United States Patent Application Publication US 2007/0134655 A1 - sequence listing, part 13

SEQ ID NO: 484569 - RNA, 32 nt, Human
uaaccaacggcaagcugccacugugggcaaag

SEQ ID NO: 484570 - RNA, 32 nt, Human
uaaccaagagcucaggucacacagaccuugga

SEQ ID NO: 484571 - RNA, 32 nt, Human
uaaccaagcuaaauuauuuccauuuagccaug

SEQ ID NO: 484572 - RNA, 32 nt, Human
uaaccaagcuauucaaguauuccuaugccaga

SEQ ID NO: 484573 - RNA, 32 nt, Human
uaaccaaguaaagaagugagaacaaagugaga

SEQ ID NO: 484574 - RNA, 32 nt, Human
uaaccaaucugugcaacaacauagacugaccu

SEQ ID NO: 484575 - RNA, 32 nt, Human
uaaccaauuccagucugguccaugaagaggaa

SEQ ID NO: 484576 - RNA, 32 nt, Human
uaaccacaaaggacaagcagcucagagauuag

SEQ ID NO: 484577 - RNA, 32 nt, Human
uaaccacaagcuccagaugggcuguuuacccc

SEQ ID NO: 484578 - RNA, 32 nt, Human
uaaccacaagggauuguccugacaacuugugg

SEQ ID NO: 484579 - RNA, 21 nt, Human
uaaccacacacacucagagga

SEQ ID NO: 484580 - RNA, 32 nt, Human
uaaccacacagccugagccuggcccagccucg

SEQ ID NO: 484581 - RNA, 32 nt, Human
uaaccacaguuaauuucagcuuuuggcaggaa

SEQ ID NO: 484582 - RNA, 32 nt, Human
uaaccaccaacugcccuuauuccggcugggac

SEQ ID NO: 484583 - RNA, 32 nt, Human
uaaccaccagccaugaauucagugaacucuuu

SEQ ID NO: 484584 - RNA, 32 nt, Human
uaaccaccaggcacaaauucaccaggaacaac

SEQ ID NO: 484585 - RNA, 32 nt, Human
uaaccaccugcuucccacucagccugcaauag

SEQ ID NO: 484586 - RNA, 32 nt, Human
uaaccaccugcuuuguaggcaccagaaacuca

SEQ ID NO: 484587 - RNA, 32 nt, Human
uaaccacuacccuuuaaaguucauggggcaau

SEQ ID NO: 484588 - RNA, 32 nt, Human
uaaccacuccucccgccugauggccaagagag

SEQ ID NO: 484589 - RNA, 32 nt, Human
uaaccacugcacuccaaccugggcaacauggc

SEQ ID NO: 484590 - RNA, 32 nt, Human
uaaccacuuaaccucucagaacugaacaaaga

SEQ ID NO: 484591 - RNA, 32 nt, Human
uaaccacuucaggugcagcuugugcgagggua

SEQ ID NO: 484592 - RNA, 32 nt, Human
uaaccagaacuaaggguaugaaggaccuguau

SEQ ID NO: 484593 - RNA, 32 nt, Human
uaaccagaccuccagccacucacagcucuuuu

SEQ ID NO: 484594 - RNA, 32 nt, Human
uaaccagagagggacugugagcugccagccua

SEQ ID NO: 484595 - RNA, 32 nt, Human
uaaccagauagggcuguguccaggaacuccag

SEQ ID NO: 484596 - RNA, 32 nt, Human
uaaccagcauuacugcaccucuuguuagacuc

SEQ ID NO: 484597 - RNA, 32 nt, Human
uaaccagccacucaaacugaugcagugccuag

SEQ ID NO: 484598 - RNA, 32 nt, Human
uaaccagccacugcagcccuccagcucuggcc

SEQ ID NO: 484599 - RNA, 24 nt, Human
uaaccagccucaaagcuuggcaaa

SEQ ID NO: 484600 - RNA, 32 nt, Human
uaaccagcucuucccagcuggcugggacuguc

SEQ ID NO: 484601 - RNA, 32 nt, Human
uaaccaggaucaggcaggagggcagggauggu

SEQ ID NO: 484602 - RNA, 32 nt, Human
uaaccagggaggaugcccaugacugcugaccc

SEQ ID NO: 484603 - RNA, 32 nt, Human
uaaccagggaugggcuuuugcauggcacugac

SEQ ID NO: 484604 - RNA, 32 nt, Human
uaaccagggcucccagaagcuuugcuuaugua

SEQ ID NO: 484605 - RNA, 31 nt, Human
uaaccaggggcaccuguuugagcuggaggug

SEQ ID NO: 484606 - RNA, 32 nt, Human
uaaccaggguggugagggcacuaaucuuguag

SEQ ID NO: 484607 - RNA, 21 nt, Human
uaaccagguaauauuggcaaa

SEQ ID NO: 484608 - RNA, 32 nt, Human
uaaccagguaccacauucauuguuaaggaaug

SEQ ID NO: 484609 - RNA, 32 nt, Human
uaaccagguauaggccagaaaggagguggccc

SEQ ID NO: 484610 - RNA, 32 nt, Human
uaaccaggucaucagggacccauuguucucuu

SEQ ID NO: 484611 - RNA, 32 nt, Human
uaaccaguccagcauucuuagaacagaugggu

SEQ ID NO: 484612 - RNA, 32 nt, Human
uaaccaguuguucaacagcggguuaagcucag

SEQ ID NO: 484613 - RNA, 32 nt, Human
uaaccauagcuaucauguguuucccaaaucuu

SEQ ID NO: 484614 - RNA, 32 nt, Human
uaaccauaguacaggaugauuucuguccacac

SEQ ID NO: 484615 - RNA, 32 nt, Human
uaaccauauuugcuaaucuaagccauauugcg

SEQ ID NO: 484616 - RNA, 32 nt, Human
uaaccaucacagcaacaugccugcuaaauuuu

SEQ ID NO: 484617 - RNA, 32 nt, Human
uaaccaucucauuccuacuuuuauaacuauua

SEQ ID NO: 484618 - RNA, 32 nt, Human
uaaccaucugcucccaggcugugugcagaaaa

SEQ ID NO: 484619 - RNA, 32 nt, Human
uaaccaugggaagugaccaagcaaagacacuc

SEQ ID NO: 484620 - RNA, 31 nt, Human
uaaccauggucaaaagaccauucuguccuau

SEQ ID NO: 484621 - RNA, 22 nt, Human
uaaccaugugugguggugugca

SEQ ID NO: 484622 - RNA, 32 nt, Human
uaaccauguuggccaggauggucucgaucucu

SEQ ID NO: 484623 - RNA, 32 nt, Human
uaaccauuaaccauuucuuccuggugauuccu

SEQ ID NO: 484624 - RNA, 32 nt, Human
uaaccauugggaagguagaggcuggcagggaa

SEQ ID NO: 484625 - RNA, 32 nt, Human
uaacccaaaaggcggagguugcagugagccaa

SEQ ID NO: 484626 - RNA, 32 nt, Human
uaacccaaggaauugaggaaguugcugagaag

SEQ ID NO: 484627 - RNA, 32 nt, Human
uaacccaaggaccacaccagugccugauuucu

SEQ ID NO: 484628 - RNA, 32 nt, Human
uaacccacagaauccaaggagcauggcuggcc

SEQ ID NO: 484629 - RNA, 32 nt, Human
uaacccacaguucugucaccuaaagguaacug

SEQ ID NO: 484630 - RNA, 32 nt, Human
uaacccacgguguugcucauucucucacguua

SEQ ID NO: 484631 - RNA, 32 nt, Human
uaacccagagcugaugggugauaggaaaaugg

SEQ ID NO: 484632 - RNA, 32 nt, Human
uaacccagcuacucaggaggcugaggcacaag

SEQ ID NO: 484633 - RNA, 32 nt, Human
uaacccagcuacucgggaggcugaagcaggag

SEQ ID NO: 484634 - RNA, 32 nt, Human
uaacccagcuacucgugaggccaaggcaggag

SEQ ID NO: 484635 - RNA, 32 nt, Human
uaacccaggaccuuggaaauucuacucauccc

SEQ ID NO: 484636 - RNA, 32 nt, Human
uaacccaggaggcagagguugcagugagcuga

SEQ ID NO: 484637 - RNA, 32 nt, Human
uaacccaggcagugggaggucugcagccuggu

SEQ ID NO: 484638 - RNA, 32 nt, Human
uaacccaggccugucugacuacuuugccuucu

SEQ ID NO: 484639 - RNA, 32 nt, Human
uaacccaggccuuucaucagagcccaggaggg

SEQ ID NO: 484640 - RNA, 32 nt, Human
uaacccaggcgaggaggaggaggagaaaauuc

SEQ ID NO: 484641 - RNA, 32 nt, Human
uaacccaguucugcaccacugguuuuuguagc

SEQ ID NO: 484642 - RNA, 32 nt, Human
uaacccauugugcuuccaggacagcucacaau

SEQ ID NO: 484643 - RNA, 32 nt, Human
uaaccccaacgcacaggaaaagguagcuuacc

SEQ ID NO: 484644 - RNA, 32 nt, Human
uaaccccaacuacuuggguggcugaggcagga

SEQ ID NO: 484645 - RNA, 32 nt, Human
uaaccccaccuugccaagcuuucuucuacaac

SEQ ID NO: 484646 - RNA, 32 nt, Human
uaaccccacucccucugcugcagcacccccau

SEQ ID NO: 484647 - RNA, 32 nt, Human
uaaccccacugugcuuccacaugccuggccua

SEQ ID NO: 484648 - RNA, 32 nt, Human
uaaccccagcacuucgggaggcugaggugggc

SEQ ID NO: 484649 - RNA, 32 nt, Human
uaaccccagcacuuugggaggccgaggcgggc

SEQ ID NO: 484650 - RNA, 32 nt, Human
uaaccccagcacuuugggaggccgaggcgggu

SEQ ID NO: 484651 - RNA, 32 nt, Human
uaaccccagcacuuugggaggccgaggugggc

SEQ ID NO: 484652 - RNA, 32 nt, Human
uaaccccagcacuuugggaggcugagacaggc

SEQ ID NO: 484653 - RNA, 32 nt, Human
uaaccccagcacuuugggaggcugagaugggc

SEQ ID NO: 484654 - RNA, 32 nt, Human
uaaccccagcacuuugggaggcugaggcgggc

SEQ ID NO: 484655 - RNA, 32 nt, Human
uaaccccagcacuuugggaggcugaggugggu

SEQ ID NO: 484656 - RNA, 32 nt, Human
uaaccccagcuacuagggaggcugaggcagga

SEQ ID NO: 484657 - RNA, 32 nt, Human
uaaccccagcuacucgggaggcugaggcagga

SEQ ID NO: 484658 - RNA, 32 nt, Human
uaaccccagcuacuugggaggcugaggaggga

SEQ ID NO: 484659 - RNA, 32 nt, Human
uaaccccagcuauucgggaggcugaggcagga

SEQ ID NO: 484660 - RNA, 32 nt, Human
uaaccccagcuauuugggaggcugaggcagua

SEQ ID NO: 484661 - RNA, 32 nt, Human
uaaccccaggacucagaagugaaggaaaaaug

SEQ ID NO: 484662 - RNA, 32 nt, Human
uaaccccaggagguggggguuguugugagcca

SEQ ID NO: 484663 - RNA, 32 nt, Human
uaaccccaggcagaccgauaaaaagaccucca

SEQ ID NO: 484664 - RNA, 32 nt, Human
uaaccccagguaaauguuuuauauagaggauc

SEQ ID NO: 484665 - RNA, 32 nt, Human
uaaccccaguaggaagugauugaggcaugagu

SEQ ID NO: 484666 - RNA, 32 nt, Human
uaacccccacccaacccagcuccugcugcugu

SEQ ID NO: 484667 - RNA, 32 nt, Human
uaacccccaggaucagagauggagucucgcuc

SEQ ID NO: 484668 - RNA, 32 nt, Human
uaacccccggcucuccccugccccaccucacc

SEQ ID NO: 484669 - RNA, 32 nt, Human
uaacccccucauucucccucgcucccacuccg

SEQ ID NO: 484670 - RNA, 32 nt, Human
uaacccccucccccuucauuacuucacucagg

SEQ ID NO: 484671 - RNA, 32 nt, Human
uaacccccuccccucgcugcugggccccaucu

SEQ ID NO: 484672 - RNA, 32 nt, Human
uaacccccucugcuucuggugugugacgaggc

SEQ ID NO: 484673 - RNA, 32 nt, Human
uaaccccggcacuccggacagagcugggccug

SEQ ID NO: 484674 - RNA, 32 nt, Human
uaaccccgggacuccccaagcccagccucugu

SEQ ID NO: 484675 - RNA, 32 nt, Human
uaaccccuaaaccaucccccacccuaacccaa

SEQ ID NO: 484676 - RNA, 32 nt, Human
uaaccccuccauccucucuaacuuuucaagcc

SEQ ID NO: 484677 - RNA, 32 nt, Human
uaaccccuccuacccucuaccucuucccgaag

SEQ ID NO: 484678 - RNA, 32 nt, Human
uaaccccugucuucuuccccaggccucugacu

SEQ ID NO: 484679 - RNA, 32 nt, Human
uaaccccuguuggaguccaggggcuggagaaa

SEQ ID NO: 484680 - RNA, 32 nt, Human
uaacccgccagccuccuccucucgggcuggau

SEQ ID NO: 484681 - RNA, 32 nt, Human
uaacccgccgguuuuaccgugcuuuauuccug

SEQ ID NO: 484682 - RNA, 32 nt, Human
uaacccggaagguggaguuugcagugagccga

SEQ ID NO: 484683 - RNA, 32 nt, Human
uaacccgggagguggagguugcagugagcuga

SEQ ID NO: 484684 - RNA, 32 nt, Human
uaacccgggcuggcgcugcuaaccucacccaa

SEQ ID NO: 484685 - RNA, 32 nt, Human
uaacccuaaacacaucauguauuuuaaaugcc

SEQ ID NO: 484686 - RNA, 32 nt, Human
uaacccuacacccagaccccaggcuggacaug

SEQ ID NO: 484687 - RNA, 32 nt, Human
uaacccuagugaguuuucaguugugauuauuc

SEQ ID NO: 484688 - RNA, 32 nt, Human
uaacccucgcacuuucuccacuguggagaugg

SEQ ID NO: 484689 - RNA, 32 nt, Human
uaacccucugcuugcauuuacucucaucaaac

SEQ ID NO: 484690 - RNA, 32 nt, Human
uaacccucuugccaccaaauaccacacacacu

SEQ ID NO: 484691 - RNA, 32 nt, Human
uaacccugacccuccccauuuccccagcuugg

SEQ ID NO: 484692 - RNA, 32 nt, Human
uaacccugagaagcucugcugucuggggcaag

SEQ ID NO: 484693 - RNA, 32 nt, Human
uaacccugcauccaaauuccaggaagcucuua

SEQ ID NO: 484694 - RNA, 32 nt, Human
uaacccugccaguuucuccauccagcucacgc

SEQ ID NO: 484695 - RNA, 31 nt, Human
uaacccugccucucagaggguuuucucuccc

SEQ ID NO: 484696 - RNA, 32 nt, Human
uaacccugcgugucugugucacccuguuuguc

SEQ ID NO: 484697 - RNA, 32 nt, Human
uaacccugggggcggccauguuguccaggccc

SEQ ID NO: 484698 - RNA, 32 nt, Human
uaacccugguggacugcagccuucaucuuuau

SEQ ID NO: 484699 - RNA, 32 nt, Human
uaacccuguacaaagaggaauggagauugccu

SEQ ID NO: 484700 - RNA, 31 nt, Human
uaacccugucuaaugaaaccugugucucuga

SEQ ID NO: 484701 - RNA, 32 nt, Human
uaacccuuccuuguaucugucuucccaggaga

SEQ ID NO: 484702 - RNA, 32 nt, Human
uaacccuugaagcagcaugucuuugccauagc

SEQ ID NO: 484703 - RNA, 32 nt, Human
uaacccuugccuuccugucacaggguuugcuu

SEQ ID NO: 484704 - RNA, 32 nt, Human
uaacccuuguguuguguguuucugucugagga

SEQ ID NO: 484705 - RNA, 32 nt, Human
uaacccuuuccauuuccucucauuccauucau

SEQ ID NO: 484706 - RNA, 18 nt, Human
uaaccgcauuccauugaa

SEQ ID NO: 484707 - RNA, 32 nt, Human
uaaccgcccagagggcuccagguccgcaagcu

SEQ ID NO: 484708 - RNA, 32 nt, Human
uaaccgcucuaaaaauuaccagaguaagaaaa

SEQ ID NO: 484709 - RNA, 32 nt, Human
uaaccggaggcaggcugggugcaguggcucau

SEQ ID NO: 484710 - RNA, 32 nt, Human
uaaccgggcuccagccccagacccucuagcuc

SEQ ID NO: 484711 - RNA, 32 nt, Human
uaaccgucacucagcacaacacucccucuggg

SEQ ID NO: 484712 - RNA, 31 nt, Human
uaaccgugacuucccagccuccagagcugua

SEQ ID NO: 484713 - RNA, 32 nt, Human
uaaccuaacagcuuuggagauggcgguggaga

SEQ ID NO: 484714 - RNA, 32 nt, Human
uaaccuagacuaaaauugggaacuuauuugca

SEQ ID NO: 484715 - RNA, 32 nt, Human
uaaccuagcuucuuuuuacucuugccucugcu

SEQ ID NO: 484716 - RNA, 32 nt, Human
uaaccuaggcagugggaggcaaaugggauggu

SEQ ID NO: 484717 - RNA, 32 nt, Human
uaaccuaggugcugccuggcccccaggcccuc

SEQ ID NO: 484718 - RNA, 32 nt, Human
uaaccuauaacccccaacaguaugacagaaaa

SEQ ID NO: 484719 - RNA, 32 nt, Human
uaaccuauaagcugcccguggcagacguuuac

SEQ ID NO: 484720 - RNA, 32 nt, Human
uaaccuaugcaguaagauucugucuuuguaaa

SEQ ID NO: 484721 - RNA, 32 nt, Human
uaaccucagagccaggagccuggggcuggggc

SEQ ID NO: 484722 - RNA, 32 nt, Human
uaaccucagcacuuugggaggcugaggugggc

SEQ ID NO: 484723 - RNA, 32 nt, Human
uaaccucagccuauaucugucuaucuaaccua

SEQ ID NO: 484724 - RNA, 32 nt, Human
uaaccucagcuacuugggaggcugaggcagga

SEQ ID NO: 484725 - RNA, 32 nt, Human
uaaccucaucuucuucaccauuuggcaaugcc

SEQ ID NO: 484726 - RNA, 32 nt, Human
uaaccuccaaagccacacaggaggcugccagc

SEQ ID NO: 484727 - RNA, 32 nt, Human
uaaccuccaaguuuaaaacuacagucaggcau

SEQ ID NO: 484728 - RNA, 32 nt, Human
uaaccuccacuuccuucucugccccauugccu

SEQ ID NO: 484729 - RNA, 32 nt, Human
uaaccuccagccuccugcccagcacaggaauc

SEQ ID NO: 484730 - RNA, 25 nt, Human
uaaccucccccuaccuaggacccuu

SEQ ID NO: 484731 - RNA, 32 nt, Human
uaaccucuacagacacaauccucaaaccaaca

SEQ ID NO: 484732 - RNA, 32 nt, Human
uaaccucucaacuuuuauugcuguauucuagu

SEQ ID NO: 484733 - RNA, 32 nt, Human
uaaccucuccccuguaccugugccaagccuag

SEQ ID NO: 484734 - RNA, 31 nt, Human
uaaccucugcacuacugacauguggggccag

SEQ ID NO: 484735 - RNA, 32 nt, Human
uaaccucugccucccccaccccuuaacuuuaa

SEQ ID NO: 484736 - RNA, 32 nt, Human
uaaccucugggcaucagacaucagcaggucug

SEQ ID NO: 484737 - RNA, 32 nt, Human
uaaccucuggucagccgagaaaccccacuauc

SEQ ID NO: 484738 - RNA, 32 nt, Human
uaaccucuuugaggaaccacagagcccaaggc

SEQ ID NO: 484739 - RNA, 32 nt, Human
uaaccugaacagcucacaauguagcuguaaau

SEQ ID NO: 484740 - RNA, 32 nt, Human
uaaccugaagagggaggaaguggauuuggggu

SEQ ID NO: 484741 - RNA, 32 nt, Human
uaaccugacuucucugugccucaaugucuuca

SEQ ID NO: 484742 - RNA, 32 nt, Human
uaaccugagucccucucagaaaacagagcuaa

SEQ ID NO: 484743 - RNA, 32 nt, Human
uaaccugcagaaagagaugcagauguuggcua

SEQ ID NO: 484744 - RNA, 32 nt, Human
uaaccugcaugaaucaguuuugggggaaugga

SEQ ID NO: 484745 - RNA, 32 nt, Human
uaaccugccaaaauaaguauuccucuuccuuu

SEQ ID NO: 484746 - RNA, 32 nt, Human
uaaccugccaccaguguccacccuccggcccc

SEQ ID NO: 484747 - RNA, 32 nt, Human
uaaccugccauccaaaugauaaauugcuaauu

SEQ ID NO: 484748 - RNA, 32 nt, Human
uaaccugcgagaagcugguugugcgcugaggc

SEQ ID NO: 484749 - RNA, 32 nt, Human
uaaccugcuggcugugagucccuuguggaaua

SEQ ID NO: 484750 - RNA, 32 nt, Human
uaaccuggagugaagagguagaacugugguau

SEQ ID NO: 484751 - RNA, 32 nt, Human
uaaccugggagaucaucuuagaacaaagggcu

SEQ ID NO: 484752 - RNA, 32 nt, Human
uaaccugggaggucaggggcugugguauauca

SEQ ID NO: 484753 - RNA, 32 nt, Human
uaaccugggauuacuaacuguugagccaucuu

SEQ ID NO: 484754 - RNA, 32 nt, Human
uaaccuggucucacugugguugcccucaucca

SEQ ID NO: 484755 - RNA, 23 nt, Human
uaaccuggugauccgcccgccuc

SEQ ID NO: 484756 - RNA, 32 nt, Human
uaaccuguacacacaaacgcacagggaugcac

SEQ ID NO: 484757 - RNA, 32 nt, Human
uaaccuguauuuaaucuguacuuccuaugcca

SEQ ID NO: 484758 - RNA, 32 nt, Human
uaaccugucagcccuuuuacucagccacagcc

SEQ ID NO: 484759 - RNA, 32 nt, Human
uaaccugucgcugaagccccagaagcgggccc

SEQ ID NO: 484760 - RNA, 32 nt, Human
uaaccugucuuccaggugguacaguuagcugu

SEQ ID NO: 484761 - RNA, 32 nt, Human
uaaccugugcuugcauccuccuuuccuccucc

SEQ ID NO: 484762 - RNA, 32 nt, Human
uaaccuguuuccagccuggccugagguggaac

SEQ ID NO: 484763 - RNA, 32 nt, Human
uaaccuuagacaccuaugcagucauguuggga

SEQ ID NO: 484764 - RNA, 32 nt, Human
uaaccuuagaucuuugaugugaagcuagcacu

SEQ ID NO: 484765 - RNA, 32 nt, Human
uaaccuuagcccugccuuguguuccaaaagcu

SEQ ID NO: 484766 - RNA, 32 nt, Human
uaaccuuauggagagaaaggacuuugagacau

SEQ ID NO: 484767 - RNA, 28 nt, Human
uaaccuucaagugcuccucuucauuuga

SEQ ID NO: 484768 - RNA, 32 nt, Human
uaaccuuccaacugcuucccacaaacacauug

SEQ ID NO: 484769 - RNA, 32 nt, Human
uaaccuuccaauaucauuacaucauauuuaaa

SEQ ID NO: 484770 - RNA, 32 nt, Human
uaaccuuccaucauccucagcuagauguaugc

SEQ ID NO: 484771 - RNA, 32 nt, Human
uaaccuucgcaucccaagagcugcaguuucag

SEQ ID NO: 484772 - RNA, 32 nt, Human
uaaccuucucccuugucaucucagccugagcc

SEQ ID NO: 484773 - RNA, 32 nt, Human
uaaccuucuggcuuccuucucucaauaugcuu

SEQ ID NO: 484774 - RNA, 32 nt, Human
uaaccuugaaucugcccagacucuucccuuag

SEQ ID NO: 484775 - RNA, 32 nt, Human
uaaccuugaucucuugguucagguggugccug

SEQ ID NO: 484776 - RNA, 32 nt, Human
uaaccuugccaguuuguucccucuuuuauuuu

SEQ ID NO: 484777 - RNA, 32 nt, Human
uaaccuugcucaccaagcuguuccacuucucu

SEQ ID NO: 484778 - RNA, 32 nt, Human
uaaccuuggaggcggagguugcauugagcuga

SEQ ID NO: 484779 - RNA, 32 nt, Human
uaaccuuggaggucagcuugagaugacugcgc

SEQ ID NO: 484780 - RNA, 31 nt, Human
uaaccuuguccuuucucuccugugucucagu

SEQ ID NO: 484781 - RNA, 32 nt, Human
uaaccuugugagccaccgugcccaacccuaac

SEQ ID NO: 484782 - RNA, 32 nt, Human
uaaccuugugugucugugaucuccucugucuu

SEQ ID NO: 484783 - RNA, 32 nt, Human
uaaccuuguuuagggaaagaccugugucuuac

SEQ ID NO: 484784 - RNA, 32 nt, Human
uaaccuuuauggcucuuucaggaaaagugaaa

SEQ ID NO: 484785 - RNA, 32 nt, Human
uaaccuuucagccugugagccucugcacaaag

SEQ ID NO: 484786 - RNA, 32 nt, Human
uaaccuuuccacccuauccuguuaacccuuua

SEQ ID NO: 484787 - RNA, 32 nt, Human
uaaccuuuguguaacccugacuuaaugagaaa

SEQ ID NO: 484788 - RNA, 32 nt, Human
uaaccuuuuagaaauccacauauaucucaaau

SEQ ID NO: 484789 - RNA, 32 nt, Human
uaacgaaauagggaguagagagaaauggagau

SEQ ID NO: 484790 - RNA, 32 nt, Human
uaacgacugcacuccagccuggaugacagaac

SEQ ID NO: 484791 - RNA, 32 nt, Human
uaacgagacgccagggacaaucugccaguggc

SEQ ID NO: 484792 - RNA, 32 nt, Human
uaacgagacgguuccccucccuuucccugcca

SEQ ID NO: 484793 - RNA, 32 nt, Human
uaacgaggaacuuuucgccggcgccgggccgc

SEQ ID NO: 484794 - RNA, 32 nt, Human
uaacgaggcugccuccagcauuuccugauuuc

SEQ ID NO: 484795 - RNA, 32 nt, Human
uaacgagggggcuucuggagggaggcggcagc

SEQ ID NO: 484796 - RNA, 32 nt, Human
uaacgagucacagccucagcugugcugggacg

SEQ ID NO: 484797 - RNA, 32 nt, Human
uaacgauaagccucuuggaauauggaggccgc

SEQ ID NO: 484798 - RNA, 32 nt, Human
uaacgauacagagagaugaugacacuggaguu

SEQ ID NO: 484799 - RNA, 32 nt, Human
uaacgauugcaggagaaauaaugaggauguaa

SEQ ID NO: 484800 - RNA, 32 nt, Human
uaacgcagacaucagcuuuacacuucacagga

SEQ ID NO: 484801 - RNA, 32 nt, Human
uaacgcagccaagaucucgccaaucguuaacu

SEQ ID NO: 484802 - RNA, 32 nt, Human
uaacgccacugcacuccaguguaggcaacaga

SEQ ID NO: 484803 - RNA, 32 nt, Human
uaacgcccaaguuggaagguuguggauuuaca

SEQ ID NO: 484804 - RNA, 32 nt, Human
uaacgccuguaaucccagaacuuugggaagcc

SEQ ID NO: 484805 - RNA, 32 nt, Human
uaacgccuguaaucccagcacuugggaggccc

SEQ ID NO: 484806 - RNA, 32 nt, Human
uaacgccuguaaucccagcacuuugagaugcu

SEQ ID NO: 484807 - RNA, 31 nt, Human
uaacgcuacagcuagaccacggugggcuugg

SEQ ID NO: 484808 - RNA, 32 nt, Human
uaacgcucacugcgaaggucugcagcuucacu

SEQ ID NO: 484809 - RNA, 32 nt, Human
uaacgcuuguaaucccagcgcuuugggaggcc

SEQ ID NO: 484810 - RNA, 32 nt, Human
uaacggagccgagaccauagaugaggaggcug

SEQ ID NO: 484811 - RNA, 32 nt, Human
uaacggauagugagcuugugccccugccuagg

SEQ ID NO: 484812 - RNA, 32 nt, Human
uaacggauguuguguggaguccuggcuggagg

SEQ ID NO: 484813 - RNA, 32 nt, Human
uaacgggaggcugggcacagaggucaggaagc

SEQ ID NO: 484814 - RNA, 32 nt, Human
uaacgggcugccagaagagagagaggcagaga

SEQ ID NO: 484815 - RNA, 32 nt, Human
uaacggguucaagugauuccccugccucaguc

SEQ ID NO: 484816 - RNA, 24 nt, Human
uaacgguggaguccaugugugaaa

SEQ ID NO: 484817 - RNA, 32 nt, Human
uaacguacauuugugcuguuuucaauuuugug

SEQ ID NO: 484818 - RNA, 32 nt, Human
uaacgucugccacccccacucucacccccaag

SEQ ID NO: 484819 - RNA, 32 nt, Human
uaacgucuucauuauuuuccucauugaugucu

SEQ ID NO: 484820 - RNA, 32 nt, Human
uaacgucuugccugugcaucuagaaagguacc

SEQ ID NO: 484821 - RNA, 32 nt, Human
uaacgucuuugcaaaugaaaaauccacuguac

SEQ ID NO: 484822 - RNA, 32 nt, Human
uaacgugacugucaucugugacagcauuugug

SEQ ID NO: 484823 - RNA, 32 nt, Human
uaacguggagagaacacggagcaccagucacc

SEQ ID NO: 484824 - RNA, 32 nt, Human
uaacguucauaucuaacucugaauauuucuau

SEQ ID NO: 484825 - RNA, 32 nt, Human
uaacguucuggugugguuuccuguagugaucu

SEQ ID NO: 484826 - RNA, 32 nt, Human
uaacuaaaacccacagcccaaccaaaccuuga

SEQ ID NO: 484827 - RNA, 32 nt, Human
uaacuaaacucauuggagucuaguuccaaauu

SEQ ID NO: 484828 - RNA, 32 nt, Human
uaacuaacaauguuaguauaauaguccuaaua

SEQ ID NO: 484829 - RNA, 32 nt, Human
uaacuaacacaugagcagucacuuuggagaga

SEQ ID NO: 484830 - RNA, 32 nt, Human
uaacuaacauggcuaaacccuucucuacugaa

SEQ ID NO: 484831 - RNA, 32 nt, Human
uaacuaagaaaauuuauuugccucuuaaugcu

SEQ ID NO: 484832 - RNA, 30 nt, Human
uaacuaagcuugcauuuugaaaaagagacu

SEQ ID NO: 484833 - RNA, 32 nt, Human
uaacuaaucauauuuaaauauauuucacuuuc

SEQ ID NO: 484834 - RNA, 32 nt, Human
uaacuaaucauauuuaaauauauuucacuuug

SEQ ID NO: 484835 - RNA, 32 nt, Human
uaacuaauccauccucugaugucaccugcuaa

SEQ ID NO: 484836 - RNA, 24 nt, Human
uaacuacacagaggacccagggga

SEQ ID NO: 484837 - RNA, 32 nt, Human
uaacuacaccucagggcgggugagguuccgac

SEQ ID NO: 484838 - RNA, 32 nt, Human
uaacuacuuccaggaauuuagccuaggaaauc

SEQ ID NO: 484839 - RNA, 32 nt, Human
uaacuacuuggaaaauacagaauuggcuagug

SEQ ID NO: 484840 - RNA, 32 nt, Human
uaacuagaaaauucauacaacaucagugguua

SEQ ID NO: 484841 - RNA, 32 nt, Human
uaacuagaaagaauuauacauugcauagcacu

SEQ ID NO: 484842 - RNA, 32 nt, Human
uaacuagaaaucuaguauugccauaaaggaaa

SEQ ID NO: 484843 - RNA, 32 nt, Human
uaauggggcugauguguaaagcuguucaaguu

SEQ ID NO: 484844 - RNA, 32 nt, Human
uaauggggguauaaaucaagaaagcagucaaa

SEQ ID NO: 484845 - RNA, 23 nt, Human
uaaugggucacauuggcuggaug

SEQ ID NO: 484846 - RNA, 32 nt, Human
uaaugguaaaacaacauacaucugccaauaua

SEQ ID NO: 484847 - RNA, 32 nt, Human
uaaugguaucacgucgcaggguugucaggcgg

SEQ ID NO: 484848 - RNA, 21 nt, Human
uaauggucacuuucugacucc

SEQ ID NO: 484849 - RNA, 32 nt, Human
uaauggucagaggcgcaugaauuugugaaggu

SEQ ID NO: 484850 - RNA, 32 nt, Human
uaauggucagccuaaucauucugucagccuaa

SEQ ID NO: 484851 - RNA, 20 nt, Human
uaauggucucuccaacccug

SEQ ID NO: 484852 - RNA, 32 nt, Human
uaauggugcagaauaaaacacacacaucugau

SEQ ID NO: 484853 - RNA, 18 nt, Human
uaauggugccacuggacu

SEQ ID NO: 484854 - RNA, 32 nt, Human
uaauggugccacuggacuccagccugggagac

SEQ ID NO: 484855 - RNA, 32 nt, Human
uaauggugcccacuuucucgacuuuggccagg

SEQ ID NO: 484856 - RNA, 32 nt, Human
uaaugguggccuggggcuucugaggcuucugg

SEQ ID NO: 484857 - RNA, 32 nt, Human
uaauggugucacugcuggcaauggugauaaug

SEQ ID NO: 484858 - RNA, 32 nt, Human
uaaugguguuaauaauacaaaugaauuggccu

SEQ ID NO: 484859 - RNA, 32 nt, Human
uaaugguucauccucuauaaggccaacaaaga

SEQ ID NO: 484860 - RNA, 32 nt, Human
uaaugguuggcccugguguuguuggguggcag

SEQ ID NO: 484861 - RNA, 32 nt, Human
uaaugguuuggcucaaagaaggcacaugcauc

SEQ ID NO: 484862 - RNA, 32 nt, Human
uaaugguuuuaaauauaugcuauagggacguu

SEQ ID NO: 484863 - RNA, 32 nt, Human
uaaugguuuuguuggggcucuuaacuugcaag

SEQ ID NO: 484864 - RNA, 32 nt, Human
uaauguaaaaacaauucccuaggcuuucccug

SEQ ID NO: 484865 - RNA, 32 nt, Human
uaauguaaacagaacuggcacacacacauuaa

SEQ ID NO: 484866 - RNA, 32 nt, Human
uaauguaccuuuaucuucccccggcugacugu

SEQ ID NO: 484867 - RNA, 32 nt, Human
uaauguacuggcuccucacacaauacuguggu

SEQ ID NO: 484868 - RNA, 32 nt, Human
uaauguagacuauagaaugacuuucagguguu

SEQ ID NO: 484869 - RNA, 32 nt, Human
uaauguaggcaagccacuucauuuuucagaac

SEQ ID NO: 484870 - RNA, 32 nt, Human
uaauguaguacaacagugacaguuaugacagg

SEQ ID NO: 484871 - RNA, 32 nt, Human
uaauguaguaugguauaugcacaaaacuacuu

SEQ ID NO: 484872 - RNA, 32 nt, Human
uaauguauacacauuaaugauaaguugauaac

SEQ ID NO: 484873 - RNA, 32 nt, Human
uaaugucaaaggacgaaaucauggggacaauu

SEQ ID NO: 484874 - RNA, 31 nt, Human
uaaugucaagugucauaagagaggaugcgag

SEQ ID NO: 484875 - RNA, 32 nt, Human
uaaugucacagggguuguacacccuguuauau

SEQ ID NO: 484876 - RNA, 32 nt, Human
uaaugucacaucugccuucggagauuacaaau

SEQ ID NO: 484877 - RNA, 32 nt, Human
uaaugucacaucugccuuuggagauuacaaau

SEQ ID NO: 484878 - RNA, 32 nt, Human
uaaugucagcacuuuaaaaggcugaggcaggc

SEQ ID NO: 484879 - RNA, 32 nt, Human
uaaugucagcuacuugggaggcugaggcagga

SEQ ID NO: 484880 - RNA, 32 nt, Human
uaauguccaaagugcuuugucauuuagagucc

SEQ ID NO: 484881 - RNA, 32 nt, Human
uaauguccaucaguauaaauugagacugugaa

SEQ ID NO: 484882 - RNA, 32 nt, Human
uaaugucccugccucuucucccaaucaagguu

SEQ ID NO: 484883 - RNA, 32 nt, Human
uaauguccucaagguucauccauguuguguca

SEQ ID NO: 484884 - RNA, 32 nt, Human
uaaugucuccuccugguuuuuaguuguuuuuc

SEQ ID NO: 484885 - RNA, 32 nt, Human
uaaugucuggaauaucaaagagaugcucagua

SEQ ID NO: 484886 - RNA, 32 nt, Human
uaaugucuucaguuucuugaggagacuccuag

SEQ ID NO: 484887 - RNA, 32 nt, Human
uaaugugaaaaagaaaggaauuuagagguagg

SEQ ID NO: 484888 - RNA, 31 nt, Human
uaaugugaacaaugaccucuaacuuguauuu

SEQ ID NO: 484889 - RNA, 32 nt, Human
uaaugugaauaguuuguuaauauugcuguaaa

SEQ ID NO: 484890 - RNA, 32 nt, Human
uaaugugacaccugcagaaacuauagagcguc

SEQ ID NO: 484891 - RNA, 32 nt, Human
uaaugugacuuaggugcugucaacauuagcaa

SEQ ID NO: 484892 - RNA, 32 nt, Human
uaaugugagacaggaucucauucuguugccua

SEQ ID NO: 484893 - RNA, 32 nt, Human
uaaugugagauauguaccuucauauucagaaa

SEQ ID NO: 484894 - RNA, 32 nt, Human
uaaugugagcucauccacugcugcugcagcgu

SEQ ID NO: 484895 - RNA, 32 nt, Human
uaaugugaggagguggagagacagcccacccc

SEQ ID NO: 484896 - RNA, 32 nt, Human
uaaugugaggagguggagagacagcccacccu

SEQ ID NO: 484897 - RNA, 32 nt, Human
uaaugugaggguagggaaaauguggauaacau

SEQ ID NO: 484898 - RNA, 31 nt, Human
uaaugugcacuuuugugauguggaaggcaaa

SEQ ID NO: 484899 - RNA, 32 nt, Human
uaauguggcaaaguccacccucaggccuuaua

SEQ ID NO: 484900 - RNA, 32 nt, Human
uaauguggcugcugccucgugucacaucugaa

SEQ ID NO: 484901 - RNA, 32 nt, Human
uaaugugggaaaugguucuccuuucccucuca

SEQ ID NO: 484902 - RNA, 32 nt, Human
uaauguggggagcgggcaggggugggguggga

SEQ ID NO: 484903 - RNA, 32 nt, Human
uaaugugguacaauaaauagcccuuccugaca

SEQ ID NO: 484904 - RNA, 32 nt, Human
uaauguggugucugaagcagggccaggggagg

SEQ ID NO: 484905 - RNA, 32 nt, Human
uaauguguaaaaaccacgucugagcuugcuuu

SEQ ID NO: 484906 - RNA, 32 nt, Human
uaauguguacagucuuugcaguuccaccaaga

SEQ ID NO: 484907 - RNA, 32 nt, Human
uaauguguauuuuucuugguccaccauguuua

SEQ ID NO: 484908 - RNA, 32 nt, Human
uaauguguuccaggcauucuucuaagugguuu

SEQ ID NO: 484909 - RNA, 32 nt, Human
uaauguuaacugaucaggaagugcaguuuggg

SEQ ID NO: 484910 - RNA, 32 nt, Human
uaauguuacuguugauucauuucccaaauucc

SEQ ID NO: 484911 - RNA, 32 nt, Human
uaauguuagauaugugggaaaggccuuuauuc

SEQ ID NO: 484912 - RNA, 32 nt, Human
uaauguucaagaaacuaggcagucauaugauc

SEQ ID NO: 484913 - RNA, 32 nt, Human
uaauguucaagcuuuagaaagaucagagcaau

SEQ ID NO: 484914 - RNA, 32 nt, Human
uaauguucaguuauuaauauguauacugccau

SEQ ID NO: 484915 - RNA, 32 nt, Human
uaauguucauuucccaccccugcuccagccuc

SEQ ID NO: 484916 - RNA, 32 nt, Human
uaauguucccucaaauagcacagggaagcaac

SEQ ID NO: 484917 - RNA, 32 nt, Human
uaauguucgguuaaaaaugugacagaugagua

SEQ ID NO: 484918 - RNA, 32 nt, Human
uaauguucuguccuagccaaauucucaggaca

SEQ ID NO: 484919 - RNA, 32 nt, Human
uaauguucuuuagccuaaauguuaacaacuuu

SEQ ID NO: 484920 - RNA, 32 nt, Human
uaauguugaucuggcauccucaggcugcagcu

SEQ ID NO: 484921 - RNA, 32 nt, Human
uaauguuugguaacuuuuaugccuucacuuua

SEQ ID NO: 484922 - RNA, 32 nt, Human
uaauguuuuagucugcugcacacaucuaaaaa

SEQ ID NO: 484923 - RNA, 32 nt, Human
uaauguuuuauacacuuuuuaacugguugcac

SEQ ID NO: 484924 - RNA, 32 nt, Human
uaauguuuucagucauuguguguccuuuguug

SEQ ID NO: 484925 - RNA, 32 nt, Human
uaauguuuuuaauacccagaacacagggcuuc

SEQ ID NO: 484926 - RNA, 32 nt, Human
uaauuaaaagcauaguguauaagugaguacac

SEQ ID NO: 484927 - RNA, 32 nt, Human
uaauuaaaagugugaaaaucuaaaaauacuuc

SEQ ID NO: 484928 - RNA, 32 nt, Human
uaauuaaacaugcucagccugagccaccaaaa

SEQ ID NO: 484929 - RNA, 32 nt, Human
uaauuaaacgugccuuugaguagaugugaaua

SEQ ID NO: 484930 - RNA, 32 nt, Human
uaauuaaaguagaagagaaggguucuguucca

SEQ ID NO: 484931 - RNA, 32 nt, Human
uaauuaaauguguucaguauguacuuaucagu

SEQ ID NO: 484932 - RNA, 32 nt, Human
uaauuaacaaaugauaauagacaggagaaaua

SEQ ID NO: 484933 - RNA, 32 nt, Human
uaauuaaccccauaauuagauccauuaauuua

SEQ ID NO: 484934 - RNA, 32 nt, Human
uaauuaacuugcaggugugcaccaccacaaaa

SEQ ID NO: 484935 - RNA, 32 nt, Human
uaauuaaggcaucuuucugcuccugaucagaa

SEQ ID NO: 484936 - RNA, 32 nt, Human
uaauuaaggccuuucuucccaccccaagucca

SEQ ID NO: 484937 - RNA, 32 nt, Human
uaauuaagucacaggcaggacccaguuuccag

SEQ ID NO: 484938 - RNA, 32 nt, Human
uaauuaaguguaauauggauuacuuugaaacu

SEQ ID NO: 484939 - RNA, 32 nt, Human
uaauuaaucucucuggaaaaaggaaagcuaaa

SEQ ID NO: 484940 - RNA, 32 nt, Human
uaauuaauggacaacuguagugcagugauccu

SEQ ID NO: 484941 - RNA, 32 nt, Human
uaauuaauuucaugggacuaaaugaacuaaug

SEQ ID NO: 484942 - RNA, 32 nt, Human
uaauuacacacgugaaauaauuacagcuuaaa

SEQ ID NO: 484943 - RNA, 32 nt, Human
uaauuacagaacuuaccacacauauacauaga

SEQ ID NO: 484944 - RNA, 32 nt, Human
uaauuacaucugcaaggcccccuucuccaaau

SEQ ID NO: 484945 - RNA, 32 nt, Human
uaauuaccaguggauugguagaacugcuuuuu

SEQ ID NO: 484946 - RNA, 32 nt, Human
uaauuacccuuuugcaggcaccaccuuuaauc

SEQ ID NO: 484947 - RNA, 32 nt, Human
uaauuaccgacguugcaugcugugaggaggcu

SEQ ID NO: 484948 - RNA, 32 nt, Human
uaauuacugcaacuugcugcuggacaauugua

SEQ ID NO: 484949 - RNA, 32 nt, Human
uaauuacugugccuuuuccuuucuuuuuacac

SEQ ID NO: 484950 - RNA, 29 nt, Human
uaauuacuguuucuguugccuggacaguu

SEQ ID NO: 484951 - RNA, 32 nt, Human
uaauuacuugacuugccuugauuuauaggacu

SEQ ID NO: 484952 - RNA, 32 nt, Human
uaauuagaaacacacuuuugcacauauauuuu

SEQ ID NO: 484953 - RNA, 32 nt, Human
uaauuagaaagcccagagaaaaagccagaaaa

SEQ ID NO: 484954 - RNA, 32 nt, Human
uaauuagaaguagacaaagauuaaugaaaggg

SEQ ID NO: 484955 - RNA, 32 nt, Human
uaauuagagcauccuucccuuuuauucuacuu

SEQ ID NO: 484956 - RNA, 32 nt, Human
uaauuagauuauaccacuagagucuucagauu

SEQ ID NO: 484957 - RNA, 32 nt, Human
uaauuagcauggucaaugcgggagcgaugagu

SEQ ID NO: 484958 - RNA, 32 nt, Human
uaauuagccagccucagauacuucugugggcc

SEQ ID NO: 484959 - RNA, 32 nt, Human
uaauuagcccggcuaauuuuguauuuuuagua

SEQ ID NO: 484960 - RNA, 32 nt, Human
uaauuaggaacucuugagaauauuggcugcug

SEQ ID NO: 484961 - RNA, 32 nt, Human
uaauuaggacagaucaauguacacuuaccucu

SEQ ID NO: 484962 - RNA, 32 nt, Human
uaauuagucaucuggauuuuuauagauaaaau

SEQ ID NO: 484963 - RNA, 32 nt, Human
uaauuauaaacaaaggaacaaauaaguggaag

SEQ ID NO: 484964 - RNA, 32 nt, Human
uaauuauacagcccggaugaaucucacucaga

SEQ ID NO: 484965 - RNA, 32 nt, Human
uaauuauagagaucugucauuugguacuggau

SEQ ID NO: 484966 - RNA, 32 nt, Human
uaauuaucauuuccuuggcuucaugcucuccc

SEQ ID NO: 484967 - RNA, 32 nt, Human
uaauuaucuucagcccaggcuuuugcuagaug

SEQ ID NO: 484968 - RNA, 32 nt, Human
uaauuaugcauccuagcuaaggcacagaagac

SEQ ID NO: 484969 - RNA, 32 nt, Human
uaauuauguaucugaaagucacccccacauac

SEQ ID NO: 484970 - RNA, 32 nt, Human
uaauuauguccuauuuauuugagauuuguguu

SEQ ID NO: 484971 - RNA, 32 nt, Human
uaauuauucccuaugcagagacaggagagagg

SEQ ID NO: 484972 - RNA, 32 nt, Human
uaauuauugauggcucugccugcuuaggacuc

SEQ ID NO: 484973 - RNA, 32 nt, Human
uaauuauugcuuccuuucuuauuacuuuccua

SEQ ID NO: 484974 - RNA, 32 nt, Human
uaauuauugugcccuuuaaguguuguaaaauc

SEQ ID NO: 484975 - RNA, 32 nt, Human
uaauuauuugagauggaaucuugcuuugucag

SEQ ID NO: 484976 - RNA, 32 nt, Human
uaauuauuuuaaaguuagaaacuuuuucuuuu

SEQ ID NO: 484977 - RNA, 32 nt, Human
uaauucaaauccaugugugugccugcauuaca

SEQ ID NO: 484978 - RNA, 32 nt, Human
uaauucaaugcaacacauauuuauggggcaua

SEQ ID NO: 484979 - RNA, 32 nt, Human
uaauucacacagagcgucagaagccaugaugc

SEQ ID NO: 484980 - RNA, 32 nt, Human
uaauucacaguccucagaagccuauuuuuaaa

SEQ ID NO: 484981 - RNA, 32 nt, Human
uaauucagaaagagaagagacagugaccaacc

SEQ ID NO: 484982 - RNA, 32 nt, Human
uaauucagagaaugccuccugaguuguucuac

SEQ ID NO: 484983 - RNA, 32 nt, Human
uaauucagcugaugcucaaguccaagggguag

SEQ ID NO: 484984 - RNA, 32 nt, Human
uaauucaggagguagaaugcagcuugagaucu

SEQ ID NO: 484985 - RNA, 32 nt, Human
uaauucaggagguagaauggagcuugagauca

SEQ ID NO: 484986 - RNA, 32 nt, Human
uaauucaggccuuccuuuugaccacugccccc

SEQ ID NO: 484987 - RNA, 32 nt, Human
uaauucaggugacuugcuaucuagacaccugg

SEQ ID NO: 484988 - RNA, 32 nt, Human
uaauucauacuggggagaaacccuaaagugug

SEQ ID NO: 484989 - RNA, 32 nt, Human
uaauucaucuaaucccuccuguuugucucaaa

SEQ ID NO: 484990 - RNA, 32 nt, Human
uaauucaucuugguuugcuauguuaaaacugu

SEQ ID NO: 484991 - RNA, 32 nt, Human
uaauucaugauaaaauugaaccaaugguccua

SEQ ID NO: 484992 - RNA, 32 nt, Human
uaauuccaacacuuugggaggcugaggcagga

SEQ ID NO: 484993 - RNA, 32 nt, Human
uaauuccacaauaugccaaauacucauaaaga

SEQ ID NO: 484994 - RNA, 24 nt, Human
uaauuccacuuuaacauuuuacug

SEQ ID NO: 484995 - RNA, 32 nt, Human
uaauuccagauggagcugaaauuagcaguuau

SEQ ID NO: 484996 - RNA, 32 nt, Human
uaauuccagcacuguggaaggccgaggugggu

SEQ ID NO: 484997 - RNA, 32 nt, Human
uaauuccagcacuuugggaggccgaggaggga

SEQ ID NO: 484998 - RNA, 32 nt, Human
uaauuccagcacuuugggaggccgaggcagga

SEQ ID NO: 484999 - RNA, 32 nt, Human
uaauuccagcacuuugggaggccgaggcgggc

SEQ ID NO: 485000 - RNA, 32 nt, Human
uaauuccagcacuuugggaggccgaggcgggu

SEQ ID NO: 485001 - RNA, 32 nt, Human
uaauuccagcacuuugggaggccgaggugggc

SEQ ID NO: 485002 - RNA, 32 nt, Human
uaauuccagcacuuugggaggccgagucggaa

SEQ ID NO: 485003 - RNA, 32 nt, Human
uaauuccagcacuuugggaggcugacgugggc

SEQ ID NO: 485004 - RNA, 32 nt, Human
uaauuccagcacuuugggaggcugaggagggc

SEQ ID NO: 485005 - RNA, 32 nt, Human
uaauuccagcacuuugggaggcugaggcgggu

SEQ ID NO: 485006 - RNA, 32 nt, Human
uaauuccagcacuuugggaggcugagguagga

SEQ ID NO: 485007 - RNA, 32 nt, Human
uaauuccagcacuuugggaggcugaggugggu

SEQ ID NO: 485008 - RNA, 32 nt, Human
uaauuccagcacuuugggaggucgagguaggc

SEQ ID NO: 485009 - RNA, 32 nt, Human
uaauuccagcacuuugugaggcugaggcgagu

SEQ ID NO: 485010 - RNA, 32 nt, Human
uaauuccagcaguuugggaggcugaggcagga

SEQ ID NO: 485011 - RNA, 32 nt, Human
uaauuccagccacucgagaggcugaggcagga

SEQ ID NO: 485012 - RNA, 32 nt, Human
uaauuccagcggcuuggaaggcugaggcagga

SEQ ID NO: 485013 - RNA, 32 nt, Human
uaauuccagcuacucaggaggcugagacaggg

SEQ ID NO: 485014 - RNA, 32 nt, Human
uaauuccagcuacucaggaggcugaggcagga

SEQ ID NO: 485015 - RNA, 32 nt, Human
uaauuccagcuacucaggaggcugaggcaggu

SEQ ID NO: 485016 - RNA, 32 nt, Human
uaauuccagcuacucgggaggcugaggcagga

SEQ ID NO: 485017 - RNA, 32 nt, Human
uaauuccagcuacuugagaggcugagauagga

SEQ ID NO: 485018 - RNA, 32 nt, Human
uaauuccagcuacuugggaggcugaggcagga

SEQ ID NO: 485019 - RNA, 32 nt, Human
uaauuccagcuacuugggaggcugaggcaugg

SEQ ID NO: 485020 - RNA, 32 nt, Human
uaauuccaucuacucgggaggcugaggcagga

SEQ ID NO: 485021 - RNA, 32 nt, Human
uaauuccccguauucaugugaggggccagcuu

SEQ ID NO: 485022 - RNA, 32 nt, Human
uaauuccccuuccggacgcugccaucauguug

SEQ ID NO: 485023 - RNA, 32 nt, Human
uaauucccuaacuguggaguuuuaggaaguca

SEQ ID NO: 485024 - RNA, 32 nt, Human
uaauucccuucccaacacuugccugauggaaa

SEQ ID NO: 485025 - RNA, 32 nt, Human
uaauuccggcacuuugggaggcugaggcagaa

SEQ ID NO: 485026 - RNA, 32 nt, Human
uaauuccuagcaucugcuaucaaacugugccu

SEQ ID NO: 485027 - RNA, 32 nt, Human
uaauuccucaguuauaccagauuuuauaaaau

SEQ ID NO: 485028 - RNA, 32 nt, Human
uaauuccugccuuccucccuuuucccagucca

SEQ ID NO: 485029 - RNA, 32 nt, Human
uaauuccuguaaucccagcauuuugagaggcu

SEQ ID NO: 485030 - RNA, 32 nt, Human
uaauuccuuagagauacaguauaccuggcaau

SEQ ID NO: 485031 - RNA, 32 nt, Human
uaauuccuucacuagguuggguuuggggaggg

SEQ ID NO: 485032 - RNA, 32 nt, Human
uaauuccuuccucucccuuguucccaaguagg

SEQ ID NO: 485033 - RNA, 32 nt, Human
uaauuccuucucagauaccauggauguggaug

SEQ ID NO: 485034 - RNA, 32 nt, Human
uaauucgugagacugaaguugcuuagaguacu

SEQ ID NO: 485035 - RNA, 32 nt, Human
uaauucuaaagcugcuucagacugcuucauga

SEQ ID NO: 485036 - RNA, 32 nt, Human
uaauucuaaggaguuuuguuguauuuuagaau

SEQ ID NO: 485037 - RNA, 32 nt, Human
uaauucuagcacuuugggaggcugaggcgggu

SEQ ID NO: 485038 - RNA, 32 nt, Human
uaauucuauuaaaugguugagaaauuagucac

SEQ ID NO: 485039 - RNA, 32 nt, Human
uaauucuauuugaagcaugcucuguaaguugc

SEQ ID NO: 485040 - RNA, 32 nt, Human
uaauucucaaaauauuuaaaacuuuuucauga

SEQ ID NO: 485041 - RNA, 31 nt, Human
uaauucucaaauaaauauuuuggugaagcau

SEQ ID NO: 485042 - RNA, 32 nt, Human
uaauucucaacguaucaaagcuuuucacuggc

SEQ ID NO: 485043 - RNA, 32 nt, Human
uaauucucaauauguuaacaccuagguguucc

SEQ ID NO: 485044 - RNA, 23 nt, Human
uaauucucacuugcauuuuccua

SEQ ID NO: 485045 - RNA, 32 nt, Human
uaauucucccuccagcucccccaaaccccaga

SEQ ID NO: 485046 - RNA, 32 nt, Human
uaauucuccugccucagccucccgaguagcug

SEQ ID NO: 485047 - RNA, 32 nt, Human
uaauucuccugccucagccucccgaguggcug

SEQ ID NO: 485048 - RNA, 32 nt, Human
uaauucuccugccucaggcuucugaguagcug

SEQ ID NO: 485049 - RNA, 32 nt, Human
uaauucuggaaagagcaaauaaaugaagauug

SEQ ID NO: 485050 - RNA, 32 nt, Human
uaauucuggagcaaguggagugguugcaggca

SEQ ID NO: 485051 - RNA, 32 nt, Human
uaauucugggucacuuccagggccaggucugu

SEQ ID NO: 485052 - RNA, 32 nt, Human
uaauucuguccaacaaacacacacggguagau

SEQ ID NO: 485053 - RNA, 32 nt, Human
uaauucuuauuucuguguuacucauguacauu

SEQ ID NO: 485054 - RNA, 32 nt, Human
uaauucuucuuccaauguggcccagggaagcc

SEQ ID NO: 485055 - RNA, 32 nt, Human
uaauucuuggauuccacuguuuucuuugggga

SEQ ID NO: 485056 - RNA, 32 nt, Human
uaauucuuuuuccaggaauagcaguaagguca

SEQ ID NO: 485057 - RNA, 32 nt, Human
uaauugaauaugcacacaggcaugacacaggu

SEQ ID NO: 485058 - RNA, 32 nt, Human
uaauugacauuacaguuaaaugagcacugacc

SEQ ID NO: 485059 - RNA, 32 nt, Human
uaauugagaugggguuucaccaugguagccag

SEQ ID NO: 485060 - RNA, 32 nt, Human
uaauugagccaaagaugauggaagaagaaacu

SEQ ID NO: 485061 - RNA, 32 nt, Human
uaauugagcuguaacccagggacaggaaaaua

SEQ ID NO: 485062 - RNA, 32 nt, Human
uaauugaggccuggccucugcugugggugaau

SEQ ID NO: 485063 - RNA, 32 nt, Human
uaauugaggcugaaugaaugaucccgaaucug

SEQ ID NO: 485064 - RNA, 32 nt, Human
uaauugagggugcuaauuuucuuaagauagug

SEQ ID NO: 485065 - RNA, 32 nt, Human
uaauugagguauaaauuaaugagacaaaguga

SEQ ID NO: 485066 - RNA, 32 nt, Human
uaauugauuccuugugaccuaauucuagagaa

SEQ ID NO: 485067 - RNA, 32 nt, Human
uaauugcaacaugguucuuuguacauuuucau

SEQ ID NO: 485068 - RNA, 32 nt, Human
uaauugcaccacugcacuccagccugggugac

SEQ ID NO: 485069 - RNA, 32 nt, Human
uaauugcagaagcaguuggggugaagaaaacu

SEQ ID NO: 485070 - RNA, 32 nt, Human
uaauugcagaucuucccuuguaaaugugacug

SEQ ID NO: 485071 - RNA, 32 nt, Human
uaauugcagcacuuugggaggcugaggcaggu

SEQ ID NO: 485072 - RNA, 32 nt, Human
uaauugcagcacuuuuagaggcugaggcagga

SEQ ID NO: 485073 - RNA, 32 nt, Human
uaauugcaucacugcacuccaaccugggcaac

SEQ ID NO: 485074 - RNA, 32 nt, Human
uaauugcaucauugcacuccagccugggcaac

SEQ ID NO: 485075 - RNA, 32 nt, Human
uaauugcauggcuuuuccaaucagacgaaauu

SEQ ID NO: 485076 - RNA, 32 nt, Human
uaauugcccuaccuaccucacaggguuguugu

SEQ ID NO: 485077 - RNA, 32 nt, Human
uaauugccucuccccucucccauuuucucucu

SEQ ID NO: 485078 - RNA, 32 nt, Human
uaauugccuuucuuuuccccuccuccuuugua

SEQ ID NO: 485079 - RNA, 32 nt, Human
uaauugcgagggagaaucaugguucugcaguc

SEQ ID NO: 485080 - RNA, 32 nt, Human
uaauugcgccacugcacuccagccugagcgac

SEQ ID NO: 485081 - RNA, 32 nt, Human
uaauugcuucauuuucuugagcaauacugaag

SEQ ID NO: 485082 - RNA, 32 nt, Human
uaauugcuuguuuucuagccuggcaagauauu

SEQ ID NO: 485083 - RNA, 32 nt, Human
uaauuggaacuggaagagggaucauguuuugu

SEQ ID NO: 485084 - RNA, 32 nt, Human
uaauuggcauuucucaagacugucuuuaccag

SEQ ID NO: 485085 - RNA, 32 nt, Human
uaauuggccugggcugcaugggcugcuuuuau

SEQ ID NO: 485086 - RNA, 32 nt, Human
uaauuggcucaccucguuccacagcuccaccu

SEQ ID NO: 485087 - RNA, 32 nt, Human
uaauugggagagaagagaccugccagauuauc

SEQ ID NO: 485088 - RNA, 32 nt, Human
uaauugggaggaagauuagaagcagugggggu

SEQ ID NO: 485089 - RNA, 32 nt, Human
uaauugggaggcugaagcaggagaauugcuca

SEQ ID NO: 485090 - RNA, 32 nt, Human
uaauuggggagaagaagggaagagagcagcag

SEQ ID NO: 485091 - RNA, 32 nt, Human
uaauuggggagagggagugugccccucggggc

SEQ ID NO: 485092 - RNA, 32 nt, Human
uaauuggggguuucucuuucuguccggugucc

SEQ ID NO: 485093 - RNA, 32 nt, Human
uaauuggguauugggaggagggguguggggag

SEQ ID NO: 485094 - RNA, 32 nt, Human
uaauugguguugggaguguugcagugacugaa

SEQ ID NO: 485095 - RNA, 32 nt, Human
uaauugguuuucuuguaaauacaguuuuguac

SEQ ID NO: 485096 - RNA, 31 nt, Human
uaauuguacagcuagagccugcaaguucaac

SEQ ID NO: 485097 - RNA, 32 nt, Human
uaauuguagaacuuugugugaggacuuugguu

SEQ ID NO: 485098 - RNA, 32 nt, Human
uaauuguauguaccacacaucuccagacguua

SEQ ID NO: 485099 - RNA, 32 nt, Human
uaauuguauuuagaucuuguuauugcuccagu

SEQ ID NO: 485100 - RNA, 32 nt, Human
uaauugucacaugugucuuccaccuccuugac

SEQ ID NO: 485101 - RNA, 32 nt, Human
uaauugucacgggggucucacauaucagggcg

SEQ ID NO: 485102 - RNA, 32 nt, Human
uaauugucagccucuggcugugcauuggugca

SEQ ID NO: 485103 - RNA, 32 nt, Human
uaauugucaguuauaugaauaaauuacauguc

SEQ ID NO: 485104 - RNA, 32 nt, Human
uaauuguccuggaaggugggagaaauggagug

SEQ ID NO: 485105 - RNA, 32 nt, Human
uaauugucuaugcuuaaucaucuuuaaacacu

SEQ ID NO: 485106 - RNA, 32 nt, Human
uaauugucuggcuucucucuggacugggagcu

SEQ ID NO: 485107 - RNA, 32 nt, Human
uaauugugcaacuuuuaaccccuguuggcugg

SEQ ID NO: 485108 - RNA, 32 nt, Human
uaauugugccacugcacugcagccugggcgac

SEQ ID NO: 485109 - RNA, 32 nt, Human
uaauugugggaaguaugugauugccuggugug

SEQ ID NO: 485110 - RNA, 32 nt, Human
uaauugugggagaagagaggagaggagggcuc

SEQ ID NO: 485111 - RNA, 32 nt, Human
uaauuguguucuuuaaaaugcauacacacaua

SEQ ID NO: 485112 - RNA, 32 nt, Human
uaauuguuaauuagauguugcuuuuguuuaua

SEQ ID NO: 485113 - RNA, 31 nt, Human
uaauuguuacaaaaauaccugucagaaaccc

SEQ ID NO: 485114 - RNA, 32 nt, Human
uaauuguuagacugguugaugagggaaaugug

SEQ ID NO: 485115 - RNA, 32 nt, Human
uaauuguucacucuuuacuuuugaggcagcca

SEQ ID NO: 485116 - RNA, 32 nt, Human
uaauuguugcuguuuccagucuaaaggaccuc

SEQ ID NO: 485117 - RNA, 20 nt, Human
uaauuguuguaccuauugaa

SEQ ID NO: 485118 - RNA, 32 nt, Human
uaauuguuguccccauuuuauagaugaaaagg

SEQ ID NO: 485119 - RNA, 32 nt, Human
uaauuguuugcuguaucucccuucccucugag

SEQ ID NO: 485120 - RNA, 32 nt, Human
uaauuguuugugucaccccaugauauccguua

SEQ ID NO: 485121 - RNA, 32 nt, Human
uaauuuaaaauggcuguaaaaaugacuuaaau

SEQ ID NO: 485122 - RNA, 32 nt, Human
uaauuuaaauacccaaccucuccaucacagcu

SEQ ID NO: 485123 - RNA, 32 nt, Human
uaauuuaacaaaucugaaaauaugucaaauua

SEQ ID NO: 485124 - RNA, 32 nt, Human
uaauuuaacccaggcaugcaaugcuagauaau

SEQ ID NO: 485125 - RNA, 32 nt, Human
uaauuuaauccuucuguagcaaacaggcauuc

SEQ ID NO: 485126 - RNA, 32 nt, Human
uaauuuaauuggugaggcccauucuugcaacu

SEQ ID NO: 485127 - RNA, 28 nt, Human
uaauuuacaagugcugguacaucuuuuu

SEQ ID NO: 485128 - RNA, 32 nt, Human
uaauuuacacucccaccaacaguguauaagug

SEQ ID NO: 485129 - RNA, 32 nt, Human
uaauuuacacucccaccaacaguguauaauaa

SEQ ID NO: 485130 - RNA, 32 nt, Human
uaauuuacacucccaccaacaguguauguguu

SEQ ID NO: 485131 - RNA, 32 nt, Human
uaauuuaccauccugaaaguccagaauuaaaa

SEQ ID NO: 485132 - RNA, 32 nt, Human
uaauuuacuaaauuauguagcuaucugacugu

SEQ ID NO: 485133 - RNA, 32 nt, Human
uaauuuacuaugaaauggacauccuuuuaacu

SEQ ID NO: 485134 - RNA, 32 nt, Human
uaauuuacuucacuaacugcuauauucuauag

SEQ ID NO: 485135 - RNA, 32 nt, Human
uaauuuagguauaaauucugugacaugcucuu

SEQ ID NO: 485136 - RNA, 32 nt, Human
uaauuuagucaacuugaaaauuucgguagucu

SEQ ID NO: 485137 - RNA, 23 nt, Human
uaauuuaguuuggcauuuuccua

SEQ ID NO: 485138 - RNA, 32 nt, Human
uaauuuaucauuuuuccaaccuugguauuuua

SEQ ID NO: 485139 - RNA, 32 nt, Human
uaauuuauccaccaauuucugccugacauuca

SEQ ID NO: 485140 - RNA, 32 nt, Human
uaauuuaugaauuuuacuugcaccuuauaguu

SEQ ID NO: 485141 - RNA, 32 nt, Human
uaauuuaugggguggaaacagcauuaagaaua

SEQ ID NO: 485142 - RNA, 32 nt, Human
uaauuuauuaaagacuggcucuccaguuuuaa

SEQ ID NO: 485143 - RNA, 32 nt, Human
uaauuuauuuuccuccuccuccuucuucuucu

SEQ ID NO: 485144 - RNA, 32 nt, Human
uaauuuauuuugcuuuggagcagguaccuuuc

SEQ ID NO: 485145 - RNA, 32 nt, Human
uaauuucaaagcuuccucuggccagguagacu

SEQ ID NO: 485146 - RNA, 32 nt, Human
uaauuucaacagaagagugagagauggaaccc

SEQ ID NO: 485147 - RNA, 32 nt, Human
uaauuucacacauuauuccucguuuugacugg

SEQ ID NO: 485148 - RNA, 32 nt, Human
uaauuucacagcaacaggugacugacccuuug

SEQ ID NO: 485149 - RNA, 30 nt, Human
uaauuucacauguaguauaggagcuucuga

SEQ ID NO: 485150 - RNA, 32 nt, Human
uaauuucacugagcuggaggugaguguaagaa

SEQ ID NO: 485151 - RNA, 32 nt, Human
uaauuucagacaggcaauaguggggaggucau

SEQ ID NO: 485152 - RNA, 32 nt, Human
uaauuucagugcagugauuguugugagaaaua

SEQ ID NO: 485153 - RNA, 32 nt, Human
uaauuucaguuaucagaagccauuccaucauu

SEQ ID NO: 485154 - RNA, 32 nt, Human
uaauuucauucauuucuauacaggguuaacaa

SEQ ID NO: 485155 - RNA, 32 nt, Human
uaauuuccaacacacauacaugcacacaaaca

SEQ ID NO: 485156 - RNA, 32 nt, Human
uaauuuccacacacagcacuuccagagccuca

SEQ ID NO: 485157 - RNA, 32 nt, Human
uaauuuccauggccgguggcuuuuccuuccau

SEQ ID NO: 485158 - RNA, 32 nt, Human
uaauuuccccaaggucacacagcuggcugggg

SEQ ID NO: 485159 - RNA, 32 nt, Human
uaauuucccuugugaguuccccauuaaucugc

SEQ ID NO: 485160 - RNA, 32 nt, Human
uaauuuccgagcgaagcugcccccaggaugac

SEQ ID NO: 485161 - RNA, 32 nt, Human
uaauuuccuagagguucuggguuuucugaaag

SEQ ID NO: 485162 - RNA, 32 nt, Human
uaauuucuaagcugugaagcuuauagcauuuu

SEQ ID NO: 485163 - RNA, 32 nt, Human
uaauuucucauggcaguguuuaagaccacucu

SEQ ID NO: 485164 - RNA, 32 nt, Human
uaauuucuccacaacaaaaaccacaacuugaa

SEQ ID NO: 485165 - RNA, 32 nt, Human
uaauuucucugguucuuggcagcuccauuugg

SEQ ID NO: 485166 - RNA, 32 nt, Human
uaauuucugaaaaccaaaaacucuccaagugu

SEQ ID NO: 485167 - RNA, 32 nt, Human
uaauuucugaauccuuugccuguggguaggaa

SEQ ID NO: 485168 - RNA, 32 nt, Human
uaauuucugagagcuaguaccuauaugcuacc

SEQ ID NO: 485169 - RNA, 32 nt, Human
uaauuucugcaaggagcuuucuauccugaacu

SEQ ID NO: 485170 - RNA, 32 nt, Human
uaauuucugcuuccccagccuaagcagggauc

SEQ ID NO: 485171 - RNA, 32 nt, Human
uaauuucuguuacuggcuuugcuagaauucau

SEQ ID NO: 485172 - RNA, 32 nt, Human
uaauuucuucuuucauucacucaggaacaaau

SEQ ID NO: 485173 - RNA, 32 nt, Human
uaauuugaaauggcauuuaaaauaaacauauc

SEQ ID NO: 485174 - RNA, 32 nt, Human
uaauuugaacagcucuaagauauugucacuua

SEQ ID NO: 485175 - RNA, 32 nt, Human
uaauuugaauccauuuggaugaaauuguagag

SEQ ID NO: 485176 - RNA, 32 nt, Human
uaauuugaggcugggugcaguggcucacaccu

SEQ ID NO: 485177 - RNA, 32 nt, Human
uaauuugauuuaaugguuacugcccagauauu

SEQ ID NO: 485178 - RNA, 32 nt, Human
uaauuugcacuccuguuggaaagucuaaaaug

SEQ ID NO: 485179 - RNA, 32 nt, Human
uaauuugccugaggccacacagcuuguaagug

SEQ ID NO: 485180 - RNA, 32 nt, Human
uaauuugccugaugucugugagauuugauaaa

SEQ ID NO: 485181 - RNA, 32 nt, Human
uaauuugccuuuucucuuuugauuuaauguuu

SEQ ID NO: 485182 - RNA, 32 nt, Human
uaauuugcucugguguaaaacugcuaauuucu

SEQ ID NO: 485183 - RNA, 32 nt, Human
uaauuugcuuuuccuuaaggaugcugaacaua

SEQ ID NO: 485184 - RNA, 32 nt, Human
uaauuugcuuuuucugaccaagccuuguggca

SEQ ID NO: 485185 - RNA, 32 nt, Human
uaauuuggagacuacuuugaaaaguauggcaa

SEQ ID NO: 485186 - RNA, 32 nt, Human
uaauuuggcaggauaauauagugcaaauuauu

SEQ ID NO: 485187 - RNA, 32 nt, Human
uaauuuggccaaaaauaagaaauuggaaagaa

SEQ ID NO: 485188 - RNA, 32 nt, Human
uaauuuggcuuggcaugccagucuuauaauua

SEQ ID NO: 485189 - RNA, 32 nt, Human
uaauuuggggucucuuuguuuuccccaacaua

SEQ ID NO: 485190 - RNA, 32 nt, Human
uaauuugggguuccugguccugcuccaggagu

SEQ ID NO: 485191 - RNA, 32 nt, Human
uaauuugguaguuuauaaaaaugcuggaaaug

SEQ ID NO: 485192 - RNA, 32 nt, Human
uaauuuggugacauuuuaacaguaauuagcua

SEQ ID NO: 485193 - RNA, 32 nt, Human
uaauuuguaaaauccugcuaacuagcaaauuc

SEQ ID NO: 485194 - RNA, 32 nt, Human
uaauuugucugucagaucuaaugucaaacaac

SEQ ID NO: 485195 - RNA, 32 nt, Human
uaauuuguuuugcuggagaaacaucagguuug

SEQ ID NO: 485196 - RNA, 32 nt, Human
uaauuuguuuuuaaauacuuuccuggcugggc

SEQ ID NO: 485197 - RNA, 32 nt, Human
uaauuuuaaagccuuucggauuacuuuuaaaa

SEQ ID NO: 485198 - RNA, 32 nt, Human
uaauuuuaagcauguucaguggcagcuccccu

SEQ ID NO: 485199 - RNA, 32 nt, Human
uaauuuuaagcuccuucugucuuguagagucu

SEQ ID NO: 485200 - RNA, 32 nt, Human
uaauuuuaaugccaacaaaauugguuguaauc

SEQ ID NO: 485201 - RNA, 32 nt, Human
uaauuuuacacaauacacauggcuuaauuauu

SEQ ID NO: 485202 - RNA, 32 nt, Human
uaauuuuacaucuuaaauauuucuuucuacua

SEQ ID NO: 485203 - RNA, 32 nt, Human
uaauuuuagaccuuucugagaagauuauuaua

SEQ ID NO: 485204 - RNA, 32 nt, Human
uaauuuuauaaauauauaaauacauguaugua

SEQ ID NO: 485205 - RNA, 32 nt, Human
uaauuuuauagcacguuuacucuagugcuagc

SEQ ID NO: 485206 - RNA, 32 nt, Human
uaauuuuauaugucaacuugaauaggccacag

SEQ ID NO: 485207 - RNA, 32 nt, Human
uaauuuuaugccugaaacagaguuugcgcaca

SEQ ID NO: 485208 - RNA, 32 nt, Human
uaauuuuauucuccucuuccuuuuacccuagu

SEQ ID NO: 485209 - RNA, 32 nt, Human
uaauuuuauuuuccaaacugugcuggaccaaa

SEQ ID NO: 485210 - RNA, 32 nt, Human
uaauuuucccaaggcugcccagcugguggugu

SEQ ID NO: 485211 - RNA, 32 nt, Human
uaauuuuccuuucugaaaacucucauuuuaaa

SEQ ID NO: 485212 - RNA, 32 nt, Human
uaauuuucuuaagauagugccuaaaacacuaa

SEQ ID NO: 485213 - RNA, 32 nt, Human
uaauuuucuucucacuauuaaauuuauuuaaa

SEQ ID NO: 485214 - RNA, 32 nt, Human
uaauuuucuugcaaauaaguuauuuacugcua

SEQ ID NO: 485215 - RNA, 32 nt, Human
uaauuuucuuuuccuuuucaacaaucuccuaa

SEQ ID NO: 485216 - RNA, 32 nt, Human
uaauuuugaguuugaaaucucucccagaagac

SEQ ID NO: 485217 - RNA, 32 nt, Human
uaauuuugcccuaaaagcagauuuuaucacca

SEQ ID NO: 485218 - RNA, 32 nt, Human
uaauuuugcugguuuucauucuucugauuaac

SEQ ID NO: 485219 - RNA, 32 nt, Human
uaauuuugcuuacuuuuucaugcagcugcauu

SEQ ID NO: 485220 - RNA, 32 nt, Human
uaauuuuggccacuuguagguaucagugugau

SEQ ID NO: 485221 - RNA, 32 nt, Human
uaauuuugggcugagugcaguggcuuaugccu

SEQ ID NO: 485222 - RNA, 32 nt, Human
uaauuuuggguggggagaagaggcagauucaa

SEQ ID NO: 485223 - RNA, 32 nt, Human
uaauuuugucccaucuguuuucucuguucucu

SEQ ID NO: 485224 - RNA, 32 nt, Human
uaauuuuuaagaauugaguaaugguguagaac

SEQ ID NO: 485225 - RNA, 32 nt, Human
uaauuuuucacagccgagaaacagugcagcag

SEQ ID NO: 485226 - RNA, 32 nt, Human
uaauuuuugagacugaguaguauucuuggaua

SEQ ID NO: 485227 - RNA, 32 nt, Human
uaauuuuugauuugcuuccaccaggggaaaau

SEQ ID NO: 485228 - RNA, 32 nt, Human
uaauuuuugcuuuuaauuuugauaccucuuua

SEQ ID NO: 485229 - RNA, 32 nt, Human
uaauuuuuguguuuuaguagagacaggguuuc

SEQ ID NO: 485230 - RNA, 32 nt, Human
uaauuuuuguucauaauguagcuccccuuuag

SEQ ID NO: 485231 - RNA, 32 nt, Human
uacaaaaacucaucuuguaauauuuucauuuu

SEQ ID NO: 485232 - RNA, 32 nt, Human
uacaaaaacuuagccgggcaugguggcaugug

SEQ ID NO: 485233 - RNA, 32 nt, Human
uacaaaaacuuagccgggcaugguggugggca

SEQ ID NO: 485234 - RNA, 32 nt, Human
uacaaaaagacacaaaaauuagacaggugugg

SEQ ID NO: 485235 - RNA, 32 nt, Human
uacaaaaagcaggggcccagccccagcuguug

SEQ ID NO: 485236 - RNA, 32 nt, Human
uacaaaaaguagaaaaauuagcugaguguggu

SEQ ID NO: 485237 - RNA, 32 nt, Human
uacaaaaaguuagcugggcaugguggccugua

SEQ ID NO: 485238 - RNA, 32 nt, Human
uacaaaaaguuagcugggcaugguggugcgcg

SEQ ID NO: 485239 - RNA, 32 nt, Human
uacaaaaaguuagcugggugugguggcgugug

SEQ ID NO: 485240 - RNA, 32 nt, Human
uacaaaaauuccaagucucuuuugaacuguau

SEQ ID NO: 485241 - RNA, 32 nt, Human
uacaaaaauucucaguucucuucacucaagga

SEQ ID NO: 485242 - RNA, 32 nt, Human
uacaaaaauuuagccaggcaugguggcauaca

SEQ ID NO: 485243 - RNA, 32 nt, Human
uacaaaacagaauugaaguguguuagagcugg

SEQ ID NO: 485244 - RNA, 32 nt, Human
uacaaaacagcaugcacucaacuugggacuuu

SEQ ID NO: 485245 - RNA, 32 nt, Human
uacaaaacauuccucugaaaaucuaauauuug

SEQ ID NO: 485246 - RNA, 32 nt, Human
uacaaaaccagcucugacuuccuuauccugaa

SEQ ID NO: 485247 - RNA, 32 nt, Human
uacaaaacguuagaaaaauuagccaggugugg

SEQ ID NO: 485248 - RNA, 32 nt, Human
uacaaaacuguacagccuauuuuaguguggac

SEQ ID NO: 485249 - RNA, 32 nt, Human
uacaaaagagaaaagaaaagauuuuuaauaaa

SEQ ID NO: 485250 - RNA, 32 nt, Human
uacaaaagaguuucgcuuuaccccucugguaa

SEQ ID NO: 485251 - RNA, 32 nt, Human
uacaaaagauagaaaaacuuagccaggcaugg

SEQ ID NO: 485252 - RNA, 32 nt, Human
uacaaaagauuuuuaaaaauuagccagguggu

SEQ ID NO: 485253 - RNA, 25 nt, Human
uacaaaagcagccauagacaauaca

SEQ ID NO: 485254 - RNA, 32 nt, Human
uacaaaagguaaagcaguugagauucucuaca

SEQ ID NO: 485255 - RNA, 32 nt, Human
uacaaaagguuuaggaaaagaaaacaauggug

SEQ ID NO: 485256 - RNA, 32 nt, Human
uacaaaagucuuucugacauacacacugcagg

SEQ ID NO: 485257 - RNA, 32 nt, Human
uacaaaauauacaaaauauuagccagccaucg

SEQ ID NO: 485258 - RNA, 19 nt, Human
uacaaaauauauuuuacca

SEQ ID NO: 485259 - RNA, 32 nt, Human
uacaaaauauuagcugggcgugguggcaggcg

SEQ ID NO: 485260 - RNA, 32 nt, Human
uacaaaauauuuuaaaaauuagccaggugugg

SEQ ID NO: 485261 - RNA, 31 nt, Human
uacaaaaucacacuguguaccaaagcaucuu

SEQ ID NO: 485262 - RNA, 32 nt, Human
uacaaaaucucuugggucaagaaaguucuaga

SEQ ID NO: 485263 - RNA, 32 nt, Human
uacaaaaucugugucaguuguacauucacagg

SEQ ID NO: 485264 - RNA, 32 nt, Human
uacaaaaugcaaaaauuagcugggcauggugg

SEQ ID NO: 485265 - RNA, 32 nt, Human
uacaaaaugugcugcacuguugggagaaagaa

SEQ ID NO: 485266 - RNA, 32 nt, Human
uacaaaauuagccaggugugguggcgcauguc

SEQ ID NO: 485267 - RNA, 32 nt, Human
uacaaaauuagccgggugugguggcgcgugcu

SEQ ID NO: 485268 - RNA, 32 nt, Human
uacaaaauuagcugggugugguggcgcaugcc

SEQ ID NO: 485269 - RNA, 32 nt, Human
uacaaacaaaccucgucaccacggucaggagg

SEQ ID NO: 485270 - RNA, 32 nt, Human
uacaaacaaggaagcacauuguguacaaaaua

SEQ ID NO: 485271 - RNA, 32 nt, Human
uacaaacaaggcagaaacauuuaaacuaguau

SEQ ID NO: 485272 - RNA, 32 nt, Human
uacaaacacaugcaaacauaccuacacacaca

SEQ ID NO: 485273 - RNA, 32 nt, Human
uacaaaccaagcucagggccccaacccuagaa

SEQ ID NO: 485274 - RNA, 32 nt, Human
uacaaaccagugccacaaggagcuauuaugag

SEQ ID NO: 485275 - RNA, 32 nt, Human
uacaaacccauguugaucuuucucaaucuuga

SEQ ID NO: 485276 - RNA, 32 nt, Human
uacaaaccucaaaaacgugagcguaucuucca

SEQ ID NO: 485277 - RNA, 32 nt, Human
uacaaaccuccccuccaaacaccuucucacau

SEQ ID NO: 485278 - RNA, 32 nt, Human
uacaaaccuuaaauccaaaggcucuucucaga

SEQ ID NO: 485279 - RNA, 32 nt, Human
uacaaacgugagccacugugcuuggccacaca

SEQ ID NO: 485280 - RNA, 32 nt, Human
uacaaacgugagccaucgcaccuagccucuuu

SEQ ID NO: 485281 - RNA, 32 nt, Human
uacaaacuccugcaauucuuccugcaagccuc

SEQ ID NO: 485282 - RNA, 32 nt, Human
uacaaacucggugaacaacugagggaaccaaa

SEQ ID NO: 485283 - RNA, 32 nt, Human
uacaaacuggauauuuuauacauugcugacag

SEQ ID NO: 485284 - RNA, 32 nt, Human
uacaaacuuaccucuaaacucugaggauaaag

SEQ ID NO: 485285 - RNA, 32 nt, Human
uacaaagaacugcuucuugcucuugggguauc

SEQ ID NO: 485286 - RNA, 32 nt, Human
uacaaagaagcagaaguguaauuuuccuuuuc

SEQ ID NO: 485287 - RNA, 32 nt, Human
uacaaagaaggcuaaugucauucuuccaguag

SEQ ID NO: 485288 - RNA, 32 nt, Human
uacaaagaaucuagugugcucagggcuuggua

SEQ ID NO: 485289 - RNA, 32 nt, Human
uacaaagacuuuguuaaacuuuauccaguggu

SEQ ID NO: 485290 - RNA, 32 nt, Human
uacaaagagccccaggccccgggggcuucucu

SEQ ID NO: 485291 - RNA, 22 nt, Human
uacaaagagcuuuugugucuuu

SEQ ID NO: 485292 - RNA, 32 nt, Human
uacaaagauauaaucuauuuuauuaugguuuc

SEQ ID NO: 485293 - RNA, 32 nt, Human
uacaaagcaauucauaccuuuugcuacauuug

SEQ ID NO: 485294 - RNA, 32 nt, Human
uacaaagcacaauggggcugggcucauacagu

SEQ ID NO: 485295 - RNA, 32 nt, Human
uacaaagcagcaagagguuaggguggcaaggc

SEQ ID NO: 485296 - RNA, 32 nt, Human
uacaaagcagcuaaaaaugacacagcuuauuu

SEQ ID NO: 485297 - RNA, 31 nt, Human
uacaaagcaguuuucugaauggggauuaguu

SEQ ID NO: 485298 - RNA, 32 nt, Human
uacaaagccaacaacauuugcugcaaauaaac

SEQ ID NO: 485299 - RNA, 32 nt, Human
uacaaagcugaagaaaaugaagcccuauuacu

SEQ ID NO: 485300 - RNA, 32 nt, Human
uacaaagcugucacucacaaaaggcuggaugu

SEQ ID NO: 485301 - RNA, 32 nt, Human
uacaaaggcugcauaccauagggcagggcacc

SEQ ID NO: 485302 - RNA, 32 nt, Human
uacaaaggcuggaauagaacaaaagcccacca

SEQ ID NO: 485303 - RNA, 32 nt, Human
uacaaaggucuucuucccucgccccuucucca

SEQ ID NO: 485304 - RNA, 32 nt, Human
uacaaagguuuaaaggaauugauuccucugaa

SEQ ID NO: 485305 - RNA, 32 nt, Human
uacaaaguagacaugacaagugaacagcagag

SEQ ID NO: 485306 - RNA, 32 nt, Human
uacaaagucugcuuuugcuauucuuuuugcuu

SEQ ID NO: 485307 - RNA, 32 nt, Human
uacaaaguggaagugccagcuggcuuaaguac

SEQ ID NO: 485308 - RNA, 32 nt, Human
uacaaaguguggaagccagggcccagggaagg

SEQ ID NO: 485309 - RNA, 24 nt, Human
uacaaauaaaaacaauacagcaua

SEQ ID NO: 485310 - RNA, 32 nt, Human
uacaaauaaauguguucugaaucuuuucaucu

SEQ ID NO: 485311 - RNA, 32 nt, Human
uacaaauaaggcaugaggacuaugugaaaaau

SEQ ID NO: 485312 - RNA, 32 nt, Human
uacaaauaccccugggugucaccaacaauauu

SEQ ID NO: 485313 - RNA, 32 nt, Human
uacaaauagauggagaccugcugggaucagug

SEQ ID NO: 485314 - RNA, 32 nt, Human
uacaaauaggcaugccucacacacacagucca

SEQ ID NO: 485315 - RNA, 32 nt, Human
uacaaauauauguacaacagauuuugcuuuuu

SEQ ID NO: 485316 - RNA, 32 nt, Human
uacaaauauuagcguuuggcucuaauaagggu

SEQ ID NO: 485317 - RNA, 32 nt, Human
uacaaaucagaagaaaaagcaagcauuauaaa

SEQ ID NO: 485318 - RNA, 32 nt, Human
uacaaaucauuugcucauuuuuaauuuggguu

SEQ ID NO: 485319 - RNA, 30 nt, Human
uacaaaucuaaacucaugauacacuugaua

SEQ ID NO: 485320 - RNA, 24 nt, Human
uacaaaucugugcuacacuggaua

SEQ ID NO: 485321 - RNA, 32 nt, Human
uacaaaugagauuauauuuggagucauguucc

SEQ ID NO: 485322 - RNA, 32 nt, Human
uacaaauggauccauaguuugcagugauuuaa

SEQ ID NO: 485323 - RNA, 32 nt, Human
uacaaaugugaagucuguggcaaagcuuuuaa

SEQ ID NO: 485324 - RNA, 24 nt, Human
uacaaauuaacauuuuugaugcca

SEQ ID NO: 485325 - RNA, 32 nt, Human
uacaaauuaaguuugugacaagaaaugcccaa

SEQ ID NO: 485326 - RNA, 21 nt, Human
uacaaauuccucauucuguca

SEQ ID NO: 485327 - RNA, 19 nt, Human
uacaaauucugguaaacug

SEQ ID NO: 485328 - RNA, 32 nt, Human
uacaaauuguucuuguuaaaaaugacuaauac

SEQ ID NO: 485329 - RNA, 27 nt, Human
uacaaauuuaaaaaccaauacaguaua

SEQ ID NO: 485330 - RNA, 32 nt, Human
uacaaauuugagauagaucucgccugucuuaa

SEQ ID NO: 485331 - RNA, 32 nt, Human
uacaacaaucagaaagggcacugauuuauuug

SEQ ID NO: 485332 - RNA, 32 nt, Human
uacaacacaaaucaugcuucugacuggcacca

SEQ ID NO: 485333 - RNA, 18 nt, Human
uacaacaccugacuuuaa

SEQ ID NO: 485334 - RNA, 32 nt, Human
uacaacacuggcagagaugauucuagauuaac

SEQ ID NO: 485335 - RNA, 32 nt, Human
uacaacacuguaguggaacauucuucugcauu

SEQ ID NO: 485336 - RNA, 21 nt, Human
uacaacagaagauacaggaag

SEQ ID NO: 485337 - RNA, 24 nt, Human
uacaacagagaggcagucaggaga

SEQ ID NO: 485338 - RNA, 32 nt, Human
uacaacagccugaaucaaaugguuagcuuaau

SEQ ID NO: 485339 - RNA, 32 nt, Human
uacaacagugccugacacauauuaggcacugg

SEQ ID NO: 485340 - RNA, 32 nt, Human
uacaacauaccuaucagaaaugguuuucauua

SEQ ID NO: 485341 - RNA, 32 nt, Human
uacaacauagccccaaauauaguaagaucuau

SEQ ID NO: 485342 - RNA, 32 nt, Human
uacaacaucacugcgcuagggugcuucauggu

SEQ ID NO: 485343 - RNA, 24 nt, Human
uacaacaugaaauauaguugcaua

SEQ ID NO: 485344 - RNA, 32 nt, Human
uacaacauggcugagacuaaguguccagggag

SEQ ID NO: 485345 - RNA, 32 nt, Human
uacaacaugugaggcauucggggaagcugcac

SEQ ID NO: 485346 - RNA, 32 nt, Human
uacaacauucaaaucacaacaguauccugauu

SEQ ID NO: 485347 - RNA, 26 nt, Human
uacaaccaaagagcuaucucaggaga

SEQ ID NO: 485348 - RNA, 32 nt, Human
uacaaccacaaacaccacaacggccgccacuc

SEQ ID NO: 485349 - RNA, 32 nt, Human
uacaaccacugcacuaccugacucaggaaucg

SEQ ID NO: 485350 - RNA, 32 nt, Human
uacaaccagccaaaugcacuuuugugaaaaug

SEQ ID NO: 485351 - RNA, 32 nt, Human
uacaaccaggacacaggaagcccugcugggcu

SEQ ID NO: 485352 - RNA, 32 nt, Human
uacaaccauacauacuugcacauguguguuca

SEQ ID NO: 485353 - RNA, 32 nt, Human
uacaaccauaggcucacagaaaaagaaaaaga

SEQ ID NO: 485354 - RNA, 32 nt, Human
uacaacccgcagucccacaucaucucaggcgg

SEQ ID NO: 485355 - RNA, 32 nt, Human
uacaaccgaugguaauuaagcuuguauucaca

SEQ ID NO: 485356 - RNA, 32 nt, Human
uacaaccgguacucaaggggcagccccaccuc

SEQ ID NO: 485357 - RNA, 32 nt, Human
uacaaccuaccaccgcagcccaggcucgacuc

SEQ ID NO: 485358 - RNA, 32 nt, Human
uacaaccuauggauuucauguguuacaauauc

SEQ ID NO: 485359 - RNA, 32 nt, Human
uacaaccucugccuccugggcucaagugaucc

SEQ ID NO: 485360 - RNA, 32 nt, Human
uacaaccugagccuuuucuuauauaagacaag

SEQ ID NO: 485361 - RNA, 32 nt, Human
uacaaccugcauaauguggacucuugaccagu

SEQ ID NO: 485362 - RNA, 32 nt, Human
uacaaccugggugauagagcaagucucugucu

SEQ ID NO: 485363 - RNA, 32 nt, Human
uacaaccuguaaccacaaucccucaccucuca

SEQ ID NO: 485364 - RNA, 32 nt, Human
uacaaccuuccacagcagcccaggcuccacuc

SEQ ID NO: 485365 - RNA, 32 nt, Human
uacaacgacgaggagauucguuuccaaaccag

SEQ ID NO: 485366 - RNA, 32 nt, Human
uacaacgcaccgucuagccacaggagaacuaa

SEQ ID NO: 485367 - RNA, 32 nt, Human
uacaacgcuggagccgcuuccccagcucagag

SEQ ID NO: 485368 - RNA, 32 nt, Human
uacaacguccaggagaaggccauccagcgcuu

SEQ ID NO: 485369 - RNA, 32 nt, Human
uacaacguggagaagaaaagauauacuuacua

SEQ ID NO: 485370 - RNA, 32 nt, Human
uacaacuacauacauuuuugaagaccaaaugg

SEQ ID NO: 485371 - RNA, 32 nt, Human
uacaacucaaaauacaccagcucauuuggcug

SEQ ID NO: 485372 - RNA, 32 nt, Human
uacaacucaagcauuccucccaccuuggucuc

SEQ ID NO: 485373 - RNA, 32 nt, Human
uacaacucgaggagaacccagaccaggacagg

SEQ ID NO: 485374 - RNA, 32 nt, Human
uacaacugaccauuuaaaauugaacaaguuua

SEQ ID NO: 485375 - RNA, 32 nt, Human
uacaacugaguucugucuggcccagaaccagc

SEQ ID NO: 485376 - RNA, 32 nt, Human
uacaacugaugugcccuuagagcgcacuaguu

SEQ ID NO: 485377 - RNA, 32 nt, Human
uacaacugauugcaacagacuguugaguuaug

SEQ ID NO: 485378 - RNA, 32 nt, Human
uacaacuuccagauuugagcugccuggaggga

SEQ ID NO: 485379 - RNA, 32 nt, Human
uacaacuucuaucacccaacagugccaauggc

SEQ ID NO: 485380 - RNA, 32 nt, Human
uacaacuugcauuuacagaugguaauuccuag

SEQ ID NO: 485381 - RNA, 32 nt, Human
uacaacuugugggugaguuccaaagagcuugg

SEQ ID NO: 485382 - RNA, 32 nt, Human
uacaacuuugagcaaauagcagugauguuuua

SEQ ID NO: 485383 - RNA, 32 nt, Human
uacaagaaaggcaccugcaaggacugcaggac

SEQ ID NO: 485384 - RNA, 32 nt, Human
uacaagaaaggcaccugcaaggacugcucugu

SEQ ID NO: 485385 - RNA, 32 nt, Human
uacaagaaaggccugaauggaggacuuuucug

SEQ ID NO: 485386 - RNA, 32 nt, Human
uacaagaacaaugacaccacacucugccugaa

SEQ ID NO: 485387 - RNA, 32 nt, Human
uacaagaacuguauugccacacaugucagcua

SEQ ID NO: 485388 - RNA, 32 nt, Human
uacaagaagaagaaagaaagaaaucccacaga

SEQ ID NO: 485389 - RNA, 32 nt, Human
uacaagaagagcuuccuuuaaaguuccuauuu

SEQ ID NO: 485390 - RNA, 32 nt, Human
uacaagaagcagcugaggaaagggagacaagg

SEQ ID NO: 485391 - RNA, 32 nt, Human
uacaagaaguccccagcagcacacacacauuu

SEQ ID NO: 485392 - RNA, 32 nt, Human
uacaagaauaccacauuuugaaacccagaaag

SEQ ID NO: 485393 - RNA, 32 nt, Human
uacaagaaugagccaccgugccuggccuauuu

SEQ ID NO: 485394 - RNA, 21 nt, Human
uacaagacagcccagugucau

SEQ ID NO: 485395 - RNA, 32 nt, Human
uacaagacagcucuagagaagcucccucugcu

SEQ ID NO: 485396 - RNA, 32 nt, Human
uacaagaccagaaaugccacggccgcguccug

SEQ ID NO: 485397 - RNA, 32 nt, Human
uacaagacuauguaacacaaccugcacuucuc

SEQ ID NO: 485398 - RNA, 32 nt, Human
uacaagacuccuucagccaacaugaugguacu

SEQ ID NO: 485399 - RNA, 32 nt, Human
uacaagacuuggauacauuacagcagacaugg

SEQ ID NO: 485400 - RNA, 32 nt, Human
uacaagagaacagcugguugugauggcaggag

SEQ ID NO: 485401 - RNA, 32 nt, Human
uacaagagaagaggaagggagcagagagcacu

SEQ ID NO: 485402 - RNA, 32 nt, Human
uacaagagcccagcuagcugauauuuuuaauc

SEQ ID NO: 485403 - RNA, 32 nt, Human
uacaagaggaaucaccugguuucccaaccaau

SEQ ID NO: 485404 - RNA, 32 nt, Human
uacaagagggccuggggcacgauguggucagc

SEQ ID NO: 485405 - RNA, 32 nt, Human
uacaagaguaguuucuuacacaguuuaacaca

SEQ ID NO: 485406 - RNA, 20 nt, Human
uacaagagugcgccaccacg

SEQ ID NO: 485407 - RNA, 32 nt, Human
uacaagaguuaaaacuuccugucccauuuagu

SEQ ID NO: 485408 - RNA, 32 nt, Human
uacaagaguuugcagugcaggcacugaugaac

SEQ ID NO: 485409 - RNA, 32 nt, Human
uacaagauaaagaagucugugccugaaugaau

SEQ ID NO: 485410 - RNA, 32 nt, Human
uacaagaucccugaacuuaugccuccuaacug

SEQ ID NO: 485411 - RNA, 32 nt, Human
uacaagaucuacaaugcagcugaaaagcaacc

SEQ ID NO: 485412 - RNA, 32 nt, Human
uacaagaugauaccuuaauuacacucccgcaa

SEQ ID NO: 485413 - RNA, 32 nt, Human
uacaagaugcugcggccauuugcacauucuua

SEQ ID NO: 485414 - RNA, 32 nt, Human
uacaagcaagcaggccaggcagcugugggcaa

SEQ ID NO: 485415 - RNA, 32 nt, Human
uacaagcacaauucucccaguuaaggggcugg

SEQ ID NO: 485416 - RNA, 23 nt, Human
uacaagcacaugccaccaugccc

SEQ ID NO: 485417 - RNA, 32 nt, Human
uacaagcacaugccaccaugcccagcuaauuu

SEQ ID NO: 485418 - RNA, 32 nt, Human
uacaagcaccagccaccaugccuggcuaauuu

SEQ ID NO: 485419 - RNA, 19 nt, Human
uacaagcacccaccaccac

SEQ ID NO: 485420 - RNA, 32 nt, Human
uacaagcaccucaggugucugaaauaucucaa

SEQ ID NO: 485421 - RNA, 32 nt, Human
uacaagcacgacugaggcaacggcacgaagac

SEQ ID NO: 485422 - RNA, 32 nt, Human
uacaagcagagcucuuagcucagucccguggg

SEQ ID NO: 485423 - RNA, 20 nt, Human
uacaagcauaugccaccacg

SEQ ID NO: 485424 - RNA, 32 nt, Human
uacaagcaucuucucuggcguggauccgcugc

SEQ ID NO: 485425 - RNA, 32 nt, Human
uacaagcaugagccaccacaccuggccuaugu

SEQ ID NO: 485426 - RNA, 32 nt, Human
uacaagcaugagccaccacaccuggccuguua

SEQ ID NO: 485427 - RNA, 32 nt, Human
uacaagcaugagccaccacgccugagcuuucu

SEQ ID NO: 485428 - RNA, 20 nt, Human
uacaagcaugagccaccaug

SEQ ID NO: 485429 - RNA, 32 nt, Human
uacaagcaugagccaccgcaccugaccaaauu

SEQ ID NO: 485430 - RNA, 32 nt, Human
uacaagcaugagccacggcagccagcccuucu

SEQ ID NO: 485431 - RNA, 32 nt, Human
uacaagcaugagccacugugcccagccuguuc

SEQ ID NO: 485432 - RNA, 32 nt, Human
uacaagcaugagccacugugcccagccuucuu

SEQ ID NO: 485433 - RNA, 32 nt, Human
uacaagcaugagccacugugccugacccucaa

SEQ ID NO: 485434 - RNA, 20 nt, Human
uacaagcaugcaccaccaug

SEQ ID NO: 485435 - RNA, 32 nt, Human
uacaagcaugcaccaccaugcccagcuaauuu

SEQ ID NO: 485436 - RNA, 20 nt, Human
uacaagcaugcgccaccaug

SEQ ID NO: 485437 - RNA, 32 nt, Human
uacaagcaugcgccaccaugcccagcuuauuu

SEQ ID NO: 485438 - RNA, 32 nt, Human
uacaagcaugggccaccgcacccggccuauuu

SEQ ID NO: 485439 - RNA, 32 nt, Human
uacaagcaugugccaccauggccagcuaagug

SEQ ID NO: 485440 - RNA, 32 nt, Human
uacaagccacaggccccuuccccagccucagu

SEQ ID NO: 485441 - RNA, 32 nt, Human
uacaagccaccauaugcacagacuauacagcg

SEQ ID NO: 485442 - RNA, 32 nt, Human
uacaagccaccauaugcacagacuauacagug

SEQ ID NO: 485443 - RNA, 32 nt, Human
uacaagccagcugccauguugugagcacauac

SEQ ID NO: 485444 - RNA, 32 nt, Human
uacaagcccugggguuugaagcugacuuuaua

SEQ ID NO: 485445 - RNA, 32 nt, Human
uacaagccugagccaccgugcccggcccugaa

SEQ ID NO: 485446 - RNA, 19 nt, Human
uacaagcggcugccaccac

SEQ ID NO: 485447 - RNA, 20 nt, Human
uacaagcgugaaccaccaug

SEQ ID NO: 485448 - RNA, 32 nt, Human
uacaagcgugaaccacccugcccagccagaaa

SEQ ID NO: 485449 - RNA, 32 nt, Human
uacaagcgugagccaccacacuaggccuuuag

SEQ ID NO: 485450 - RNA, 32 nt, Human
uacaagcgugagccaccauuccuggacccucg

SEQ ID NO: 485451 - RNA, 32 nt, Human
uacaagcgugagccaccgaccccugccgagga

SEQ ID NO: 485452 - RNA, 19 nt, Human
uacaagcgugagccaccgc

SEQ ID NO: 485453 - RNA, 32 nt, Human
uacaagcgugagccaccgcacccugccugaau

SEQ ID NO: 485454 - RNA, 20 nt, Human
uacaagcgugagccaccgcg

SEQ ID NO: 485455 - RNA, 32 nt, Human
uacaagcgugagccaccgggccuggccugcau

SEQ ID NO: 485456 - RNA, 32 nt, Human
uacaagcgugagccaccgugccuggccugcca

SEQ ID NO: 485457 - RNA, 32 nt, Human
uacaagcgugagccacugcacccagccuguaa

SEQ ID NO: 485458 - RNA, 32 nt, Human
uacaagcgugagccacugcaccgggccacaga

SEQ ID NO: 485459 - RNA, 32 nt, Human
uacaagcgugagccacugugccuggcccuuuu

SEQ ID NO: 485460 - RNA, 32 nt, Human
uacaagcgugagccacugugcugggcccgagg

SEQ ID NO: 485461 - RNA, 32 nt, Human
uacaagcgugagcuaaccuugcccagccucug

SEQ ID NO: 485462 - RNA, 20 nt, Human
uacaagcgugcgccaccaug

SEQ ID NO: 485463 - RNA, 32 nt, Human
uacaagcgugcgccaccaugccuggcuaauuu

SEQ ID NO: 485464 - RNA, 19 nt, Human
uacaagcgugugcccccac

SEQ ID NO: 485465 - RNA, 32 nt, Human
uacaagcuacagaauauauacaugcaucuaug

SEQ ID NO: 485466 - RNA, 32 nt, Human
uacaagcucucaucauaugcaaauucucagaa

SEQ ID NO: 485467 - RNA, 32 nt, Human
uacaagcucucucucuuugccugcugccaucc

SEQ ID NO: 485468 - RNA, 32 nt, Human
uacaagcucugccucccgaguucaagugauuc

SEQ ID NO: 485469 - RNA, 32 nt, Human
uacaagcugcauguccugacccucuuugaauu

SEQ ID NO: 485470 - RNA, 32 nt, Human
uacaagcugggaacuucuaaacacuucauucu

SEQ ID NO: 485471 - RNA, 32 nt, Human
uacaagcuugagcuaccgcgcccagccaacac

SEQ ID NO: 485472 - RNA, 32 nt, Human
uacaagcuugccaaagauagaauauggaucgc

SEQ ID NO: 485473 - RNA, 32 nt, Human
uacaagcuugugcuguaggcacaugccuucug

SEQ ID NO: 485474 - RNA, 32 nt, Human
uacaaggaaaguuaaguaaaugucuuuacauu

SEQ ID NO: 485475 - RNA, 32 nt, Human
uacaaggaaaugcaguaaagccagggaauuua

SEQ ID NO: 485476 - RNA, 32 nt, Human
uacaaggaagcauacauagugggucaaggaga

SEQ ID NO: 485477 - RNA, 32 nt, Human
uacaaggaagggacacagggcuuaaaaugucc

SEQ ID NO: 485478 - RNA, 32 nt, Human
uacaaggacauggugagucuauuuuuaaugca

SEQ ID NO: 485479 - RNA, 32 nt, Human
uacaaggagggugguuaaucugcuauaucaaa

SEQ ID NO: 485480 - RNA, 32 nt, Human
uacaaggaguucaagcugacuguggagaacau

SEQ ID NO: 485481 - RNA, 32 nt, Human
uacaaggaucagagcugcuguaaugaaccuca

SEQ ID NO: 485482 - RNA, 19 nt, Human
uacaaggcacaccaccaug

SEQ ID NO: 485483 - RNA, 32 nt, Human
uacaaggcggagaaccuggagcagggaugaag

SEQ ID NO: 485484 - RNA, 32 nt, Human
uacaaggcugugguagaaucauaccccaugga

SEQ ID NO: 485485 - RNA, 32 nt, Human
uacaagggaggaacaccugaucuuccagaaaa

SEQ ID NO: 485486 - RNA, 32 nt, Human
uacaagggcaacagguaugguccuccgauauu

SEQ ID NO: 485487 - RNA, 32 nt, Human
uacaagggccagccuggccaacauggugaaac

SEQ ID NO: 485488 - RNA, 32 nt, Human
uacaagggugagccaccaugcccggccguaaa

SEQ ID NO: 485489 - RNA, 32 nt, Human
uacaagguacuaggaaggaaguuucucuucua

SEQ ID NO: 485490 - RNA, 32 nt, Human
uacaagguucuugaaugaaaauaaucuguuga

SEQ ID NO: 485491 - RNA, 20 nt, Human
uacaaguacacacuaccacg

SEQ ID NO: 485492 - RNA, 32 nt, Human
uacaaguaggaacuuccuuuccuucacuuccc

SEQ ID NO: 485493 - RNA, 32 nt, Human
uacaaguagggagcagggaaagaagagugagc

SEQ ID NO: 485494 - RNA, 23 nt, Human
uacaaguauaaggauuuuggcca

SEQ ID NO: 485495 - RNA, 32 nt, Human
uacaaguaugagccacugcauccggcccaucu

SEQ ID NO: 485496 - RNA, 32 nt, Human
uacaagucacccagccagaaggaaugcacagu

SEQ ID NO: 485497 - RNA, 32 nt, Human
uacaagucgugcuggcuaauuuuuaguuugua

SEQ ID NO: 485498 - RNA, 32 nt, Human
uacaagugaagaaacaaggaggcacuuccugu

SEQ ID NO: 485499 - RNA, 32 nt, Human
uacaagugaaugaagaaugaaagggaaagaau

SEQ ID NO: 485500 - RNA, 32 nt, Human
uacaagugacugccacuaugcccagcuaauuu

SEQ ID NO: 485501 - RNA, 32 nt, Human
uacaagugcacgccaccaugccuggcuaauuu

SEQ ID NO: 485502 - RNA, 20 nt, Human
uacaagugcccaccaccaug

SEQ ID NO: 485503 - RNA, 32 nt, Human
uacaagugcccaccaccaugcccagcuaauuu

SEQ ID NO: 485504 - RNA, 29 nt, Human
uacaagugccugcuaucccucucccacuc

SEQ ID NO: 485505 - RNA, 19 nt, Human
uacaagugcgcacuaccac

SEQ ID NO: 485506 - RNA, 32 nt, Human
uacaagugcuucuugaccccuuccucaauguu

SEQ ID NO: 485507 - RNA, 32 nt, Human
uacaaguggcuaagccaacaacagaauaaaua

SEQ ID NO: 485508 - RNA, 19 nt, Human
uacaagugugagccaccac

SEQ ID NO: 485509 - RNA, 32 nt, Human
uacaagugugagccaccacacccagccuaaug

SEQ ID NO: 485510 - RNA, 32 nt, Human
uacaagugugagccaccacaccuggccuggaa

SEQ ID NO: 485511 - RNA, 32 nt, Human
uacaagugugagccaccacaccuggcuccaga

SEQ ID NO: 485512 - RNA, 20 nt, Human
uacaagugugagccaccacg

SEQ ID NO: 485513 - RNA, 32 nt, Human
uacaagugugagccaccacgccaagccugacu

SEQ ID NO: 485514 - RNA, 32 nt, Human
uacaagugugagccaccgcgcccggcccaguu

SEQ ID NO: 485515 - RNA, 32 nt, Human
uacaagugugagccaccgcgccuggcccaagc

SEQ ID NO: 485516 - RNA, 32 nt, Human
uacaagugugagccacugcgacaggccucuuu

SEQ ID NO: 485517 - RNA, 32 nt, Human
uacaagugugagccacugugcccagcuuuuga

SEQ ID NO: 485518 - RNA, 20 nt, Human
uacaagugugcaccaccaug

SEQ ID NO: 485519 - RNA, 32 nt, Human
uacaagugugcaccaccaugccuggcuaauuu

SEQ ID NO: 485520 - RNA, 32 nt, Human
uacaaguguguaccaccaugccuggcugaaca

SEQ ID NO: 485521 - RNA, 32 nt, Human
uacaagugugugccaccaugccucacuaauuu

SEQ ID NO: 485522 - RNA, 21 nt, Human
uacaaguuccugaauguccca

SEQ ID NO: 485523 - RNA, 21 nt, Human
uacaaguucucugacuguguu

SEQ ID NO: 485524 - RNA, 32 nt, Human
uacaaguucuuuccucuucauuugaugccgug

SEQ ID NO: 485525 - RNA, 32 nt, Human
uacaaguugauccaaaggauaaggcugugacu

SEQ ID NO: 485526 - RNA, 32 nt, Human
uacaauaaauacugcuuuccucuaaaaagauc

SEQ ID NO: 485527 - RNA, 32 nt, Human
uacaauaaauuagcugggcaugguggugggug

SEQ ID NO: 485528 - RNA, 32 nt, Human
uacaauaauggaagggaaagaaagaagacaaa

SEQ ID NO: 485529 - RNA, 32 nt, Human
uacaauagaaaccaaaccaaaugggcacccuc

SEQ ID NO: 485530 - RNA, 32 nt, Human
uacaauagaguggaagucuguaguaguuaaua

SEQ ID NO: 485531 - RNA, 32 nt, Human
uacaauauacuuuuuauugagcacuuugcugc

SEQ ID NO: 485532 - RNA, 23 nt, Human
uacaauauguuguaaaauguaga

SEQ ID NO: 485533 - RNA, 32 nt, Human
uacaauauucaggaagcacauuuauucagauu

SEQ ID NO: 485534 - RNA, 22 nt, Human
uacaauauuuuaaagguguaga

SEQ ID NO: 485535 - RNA, 20 nt, Human
uacaaucaaagaagaggaaa

SEQ ID NO: 485536 - RNA, 24 nt, Human
uacaaucaaaggaacuucaggaaa

SEQ ID NO: 485537 - RNA, 32 nt, Human
uacaaucaccucacuccagcauggugucuguu

SEQ ID NO: 485538 - RNA, 32 nt, Human
uacaaucagaacuuggagauuuuaagaaaagg

SEQ ID NO: 485539 - RNA, 32 nt, Human
uacaaucaggaugacaaucaccaggaauuggg

SEQ ID NO: 485540 - RNA, 32 nt, Human
uacaaucaugcuauucuuacacuugcuauuuu

SEQ ID NO: 485541 - RNA, 32 nt, Human
uacaauccaagugcauucaacaagugauaugg

SEQ ID NO: 485542 - RNA, 32 nt, Human
uacaaucuaaaaagcacccaauggaguauaaa

SEQ ID NO: 485543 - RNA, 21 nt, Human
uacaaucugaaacucaggaaa

SEQ ID NO: 485544 - RNA, 19 nt, Human
uacaaucugugaccaccac

SEQ ID NO: 485545 - RNA, 32 nt, Human
uacaaugaaaaugcagugcucagucccaaaaa

SEQ ID NO: 485546 - RNA, 32 nt, Human
uacaaugaaaggcuucucagcaugauacccca

SEQ ID NO: 485547 - RNA, 32 nt, Human
uacaaugaaauggcaggaugccaauaugagau

SEQ ID NO: 485548 - RNA, 32 nt, Human
uacaaugagacaccaucucacaccagucaaaa

SEQ ID NO: 485549 - RNA, 32 nt, Human
uacaaugagcggugccugggggcuggaggaga

SEQ ID NO: 485550 - RNA, 32 nt, Human
uacaaugaucugcuuuagugagaggacaauuu

SEQ ID NO: 485551 - RNA, 32 nt, Human
uacaaugauuuucucccuucuuuuacaguagc

SEQ ID NO: 485552 - RNA, 32 nt, Human
uacaaugcagucaggcuggaccagagaauucc

SEQ ID NO: 485553 - RNA, 32 nt, Human
uacaaugccaggaagaugaaugugcguuaaug

SEQ ID NO: 485554 - RNA, 32 nt, Human
uacaaugcgugguuuccagaccugcagcuugu

SEQ ID NO: 485555 - RNA, 31 nt, Human
uacaauggcaggaucucagcucaccacaacc

SEQ ID NO: 485556 - RNA, 31 nt, Human
uacaauggcaugaucucagcucacugcaacc

SEQ ID NO: 485557 - RNA, 31 nt, Human
uacaauggcgagaucucagcucacggcaacc

SEQ ID NO: 485558 - RNA, 31 nt, Human
uacaauggcgcgaucucagcucaccgcaacc

SEQ ID NO: 485559 - RNA, 31 nt, Human
uacaauggcgugaucucagcucacucugcaa

SEQ ID NO: 485560 - RNA, 32 nt, Human
uacaauggcucacgccuguaauccuaacacuu

SEQ ID NO: 485561 - RNA, 32 nt, Human
uacaauggguguccacaugcacguguauaugu

SEQ ID NO: 485562 - RNA, 31 nt, Human
uacaauggugcgaucucagcucagugcaacc

SEQ ID NO: 485563 - RNA, 32 nt, Human
uacaauguaaaugacaaaacauaauuccugag

SEQ ID NO: 485564 - RNA, 32 nt, Human
uacaauguaagugcuuuuaauggcuguuuucc

SEQ ID NO: 485565 - RNA, 32 nt, Human
uacaaugucccauuuucuggauuugucugauc

SEQ ID NO: 485566 - RNA, 32 nt, Human
uacaauuacugcccuaaaaugucucuggcaau

SEQ ID NO: 485567 - RNA, 32 nt, Human
uacaauuacuuaaauguaucacagacugucac

SEQ ID NO: 485568 - RNA, 32 nt, Human
uacaauuaggcagaggucaaaaagugacaaug

SEQ ID NO: 485569 - RNA, 32 nt, Human
uacaauuaucaagcagagaccaccucagauua

SEQ ID NO: 485570 - RNA, 32 nt, Human
uacaauucagacaaacugcuuucuccugucca

SEQ ID NO: 485571 - RNA, 32 nt, Human
uacaauucaguuauuucuguaguuuguaaacu

SEQ ID NO: 485572 - RNA, 32 nt, Human
uacaauucaguuucagcucuggauuacuucag

SEQ ID NO: 485573 - RNA, 32 nt, Human
uacaauugaugugguuuucauuucucauguuu

SEQ ID NO: 485574 - RNA, 20 nt, Human
uacaauugugagccaccacg

SEQ ID NO: 485575 - RNA, 32 nt, Human
uacaauugugagccaccacguggagcuggaag

SEQ ID NO: 485576 - RNA, 32 nt, Human
uacaauugugagccaccaugccaggcucauug

SEQ ID NO: 485577 - RNA, 32 nt, Human
uacaauuguuaaaaauacagacaugcacauuc

SEQ ID NO: 485578 - RNA, 23 nt, Human
uacaauuguugacuuuucuuuua

SEQ ID NO: 485579 - RNA, 30 nt, Human
uacaauuuagcuuaaucagaaagccucucc

SEQ ID NO: 485580 - RNA, 31 nt, Human
uacaauuucaauaaauuuggggaaaacaaau

SEQ ID NO: 485581 - RNA, 32 nt, Human
uacaauuuuaagaggggagggaagggaaaguu

SEQ ID NO: 485582 - RNA, 32 nt, Human
uacacaaaaagcuuaugaagauguuccuuggg

SEQ ID NO: 485583 - RNA, 32 nt, Human
uacacaaaauuagcugggcgugguggugggca

SEQ ID NO: 485584 - RNA, 32 nt, Human
uacacaaaauuuuauuuaaagagaacacuuag

SEQ ID NO: 485585 - RNA, 32 nt, Human
uacacaaagaacacucuauauaacuguguuaa

SEQ ID NO: 485586 - RNA, 32 nt, Human
uacacaaagaaggaggaggaaaaggugagaaa

SEQ ID NO: 485587 - RNA, 32 nt, Human
uacacaaagaggaaguggggaaaaaggcaaaa

SEQ ID NO: 485588 - RNA, 32 nt, Human
uacacaaaggccagggagccuuuggcuuggac

SEQ ID NO: 485589 - RNA, 32 nt, Human
uacacaaccaacaaaaccgcaaaauauuccca

SEQ ID NO: 485590 - RNA, 32 nt, Human
uacacaagucagaggaaggaaggguccugaaa

SEQ ID NO: 485591 - RNA, 32 nt, Human
uacacaauaaagagaugagacacugcccccaa

SEQ ID NO: 485592 - RNA, 32 nt, Human
uacacaauacacuugaacuguggaauaaagca

SEQ ID NO: 485593 - RNA, 32 nt, Human
uacacaauauaaaauaugaaacucaauaauaa

SEQ ID NO: 485594 - RNA, 32 nt, Human
uacacaaucaacuucaaccccaauagaagaga

SEQ ID NO: 485595 - RNA, 32 nt, Human
uacacaaucccccauccucaaguccccaccgc

SEQ ID NO: 485596 - RNA, 32 nt, Human
uacacaaugaaaacacaucuguuggggugauc

SEQ ID NO: 485597 - RNA, 32 nt, Human
uacacaaugcugcaggugcuucccaggggcca

SEQ ID NO: 485598 - RNA, 32 nt, Human
uacacacaagggccaggcuccauucucccucc

SEQ ID NO: 485599 - RNA, 32 nt, Human
uacacacacauccauacacucugacaaucucc

SEQ ID NO: 485600 - RNA, 32 nt, Human
uacacacacaugcaugcaugcacacacgagca

SEQ ID NO: 485601 - RNA, 32 nt, Human
uacacacacuucaggugguuugugcuucaaag

SEQ ID NO: 485602 - RNA, 20 nt, Human
uacacacagauguacacaca

SEQ ID NO: 485603 - RNA, 32 nt, Human
uacacacagcacauauaugcacaaaauagccu

SEQ ID NO: 485604 - RNA, 32 nt, Human
uacacacaggaucccugcugggcaccaacagc

SEQ ID NO: 485605 - RNA, 32 nt, Human
uacacacagucuggaaaagcagccugggcuuc

SEQ ID NO: 485606 - RNA, 16 nt, Human
uacacacauauacaca

SEQ ID NO: 485607 - RNA, 18 nt, Human
uacacacauauacacaca

SEQ ID NO: 485608 - RNA, 32 nt, Human
uacacacauauguaggauguaugcauguguga

SEQ ID NO: 485609 - RNA, 32 nt, Human
uacacacaucuccaugcagaagcacaacuggg

SEQ ID NO: 485610 - RNA, 32 nt, Human
uacacacaugcacacacauauacacacaugug

SEQ ID NO: 485611 - RNA, 32 nt, Human
uacacacaugcacacacauaugcacacacaug

SEQ ID NO: 485612 - RNA, 32 nt, Human
uacacacaugguguacacccacugugacauua

SEQ ID NO: 485613 - RNA, 32 nt, Human
uacacacaugguguacacccacuuugauauua

SEQ ID NO: 485614 - RNA, 23 nt, Human
uacacacauguauaauauauaca

SEQ ID NO: 485615 - RNA, 32 nt, Human
uacacacaugugcacacacccucaugcauggg

SEQ ID NO: 485616 - RNA, 32 nt, Human
uacacaccaacacacauaugcacacucacacu

SEQ ID NO: 485617 - RNA, 32 nt, Human
uacacacccacauucccuuuuuaucaugacau

SEQ ID NO: 485618 - RNA, 32 nt, Human
uacacaccuaguucauaauccucauaauuuau

SEQ ID NO: 485619 - RNA, 32 nt, Human
uacacacgugugugugcgcguguguauaaaac

SEQ ID NO: 485620 - RNA, 32 nt, Human
uacacacguuaacagaaaucaucugauccccu

SEQ ID NO: 485621 - RNA, 32 nt, Human
uacacacucagccccuucuguacagcaccucu

SEQ ID NO: 485622 - RNA, 32 nt, Human
uacacacucugagucucugaaugaagcugaag

SEQ ID NO: 485623 - RNA, 32 nt, Human
uacacacugaguaguauguauuucauggauga

SEQ ID NO: 485624 - RNA, 32 nt, Human
uacacacugcaagcuucuccuuggcuuguagc

SEQ ID NO: 485625 - RNA, 32 nt, Human
uacacacugcagcagagcuuguagcuggacag

SEQ ID NO: 485626 - RNA, 32 nt, Human
uacacacuugcauacacauacacaacaugugu

SEQ ID NO: 485627 - RNA, 32 nt, Human
uacacagaaauccuaacauuauauucccaaau

SEQ ID NO: 485628 - RNA, 32 nt, Human
uacacagaauggaguccucuagccuaaagaua

SEQ ID NO: 485629 - RNA, 32 nt, Human
uacacagagcgcugagagaguggggcagugug

SEQ ID NO: 485630 - RNA, 32 nt, Human
uacacagaggcgggucuauaacaggcaaucaa

SEQ ID NO: 485631 - RNA, 32 nt, Human
uacacagaugcacacacacaagcacacaugca

SEQ ID NO: 485632 - RNA, 32 nt, Human
uacacagauguucacccaaccacaucccacuc

SEQ ID NO: 485633 - RNA, 32 nt, Human
uacacagcacaucugcagucauucaggagguc

SEQ ID NO: 485634 - RNA, 32 nt, Human
uacacagcagucuucagcccccuggaaggagg

SEQ ID NO: 485635 - RNA, 32 nt, Human
uacacagccugcaggccccggggcagccucca

SEQ ID NO: 485636 - RNA, 32 nt, Human
uacacaggacuucacuccagaguuaccauuau

SEQ ID NO: 485637 - RNA, 32 nt, Human
uacacaggcaccaggccagccugccugaggac

SEQ ID NO: 485638 - RNA, 32 nt, Human
uacacaggcagcucugcagggaagucugugac

SEQ ID NO: 485639 - RNA, 32 nt, Human
uacacagggaacacuucuugggcagccaggug

SEQ ID NO: 485640 - RNA, 32 nt, Human
uacacagggcugcugucacuucccagggccca

SEQ ID NO: 485641 - RNA, 32 nt, Human
uacacaggugcuggucgauguccacuuucugc

SEQ ID NO: 485642 - RNA, 32 nt, Human
uacacaggugggguagagagugggucagcagc

SEQ ID NO: 485643 - RNA, 32 nt, Human
uacacaguauucacuugucucccuuuaguagu

SEQ ID NO: 485644 - RNA, 32 nt, Human
uacacaguccucucccuauuaauaugggcaca

SEQ ID NO: 485645 - RNA, 32 nt, Human
uacacaguucacucuagcuucuuccaaaauau

SEQ ID NO: 485646 - RNA, 32 nt, Human
uacacaguucauccauucuccaugcagucuuu

SEQ ID NO: 485647 - RNA, 32 nt, Human
uacacaguugcuggcuuugcuccugggcaagg

SEQ ID NO: 485648 - RNA, 32 nt, Human
uacacauacagaauacuuacuauguuccaagc

SEQ ID NO: 485649 - RNA, 32 nt, Human
uacacauacauacacacacaaauacacaaucu

SEQ ID NO: 485650 - RNA, 32 nt, Human
uacacauacauacacacauacaaaaccuuuaa

SEQ ID NO: 485651 - RNA, 32 nt, Human
uacacauagccaugcagcaaacuacaguuuuu

SEQ ID NO: 485652 - RNA, 32 nt, Human
uacacauccagaugccagcccagcuaccacag

SEQ ID NO: 485653 - RNA, 32 nt, Human
uacacaucucagacccuuuagccaaacccuug

SEQ ID NO: 485654 - RNA, 32 nt, Human
uacacaugaguuucccaaauguguaccuggac

SEQ ID NO: 485655 - RNA, 22 nt, Human
uacacaugcacacccucucuga

SEQ ID NO: 485656 - RNA, 24 nt, Human
uacacaugcacauaugugccuugg

SEQ ID NO: 485657 - RNA, 32 nt, Human
uacacaugcacgcuugcacacaugcacacaga

SEQ ID NO: 485658 - RNA, 32 nt, Human
uacacaugcaugcacacauacacaggcauaca

SEQ ID NO: 485659 - RNA, 32 nt, Human
uacacaugcccaggcagcaccucaggcccuuu

SEQ ID NO: 485660 - RNA, 32 nt, Human
uacacaugcuugcacacaugcacacacaguga

SEQ ID NO: 485661 - RNA, 32 nt, Human
uacacauggaaagaggguuuaacagacccucu

SEQ ID NO: 485662 - RNA, 32 nt, Human
uacacaugggagcugccugccugcugcugcug

SEQ ID NO: 485663 - RNA, 32 nt, Human
uacacaugguauagcuugcuuggcguuugacu

SEQ ID NO: 485664 - RNA, 30 nt, Human
uacacaugucccugcaacuuuacccuguac

SEQ ID NO: 485665 - RNA, 31 nt, Human
uacacauguggcuugucuugccaauagacuc

SEQ ID NO: 485666 - RNA, 18 nt, Human
uacacauuccaucuuaca

SEQ ID NO: 485667 - RNA, 32 nt, Human
uacacauuugacuuccuauuggcccuuugaaa

SEQ ID NO: 485668 - RNA, 32 nt, Human
uacacauuuugcacuugggaggagggaggcua

SEQ ID NO: 485669 - RNA, 32 nt, Human
uacaccaacauagcuacaaucaaacaggccug

SEQ ID NO: 485670 - RNA, 32 nt, Human
uacaccaaccugugccccaggggcuucaagag

SEQ ID NO: 485671 - RNA, 32 nt, Human
uacaccacaaauauauccuguggcccuuucag

SEQ ID NO: 485672 - RNA, 32 nt, Human
uacaccacacacaccgucaucacauuuucaca

SEQ ID NO: 485673 - RNA, 32 nt, Human
uacaccacacccaggguggaaaccacaguugc

SEQ ID NO: 485674 - RNA, 32 nt, Human
uacaccacuacacuccagccugggcaacagag

SEQ ID NO: 485675 - RNA, 32 nt, Human
uacaccacugagggaaucccugugcugaucgu

SEQ ID NO: 485676 - RNA, 32 nt, Human
uacaccacugcacuccagucuggaugacaaag

SEQ ID NO: 485677 - RNA, 32 nt, Human
uacaccacugcacuucagucugugugacugag

SEQ ID NO: 485678 - RNA, 32 nt, Human
uacaccacugcacuugagccugggcagcagag

SEQ ID NO: 485679 - RNA, 32 nt, Human
uacaccagccaugcccgcggcaccacaugugu

SEQ ID NO: 485680 - RNA, 32 nt, Human
uacaccagccugggugacagagcaagacucuu

SEQ ID NO: 485681 - RNA, 32 nt, Human
uacaccagcuccaaguaacuugucccugcaac

SEQ ID NO: 485682 - RNA, 32 nt, Human
uacaccaggcugggugcgguggcucacgccug

SEQ ID NO: 485683 - RNA, 32 nt, Human
uacaccauccaucaccaacagaaacaugguua

SEQ ID NO: 485684 - RNA, 32 nt, Human
uacaccauggaauacuaugcagccauaaaaag

SEQ ID NO: 485685 - RNA, 32 nt, Human
uacaccauggaauacuaugcagccauaaagaa

SEQ ID NO: 485686 - RNA, 32 nt, Human
uacaccauggaauacuaugcagccauagaaaa

SEQ ID NO: 485687 - RNA, 32 nt, Human
uacaccauggaauacuaugcagccauuaagaa

SEQ ID NO: 485688 - RNA, 32 nt, Human
uacaccauugcauuccagccuaggcaacagag

SEQ ID NO: 485689 - RNA, 32 nt, Human
uacaccauugcauuccagccugggcaacagag

SEQ ID NO: 485690 - RNA, 32 nt, Human
uacacccaagccuugaugggauucugcugcga

SEQ ID NO: 485691 - RNA, 32 nt, Human
uacacccaagcuguuuuagcagcuccaaccac

SEQ ID NO: 485692 - RNA, 32 nt, Human
uacacccaagugccuaaaagaucucauuguaa

SEQ ID NO: 485693 - RNA, 32 nt, Human
uacacccaccgaggcauggggcucccugggcu

SEQ ID NO: 485694 - RNA, 32 nt, Human
uacacccagcacuuuggaaggcugaggaagga

SEQ ID NO: 485695 - RNA, 32 nt, Human
uacacccagcagaggacuccagccuucucggg

SEQ ID NO: 485696 - RNA, 32 nt, Human
uacacccagccuggcccagggccggcuuugcc

SEQ ID NO: 485697 - RNA, 32 nt, Human
uacacccaguaacagugguuacccacagugca

SEQ ID NO: 485698 - RNA, 32 nt, Human
uacaccccagcaaccauguccaagggaccugc

SEQ ID NO: 485699 - RNA, 32 nt, Human
uacaccccaucuuuaacuccacagaccaagac

SEQ ID NO: 485700 - RNA, 32 nt, Human
uacaccccaucuuugacucaguuccccacacc

SEQ ID NO: 485701 - RNA, 32 nt, Human
uacacccccacgcaccagaagggaggugccag

SEQ ID NO: 485702 - RNA, 32 nt, Human
uacacccccugccccgccaaacacacaauugg

SEQ ID NO: 485703 - RNA, 32 nt, Human
uacaccccucccccagcuccuuccccagauuc

SEQ ID NO: 485704 - RNA, 32 nt, Human
uacaccccugcacuccagccugggcggcagag

SEQ ID NO: 485705 - RNA, 32 nt, Human
uacaccccuggacuccagcuugggugacacag

SEQ ID NO: 485706 - RNA, 32 nt, Human
uacacccuccaccuccccauccccuguucucc

SEQ ID NO: 485707 - RNA, 32 nt, Human
uacacccugggggaaauaauuucugugguuuu

SEQ ID NO: 485708 - RNA, 32 nt, Human
uacaccgacccucguguccucccuucauccug

SEQ ID NO: 485709 - RNA, 32 nt, Human
uacaccuaaauacuccuccuuuuguaucauuc

SEQ ID NO: 485710 - RNA, 32 nt, Human
uacaccuacaggcuggaguguaaaauggacac

SEQ ID NO: 485711 - RNA, 32 nt, Human
uacaccuaguuucuaauaagcauuuuauaauu

SEQ ID NO: 485712 - RNA, 32 nt, Human
uacaccucagcaggaacagccuugaguugcuu

SEQ ID NO: 485713 - RNA, 32 nt, Human
uacaccuccaucggauuuuaguuuacaugucu

SEQ ID NO: 485714 - RNA, 32 nt, Human
uacaccucccacccucuccaucaccugcucug

SEQ ID NO: 485715 - RNA, 32 nt, Human
uacaccucuggauucauugucucucacagaug

SEQ ID NO: 485716 - RNA, 32 nt, Human
uacaccugagccacuguggugggucacagugu

SEQ ID NO: 485717 - RNA, 32 nt, Human
uacaccugccaaggcugaaucccugggcccag

SEQ ID NO: 485718 - RNA, 32 nt, Human
uacaccugcccuucucacccauggcccaccca

SEQ ID NO: 485719 - RNA, 32 nt, Human
uacaccugcuccaggaccaaucagugaaaccu

SEQ ID NO: 485720 - RNA, 32 nt, Human
uacaccugcuucugguccuguccacauuuuga

SEQ ID NO: 485721 - RNA, 32 nt, Human
uacaccuguagucccagcuacucaggaggcug

SEQ ID NO: 485722 - RNA, 32 nt, Human
uacaccuguagucccagcuacucaggaggcuu

SEQ ID NO: 485723 - RNA, 32 nt, Human
uacaccuguagucccagcuacucgggaggcug

SEQ ID NO: 485724 - RNA, 32 nt, Human
uacaccuguagucccaggcacuuugggaggcc

SEQ ID NO: 485725 - RNA, 32 nt, Human
uacaccuguggucccagcuacucuggaggcua

SEQ ID NO: 485726 - RNA, 32 nt, Human
uacaccuguggucccagcuauuugggaggcug

SEQ ID NO: 485727 - RNA, 32 nt, Human
uacacgaggaagaagaugcggucagcagucuc

SEQ ID NO: 485728 - RNA, 31 nt, Human
uacacgauggcgcugcugauucaucaguggu

SEQ ID NO: 485729 - RNA, 32 nt, Human
uacacgauguccuggaccggagcugcucccgg

SEQ ID NO: 485730 - RNA, 32 nt, Human
uacacgcacaugcacacauacacaugcaugca

SEQ ID NO: 485731 - RNA, 32 nt, Human
uacacgcgugagccacugugcccagccgaucu

SEQ ID NO: 485732 - RNA, 31 nt, Human
uacacgcuauuuuucugauuguuaagacuuu

SEQ ID NO: 485733 - RNA, 32 nt, Human
uacacgcucauauugugcauauggcagacccu

SEQ ID NO: 485734 - RNA, 32 nt, Human
uacacggccacagcaggcacgcucagagacac

SEQ ID NO: 485735 - RNA, 32 nt, Human
uacacgggaggcagaggugggagaaucgcuug

SEQ ID NO: 485736 - RNA, 32 nt, Human
uacacgugcccaccaccaugcccagcuaauuu

SEQ ID NO: 485737 - RNA, 32 nt, Human
uacacgugccuguagucccagcuacucuauag

SEQ ID NO: 485738 - RNA, 32 nt, Human
uacacguuguaucacugcauugugguaauagc

SEQ ID NO: 485739 - RNA, 32 nt, Human
uacacuaaaacccaacagggcaacuggaaccc

SEQ ID NO: 485740 - RNA, 32 nt, Human
uacacuacacuacacuauacuacacuacagcc

SEQ ID NO: 485741 - RNA, 32 nt, Human
uacacuagagggcugcaggacucuauccaccg

SEQ ID NO: 485742 - RNA, 32 nt, Human
uacacuagcaaguucuacccuccuggucugac

SEQ ID NO: 485743 - RNA, 32 nt, Human
uacacucacaugcacacaugcaugcacacuca

SEQ ID NO: 485744 - RNA, 32 nt, Human
uacacucaggaguucaagaccagucugggcaa

SEQ ID NO: 485745 - RNA, 31 nt, Human
uacacuccaaugucucuuuugcaagaguuuu

SEQ ID NO: 485746 - RNA, 32 nt, Human
uacacuccagccaaagcaacaagagcaaaaac

SEQ ID NO: 485747 - RNA, 32 nt, Human
uacacuccagccugagcaacagagugagaccc

SEQ ID NO: 485748 - RNA, 32 nt, Human
uacacuccagccuggaugacagagugagacuu

SEQ ID NO: 485749 - RNA, 32 nt, Human
uacacuccagccuggccgacagagcaagauuc

SEQ ID NO: 485750 - RNA, 32 nt, Human
uacacuccagccugggcaaaagagugagacuc

SEQ ID NO: 485751 - RNA, 32 nt, Human
uacacuccagccugggcaacacagcaagacuc

SEQ ID NO: 485752 - RNA, 32 nt, Human
uacacuccagccugggcaacagagugagacuc

SEQ ID NO: 485753 - RNA, 32 nt, Human
uacacuccagccugggcaacagcguaagaccc

SEQ ID NO: 485754 - RNA, 32 nt, Human
uacacuccagccugggcaacagugacacucuu

SEQ ID NO: 485755 - RNA, 32 nt, Human
uacacuccagccugggcgaaagggugagacuc

SEQ ID NO: 485756 - RNA, 32 nt, Human
uacacuccagccugggcgacagagugacccug

SEQ ID NO: 485757 - RNA, 32 nt, Human
uacacuccagccugggcgagacggcaagacuc

SEQ ID NO: 485758 - RNA, 32 nt, Human
uacacuccagccugggugacagagugagacuc

SEQ ID NO: 485759 - RNA, 32 nt, Human
uacacuccagccugggugacagagugagaucc

SEQ ID NO: 485760 - RNA, 32 nt, Human
uacacuccagccugggugacagagugagaucu

SEQ ID NO: 485761 - RNA, 32 nt, Human
uacacuccagccuggucaacagagugagacuc

SEQ ID NO: 485762 - RNA, 32 nt, Human
uacacuccagccuggucgacagagugaacucu

SEQ ID NO: 485763 - RNA, 32 nt, Human
uacacuccagccuggugacagagugagacucc

SEQ ID NO: 485764 - RNA, 32 nt, Human
uacacuccuccagggaccccggagcuuccacc

SEQ ID NO: 485765 - RNA, 32 nt, Human
uacacuccuccccagaugaccccacacccuac

SEQ ID NO: 485766 - RNA, 32 nt, Human
uacacuccuuauccuccccaaauuuuaagcuc

SEQ ID NO: 485767 - RNA, 32 nt, Human
uacacucguggacaccuacacacuccauagga

SEQ ID NO: 485768 - RNA, 32 nt, Human
uacacucuagcugaaagagcaagaguacacau

SEQ ID NO: 485769 - RNA, 32 nt, Human
uacacucucuccugccuuuuccaaguuugaug

SEQ ID NO: 485770 - RNA, 32 nt, Human
uacacucugaagggauaucauccuuucaaacg

SEQ ID NO: 485771 - RNA, 32 nt, Human
uacacucuucuccauucccuccacccacuugc

SEQ ID NO: 485772 - RNA, 32 nt, Human
uacacucuugcugucugucuuucuugccuucu

SEQ ID NO: 485773 - RNA, 32 nt, Human
uacacucuuucaggccucuuucugccuuuugu

SEQ ID NO: 485774 - RNA, 32 nt, Human
uacacugagccagcagguucaccagaaagcua

SEQ ID NO: 485775 - RNA, 32 nt, Human
uacacugaggguuucaaaauucgacuagaagu

SEQ ID NO: 485776 - RNA, 32 nt, Human
uacacugagguucugcccacuccugggcagcu

SEQ ID NO: 485777 - RNA, 32 nt, Human
uacacugauuccuuuaugaugacugcuuaacu

SEQ ID NO: 485778 - RNA, 32 nt, Human
uacacugcaucuuuaacacagagucaccugug

SEQ ID NO: 485779 - RNA, 32 nt, Human
uacacugccugcagcagucucuggguguguug

SEQ ID NO: 485780 - RNA, 32 nt, Human
uacacugcuacaccauuacuuucuugagacau

SEQ ID NO: 485781 - RNA, 32 nt, Human
uacacuggaaggcagauauacugugauaugcu

SEQ ID NO: 485782 - RNA, 32 nt, Human
uacacuggagugagcagaacugggggauaggg

SEQ ID NO: 485783 - RNA, 32 nt, Human
uacacuggcuacaccuggccuuguggcugcau

SEQ ID NO: 485784 - RNA, 32 nt, Human
uacacuggcucacgaaaaucugcccugcuaga

SEQ ID NO: 485785 - RNA, 32 nt, Human
uacacugggacuguaacagcauuuuuacuuuc

SEQ ID NO: 485786 - RNA, 32 nt, Human
uacacuggggacccaagccugcucugaggagu

SEQ ID NO: 485787 - RNA, 32 nt, Human
uacacugguaccccagugugaaaaggauggaa

SEQ ID NO: 485788 - RNA, 32 nt, Human
uacacuggucucaaacucuuggccucaaggga

SEQ ID NO: 485789 - RNA, 32 nt, Human
uacacugguuuucaaacuuuuaaaguugagga

SEQ ID NO: 485790 - RNA, 32 nt, Human
uacacuucucccacugugugauggcgacaaga

SEQ ID NO: 485791 - RNA, 32 nt, Human
uacacuucucuagcucagccucacaggccaaa

SEQ ID NO: 485792 - RNA, 31 nt, Human
uacacuuggagcuaggaaaccaaagcaagcu

SEQ ID NO: 485793 - RNA, 32 nt, Human
uacacuuucaagacacuguaaccacaagaugu

SEQ ID NO: 485794 - RNA, 32 nt, Human
uacacuuucuuggaugagaggggagagugugg

SEQ ID NO: 485795 - RNA, 32 nt, Human
uacacuuugacuccccuucccuucccuauuuu

SEQ ID NO: 485796 - RNA, 32 nt, Human
uacagaaaagagacauuucagcugugauuaug

SEQ ID NO: 485797 - RNA, 32 nt, Human
uacagaaaaguggaagcagauuggcugggcuu

SEQ ID NO: 485798 - RNA, 32 nt, Human
uacagaaaaucagcuccugacccugccuaaaa

SEQ ID NO: 485799 - RNA, 32 nt, Human
uacagaaaaucuggagcuaauacugguuuagc

SEQ ID NO: 485800 - RNA, 32 nt, Human
uacagaaaauuagacagguaugguggcacgca

SEQ ID NO: 485801 - RNA, 32 nt, Human
uacagaaaauuagccaggcaugguggcgcaug

SEQ ID NO: 485802 - RNA, 32 nt, Human
uacagaaaauuagccuggcaugguggcaugca

SEQ ID NO: 485803 - RNA, 32 nt, Human
uacagaaaauuagcugggcgcaguggcgggcg

SEQ ID NO: 485804 - RNA, 32 nt, Human
uacagaaaauuagcugggcgugguggcgggcg

SEQ ID NO: 485805 - RNA, 32 nt, Human
uacagaaacugauuauucugaggaugauauau

SEQ ID NO: 485806 - RNA, 32 nt, Human
uacagaaacugucauuagaaaugaguaguguu

SEQ ID NO: 485807 - RNA, 32 nt, Human
uacagaaagcccuucagucaccagagauggcc

SEQ ID NO: 485808 - RNA, 32 nt, Human
uacagaaauagaagaaagcaagccagacuuaa

SEQ ID NO: 485809 - RNA, 32 nt, Human
uacagaaauagucaacagauguuuccaagaac

SEQ ID NO: 485810 - RNA, 27 nt, Human
uacagaaauuucuuggauucuguauca

SEQ ID NO: 485811 - RNA, 32 nt, Human
uacagaacaagaaaaauacuauuugccaugcu

SEQ ID NO: 485812 - RNA, 32 nt, Human
uacagaacaccuguccugccugugccagccug

SEQ ID NO: 485813 - RNA, 32 nt, Human
uacagaacagaaguuaaugaaaaaggcuauuu

SEQ ID NO: 485814 - RNA, 32 nt, Human
uacagaacagguguuaagccuuuuccaauauu

SEQ ID NO: 485815 - RNA, 32 nt, Human
uacagaaccucauaguuugagaacaaagcuga

SEQ ID NO: 485816 - RNA, 32 nt, Human
uacagaacuauucaaagaagcucacagauggu

SEQ ID NO: 485817 - RNA, 32 nt, Human
uacagaacugauuuccuuccuggcuguacaug

SEQ ID NO: 485818 - RNA, 32 nt, Human
uacagaagacacacacaucacauagacccuca

SEQ ID NO: 485819 - RNA, 32 nt, Human
uacagaagagccaccacugggauggggaauaa

SEQ ID NO: 485820 - RNA, 32 nt, Human
uacagaagcuugacaagcauguccucacccuc

SEQ ID NO: 485821 - RNA, 32 nt, Human
uacagaagguccugugugacccucucugcauc

SEQ ID NO: 485822 - RNA, 32 nt, Human
uacagaagugagccacuguaccuggccuuuug

SEQ ID NO: 485823 - RNA, 32 nt, Human
uacagaagugagccacuguguccugccuaaaa

SEQ ID NO: 485824 - RNA, 32 nt, Human
uacagaaguucuaccuuagggaaaagaaaggg

SEQ ID NO: 485825 - RNA, 26 nt, Human
uacagaauaagucagaggaaaagcaa

SEQ ID NO: 485826 - RNA, 32 nt, Human
uacagaauaauccaguauugcugauuuuaaag

SEQ ID NO: 485827 - RNA, 32 nt, Human
uacagaaucaacaacagauaucacaacaggga

SEQ ID NO: 485828 - RNA, 32 nt, Human
uacagaaucuggauggcuaugcucugauccug

SEQ ID NO: 485829 - RNA, 32 nt, Human
uacagaaugcagaauggcuacugugugucuug

SEQ ID NO: 485830 - RNA, 32 nt, Human
uacagaauguucuggaaagaaaaagaaccggc

SEQ ID NO: 485831 - RNA, 32 nt, Human
uacagaauuagcugagugugguggcgcaugcc

SEQ ID NO: 485832 - RNA, 32 nt, Human
uacagaauugaauaccuguuaaagaaaaauua

SEQ ID NO: 485833 - RNA, 32 nt, Human
uacagacaaggccaaggcaaucccagggcauu

SEQ ID NO: 485834 - RNA, 32 nt, Human
uacagacaaguauuuccaggagccuuucugua

SEQ ID NO: 485835 - RNA, 32 nt, Human
uacagacacaagaacaaucuuugcuauaauug

SEQ ID NO: 485836 - RNA, 32 nt, Human
uacagacaccauauuuguucugcauucccugc

SEQ ID NO: 485837 - RNA, 20 nt, Human
uacagacacccgccaccacg

SEQ ID NO: 485838 - RNA, 32 nt, Human
uacagacacuucacuuagccuagggggccuuc

SEQ ID NO: 485839 - RNA, 32 nt, Human
uacagacagcuuuccugaucauuugauuuauu

SEQ ID NO: 485840 - RNA, 32 nt, Human
uacagacaggacagaaugaaacuccugcggcu

SEQ ID NO: 485841 - RNA, 19 nt, Human
uacagacaggcaccaccac

SEQ ID NO: 485842 - RNA, 32 nt, Human
uacagacaucuuccuccucccucaucccuucc

SEQ ID NO: 485843 - RNA, 20 nt, Human
uacagacaugaaccaccacg

SEQ ID NO: 485844 - RNA, 32 nt, Human
uacagacaugagcagccaugcccagccuguuu

SEQ ID NO: 485845 - RNA, 20 nt, Human
uacagacaugagccaccacg

SEQ ID NO: 485846 - RNA, 32 nt, Human
uacagacaugagccaccaugcccggccaagaa

SEQ ID NO: 485847 - RNA, 32 nt, Human
uacagacaugagccaccucgcccagccuuuuc

SEQ ID NO: 485848 - RNA, 32 nt, Human
uacagacaugagccacugcaccugcccagcuc

SEQ ID NO: 485849 - RNA, 32 nt, Human
uacagacaugagccacugugcccggcccccau

SEQ ID NO: 485850 - RNA, 32 nt, Human
uacagacaugagccacugugccggccuguuuu

SEQ ID NO: 485851 - RNA, 32 nt, Human
uacagacaugagccacugugccugucuagacu

SEQ ID NO: 485852 - RNA, 20 nt, Human
uacagacaugcaccacaacg

SEQ ID NO: 485853 - RNA, 19 nt, Human
uacagacaugcaccaccac

SEQ ID NO: 485854 - RNA, 20 nt, Human
uacagacaugugccaccacg

SEQ ID NO: 485855 - RNA, 32 nt, Human
uacagaccaaguuugcucgccuccuggcugag

SEQ ID NO: 485856 - RNA, 32 nt, Human
uacagaccaggugagagcccuuuugccuuagu

SEQ ID NO: 485857 - RNA, 32 nt, Human
uacagaccguggccgcccugccugugugugug

SEQ ID NO: 485858 - RNA, 32 nt, Human
uacagaccugccagggcccaggagagcucgac

SEQ ID NO: 485859 - RNA, 32 nt, Human
uacagaccuguuuugucauccugcugccaaga

SEQ ID NO: 485860 - RNA, 32 nt, Human
uacagaccuuuguaacaaguguacagaaaacu

SEQ ID NO: 485861 - RNA, 32 nt, Human
uacagacgcacgccaccaugcccggcuaauuu

SEQ ID NO: 485862 - RNA, 21 nt, Human
uacagacgguguuucaccaug

SEQ ID NO: 485863 - RNA, 32 nt, Human
uacagacgugaaccacugggcccagcccaaac

SEQ ID NO: 485864 - RNA, 19 nt, Human
uacagacgugagccaccac

SEQ ID NO: 485865 - RNA, 32 nt, Human
uacagacgugagccaccacccccggccacuug

SEQ ID NO: 485866 - RNA, 32 nt, Human
uacagacgugagccaccacgcccugccaauaa

SEQ ID NO: 485867 - RNA, 32 nt, Human
uacagacgugagccaccacucccggcccauag

SEQ ID NO: 485868 - RNA, 32 nt, Human
uacagacgugagccaccgugcccggccaaucc

SEQ ID NO: 485869 - RNA, 32 nt, Human
uacagacgugagccaccgugcccggccaguuc

SEQ ID NO: 485870 - RNA, 32 nt, Human
uacagacgugagccaccgugccuggccuggaa

SEQ ID NO: 485871 - RNA, 32 nt, Human
uacagacgugagccacugcagccaccgugccu

SEQ ID NO: 485872 - RNA, 32 nt, Human
uacagacgugagccacugcguccugccuaaaa

SEQ ID NO: 485873 - RNA, 32 nt, Human
uacagacgugagccacugugccuggccaagau

SEQ ID NO: 485874 - RNA, 32 nt, Human
uacagacgugagccacuguguccugccuaaaa

SEQ ID NO: 485875 - RNA, 19 nt, Human
uacagacgugagcuaccac

SEQ ID NO: 485876 - RNA, 32 nt, Human
uacagacgugagcuaucaugcccagcaacaua

SEQ ID NO: 485877 - RNA, 20 nt, Human
uacagacgugugccaccaug

SEQ ID NO: 485878 - RNA, 32 nt, Human
uacagacgugugccaccaugcuuggcuaauuu

SEQ ID NO: 485879 - RNA, 32 nt, Human
uacagacucuacugcugccugggggcgagcag

SEQ ID NO: 485880 - RNA, 32 nt, Human
uacagacugcauuuuaaaauuguaauuaugaa

SEQ ID NO: 485881 - RNA, 32 nt, Human
uacagacuggggacccuggacaugcgggccuu

SEQ ID NO: 485882 - RNA, 32 nt, Human
uacagacuugcugugugaccucaggccagugu

SEQ ID NO: 485883 - RNA, 32 nt, Human
uacagagaaaucacagacuuuugcuacaaauc

SEQ ID NO: 485884 - RNA, 32 nt, Human
uacagagaaauuauaggccaagagaaaaugcu

SEQ ID NO: 485885 - RNA, 32 nt, Human
uacagagaacaagggaugcugaggcuucugau

SEQ ID NO: 485886 - RNA, 32 nt, Human
uacagagaagagaagagggagucagcccaucg

SEQ ID NO: 485887 - RNA, 32 nt, Human
uacagagaagcuggcugguaggacccgcaggg

SEQ ID NO: 485888 - RNA, 19 nt, Human
uacagagaccaccaccacg

SEQ ID NO: 485889 - RNA, 32 nt, Human
uacagagagacaacuugcuccuuuccaucagc

SEQ ID NO: 485890 - RNA, 32 nt, Human
uacagagagagaaacacuacagcaacccaggg

SEQ ID NO: 485891 - RNA, 27 nt, Human
uacagagagagccagguuuuggugcca

SEQ ID NO: 485892 - RNA, 32 nt, Human
uacagagaggucaaguaacuugcccaaaguca

SEQ ID NO: 485893 - RNA, 19 nt, Human
uacagagauacccucucca

SEQ ID NO: 485894 - RNA, 32 nt, Human
uacagagaugugaugcaggaaaccuucacgaa

SEQ ID NO: 485895 - RNA, 32 nt, Human
uacagagaugugaugcaggaaaccuucaggaa

SEQ ID NO: 485896 - RNA, 32 nt, Human
uacagagauucuaugaagcccacccagaaaaa

SEQ ID NO: 485897 - RNA, 32 nt, Human
uacagagauucuuucugcugucacucaauuuc

SEQ ID NO: 485898 - RNA, 24 nt, Human
uacagagcaagaaauuucaggaaa

SEQ ID NO: 485899 - RNA, 32 nt, Human
uacagagcacagaacagaacuucuuacagaag

SEQ ID NO: 485900 - RNA, 32 nt, Human
uacagagcacuaguugucacugccuggcuuua

SEQ ID NO: 485901 - RNA, 32 nt, Human
uacagagcgagauggacuagccccagaaaaga

SEQ ID NO: 485902 - RNA, 32 nt, Human
uacagaggacauguaaauacacagcgguggug

SEQ ID NO: 485903 - RNA, 32 nt, Human
uacagaggagaaagcaccaggaggguguagca

SEQ ID NO: 485904 - RNA, 32 nt, Human
uacagaggcccuucaggagggccuccugugcc

SEQ ID NO: 485905 - RNA, 32 nt, Human
uacagagggaaagaccuacagagggaaagacc

SEQ ID NO: 485906 - RNA, 32 nt, Human
uacagagguucugcagaacuguggccaucugc

SEQ ID NO: 485907 - RNA, 32 nt, Human
uacagagugugagccaccacacccagccagca

SEQ ID NO: 485908 - RNA, 32 nt, Human
uacagaguguuauaacaccaucuggagucuuc

SEQ ID NO: 485909 - RNA, 32 nt, Human
uacagaguuccuuuugcuauguuugguaacau

SEQ ID NO: 485910 - RNA, 32 nt, Human
uacagaguugcuuggaauaaauccuaauagau

SEQ ID NO: 485911 - RNA, 32 nt, Human
uacagauaaagugucugaaauaacgcaugaug

SEQ ID NO: 485912 - RNA, 23 nt, Human
uacagauaacgucaggaagaguc

SEQ ID NO: 485913 - RNA, 32 nt, Human
uacagauacgugccaccauacccggcuaauuu

SEQ ID NO: 485914 - RNA, 32 nt, Human
uacagauacugauucagugggucuguguagag

SEQ ID NO: 485915 - RNA, 32 nt, Human
uacagauagaauauuugauauuucuugggauu

SEQ ID NO: 485916 - RNA, 32 nt, Human
uacagauauaagaaauacaaaaguuuaaaaag

SEQ ID NO: 485917 - RNA, 32 nt, Human
uacagaucaauaaaagcaccuguucuccaucu

SEQ ID NO: 485918 - RNA, 32 nt, Human
uacagaucagcaccuucucuguaccugcugga

SEQ ID NO: 485919 - RNA, 32 nt, Human
uacagaucucuguagagcuccuguguguaaua

SEQ ID NO: 485920 - RNA, 32 nt, Human
uacagaugacuugccauuucauuuacaaagau

SEQ ID NO: 485921 - RNA, 32 nt, Human
uacagaugaggugaggggaugguuagcagcga

SEQ ID NO: 485922 - RNA, 21 nt, Human
uacagaugcaaucaccaccac

SEQ ID NO: 485923 - RNA, 19 nt, Human
uacagaugcacaccaccac

SEQ ID NO: 485924 - RNA, 20 nt, Human
uacagaugcccaccaccaug

SEQ ID NO: 485925 - RNA, 23 nt, Human
uacagaugcccaccaccaugccc

SEQ ID NO: 485926 - RNA, 32 nt, Human
uacagaugcucuccaaccuauuuucuauaaga

SEQ ID NO: 485927 - RNA, 32 nt, Human
uacagauggaccucuugagaagaauuaucgua

SEQ ID NO: 485928 - RNA, 20 nt, Human
uacagaugggagccaccacg

SEQ ID NO: 485929 - RNA, 32 nt, Human
uacagaugggagccaccacgcccagcccaguc

SEQ ID NO: 485930 - RNA, 30 nt, Human
uacagaugggcauaggugcagugagugcag

SEQ ID NO: 485931 - RNA, 32 nt, Human
uacagaugggguccucuagggauggcagauug

SEQ ID NO: 485932 - RNA, 32 nt, Human
uacagauguagcccugggaauggcacagugga

SEQ ID NO: 485933 - RNA, 32 nt, Human
uacagaugugagccaacgcacccggcuacacc

SEQ ID NO: 485934 - RNA, 19 nt, Human
uacagaugugagccaccac

SEQ ID NO: 485935 - RNA, 32 nt, Human
uacagaugugagccaccacacacaccaucuga

SEQ ID NO: 485936 - RNA, 32 nt, Human
uacagaugugagccaccacaccaggccgguga

SEQ ID NO: 485937 - RNA, 32 nt, Human
uacagaugugagccaccacaccuggccccaag

SEQ ID NO: 485938 - RNA, 20 nt, Human
uacagaugugagccaccacg

SEQ ID NO: 485939 - RNA, 32 nt, Human
uacagaugugagccaccacgcccagccagaaa

SEQ ID NO: 485940 - RNA, 32 nt, Human
uacagaugugagccaccacgcccggccuuuuu

SEQ ID NO: 485941 - RNA, 32 nt, Human
uacagaugugagccaccaugcccagcuuucuu

SEQ ID NO: 485942 - RNA, 32 nt, Human
uacagaugugagccaccgcacccagccugagu

SEQ ID NO: 485943 - RNA, 32 nt, Human
uacagaugugagccaccgcauccagccccaca

SEQ ID NO: 485944 - RNA, 32 nt, Human
uacagaugugagccaccgcgcccacccugaac

SEQ ID NO: 485945 - RNA, 32 nt, Human
uacagaugugagccaccguacccagcuaauuu

SEQ ID NO: 485946 - RNA, 32 nt, Human
uacagaugugagccaccgugccuagccaagga

SEQ ID NO: 485947 - RNA, 32 nt, Human
uacagaugugagccacugcaccuggccccaga

SEQ ID NO: 485948 - RNA, 32 nt, Human
uacagaugugagccacugcguccugccuaaaa

SEQ ID NO: 485949 - RNA, 32 nt, Human
uacagaugugagccacugcguccuuccuaaaa

SEQ ID NO: 485950 - RNA, 32 nt, Human
uacagaugugagccacuucgcccagcugaggc

SEQ ID NO: 485951 - RNA, 32 nt, Human
uacagaugugagccauggugcccggcuacucu

SEQ ID NO: 485952 - RNA, 32 nt, Human
uacagaugugagccauuguggccuaagaugcu

SEQ ID NO: 485953 - RNA, 19 nt, Human
uacagaugugcaccaccac

SEQ ID NO: 485954 - RNA, 20 nt, Human
uacagaugugcaccaccacg

SEQ ID NO: 485955 - RNA, 19 nt, Human
uacagaugugcaccagcac

SEQ ID NO: 485956 - RNA, 32 nt, Human
uacagaugugcaucaccaugccuggcuaauuu

SEQ ID NO: 485957 - RNA, 32 nt, Human
uacagaugugggccaccaugucuggcuaauuu

SEQ ID NO: 485958 - RNA, 32 nt, Human
uacagaugugugcuaccaugcccagcuaauuu

SEQ ID NO: 485959 - RNA, 32 nt, Human
uacagauguguuguuugucacacugagauugc

SEQ ID NO: 485960 - RNA, 32 nt, Human
uacagauguuugccaccaugcccgccucauuu

SEQ ID NO: 485961 - RNA, 32 nt, Human
uacagauucaaugcuauucccauuaacugccg

SEQ ID NO: 485962 - RNA, 32 nt, Human
uacagauucagguacuucugggugacaggugu

SEQ ID NO: 485963 - RNA, 21 nt, Human
uacagauucucacuucugcua

SEQ ID NO: 485964 - RNA, 22 nt, Human
uacagauucuuuguuuuggcca

SEQ ID NO: 485965 - RNA, 32 nt, Human
uacagauuguagggcaucacuucaauucacca

SEQ ID NO: 485966 - RNA, 32 nt, Human
uacagauuuagagaaggaaccaguaaguagga

SEQ ID NO: 485967 - RNA, 32 nt, Human
uacagauuuuugaauaguuguuugcuugccag

SEQ ID NO: 485968 - RNA, 32 nt, Human
uacagcaaaccaacauggcacauguauaccua

SEQ ID NO: 485969 - RNA, 32 nt, Human
uacagcaaauaagaugugucccaggugacaag

SEQ ID NO: 485970 - RNA, 32 nt, Human
uacagcaaauuagcugggcgugguggcgcaug

SEQ ID NO: 485971 - RNA, 32 nt, Human
uacagcaacagaaaacuaaacacacacauaaa

SEQ ID NO: 485972 - RNA, 32 nt, Human
uacagcaacagacccagaaacuaaaguagaaa

SEQ ID NO: 485973 - RNA, 32 nt, Human
uacagcaacaggaaucucagagacagguggcc

SEQ ID NO: 485974 - RNA, 32 nt, Human
uacagcaagggagccauguuauauucaaguua

SEQ ID NO: 485975 - RNA, 32 nt, Human
uacagcaaguuugcacaaaaucgcacaacgau

SEQ ID NO: 485976 - RNA, 32 nt, Human
uacagcacaagcacguguucucaccuuuuucc

SEQ ID NO: 485977 - RNA, 32 nt, Human
uacagcacauuuuuccucaaagaaccaaacau

SEQ ID NO: 485978 - RNA, 18 nt, Human
uacagcacccaccaccac

SEQ ID NO: 485979 - RNA, 32 nt, Human
uacagcagaaaugcuauuuuguaugcuguuaa

SEQ ID NO: 485980 - RNA, 32 nt, Human
uacagcagagaagccucccugccuuggacccc

SEQ ID NO: 485981 - RNA, 32 nt, Human
uacagcagagacacucaguuguguggggugcu

SEQ ID NO: 485982 - RNA, 21 nt, Human
uacagcagagcuagguggaaa

SEQ ID NO: 485983 - RNA, 32 nt, Human
uacagcagaggcauugaacacacaccaccagg

SEQ ID NO: 485984 - RNA, 32 nt, Human
uacagcagccucggcggugccacccacugcac

SEQ ID NO: 485985 - RNA, 21 nt, Human
uacagcagcuggugcuaguca

SEQ ID NO: 485986 - RNA, 24 nt, Human
uacagcagcuucaguuuugugcca

SEQ ID NO: 485987 - RNA, 32 nt, Human
uacagcaggaagagacagcuuuuagaggggca

SEQ ID NO: 485988 - RNA, 32 nt, Human
uacagcaggacacucuggacaguagauugcag

SEQ ID NO: 485989 - RNA, 32 nt, Human
uacagcaggacagaauaugaccaccuucguuu

SEQ ID NO: 485990 - RNA, 32 nt, Human
uacagcaggacuccugaacauucuuccuuaaa

SEQ ID NO: 485991 - RNA, 32 nt, Human
uacagcaggagaaaguugagguucuucaccua

SEQ ID NO: 485992 - RNA, 32 nt, Human
uacagcaggagagcuuagggaggcugagagcu

SEQ ID NO: 485993 - RNA, 32 nt, Human
uacagcaggccucugggguccagccugggagc

SEQ ID NO: 485994 - RNA, 32 nt, Human
uacagcaggcugggcccaggaggucagguuca

SEQ ID NO: 485995 - RNA, 32 nt, Human
uacagcagggucuugcuguaacucagacauuc

SEQ ID NO: 485996 - RNA, 32 nt, Human
uacagcaguaccgaagauguuaguuaauagau

SEQ ID NO: 485997 - RNA, 32 nt, Human
uacagcaguauuuuuaauaaagaauuacagag

SEQ ID NO: 485998 - RNA, 32 nt, Human
uacagcaguggaaugaguggucccggagaugu

SEQ ID NO: 485999 - RNA, 32 nt, Human
uacagcaguguguggaggugauggccaguuaa

SEQ ID NO: 486000 - RNA, 16 nt, Human
uacagcaguuauucua

SEQ ID NO: 486001 - RNA, 32 nt, Human
uacagcauaugguaaccaagguuagaugccag

SEQ ID NO: 486002 - RNA, 32 nt, Human
uacagcauccaccucucuuggcucuuguaagg

SEQ ID NO: 486003 - RNA, 32 nt, Human
uacagcauccacugcagcucugggcuccauuu

SEQ ID NO: 486004 - RNA, 32 nt, Human
uacagcauccagggaagugcccagggaccagg

SEQ ID NO: 486005 - RNA, 32 nt, Human
uacagcaugacaauagagacuguggaugucgg

SEQ ID NO: 486006 - RNA, 15 nt, Human
uacagcauuauucua

SEQ ID NO: 486007 - RNA, 32 nt, Human
uacagcauuggagacagcuggggaagagguga

SEQ ID NO: 486008 - RNA, 32 nt, Human
uacagccaagggcacugcucacuguggcccgu

SEQ ID NO: 486009 - RNA, 32 nt, Human
uacagccaaugccuccauaggccacuuuuuaa

SEQ ID NO: 486010 - RNA, 32 nt, Human
uacagccagaagcccauggagcagggauguca

SEQ ID NO: 486011 - RNA, 32 nt, Human
uacagccaggaaccacaccugagccauuucca

SEQ ID NO: 486012 - RNA, 32 nt, Human
uacagccaugagccaccaugcccggccaaacu

SEQ ID NO: 486013 - RNA, 32 nt, Human
uacagcccacccuaccccuccuccaugggccc

SEQ ID NO: 486014 - RNA, 32 nt, Human
uacagccccuccaccgcccccugcugccccuc

SEQ ID NO: 486015 - RNA, 32 nt, Human
uacagcccgaggaguagaggcagcagcagcug

SEQ ID NO: 486016 - RNA, 32 nt, Human
uacagcccuagggugagaagaggcugagagag

SEQ ID NO: 486017 - RNA, 32 nt, Human
uacagcccugagcgaccgcgcccagccgucac

SEQ ID NO: 486018 - RNA, 32 nt, Human
uacagcccugcaggucuucaagucugugguug

SEQ ID NO: 486019 - RNA, 32 nt, Human
uacagcccugcucccaggugugcaucuuacug

SEQ ID NO: 486020 - RNA, 32 nt, Human
uacagccgcaccgccuauuccagccuuuggag

SEQ ID NO: 486021 - RNA, 32 nt, Human
uacagccgugagccaccacgcccagccugcuu

SEQ ID NO: 486022 - RNA, 32 nt, Human
uacagccgugagccacugcacccagccccaau

SEQ ID NO: 486023 - RNA, 19 nt, Human
uacagccgugcaccacuac

SEQ ID NO: 486024 - RNA, 32 nt, Human
uacagccucauagccccugugcagccuucguc

SEQ ID NO: 486025 - RNA, 32 nt, Human
uacagccugauggggaauucccagggaggccc

SEQ ID NO: 486026 - RNA, 32 nt, Human
uacagccugcacacaccugccugcagagcagg

SEQ ID NO: 486027 - RNA, 32 nt, Human
uacagccugcagaaccgugagccagcuaaacc

SEQ ID NO: 486028 - RNA, 32 nt, Human
uacagccugcagcugugagcugagccagugac

SEQ ID NO: 486029 - RNA, 32 nt, Human
uacagccugccuggauauggaugaugccaaua

SEQ ID NO: 486030 - RNA, 32 nt, Human
uacagccuggacgacagagcaagacucugucu

SEQ ID NO: 486031 - RNA, 32 nt, Human
uacagccugggcaauaaagugagacccuguca

SEQ ID NO: 486032 - RNA, 32 nt, Human
uacagccuggggaccaugggguggcagggaag

SEQ ID NO: 486033 - RNA, 32 nt, Human
uacagccugggugacagagcaagacuccgucu

SEQ ID NO: 486034 - RNA, 32 nt, Human
uacagccugggugacagagugagaucuugucu

SEQ ID NO: 486035 - RNA, 32 nt, Human
uacagccuggucaacagagcaagacucugucu

SEQ ID NO: 486036 - RNA, 32 nt, Human
uacagcgcggaggaggagggaggccaggcggg

SEQ ID NO: 486037 - RNA, 32 nt, Human
uacagcggcuguucccgccaguuccacagauc

SEQ ID NO: 486038 - RNA, 32 nt, Human
uacagcguaacagugcuuuaaaauguaugucc

SEQ ID NO: 486039 - RNA, 32 nt, Human
uacagcguccuguccaccaugcccucagacuc

SEQ ID NO: 486040 - RNA, 32 nt, Human
uacagcgucugucaggucgaugucucagaaca

SEQ ID NO: 486041 - RNA, 32 nt, Human
uacagcgugaucuaccacaccuggccaauccc

SEQ ID NO: 486042 - RNA, 32 nt, Human
uacagcguuuacaaaccagugccacaaggagc

SEQ ID NO: 486043 - RNA, 32 nt, Human
uacagcuaugcacuguaaaugcagccuucuuu

SEQ ID NO: 486044 - RNA, 32 nt, Human
uacagcuaugcgccaccaugcccagcuaauuu

SEQ ID NO: 486045 - RNA, 16 nt, Human
uacagcucacuaccac

SEQ ID NO: 486046 - RNA, 32 nt, Human
uacagcucacuaccacacaggcccugcagucc

SEQ ID NO: 486047 - RNA, 32 nt, Human
uacagcucagcccugauggacguguuugagcu

SEQ ID NO: 486048 - RNA, 32 nt, Human
uacagcucauguuccuuagaccugauuuguuu

SEQ ID NO: 486049 - RNA, 32 nt, Human
uacagcucauuuccccguccuccaaccaaugg

SEQ ID NO: 486050 - RNA, 32 nt, Human
uacagcuccagccccuccugggccucccagcg

SEQ ID NO: 486051 - RNA, 32 nt, Human
uacagcugagcuuuuuguuuucuucucuuuuu

SEQ ID NO: 486052 - RNA, 32 nt, Human
uacagcugccugccaaauuuuuguauuuuuag

SEQ ID NO: 486053 - RNA, 32 nt, Human
uacagcugccugccaccgugcccagcuaauuu

SEQ ID NO: 486054 - RNA, 32 nt, Human
uacagcugcggaggauggcagguggcaucucg

SEQ ID NO: 486055 - RNA, 32 nt, Human
uacagcuguaaaccaaaguggagcuggugcuu

SEQ ID NO: 486056 - RNA, 32 nt, Human
uacagcugugagccaccgugccuggccuuuua

SEQ ID NO: 486057 - RNA, 32 nt, Human
uacagcugugagccacugcacccggccgggaa

SEQ ID NO: 486058 - RNA, 32 nt, Human
uacagcugugagccauggcaccuggccacaca

SEQ ID NO: 486059 - RNA, 32 nt, Human
uacagcugugugaucuugggcaagucacuuaa

SEQ ID NO: 486060 - RNA, 32 nt, Human
uacagcuguuuccucagagggaaaaaucuuga

SEQ ID NO: 486061 - RNA, 32 nt, Human
uacagcuucccaagccccaucaauaaagcccc

SEQ ID NO: 486062 - RNA, 32 nt, Human
uacagcuucugccuccucaccuggccgucggu

SEQ ID NO: 486063 - RNA, 32 nt, Human
uacagcuugggugacagcgcgagacaccgucu

SEQ ID NO: 486064 - RNA, 32 nt, Human
uacagcuugugugguuugucuuuggaaauaaa

SEQ ID NO: 486065 - RNA, 32 nt, Human
uacagcuuugccuuguguccucuuguuccgug

SEQ ID NO: 486066 - RNA, 32 nt, Human
uacagcuuuucaggaagcuuagaucugaauuu

SEQ ID NO: 486067 - RNA, 18 nt, Human
uacaggaaaacuguccaa

SEQ ID NO: 486068 - RNA, 32 nt, Human
uacaggaaaagccauaucuugcaccagcagca

SEQ ID NO: 486069 - RNA, 32 nt, Human
uacaggaaaccaccccucacccuguccacuug

SEQ ID NO: 486070 - RNA, 27 nt, Human
uacaggaaaggagggaggaugcugugu

SEQ ID NO: 486071 - RNA, 32 nt, Human
uacaggaaauuaucugggcaugguggugugug

SEQ ID NO: 486072 - RNA, 32 nt, Human
uacaggaacacaagcagcagcacuccuuugag

SEQ ID NO: 486073 - RNA, 20 nt, Human
uacaggaacgcgccaccacg

SEQ ID NO: 486074 - RNA, 32 nt, Human
uacaggaagaaagagcuugaggugggagcggg

SEQ ID NO: 486075 - RNA, 32 nt, Human
uacaggaagccuccuaggguucugagcagaag

SEQ ID NO: 486076 - RNA, 19 nt, Human
uacaggaaggagucccuuu

SEQ ID NO: 486077 - RNA, 32 nt, Human
uacaggaaggcaggaggggugaguccccuacu

SEQ ID NO: 486078 - RNA, 32 nt, Human
uacaggaaugagccacugugccagcugacacg

SEQ ID NO: 486079 - RNA, 20 nt, Human
uacaggaaugcaccaccacg

SEQ ID NO: 486080 - RNA, 20 nt, Human
uacaggaaugcaccaccaug

SEQ ID NO: 486081 - RNA, 23 nt, Human
uacaggaaugcaccaccaugccc

SEQ ID NO: 486082 - RNA, 32 nt, Human
uacaggaauuaaauaguuuggaagaggguugg

SEQ ID NO: 486083 - RNA, 32 nt, Human
uacaggaauucauauauccaggcaacacaaaa

SEQ ID NO: 486084 - RNA, 32 nt, Human
uacaggacacuggccccucucaggucagaaga

SEQ ID NO: 486085 - RNA, 32 nt, Human
uacaggacaggcugcacaucucaguauaugua

SEQ ID NO: 486086 - RNA, 32 nt, Human
uacaggacauguacugagacaaaaaggaaaca

SEQ ID NO: 486087 - RNA, 32 nt, Human
uacaggacuacaaucccaacaugugccagucu

SEQ ID NO: 486088 - RNA, 32 nt, Human
uacaggacucagcuacagagcucugcuauaca

SEQ ID NO: 486089 - RNA, 32 nt, Human
uacaggagacgggguuucaccauguuggucag

SEQ ID NO: 486090 - RNA, 32 nt, Human
uacaggagagcaaaauugcaccagagauucuu

SEQ ID NO: 486091 - RNA, 32 nt, Human
uacaggagauacguaaaguaggccccacaaau

SEQ ID NO: 486092 - RNA, 20 nt, Human
uacaggagcauaccaccaug

SEQ ID NO: 486093 - RNA, 32 nt, Human
uacaggagcugaaggauaaaguagcugguaua

SEQ ID NO: 486094 - RNA, 32 nt, Human
uacaggaggauucuggagccgagaaggagaac

SEQ ID NO: 486095 - RNA, 32 nt, Human
uacaggaguaugccaccaugcccagcuaauuu

SEQ ID NO: 486096 - RNA, 29 nt, Human
uacaggaguauuuucgaagacauugggga

SEQ ID NO: 486097 - RNA, 32 nt, Human
uacaggagugaaccaccaugcccagccuaaag

SEQ ID NO: 486098 - RNA, 32 nt, Human
uacaggagugagccaccaugcccggcuggcag

SEQ ID NO: 486099 - RNA, 32 nt, Human
uacaggagugagccaccaugucugguccucug

SEQ ID NO: 486100 - RNA, 32 nt, Human
uacaggagugagccaccgcgccugguccccgc

SEQ ID NO: 486101 - RNA, 32 nt, Human
uacaggagugagccaccgugcccggccuaagu

SEQ ID NO: 486102 - RNA, 32 nt, Human
uacaggagugagccacugcgcccugccuggaa

SEQ ID NO: 486103 - RNA, 32 nt, Human
uacaggagugagccacugcgccuggcccacuu

SEQ ID NO: 486104 - RNA, 32 nt, Human
uacaggagugcaccaucaugcccagcuaauuu

SEQ ID NO: 486105 - RNA, 32 nt, Human
uacaggauaagauagauacaggguaaaauguu

SEQ ID NO: 486106 - RNA, 31 nt, Human
uacaggauguauaccauugacaugcacagcc

SEQ ID NO: 486107 - RNA, 32 nt, Human
uacaggauucuaaggaaccauggagauuugag

SEQ ID NO: 486108 - RNA, 32 nt, Human
uacaggauuucaugggcuggcucugcucgccu

SEQ ID NO: 486109 - RNA, 32 nt, Human
uacaggcaaaacaccaggcugcagagcuauga

SEQ ID NO: 486110 - RNA, 19 nt, Human
uacaggcaaacgccaccac

SEQ ID NO: 486111 - RNA, 19 nt, Human
uacaggcaaccaccaccac

SEQ ID NO: 486112 - RNA, 20 nt, Human
uacaggcaacugccaccaug

SEQ ID NO: 486113 - RNA, 32 nt, Human
uacaggcaagagccaccauaccaguuccuguc

SEQ ID NO: 486114 - RNA, 32 nt, Human
uacaggcaagcaagaugcccacacaacaggcu

SEQ ID NO: 486115 - RNA, 20 nt, Human
uacaggcaagcaccaccaug

SEQ ID NO: 486116 - RNA, 20 nt, Human
uacaggcacaaaccaccaug

SEQ ID NO: 486117 - RNA, 32 nt, Human
uacaggcacaagccaccgugcccagccaagaa

SEQ ID NO: 486118 - RNA, 20 nt, Human
uacaggcacaagucaccaug

SEQ ID NO: 486119 - RNA, 23 nt, Human
uacaggcacaagucaccaugccu

SEQ ID NO: 486120 - RNA, 18 nt, Human
uacaggcacacaccacca

SEQ ID NO: 486121 - RNA, 19 nt, Human
uacaggcacacaccaccac

SEQ ID NO: 486122 - RNA, 20 nt, Human
uacaggcacacaccaccacg

SEQ ID NO: 486123 - RNA, 23 nt, Human
uacaggcacacaccaccacgccc

SEQ ID NO: 486124 - RNA, 19 nt, Human
uacaggcacacaccaccau

SEQ ID NO: 486125 - RNA, 20 nt, Human
uacaggcacacaccaccaug

SEQ ID NO: 486126 - RNA, 19 nt, Human
uacaggcacacaccaucac

SEQ ID NO: 486127 - RNA, 21 nt, Human
uacaggcacacaccaucaccc

SEQ ID NO: 486128 - RNA, 20 nt, Human
uacaggcacacacuaccacg

SEQ ID NO: 486129 - RNA, 20 nt, Human
uacaggcacacccacgccac

SEQ ID NO: 486130 - RNA, 19 nt, Human
uacaggcacacgccaccac

SEQ ID NO: 486131 - RNA, 20 nt, Human
uacaggcacacgccaccaug

SEQ ID NO: 486132 - RNA, 20 nt, Human
uacaggcacacgcuaucaug

SEQ ID NO: 486133 - RNA, 20 nt, Human
uacaggcacacgcugccacg

SEQ ID NO: 486134 - RNA, 19 nt, Human
uacaggcacaggccaccac

SEQ ID NO: 486135 - RNA, 20 nt, Human
uacaggcacaggccgccacg

SEQ ID NO: 486136 - RNA, 19 nt, Human
uacaggcacaugccaccac

SEQ ID NO: 486137 - RNA, 21 nt, Human
uacaggcacaugccaccacca

SEQ ID NO: 486138 - RNA, 20 nt, Human
uacaggcacaugccaccacg

SEQ ID NO: 486139 - RNA, 23 nt, Human
uacaggcacaugccaccacgccc

SEQ ID NO: 486140 - RNA, 19 nt, Human
uacaggcacaugccaccau

SEQ ID NO: 486141 - RNA, 20 nt, Human
uacaggcacaugccaccaug

SEQ ID NO: 486142 - RNA, 23 nt, Human
uacaggcacaugccaccaugccc

SEQ ID NO: 486143 - RNA, 32 nt, Human
uacaggcacaugccaccaugcccagcuaaauu

SEQ ID NO: 486144 - RNA, 32 nt, Human
uacaggcacaugccaccaugcccagcugauuu

SEQ ID NO: 486145 - RNA, 32 nt, Human
uacaggcacaugccaccaugcccggcuaauuu

SEQ ID NO: 486146 - RNA, 32 nt, Human
uacaggcacaugccaccaugccuggcuaauuu

SEQ ID NO: 486147 - RNA, 32 nt, Human
uacaggcacaugccaccaugcucagcuaauuu

SEQ ID NO: 486148 - RNA, 19 nt, Human
uacaggcacaugccacuac

SEQ ID NO: 486149 - RNA, 23 nt, Human
uacaggcacauguuaccaugccc

SEQ ID NO: 486150 - RNA, 32 nt, Human
uacaggcacauguuaccaugcccagcuaauuu

SEQ ID NO: 486151 - RNA, 20 nt, Human
uacaggcaccagccaccaug

SEQ ID NO: 486152 - RNA, 32 nt, Human
uacaggcaccagccaccaugccuggcuaauuu

SEQ ID NO: 486153 - RNA, 19 nt, Human
uacaggcacccaccaccac

SEQ ID NO: 486154 - RNA, 20 nt, Human
uacaggcacccaccaccacg

SEQ ID NO: 486155 - RNA, 23 nt, Human
uacaggcacccaccaccacgccc

SEQ ID NO: 486156 - RNA, 19 nt, Human
uacaggcacccaccaccau

SEQ ID NO: 486157 - RNA, 20 nt, Human
uacaggcacccaccaccaug

SEQ ID NO: 486158 - RNA, 18 nt, Human
uacaggcacccaccauca

SEQ ID NO: 486159 - RNA, 19 nt, Human
uacaggcacccaccauccc

SEQ ID NO: 486160 - RNA, 20 nt, Human
uacaggcacccacuaccacg

SEQ ID NO: 486161 - RNA, 19 nt, Human
uacaggcacccaucaccac

SEQ ID NO: 486162 - RNA, 20 nt, Human
uacaggcaccccccaccaug

SEQ ID NO: 486163 - RNA, 19 nt, Human
uacaggcacccgccaccac

SEQ ID NO: 486164 - RNA, 20 nt, Human
uacaggcacccgccaccacg

SEQ ID NO: 486165 - RNA, 23 nt, Human
uacaggcacccgccaccacgccc

SEQ ID NO: 486166 - RNA, 20 nt, Human
uacaggcacccgccaccaug

SEQ ID NO: 486167 - RNA, 23 nt, Human
uacaggcacccgccaccaugccc

SEQ ID NO: 486168 - RNA, 20 nt, Human
uacaggcaccuaccaccagg

SEQ ID NO: 486169 - RNA, 19 nt, Human
uacaggcaccugccaccac

SEQ ID NO: 486170 - RNA, 22 nt, Human
uacaggcaccugccaccaccac

SEQ ID NO: 486171 - RNA, 20 nt, Human
uacaggcaccugccaccacg

SEQ ID NO: 486172 - RNA, 23 nt, Human
uacaggcaccugccaccacgccc

SEQ ID NO: 486173 - RNA, 19 nt, Human
uacaggcaccugccaccau

SEQ ID NO: 486174 - RNA, 23 nt, Human
uacaggcaccugccaccauaccc

SEQ ID NO: 486175 - RNA, 32 nt, Human
uacaggcaccugccaccauacccagcuaaguu

SEQ ID NO: 486176 - RNA, 20 nt, Human
uacaggcaccugccaccaug

SEQ ID NO: 486177 - RNA, 23 nt, Human
uacaggcaccugccaccaugccc

SEQ ID NO: 486178 - RNA, 32 nt, Human
uacaggcaccugccaccaugcccagcuaauuu

SEQ ID NO: 486179 - RNA, 32 nt, Human
uacaggcaccugccaccaugcccggcuaauuu

SEQ ID NO: 486180 - RNA, 32 nt, Human
uacaggcaccugccaccaugccuggcuaauuu

SEQ ID NO: 486181 - RNA, 32 nt, Human
uacaggcaccugccaccaugcgcagcuaauuu

SEQ ID NO: 486182 - RNA, 20 nt, Human
uacaggcacgagccaccaug

SEQ ID NO: 486183 - RNA, 23 nt, Human
uacaggcacgagccaccaugccc

SEQ ID NO: 486184 - RNA, 32 nt, Human
uacaggcacgagccaccaugcccagcuaauuu

SEQ ID NO: 486185 - RNA, 19 nt, Human
uacaggcacgagccaccgc

SEQ ID NO: 486186 - RNA, 19 nt, Human
uacaggcacgcaccaccac

SEQ ID NO: 486187 - RNA, 20 nt, Human
uacaggcacgcaccaccaug

SEQ ID NO: 486188 - RNA, 22 nt, Human
uacaggcacgcaccaccaugcc

SEQ ID NO: 486189 - RNA, 23 nt, Human
uacaggcacgcaccaccaugccu

SEQ ID NO: 486190 - RNA, 19 nt, Human
uacaggcacgcaccaccgc

SEQ ID NO: 486191 - RNA, 20 nt, Human
uacaggcacgcaucaccaug

SEQ ID NO: 486192 - RNA, 23 nt, Human
uacaggcacgcaucaccaugccu

SEQ ID NO: 486193 - RNA, 18 nt, Human
uacaggcacgccaccaug

SEQ ID NO: 486194 - RNA, 19 nt, Human
uacaggcacgcgccaccac

SEQ ID NO: 486195 - RNA, 20 nt, Human
uacaggcacgcgccaccaug

SEQ ID NO: 486196 - RNA, 23 nt, Human
uacaggcacgcgccaccaugccc

SEQ ID NO: 486197 - RNA, 19 nt, Human
uacaggcacgcgccacuac

SEQ ID NO: 486198 - RNA, 19 nt, Human
uacaggcacgcgcugccac

SEQ ID NO: 486199 - RNA, 20 nt, Human
uacaggcacgcgcugccacg

SEQ ID NO: 486200 - RNA, 32 nt, Human
uacaggcacgcuccaccacacccggcuaauuu

SEQ ID NO: 486201 - RNA, 20 nt, Human
uacaggcacguaccaccacg

SEQ ID NO: 486202 - RNA, 20 nt, Human
uacaggcacgugccaccacg

SEQ ID NO: 486203 - RNA, 23 nt, Human
uacaggcacgugccaccacgccc

SEQ ID NO: 486204 - RNA, 19 nt, Human
uacaggcacgugccaccau

SEQ ID NO: 486205 - RNA, 20 nt, Human
uacaggcacgugccaccaug

SEQ ID NO: 486206 - RNA, 23 nt, Human
uacaggcacgugccaccaugccc

SEQ ID NO: 486207 - RNA, 32 nt, Human
uacaggcacgugccaccaugccuggcuaauuu

SEQ ID NO: 486208 - RNA, 32 nt, Human
uacaggcacgugccaccaugucuggcuaauuu

SEQ ID NO: 486209 - RNA, 32 nt, Human
uacaggcacgugugaccaugccaggcuaauuu

SEQ ID NO: 486210 - RNA, 32 nt, Human
uacaggcacucauugcuacugaaggggacacc

SEQ ID NO: 486211 - RNA, 32 nt, Human
uacaggcacuugccaccauucccagcuaauuu

SEQ ID NO: 486212 - RNA, 20 nt, Human
uacaggcagacaccaucacg

SEQ ID NO: 486213 - RNA, 32 nt, Human
uacaggcagagugggacugagaugguacagug

SEQ ID NO: 486214 - RNA, 20 nt, Human
uacaggcaggagccaccgcg

SEQ ID NO: 486215 - RNA, 32 nt, Human
uacaggcaggagccaccgcgccugggccuuuu

SEQ ID NO: 486216 - RNA, 32 nt, Human
uacaggcaggagccacugagcccagccaagac

SEQ ID NO: 486217 - RNA, 18 nt, Human
uacaggcaggcaccacua

SEQ ID NO: 486218 - RNA, 32 nt, Human
uacaggcaggugccaccaugccuggcuaauuu

SEQ ID NO: 486219 - RNA, 32 nt, Human
uacaggcaggugccaccaugccuggcucauuu

SEQ ID NO: 486220 - RNA, 32 nt, Human
uacaggcauaagccacagcacccggcccugug

SEQ ID NO: 486221 - RNA, 20 nt, Human
uacaggcauaagccaccgcg

SEQ ID NO: 486222 - RNA, 19 nt, Human
uacaggcauacgccaccac

SEQ ID NO: 486223 - RNA, 20 nt, Human
uacaggcauauaccaccaug

SEQ ID NO: 486224 - RNA, 23 nt, Human
uacaggcauauaccaccaugccc

SEQ ID NO: 486225 - RNA, 19 nt, Human
uacaggcauaugccaccac

SEQ ID NO: 486226 - RNA, 19 nt, Human
uacaggcauaugccaucac

SEQ ID NO: 486227 - RNA, 19 nt, Human
uacaggcaucagccaccac

SEQ ID NO: 486228 - RNA, 26 nt, Human
uacaggcaucagccaccacacccagc

SEQ ID NO: 486229 - RNA, 32 nt, Human
uacaggcaucagccaccacacccagccaacuu

SEQ ID NO: 486230 - RNA, 32 nt, Human
uacaggcaucagccaccacacccagccccucc

SEQ ID NO: 486231 - RNA, 32 nt, Human
uacaggcaucagccaccacacccagccgucau

SEQ ID NO: 486232 - RNA, 32 nt, Human
uacaggcaucagccaccacgccuggcccucuc

SEQ ID NO: 486233 - RNA, 32 nt, Human
uacaggcaucagccaccacgccuggccugaua

SEQ ID NO: 486234 - RNA, 20 nt, Human
uacaggcauccgccaccaug

SEQ ID NO: 486235 - RNA, 19 nt, Human
uacaggcaucugccaccgc

SEQ ID NO: 486236 - RNA, 20 nt, Human
uacaggcaucugcuaccacg

SEQ ID NO: 486237 - RNA, 32 nt, Human
uacaggcaugaaccaccaugccuggaggagcc

SEQ ID NO: 486238 - RNA, 32 nt, Human
uacaggcaugaaccacugugcccagccgaaaa

SEQ ID NO: 486239 - RNA, 32 nt, Human
uacaggcaugaaccacugugcccagcugacaa

SEQ ID NO: 486240 - RNA, 18 nt, Human
uacaggcaugaaccauca

SEQ ID NO: 486241 - RNA, 32 nt, Human
uacaggcaugaaccauggugcccagccucauu

SEQ ID NO: 486242 - RNA, 19 nt, Human
uacaggcaugaaucaccac

SEQ ID NO: 486243 - RNA, 20 nt, Human
uacaggcaugaaucaccaug

SEQ ID NO: 486244 - RNA, 32 nt, Human
uacaggcaugaaucaccaugccuagccacuua

SEQ ID NO: 486245 - RNA, 32 nt, Human
uacaggcaugaaugaccgcgcccagccgcagg

SEQ ID NO: 486246 - RNA, 20 nt, Human
uacaggcaugacccaccgcg

SEQ ID NO: 486247 - RNA, 32 nt, Human
uacaggcaugagcacugcucccagcucuguuu

SEQ ID NO: 486248 - RNA, 32 nt, Human
uacaggcaugagccacagcacccggcccagaa

SEQ ID NO: 486249 - RNA, 32 nt, Human
uacaggcaugagccacagugcccggccaagua

SEQ ID NO: 486250 - RNA, 32 nt, Human
uacaggcaugagccaccaaacccagcccagaa

SEQ ID NO: 486251 - RNA, 19 nt, Human
uacaggcaugagccaccac

SEQ ID NO: 486252 - RNA, 32 nt, Human
uacaggcaugagccaccacaaccgucccacua

SEQ ID NO: 486253 - RNA, 32 nt, Human
uacaggcaugagccaccacaacuggccugaaa

SEQ ID NO: 486254 - RNA, 23 nt, Human
uacaggcaugagccaccacaccc

SEQ ID NO: 486255 - RNA, 32 nt, Human
uacaggcaugagccaccacacccacacaagac

SEQ ID NO: 486256 - RNA, 32 nt, Human
uacaggcaugagccaccacacccagccccuuu

SEQ ID NO: 486257 - RNA, 32 nt, Human
uacaggcaugagccaccacacccagcccggac

SEQ ID NO: 486258 - RNA, 32 nt, Human
uacaggcaugagccaccacacccagccuucag

SEQ ID NO: 486259 - RNA, 32 nt, Human
uacaggcaugagccaccacacccagccuuuau

SEQ ID NO: 486260 - RNA, 32 nt, Human
uacaggcaugagccaccacacccagcgagacg

SEQ ID NO: 486261 - RNA, 32 nt, Human
uacaggcaugagccaccacacccagcuccucc

SEQ ID NO: 486262 - RNA, 32 nt, Human
uacaggcaugagccaccacacccggcacuaua

SEQ ID NO: 486263 - RNA, 32 nt, Human
uacaggcaugagccaccacacccggccaauca

SEQ ID NO: 486264 - RNA, 32 nt, Human
uacaggcaugagccaccacacccugcccaugu

SEQ ID NO: 486265 - RNA, 32 nt, Human
uacaggcaugagccaccacaccuggauugcca

SEQ ID NO: 486266 - RNA, 32 nt, Human
uacaggcaugagccaccacaccuggccccauu

SEQ ID NO: 486267 - RNA, 32 nt, Human
uacaggcaugagccaccacaccuugccacaaa

SEQ ID NO: 486268 - RNA, 32 nt, Human
uacaggcaugagccaccacagcuggcccccuu

SEQ ID NO: 486269 - RNA, 32 nt, Human
uacaggcaugagccaccacauccggccuaauu

SEQ ID NO: 486270 - RNA, 32 nt, Human
uacaggcaugagccaccacaucuggccuagga

SEQ ID NO: 486271 - RNA, 20 nt, Human
uacaggcaugagccaccacg

SEQ ID NO: 486272 - RNA, 32 nt, Human
uacaggcaugagccaccacgcccagccaaaau

SEQ ID NO: 486273 - RNA, 32 nt, Human
uacaggcaugagccaccacgcccagccauuga

SEQ ID NO: 486274 - RNA, 32 nt, Human
uacaggcaugagccaccacgcccagcccauaa

SEQ ID NO: 486275 - RNA, 32 nt, Human
uacaggcaugagccaccacgcccagccuaaag

SEQ ID NO: 486276 - RNA, 32 nt, Human
uacaggcaugagccaccacgcccagccuauuu

SEQ ID NO: 486277 - RNA, 32 nt, Human
uacaggcaugagccaccacgcccagccuguuu

SEQ ID NO: 486278 - RNA, 32 nt, Human
uacaggcaugagccaccacgcccagccuuccc

SEQ ID NO: 486279 - RNA, 32 nt, Human
uacaggcaugagccaccacgcccggaccauga

SEQ ID NO: 486280 - RNA, 32 nt, Human
uacaggcaugagccaccacgcccggccaaauu

SEQ ID NO: 486281 - RNA, 32 nt, Human
uacaggcaugagccaccacgcccggcccacuc

SEQ ID NO: 486282 - RNA, 32 nt, Human
uacaggcaugagccaccacgcccggcuagacu

SEQ ID NO: 486283 - RNA, 32 nt, Human
uacaggcaugagccaccacgccuggccaaaaa

SEQ ID NO: 486284 - RNA, 32 nt, Human
uacaggcaugagccaccacgccuggccaagcu

SEQ ID NO: 486285 - RNA, 32 nt, Human
uacaggcaugagccaccacgccuggccaaggc

SEQ ID NO: 486286 - RNA, 32 nt, Human
uacaggcaugagccaccacgccuggccaguuu

SEQ ID NO: 486287 - RNA, 32 nt, Human
uacaggcaugagccaccacgccuggccgagag

SEQ ID NO: 486288 - RNA, 32 nt, Human
uacaggcaugagccaccacgccuggccuccuc

SEQ ID NO: 486289 - RNA, 32 nt, Human
uacaggcaugagccaccacgccuggcuggaau

SEQ ID NO: 486290 - RNA, 32 nt, Human
uacaggcaugagccaccacgccuguccgguua

SEQ ID NO: 486291 - RNA, 32 nt, Human
uacaggcaugagccaccacggccagcccacaa

SEQ ID NO: 486292 - RNA, 32 nt, Human
uacaggcaugagccaccacggcccgccaaaag

SEQ ID NO: 486293 - RNA, 32 nt, Human
uacaggcaugagccaccacuccuggccaggag

SEQ ID NO: 486294 - RNA, 32 nt, Human
uacaggcaugagccaccacuccuggccccaga

SEQ ID NO: 486295 - RNA, 32 nt, Human
uacaggcaugagccaccaggcccggccuuauu

SEQ ID NO: 486296 - RNA, 32 nt, Human
uacaggcaugagccaccaucuucagccagaug

SEQ ID NO: 486297 - RNA, 20 nt, Human
uacaggcaugagccaccaug

SEQ ID NO: 486298 - RNA, 32 nt, Human
uacaggcaugagccaccaugccagacuuccca

SEQ ID NO: 486299 - RNA, 32 nt, Human
uacaggcaugagccaccaugcccaacccaaga

SEQ ID NO: 486300 - RNA, 32 nt, Human
uacaggcaugagccaccaugcccagccaaaga

SEQ ID NO: 486301 - RNA, 32 nt, Human
uacaggcaugagccaccaugcccagccaaugu

SEQ ID NO: 486302 - RNA, 32 nt, Human
uacaggcaugagccaccaugcccagcccacug

SEQ ID NO: 486303 - RNA, 32 nt, Human
uacaggcaugagccaccaugcccagcccucaa

SEQ ID NO: 486304 - RNA, 32 nt, Human
uacaggcaugagccaccaugcccagccuccuu

SEQ ID NO: 486305 - RNA, 32 nt, Human
uacaggcaugagccaccaugcccagccuuuuu

SEQ ID NO: 486306 - RNA, 32 nt, Human
uacaggcaugagccaccaugcccagcugacaa

SEQ ID NO: 486307 - RNA, 32 nt, Human
uacaggcaugagccaccaugcccagcugcucc

SEQ ID NO: 486308 - RNA, 32 nt, Human
uacaggcaugagccaccaugcccagucgauau

SEQ ID NO: 486309 - RNA, 32 nt, Human
uacaggcaugagccaccaugcccggcccagug

SEQ ID NO: 486310 - RNA, 32 nt, Human
uacaggcaugagccaccaugcccggccccuua

SEQ ID NO: 486311 - RNA, 32 nt, Human
uacaggcaugagccaccaugcccggccuaaac

SEQ ID NO: 486312 - RNA, 32 nt, Human
uacaggcaugagccaccaugcccggccuucuu

SEQ ID NO: 486313 - RNA, 32 nt, Human
uacaggcaugagccaccaugcccggcuguuuu

SEQ ID NO: 486314 - RNA, 23 nt, Human
uacaggcaugagccaccaugccu

SEQ ID NO: 486315 - RNA, 32 nt, Human
uacaggcaugagccaccaugccuagccagcaa

SEQ ID NO: 486316 - RNA, 32 nt, Human
uacaggcaugagccaccaugccuagcccagaa

SEQ ID NO: 486317 - RNA, 32 nt, Human
uacaggcaugagccaccaugccuggcaacaua

SEQ ID NO: 486318 - RNA, 32 nt, Human
uacaggcaugagccaccaugccuggccaacuc

SEQ ID NO: 486319 - RNA, 32 nt, Human
uacaggcaugagccaccaugccuggccagaau

SEQ ID NO: 486320 - RNA, 32 nt, Human
uacaggcaugagccaccaugccuggccaggac

SEQ ID NO: 486321 - RNA, 32 nt, Human
uacaggcaugagccaccaugccuggccaugau

SEQ ID NO: 486322 - RNA, 32 nt, Human
uacaggcaugagccaccaugccuggcccagug

SEQ ID NO: 486323 - RNA, 32 nt, Human
uacaggcaugagccaccaugccuggccucugu

SEQ ID NO: 486324 - RNA, 32 nt, Human
uacaggcaugagccaccaugccuggcucaaau

SEQ ID NO: 486325 - RNA, 32 nt, Human
uacaggcaugagccaccaugucuugccaguuu

SEQ ID NO: 486326 - RNA, 32 nt, Human
uacaggcaugagccaccccgcccagcugaguc

SEQ ID NO: 486327 - RNA, 32 nt, Human
uacaggcaugagccaccccgccuggccaguua

SEQ ID NO: 486328 - RNA, 32 nt, Human
uacaggcaugagccaccgagcucagccuccac

SEQ ID NO: 486329 - RNA, 19 nt, Human
uacaggcaugagccaccgc

SEQ ID NO: 486330 - RNA, 32 nt, Human
uacaggcaugagccaccgcacccagcaagagu

SEQ ID NO: 486331 - RNA, 32 nt, Human
uacaggcaugagccaccgcacccagcccaugu

SEQ ID NO: 486332 - RNA, 32 nt, Human
uacaggcaugagccaccgcacccagccuacaa

SEQ ID NO: 486333 - RNA, 32 nt, Human
uacaggcaugagccaccgcacccagccuauuu

SEQ ID NO: 486334 - RNA, 32 nt, Human
uacaggcaugagccaccgcacccagccugcau

SEQ ID NO: 486335 - RNA, 32 nt, Human
uacaggcaugagccaccgcacccagccugguu

SEQ ID NO: 486336 - RNA, 32 nt, Human
uacaggcaugagccaccgcacccggccugcca

SEQ ID NO: 486337 - RNA, 32 nt, Human
uacaggcaugagccaccgcacccggccuuuuu

SEQ ID NO: 486338 - RNA, 32 nt, Human
uacaggcaugagccaccgcaccgggcccuccu

SEQ ID NO: 486339 - RNA, 32 nt, Human
uacaggcaugagccaccgcaccugacccaggc

SEQ ID NO: 486340 - RNA, 32 nt, Human
uacaggcaugagccaccgcaccuggcccuucu

SEQ ID NO: 486341 - RNA, 32 nt, Human
uacaggcaugagccaccgcaccuggccuuccc

SEQ ID NO: 486342 - RNA, 32 nt, Human
uacaggcaugagccaccgcaccuggucugauc

SEQ ID NO: 486343 - RNA, 32 nt, Human
uacaggcaugagccaccgcacucggccaggag

SEQ ID NO: 486344 - RNA, 32 nt, Human
uacaggcaugagccaccgcagccggccccauu

SEQ ID NO: 486345 - RNA, 20 nt, Human
uacaggcaugagccaccgcg

SEQ ID NO: 486346 - RNA, 32 nt, Human
uacaggcaugagccaccgcgccaggccaaggc

SEQ ID NO: 486347 - RNA, 32 nt, Human
uacaggcaugagccaccgcgcccagccaagga

SEQ ID NO: 486348 - RNA, 32 nt, Human
uacaggcaugagccaccgcgcccagccuaauu

SEQ ID NO: 486349 - RNA, 32 nt, Human
uacaggcaugagccaccgcgcccagcugccuu

SEQ ID NO: 486350 - RNA, 32 nt, Human
uacaggcaugagccaccgcgcccggccacgug

SEQ ID NO: 486351 - RNA, 32 nt, Human
uacaggcaugagccaccgcgcccggccagauu

SEQ ID NO: 486352 - RNA, 32 nt, Human
uacaggcaugagccaccgcgcccggcccaauc

SEQ ID NO: 486353 - RNA, 32 nt, Human
uacaggcaugagccaccgcgcccggccccaau

SEQ ID NO: 486354 - RNA, 32 nt, Human
uacaggcaugagccaccgcgcccggccucaau

SEQ ID NO: 486355 - RNA, 32 nt, Human
uacaggcaugagccaccgcgcccggccuguua

SEQ ID NO: 486356 - RNA, 32 nt, Human
uacaggcaugagccaccgcgcccggccuguuu

SEQ ID NO: 486357 - RNA, 32 nt, Human
uacaggcaugagccaccgcgcccugccccuac

SEQ ID NO: 486358 - RNA, 32 nt, Human
uacaggcaugagccaccgcgccugaccacauu

SEQ ID NO: 486359 - RNA, 32 nt, Human
uacaggcaugagccaccgcgccuggccaaugc

SEQ ID NO: 486360 - RNA, 32 nt, Human
uacaggcaugagccaccgcgccuggccgcuuu

SEQ ID NO: 486361 - RNA, 32 nt, Human
uacaggcaugagccaccgcgccuggccuaguu

SEQ ID NO: 486362 - RNA, 32 nt, Human
uacaggcaugagccaccgcgccuggccucugc

SEQ ID NO: 486363 - RNA, 32 nt, Human
uacaggcaugagccaccgcgcuuggccagacu

SEQ ID NO: 486364 - RNA, 32 nt, Human
uacaggcaugagccaccgcucccagccuuuga

SEQ ID NO: 486365 - RNA, 32 nt, Human
uacaggcaugagccaccgcuccuggccggguu

SEQ ID NO: 486366 - RNA, 32 nt, Human
uacaggcaugagccaccgcucucggcccccuu

SEQ ID NO: 486367 - RNA, 32 nt, Human
uacaggcaugagccaccgugccaggccaacag

SEQ ID NO: 486368 - RNA, 23 nt, Human
uacaggcaugagccaccgugccc

SEQ ID NO: 486369 - RNA, 32 nt, Human
uacaggcaugagccaccgugcccagccaaaug

SEQ ID NO: 486370 - RNA, 32 nt, Human
uacaggcaugagccaccgugcccagccaagaa

SEQ ID NO: 486371 - RNA, 32 nt, Human
uacaggcaugagccaccgugcccagccaggca

SEQ ID NO: 486372 - RNA, 32 nt, Human
uacaggcaugagccaccgugcccagcccaaaa

SEQ ID NO: 486373 - RNA, 32 nt, Human
uacaggcaugagccaccgugcccagccuacug

SEQ ID NO: 486374 - RNA, 32 nt, Human
uacaggcaugagccaccgugcccagccuauca

SEQ ID NO: 486375 - RNA, 32 nt, Human
uacaggcaugagccaccgugcccggcccuuua

SEQ ID NO: 486376 - RNA, 32 nt, Human
uacaggcaugagccaccgugcccggccucauc

SEQ ID NO: 486377 - RNA, 32 nt, Human
uacaggcaugagccaccgugcccggccucuua

SEQ ID NO: 486378 - RNA, 32 nt, Human
uacaggcaugagccaccgugcccggcuguauu

SEQ ID NO: 486379 - RNA, 32 nt, Human
uacaggcaugagccaccgugcccggcuucaca

SEQ ID NO: 486380 - RNA, 32 nt, Human
uacaggcaugagccaccgugccuggccaacau

SEQ ID NO: 486381 - RNA, 32 nt, Human
uacaggcaugagccaccgugccuggccucauu

SEQ ID NO: 486382 - RNA, 32 nt, Human
uacaggcaugagccaccgugccuggcuuugcu

SEQ ID NO: 486383 - RNA, 32 nt, Human
uacaggcaugagccaccgugccuguccuagaa

SEQ ID NO: 486384 - RNA, 32 nt, Human
uacaggcaugagccaccgugcgggccucuacu

SEQ ID NO: 486385 - RNA, 32 nt, Human
uacaggcaugagccaccguggccggccaagau

SEQ ID NO: 486386 - RNA, 32 nt, Human
uacaggcaugagccaccucacccagcauuuuu

SEQ ID NO: 486387 - RNA, 32 nt, Human
uacaggcaugagccaccucacccagcuccggu

SEQ ID NO: 486388 - RNA, 32 nt, Human
uacaggcaugagccaccucacuuggcccaauu

SEQ ID NO: 486389 - RNA, 32 nt, Human
uacaggcaugagccaccucgccuagcccaccg

SEQ ID NO: 486390 - RNA, 32 nt, Human
uacaggcaugagccaccucgccuggccagaug

SEQ ID NO: 486391 - RNA, 32 nt, Human
uacaggcaugagccaccugcccagccauguuu

SEQ ID NO: 486392 - RNA, 32 nt, Human
uacaggcaugagccacggcacccagccucauu

SEQ ID NO: 486393 - RNA, 32 nt, Human
uacaggcaugagccacggcgccuggcccccaa

SEQ ID NO: 486394 - RNA, 19 nt, Human
uacaggcaugagccacuac

SEQ ID NO: 486395 - RNA, 32 nt, Human
uacaggcaugagccacuacacccagccgauuu

SEQ ID NO: 486396 - RNA, 32 nt, Human
uacaggcaugagccacuacgccuggccaagua

SEQ ID NO: 486397 - RNA, 32 nt, Human
uacaggcaugagccacugcacccaacuccucu

SEQ ID NO: 486398 - RNA, 32 nt, Human
uacaggcaugagccacugcacccagacuagaa

SEQ ID NO: 486399 - RNA, 32 nt, Human
uacaggcaugagccacugcacccagccaagug

SEQ ID NO: 486400 - RNA, 32 nt, Human
uacaggcaugagccacugcacccagcccaguu

SEQ ID NO: 486401 - RNA, 32 nt, Human
uacaggcaugagccacugcacccagccgauag

SEQ ID NO: 486402 - RNA, 32 nt, Human
uacaggcaugagccacugcacccagccucuua

SEQ ID NO: 486403 - RNA, 32 nt, Human
uacaggcaugagccacugcacccagccuuggc

SEQ ID NO: 486404 - RNA, 32 nt, Human
uacaggcaugagccacugcacccggccaaguc

SEQ ID NO: 486405 - RNA, 32 nt, Human
uacaggcaugagccacugcacccggccuuucu

SEQ ID NO: 486406 - RNA, 32 nt, Human
uacaggcaugagccacugcacccggcuugaau

SEQ ID NO: 486407 - RNA, 32 nt, Human
uacaggcaugagccacugcaccuggcccacuu

SEQ ID NO: 486408 - RNA, 32 nt, Human
uacaggcaugagccacugcaccuggcccuuuu

SEQ ID NO: 486409 - RNA, 32 nt, Human
uacaggcaugagccacugcaccuggccgguua

SEQ ID NO: 486410 - RNA, 32 nt, Human
uacaggcaugagccacugcaccuggccuacgu

SEQ ID NO: 486411 - RNA, 32 nt, Human
uacaggcaugagccacugcaccuggccuagga

SEQ ID NO: 486412 - RNA, 32 nt, Human
uacaggcaugagccacugcauccggccuguua

SEQ ID NO: 486413 - RNA, 32 nt, Human
uacaggcaugagccacugcgccagccuaaagu

SEQ ID NO: 486414 - RNA, 32 nt, Human
uacaggcaugagccacugcgcccggccaagaa

SEQ ID NO: 486415 - RNA, 32 nt, Human
uacaggcaugagccacugcgcccggccaauuu

SEQ ID NO: 486416 - RNA, 32 nt, Human
uacaggcaugagccacugcgcccggccaugga

SEQ ID NO: 486417 - RNA, 32 nt, Human
uacaggcaugagccacugcgcccggcccaaau

SEQ ID NO: 486418 - RNA, 32 nt, Human
uacaggcaugagccacugcgcccggccuccaa

SEQ ID NO: 486419 - RNA, 32 nt, Human
uacaggcaugagccacugcgcccggccucuuu

SEQ ID NO: 486420 - RNA, 32 nt, Human
uacaggcaugagccacugcgcccggccugggu

SEQ ID NO: 486421 - RNA, 32 nt, Human
uacaggcaugagccacugcgcccggcugagug

SEQ ID NO: 486422 - RNA, 32 nt, Human
uacaggcaugagccacugcgccuggccagcaa

SEQ ID NO: 486423 - RNA, 32 nt, Human
uacaggcaugagccacugcgccuggccggaca

SEQ ID NO: 486424 - RNA, 32 nt, Human
uacaggcaugagccacugcgccuggccucaga

SEQ ID NO: 486425 - RNA, 32 nt, Human
uacaggcaugagccacugggcgcggccagaua

SEQ ID NO: 486426 - RNA, 32 nt, Human
uacaggcaugagccacuguacccagccaaaau

SEQ ID NO: 486427 - RNA, 32 nt, Human
uacaggcaugagccacugugcccagcccaggc

SEQ ID NO: 486428 - RNA, 32 nt, Human
uacaggcaugagccacugugcccagcccuuuu

SEQ ID NO: 486429 - RNA, 32 nt, Human
uacaggcaugagccacugugcccagccuguuc

SEQ ID NO: 486430 - RNA, 32 nt, Human
uacaggcaugagccacugugcccagcugggau

SEQ ID NO: 486431 - RNA, 32 nt, Human
uacaggcaugagccacugugcccagucaggau

SEQ ID NO: 486432 - RNA, 32 nt, Human
uacaggcaugagccacugugcccggcaagcag

SEQ ID NO: 486433 - RNA, 32 nt, Human
uacaggcaugagccacugugcccggccacuuu

SEQ ID NO: 486434 - RNA, 32 nt, Human
uacaggcaugagccacugugcccggccaguug

SEQ ID NO: 486435 - RNA, 32 nt, Human
uacaggcaugagccacugugcccggccuauga

SEQ ID NO: 486436 - RNA, 32 nt, Human
uacaggcaugagccacugugcccggccuggga

SEQ ID NO: 486437 - RNA, 32 nt, Human
uacaggcaugagccacugugcccggccuuuug

SEQ ID NO: 486438 - RNA, 32 nt, Human
uacaggcaugagccacugugccugaccuuaca

SEQ ID NO: 486439 - RNA, 32 nt, Human
uacaggcaugagccacugugccuggccaacau

SEQ ID NO: 486440 - RNA, 32 nt, Human
uacaggcaugagccacugugccuggccagaaa

SEQ ID NO: 486441 - RNA, 32 nt, Human
uacaggcaugagccacugugccuggccccuuc

SEQ ID NO: 486442 - RNA, 32 nt, Human
uacaggcaugagccacugugccuggccugagg

SEQ ID NO: 486443 - RNA, 32 nt, Human
uacaggcaugagccacugugccuggcuauucu

SEQ ID NO: 486444 - RNA, 32 nt, Human
uacaggcaugagccacugugccuguccuaccc

SEQ ID NO: 486445 - RNA, 32 nt, Human
uacaggcaugagccacugugcucagccuucau

SEQ ID NO: 486446 - RNA, 32 nt, Human
uacaggcaugagccacugugcuuggccuguua

SEQ ID NO: 486447 - RNA, 32 nt, Human
uacaggcaugagccacuguguccggucuugag

SEQ ID NO: 486448 - RNA, 32 nt, Human
uacaggcaugagccacuguguccuucccugcc

SEQ ID NO: 486449 - RNA, 32 nt, Human
uacaggcaugagccacugugucuggcccuauu

SEQ ID NO: 486450 - RNA, 32 nt, Human
uacaggcaugagccacuguguucaguuggcca

SEQ ID NO: 486451 - RNA, 19 nt, Human
uacaggcaugagccaucac

SEQ ID NO: 486452 - RNA, 32 nt, Human
uacaggcaugagccauugugcccagccuauau

SEQ ID NO: 486453 - RNA, 32 nt, Human
uacaggcaugagcccuugugcccagcccauag

SEQ ID NO: 486454 - RNA, 20 nt, Human
uacaggcaugagcuaccacg

SEQ ID NO: 486455 - RNA, 19 nt, Human
uacaggcaugagcuacuac

SEQ ID NO: 486456 - RNA, 32 nt, Human
uacaggcaugagcuacugugcccagccucuau

SEQ ID NO: 486457 - RNA, 19 nt, Human
uacaggcaugagucaccac

SEQ ID NO: 486458 - RNA, 23 nt, Human
uacaggcaugagucaccacaccu

SEQ ID NO: 486459 - RNA, 19 nt, Human
uacaggcaugagucaccau

SEQ ID NO: 486460 - RNA, 20 nt, Human
uacaggcaugagucacuacg

SEQ ID NO: 486461 - RNA, 32 nt, Human
uacaggcaugcaccaauuuuuguauuuuuagu

SEQ ID NO: 486462 - RNA, 19 nt, Human
uacaggcaugcaccaccac

SEQ ID NO: 486463 - RNA, 23 nt, Human
uacaggcaugcaccaccacaccc

SEQ ID NO: 486464 - RNA, 32 nt, Human
uacaggcaugcaccaccacacccggcuaauuu

SEQ ID NO: 486465 - RNA, 20 nt, Human
uacaggcaugcaccaccacg

SEQ ID NO: 486466 - RNA, 23 nt, Human
uacaggcaugcaccaccacgccc

SEQ ID NO: 486467 - RNA, 20 nt, Human
uacaggcaugcaccaccaug

SEQ ID NO: 486468 - RNA, 23 nt, Human
uacaggcaugcaccaccaugccc

SEQ ID NO: 486469 - RNA, 32 nt, Human
uacaggcaugcaccaccaugcccagcuaauuu

SEQ ID NO: 486470 - RNA, 32 nt, Human
uacaggcaugcaccaccaugcccaguuaauaa

SEQ ID NO: 486471 - RNA, 32 nt, Human
uacaggcaugcaccaccaugcccggcuaauuu

SEQ ID NO: 486472 - RNA, 23 nt, Human
uacaggcaugcaccaccaugccu

SEQ ID NO: 486473 - RNA, 32 nt, Human
uacaggcaugcaccaccaugccuagcuaauuu

SEQ ID NO: 486474 - RNA, 32 nt, Human
uacaggcaugcaccaccaugccuggcuaauuu

SEQ ID NO: 486475 - RNA, 32 nt, Human
uacaggcaugcaccaccaugccuggcuacuuu

SEQ ID NO: 486476 - RNA, 18 nt, Human
uacaggcaugcacuacca

SEQ ID NO: 486477 - RNA, 19 nt, Human
uacaggcaugcacuaccac

SEQ ID NO: 486478 - RNA, 20 nt, Human
uacaggcaugcacuaccacg

SEQ ID NO: 486479 - RNA, 20 nt, Human
uacaggcaugcaucaccaug

SEQ ID NO: 486480 - RNA, 23 nt, Human
uacaggcaugcaucaccaugucc

SEQ ID NO: 486481 - RNA, 20 nt, Human
uacaggcaugcaucacuaug

SEQ ID NO: 486482 - RNA, 32 nt, Human
uacaggcaugcauccccaugcccagcuaauuu

SEQ ID NO: 486483 - RNA, 19 nt, Human
uacaggcaugcgcagccac

SEQ ID NO: 486484 - RNA, 19 nt, Human
uacaggcaugcgccaccac

SEQ ID NO: 486485 - RNA, 23 nt, Human
uacaggcaugcgccaccacaccc

SEQ ID NO: 486486 - RNA, 20 nt, Human
uacaggcaugcgccaccacg

SEQ ID NO: 486487 - RNA, 23 nt, Human
uacaggcaugcgccaccacgccc

SEQ ID NO: 486488 - RNA, 19 nt, Human
uacaggcaugcgccaccau

SEQ ID NO: 486489 - RNA, 32 nt, Human
uacaggcaugcgccaccauacccaccagauuu

SEQ ID NO: 486490 - RNA, 20 nt, Human
uacaggcaugcgccaccaug

SEQ ID NO: 486491 - RNA, 32 nt, Human
uacaggcaugcgccaccaugaccggcuaauuu

SEQ ID NO: 486492 - RNA, 32 nt, Human
uacaggcaugcgccaccaugccaggcuaacuu

SEQ ID NO: 486493 - RNA, 32 nt, Human
uacaggcaugcgccaccaugcccagcuaauug

SEQ ID NO: 486494 - RNA, 32 nt, Human
uacaggcaugcgccaccaugcccagcuaauuu

SEQ ID NO: 486495 - RNA, 32 nt, Human
uacaggcaugcgccaccaugcccagcugauuu

SEQ ID NO: 486496 - RNA, 32 nt, Human
uacaggcaugcgccaccaugccccacuaauuc

SEQ ID NO: 486497 - RNA, 32 nt, Human
uacaggcaugcgccaccaugcccggcuaauuu

SEQ ID NO: 486498 - RNA, 32 nt, Human
uacaggcaugcgccaccaugccuggcuaauuu

SEQ ID NO: 486499 - RNA, 18 nt, Human
uacaggcaugcgccacua

SEQ ID NO: 486500 - RNA, 20 nt, Human
uacaggcaugcgcuaccacg

SEQ ID NO: 486501 - RNA, 19 nt, Human
uacaggcaugcgucaccac

SEQ ID NO: 486502 - RNA, 20 nt, Human
uacaggcaugcgucaccacg

SEQ ID NO: 486503 - RNA, 20 nt, Human
uacaggcaugcuccaccaug

SEQ ID NO: 486504 - RNA, 32 nt, Human
uacaggcaugcuccaccaugcccagcuaauuu

SEQ ID NO: 486505 - RNA, 19 nt, Human
uacaggcaugggccaccac

SEQ ID NO: 486506 - RNA, 23 nt, Human
uacaggcaugggccaccacaccc

SEQ ID NO: 486507 - RNA, 23 nt, Human
uacaggcaugggccaccacagcc

SEQ ID NO: 486508 - RNA, 20 nt, Human
uacaggcaugggccaccacg

SEQ ID NO: 486509 - RNA, 32 nt, Human
uacaggcaugggccaccaugcccggcuaauuu

SEQ ID NO: 486510 - RNA, 19 nt, Human
uacaggcaugggucaccgc

SEQ ID NO: 486511 - RNA, 32 nt, Human
uacaggcaugggucacugugcccagccuuuuc

SEQ ID NO: 486512 - RNA, 19 nt, Human
uacaggcauguaccaccac

SEQ ID NO: 486513 - RNA, 32 nt, Human
uacaggcauguaccaucacacccggcuaauuu

SEQ ID NO: 486514 - RNA, 20 nt, Human
uacaggcauguaccaucacg

SEQ ID NO: 486515 - RNA, 23 nt, Human
uacaggcauguaccaucacgccc

SEQ ID NO: 486516 - RNA, 20 nt, Human
uacaggcauguacuaccaug

SEQ ID NO: 486517 - RNA, 20 nt, Human
uacaggcaugugccacaacg

SEQ ID NO: 486518 - RNA, 19 nt, Human
uacaggcaugugccaccac

SEQ ID NO: 486519 - RNA, 20 nt, Human
uacaggcaugugccaccacg

SEQ ID NO: 486520 - RNA, 23 nt, Human
uacaggcaugugccaccacgccc

SEQ ID NO: 486521 - RNA, 23 nt, Human
uacaggcaugugccaccacgccu

SEQ ID NO: 486522 - RNA, 20 nt, Human
uacaggcaugugccaccaug

SEQ ID NO: 486523 - RNA, 23 nt, Human
uacaggcaugugccaccaugccc

SEQ ID NO: 486524 - RNA, 32 nt, Human
uacaggcaugugccaccaugcccagcuaauuu

SEQ ID NO: 486525 - RNA, 32 nt, Human
uacaggcaugugccaccaugcccggcuaauuu

SEQ ID NO: 486526 - RNA, 23 nt, Human
uacaggcaugugccaccaugccu

SEQ ID NO: 486527 - RNA, 32 nt, Human
uacaggcaugugccaccaugccugaccaauuu

SEQ ID NO: 486528 - RNA, 32 nt, Human
uacaggcaugugccaccaugccuggcuaauuu

SEQ ID NO: 486529 - RNA, 32 nt, Human
uacaggcaugugccaccauguaauuagcccgg

SEQ ID NO: 486530 - RNA, 32 nt, Human
uacaggcaugugccaccauguccagcuaauuu

SEQ ID NO: 486531 - RNA, 24 nt, Human
uacaggcaugugccacccaccacg

SEQ ID NO: 486532 - RNA, 20 nt, Human
uacaggcaugugccaccgcg

SEQ ID NO: 486533 - RNA, 32 nt, Human
uacaggcaugugccacgacacccggccaauuu

SEQ ID NO: 486534 - RNA, 23 nt, Human
uacaggcauguggcaccaugccc

SEQ ID NO: 486535 - RNA, 32 nt, Human
uacaggcauguggcaccaugcccgcuaaguuu

SEQ ID NO: 486536 - RNA, 32 nt, Human
uacaggcauguggcaccaugccuggcuaauuu

SEQ ID NO: 486537 - RNA, 19 nt, Human
uacaggcaugugucaccac

SEQ ID NO: 486538 - RNA, 20 nt, Human
uacaggcaugugucaccacg

SEQ ID NO: 486539 - RNA, 20 nt, Human
uacaggcaugugucaccaug

SEQ ID NO: 486540 - RNA, 32 nt, Human
uacaggcaugugucaccaugcccagcuaauuu

SEQ ID NO: 486541 - RNA, 32 nt, Human
uacaggcaugugucaccaugcccggcuaauuu

SEQ ID NO: 486542 - RNA, 32 nt, Human
uacaggcauguuucaccauguuggucaggcug

SEQ ID NO: 486543 - RNA, 32 nt, Human
uacaggcauuagccaccaugccuggccuauuc

SEQ ID NO: 486544 - RNA, 32 nt, Human
uacaggcauuagccaccaugccuggccuggag

SEQ ID NO: 486545 - RNA, 32 nt, Human
uacaggccaacaggaacaccuggcuccagcca

SEQ ID NO: 486546 - RNA, 20 nt, Human
uacaggccacggccaccaug

SEQ ID NO: 486547 - RNA, 32 nt, Human
uacaggccacggccaccaugccuggcuaaucu

SEQ ID NO: 486548 - RNA, 32 nt, Human
uacaggccaggccuagaaaugaugcauaucau

SEQ ID NO: 486549 - RNA, 19 nt, Human
uacaggcccacacuaccac

SEQ ID NO: 486550 - RNA, 32 nt, Human
uacaggcccacacuaccacacccggcuaauuu

SEQ ID NO: 486551 - RNA, 32 nt, Human
uacaggccccuguacagagaagugucucacgu

SEQ ID NO: 486552 - RNA, 32 nt, Human
uacaggcccucccuccccuuggccucuaggag

SEQ ID NO: 486553 - RNA, 19 nt, Human
uacaggcccugccaccacg

SEQ ID NO: 486554 - RNA, 32 nt, Human
uacaggcccugccaccacgcccggcuaauuug

SEQ ID NO: 486555 - RNA, 20 nt, Human
uacaggccucagccaccaug

SEQ ID NO: 486556 - RNA, 32 nt, Human
uacaggccucagccaccaugcccagcccugcg

SEQ ID NO: 486557 - RNA, 32 nt, Human
uacaggccuccacccaaccaccauccccuugg

SEQ ID NO: 486558 - RNA, 32 nt, Human
uacaggccucugccaccaugcucagcuauuuu

SEQ ID NO: 486559 - RNA, 20 nt, Human
uacaggccugagccaccacg

SEQ ID NO: 486560 - RNA, 32 nt, Human
uacaggccugagccaccauacccagcaaguua

SEQ ID NO: 486561 - RNA, 20 nt, Human
uacaggccugagccaccaug

SEQ ID NO: 486562 - RNA, 32 nt, Human
uacaggccugagccaccaugcccagcugaauu

SEQ ID NO: 486563 - RNA, 32 nt, Human
uacaggccugagccaccccacccggccuauuu

SEQ ID NO: 486564 - RNA, 20 nt, Human
uacaggccugagccaccgcg

SEQ ID NO: 486565 - RNA, 32 nt, Human
uacaggccugagccaccgcgcccagucucucc

SEQ ID NO: 486566 - RNA, 32 nt, Human
uacaggccugagccaccgcgcccggccuauuu

SEQ ID NO: 486567 - RNA, 32 nt, Human
uacaggccugagccaccgcguccggccuccau

SEQ ID NO: 486568 - RNA, 32 nt, Human
uacaggccugagccaccguaucuggcccaaaa

SEQ ID NO: 486569 - RNA, 32 nt, Human
uacaggccugagccaccgugcccagccaaaau

SEQ ID NO: 486570 - RNA, 32 nt, Human
uacaggccugagccaccgugccuggccccuaa

SEQ ID NO: 486571 - RNA, 32 nt, Human
uacaggccugagccaccgugccuggccuuuua

SEQ ID NO: 486572 - RNA, 32 nt, Human
uacaggccugagccacugcgcccagccaauac

SEQ ID NO: 486573 - RNA, 32 nt, Human
uacaggccugagccacugcgcccagccaggau

SEQ ID NO: 486574 - RNA, 20 nt, Human
uacaggccugcgccaccacg

SEQ ID NO: 486575 - RNA, 19 nt, Human
uacaggcgaucaccaccac

SEQ ID NO: 486576 - RNA, 20 nt, Human
uacaggcgcaaaccaccaug

SEQ ID NO: 486577 - RNA, 19 nt, Human
uacaggcgcaagccacuac

SEQ ID NO: 486578 - RNA, 18 nt, Human
uacaggcgcacaccacca

SEQ ID NO: 486579 - RNA, 19 nt, Human
uacaggcgcacaccaccac

SEQ ID NO: 486580 - RNA, 32 nt, Human
uacaggcgcacaccaccacacuggcuaauuuu

SEQ ID NO: 486581 - RNA, 20 nt, Human
uacaggcgcacaccaccacg

SEQ ID NO: 486582 - RNA, 32 nt, Human
uacaggcgcacaccaccaugcccagcuaacuu

SEQ ID NO: 486583 - RNA, 32 nt, Human
uacaggcgcacaucaccaugcccaaccuccaa

SEQ ID NO: 486584 - RNA, 19 nt, Human
uacaggcgcacgccaccac

SEQ ID NO: 486585 - RNA, 20 nt, Human
uacaggcgcacgccaccacg

SEQ ID NO: 486586 - RNA, 20 nt, Human
uacaggcgcacgccaccaug

SEQ ID NO: 486587 - RNA, 32 nt, Human
uacaggcgcacgccaccaugcccagcuaauuu

SEQ ID NO: 486588 - RNA, 19 nt, Human
uacaggcgcacgucaccac

SEQ ID NO: 486589 - RNA, 19 nt, Human
uacaggcgcaugccaccac

SEQ ID NO: 486590 - RNA, 20 nt, Human
uacaggcgcaugccaccaug

SEQ ID NO: 486591 - RNA, 32 nt, Human
uacaggcgcaugccaccaugccaggcuaauuu

SEQ ID NO: 486592 - RNA, 32 nt, Human
uacaggcgcaugccaccaugcccagcuaauuu

SEQ ID NO: 486593 - RNA, 20 nt, Human
uacaggcgcaugccaucacg

SEQ ID NO: 486594 - RNA, 20 nt, Human
uacaggcgcaugcuacgacg

SEQ ID NO: 486595 - RNA, 20 nt, Human
uacaggcgccagccaccaug

SEQ ID NO: 486596 - RNA, 32 nt, Human
uacaggcgccagccaccaugccuggcuaauuu

SEQ ID NO: 486597 - RNA, 18 nt, Human
uacaggcgcccaccacca

SEQ ID NO: 486598 - RNA, 19 nt, Human
uacaggcgcccaccaccac

SEQ ID NO: 486599 - RNA, 20 nt, Human
uacaggcgcccaccaccacg

SEQ ID NO: 486600 - RNA, 19 nt, Human
uacaggcgcccaccaccau

SEQ ID NO: 486601 - RNA, 20 nt, Human
uacaggcgcccaccaccaug

SEQ ID NO: 486602 - RNA, 23 nt, Human
uacaggcgcccaccaccaugccc

SEQ ID NO: 486603 - RNA, 32 nt, Human
uacaggcgcccaccaccaugcccagcuaauuu

SEQ ID NO: 486604 - RNA, 32 nt, Human
uacaggcgcccaccaccaugcccggcuaauuu

SEQ ID NO: 486605 - RNA, 20 nt, Human
uacaggcgcccaccaccgcg

SEQ ID NO: 486606 - RNA, 20 nt, Human
uacaggcgcccaccaccucg

SEQ ID NO: 486607 - RNA, 20 nt, Human
uacaggcgcccaccacgacg

SEQ ID NO: 486608 - RNA, 32 nt, Human
uacaggcgcccaccacuaugcccagcuaauuu

SEQ ID NO: 486609 - RNA, 20 nt, Human
uacaggcgcccaccaucacg

SEQ ID NO: 486610 - RNA, 32 nt, Human
uacaggcgcccaccgccaugcccggcuaauuu

SEQ ID NO: 486611 - RNA, 19 nt, Human
uacaggcgcccaccuccac

SEQ ID NO: 486612 - RNA, 20 nt, Human
uacaggcgcccacgaccacg

SEQ ID NO: 486613 - RNA, 20 nt, Human
uacaggcgcccgcaaccacg

SEQ ID NO: 486614 - RNA, 20 nt, Human
uacaggcgcccgccaacacg

SEQ ID NO: 486615 - RNA, 19 nt, Human
uacaggcgcccgccaccac

SEQ ID NO: 486616 - RNA, 20 nt, Human
uacaggcgcccgccaccacg

SEQ ID NO: 486617 - RNA, 20 nt, Human
uacaggcgcccgccaccaug

SEQ ID NO: 486618 - RNA, 23 nt, Human
uacaggcgcccgccaccaugccc

SEQ ID NO: 486619 - RNA, 32 nt, Human
uacaggcgcccgccaccaugcccagcuaauuu

SEQ ID NO: 486620 - RNA, 32 nt, Human
uacaggcgcccgccaccaugccccggcuauuu

SEQ ID NO: 486621 - RNA, 32 nt, Human
uacaggcgcccgccaccaugcccggcuaauuu

SEQ ID NO: 486622 - RNA, 32 nt, Human
uacaggcgcccgccaccaugccuggcuaauuu

SEQ ID NO: 486623 - RNA, 20 nt, Human
uacaggcgcccgccaccucg

SEQ ID NO: 486624 - RNA, 20 nt, Human
uacaggcgcccgccacuacg

SEQ ID NO: 486625 - RNA, 20 nt, Human
uacaggcgcccgccaucacg

SEQ ID NO: 486626 - RNA, 32 nt, Human
uacaggcgcccgccaucgugcccagcuaauuu

SEQ ID NO: 486627 - RNA, 20 nt, Human
uacaggcgcccgccgccacg

SEQ ID NO: 486628 - RNA, 20 nt, Human
uacaggcgcccggccaccac

SEQ ID NO: 486629 - RNA, 19 nt, Human
uacaggcgcccgucaccac

SEQ ID NO: 486630 - RNA, 20 nt, Human
uacaggcgccuaccaccaug

SEQ ID NO: 486631 - RNA, 23 nt, Human
uacaggcgccuaccaccaugccc

SEQ ID NO: 486632 - RNA, 32 nt, Human
uacaggcgccuaccaccaugcccagcuaauuu

SEQ ID NO: 486633 - RNA, 20 nt, Human
uacaggcgccuaucaccaug

SEQ ID NO: 486634 - RNA, 18 nt, Human
uacaggcgccucaccaug

SEQ ID NO: 486635 - RNA, 20 nt, Human
uacaggcgccugccacaacg

SEQ ID NO: 486636 - RNA, 19 nt, Human
uacaggcgccugccaccac

SEQ ID NO: 486637 - RNA, 20 nt, Human
uacaggcgccugccaccacg

SEQ ID NO: 486638 - RNA, 20 nt, Human
uacaggcgccugccaccaug

SEQ ID NO: 486639 - RNA, 23 nt, Human
uacaggcgccugccaccaugccc

SEQ ID NO: 486640 - RNA, 32 nt, Human
uacaggcgccugccaccaugcccgccuaauuu

SEQ ID NO: 486641 - RNA, 32 nt, Human
uacaggcgccugccaccaugccuagcaaauuu

SEQ ID NO: 486642 - RNA, 32 nt, Human
uacaggcgccugccaccaugccuggcuaauuu

SEQ ID NO: 486643 - RNA, 32 nt, Human
uacaggcgccugccaccaugccuggcugauau

SEQ ID NO: 486644 - RNA, 32 nt, Human
uacaggcgccugccaccaugcugggcuaauuu

SEQ ID NO: 486645 - RNA, 20 nt, Human
uacaggcgccugccagcacg

SEQ ID NO: 486646 - RNA, 19 nt, Human
uacaggcgccugcuaccac

SEQ ID NO: 486647 - RNA, 20 nt, Human
uacaggcgccugcuaccaug

SEQ ID NO: 486648 - RNA, 32 nt, Human
uacaggcgccugcuaccaugccuggcuaauuu

SEQ ID NO: 486649 - RNA, 19 nt, Human
uacaggcgcgagccaccac

SEQ ID NO: 486650 - RNA, 32 nt, Human
uacaggcgcgagccaccaugcccggccagugu

SEQ ID NO: 486651 - RNA, 20 nt, Human
uacaggcgcgagccaccgcg

SEQ ID NO: 486652 - RNA, 32 nt, Human
uacaggcgcgagccaccgcgcccagccuacac

SEQ ID NO: 486653 - RNA, 32 nt, Human
uacaggcgcgagccaccgcgcccgacagcagu

SEQ ID NO: 486654 - RNA, 17 nt, Human
uacaggcgcgagccacg

SEQ ID NO: 486655 - RNA, 32 nt, Human
uacaggcgcgagccacggcgcccagccuugaa

SEQ ID NO: 486656 - RNA, 20 nt, Human
uacaggcgcgcaccaccacg

SEQ ID NO: 486657 - RNA, 32 nt, Human
uacaggcgcgcaucaccaugcccagcuaauuu

SEQ ID NO: 486658 - RNA, 20 nt, Human
uacaggcgcgcgccaccacg

SEQ ID NO: 486659 - RNA, 20 nt, Human
uacaggcgcgcgccaccagg

SEQ ID NO: 486660 - RNA, 20 nt, Human
uacaggcgcgcgccaccaug

SEQ ID NO: 486661 - RNA, 19 nt, Human
uacaggcgcgcgccgccac

SEQ ID NO: 486662 - RNA, 20 nt, Human
uacaggcgcgcgccgccacg

SEQ ID NO: 486663 - RNA, 19 nt, Human
uacaggcgcguaucaccau

SEQ ID NO: 486664 - RNA, 19 nt, Human
uacaggcgcgugccaccac

SEQ ID NO: 486665 - RNA, 20 nt, Human
uacaggcgcgugccaccacg

SEQ ID NO: 486666 - RNA, 19 nt, Human
uacaggcgcgugccaccau

SEQ ID NO: 486667 - RNA, 32 nt, Human
uacaggcgcgugccaccauaccgagcuaguuu

SEQ ID NO: 486668 - RNA, 32 nt, Human
uacaggcgcgugccaccaugccuggcuuuugu

SEQ ID NO: 486669 - RNA, 19 nt, Human
uacaggcgcuggccaccac

SEQ ID NO: 486670 - RNA, 17 nt, Human
uacaggcgcuguuacca

SEQ ID NO: 486671 - RNA, 20 nt, Human
uacaggcgggagccaccaug

SEQ ID NO: 486672 - RNA, 32 nt, Human
uacaggcgggagccaccaugauggccaacuuu

SEQ ID NO: 486673 - RNA, 32 nt, Human
uacaggcgggagccaccaugccuggccagaac

SEQ ID NO: 486674 - RNA, 20 nt, Human
uacaggcgggcaacacuacg

SEQ ID NO: 486675 - RNA, 19 nt, Human
uacaggcguaagccaccac

SEQ ID NO: 486676 - RNA, 32 nt, Human
uacaggcguaagccaccacaccagcugaugca

SEQ ID NO: 486677 - RNA, 32 nt, Human
uacaggcguaagccaccacacccagcccaaaa

SEQ ID NO: 486678 - RNA, 32 nt, Human
uacaggcguaagccaccaugccuggcaacaua

SEQ ID NO: 486679 - RNA, 18 nt, Human
uacaggcguaagccacua

SEQ ID NO: 486680 - RNA, 32 nt, Human
uacaggcguaagccacugcgcccagccacugc

SEQ ID NO: 486681 - RNA, 32 nt, Human
uacaggcguaagggcccacgcccagccuacca

SEQ ID NO: 486682 - RNA, 20 nt, Human
uacaggcguacaccaccaug

SEQ ID NO: 486683 - RNA, 32 nt, Human
uacaggcguacaccaccaugccuggcuaauuu

SEQ ID NO: 486684 - RNA, 32 nt, Human
uacaggcguacgccaccaugcccaguuaacuu

SEQ ID NO: 486685 - RNA, 20 nt, Human
uacaggcgucaaagaccccg

SEQ ID NO: 486686 - RNA, 20 nt, Human
uacaggcgucagccaccaug

SEQ ID NO: 486687 - RNA, 32 nt, Human
uacaggcgucagccaccaugcccagccuuaaa

SEQ ID NO: 486688 - RNA, 20 nt, Human
uacaggcgucagccaccgcg

SEQ ID NO: 486689 - RNA, 20 nt, Human
uacaggcguccacuaccacg

SEQ ID NO: 486690 - RNA, 32 nt, Human
uacaggcguccgccaccaugcccagccaauuu

SEQ ID NO: 486691 - RNA, 32 nt, Human
uacaggcguccuccaccaugccuggcuaauau

SEQ ID NO: 486692 - RNA, 19 nt, Human
uacaggcgugaaccaccac

SEQ ID NO: 486693 - RNA, 20 nt, Human
uacaggcgugaagcaccacg

SEQ ID NO: 486694 - RNA, 32 nt, Human
uacaggcgugaagcaccacgcccagccugaaa

SEQ ID NO: 486695 - RNA, 18 nt, Human
uacaggcgugacgaccac

SEQ ID NO: 486696 - RNA, 19 nt, Human
uacaggcgugacgaccgcg

SEQ ID NO: 486697 - RNA, 20 nt, Human
uacaggcgugagacaccgcg

SEQ ID NO: 486698 - RNA, 32 nt, Human
uacaggcgugagacacugcgcccagccucauc

SEQ ID NO: 486699 - RNA, 19 nt, Human
uacaggcgugagcaaccgc

SEQ ID NO: 486700 - RNA, 32 nt, Human
uacaggcgugagcaaccgcacccggccaggac

SEQ ID NO: 486701 - RNA, 20 nt, Human
uacaggcgugagcaaccgcg

SEQ ID NO: 486702 - RNA, 32 nt, Human
uacaggcgugagcaaccgcgccuggcugacaa

SEQ ID NO: 486703 - RNA, 32 nt, Human
uacaggcgugagcaacugcacccagccuaguu

SEQ ID NO: 486704 - RNA, 32 nt, Human
uacaggcgugagcaaucgugcccagccuuguu

SEQ ID NO: 486705 - RNA, 32 nt, Human
uacaggcgugagcaccccacccagcucauuac

SEQ ID NO: 486706 - RNA, 32 nt, Human
uacaggcgugagccaacacaccggaccuucau

SEQ ID NO: 486707 - RNA, 32 nt, Human
uacaggcgugagccaaugugcccggccuaaac

SEQ ID NO: 486708 - RNA, 32 nt, Human
uacaggcgugagccacaaugcccggcccacgu

SEQ ID NO: 486709 - RNA, 32 nt, Human
uacaggcgugagccacagcgcccggcccucuu

SEQ ID NO: 486710 - RNA, 32 nt, Human
uacaggcgugagccacagugccuggccucuuc

SEQ ID NO: 486711 - RNA, 32 nt, Human
uacaggcgugagccacagugccuggccugauu

SEQ ID NO: 486712 - RNA, 18 nt, Human
uacaggcgugagccacca

SEQ ID NO: 486713 - RNA, 32 nt, Human
uacaggcgugagccaccaacacccugccugag

SEQ ID NO: 486714 - RNA, 19 nt, Human
uacaggcgugagccaccac

SEQ ID NO: 486715 - RNA, 32 nt, Human
uacaggcgugagccaccacaccaggcccgaga

SEQ ID NO: 486716 - RNA, 32 nt, Human
uacaggcgugagccaccacacccagccaaauu

SEQ ID NO: 486717 - RNA, 32 nt, Human
uacaggcgugagccaccacacccagccaguga

SEQ ID NO: 486718 - RNA, 32 nt, Human
uacaggcgugagccaccacacccagccaguuu

SEQ ID NO: 486719 - RNA, 32 nt, Human
uacaggcgugagccaccacacccagcccuuuc

SEQ ID NO: 486720 - RNA, 32 nt, Human
uacaggcgugagccaccacacccagcucaggg

SEQ ID NO: 486721 - RNA, 32 nt, Human
uacaggcgugagccaccacacccggcccacuu

SEQ ID NO: 486722 - RNA, 32 nt, Human
uacaggcgugagccaccacacccggcccccag

SEQ ID NO: 486723 - RNA, 32 nt, Human
uacaggcgugagccaccacacccggccgugga

SEQ ID NO: 486724 - RNA, 32 nt, Human
uacaggcgugagccaccacacccggcuccguu

SEQ ID NO: 486725 - RNA, 32 nt, Human
uacaggcgugagccaccacacccucccgagau

SEQ ID NO: 486726 - RNA, 32 nt, Human
uacaggcgugagccaccacaccuagcuggaag

SEQ ID NO: 486727 - RNA, 32 nt, Human
uacaggcgugagccaccacaccuggccagcuc

SEQ ID NO: 486728 - RNA, 32 nt, Human
uacaggcgugagccaccacaccuggcccuaaa

SEQ ID NO: 486729 - RNA, 32 nt, Human
uacaggcgugagccaccacaccuggccuguuu

SEQ ID NO: 486730 - RNA, 32 nt, Human
uacaggcgugagccaccacaccuggcuacccu

SEQ ID NO: 486731 - RNA, 32 nt, Human
uacaggcgugagccaccacacuuggccagacu

SEQ ID NO: 486732 - RNA, 32 nt, Human
uacaggcgugagccaccacauccagccaguga

SEQ ID NO: 486733 - RNA, 32 nt, Human
uacaggcgugagccaccacauccggccagugc

SEQ ID NO: 486734 - RNA, 32 nt, Human
uacaggcgugagccaccaccacacccagcccu

SEQ ID NO: 486735 - RNA, 32 nt, Human
uacaggcgugagccaccacccccggccuguau

SEQ ID NO: 486736 - RNA, 20 nt, Human
uacaggcgugagccaccacg

SEQ ID NO: 486737 - RNA, 32 nt, Human
uacaggcgugagccaccacgccagggcuuuau

SEQ ID NO: 486738 - RNA, 32 nt, Human
uacaggcgugagccaccacgcccaacugggac

SEQ ID NO: 486739 - RNA, 32 nt, Human
uacaggcgugagccaccacgcccagccguaca

SEQ ID NO: 486740 - RNA, 32 nt, Human
uacaggcgugagccaccacgcccagccuauac

SEQ ID NO: 486741 - RNA, 32 nt, Human
uacaggcgugagccaccacgcccgaccugaug

SEQ ID NO: 486742 - RNA, 32 nt, Human
uacaggcgugagccaccacgcccggccacuag

SEQ ID NO: 486743 - RNA, 32 nt, Human
uacaggcgugagccaccacgcccggccagcaa

SEQ ID NO: 486744 - RNA, 32 nt, Human
uacaggcgugagccaccacgcccggccccaaa

SEQ ID NO: 486745 - RNA, 32 nt, Human
uacaggcgugagccaccacgcccggcccccag

SEQ ID NO: 486746 - RNA, 32 nt, Human
uacaggcgugagccaccacgcccggcccguau

SEQ ID NO: 486747 - RNA, 32 nt, Human
uacaggcgugagccaccacgcccggccucuuu

SEQ ID NO: 486748 - RNA, 32 nt, Human
uacaggcgugagccaccacgcccggccuggcc

SEQ ID NO: 486749 - RNA, 32 nt, Human
uacaggcgugagccaccacgcccggucaccuu

SEQ ID NO: 486750 - RNA, 32 nt, Human
uacaggcgugagccaccacgccuggccaauua

SEQ ID NO: 486751 - RNA, 32 nt, Human
uacaggcgugagccaccacgccuggccgaaaa

SEQ ID NO: 486752 - RNA, 32 nt, Human
uacaggcgugagccaccacgccuggccucacu

SEQ ID NO: 486753 - RNA, 32 nt, Human
uacaggcgugagccaccacgccuggcuggauc

SEQ ID NO: 486754 - RNA, 32 nt, Human
uacaggcgugagccaccacgcucagccuuuaa

SEQ ID NO: 486755 - RNA, 32 nt, Human
uacaggcgugagccaccacguccaacugccuu

SEQ ID NO: 486756 - RNA, 32 nt, Human
uacaggcgugagccaccacgucuggccuucuu

SEQ ID NO: 486757 - RNA, 32 nt, Human
uacaggcgugagccaccacucccggccgugaa

SEQ ID NO: 486758 - RNA, 32 nt, Human
uacaggcgugagccaccacucccggcuaaguu

SEQ ID NO: 486759 - RNA, 32 nt, Human
uacaggcgugagccaccacuccuggccuaugc

SEQ ID NO: 486760 - RNA, 32 nt, Human
uacaggcgugagccaccagccaggccaagcua

SEQ ID NO: 486761 - RNA, 32 nt, Human
uacaggcgugagccaccaggcccagccucgag

SEQ ID NO: 486762 - RNA, 32 nt, Human
uacaggcgugagccaccaggccuggcuccuuu

SEQ ID NO: 486763 - RNA, 19 nt, Human
uacaggcgugagccaccau

SEQ ID NO: 486764 - RNA, 32 nt, Human
uacaggcgugagccaccauacccggcccacuc

SEQ ID NO: 486765 - RNA, 32 nt, Human
uacaggcgugagccaccauaccuggcgcaugc

SEQ ID NO: 486766 - RNA, 20 nt, Human
uacaggcgugagccaccaug

SEQ ID NO: 486767 - RNA, 32 nt, Human
uacaggcgugagccaccaugaccagcccucca

SEQ ID NO: 486768 - RNA, 23 nt, Human
uacaggcgugagccaccaugccc

SEQ ID NO: 486769 - RNA, 32 nt, Human
uacaggcgugagccaccaugcccagaugcuuu

SEQ ID NO: 486770 - RNA, 32 nt, Human
uacaggcgugagccaccaugcccagccuaaua

SEQ ID NO: 486771 - RNA, 32 nt, Human
uacaggcgugagccaccaugcccagccuacuc

SEQ ID NO: 486772 - RNA, 32 nt, Human
uacaggcgugagccaccaugccccgccccaga

SEQ ID NO: 486773 - RNA, 32 nt, Human
uacaggcgugagccaccaugcccggccagcuu

SEQ ID NO: 486774 - RNA, 32 nt, Human
uacaggcgugagccaccaugcccggccauggu

SEQ ID NO: 486775 - RNA, 32 nt, Human
uacaggcgugagccaccaugcccggcccaaau

SEQ ID NO: 486776 - RNA, 32 nt, Human
uacaggcgugagccaccaugcccggccucuuu

SEQ ID NO: 486777 - RNA, 32 nt, Human
uacaggcgugagccaccaugcccggcuaauuu

SEQ ID NO: 486778 - RNA, 32 nt, Human
uacaggcgugagccaccaugccuagcaacaua

SEQ ID NO: 486779 - RNA, 32 nt, Human
uacaggcgugagccaccaugccugcccagcaa

SEQ ID NO: 486780 - RNA, 32 nt, Human
uacaggcgugagccaccaugccuggcaacaua

SEQ ID NO: 486781 - RNA, 32 nt, Human
uacaggcgugagccaccaugccuggccaaaac

SEQ ID NO: 486782 - RNA, 32 nt, Human
uacaggcgugagccaccaugccuggccacauc

SEQ ID NO: 486783 - RNA, 32 nt, Human
uacaggcgugagccaccaugccuggccagaaa

SEQ ID NO: 486784 - RNA, 32 nt, Human
uacaggcgugagccaccaugccuggccaucag

SEQ ID NO: 486785 - RNA, 32 nt, Human
uacaggcgugagccaccaugccuggccuucau

SEQ ID NO: 486786 - RNA, 32 nt, Human
uacaggcgugagccaccaugcucggccuaaaa

SEQ ID NO: 486787 - RNA, 32 nt, Human
uacaggcgugagccaccauguccagccaaagu

SEQ ID NO: 486788 - RNA, 32 nt, Human
uacaggcgugagccaccauguccggcuugugu

SEQ ID NO: 486789 - RNA, 32 nt, Human
uacaggcgugagccaccauucccgggcgcugu

SEQ ID NO: 486790 - RNA, 32 nt, Human
uacaggcgugagccacccggccuggccuagaa

SEQ ID NO: 486791 - RNA, 32 nt, Human
uacaggcgugagccacccugacuggccguuca

SEQ ID NO: 486792 - RNA, 32 nt, Human
uacaggcgugagccaccgagccuggccgguua

SEQ ID NO: 486793 - RNA, 19 nt, Human
uacaggcgugagccaccgc

SEQ ID NO: 486794 - RNA, 32 nt, Human
uacaggcgugagccaccgcacccagccagggg

SEQ ID NO: 486795 - RNA, 32 nt, Human
uacaggcgugagccaccgcacccagcccaucu

SEQ ID NO: 486796 - RNA, 32 nt, Human
uacaggcgugagccaccgcacccagcccguau

SEQ ID NO: 486797 - RNA, 32 nt, Human
uacaggcgugagccaccgcacccggcagaguu

SEQ ID NO: 486798 - RNA, 32 nt, Human
uacaggcgugagccaccgcacccggcccuugu

SEQ ID NO: 486799 - RNA, 32 nt, Human
uacaggcgugagccaccgcacccggccuauug

SEQ ID NO: 486800 - RNA, 32 nt, Human
uacaggcgugagccaccgcacccggccucugu

SEQ ID NO: 486801 - RNA, 32 nt, Human
uacaggcgugagccaccgcacccggcuugcaa

SEQ ID NO: 486802 - RNA, 32 nt, Human
uacaggcgugagccaccgcacccggucagcua

SEQ ID NO: 486803 - RNA, 32 nt, Human
uacaggcgugagccaccgcaccuggccauuau

SEQ ID NO: 486804 - RNA, 32 nt, Human
uacaggcgugagccaccgcaccuggcccccuu

SEQ ID NO: 486805 - RNA, 32 nt, Human
uacaggcgugagccaccgcaccuggccuaccu

SEQ ID NO: 486806 - RNA, 32 nt, Human
uacaggcgugagccaccgcacuggccuaauuu

SEQ ID NO: 486807 - RNA, 32 nt, Human
uacaggcgugagccaccgcaucuggccacaau

SEQ ID NO: 486808 - RNA, 32 nt, Human
uacaggcgugagccaccgcccccggccgccuc

SEQ ID NO: 486809 - RNA, 20 nt, Human
uacaggcgugagccaccgcg

SEQ ID NO: 486810 - RNA, 32 nt, Human
uacaggcgugagccaccgcgacuggccuacac

SEQ ID NO: 486811 - RNA, 32 nt, Human
uacaggcgugagccaccgcgccaagccaaggu

SEQ ID NO: 486812 - RNA, 32 nt, Human
uacaggcgugagccaccgcgccaggcugagau

SEQ ID NO: 486813 - RNA, 32 nt, Human
uacaggcgugagccaccgcgcccagccaaaaa

SEQ ID NO: 486814 - RNA, 32 nt, Human
uacaggcgugagccaccgcgcccagccaaacc

SEQ ID NO: 486815 - RNA, 32 nt, Human
uacaggcgugagccaccgcgcccagccagaac

SEQ ID NO: 486816 - RNA, 32 nt, Human
uacaggcgugagccaccgcgcccagccccaua

SEQ ID NO: 486817 - RNA, 32 nt, Human
uacaggcgugagccaccgcgcccagccccauu

SEQ ID NO: 486818 - RNA, 32 nt, Human
uacaggcgugagccaccgcgcccagcccugaa

SEQ ID NO: 486819 - RNA, 32 nt, Human
uacaggcgugagccaccgcgcccagccggaau

SEQ ID NO: 486820 - RNA, 32 nt, Human
uacaggcgugagccaccgcgcccagccuacau

SEQ ID NO: 486821 - RNA, 32 nt, Human
uacaggcgugagccaccgcgcccagccuauaa

SEQ ID NO: 486822 - RNA, 32 nt, Human
uacaggcgugagccaccgcgcccagccucaac

SEQ ID NO: 486823 - RNA, 32 nt, Human
uacaggcgugagccaccgcgcccagccuuaau

SEQ ID NO: 486824 - RNA, 32 nt, Human
uacaggcgugagccaccgcgcccagcugaaau

SEQ ID NO: 486825 - RNA, 32 nt, Human
uacaggcgugagccaccgcgcccaucuccccu

SEQ ID NO: 486826 - RNA, 32 nt, Human
uacaggcgugagccaccgcgccccaccuaacc

SEQ ID NO: 486827 - RNA, 32 nt, Human
uacaggcgugagccaccgcgcccgaucagcag

SEQ ID NO: 486828 - RNA, 32 nt, Human
uacaggcgugagccaccgcgcccggccaagca

SEQ ID NO: 486829 - RNA, 32 nt, Human
uacaggcgugagccaccgcgcccggccaauuu

SEQ ID NO: 486830 - RNA, 32 nt, Human
uacaggcgugagccaccgcgcccggccagguu

SEQ ID NO: 486831 - RNA, 32 nt, Human
uacaggcgugagccaccgcgcccggccaguau

SEQ ID NO: 486832 - RNA, 32 nt, Human
uacaggcgugagccaccgcgcccggccaguuc

SEQ ID NO: 486833 - RNA, 32 nt, Human
uacaggcgugagccaccgcgcccggccauagg

SEQ ID NO: 486834 - RNA, 32 nt, Human
uacaggcgugagccaccgcgcccggccaugau

SEQ ID NO: 486835 - RNA, 32 nt, Human
uacaggcgugagccaccgcgcccggcccacua

SEQ ID NO: 486836 - RNA, 32 nt, Human
uacaggcgugagccaccgcgcccggcccaggu

SEQ ID NO: 486837 - RNA, 32 nt, Human
uacaggcgugagccaccgcgcccggcccauac

SEQ ID NO: 486838 - RNA, 32 nt, Human
uacaggcgugagccaccgcgcccggcccucuu

SEQ ID NO: 486839 - RNA, 32 nt, Human
uacaggcgugagccaccgcgcccggccgaauc

SEQ ID NO: 486840 - RNA, 32 nt, Human
uacaggcgugagccaccgcgcccggccggcuu

SEQ ID NO: 486841 - RNA, 32 nt, Human
uacaggcgugagccaccgcgcccggccguagu

SEQ ID NO: 486842 - RNA, 32 nt, Human
uacaggcgugagccaccgcgcccggccuagag

SEQ ID NO: 486843 - RNA, 32 nt, Human
uacaggcgugagccaccgcgcccggccuaggu

SEQ ID NO: 486844 - RNA, 32 nt, Human
uacaggcgugagccaccgcgcccggccucagc

SEQ ID NO: 486845 - RNA, 32 nt, Human
uacaggcgugagccaccgcgcccggccucagu

SEQ ID NO: 486846 - RNA, 32 nt, Human
uacaggcgugagccaccgcgcccggccuccau

SEQ ID NO: 486847 - RNA, 32 nt, Human
uacaggcgugagccaccgcgcccggccugaag

SEQ ID NO: 486848 - RNA, 32 nt, Human
uacaggcgugagccaccgcgcccggccugagg

SEQ ID NO: 486849 - RNA, 32 nt, Human
uacaggcgugagccaccgcgcccggccugagu

SEQ ID NO: 486850 - RNA, 32 nt, Human
uacaggcgugagccaccgcgcccggccuguau

SEQ ID NO: 486851 - RNA, 32 nt, Human
uacaggcgugagccaccgcgcccggccuguuc

SEQ ID NO: 486852 - RNA, 32 nt, Human
uacaggcgugagccaccgcgcccggccuguuu

SEQ ID NO: 486853 - RNA, 32 nt, Human
uacaggcgugagccaccgcgcccggcggcgaa

SEQ ID NO: 486854 - RNA, 32 nt, Human
uacaggcgugagccaccgcgcccggcugccuu

SEQ ID NO: 486855 - RNA, 32 nt, Human
uacaggcgugagccaccgcgcccugccuagaa

SEQ ID NO: 486856 - RNA, 32 nt, Human
uacaggcgugagccaccgcgccgggcaccuuc

SEQ ID NO: 486857 - RNA, 32 nt, Human
uacaggcgugagccaccgcgccugacugggac

SEQ ID NO: 486858 - RNA, 32 nt, Human
uacaggcgugagccaccgcgccuggccaaaac

SEQ ID NO: 486859 - RNA, 32 nt, Human
uacaggcgugagccaccgcgccuggccaaaau

SEQ ID NO: 486860 - RNA, 32 nt, Human
uacaggcgugagccaccgcgccuggccaagau

SEQ ID NO: 486861 - RNA, 32 nt, Human
uacaggcgugagccaccgcgccuggccacauc

SEQ ID NO: 486862 - RNA, 32 nt, Human
uacaggcgugagccaccgcgccuggccaggcu

SEQ ID NO: 486863 - RNA, 32 nt, Human
uacaggcgugagccaccgcgccuggccaggga

SEQ ID NO: 486864 - RNA, 32 nt, Human
uacaggcgugagccaccgcgccuggccgaugg

SEQ ID NO: 486865 - RNA, 32 nt, Human
uacaggcgugagccaccgcgccuggccgaugu

SEQ ID NO: 486866 - RNA, 32 nt, Human
uacaggcgugagccaccgcgccuggccuaaaa

SEQ ID NO: 486867 - RNA, 32 nt, Human
uacaggcgugagccaccgcgccuggccucagc

SEQ ID NO: 486868 - RNA, 32 nt, Human
uacaggcgugagccaccgcgccuggccuucag

SEQ ID NO: 486869 - RNA, 32 nt, Human
uacaggcgugagccaccgcgccuggucuauau

SEQ ID NO: 486870 - RNA, 32 nt, Human
uacaggcgugagccaccgcggcccaacagcgg

SEQ ID NO: 486871 - RNA, 32 nt, Human
uacaggcgugagccaccgcguccagccacauu

SEQ ID NO: 486872 - RNA, 32 nt, Human
uacaggcgugagccaccgcguccggccucuuu

SEQ ID NO: 486873 - RNA, 32 nt, Human
uacaggcgugagccaccgcguccggcucagga

SEQ ID NO: 486874 - RNA, 32 nt, Human
uacaggcgugagccaccgcgucuggccucagc

SEQ ID NO: 486875 - RNA, 32 nt, Human
uacaggcgugagccaccgcuccuggccuauuc

SEQ ID NO: 486876 - RNA, 32 nt, Human
uacaggcgugagccaccgcuccuggccugaca

SEQ ID NO: 486877 - RNA, 32 nt, Human
uacaggcgugagccaccguacccagccugguc

SEQ ID NO: 486878 - RNA, 32 nt, Human
uacaggcgugagccaccgugcccaaccaugaa

SEQ ID NO: 486879 - RNA, 32 nt, Human
uacaggcgugagccaccgugcccagccuccuu

SEQ ID NO: 486880 - RNA, 32 nt, Human
uacaggcgugagccaccgugcccagccuucug

SEQ ID NO: 486881 - RNA, 32 nt, Human
uacaggcgugagccaccgugcccagccuuucu

SEQ ID NO: 486882 - RNA, 32 nt, Human
uacaggcgugagccaccgugcccauccaacuu

SEQ ID NO: 486883 - RNA, 32 nt, Human
uacaggcgugagccaccgugcccggcccaaac

SEQ ID NO: 486884 - RNA, 32 nt, Human
uacaggcgugagccaccgugcccggcccaaag

SEQ ID NO: 486885 - RNA, 32 nt, Human
uacaggcgugagccaccgugcccggcccaacu

SEQ ID NO: 486886 - RNA, 32 nt, Human
uacaggcgugagccaccgugcccggcccagga

SEQ ID NO: 486887 - RNA, 32 nt, Human
uacaggcgugagccaccgugcccggcccuaaa

SEQ ID NO: 486888 - RNA, 32 nt, Human
uacaggcgugagccaccgugcccggcccuuuu

SEQ ID NO: 486889 - RNA, 32 nt, Human
uacaggcgugagccaccgugcccggccuaaau

SEQ ID NO: 486890 - RNA, 32 nt, Human
uacaggcgugagccaccgugcccggccuacaa

SEQ ID NO: 486891 - RNA, 32 nt, Human
uacaggcgugagccaccgugcccggccucucc

SEQ ID NO: 486892 - RNA, 32 nt, Human
uacaggcgugagccaccgugcccggccugaug

SEQ ID NO: 486893 - RNA, 32 nt, Human
uacaggcgugagccaccgugcccggccugauu

SEQ ID NO: 486894 - RNA, 32 nt, Human
uacaggcgugagccaccgugcccggccugugc

SEQ ID NO: 486895 - RNA, 32 nt, Human
uacaggcgugagccaccgugccugccccagaa

SEQ ID NO: 486896 - RNA, 32 nt, Human
uacaggcgugagccaccgugccuggccaagag

SEQ ID NO: 486897 - RNA, 32 nt, Human
uacaggcgugagccaccgugccuggccacgcc

SEQ ID NO: 486898 - RNA, 32 nt, Human
uacaggcgugagccaccgugccuggccagaaa

SEQ ID NO: 486899 - RNA, 32 nt, Human
uacaggcgugagccaccgugccuggccaggcc

SEQ ID NO: 486900 - RNA, 32 nt, Human
uacaggcgugagccaccgugccuggcccuggu

SEQ ID NO: 486901 - RNA, 32 nt, Human
uacaggcgugagccaccgugccuggccgaugu

SEQ ID NO: 486902 - RNA, 32 nt, Human
uacaggcgugagccaccgugccuggccgugau

SEQ ID NO: 486903 - RNA, 32 nt, Human
uacaggcgugagccaccgugccuggccuaaau

SEQ ID NO: 486904 - RNA, 32 nt, Human
uacaggcgugagccaccgugccuggcugagaa

SEQ ID NO: 486905 - RNA, 32 nt, Human
uacaggcgugagccaccgugccuggcuguagu

SEQ ID NO: 486906 - RNA, 32 nt, Human
uacaggcgugagccaccgugcucagccuaaau

SEQ ID NO: 486907 - RNA, 32 nt, Human
uacaggcgugagccaccgugcugggccaaaaa

SEQ ID NO: 486908 - RNA, 32 nt, Human
uacaggcgugagccaccguguccggccguagu

SEQ ID NO: 486909 - RNA, 32 nt, Human
uacaggcgugagccaccucaccaggccccguu

SEQ ID NO: 486910 - RNA, 32 nt, Human
uacaggcgugagccaccucacccagccggcua

SEQ ID NO: 486911 - RNA, 32 nt, Human
uacaggcgugagccaccucaccuggccuuuuc

SEQ ID NO: 486912 - RNA, 20 nt, Human
uacaggcgugagccaccucg

SEQ ID NO: 486913 - RNA, 32 nt, Human
uacaggcgugagccaccucgcccagcggcauc

SEQ ID NO: 486914 - RNA, 32 nt, Human
uacaggcgugagccaccucgcccggccaaucc

SEQ ID NO: 486915 - RNA, 32 nt, Human
uacaggcgugagccaccuugcccagcccacau

SEQ ID NO: 486916 - RNA, 32 nt, Human
uacaggcgugagccaccuugccuagcccacau

SEQ ID NO: 486917 - RNA, 32 nt, Human
uacaggcgugagccacggcaccaggcccucuu

SEQ ID NO: 486918 - RNA, 32 nt, Human
uacaggcgugagccacggcacgcagccagcaa

SEQ ID NO: 486919 - RNA, 32 nt, Human
uacaggcgugagccacggcgcccagccugugc

SEQ ID NO: 486920 - RNA, 18 nt, Human
uacaggcgugagccacua

SEQ ID NO: 486921 - RNA, 19 nt, Human
uacaggcgugagccacuac

SEQ ID NO: 486922 - RNA, 32 nt, Human
uacaggcgugagccacuacacccagccaauca

SEQ ID NO: 486923 - RNA, 32 nt, Human
uacaggcgugagccacuaggccugaccucccc

SEQ ID NO: 486924 - RNA, 32 nt, Human
uacaggcgugagccacuccacccagcccagau

SEQ ID NO: 486925 - RNA, 32 nt, Human
uacaggcgugagccacucugcccggccugugc

SEQ ID NO: 486926 - RNA, 32 nt, Human
uacaggcgugagccacugagccagccagcauu

SEQ ID NO: 486927 - RNA, 32 nt, Human
uacaggcgugagccacugagcccagccuacuu

SEQ ID NO: 486928 - RNA, 32 nt, Human
uacaggcgugagccacugagcccggccaaaaa

SEQ ID NO: 486929 - RNA, 32 nt, Human
uacaggcgugagccacugcacccacccacgcc

SEQ ID NO: 486930 - RNA, 32 nt, Human
uacaggcgugagccacugcacccagccaaaaa

SEQ ID NO: 486931 - RNA, 32 nt, Human
uacaggcgugagccacugcacccagcccucuu

SEQ ID NO: 486932 - RNA, 32 nt, Human
uacaggcgugagccacugcacccagccgagug

SEQ ID NO: 486933 - RNA, 32 nt, Human
uacaggcgugagccacugcacccagccuagaa

SEQ ID NO: 486934 - RNA, 32 nt, Human
uacaggcgugagccacugcacccagccuauuc

SEQ ID NO: 486935 - RNA, 32 nt, Human
uacaggcgugagccacugcacccagccucaug

SEQ ID NO: 486936 - RNA, 32 nt, Human
uacaggcgugagccacugcacccagccuggga

SEQ ID NO: 486937 - RNA, 32 nt, Human
uacaggcgugagccacugcacccggccgugac

SEQ ID NO: 486938 - RNA, 32 nt, Human
uacaggcgugagccacugcacccggccuaauu

SEQ ID NO: 486939 - RNA, 32 nt, Human
uacaggcgugagccacugcacccggcucacca

SEQ ID NO: 486940 - RNA, 32 nt, Human
uacaggcgugagccacugcaccuggcccucga

SEQ ID NO: 486941 - RNA, 32 nt, Human
uacaggcgugagccacugcaccuggccucugu

SEQ ID NO: 486942 - RNA, 32 nt, Human
uacaggcgugagccacugcaccuggccugaca

SEQ ID NO: 486943 - RNA, 32 nt, Human
uacaggcgugagccacugcaccuggccuuaua

SEQ ID NO: 486944 - RNA, 32 nt, Human
uacaggcgugagccacugcagugggccaauuu

SEQ ID NO: 486945 - RNA, 32 nt, Human
uacaggcgugagccacugcaucuggccuuuuu

SEQ ID NO: 486946 - RNA, 32 nt, Human
uacaggcgugagccacugcccagcuauacugu

SEQ ID NO: 486947 - RNA, 32 nt, Human
uacaggcgugagccacugcccccagccccagc

SEQ ID NO: 486948 - RNA, 32 nt, Human
uacaggcgugagccacugcgcccagccaacac

SEQ ID NO: 486949 - RNA, 32 nt, Human
uacaggcgugagccacugcgcccagccugaau

SEQ ID NO: 486950 - RNA, 32 nt, Human
uacaggcgugagccacugcgcccagccuguuc

SEQ ID NO: 486951 - RNA, 32 nt, Human
uacaggcgugagccacugcgcccagccuugua

SEQ ID NO: 486952 - RNA, 32 nt, Human
uacaggcgugagccacugcgcccagcuaccug

SEQ ID NO: 486953 - RNA, 32 nt, Human
uacaggcgugagccacugcgcccggccaauaa

SEQ ID NO: 486954 - RNA, 32 nt, Human
uacaggcgugagccacugcgcccggccaauuu

SEQ ID NO: 486955 - RNA, 32 nt, Human
uacaggcgugagccacugcgcccggccacauu

SEQ ID NO: 486956 - RNA, 32 nt, Human
uacaggcgugagccacugcgcccggcccuaau

SEQ ID NO: 486957 - RNA, 32 nt, Human
uacaggcgugagccacugcgcccggccuaauu

SEQ ID NO: 486958 - RNA, 32 nt, Human
uacaggcgugagccacugcgcccggccuauuu

SEQ ID NO: 486959 - RNA, 32 nt, Human
uacaggcgugagccacugcgcccggccucccc

SEQ ID NO: 486960 - RNA, 32 nt, Human
uacaggcgugagccacugcgcccggccuguug

SEQ ID NO: 486961 - RNA, 32 nt, Human
uacaggcgugagccacugcgcccggccuugaa

SEQ ID NO: 486962 - RNA, 32 nt, Human
uacaggcgugagccacugcgcccgggcaagac

SEQ ID NO: 486963 - RNA, 32 nt, Human
uacaggcgugagccacugcgcccugccuguuu

SEQ ID NO: 486964 - RNA, 32 nt, Human
uacaggcgugagccacugcgccuggccaagaa

SEQ ID NO: 486965 - RNA, 32 nt, Human
uacaggcgugagccacugcgccuggccagacc

SEQ ID NO: 486966 - RNA, 32 nt, Human
uacaggcgugagccacugcgccuggccaucag

SEQ ID NO: 486967 - RNA, 32 nt, Human
uacaggcgugagccacugcgccuggccgugac

SEQ ID NO: 486968 - RNA, 32 nt, Human
uacaggcgugagccacugcgccuggccuaguu

SEQ ID NO: 486969 - RNA, 32 nt, Human
uacaggcgugagccacugcgccuggccuuuuu

SEQ ID NO: 486970 - RNA, 32 nt, Human
uacaggcgugagccacugcguccagccagaau

SEQ ID NO: 486971 - RNA, 32 nt, Human
uacaggcgugagccacugcucccagccucuuu

SEQ ID NO: 486972 - RNA, 32 nt, Human
uacaggcgugagccacugcuccuggcccaaga

SEQ ID NO: 486973 - RNA, 32 nt, Human
uacaggcgugagccacugcucguggccaaaag

SEQ ID NO: 486974 - RNA, 32 nt, Human
uacaggcgugagccacuggcccggcggcacaa

SEQ ID NO: 486975 - RNA, 32 nt, Human
uacaggcgugagccacuggcggccucaacuca

SEQ ID NO: 486976 - RNA, 32 nt, Human
uacaggcgugagccacugggcccagccuaauu

SEQ ID NO: 486977 - RNA, 32 nt, Human
uacaggcgugagccacugugcacguugggacu

SEQ ID NO: 486978 - RNA, 32 nt, Human
uacaggcgugagccacugugcauggccccagc

SEQ ID NO: 486979 - RNA, 32 nt, Human
uacaggcgugagccacugugcccagccaaaag

SEQ ID NO: 486980 - RNA, 32 nt, Human
uacaggcgugagccacugugcccagccaccaa

SEQ ID NO: 486981 - RNA, 32 nt, Human
uacaggcgugagccacugugcccagccgauga

SEQ ID NO: 486982 - RNA, 32 nt, Human
uacaggcgugagccacugugcccagccggaac

SEQ ID NO: 486983 - RNA, 32 nt, Human
uacaggcgugagccacugugcccagccuaagc

SEQ ID NO: 486984 - RNA, 32 nt, Human
uacaggcgugagccacugugcccagcugagau

SEQ ID NO: 486985 - RNA, 32 nt, Human
uacaggcgugagccacugugcccggccaagaa

SEQ ID NO: 486986 - RNA, 32 nt, Human
uacaggcgugagccacugugcccggccucagu

SEQ ID NO: 486987 - RNA, 32 nt, Human
uacaggcgugagccacugugcccggccuuggc

SEQ ID NO: 486988 - RNA, 32 nt, Human
uacaggcgugagccacugugcccggcuguuca

SEQ ID NO: 486989 - RNA, 32 nt, Human
uacaggcgugagccacugugccuagccauucc

SEQ ID NO: 486990 - RNA, 32 nt, Human
uacaggcgugagccacugugccucgccuaauu

SEQ ID NO: 486991 - RNA, 32 nt, Human
uacaggcgugagccacugugccugacccacuc

SEQ ID NO: 486992 - RNA, 32 nt, Human
uacaggcgugagccacugugccugaccuguca

SEQ ID NO: 486993 - RNA, 32 nt, Human
uacaggcgugagccacugugccugccccaauc

SEQ ID NO: 486994 - RNA, 32 nt, Human
uacaggcgugagccacugugccuggccgacaa

SEQ ID NO: 486995 - RNA, 32 nt, Human
uacaggcgugagccacugugccuggccuaucu

SEQ ID NO: 486996 - RNA, 32 nt, Human
uacaggcgugagccacugugccuggccuguag

SEQ ID NO: 486997 - RNA, 32 nt, Human
uacaggcgugagccacugugccuggccuuaug

SEQ ID NO: 486998 - RNA, 32 nt, Human
uacaggcgugagccacugugccuggcugaguu

SEQ ID NO: 486999 - RNA, 32 nt, Human
uacaggcgugagccacugugccuggcugguua

SEQ ID NO: 487000 - RNA, 32 nt, Human
uacaggcgugagccacugugccuggcuuccau

SEQ ID NO: 487001 - RNA, 32 nt, Human
uacaggcgugagccacuguggccaaccuaauu

SEQ ID NO: 487002 - RNA, 32 nt, Human
uacaggcgugagccacuuacccggccucugcc

SEQ ID NO: 487003 - RNA, 20 nt, Human
uacaggcgugagccagcacg

SEQ ID NO: 487004 - RNA, 32 nt, Human
uacaggcgugagccagcacgcccagcuaauuu

SEQ ID NO: 487005 - RNA, 32 nt, Human
uacaggcgugagccagcgcgugccuggccaaa

SEQ ID NO: 487006 - RNA, 32 nt, Human
uacaggcgugagccagugugcccggccuccgu

SEQ ID NO: 487007 - RNA, 32 nt, Human
uacaggcgugagccauggcgcccagccugggc

SEQ ID NO: 487008 - RNA, 32 nt, Human
uacaggcgugagccauggcgcccagccuucca

SEQ ID NO: 487009 - RNA, 32 nt, Human
uacaggcgugagccauggugccagacuggagu

SEQ ID NO: 487010 - RNA, 32 nt, Human
uacaggcgugagccauggugcccagccuggcu

SEQ ID NO: 487011 - RNA, 32 nt, Human
uacaggcgugagccauugcgccugggcaggua

SEQ ID NO: 487012 - RNA, 20 nt, Human
uacaggcgugagcccccacg

SEQ ID NO: 487013 - RNA, 32 nt, Human
uacaggcgugagcccccacgcuggccugcuuu

SEQ ID NO: 487014 - RNA, 18 nt, Human
uacaggcgugagcccccg

SEQ ID NO: 487015 - RNA, 32 nt, Human
uacaggcgugagcccccgcgccgggcuaagaa

SEQ ID NO: 487016 - RNA, 32 nt, Human
uacaggcgugagccgccgugcccggcccccuu

SEQ ID NO: 487017 - RNA, 32 nt, Human
uacaggcgugagccgccgugccuggcguuaca

SEQ ID NO: 487018 - RNA, 32 nt, Human
uacaggcgugagccgcugcacccagcccagaa

SEQ ID NO: 487019 - RNA, 32 nt, Human
uacaggcgugagccuccgcgcccggcccccuu

SEQ ID NO: 487020 - RNA, 32 nt, Human
uacaggcgugagccugcgccuggcuguaauua

SEQ ID NO: 487021 - RNA, 32 nt, Human
uacaggcgugagccuuggugcuggcccagugu

SEQ ID NO: 487022 - RNA, 19 nt, Human
uacaggcgugagcuaccac

SEQ ID NO: 487023 - RNA, 32 nt, Human
uacaggcgugagcuaccaccaugccuggcuuc

SEQ ID NO: 487024 - RNA, 32 nt, Human
uacaggcgugagcuaccacgcccggccuuauu

SEQ ID NO: 487025 - RNA, 20 nt, Human
uacaggcgugagcuaccaug

SEQ ID NO: 487026 - RNA, 32 nt, Human
uacaggcgugagcuaccaugcccggcuaauuu

SEQ ID NO: 487027 - RNA, 19 nt, Human
uacaggcgugagcuaccgc

SEQ ID NO: 487028 - RNA, 32 nt, Human
uacaggcgugagcuaccgcacuggaccuagcc

SEQ ID NO: 487029 - RNA, 32 nt, Human
uacaggcgugagcuaccgcgcccagccugaaa

SEQ ID NO: 487030 - RNA, 32 nt, Human
uacaggcgugagcuacugugcccagccuuacg

SEQ ID NO: 487031 - RNA, 19 nt, Human
uacaggcgugagcuaucac

SEQ ID NO: 487032 - RNA, 32 nt, Human
uacaggcgugagcuaucacacccagccucccc

SEQ ID NO: 487033 - RNA, 32 nt, Human
uacaggcgugagcugccaugccaggcagauuu

SEQ ID NO: 487034 - RNA, 19 nt, Human
uacaggcgugagcugcuac

SEQ ID NO: 487035 - RNA, 32 nt, Human
uacaggcgugagcugcuacaccuagccugcau

SEQ ID NO: 487036 - RNA, 32 nt, Human
uacaggcgugagcugugccuggcccaccccag

SEQ ID NO: 487037 - RNA, 20 nt, Human
uacaggcgugaggcaccgcg

SEQ ID NO: 487038 - RNA, 19 nt, Human
uacaggcgugaggcaucac

SEQ ID NO: 487039 - RNA, 19 nt, Human
uacaggcgugagucaccac

SEQ ID NO: 487040 - RNA, 20 nt, Human
uacaggcgugagucaccgcg

SEQ ID NO: 487041 - RNA, 32 nt, Human
uacaggcgugagucaccgcgcccagccgggaa

SEQ ID NO: 487042 - RNA, 32 nt, Human
uacaggcgugagucaccgugcccagccaugua

SEQ ID NO: 487043 - RNA, 32 nt, Human
uacaggcgugagucaccgugcccagccuggau

SEQ ID NO: 487044 - RNA, 32 nt, Human
uacaggcgugagucacugugcccagccaaggu

SEQ ID NO: 487045 - RNA, 32 nt, Human
uacaggcgugagugaccaugccuagcucacuu

SEQ ID NO: 487046 - RNA, 19 nt, Human
uacaggcgugauccaccac

SEQ ID NO: 487047 - RNA, 17 nt, Human
uacaggcgugaugcccg

SEQ ID NO: 487048 - RNA, 20 nt, Human
uacaggcgugcaccaccacg

SEQ ID NO: 487049 - RNA, 23 nt, Human
uacaggcgugcaccaccacgccc

SEQ ID NO: 487050 - RNA, 20 nt, Human
uacaggcgugcaccaccaug

SEQ ID NO: 487051 - RNA, 32 nt, Human
uacaggcgugcaccaccaugcccguuaguuuu

SEQ ID NO: 487052 - RNA, 32 nt, Human
uacaggcgugcaccaccaugccuggcuaaguu

SEQ ID NO: 487053 - RNA, 20 nt, Human
uacaggcgugcaccacugug

SEQ ID NO: 487054 - RNA, 20 nt, Human
uacaggcgugcaccagcuca

SEQ ID NO: 487055 - RNA, 32 nt, Human
uacaggcgugcaccagcucaaacaugcaggcu

SEQ ID NO: 487056 - RNA, 19 nt, Human
uacaggcgugcaccaucac

SEQ ID NO: 487057 - RNA, 19 nt, Human
uacaggcgugcacuaccac

SEQ ID NO: 487058 - RNA, 20 nt, Human
uacaggcgugcaucaccaug

SEQ ID NO: 487059 - RNA, 20 nt, Human
uacaggcgugcgaggggcac

SEQ ID NO: 487060 - RNA, 18 nt, Human
uacaggcgugcgccaaca

SEQ ID NO: 487061 - RNA, 20 nt, Human
uacaggcgugcgccaccacg

SEQ ID NO: 487062 - RNA, 20 nt, Human
uacaggcgugcgccaccaug

SEQ ID NO: 487063 - RNA, 23 nt, Human
uacaggcgugcgccaccaugccc

SEQ ID NO: 487064 - RNA, 32 nt, Human
uacaggcgugcgccaccaugcccggcuaauuu

SEQ ID NO: 487065 - RNA, 32 nt, Human
uacaggcgugcgccaccaugcccggcuacuuc

SEQ ID NO: 487066 - RNA, 32 nt, Human
uacaggcgugcgccaccaugccuggcuaauuu

SEQ ID NO: 487067 - RNA, 32 nt, Human
uacaggcgugcgccaccauguccagcuaauuu

SEQ ID NO: 487068 - RNA, 18 nt, Human
uacaggcgugcgccacua

SEQ ID NO: 487069 - RNA, 18 nt, Human
uacaggcgugcgugacca

SEQ ID NO: 487070 - RNA, 19 nt, Human
uacaggcguggcccaucac

SEQ ID NO: 487071 - RNA, 18 nt, Human
uacaggcgugggccccca

SEQ ID NO: 487072 - RNA, 20 nt, Human
uacaggcguggguacaccac

SEQ ID NO: 487073 - RNA, 22 nt, Human
uacaggcgugugagccaccacg

SEQ ID NO: 487074 - RNA, 32 nt, Human
uacaggcgugugagccaccacgcccggccaug

SEQ ID NO: 487075 - RNA, 18 nt, Human
uacaggcgugugccacca

SEQ ID NO: 487076 - RNA, 19 nt, Human
uacaggcgugugccaccac

SEQ ID NO: 487077 - RNA, 20 nt, Human
uacaggcgugugccaccacg

SEQ ID NO: 487078 - RNA, 23 nt, Human
uacaggcgugugccaccacgccc

SEQ ID NO: 487079 - RNA, 20 nt, Human
uacaggcgugugccaccaug

SEQ ID NO: 487080 - RNA, 32 nt, Human
uacaggcgugugccaccaugcccaaccuauuu

SEQ ID NO: 487081 - RNA, 32 nt, Human
uacaggcgugugccaccaugcccagcuaauuu

SEQ ID NO: 487082 - RNA, 32 nt, Human
uacaggcgugugccaccaugccuggcuaauuu

SEQ ID NO: 487083 - RNA, 32 nt, Human
uacaggcgugugccaccaugucugacuaaugu

SEQ ID NO: 487084 - RNA, 20 nt, Human
uacaggcgugugccaccgcg

SEQ ID NO: 487085 - RNA, 32 nt, Human
uacaggcgugugccacugcgcccagccauuau

SEQ ID NO: 487086 - RNA, 18 nt, Human
uacaggcgugugccauca

SEQ ID NO: 487087 - RNA, 20 nt, Human
uacaggcgugugucaccacg

SEQ ID NO: 487088 - RNA, 18 nt, Human
uacaggcguguuagcaug

SEQ ID NO: 487089 - RNA, 31 nt, Human
uacaggcucaauaacuauuuacugaauguga

SEQ ID NO: 487090 - RNA, 18 nt, Human
uacaggcucacaccacca

SEQ ID NO: 487091 - RNA, 20 nt, Human
uacaggcucaugccaccaug

SEQ ID NO: 487092 - RNA, 32 nt, Human
uacaggcucaugccaccaugcccagcuaauuu

SEQ ID NO: 487093 - RNA, 32 nt, Human
uacaggcucaugccaucaugcccagcuaauau

SEQ ID NO: 487094 - RNA, 20 nt, Human
uacaggcuccugccaccacg

SEQ ID NO: 487095 - RNA, 20 nt, Human
uacaggcuccugccaccgcg

SEQ ID NO: 487096 - RNA, 19 nt, Human
uacaggcugagccaccgcg

SEQ ID NO: 487097 - RNA, 32 nt, Human
uacaggcugcagcuccuucccacaguuccagu

SEQ ID NO: 487098 - RNA, 32 nt, Human
uacaggcuggaaacagcuccuuguacaacacg

SEQ ID NO: 487099 - RNA, 32 nt, Human
uacaggcuggagcuacagagcccagccuguca

SEQ ID NO: 487100 - RNA, 32 nt, Human
uacaggcugugaaguaucugaccuguguuauc

SEQ ID NO: 487101 - RNA, 20 nt, Human
uacaggcuuaagccaccacg

SEQ ID NO: 487102 - RNA, 32 nt, Human
uacaggcuucagccaccacacccagccucauu

SEQ ID NO: 487103 - RNA, 32 nt, Human
uacaggcuuccaggcaccucaucagucaugcu

SEQ ID NO: 487104 - RNA, 32 nt, Human
uacaggcuugacccacugcgcccagccugcau

SEQ ID NO: 487105 - RNA, 19 nt, Human
uacaggcuugagccaccac

SEQ ID NO: 487106 - RNA, 32 nt, Human
uacaggcuugagccaccacaccugaccuauuc

SEQ ID NO: 487107 - RNA, 32 nt, Human
uacaggcuugagccaccacgcccagacuugug

SEQ ID NO: 487108 - RNA, 32 nt, Human
uacaggcuugagccaccacgcccagccuguag

SEQ ID NO: 487109 - RNA, 32 nt, Human
uacaggcuugagccaccacgcccaguccaaca

SEQ ID NO: 487110 - RNA, 19 nt, Human
uacaggcuugagccaccgc

SEQ ID NO: 487111 - RNA, 32 nt, Human
uacaggcuugagccaccgcacccggccgagaa

SEQ ID NO: 487112 - RNA, 32 nt, Human
uacaggcuugagccaccgcaccuggccuuccc

SEQ ID NO: 487113 - RNA, 20 nt, Human
uacaggcuugagccaccgcg

SEQ ID NO: 487114 - RNA, 32 nt, Human
uacaggcuugagccaccgcgcccggcuauauu

SEQ ID NO: 487115 - RNA, 32 nt, Human
uacaggcuugagccaccgggugaccggcuuac

SEQ ID NO: 487116 - RNA, 32 nt, Human
uacaggcuugagccaccgugccaggccuguuu

SEQ ID NO: 487117 - RNA, 32 nt, Human
uacaggcuugagccaccgugccuggccucaaa

SEQ ID NO: 487118 - RNA, 32 nt, Human
uacaggcuugagccaccgugccuggccucaag

SEQ ID NO: 487119 - RNA, 32 nt, Human
uacaggcuugagccaccgugccuggucuguuu

SEQ ID NO: 487120 - RNA, 32 nt, Human
uacaggcuugagccacgcguccggccugaagu

SEQ ID NO: 487121 - RNA, 32 nt, Human
uacaggcuugagccacugcaccuagccucuau

SEQ ID NO: 487122 - RNA, 32 nt, Human
uacaggcuugagccacugcgcccggccuagaa

SEQ ID NO: 487123 - RNA, 32 nt, Human
uacaggcuugagccacugcgccuggccugguc

SEQ ID NO: 487124 - RNA, 32 nt, Human
uacaggcuugagccacugcucccggcugauuu

SEQ ID NO: 487125 - RNA, 32 nt, Human
uacaggcuugagccacugcuccuggccaacau

SEQ ID NO: 487126 - RNA, 32 nt, Human
uacaggcuugagccacugugccuggcuucagg

SEQ ID NO: 487127 - RNA, 32 nt, Human
uacaggcuugagcccccgcgcccagccaucaa

SEQ ID NO: 487128 - RNA, 32 nt, Human
uacaggcuugauugguguaaaucuuuuuauaa

SEQ ID NO: 487129 - RNA, 19 nt, Human
uacaggcuugcaccaccac

SEQ ID NO: 487130 - RNA, 19 nt, Human
uacaggcuugcacuaccac

SEQ ID NO: 487131 - RNA, 20 nt, Human
uacaggcuugcacuaccaca

SEQ ID NO: 487132 - RNA, 19 nt, Human
uacaggcuugcgccaccac

SEQ ID NO: 487133 - RNA, 32 nt, Human
uacaggcuuggagcuugcaggucccuuucuac

SEQ ID NO: 487134 - RNA, 20 nt, Human
uacaggcuugggccaccgcg

SEQ ID NO: 487135 - RNA, 32 nt, Human
uacaggcuugggccaccgcgcccagccaaugu

SEQ ID NO: 487136 - RNA, 19 nt, Human
uacaggcuugugccaccac

SEQ ID NO: 487137 - RNA, 19 nt, Human
uacaggcuuugucacuacg

SEQ ID NO: 487138 - RNA, 32 nt, Human
uacagggaaugauuggucauggggaagucucu

SEQ ID NO: 487139 - RNA, 20 nt, Human
uacagggacccgccaccacg

SEQ ID NO: 487140 - RNA, 32 nt, Human
uacagggagcaguuuuggguggcgugggcucc

SEQ ID NO: 487141 - RNA, 32 nt, Human
uacagggaggaacaaggagaaaccagccaggc

SEQ ID NO: 487142 - RNA, 32 nt, Human
uacagggaggggccaugugcgaaccagggaga

SEQ ID NO: 487143 - RNA, 32 nt, Human
uacagggaugagccaccaugccuggcugggua

SEQ ID NO: 487144 - RNA, 32 nt, Human
uacagggaugagccaccgcgcccagccucauc

SEQ ID NO: 487145 - RNA, 19 nt, Human
uacagggauguaccaccac

SEQ ID NO: 487146 - RNA, 32 nt, Human
uacagggauguagcaccaugccuggcuaauuu

SEQ ID NO: 487147 - RNA, 32 nt, Human
uacagggcaggcagaggaggcaccuguagggg

SEQ ID NO: 487148 - RNA, 32 nt, Human
uacagggcagggauaaauacagugcaugucug

SEQ ID NO: 487149 - RNA, 32 nt, Human
uacagggccaaagacuugagacgugguguuuu

SEQ ID NO: 487150 - RNA, 20 nt, Human
uacagggccaccaccaccac

SEQ ID NO: 487151 - RNA, 21 nt, Human
uacagggccccgccccagcca

SEQ ID NO: 487152 - RNA, 32 nt, Human
uacagggccguuuuauucugcaaaccgaaacu

SEQ ID NO: 487153 - RNA, 32 nt, Human
uacagggcugcacagcccugaggggucagugc

SEQ ID NO: 487154 - RNA, 32 nt, Human
uacaggggagccacugcacuggccuucauugu

SEQ ID NO: 487155 - RNA, 32 nt, Human
uacaggggaggcugaggcaggagaaucgcuug

SEQ ID NO: 487156 - RNA, 32 nt, Human
uacaggggagggagagccugaggcucugcuca

SEQ ID NO: 487157 - RNA, 32 nt, Human
uacaggggcauauaccuguaauccuagcuauu

SEQ ID NO: 487158 - RNA, 19 nt, Human
uacaggggcccgccaccac

SEQ ID NO: 487159 - RNA, 20 nt, Human
uacaggggcccgccaccacg

SEQ ID NO: 487160 - RNA, 32 nt, Human
uacagggggaagggccugagaggaauguaagg

SEQ ID NO: 487161 - RNA, 32 nt, Human
uacagggggccgggacagggagguugggaggg

SEQ ID NO: 487162 - RNA, 23 nt, Human
uacagggguaugccaccaugccc

SEQ ID NO: 487163 - RNA, 32 nt, Human
uacagggguaugccaccaugcccagcuggcau

SEQ ID NO: 487164 - RNA, 32 nt, Human
uacagggguccucggucuccaucuacuucccu

SEQ ID NO: 487165 - RNA, 20 nt, Human
uacaggggugagccaccacg

SEQ ID NO: 487166 - RNA, 32 nt, Human
uacaggggugagccaccacgcccagccccagc

SEQ ID NO: 487167 - RNA, 32 nt, Human
uacaggggugagccaccgugcccaaccucacu

SEQ ID NO: 487168 - RNA, 32 nt, Human
uacaggggugagccaccgugccuugcuauuaa

SEQ ID NO: 487169 - RNA, 32 nt, Human
uacaggggugagccacugcgcccagccuaaaa

SEQ ID NO: 487170 - RNA, 32 nt, Human
uacaggggugagccacugugcccggccauaau

SEQ ID NO: 487171 - RNA, 32 nt, Human
uacaggggugcaccaccaugcccagcuaaguu

SEQ ID NO: 487172 - RNA, 32 nt, Human
uacagggguucagccaagcaagacugagcagc

SEQ ID NO: 487173 - RNA, 32 nt, Human
uacaggguaggcaccugucaggacagaacagc

SEQ ID NO: 487174 - RNA, 32 nt, Human
uacaggguuagcaaaaagagccugggcuguau

SEQ ID NO: 487175 - RNA, 32 nt, Human
uacagguaauccagaggcauaagaguccuggu

SEQ ID NO: 487176 - RNA, 20 nt, Human
uacagguacccaccaccacg

SEQ ID NO: 487177 - RNA, 20 nt, Human
uacagguacgcaccaccacg

SEQ ID NO: 487178 - RNA, 20 nt, Human
uacagguagacaccaucacg

SEQ ID NO: 487179 - RNA, 18 nt, Human
uacagguaggaccaccac

SEQ ID NO: 487180 - RNA, 20 nt, Human
uacagguaugacccaccacg

SEQ ID NO: 487181 - RNA, 32 nt, Human
uacagguaugagccacaacacccagccuuuaa

SEQ ID NO: 487182 - RNA, 32 nt, Human
uacagguaugagccacaacgcccagccaucau

SEQ ID NO: 487183 - RNA, 19 nt, Human
uacagguaugagccaccac

SEQ ID NO: 487184 - RNA, 32 nt, Human
uacagguaugagccaccacacccagcccaacu

SEQ ID NO: 487185 - RNA, 20 nt, Human
uacagguaugagccaccacg

SEQ ID NO: 487186 - RNA, 32 nt, Human
uacagguaugagccaccacgcccggucagaag

SEQ ID NO: 487187 - RNA, 32 nt, Human
uacagguaugagccaccaugcccggcuggcag

SEQ ID NO: 487188 - RNA, 32 nt, Human
uacagguaugagccaccaugccuggccccagc

SEQ ID NO: 487189 - RNA, 32 nt, Human
uacagguaugagccaccgcaccgggccuguuc

SEQ ID NO: 487190 - RNA, 32 nt, Human
uacagguaugagccaccgcgcccagcccaucu

SEQ ID NO: 487191 - RNA, 32 nt, Human
uacagguaugagccacugcgcccggccaguua

SEQ ID NO: 487192 - RNA, 32 nt, Human
uacagguaugcaccacagcuccaggccaaccu

SEQ ID NO: 487193 - RNA, 20 nt, Human
uacagguaugcaccaccacg

SEQ ID NO: 487194 - RNA, 32 nt, Human
uacagguaugcgccaccaugccccacuaauuu

SEQ ID NO: 487195 - RNA, 32 nt, Human
uacagguaugugccaccaugccuggcuaauuu

SEQ ID NO: 487196 - RNA, 32 nt, Human
uacagguauuggguaaauacagcuguuccaaa

SEQ ID NO: 487197 - RNA, 32 nt, Human
uacagguccccgcuaaagauggacucucuggc

SEQ ID NO: 487198 - RNA, 19 nt, Human
uacaggucuacaccaccac

SEQ ID NO: 487199 - RNA, 32 nt, Human
uacaggucuacaccaccacucccggcuaauuu

SEQ ID NO: 487200 - RNA, 20 nt, Human
uacaggugaccgccaccacg

SEQ ID NO: 487201 - RNA, 32 nt, Human
uacaggugagauuacuaaguugcucaccauua

SEQ ID NO: 487202 - RNA, 20 nt, Human
uacaggugagcacuaccacg

SEQ ID NO: 487203 - RNA, 32 nt, Human
uacaggugagccccagcaugcccagcuaauuu

SEQ ID NO: 487204 - RNA, 19 nt, Human
uacaggugcacaccaccac

SEQ ID NO: 487205 - RNA, 20 nt, Human
uacaggugcacaccaccacg

SEQ ID NO: 487206 - RNA, 20 nt, Human
uacaggugcacaccaccaug

SEQ ID NO: 487207 - RNA, 17 nt, Human
uacaggugcaccaccac

SEQ ID NO: 487208 - RNA, 32 nt, Human
uacaggugcaccaccacaccuggcuaauuuuu

SEQ ID NO: 487209 - RNA, 19 nt, Human
uacaggugcacgccaccac

SEQ ID NO: 487210 - RNA, 20 nt, Human
uacaggugcacgccaccacg

SEQ ID NO: 487211 - RNA, 32 nt, Human
uacaggugcacgcuaccaugcccggcuaauuu

SEQ ID NO: 487212 - RNA, 32 nt, Human
uacaggugcaggccaccaugcccggcuaauuu

SEQ ID NO: 487213 - RNA, 19 nt, Human
uacaggugcauaccaccac

SEQ ID NO: 487214 - RNA, 20 nt, Human
uacaggugcauaccaccaug

SEQ ID NO: 487215 - RNA, 32 nt, Human
uacaggugcauauuaauuuucuugguucuuuc

SEQ ID NO: 487216 - RNA, 32 nt, Human
uacaggugcaugccaccaugccaggcuaauuu

SEQ ID NO: 487217 - RNA, 32 nt, Human
uacaggugcaugccaccaugccuggcuaauuu

SEQ ID NO: 487218 - RNA, 32 nt, Human
uacaggugcaugccauuaugccaggcuaauuu

SEQ ID NO: 487219 - RNA, 32 nt, Human
uacaggugcaugcuacaaugcccagcuaauuu

SEQ ID NO: 487220 - RNA, 32 nt, Human
uacaggugcaugcuaccaugcccaguccauuu

SEQ ID NO: 487221 - RNA, 20 nt, Human
uacaggugcccaccaacacg

SEQ ID NO: 487222 - RNA, 19 nt, Human
uacaggugcccaccaccac

SEQ ID NO: 487223 - RNA, 20 nt, Human
uacaggugcccaccaccacg

SEQ ID NO: 487224 - RNA, 20 nt, Human
uacaggugcccaccaccaug

SEQ ID NO: 487225 - RNA, 23 nt, Human
uacaggugcccaccaccaugccc

SEQ ID NO: 487226 - RNA, 32 nt, Human
uacaggugcccaccaccaugcccagcuaauuu

SEQ ID NO: 487227 - RNA, 32 nt, Human
uacaggugcccaccaccaugcccggcuaauuu

SEQ ID NO: 487228 - RNA, 20 nt, Human
uacaggugcccaccaccgcg

SEQ ID NO: 487229 - RNA, 20 nt, Human
uacaggugcccaccagcacg

SEQ ID NO: 487230 - RNA, 18 nt, Human
uacaggugcccaccauca

SEQ ID NO: 487231 - RNA, 19 nt, Human
uacaggugcccgccaccac

SEQ ID NO: 487232 - RNA, 20 nt, Human
uacaggugcccgccaccacg

SEQ ID NO: 487233 - RNA, 32 nt, Human
uacaggugcccgccaccaugcccggcuaauuu

SEQ ID NO: 487234 - RNA, 32 nt, Human
uacaggugcccgccaccaugcccggcugauuu

SEQ ID NO: 487235 - RNA, 32 nt, Human
uacaggugcccgccaccaugcucagcuaauuu

SEQ ID NO: 487236 - RNA, 32 nt, Human
uacaggugcccgccacuaugcccagcuaauuu

SEQ ID NO: 487237 - RNA, 20 nt, Human
uacaggugcccuccaccacg

SEQ ID NO: 487238 - RNA, 32 nt, Human
uacaggugccugccaccaugcccagcuaauuu

SEQ ID NO: 487239 - RNA, 32 nt, Human
uacaggugccugccaccaugcccggcuaauac

SEQ ID NO: 487240 - RNA, 32 nt, Human
uacaggugccugccaccaugccuggcuaauuu

SEQ ID NO: 487241 - RNA, 32 nt, Human
uacaggugcgagccaccgugcccggccucugg

SEQ ID NO: 487242 - RNA, 20 nt, Human
uacaggugcgcaccaccaug

SEQ ID NO: 487243 - RNA, 23 nt, Human
uacaggugcgcaccaccaugccc

SEQ ID NO: 487244 - RNA, 32 nt, Human
uacaggugcgcaccaccaugcccagcuaauuu

SEQ ID NO: 487245 - RNA, 32 nt, Human
uacaggugcgcaccaccaugcccggcuaacuu

SEQ ID NO: 487246 - RNA, 20 nt, Human
uacaggugcgcaccacuacg

SEQ ID NO: 487247 - RNA, 19 nt, Human
uacaggugcgcacuaccac

SEQ ID NO: 487248 - RNA, 32 nt, Human
uacaggugcgccccaccaugcccagcuaauuu

SEQ ID NO: 487249 - RNA, 19 nt, Human
uacaggugcgcgccaccac

SEQ ID NO: 487250 - RNA, 32 nt, Human
uacaggugcgugccaccaugcccggguaauuu

SEQ ID NO: 487251 - RNA, 32 nt, Human
uacaggugcgugccaccaugccuggcuaauuu

SEQ ID NO: 487252 - RNA, 32 nt, Human
uacaggugcgugccaccaugcuuggcuaauuu

SEQ ID NO: 487253 - RNA, 32 nt, Human
uacaggugcucaauaaacacuuguagagcaga

SEQ ID NO: 487254 - RNA, 19 nt, Human
uacaggugcucaccaccac

SEQ ID NO: 487255 - RNA, 20 nt, Human
uacaggugcucaccaccacg

SEQ ID NO: 487256 - RNA, 23 nt, Human
uacaggugcuugccaccaugccc

SEQ ID NO: 487257 - RNA, 31 nt, Human
uacagguggcaauggaaaugggugaguggau

SEQ ID NO: 487258 - RNA, 20 nt, Human
uacagguggcuggagcagcu

SEQ ID NO: 487259 - RNA, 32 nt, Human
uacaggugggagccaccgcacccagccugcag

SEQ ID NO: 487260 - RNA, 32 nt, Human
uacaggugggcauaggugcagugagugcaggu

SEQ ID NO: 487261 - RNA, 32 nt, Human
uacagguggguuaggagaaaacugacaugagc

SEQ ID NO: 487262 - RNA, 32 nt, Human
uacagguggugccaccauaccuagcuaauuuu

SEQ ID NO: 487263 - RNA, 19 nt, Human
uacagguguaaaucaccac

SEQ ID NO: 487264 - RNA, 32 nt, Human
uacagguguaagccaccauaccgcaaccucaa

SEQ ID NO: 487265 - RNA, 32 nt, Human
uacagguguaagccaccaugcccagccuguuu

SEQ ID NO: 487266 - RNA, 32 nt, Human
uacagguguaagccaccgugcccagcccuaaa

SEQ ID NO: 487267 - RNA, 32 nt, Human
uacagguguacaccaccaugccuagcuaauuu

SEQ ID NO: 487268 - RNA, 32 nt, Human
uacagguguacgccaccauacccugucucuac

SEQ ID NO: 487269 - RNA, 32 nt, Human
uacaggugucagccaccacgcccggcccuaaa

SEQ ID NO: 487270 - RNA, 20 nt, Human
uacagguguccaccaccacg

SEQ ID NO: 487271 - RNA, 32 nt, Human
uacaggugucugccaccauacccaguuucauu

SEQ ID NO: 487272 - RNA, 19 nt, Human
uacaggugugaaccaccac

SEQ ID NO: 487273 - RNA, 20 nt, Human
uacaggugugaaccaccacg

SEQ ID NO: 487274 - RNA, 20 nt, Human
uacaggugugaaccaccaug

SEQ ID NO: 487275 - RNA, 32 nt, Human
uacaggugugaaccaccaugcccagccagaga

SEQ ID NO: 487276 - RNA, 32 nt, Human
uacaggugugaaccacugcgcccagccccaag

SEQ ID NO: 487277 - RNA, 32 nt, Human
uacaggugugagccacagcacccaaccuuuuu

SEQ ID NO: 487278 - RNA, 32 nt, Human
uacaggugugagccacagcaccuggccaacca

SEQ ID NO: 487279 - RNA, 32 nt, Human
uacaggugugagccacagcacucggccuaaau

SEQ ID NO: 487280 - RNA, 32 nt, Human
uacaggugugagccacagcgccuggcccagug

SEQ ID NO: 487281 - RNA, 32 nt, Human
uacaggugugagccacagugcccagcacuuga

SEQ ID NO: 487282 - RNA, 32 nt, Human
uacaggugugagccacagugccuggcccauuc

SEQ ID NO: 487283 - RNA, 19 nt, Human
uacaggugugagccaccac

SEQ ID NO: 487284 - RNA, 32 nt, Human
uacaggugugagccaccacaccaggccagagc

SEQ ID NO: 487285 - RNA, 32 nt, Human
uacaggugugagccaccacacccagccaacau

SEQ ID NO: 487286 - RNA, 32 nt, Human
uacaggugugagccaccacacccagccaauua

SEQ ID NO: 487287 - RNA, 32 nt, Human
uacaggugugagccaccacacccagcccaggc

SEQ ID NO: 487288 - RNA, 32 nt, Human
uacaggugugagccaccacacccagccucugu

SEQ ID NO: 487289 - RNA, 32 nt, Human
uacaggugugagccaccacacccggccaacca

SEQ ID NO: 487290 - RNA, 32 nt, Human
uacaggugugagccaccacacccggcccaacu

SEQ ID NO: 487291 - RNA, 32 nt, Human
uacaggugugagccaccacacccggcccccau

SEQ ID NO: 487292 - RNA, 32 nt, Human
uacaggugugagccaccacacccggccuauau

SEQ ID NO: 487293 - RNA, 32 nt, Human
uacaggugugagccaccacacccggccuuauc

SEQ ID NO: 487294 - RNA, 32 nt, Human
uacaggugugagccaccacaccugacccauag

SEQ ID NO: 487295 - RNA, 32 nt, Human
uacaggugugagccaccacaccugcccccgcc

SEQ ID NO: 487296 - RNA, 32 nt, Human
uacaggugugagccaccacaccuggccaagaa

SEQ ID NO: 487297 - RNA, 32 nt, Human
uacaggugugagccaccacaccuggcccauag

SEQ ID NO: 487298 - RNA, 32 nt, Human
uacaggugugagccaccacaccuggccccaaa

SEQ ID NO: 487299 - RNA, 32 nt, Human
uacaggugugagccaccacacugggccaaugc

SEQ ID NO: 487300 - RNA, 32 nt, Human
uacaggugugagccaccacacuuggccaguau

SEQ ID NO: 487301 - RNA, 32 nt, Human
uacaggugugagccaccacagccagccaguau

SEQ ID NO: 487302 - RNA, 32 nt, Human
uacaggugugagccaccacagccagccuaaaa

SEQ ID NO: 487303 - RNA, 32 nt, Human
uacaggugugagccaccacauccagccuaacu

SEQ ID NO: 487304 - RNA, 20 nt, Human
uacaggugugagccaccacg

SEQ ID NO: 487305 - RNA, 32 nt, Human
uacaggugugagccaccacgaucagccucuag

SEQ ID NO: 487306 - RNA, 32 nt, Human
uacaggugugagccaccacgcauggcccugaa

SEQ ID NO: 487307 - RNA, 32 nt, Human
uacaggugugagccaccacgccagccugacga

SEQ ID NO: 487308 - RNA, 32 nt, Human
uacaggugugagccaccacgcccagccaugaa

SEQ ID NO: 487309 - RNA, 32 nt, Human
uacaggugugagccaccacgcccagccugugg

SEQ ID NO: 487310 - RNA, 32 nt, Human
uacaggugugagccaccacgcccagccuuuuu

SEQ ID NO: 487311 - RNA, 32 nt, Human
uacaggugugagccaccacgcccggccaaggc

SEQ ID NO: 487312 - RNA, 32 nt, Human
uacaggugugagccaccacgcccggccgauuu

SEQ ID NO: 487313 - RNA, 32 nt, Human
uacaggugugagccaccacgcccgguacauau

SEQ ID NO: 487314 - RNA, 32 nt, Human
uacaggugugagccaccacgcccugccuacuc

SEQ ID NO: 487315 - RNA, 32 nt, Human
uacaggugugagccaccacgccuggacuauaa

SEQ ID NO: 487316 - RNA, 32 nt, Human
uacaggugugagccaccacgccuggcuaauuu

SEQ ID NO: 487317 - RNA, 32 nt, Human
uacaggugugagccaccacgccugggcccaug

SEQ ID NO: 487318 - RNA, 32 nt, Human
uacaggugugagccaccacguccggccaauuu

SEQ ID NO: 487319 - RNA, 32 nt, Human
uacaggugugagccaccacucccagccugauu

SEQ ID NO: 487320 - RNA, 32 nt, Human
uacaggugugagccaccaggcccagccuauau

SEQ ID NO: 487321 - RNA, 32 nt, Human
uacaggugugagccaccaggcucagcccccua

SEQ ID NO: 487322 - RNA, 32 nt, Human
uacaggugugagccaccaugccaggcccucuu

SEQ ID NO: 487323 - RNA, 23 nt, Human
uacaggugugagccaccaugccc

SEQ ID NO: 487324 - RNA, 32 nt, Human
uacaggugugagccaccaugcccaacacccac

SEQ ID NO: 487325 - RNA, 32 nt, Human
uacaggugugagccaccaugcccagcccaaaa

SEQ ID NO: 487326 - RNA, 32 nt, Human
uacaggugugagccaccaugcccagccucuuc

SEQ ID NO: 487327 - RNA, 32 nt, Human
uacaggugugagccaccaugcccagccugaau

SEQ ID NO: 487328 - RNA, 32 nt, Human
uacaggugugagccaccaugcccagccuguuc

SEQ ID NO: 487329 - RNA, 32 nt, Human
uacaggugugagccaccaugcccggccuucuc

SEQ ID NO: 487330 - RNA, 32 nt, Human
uacaggugugagccaccaugcccggccuuguu

SEQ ID NO: 487331 - RNA, 32 nt, Human
uacaggugugagccaccaugcccggcuaauuu

SEQ ID NO: 487332 - RNA, 32 nt, Human
uacaggugugagccaccaugccuggccccaug

SEQ ID NO: 487333 - RNA, 32 nt, Human
uacaggugugagccaccaugccuggccguggu

SEQ ID NO: 487334 - RNA, 32 nt, Human
uacaggugugagccaccaugccuggccuaaac

SEQ ID NO: 487335 - RNA, 32 nt, Human
uacaggugugagccaccaugccuggccugcuu

SEQ ID NO: 487336 - RNA, 32 nt, Human
uacaggugugagccaccaugccuggcucugga

SEQ ID NO: 487337 - RNA, 32 nt, Human
uacaggugugagccaccaugccugggcuaaac

SEQ ID NO: 487338 - RNA, 32 nt, Human
uacaggugugagccaccaugccuggucacccu

SEQ ID NO: 487339 - RNA, 32 nt, Human
uacaggugugagccaccaugcucugccaauua

SEQ ID NO: 487340 - RNA, 32 nt, Human
uacaggugugagccaccaugucuggccuugau

SEQ ID NO: 487341 - RNA, 32 nt, Human
uacaggugugagccacccugcccagccgucaa

SEQ ID NO: 487342 - RNA, 32 nt, Human
uacaggugugagccaccgcacccaauccuauu

SEQ ID NO: 487343 - RNA, 32 nt, Human
uacaggugugagccaccgcacccagccuaugu

SEQ ID NO: 487344 - RNA, 32 nt, Human
uacaggugugagccaccgcacccggccaaaaa

SEQ ID NO: 487345 - RNA, 32 nt, Human
uacaggugugagccaccgcacccggccaacuu

SEQ ID NO: 487346 - RNA, 32 nt, Human
uacaggugugagccaccgcacccggcuggcca

SEQ ID NO: 487347 - RNA, 32 nt, Human
uacaggugugagccaccgcaccuggccagaag

SEQ ID NO: 487348 - RNA, 32 nt, Human
uacaggugugagccaccgcaccuggccagacc

SEQ ID NO: 487349 - RNA, 32 nt, Human
uacaggugugagccaccgcaccuggccugcuu

SEQ ID NO: 487350 - RNA, 32 nt, Human
uacaggugugagccaccgcacucagcugauuu

SEQ ID NO: 487351 - RNA, 32 nt, Human
uacaggugugagccaccgcgccaggccucagc

SEQ ID NO: 487352 - RNA, 32 nt, Human
uacaggugugagccaccgcgcccagccaagaa

SEQ ID NO: 487353 - RNA, 32 nt, Human
uacaggugugagccaccgcgcccagccaccuu

SEQ ID NO: 487354 - RNA, 32 nt, Human
uacaggugugagccaccgcgcccagcccguuu

SEQ ID NO: 487355 - RNA, 32 nt, Human
uacaggugugagccaccgcgcccggcccgagc

SEQ ID NO: 487356 - RNA, 32 nt, Human
uacaggugugagccaccgcgcccggcccuuuu

SEQ ID NO: 487357 - RNA, 32 nt, Human
uacaggugugagccaccgcgcccggccgagaa

SEQ ID NO: 487358 - RNA, 32 nt, Human
uacaggugugagccaccgcgcccggccucucg

SEQ ID NO: 487359 - RNA, 32 nt, Human
uacaggugugagccaccgcgcccggcuguuuu

SEQ ID NO: 487360 - RNA, 32 nt, Human
uacaggugugagccaccgcgccgggcccuuuu

SEQ ID NO: 487361 - RNA, 32 nt, Human
uacaggugugagccaccgcgccugaccaacuu

SEQ ID NO: 487362 - RNA, 32 nt, Human
uacaggugugagccaccgcgccuggcccucaa

SEQ ID NO: 487363 - RNA, 32 nt, Human
uacaggugugagccaccgcgccuggcccugua

SEQ ID NO: 487364 - RNA, 32 nt, Human
uacaggugugagccaccgcgccuggccuauua

SEQ ID NO: 487365 - RNA, 32 nt, Human
uacaggugugagccaccgcgccuggccugggc

SEQ ID NO: 487366 - RNA, 32 nt, Human
uacaggugugagccaccgcgcucggccagagc

SEQ ID NO: 487367 - RNA, 32 nt, Human
uacaggugugagccaccgcguccagccagcuu

SEQ ID NO: 487368 - RNA, 32 nt, Human
uacaggugugagccaccgugaccagccaaugu

SEQ ID NO: 487369 - RNA, 32 nt, Human
uacaggugugagccaccgugcacggccggccu

SEQ ID NO: 487370 - RNA, 32 nt, Human
uacaggugugagccaccgugcccagccuauac

SEQ ID NO: 487371 - RNA, 32 nt, Human
uacaggugugagccaccgugcccaggcccuca

SEQ ID NO: 487372 - RNA, 32 nt, Human
uacaggugugagccaccgugcccggccaagua

SEQ ID NO: 487373 - RNA, 32 nt, Human
uacaggugugagccaccgugcccggccaccag

SEQ ID NO: 487374 - RNA, 32 nt, Human
uacaggugugagccaccgugcccggcccagau

SEQ ID NO: 487375 - RNA, 32 nt, Human
uacaggugugagccaccgugcccggcccauuc

SEQ ID NO: 487376 - RNA, 32 nt, Human
uacugguuuguaagcuuuaauuuuagaaaaga

SEQ ID NO: 487377 - RNA, 32 nt, Human
uacugguuuguaagcuuuaauuuuagagaaga

SEQ ID NO: 487378 - RNA, 32 nt, Human
uacuguaaaagauuuuugcuucccucuugugg

SEQ ID NO: 487379 - RNA, 31 nt, Human
uacuguaaaguuaauaaagcaauuuaaaagc

SEQ ID NO: 487380 - RNA, 19 nt, Human
uacuguaacacuuuacaau

SEQ ID NO: 487381 - RNA, 32 nt, Human
uacuguaagcuggcugacugcuggugaagaaa

SEQ ID NO: 487382 - RNA, 31 nt, Human
uacuguaaggccuucuuuaggccuuuagcuc

SEQ ID NO: 487383 - RNA, 32 nt, Human
uacuguacagcaggcaggagggugggcaggca

SEQ ID NO: 487384 - RNA, 32 nt, Human
uacuguacaggggaauaaaagagaucuuauuu

SEQ ID NO: 487385 - RNA, 32 nt, Human
uacuguacuacuguacuccagccugggggaaa

SEQ ID NO: 487386 - RNA, 32 nt, Human
uacuguacuccccucauggcccagggagccag

SEQ ID NO: 487387 - RNA, 32 nt, Human
uacuguagaacugcaauuuccauucuuuuaaa

SEQ ID NO: 487388 - RNA, 32 nt, Human
uacuguagcugagacccuagccugugccaggc

SEQ ID NO: 487389 - RNA, 32 nt, Human
uacuguaggcagugccauuugaccacaccgau

SEQ ID NO: 487390 - RNA, 32 nt, Human
uacuguaguagaauucauucugggcaaacacu

SEQ ID NO: 487391 - RNA, 32 nt, Human
uacuguagucagcugggaauggggaaggugca

SEQ ID NO: 487392 - RNA, 32 nt, Human
uacuguaguuccuagaaugcugugagggcggg

SEQ ID NO: 487393 - RNA, 32 nt, Human
uacuguauccagcaccacagaaaccucagugu

SEQ ID NO: 487394 - RNA, 32 nt, Human
uacuguauguaauguauuuauguauguauuug

SEQ ID NO: 487395 - RNA, 32 nt, Human
uacuguaugugcaugcauucacacacacauau

SEQ ID NO: 487396 - RNA, 32 nt, Human
uacuguauucuacauuauuauaugacauagua

SEQ ID NO: 487397 - RNA, 32 nt, Human
uacuguauuuuacaucuuuauuucuuggugaa

SEQ ID NO: 487398 - RNA, 32 nt, Human
uacuguauuuuuaaaaacccuaccuccauuaa

SEQ ID NO: 487399 - RNA, 32 nt, Human
uacuguauuuuuaccuuuuuccuuccuuauca

SEQ ID NO: 487400 - RNA, 25 nt, Human
uacugucaaguguuacaacuggaua

SEQ ID NO: 487401 - RNA, 32 nt, Human
uacugucauacaggcuggcgugcaguaguggg

SEQ ID NO: 487402 - RNA, 32 nt, Human
uacugucauggaggugcugaacacagggaagg

SEQ ID NO: 487403 - RNA, 32 nt, Human
uacugucauuguccuaaaaccuuauuuuagaa

SEQ ID NO: 487404 - RNA, 32 nt, Human
uacuguccagucuuaaagcugcagagaaucgg

SEQ ID NO: 487405 - RNA, 32 nt, Human
uacuguccccagagaaagugcagcucuggaag

SEQ ID NO: 487406 - RNA, 32 nt, Human
uacuguccccuccagaggccacaccaaggucu

SEQ ID NO: 487407 - RNA, 32 nt, Human
uacugucccuuccuagcugugugaucuugaca

SEQ ID NO: 487408 - RNA, 32 nt, Human
uacuguccuccagaauaccaaguauuagguga

SEQ ID NO: 487409 - RNA, 32 nt, Human
uacuguccuuugccuauugcucccucuaucau

SEQ ID NO: 487410 - RNA, 28 nt, Human
uacugucucagugcugcuauauuuaaga

SEQ ID NO: 487411 - RNA, 32 nt, Human
uacugucucagugcugcuauauuuaagacggu

SEQ ID NO: 487412 - RNA, 32 nt, Human
uacugucucucauugagcacugauagaauuua

SEQ ID NO: 487413 - RNA, 32 nt, Human
uacugucucugaaucaauaugaccucacuuaa

SEQ ID NO: 487414 - RNA, 32 nt, Human
uacugucugccuauauuaaggguccacacggc

SEQ ID NO: 487415 - RNA, 32 nt, Human
uacugucugccuugcuggaaugcuggcuuuca

SEQ ID NO: 487416 - RNA, 32 nt, Human
uacugucugggcuaaaaagcuuacagugagug

SEQ ID NO: 487417 - RNA, 32 nt, Human
uacugugaagacacaaagauacuuuuagaaua

SEQ ID NO: 487418 - RNA, 32 nt, Human
uacugugaaugagugagauccuggaggacccu

SEQ ID NO: 487419 - RNA, 32 nt, Human
uacugugaauuguuuuuguacaguuaucauga

SEQ ID NO: 487420 - RNA, 32 nt, Human
uacugugacuucuuccuguguaaucucagugg

SEQ ID NO: 487421 - RNA, 32 nt, Human
uacugugaggaacuugggaaaagcuuuagauc

SEQ ID NO: 487422 - RNA, 32 nt, Human
uacugugaguggucuguuauuaagcccaauga

SEQ ID NO: 487423 - RNA, 32 nt, Human
uacugugaguucugcuacaaagcacaaaugaa

SEQ ID NO: 487424 - RNA, 32 nt, Human
uacugugauaccuggcacagugcuuugaucuu

SEQ ID NO: 487425 - RNA, 32 nt, Human
uacugugccacuccaauauuuaucaaauccaa

SEQ ID NO: 487426 - RNA, 32 nt, Human
uacugugccacuggccaugccaaacagcaccc

SEQ ID NO: 487427 - RNA, 32 nt, Human
uacugugccauugcacuccaagccugggcaac

SEQ ID NO: 487428 - RNA, 31 nt, Human
uacugugcccaggaaggcugggugaaguccc

SEQ ID NO: 487429 - RNA, 32 nt, Human
uacugugccuucauccccauccugggcccuga

SEQ ID NO: 487430 - RNA, 32 nt, Human
uacugugcugccugagcccguggcaccguggg

SEQ ID NO: 487431 - RNA, 32 nt, Human
uacugugcuucaaauaaauagaaaaauaguua

SEQ ID NO: 487432 - RNA, 32 nt, Human
uacugugcuuccuuucuuguucaugugagcau

SEQ ID NO: 487433 - RNA, 32 nt, Human
uacuguggagcagcccaguccacaccagagcc

SEQ ID NO: 487434 - RNA, 32 nt, Human
uacuguggagggaacccaggauccugaaauuc

SEQ ID NO: 487435 - RNA, 32 nt, Human
uacugugggaauaggggucucuccauccaggg

SEQ ID NO: 487436 - RNA, 32 nt, Human
uacugugggagcaggggucucuccauccaggg

SEQ ID NO: 487437 - RNA, 32 nt, Human
uacugugggaggccgaggcaggaggaucacga

SEQ ID NO: 487438 - RNA, 32 nt, Human
uacugugggaugguaucucaggguaaguaaca

SEQ ID NO: 487439 - RNA, 32 nt, Human
uacuguggggcuggggacccucacaggugaca

SEQ ID NO: 487440 - RNA, 32 nt, Human
uacuguguaacuuucaaaaguagcuacucaau

SEQ ID NO: 487441 - RNA, 32 nt, Human
uacuguguaauucuauuuauaugaaauaucca

SEQ ID NO: 487442 - RNA, 32 nt, Human
uacuguguauuucacauucaucaugccccgac

SEQ ID NO: 487443 - RNA, 32 nt, Human
uacugugucucccaggccacugggugcucucu

SEQ ID NO: 487444 - RNA, 32 nt, Human
uacugugugacuuugggcaaguuccuucccca

SEQ ID NO: 487445 - RNA, 32 nt, Human
uacugugugcagggaccagaggguguggaggu

SEQ ID NO: 487446 - RNA, 32 nt, Human
uacugugugccaacuugcaaaaggaauagaaa

SEQ ID NO: 487447 - RNA, 32 nt, Human
uacuguguuguaugaaacccuuuuguccuuug

SEQ ID NO: 487448 - RNA, 32 nt, Human
uacuguuacaguggcaaucgcauuucaacgug

SEQ ID NO: 487449 - RNA, 32 nt, Human
uacuguuacauuggggaucaaguuuccaauau

SEQ ID NO: 487450 - RNA, 32 nt, Human
uacuguucacacacacaguuugagacuccaag

SEQ ID NO: 487451 - RNA, 32 nt, Human
uacuguucauuucugauuccucagcaccuggu

SEQ ID NO: 487452 - RNA, 32 nt, Human
uacuguucuauagccccagaacugggagaugg

SEQ ID NO: 487453 - RNA, 32 nt, Human
uacuguucugaccaggcguccucugcccccag

SEQ ID NO: 487454 - RNA, 32 nt, Human
uacuguucugcugcugaucacgagggcaccag

SEQ ID NO: 487455 - RNA, 32 nt, Human
uacuguugaauucuguaaauaguuauaucucg

SEQ ID NO: 487456 - RNA, 32 nt, Human
uacuguugaugauuuuugcuguuguuucauga

SEQ ID NO: 487457 - RNA, 32 nt, Human
uacuguugcugauuuuugcaucuucuugaaga

SEQ ID NO: 487458 - RNA, 32 nt, Human
uacuguuguccaggcuggagcgcaguugauug

SEQ ID NO: 487459 - RNA, 32 nt, Human
uacuguuuaaguacaucucagcagaauuuuau

SEQ ID NO: 487460 - RNA, 32 nt, Human
uacuguuucuaaagcaugcaacuuuuucacaa

SEQ ID NO: 487461 - RNA, 32 nt, Human
uacuguuugggucugugucccuagccaaaugu

SEQ ID NO: 487462 - RNA, 32 nt, Human
uacuguuuguuucuaaaaauccuacugugccc

SEQ ID NO: 487463 - RNA, 32 nt, Human
uacuguuuucuuucuggccuuuucuccugguu

SEQ ID NO: 487464 - RNA, 32 nt, Human
uacuguuuugggccuccaugccccagcucugg

SEQ ID NO: 487465 - RNA, 32 nt, Human
uacuuaaaaaugcaaaaauuagccggacgugg

SEQ ID NO: 487466 - RNA, 32 nt, Human
uacuuaaaagaaagauuucccauugcauacag

SEQ ID NO: 487467 - RNA, 32 nt, Human
uacuuaaacucagucucagcuuccucaucugu

SEQ ID NO: 487468 - RNA, 32 nt, Human
uacuuaaagaacagacaguuuacuuggccuaa

SEQ ID NO: 487469 - RNA, 32 nt, Human
uacuuaaauguucauauuauuagcacacuaca

SEQ ID NO: 487470 - RNA, 32 nt, Human
uacuuaacauacaaugcaaaugcuuuccgcau

SEQ ID NO: 487471 - RNA, 32 nt, Human
uacuuaaccaacaaacaaauguaagacuacaa

SEQ ID NO: 487472 - RNA, 32 nt, Human
uacuuaaccugagacucauuauuuagcuauuu

SEQ ID NO: 487473 - RNA, 32 nt, Human
uacuuaacgugucacuucuccucccagaggca

SEQ ID NO: 487474 - RNA, 32 nt, Human
uacuuaacucacugcaucuguacagucauucu

SEQ ID NO: 487475 - RNA, 32 nt, Human
uacuuaaggauuuaccguggcuuugaguaaug

SEQ ID NO: 487476 - RNA, 32 nt, Human
uacuuaagguauagagauucuuuuccaccugu

SEQ ID NO: 487477 - RNA, 32 nt, Human
uacuuaauuccuguaaucccagcauuuugaga

SEQ ID NO: 487478 - RNA, 32 nt, Human
uacuuaauuuugaauuucuccuugccacguua

SEQ ID NO: 487479 - RNA, 32 nt, Human
uacuuaccagcccaauucuacucuccucaaac

SEQ ID NO: 487480 - RNA, 32 nt, Human
uacuuaccauuccuauuuuauagaugaggaaa

SEQ ID NO: 487481 - RNA, 32 nt, Human
uacuuacgaugauucagguacuguuguaagug

SEQ ID NO: 487482 - RNA, 32 nt, Human
uacuuacggaguuucgcucuuauugcccagac

SEQ ID NO: 487483 - RNA, 32 nt, Human
uacuuacuaagcauuuacuaugucaucaauaa

SEQ ID NO: 487484 - RNA, 32 nt, Human
uacuuacuacugcacuccugcuuuugugggaa

SEQ ID NO: 487485 - RNA, 32 nt, Human
uacuuacugaugacugaccacacugucuugug

SEQ ID NO: 487486 - RNA, 32 nt, Human
uacuuacuuacacauuuuuaacuuuaugacca

SEQ ID NO: 487487 - RNA, 21 nt, Human
uacuuagaaucuccuucuguu

SEQ ID NO: 487488 - RNA, 32 nt, Human
uacuuagagacagggucuugcucuguugccca

SEQ ID NO: 487489 - RNA, 32 nt, Human
uacuuagaugaucuucaugggcccacagguac

SEQ ID NO: 487490 - RNA, 32 nt, Human
uacuuagcagaaauaaaagggaaaaguauguc

SEQ ID NO: 487491 - RNA, 32 nt, Human
uacuuaggagccucuuuguagggacugugccu

SEQ ID NO: 487492 - RNA, 32 nt, Human
uacuuagggaggcuaagauaggaggaucacuu

SEQ ID NO: 487493 - RNA, 32 nt, Human
uacuuaggggucagagagucucgaccagagga

SEQ ID NO: 487494 - RNA, 32 nt, Human
uacuuaggugggccaggauuucuugaaaccaa

SEQ ID NO: 487495 - RNA, 32 nt, Human
uacuuagucuucucccccuucccuggggcuuc

SEQ ID NO: 487496 - RNA, 32 nt, Human
uacuuagugaaagagagcugcaguugaaauug

SEQ ID NO: 487497 - RNA, 32 nt, Human
uacuuauaaaaaggauuuugaagcuggaaaca

SEQ ID NO: 487498 - RNA, 32 nt, Human
uacuuauaaacauacuaauccucuuucaggac

SEQ ID NO: 487499 - RNA, 32 nt, Human
uacuuauagaaauccauuaaaaagcaaucucu

SEQ ID NO: 487500 - RNA, 32 nt, Human
uacuuaucaaaaaggcaggaaaguagguauga

SEQ ID NO: 487501 - RNA, 32 nt, Human
uacuuaucagggccauacugguaagcuugcgu

SEQ ID NO: 487502 - RNA, 32 nt, Human
uacuuauccuuaagaacauggaaggggugcug

SEQ ID NO: 487503 - RNA, 32 nt, Human
uacuuaucucucugugcuguggaagcaacagg

SEQ ID NO: 487504 - RNA, 32 nt, Human
uacuuaucuugcuccauugucaugaguccaug

SEQ ID NO: 487505 - RNA, 32 nt, Human
uacuuaugaagucuucuuccugcuccacaacg

SEQ ID NO: 487506 - RNA, 32 nt, Human
uacuuaugcaaauuucugcagcuggcuugaau

SEQ ID NO: 487507 - RNA, 32 nt, Human
uacuuauuacugcuaaguauuucccagcacau

SEQ ID NO: 487508 - RNA, 32 nt, Human
uacuuauucaacuccauuucuuguccuuacaa

SEQ ID NO: 487509 - RNA, 32 nt, Human
uacuuauuuauucaucugccucauguuuuauu

SEQ ID NO: 487510 - RNA, 32 nt, Human
uacuuauuucugcuuuagccuccuauguuugc

SEQ ID NO: 487511 - RNA, 32 nt, Human
uacuucaaccugggagguugaggcugcaguga

SEQ ID NO: 487512 - RNA, 32 nt, Human
uacuucaagaaagaggcaguagaguugcuggu

SEQ ID NO: 487513 - RNA, 32 nt, Human
uacuucaagaagaagaagcuguggaagcccag

SEQ ID NO: 487514 - RNA, 32 nt, Human
uacuucacagcucaaaucugaucuaguaugaa

SEQ ID NO: 487515 - RNA, 32 nt, Human
uacuucacugccuuugucuguguuacuagugg

SEQ ID NO: 487516 - RNA, 32 nt, Human
uacuucagaggaagaauuaaggggcauguugg

SEQ ID NO: 487517 - RNA, 32 nt, Human
uacuucaggcugggcacaguggcucaugccug

SEQ ID NO: 487518 - RNA, 32 nt, Human
uacuucaguuaacuuggcuuuuauagaauccu

SEQ ID NO: 487519 - RNA, 31 nt, Human
uacuucaucagcuagauugcaagcuccaugu

SEQ ID NO: 487520 - RNA, 32 nt, Human
uacuucaucucuaggucacgggucaggaaaca

SEQ ID NO: 487521 - RNA, 32 nt, Human
uacuuccaaaacugugcugugugaaggcuuug

SEQ ID NO: 487522 - RNA, 32 nt, Human
uacuuccacagcaacaggugcuagagaccacu

SEQ ID NO: 487523 - RNA, 32 nt, Human
uacuuccagaagaacaaccagaugggaaggac

SEQ ID NO: 487524 - RNA, 32 nt, Human
uacuuccagaggaggaauuaaugagcgaccug

SEQ ID NO: 487525 - RNA, 31 nt, Human
uacuucccagcugcagccaaguucuuagggu

SEQ ID NO: 487526 - RNA, 32 nt, Human
uacuucccucugcauuuguggcugccauuuca

SEQ ID NO: 487527 - RNA, 32 nt, Human
uacuuccucaaaauguauccuuagucaccuca

SEQ ID NO: 487528 - RNA, 32 nt, Human
uacuuccuccaccccucccuaucucaccugcc

SEQ ID NO: 487529 - RNA, 32 nt, Human
uacuuccucuccccaggucucucgguuuccuc

SEQ ID NO: 487530 - RNA, 32 nt, Human
uacuuccugcauuuuaacaagauccccaaggg

SEQ ID NO: 487531 - RNA, 32 nt, Human
uacuuccugccugugucaccugguuccugcuu

SEQ ID NO: 487532 - RNA, 32 nt, Human
uacuuccugguugcaaccucucuuccucuggg

SEQ ID NO: 487533 - RNA, 32 nt, Human
uacuuccuguguacaaaguuuuauuguaaaug

SEQ ID NO: 487534 - RNA, 32 nt, Human
uacuuccuuuaaaugucccauggauguaggac

SEQ ID NO: 487535 - RNA, 32 nt, Human
uacuucggcaagacaucuuaagaaugugacac

SEQ ID NO: 487536 - RNA, 32 nt, Human
uacuucggcaggcguguguuacaguggaguca

SEQ ID NO: 487537 - RNA, 32 nt, Human
uacuucgggcuucuguuaaagcuguucuaugg

SEQ ID NO: 487538 - RNA, 24 nt, Human
uacuucuaccauuaaggugaaauc

SEQ ID NO: 487539 - RNA, 32 nt, Human
uacuucuacggaauaguuuuugcucauggaac

SEQ ID NO: 487540 - RNA, 24 nt, Human
uacuucuauaaacuuuacacaaua

SEQ ID NO: 487541 - RNA, 32 nt, Human
uacuucuauuaaguuauugaugcaauuugaua

SEQ ID NO: 487542 - RNA, 32 nt, Human
uacuucucaacaacaucaacuauguaaaauga

SEQ ID NO: 487543 - RNA, 32 nt, Human
uacuucuccaacacccggcagcacuuggcccu

SEQ ID NO: 487544 - RNA, 32 nt, Human
uacuucuccacugucccguucagucugaaugc

SEQ ID NO: 487545 - RNA, 32 nt, Human
uacuucucccagagaaaggaaaaucuuggaaa

SEQ ID NO: 487546 - RNA, 32 nt, Human
uacuucuccuucugucucuuggaaagauacag

SEQ ID NO: 487547 - RNA, 32 nt, Human
uacuucucuguaaaaugucuguucuacuucac

SEQ ID NO: 487548 - RNA, 32 nt, Human
uacuucucuguucggagacaugagaaguauga

SEQ ID NO: 487549 - RNA, 32 nt, Human
uacuucucuuagagucuuucuucuuuggcuug

SEQ ID NO: 487550 - RNA, 32 nt, Human
uacuucugaaagaugggguaauaccaacagcu

SEQ ID NO: 487551 - RNA, 32 nt, Human
uacuucugaccuugaaauagccugcuggugac

SEQ ID NO: 487552 - RNA, 32 nt, Human
uacuucugcccuuucuauccaucgucuucauu

SEQ ID NO: 487553 - RNA, 32 nt, Human
uacuucugcuuugcagaaauuaucugcuugca

SEQ ID NO: 487554 - RNA, 32 nt, Human
uacuucugcuuuuuauucuuccucaaguaguu

SEQ ID NO: 487555 - RNA, 32 nt, Human
uacuucuggguauuacagaaacagucuguaaa

SEQ ID NO: 487556 - RNA, 22 nt, Human
uacuucuggguuuuagacaaua

SEQ ID NO: 487557 - RNA, 32 nt, Human
uacuucuguacuucaaugaugaucucacggag

SEQ ID NO: 487558 - RNA, 19 nt, Human
uacuucuucaagauuggac

SEQ ID NO: 487559 - RNA, 19 nt, Human
uacuucuucauccauagac

SEQ ID NO: 487560 - RNA, 32 nt, Human
uacuucuuggauaaugcacaaauaguaagaca

SEQ ID NO: 487561 - RNA, 32 nt, Human
uacuucuugggcuucucagucuuggauuugaa

SEQ ID NO: 487562 - RNA, 32 nt, Human
uacuucuugucauccccacucccagccccuau

SEQ ID NO: 487563 - RNA, 32 nt, Human
uacuucuuuccuguuuugccuggaccacuuaa

SEQ ID NO: 487564 - RNA, 32 nt, Human
uacuucuuuuauuccuccuuuugguaaacaac

SEQ ID NO: 487565 - RNA, 32 nt, Human
uacuucuuuucuuccuuccucuuccucucuua

SEQ ID NO: 487566 - RNA, 32 nt, Human
uacuugaaaaacugagcacauaguggaaagag

SEQ ID NO: 487567 - RNA, 32 nt, Human
uacuugaaaggccagauuacucagcagaucuc

SEQ ID NO: 487568 - RNA, 32 nt, Human
uacuugaaaggcugaggcaggagaaucgcuug

SEQ ID NO: 487569 - RNA, 32 nt, Human
uacuugaagugggcagggaagcagcacugagu

SEQ ID NO: 487570 - RNA, 32 nt, Human
uacuugaaguuuguuaaaugguuuguggaaga

SEQ ID NO: 487571 - RNA, 32 nt, Human
uacuugaaucugagagauggaggcugcaguga

SEQ ID NO: 487572 - RNA, 32 nt, Human
uacuugaaugugccuaauggaaccauuugaug

SEQ ID NO: 487573 - RNA, 32 nt, Human
uacuugacaacaaaacccauucuuucaguuac

SEQ ID NO: 487574 - RNA, 32 nt, Human
uacuugacaccagcuaccuagcaggcucauug

SEQ ID NO: 487575 - RNA, 32 nt, Human
uacuugacauacugccacaaaguaguuuuuga

SEQ ID NO: 487576 - RNA, 32 nt, Human
uacuugagagcaucaaauuuugucauuaaaau

SEQ ID NO: 487577 - RNA, 32 nt, Human
uacuugagaggcuggggcaggagaaucacuag

SEQ ID NO: 487578 - RNA, 32 nt, Human
uacuugagcaccucaucuuuugcucaaauuga

SEQ ID NO: 487579 - RNA, 32 nt, Human
uacuugaggaauagagaagacuggguuuucuc

SEQ ID NO: 487580 - RNA, 32 nt, Human
uacuugaggcagaugggauaguagcugggaac

SEQ ID NO: 487581 - RNA, 32 nt, Human
uacuugagggccugagguagggggaucacuug

SEQ ID NO: 487582 - RNA, 32 nt, Human
uacuugaguagacgaugaacuaguaaacaaau

SEQ ID NO: 487583 - RNA, 30 nt, Human
uacuugaguuuggagucagaaagcaagacc

SEQ ID NO: 487584 - RNA, 32 nt, Human
uacuugauguaaccacgggcuccuggacuugc

SEQ ID NO: 487585 - RNA, 32 nt, Human
uacuugauuacaaaugaaaacucagaaaccaa

SEQ ID NO: 487586 - RNA, 32 nt, Human
uacuugcaacagucuuucaugauaugaggaug

SEQ ID NO: 487587 - RNA, 32 nt, Human
uacuugcaaucaaggguucaggugcaagcaga

SEQ ID NO: 487588 - RNA, 32 nt, Human
uacuugcagcggcaacagaugagggaacagca

SEQ ID NO: 487589 - RNA, 32 nt, Human
uacuugcaucuuagguauuucuucccagucac

SEQ ID NO: 487590 - RNA, 32 nt, Human
uacuugcaugaucuuacacgaagaaauagaau

SEQ ID NO: 487591 - RNA, 32 nt, Human
uacuugcauguguauacauacauguaacuuca

SEQ ID NO: 487592 - RNA, 21 nt, Human
uacuugccacugccaucacug

SEQ ID NO: 487593 - RNA, 32 nt, Human
uacuugccaggaccucuccuugcuacucuucc

SEQ ID NO: 487594 - RNA, 23 nt, Human
uacuugccauuugagccucacug

SEQ ID NO: 487595 - RNA, 32 nt, Human
uacuugccuaucugacuucauacaucccucag

SEQ ID NO: 487596 - RNA, 32 nt, Human
uacuugccucuggaacaccuucugcuaacauc

SEQ ID NO: 487597 - RNA, 32 nt, Human
uacuugccugcacuucuugagaaaaagacugc

SEQ ID NO: 487598 - RNA, 32 nt, Human
uacuugcuauauugaggaugaaguuuucuaug

SEQ ID NO: 487599 - RNA, 32 nt, Human
uacuugcuggaaaauuaguuggcuggacauug

SEQ ID NO: 487600 - RNA, 32 nt, Human
uacuugcugugggaagagagaugagggucaga

SEQ ID NO: 487601 - RNA, 32 nt, Human
uacuugcuguuuuuauugaucuuaugguuuau

SEQ ID NO: 487602 - RNA, 32 nt, Human
uacuuggaaacugccuuuuccauucacuuaca

SEQ ID NO: 487603 - RNA, 32 nt, Human
uacuuggaagcugaggugggaggaucacuuga

SEQ ID NO: 487604 - RNA, 32 nt, Human
uacuuggaaguaacuuuggaaaagaauuccuu

SEQ ID NO: 487605 - RNA, 32 nt, Human
uacuuggaggcugaggcgugagaaucgcuuga

SEQ ID NO: 487606 - RNA, 32 nt, Human
uacuuggagggcagaggugggaggauggcuug

SEQ ID NO: 487607 - RNA, 20 nt, Human
uacuuggagggcucagggca

SEQ ID NO: 487608 - RNA, 32 nt, Human
uacuuggaggggcagggagcccuuuccucggu

SEQ ID NO: 487609 - RNA, 32 nt, Human
uacuuggcacacacaggaugguguuuuaaaga

SEQ ID NO: 487610 - RNA, 32 nt, Human
uacuuggcacuucaguuucaaacacguagucc

SEQ ID NO: 487611 - RNA, 32 nt, Human
uacuuggcaggcugaggcagaagaaucaccug

SEQ ID NO: 487612 - RNA, 24 nt, Human
uacuuggcccucgccgguggccca

SEQ ID NO: 487613 - RNA, 32 nt, Human
uacuuggccugagacugaccucucccuagguc

SEQ ID NO: 487614 - RNA, 32 nt, Human
uacuuggcggugaggagggcagcuggagaucu

SEQ ID NO: 487615 - RNA, 32 nt, Human
uacuugggaaaaggucaguaggaugugcaucc

SEQ ID NO: 487616 - RNA, 32 nt, Human
uacuugggagagggagaccaugacagaagcca

SEQ ID NO: 487617 - RNA, 32 nt, Human
uacuugggagccuggggcaggagaaucacuug

SEQ ID NO: 487618 - RNA, 32 nt, Human
uacuugggaggaugaggcaggagaaucgcuug

SEQ ID NO: 487619 - RNA, 32 nt, Human
uacuugggaggcaccaucccagagagcuccaa

SEQ ID NO: 487620 - RNA, 32 nt, Human
uacuugggaggcagaggcaggagaaucauuug

SEQ ID NO: 487621 - RNA, 32 nt, Human
uacuugggaggcagaggcaggagaaucgcuug

SEQ ID NO: 487622 - RNA, 32 nt, Human
uacuugggaggcagaggcaggagaaucguuug

SEQ ID NO: 487623 - RNA, 32 nt, Human
uacuugggaggcagaggcaggagaauggcaug

SEQ ID NO: 487624 - RNA, 32 nt, Human
uacuugggaggcagaggcaggagaauugcuug

SEQ ID NO: 487625 - RNA, 32 nt, Human
uacuugggaggcagaggugggaagaugguuug

SEQ ID NO: 487626 - RNA, 32 nt, Human
uacuugggaggcagcggcuggagaauugcuug

SEQ ID NO: 487627 - RNA, 32 nt, Human
uacuugggaggccaaggcaggagaaucgcucg

SEQ ID NO: 487628 - RNA, 32 nt, Human
uacuugggaggccaaggcaggagaaucgcuug

SEQ ID NO: 487629 - RNA, 32 nt, Human
uacuugggaggccgaggcaggagaaucgcuug

SEQ ID NO: 487630 - RNA, 32 nt, Human
uacuugggaggccgaggcaggagaauugcuug

SEQ ID NO: 487631 - RNA, 32 nt, Human
uacuugggaggcggaagcaggaguaucccuug

SEQ ID NO: 487632 - RNA, 32 nt, Human
uacuugggaggcuaaggcaggagaaucgcuug

SEQ ID NO: 487633 - RNA, 32 nt, Human
uacuugggaggcuaaggcaggagaauugcuug

SEQ ID NO: 487634 - RNA, 32 nt, Human
uacuugggaggcuaaggcaggagcaucguuug

SEQ ID NO: 487635 - RNA, 32 nt, Human
uacuugggaggcugaagcaggagaacugccug

SEQ ID NO: 487636 - RNA, 32 nt, Human
uacuugggaggcugaagcaggagaaucgcuug

SEQ ID NO: 487637 - RNA, 32 nt, Human
uacuugggaggcugaagcaggagaauugccug

SEQ ID NO: 487638 - RNA, 32 nt, Human
uacuugggaggcugaagcaggagaauugcucg

SEQ ID NO: 487639 - RNA, 32 nt, Human
uacuugggaggcugaagcaggagagucacuug

SEQ ID NO: 487640 - RNA, 32 nt, Human
uacuugggaggcugaagcaggagcauggcgug

SEQ ID NO: 487641 - RNA, 32 nt, Human
uacuugggaggcugaagcaggaggauagcuag

SEQ ID NO: 487642 - RNA, 32 nt, Human
uacuugggaggcugagacaggagaaucgcuug

SEQ ID NO: 487643 - RNA, 32 nt, Human
uacuugggaggcugagacaggagaauugcuug

SEQ ID NO: 487644 - RNA, 32 nt, Human
uacuugggaggcugaggcagagcugcuugaac

SEQ ID NO: 487645 - RNA, 32 nt, Human
uacuugggaggcugaggcaggagaaccgcuua

SEQ ID NO: 487646 - RNA, 32 nt, Human
uacuugggaggcugaggcaggagaacugcuug

SEQ ID NO: 487647 - RNA, 32 nt, Human
uacuugggaggcugaggcaggagaauagcuug

SEQ ID NO: 487648 - RNA, 32 nt, Human
uacuugggaggcugaggcaggagaaucgccug

SEQ ID NO: 487649 - RNA, 32 nt, Human
uacuugggaggcugaggcaggagaaucgcugg

SEQ ID NO: 487650 - RNA, 32 nt, Human
uacuugggaggcugaggcaggagaaucgcuua

SEQ ID NO: 487651 - RNA, 32 nt, Human
uacuugggaggcugaggcaggagaaucgcuug

SEQ ID NO: 487652 - RNA, 32 nt, Human
uacuugggaggcugaggcaggagaauugcuua

SEQ ID NO: 487653 - RNA, 32 nt, Human
uacuugggaggcugaggcaggagaauugcuug

SEQ ID NO: 487654 - RNA, 32 nt, Human
uacuugggaggcuggggcaggagaauugccug

SEQ ID NO: 487655 - RNA, 32 nt, Human
uacuugggaggcuguggcaggagaaucgcuag

SEQ ID NO: 487656 - RNA, 32 nt, Human
uacuugggagguugaggcaggagaaucgcuug

SEQ ID NO: 487657 - RNA, 32 nt, Human
uacuugggggacugaggcgggaggaucacuug

SEQ ID NO: 487658 - RNA, 32 nt, Human
uacuugggggccugaggcacgagaaucgcuug

SEQ ID NO: 487659 - RNA, 32 nt, Human
uacuuggggugagcggaaagcauggcggggac

SEQ ID NO: 487660 - RNA, 32 nt, Human
uacuugguaggcugaggcaggagaaucgcuug

SEQ ID NO: 487661 - RNA, 32 nt, Human
uacuugguaggcugaggcaggagaauggcggg

SEQ ID NO: 487662 - RNA, 32 nt, Human
uacuugguaggcuguggcaggagaauggcgug

SEQ ID NO: 487663 - RNA, 32 nt, Human
uacuuggugguggaauguuacagugagaccug

SEQ ID NO: 487664 - RNA, 32 nt, Human
uacuugguuacaucacggcucugguucagaua

SEQ ID NO: 487665 - RNA, 32 nt, Human
uacuuguaauaauacaaauaagucagcugaug

SEQ ID NO: 487666 - RNA, 32 nt, Human
uacuuguacaauuuuugaucuacagcaucacg

SEQ ID NO: 487667 - RNA, 32 nt, Human
uacuugucaagaaagaagcaauguuggucagu

SEQ ID NO: 487668 - RNA, 32 nt, Human
uacuugucaccagcuccaagccccagacagca

SEQ ID NO: 487669 - RNA, 32 nt, Human
uacuugucauuucuuuaggucuugccuuccca

SEQ ID NO: 487670 - RNA, 31 nt, Human
uacuugucucuuuucugauauuaggacugau

SEQ ID NO: 487671 - RNA, 32 nt, Human
uacuugucuuauuccuccuuuccuuucuuuaa

SEQ ID NO: 487672 - RNA, 32 nt, Human
uacuugucuuggauagguugcugguaaaccau

SEQ ID NO: 487673 - RNA, 32 nt, Human
uacuuguguguguuugggggagugggaauugg

SEQ ID NO: 487674 - RNA, 32 nt, Human
uacuuguuccuccaaagcauucuccccagcau

SEQ ID NO: 487675 - RNA, 32 nt, Human
uacuuguugggaggaggaggaaagggaaggcu

SEQ ID NO: 487676 - RNA, 32 nt, Human
uacuuguuuagaagaaggaaagugauugauuc

SEQ ID NO: 487677 - RNA, 32 nt, Human
uacuuguuucaacuuagagaacaguuaugaug

SEQ ID NO: 487678 - RNA, 32 nt, Human
uacuuguuuuucccaucucuuccuuuccaauu

SEQ ID NO: 487679 - RNA, 32 nt, Human
uacuuuaagacauacuccuuccaucaaauaga

SEQ ID NO: 487680 - RNA, 22 nt, Human
uacuuuacaaaccauuaccugu

SEQ ID NO: 487681 - RNA, 32 nt, Human
uacuuuaccagacuuuacuuuguacucagaga

SEQ ID NO: 487682 - RNA, 32 nt, Human
uacuuuagaagaggauaauggauaaaaucaau

SEQ ID NO: 487683 - RNA, 32 nt, Human
uacuuuagccacaaagcuaaaacagcauuacc

SEQ ID NO: 487684 - RNA, 32 nt, Human
uacuuuagggacuguuguaauuucucauaugg

SEQ ID NO: 487685 - RNA, 31 nt, Human
uacuuuauacuuuucugugcuugacagauuu

SEQ ID NO: 487686 - RNA, 32 nt, Human
uacuuuauaucacauggugaaggauuuugcuu

SEQ ID NO: 487687 - RNA, 32 nt, Human
uacuuuaucaaggggaaccaagccugcugugc

SEQ ID NO: 487688 - RNA, 32 nt, Human
uacuuuaugagggcuggagugcacuggagcaa

SEQ ID NO: 487689 - RNA, 32 nt, Human
uacuuuauugacaaaaaggcagugaacauaac

SEQ ID NO: 487690 - RNA, 32 nt, Human
uacuuucaaaaauguuacugugaugaaaaauc

SEQ ID NO: 487691 - RNA, 32 nt, Human
uacuuucaaagucauauccaagaaagacaaua

SEQ ID NO: 487692 - RNA, 32 nt, Human
uacuuucaagccuucguucuuccuugagcauc

SEQ ID NO: 487693 - RNA, 32 nt, Human
uacuuucagaggaagcagagaaguugcuguua

SEQ ID NO: 487694 - RNA, 32 nt, Human
uacuuucagcagggcuuugaggcugggaaacu

SEQ ID NO: 487695 - RNA, 32 nt, Human
uacuuucaguagcaucuuuccacagcaagggc

SEQ ID NO: 487696 - RNA, 32 nt, Human
uacuuucaguauacuccauagaccaaagagca

SEQ ID NO: 487697 - RNA, 32 nt, Human
uacuuucagucuaacacagcacugccugcuuu

SEQ ID NO: 487698 - RNA, 32 nt, Human
uacuuucauucaggcuggagugcaguggcaug

SEQ ID NO: 487699 - RNA, 32 nt, Human
uacuuuccacagaaguacuuguaggagcucuc

SEQ ID NO: 487700 - RNA, 32 nt, Human
uacuuuccacauuuugacuauuacaagcuucu

SEQ ID NO: 487701 - RNA, 32 nt, Human
uacuuuccauaucuccugaguuggagauacuu

SEQ ID NO: 487702 - RNA, 32 nt, Human
uacuuucccaacaggaagucugaucuguugcc

SEQ ID NO: 487703 - RNA, 32 nt, Human
uacuuucccugccugccucccucccccugcua

SEQ ID NO: 487704 - RNA, 32 nt, Human
uacuuuccuugugcaauggagggagacgaucu

SEQ ID NO: 487705 - RNA, 32 nt, Human
uacuuucuauccuuuaaugccuaaaacuccau

SEQ ID NO: 487706 - RNA, 32 nt, Human
uacuuucucagcgcuguguggagggggaaugc

SEQ ID NO: 487707 - RNA, 32 nt, Human
uacuuucucaggguguucuuguccucaucuac

SEQ ID NO: 487708 - RNA, 32 nt, Human
uacuuucucuuccugguaauccucuggcccag

SEQ ID NO: 487709 - RNA, 32 nt, Human
uacuuucuggggccucuccuguugaauggcua

SEQ ID NO: 487710 - RNA, 32 nt, Human
uacuuucuuauaugaguuuacacaagucugug

SEQ ID NO: 487711 - RNA, 32 nt, Human
uacuuucuuugcuguaguuaugaaccuugggg

SEQ ID NO: 487712 - RNA, 32 nt, Human
uacuuugaaaugcaugagaaucaugcugcaau

SEQ ID NO: 487713 - RNA, 32 nt, Human
uacuuugaaauuccuugauuuguaauucaaug

SEQ ID NO: 487714 - RNA, 32 nt, Human
uacuuugacauuuaaagagaaauuuagagaau

SEQ ID NO: 487715 - RNA, 32 nt, Human
uacuuugacccccaggcuggagugcaguggca

SEQ ID NO: 487716 - RNA, 32 nt, Human
uacuuugaccugccaggagcucuucugugugc

SEQ ID NO: 487717 - RNA, 32 nt, Human
uacuuugacugcuguuaagcaauguuuagaaa

SEQ ID NO: 487718 - RNA, 32 nt, Human
uacuuugagaagaguccaaggaucuggccguc

SEQ ID NO: 487719 - RNA, 32 nt, Human
uacuuugagucuccauccccagaauuuccagc

SEQ ID NO: 487720 - RNA, 32 nt, Human
uacuuugauuauuuuuauuucuuauacucugu

SEQ ID NO: 487721 - RNA, 22 nt, Human
uacuuugauuuacagugccugu

SEQ ID NO: 487722 - RNA, 32 nt, Human
uacuuugccucaagcaaccucuagcucccaca

SEQ ID NO: 487723 - RNA, 32 nt, Human
uacuuugccuuagagaaggaaguacuuaccuu

SEQ ID NO: 487724 - RNA, 32 nt, Human
uacuuuggacacaaaccaaaacacacaccaaa

SEQ ID NO: 487725 - RNA, 32 nt, Human
uacuuuggcagggggugcuggggaaggggcug

SEQ ID NO: 487726 - RNA, 32 nt, Human
uacuuuggcuuccuuuuguaugauaggucccc

SEQ ID NO: 487727 - RNA, 32 nt, Human
uacuuugggagaccaaggugggcagaucacuu

SEQ ID NO: 487728 - RNA, 32 nt, Human
uacuuugggagaccgaggugggcagaucacuu

SEQ ID NO: 487729 - RNA, 32 nt, Human
uacuuugggaggccaaggcaagcagaucaccu

SEQ ID NO: 487730 - RNA, 32 nt, Human
uacuuugggaggccaaggcgggcagaucacaa

SEQ ID NO: 487731 - RNA, 32 nt, Human
uacuuugggaggcccaggugggaggaucgcuu

SEQ ID NO: 487732 - RNA, 32 nt, Human
uacuuugggaggccgaggcagguggaucaccu

SEQ ID NO: 487733 - RNA, 32 nt, Human
uacuuugggaggccgaggcggguggaucacga

SEQ ID NO: 487734 - RNA, 32 nt, Human
uacuuugggaggccgaggugggcagaucacaa

SEQ ID NO: 487735 - RNA, 32 nt, Human
uacuuugggaggcugagcugggcagaucaccu

SEQ ID NO: 487736 - RNA, 32 nt, Human
uacuuugggaggcugaggcaagugaagcacuu

SEQ ID NO: 487737 - RNA, 32 nt, Human
uacuuugggaggcugaggcgggaggauugcuu

SEQ ID NO: 487738 - RNA, 32 nt, Human
uacuuugggggaacaaaauagucagggauauu

SEQ ID NO: 487739 - RNA, 32 nt, Human
uacuuugggugcuccauagaugcucauuuguc

SEQ ID NO: 487740 - RNA, 32 nt, Human
uacuuuggugaguuuggggaggugaauuucuc

SEQ ID NO: 487741 - RNA, 32 nt, Human
uacuuuggugucuccaccacugucccuucucc

SEQ ID NO: 487742 - RNA, 32 nt, Human
uacuuugguugaggccuucgaaucacucuuca

SEQ ID NO: 487743 - RNA, 32 nt, Human
uacuuuguccuccaaaaagcuaacauacgguu

SEQ ID NO: 487744 - RNA, 32 nt, Human
uacuuuguccuuucugacuuuuguuguaaaga

SEQ ID NO: 487745 - RNA, 18 nt, Human
uacuuugucugguaccug

SEQ ID NO: 487746 - RNA, 32 nt, Human
uacuuuguucacaaacgugugauuuagauaug

SEQ ID NO: 487747 - RNA, 32 nt, Human
uacuuuguuccaggaacuaugcuggaaacuga

SEQ ID NO: 487748 - RNA, 32 nt, Human
uacuuuguugaaacaucaaccugggcagaaaa

SEQ ID NO: 487749 - RNA, 32 nt, Human
uacuuuguugcccaggcuggucucaaacuccu

SEQ ID NO: 487750 - RNA, 32 nt, Human
uacuuuguugggggacuuuggaggcgggcagg

SEQ ID NO: 487751 - RNA, 32 nt, Human
uacuuuguuuccugaagugauagccuacuaau

SEQ ID NO: 487752 - RNA, 32 nt, Human
uacuuuguuuuuaaauuaugcuuucuauuuug

SEQ ID NO: 487753 - RNA, 32 nt, Human
uacuuuuaaauggauuuuuaaagauucuuccc

SEQ ID NO: 487754 - RNA, 25 nt, Human
uacuuuuacucuuguacauauguug

SEQ ID NO: 487755 - RNA, 32 nt, Human
uacuuuuagccugaaaccucuuccacgccaug

SEQ ID NO: 487756 - RNA, 24 nt, Human
uacuuuuaguuuuaaaaugaaauc

SEQ ID NO: 487757 - RNA, 32 nt, Human
uacuuuucaagcaaauucaacaaaucagugua

SEQ ID NO: 487758 - RNA, 32 nt, Human
uacuuuucagcuuuuuaaaaggccaauuuuug

SEQ ID NO: 487759 - RNA, 32 nt, Human
uacuuuucaguuagauauacuucugcauaaag

SEQ ID NO: 487760 - RNA, 32 nt, Human
uacuuuuccacucuaggccacgaugccgcagu

SEQ ID NO: 487761 - RNA, 32 nt, Human
uacuuuuccaggcuggauuguaucuaugcccc

SEQ ID NO: 487762 - RNA, 32 nt, Human
uacuuuucuccaauaccugccaauacagaaaa

SEQ ID NO: 487763 - RNA, 32 nt, Human
uacuuuucucuaguuguuaaauagcuggaguu

SEQ ID NO: 487764 - RNA, 32 nt, Human
uacuuuucugagauuuggcuuauuuuuauuau

SEQ ID NO: 487765 - RNA, 32 nt, Human
uacuuuugaggugaaaagcuaagcuagggccu

SEQ ID NO: 487766 - RNA, 32 nt, Human
uacuuuugccauguuuucauuuccuugacuua

SEQ ID NO: 487767 - RNA, 32 nt, Human
uacuuuugccuaaaagcauuuauccuucauac

SEQ ID NO: 487768 - RNA, 32 nt, Human
uacuuuuggaaagagggacugaugggagcuga

SEQ ID NO: 487769 - RNA, 32 nt, Human
uacuuuugggcccaacacuugcaguugccuuc

SEQ ID NO: 487770 - RNA, 32 nt, Human
uacuuuuggggacuugcccacaucucugggau

SEQ ID NO: 487771 - RNA, 32 nt, Human
uacuuuugggucgggcccuccgggaagauggc

SEQ ID NO: 487772 - RNA, 32 nt, Human
uacuuuuucucuucccuuuaaugcuugcagaa

SEQ ID NO: 487773 - RNA, 32 nt, Human
uacuuuuucuucuucuugcuggugauggucuu

SEQ ID NO: 487774 - RNA, 32 nt, Human
uagaaaaacugagauuuucuucccucugugcu

SEQ ID NO: 487775 - RNA, 32 nt, Human
uagaaaaacuuagccaggcaugguggcaggug

SEQ ID NO: 487776 - RNA, 32 nt, Human
uagaaaaagcaguugaggauugguuuggauug

SEQ ID NO: 487777 - RNA, 32 nt, Human
uagaaaaaguggagcaggcagggccuugcacc

SEQ ID NO: 487778 - RNA, 32 nt, Human
uagaaaaauguucuuuaaaggcaucuacacaa

SEQ ID NO: 487779 - RNA, 28 nt, Human
uagaaaacaagugcuuuuuaucuugaaa

SEQ ID NO: 487780 - RNA, 32 nt, Human
uagaaaacaauguuuuaaaucacccaaauuua

SEQ ID NO: 487781 - RNA, 32 nt, Human
uagaaaacacaaaccacaacugacacaggaaa

SEQ ID NO: 487782 - RNA, 32 nt, Human
uagaaaacacaagcauuugaccaaaugagauc

SEQ ID NO: 487783 - RNA, 32 nt, Human
uagaaaacauauguuuacauuugauuaacugu

SEQ ID NO: 487784 - RNA, 32 nt, Human
uagaaaaccacagccucagauacuggggacuu

SEQ ID NO: 487785 - RNA, 32 nt, Human
uagaaaaccacccuucaaccugggugaugcuc

SEQ ID NO: 487786 - RNA, 32 nt, Human
uagaaaaccagcucagcacugccugcucccau

SEQ ID NO: 487787 - RNA, 32 nt, Human
uagaaaaccuaaaagaaaugauacauuccugg

SEQ ID NO: 487788 - RNA, 32 nt, Human
uagaaaacugauuuuagaguucugaucguuca

SEQ ID NO: 487789 - RNA, 23 nt, Human
uagaaaacuggucaaggaagcua

SEQ ID NO: 487790 - RNA, 32 nt, Human
uagaaaagaaagcauuuaccugccugucugua

SEQ ID NO: 487791 - RNA, 32 nt, Human
uagaaaagagcaagaaugcacauguauaaagu

SEQ ID NO: 487792 - RNA, 32 nt, Human
uagaaaagagcagagaaugacguggacauugg

SEQ ID NO: 487793 - RNA, 22 nt, Human
uagaaaagaggacuggucuugg

SEQ ID NO: 487794 - RNA, 32 nt, Human
uagaaaagccaucuucauucguggagacugug

SEQ ID NO: 487795 - RNA, 32 nt, Human
uagaaaaggaauaugcuacuguugccagccaa

SEQ ID NO: 487796 - RNA, 32 nt, Human
uagaaaaggagaggguccgaggguggugggag

SEQ ID NO: 487797 - RNA, 20 nt, Human
uagaaaaggaugaguucaua

SEQ ID NO: 487798 - RNA, 32 nt, Human
uagaaaaggcugcagacagucacagggaagug

SEQ ID NO: 487799 - RNA, 32 nt, Human
uagaaaaggggagacucacuucccugggagaa

SEQ ID NO: 487800 - RNA, 32 nt, Human
uagaaaagucauaucuccucacauuuuacuaa

SEQ ID NO: 487801 - RNA, 32 nt, Human
uagaaaagugaucucaguuggcccaagaugac

SEQ ID NO: 487802 - RNA, 32 nt, Human
uagaaaaguggcccagaaacagcagcuuaaag

SEQ ID NO: 487803 - RNA, 32 nt, Human
uagaaaaguugccagaaugcuguggaguuuua

SEQ ID NO: 487804 - RNA, 32 nt, Human
uagaaaauaaauagaagagacagugaagcaag

SEQ ID NO: 487805 - RNA, 32 nt, Human
uagaaaauacccuuuuuagaaauccaguuuua

SEQ ID NO: 487806 - RNA, 32 nt, Human
uagaaaauaguuguguguaucuuucugaggaa

SEQ ID NO: 487807 - RNA, 19 nt, Human
uagaaaauguguuuaguua

SEQ ID NO: 487808 - RNA, 32 nt, Human
uagaaaauugaauaugagguucaggagauagg

SEQ ID NO: 487809 - RNA, 32 nt, Human
uagaaaauugagaaggacuaggaagcugauag

SEQ ID NO: 487810 - RNA, 32 nt, Human
uagaaaauuuguacugaggggaauucuauuca

SEQ ID NO: 487811 - RNA, 31 nt, Human
uagaaacaaguguccaucacuaggacacuag

SEQ ID NO: 487812 - RNA, 32 nt, Human
uagaaacaccugccagugucaaggauuccagu

SEQ ID NO: 487813 - RNA, 32 nt, Human
uagaaacacuggcugcagcaaucaaccuccug

SEQ ID NO: 487814 - RNA, 32 nt, Human
uagaaacagaacauauggacugcucugaccuu

SEQ ID NO: 487815 - RNA, 32 nt, Human
uagaaacagauccgccagcccaaacagaaccu

SEQ ID NO: 487816 - RNA, 31 nt, Human
uagaaacaggaaucaaugacagcagaacucc

SEQ ID NO: 487817 - RNA, 32 nt, Human
uagaaacagugaucguugcagaaaaauaauua

SEQ ID NO: 487818 - RNA, 32 nt, Human
uagaaaccaaaaugcuauuuuaaaguaguuuc

SEQ ID NO: 487819 - RNA, 32 nt, Human
uagaaaccaaaccaaaugggcacccucgguug

SEQ ID NO: 487820 - RNA, 32 nt, Human
uagaaaccaaaccgcacacaaucuugcacacu

SEQ ID NO: 487821 - RNA, 32 nt, Human
uagaaaccagagccuucuccccaggccugccc

SEQ ID NO: 487822 - RNA, 32 nt, Human
uagaaaccagccuggccaacauggcaaaaccc

SEQ ID NO: 487823 - RNA, 32 nt, Human
uagaaaccagccuggccaacguggugaaaccc

SEQ ID NO: 487824 - RNA, 20 nt, Human
uagaaacccaggcucaugga

SEQ ID NO: 487825 - RNA, 32 nt, Human
uagaaacccauuguugaaacuccuguagcuau

SEQ ID NO: 487826 - RNA, 21 nt, Human
uagaaaccgacguuucaggga

SEQ ID NO: 487827 - RNA, 32 nt, Human
uagaaaccguaaauuuaacuuaaggauuuucu

SEQ ID NO: 487828 - RNA, 32 nt, Human
uagaaaccucccaaauucuuaaagcuaaauua

SEQ ID NO: 487829 - RNA, 32 nt, Human
uagaaaccugagauggagacagaaggagggga

SEQ ID NO: 487830 - RNA, 32 nt, Human
uagaaacguggcuuugggcuguggaaacgcug

SEQ ID NO: 487831 - RNA, 32 nt, Human
uagaaacuacgucugucauacugggagcuuua

SEQ ID NO: 487832 - RNA, 26 nt, Human
uagaaacucaguucccuucucagggg

SEQ ID NO: 487833 - RNA, 32 nt, Human
uagaaacuccauuaaucaucugauuuuccgaa

SEQ ID NO: 487834 - RNA, 32 nt, Human
uagaaacucuucuagcugauaucaugaaacga

SEQ ID NO: 487835 - RNA, 32 nt, Human
uagaaacugaguaguuuggauuuuuauggcuc

SEQ ID NO: 487836 - RNA, 32 nt, Human
uagaaacuguaacugccccugauugggcaggc

SEQ ID NO: 487837 - RNA, 32 nt, Human
uagaaagaaaagaacacuugcccagggcagcu

SEQ ID NO: 487838 - RNA, 32 nt, Human
uagaaagaaagaggagggacaagcaagcccau

SEQ ID NO: 487839 - RNA, 32 nt, Human
uagaaagaauuggccaggcaugguggcucaug

SEQ ID NO: 487840 - RNA, 32 nt, Human
uagaaagacaguccuggugaaugggcuucaag

SEQ ID NO: 487841 - RNA, 32 nt, Human
uagaaagagccaggguucaaagcuggcgaaug

SEQ ID NO: 487842 - RNA, 32 nt, Human
uagaaagagggaaggagcaggagacgacaggg

SEQ ID NO: 487843 - RNA, 32 nt, Human
uagaaagagugggacccuuucuggccugugau

SEQ ID NO: 487844 - RNA, 32 nt, Human
uagaaagaucccuagaaagagcaaagaaggaa

SEQ ID NO: 487845 - RNA, 32 nt, Human
uagaaagaugcuagaaaaauguucuuuaaagg

SEQ ID NO: 487846 - RNA, 32 nt, Human
uagaaagcaaacaugugcagauauccaaacaa

SEQ ID NO: 487847 - RNA, 32 nt, Human
uagaaagcaacuuggaaguguaaagagucacc

SEQ ID NO: 487848 - RNA, 32 nt, Human
uagaaagcaagaaugucaacaguguuagaugg

SEQ ID NO: 487849 - RNA, 32 nt, Human
uagaaagcaaguguuaccaaaguuguguuauc

SEQ ID NO: 487850 - RNA, 19 nt, Human
uagaaagccaaucaucuca

SEQ ID NO: 487851 - RNA, 32 nt, Human
uagaaagccaugugcagccaccaguccauugg

SEQ ID NO: 487852 - RNA, 32 nt, Human
uagaaagcucacaacuuuaaaaccuacaaaaa

SEQ ID NO: 487853 - RNA, 32 nt, Human
uagaaaggacauuucugccauuguucaggcug

SEQ ID NO: 487854 - RNA, 32 nt, Human
uagaaaggagagaaaaagcaccucuuuuggcu

SEQ ID NO: 487855 - RNA, 32 nt, Human
uagaaaggagagaacgggcgucaggggugcac

SEQ ID NO: 487856 - RNA, 32 nt, Human
uagaaaggagccucuuucuuaaaaccaaccaa

SEQ ID NO: 487857 - RNA, 32 nt, Human
uagaaaggaucuuggggcuuguuuucucuagg

SEQ ID NO: 487858 - RNA, 32 nt, Human
uagaaaggcacugcaggcugggcgcaggggcu

SEQ ID NO: 487859 - RNA, 32 nt, Human
uagaaaggcauccaggaauuguuuuccuacgc

SEQ ID NO: 487860 - RNA, 32 nt, Human
uagaaagggagguggcggauggagugggaagu

SEQ ID NO: 487861 - RNA, 32 nt, Human
uagaaaggguguggagggaggaagggggucua

SEQ ID NO: 487862 - RNA, 32 nt, Human
uagaaagguaacuccauagcugggagccaagu

SEQ ID NO: 487863 - RNA, 32 nt, Human
uagaaagguaugugaauaaauauguucaugcu

SEQ ID NO: 487864 - RNA, 32 nt, Human
uagaaagguuaggaagaaagaggagacaagga

SEQ ID NO: 487865 - RNA, 32 nt, Human
uagaaaguauaaaauauugccuccaacaugcu

SEQ ID NO: 487866 - RNA, 32 nt, Human
uagaaaguauuggcagaccaggcgugguggcg

SEQ ID NO: 487867 - RNA, 32 nt, Human
uagaaagucaguuucccggcacuggcaccccg

SEQ ID NO: 487868 - RNA, 32 nt, Human
uagaaagugaaaaaugagcaguauuugggcag

SEQ ID NO: 487869 - RNA, 32 nt, Human
uagaaagugaagaugcucaaauggugcuaugu

SEQ ID NO: 487870 - RNA, 32 nt, Human
uagaaaguggaaaugagguugcuauggaaacu

SEQ ID NO: 487871 - RNA, 32 nt, Human
uagaaaguguaaaauucuuggaaaagauuuuc

SEQ ID NO: 487872 - RNA, 32 nt, Human
uagaaaguugcuggagugagaaaugagccugu

SEQ ID NO: 487873 - RNA, 32 nt, Human
uagaaauaaccuaaaacugcagaaggaucuga

SEQ ID NO: 487874 - RNA, 26 nt, Human
uagaaauacagaaaugugcccagggg

SEQ ID NO: 487875 - RNA, 32 nt, Human
uagaaauacagaauaucacaaauguauaaagg

SEQ ID NO: 487876 - RNA, 32 nt, Human
uagaaauacauuacccucccacuccccaaguu

SEQ ID NO: 487877 - RNA, 32 nt, Human
uagaaauagacuuagcugggugcaguggcuca

SEQ ID NO: 487878 - RNA, 32 nt, Human
uagaaauaguaggaaguauugcagaagucaau

SEQ ID NO: 487879 - RNA, 32 nt, Human
uagaaauauauuagggaaagaaaguagccuuc

SEQ ID NO: 487880 - RNA, 32 nt, Human
uagaaaucagccagcagguggcagguucuggg

SEQ ID NO: 487881 - RNA, 32 nt, Human
uagaaaucagcuuuuaagcucccaugugauga

SEQ ID NO: 487882 - RNA, 32 nt, Human
uagaaaucgugugacuuuaaggauuuagauuu

SEQ ID NO: 487883 - RNA, 32 nt, Human
uagaaaucucugaaggcagcagccaucauccu

SEQ ID NO: 487884 - RNA, 32 nt, Human
uagaaaucugaucucggcuccaaccaacagcc

SEQ ID NO: 487885 - RNA, 32 nt, Human
uagaaaucuggugaccuaaggcucaguguggu

SEQ ID NO: 487886 - RNA, 32 nt, Human
uagaaaucuugaucucugcguuuuucuaugga

SEQ ID NO: 487887 - RNA, 32 nt, Human
uagaaaucuuguaggagcucuguuagcucuaa

SEQ ID NO: 487888 - RNA, 32 nt, Human
uagaaaugaaagcucaggaucucugaauuggg

SEQ ID NO: 487889 - RNA, 32 nt, Human
uagaaaugacucuaucagccucagccaaaccu

SEQ ID NO: 487890 - RNA, 32 nt, Human
uagaaaugaggaugucaucuuccuucacuuuu

SEQ ID NO: 487891 - RNA, 32 nt, Human
uagaaaugcaauauuuaguuucauccagcucu

SEQ ID NO: 487892 - RNA, 32 nt, Human
uagaaauggaaauuuugcuaucaacaauaaaa

SEQ ID NO: 487893 - RNA, 32 nt, Human
uagaaauguagaagaagcaaguggccagaugg

SEQ ID NO: 487894 - RNA, 22 nt, Human
uagaaauguggaaaucuguauu

SEQ ID NO: 487895 - RNA, 19 nt, Human
uagaaauuagguccuuggg

SEQ ID NO: 487896 - RNA, 32 nt, Human
uagaaauucuacugcacugccuggcucagcug

SEQ ID NO: 487897 - RNA, 32 nt, Human
uagaaauucucagcagacagugggauggagaa

SEQ ID NO: 487898 - RNA, 24 nt, Human
uagaaauugaaagggccuugggua

SEQ ID NO: 487899 - RNA, 32 nt, Human
uagaaauugagguugagaggaacucaggagau

SEQ ID NO: 487900 - RNA, 24 nt, Human
uagaaauugauuuuucuuggugua

SEQ ID NO: 487901 - RNA, 26 nt, Human
uagaaauuuauuuccuaguucuguag

SEQ ID NO: 487902 - RNA, 32 nt, Human
uagaaauuugaguaaagaaacaauaaggaccu

SEQ ID NO: 487903 - RNA, 32 nt, Human
uagaacaacuccaucagaacagcuccaccggg

SEQ ID NO: 487904 - RNA, 32 nt, Human
uagaacaauuugagccugagugaguucugugg

SEQ ID NO: 487905 - RNA, 32 nt, Human
uagaacagaaaugcuuauuuuauauuuggcug

SEQ ID NO: 487906 - RNA, 32 nt, Human
uagaacagagccgccugcccaggacccucagg

SEQ ID NO: 487907 - RNA, 32 nt, Human
uagaacagauggagccccucuccucuguagcg

SEQ ID NO: 487908 - RNA, 32 nt, Human
uagaacagccuccuuacuccagccuggcaggg

SEQ ID NO: 487909 - RNA, 32 nt, Human
uagaacagcugggaaaaagaaaauaauccauu

SEQ ID NO: 487910 - RNA, 32 nt, Human
uagaacaggagaaucacuugauggcugccagg

SEQ ID NO: 487911 - RNA, 32 nt, Human
uagaacaggugugguuucaccauauugcccag

SEQ ID NO: 487912 - RNA, 32 nt, Human
uagaacagucugcugggagucagaccuggaau

SEQ ID NO: 487913 - RNA, 32 nt, Human
uagaacagugccuggcacauaguaggcacuca

SEQ ID NO: 487914 - RNA, 32 nt, Human
uagaacagugccuggcacauaguaggcgcuca

SEQ ID NO: 487915 - RNA, 32 nt, Human
uagaacaugccguuucaugucaccugcuacag

SEQ ID NO: 487916 - RNA, 32 nt, Human
uagaacauuuuauuuuccuuguucaccauaca

SEQ ID NO: 487917 - RNA, 32 nt, Human
uagaaccaaaaacgccagucaugggaggcaga

SEQ ID NO: 487918 - RNA, 32 nt, Human
uagaaccacccgcucucucuuccuuuagccag

SEQ ID NO: 487919 - RNA, 32 nt, Human
uagaaccaccucagguacugaugaaccccacu

SEQ ID NO: 487920 - RNA, 32 nt, Human
uagaaccagcagaagccagagggugggagggg

SEQ ID NO: 487921 - RNA, 21 nt, Human
uagaaccaggcugcccucuac

SEQ ID NO: 487922 - RNA, 32 nt, Human
uagaaccaggucucacuauguugcccaggcua

SEQ ID NO: 487923 - RNA, 32 nt, Human
uagaacccaggagacggagguugcagugagcc

SEQ ID NO: 487924 - RNA, 32 nt, Human
uagaacccaggagguggagacugcagugagcc

SEQ ID NO: 487925 - RNA, 24 nt, Human
uagaaccccaggugaaggcacuua

SEQ ID NO: 487926 - RNA, 32 nt, Human
uagaacccggcucuggggcacuggccuaguuc

SEQ ID NO: 487927 - RNA, 32 nt, Human
uagaacccugagcacuggaggaagagcgccug

SEQ ID NO: 487928 - RNA, 32 nt, Human
uagaacccuuccugcaguauucauacaguguu

SEQ ID NO: 487929 - RNA, 32 nt, Human
uagaaccgggaggcggaaguugcagugagcca

SEQ ID NO: 487930 - RNA, 32 nt, Human
uagaaccuaccucccugcccagucagcaggcu

SEQ ID NO: 487931 - RNA, 32 nt, Human
uagaaccucuacuggcugaugccaacaucauc

SEQ ID NO: 487932 - RNA, 32 nt, Human
uagaaccugcugcacaggggcugggaauggga

SEQ ID NO: 487933 - RNA, 32 nt, Human
uagaaccugcuucucugaucuguguguuuccu

SEQ ID NO: 487934 - RNA, 32 nt, Human
uagaaccugucuuccucccuggcauugugggg

SEQ ID NO: 487935 - RNA, 32 nt, Human
uagaaccuguucucugccgucuuuggcucagc

SEQ ID NO: 487936 - RNA, 32 nt, Human
uagaaccuucuuuccuaauccccuuaucuuca

SEQ ID NO: 487937 - RNA, 32 nt, Human
uagaacgggaggcugcugaagugaguagcuga

SEQ ID NO: 487938 - RNA, 32 nt, Human
uagaacgugugcuucaugacccguuguacaga

SEQ ID NO: 487939 - RNA, 32 nt, Human
uagaacuaaggcuucugcuuccuugcugcugu

SEQ ID NO: 487940 - RNA, 32 nt, Human
uagaacuaauugaccuuucuaaaacagcauuu

SEQ ID NO: 487941 - RNA, 32 nt, Human
uagaacuacuaaaguuccaguaguuaggccau

SEQ ID NO: 487942 - RNA, 32 nt, Human
uagaacucacauuuuaaucagggauugcauuu

SEQ ID NO: 487943 - RNA, 32 nt, Human
uagaacucaccucucacacucuguucuuuagu

SEQ ID NO: 487944 - RNA, 32 nt, Human
uagaacucagaggaagaggcaggggcagcagc

SEQ ID NO: 487945 - RNA, 32 nt, Human
uagaacucccccaggcccugccauuggguugu

SEQ ID NO: 487946 - RNA, 32 nt, Human
uagaacugcaccauuggcucucuuggguuucc

SEQ ID NO: 487947 - RNA, 32 nt, Human
uagaacugguuccccucaccacccaaccuacc

SEQ ID NO: 487948 - RNA, 32 nt, Human
uagaacugucguaaagguguagaagggagaga

SEQ ID NO: 487949 - RNA, 32 nt, Human
uagaacuucaagcucuuucuucacucaggagg

SEQ ID NO: 487950 - RNA, 32 nt, Human
uagaacuucucucccuuuuucucccucauucc

SEQ ID NO: 487951 - RNA, 32 nt, Human
uagaacuugauuguugagacgccuugcuagag

SEQ ID NO: 487952 - RNA, 32 nt, Human
uagaacuuggcuggaugcaguggcucacaccu

SEQ ID NO: 487953 - RNA, 32 nt, Human
uagaacuuuuucugcugaccuacccggucagu

SEQ ID NO: 487954 - RNA, 32 nt, Human
uagaagaaagagaaaccuucacuuuggcauuu

SEQ ID NO: 487955 - RNA, 32 nt, Human
uagaagaaaugcugaagcaagcauaugaguuu

SEQ ID NO: 487956 - RNA, 32 nt, Human
uagaagaacagacaucuuccagcagcugucag

SEQ ID NO: 487957 - RNA, 32 nt, Human
uagaagaacaucacuuuuaaccuugcuuuggc

SEQ ID NO: 487958 - RNA, 19 nt, Human
uagaagaagccaagaauuu

SEQ ID NO: 487959 - RNA, 32 nt, Human
uagaagaagugggaagaagaaggagcucuaca

SEQ ID NO: 487960 - RNA, 32 nt, Human
uagaagaauugugacuguaaagccacuucuau

SEQ ID NO: 487961 - RNA, 32 nt, Human
uagaagacuguucugcaauuugcugccaaaug

SEQ ID NO: 487962 - RNA, 32 nt, Human
uagaagacuugacagcuugagaauagaggaaa

SEQ ID NO: 487963 - RNA, 32 nt, Human
uagaagagaaaggcuuccccuacaccccagcc

SEQ ID NO: 487964 - RNA, 32 nt, Human
uagaagagacaggagacaggaagccuucccau

SEQ ID NO: 487965 - RNA, 20 nt, Human
uagaagagauagggggucuu

SEQ ID NO: 487966 - RNA, 32 nt, Human
uagaagagaugggauuucaucauguuggccag

SEQ ID NO: 487967 - RNA, 32 nt, Human
uagaagagaugggguuucuccauguuggccag

SEQ ID NO: 487968 - RNA, 32 nt, Human
uagaagagccacaagaccacacacacagcccu

SEQ ID NO: 487969 - RNA, 32 nt, Human
uagaagagcuucccccugacacccugugacug

SEQ ID NO: 487970 - RNA, 32 nt, Human
uagaagagcuuugagagaggugggcccacggg

SEQ ID NO: 487971 - RNA, 32 nt, Human
uagaagaggaaggcuuugugcagcaguagcgu

SEQ ID NO: 487972 - RNA, 32 nt, Human
uagaagaggcgggguuucaccauguuggccag

SEQ ID NO: 487973 - RNA, 32 nt, Human
uagaagaggcggguacugucacuguguaaaau

SEQ ID NO: 487974 - RNA, 32 nt, Human
uagaagauaagaaacaugucaucauauuuaaa

SEQ ID NO: 487975 - RNA, 32 nt, Human
uagaagauagcuuaaccuguagguacauguua

SEQ ID NO: 487976 - RNA, 32 nt, Human
uagaagauaugggcuuuuggaagcacugauug

SEQ ID NO: 487977 - RNA, 21 nt, Human
uagaagaucugacugauguua

SEQ ID NO: 487978 - RNA, 32 nt, Human
uagaagauggugaaauagacgaugcaggauuu

SEQ ID NO: 487979 - RNA, 32 nt, Human
uagaagauucuauucugcuggccaguggaaca

SEQ ID NO: 487980 - RNA, 32 nt, Human
uagaagcaaaacugagugauaacucaugagaa

SEQ ID NO: 487981 - RNA, 32 nt, Human
uagaagcaaaggaggcugggcacaguggcuca

SEQ ID NO: 487982 - RNA, 32 nt, Human
uagaagcaacaaggcccuagcuggagacucug

SEQ ID NO: 487983 - RNA, 32 nt, Human
uagaagcaaccauucuaauaauugcugaaugu

SEQ ID NO: 487984 - RNA, 32 nt, Human
uagaagcaagcuggaugcaguggcucaugccu

SEQ ID NO: 487985 - RNA, 32 nt, Human
uagaagcaaguaaaucauccucuuuucaagag

SEQ ID NO: 487986 - RNA, 32 nt, Human
uagaagcacauguacauacauggaccucauuc

SEQ ID NO: 487987 - RNA, 32 nt, Human
uagaagcacugagcucccugucucuggaagua

SEQ ID NO: 487988 - RNA, 32 nt, Human
uagaagcagagcuggaguaaggacuugggugu

SEQ ID NO: 487989 - RNA, 32 nt, Human
uagaagcaggaacaccagugcuaagguagagc

SEQ ID NO: 487990 - RNA, 32 nt, Human
uagaagcaggcaaguuggguaacggcucucgg

SEQ ID NO: 487991 - RNA, 32 nt, Human
uagaagcagggugucagcuacugggaauauuu

SEQ ID NO: 487992 - RNA, 32 nt, Human
uagaagcaugauacaagacaucuacuggauuc

SEQ ID NO: 487993 - RNA, 32 nt, Human
uagaagcaugcaccaccaugcccaucuaauau

SEQ ID NO: 487994 - RNA, 32 nt, Human
uagaagccaagguuguggauuugaucuuagaa

SEQ ID NO: 487995 - RNA, 32 nt, Human
uagaagccaccacuggcuuucaggcuuggggg

SEQ ID NO: 487996 - RNA, 32 nt, Human
uagaagccacuugcacgguguggccagagccu

SEQ ID NO: 487997 - RNA, 32 nt, Human
uagaagccaggaccuggguucugggugaagcc

SEQ ID NO: 487998 - RNA, 32 nt, Human
uagaagccaggaguucgagaccagccugggua

SEQ ID NO: 487999 - RNA, 32 nt, Human
uagaagccauuuugauccaagaagcuacuuaa

SEQ ID NO: 488000 - RNA, 32 nt, Human
uagaagccccugguuugggguggguggaggag

SEQ ID NO: 488001 - RNA, 23 nt, Human
uagaagccucugggcucagagga

SEQ ID NO: 488002 - RNA, 32 nt, Human
uagaagcgguggaagguguggauguccgugcg

SEQ ID NO: 488003 - RNA, 32 nt, Human
uagaagcgugagccaccacgcccagccuuuuu

SEQ ID NO: 488004 - RNA, 32 nt, Human
uagaagcuaagcuguggcucaacucauccgga

SEQ ID NO: 488005 - RNA, 32 nt, Human
uagaagcucaugugguuguugcagcauucagu

SEQ ID NO: 488006 - RNA, 32 nt, Human
uagaagcuccaucccccuugucuuugugcuug

SEQ ID NO: 488007 - RNA, 22 nt, Human
uagaagcugcaaagaugugcca

SEQ ID NO: 488008 - RNA, 32 nt, Human
uagaagcugcuugcagggucgccgggcuaacc

SEQ ID NO: 488009 - RNA, 32 nt, Human
uagaaggaaaaaugauuugggccugcuuucca

SEQ ID NO: 488010 - RNA, 32 nt, Human
uagaaggaacauccugaauucuagaguugacu

SEQ ID NO: 488011 - RNA, 19 nt, Human
uagaaggaaucuuugguua

SEQ ID NO: 488012 - RNA, 32 nt, Human
uagaaggauguggcuuuuagagaaguccagua

SEQ ID NO: 488013 - RNA, 31 nt, Human
uagaaggcaguggugacuggcauucagaagu

SEQ ID NO: 488014 - RNA, 32 nt, Human
uagaaggcaguuuccucuacuugcccaagagc

SEQ ID NO: 488015 - RNA, 32 nt, Human
uagaaggccauggagcuuaaaccuccagcagu

SEQ ID NO: 488016 - RNA, 32 nt, Human
uagaaggcgauaaagcaauaauucagcuaauu

SEQ ID NO: 488017 - RNA, 32 nt, Human
uagaaggcugcugccauucagauagcacagac

SEQ ID NO: 488018 - RNA, 32 nt, Human
uagaagggaagagaauuggugcugcagaagug

SEQ ID NO: 488019 - RNA, 32 nt, Human
uagaagggaagagauaggaugggaaagcuaac

SEQ ID NO: 488020 - RNA, 32 nt, Human
uagaagggaagagggaaauggagagcauccuu

SEQ ID NO: 488021 - RNA, 32 nt, Human
uagaagggaccugacuggagugcugauggacu

SEQ ID NO: 488022 - RNA, 32 nt, Human
uagaagggagaguguauauguguaugaaugaa

SEQ ID NO: 488023 - RNA, 32 nt, Human
uagaagggaggcacaccagcuugggcaggugg

SEQ ID NO: 488024 - RNA, 32 nt, Human
uagaagggauuccaaauaaacacuugcacaca

SEQ ID NO: 488025 - RNA, 18 nt, Human
uagaaggggaaaauucaa

SEQ ID NO: 488026 - RNA, 32 nt, Human
uagaaggggaagccucugggcugagcauguag

SEQ ID NO: 488027 - RNA, 32 nt, Human
uagaaggggacuguucuucacacaucauauua

SEQ ID NO: 488028 - RNA, 32 nt, Human
uagaaggucucgagccuccuguaccuucccag

SEQ ID NO: 488029 - RNA, 32 nt, Human
uagaaguaccugcuggguucucaguuccaguu

SEQ ID NO: 488030 - RNA, 32 nt, Human
uagaagucaaugcaaaugcauuaauuuacaag

SEQ ID NO: 488031 - RNA, 32 nt, Human
uagaagucacacuaguauauaccauuuaauac

SEQ ID NO: 488032 - RNA, 32 nt, Human
uagaagucagcuuucacaucugauuucuguau

SEQ ID NO: 488033 - RNA, 32 nt, Human
uagaaguccuuuccucacccaccccacaccau

SEQ ID NO: 488034 - RNA, 32 nt, Human
uagaagucguccugucguccugccucacagua

SEQ ID NO: 488035 - RNA, 20 nt, Human
uagaagugaauuguuuagug

SEQ ID NO: 488036 - RNA, 32 nt, Human
uagaagugacauuguaagaggugguggggacc

SEQ ID NO: 488037 - RNA, 17 nt, Human
uagaagugaccaguuca

SEQ ID NO: 488038 - RNA, 32 nt, Human
uagaagugcggguccccagagccaggguagac

SEQ ID NO: 488039 - RNA, 32 nt, Human
uagaaguggcaaaauuccaagcagguucaaaa

SEQ ID NO: 488040 - RNA, 32 nt, Human
uagaaguggcugggaauuuugccuucuagacu

SEQ ID NO: 488041 - RNA, 32 nt, Human
uagaaguuaccugaguaucucugggaggccuc

SEQ ID NO: 488042 - RNA, 32 nt, Human
uagaaguuaggguuuaggcaucauuuugagaa

SEQ ID NO: 488043 - RNA, 32 nt, Human
uagaaguugagguagucugggguggggaacuu

SEQ ID NO: 488044 - RNA, 19 nt, Human
uagaaguuggccuuuaguu

SEQ ID NO: 488045 - RNA, 32 nt, Human
uagaaguuuccagauauggagggguauuuuca

SEQ ID NO: 488046 - RNA, 21 nt, Human
uagaaguuuguugacucguaa

SEQ ID NO: 488047 - RNA, 30 nt, Human
uagaauaaggaaauaaaaugauacacucac

SEQ ID NO: 488048 - RNA, 32 nt, Human
uagaauacaaacuccuuaaggccaggcacucu

SEQ ID NO: 488049 - RNA, 32 nt, Human
uagaauacauggaaacgcaaaugaguauuucg

SEQ ID NO: 488050 - RNA, 32 nt, Human
uagaauacuguaggaagucagugcaaggugca

SEQ ID NO: 488051 - RNA, 32 nt, Human
uagaauagacuggccugaaauccccuugccca

SEQ ID NO: 488052 - RNA, 32 nt, Human
uagaauagagguuauucuguaauggaaaagug

SEQ ID NO: 488053 - RNA, 32 nt, Human
uagaauagauacuguauuaaauauugccaugu

SEQ ID NO: 488054 - RNA, 31 nt, Human
uagaauaggaaacuguggcucagaggucauc

SEQ ID NO: 488055 - RNA, 31 nt, Human
uagaauaggcacuuuaaaacacucuuucccc

SEQ ID NO: 488056 - RNA, 32 nt, Human
uagaauaggcaggaaccaauuugcauuuaagu

SEQ ID NO: 488057 - RNA, 32 nt, Human
uagaauagucauaccuggaaugugucaaauua

SEQ ID NO: 488058 - RNA, 32 nt, Human
uagaauauagagaguuuuuaaaugucucccau

SEQ ID NO: 488059 - RNA, 32 nt, Human
uagaauaugacaugcugaaccaggcauggugg

SEQ ID NO: 488060 - RNA, 32 nt, Human
uagaauauguggaagagccagaggaggagcag

SEQ ID NO: 488061 - RNA, 32 nt, Human
uagaaucacagaacgacacccgguaauccaca

SEQ ID NO: 488062 - RNA, 32 nt, Human
uagaaucaggaaaauguccgcaaaagcauguu

SEQ ID NO: 488063 - RNA, 32 nt, Human
uagaaucauaacccacacaggcccacugcagg

SEQ ID NO: 488064 - RNA, 32 nt, Human
uagaaucaugguacauuauuguuucaguauuc

SEQ ID NO: 488065 - RNA, 25 nt, Human
uagaauccaaugcaacaggaagcua

SEQ ID NO: 488066 - RNA, 32 nt, Human
uagaauccagcccagaucugaggccaagcuau

SEQ ID NO: 488067 - RNA, 32 nt, Human
uagaauccagccuucaguuucuuaaaugaaau

SEQ ID NO: 488068 - RNA, 32 nt, Human
uagaauccaguacuuuuaauggugggaauuua

SEQ ID NO: 488069 - RNA, 32 nt, Human
uagaaucccacuuuuggugauuucaagucaag

SEQ ID NO: 488070 - RNA, 32 nt, Human
uagaaucccagaggccuccucauuagugaucc

SEQ ID NO: 488071 - RNA, 32 nt, Human
uagaaucccagcagcagagaaccaucaaggcg

SEQ ID NO: 488072 - RNA, 32 nt, Human
uagaaucgcuuuccuuccuccccuuuugcccc

SEQ ID NO: 488073 - RNA, 31 nt, Human
uagaaucucaauaaauuuaugugaagagaau

SEQ ID NO: 488074 - RNA, 32 nt, Human
uagaaucucagggcuuauccuagaagguguug

SEQ ID NO: 488075 - RNA, 32 nt, Human
uagaaucucauccuuagggcucagagaguccc

SEQ ID NO: 488076 - RNA, 32 nt, Human
uagaaucucccauccuauugucaagguuaaca

SEQ ID NO: 488077 - RNA, 32 nt, Human
uagaaugaagucaccaguaggucagucccuuc

SEQ ID NO: 488078 - RNA, 32 nt, Human
uagaaugacaguguuggaauuuggaggcagua

SEQ ID NO: 488079 - RNA, 32 nt, Human
uagaaugacuaaaacuaucuaccuauagaacu

SEQ ID NO: 488080 - RNA, 32 nt, Human
uagaaugagagggagggcagccuucugccacc

SEQ ID NO: 488081 - RNA, 32 nt, Human
uagaaugagccccaaaccuuagccucauuuau

SEQ ID NO: 488082 - RNA, 20 nt, Human
uagaaugagggccuuuaguu

SEQ ID NO: 488083 - RNA, 32 nt, Human
uagaaugaguuccucuggccaugggaggaucg

SEQ ID NO: 488084 - RNA, 32 nt, Human
uagaaugaucuauugcucaucagcuuuauuuu

SEQ ID NO: 488085 - RNA, 32 nt, Human
uagaaugauguaauauuccaggaugcugcugc

SEQ ID NO: 488086 - RNA, 32 nt, Human
uagaaugcaauggguauuuucucagauuucca

SEQ ID NO: 488087 - RNA, 32 nt, Human
uagaaugccacaucugcguccucaagaccugu

SEQ ID NO: 488088 - RNA, 32 nt, Human
uagaaugcuguugccacuuacgggggcuggag

SEQ ID NO: 488089 - RNA, 32 nt, Human
uagaauggaacaaacugaaggcccgaugagag

SEQ ID NO: 488090 - RNA, 32 nt, Human
uagaauggacccuuccuccaccucaguucaga

SEQ ID NO: 488091 - RNA, 32 nt, Human
uagaaugggaggugguaugggaaguggcaugu

SEQ ID NO: 488092 - RNA, 32 nt, Human
uagaaugggcuucaauauucauaacugaguua

SEQ ID NO: 488093 - RNA, 32 nt, Human
uagaauggguuugagcuuggggugggguggau

SEQ ID NO: 488094 - RNA, 32 nt, Human
uagaauguaaaaggaauauuacaguguuaacu

SEQ ID NO: 488095 - RNA, 32 nt, Human
uagaauguaagcuuggugaaagaagggacuuu

SEQ ID NO: 488096 - RNA, 23 nt, Human
uagaauguauacuccacacauuu

SEQ ID NO: 488097 - RNA, 32 nt, Human
uagaaugucauuuugcccucaaccuugguauu

SEQ ID NO: 488098 - RNA, 22 nt, Human
uagaaugugaugucugaagaua

SEQ ID NO: 488099 - RNA, 32 nt, Human
uagaaugugccuuucgugaaggucugacaaau

SEQ ID NO: 488100 - RNA, 32 nt, Human
uagaauguucauaagcauggucuuccaguugc

SEQ ID NO: 488101 - RNA, 21 nt, Human
uagaauguuucaguucuagga

SEQ ID NO: 488102 - RNA, 32 nt, Human
uagaauuaaaaaguggggacuuugggaggagg

SEQ ID NO: 488103 - RNA, 32 nt, Human
uagaauuaacaccauuauguauuuuguuauuu

SEQ ID NO: 488104 - RNA, 32 nt, Human
uagaauuaccucuauucuuuguuuugccauau

SEQ ID NO: 488105 - RNA, 32 nt, Human
uagaauuaugcuguuaaaacuacuuuagguga

SEQ ID NO: 488106 - RNA, 32 nt, Human
uagaauuauugcuuaugucauuucuuaagcag

SEQ ID NO: 488107 - RNA, 32 nt, Human
uagaauucacaaugcauuuuucaagagaaaug

SEQ ID NO: 488108 - RNA, 32 nt, Human
uagaauucauacuggggagaaaccuuagaaau

SEQ ID NO: 488109 - RNA, 32 nt, Human
uagaauucauuucucuuacguugaauccccaa

SEQ ID NO: 488110 - RNA, 32 nt, Human
uagaauuccuacucacacagcucagcaacaac

SEQ ID NO: 488111 - RNA, 32 nt, Human
uagaauucuaaguuucuagacccacugcccau

SEQ ID NO: 488112 - RNA, 32 nt, Human
uagaauugaauccaaggucugccauucacuag

SEQ ID NO: 488113 - RNA, 32 nt, Human
uagaauugcccagugcugccagagugagugag

SEQ ID NO: 488114 - RNA, 32 nt, Human
uagaauuguagacugauguuuuagcauuuuuc

SEQ ID NO: 488115 - RNA, 32 nt, Human
uagaauuguaugaaauuaagaguuucagaguu

SEQ ID NO: 488116 - RNA, 32 nt, Human
uagaauuguugggaucucauagauggaauggg

SEQ ID NO: 488117 - RNA, 32 nt, Human
uagaauuucucucccucucucuuuuaauacuu

SEQ ID NO: 488118 - RNA, 32 nt, Human
uagacaaaacucacaacuaccugcucaaguuc

SEQ ID NO: 488119 - RNA, 20 nt, Human
uagacaaacaguugccucca

SEQ ID NO: 488120 - RNA, 32 nt, Human
uagacaaacuucacaaacugucuuaauuuaga

SEQ ID NO: 488121 - RNA, 19 nt, Human
uagacaaagcuauuucuac

SEQ ID NO: 488122 - RNA, 32 nt, Human
uagacaaauugcugcugaccuuacgccuguau

SEQ ID NO: 488123 - RNA, 32 nt, Human
uagacaacacccuuacaaggauccgccagggc

SEQ ID NO: 488124 - RNA, 32 nt, Human
uagacaacaguuuguucuugccuguguugcuu

SEQ ID NO: 488125 - RNA, 32 nt, Human
uagacaaccagcuaaacugccuuuuuggugug

SEQ ID NO: 488126 - RNA, 32 nt, Human
uagacaagccugggaaacauagcaagaucuca

SEQ ID NO: 488127 - RNA, 32 nt, Human
uagacaaggagaagaggaagggaggaagggaa

SEQ ID NO: 488128 - RNA, 32 nt, Human
uagacacacagcaagcagacaaccacacaaag

SEQ ID NO: 488129 - RNA, 32 nt, Human
uagacacacagcagcagcagcgucucucagaa

SEQ ID NO: 488130 - RNA, 32 nt, Human
uagacacacauuuucuuuucacccuaaucuau

SEQ ID NO: 488131 - RNA, 32 nt, Human
uagacacagcuaacuugagucuuggagcuccu

SEQ ID NO: 488132 - RNA, 32 nt, Human
uagacaccuucaccuccaucgugcccucucuc

SEQ ID NO: 488133 - RNA, 32 nt, Human
uagacacggcuggggcgugcucuggccucacu

SEQ ID NO: 488134 - RNA, 32 nt, Human
uagacacuacuuauuuguuacauuuuguacua

SEQ ID NO: 488135 - RNA, 30 nt, Human
uagacacucaauaaauaauuguugaauuca

SEQ ID NO: 488136 - RNA, 31 nt, Human
uagacacucaauaaauacuuguugaauucaa

SEQ ID NO: 488137 - RNA, 32 nt, Human
uagacacucuaggcucggaggcugccacugua

SEQ ID NO: 488138 - RNA, 32 nt, Human
uagacacucuguaucuagcuacucuggugggg

SEQ ID NO: 488139 - RNA, 32 nt, Human
uagacacucuucuuagucccauggagcugacu

SEQ ID NO: 488140 - RNA, 32 nt, Human
uagacacugaugccauugugugcugccucaag

SEQ ID NO: 488141 - RNA, 32 nt, Human
uagacacugcaaccucuugcucguaucccagg

SEQ ID NO: 488142 - RNA, 32 nt, Human
uagacagaagaggaagaaagaacagauguuca

SEQ ID NO: 488143 - RNA, 32 nt, Human
uagacagcaguuucccuauauuauuuggaguc

SEQ ID NO: 488144 - RNA, 32 nt, Human
uagacagcauaaaugaaaaagacagaaauucc

SEQ ID NO: 488145 - RNA, 31 nt, Human
uagacagccccugcugggccuguuugcuguc

SEQ ID NO: 488146 - RNA, 32 nt, Human
uagacagcgcucagccccagccccaggugugg

SEQ ID NO: 488147 - RNA, 32 nt, Human
uagacagcugagaggaccugaucauguaggga

SEQ ID NO: 488148 - RNA, 32 nt, Human
uagacaggaauagaaguugugguggaggugau

SEQ ID NO: 488149 - RNA, 32 nt, Human
uagacagggaaaaucgauggugucaaggcaaa

SEQ ID NO: 488150 - RNA, 32 nt, Human
uagacagggcaggcuggcugcggggaggggcu

SEQ ID NO: 488151 - RNA, 31 nt, Human
uagacaggggagccaugcacagcaggaaaug

SEQ ID NO: 488152 - RNA, 22 nt, Human
uagacaggguuucaccauguug

SEQ ID NO: 488153 - RNA, 32 nt, Human
uagacaguaaggagccaggggaacagagagaa

SEQ ID NO: 488154 - RNA, 32 nt, Human
uagacaguaucagccaaaauuugaguuagcaa

SEQ ID NO: 488155 - RNA, 32 nt, Human
uagacaguauuauuacauucaguauuacaaug

SEQ ID NO: 488156 - RNA, 32 nt, Human
uagacagucagaccuccaggacuagaugaagu

SEQ ID NO: 488157 - RNA, 32 nt, Human
uagacagucaggcaaaacuaaugaacguggag

SEQ ID NO: 488158 - RNA, 32 nt, Human
uagacaguuccuucugguuagauggguccuac

SEQ ID NO: 488159 - RNA, 32 nt, Human
uagacaguuugccguauuugugguguucuccu

SEQ ID NO: 488160 - RNA, 32 nt, Human
uagacauauacacacacauauauguauguaua

SEQ ID NO: 488161 - RNA, 32 nt, Human
uagacauaucuauuaaguggaaagaaggcuuu

SEQ ID NO: 488162 - RNA, 32 nt, Human
uagacaucaaagaauucauacuggagagaagc

SEQ ID NO: 488163 - RNA, 32 nt, Human
uagacauccucaccaucuccauccgcucucac

SEQ ID NO: 488164 - RNA, 32 nt, Human
uagacaucucuucauuuuagagagaagaugga

SEQ ID NO: 488165 - RNA, 32 nt, Human
uagacaugcccaaaacuuauccuugggccaua

SEQ ID NO: 488166 - RNA, 32 nt, Human
uagacaugcucuuccucucguuucaugcaggc

SEQ ID NO: 488167 - RNA, 32 nt, Human
uagacaugcuggugucuacacagcagaagaag

SEQ ID NO: 488168 - RNA, 32 nt, Human
uagacaugggcugggugcaguggcucacuccu

SEQ ID NO: 488169 - RNA, 32 nt, Human
uagacaugugggagaaaaagugaggauggauc

SEQ ID NO: 488170 - RNA, 32 nt, Human
uagacauuagccaccaugccuggccaaauauu

SEQ ID NO: 488171 - RNA, 32 nt, Human
uagacauuaugcuuuuauaugcuauucagauu

SEQ ID NO: 488172 - RNA, 32 nt, Human
uagacauucauuuuaaacacuaccucaguuaa

SEQ ID NO: 488173 - RNA, 32 nt, Human
uagacauucugauccccacucccagguaugag

SEQ ID NO: 488174 - RNA, 32 nt, Human
uagacauuuucucaugucuaccaggaauugaa

SEQ ID NO: 488175 - RNA, 32 nt, Human
uagaccaaacuaacucauggagauauuuugaa

SEQ ID NO: 488176 - RNA, 32 nt, Human
uagaccaagaacuuccucugggguggcugugc

SEQ ID NO: 488177 - RNA, 32 nt, Human
uagaccaaggguguccaaucuuuggcuucccu

SEQ ID NO: 488178 - RNA, 32 nt, Human
uagaccaccagcugcacccaucuccacaaagc

SEQ ID NO: 488179 - RNA, 32 nt, Human
uagaccacccuccaugucagguacugagcaag

SEQ ID NO: 488180 - RNA, 32 nt, Human
uagaccaccugucccaggcuguggugccaccc

SEQ ID NO: 488181 - RNA, 32 nt, Human
uagaccagaagaggaugacaauggcaacaagu

SEQ ID NO: 488182 - RNA, 32 nt, Human
uagaccagccuggacaacauagcaagaccuca

SEQ ID NO: 488183 - RNA, 32 nt, Human
uagaccagccuggccaacaugacccaucuuua

SEQ ID NO: 488184 - RNA, 32 nt, Human
uagaccagccugggcaacacaguaagacccug

SEQ ID NO: 488185 - RNA, 32 nt, Human
uagaccagccugggcaacauagcaagacccug

SEQ ID NO: 488186 - RNA, 32 nt, Human
uagaccagccugggcaacauagugagacccaa

SEQ ID NO: 488187 - RNA, 32 nt, Human
uagaccagcuaguuugggagguggcggcagaa

SEQ ID NO: 488188 - RNA, 32 nt, Human
uagaccagcuuggaguuaaugcagaagaggac

SEQ ID NO: 488189 - RNA, 32 nt, Human
uagaccaggcuacuccugcuguggaccagcua

SEQ ID NO: 488190 - RNA, 32 nt, Human
uagaccaggcuggucucgaauuccugaccuca

SEQ ID NO: 488191 - RNA, 32 nt, Human
uagaccagggcugaugguaaaugaggugguca

SEQ ID NO: 488192 - RNA, 32 nt, Human
uagaccauaacuccucuaguaucaaaauuggg

SEQ ID NO: 488193 - RNA, 32 nt, Human
uagaccaucucuagcccuguggugaaagaggu

SEQ ID NO: 488194 - RNA, 32 nt, Human
uagaccaugaucuccuuggaagcagggacagu

SEQ ID NO: 488195 - RNA, 32 nt, Human
uagacccaaacuuguggaaguaucauguguua

SEQ ID NO: 488196 - RNA, 32 nt, Human
uagacccaaccuggccccagauucugccucug

SEQ ID NO: 488197 - RNA, 32 nt, Human
uagacccaggagaggaagguuaagagaugucg

SEQ ID NO: 488198 - RNA, 32 nt, Human
uagaccccaaaaacuuuugugacaacagugaa

SEQ ID NO: 488199 - RNA, 32 nt, Human
uagaccccaaagauuccuguugguggucuggg

SEQ ID NO: 488200 - RNA, 32 nt, Human
uagaccccacagaacugacagcagggacugaa

SEQ ID NO: 488201 - RNA, 32 nt, Human
uagaccccagcaccugugagucacgcagaccc

SEQ ID NO: 488202 - RNA, 32 nt, Human
uagaccccaggcagcuccgaauuugugaaccu

SEQ ID NO: 488203 - RNA, 32 nt, Human
uagaccccaguucuguuuuccaggaggaacuc

SEQ ID NO: 488204 - RNA, 32 nt, Human
uagaccccauaaccccagaccaaagagguucu

SEQ ID NO: 488205 - RNA, 25 nt, Human
uagaccccauguugaaaacuccaua

SEQ ID NO: 488206 - RNA, 32 nt, Human
uagaccccgccagcagcaguggggcuuggccu

SEQ ID NO: 488207 - RNA, 32 nt, Human
uagacccgggaggcagagguugcagugagccg

SEQ ID NO: 488208 - RNA, 32 nt, Human
uagacccuuacgcccagagaacugcugggagg

SEQ ID NO: 488209 - RNA, 32 nt, Human
uagaccgaagugggcagaucaccugaggucag

SEQ ID NO: 488210 - RNA, 32 nt, Human
uagaccgaaguguacggcagugccaucuggug

SEQ ID NO: 488211 - RNA, 32 nt, Human
uagaccgcuaacaccugucacuggccacuggu

SEQ ID NO: 488212 - RNA, 32 nt, Human
uagaccgggaaggggaggcgggcgggcggaga

SEQ ID NO: 488213 - RNA, 32 nt, Human
uagaccucccaaaaugcuggaauuacaggcgu

SEQ ID NO: 488214 - RNA, 32 nt, Human
uagaccuccuccacucuccauccccuuucccu

SEQ ID NO: 488215 - RNA, 32 nt, Human
uagaccuggaggaucugcaaugcuggaacuug

SEQ ID NO: 488216 - RNA, 32 nt, Human
uagaccugggggacccaaagggucuggccucu

SEQ ID NO: 488217 - RNA, 31 nt, Human
uagaccuggguggaggugagacuggugggug

SEQ ID NO: 488218 - RNA, 19 nt, Human
uagaccugugaaauuucuu

SEQ ID NO: 488219 - RNA, 32 nt, Human
uagaccuuaccucucaacucccucaagaguac

SEQ ID NO: 488220 - RNA, 32 nt, Human
uagaccuuagccagcaggagacucacuggggg

SEQ ID NO: 488221 - RNA, 32 nt, Human
uagaccuuuccucugaggagggcuggcaucuc

SEQ ID NO: 488222 - RNA, 32 nt, Human
uagacgacaaagcaucuauauagcuaagcuaa

SEQ ID NO: 488223 - RNA, 32 nt, Human
uagacgcaggaaauaaggucacauugguguug

SEQ ID NO: 488224 - RNA, 32 nt, Human
uagacgcauguugguaggucacuggaccagag

SEQ ID NO: 488225 - RNA, 32 nt, Human
uagacgcccagcugcacaacuugauugccuua

SEQ ID NO: 488226 - RNA, 32 nt, Human
uagacgcgccggacaggacugauggcgggacc

SEQ ID NO: 488227 - RNA, 30 nt, Human
uagacgcuugucgaaggcagguccuaguca

SEQ ID NO: 488228 - RNA, 32 nt, Human
uagacggagccacacuacaggcaggguaugag

SEQ ID NO: 488229 - RNA, 32 nt, Human
uagacggaguuucacucuuguugcccaggcug

SEQ ID NO: 488230 - RNA, 32 nt, Human
uagacggaguuuugcucuuguugcccaggcug

SEQ ID NO: 488231 - RNA, 32 nt, Human
uagacggccaccugcaggaccccacacucacu

SEQ ID NO: 488232 - RNA, 32 nt, Human
uagacggccuuuccuuuugcacuuucugaacu

SEQ ID NO: 488233 - RNA, 32 nt, Human
uagacguauuagaagauauauucugucguuuu

SEQ ID NO: 488234 - RNA, 32 nt, Human
uagacguggcagagaagagguugcgagcaugg

SEQ ID NO: 488235 - RNA, 32 nt, Human
uagacguggcagcucugugcaguguuugagcc

SEQ ID NO: 488236 - RNA, 32 nt, Human
uagacuaacaacuuuucaagugcucaagaguc

SEQ ID NO: 488237 - RNA, 32 nt, Human
uagacuacuugaacccauaaacuuggaagaau

SEQ ID NO: 488238 - RNA, 32 nt, Human
uagacuagaucccuuacccucucuccaguucc

SEQ ID NO: 488239 - RNA, 32 nt, Human
uagacuagcuguaaaggaccuccuaaauaaau

SEQ ID NO: 488240 - RNA, 32 nt, Human
uagacucaccccacagcacacagacuuucucu

SEQ ID NO: 488241 - RNA, 32 nt, Human
uagacucacugcaaccuccaccuccuguguuc

SEQ ID NO: 488242 - RNA, 32 nt, Human
uagacuccaggauacaaaccauaguaggcaau

SEQ ID NO: 488243 - RNA, 32 nt, Human
uagacuccaucccucaacuucucccauccucu

SEQ ID NO: 488244 - RNA, 32 nt, Human
uagacuccauggucuaacaagggagacauaua

SEQ ID NO: 488245 - RNA, 32 nt, Human
uagacucccagcugcacaauuugauugccuug

SEQ ID NO: 488246 - RNA, 32 nt, Human
uagacucccagucuucuccacauugcugucau

SEQ ID NO: 488247 - RNA, 32 nt, Human
uagacucccauuuugcaaaaggcuuacuuucc

SEQ ID NO: 488248 - RNA, 32 nt, Human
uagacuccucaccauccuuaaguucagugacu

SEQ ID NO: 488249 - RNA, 32 nt, Human
uagacucguccuagagcacagggacucuugcc

SEQ ID NO: 488250 - RNA, 32 nt, Human
uagacucucagauuccgaaggguccuccagcc

SEQ ID NO: 488251 - RNA, 32 nt, Human
uagacucuccacuguuaccuaaguucucaagc

SEQ ID NO: 488252 - RNA, 32 nt, Human
uagacucugguggacaggcaggccccaaggcc

SEQ ID NO: 488253 - RNA, 24 nt, Human
uagacugaaaaugccuaauugaua

SEQ ID NO: 488254 - RNA, 21 nt, Human
uagacugacagacauagcuga

SEQ ID NO: 488255 - RNA, 32 nt, Human
uagacugcaaaucuaaccauauuuaaugaaau

SEQ ID NO: 488256 - RNA, 31 nt, Human
uagacugcaagcuagaaagccaccaaggcca

SEQ ID NO: 488257 - RNA, 32 nt, Human
uagacugcagggcuuaaacaacagacauuuau

SEQ ID NO: 488258 - RNA, 32 nt, Human
uagacugccuuccuuggacccuuccaaagugu

SEQ ID NO: 488259 - RNA, 32 nt, Human
uagacuggaaaauguuuguguccagcugagga

SEQ ID NO: 488260 - RNA, 32 nt, Human
uagacuggaauguguggcauaaucuuggcuaa

SEQ ID NO: 488261 - RNA, 32 nt, Human
uagacuggacagcuuguggcaagugaauuucc

SEQ ID NO: 488262 - RNA, 32 nt, Human
uagacuggagcccagcagcagcgcggcggcgc

SEQ ID NO: 488263 - RNA, 32 nt, Human
uagacuggagugaggcuuccaggcucuuccug

SEQ ID NO: 488264 - RNA, 32 nt, Human
uagacuggccacacuggcucugaaacucacca

SEQ ID NO: 488265 - RNA, 32 nt, Human
uagacuggggccuucugccaccuuugccuccc

SEQ ID NO: 488266 - RNA, 32 nt, Human
uagacugggucucauucugucacccaggcuag

SEQ ID NO: 488267 - RNA, 32 nt, Human
uagacugguaaccagauaaaauaaccuuguaa

SEQ ID NO: 488268 - RNA, 32 nt, Human
uagacuggugcuguaacucaagcaucaauuca

SEQ ID NO: 488269 - RNA, 32 nt, Human
uagacuguauccaggagguggaagugaauugc

SEQ ID NO: 488270 - RNA, 30 nt, Human
uagacugucagagcauggcuagcucagggg

SEQ ID NO: 488271 - RNA, 32 nt, Human
uagacuguccuugagccagggucuguaaaccu

SEQ ID NO: 488272 - RNA, 32 nt, Human
uagacugugaagauucaguucaaauguuaucc

SEQ ID NO: 488273 - RNA, 32 nt, Human
uagacugugagcuccucgagggcagggaccgu

SEQ ID NO: 488274 - RNA, 32 nt, Human
uagacuuacaauauuuuucuuguuucuguacu

SEQ ID NO: 488275 - RNA, 32 nt, Human
uagacuucaagugaucuuucaucccaggaaua

SEQ ID NO: 488276 - RNA, 32 nt, Human
uagacuugccacccaucuccccagucuuuugu

SEQ ID NO: 488277 - RNA, 32 nt, Human
uagacuugcuuugccaaacuuuugccuuaagc

SEQ ID NO: 488278 - RNA, 32 nt, Human
uagacuuggggcacuuguggguacucauucuc

SEQ ID NO: 488279 - RNA, 32 nt, Human
uagacuuggggcacuuguggguacucauuuuc

SEQ ID NO: 488280 - RNA, 32 nt, Human
uagacuuugcauauauacaaauuuguaguauu

SEQ ID NO: 488281 - RNA, 32 nt, Human
uagacuuugccuggagaccccuuuggaaaucu

SEQ ID NO: 488282 - RNA, 32 nt, Human
uagacuuuuuaaugcuaaaauguccuuauuaa

SEQ ID NO: 488283 - RNA, 32 nt, Human
uagagaaaaagacugcuuugucacucaaacau

SEQ ID NO: 488284 - RNA, 32 nt, Human
uagagaaaaaugaagacaggaaaggggcagag

SEQ ID NO: 488285 - RNA, 32 nt, Human
uagagaaaagagaccauguuuauuuggguagg

SEQ ID NO: 488286 - RNA, 32 nt, Human
uagagaaacaggaggaaaauuaugccagagau

SEQ ID NO: 488287 - RNA, 32 nt, Human
uagagaaagagaagaagagaaagaggaagagu

SEQ ID NO: 488288 - RNA, 32 nt, Human
uagagaaagauaaacaggucaugaaggcugag

SEQ ID NO: 488289 - RNA, 18 nt, Human
uagagaaaggaguucaug

SEQ ID NO: 488290 - RNA, 32 nt, Human
uagagaaaucugagcccgaaccugccagaaua

SEQ ID NO: 488291 - RNA, 32 nt, Human
uagagaaaugagucucaugccuguaaucccag

SEQ ID NO: 488292 - RNA, 32 nt, Human
uagagaacaagucccccgaacgcugaguugga

SEQ ID NO: 488293 - RNA, 32 nt, Human
uagagaacaccguccugcugggcauggccggg

SEQ ID NO: 488294 - RNA, 32 nt, Human
uagagaacagcagcagcuucagccuggaccag

SEQ ID NO: 488295 - RNA, 32 nt, Human
uagagaacagccugguuaacauggugaaacac

SEQ ID NO: 488296 - RNA, 32 nt, Human
uagagaacccucagcuucucucugccucugga

SEQ ID NO: 488297 - RNA, 32 nt, Human
uagagaacuauacaacuuuuauuguuucuuaa

SEQ ID NO: 488298 - RNA, 32 nt, Human
uagagaacucacugcacccacccacaacacau

SEQ ID NO: 488299 - RNA, 32 nt, Human
uagagaagaaccagaggagcucagcugagaua

SEQ ID NO: 488300 - RNA, 32 nt, Human
uagagaagaagaggacaaaacaagggaaaagc

SEQ ID NO: 488301 - RNA, 32 nt, Human
uagagaagaaggagggaagaauagaugauuua

SEQ ID NO: 488302 - RNA, 32 nt, Human
uagagaagacuuugggggcuucaggcuccaau

SEQ ID NO: 488303 - RNA, 32 nt, Human
uagagaagauacaugagggcuuaaacaagaaa

SEQ ID NO: 488304 - RNA, 32 nt, Human
uagagaagcaguacauuugcuuuugauagaaa

SEQ ID NO: 488305 - RNA, 32 nt, Human
uagagaaggauugcugaucaccugccacccag

SEQ ID NO: 488306 - RNA, 32 nt, Human
uagagaaggccaagcaaccuccacuucuucag

SEQ ID NO: 488307 - RNA, 32 nt, Human
uagagaagggguuuugccgccauguugcacag

SEQ ID NO: 488308 - RNA, 32 nt, Human
uagagaagucagagagacuagaugcuuucacu

SEQ ID NO: 488309 - RNA, 32 nt, Human
uagagaagugagaugaguguguuuucuuuggg

SEQ ID NO: 488310 - RNA, 32 nt, Human
uagagaagugcagaggaagcaaugucuagugc

SEQ ID NO: 488311 - RNA, 32 nt, Human
uagagaauaagaauugcagaaaauaacaguga

SEQ ID NO: 488312 - RNA, 23 nt, Human
uagagaaucguauuuuucuuuca

SEQ ID NO: 488313 - RNA, 32 nt, Human
uagagaauguggcuucaacugggcuuauuaaa

SEQ ID NO: 488314 - RNA, 32 nt, Human
uagagaauuauacaacuuuuauuguuucuuaa

SEQ ID NO: 488315 - RNA, 32 nt, Human
uagagaauucuuuggcaugaucugacuuucca

SEQ ID NO: 488316 - RNA, 32 nt, Human
uagagacaagaaaccuguuucaacuugaagac

SEQ ID NO: 488317 - RNA, 32 nt, Human
uagagacacagaacaauguauuagaauuucca

SEQ ID NO: 488318 - RNA, 32 nt, Human
uagagacacaggcuggguuggucugccccuca

SEQ ID NO: 488319 - RNA, 32 nt, Human
uagagacagagagagaaaaaggcugaaauggg

SEQ ID NO: 488320 - RNA, 32 nt, Human
uagagacagaguuucgucauguugcccaggcu

SEQ ID NO: 488321 - RNA, 32 nt, Human
uagagacaggguuucgcuauguuggccaggcu

SEQ ID NO: 488322 - RNA, 32 nt, Human
uagagacagguuucaccauauuggccaggcug

SEQ ID NO: 488323 - RNA, 32 nt, Human
uagagacaguauucagauuagcuguaucccug

SEQ ID NO: 488324 - RNA, 31 nt, Human
uagagacauacuuguuaacuuuggagcacag

SEQ ID NO: 488325 - RNA, 32 nt, Human
uagagaccagccugggcaacaugaugugaaaa

SEQ ID NO: 488326 - RNA, 32 nt, Human
uagagaccagccugggcaacauggugaaaucc

SEQ ID NO: 488327 - RNA, 32 nt, Human
uagagaccagccugggccaacguggugaaacc

SEQ ID NO: 488328 - RNA, 32 nt, Human
uagagaccagccuggucaacauggugaaaccc

SEQ ID NO: 488329 - RNA, 32 nt, Human
uagagaccagccuguccaacguggugaaaccc

SEQ ID NO: 488330 - RNA, 32 nt, Human
uagagaccaucauugcuaacauggugaaaccc

SEQ ID NO: 488331 - RNA, 32 nt, Human
uagagaccauccuggccaacacggugaaaccc

SEQ ID NO: 488332 - RNA, 32 nt, Human
uagagaccauccuggccaacauggugaaaccc

SEQ ID NO: 488333 - RNA, 32 nt, Human
uagagaccauccuggcuaacacggugaaaccc

SEQ ID NO: 488334 - RNA, 32 nt, Human
uagagaccauccugguuaacacggugaaaccc

SEQ ID NO: 488335 - RNA, 32 nt, Human
uagagaccaucucauuggcccuaaggagccgc

SEQ ID NO: 488336 - RNA, 32 nt, Human
uagagaccaucuuugccaacauggugaaacuc

SEQ ID NO: 488337 - RNA, 32 nt, Human
uagagaccccacccucccaucgguccuacaug

SEQ ID NO: 488338 - RNA, 32 nt, Human
uagagacccuugccuguguccgggacccuggc

SEQ ID NO: 488339 - RNA, 32 nt, Human
uagagaccgguuuugccauguuggccaggcug

SEQ ID NO: 488340 - RNA, 23 nt, Human
uagagaccuaugauccucaugga

SEQ ID NO: 488341 - RNA, 32 nt, Human
uagagaccuguuucuucuguuauuacagaaca

SEQ ID NO: 488342 - RNA, 32 nt, Human
uagagacgacaggguuucaccauguuggccag

SEQ ID NO: 488343 - RNA, 32 nt, Human
uagagacgagguuuugccaucccuguggauuu

SEQ ID NO: 488344 - RNA, 32 nt, Human
uagagacgcaccuugcugcaguguccagaagc

SEQ ID NO: 488345 - RNA, 32 nt, Human
uagagacggaggaguuucaccauguuggccag

SEQ ID NO: 488346 - RNA, 32 nt, Human
uagagacggggucuccccauauuggccaggcu

SEQ ID NO: 488347 - RNA, 32 nt, Human
uagagacgggguucaccauguuggccaggcuu

SEQ ID NO: 488348 - RNA, 32 nt, Human
uagagacgggguuucaccuguuagccaggaug

SEQ ID NO: 488349 - RNA, 32 nt, Human
uagagacggguuucaccacguuggccaggcug

SEQ ID NO: 488350 - RNA, 32 nt, Human
uagagacggguuucaccauauugaccaggcug

SEQ ID NO: 488351 - RNA, 32 nt, Human
uagagacggguuucaccauguuggucagacua

SEQ ID NO: 488352 - RNA, 32 nt, Human
uagagacggguuucaucaugguggccaggaug

SEQ ID NO: 488353 - RNA, 32 nt, Human
uagagacuauguccaugcuuagcaggaaguag

SEQ ID NO: 488354 - RNA, 32 nt, Human
uagagacucagaaaaugucuuuucuuuaaaag

SEQ ID NO: 488355 - RNA, 21 nt, Human
uagagacucggccaccaggaa

SEQ ID NO: 488356 - RNA, 20 nt, Human
uagagacucgguggcccagg

SEQ ID NO: 488357 - RNA, 32 nt, Human
uagagacucuuccaccauucugacaugauccg

SEQ ID NO: 488358 - RNA, 32 nt, Human
uagagacugacagccucugccccaggccugag

SEQ ID NO: 488359 - RNA, 32 nt, Human
uagagacugccugguucucucugauguucaag

SEQ ID NO: 488360 - RNA, 32 nt, Human
uagagacuggguuucgcuguguuagccuggau

SEQ ID NO: 488361 - RNA, 19 nt, Human
uagagacuucacccggggg

SEQ ID NO: 488362 - RNA, 32 nt, Human
uagagagaaagccaggagguaagagccagcug

SEQ ID NO: 488363 - RNA, 32 nt, Human
uagagagacugcuccuauuuuaaaagugaugc

SEQ ID NO: 488364 - RNA, 32 nt, Human
uagagagagaaaggaagggaaggaagcugaag

SEQ ID NO: 488365 - RNA, 32 nt, Human
uagagagagacaggcucuugcuauguugccca

SEQ ID NO: 488366 - RNA, 32 nt, Human
uagagagagagcaggagcaucuugaccgcauu

SEQ ID NO: 488367 - RNA, 32 nt, Human
uagagagagaguucaaaacuaguugguaauuu

SEQ ID NO: 488368 - RNA, 32 nt, Human
uagagagagcaagacagcacuugagugcacug

SEQ ID NO: 488369 - RNA, 32 nt, Human
uagagagagggcuucucagcaggaugaugaag

SEQ ID NO: 488370 - RNA, 32 nt, Human
uagagagaguaagauuugagaacucaguuugc

SEQ ID NO: 488371 - RNA, 20 nt, Human
uagagagauaauaaauucaa

SEQ ID NO: 488372 - RNA, 32 nt, Human
uagagagcagagcuccuugcauggacaaauaa

SEQ ID NO: 488373 - RNA, 32 nt, Human
uagagagcagagggcccauuucagcucuguug

SEQ ID NO: 488374 - RNA, 32 nt, Human
uagagagcagcguggcugugugcaguggguac

SEQ ID NO: 488375 - RNA, 32 nt, Human
uagagagcccuccccagugucuucccaggaua

SEQ ID NO: 488376 - RNA, 32 nt, Human
uagagagccuccuguucuuucuaugcuugguc

SEQ ID NO: 488377 - RNA, 19 nt, Human
uagagagcuauuaguucau

SEQ ID NO: 488378 - RNA, 32 nt, Human
uagagagcugccugugggacagcccagggcag

SEQ ID NO: 488379 - RNA, 32 nt, Human
uagagagcuguaggaagcucaacauuucuuug

SEQ ID NO: 488380 - RNA, 32 nt, Human
uagagagcuugucuuucaaggccagguucccu

SEQ ID NO: 488381 - RNA, 19 nt, Human
uagagagcuuucaguucau

SEQ ID NO: 488382 - RNA, 19 nt, Human
uagagaggaaggcaguuca

SEQ ID NO: 488383 - RNA, 16 nt, Human
uagagaggaauucaug

SEQ ID NO: 488384 - RNA, 18 nt, Human
uagagaggacuuuacaug

SEQ ID NO: 488385 - RNA, 32 nt, Human
uagagaggagaaagagagcagcccgggagcaa

SEQ ID NO: 488386 - RNA, 18 nt, Human
uagagaggagccaaguuc

SEQ ID NO: 488387 - RNA, 32 nt, Human
uagagaggcccagcagagcagcucagacuccu

SEQ ID NO: 488388 - RNA, 16 nt, Human
uagagaggccuccaua

SEQ ID NO: 488389 - RNA, 32 nt, Human
uagagaggccuuuucuuccagaagagucccgc

SEQ ID NO: 488390 - RNA, 32 nt, Human
uagagaggcugaggcaggagaaucacuugaau

SEQ ID NO: 488391 - RNA, 32 nt, Human
uagagaggcugaggcaggagaaucgcuugaac

SEQ ID NO: 488392 - RNA, 32 nt, Human
uagagagggaaagagaagaccagaugugcaua

SEQ ID NO: 488393 - RNA, 32 nt, Human
uagagagggaggugacugguucccugggggau

SEQ ID NO: 488394 - RNA, 32 nt, Human
uagagagggaguuucgccauguuggccaggcu

SEQ ID NO: 488395 - RNA, 21 nt, Human
uagagaggggccucugggaug

SEQ ID NO: 488396 - RNA, 17 nt, Human
uagagaggggguuucau

SEQ ID NO: 488397 - RNA, 32 nt, Human
uagagagggguuucacaguguugggcagggug

SEQ ID NO: 488398 - RNA, 32 nt, Human
uagagagguacacauuuauuuacuguuuaggu

SEQ ID NO: 488399 - RNA, 32 nt, Human
uagagagguuccccuuucaaaucccagugccg

SEQ ID NO: 488400 - RNA, 32 nt, Human
uagagaguacgcgugugagccugggugcaagg

SEQ ID NO: 488401 - RNA, 20 nt, Human
uagagagucucaaguucaua

SEQ ID NO: 488402 - RNA, 32 nt, Human
uagagaguuucgaaguuaggaggacucaagac

SEQ ID NO: 488403 - RNA, 32 nt, Human
uagagauaauccaaaaucaggguuugguuugg

SEQ ID NO: 488404 - RNA, 32 nt, Human
uagagauacagaaaauugcaaccuccaccaga

SEQ ID NO: 488405 - RNA, 32 nt, Human
uagagauacauacuauuucuccauaugaauuu

SEQ ID NO: 488406 - RNA, 32 nt, Human
uagagauacuaucaucauauacaccugaaaaa

SEQ ID NO: 488407 - RNA, 32 nt, Human
uagagauagagaaauaggggugguuauuuuuc

SEQ ID NO: 488408 - RNA, 32 nt, Human
uagagauaugaacaggguaugguaggauuggg

SEQ ID NO: 488409 - RNA, 32 nt, Human
uagagauaugacugucaguugcagugaguucu

SEQ ID NO: 488410 - RNA, 32 nt, Human
uagagaucaagccagucuuuugcaucccaccu

SEQ ID NO: 488411 - RNA, 32 nt, Human
uagagaucccugucgagcaugacuguguagaa

SEQ ID NO: 488412 - RNA, 32 nt, Human
uagagaugaaaaggggccacugaaaagugaau

SEQ ID NO: 488413 - RNA, 32 nt, Human
uagagaugaaguuucaccguguuggccaggau

SEQ ID NO: 488414 - RNA, 32 nt, Human
uagagaugagauccacauccuaaaaauaccau

SEQ ID NO: 488415 - RNA, 32 nt, Human
uagagaugaggcuuuaccucagacaagaagag

SEQ ID NO: 488416 - RNA, 32 nt, Human
uagagaugcagcauuuguaauauuucaucccc

SEQ ID NO: 488417 - RNA, 32 nt, Human
uagagauggagagaaaugguguggaaacauuu

SEQ ID NO: 488418 - RNA, 32 nt, Human
uagagauggaguuucaccauguuacccaggau

SEQ ID NO: 488419 - RNA, 32 nt, Human
uagagauggaguuucaccauguugcccaggcu

SEQ ID NO: 488420 - RNA, 32 nt, Human
uagagauggaguuucaccauguuggccaggau

SEQ ID NO: 488421 - RNA, 32 nt, Human
uagagauggaguuucaccauguuggccaggcu

SEQ ID NO: 488422 - RNA, 32 nt, Human
uagagauggaguuucacuauguuggccaggcu

SEQ ID NO: 488423 - RNA, 32 nt, Human
uagagauggaguuucacucuguuucccaggcu

SEQ ID NO: 488424 - RNA, 32 nt, Human
uagagauggaguuuuacuauguuggccaggcu

SEQ ID NO: 488425 - RNA, 32 nt, Human
uagagauggaguuuugccauguggucccaggc

SEQ ID NO: 488426 - RNA, 32 nt, Human
uagagauggauuucaccauguuggucaagcug

SEQ ID NO: 488427 - RNA, 32 nt, Human
uagagaugggggaggucucccuauguggccca

SEQ ID NO: 488428 - RNA, 32 nt, Human
uagagauggggucucacuaugucgcccagggu

SEQ ID NO: 488429 - RNA, 32 nt, Human
uagagaugggguuucaccauacuggcuaggcu

SEQ ID NO: 488430 - RNA, 30 nt, Human
uagagaugggguuucgcuauguuggccaag

SEQ ID NO: 488431 - RNA, 32 nt, Human
uagagaugggguuucgcuauguuggccaggcu

SEQ ID NO: 488432 - RNA, 32 nt, Human
uagagauggguuucaccauguuggccaauaug

SEQ ID NO: 488433 - RNA, 32 nt, Human
uagagauggguuucaccauguuggccaggcug

SEQ ID NO: 488434 - RNA, 32 nt, Human
uagagauggguuucaccauguuggccaugcuc

SEQ ID NO: 488435 - RNA, 32 nt, Human
uagagauggguuucuccauguuggucgggcug

SEQ ID NO: 488436 - RNA, 32 nt, Human
uagagaugugccagauuuagauuuucuuaccc

SEQ ID NO: 488437 - RNA, 23 nt, Human
uagagaugugugccaccaugccc

SEQ ID NO: 488438 - RNA, 32 nt, Human
uagagaugugugccaccaugcccggccaauua

SEQ ID NO: 488439 - RNA, 32 nt, Human
uagagauguguuuuuccauguugcccaagcug

SEQ ID NO: 488440 - RNA, 32 nt, Human
uagagauuaaugaagaggagggagguuucuuu

SEQ ID NO: 488441 - RNA, 32 nt, Human
uagagauuaccccugcagcuguggggcuggcc

SEQ ID NO: 488442 - RNA, 32 nt, Human
uagagauuauaaggcucucugagccaucuucu

SEQ ID NO: 488443 - RNA, 32 nt, Human
uagagcaaaggagggaccucaggccuuccguu

SEQ ID NO: 488444 - RNA, 32 nt, Human
uagagcaagagcuguguuccaggaaccagauc

SEQ ID NO: 488445 - RNA, 32 nt, Human
uagagcaagggacuuucccacuagcuuaguau

SEQ ID NO: 488446 - RNA, 32 nt, Human
uagagcacaguaccccuucacacggaggacgc

SEQ ID NO: 488447 - RNA, 32 nt, Human
uagagcacccaagcuucugccuucuggaauau

SEQ ID NO: 488448 - RNA, 32 nt, Human
uagagcacgaggagcagaaacuggagcucaag

SEQ ID NO: 488449 - RNA, 18 nt, Human
uagagcagcaucuuuggc

SEQ ID NO: 488450 - RNA, 32 nt, Human
uagagcaggccugagggccauaggcgaugaga

SEQ ID NO: 488451 - RNA, 32 nt, Human
uagagcaggcugccccauaaauggguaacaua

SEQ ID NO: 488452 - RNA, 32 nt, Human
uagagcagguaucuucacccccuuuucacucu

SEQ ID NO: 488453 - RNA, 32 nt, Human
uagagcagugccugacauagcagaagcucaca

SEQ ID NO: 488454 - RNA, 32 nt, Human
uagagcaguuccucugccucccuaagcuccac

SEQ ID NO: 488455 - RNA, 32 nt, Human
uagagcauccccaaucaauaguuucagaaguu

SEQ ID NO: 488456 - RNA, 32 nt, Human
uagagcauucugggguggggcuuggaagggcg

SEQ ID NO: 488457 - RNA, 32 nt, Human
uagagccagaggaggagggcaaaggggcagau

SEQ ID NO: 488458 - RNA, 32 nt, Human
uagagccagcaggccccacuguauuauguaua

SEQ ID NO: 488459 - RNA, 32 nt, Human
uagagccagccuggccuugcccagagcauaca

SEQ ID NO: 488460 - RNA, 32 nt, Human
uagagccagcugcuugcucacagccacauuuc

SEQ ID NO: 488461 - RNA, 23 nt, Human
uagagccaggggugcaagugcca

SEQ ID NO: 488462 - RNA, 32 nt, Human
uagagccaguccaggcuggagaucccuuucaa

SEQ ID NO: 488463 - RNA, 32 nt, Human
uagagccagugagagaacuaggaaugacacuc

SEQ ID NO: 488464 - RNA, 32 nt, Human
uagagccaucccucagucagcuggcagggaca

SEQ ID NO: 488465 - RNA, 32 nt, Human
uagagccaugaucucaaccacgaaaugggaac

SEQ ID NO: 488466 - RNA, 32 nt, Human
uagagcccaggaguucaaagcugcaacgaccu

SEQ ID NO: 488467 - RNA, 32 nt, Human
uagagccccaaggcguggaagccagacuugac

SEQ ID NO: 488468 - RNA, 32 nt, Human
uagagcccgggcgacagagcaagacuuggucu

SEQ ID NO: 488469 - RNA, 32 nt, Human
uagagccgacugucuccucugccuuuuguuuu

SEQ ID NO: 488470 - RNA, 32 nt, Human
uagagccgagacuggaggaucgauuggcaccu

SEQ ID NO: 488471 - RNA, 32 nt, Human
uagagccucuggaaggagcauggccccaucaa

SEQ ID NO: 488472 - RNA, 32 nt, Human
uagagccugcaaggagcucccgagucugagga

SEQ ID NO: 488473 - RNA, 32 nt, Human
uagagccugccuggagcguuucuagcaaguga

SEQ ID NO: 488474 - RNA, 32 nt, Human
uagagccuuuuaucugcagaacaucgauaugu

SEQ ID NO: 488475 - RNA, 32 nt, Human
uagagcgaaaccaagcagaaaucaaugccauc

SEQ ID NO: 488476 - RNA, 32 nt, Human
uagagcggacacaggcaccuggcaagcuuucc

SEQ ID NO: 488477 - RNA, 32 nt, Human
uagagcgucucagcaucgccagucuagacugu

SEQ ID NO: 488478 - RNA, 32 nt, Human
uagagcuaacagcaaaacaguauccugacauu

SEQ ID NO: 488479 - RNA, 32 nt, Human
uagagcuacacgcugcuucacaagcacacggc

SEQ ID NO: 488480 - RNA, 32 nt, Human
uagagcuacagauccagauacacacacuugug

SEQ ID NO: 488481 - RNA, 32 nt, Human
uagagcuagcuggugugguugcagugaccuug

SEQ ID NO: 488482 - RNA, 32 nt, Human
uagagcuaggguggggucuggucacacacagg

SEQ ID NO: 488483 - RNA, 32 nt, Human
uagagcucagcccacaggacugcuucaggccg

SEQ ID NO: 488484 - RNA, 32 nt, Human
uagagcucccgggagaaaaaggcgaagauccc

SEQ ID NO: 488485 - RNA, 32 nt, Human
uagagcucccuaaucccaugcaccacauuggc

SEQ ID NO: 488486 - RNA, 32 nt, Human
uagagcucgcuucauuuauuuauguaacucag

SEQ ID NO: 488487 - RNA, 32 nt, Human
uagagcucucagaagcaguccuuugagcuggu

SEQ ID NO: 488488 - RNA, 32 nt, Human
uagagcugaaucuaaccacucuccuuggccca

SEQ ID NO: 488489 - RNA, 32 nt, Human
uagagcugcuccacaucucccugcugcucauc

SEQ ID NO: 488490 - RNA, 32 nt, Human
uagagcugcucugcugcaaggauuuccugccu

SEQ ID NO: 488491 - RNA, 32 nt, Human
uagagcugggauugguggagggagcaggugcc

SEQ ID NO: 488492 - RNA, 32 nt, Human
uagagcugggcuggggcagggggcagcuccuc

SEQ ID NO: 488493 - RNA, 32 nt, Human
uagagcuggguuucaccauguuggccaggcug

SEQ ID NO: 488494 - RNA, 32 nt, Human
uagagcuguaugaggccgggugcaguggcuca

SEQ ID NO: 488495 - RNA, 29 nt, Human
uagagcugucugugccucucugggagaaa

SEQ ID NO: 488496 - RNA, 32 nt, Human
uagagcuugccucacccgcuguagccgccgag

SEQ ID NO: 488497 - RNA, 32 nt, Human
uagagcuuuucagugcaucccaccucccuguc

SEQ ID NO: 488498 - RNA, 32 nt, Human
uagaggaaagagaacccuuguacacuguuggu

SEQ ID NO: 488499 - RNA, 32 nt, Human
uagaggaaaggcuccaaacaccugcagguugg

SEQ ID NO: 488500 - RNA, 32 nt, Human
uagaggaacccccuacucuccaccuuugccua

SEQ ID NO: 488501 - RNA, 32 nt, Human
uagaggaacgugccaccaugacuggcuaauuu

SEQ ID NO: 488502 - RNA, 32 nt, Human
uagaggaacuucugaacuuggaaaggggaagu

SEQ ID NO: 488503 - RNA, 32 nt, Human
uagaggaacuuuauuuacaguacuuugauuug

SEQ ID NO: 488504 - RNA, 32 nt, Human
uagaggaagacgagacaggacgaggcagaaaa

SEQ ID NO: 488505 - RNA, 32 nt, Human
uagaggaagggagggcgcagguuggagucagg

SEQ ID NO: 488506 - RNA, 32 nt, Human
uagaggaaguguaccacagcagccuggcuuca

SEQ ID NO: 488507 - RNA, 32 nt, Human
uagaggaaguuucugccaccuccccuccugag

SEQ ID NO: 488508 - RNA, 32 nt, Human
uagaggaaucuuauucucaucucccauauguu

SEQ ID NO: 488509 - RNA, 32 nt, Human
uagaggaauuaagacaaagacacagaaauaga

SEQ ID NO: 488510 - RNA, 32 nt, Human
uagaggaauuaagacaaagacacagaaauaua

SEQ ID NO: 488511 - RNA, 32 nt, Human
uagaggacacagcaagugaguccuccccacuc

SEQ ID NO: 488512 - RNA, 32 nt, Human
uagaggacaggcaagccagcucugggggaguc

SEQ ID NO: 488513 - RNA, 32 nt, Human
uagaggacauggcugucuucuaaaaagccacg

SEQ ID NO: 488514 - RNA, 32 nt, Human
uagaggacccacaaaucaugauauugaacaca

SEQ ID NO: 488515 - RNA, 32 nt, Human
uagaggacuauacacuuucuuuugaacuuuua

SEQ ID NO: 488516 - RNA, 32 nt, Human
uagaggacuauaguggaagugaaagcauucug

SEQ ID NO: 488517 - RNA, 32 nt, Human
uagaggacucacugguuucuuuucauaagcaa

SEQ ID NO: 488518 - RNA, 32 nt, Human
uagaggacuucuuaugcucaagcacaaagaac

SEQ ID NO: 488519 - RNA, 32 nt, Human
uagaggagaaacuggaacucucgagcguugcu

SEQ ID NO: 488520 - RNA, 32 nt, Human
uagaggagacggauucagaagggcuacagacc

SEQ ID NO: 488521 - RNA, 32 nt, Human
uagaggagagaggaggaggaggaggcugagag

SEQ ID NO: 488522 - RNA, 32 nt, Human
uagaggagagaggucuugaggggugggagcag

SEQ ID NO: 488523 - RNA, 32 nt, Human
uagaggagaggcgacagucgcgagccacacuu

SEQ ID NO: 488524 - RNA, 32 nt, Human
uagaggagcccaagccccagcuccauccucca

SEQ ID NO: 488525 - RNA, 32 nt, Human
uagaggagcugccggugccuccucagaacauc

SEQ ID NO: 488526 - RNA, 32 nt, Human
uagaggaggaagagggagucuggcaugaguug

SEQ ID NO: 488527 - RNA, 32 nt, Human
uagaggaggaggaggaggaggaagagguggag

SEQ ID NO: 488528 - RNA, 32 nt, Human
uagaggaucauaggucuggacacuccauccuu

SEQ ID NO: 488529 - RNA, 32 nt, Human
uagaggaugacgucugaccucuaccaucgcca

SEQ ID NO: 488530 - RNA, 32 nt, Human
uagaggaugcaacacccccgcuuguggagcug

SEQ ID NO: 488531 - RNA, 31 nt, Human
uagaggaugcuuuucguuucacugggauccg

SEQ ID NO: 488532 - RNA, 32 nt, Human
uagaggauguacugggacuuggcauuuaggau

SEQ ID NO: 488533 - RNA, 32 nt, Human
uagaggcaaacagggucucacucuguugccua

SEQ ID NO: 488534 - RNA, 32 nt, Human
uagaggcaagccaggccagggagcugggagcg

SEQ ID NO: 488535 - RNA, 20 nt, Human
uagaggcacgcaccaccgcg

SEQ ID NO: 488536 - RNA, 32 nt, Human
uagaggcagaaaaaggaggauaaagauaacag

SEQ ID NO: 488537 - RNA, 32 nt, Human
uagaggcagaaaguaggaaccagauagagaug

SEQ ID NO: 488538 - RNA, 32 nt, Human
uagaggcagcagcguguguaaagagcuugggg

SEQ ID NO: 488539 - RNA, 32 nt, Human
uagaggcagcugaacauauagggcacauuuuc

SEQ ID NO: 488540 - RNA, 32 nt, Human
uagaggcaggauuccuucccacccucaaagca

SEQ ID NO: 488541 - RNA, 32 nt, Human
uagaggcaggcagaucacgaggucaagagaua

SEQ ID NO: 488542 - RNA, 32 nt, Human
uagaggcagguuuucaccauguuggcuaggcu

SEQ ID NO: 488543 - RNA, 32 nt, Human
uagaggcaugagccaccgugcccagccucaaa

SEQ ID NO: 488544 - RNA, 32 nt, Human
uagaggcaugagccacugcgcccggccccugg

SEQ ID NO: 488545 - RNA, 32 nt, Human
uagaggcaugagccacuguccccggccuccug

SEQ ID NO: 488546 - RNA, 32 nt, Human
uagaggcauguaucaccaugcccagcuaauuu

SEQ ID NO: 488547 - RNA, 32 nt, Human
uagaggcauuaaguauugccucagucuuaaua

SEQ ID NO: 488548 - RNA, 32 nt, Human
uagaggccacacucaguuaauaauggggcaca

SEQ ID NO: 488549 - RNA, 21 nt, Human
uagaggccacggucccgggga

SEQ ID NO: 488550 - RNA, 32 nt, Human
uagaggccaggauuuugagaccagcuucggca

SEQ ID NO: 488551 - RNA, 21 nt, Human
uagaggccaucgcucaggaga

SEQ ID NO: 488552 - RNA, 32 nt, Human
uagaggcccagccucuguggcccugugaccug

SEQ ID NO: 488553 - RNA, 32 nt, Human
uagaggcccagccucuguggcgcugugaucug

SEQ ID NO: 488554 - RNA, 32 nt, Human
uagaggcccagccucuguggcgcuguuaccag

SEQ ID NO: 488555 - RNA, 32 nt, Human
uagaggcccauggaggaaaaggaagauaagca

SEQ ID NO: 488556 - RNA, 32 nt, Human
uagaggcccgagcgccuggugcugagugcacc

SEQ ID NO: 488557 - RNA, 32 nt, Human
uagaggcggaguuucgccauguuggucaggcu

SEQ ID NO: 488558 - RNA, 32 nt, Human
uagaggcgugagccacugcaccugaccuaaga

SEQ ID NO: 488559 - RNA, 32 nt, Human
uagaggcgugagcccccaugcuuggccuuacc

SEQ ID NO: 488560 - RNA, 32 nt, Human
uagaggcgugugccaccaugccuggcuaauuu

SEQ ID NO: 488561 - RNA, 32 nt, Human
uagaggcucacaugggaguuguccucacccuu

SEQ ID NO: 488562 - RNA, 32 nt, Human
uagaggcugacggcgcaagaccagcuuuagcc

SEQ ID NO: 488563 - RNA, 32 nt, Human
uagaggcugacuuggaaaccggugggugcaau

SEQ ID NO: 488564 - RNA, 32 nt, Human
uagaggcugagagaagaaggaagaaucagccc

SEQ ID NO: 488565 - RNA, 32 nt, Human
uagaggcugccucugugugugguuuaaguaaa

SEQ ID NO: 488566 - RNA, 32 nt, Human
uagaggcugggaggagccccuggacaugccug

SEQ ID NO: 488567 - RNA, 24 nt, Human
uagaggcuuacucagccuguggga

SEQ ID NO: 488568 - RNA, 32 nt, Human
uagaggcuucugacuccugggacuuuggagcu

SEQ ID NO: 488569 - RNA, 32 nt, Human
uagaggcuugacuugcagugaaacccguccua

SEQ ID NO: 488570 - RNA, 32 nt, Human
uagaggcuugagccaccaggcccggcuggaau

SEQ ID NO: 488571 - RNA, 32 nt, Human
uagaggcuugagccacugcaccuggccucaug

SEQ ID NO: 488572 - RNA, 32 nt, Human
uagagggaguggagcgagagccuacgacuaga

SEQ ID NO: 488573 - RNA, 32 nt, Human
uagagggcagggacuguggcgaggccgccgcc

SEQ ID NO: 488574 - RNA, 32 nt, Human
uagagggcaguggcaugaucucggcucacuac

SEQ ID NO: 488575 - RNA, 32 nt, Human
uagagggcauuucugucgcuguggaaguuguu

SEQ ID NO: 488576 - RNA, 32 nt, Human
uagagggcuacccaagcagaaaccccacauuu

SEQ ID NO: 488577 - RNA, 32 nt, Human
uagagggcuccugggagcgcucgcuucuccgu

SEQ ID NO: 488578 - RNA, 32 nt, Human
uagagggcugggcccuaugacuguggucuggg

SEQ ID NO: 488579 - RNA, 32 nt, Human
uagagggcuuggacacagccccggaugugagu

SEQ ID NO: 488580 - RNA, 32 nt, Human
uagaggggaggcaccuaaaggaaaagaggaaa

SEQ ID NO: 488581 - RNA, 32 nt, Human
uagaggggagguugggguuggagcagcggcga

SEQ ID NO: 488582 - RNA, 32 nt, Human
uagagggggauagaauuuuuauuucauauccu

SEQ ID NO: 488583 - RNA, 32 nt, Human
uagagggucaugcagacaaggaagaaaacuua

SEQ ID NO: 488584 - RNA, 32 nt, Human
uagaggguggcaaaaugccuuugcccaguguc

SEQ ID NO: 488585 - RNA, 32 nt, Human
uagagggugugaggagggagaggaucaagaaa

SEQ ID NO: 488586 - RNA, 32 nt, Human
uagaggguguugguaccacugccccuggccug

SEQ ID NO: 488587 - RNA, 32 nt, Human
uagaggguuauccuuuuguugugaaaggaagg

SEQ ID NO: 488588 - RNA, 32 nt, Human
uagagguagaggagcuacauuggccgcguccc

SEQ ID NO: 488589 - RNA, 32 nt, Human
uagagguagcuugccaucucucaggagcccuc

SEQ ID NO: 488590 - RNA, 32 nt, Human
uagaggucagaagaaaggagcaaguuuugcga

SEQ ID NO: 488591 - RNA, 32 nt, Human
uagaggucguuagcugggugugugggucccaa

SEQ ID NO: 488592 - RNA, 32 nt, Human
uagaggugaaaccagauguuaugagaguacuu

SEQ ID NO: 488593 - RNA, 32 nt, Human
uagaggugaugaagacacagaacaggcucagu

SEQ ID NO: 488594 - RNA, 31 nt, Human
uagagguggagacaggaaaaagacuaagcca

SEQ ID NO: 488595 - RNA, 32 nt, Human
uagagguggaggaggcaguccugggaauggga

SEQ ID NO: 488596 - RNA, 32 nt, Human
uagagguggcuuuucugcuuaacagucagccc

SEQ ID NO: 488597 - RNA, 32 nt, Human
uagaggugguagugaguaaugugccccugaaa

SEQ ID NO: 488598 - RNA, 32 nt, Human
uagaggugugagccaccacgcccggccuauuu

SEQ ID NO: 488599 - RNA, 32 nt, Human
uagaggugugagccacugugcccagcccauca

SEQ ID NO: 488600 - RNA, 32 nt, Human
uagagguuauuccaggagaguugaugaccuuc

SEQ ID NO: 488601 - RNA, 32 nt, Human
uagaguagcaagaguuuaugaugacagcccac

SEQ ID NO: 488602 - RNA, 32 nt, Human
uagaguaggguuuggccauguuggccaggcug

SEQ ID NO: 488603 - RNA, 31 nt, Human
uagaguagugagagaaggaaacaucugugga

SEQ ID NO: 488604 - RNA, 32 nt, Human
uagaguauggaggcugagccaggccuuggguu

SEQ ID NO: 488605 - RNA, 32 nt, Human
uagaguauucgguacuggacaaaaagacugga

SEQ ID NO: 488606 - RNA, 32 nt, Human
uagagucaaagucaggcucaaaagaagaauua

SEQ ID NO: 488607 - RNA, 32 nt, Human
uagagucacauguccaguagcauuucuaauuu

SEQ ID NO: 488608 - RNA, 32 nt, Human
uagagucacugggagucacacagcuccugugu

SEQ ID NO: 488609 - RNA, 32 nt, Human
uagagucagacuccuagacucacuuguucuca

SEQ ID NO: 488610 - RNA, 32 nt, Human
uagagucagccuucccccucccagggccaggg

SEQ ID NO: 488611 - RNA, 32 nt, Human
uagagucaggacagaaaagcuuccauaauuga

SEQ ID NO: 488612 - RNA, 32 nt, Human
uagagucaggcagagguuaaguguguugcacc

SEQ ID NO: 488613 - RNA, 32 nt, Human
uagagucaggcugcaguggaaucucccuagga

SEQ ID NO: 488614 - RNA, 32 nt, Human
uagagucaugguaguggguaaaagccaaagag

SEQ ID NO: 488615 - RNA, 32 nt, Human
uagaguccagccuggccaacauggugaaaccc

SEQ ID NO: 488616 - RNA, 32 nt, Human
uagagucccuccaaccuuauagauuuuuggcu

SEQ ID NO: 488617 - RNA, 32 nt, Human
uagaguccuggauacgugcaccaggagaguug

SEQ ID NO: 488618 - RNA, 32 nt, Human
uagagucgagcggggcaagggagccaguggcc

SEQ ID NO: 488619 - RNA, 32 nt, Human
uagagucgccugaaccugggaggcagagguug

SEQ ID NO: 488620 - RNA, 32 nt, Human
uagagucgguuucuggagcugccuuccuggga

SEQ ID NO: 488621 - RNA, 32 nt, Human
uagagucuaacuuugguucauuucugcacagg

SEQ ID NO: 488622 - RNA, 32 nt, Human
uagagucucaacucacucuagccugggugaca

SEQ ID NO: 488623 - RNA, 31 nt, Human
uagagucucaauaaaugucacuugguugguu

SEQ ID NO: 488624 - RNA, 32 nt, Human
uagagucucucccccuccccuuucucuuucuu

SEQ ID NO: 488625 - RNA, 32 nt, Human
uagagucucucuuccuccucagcgaaccacua

SEQ ID NO: 488626 - RNA, 32 nt, Human
uagagucucuggaagguuuuaagcccauuuuc

SEQ ID NO: 488627 - RNA, 32 nt, Human
uagagucugagccucaggcucuccugcccugg

SEQ ID NO: 488628 - RNA, 32 nt, Human
uagagucugaguuugugagauuauuuggggga

SEQ ID NO: 488629 - RNA, 32 nt, Human
uagagucuggagguugcaagggagacagccaa

SEQ ID NO: 488630 - RNA, 32 nt, Human
uagagugaaagaaaaagaaagagagcacgaac

SEQ ID NO: 488631 - RNA, 32 nt, Human
uagagugaagaaugcuaauguaaagcaaauag

SEQ ID NO: 488632 - RNA, 32 nt, Human
uagagugaagacagcugcuguuuuaauauauu

SEQ ID NO: 488633 - RNA, 32 nt, Human
uagagugaaucacaccuguaaucccagcacuu

SEQ ID NO: 488634 - RNA, 32 nt, Human
uagagugaauggaacaaagauuuguuagggga

SEQ ID NO: 488635 - RNA, 32 nt, Human
uagagugaccuuuuaaucagagcccagggaag

SEQ ID NO: 488636 - RNA, 32 nt, Human
uagagugacucacaccuguaaucccagcacuu

SEQ ID NO: 488637 - RNA, 32 nt, Human
uagagugacucgcaccuguaaucccagcacuu

SEQ ID NO: 488638 - RNA, 32 nt, Human
uagagugacuuguacaugagcuugcuugcaga

SEQ ID NO: 488639 - RNA, 20 nt, Human
uagagugagacccugucuca

SEQ ID NO: 488640 - RNA, 20 nt, Human
uagagugagacuacgucuca

SEQ ID NO: 488641 - RNA, 32 nt, Human
uagagugaggucuauaggaccaaugucucggg

SEQ ID NO: 488642 - RNA, 32 nt, Human
uagagugagugugcucuguugcugugaugcug

SEQ ID NO: 488643 - RNA, 32 nt, Human
uagagugaguucccaccugcccuaccuaaacu

SEQ ID NO: 488644 - RNA, 32 nt, Human
uagagugcaauggcaugaucuuggcucacugc

SEQ ID NO: 488645 - RNA, 32 nt, Human
uagagugcaguagcgugaucauagcuuacugc

SEQ ID NO: 488646 - RNA, 32 nt, Human
uagagugcaguggcacgaucucagcucacugc

SEQ ID NO: 488647 - RNA, 32 nt, Human
uagagugcaguggcacgaucuuggcucacugc

SEQ ID NO: 488648 - RNA, 32 nt, Human
uagagugcaguggcacgaucuuggcuuacugc

SEQ ID NO: 488649 - RNA, 32 nt, Human
uagagugcaguggcaugaucauagguuauugc

SEQ ID NO: 488650 - RNA, 32 nt, Human
uagagugcaguggcaugaucuaugcucacugu

SEQ ID NO: 488651 - RNA, 32 nt, Human
uagagugcaguggcaugaucucagcucacugc

SEQ ID NO: 488652 - RNA, 32 nt, Human
uagagugcaguggcaugaucucagcucauugc

SEQ ID NO: 488653 - RNA, 32 nt, Human
uagagugcaguggcaugaucucggcucacugc

SEQ ID NO: 488654 - RNA, 32 nt, Human
uagagugcaguggcaugaucucggcuuacugc

SEQ ID NO: 488655 - RNA, 32 nt, Human
uagagugcaguggcaugaucuuggcucacugc

SEQ ID NO: 488656 - RNA, 32 nt, Human
uagagugcaguggcgugaucucggcucacugc

SEQ ID NO: 488657 - RNA, 32 nt, Human
uagagugcaguggcgugaucucugcucauugc

SEQ ID NO: 488658 - RNA, 32 nt, Human
uagagugcaguggcuugaucauagcucacugc

SEQ ID NO: 488659 - RNA, 32 nt, Human
uagagugcagugguaugaucucagcuuacugc

SEQ ID NO: 488660 - RNA, 32 nt, Human
uagagugcaguggugugaucacagcucacugc

SEQ ID NO: 488661 - RNA, 32 nt, Human
uagagugcccagcagagguuugcugacaggug

SEQ ID NO: 488662 - RNA, 32 nt, Human
uagagugccuuggcucccuccugucguccugg

SEQ ID NO: 488663 - RNA, 32 nt, Human
uagagugcuggcuccugggccucccagcccuc

SEQ ID NO: 488664 - RNA, 32 nt, Human
uagagugcuguugggccagggugggaggaugg

SEQ ID NO: 488665 - RNA, 32 nt, Human
uagaguggcucaaaguacuucaggauuaggaa

SEQ ID NO: 488666 - RNA, 20 nt, Human
uagagugggaagaagaggcu

SEQ ID NO: 488667 - RNA, 22 nt, Human
uagagugggaagagggggcugg

SEQ ID NO: 488668 - RNA, 24 nt, Human
uagagugggaaggacuaaagacug

SEQ ID NO: 488669 - RNA, 21 nt, Human
uagagugggacccagcccuca

SEQ ID NO: 488670 - RNA, 32 nt, Human
uagagugggacccagcccucaccucccccaga

SEQ ID NO: 488671 - RNA, 32 nt, Human
uagaguggucucagaagugccuucaggacaau

SEQ ID NO: 488672 - RNA, 32 nt, Human
uagaguggucucaucuccuuccuuaaucuucc

SEQ ID NO: 488673 - RNA, 32 nt, Human
uagaguguacagcuucuucccacagcaaacag

SEQ ID NO: 488674 - RNA, 32 nt, Human
uagaguguaguggcaugaucucagcucacugc

SEQ ID NO: 488675 - RNA, 31 nt, Human
uagaguguauuuuucccuugcuuuugggggu

SEQ ID NO: 488676 - RNA, 32 nt, Human
uagagugugagccagccuguguuccugaaugc

SEQ ID NO: 488677 - RNA, 32 nt, Human
uagaguguggaaagucugagaauauuagcuuu

SEQ ID NO: 488678 - RNA, 32 nt, Human
uagagugugguguuuugaauuugcucuuuguc

SEQ ID NO: 488679 - RNA, 32 nt, Human
uagaguuaagagaaccuuaaaagauuaccgcu

SEQ ID NO: 488680 - RNA, 32 nt, Human
uagaguuaagugaagaguuaacacugugacuu

SEQ ID NO: 488681 - RNA, 32 nt, Human
uagaguucaucccagccccaauuuucuggggc

SEQ ID NO: 488682 - RNA, 32 nt, Human
uagaguucuccagagccccaaggagcgggagg

SEQ ID NO: 488683 - RNA, 32 nt, Human
uagaguucugggacuguggucugcccaccccc

SEQ ID NO: 488684 - RNA, 32 nt, Human
uagaguugcacccuagcaaccuagccagaaaa

SEQ ID NO: 488685 - RNA, 32 nt, Human
uagaguuggaaggucccagaccuggaacaaca

SEQ ID NO: 488686 - RNA, 32 nt, Human
uagaguugucuaccaagcaaaauguucgcuca

SEQ ID NO: 488687 - RNA, 32 nt, Human
uagaguugugagccaccgcugccagcccagag

SEQ ID NO: 488688 - RNA, 32 nt, Human
uagaguugugguccaaagaagcuccuaaagcu

SEQ ID NO: 488689 - RNA, 32 nt, Human
uagaguuugaaggaggugagggaugugaauug

SEQ ID NO: 488690 - RNA, 32 nt, Human
uagauaaagaagaguccuauggcuuauuuaau

SEQ ID NO: 488691 - RNA, 32 nt, Human
uagauaaaguaagccuagguguugucagcagg

SEQ ID NO: 488692 - RNA, 32 nt, Human
uagauaaauauguauaucaauauuuuaaauuc

SEQ ID NO: 488693 - RNA, 32 nt, Human
uagauaaaugaauucaaccaguugaucaaaug

SEQ ID NO: 488694 - RNA, 32 nt, Human
uagauaacagauuaguaguuacaugguaauua

SEQ ID NO: 488695 - RNA, 32 nt, Human
uagauaacuccaacuucuggcuguagagcacc

SEQ ID NO: 488696 - RNA, 32 nt, Human
uagauaagaguuucagguuaaauacuggaaca

SEQ ID NO: 488697 - RNA, 32 nt, Human
uagauaagcccagcagccccagaagauggucu

SEQ ID NO: 488698 - RNA, 32 nt, Human
uagauaaucacauaauagugggagauuucagu

SEQ ID NO: 488699 - RNA, 32 nt, Human
uagauaaucacauuuucugggcccuguaaaau

SEQ ID NO: 488700 - RNA, 32 nt, Human
uagauaauccugaauugaggucaugaggaggc

SEQ ID NO: 488701 - RNA, 32 nt, Human
uagauaaugcucgggcuuguuuugccauuuuu

SEQ ID NO: 488702 - RNA, 32 nt, Human
uagauaauuucuaacagagaggccccagcaau

SEQ ID NO: 488703 - RNA, 32 nt, Human
uagauacaacagcaagcccaagauuccgaaga

SEQ ID NO: 488704 - RNA, 32 nt, Human
uagauacaacagccacagcuccccaucaccua

SEQ ID NO: 488705 - RNA, 32 nt, Human
uagauacagaagccacacagaacugcauaaag

SEQ ID NO: 488706 - RNA, 32 nt, Human
uagauacauacgaauuguuaaaauggaaugca

SEQ ID NO: 488707 - RNA, 32 nt, Human
uagauacauagauagacgauucagagauagau

SEQ ID NO: 488708 - RNA, 32 nt, Human
uagauacaucacauuaaagcuuuucagaaucu

SEQ ID NO: 488709 - RNA, 32 nt, Human
uagauaccaaauauuuguuuguguuaccuuga

SEQ ID NO: 488710 - RNA, 32 nt, Human
uagauacuaaaucgucccuucuccaguccuga

SEQ ID NO: 488711 - RNA, 32 nt, Human
uagauacuaguugucugaauugaguuacuuug

SEQ ID NO: 488712 - RNA, 32 nt, Human
uagauacuugcaugaucuacuguagucaacgu

SEQ ID NO: 488713 - RNA, 31 nt, Human
uagauagaacaaucuuucuauauuuaauuuu

SEQ ID NO: 488714 - RNA, 32 nt, Human
uagauagccagucaaccagcaguauuagugcu

SEQ ID NO: 488715 - RNA, 32 nt, Human
uagauagcgccacugcacugcacgccagccua

SEQ ID NO: 488716 - RNA, 32 nt, Human
uagauagggaaacugaggcuuugggaggacuc

SEQ ID NO: 488717 - RNA, 32 nt, Human
uagauagggcugggcaaggaaaaagaaaauaa

SEQ ID NO: 488718 - RNA, 32 nt, Human
uagauaguagccacugccugaagcuuugcauc

SEQ ID NO: 488719 - RNA, 32 nt, Human
uagauaguggaugaagaaagaaggacgaggaa

SEQ ID NO: 488720 - RNA, 32 nt, Human
uagauauagaaucaugucaucuguaaacagag

SEQ ID NO: 488721 - RNA, 32 nt, Human
uagauaucaucugagagguaguuaauuuggca

SEQ ID NO: 488722 - RNA, 32 nt, Human
uagauaucuagaggugaaauuacugagucaag

SEQ ID NO: 488723 - RNA, 32 nt, Human
uagauaucugggaccuuucucaggaucugugu

SEQ ID NO: 488724 - RNA, 32 nt, Human
uagauaucuuuuuauugaugugcaaaaauuuu

SEQ ID NO: 488725 - RNA, 32 nt, Human
uagauaugauguuggguccacccuccacgggc

SEQ ID NO: 488726 - RNA, 30 nt, Human
uagauaugcugaaaaacaaagcaaagagau

SEQ ID NO: 488727 - RNA, 32 nt, Human
uagauauggaaaauagugaugaaccagaguuu

SEQ ID NO: 488728 - RNA, 32 nt, Human
uagauauggaauugcauuuucaagccaagcug

SEQ ID NO: 488729 - RNA, 32 nt, Human
uagauauggaguuucaccacguuggccaagac

SEQ ID NO: 488730 - RNA, 32 nt, Human
uagauauggcuuuuagaguuacauuaugcuug

SEQ ID NO: 488731 - RNA, 32 nt, Human
uagauaugucugucuuuuuggguccucagaga

SEQ ID NO: 488732 - RNA, 32 nt, Human
uagauauuaaaauguucagcaggcacaguucu

SEQ ID NO: 488733 - RNA, 32 nt, Human
uagauauucuuucuuauccuggacugguucuc

SEQ ID NO: 488734 - RNA, 32 nt, Human
uagauauuggguuccuggauuaagaugacuuc

SEQ ID NO: 488735 - RNA, 23 nt, Human
uagaucaagaucagcuucacuca

SEQ ID NO: 488736 - RNA, 32 nt, Human
uagaucacaggcugagggacagagcaaagacc

SEQ ID NO: 488737 - RNA, 32 nt, Human
uagaucacccuuguaauguguuacggguccau

SEQ ID NO: 488738 - RNA, 19 nt, Human
uagaucacuugaggucagg

SEQ ID NO: 488739 - RNA, 32 nt, Human
uagaucacuuuggugaaugcuaguuucaaauu

SEQ ID NO: 488740 - RNA, 32 nt, Human
uagaucagaugaauuaucaucggcauuaacgu

SEQ ID NO: 488741 - RNA, 22 nt, Human
uagaucagccaucagccuguca

SEQ ID NO: 488742 - RNA, 32 nt, Human
uagaucagcuaacaucugcuacuccaguaaca

SEQ ID NO: 488743 - RNA, 32 nt, Human
uagaucagcugguuaagaguccagccuggguu

SEQ ID NO: 488744 - RNA, 32 nt, Human
uagaucaggagaaacucgggcacucccuaagu

SEQ ID NO: 488745 - RNA, 32 nt, Human
uagaucaguacuugauuucauuuucauuuucc

SEQ ID NO: 488746 - RNA, 31 nt, Human
uagaucagugagaggagauugcaguucuaau

SEQ ID NO: 488747 - RNA, 32 nt, Human
uagaucauaugacugccuuucuguaaaauugg

SEQ ID NO: 488748 - RNA, 32 nt, Human
uagaucaucucuuucauaaugauaugauguua

SEQ ID NO: 488749 - RNA, 32 nt, Human
uagaucaugccaccaugccacugcacuccagc

SEQ ID NO: 488750 - RNA, 32 nt, Human
uagaucaugccacugcacuccagccuauguga

SEQ ID NO: 488751 - RNA, 32 nt, Human
uagaucaugccuguaaucccaguacuuuggga

SEQ ID NO: 488752 - RNA, 32 nt, Human
uagaucauggcaaggccugacaacagcugagc

SEQ ID NO: 488753 - RNA, 32 nt, Human
uagaucauggcuguucuucccaccucaucccu

SEQ ID NO: 488754 - RNA, 19 nt, Human
uagaucauuccaguucaua

SEQ ID NO: 488755 - RNA, 32 nt, Human
uagauccaaaugacauggcacaugugugccca

SEQ ID NO: 488756 - RNA, 32 nt, Human
uagauccacuggcagcuugcacucucagccug

SEQ ID NO: 488757 - RNA, 32 nt, Human
uagauccagcuacucgggaggcugaggcaggg

SEQ ID NO: 488758 - RNA, 32 nt, Human
uagaucccaaagauucuuggugaauuuugaag

SEQ ID NO: 488759 - RNA, 32 nt, Human
uagaucccacugagcccagcugacugaaaaca

SEQ ID NO: 488760 - RNA, 32 nt, Human
uagauccuaucauuccuuaaacauaauacccu

SEQ ID NO: 488761 - RNA, 32 nt, Human
uagauccuccaauguaaauauaaacaugccau

SEQ ID NO: 488762 - RNA, 32 nt, Human
uagauccugaaccuguccuugcuucucaguuu

SEQ ID NO: 488763 - RNA, 32 nt, Human
uagauccugggucuccccuuaaugucacccuu

SEQ ID NO: 488764 - RNA, 20 nt, Human
uagauccuguccaccuccac

SEQ ID NO: 488765 - RNA, 32 nt, Human
uagauccuguuuugggguuugcacauggaucg

SEQ ID NO: 488766 - RNA, 32 nt, Human
uagaucgcgccacugcacuccagccugggcga

SEQ ID NO: 488767 - RNA, 32 nt, Human
uagaucgcgucacugcacuccagccugggaga

SEQ ID NO: 488768 - RNA, 32 nt, Human
uagaucgcgucacugcacuccagccugggcga

SEQ ID NO: 488769 - RNA, 32 nt, Human
uagaucgguggcaggggagcagcguuugaucc

SEQ ID NO: 488770 - RNA, 32 nt, Human
uagaucgugccacugcauuccagccugagcga

SEQ ID NO: 488771 - RNA, 32 nt, Human
uagaucgugccauugcacuccagucugggaga

SEQ ID NO: 488772 - RNA, 32 nt, Human
uagaucguggggacagagaugggugauggaac

SEQ ID NO: 488773 - RNA, 32 nt, Human
uagaucuauaaggucacaugcuuuuaaaauag

SEQ ID NO: 488774 - RNA, 32 nt, Human
uagaucucugcacuuggcauggaaaauuuuga

SEQ ID NO: 488775 - RNA, 32 nt, Human
uagaucucuguuuuagaccaguagaccuaacu

SEQ ID NO: 488776 - RNA, 32 nt, Human
uagaucugaagcauaauuuaagaaaaacauca

SEQ ID NO: 488777 - RNA, 32 nt, Human
uagaucugggaggccaggcuggcaugauuccu

SEQ ID NO: 488778 - RNA, 32 nt, Human
uagaucugggcagcauuugacauggcugauca

SEQ ID NO: 488779 - RNA, 32 nt, Human
uagaucuggugcuucuucugugcugugguuua

SEQ ID NO: 488780 - RNA, 32 nt, Human
uagaucuguuccaacaguucuguguaaaccaa

SEQ ID NO: 488781 - RNA, 19 nt, Human
uagaucuugaucauucgca

SEQ ID NO: 488782 - RNA, 32 nt, Human
uagaucuugccacugcucuccagccugagcga

SEQ ID NO: 488783 - RNA, 32 nt, Human
uagaucuuucauuccaccucaggaaugagguu

SEQ ID NO: 488784 - RNA, 32 nt, Human
uagaucuuuccacaugcucugccauuaauuag

SEQ ID NO: 488785 - RNA, 32 nt, Human
uagaugaacugcugcccagugaacacuaugua

SEQ ID NO: 488786 - RNA, 32 nt, Human
uagaugacguuuccuauguaaguagguagccc

SEQ ID NO: 488787 - RNA, 32 nt, Human
uagaugacucucaguccccauggcacccugcu

SEQ ID NO: 488788 - RNA, 32 nt, Human
uagaugagcccagcccuguucugggugcagcu

SEQ ID NO: 488789 - RNA, 31 nt, Human
uagaugaggaaacugagucucagaagggcuu

SEQ ID NO: 488790 - RNA, 32 nt, Human
uagaugaggccuucccauggcuacagugugac

SEQ ID NO: 488791 - RNA, 32 nt, Human
uagaugagugaaaaggaggaaaggcgaaguag

SEQ ID NO: 488792 - RNA, 32 nt, Human
uagaugaucucucagacaggcugggacucaga

SEQ ID NO: 488793 - RNA, 32 nt, Human
uagaugaucugugugcuucuagcacaucagaa

SEQ ID NO: 488794 - RNA, 32 nt, Human
uagaugaugagacuggaggaagacuuccauug

SEQ ID NO: 488795 - RNA, 32 nt, Human
uagaugauugcugcuuuccuuugccaaacuug

SEQ ID NO: 488796 - RNA, 24 nt, Human
uagaugcaaagcauuauaaugacu

SEQ ID NO: 488797 - RNA, 32 nt, Human
uagaugcacagcacuuccuuguccucaugaaa

SEQ ID NO: 488798 - RNA, 32 nt, Human
uagaugcacuaagaauucacugcagcagcagg

SEQ ID NO: 488799 - RNA, 32 nt, Human
uagaugcacuuucuuuuuccaccagcacaucc

SEQ ID NO: 488800 - RNA, 32 nt, Human
uagaugcauuauacuccauaccugcuuuuccc

SEQ ID NO: 488801 - RNA, 32 nt, Human
uagaugcccagcugcacaacuugauugccuua

SEQ ID NO: 488802 - RNA, 32 nt, Human
uagaugcccagcuguggcuggguacaguguuc

SEQ ID NO: 488803 - RNA, 32 nt, Human
uagaugcccugguuugucccucuugucuccug

SEQ ID NO: 488804 - RNA, 32 nt, Human
uagaugccucucccccuccagcccuagccgag

SEQ ID NO: 488805 - RNA, 32 nt, Human
uagaugccucucccccuccaguccuagcccag

SEQ ID NO: 488806 - RNA, 32 nt, Human
uagaugccuuccaggcugcagucagugcagau

SEQ ID NO: 488807 - RNA, 32 nt, Human
uagaugccuucccacccaccaggcauugcccc

SEQ ID NO: 488808 - RNA, 28 nt, Human
uagaugcucaauaaacacuuguugaaug

SEQ ID NO: 488809 - RNA, 32 nt, Human
uagaugcugggaaguccaagaucagggugccg

SEQ ID NO: 488810 - RNA, 32 nt, Human
uagauggaauuucacucuuguugcccaggcua

SEQ ID NO: 488811 - RNA, 32 nt, Human
uagauggaguuucacucuuguugcccaggcca

SEQ ID NO: 488812 - RNA, 23 nt, Human
uagauggaguuucacuuuuguug

SEQ ID NO: 488813 - RNA, 32 nt, Human
uagauggaguuucacuuuuguugcccaggcug

SEQ ID NO: 488814 - RNA, 32 nt, Human
uagauggaguuuuacucuuguugcccaggcug

SEQ ID NO: 488815 - RNA, 32 nt, Human
uagauggccuaaaagaaucauggggaaauguu

SEQ ID NO: 488816 - RNA, 28 nt, Human
uagauggcggcugcagaggcugugcauc

SEQ ID NO: 488817 - RNA, 32 nt, Human
uagaugggaauuugagggagaauacagagaua

SEQ ID NO: 488818 - RNA, 32 nt, Human
uagaugggaccuuccacaaauaugucuucacu

SEQ ID NO: 488819 - RNA, 32 nt, Human
uagaugggacgugauggauggaauugaaguua

SEQ ID NO: 488820 - RNA, 27 nt, Human
uagaugggauuucaauucaccauguug

SEQ ID NO: 488821 - RNA, 32 nt, Human
uagaugggccugauuagagcagucaucuccug

SEQ ID NO: 488822 - RNA, 32 nt, Human
uagaugggccuguggucccaaaguaggucagu

SEQ ID NO: 488823 - RNA, 27 nt, Human
uagauggggccagcuuccacuauguug

SEQ ID NO: 488824 - RNA, 22 nt, Human
uagaugggguuucaccauguug

SEQ ID NO: 488825 - RNA, 32 nt, Human
uagaugguacuucuccagccuuccguuucuug

SEQ ID NO: 488826 - RNA, 32 nt, Human
uagauggugcaggugaguuugcaaugagggaa

SEQ ID NO: 488827 - RNA, 32 nt, Human
uagauguacauuccugagguucuuuuaucugu

SEQ ID NO: 488828 - RNA, 32 nt, Human
uagauguaccuguuuugcuuucacacuuaaua

SEQ ID NO: 488829 - RNA, 32 nt, Human
uagauguaguuuugcucuuguugcccaggcug

SEQ ID NO: 488830 - RNA, 32 nt, Human
uagaugucacacuggggagaaaccuuacaggu

SEQ ID NO: 488831 - RNA, 32 nt, Human
uagaugucaccuaagugauaguuaacccauuu

SEQ ID NO: 488832 - RNA, 32 nt, Human
uagaugucagaggcauggcugggccuccaucu

SEQ ID NO: 488833 - RNA, 32 nt, Human
uagauguccucaccccuccucacugccucucc

SEQ ID NO: 488834 - RNA, 32 nt, Human
uagaugucuuacaagucuuauauuuuugucuu

SEQ ID NO: 488835 - RNA, 32 nt, Human
uagaugugagccagcacaccgggccaagugaa

SEQ ID NO: 488836 - RNA, 32 nt, Human
uagaugugcaauagaaauagcuaauuuauuuc

SEQ ID NO: 488837 - RNA, 32 nt, Human
uagaugugugugugcacacacacagaaaccac

SEQ ID NO: 488838 - RNA, 31 nt, Human
uagauguucaauaaauauuuguugaaugagu

SEQ ID NO: 488839 - RNA, 32 nt, Human
uagauguucuugcuguguuaggaggugauaaa

SEQ ID NO: 488840 - RNA, 32 nt, Human
uagauguugcuuuccagccaggaaucuaaagc

SEQ ID NO: 488841 - RNA, 32 nt, Human
uagauguuggguuccuggauuaagaugacuuc

SEQ ID NO: 488842 - RNA, 32 nt, Human
uagauguuguuuuguucugugauggcuuuuuc

SEQ ID NO: 488843 - RNA, 32 nt, Human
uagauguuucuguuaugcucucucguuggcag

SEQ ID NO: 488844 - RNA, 32 nt, Human
uagauguuuuuagaaaaacuugugaaugaaaa

SEQ ID NO: 488845 - RNA, 32 nt, Human
uagauuacccuccaugauguggaugggccuga

SEQ ID NO: 488846 - RNA, 32 nt, Human
uagauuauuccaguaucccauggaagcugagg

SEQ ID NO: 488847 - RNA, 32 nt, Human
uagauucaaugccauccccaucaagcuaccaa

SEQ ID NO: 488848 - RNA, 32 nt, Human
uagauucacagaaauccaaagcuguauguagu

SEQ ID NO: 488849 - RNA, 32 nt, Human
uagauucacuccugccaugccuugccaauagu

SEQ ID NO: 488850 - RNA, 32 nt, Human
uagauucacuuaacaaacaaauuuuucugcuu

SEQ ID NO: 488851 - RNA, 32 nt, Human
uagauucauggcagaaaaugaccaaauccugu

SEQ ID NO: 488852 - RNA, 32 nt, Human
uagauucauugagcucacccuagaugaguccu

SEQ ID NO: 488853 - RNA, 32 nt, Human
uagauuccauuuuucuuaucucuuauuucuca

SEQ ID NO: 488854 - RNA, 32 nt, Human
uagauucccaggaacugggaaaugcagucagu

SEQ ID NO: 488855 - RNA, 32 nt, Human
uagauuccccgguggguuagacaggaaguaac

SEQ ID NO: 488856 - RNA, 32 nt, Human
uagauuccccucccagacacccucauuccugu

SEQ ID NO: 488857 - RNA, 32 nt, Human
uagauuccucaccaacuacuaccagucauuug

SEQ ID NO: 488858 - RNA, 32 nt, Human
uagauuccuuucuccugcuucauauaggccaa

SEQ ID NO: 488859 - RNA, 32 nt, Human
uagauugaagugugugugaugggggugcagcu

SEQ ID NO: 488860 - RNA, 32 nt, Human
uagauugcaaaugaccugcuuucuuucggauc

SEQ ID NO: 488861 - RNA, 32 nt, Human
uagauugcaaaugaccugcuuucuuucuguuc

SEQ ID NO: 488862 - RNA, 32 nt, Human
uagauugcaccacugcacucuagccuggguaa

SEQ ID NO: 488863 - RNA, 32 nt, Human
uagauugcaucaaauaaaaaugagcuacuuua

SEQ ID NO: 488864 - RNA, 32 nt, Human
uagauugcaugucauacuccauuugguucaac

SEQ ID NO: 488865 - RNA, 32 nt, Human
uagauugcgcuacugcacuccagccuaggcaa

SEQ ID NO: 488866 - RNA, 32 nt, Human
uagauugcuccuggagugugggaacaacaguc

SEQ ID NO: 488867 - RNA, 21 nt, Human
uagauuggagccaccaugccc

SEQ ID NO: 488868 - RNA, 32 nt, Human
uagauuggagccaccaugcccagcucagaggg

SEQ ID NO: 488869 - RNA, 32 nt, Human
uagauuggagccauggcuuuggaacagaacca

SEQ ID NO: 488870 - RNA, 32 nt, Human
uagauugggacccccuucaaaccuaaaaauca

SEQ ID NO: 488871 - RNA, 32 nt, Human
uagauugggaggugguuuguuuggugaauggg

SEQ ID NO: 488872 - RNA, 32 nt, Human
uagauugggcagggagaugggaggagucguga

SEQ ID NO: 488873 - RNA, 32 nt, Human
uagauuggguaucaccuuuaggauaacccaaa

SEQ ID NO: 488874 - RNA, 32 nt, Human
uagauugggugagggggacggggaugucaggg

SEQ ID NO: 488875 - RNA, 32 nt, Human
uagauugucauccugguuguccaacucugaau

SEQ ID NO: 488876 - RNA, 32 nt, Human
uagauugucccuuauuuccuucauacaugauu

SEQ ID NO: 488877 - RNA, 32 nt, Human
uagauugugcuacugcacucuagauuggguga

SEQ ID NO: 488878 - RNA, 32 nt, Human
uagauuguguuaucacucugccuguguauagu

SEQ ID NO: 488879 - RNA, 32 nt, Human
uagauuguuccuaucccccucuccuugaugug

SEQ ID NO: 488880 - RNA, 32 nt, Human
uagauuguuggggguggggagggagggaucua

SEQ ID NO: 488881 - RNA, 32 nt, Human
uagauuguuucagcuucucuuguuucauuuuc

SEQ ID NO: 488882 - RNA, 23 nt, Human
uagauuuaacaguguugauucuc

SEQ ID NO: 488883 - RNA, 32 nt, Human
uagauuuacaucuuuguccuugcucccaacga

SEQ ID NO: 488884 - RNA, 32 nt, Human
uagauuuagauccuucaccuuccuuuugcuuu

SEQ ID NO: 488885 - RNA, 32 nt, Human
uagauuucaauccaguccuagcacuugaucuc

SEQ ID NO: 488886 - RNA, 32 nt, Human
uagauuucaccuuuguuucauuauuacagcag

SEQ ID NO: 488887 - RNA, 32 nt, Human
uagauuuccucuuucauuacuuuuaguaacca

SEQ ID NO: 488888 - RNA, 32 nt, Human
uagauuugagauuaaaguggucauuugcagau

SEQ ID NO: 488889 - RNA, 32 nt, Human
uagauuugaugacucuuuuucugccuccaaag

SEQ ID NO: 488890 - RNA, 32 nt, Human
uagauuugcaagcugcucauuuuugacagcuu

SEQ ID NO: 488891 - RNA, 32 nt, Human
uagauuugcucuauugaaaauguuucauuuuu

SEQ ID NO: 488892 - RNA, 32 nt, Human
uagauuuggaaaugagcuuugcaaagacuuuu

SEQ ID NO: 488893 - RNA, 32 nt, Human
uagauuuggagaggaaggauggagguggacuc

SEQ ID NO: 488894 - RNA, 32 nt, Human
uagauuugggcaauggaggugaugacagcauu

SEQ ID NO: 488895 - RNA, 32 nt, Human
uagauuugguuuuccuuucuuuacuuacccug

SEQ ID NO: 488896 - RNA, 31 nt, Human
uagauuuuaagugccuuuucacugggagaau

SEQ ID NO: 488897 - RNA, 32 nt, Human
uagauuuucucagcuaaacggaagggaaaugc

SEQ ID NO: 488898 - RNA, 32 nt, Human
uagauuuucucagcuaaacggaagggaaaugu

SEQ ID NO: 488899 - RNA, 32 nt, Human
uagauuuucucagcuaaacuguagggaaaugc

SEQ ID NO: 488900 - RNA, 32 nt, Human
uagauuuugaauccugccucugccauuuccug

SEQ ID NO: 488901 - RNA, 32 nt, Human
uagauuuugguauucaaggagggaggauccug

SEQ ID NO: 488902 - RNA, 32 nt, Human
uagauuuuuacccaggccagugcagagaggug

SEQ ID NO: 488903 - RNA, 32 nt, Human
uagauuuuugcaccaucugccgacgaaccccu

SEQ ID NO: 488904 - RNA, 32 nt, Human
uagauuuuuggucacuugcuuuuauagacuau

SEQ ID NO: 488905 - RNA, 32 nt, Human
uagcaaaaagagacuugaauguuguggacaaa

SEQ ID NO: 488906 - RNA, 32 nt, Human
uagcaaaaaguuaaggaacuagggaaaagaga

SEQ ID NO: 488907 - RNA, 32 nt, Human
uagcaaaagcagacaccuuugccuuguuccug

SEQ ID NO: 488908 - RNA, 32 nt, Human
uagcaaaauacugauucaauguaaagcaaacu

SEQ ID NO: 488909 - RNA, 32 nt, Human
uagcaaacauuuaccaaguaucugccauguuc

SEQ ID NO: 488910 - RNA, 32 nt, Human
uagcaaaccaaccacacacuguucuguaucuu

SEQ ID NO: 488911 - RNA, 32 nt, Human
uagcaaaccccugauauuauucauggacuuga

SEQ ID NO: 488912 - RNA, 32 nt, Human
uagcaaaccucuuccuccucauugaagccaug

SEQ ID NO: 488913 - RNA, 23 nt, Human
uagcaaacuuggaauuuguaacc

SEQ ID NO: 488914 - RNA, 32 nt, Human
uagcaaaucugcaagagaaaacaggggauccu

SEQ ID NO: 488915 - RNA, 32 nt, Human
uagcaaaucugcuguggcaggcuguggauuuu

SEQ ID NO: 488916 - RNA, 32 nt, Human
uagcaaauggaucucagccacuguuggagugg

SEQ ID NO: 488917 - RNA, 32 nt, Human
uagcaaauggcagaaccaaagcucaaauaaaa

SEQ ID NO: 488918 - RNA, 32 nt, Human
uagcaaauguagaagcaguggcuguggcagua

SEQ ID NO: 488919 - RNA, 32 nt, Human
uagcaaauuguuuuugcuuugaaaaucuagcc

SEQ ID NO: 488920 - RNA, 31 nt, Human
uagcaacagagcuagaauggggcaaugcacu

SEQ ID NO: 488921 - RNA, 32 nt, Human
uagcaacagaugggaauuuggagucacucuga

SEQ ID NO: 488922 - RNA, 32 nt, Human
uagcaacagcagagcaggagcagcugguauuc

SEQ ID NO: 488923 - RNA, 32 nt, Human
uagcaacaucuucuccgaguccugcagccagc

SEQ ID NO: 488924 - RNA, 32 nt, Human
uagcaaccaggacgaaguugagaaggaaaacg

SEQ ID NO: 488925 - RNA, 32 nt, Human
uagcaaccaucuccuaucaaaggagcaauuuc

SEQ ID NO: 488926 - RNA, 32 nt, Human
uagcaacccugagaugauuuucuuccauuuac

SEQ ID NO: 488927 - RNA, 32 nt, Human
uagcaaccuucauuccaucugccuccuucauu

SEQ ID NO: 488928 - RNA, 32 nt, Human
uagcaacgaauagggcuccccuauguuccagc

SEQ ID NO: 488929 - RNA, 32 nt, Human
uagcaagaacuccaaaucauggaagugaaauu

SEQ ID NO: 488930 - RNA, 32 nt, Human
uagcaagaagcagaggaaagaaaccaauugcc

SEQ ID NO: 488931 - RNA, 23 nt, Human
uagcaagaccccaucacuacaaa

SEQ ID NO: 488932 - RNA, 24 nt, Human
uagcaagacccccaucucugcaaa

SEQ ID NO: 488933 - RNA, 22 nt, Human
uagcaagaccccucacuacaaa

SEQ ID NO: 488934 - RNA, 23 nt, Human
uagcaagacuccgaugcuacaaa

SEQ ID NO: 488935 - RNA, 32 nt, Human
uagcaagagaaacaggcagcagaggaacccaa

SEQ ID NO: 488936 - RNA, 32 nt, Human
uagcaagauauugaucaaauauagaaaguuga

SEQ ID NO: 488937 - RNA, 21 nt, Human
uagcaagaucuuuacauaauu

SEQ ID NO: 488938 - RNA, 32 nt, Human
uagcaagcaagaaaggcuccagugucaaggua

SEQ ID NO: 488939 - RNA, 32 nt, Human
uagcaaggacucgagcaggggugucuggagag

SEQ ID NO: 488940 - RNA, 32 nt, Human
uagcaaggagccaacauaacagaugggcugga

SEQ ID NO: 488941 - RNA, 32 nt, Human
uagcaaggagugacuuucuuucugcuacgugu

SEQ ID NO: 488942 - RNA, 24 nt, Human
uagcaaggccuggucugcaagauu

SEQ ID NO: 488943 - RNA, 32 nt, Human
uagcaaggcugcagagaggccagaacuaauca

SEQ ID NO: 488944 - RNA, 32 nt, Human
uagcaaggucugaaaguuucaaagggagaccu

SEQ ID NO: 488945 - RNA, 32 nt, Human
uagcaaggugagucggugcuugccaagaggca

SEQ ID NO: 488946 - RNA, 32 nt, Human
uagcaaguccaggaaaaacucuucucauucaa

SEQ ID NO: 488947 - RNA, 32 nt, Human
uagcaagucucagguguuugcaguaagaagcu

SEQ ID NO: 488948 - RNA, 32 nt, Human
uagcaagugaagaucuguugagaaacugagaa

SEQ ID NO: 488949 - RNA, 24 nt, Human
uagcaagugcuaggguuacaaagu

SEQ ID NO: 488950 - RNA, 32 nt, Human
uagcaaguggacuuguugaaacaggaagcaag

SEQ ID NO: 488951 - RNA, 32 nt, Human
uagcaaguggaucaaugcugaagauaaaucag

SEQ ID NO: 488952 - RNA, 32 nt, Human
uagcaagugugcacuccagcuucggaggcccu

SEQ ID NO: 488953 - RNA, 32 nt, Human
uagcaaucagucagggcugcagugagccauga

SEQ ID NO: 488954 - RNA, 32 nt, Human
uagcaauccauguuaguuuuuacuuucuguug

SEQ ID NO: 488955 - RNA, 32 nt, Human
uagcaaucugcccgccuccacccuuuaagcua

SEQ ID NO: 488956 - RNA, 32 nt, Human
uagcaaugaaacugaggcaggauagguacuua

SEQ ID NO: 488957 - RNA, 31 nt, Human
uagcaauggacaauuccaauaccuccacaca

SEQ ID NO: 488958 - RNA, 29 nt, Human
uagcaauggcugcuguuaucucgcagagc

SEQ ID NO: 488959 - RNA, 32 nt, Human
uagcaauguuagccucaagcaagaggaugaac

SEQ ID NO: 488960 - RNA, 32 nt, Human
uagcaauugcacuccggccugggcaacaagag

SEQ ID NO: 488961 - RNA, 32 nt, Human
uagcaauugggagcuugguggaccaucucuug

SEQ ID NO: 488962 - RNA, 32 nt, Human
uagcaauuuuaugcugggcaugguggcucacg

SEQ ID NO: 488963 - RNA, 32 nt, Human
uagcacaaaaguuaucaaagaggcucagccau

SEQ ID NO: 488964 - RNA, 32 nt, Human
uagcacaagcccgguugcuccuugucaggaga

SEQ ID NO: 488965 - RNA, 32 nt, Human
uagcacaaggagugcccgccuugagugacaug

SEQ ID NO: 488966 - RNA, 32 nt, Human
uagcacacaccuguagucccagauacuuggga

SEQ ID NO: 488967 - RNA, 32 nt, Human
uagcacacauuuucaaggcagcuuccugauaa

SEQ ID NO: 488968 - RNA, 32 nt, Human
uagcacaccuagacuugcuguaacuguacuca

SEQ ID NO: 488969 - RNA, 32 nt, Human
uagcacacgccuguaaucccagcuacuuggga

SEQ ID NO: 488970 - RNA, 32 nt, Human
uagcacacuugcccggccaccugcugccguga

SEQ ID NO: 488971 - RNA, 32 nt, Human
uagcacagagcagggacggcagcucugggaga

SEQ ID NO: 488972 - RNA, 32 nt, Human
uagcacagagguggggcuucgggcagggagcg

SEQ ID NO: 488973 - RNA, 32 nt, Human
uagcacagcagucugagaucaaacugcaaggc

SEQ ID NO: 488974 - RNA, 32 nt, Human
uagcacagccugugacagagccugggcagguc

SEQ ID NO: 488975 - RNA, 32 nt, Human
uagcacagcucccuucuguugaugcuguauuc

SEQ ID NO: 488976 - RNA, 32 nt, Human
uagcacagugauaucaccaugacuucacagac

SEQ ID NO: 488977 - RNA, 32 nt, Human
uagcacagugccuggcacacaguagaguaggu

SEQ ID NO: 488978 - RNA, 32 nt, Human
uagcacagugccuugcacuugauaggugcuua

SEQ ID NO: 488979 - RNA, 32 nt, Human
uagcacauaccuguaaucccagcuacucagga

SEQ ID NO: 488980 - RNA, 32 nt, Human
uagcacauauuucaggaggagaaugguauguu

SEQ ID NO: 488981 - RNA, 32 nt, Human
uagcacaucuuucucuauuauccuucuauugg

SEQ ID NO: 488982 - RNA, 32 nt, Human
uagcacaugccuguggucccagcuacucagag

SEQ ID NO: 488983 - RNA, 23 nt, Human
uagcaccaacuuauucaaugacu

SEQ ID NO: 488984 - RNA, 32 nt, Human
uagcaccacugcacuccagccugggagacaga

SEQ ID NO: 488985 - RNA, 32 nt, Human
uagcaccacugcacuccagccugggcaacaga

SEQ ID NO: 488986 - RNA, 32 nt, Human
uagcaccacugcacuccagccugggugacaga

SEQ ID NO: 488987 - RNA, 32 nt, Human
uagcaccacugcacuccaggcugggugacaga

SEQ ID NO: 488988 - RNA, 32 nt, Human
uagcaccacugcacuucagccuggacaacaga

SEQ ID NO: 488989 - RNA, 32 nt, Human
uagcaccacugcacuucuaguugacagaguga

SEQ ID NO: 488990 - RNA, 32 nt, Human
uagcaccacugcacuuuagccugggcgacaag

SEQ ID NO: 488991 - RNA, 32 nt, Human
uagcaccacugcaguccagccugggcgacaga

SEQ ID NO: 488992 - RNA, 32 nt, Human
uagcaccacugcaugcaagccugggcaauaga

SEQ ID NO: 488993 - RNA, 32 nt, Human
uagcaccacugcgcuccagccugggugaggag

SEQ ID NO: 488994 - RNA, 32 nt, Human
uagcaccagggcagacacucacccucaggaau

SEQ ID NO: 488995 - RNA, 32 nt, Human
uagcaccauucuugauguccagggaagaagcc

SEQ ID NO: 488996 - RNA, 32 nt, Human
uagcaccauugcacuccagccugggcgacucc

SEQ ID NO: 488997 - RNA, 32 nt, Human
uagcacccagccugcaucucccaggaggaagu

SEQ ID NO: 488998 - RNA, 32 nt, Human
uagcaccccuugcccugugucuguggaacaga

SEQ ID NO: 488999 - RNA, 32 nt, Human
uagcacccuauauuucugcuucccucuauuuu

SEQ ID NO: 489000 - RNA, 32 nt, Human
uagcacccuuaucaccccucacugccuugugg

SEQ ID NO: 489001 - RNA, 32 nt, Human
uagcaccucugccagugcacagauaggacugu

SEQ ID NO: 489002 - RNA, 32 nt, Human
uagcaccucuguguuuuaagggucuuucaaug

SEQ ID NO: 489003 - RNA, 32 nt, Human
uagcaccugcccgcccuccaccuucuccacca

SEQ ID NO: 489004 - RNA, 32 nt, Human
uagcaccuguaacccuguguacuaagugcuuu

SEQ ID NO: 489005 - RNA, 32 nt, Human
uagcaccuuccugauccccuuaucucuaaggc

SEQ ID NO: 489006 - RNA, 32 nt, Human
uagcaccuugggaggccgaggcgggcggauca

SEQ ID NO: 489007 - RNA, 32 nt, Human
uagcaccuugggaggcugaggcagguggauca

SEQ ID NO: 489008 - RNA, 32 nt, Human
uagcacgaaucacugcacccagccuauggaac

SEQ ID NO: 489009 - RNA, 32 nt, Human
uagcacgggagguaagggugguaugggauggg

SEQ ID NO: 489010 - RNA, 32 nt, Human
uagcacggggagcaaugauggagggagccccu

SEQ ID NO: 489011 - RNA, 32 nt, Human
uagcacgugccuguagucccagcuacucggga

SEQ ID NO: 489012 - RNA, 32 nt, Human
uagcacuaucacugcaaccuccgccuccuggg

SEQ ID NO: 489013 - RNA, 32 nt, Human
uagcacucaaagcuuaucagcgcagagcccau

SEQ ID NO: 489014 - RNA, 32 nt, Human
uagcacucagauuacccugccugcucugugcu

SEQ ID NO: 489015 - RNA, 32 nt, Human
uagcacuccagccuuagccugggcgacagagc

SEQ ID NO: 489016 - RNA, 31 nt, Human
uagcacuccggcucugggcuuucggccagaa

SEQ ID NO: 489017 - RNA, 32 nt, Human
uagcacugagcuuucaacauugaagugacuug

SEQ ID NO: 489018 - RNA, 32 nt, Human
uagcacugcacugucaccugaugauuggcccu

SEQ ID NO: 489019 - RNA, 32 nt, Human
uagcacugcaguccagccugggcgacagagug

SEQ ID NO: 489020 - RNA, 32 nt, Human
uagcacugccgagacugugcucuggccucccu

SEQ ID NO: 489021 - RNA, 32 nt, Human
uagcacuggccucugugccacagcuacuguuu

SEQ ID NO: 489022 - RNA, 32 nt, Human
uagcacugggcguggugcaugccuguaauccc

SEQ ID NO: 489023 - RNA, 32 nt, Human
uagcacuguggacaauaaaguccauaggcuga

SEQ ID NO: 489024 - RNA, 20 nt, Human
uagcacuuccauuuuccaua

SEQ ID NO: 489025 - RNA, 32 nt, Human
uagcacuugcaucguuauuaagcccuuauuug

SEQ ID NO: 489026 - RNA, 32 nt, Human
uagcacuuggaaaggcugagacaggaggauca

SEQ ID NO: 489027 - RNA, 22 nt, Human
uagcacuuuaucauucuccaca

SEQ ID NO: 489028 - RNA, 32 nt, Human
uagcacuuugggaggcagaggcgggcagauca

SEQ ID NO: 489029 - RNA, 32 nt, Human
uagcacuuugggaggccaaggcaggcagauca

SEQ ID NO: 489030 - RNA, 32 nt, Human
uagcacuuugggaggccaaggugggaggauug

SEQ ID NO: 489031 - RNA, 32 nt, Human
uagcacuuugggaggccgaggcaggcagauca

SEQ ID NO: 489032 - RNA, 32 nt, Human
uagcacuuugggaggccgaggcaggcggauca

SEQ ID NO: 489033 - RNA, 32 nt, Human
uagcacuuugggaggccgaggcaggcggaucc

SEQ ID NO: 489034 - RNA, 32 nt, Human
uagcacuuugggaggccgaggcgggcagauca

SEQ ID NO: 489035 - RNA, 32 nt, Human
uagcacuuugggaggccgaggcgggcggauca

SEQ ID NO: 489036 - RNA, 32 nt, Human
uagcacuuugggaggccgaggugggcagauca

SEQ ID NO: 489037 - RNA, 32 nt, Human
uagcacuuugggaggccgaggugggcggauca

SEQ ID NO: 489038 - RNA, 32 nt, Human
uagcacuuugggaggccgagguggguagaucg

SEQ ID NO: 489039 - RNA, 32 nt, Human
uagcacuuugggaggcugaggauggaaaauca

SEQ ID NO: 489040 - RNA, 32 nt, Human
uagcacuuugggaggcugaggcgggcggauag

SEQ ID NO: 489041 - RNA, 32 nt, Human
uagcacuuugggaggcugaggcggguagauca

SEQ ID NO: 489042 - RNA, 32 nt, Human
uagcacuuugggaggcugaggcgggugaauca

SEQ ID NO: 489043 - RNA, 32 nt, Human
uagcacuuugggaggcugagguaggcagauca

SEQ ID NO: 489044 - RNA, 32 nt, Human
uagcacuuugggaggcugaggugagcagguug

SEQ ID NO: 489045 - RNA, 32 nt, Human
uagcacuuugggaggcugaggugggcagauca

SEQ ID NO: 489046 - RNA, 30 nt, Human
uagcagaaaaggggagugcuaacuggggga

SEQ ID NO: 489047 - RNA, 32 nt, Human
uagcagaaauuuugaagccagaaggacaacau

SEQ ID NO: 489048 - RNA, 32 nt, Human
uagcagaacccagcucagaagauggggcuuau

SEQ ID NO: 489049 - RNA, 21 nt, Human
uagcagaacuuaucucaggaa

SEQ ID NO: 489050 - RNA, 23 nt, Human
uagcagaacuuguccccauggaa

SEQ ID NO: 489051 - RNA, 32 nt, Human
uagcagaagaauuggaguuggaagguugcaua

SEQ ID NO: 489052 - RNA, 32 nt, Human
uagcagaagcagcuugguaggauggaaggcac

SEQ ID NO: 489053 - RNA, 32 nt, Human
uagcagacacugcaacagaugccuccuagaaa

SEQ ID NO: 489054 - RNA, 32 nt, Human
uagcagacuuguauggcccacauguauuaguc

SEQ ID NO: 489055 - RNA, 32 nt, Human
uagcagagacaggguuucaccauguuggccag

SEQ ID NO: 489056 - RNA, 32 nt, Human
uagcagagacaggguuucaccguguuggccag

SEQ ID NO: 489057 - RNA, 32 nt, Human
uagcagagacgggguuucaccauguuggccag

SEQ ID NO: 489058 - RNA, 32 nt, Human
uagcagagacgggguuucaccguguuagccag

SEQ ID NO: 489059 - RNA, 32 nt, Human
uagcagagauggggguuucaccauguuggcca

SEQ ID NO: 489060 - RNA, 32 nt, Human
uagcagagaugggguuucaccacauuggccag

SEQ ID NO: 489061 - RNA, 32 nt, Human
uagcagagaugggguuucaccauauuggccag

SEQ ID NO: 489062 - RNA, 32 nt, Human
uagcagagaugggguuucaccguguuggccag

SEQ ID NO: 489063 - RNA, 32 nt, Human
uagcagagaugggguuucacuguguuggccag

SEQ ID NO: 489064 - RNA, 32 nt, Human
uagcagagaugggguuuuaccauguuggccag

SEQ ID NO: 489065 - RNA, 32 nt, Human
uagcagagaugggguuuuaccauguuggucag

SEQ ID NO: 489066 - RNA, 32 nt, Human
uagcagagccuuucuugcacuuuaaagugaga

SEQ ID NO: 489067 - RNA, 32 nt, Human
uagcagagcuccaggccucccuuccagucaga

SEQ ID NO: 489068 - RNA, 32 nt, Human
uagcagaggagaaaucggagauccccagacag

SEQ ID NO: 489069 - RNA, 32 nt, Human
uagcagaggugaguagaggggccugggggcuu

SEQ ID NO: 489070 - RNA, 32 nt, Human
uagcagagguuucacccggcaggaugacacag

SEQ ID NO: 489071 - RNA, 32 nt, Human
uagcagaugccauugaagauaaagcuacugua

SEQ ID NO: 489072 - RNA, 32 nt, Human
uagcagauuuggcagagguacagugagaaucu

SEQ ID NO: 489073 - RNA, 32 nt, Human
uagcagcaaaaauauaaaauaguuguccauau

SEQ ID NO: 489074 - RNA, 32 nt, Human
uagcagcaagggugggguggccagcagaugga

SEQ ID NO: 489075 - RNA, 31 nt, Human
uagcagcacauccucuuuccugugucaagaa

SEQ ID NO: 489076 - RNA, 32 nt, Human
uagcagcacugugcccagcacagguaagcacu

SEQ ID NO: 489077 - RNA, 32 nt, Human
uagcagcagcgugcagcucaguacguuguaac

SEQ ID NO: 489078 - RNA, 32 nt, Human
uagcagcagcguucccugccuccugcaggaug

SEQ ID NO: 489079 - RNA, 32 nt, Human
uagcagcaguacgagggcuacacuccucugcu

SEQ ID NO: 489080 - RNA, 32 nt, Human
uagcagcauguccuacggaaacccagcacgug

SEQ ID NO: 489081 - RNA, 32 nt, Human
uagcagcauucagaaaguuaaugagugguuuu

SEQ ID NO: 489082 - RNA, 32 nt, Human
uagcagcauuuugccccugggcauuuugcccc

SEQ ID NO: 489083 - RNA, 32 nt, Human
uagcagccaaaacuucagcccauagguuaguc

SEQ ID NO: 489084 - RNA, 32 nt, Human
uagcagccacugccaccugggcccggagccuc

SEQ ID NO: 489085 - RNA, 32 nt, Human
uagcagccauguggugggcaugugugacuacu

SEQ ID NO: 489086 - RNA, 32 nt, Human
uagcagcccccagcaucucccacccacccagc

SEQ ID NO: 489087 - RNA, 32 nt, Human
uagcagccuaguuuucuacauccuucaugcca

SEQ ID NO: 489088 - RNA, 32 nt, Human
uagcagccuccaagccacaaacacauccaagg

SEQ ID NO: 489089 - RNA, 32 nt, Human
uagcagccuuugacaaugacuuccucaaacug

SEQ ID NO: 489090 - RNA, 32 nt, Human
uagcagcgcacugcaaccuggaccuccugggc

SEQ ID NO: 489091 - RNA, 32 nt, Human
uagcagcgcauacaggagcuggggaagggggc

SEQ ID NO: 489092 - RNA, 32 nt, Human
uagcagcgccuucggguagcaggaugauuccu

SEQ ID NO: 489093 - RNA, 32 nt, Human
uagcagcuaucucucagugaacugugagggua

SEQ ID NO: 489094 - RNA, 32 nt, Human
uagcagcucugacuaacaggcugcaaagugca

SEQ ID NO: 489095 - RNA, 32 nt, Human
uagcagcuggauguuccugaaaccucugcagg

SEQ ID NO: 489096 - RNA, 32 nt, Human
uagcagcuuagaaucccagcugcuggcucggg

SEQ ID NO: 489097 - RNA, 32 nt, Human
uagcagcuuauucacaagacccaaaaggcaga

SEQ ID NO: 489098 - RNA, 32 nt, Human
uagcagcuuccucccuucauggcagccaaaag

SEQ ID NO: 489099 - RNA, 32 nt, Human
uagcagcuuguauaccucaggccaggugagcu

SEQ ID NO: 489100 - RNA, 32 nt, Human
uagcaggacagaugcauugaagccacaugguu

SEQ ID NO: 489101 - RNA, 32 nt, Human
uagcaggagcacaggcguggcagugagaaagc

SEQ ID NO: 489102 - RNA, 32 nt, Human
uagcaggagcaguuucuggccagaagcaccag

SEQ ID NO: 489103 - RNA, 32 nt, Human
uagcaggagcccuuugcugugugcucugucca

SEQ ID NO: 489104 - RNA, 32 nt, Human
uagcaggauagaagcaaaugaaacugaaagcu

SEQ ID NO: 489105 - RNA, 22 nt, Human
uagcaggaucuccuucagaauu

SEQ ID NO: 489106 - RNA, 32 nt, Human
uagcaggcaaaacuaugaugguuugugauauc

SEQ ID NO: 489107 - RNA, 32 nt, Human
uagcaggccuccaggugggguuagaauuguca

SEQ ID NO: 489108 - RNA, 32 nt, Human
uagcagggacggccuuucucuuagagcagcug

SEQ ID NO: 489109 - RNA, 32 nt, Human
uagcagggagcaugcccguaaucccagcuacu

SEQ ID NO: 489110 - RNA, 32 nt, Human
uagcagggaugcuguguucacccuucuuggua

SEQ ID NO: 489111 - RNA, 32 nt, Human
uagcagggggcacagagagagcagggucagcu

SEQ ID NO: 489112 - RNA, 26 nt, Human
uagcaggguagcugguugcuagaguu

SEQ ID NO: 489113 - RNA, 26 nt, Human
uagcagggucagguguuagcaggguu

SEQ ID NO: 489114 - RNA, 32 nt, Human
uagcaggguccuuccuugcaaaguacuauaca

SEQ ID NO: 489115 - RNA, 32 nt, Human
uagcagggucugcagugugaguaccagguuuc

SEQ ID NO: 489116 - RNA, 32 nt, Human
uagcaggguggaggaggccuggugugggcccu

SEQ ID NO: 489117 - RNA, 32 nt, Human
uagcagguccuuuuuccuccugcugagcugag

SEQ ID NO: 489118 - RNA, 32 nt, Human
uagcaggugccuguaaucacagcuacucggga

SEQ ID NO: 489119 - RNA, 32 nt, Human
uagcaggugccuguaaucccagcuacugggga

SEQ ID NO: 489120 - RNA, 32 nt, Human
uagcaggugugggcuuacagacacauggacug

SEQ ID NO: 489121 - RNA, 32 nt, Human
uagcagguuggugagagaagcuccccugagcu

SEQ ID NO: 489122 - RNA, 32 nt, Human
uagcaguacacccuuuuaucuccauugcuacu

SEQ ID NO: 489123 - RNA, 32 nt, Human
uagcagucaacuccugauucagacaugaucca

SEQ ID NO: 489124 - RNA, 32 nt, Human
uagcagucacacccuagccacugcugggaccu

SEQ ID NO: 489125 - RNA, 32 nt, Human
uagcagucauucuccuaaucugaccacuuuca

SEQ ID NO: 489126 - RNA, 28 nt, Human
uagcagucccagcugcuggcuuugaaga

SEQ ID NO: 489127 - RNA, 32 nt, Human
uagcaguccgugcgcagaggggccaguucuga

SEQ ID NO: 489128 - RNA, 32 nt, Human
uagcaguccuggaaguugaagguggagauggc

SEQ ID NO: 489129 - RNA, 32 nt, Human
uagcagucugggacucaagggugggucuuugg

SEQ ID NO: 489130 - RNA, 32 nt, Human
uagcagugagaaugccgccucugugaucagcu

SEQ ID NO: 489131 - RNA, 32 nt, Human
uagcagugagccaagaccgugccacuguacuc

SEQ ID NO: 489132 - RNA, 32 nt, Human
uagcagugaugauaugcauaagugcuguaagg

SEQ ID NO: 489133 - RNA, 32 nt, Human
uagcagugccuguguguuggagcucaguuagg

SEQ ID NO: 489134 - RNA, 32 nt, Human
uagcaguggccuggcacaaaacaaaugcucag

SEQ ID NO: 489135 - RNA, 32 nt, Human
uagcaguugcucccgcacuccaggccugugcu

SEQ ID NO: 489136 - RNA, 32 nt, Human
uagcaguugucauucaguaauuuccuacaagc

SEQ ID NO: 489137 - RNA, 32 nt, Human
uagcaguuugagcccagccuaggcaacauagc

SEQ ID NO: 489138 - RNA, 32 nt, Human
uagcauaacauacagacuuuugcacauucagc

SEQ ID NO: 489139 - RNA, 32 nt, Human
uagcauaauaccaaauuccucuauucacuaaa

SEQ ID NO: 489140 - RNA, 32 nt, Human
uagcauagccugggccaagcaggguggggaau

SEQ ID NO: 489141 - RNA, 32 nt, Human
uagcauaggaaaaaguuguuuaaugcucaggg

SEQ ID NO: 489142 - RNA, 32 nt, Human
uagcauauccuaaauaccaggcaaugugcugu

SEQ ID NO: 489143 - RNA, 32 nt, Human
uagcauaugccuguggucccagcuacugagga

SEQ ID NO: 489144 - RNA, 32 nt, Human
uagcaucacagcuucaggaagccuucucaagu

SEQ ID NO: 489145 - RNA, 32 nt, Human
uagcaucagcacuuaaucuuuaucugcugaau

SEQ ID NO: 489146 - RNA, 32 nt, Human
uagcaucaugugugaucucgucuuccagcgug

SEQ ID NO: 489147 - RNA, 32 nt, Human
uagcauccuuuuggcucccugguugguuguga

SEQ ID NO: 489148 - RNA, 32 nt, Human
uagcaucguggcaccguaagguggugaaguac

SEQ ID NO: 489149 - RNA, 32 nt, Human
uagcaucuacagccacaacucugcccaccacc

SEQ ID NO: 489150 - RNA, 32 nt, Human
uagcaucucaaggaaaagagcaugggaaagcc

SEQ ID NO: 489151 - RNA, 32 nt, Human
uagcaucucaggacaguuacucucaucauaua

SEQ ID NO: 489152 - RNA, 32 nt, Human
uagcaucucccaggaacaacgacuuuuugccu

SEQ ID NO: 489153 - RNA, 32 nt, Human
uagcaucugcuaucaaacugugccuuauuaaa

SEQ ID NO: 489154 - RNA, 32 nt, Human
uagcaucuucuuuggaauuacucaggaaccag

SEQ ID NO: 489155 - RNA, 32 nt, Human
uagcaucuuguucaaagauaagaaaguuacag

SEQ ID NO: 489156 - RNA, 32 nt, Human
uagcaucuuuacagauggagaggacagaguca

SEQ ID NO: 489157 - RNA, 32 nt, Human
uagcaugaaaccagagguucucagaaugaccg

SEQ ID NO: 489158 - RNA, 32 nt, Human
uagcaugaagacagagccccacccucagaugc

SEQ ID NO: 489159 - RNA, 29 nt, Human
uagcaugaccucacaucacugcguaggac

SEQ ID NO: 489160 - RNA, 32 nt, Human
uagcaugaucacgacuuacugcagccuugauc

SEQ ID NO: 489161 - RNA, 32 nt, Human
uagcaugccugccccaucuugccuguagcauu

SEQ ID NO: 489162 - RNA, 32 nt, Human
uagcaugcgcccgggguugacaacagcuggac

SEQ ID NO: 489163 - RNA, 32 nt, Human
uagcaugcuguaaacaauugucaaaguuguuu

SEQ ID NO: 489164 - RNA, 32 nt, Human
uagcauggccuucuugagcuaggguggaaugg

SEQ ID NO: 489165 - RNA, 32 nt, Human
uagcaugggaggcucuggaagcuguggcauug

SEQ ID NO: 489166 - RNA, 32 nt, Human
uagcauggucccucugucucaggcucuacacu

SEQ ID NO: 489167 - RNA, 32 nt, Human
uagcaugguggcccccacacacccagccugug

SEQ ID NO: 489168 - RNA, 32 nt, Human
uagcaugugcccgguccagucagugcagucau

SEQ ID NO: 489169 - RNA, 32 nt, Human
uagcaugugccuguaaucccagcuucuuggga

SEQ ID NO: 489170 - RNA, 32 nt, Human
uagcauguuccucauuccccaaugacaccuca

SEQ ID NO: 489171 - RNA, 32 nt, Human
uagcauguucuuucuuucuccauccacuggcu

SEQ ID NO: 489172 - RNA, 32 nt, Human
uagcauguugacuauguuguguaaaaccaagc

SEQ ID NO: 489173 - RNA, 32 nt, Human
uagcauguuuacugcucuaugccuccugaucc

SEQ ID NO: 489174 - RNA, 32 nt, Human
uagcauuagaauuauuuguuuguuaaaaguua

SEQ ID NO: 489175 - RNA, 32 nt, Human
uagcauuaggguucuuugcaaugugguaucua

SEQ ID NO: 489176 - RNA, 32 nt, Human
uagcauuaguuucagauucuuuugccauugca

SEQ ID NO: 489177 - RNA, 32 nt, Human
uagcauuaugggaggcugaggcgggcagauca

SEQ ID NO: 489178 - RNA, 32 nt, Human
uagcauucauuucccuuuauauuucccugaaa

SEQ ID NO: 489179 - RNA, 32 nt, Human
uagcauucccuggugaaguguugcagguugug

SEQ ID NO: 489180 - RNA, 32 nt, Human
uagcauuccugacucuaggaagaaggagcagu

SEQ ID NO: 489181 - RNA, 32 nt, Human
uagcauucuuguucaagaagcugcugguucac

SEQ ID NO: 489182 - RNA, 32 nt, Human
uagcauugacacauuuaaagcuuuucauuuaa

SEQ ID NO: 489183 - RNA, 31 nt, Human
uagcauugggccaggccuggcauucaaggga

SEQ ID NO: 489184 - RNA, 32 nt, Human
uagcauugucugucuguccggucuuguuugua

SEQ ID NO: 489185 - RNA, 32 nt, Human
uagcauugugugugaguggccccacagguaga

SEQ ID NO: 489186 - RNA, 32 nt, Human
uagcauuuaguauuuugcacaaagucuaaggg

SEQ ID NO: 489187 - RNA, 32 nt, Human
uagcauuuccuuguccccucuuccccaaaacc

SEQ ID NO: 489188 - RNA, 32 nt, Human
uagcauuucucuagccuuccuuuucugcugcu

SEQ ID NO: 489189 - RNA, 32 nt, Human
uagcauuucuguaguuuagaacagauguuaca

SEQ ID NO: 489190 - RNA, 32 nt, Human
uagcauuuuaauccauucuugacauucaguua

SEQ ID NO: 489191 - RNA, 32 nt, Human
uagcauuuuauauuugaacaugggcuuguuau

SEQ ID NO: 489192 - RNA, 32 nt, Human
uagccaaagcaaauucuccuauuaacacuuag

SEQ ID NO: 489193 - RNA, 32 nt, Human
uagccaaagcuagcuugagcaaaaagaacaaa

SEQ ID NO: 489194 - RNA, 32 nt, Human
uagccaaagggcccugcccagaugccuuccuu

SEQ ID NO: 489195 - RNA, 32 nt, Human
uagccaaagguuuuguucuggccuucuguacu

SEQ ID NO: 489196 - RNA, 32 nt, Human
uagccaaauacaguaacugugacuggcccagg

SEQ ID NO: 489197 - RNA, 32 nt, Human
uagccaacaucgugaaaccccaucucuacuaa

SEQ ID NO: 489198 - RNA, 32 nt, Human
uagccaacaugcugaaacuccaucucuacuaa

SEQ ID NO: 489199 - RNA, 32 nt, Human
uagccaacauggugaaaacccaucuguacuaa

SEQ ID NO: 489200 - RNA, 32 nt, Human
uagccaacauggugaaaccccgucucuauuaa

SEQ ID NO: 489201 - RNA, 32 nt, Human
uagccaacauggugaaaccccgucucuucuaa

SEQ ID NO: 489202 - RNA, 29 nt, Human
uagccaacauggugaaaucccaucucuac

SEQ ID NO: 489203 - RNA, 32 nt, Human
uagccaacauggugaacuaccaucucuacuaa

SEQ ID NO: 489204 - RNA, 32 nt, Human
uagccaagaggcccagaaaucuaaagaucuuu

SEQ ID NO: 489205 - RNA, 32 nt, Human
uagccaagaugccugaggaaacccagacccaa

SEQ ID NO: 489206 - RNA, 32 nt, Human
uagccaagauggugaaaccccaucucuacuaa

SEQ ID NO: 489207 - RNA, 32 nt, Human
uagccaaggaguucuagccugcagugaacuau

SEQ ID NO: 489208 - RNA, 19 nt, Human
uagccaaggugccucuaua

SEQ ID NO: 489209 - RNA, 32 nt, Human
uagccaagguggccgcagucugccuuugcauc

SEQ ID NO: 489210 - RNA, 32 nt, Human
uagccaauauggugaaaccccgucucuacuaa

SEQ ID NO: 489211 - RNA, 32 nt, Human
uagccaaugagcugugaguacacgugacacag

SEQ ID NO: 489212 - RNA, 32 nt, Human
uagccaauggcagaggggguuggggcugggac

SEQ ID NO: 489213 - RNA, 32 nt, Human
uagccacaauaagauuuucauuuuucagugcu

SEQ ID NO: 489214 - RNA, 32 nt, Human
uagccacacaugcgccaugaaguacccuuuga

SEQ ID NO: 489215 - RNA, 32 nt, Human
uagccacacguggcaugucauaccuaccaggu

SEQ ID NO: 489216 - RNA, 32 nt, Human
uagccacacugcacuguggccccuugggaaga

SEQ ID NO: 489217 - RNA, 32 nt, Human
uagccacacuucucccuucaggggcuucggag

SEQ ID NO: 489218 - RNA, 32 nt, Human
uagccacagcccaaaucuuccaggcaaaugua

SEQ ID NO: 489219 - RNA, 32 nt, Human
uagccacagcuguuuuaagacuucugaucucc

SEQ ID NO: 489220 - RNA, 32 nt, Human
uagccacaggcagggcugucaauaacccccuu

SEQ ID NO: 489221 - RNA, 32 nt, Human
uagccacaguccuuaagccacacacauuguug

SEQ ID NO: 489222 - RNA, 32 nt, Human
uagccacauuuaacuccagccuuggguuugac

SEQ ID NO: 489223 - RNA, 32 nt, Human
uagccaccaugcaguucugccuggguuggagu

SEQ ID NO: 489224 - RNA, 32 nt, Human
uagccacccagccugugggaccucaggagggu

SEQ ID NO: 489225 - RNA, 32 nt, Human
uagccaccccuccaccagaggggauggaggaa

SEQ ID NO: 489226 - RNA, 32 nt, Human
uagccaccuuagcaugaacauaggguuaaccc

SEQ ID NO: 489227 - RNA, 32 nt, Human
uagccaccuugauuuucuucuuuguggucuuu

SEQ ID NO: 489228 - RNA, 32 nt, Human
uagccacgagcugccuuccucccaggcuagug

SEQ ID NO: 489229 - RNA, 32 nt, Human
uagccacuaaccuuugccugguacaguauggg

SEQ ID NO: 489230 - RNA, 32 nt, Human
uagccacuccuguugacagugcaccugaaggg

SEQ ID NO: 489231 - RNA, 32 nt, Human
uagccacugcacuccagccugggcaacauagc

SEQ ID NO: 489232 - RNA, 32 nt, Human
uagccacugcacuccagccugggcaacguggu

SEQ ID NO: 489233 - RNA, 32 nt, Human
uagccacugcacuccagccugggcaauauagc

SEQ ID NO: 489234 - RNA, 32 nt, Human
uagccacugcacuccaucuugggcaacacagu

SEQ ID NO: 489235 - RNA, 32 nt, Human
uagccacugcacucuagucuggggaacauaug

SEQ ID NO: 489236 - RNA, 32 nt, Human
uagccacugcacuucagccugggcaacauagc

SEQ ID NO: 489237 - RNA, 32 nt, Human
uagccacugcacuugagccucuugggaaacau

SEQ ID NO: 489238 - RNA, 32 nt, Human
uagccacuggccccucccuguuucauguauuu

SEQ ID NO: 489239 - RNA, 32 nt, Human
uagccacugugcuccagccugggcaacaccau

SEQ ID NO: 489240 - RNA, 32 nt, Human
uagccacuuagcaaucucuauauucuuucaag

SEQ ID NO: 489241 - RNA, 32 nt, Human
uagccacuugcagcacauuaucagcagugacc

SEQ ID NO: 489242 - RNA, 32 nt, Human
uagccagaaacagguguucuggcuuuaggucc

SEQ ID NO: 489243 - RNA, 32 nt, Human
uagccagaagagaagcacuggauuccucaguc

SEQ ID NO: 489244 - RNA, 32 nt, Human
uagccagacuuguuuugcuaucuuauaagcag

SEQ ID NO: 489245 - RNA, 32 nt, Human
uagccagagaaacacugucuuccuucagaaau

SEQ ID NO: 489246 - RNA, 32 nt, Human
uagccagagccacugggagacuggggagacug

SEQ ID NO: 489247 - RNA, 32 nt, Human
uagccagaucuacgaguggauguaauaacugc

SEQ ID NO: 489248 - RNA, 32 nt, Human
uagccagcacacagggcagugagggagggcug

SEQ ID NO: 489249 - RNA, 32 nt, Human
uagccagcaguuucaguuauacucaaccaugc

SEQ ID NO: 489250 - RNA, 32 nt, Human
uagccagcccuccgccgccucuccuuagucgc

SEQ ID NO: 489251 - RNA, 32 nt, Human
uagccagcucagaauacccauguagcagcaac

SEQ ID NO: 489252 - RNA, 22 nt, Human
uagccaggacucuaaucugccu

SEQ ID NO: 489253 - RNA, 32 nt, Human
uagccaggcagaaagagugcucagggaaaauu

SEQ ID NO: 489254 - RNA, 32 nt, Human
uagccaggcuuaguggcgggcaucuguagucc

SEQ ID NO: 489255 - RNA, 32 nt, Human
uagccagggaugguccuggcugugcugcugca

SEQ ID NO: 489256 - RNA, 18 nt, Human
uagccagggcuggugcuu

SEQ ID NO: 489257 - RNA, 32 nt, Human
uagccagggucuguaggcaucacauugugagg

SEQ ID NO: 489258 - RNA, 32 nt, Human
uagccaggguucccucgaacuugggggaucuu

SEQ ID NO: 489259 - RNA, 32 nt, Human
uagccagguacugcauucucucccauccuggg

SEQ ID NO: 489260 - RNA, 32 nt, Human
uagccagguagccaccacugugcccaggcgcc

SEQ ID NO: 489261 - RNA, 32 nt, Human
uagccaggugcugaagaggauccucggagccg

SEQ ID NO: 489262 - RNA, 32 nt, Human
uagccagguguggcacacgccuguaaucccag

SEQ ID NO: 489263 - RNA, 25 nt, Human
uagccaggugugguggcacgugccu

SEQ ID NO: 489264 - RNA, 32 nt, Human
uagccagucagacuugaucacugacaccccgu

SEQ ID NO: 489265 - RNA, 32 nt, Human
uagccagucagaggaggaggagaaggagcccc

SEQ ID NO: 489266 - RNA, 32 nt, Human
uagccagucaguuuuagucacugugaaauauu

SEQ ID NO: 489267 - RNA, 32 nt, Human
uagccagugccgcauuuauccaucuguaagaa

SEQ ID NO: 489268 - RNA, 32 nt, Human
uagccagugggucccuuccuuucuccuuuccu

SEQ ID NO: 489269 - RNA, 32 nt, Human
uagccaguguccacagcaccuucucaaacuac

SEQ ID NO: 489270 - RNA, 32 nt, Human
uagccaguuacuggucaugccugcugugggca

SEQ ID NO: 489271 - RNA, 32 nt, Human
uagccaguucugacaguguuuuaggugccugg

SEQ ID NO: 489272 - RNA, 32 nt, Human
uagccauagagcuuccuuuccagaacccuucc

SEQ ID NO: 489273 - RNA, 22 nt, Human
uagccauaggcccucccagagu

SEQ ID NO: 489274 - RNA, 32 nt, Human
uagccaucacuucugggaaguaaagaacuuga

SEQ ID NO: 489275 - RNA, 32 nt, Human
uagccaucccccaggagaaugacagaagcaaa

SEQ ID NO: 489276 - RNA, 32 nt, Human
uagccaucccgucguuaaauguuuucauggau

SEQ ID NO: 489277 - RNA, 32 nt, Human
uagccaucccuuggggaaggguggggagaaau

SEQ ID NO: 489278 - RNA, 32 nt, Human
uagccaucuagccuucuucccaaacaagcagc

SEQ ID NO: 489279 - RNA, 32 nt, Human
uagccaucuccugucagguaggaaugaacuug

SEQ ID NO: 489280 - RNA, 32 nt, Human
uagccaucucuccagcucugcaguuuucacug

SEQ ID NO: 489281 - RNA, 32 nt, Human
uagccaucuucccuccacaccugauugcucaa

SEQ ID NO: 489282 - RNA, 32 nt, Human
uagccaugaaaugguuauuuugccaguuacau

SEQ ID NO: 489283 - RNA, 32 nt, Human
uagccaugaaggagucggagcccuggguccga

SEQ ID NO: 489284 - RNA, 32 nt, Human
uagccaugacuaggguccucaggcaguggccc

SEQ ID NO: 489285 - RNA, 32 nt, Human
uagccaugaucuuccacacuauguggcauugu

SEQ ID NO: 489286 - RNA, 30 nt, Human
uagccauggaagagaauauggaagagggac

SEQ ID NO: 489287 - RNA, 32 nt, Human
uagccauggcuggcagagguuucuaggguggg

SEQ ID NO: 489288 - RNA, 32 nt, Human
uagccaugguggacccagcgggcagguucugc

SEQ ID NO: 489289 - RNA, 32 nt, Human
uagcccaaaggacaagaaaacacuucucacua

SEQ ID NO: 489290 - RNA, 32 nt, Human
uagcccaaaggagaggccaaaagggaaaccaa

SEQ ID NO: 489291 - RNA, 32 nt, Human
uagcccaacagcuguucuguucuaucuacccc

SEQ ID NO: 489292 - RNA, 32 nt, Human
uagcccacauucccaugaccucccucugcuug

SEQ ID NO: 489293 - RNA, 32 nt, Human
uagcccacccgacuaacaucucagucucugaa

SEQ ID NO: 489294 - RNA, 32 nt, Human
uagcccacgccucuaaucccagcacuuuggga

SEQ ID NO: 489295 - RNA, 32 nt, Human
uagcccacugcagccuccaccucccaggcuca

SEQ ID NO: 489296 - RNA, 32 nt, Human
uagcccacuuaaguaaauacuaugaugauaag

SEQ ID NO: 489297 - RNA, 32 nt, Human
uagcccagagacauggagaguugcuacaaccc

SEQ ID NO: 489298 - RNA, 32 nt, Human
uagcccagcaaauagugauaacaaauaaaacc

SEQ ID NO: 489299 - RNA, 32 nt, Human
uagcccagccuauccuaaugaacuaccugauu

SEQ ID NO: 489300 - RNA, 32 nt, Human
uagcccaggaaugcagcugggggccaggccgu

SEQ ID NO: 489301 - RNA, 32 nt, Human
uagcccaggaauucgagaccagccugggcaag

SEQ ID NO: 489302 - RNA, 30 nt, Human
uagcccaggaggucaggucaaggcugcagu

SEQ ID NO: 489303 - RNA, 32 nt, Human
uagcccaggaguuaaagaccagccugggcaac

SEQ ID NO: 489304 - RNA, 32 nt, Human
uagcccaggaguuugagaacagccugggcaac

SEQ ID NO: 489305 - RNA, 32 nt, Human
uagcccaggccagagugcaguggcgcgaucuc

SEQ ID NO: 489306 - RNA, 32 nt, Human
uagcccaggcuggagugcaguggcacagucac

SEQ ID NO: 489307 - RNA, 32 nt, Human
uagcccaggcuggagugcaguguggcacaauc

SEQ ID NO: 489308 - RNA, 32 nt, Human
uagcccagggcucccccaaaagaauugguuca

SEQ ID NO: 489309 - RNA, 32 nt, Human
uagcccagucuggagugcagugguacaauaau

SEQ ID NO: 489310 - RNA, 32 nt, Human
uagcccagucuggagugcaguggugugaucau

SEQ ID NO: 489311 - RNA, 32 nt, Human
uagcccagugaaacugaucguugacuucugga

SEQ ID NO: 489312 - RNA, 32 nt, Human
uagcccagugccuggugcaaagcaggcuuuca

SEQ ID NO: 489313 - RNA, 32 nt, Human
uagcccaguuaauccucacaccuacuguagga

SEQ ID NO: 489314 - RNA, 32 nt, Human
uagcccaucaugacuaucaaaauucaccugua

SEQ ID NO: 489315 - RNA, 32 nt, Human
uagcccaugaacacgugugggccucggucacg

SEQ ID NO: 489316 - RNA, 32 nt, Human
uagcccaugaggaggaugugaccgggacugag

SEQ ID NO: 489317 - RNA, 32 nt, Human
uagcccaugccuuuugagggcugaacaaauaa

SEQ ID NO: 489318 - RNA, 32 nt, Human
uagcccaugcuguuuucccuuugccacacugu

SEQ ID NO: 489319 - RNA, 32 nt, Human
uagcccauguuuagauccaggucuccaauuca

SEQ ID NO: 489320 - RNA, 32 nt, Human
uagccccacugcacuccagccugggugacaga

SEQ ID NO: 489321 - RNA, 32 nt, Human
uagccccagagccuggcaacagccuggccugc

SEQ ID NO: 489322 - RNA, 32 nt, Human
uagccccagcuacuagggaggcugaggaggga

SEQ ID NO: 489323 - RNA, 32 nt, Human
uagccccagcuacucaagaggcugaggcagga

SEQ ID NO: 489324 - RNA, 32 nt, Human
uagccccagcuacucgggaggcugaggcagga

SEQ ID NO: 489325 - RNA, 32 nt, Human
uagccccagcuacucgggaggcugagguggaa

SEQ ID NO: 489326 - RNA, 32 nt, Human
uagccccagcuacuugggaggcugaggcggga

SEQ ID NO: 489327 - RNA, 32 nt, Human
uagccccagcuacuugggaggcugagguggga

SEQ ID NO: 489328 - RNA, 32 nt, Human
uagccccagcuauucaggagacugaggcagga

SEQ ID NO: 489329 - RNA, 32 nt, Human
uagccccaggcccgcccugcccgcgcccgccg

SEQ ID NO: 489330 - RNA, 32 nt, Human
uagcccccaacacacagaaaccacaccagaua

SEQ ID NO: 489331 - RNA, 19 nt, Human
uagcccccaagucaggcca

SEQ ID NO: 489332 - RNA, 32 nt, Human
uagcccccagccagggcguuggggagggcggu

SEQ ID NO: 489333 - RNA, 32 nt, Human
uagcccccgaguccaagaacuuaggcaggggc

SEQ ID NO: 489334 - RNA, 32 nt, Human
uagcccccuccaccuuuccacucaacaaccuc

SEQ ID NO: 489335 - RNA, 32 nt, Human
uagcccccugcacuguccuucccauaggagaa

SEQ ID NO: 489336 - RNA, 32 nt, Human
uagcccccuuuuaagagaaucucccuuucaau

SEQ ID NO: 489337 - RNA, 32 nt, Human
uagccccgccugcugcuucuccaccuccccuc

SEQ ID NO: 489338 - RNA, 32 nt, Human
uagccccgccugcugcuucucuaccuccccuc

SEQ ID NO: 489339 - RNA, 32 nt, Human
uagccccggacugaguccccuccagucgagga

SEQ ID NO: 489340 - RNA, 32 nt, Human
uagccccggcucccagugugcgcccggccggc

SEQ ID NO: 489341 - RNA, 32 nt, Human
uagccccggggcccugagcagaggccguagcu

SEQ ID NO: 489342 - RNA, 32 nt, Human
uagccccgugauggcucccuguuggcuacgca

SEQ ID NO: 489343 - RNA, 32 nt, Human
uagccccucaugcugggcucuggaccaugagc

SEQ ID NO: 489344 - RNA, 25 nt, Human
uagccccucccagccuaccccuccu

SEQ ID NO: 489345 - RNA, 32 nt, Human
uagccccucucaaaaggagucuuuauucugag

SEQ ID NO: 489346 - RNA, 32 nt, Human
uagccccugcacccucuucccugccucugcuc

SEQ ID NO: 489347 - RNA, 32 nt, Human
uagccccugccugcacccacgaugcugcacgg

SEQ ID NO: 489348 - RNA, 32 nt, Human
uagccccuucaucaugucaucucccuuaugcu

SEQ ID NO: 489349 - RNA, 31 nt, Human
uagccccuucccgucugcccuguguccucac

SEQ ID NO: 489350 - RNA, 32 nt, Human
uagcccgcagugcaggggcagcgcggcgcggg

SEQ ID NO: 489351 - RNA, 32 nt, Human
uagcccgccugggaggagcgccuggacucgcg

SEQ ID NO: 489352 - RNA, 32 nt, Human
uagcccggaaggaggagcaagagccagggggc

SEQ ID NO: 489353 - RNA, 32 nt, Human
uagcccggccagggccuggugugaggcugggc

SEQ ID NO: 489354 - RNA, 32 nt, Human
uagcccgggggaggcagaaucuggguaaugga

SEQ ID NO: 489355 - RNA, 32 nt, Human
uagcccuaaggagaugaucagagauguguaaa

SEQ ID NO: 489356 - RNA, 32 nt, Human
uagcccuagcuacucuggaggcugaggcagga

SEQ ID NO: 489357 - RNA, 32 nt, Human
uagcccucaaauaaacuguuauugcauuauag

SEQ ID NO: 489358 - RNA, 32 nt, Human
uagcccucauggcugaaggcccaguccuggcu

SEQ ID NO: 489359 - RNA, 19 nt, Human
uagcccuccauccucuaca

SEQ ID NO: 489360 - RNA, 32 nt, Human
uagcccucccaaaauguagauuauuuuauuuc

SEQ ID NO: 489361 - RNA, 32 nt, Human
uagcccucccucucuugggacagaccccucgg

SEQ ID NO: 489362 - RNA, 32 nt, Human
uagcccucccugcuuugccuggcccguugaag

SEQ ID NO: 489363 - RNA, 32 nt, Human
uagcccuggcuccaagggcugccuccugacag

SEQ ID NO: 489364 - RNA, 32 nt, Human
uagcccuggcuggaaaaccaccucucaauagc

SEQ ID NO: 489365 - RNA, 32 nt, Human
uagcccugggcaagagccuggaagccucuaua

SEQ ID NO: 489366 - RNA, 32 nt, Human
uagcccugguacaugguacacacacccccacc

SEQ ID NO: 489367 - RNA, 32 nt, Human
uagcccuguccauccagcaccuggacaccccg

SEQ ID NO: 489368 - RNA, 32 nt, Human
uagcccugucccccagccuggcaccuggacac

SEQ ID NO: 489369 - RNA, 32 nt, Human
uagcccugucccuucccugccugcagcccagg

SEQ ID NO: 489370 - RNA, 32 nt, Human
uagcccugugaccaacucuggcugccagaaaa

SEQ ID NO: 489371 - RNA, 32 nt, Human
uagcccuguuucucaauucccaucauguagag

SEQ ID NO: 489372 - RNA, 32 nt, Human
uagcccuuggccaggccauccuguugcagauc

SEQ ID NO: 489373 - RNA, 32 nt, Human
uagcccuuguaauccuagcacuuugggaggcc

SEQ ID NO: 489374 - RNA, 32 nt, Human
uagcccuuuguaguuugcaaagcacuuuucca

SEQ ID NO: 489375 - RNA, 32 nt, Human
uagcccuuuguuuugcaguggaaaacacugaa

SEQ ID NO: 489376 - RNA, 32 nt, Human
uagcccuuuuagauuuuggcacugugaaaccc

SEQ ID NO: 489377 - RNA, 32 nt, Human
uagccgaagagauuccucugaaaaucuuggcc

SEQ ID NO: 489378 - RNA, 32 nt, Human
uagccgaagcgcuuccagcauccucuguucau

SEQ ID NO: 489379 - RNA, 32 nt, Human
uagccgacucacuugcaacuccaccucagcag

SEQ ID NO: 489380 - RNA, 32 nt, Human
uagccgagggagagucuuggggccaagaaggg

SEQ ID NO: 489381 - RNA, 32 nt, Human
uagccgaucucuaggcccuucuugcacugcca

SEQ ID NO: 489382 - RNA, 32 nt, Human
uagccgccgcugggccgagccugcacuggggc

SEQ ID NO: 489383 - RNA, 32 nt, Human
uagccgccuuucugucugagagaaacugaggc

SEQ ID NO: 489384 - RNA, 32 nt, Human
uagccgcggcgcugcugcugggcugcugggcu

SEQ ID NO: 489385 - RNA, 32 nt, Human
uagccgcggcugcuucgguugccgcggucggu

SEQ ID NO: 489386 - RNA, 32 nt, Human
uagccgcucgccguccuugcaggcucugccgu

SEQ ID NO: 489387 - RNA, 32 nt, Human
uagccgcugcuugugagaccuuccucaagcuc

SEQ ID NO: 489388 - RNA, 32 nt, Human
uagccggagacagcucuucaguucccauaaac

SEQ ID NO: 489389 - RNA, 32 nt, Human
uagccggagccgcgggugagcgcggcgagcgg

SEQ ID NO: 489390 - RNA, 32 nt, Human
uagccggccccagggagugcagagccagggag

SEQ ID NO: 489391 - RNA, 32 nt, Human
uagccgggcauggugcaugccuguaaucccag

SEQ ID NO: 489392 - RNA, 32 nt, Human
uagccgggcucacgccugaaaucccagcacuu

SEQ ID NO: 489393 - RNA, 32 nt, Human
uagccggggccaggggaccgugguggagaccu

SEQ ID NO: 489394 - RNA, 32 nt, Human
uagccguaacuugccugcaccugcugccuuaa

SEQ ID NO: 489395 - RNA, 32 nt, Human
uagccgucauccucacagcugcagggccaggu

SEQ ID NO: 489396 - RNA, 32 nt, Human
uagccgucuccucuuuaucaugcuuuuucccc

SEQ ID NO: 489397 - RNA, 32 nt, Human
uagccgugcacagccccauacacuucagggga

SEQ ID NO: 489398 - RNA, 23 nt, Human
uagccguguuagggaucauguua

SEQ ID NO: 489399 - RNA, 32 nt, Human
uagccuaacaaggugcugucacagacccuugu

SEQ ID NO: 489400 - RNA, 32 nt, Human
uagccuaaguaggaagugaaaagauaauucac

SEQ ID NO: 489401 - RNA, 23 nt, Human
uagccuaauaaagcuuuuuugaa

SEQ ID NO: 489402 - RNA, 32 nt, Human
uagccuacaguguuuccacacgcccugacacc

SEQ ID NO: 489403 - RNA, 22 nt, Human
uagccuaggcaacauagugaga

SEQ ID NO: 489404 - RNA, 32 nt, Human
uagccuagggaacauggcaaaaccccagcucu

SEQ ID NO: 489405 - RNA, 22 nt, Human
uagccuaggugacagagugaga

SEQ ID NO: 489406 - RNA, 32 nt, Human
uagccuaguuuuccuuuucuuuauucuggcuc

SEQ ID NO: 489407 - RNA, 32 nt, Human
uagccuaucccuccugacaguccuuauaaaua

SEQ ID NO: 489408 - RNA, 32 nt, Human
uagccuaucuccugugccccugacugagcaga

SEQ ID NO: 489409 - RNA, 32 nt, Human
uagccuauucccucuaggaaccuuggagggca

SEQ ID NO: 489410 - RNA, 23 nt, Human
uagccucaaacucccaggcucaa

SEQ ID NO: 489411 - RNA, 23 nt, Human
uagccucaaacuccuggucucaa

SEQ ID NO: 489412 - RNA, 23 nt, Human
uagccucaaacuucugggcuuaa

SEQ ID NO: 489413 - RNA, 32 nt, Human
uagccucacgugcaaucugggugucuucgggg

SEQ ID NO: 489414 - RNA, 17 nt, Human
uagccucagaucuuccc

SEQ ID NO: 489415 - RNA, 32 nt, Human
uagccucaucucagugccuaugaggggccugc

SEQ ID NO: 489416 - RNA, 32 nt, Human
uagccucauggaccagcccacguuuuccaugg

SEQ ID NO: 489417 - RNA, 22 nt, Human
uagccuccaaccccugggcuca

SEQ ID NO: 489418 - RNA, 32 nt, Human
uagccuccauaacugugugagccaauucccua

SEQ ID NO: 489419 - RNA, 32 nt, Human
uagccucccaagugcuaggauuacaggcauca

SEQ ID NO: 489420 - RNA, 32 nt, Human
uagccuccuccacuccuccccacagcgcagag

SEQ ID NO: 489421 - RNA, 32 nt, Human
uagccucucaggaaccugcuuaccucagagcc

SEQ ID NO: 489422 - RNA, 32 nt, Human
uagccucugagauguguggugugagcccgugu

SEQ ID NO: 489423 - RNA, 32 nt, Human
uagccucugcugcaaaugcucagcccugcugu

SEQ ID NO: 489424 - RNA, 32 nt, Human
uagccucuuucaucuucucucacccacauaac

SEQ ID NO: 489425 - RNA, 20 nt, Human
uagccugaaaccucuuccac

SEQ ID NO: 489426 - RNA, 32 nt, Human
uagccugacagcucuagauacagcauuucuau

SEQ ID NO: 489427 - RNA, 32 nt, Human
uagccugaccaacauggagaaacccugucucu

SEQ ID NO: 489428 - RNA, 32 nt, Human
uagccugaccaacauggagaaaucccgucucu

SEQ ID NO: 489429 - RNA, 32 nt, Human
uagccugaccaacauggugaaacucuguucua

SEQ ID NO: 489430 - RNA, 32 nt, Human
uagccugacccuugcugaucuguccagccucu

SEQ ID NO: 489431 - RNA, 32 nt, Human
uagccugaccgacauggagaaacccugugucc

SEQ ID NO: 489432 - RNA, 32 nt, Human
uagccugagcuccuaaagaccucuuguacuug

SEQ ID NO: 489433 - RNA, 32 nt, Human
uagccugaguauacaaucaagcuucagugugc

SEQ ID NO: 489434 - RNA, 32 nt, Human
uagccugaugucaaccuggaagcugguguuca

SEQ ID NO: 489435 - RNA, 32 nt, Human
uagccugaugucaaccugggagcuggugauca

SEQ ID NO: 489436 - RNA, 32 nt, Human
uagccugcagugaacuaugauaguaccacugc

SEQ ID NO: 489437 - RNA, 32 nt, Human
uagccugcggucaggggcaaggcuuuuggaug

SEQ ID NO: 489438 - RNA, 32 nt, Human
uagccugcuacagccuugaacucaugggcuca

SEQ ID NO: 489439 - RNA, 32 nt, Human
uagccugcuguugaccaguaguaugcuauuag

SEQ ID NO: 489440 - RNA, 32 nt, Human
uagccugcuuucuuaccaaauucauguuaccc

SEQ ID NO: 489441 - RNA, 20 nt, Human
uagccugcuuuuguccuguu

SEQ ID NO: 489442 - RNA, 32 nt, Human
uagccuggacaacauggugaaaccccaucucu

SEQ ID NO: 489443 - RNA, 22 nt, Human
uagccuggacaacuaagugaga

SEQ ID NO: 489444 - RNA, 32 nt, Human
uagccuggagaugggaaaauaugcuuggcaga

SEQ ID NO: 489445 - RNA, 32 nt, Human
uagccuggaggucaaggcugcagugagccaug

SEQ ID NO: 489446 - RNA, 32 nt, Human
uagccuggaugagcugaguggagccaggcugg

SEQ ID NO: 489447 - RNA, 32 nt, Human
uagccuggcagccuggcuuugcggacucaccu

SEQ ID NO: 489448 - RNA, 32 nt, Human
uagccuggccaacaucaugaaaccccgucucu

SEQ ID NO: 489449 - RNA, 32 nt, Human
uagccuggccaacaugaugaaacccugucucu

SEQ ID NO: 489450 - RNA, 32 nt, Human
uagccuggccaacauggcaaaacccccucuuu

SEQ ID NO: 489451 - RNA, 32 nt, Human
uagccuggccaacaugguaaaacccuaucuuu

SEQ ID NO: 489452 - RNA, 32 nt, Human
uagccuggccaacauggugaaaccccaucucu

SEQ ID NO: 489453 - RNA, 30 nt, Human
uagccuggccaacauggugaaaccccguca

SEQ ID NO: 489454 - RNA, 32 nt, Human
uagccuggccaacauggugaaaccccgucucu

SEQ ID NO: 489455 - RNA, 32 nt, Human
uagccuggccaacauggugaaacccugucucu

SEQ ID NO: 489456 - RNA, 32 nt, Human
uagccuggccaacauggugagacacccgucuc

SEQ ID NO: 489457 - RNA, 32 nt, Human
uagccuggccaacauguuguaaaccccgucuc

SEQ ID NO: 489458 - RNA, 32 nt, Human
uagccuggccaagauggugaaaccccaucucu

SEQ ID NO: 489459 - RNA, 29 nt, Human
uagccuggcuaacauggcaaaaccccauc

SEQ ID NO: 489460 - RNA, 32 nt, Human
uagccuggcuaauacagugaaaccccaucucu

SEQ ID NO: 489461 - RNA, 32 nt, Human
uagccuggcuuucuugcucucccucaucucau

SEQ ID NO: 489462 - RNA, 32 nt, Human
uagccugggaggaucagucuguccaggucagc

SEQ ID NO: 489463 - RNA, 22 nt, Human
uagccugggcaacagagcgaga

SEQ ID NO: 489464 - RNA, 22 nt, Human
uagccugggcaacagaguaaga

SEQ ID NO: 489465 - RNA, 22 nt, Human
uagccugggcaacagagugaga

SEQ ID NO: 489466 - RNA, 32 nt, Human
uagccugggcaacaugaugaaaccccaucucc

SEQ ID NO: 489467 - RNA, 32 nt, Human
uagccugggcaacauggugaaaccccaucucu

SEQ ID NO: 489468 - RNA, 32 nt, Human
uagccugggcaacauggugagaccccaucucu

SEQ ID NO: 489469 - RNA, 32 nt, Human
uagccugggcaacuugguaaaaccccaucucu

SEQ ID NO: 489470 - RNA, 22 nt, Human
uagccugggcgacagagcaaga

SEQ ID NO: 489471 - RNA, 22 nt, Human
uagccugggcgacagagcgaga

SEQ ID NO: 489472 - RNA, 22 nt, Human
uagccugggcgacagagugaga

SEQ ID NO: 489473 - RNA, 22 nt, Human
uagccugggugacaaagugaga

SEQ ID NO: 489474 - RNA, 22 nt, Human
uagccugggugacagaacgaga

SEQ ID NO: 489475 - RNA, 22 nt, Human
uagccugggugacagaaugaga

SEQ ID NO: 489476 - RNA, 22 nt, Human
uagccugggugacagagcaaga

SEQ ID NO: 489477 - RNA, 22 nt, Human
uagccugggugacagagcgaga

SEQ ID NO: 489478 - RNA, 22 nt, Human
uagccugggugacagagugaga

SEQ ID NO: 489479 - RNA, 32 nt, Human
uagccugggugacugacuggccugggccuggg

SEQ ID NO: 489480 - RNA, 32 nt, Human
uagccuggucuuaaacuccuaaccucagguga

SEQ ID NO: 489481 - RNA, 32 nt, Human
uagccugguggcagagugagacuccaucucaa

SEQ ID NO: 489482 - RNA, 32 nt, Human
uagccugguggcaguggugagggagugaggag

SEQ ID NO: 489483 - RNA, 32 nt, Human
uagccuggugggaaaaugcacacauuucugag

SEQ ID NO: 489484 - RNA, 32 nt, Human
uagccuggugggcguggcaugugcuuuuuaaa

SEQ ID NO: 489485 - RNA, 32 nt, Human
uagccugucacucauuugccaugagguaugug

SEQ ID NO: 489486 - RNA, 32 nt, Human
uagccugucucaaagaaagaaagaaagaaaag

SEQ ID NO: 489487 - RNA, 18 nt, Human
uagccuguggucuccaca

SEQ ID NO: 489488 - RNA, 32 nt, Human
uagccuuaaagagccuacaguguccuuuugga

SEQ ID NO: 489489 - RNA, 23 nt, Human
uagccuuaaauuccuggguucaa

SEQ ID NO: 489490 - RNA, 32 nt, Human
uagccuuacugggaaccuucugucccccaaga

SEQ ID NO: 489491 - RNA, 32 nt, Human
uagccuuauuucucaucacaucaugcuguuuu

SEQ ID NO: 489492 - RNA, 32 nt, Human
uagccuuccucacagcacccaggauugugacu

SEQ ID NO: 489493 - RNA, 20 nt, Human
uagccuuccugaccuccaua

SEQ ID NO: 489494 - RNA, 32 nt, Human
uagccuuccugaccuucacuuaccucagcuau

SEQ ID NO: 489495 - RNA, 17 nt, Human
uagccuugaaguuuaca

SEQ ID NO: 489496 - RNA, 18 nt, Human
uagccuugaauccugcau

SEQ ID NO: 489497 - RNA, 23 nt, Human
uagccuugaccucucaggcucaa

SEQ ID NO: 489498 - RNA, 21 nt, Human
uagccuugagcaccuuccaca

SEQ ID NO: 489499 - RNA, 18 nt, Human
uagccuugauauucucca

SEQ ID NO: 489500 - RNA, 32 nt, Human
uagccuugaugaaaaguacaagauauguucaa

SEQ ID NO: 489501 - RNA, 32 nt, Human
uagccuugauuucaguagauguaauggaagcc

SEQ ID NO: 489502 - RNA, 20 nt, Human
uagccuugcaguggucuaca

SEQ ID NO: 489503 - RNA, 32 nt, Human
uagccuugccaacauggugaaaccccaucucu

SEQ ID NO: 489504 - RNA, 17 nt, Human
uagccuugcuuucuaua

SEQ ID NO: 489505 - RNA, 32 nt, Human
uagccuugguaucauuuucuagcaauaacuga

SEQ ID NO: 489506 - RNA, 32 nt, Human
uagccuuggucuuuuggccucuuuacccugug

SEQ ID NO: 489507 - RNA, 18 nt, Human
uagccuugugguuucaca

SEQ ID NO: 489508 - RNA, 19 nt, Human
uagccuuuacuucuucaca

SEQ ID NO: 489509 - RNA, 20 nt, Human
uagccuuugcauucucuaua

SEQ ID NO: 489510 - RNA, 32 nt, Human
uagccuuuggaggugggcucuauuccuguccc

SEQ ID NO: 489511 - RNA, 32 nt, Human
uagccuuuucccucugcccauccuagaggaga

SEQ ID NO: 489512 - RNA, 32 nt, Human
uagccuuuuugguaugguaaagagaugucaaa

SEQ ID NO: 489513 - RNA, 32 nt, Human
uagcgaacuucccucauuucucucugcaaucu

SEQ ID NO: 489514 - RNA, 32 nt, Human
uagcgaaggcagcagcagcgguggcgacauga

SEQ ID NO: 489515 - RNA, 23 nt, Human
uagcgagaccccaucucuacaaa

SEQ ID NO: 489516 - RNA, 24 nt, Human
uagcgagacccccauugcuacaaa

SEQ ID NO: 489517 - RNA, 23 nt, Human
uagcgagacccugucucuacaaa

SEQ ID NO: 489518 - RNA, 23 nt, Human
uagcgagacccugucucuacaag

SEQ ID NO: 489519 - RNA, 18 nt, Human
uagcgagaucugauuccg

SEQ ID NO: 489520 - RNA, 32 nt, Human
uagcgaggaggcaccccaagcacggagaagac

SEQ ID NO: 489521 - RNA, 32 nt, Human
uagcgagggcccuggccucaccuccugguggc

SEQ ID NO: 489522 - RNA, 32 nt, Human
uagcgauacugaggcagcgcccaggacaagug

SEQ ID NO: 489523 - RNA, 32 nt, Human
uagcgauagcuuuuaguagacagcgguaggug

SEQ ID NO: 489524 - RNA, 32 nt, Human
uagcgaugcugcaccucccaugauguccuggc

SEQ ID NO: 489525 - RNA, 30 nt, Human
uagcgaugucauucuucccugcucagacuc

SEQ ID NO: 489526 - RNA, 32 nt, Human
uagcgauuaucucuacuucuccaccucucauc

SEQ ID NO: 489527 - RNA, 32 nt, Human
uagcgcaaggcgggccgggcaccccgcgcucc

SEQ ID NO: 489528 - RNA, 24 nt, Human
uagcgcagggagccaggcgggcug

SEQ ID NO: 489529 - RNA, 32 nt, Human
uagcgccacccgcuucgcuugcaucagcugcg

SEQ ID NO: 489530 - RNA, 32 nt, Human
uagcgccacugcacugcacgccagccuaggcg

SEQ ID NO: 489531 - RNA, 32 nt, Human
uagcgccacugcaguccggccugggugaaaga

SEQ ID NO: 489532 - RNA, 32 nt, Human
uagcgccagggcuucccgcaccccaggcuggg

SEQ ID NO: 489533 - RNA, 32 nt, Human
uagcgccauugcacuccagccugagcgacaga

SEQ ID NO: 489534 - RNA, 32 nt, Human
uagcgccauugcacuccagccugggcaacaag

SEQ ID NO: 489535 - RNA, 32 nt, Human
uagcgccauugcacuccagccugggcgacuga

SEQ ID NO: 489536 - RNA, 32 nt, Human
uagcgccccauuugggaacagagcaagagugu

SEQ ID NO: 489537 - RNA, 32 nt, Human
uagcgcccugcagggacggugcaggcugguug

SEQ ID NO: 489538 - RNA, 32 nt, Human
uagcgcccuuuggaaagaagcuacuauaggac

SEQ ID NO: 489539 - RNA, 32 nt, Human
uagcgccucccaucugcuccccaauucuugau

SEQ ID NO: 489540 - RNA, 32 nt, Human
uagcgccugccugcccgccacugcccgcugag

SEQ ID NO: 489541 - RNA, 32 nt, Human
uagcgccugcucauauaaagcucuccuaacuc

SEQ ID NO: 489542 - RNA, 32 nt, Human
uagcgcgggagcugagaaguugcaggguugag

SEQ ID NO: 489543 - RNA, 32 nt, Human
uagcgcucaagcagagcccagcgcggugcuau

SEQ ID NO: 489544 - RNA, 32 nt, Human
uagcgcugaaacugaacaucuccuggguucuu

SEQ ID NO: 489545 - RNA, 32 nt, Human
uagcgcugggcaaagugaaggcuuccugaucu

SEQ ID NO: 489546 - RNA, 32 nt, Human
uagcgcuguccccagggccuugagugccugga

SEQ ID NO: 489547 - RNA, 32 nt, Human
uagcggagaagcucccccucccugcuucccuu

SEQ ID NO: 489548 - RNA, 19 nt, Human
uagcggagagcacgggaag

SEQ ID NO: 489549 - RNA, 32 nt, Human
uagcggaggaaaggagcaauccaugcacacuc

SEQ ID NO: 489550 - RNA, 32 nt, Human
uagcggcaaagauucagagaggcgugagcagc

SEQ ID NO: 489551 - RNA, 32 nt, Human
uagcggcaacucccucccucccugcaauccuu

SEQ ID NO: 489552 - RNA, 32 nt, Human
uagcggcacugcacuccagccugggugacaaa

SEQ ID NO: 489553 - RNA, 32 nt, Human
uagcggcagcagccccagccucaaggccaguu

SEQ ID NO: 489554 - RNA, 32 nt, Human
uagcggcauugcacuccagccugggcaacaag

SEQ ID NO: 489555 - RNA, 32 nt, Human
uagcggccaaggaggcuucaguucuuugccgc

SEQ ID NO: 489556 - RNA, 32 nt, Human
uagcggcccgggcgcugccuucacuccuggag

SEQ ID NO: 489557 - RNA, 32 nt, Human
uagcggcccuggagggcugcuaggugguucug

SEQ ID NO: 489558 - RNA, 32 nt, Human
uagcggccucugcaccacggagcugcuuggug

SEQ ID NO: 489559 - RNA, 32 nt, Human
uagcggcucuuccaagcucaaagaagcagagg

SEQ ID NO: 489560 - RNA, 32 nt, Human
uagcgggagagacaggauaaccuguccgagag

SEQ ID NO: 489561 - RNA, 32 nt, Human
uagcgggagagggagcgggaucaccggcccgg

SEQ ID NO: 489562 - RNA, 32 nt, Human
uagcgggagggguguguucauggggaacaacc

SEQ ID NO: 489563 - RNA, 32 nt, Human
uagcggggcaaccucagggcuaccagcgaucc

SEQ ID NO: 489564 - RNA, 32 nt, Human
uagcggggcccaggcugcccgcgggugcaccc

SEQ ID NO: 489565 - RNA, 32 nt, Human
uagcgggugccuguaaucccaguuacucagga

SEQ ID NO: 489566 - RNA, 32 nt, Human
uagcggguggaaagcuggacuggaguucucac

SEQ ID NO: 489567 - RNA, 32 nt, Human
uagcggucaaaggagcaaaacagacuuugucu

SEQ ID NO: 489568 - RNA, 32 nt, Human
uagcgucaccucaggucuggggaagucugugc

SEQ ID NO: 489569 - RNA, 26 nt, Human
uagcgucauaguuuccucacccaaau

SEQ ID NO: 489570 - RNA, 32 nt, Human
uagcguccucaccggcugccagcagggaaaug

SEQ ID NO: 489571 - RNA, 32 nt, Human
uagcguccucaccuuccccaagccacacaucc

SEQ ID NO: 489572 - RNA, 32 nt, Human
uagcgugaacccagaagguggagguagcagug

SEQ ID NO: 489573 - RNA, 32 nt, Human
uagcgugaaggggaaucaaagaggagguugug

SEQ ID NO: 489574 - RNA, 32 nt, Human
uagcgugaucauagcuuacugcagccucgaac

SEQ ID NO: 489575 - RNA, 32 nt, Human
uagcgugaucucuacucacugcagccucaauc

SEQ ID NO: 489576 - RNA, 32 nt, Human
uagcguggauccugggaugagaagacucaggg

SEQ ID NO: 489577 - RNA, 32 nt, Human
uagcgugggaagggggacagagagggcccucc

SEQ ID NO: 489578 - RNA, 32 nt, Human
uagcguuccauuugugaacaaauguucccuug

SEQ ID NO: 489579 - RNA, 32 nt, Human
uagcguuccucuuccccucuaguuuccuggag

SEQ ID NO: 489580 - RNA, 32 nt, Human
uagcguugaugaacucauguuugggaagaaau

SEQ ID NO: 489581 - RNA, 32 nt, Human
uagcguuggagacauacacaaaugggcauaca

SEQ ID NO: 489582 - RNA, 32 nt, Human
uagcguuguaggggcccugccugcacugcggu

SEQ ID NO: 489583 - RNA, 32 nt, Human
uagcguuuccuccucgaaauucuaccaagacu

SEQ ID NO: 489584 - RNA, 32 nt, Human
uagcuaaaaguuaagaaggaaagaaggaaagc

SEQ ID NO: 489585 - RNA, 32 nt, Human
uagcuaaaugacugagaagucuaaagagcuga

SEQ ID NO: 489586 - RNA, 32 nt, Human
uagcuaacuaugacagucacccucuguacgug

SEQ ID NO: 489587 - RNA, 32 nt, Human
uagcuaacuguaccaucacugccacaucaggg

SEQ ID NO: 489588 - RNA, 32 nt, Human
uagcuaaggccuggcuguagcaguuauaaacu

SEQ ID NO: 489589 - RNA, 32 nt, Human
uagcuaaguccaccccaccugcugccucacau

SEQ ID NO: 489590 - RNA, 31 nt, Human
uagcuaaucaauaaauauuuauugagcugaa

SEQ ID NO: 489591 - RNA, 32 nt, Human
uagcuacacccacucuaaaauuaacuggacau

SEQ ID NO: 489592 - RNA, 32 nt, Human
uagcuacacuucagauuaaaguaggagaaaga

SEQ ID NO: 489593 - RNA, 32 nt, Human
uagcuaccacuguugaguuuuccugcuuggaa

SEQ ID NO: 489594 - RNA, 32 nt, Human
uagcuaccaucuuugcagcagcccugguaacu

SEQ ID NO: 489595 - RNA, 32 nt, Human
uagcuacccuccccgucuccagccugggcucc

SEQ ID NO: 489596 - RNA, 32 nt, Human
uagcuacccuugcccaccgccguggaguucgc

SEQ ID NO: 489597 - RNA, 32 nt, Human
uagcuaccuggacuuuacagagcugucagaag

SEQ ID NO: 489598 - RNA, 32 nt, Human
uagcuaccugggagguuaaggugggaggauug

SEQ ID NO: 489599 - RNA, 32 nt, Human
uagcuaccuucucuacccaucucccccauccc

SEQ ID NO: 489600 - RNA, 32 nt, Human
uagcuacucuuauguuccacaugcacauauga

SEQ ID NO: 489601 - RNA, 32 nt, Human
uagcuacugcacuccaaccugggcaacauagu

SEQ ID NO: 489602 - RNA, 32 nt, Human
uagcuacuuauucagauacugaagaccaacgg

SEQ ID NO: 489603 - RNA, 32 nt, Human
uagcuacuucuuuaagcuccuccagugugcug

SEQ ID NO: 489604 - RNA, 32 nt, Human
uagcuacuugggaggcugagaugggaggauca

SEQ ID NO: 489605 - RNA, 32 nt, Human
uagcuacuugggaggcugaggcaggugaaucg

SEQ ID NO: 489606 - RNA, 32 nt, Human
uagcuacuugggaggcugaggugggagaauug

SEQ ID NO: 489607 - RNA, 32 nt, Human
uagcuacuugggaggcugaggugugaggauca

SEQ ID NO: 489608 - RNA, 32 nt, Human
uagcuagagauuggugaauugaaugcuccuga

SEQ ID NO: 489609 - RNA, 32 nt, Human
uagcuagaguuucaggaaugccuccagcuguc

SEQ ID NO: 489610 - RNA, 32 nt, Human
uagcuagauaaauauuguuagucuuagacaau

SEQ ID NO: 489611 - RNA, 32 nt, Human
uagcuagcagugagccaagaccgugccacugu

SEQ ID NO: 489612 - RNA, 32 nt, Human
uagcuagcauucaacagagaacucugucuuaa

SEQ ID NO: 489613 - RNA, 32 nt, Human
uagcuagcccacccugugcuaguuuucauguu

SEQ ID NO: 489614 - RNA, 32 nt, Human
uagcuagccugacuaagucccagauccccuac

SEQ ID NO: 489615 - RNA, 32 nt, Human
uagcuaggaaggguuuguagaaaacaagauaa

SEQ ID NO: 489616 - RNA, 32 nt, Human
uagcuaggacuacaaggcacaccaccaugccu

SEQ ID NO: 489617 - RNA, 32 nt, Human
uagcuaggagaugucaaaagcccauaugagga

SEQ ID NO: 489618 - RNA, 32 nt, Human
uagcuagggcuggggucagccacugccaaucc

SEQ ID NO: 489619 - RNA, 32 nt, Human
uagcuaguggagaggcaggaaaaaggaaauga

SEQ ID NO: 489620 - RNA, 32 nt, Human
uagcuauacauacucacuuuugguaacacuuu

SEQ ID NO: 489621 - RNA, 32 nt, Human
uagcuaugccaacugguugacccuccauucuc

SEQ ID NO: 489622 - RNA, 32 nt, Human
uagcuaugcuucuuccuccucagaccuggcau

SEQ ID NO: 489623 - RNA, 23 nt, Human
uagcuauguggaaugauauguca

SEQ ID NO: 489624 - RNA, 32 nt, Human
uagcuauguuuggagaaggaauuuguggcugc

SEQ ID NO: 489625 - RNA, 32 nt, Human
uagcuauuaagguggccuguugcagugcagag

SEQ ID NO: 489626 - RNA, 32 nt, Human
uagcuauuccacccucugccugccugccugcc

SEQ ID NO: 489627 - RNA, 32 nt, Human
uagcuauucgggaggcugagacaggagaauca

SEQ ID NO: 489628 - RNA, 32 nt, Human
uagcuauugcacuccagccuuggcaacauaau

SEQ ID NO: 489629 - RNA, 32 nt, Human
uagcuauuuaauuuuucccuuuccuauuguaa

SEQ ID NO: 489630 - RNA, 32 nt, Human
uagcuauuucgcauauauguaaaauguucuca

SEQ ID NO: 489631 - RNA, 32 nt, Human
uagcuauuugggaggcugaggcuggaggauug

SEQ ID NO: 489632 - RNA, 32 nt, Human
uagcucaacacaguuauauucuuuuugugaau

SEQ ID NO: 489633 - RNA, 32 nt, Human
uagcucaagccuguaaucccagcacuuuggga

SEQ ID NO: 489634 - RNA, 32 nt, Human
uagcucaaguugugcaugaauuacugaauauu

SEQ ID NO: 489635 - RNA, 32 nt, Human
uagcucacaccuguaaucccagaacuuuggga

SEQ ID NO: 489636 - RNA, 32 nt, Human
uagcucacaccuguaaucccagcacuucggga

SEQ ID NO: 489637 - RNA, 32 nt, Human
uagcucacaccuguaaucccagcacuuuagga

SEQ ID NO: 489638 - RNA, 32 nt, Human
uagcucacaccuguaaucccagcacuuuggga

SEQ ID NO: 489639 - RNA, 32 nt, Human
uagcucacaccuguaaucccagccuggaaugc

SEQ ID NO: 489640 - RNA, 32 nt, Human
uagcucacaccuguaauucccagcgcuuuggg

SEQ ID NO: 489641 - RNA, 32 nt, Human
uagcucacauccuccuuccuccaccuugacaa

SEQ ID NO: 489642 - RNA, 32 nt, Human
uagcucaccgcaaccuccaccucccggguuca

SEQ ID NO: 489643 - RNA, 32 nt, Human
uagcucacgccuguaaucccaacacuuuggga

SEQ ID NO: 489644 - RNA, 32 nt, Human
uagcucacgccuguaaucccagcacuuuggga

SEQ ID NO: 489645 - RNA, 32 nt, Human
uagcucacgccuguaauuccagcacuuuggga

SEQ ID NO: 489646 - RNA, 32 nt, Human
uagcucacgccugugauuccagcacuuuggga

SEQ ID NO: 489647 - RNA, 32 nt, Human
uagcucacuacaaccuccacuuuccagguuca

SEQ ID NO: 489648 - RNA, 32 nt, Human
uagcucacuacaaccucugccucccagguuca

SEQ ID NO: 489649 - RNA, 32 nt, Human
uagcucacuacaacuucugccucccaggcuca

SEQ ID NO: 489650 - RNA, 32 nt, Human
uagcucacuacagccuugaacuccugggcuca

SEQ ID NO: 489651 - RNA, 32 nt, Human
uagcucacugaagccucaaccucccuggguuu

SEQ ID NO: 489652 - RNA, 32 nt, Human
uagcucacugcaacccccgccucccggguuca

SEQ ID NO: 489653 - RNA, 32 nt, Human
uagcucacugcaaccucaaacuccugggcuca

SEQ ID NO: 489654 - RNA, 32 nt, Human
uagcucacugcaaccuccaacugcugggcuua

SEQ ID NO: 489655 - RNA, 32 nt, Human
uagcucacugcaaccuccaccucccagguuca

SEQ ID NO: 489656 - RNA, 32 nt, Human
uagcucacugcaaccuccaccucccggguuca

SEQ ID NO: 489657 - RNA, 32 nt, Human
uagcucacugcaaccuccgccuccuggguuca

SEQ ID NO: 489658 - RNA, 32 nt, Human
uagcucacugcaaccucugcuuccuggguuca

SEQ ID NO: 489659 - RNA, 32 nt, Human
uagcucacugcaagcuccgccucccagguuca

SEQ ID NO: 489660 - RNA, 32 nt, Human
uagcucacugcacccucaaccuccuggguuca

SEQ ID NO: 489661 - RNA, 32 nt, Human
uagcucacugcagccuccaccucccaggcuca

SEQ ID NO: 489662 - RNA, 32 nt, Human
uagcucacugcagcuucaaacucuugggcuca

SEQ ID NO: 489663 - RNA, 32 nt, Human
uagcucacugcagcuuugaccucccagaccca

SEQ ID NO: 489664 - RNA, 32 nt, Human
uagcucacugcugccucaaccucccaggcuca

SEQ ID NO: 489665 - RNA, 32 nt, Human
uagcucacuguagccucgaccuuccgggauca

SEQ ID NO: 489666 - RNA, 32 nt, Human
uagcucagaaguugcagagcagccugggcaac

SEQ ID NO: 489667 - RNA, 32 nt, Human
uagcucagccucccaccgucuuccuccuacac

SEQ ID NO: 489668 - RNA, 32 nt, Human
uagcucaggaagguagaagagaucugugccca

SEQ ID NO: 489669 - RNA, 32 nt, Human
uagcucaggagacaauuccagcacagacacua

SEQ ID NO: 489670 - RNA, 32 nt, Human
uagcucaggccuguaaccccagcacuucggga

SEQ ID NO: 489671 - RNA, 32 nt, Human
uagcucagggaggaggcaugagagggaucguu

SEQ ID NO: 489672 - RNA, 32 nt, Human
uagcucaggguuugugagugcaccaaucaaca

SEQ ID NO: 489673 - RNA, 32 nt, Human
uagcucaggucugggugccauucuuuacacuc

SEQ ID NO: 489674 - RNA, 32 nt, Human
uagcucaguaucucugccuucucuccauuguu

SEQ ID NO: 489675 - RNA, 32 nt, Human
uagcucauaccuguaaucccaggacuuuggga

SEQ ID NO: 489676 - RNA, 32 nt, Human
uagcucauacuuguaacccagcacuuugggaa

SEQ ID NO: 489677 - RNA, 32 nt, Human
uagcucaucucagccuccucugggagcaucaa

SEQ ID NO: 489678 - RNA, 32 nt, Human
uagcucaugccuguaacccuggcacuuaaggg

SEQ ID NO: 489679 - RNA, 32 nt, Human
uagcucaugccuguaaucccaauacuuuggga

SEQ ID NO: 489680 - RNA, 32 nt, Human
uagcucaugccuguaaucccagcacuucggga

SEQ ID NO: 489681 - RNA, 32 nt, Human
uagcucaugccuguaaucccagcacuuuggga

SEQ ID NO: 489682 - RNA, 32 nt, Human
uagcucaugccuguagucccagcuacuccaga

SEQ ID NO: 489683 - RNA, 32 nt, Human
uagcucaugccuguaucccagcccuuugggag

SEQ ID NO: 489684 - RNA, 31 nt, Human
uagcucaugucuguaaucccagcacuuuggg

SEQ ID NO: 489685 - RNA, 32 nt, Human
uagcuccaacuugucucagcaucacaucuucu

SEQ ID NO: 489686 - RNA, 31 nt, Human
uagcuccaagugucacacaccagaacauuaa

SEQ ID NO: 489687 - RNA, 32 nt, Human
uagcuccagcuacucaggaggcugaggcggga

SEQ ID NO: 489688 - RNA, 32 nt, Human
uagcuccagguggcaggcagagcaggaugcag

SEQ ID NO: 489689 - RNA, 32 nt, Human
uagcuccauauuggacauccccagaaaagaug

SEQ ID NO: 489690 - RNA, 32 nt, Human
uagcuccccugccccugcagccuggagggcuc

SEQ ID NO: 489691 - RNA, 32 nt, Human
uagcucccugcaggagagcugaaucuggagcu

SEQ ID NO: 489692 - RNA, 32 nt, Human
uagcucccuggacccgguugaccuguuggcuc

SEQ ID NO: 489693 - RNA, 32 nt, Human
uagcucccuggacccgguugaccuguuggucu

SEQ ID NO: 489694 - RNA, 32 nt, Human
uagcucccuguggggcaggagugccaggacca

SEQ ID NO: 489695 - RNA, 32 nt, Human
uagcucccuuuccuaggaguuguucuguccac

SEQ ID NO: 489696 - RNA, 32 nt, Human
uagcuccgcaaagcucugggcuugugugagag

SEQ ID NO: 489697 - RNA, 32 nt, Human
uagcuccggcgccccuagcuggugacugcugc

SEQ ID NO: 489698 - RNA, 32 nt, Human
uagcuccuaagaccugaaaacucuucucaaga

SEQ ID NO: 489699 - RNA, 32 nt, Human
uagcuccuauaccaccaccaccaccaccauua

SEQ ID NO: 489700 - RNA, 32 nt, Human
uagcuccucacugcuacagccuagaaggugag

SEQ ID NO: 489701 - RNA, 32 nt, Human
uagcuccuccugcuguggcuucagcugcugca

SEQ ID NO: 489702 - RNA, 32 nt, Human
uagcuccuccugguuuggugugguguuugcca

SEQ ID NO: 489703 - RNA, 32 nt, Human
uagcuccucuuuucuuccuuuuuauuucauaa

SEQ ID NO: 489704 - RNA, 32 nt, Human
uagcuccugcagcagcucugcuacgucaucgu

SEQ ID NO: 489705 - RNA, 32 nt, Human
uagcuccugcccccaggccuaggcaugcugcu

SEQ ID NO: 489706 - RNA, 32 nt, Human
uagcuccugccugcucucccugcguugccuag

SEQ ID NO: 489707 - RNA, 32 nt, Human
uagcuccuggcagagggugaguggggaccuac

SEQ ID NO: 489708 - RNA, 32 nt, Human
uagcucgauugccaaaaagcaccaagaaacau

SEQ ID NO: 489709 - RNA, 32 nt, Human
uagcucgguaaucucauguaccacagguaaug

SEQ ID NO: 489710 - RNA, 32 nt, Human
uagcucgucucaaacuccuggccucaagugau

SEQ ID NO: 489711 - RNA, 32 nt, Human
uagcucgugccuguaauaccaacauuuuggga

SEQ ID NO: 489712 - RNA, 32 nt, Human
uagcucuaaaaauagauucagagaaagggugg

SEQ ID NO: 489713 - RNA, 32 nt, Human
uagcucuacuacuugaaugauuuuggaauuuu

SEQ ID NO: 489714 - RNA, 32 nt, Human
uagcucuagcacuuacagcugugugaucuugg

SEQ ID NO: 489715 - RNA, 32 nt, Human
uagcucuauaaauauaugaauauggacaaaau

SEQ ID NO: 489716 - RNA, 32 nt, Human
uagcucucccucucacacacgcucacacccgg

SEQ ID NO: 489717 - RNA, 32 nt, Human
uagcucucgccuguaaucccagcacuuuggga

SEQ ID NO: 489718 - RNA, 32 nt, Human
uagcucucugcaaccucugccucccagguuca

SEQ ID NO: 489719 - RNA, 32 nt, Human
uagcucugagcagggucacauuuggccaaacc

SEQ ID NO: 489720 - RNA, 32 nt, Human
uagcucugcacucucuggaauaagggcccgau

SEQ ID NO: 489721 - RNA, 32 nt, Human
uagcucugccaguauuggguuuugccauuuuu

SEQ ID NO: 489722 - RNA, 32 nt, Human
uagcucugccucccucuccauaucuccuuccc

SEQ ID NO: 489723 - RNA, 32 nt, Human
uagcucugccugccugucaaccccucacugca

SEQ ID NO: 489724 - RNA, 32 nt, Human
uagcucuggaaccaggcuuguaauccauagca

SEQ ID NO: 489725 - RNA, 32 nt, Human
uagcucuggaccagccuguuggacccgcucug

SEQ ID NO: 489726 - RNA, 22 nt, Human
uagcucuggcauccucaggggu

SEQ ID NO: 489727 - RNA, 32 nt, Human
uagcucuggcauccucagggguugugauccag

SEQ ID NO: 489728 - RNA, 29 nt, Human
uagcucuggcugccugucagcucccuugg

SEQ ID NO: 489729 - RNA, 32 nt, Human
uagcucuggguugggcuuggggccaagucuca

SEQ ID NO: 489730 - RNA, 32 nt, Human
uagcucugucaccaggcuggagugcaguggug

SEQ ID NO: 489731 - RNA, 19 nt, Human
uagcucugugauucuucca

SEQ ID NO: 489732 - RNA, 32 nt, Human
uagcucuguggccucagaccucugggccugug

SEQ ID NO: 489733 - RNA, 24 nt, Human
uagcucuuaucacccuuccuagaa

SEQ ID NO: 489734 - RNA, 32 nt, Human
uagcucuuaucacccuuccuagaaagguuauu

SEQ ID NO: 489735 - RNA, 32 nt, Human
uagcucuugggaugcaggcucagcccgcugga

SEQ ID NO: 489736 - RNA, 32 nt, Human
uagcucuugucacguuccuuccuuccucacuc

SEQ ID NO: 489737 - RNA, 32 nt, Human
uagcucuuuaccuuuugaggaggaugagcggg

SEQ ID NO: 489738 - RNA, 32 nt, Human
uagcucuuuaguaauuugggcccagugccuug

SEQ ID NO: 489739 - RNA, 32 nt, Human
uagcucuuucccuccucccauuuccuuuagua

SEQ ID NO: 489740 - RNA, 22 nt, Human
uagcucuuucuugcuguuuuaa

SEQ ID NO: 489741 - RNA, 32 nt, Human
uagcucuuugaagagcuggucuauggaaguuu

SEQ ID NO: 489742 - RNA, 32 nt, Human
uagcugaaaacaaaugacaacuuucaaaacau

SEQ ID NO: 489743 - RNA, 32 nt, Human
uagcugaaacccaauucagauccaccauagga

SEQ ID NO: 489744 - RNA, 32 nt, Human
uagcugaccaaaggggucagcagggauggcgu

SEQ ID NO: 489745 - RNA, 32 nt, Human
uagcugaccauccuguuuuccaucccagagcc

SEQ ID NO: 489746 - RNA, 32 nt, Human
uagcugacucgguacucucugaagauggcaga

SEQ ID NO: 489747 - RNA, 32 nt, Human
uagcugagagguuccagcaaaagcuugaaguc

SEQ ID NO: 489748 - RNA, 32 nt, Human
uagcugagcaaugcuugugaaucuuuucuuaa

SEQ ID NO: 489749 - RNA, 32 nt, Human
uagcugaggaagaagggaggcuucacagcauc

SEQ ID NO: 489750 - RNA, 32 nt, Human
uagcugaggcccagaggaacgggaggaaaggg

SEQ ID NO: 489751 - RNA, 32 nt, Human
uagcugagguccagaaauacaaaccuggaacu

SEQ ID NO: 489752 - RNA, 32 nt, Human
uagcugagucaccauuuggcuucggccuggaa

SEQ ID NO: 489753 - RNA, 32 nt, Human
uagcugagugcacgccuguaaucccagcuucu

SEQ ID NO: 489754 - RNA, 16 nt, Human
uagcugauacuacaga

SEQ ID NO: 489755 - RNA, 32 nt, Human
uagcugaucacaccaacagauccucaucagca

SEQ ID NO: 489756 - RNA, 32 nt, Human
uagcugauggugcuggagcuguuaucauagcu

SEQ ID NO: 489757 - RNA, 32 nt, Human
uagcugcaaaggacagauccagggacugaagc

SEQ ID NO: 489758 - RNA, 32 nt, Human
uagcugcacgguggcugcuggccacaccacgg

SEQ ID NO: 489759 - RNA, 32 nt, Human
uagcugcagcaugccauuuggcuuucccaccu

SEQ ID NO: 489760 - RNA, 32 nt, Human
uagcugcagccacccgcaccuucacagacaua

SEQ ID NO: 489761 - RNA, 30 nt, Human
uagcugcaggaggugauggcacaaugcugc

SEQ ID NO: 489762 - RNA, 32 nt, Human
uagcugcagguucucucucacugccaucaaac

SEQ ID NO: 489763 - RNA, 32 nt, Human
uagcugcaguggaagauucuguuuuccugugg

SEQ ID NO: 489764 - RNA, 32 nt, Human
uagcugcagugucacaaagccauggcagaggg

SEQ ID NO: 489765 - RNA, 32 nt, Human
uagcugcauagacaggauuuuugcugaaaagg

SEQ ID NO: 489766 - RNA, 32 nt, Human
uagcugcauugcagguuucaggauuugcaggg

SEQ ID NO: 489767 - RNA, 32 nt, Human
uagcugccagaccugcucuugcugcugcucag

SEQ ID NO: 489768 - RNA, 32 nt, Human
uagcugccaucuuuuccuauguuucuucacau

SEQ ID NO: 489769 - RNA, 32 nt, Human
uagcugccccaccccucaggcccagccuggcc

SEQ ID NO: 489770 - RNA, 32 nt, Human
uagcugcccuaaaaggaaugaggaagcgagag

SEQ ID NO: 489771 - RNA, 32 nt, Human
uagcugccgcccuggguguccucaccccuucc

SEQ ID NO: 489772 - RNA, 32 nt, Human
uagcugccgccgcugcucaccccggccguccg

SEQ ID NO: 489773 - RNA, 32 nt, Human
uagcugccucuggcauucuuuuacuuaguuua

SEQ ID NO: 489774 - RNA, 32 nt, Human
uagcugccugcaccugcccuucagggagaugg

SEQ ID NO: 489775 - RNA, 32 nt, Human
uagcugccugcucuuccuuaagauggccuccc

SEQ ID NO: 489776 - RNA, 32 nt, Human
uagcugcuaaugaagagacaaaagagagagga

SEQ ID NO: 489777 - RNA, 32 nt, Human
uagcugcuacagucuccaggcagcuugacuug

SEQ ID NO: 489778 - RNA, 32 nt, Human
uagcugcuagaugcugaaaagacugaaaggag

SEQ ID NO: 489779 - RNA, 31 nt, Human
uagcugcucaauaaaggcuguguguguggaa

SEQ ID NO: 489780 - RNA, 32 nt, Human
uagcugcuccagucucagccugggcagcuucc

SEQ ID NO: 489781 - RNA, 32 nt, Human
uagcugcucuagcccuggguucuuggagaccu

SEQ ID NO: 489782 - RNA, 32 nt, Human
uagcugcucuccccaugauucccucccaguuu

SEQ ID NO: 489783 - RNA, 32 nt, Human
uagcugcugaaacccucuaucucuccggcauc

SEQ ID NO: 489784 - RNA, 32 nt, Human
uagcugcugcagcugcuggcucagccacgagc

SEQ ID NO: 489785 - RNA, 32 nt, Human
uagcugcugccuugccuuccgggaccucguuu

SEQ ID NO: 489786 - RNA, 32 nt, Human
uagcugcugcugcugcugcugcugcaaacugu

SEQ ID NO: 489787 - RNA, 32 nt, Human
uagcugcugcugcuggcuccacuccugcgguc

SEQ ID NO: 489788 - RNA, 32 nt, Human
uagcugcuggggaaauugguuuugaaaaucau

SEQ ID NO: 489789 - RNA, 32 nt, Human
uagcugcuggggaagcggggagaggggucagg

SEQ ID NO: 489790 - RNA, 32 nt, Human
uagcugcugugagaauuugucuuccucaccag

SEQ ID NO: 489791 - RNA, 32 nt, Human
uagcugcuugggaggcugaggcaggcggauag

SEQ ID NO: 489792 - RNA, 32 nt, Human
uagcuggaacagacauuuaucauuugacaaca

SEQ ID NO: 489793 - RNA, 32 nt, Human
uagcuggaacuacagguggugccaccauaccu

SEQ ID NO: 489794 - RNA, 32 nt, Human
uagcuggaagaugcggaaggggagcgacuagg

SEQ ID NO: 489795 - RNA, 23 nt, Human
uagcuggaccucgucucccaggg

SEQ ID NO: 489796 - RNA, 32 nt, Human
uagcuggaccucgucucccagggauuagagaa

SEQ ID NO: 489797 - RNA, 32 nt, Human
uagcuggauuacaggcacgugccaucacgccc

SEQ ID NO: 489798 - RNA, 32 nt, Human
uagcuggauuacaggcaugugccacccaccca

SEQ ID NO: 489799 - RNA, 32 nt, Human
uagcuggauuacaggugcaugccacgacaccc

SEQ ID NO: 489800 - RNA, 32 nt, Human
uagcuggcaaagguuuggugaaauagcuuugg

SEQ ID NO: 489801 - RNA, 32 nt, Human
uagcuggcaagcaguaguaucaagauggcggc

SEQ ID NO: 489802 - RNA, 32 nt, Human
uagcuggcauacaggugcaagccacuaugucc

SEQ ID NO: 489803 - RNA, 32 nt, Human
uagcuggcucccuagccuaccucucuggugau

SEQ ID NO: 489804 - RNA, 32 nt, Human
uagcuggcugacauggcacaagccacuuaccc

SEQ ID NO: 489805 - RNA, 32 nt, Human
uagcuggcugugccuuccuccuuucucucauc

SEQ ID NO: 489806 - RNA, 32 nt, Human
uagcuggcuuaacaaugacagaacagcuuaaa

SEQ ID NO: 489807 - RNA, 19 nt, Human
uagcuggcuuuuauccugu

SEQ ID NO: 489808 - RNA, 32 nt, Human
uagcugggaagccacaugcuggauggcuacaa

SEQ ID NO: 489809 - RNA, 32 nt, Human
uagcugggaagugggaccugggggugguugga

SEQ ID NO: 489810 - RNA, 32 nt, Human
uagcugggacauaccaacacacccagcuaauu

SEQ ID NO: 489811 - RNA, 32 nt, Human
uagcugggacuacagcacccaccaccacaccc

SEQ ID NO: 489812 - RNA, 32 nt, Human
uagcugggacuacaggcaccacuguggacccc

SEQ ID NO: 489813 - RNA, 18 nt, Human
uagcugggagccugggca

SEQ ID NO: 489814 - RNA, 32 nt, Human
uagcugggaguacagcgucugccaccaugccu

SEQ ID NO: 489815 - RNA, 18 nt, Human
uagcugggaucacuggca

SEQ ID NO: 489816 - RNA, 32 nt, Human
uagcugggauuaaggcgccugccaccaugccc

SEQ ID NO: 489817 - RNA, 18 nt, Human
uagcugggauuacaggug

SEQ ID NO: 489818 - RNA, 32 nt, Human
uagcugggauuacagugccugccaccaugccc

SEQ ID NO: 489819 - RNA, 18 nt, Human
uagcugggauuauaggug

SEQ ID NO: 489820 - RNA, 32 nt, Human
uagcugggauugcagccugcaccaccacaccu

SEQ ID NO: 489821 - RNA, 32 nt, Human
uagcugggccacaggcgugugccaccacaccu

SEQ ID NO: 489822 - RNA, 21 nt, Human
uagcugggccaccuccccggg

SEQ ID NO: 489823 - RNA, 31 nt, Human
uagcugggcguacuggcaugcaccuguaguc

SEQ ID NO: 489824 - RNA, 32 nt, Human
uagcuggggagagagggaucuuagaugagucu

SEQ ID NO: 489825 - RNA, 32 nt, Human
uagcuggggauugggcccucuuucucccagug

SEQ ID NO: 489826 - RNA, 22 nt, Human
uagcuggggcccuucacuggug

SEQ ID NO: 489827 - RNA, 18 nt, Human
uagcugggguuacaggug

SEQ ID NO: 489828 - RNA, 32 nt, Human
uagcuggguccccuggugaugaguuucagcau

SEQ ID NO: 489829 - RNA, 25 nt, Human
uagcugggugguaucuuuuacugug

SEQ ID NO: 489830 - RNA, 32 nt, Human
uagcuggguguggugguaggcaccuguaaucc

SEQ ID NO: 489831 - RNA, 32 nt, Human
uagcugguaccacaucuauucccauccagaga

SEQ ID NO: 489832 - RNA, 32 nt, Human
uagcuggucauugucucguggccagagggccc

SEQ ID NO: 489833 - RNA, 32 nt, Human
uagcuggucucaaacuccugaccuuaguugau

SEQ ID NO: 489834 - RNA, 32 nt, Human
uagcuggucuugaacuccugacccucaugauc

SEQ ID NO: 489835 - RNA, 32 nt, Human
uagcugguggcaauaaauaccagacacguaca

SEQ ID NO: 489836 - RNA, 32 nt, Human
uagcugguguuacugaguaaauuugaguguua

SEQ ID NO: 489837 - RNA, 32 nt, Human
uagcuguacuacaggaaugcaccaccaugccc

SEQ ID NO: 489838 - RNA, 32 nt, Human
uagcuguagcuggaggcagacuagccuugcac

SEQ ID NO: 489839 - RNA, 32 nt, Human
uaguuacauauguauacaugugccaugcuggu

SEQ ID NO: 489840 - RNA, 32 nt, Human
uaguuacauauguauacaugugccauguuggu

SEQ ID NO: 489841 - RNA, 32 nt, Human
uaguuacugauucuagggaacaauuggguaga

SEQ ID NO: 489842 - RNA, 32 nt, Human
uaguuacuggggguguugggggagacaggaga

SEQ ID NO: 489843 - RNA, 32 nt, Human
uaguuacugugagccuggcagagcagaaaagg

SEQ ID NO: 489844 - RNA, 32 nt, Human
uaguuagaaccugaaccacuaacuuccagggg

SEQ ID NO: 489845 - RNA, 32 nt, Human
uaguuagaauccaaauuugucuucuuauccau

SEQ ID NO: 489846 - RNA, 32 nt, Human
uaguuagagcaugggcccuggagccaggcugc

SEQ ID NO: 489847 - RNA, 32 nt, Human
uaguuagauuucaccugcauauacauuuuucc

SEQ ID NO: 489848 - RNA, 32 nt, Human
uaguuaggaagaaaggaggugggauaaggguc

SEQ ID NO: 489849 - RNA, 32 nt, Human
uaguuaggagcuauggcuaaacaucauccuga

SEQ ID NO: 489850 - RNA, 21 nt, Human
uaguuaggcaagggacaauga

SEQ ID NO: 489851 - RNA, 32 nt, Human
uaguuaggcaggaagcagagguguuuccuuuc

SEQ ID NO: 489852 - RNA, 32 nt, Human
uaguuagucucuaaaaauacaauguuucaggc

SEQ ID NO: 489853 - RNA, 32 nt, Human
uaguuagugaagaucaacugugugcugagcuc

SEQ ID NO: 489854 - RNA, 32 nt, Human
uaguuagugcagcuuuucauuguguugugugg

SEQ ID NO: 489855 - RNA, 32 nt, Human
uaguuaguggagggcaggauucucaggucccc

SEQ ID NO: 489856 - RNA, 32 nt, Human
uaguuauaacaugauaggugcugaauugugau

SEQ ID NO: 489857 - RNA, 32 nt, Human
uaguuaucuuucuccuuuuucuccuggaacug

SEQ ID NO: 489858 - RNA, 32 nt, Human
uaguuaugagggcaaccuagguuguucauguc

SEQ ID NO: 489859 - RNA, 32 nt, Human
uaguuauuaagcaauugacuuucacaccaacu

SEQ ID NO: 489860 - RNA, 32 nt, Human
uaguuauugaacuucuauaaugugccaggcuc

SEQ ID NO: 489861 - RNA, 32 nt, Human
uaguuauugagcaccuacuauguguuaggccc

SEQ ID NO: 489862 - RNA, 32 nt, Human
uaguuauuguaaggauuaaguaaguuauuaua

SEQ ID NO: 489863 - RNA, 32 nt, Human
uaguuauuguucaaggagggugcaauauuaag

SEQ ID NO: 489864 - RNA, 32 nt, Human
uaguuauuucuuggaccuugacaguaucuaau

SEQ ID NO: 489865 - RNA, 32 nt, Human
uaguuauuugcaaccucccuuuggguuuggcc

SEQ ID NO: 489866 - RNA, 32 nt, Human
uaguucaaccaccaaucccccuguccugaacu

SEQ ID NO: 489867 - RNA, 20 nt, Human
uaguucaaccauuguggaag

SEQ ID NO: 489868 - RNA, 32 nt, Human
uaguucacaccuguaaucccagcacuuuggga

SEQ ID NO: 489869 - RNA, 32 nt, Human
uaguucacagcaaauucacugccuccucccau

SEQ ID NO: 489870 - RNA, 32 nt, Human
uaguucacagccgucuccacagcucuuaccca

SEQ ID NO: 489871 - RNA, 32 nt, Human
uaguucacagcuguaccccaaggcuggagagg

SEQ ID NO: 489872 - RNA, 32 nt, Human
uaguucacagcuguucagggugacagugagca

SEQ ID NO: 489873 - RNA, 32 nt, Human
uaguucacaggcagaagcgagcugugacauug

SEQ ID NO: 489874 - RNA, 32 nt, Human
uaguucacugcaacuuccgcuucccagguuca

SEQ ID NO: 489875 - RNA, 32 nt, Human
uaguucagaguuaaagcuaaaacaccaaauau

SEQ ID NO: 489876 - RNA, 32 nt, Human
uaguucagauggugauucugaagcuuacaucu

SEQ ID NO: 489877 - RNA, 32 nt, Human
uaguucagccaagugauugggagaccacacag

SEQ ID NO: 489878 - RNA, 32 nt, Human
uaguucagcuacucagggggcugaggugggag

SEQ ID NO: 489879 - RNA, 32 nt, Human
uaguucagcugaggaagagaaucagcugaucc

SEQ ID NO: 489880 - RNA, 32 nt, Human
uaguucaggagguagaaugcagcuugagauca

SEQ ID NO: 489881 - RNA, 32 nt, Human
uaguucaggaguuugaaaccagccugggcaac

SEQ ID NO: 489882 - RNA, 32 nt, Human
uaguucaguacugauggaaucugagaaaauuu

SEQ ID NO: 489883 - RNA, 32 nt, Human
uaguucaguucugcagggcugcucaguucaca

SEQ ID NO: 489884 - RNA, 32 nt, Human
uaguucauaauccagucucagauuuugcucuu

SEQ ID NO: 489885 - RNA, 32 nt, Human
uaguucaugagucuagguaaaauaucaauuac

SEQ ID NO: 489886 - RNA, 32 nt, Human
uaguucaugccauucagagcucauccccaaga

SEQ ID NO: 489887 - RNA, 32 nt, Human
uaguucaugccuguuucauugacacgugcugg

SEQ ID NO: 489888 - RNA, 32 nt, Human
uaguuccaaugcauuuggcuccagaaagaccc

SEQ ID NO: 489889 - RNA, 32 nt, Human
uaguuccacccccuccuaccugggugagcuug

SEQ ID NO: 489890 - RNA, 32 nt, Human
uaguuccagacaccuccacgcccaccuggucc

SEQ ID NO: 489891 - RNA, 32 nt, Human
uaguuccagcgcuuugggaggcugagguggac

SEQ ID NO: 489892 - RNA, 32 nt, Human
uaguuccagcuaacugggcggcugaggcagga

SEQ ID NO: 489893 - RNA, 32 nt, Human
uaguuccagcuacauaggaggcugagguggga

SEQ ID NO: 489894 - RNA, 32 nt, Human
uaguuccagcuaccugggaggcugaggcagga

SEQ ID NO: 489895 - RNA, 32 nt, Human
uaguuccagcuacucaggaggcugaaguggga

SEQ ID NO: 489896 - RNA, 32 nt, Human
uaguuccagcuacucaggaggcugaggcaaga

SEQ ID NO: 489897 - RNA, 32 nt, Human
uaguuccagcuacucaggaggcugaggcagga

SEQ ID NO: 489898 - RNA, 32 nt, Human
uaguuccagcuacucaggaggcugaggcuaga

SEQ ID NO: 489899 - RNA, 32 nt, Human
uaguuccagcuacucaggaggcugagguggga

SEQ ID NO: 489900 - RNA, 32 nt, Human
uaguuccagcuacucaguaggcugaggcagaa

SEQ ID NO: 489901 - RNA, 32 nt, Human
uaguuccagcuacucggagacugaggcaggag

SEQ ID NO: 489902 - RNA, 32 nt, Human
uaguuccagcuacucgggaggcugaggcaaga

SEQ ID NO: 489903 - RNA, 32 nt, Human
uaguuccagcuacucgggaggcugaggcagga

SEQ ID NO: 489904 - RNA, 32 nt, Human
uaguuccagcuacucgggaggcugaggugaaa

SEQ ID NO: 489905 - RNA, 32 nt, Human
uaguuccagcuacuugagaggcugaggcagga

SEQ ID NO: 489906 - RNA, 32 nt, Human
uaguuccagcuacuugggaggcugagacaggc

SEQ ID NO: 489907 - RNA, 32 nt, Human
uaguuccagcuacuugggaggcugaggcagca

SEQ ID NO: 489908 - RNA, 32 nt, Human
uaguuccagcuacuugggaggcugaggcagga

SEQ ID NO: 489909 - RNA, 32 nt, Human
uaguuccagcuacuugggaggcugagguggga

SEQ ID NO: 489910 - RNA, 32 nt, Human
uaguuccagcuacuugugaggcugagguggga

SEQ ID NO: 489911 - RNA, 32 nt, Human
uaguuccagcuauacaggaaggugaggcagaa

SEQ ID NO: 489912 - RNA, 32 nt, Human
uaguuccagcuauuugggaggcugaggaagga

SEQ ID NO: 489913 - RNA, 32 nt, Human
uaguuccagcugcuugggaggcugaggcacga

SEQ ID NO: 489914 - RNA, 32 nt, Human
uaguuccaguuacucaggaggcugaggugaga

SEQ ID NO: 489915 - RNA, 32 nt, Human
uaguuccaguuacuccagaggcugagguagga

SEQ ID NO: 489916 - RNA, 32 nt, Human
uaguucccaccacacaugaggugguggaaugg

SEQ ID NO: 489917 - RNA, 32 nt, Human
uaguucccauguuaaaucccauucauaacuuu

SEQ ID NO: 489918 - RNA, 31 nt, Human
uaguucccucguguggagcacuuguguuagg

SEQ ID NO: 489919 - RNA, 32 nt, Human
uaguucccugcaccccuucugggaaagaauua

SEQ ID NO: 489920 - RNA, 32 nt, Human
uaguucccuguauucaaaucccagugucuaac

SEQ ID NO: 489921 - RNA, 32 nt, Human
uaguucccuucauuccagagcuaugcuuguga

SEQ ID NO: 489922 - RNA, 32 nt, Human
uaguuccuagcuccucuuaggaaaacaguucu

SEQ ID NO: 489923 - RNA, 32 nt, Human
uaguuccugagugaugucuguguguuccuugc

SEQ ID NO: 489924 - RNA, 32 nt, Human
uaguuccuugacuuuccucgaauuucauuacc

SEQ ID NO: 489925 - RNA, 32 nt, Human
uaguucuacaucuagugcuucuugccaaaaag

SEQ ID NO: 489926 - RNA, 32 nt, Human
uaguucuaccacccuucacugcuaguguacag

SEQ ID NO: 489927 - RNA, 32 nt, Human
uaguucuaccugcugcaguugcacugaaguga

SEQ ID NO: 489928 - RNA, 32 nt, Human
uaguucuacuucagaaccacagagacaugagc

SEQ ID NO: 489929 - RNA, 32 nt, Human
uaguucuagaggcuggaaguccacagugccgg

SEQ ID NO: 489930 - RNA, 32 nt, Human
uaguucuagcacuuugagaggcugagcggggu

SEQ ID NO: 489931 - RNA, 32 nt, Human
uaguucuagcacuuugagaggcugaggagggu

SEQ ID NO: 489932 - RNA, 32 nt, Human
uaguucuagcuacuagggaggcugaggaggaa

SEQ ID NO: 489933 - RNA, 32 nt, Human
uaguucuagcuacucuggaggcugaggcagga

SEQ ID NO: 489934 - RNA, 32 nt, Human
uaguucuccagguaguuacuuuugccaugucc

SEQ ID NO: 489935 - RNA, 32 nt, Human
uaguucucccuccccuccuacuucucucacac

SEQ ID NO: 489936 - RNA, 32 nt, Human
uaguucucucagguaaauacagggaucaauaa

SEQ ID NO: 489937 - RNA, 32 nt, Human
uaguucugcacuuuuccacauuauacuccaua

SEQ ID NO: 489938 - RNA, 32 nt, Human
uaguucugcuuaccuucucuuccucauccaga

SEQ ID NO: 489939 - RNA, 32 nt, Human
uaguucugcuucacucuauuuaucucuugaug

SEQ ID NO: 489940 - RNA, 32 nt, Human
uaguucugcuucugaaacuggaguaucauucu

SEQ ID NO: 489941 - RNA, 32 nt, Human
uaguucuggacuuuccuuucuguuccuugggu

SEQ ID NO: 489942 - RNA, 32 nt, Human
uaguucuguugucuuguugucucagucuuuua

SEQ ID NO: 489943 - RNA, 32 nt, Human
uaguucuuauuccggagccucaaacaagcauu

SEQ ID NO: 489944 - RNA, 32 nt, Human
uaguucuugaucugcugaccaugacacaaaac

SEQ ID NO: 489945 - RNA, 32 nt, Human
uaguucuuuuguauuuugagggagaggguggg

SEQ ID NO: 489946 - RNA, 32 nt, Human
uaguugaaagcaaccugcaugcuaaucguggu

SEQ ID NO: 489947 - RNA, 32 nt, Human
uaguugaaccguccuggaauagaaacucgccc

SEQ ID NO: 489948 - RNA, 32 nt, Human
uaguugaauguauacuucuguaccaaaacuug

SEQ ID NO: 489949 - RNA, 32 nt, Human
uaguugacagccuugcuccucucccaaguucu

SEQ ID NO: 489950 - RNA, 32 nt, Human
uaguugagacgggguuucaccauguuggucag

SEQ ID NO: 489951 - RNA, 32 nt, Human
uaguugagaugggguuuuuccacguuggucag

SEQ ID NO: 489952 - RNA, 32 nt, Human
uaguugaggugagguuucaccauguuggccag

SEQ ID NO: 489953 - RNA, 32 nt, Human
uaguugauaggugaggugggugaagaaggcug

SEQ ID NO: 489954 - RNA, 32 nt, Human
uaguugaugcagaugagaaaguuugacacagc

SEQ ID NO: 489955 - RNA, 32 nt, Human
uaguugauggccuucagaagaauugaggaucu

SEQ ID NO: 489956 - RNA, 32 nt, Human
uaguugauuuuucugccugaaggauccugaac

SEQ ID NO: 489957 - RNA, 32 nt, Human
uaguugcagaacuuaguuuauaaaaacaaaga

SEQ ID NO: 489958 - RNA, 32 nt, Human
uaguugcaggagacggguguuacacgcaguca

SEQ ID NO: 489959 - RNA, 32 nt, Human
uaguugcaggcaguguaccucagguugacucu

SEQ ID NO: 489960 - RNA, 32 nt, Human
uaguugcagucagggagccagcgaaaagacaa

SEQ ID NO: 489961 - RNA, 32 nt, Human
uaguugcaugaccacauagaacaugugucuau

SEQ ID NO: 489962 - RNA, 32 nt, Human
uaguugccaccuguauauccucuuuggaagaa

SEQ ID NO: 489963 - RNA, 32 nt, Human
uaguugccauuuuaacaaagcagguaaaucgg

SEQ ID NO: 489964 - RNA, 32 nt, Human
uaguugcccacacuagagugcaauggcgcaac

SEQ ID NO: 489965 - RNA, 32 nt, Human
uaguugcgcgcaccuuuugaaaagcuuggcgu

SEQ ID NO: 489966 - RNA, 32 nt, Human
uaguugcuaacauacuaacaacugauuuuaag

SEQ ID NO: 489967 - RNA, 32 nt, Human
uaguugcuaaugcagaacaaguucugucuugg

SEQ ID NO: 489968 - RNA, 32 nt, Human
uaguugcuccgccucugcuggcacauuucccc

SEQ ID NO: 489969 - RNA, 32 nt, Human
uaguugcugcacuccagccuaggcaacauagu

SEQ ID NO: 489970 - RNA, 32 nt, Human
uaguugcugcucaugguucugucuguccgugc

SEQ ID NO: 489971 - RNA, 32 nt, Human
uaguugcuggccuucagaagaauugaggaucu

SEQ ID NO: 489972 - RNA, 32 nt, Human
uaguugcugguaaagcccugagggucccgcca

SEQ ID NO: 489973 - RNA, 32 nt, Human
uaguugcugucugguguuugcuggugaaaaca

SEQ ID NO: 489974 - RNA, 32 nt, Human
uaguugcuguguaaauguuaggaagcaaagua

SEQ ID NO: 489975 - RNA, 32 nt, Human
uaguuggaaauguaaucaucccaaagaucauu

SEQ ID NO: 489976 - RNA, 32 nt, Human
uaguuggagagggauuggaguaccacuuucuu

SEQ ID NO: 489977 - RNA, 32 nt, Human
uaguuggaggcugcaguaagcuaugaucaugc

SEQ ID NO: 489978 - RNA, 32 nt, Human
uaguuggaucaagugacuucugcccaccugga

SEQ ID NO: 489979 - RNA, 31 nt, Human
uaguuggcaaugucuuacauuuauguuaagu

SEQ ID NO: 489980 - RNA, 32 nt, Human
uaguuggcacuggcaaugcacauacuuacuag

SEQ ID NO: 489981 - RNA, 32 nt, Human
uaguuggcaucuccgcgcguccggacacccga

SEQ ID NO: 489982 - RNA, 32 nt, Human
uaguuggcuuccugccucucuccucuaaaaua

SEQ ID NO: 489983 - RNA, 32 nt, Human
uaguuggcuuugucugucaggugcagucuggc

SEQ ID NO: 489984 - RNA, 32 nt, Human
uaguugggaauuggaaccccuccagggggaac

SEQ ID NO: 489985 - RNA, 32 nt, Human
uaguugggaggcuggcacaggagaaucgcuug

SEQ ID NO: 489986 - RNA, 32 nt, Human
uaguuggucaucuguguguuccaccugcaucc

SEQ ID NO: 489987 - RNA, 32 nt, Human
uaguuggugcuggauggauguuuguugaauga

SEQ ID NO: 489988 - RNA, 32 nt, Human
uaguuguaacaaauucaccacacuaaugucag

SEQ ID NO: 489989 - RNA, 32 nt, Human
uaguuguauaccugauuguaacaaucaucuuu

SEQ ID NO: 489990 - RNA, 32 nt, Human
uaguuguauuuuuaguagagaugggguuucac

SEQ ID NO: 489991 - RNA, 32 nt, Human
uaguugucagaauaugccuucgucaaggcuca

SEQ ID NO: 489992 - RNA, 32 nt, Human
uaguugucccuuuguggacaaguuucccaaau

SEQ ID NO: 489993 - RNA, 32 nt, Human
uaguugucugguuucagggauagcuguuugaa

SEQ ID NO: 489994 - RNA, 31 nt, Human
uaguuguggguggagagaggagugaguuugu

SEQ ID NO: 489995 - RNA, 32 nt, Human
uaguuguggucugccugauacuaccauagcac

SEQ ID NO: 489996 - RNA, 32 nt, Human
uaguugugucaccauucuuguugcuuuuuaaa

SEQ ID NO: 489997 - RNA, 32 nt, Human
uaguuguugaaugaguacaguaaugaaugaca

SEQ ID NO: 489998 - RNA, 32 nt, Human
uaguuguugggagggggaggacaagaagucua

SEQ ID NO: 489999 - RNA, 32 nt, Human
uaguuguuugacaggaggagaauaaggcugaa

SEQ ID NO: 490000 - RNA, 32 nt, Human
uaguuuaaaaguacaggaaggaugauuaaggc

SEQ ID NO: 490001 - RNA, 32 nt, Human
uaguuuaaagauacuagucaccugccauaagu

SEQ ID NO: 490002 - RNA, 32 nt, Human
uaguuuacaguuuagcauaaacaaauaguagu

SEQ ID NO: 490003 - RNA, 32 nt, Human
uaguuuaccagccugugacaacugagugcuuc

SEQ ID NO: 490004 - RNA, 32 nt, Human
uaguuuaccaguacuuuaauauuaguuuucuu

SEQ ID NO: 490005 - RNA, 32 nt, Human
uaguuuacucugccuggauagaaaguugacca

SEQ ID NO: 490006 - RNA, 32 nt, Human
uaguuuagaaauuaugcugucacugccaaaca

SEQ ID NO: 490007 - RNA, 32 nt, Human
uaguuuagggaucucuggaaaugucaguuucc

SEQ ID NO: 490008 - RNA, 32 nt, Human
uaguuuauaagacaggagaaaagggagaaagc

SEQ ID NO: 490009 - RNA, 32 nt, Human
uaguuuaugguuaucaggaagcucuguaagaa

SEQ ID NO: 490010 - RNA, 32 nt, Human
uaguuucaccacccucaaaauccugugcuuca

SEQ ID NO: 490011 - RNA, 32 nt, Human
uaguuucagcuauucgggaggcugaggcagac

SEQ ID NO: 490012 - RNA, 32 nt, Human
uaguuucaucugagaacuucugauuagcucuc

SEQ ID NO: 490013 - RNA, 32 nt, Human
uaguuuccagauagggcuaauuacaaaauguu

SEQ ID NO: 490014 - RNA, 32 nt, Human
uaguuuccauuuucuuccacugauucucuuga

SEQ ID NO: 490015 - RNA, 32 nt, Human
uaguuuccucuccuccagcccagacccagugg

SEQ ID NO: 490016 - RNA, 32 nt, Human
uaguuuccucugaaauguaacuuuaaauaaac

SEQ ID NO: 490017 - RNA, 32 nt, Human
uaguuuccugcaggagccuacccugaaaucuc

SEQ ID NO: 490018 - RNA, 32 nt, Human
uaguuucuaaauucucagcagcaguugccucc

SEQ ID NO: 490019 - RNA, 32 nt, Human
uaguuucugggaauuggauuuauuucucuugu

SEQ ID NO: 490020 - RNA, 32 nt, Human
uaguuucuguacuuauuagaacuggguaaauu

SEQ ID NO: 490021 - RNA, 32 nt, Human
uaguuucugucucucaggcacucguaacuaag

SEQ ID NO: 490022 - RNA, 32 nt, Human
uaguuucuuccucugacauggggaccauaaca

SEQ ID NO: 490023 - RNA, 32 nt, Human
uaguuucuuccucuguaaaauagggagaagaa

SEQ ID NO: 490024 - RNA, 32 nt, Human
uaguuugaagugagggaagaaugaguagucag

SEQ ID NO: 490025 - RNA, 32 nt, Human
uaguuugacagcucauuuugaagauuacauua

SEQ ID NO: 490026 - RNA, 32 nt, Human
uaguuugaccucacagugccccuucccaauca

SEQ ID NO: 490027 - RNA, 32 nt, Human
uaguuugcuaagaguuuucuguuucuuuuucu

SEQ ID NO: 490028 - RNA, 32 nt, Human
uaguuugcucuccugccccucuccuuaaaacu

SEQ ID NO: 490029 - RNA, 32 nt, Human
uaguuugcugauuuccuaaaugcuacccuuug

SEQ ID NO: 490030 - RNA, 32 nt, Human
uaguuugcuguggccuucccgguugugagagc

SEQ ID NO: 490031 - RNA, 32 nt, Human
uaguuugcuguugcauguuaaccugacuuuug

SEQ ID NO: 490032 - RNA, 32 nt, Human
uaguuuggaaacaucacucuguuguaagcuga

SEQ ID NO: 490033 - RNA, 32 nt, Human
uaguuugggaggccaaggcgggcagaucaccu

SEQ ID NO: 490034 - RNA, 32 nt, Human
uaguuuguacauaaacauugugaaaaucugau

SEQ ID NO: 490035 - RNA, 32 nt, Human
uaguuugucauccugugaaaaccaccucguuu

SEQ ID NO: 490036 - RNA, 32 nt, Human
uaguuugucuuguuuugcuuuccagagaucuu

SEQ ID NO: 490037 - RNA, 32 nt, Human
uaguuugugcuaggaaguauguaggauccaaa

SEQ ID NO: 490038 - RNA, 32 nt, Human
uaguuuguguacaaauguaauuauguucauug

SEQ ID NO: 490039 - RNA, 32 nt, Human
uaguuuguuuaguuaaggugugcaguguuuuu

SEQ ID NO: 490040 - RNA, 32 nt, Human
uaguuuguuuuuaaaaaguuuucucuguagaa

SEQ ID NO: 490041 - RNA, 32 nt, Human
uaguuuuaaaagucuaugaucugaucuggacu

SEQ ID NO: 490042 - RNA, 32 nt, Human
uaguuuuacugauuaggacuuuuauugugaau

SEQ ID NO: 490043 - RNA, 32 nt, Human
uaguuuuagggaaaaagaaugucugccuagac

SEQ ID NO: 490044 - RNA, 32 nt, Human
uaguuuuauucuuuuucccuugcccccaaagc

SEQ ID NO: 490045 - RNA, 32 nt, Human
uaguuuuauuuuuguaaagguauguaaguuau

SEQ ID NO: 490046 - RNA, 32 nt, Human
uaguuuucacauuuuaauuccuccuccugaga

SEQ ID NO: 490047 - RNA, 32 nt, Human
uaguuuucagcucauuuaaaagaggcaaaaau

SEQ ID NO: 490048 - RNA, 32 nt, Human
uaguuuucauagguacaaaaguggugaaaugg

SEQ ID NO: 490049 - RNA, 32 nt, Human
uaguuuuccaacucaugucuggcuccggcguu

SEQ ID NO: 490050 - RNA, 21 nt, Human
uaguuuucuagaucuuuuaca

SEQ ID NO: 490051 - RNA, 32 nt, Human
uaguuuucugaagugggugagggagacgcuuc

SEQ ID NO: 490052 - RNA, 32 nt, Human
uaguuuucugcagcucuaccuggccugcuuac

SEQ ID NO: 490053 - RNA, 32 nt, Human
uaguuuucuuuuaaggugacccaucugugaua

SEQ ID NO: 490054 - RNA, 18 nt, Human
uaguuuugauguuuuaua

SEQ ID NO: 490055 - RNA, 32 nt, Human
uaguuuugccaaagccucuccacucaccagca

SEQ ID NO: 490056 - RNA, 17 nt, Human
uaguuuugccuuucaca

SEQ ID NO: 490057 - RNA, 32 nt, Human
uaguuuugggaggggauggcagacagucaagg

SEQ ID NO: 490058 - RNA, 32 nt, Human
uaguuuugggucauuuaaagggacuugaggaa

SEQ ID NO: 490059 - RNA, 18 nt, Human
uaguuuuggugucccaca

SEQ ID NO: 490060 - RNA, 19 nt, Human
uaguuuuguauuuucuaua

SEQ ID NO: 490061 - RNA, 18 nt, Human
uaguuuuguuucugcaca

SEQ ID NO: 490062 - RNA, 32 nt, Human
uaguuuuuauguuugacagugguacaaaugac

SEQ ID NO: 490063 - RNA, 32 nt, Human
uaguuuuucaauccucacccuccuucuaaccc

SEQ ID NO: 490064 - RNA, 32 nt, Human
uaguuuuucuugugauacauuuuguuaaccug

SEQ ID NO: 490065 - RNA, 32 nt, Human
uaguuuuugguacaggucuuucaaguccuugg

SEQ ID NO: 490066 - RNA, 32 nt, Human
uauaaaaacauguugcuuuuaaaauguggagu

SEQ ID NO: 490067 - RNA, 32 nt, Human
uauaaaaaccaauuuccugauggacuauuaaa

SEQ ID NO: 490068 - RNA, 32 nt, Human
uauaaaaaccacacucagucuuuguucaaugg

SEQ ID NO: 490069 - RNA, 32 nt, Human
uauaaaaaccaccacccuccagccugggcaac

SEQ ID NO: 490070 - RNA, 32 nt, Human
uauaaaaacuccagaggauaaguuuacacuua

SEQ ID NO: 490071 - RNA, 32 nt, Human
uauaaaaacuuagcugggugugguggcaugug

SEQ ID NO: 490072 - RNA, 32 nt, Human
uauaaaaacuuuagguucuaaaaaccuguaca

SEQ ID NO: 490073 - RNA, 32 nt, Human
uauaaaaagagugucauauuccagcauuugaa

SEQ ID NO: 490074 - RNA, 32 nt, Human
uauaaaaagcagccaaagcucaggggaaauuu

SEQ ID NO: 490075 - RNA, 32 nt, Human
uauaaaaagcagcgaaagcucaggggaaauuu

SEQ ID NO: 490076 - RNA, 32 nt, Human
uauaaaaauacugggaaaaauugauaaauaac

SEQ ID NO: 490077 - RNA, 32 nt, Human
uauaaaaauagaauagagaguuaggaucagaa

SEQ ID NO: 490078 - RNA, 32 nt, Human
uauaaaaaucagcucuuggaauauauguugca

SEQ ID NO: 490079 - RNA, 32 nt, Human
uauaaaaauguccuugaguuuggagccugagc

SEQ ID NO: 490080 - RNA, 32 nt, Human
uauaaaaauuaaaguuaugcacuacuaacauu

SEQ ID NO: 490081 - RNA, 32 nt, Human
uauaaaaauuguaaaacuacuacuuuguuuua

SEQ ID NO: 490082 - RNA, 32 nt, Human
uauaaaacauccuucucuuauucuccauacug

SEQ ID NO: 490083 - RNA, 32 nt, Human
uauaaaagaauauacaucacaauauaauauuu

SEQ ID NO: 490084 - RNA, 32 nt, Human
uauaaaagagaccccagaguucucccaagccc

SEQ ID NO: 490085 - RNA, 32 nt, Human
uauaaaagagccuauucaauagcucagagguu

SEQ ID NO: 490086 - RNA, 32 nt, Human
uauaaaaggagagcagggaaaggagccaguga

SEQ ID NO: 490087 - RNA, 32 nt, Human
uauaaaaggaugacgccugccaauugcauugc

SEQ ID NO: 490088 - RNA, 32 nt, Human
uauaaaagggaucauccaguggaguuguaaac

SEQ ID NO: 490089 - RNA, 32 nt, Human
uauaaaaguaaauaugggagcaguugucccag

SEQ ID NO: 490090 - RNA, 32 nt, Human
uauaaaauaaggguguguaacauaucaagaua

SEQ ID NO: 490091 - RNA, 23 nt, Human
uauaaaauagauuuucaugggaa

SEQ ID NO: 490092 - RNA, 32 nt, Human
uauaaaauauauuggcuuuuguuuucaaugug

SEQ ID NO: 490093 - RNA, 32 nt, Human
uauaaaaucaacacuaaugauaaaugaaguau

SEQ ID NO: 490094 - RNA, 32 nt, Human
uauaaaaucugaauuuuagggguuugucccca

SEQ ID NO: 490095 - RNA, 32 nt, Human
uauaaaaugaugguauucuaagguccauccuu

SEQ ID NO: 490096 - RNA, 32 nt, Human
uauaaaauguacuaauuagcuuuaaacacuaa

SEQ ID NO: 490097 - RNA, 31 nt, Human
uauaaaaugucucacuucaugguuuuauuac

SEQ ID NO: 490098 - RNA, 32 nt, Human
uauaaaauuauuccgauauccauguuuaagaa

SEQ ID NO: 490099 - RNA, 32 nt, Human
uauaaaauuugaaaauggagaaaggauggaaa

SEQ ID NO: 490100 - RNA, 32 nt, Human
uauaaacaaggcaauuagaaaaauaauuaaag

SEQ ID NO: 490101 - RNA, 32 nt, Human
uauaaacacgaggcugcacacugugugggaaa

SEQ ID NO: 490102 - RNA, 32 nt, Human
uauaaacaucucccugucauccuuuuucaccc

SEQ ID NO: 490103 - RNA, 32 nt, Human
uauaaacaucuucaguaacuugccaggcucua

SEQ ID NO: 490104 - RNA, 32 nt, Human
uauaaaccaaagcagagggcacuggagccccg

SEQ ID NO: 490105 - RNA, 32 nt, Human
uauaaaccagauguagcaguuucuugacaugg

SEQ ID NO: 490106 - RNA, 32 nt, Human
uauaaaccggggaacagugguuacucacaagg

SEQ ID NO: 490107 - RNA, 32 nt, Human
uauaaaccugcagggucacucaucuaaagucu

SEQ ID NO: 490108 - RNA, 22 nt, Human
uauaaacgcauauacauacaua

SEQ ID NO: 490109 - RNA, 32 nt, Human
uauaaacugccucuucauguugccugcucaag

SEQ ID NO: 490110 - RNA, 32 nt, Human
uauaaacugcucuugcaguccaaagggauacc

SEQ ID NO: 490111 - RNA, 32 nt, Human
uauaaagaaagccagagggacagagggaguga

SEQ ID NO: 490112 - RNA, 32 nt, Human
uauaaagaaauucuguuuuuagucaagugacu

SEQ ID NO: 490113 - RNA, 32 nt, Human
uauaaagaaccugccuuccuuccuucaugguc

SEQ ID NO: 490114 - RNA, 32 nt, Human
uauaaagaauagacuugcuugggugguaguac

SEQ ID NO: 490115 - RNA, 32 nt, Human
uauaaagacacaugcacacauauguuuauuac

SEQ ID NO: 490116 - RNA, 32 nt, Human
uauaaagcaaacauaucuguaaacuucaagga

SEQ ID NO: 490117 - RNA, 32 nt, Human
uauaaagcaaagcacucacaauaugccugaca

SEQ ID NO: 490118 - RNA, 32 nt, Human
uauaaagcaguuagaccaguaccugacaauau

SEQ ID NO: 490119 - RNA, 32 nt, Human
uauaaagcaguuuccagguagucucaaugaca

SEQ ID NO: 490120 - RNA, 32 nt, Human
uauaaagcaguuuugcacauaaaauaccauca

SEQ ID NO: 490121 - RNA, 32 nt, Human
uauaaagccauauagaauaaaaauguuaauuu

SEQ ID NO: 490122 - RNA, 32 nt, Human
uauaaagccuuucaaacuuccaucaauccuaa

SEQ ID NO: 490123 - RNA, 32 nt, Human
uauaaagcuuaccucauggagcuguuaacaua

SEQ ID NO: 490124 - RNA, 32 nt, Human
uauaaaggagagaagcgggcggaccggacggc

SEQ ID NO: 490125 - RNA, 32 nt, Human
uauaaaggagcacacugucgcacuacauuguc

SEQ ID NO: 490126 - RNA, 32 nt, Human
uauaaaggccagcauuuuucugaaaaguuggg

SEQ ID NO: 490127 - RNA, 32 nt, Human
uauaaagggugaggacuggcugugcauccugc

SEQ ID NO: 490128 - RNA, 32 nt, Human
uauaaaggguuauuuucucaugaguggaaacc

SEQ ID NO: 490129 - RNA, 32 nt, Human
uauaaaguagccucgcaucuguuucucaaccu

SEQ ID NO: 490130 - RNA, 32 nt, Human
uauaaaguauuuuuauaaugacuggucuuccu

SEQ ID NO: 490131 - RNA, 32 nt, Human
uauaaagugcucugaauaaagcagaaauauau

SEQ ID NO: 490132 - RNA, 32 nt, Human
uauaaaguugaauauaagugguaaaagagcug

SEQ ID NO: 490133 - RNA, 32 nt, Human
uauaaauacaugcacacacuugcauacauaua

SEQ ID NO: 490134 - RNA, 32 nt, Human
uauaaauaccugcacugucucugaggacuuac

SEQ ID NO: 490135 - RNA, 32 nt, Human
uauaaauagccaacacucagugaacaaaaucc

SEQ ID NO: 490136 - RNA, 32 nt, Human
uauaaauaggagaggaugagagcccagaggua

SEQ ID NO: 490137 - RNA, 32 nt, Human
uauaaauauaaauauauucuuuacuuuuugua

SEQ ID NO: 490138 - RNA, 32 nt, Human
uauaaauauauguauauguaugguuguaaaua

SEQ ID NO: 490139 - RNA, 32 nt, Human
uauaaauaucagcuuguucauccaagccacug

SEQ ID NO: 490140 - RNA, 32 nt, Human
uauaaauaucggcugcagccaucccccucauu

SEQ ID NO: 490141 - RNA, 31 nt, Human
uauaaaucaauaaagguuggaaacagagaag

SEQ ID NO: 490142 - RNA, 32 nt, Human
uauaaaucaaugaugggucagaggaaaacaga

SEQ ID NO: 490143 - RNA, 32 nt, Human
uauaaaucaguuauuucuaucuagugaaaugg

SEQ ID NO: 490144 - RNA, 32 nt, Human
uauaaauccauucaguggguuguauaacauuu

SEQ ID NO: 490145 - RNA, 32 nt, Human
uauaaauccuacuagaguaaaaauuaggugug

SEQ ID NO: 490146 - RNA, 32 nt, Human
uauaaaugaaaccauaugguguguacuuuuua

SEQ ID NO: 490147 - RNA, 32 nt, Human
uauaaaugcuacagcugugagagcuuguuucu

SEQ ID NO: 490148 - RNA, 31 nt, Human
uauaaaugcugaguaugucuguugaagacga

SEQ ID NO: 490149 - RNA, 32 nt, Human
uauaaauggugcuucucauuuucugauaauuu

SEQ ID NO: 490150 - RNA, 32 nt, Human
uauaaaugucugacagugcagugcaaacagaa

SEQ ID NO: 490151 - RNA, 32 nt, Human
uauaaaugugcagaaagauuccaaaggagaau

SEQ ID NO: 490152 - RNA, 32 nt, Human
uauaaaugugcuaauuauuugagacuuccuca

SEQ ID NO: 490153 - RNA, 32 nt, Human
uauaaauguguauguguccuuguaaauguuuc

SEQ ID NO: 490154 - RNA, 32 nt, Human
uauaaauguuuggaaagguucuaaggggaccu

SEQ ID NO: 490155 - RNA, 21 nt, Human
uauaaauuacccagguucugu

SEQ ID NO: 490156 - RNA, 32 nt, Human
uauaaauucuccuggcucuccugggcuuccau

SEQ ID NO: 490157 - RNA, 32 nt, Human
uauaaauugugggaaaugagugagggcaaggu

SEQ ID NO: 490158 - RNA, 32 nt, Human
uauaaauuuugugaaugcauuuuccugguguu

SEQ ID NO: 490159 - RNA, 32 nt, Human
uauaacaaaugucacugucuuaagggacagug

SEQ ID NO: 490160 - RNA, 32 nt, Human
uauaacaagcagaugauguuguccuaagaauu

SEQ ID NO: 490161 - RNA, 32 nt, Human
uauaacacuaugcauuaaaagcacuuuuugua

SEQ ID NO: 490162 - RNA, 32 nt, Human
uauaacacucacugcgaaggucuguggcuuca

SEQ ID NO: 490163 - RNA, 32 nt, Human
uauaacacuguaauuguggugugcaaacagcu

SEQ ID NO: 490164 - RNA, 32 nt, Human
uauaacacuugcagacagagaaacugaggucu

SEQ ID NO: 490165 - RNA, 24 nt, Human
uauaacagaaaguuuauguggaaa

SEQ ID NO: 490166 - RNA, 22 nt, Human
uauaacagagcacuaauggaaa

SEQ ID NO: 490167 - RNA, 32 nt, Human
uauaacaugaacauaagugcuuagcugccaug

SEQ ID NO: 490168 - RNA, 32 nt, Human
uauaacaugcccacccuuccuccuuuagaaac

SEQ ID NO: 490169 - RNA, 32 nt, Human
uauaaccaaagaggaagagcaaaaggcagacc

SEQ ID NO: 490170 - RNA, 32 nt, Human
uauaaccaaaguuugagaacugggaacuucau

SEQ ID NO: 490171 - RNA, 32 nt, Human
uauaaccaagaauuuuaauuuauucaucuugc

SEQ ID NO: 490172 - RNA, 27 nt, Human
uauaaccagauuuuuaaagcacuaggu

SEQ ID NO: 490173 - RNA, 32 nt, Human
uauaaccaguuccuuuaagcagucuuuuuacc

SEQ ID NO: 490174 - RNA, 32 nt, Human
uauaacccagaaacaaaucucaaaguguacaa

SEQ ID NO: 490175 - RNA, 32 nt, Human
uauaaccuauaaauuuguuucuuccaagcuua

SEQ ID NO: 490176 - RNA, 32 nt, Human
uauaaccuguuuccagccuggccugaggugga

SEQ ID NO: 490177 - RNA, 32 nt, Human
uauaaccuuuauuauugcuauaucuuugugga

SEQ ID NO: 490178 - RNA, 32 nt, Human
uauaacgaaauuuugaauaaacuugaauuccu

SEQ ID NO: 490179 - RNA, 32 nt, Human
uauaacgugagggcugaaugcagcccauucuc

SEQ ID NO: 490180 - RNA, 32 nt, Human
uauaacuacuaaaaauaucauagggaggauaa

SEQ ID NO: 490181 - RNA, 32 nt, Human
uauaacuaguacucaagguuuaaccuuaaaau

SEQ ID NO: 490182 - RNA, 32 nt, Human
uauaacucagggacuguggcucguggcggugc

SEQ ID NO: 490183 - RNA, 32 nt, Human
uauaacucauaagauuuaggcauaaucugguu

SEQ ID NO: 490184 - RNA, 32 nt, Human
uauaacuccauggcucugcagcaagacucgaa

SEQ ID NO: 490185 - RNA, 32 nt, Human
uauaacuccuaaagcuucucugcuccaguuau

SEQ ID NO: 490186 - RNA, 32 nt, Human
uauaacugcaguuauuuuugcaugguaagagu

SEQ ID NO: 490187 - RNA, 32 nt, Human
uauaacuguccagcucugugcaucagaggagg

SEQ ID NO: 490188 - RNA, 32 nt, Human
uauaacuguguacuuuugaugacuguacagcu

SEQ ID NO: 490189 - RNA, 32 nt, Human
uauaacuuccaggacaaugcagauugauguug

SEQ ID NO: 490190 - RNA, 32 nt, Human
uauaacuuccccuuaauuuaaauuuaauaaac

SEQ ID NO: 490191 - RNA, 32 nt, Human
uauaacuugcauuacauguuguaagcaugguc

SEQ ID NO: 490192 - RNA, 32 nt, Human
uauaagaaaugcaagaggauauugauaggugu

SEQ ID NO: 490193 - RNA, 32 nt, Human
uauaagaaauuagcagggcaugguggcacaug

SEQ ID NO: 490194 - RNA, 32 nt, Human
uauaagaaauuagccggacaugguggcgaaug

SEQ ID NO: 490195 - RNA, 32 nt, Human
uauaagaacucaugugauuaaguucacaguuu

SEQ ID NO: 490196 - RNA, 32 nt, Human
uauaagaagcuuucauauuagugaugucaucu

SEQ ID NO: 490197 - RNA, 32 nt, Human
uauaagaaggcaagagacaaggugcuucaaau

SEQ ID NO: 490198 - RNA, 32 nt, Human
uauaagaauacugagaaaccaccacaaaaauu

SEQ ID NO: 490199 - RNA, 32 nt, Human
uauaagaccuuaaggcugggugcaguggcuca

SEQ ID NO: 490200 - RNA, 32 nt, Human
uauaagacucacugaagaacuuuccuccuuag

SEQ ID NO: 490201 - RNA, 22 nt, Human
uauaagacugaagugcugguua

SEQ ID NO: 490202 - RNA, 32 nt, Human
uauaagacugaggagggugccugugggaacag

SEQ ID NO: 490203 - RNA, 32 nt, Human
uauaagagcaagaaaucuacagcugguguaaa

SEQ ID NO: 490204 - RNA, 32 nt, Human
uauaagagcagccugggcaaaauagugagaca

SEQ ID NO: 490205 - RNA, 32 nt, Human
uauaagagcauuuauguucugaaggaauuuuu

SEQ ID NO: 490206 - RNA, 32 nt, Human
uauaagaggcagcgugaaagcagaugagcugu

SEQ ID NO: 490207 - RNA, 32 nt, Human
uauaagagucagcauggagagccccugcuaau

SEQ ID NO: 490208 - RNA, 32 nt, Human
uauaagagugccucuuucauaaaaccaaaugc

SEQ ID NO: 490209 - RNA, 32 nt, Human
uauaagaucuuucugugacagguaacaaauuu

SEQ ID NO: 490210 - RNA, 32 nt, Human
uauaagauguccuucuuagugugaaagaaggg

SEQ ID NO: 490211 - RNA, 32 nt, Human
uauaagauucauucucuuucauugcucugcua

SEQ ID NO: 490212 - RNA, 32 nt, Human
uauaagcaaugccauccauauaccauauuuua

SEQ ID NO: 490213 - RNA, 32 nt, Human
uauaagcacugcaaucaauaccucacaaagcg

SEQ ID NO: 490214 - RNA, 32 nt, Human
uauaagcauaugugauaaggcaaugcaaccuc

SEQ ID NO: 490215 - RNA, 32 nt, Human
uauaagcauuuaaagugcugaagaggauuuau

SEQ ID NO: 490216 - RNA, 32 nt, Human
uauaagccagcaacaggaacuuuugugaagac

SEQ ID NO: 490217 - RNA, 32 nt, Human
uauaagccuuaaauccauuagauugcauggua

SEQ ID NO: 490218 - RNA, 32 nt, Human
uauaagcgugagccaccaugccuggccccaau

SEQ ID NO: 490219 - RNA, 32 nt, Human
uauaagcucacacuucauggagcacugacagc

SEQ ID NO: 490220 - RNA, 32 nt, Human
uauaagcucuccucaaagcucaggaaaccugg

SEQ ID NO: 490221 - RNA, 32 nt, Human
uauaaggaugaucagagacuuuugccagcuac

SEQ ID NO: 490222 - RNA, 32 nt, Human
uauaaggcaaaaagaucuguauuuacacuccu

SEQ ID NO: 490223 - RNA, 32 nt, Human
uauaaggcucaaauagucuauaccugaacugc

SEQ ID NO: 490224 - RNA, 32 nt, Human
uauaaggugcucucuuucugucuucuacagau

SEQ ID NO: 490225 - RNA, 32 nt, Human
uauaaguaccuacaaaugcaaagaaaaauacu

SEQ ID NO: 490226 - RNA, 32 nt, Human
uauaaguacugccugugagaauuugcacuuua

SEQ ID NO: 490227 - RNA, 32 nt, Human
uauaagucacauaggaaacuugaaaggucuga

SEQ ID NO: 490228 - RNA, 32 nt, Human
uauaagucucuuccuuucucaaauaaaguuuu

SEQ ID NO: 490229 - RNA, 32 nt, Human
uauaagucugugugucagguacagcugggccc

SEQ ID NO: 490230 - RNA, 32 nt, Human
uauaagugcuuaauaaauauuugcugaauguu

SEQ ID NO: 490231 - RNA, 32 nt, Human
uauaaguggagagagugcuacaucagagagug

SEQ ID NO: 490232 - RNA, 32 nt, Human
uauaagugugagccacugcaucuggcccucua

SEQ ID NO: 490233 - RNA, 32 nt, Human
uauaagugugauuuuaaaaauguggauuaaac

SEQ ID NO: 490234 - RNA, 32 nt, Human
uauaaguguuuauauuaaugaucuugcauuug

SEQ ID NO: 490235 - RNA, 32 nt, Human
uauaaguuacuuuuaacaaccccucuuacuuu

SEQ ID NO: 490236 - RNA, 32 nt, Human
uauaaguuccucacacccuaucucuaugacuu

SEQ ID NO: 490237 - RNA, 32 nt, Human
uauaauaaacccucagcacuugcucaguaguu

SEQ ID NO: 490238 - RNA, 32 nt, Human
uauaauaauuuccaagcgguagauuauguggc

SEQ ID NO: 490239 - RNA, 32 nt, Human
uauaauacaagaaauagugaugcucuguuuuc

SEQ ID NO: 490240 - RNA, 32 nt, Human
uauaauacguacaauccuucccucaucccauc

SEQ ID NO: 490241 - RNA, 20 nt, Human
uauaauacuauuuccuauaa

SEQ ID NO: 490242 - RNA, 32 nt, Human
uauaauagaguuuccagucauuguuagacaac

SEQ ID NO: 490243 - RNA, 32 nt, Human
uauaauagcacuggaggagacugugguagcca

SEQ ID NO: 490244 - RNA, 32 nt, Human
uauaauaggcagggugugcucuagccuagcgg

SEQ ID NO: 490245 - RNA, 32 nt, Human
uauaauagucuccacucuccccaaaauauugu

SEQ ID NO: 490246 - RNA, 32 nt, Human
uauaauaugcagcugcaaaaugccagcaagaa

SEQ ID NO: 490247 - RNA, 20 nt, Human
uauaauauguuacacucuua

SEQ ID NO: 490248 - RNA, 19 nt, Human
uauaauauguuuaucuaua

SEQ ID NO: 490249 - RNA, 32 nt, Human
uauaaucaaauuugacuuccuagccuguggau

SEQ ID NO: 490250 - RNA, 32 nt, Human
uauaaucacagacccuccaccccacauagugg

SEQ ID NO: 490251 - RNA, 32 nt, Human
uauaaucacgccacugcacuccagccugggcu

SEQ ID NO: 490252 - RNA, 32 nt, Human
uauaaucauucuauuugcuuuauuaucggugc

SEQ ID NO: 490253 - RNA, 32 nt, Human
uauaauccuuagugaagacaguguccucuaac

SEQ ID NO: 490254 - RNA, 32 nt, Human
uauaaucgaauauucaacaccaugaagauaaa

SEQ ID NO: 490255 - RNA, 32 nt, Human
uauaaucgacuuuuguuuguguucugugacuu

SEQ ID NO: 490256 - RNA, 32 nt, Human
uauaaucgccacccuccacccuucuccccagc

SEQ ID NO: 490257 - RNA, 32 nt, Human
uauaaucgcgccacucacuacacuucagcuug

SEQ ID NO: 490258 - RNA, 32 nt, Human
uauaaucggauauuuauuucugugucuacagu

SEQ ID NO: 490259 - RNA, 32 nt, Human
uauaaucgucagccucuucaauggcguaggaa

SEQ ID NO: 490260 - RNA, 32 nt, Human
uauaaucuccacccucacggaguugucaucac

SEQ ID NO: 490261 - RNA, 32 nt, Human
uauaaucuguaauuggacagcucucucgaaga

SEQ ID NO: 490262 - RNA, 32 nt, Human
uauaaucuuaaauuauucagcauaugugcaac

SEQ ID NO: 490263 - RNA, 32 nt, Human
uauaaugcaaauguaacuuauguuuucauuuu

SEQ ID NO: 490264 - RNA, 32 nt, Human
uauaaugcagagcaugugaagggagaccggcu

SEQ ID NO: 490265 - RNA, 32 nt, Human
uauaaugcuucccagaauugucugacugaaca

SEQ ID NO: 490266 - RNA, 32 nt, Human
uauaauggaagaggcuuucucucuccaauaaa

SEQ ID NO: 490267 - RNA, 32 nt, Human
uauaauggcaccacuguacuccacuugggcga

SEQ ID NO: 490268 - RNA, 32 nt, Human
uauaaugggacuuuucuuucugcauccaccuu

SEQ ID NO: 490269 - RNA, 32 nt, Human
uauaaugggggagauguaugacugggaacugc

SEQ ID NO: 490270 - RNA, 21 nt, Human
uauaaugguaccccccaguaa

SEQ ID NO: 490271 - RNA, 31 nt, Human
uauaauggugcgaucucagcucaccgcaauc

SEQ ID NO: 490272 - RNA, 32 nt, Human
uauaauggugcuuuuaugguuauuaaaaauug

SEQ ID NO: 490273 - RNA, 32 nt, Human
uauaauguaaaaagaucuacauacaaacaaug

SEQ ID NO: 490274 - RNA, 32 nt, Human
uauaaugucccucaaguuuauggcaguguacc

SEQ ID NO: 490275 - RNA, 32 nt, Human
uauaauguguuaggaaauuacagucauuucua

SEQ ID NO: 490276 - RNA, 32 nt, Human
uauaauuaaaugaucuguucuucuacuucacu

SEQ ID NO: 490277 - RNA, 32 nt, Human
uauaauuaauauaacauuucuggacuugaacu

SEQ ID NO: 490278 - RNA, 32 nt, Human
uauaauuauucggccgggcaugguggcucaca

SEQ ID NO: 490279 - RNA, 32 nt, Human
uauaauucagugcuuggcagguuaguauauuu

SEQ ID NO: 490280 - RNA, 32 nt, Human
uauaauuccaguuagaaggcagaaucuagcaa

SEQ ID NO: 490281 - RNA, 32 nt, Human
uauaauucuguguccccucugcaugcccuuaa

SEQ ID NO: 490282 - RNA, 32 nt, Human
uauaauugcaucauugcacuccagccugggca

SEQ ID NO: 490283 - RNA, 32 nt, Human
uauaauugcuggggugauuaugugguuaaggg

SEQ ID NO: 490284 - RNA, 25 nt, Human
uauaauuggagauuuuaccuggaga

SEQ ID NO: 490285 - RNA, 32 nt, Human
uauaauugucucugaguaacccuuuggaaugg

SEQ ID NO: 490286 - RNA, 32 nt, Human
uauaauuuccuggaagaccucgaugaaccaga

SEQ ID NO: 490287 - RNA, 32 nt, Human
uauaauuugaauuuuaugccucccgugguugg

SEQ ID NO: 490288 - RNA, 32 nt, Human
uauaauuuggaaaugugacugcauaccaauaa

SEQ ID NO: 490289 - RNA, 32 nt, Human
uauaauuugggugacuagaacaacuugaagau

SEQ ID NO: 490290 - RNA, 32 nt, Human
uauaauuuuccagaacuuaccucuguuuuaaa

SEQ ID NO: 490291 - RNA, 32 nt, Human
uauaauuuugauuuuaaauggucacccaugua

SEQ ID NO: 490292 - RNA, 32 nt, Human
uauacaaaagaauugugccucucccaagucca

SEQ ID NO: 490293 - RNA, 32 nt, Human
uauacaaaaucaggaauaacuuuguuuuuaua

SEQ ID NO: 490294 - RNA, 32 nt, Human
uauacaaaguauaucacaauuuuaagugagua

SEQ ID NO: 490295 - RNA, 32 nt, Human
uauacaaagugaagccacauugccaaacuugc

SEQ ID NO: 490296 - RNA, 32 nt, Human
uauacaagacuggauuaaaaagacuggauucu

SEQ ID NO: 490297 - RNA, 32 nt, Human
uauacaagcauuaaacuggagugcaguaaacc

SEQ ID NO: 490298 - RNA, 32 nt, Human
uauacaauaagaaaauugccccaaaguggaug

SEQ ID NO: 490299 - RNA, 24 nt, Human
uauacaauagaauguuuucuagca

SEQ ID NO: 490300 - RNA, 32 nt, Human
uauacaauaggcuggugacaccagaguucauu

SEQ ID NO: 490301 - RNA, 32 nt, Human
uauacaauggaauacuaugcagccauaaaaag

SEQ ID NO: 490302 - RNA, 32 nt, Human
uauacaauguuuguuaacuuuguauuuguauu

SEQ ID NO: 490303 - RNA, 26 nt, Human
uauacacaaacauguauaugugcaca

SEQ ID NO: 490304 - RNA, 32 nt, Human
uauacacaaagaaggaggaggaaaaggugaga

SEQ ID NO: 490305 - RNA, 32 nt, Human
uauacacaaauuaucaauccacugcaggacug

SEQ ID NO: 490306 - RNA, 24 nt, Human
uauacacacaaacacauauacaua

SEQ ID NO: 490307 - RNA, 20 nt, Human
uauacacacaauuauacaca

SEQ ID NO: 490308 - RNA, 24 nt, Human
uauacacacacagagauauauaca

SEQ ID NO: 490309 - RNA, 26 nt, Human
uauacacacacauacacucauacaua

SEQ ID NO: 490310 - RNA, 27 nt, Human
uauacacacacauacauauuuaauaca

SEQ ID NO: 490311 - RNA, 32 nt, Human
uauacacacacauacguauacacacacauaca

SEQ ID NO: 490312 - RNA, 22 nt, Human
uauacacacacauacucacaca

SEQ ID NO: 490313 - RNA, 24 nt, Human
uauacacacacauauguacauaua

SEQ ID NO: 490314 - RNA, 32 nt, Human
uauacacacacgcacacauauauguugcugca

SEQ ID NO: 490315 - RNA, 16 nt, Human
uauacacacagacaca

SEQ ID NO: 490316 - RNA, 26 nt, Human
uauacacacagacacaugcauauaca

SEQ ID NO: 490317 - RNA, 32 nt, Human
uauacacacagacaucuacacugacauacccc

SEQ ID NO: 490318 - RNA, 26 nt, Human
uauacacacagauacaaguguacaca

SEQ ID NO: 490319 - RNA, 21 nt, Human
uauacacacauacauggacau

SEQ ID NO: 490320 - RNA, 26 nt, Human
uauacacacauauauacguguguaua

SEQ ID NO: 490321 - RNA, 32 nt, Human
uauacacacaugcauacaugagccuccacaca

SEQ ID NO: 490322 - RNA, 32 nt, Human
uauacacacaugguguacacccacuuugauau

SEQ ID NO: 490323 - RNA, 24 nt, Human
uauacacacuaaguccaucuuaca

SEQ ID NO: 490324 - RNA, 16 nt, Human
uauacacagauacaca

SEQ ID NO: 490325 - RNA, 21 nt, Human
uauacacagauguguauacac

SEQ ID NO: 490326 - RNA, 32 nt, Human
uauacacaggcaggacaggaaguaggaccuaa

SEQ ID NO: 490327 - RNA, 24 nt, Human
uauacacauacauacacauacaua

SEQ ID NO: 490328 - RNA, 22 nt, Human
uauacacauacauauauacaca

SEQ ID NO: 490329 - RNA, 24 nt, Human
uauacacauacauauauauacaca

SEQ ID NO: 490330 - RNA, 24 nt, Human
uauacacauauauacacauacaca

SEQ ID NO: 490331 - RNA, 32 nt, Human
uauacacauauauacacauacacacauguaua

SEQ ID NO: 490332 - RNA, 24 nt, Human
uauacacauauauacauauauaua

SEQ ID NO: 490333 - RNA, 20 nt, Human
uauacacauauauauacaca

SEQ ID NO: 490334 - RNA, 22 nt, Human
uauacacauauauguauacaua

SEQ ID NO: 490335 - RNA, 32 nt, Human
uauacacauauguacaugaaaaugauguucau

SEQ ID NO: 490336 - RNA, 32 nt, Human
uauacacauauguguguaugcaguuugucagg

SEQ ID NO: 490337 - RNA, 32 nt, Human
uauacaccccugagugaggauuacaugcccau

SEQ ID NO: 490338 - RNA, 32 nt, Human
uauacaccuaguucuguaugaucauaucauag

SEQ ID NO: 490339 - RNA, 32 nt, Human
uauacaccuuguagaacucauuuugcuggcug

SEQ ID NO: 490340 - RNA, 20 nt, Human
uauacacguauauaugcaca

SEQ ID NO: 490341 - RNA, 32 nt, Human
uauacacuaagcuauuacaaugguacuuaaaa

SEQ ID NO: 490342 - RNA, 32 nt, Human
uauacacuguccuccuccaccuugauggaccc

SEQ ID NO: 490343 - RNA, 32 nt, Human
uauacacugucuucauauguauaauucucacu

SEQ ID NO: 490344 - RNA, 32 nt, Human
uauacagaaaauacaaaaauuagccagguaug

SEQ ID NO: 490345 - RNA, 23 nt, Human
uauacagacacauauguauacac

SEQ ID NO: 490346 - RNA, 32 nt, Human
uauacagacagaaaguagauuauacauugccu

SEQ ID NO: 490347 - RNA, 32 nt, Human
uauacagacagugcauccagaggaaggcaccu

SEQ ID NO: 490348 - RNA, 24 nt, Human
uauacagacauauacacauacaua

SEQ ID NO: 490349 - RNA, 32 nt, Human
uauacagaccuccagauuauuuucuauauuug

SEQ ID NO: 490350 - RNA, 32 nt, Human
uauacagauggguuuucauuuuccugaugcug

SEQ ID NO: 490351 - RNA, 32 nt, Human
uauacagcacauggaagaaguaccaagaggcg

SEQ ID NO: 490352 - RNA, 32 nt, Human
uauacagccagaacagccaagccucaauucuu

SEQ ID NO: 490353 - RNA, 32 nt, Human
uauacagccugcagagagugcguggcaauccu

SEQ ID NO: 490354 - RNA, 24 nt, Human
uauacagcucagcuuuuugucuuu

SEQ ID NO: 490355 - RNA, 32 nt, Human
uauacagcugcuucugcuauugcugguuuggg

SEQ ID NO: 490356 - RNA, 32 nt, Human
uauacagcuucugucucaauagggucagauau

SEQ ID NO: 490357 - RNA, 32 nt, Human
uauacaggagccaagcagcccagggugggucg

SEQ ID NO: 490358 - RNA, 32 nt, Human
uauacagggaaaggaauaugaagccuugacaa

SEQ ID NO: 490359 - RNA, 32 nt, Human
uauacagggaccaaagacugaaugcucagccu

SEQ ID NO: 490360 - RNA, 32 nt, Human
uauacaguguggugaagguugacugagaaguc

SEQ ID NO: 490361 - RNA, 32 nt, Human
uauacaguucuaugcagaacagugagccaaau

SEQ ID NO: 490362 - RNA, 21 nt, Human
uauacaguuuuggguguucuu

SEQ ID NO: 490363 - RNA, 32 nt, Human
uauacauaaaaauuaaguucugagugaguucu

SEQ ID NO: 490364 - RNA, 32 nt, Human
uauacauaaagugacuggaauuuuaacaggug

SEQ ID NO: 490365 - RNA, 24 nt, Human
uauacauacauacacacauacaua

SEQ ID NO: 490366 - RNA, 32 nt, Human
uauacauacauacacacauacauacauaugca

SEQ ID NO: 490367 - RNA, 22 nt, Human
uauacauacauacacauacaca

SEQ ID NO: 490368 - RNA, 32 nt, Human
uauacauacauauauguguauguauguguucc

SEQ ID NO: 490369 - RNA, 18 nt, Human
uauacauacaugcauaca

SEQ ID NO: 490370 - RNA, 32 nt, Human
uauacauacgugcacacacacauacauauuca

SEQ ID NO: 490371 - RNA, 32 nt, Human
uauacauaggagcuggggauucuacaguaucu

SEQ ID NO: 490372 - RNA, 32 nt, Human
uauacauauacacauacacauauauguauaca

SEQ ID NO: 490373 - RNA, 21 nt, Human
uauacauauaguguauauaca

SEQ ID NO: 490374 - RNA, 19 nt, Human
uauacauauauaauacaca

SEQ ID NO: 490375 - RNA, 23 nt, Human
uauacauauauaauauauacaca

SEQ ID NO: 490376 - RNA, 24 nt, Human
uauacauauauacacauauauaca

SEQ ID NO: 490377 - RNA, 20 nt, Human
uauacauauauacauacaca

SEQ ID NO: 490378 - RNA, 24 nt, Human
uauacauauauacauauauccaca

SEQ ID NO: 490379 - RNA, 22 nt, Human
uauacauauauauuuauacaca

SEQ ID NO: 490380 - RNA, 20 nt, Human
uauacauauauguauauaca

SEQ ID NO: 490381 - RNA, 32 nt, Human
uauacauauccacacacauacauuacauauau

SEQ ID NO: 490382 - RNA, 24 nt, Human
uauacauaugccauauguauaaca

SEQ ID NO: 490383 - RNA, 32 nt, Human
uauacaucugcuucuaacauaucgcauguuua

SEQ ID NO: 490384 - RNA, 32 nt, Human
uauacaucuuagagucuagggcagcaguccau

SEQ ID NO: 490385 - RNA, 22 nt, Human
uauacaugcacauacauacaca

SEQ ID NO: 490386 - RNA, 32 nt, Human
uauacaugcaugcacaugugcucguacaaugg

SEQ ID NO: 490387 - RNA, 24 nt, Human
uauacauguauauacauauauaca

SEQ ID NO: 490388 - RNA, 32 nt, Human
uauacauguauguauauacagaugugugugua

SEQ ID NO: 490389 - RNA, 32 nt, Human
uauacaugugagccaccgugccuggccuugag

SEQ ID NO: 490390 - RNA, 32 nt, Human
uauacauguguauaauuaggguauguauuaug

SEQ ID NO: 490391 - RNA, 23 nt, Human
uauacauguguauauaagacagu

SEQ ID NO: 490392 - RNA, 32 nt, Human
uauacauugaaggaagaaaagaaggaagcagu

SEQ ID NO: 490393 - RNA, 32 nt, Human
uauacauuggaaucauccaguguuagagcauu

SEQ ID NO: 490394 - RNA, 32 nt, Human
uauacauuuaaauucauauauguaauguuugu

SEQ ID NO: 490395 - RNA, 32 nt, Human
uauacauuucacacauucuuuugcaaguuuua

SEQ ID NO: 490396 - RNA, 32 nt, Human
uauacauuuuuguaugagaaaggugauuggua

SEQ ID NO: 490397 - RNA, 32 nt, Human
uauaccaaaaggaauucugucaagaugacugc

SEQ ID NO: 490398 - RNA, 21 nt, Human
uauaccaaaggugcuugccaa

SEQ ID NO: 490399 - RNA, 19 nt, Human
uauaccaacacaucuucaa

SEQ ID NO: 490400 - RNA, 32 nt, Human
uauaccaacauggaagacauuugucucuauua

SEQ ID NO: 490401 - RNA, 32 nt, Human
uauaccaacuauucagaggaacucauacuuca

SEQ ID NO: 490402 - RNA, 32 nt, Human
uauaccaagagauucuucuagaucucauugau

SEQ ID NO: 490403 - RNA, 32 nt, Human
uauaccaaguguuccaugauaccauuugugag

SEQ ID NO: 490404 - RNA, 32 nt, Human
uauaccacaaaugauucaugcaaaugaauuuu

SEQ ID NO: 490405 - RNA, 32 nt, Human
uauaccacaggccuuccugggucuccagcuua

SEQ ID NO: 490406 - RNA, 32 nt, Human
uauaccacugcacuccagccugggugacagag

SEQ ID NO: 490407 - RNA, 32 nt, Human
uauaccacuguacccacccagaaucaaagcca

SEQ ID NO: 490408 - RNA, 32 nt, Human
uauaccacuuuauuuggugugcuguguuaguc

SEQ ID NO: 490409 - RNA, 32 nt, Human
uauaccagaaaaggaaggaaggauggagacgg

SEQ ID NO: 490410 - RNA, 32 nt, Human
uauaccagaguuuaccacaaguguuuugacga

SEQ ID NO: 490411 - RNA, 32 nt, Human
uauaccagcauucaugauagcauuucagcauu

SEQ ID NO: 490412 - RNA, 32 nt, Human
uauaccagcauuucagcaaaucaucaucaaua

SEQ ID NO: 490413 - RNA, 19 nt, Human
uauaccagucacaugggga

SEQ ID NO: 490414 - RNA, 32 nt, Human
uauaccauauuugucaucuauuuucugguuuc

SEQ ID NO: 490415 - RNA, 32 nt, Human
uauaccauccacccucauggugucuucuacga

SEQ ID NO: 490416 - RNA, 32 nt, Human
uauaccaucuucuauuuccagcuccugauucc

SEQ ID NO: 490417 - RNA, 32 nt, Human
uauaccaucuuucuacaguauuuccuacagcu

SEQ ID NO: 490418 - RNA, 32 nt, Human
uauaccaugaacauguggguacaccugagccc

SEQ ID NO: 490419 - RNA, 32 nt, Human
uauaccauuuaaagcuggcaccagagacccga

SEQ ID NO: 490420 - RNA, 32 nt, Human
uauacccaauacagguucaccaucauuaacag

SEQ ID NO: 490421 - RNA, 32 nt, Human
uauacccacauauucuggauuuuguagugcac

SEQ ID NO: 490422 - RNA, 32 nt, Human
uauacccacugcauccuacuccuaccugguca

SEQ ID NO: 490423 - RNA, 32 nt, Human
uauacccagaggaaaauacacaccuggggagu

SEQ ID NO: 490424 - RNA, 32 nt, Human
uauacccagaguucuucgcuccacucacucaa

SEQ ID NO: 490425 - RNA, 32 nt, Human
uauacccagcuacucgggaggcugaggcagaa

SEQ ID NO: 490426 - RNA, 32 nt, Human
uauaccccggcuucccccuugcccucagcccu

SEQ ID NO: 490427 - RNA, 32 nt, Human
uauaccccucuccucugucuccagaagcuucu

SEQ ID NO: 490428 - RNA, 32 nt, Human
uauacccuccuauuuuccuauguuuacauuau

SEQ ID NO: 490429 - RNA, 32 nt, Human
uauacccuggggacagaaagucagguugaaac

SEQ ID NO: 490430 - RNA, 32 nt, Human
uauaccuccugagcugaugagaugucucugag

SEQ ID NO: 490431 - RNA, 32 nt, Human
uauaccuccuugguacuacccuucccagacuu

SEQ ID NO: 490432 - RNA, 32 nt, Human
uauaccucgggaaccaccuccaucuccagcag

SEQ ID NO: 490433 - RNA, 32 nt, Human
uauaccucuguggauuugcuaccucuccuauu

SEQ ID NO: 490434 - RNA, 32 nt, Human
uauaccugaaaccaaaauggauauuuuuaguc

SEQ ID NO: 490435 - RNA, 32 nt, Human
uauaccugcuaccuucaugggccgagcuugcc

SEQ ID NO: 490436 - RNA, 32 nt, Human
uauaccuguagucccagcuacucaggaagcug

SEQ ID NO: 490437 - RNA, 32 nt, Human
uauaccuuccucacuggcccccuccaccugcc

SEQ ID NO: 490438 - RNA, 32 nt, Human
uauaccuucuaggagcuccuauugggagacau

SEQ ID NO: 490439 - RNA, 32 nt, Human
uauaccuucucccuuccauuucugagaucuca

SEQ ID NO: 490440 - RNA, 32 nt, Human
uauaccuucugcuggcggguguucugugccug

SEQ ID NO: 490441 - RNA, 32 nt, Human
uauaccuugcaggcucauuucagcagacacuc

SEQ ID NO: 490442 - RNA, 32 nt, Human
uauacgacauuuuacacaacaauaauggaccu

SEQ ID NO: 490443 - RNA, 32 nt, Human
uauacgaggcucggaaggacaccccgcggaag

SEQ ID NO: 490444 - RNA, 32 nt, Human
uauacgaguugaguaucccuuagaugagaugc

SEQ ID NO: 490445 - RNA, 32 nt, Human
uauacgauaucacuuacacugcgccugaaggc

SEQ ID NO: 490446 - RNA, 32 nt, Human
uauacguacauacacacauacauacauacaua

SEQ ID NO: 490447 - RNA, 32 nt, Human
uauacguggccaacugccucaccucuagcacu

SEQ ID NO: 490448 - RNA, 32 nt, Human
uauacguggccaacugccucagcucuagcacu

SEQ ID NO: 490449 - RNA, 32 nt, Human
uauacguggccaacugccucgccucuagcacu

SEQ ID NO: 490450 - RNA, 32 nt, Human
uauacuaaguccagagacaugcaggugagccc

SEQ ID NO: 490451 - RNA, 32 nt, Human
uauacuaaguucccagaauccccagcugaaga

SEQ ID NO: 490452 - RNA, 32 nt, Human
uauacuacucacaaguucuggcucauggcucc

SEQ ID NO: 490453 - RNA, 32 nt, Human
uauacuaucuguguuuucaccauucaaagugc

SEQ ID NO: 490454 - RNA, 32 nt, Human
uauacuauuaugcagcuuauuuuaccugaaac

SEQ ID NO: 490455 - RNA, 32 nt, Human
uauacucaacuugcacuguauaucucccuguc

SEQ ID NO: 490456 - RNA, 32 nt, Human
uauacucacaccaaggucugcugucuuauagc

SEQ ID NO: 490457 - RNA, 32 nt, Human
uauacucaggaaaaugucaccaagcacccucc

SEQ ID NO: 490458 - RNA, 32 nt, Human
uauacucagugcaacagaaaaacccauaugga

SEQ ID NO: 490459 - RNA, 32 nt, Human
uauacucauacuuaugaguguaaagaauuuac

SEQ ID NO: 490460 - RNA, 32 nt, Human
uauacucauagaauggaagugagcaaaggaaa

SEQ ID NO: 490461 - RNA, 32 nt, Human
uauacuccucaaggaugcugcauuuggaccua

SEQ ID NO: 490462 - RNA, 32 nt, Human
uauacucgcaauaggaauaagcuaaugcccau

SEQ ID NO: 490463 - RNA, 32 nt, Human
uauacucguacauguaugcacacauacccaua

SEQ ID NO: 490464 - RNA, 32 nt, Human
uauacucucaaagcuagucugaaagugaccuu

SEQ ID NO: 490465 - RNA, 32 nt, Human
uauacucucaguggcuuagaccccagaagaaa

SEQ ID NO: 490466 - RNA, 32 nt, Human
uauacucuuuguccaaaacucaguuucaaaau

SEQ ID NO: 490467 - RNA, 32 nt, Human
uauacugaagaaaaagaagaagaaaagaaaaa

SEQ ID NO: 490468 - RNA, 32 nt, Human
uauacugagccucaacagauugccugcuccuc

SEQ ID NO: 490469 - RNA, 32 nt, Human
uauacugcagguaacaaaagucaaaguauuuu

SEQ ID NO: 490470 - RNA, 32 nt, Human
uauacugcuaaggccacugaugcucaacucug

SEQ ID NO: 490471 - RNA, 32 nt, Human
uauacuggagagaaacuacuaaccugaaagau

SEQ ID NO: 490472 - RNA, 32 nt, Human
uauacuggccauaaaagagggagcugccuuca

SEQ ID NO: 490473 - RNA, 32 nt, Human
uauacuggcccucccuucucuucucuuugcug

SEQ ID NO: 490474 - RNA, 32 nt, Human
uauacugggaaaugcuuuguaccaaguagcag

SEQ ID NO: 490475 - RNA, 32 nt, Human
uauacugggcagggaguuuggagaacugguuu

SEQ ID NO: 490476 - RNA, 32 nt, Human
uauacugguguguguccaaguuauacaugaau

SEQ ID NO: 490477 - RNA, 32 nt, Human
uauacuguauaugauuauggccuacaauguug

SEQ ID NO: 490478 - RNA, 32 nt, Human
uauacuguggccugcaggaggguuggagugcu

SEQ ID NO: 490479 - RNA, 32 nt, Human
uauacugugguguuuggccuccauaaacugca

SEQ ID NO: 490480 - RNA, 32 nt, Human
uauacuguuguggguuggagaaaaguggaaag

SEQ ID NO: 490481 - RNA, 32 nt, Human
uauacuuaaccugaaucucuacucacagcccc

SEQ ID NO: 490482 - RNA, 32 nt, Human
uauacuuaagggaaaaguugcaagaaugcuga

SEQ ID NO: 490483 - RNA, 32 nt, Human
uauacuuaauugcaguagggacucauucccag

SEQ ID NO: 490484 - RNA, 32 nt, Human
uauacuuaccauuugaauaaagggaccacaac

SEQ ID NO: 490485 - RNA, 32 nt, Human
uauacuucagggacucugugaaccccucacaa

SEQ ID NO: 490486 - RNA, 32 nt, Human
uauacuucucagagaaauaucugacaucuauu

SEQ ID NO: 490487 - RNA, 32 nt, Human
uauacuugaaugaaaauguccauuuacacgua

SEQ ID NO: 490488 - RNA, 32 nt, Human
uauacuugcucuccgugucuucccagggcugc

SEQ ID NO: 490489 - RNA, 32 nt, Human
uauacuuguccuuccucccauuuccucccuuu

SEQ ID NO: 490490 - RNA, 32 nt, Human
uauacuugugcuucaaccaaucuaaauuggau

SEQ ID NO: 490491 - RNA, 32 nt, Human
uauacuuguucuucuauaacaucagaaauagg

SEQ ID NO: 490492 - RNA, 32 nt, Human
uauacuuuaccaguaaguuuucagaggaaaua

SEQ ID NO: 490493 - RNA, 32 nt, Human
uauacuuucuuccaaugcagacgggagaaagu

SEQ ID NO: 490494 - RNA, 32 nt, Human
uauacuuuggagcacagcacagccagaaaggg

SEQ ID NO: 490495 - RNA, 32 nt, Human
uauacuuugggggaucaagggaagagauggaa

SEQ ID NO: 490496 - RNA, 32 nt, Human
uauacuuuucauuuucaagaugauugcucuau

SEQ ID NO: 490497 - RNA, 32 nt, Human
uauagaaaagugguuuggaggggauuggggga

SEQ ID NO: 490498 - RNA, 32 nt, Human
uauagaaaauugacugaaggagggccaagaug

SEQ ID NO: 490499 - RNA, 32 nt, Human
uauagaaacaucuagaaauagacugaaagaaa

SEQ ID NO: 490500 - RNA, 32 nt, Human
uauagaaacuauucacuaagaacuuaaaacca

SEQ ID NO: 490501 - RNA, 32 nt, Human
uauagaaaugauccugaacacucugaacuuga

SEQ ID NO: 490502 - RNA, 32 nt, Human
uauagaaaugcagaaguuugggcucugcucca

SEQ ID NO: 490503 - RNA, 32 nt, Human
uauagaaccaaauaaaccuaccauuacaugaa

SEQ ID NO: 490504 - RNA, 32 nt, Human
uauagaacucacuggaucgcccuucaucucuc

SEQ ID NO: 490505 - RNA, 32 nt, Human
uauagaagaacauuugugaaacucccugccgu

SEQ ID NO: 490506 - RNA, 32 nt, Human
uauagaagagaaaugcugcuagaaggaauuaa

SEQ ID NO: 490507 - RNA, 32 nt, Human
uauagaagagccuucuguagaccauauagaaa

SEQ ID NO: 490508 - RNA, 32 nt, Human
uauagaaggggagggggcaaagggcuucuucc

SEQ ID NO: 490509 - RNA, 32 nt, Human
uauagaaguuccccucguuccuugggagauga

SEQ ID NO: 490510 - RNA, 32 nt, Human
uauagaaucugucuguucuuuguuuaacaggu

SEQ ID NO: 490511 - RNA, 32 nt, Human
uauagaaugccaggaggaaaggaagugacaag

SEQ ID NO: 490512 - RNA, 32 nt, Human
uauagaauuuguggaaggagagaggauacaca

SEQ ID NO: 490513 - RNA, 32 nt, Human
uauagacaacccagaaacaaauucauacaucu

SEQ ID NO: 490514 - RNA, 32 nt, Human
uauagacaaugaaguccagccugagguggcuu

SEQ ID NO: 490515 - RNA, 32 nt, Human
uauagacacuuccugaaugcuagaacaaugaa

SEQ ID NO: 490516 - RNA, 32 nt, Human
uauagacaggaaagagguggaggcucuuccuu

SEQ ID NO: 490517 - RNA, 32 nt, Human
uauagacaguguccugaagggauuccagcuca

SEQ ID NO: 490518 - RNA, 32 nt, Human
uauagacauaugcuauaacauggaugcaccuu

SEQ ID NO: 490519 - RNA, 32 nt, Human
uauagacauauguagauacauaccauguuuuc

SEQ ID NO: 490520 - RNA, 32 nt, Human
uauagacccaggagaggaagguuaagagaugu

SEQ ID NO: 490521 - RNA, 32 nt, Human
uauagaccuguaugcauucaucuugcuggaac

SEQ ID NO: 490522 - RNA, 32 nt, Human
uauagacgacagcacuggcucugugaaggugg

SEQ ID NO: 490523 - RNA, 32 nt, Human
uauagacggguuucaccauguuggccagacug

SEQ ID NO: 490524 - RNA, 32 nt, Human
uauagacucuacuguaguacauuucaggaucu

SEQ ID NO: 490525 - RNA, 32 nt, Human
uauagacuggacuuuaaaggcauagcugccuu

SEQ ID NO: 490526 - RNA, 32 nt, Human
uauagacuuaaacugugaacuugcucuagugu

SEQ ID NO: 490527 - RNA, 32 nt, Human
uauagacuuggaggugggggaucuucucaucg

SEQ ID NO: 490528 - RNA, 32 nt, Human
uauagagaaaguaaucauauuuguuuaugguu

SEQ ID NO: 490529 - RNA, 32 nt, Human
uauagagaagauggaugcauccuuguccaugc

SEQ ID NO: 490530 - RNA, 32 nt, Human
uauagagacauccagucccugacuccaccugc

SEQ ID NO: 490531 - RNA, 32 nt, Human
uauagagacucagaaaaugucuuuucuuuaaa

SEQ ID NO: 490532 - RNA, 32 nt, Human
uauagagagagggaggagagcgagagagagug

SEQ ID NO: 490533 - RNA, 32 nt, Human
uauagagagccuuccugucauaacugccaguc

SEQ ID NO: 490534 - RNA, 32 nt, Human
uauagagaggagaggagugaagaaaaggcugu

SEQ ID NO: 490535 - RNA, 32 nt, Human
uauagagaggguucauguggcauuuuagagaa

SEQ ID NO: 490536 - RNA, 32 nt, Human
uauagagagugagagucagguggcagcuguau

SEQ ID NO: 490537 - RNA, 32 nt, Human
uauagagauaugcagaaggaagggcauccuuc

SEQ ID NO: 490538 - RNA, 32 nt, Human
uauagagauggggguuuugccauguugcccaa

SEQ ID NO: 490539 - RNA, 32 nt, Human
uauagagauugauuucaagggaguuacauuau

SEQ ID NO: 490540 - RNA, 32 nt, Human
uauagagcccuggucaaguucucuccaccucu

SEQ ID NO: 490541 - RNA, 32 nt, Human
uauagagcuacucauccuuauuuggaaaaacc

SEQ ID NO: 490542 - RNA, 32 nt, Human
uauagagcuucugcuucccuuucccuucccag

SEQ ID NO: 490543 - RNA, 32 nt, Human
uauagaggaacagaaggugggccaggccuccc

SEQ ID NO: 490544 - RNA, 32 nt, Human
uauagagggccaagacuuggcaacagaagcag

SEQ ID NO: 490545 - RNA, 32 nt, Human
uauagagguagcccuaaaggcaacuagaagag

SEQ ID NO: 490546 - RNA, 32 nt, Human
uauagauaggcacagcuacucccguucgggaa

SEQ ID NO: 490547 - RNA, 32 nt, Human
uauagauauagcuauccuuggagcuuauguuu

SEQ ID NO: 490548 - RNA, 32 nt, Human
uauagauauauccuccuuuaacuccgaccaga

SEQ ID NO: 490549 - RNA, 32 nt, Human
uauagaugauauaggaaugaaccaauacgcuu

SEQ ID NO: 490550 - RNA, 32 nt, Human
uauagauggccuuggaauuugcucuugggggu

SEQ ID NO: 490551 - RNA, 32 nt, Human
uauagaugguuugcucugggcuugccugcccu

SEQ ID NO: 490552 - RNA, 32 nt, Human
uauagaugugagccaccgcgcccggccuacug

SEQ ID NO: 490553 - RNA, 32 nt, Human
uauagaugugagccagcacaccgggccaagug

SEQ ID NO: 490554 - RNA, 32 nt, Human
uauagauuacauaggaagaacaaucacaucag

SEQ ID NO: 490555 - RNA, 20 nt, Human
uauagauuccaccccugccc

SEQ ID NO: 490556 - RNA, 32 nt, Human
uauagauuggagccaccaugcccagcucagag

SEQ ID NO: 490557 - RNA, 32 nt, Human
uauagcaaaauggagaaaauuagaccggccau

SEQ ID NO: 490558 - RNA, 32 nt, Human
uauagcaaaugaacccagaauggaacaguggg

SEQ ID NO: 490559 - RNA, 32 nt, Human
uauagcacccuaaucugcuguagacucuuuga

SEQ ID NO: 490560 - RNA, 32 nt, Human
uauagcacuugacuuuaugaaaggaucugggc

SEQ ID NO: 490561 - RNA, 32 nt, Human
uauagcacuuuaaaguuucugcaguccuuuga

SEQ ID NO: 490562 - RNA, 32 nt, Human
uauagcagaagcagcucaauuguuugguugga

SEQ ID NO: 490563 - RNA, 32 nt, Human
uauagcagccaucuuggauugugagugugucu

SEQ ID NO: 490564 - RNA, 32 nt, Human
uauagcagcucgguacugaaggcgguguuuaa

SEQ ID NO: 490565 - RNA, 32 nt, Human
uauagcagcugaagcaggacuucauuccagau

SEQ ID NO: 490566 - RNA, 32 nt, Human
uauagcagugcaggaacaaacagcacuugcca

SEQ ID NO: 490567 - RNA, 32 nt, Human
uauagcaucucucuauuucaaagacauuccua

SEQ ID NO: 490568 - RNA, 32 nt, Human
uauagcaugaaauauauucaaauacauaccuu

SEQ ID NO: 490569 - RNA, 32 nt, Human
uauagcauuuccuagaucuaccagcuuauaag

SEQ ID NO: 490570 - RNA, 32 nt, Human
uauagccagcggcucccagccucgguggcuuu

SEQ ID NO: 490571 - RNA, 32 nt, Human
uauagcccaguucuuacaagcagagaagccua

SEQ ID NO: 490572 - RNA, 32 nt, Human
uauagcccugaaacguuugaaguggccucauu

SEQ ID NO: 490573 - RNA, 32 nt, Human
uauagcccuuuauuuaaaagagagaaguuccu

SEQ ID NO: 490574 - RNA, 32 nt, Human
uauagccgugugggguuugucucccuucugaa

SEQ ID NO: 490575 - RNA, 32 nt, Human
uauagccuaggugacagagugagacucugucu

SEQ ID NO: 490576 - RNA, 32 nt, Human
uauagccugggcaagagcgugagacccugucu

SEQ ID NO: 490577 - RNA, 32 nt, Human
uauagccuguaugguuucuacuuuauggaauu

SEQ ID NO: 490578 - RNA, 32 nt, Human
uauagccuuugugcuguucugccuugccugug

SEQ ID NO: 490579 - RNA, 32 nt, Human
uauagcggauauagagcuagcuaaucucuaca

SEQ ID NO: 490580 - RNA, 32 nt, Human
uauagcucacugcagccuggaacuccugggau

SEQ ID NO: 490581 - RNA, 32 nt, Human
uauagcucagccaaaucucuguuuuauguccu

SEQ ID NO: 490582 - RNA, 32 nt, Human
uauagcuccagaagugacaagacacuucacau

SEQ ID NO: 490583 - RNA, 32 nt, Human
uauagcuccuccagauucuagguauuaauuua

SEQ ID NO: 490584 - RNA, 32 nt, Human
uauagcucucauguauugaaggugcuacuuua

SEQ ID NO: 490585 - RNA, 32 nt, Human
uauagcugaauaguccuuaaaugaugaacagg

SEQ ID NO: 490586 - RNA, 32 nt, Human
uauagcugauccuucucugaggcucagguccu

SEQ ID NO: 490587 - RNA, 32 nt, Human
uauagcugcaagaaaugugguauguggagaag

SEQ ID NO: 490588 - RNA, 32 nt, Human
uauagcugcuguggccacaccuuccgccagcc

SEQ ID NO: 490589 - RNA, 32 nt, Human
uauagcugugaaccaccaugcccggccaggaa

SEQ ID NO: 490590 - RNA, 32 nt, Human
uauagcuuccauuuacaaguaaggauuauauc

SEQ ID NO: 490591 - RNA, 32 nt, Human
uauagcuugcugcugcucaccuuuugguccac

SEQ ID NO: 490592 - RNA, 32 nt, Human
uauagcuuucauuuuaguuugacauuuagugu

SEQ ID NO: 490593 - RNA, 32 nt, Human
uauaggaaauaagcauacuauauguuagcugu

SEQ ID NO: 490594 - RNA, 32 nt, Human
uauaggaaccccucagcucugaggucugugau

SEQ ID NO: 490595 - RNA, 32 nt, Human
uauaggaaggaagguuuaaucugucuuaagcc

SEQ ID NO: 490596 - RNA, 32 nt, Human
uauaggaccacaggccagccugggagauuuua

SEQ ID NO: 490597 - RNA, 32 nt, Human
uauaggagccucccacuuucaccagagcagcc

SEQ ID NO: 490598 - RNA, 32 nt, Human
uauaggaggcagagguugcagugagccgaggu

SEQ ID NO: 490599 - RNA, 32 nt, Human
uauaggagugagccaccgcgccgggccagacu

SEQ ID NO: 490600 - RNA, 32 nt, Human
uauaggcacaagucaccaugcccagccggaau

SEQ ID NO: 490601 - RNA, 32 nt, Human
uauaggcaccugccaucaugcccagcuaauuu

SEQ ID NO: 490602 - RNA, 32 nt, Human
uauaggcacgagccaccaugccaagccuguug

SEQ ID NO: 490603 - RNA, 32 nt, Human
uauaggcacuggguccagccuugaucagugac

SEQ ID NO: 490604 - RNA, 32 nt, Human
uauaggcagaggagaaugucagaugcucagcu

SEQ ID NO: 490605 - RNA, 32 nt, Human
uauaggcaggugugagggacaguggcuaagaa

SEQ ID NO: 490606 - RNA, 32 nt, Human
uauaggcaugagccaccacacccagccuccuc

SEQ ID NO: 490607 - RNA, 32 nt, Human
uauaggcaugagccaccacacccggccugagu

SEQ ID NO: 490608 - RNA, 32 nt, Human
uauaggcaugagccaccacaccuggcuacuuu

SEQ ID NO: 490609 - RNA, 32 nt, Human
uauaggcaugagccaccacgacuggccagagg

SEQ ID NO: 490610 - RNA, 32 nt, Human
uauaggcaugagccaccacgcccagccuguua

SEQ ID NO: 490611 - RNA, 32 nt, Human
uauaggcaugagccaccacgccuggccagaug

SEQ ID NO: 490612 - RNA, 32 nt, Human
uauaggcaugagccaccaugcccagccaggaa

SEQ ID NO: 490613 - RNA, 32 nt, Human
uauaggcaugagccaccgcacccagccucucu

SEQ ID NO: 490614 - RNA, 32 nt, Human
uauaggcaugagccaccgugcccagccuacuu

SEQ ID NO: 490615 - RNA, 32 nt, Human
uauaggcaugagccaccgugcccggcuauuuu

SEQ ID NO: 490616 - RNA, 32 nt, Human
uauaggcaugagccaccgugccuggcugaugc

SEQ ID NO: 490617 - RNA, 32 nt, Human
uauaggcaugagccacugagccuggcccugaa

SEQ ID NO: 490618 - RNA, 32 nt, Human
uauaggcaugagccacugcacccggccggugg

SEQ ID NO: 490619 - RNA, 32 nt, Human
uauaggcaugagccacugcaccuggccugugu

SEQ ID NO: 490620 - RNA, 32 nt, Human
uauaggcaugagccacugcgccuggccaacaa

SEQ ID NO: 490621 - RNA, 32 nt, Human
uauaggcaugagccacugggccccgccaggcu

SEQ ID NO: 490622 - RNA, 32 nt, Human
uauaggcaugagccacugugccaggcccaaac

SEQ ID NO: 490623 - RNA, 32 nt, Human
uauaggcaugagccacugugcccagcugaaug

SEQ ID NO: 490624 - RNA, 32 nt, Human
uauaggcaugagccacugugccuggcccucuc

SEQ ID NO: 490625 - RNA, 32 nt, Human
uauaggcaugcaccaccaugcccagcuaauuu

SEQ ID NO: 490626 - RNA, 32 nt, Human
uauaggcaugcgccaccaugcccggccggcuu

SEQ ID NO: 490627 - RNA, 32 nt, Human
uauaggcauguaccaccaugcccagcuaauuu

SEQ ID NO: 490628 - RNA, 32 nt, Human
uauaggcaugugccaccaugcccagcuaauuu

SEQ ID NO: 490629 - RNA, 32 nt, Human
uauaggcaugugccacggugccugacuugagu

SEQ ID NO: 490630 - RNA, 32 nt, Human
uauaggcauuaaccacacacuuuaauggguau

SEQ ID NO: 490631 - RNA, 32 nt, Human
uauaggcccagcuuccccuuguucuguggccc

SEQ ID NO: 490632 - RNA, 32 nt, Human
uauaggcccaggaagagggcagaggggccaga

SEQ ID NO: 490633 - RNA, 32 nt, Human
uauaggccugagccacugcguacagcuuguuu

SEQ ID NO: 490634 - RNA, 32 nt, Human
uauaggcgcaugccaccaugccuggcuaauuu

SEQ ID NO: 490635 - RNA, 32 nt, Human
uauaggcgccugccaccaugcccagcuaauuu

SEQ ID NO: 490636 - RNA, 32 nt, Human
uauaggcguaagccaccacacccagccagaaa

SEQ ID NO: 490637 - RNA, 32 nt, Human
uauaggcguaagccaccacaccuggccaaaaa

SEQ ID NO: 490638 - RNA, 32 nt, Human
uauaggcguaagccaccaugccuggccaaaaa

SEQ ID NO: 490639 - RNA, 32 nt, Human
uauaggcguccgccaccaugccuggcuaauuu

SEQ ID NO: 490640 - RNA, 32 nt, Human
uauaggcgugagccaccacaccccgccgcggc

SEQ ID NO: 490641 - RNA, 32 nt, Human
uauaggcgugagccaccacgcccagcugggaa

SEQ ID NO: 490642 - RNA, 32 nt, Human
uauaggcgugagccaccacgccccgccuaaaa

SEQ ID NO: 490643 - RNA, 32 nt, Human
uauaggcgugagccaccacgcccggcgagguu

SEQ ID NO: 490644 - RNA, 32 nt, Human
uauaggcgugagccaccaugcccagccuaauu

SEQ ID NO: 490645 - RNA, 32 nt, Human
uauaggcgugagccaccaugcucagccauuaa

SEQ ID NO: 490646 - RNA, 32 nt, Human
uauaggcgugagccaccgcacccgacccccuc

SEQ ID NO: 490647 - RNA, 32 nt, Human
uauaggcgugagccaccgcaccgugagccacu

SEQ ID NO: 490648 - RNA, 32 nt, Human
uauaggcgugagccaccgcaccuggccuauga

SEQ ID NO: 490649 - RNA, 32 nt, Human
uauaggcgugagccaccgcccccggccuugac

SEQ ID NO: 490650 - RNA, 32 nt, Human
uauaggcgugagccaccgcgcccagcccugga

SEQ ID NO: 490651 - RNA, 32 nt, Human
uauaggcgugagccaccgcgcccggccuccag

SEQ ID NO: 490652 - RNA, 32 nt, Human
uauaggcgugagccaccgcgccuggccccggg

SEQ ID NO: 490653 - RNA, 32 nt, Human
uauaggcgugagccaccgcgccuggcuuauac

SEQ ID NO: 490654 - RNA, 32 nt, Human
uauaggcgugagccaccgcuccuggccaggca

SEQ ID NO: 490655 - RNA, 32 nt, Human
uauaggcgugagccaccgcuccuggccagggu

SEQ ID NO: 490656 - RNA, 32 nt, Human
uauaggcgugagccaccguacccggccuaccc

SEQ ID NO: 490657 - RNA, 32 nt, Human
uauaggcgugagccaccgugccuggccuaaag

SEQ ID NO: 490658 - RNA, 32 nt, Human
uauaggcgugagccacggcauccagccucauc

SEQ ID NO: 490659 - RNA, 32 nt, Human
uauaggcgugagccacugcacccggccccuau

SEQ ID NO: 490660 - RNA, 32 nt, Human
uauaggcgugagccacugcaccugguccccca

SEQ ID NO: 490661 - RNA, 32 nt, Human
uauaggcgugagccacugcgccuggccaaaug

SEQ ID NO: 490662 - RNA, 32 nt, Human
uauaggcgugagccacugugcccagccucaca

SEQ ID NO: 490663 - RNA, 32 nt, Human
uauaggcgugagccacuguguccagccuuuuc

SEQ ID NO: 490664 - RNA, 32 nt, Human
uauaggcgugagccucuggcccggccuuuccu

SEQ ID NO: 490665 - RNA, 32 nt, Human
uauaggcgugagucaccaugcccugcuaaaau

SEQ ID NO: 490666 - RNA, 32 nt, Human
uauaggcgugcaccaccaugcccagcuaauuu

SEQ ID NO: 490667 - RNA, 32 nt, Human
uauaggcgugugccaccaugcccagcaaauuu

SEQ ID NO: 490668 - RNA, 32 nt, Human
uauaggcgugugccaccaugcccagcuaauuu

SEQ ID NO: 490669 - RNA, 31 nt, Human
uauaggcuaauguaaaagaugccaagcaaac

SEQ ID NO: 490670 - RNA, 32 nt, Human
uauaggcugcugucucaugucuuggucacauc

SEQ ID NO: 490671 - RNA, 32 nt, Human
uauaggcuugaaaucauccaucacauaagaaa

SEQ ID NO: 490672 - RNA, 32 nt, Human
uauaggcuugagccaccacgcccggcugguuc

SEQ ID NO: 490673 - RNA, 32 nt, Human
uauaggcuugagccaccacggcuggaugaauc

SEQ ID NO: 490674 - RNA, 32 nt, Human
uauaggcuuggaaagugaggcagcaaugcugu

SEQ ID NO: 490675 - RNA, 32 nt, Human
uauaggcuuucccacauucuuuacauuuguag

SEQ ID NO: 490676 - RNA, 32 nt, Human
uauagggaggggaaugcuaucgauaagaguga

SEQ ID NO: 490677 - RNA, 32 nt, Human
uauagggccacuuggagaugcagaggauucca

SEQ ID NO: 490678 - RNA, 32 nt, Human
uauagggcuucaauacccagguggugacagag

SEQ ID NO: 490679 - RNA, 32 nt, Human
uauaggggagaaagugauuguaguugggaucu

SEQ ID NO: 490680 - RNA, 32 nt, Human
uauaggggcccguucauggagcuggucauuuc

SEQ ID NO: 490681 - RNA, 32 nt, Human
uauagggguaacuggaagccaugaaggaagga

SEQ ID NO: 490682 - RNA, 32 nt, Human
uauagggguuucuuagaggagcuucagaauac

SEQ ID NO: 490683 - RNA, 32 nt, Human
uauagggucgagccuaggggagcuugagggag

SEQ ID NO: 490684 - RNA, 32 nt, Human
uauagggugaggaugcccagcucugcaagaca

SEQ ID NO: 490685 - RNA, 32 nt, Human
uauagguaaauacccuccacucaaggagguag

SEQ ID NO: 490686 - RNA, 32 nt, Human
uauagguaacccacaggcccagugccacccuc

SEQ ID NO: 490687 - RNA, 32 nt, Human
uauagguauuuuauucccauguuuccaucuau

SEQ ID NO: 490688 - RNA, 32 nt, Human
uauaggucagucuugcaaguaccauuuuauaa

SEQ ID NO: 490689 - RNA, 32 nt, Human
uauagguccuuucuauuaaaaacuuaagugca

SEQ ID NO: 490690 - RNA, 32 nt, Human
uauaggucucaauauuuauuaugagaccagug

SEQ ID NO: 490691 - RNA, 32 nt, Human
uauaggugcaugccaccaugcccagcuaauuu

SEQ ID NO: 490692 - RNA, 32 nt, Human
uauaggugcaugccaccaugccuggcuaaucu

SEQ ID NO: 490693 - RNA, 32 nt, Human
uauaggugccugccaccaugcccggcuaauuu

SEQ ID NO: 490694 - RNA, 32 nt, Human
uauaggugcgagccacugcgcccagccucagu

SEQ ID NO: 490695 - RNA, 32 nt, Human
uauaggugcgugccaccaugcccagcuaauau

SEQ ID NO: 490696 - RNA, 32 nt, Human
uauaggugugagccacagcacccagccaaaaa

SEQ ID NO: 490697 - RNA, 32 nt, Human
uauaggugugagccaccacacccagccucuau

SEQ ID NO: 490698 - RNA, 32 nt, Human
uauaggugugagccaccacgccuggcuaauuu

SEQ ID NO: 490699 - RNA, 32 nt, Human
uauaggugugagccaccaugcccagccccuuc

SEQ ID NO: 490700 - RNA, 32 nt, Human
uauaggugugagccacccugcucaaccagguu

SEQ ID NO: 490701 - RNA, 32 nt, Human
uauaggugugagccaccgcacccagccaaacc

SEQ ID NO: 490702 - RNA, 32 nt, Human
uauaggugugagccaccgcacccaguugggaa

SEQ ID NO: 490703 - RNA, 32 nt, Human
uauaggugugagccaccgcgcccggccugccu

SEQ ID NO: 490704 - RNA, 32 nt, Human
uauaggugugagccaccgcgccgggccgguug

SEQ ID NO: 490705 - RNA, 32 nt, Human
uauaggugugagccaccgugccgggccuggac

SEQ ID NO: 490706 - RNA, 32 nt, Human
uauaggugugagccacugcacccggccuccaa

SEQ ID NO: 490707 - RNA, 32 nt, Human
uauaggugugagccacugcaccuggccuggag

SEQ ID NO: 490708 - RNA, 32 nt, Human
uauaggugugagccacugcgccuggcuaaguu

SEQ ID NO: 490709 - RNA, 32 nt, Human
uauaggugugagccacugcucccgggcccuaa

SEQ ID NO: 490710 - RNA, 32 nt, Human
uauaggugugagccacugucccuggccuauac

SEQ ID NO: 490711 - RNA, 32 nt, Human
uauaggugugagccagcagccauaccccucuu

SEQ ID NO: 490712 - RNA, 32 nt, Human
uauaggugugagccagcaugccuggccccugg

SEQ ID NO: 490713 - RNA, 32 nt, Human
uauaggugugagccaucacgccaggucaagag

SEQ ID NO: 490714 - RNA, 32 nt, Human
uauaggugugcgccaccaugcccagcuaauuu

SEQ ID NO: 490715 - RNA, 32 nt, Human
uauaggugugugccaccaugcacagcuaauuu

SEQ ID NO: 490716 - RNA, 32 nt, Human
uauaggugugugccacuaugcccagcuaauuu

SEQ ID NO: 490717 - RNA, 23 nt, Human
uauaguaaaacuagccuuucaca

SEQ ID NO: 490718 - RNA, 32 nt, Human
uauaguaaaauaauguuuccacauuauauuau

SEQ ID NO: 490719 - RNA, 32 nt, Human
uauaguaacaugcagucugaaguccuaguuac

SEQ ID NO: 490720 - RNA, 32 nt, Human
uauaguaagacauacguguaccucuauaauaa

SEQ ID NO: 490721 - RNA, 32 nt, Human
uauaguacaucuggaccuucccuaccugggcu

SEQ ID NO: 490722 - RNA, 32 nt, Human
uauaguacugcugcuacugcuucuacaaugua

SEQ ID NO: 490723 - RNA, 31 nt, Human
uauaguaggaaacugccacauuuuugcuauc

SEQ ID NO: 490724 - RNA, 32 nt, Human
uauaguauaauccagucucucuucucacuucu

SEQ ID NO: 490725 - RNA, 32 nt, Human
uauaguaucacuucuauucuuuuuguuaaagg

SEQ ID NO: 490726 - RNA, 32 nt, Human
uauagucauuaaaucauuacuuuuacauauau

SEQ ID NO: 490727 - RNA, 32 nt, Human
uauagucgcuacacggcauucagucugcagga

SEQ ID NO: 490728 - RNA, 32 nt, Human
uauagucuauguagauaaaaaguaccacuugu

SEQ ID NO: 490729 - RNA, 32 nt, Human
uauagucuguacuucaguucucaucuuguaaa

SEQ ID NO: 490730 - RNA, 32 nt, Human
uauagucuuuucacacugcagcuuugggaaaa

SEQ ID NO: 490731 - RNA, 32 nt, Human
uauagugacaucaucccagacugccuucugua

SEQ ID NO: 490732 - RNA, 32 nt, Human
uauagugauccagggaugaacacccccugugc

SEQ ID NO: 490733 - RNA, 32 nt, Human
uauagugcuucacuguuuuugcacugauuuuu

SEQ ID NO: 490734 - RNA, 32 nt, Human
uauaguggaaagugccucagcuggaaagaucu

SEQ ID NO: 490735 - RNA, 32 nt, Human
uauaguggcaggaaccuguaaucccagcuaca

SEQ ID NO: 490736 - RNA, 32 nt, Human
uauaguggcauuucugauaaacuugaaaagac

SEQ ID NO: 490737 - RNA, 32 nt, Human
uauaguggcccaggauguagugaaagaacaaa

SEQ ID NO: 490738 - RNA, 32 nt, Human
uauaguggcguguaaucuccuuuucgggaggc

SEQ ID NO: 490739 - RNA, 32 nt, Human
uauaguggcucacaccuguaaucacagcacuu

SEQ ID NO: 490740 - RNA, 32 nt, Human
uauagugguggacaaggcucugguuuuuauga

SEQ ID NO: 490741 - RNA, 32 nt, Human
uauagugucuguguuauaacagcagcuucaaa

SEQ ID NO: 490742 - RNA, 32 nt, Human
uauaguguucaucauugaguaauggauuaagu

SEQ ID NO: 490743 - RNA, 32 nt, Human
uauaguguugccugucuguucuaaagcgaacc

SEQ ID NO: 490744 - RNA, 32 nt, Human
uauaguuauggacuacuugaaaccacuacuga

SEQ ID NO: 490745 - RNA, 32 nt, Human
uauaguuauggccuuaauuugcauuuagcuaa

SEQ ID NO: 490746 - RNA, 32 nt, Human
uauaguucagcaauggccugaauagaagcaac

SEQ ID NO: 490747 - RNA, 32 nt, Human
uauaguuccuugagucuccacacacacuccuc

SEQ ID NO: 490748 - RNA, 32 nt, Human
uauaguugcccagcuuuccuggcaauugacuu

SEQ ID NO: 490749 - RNA, 31 nt, Human
uauaguuuaaguuuuuguacagcagaaggua

SEQ ID NO: 490750 - RNA, 32 nt, Human
uauaguuuagguaguauguuacauuugaauuu

SEQ ID NO: 490751 - RNA, 32 nt, Human
uauaguuuauugaacagccacacccauuccuu

SEQ ID NO: 490752 - RNA, 32 nt, Human
uauaguuucaccacuccucucccuugagggau

SEQ ID NO: 490753 - RNA, 32 nt, Human
uauaguuugaaggaaugcaaggagaaggauuu

SEQ ID NO: 490754 - RNA, 32 nt, Human
uauaguuuuccucagcaguuuccucuucuggg

SEQ ID NO: 490755 - RNA, 32 nt, Human
uauaguuuuuggaucuuuagcauaagcacaug

SEQ ID NO: 490756 - RNA, 32 nt, Human
uauauaaaaacaaugauaaagaugugaacugu

SEQ ID NO: 490757 - RNA, 32 nt, Human
uauauaaaagaaagauuucucacugcguagga

SEQ ID NO: 490758 - RNA, 23 nt, Human
uauauaaaaguaauaaaguacaa

SEQ ID NO: 490759 - RNA, 32 nt, Human
uauauaaaauauucagcagcaccaaguuuuau

SEQ ID NO: 490760 - RNA, 32 nt, Human
uauauaaacgcauauacauacauauacccgug

SEQ ID NO: 490761 - RNA, 32 nt, Human
uauauaaagacaggguuuugcuauguuaccua

SEQ ID NO: 490762 - RNA, 32 nt, Human
uauauaaauaaguacaaaucccaggggaagug

SEQ ID NO: 490763 - RNA, 32 nt, Human
uauauaaaucuuuguuaugaucaugucauaua

SEQ ID NO: 490764 - RNA, 32 nt, Human
uauauaacacugugaacuucuaaagcaagagg

SEQ ID NO: 490765 - RNA, 32 nt, Human
uauauaacuauacaguaagcauuuguauuuuc

SEQ ID NO: 490766 - RNA, 32 nt, Human
uauauaacucaggagauuccaugucuuucuca

SEQ ID NO: 490767 - RNA, 32 nt, Human
uauauaacucauuccuaucuguacuacauaac

SEQ ID NO: 490768 - RNA, 32 nt, Human
uauauaacugaccuuauuuauaauuagggaua

SEQ ID NO: 490769 - RNA, 32 nt, Human
uauauaagacugcugcagucacaucacaauau

SEQ ID NO: 490770 - RNA, 32 nt, Human
uauauaagagcagcagccgccuuuguaaagug

SEQ ID NO: 490771 - RNA, 32 nt, Human
uauauaagcaccgcaacugagaacagagcaau

SEQ ID NO: 490772 - RNA, 32 nt, Human
uauauaaggauggucccagcugugucaaaagg

SEQ ID NO: 490773 - RNA, 24 nt, Human
uauauaaguauauauguguguaua

SEQ ID NO: 490774 - RNA, 32 nt, Human
uauauaagucaagaacuagagcucaagauuaa

SEQ ID NO: 490775 - RNA, 32 nt, Human
uauauaauagguccuuccacuuuuuggagagu

SEQ ID NO: 490776 - RNA, 32 nt, Human
uauauaaucauaagcauuuuagggugggaggg

SEQ ID NO: 490777 - RNA, 32 nt, Human
uauauaauuaugcaaaugaaugcgacuauguu

SEQ ID NO: 490778 - RNA, 32 nt, Human
uauauaauuucgaguacuuucaaagauagauu

SEQ ID NO: 490779 - RNA, 32 nt, Human
uauauacacacacauacacauauauuaugcau

SEQ ID NO: 490780 - RNA, 22 nt, Human
uauauacacacacauauaugua

SEQ ID NO: 490781 - RNA, 26 nt, Human
uauauacacacauauacauauauaua

SEQ ID NO: 490782 - RNA, 32 nt, Human
uauauacacauacauauaauuuuguuuuccuu

SEQ ID NO: 490783 - RNA, 24 nt, Human
uauauacacauauguguguaugca

SEQ ID NO: 490784 - RNA, 22 nt, Human
uauauacagauguguguguaua

SEQ ID NO: 490785 - RNA, 31 nt, Human
uauauacauacuuacuguaacacaucuaaaa

SEQ ID NO: 490786 - RNA, 18 nt, Human
uauauacauauauacaca

SEQ ID NO: 490787 - RNA, 32 nt, Human
uauauacauauauacacaaccaaggugugauc

SEQ ID NO: 490788 - RNA, 27 nt, Human
uauauacauauauauguguguauauaa

SEQ ID NO: 490789 - RNA, 25 nt, Human
uauauacauauauguguguguauaa

SEQ ID NO: 490790 - RNA, 32 nt, Human
uauauacauauccacacacauacauuacauau

SEQ ID NO: 490791 - RNA, 32 nt, Human
uauauacauauguaaugugugcguaucauguc

SEQ ID NO: 490792 - RNA, 32 nt, Human
uauauacauauguacauauucucauauguaaa

SEQ ID NO: 490793 - RNA, 32 nt, Human
uauauacauauguagacuauauacaugugugu

SEQ ID NO: 490794 - RNA, 32 nt, Human
uauauacauauguauguauauacguauguaua

SEQ ID NO: 490795 - RNA, 32 nt, Human
uauauacauauguauguuuauauacacacaug

SEQ ID NO: 490796 - RNA, 32 nt, Human
uauauacauauguguauauuauaucugugugu

SEQ ID NO: 490797 - RNA, 25 nt, Human
uauauacauuguauguguguauaua

SEQ ID NO: 490798 - RNA, 32 nt, Human
uauauacccaugucuacuguuuugcuucagcu

SEQ ID NO: 490799 - RNA, 32 nt, Human
uauauacccugaccaauaaaugauaguagaau

SEQ ID NO: 490800 - RNA, 32 nt, Human
uauauacuauguaugcagugcaucugcauaga

SEQ ID NO: 490801 - RNA, 22 nt, Human
uauauacuccuuuuaagaagca

SEQ ID NO: 490802 - RNA, 32 nt, Human
uauauacugaggcugucauacccagauuccca

SEQ ID NO: 490803 - RNA, 32 nt, Human
uauauacugugaaaacuuugagaagauaauac

SEQ ID NO: 490804 - RNA, 32 nt, Human
uauauacuugcauacacuaucacugcauuaaa

SEQ ID NO: 490805 - RNA, 32 nt, Human
uauauagaaaaugcuaaagaauccauaaaaag

SEQ ID NO: 490806 - RNA, 32 nt, Human
uauauagaauccagauaucauugucaacuucc

SEQ ID NO: 490807 - RNA, 32 nt, Human
uauauagagccuucagaaacugugaguggaaa

SEQ ID NO: 490808 - RNA, 32 nt, Human
uauauagaguaucucugcugcuuuuguuuacc

SEQ ID NO: 490809 - RNA, 32 nt, Human
uauauagcuacaaaugaaaacaauccagcacu

SEQ ID NO: 490810 - RNA, 32 nt, Human
uauauaggaauugccuuucuuuagucuucagg

SEQ ID NO: 490811 - RNA, 32 nt, Human
uauauaggaugugaggggaggggugagaacaa

SEQ ID NO: 490812 - RNA, 32 nt, Human
uauauaggcaugagccacugagccuggcccug

SEQ ID NO: 490813 - RNA, 32 nt, Human
uauauaggcgugagccaccacgcccagcuggg

SEQ ID NO: 490814 - RNA, 21 nt, Human
uauauagguaauguguguaua

SEQ ID NO: 490815 - RNA, 25 nt, Human
uauauaguguauauauauguauaca

SEQ ID NO: 490816 - RNA, 32 nt, Human
uauauaguuuucacauuuuaauuccuccuccu

SEQ ID NO: 490817 - RNA, 22 nt, Human
uauauauaaaagguuguguaca

SEQ ID NO: 490818 - RNA, 24 nt, Human
uauauauacauguguguauguaua

SEQ ID NO: 490819 - RNA, 28 nt, Human
uauauauauguauauguguauauauaua

SEQ ID NO: 490820 - RNA, 24 nt, Human
uauauauauguauguguguguaua

SEQ ID NO: 490821 - RNA, 26 nt, Human
uauauaugcacauauauguguguaua

SEQ ID NO: 490822 - RNA, 22 nt, Human
uauauauguacacaggugugca

SEQ ID NO: 490823 - RNA, 28 nt, Human
uauauauguacauguguauauaaguaua

SEQ ID NO: 490824 - RNA, 22 nt, Human
uauauauguauaaccaaguaca

SEQ ID NO: 490825 - RNA, 28 nt, Human
uauauauguauacauauauguaugugua

SEQ ID NO: 490826 - RNA, 23 nt, Human
uauauauguauacauucuguaca

SEQ ID NO: 490827 - RNA, 24 nt, Human
uauauauguauauaugcauauaca

SEQ ID NO: 490828 - RNA, 21 nt, Human
uauauauguauauaugggaca

SEQ ID NO: 490829 - RNA, 26 nt, Human
uauauauguauauguauguuuguaca

SEQ ID NO: 490830 - RNA, 21 nt, Human
uauauauguauaugucuguac

SEQ ID NO: 490831 - RNA, 24 nt, Human
uauauauguauguauauauguaua

SEQ ID NO: 490832 - RNA, 24 nt, Human
uauauaugugaauauguguauaua

SEQ ID NO: 490833 - RNA, 28 nt, Human
uauauauguguauguauauauauguaua

SEQ ID NO: 490834 - RNA, 26 nt, Human
uauauauguguauguauauauguaca

SEQ ID NO: 490835 - RNA, 24 nt, Human
uauauauguguguauguguguaua

SEQ ID NO: 490836 - RNA, 24 nt, Human
uauauauguguguguauguuugca

SEQ ID NO: 490837 - RNA, 23 nt, Human
uauauauuuauguguauguguca

SEQ ID NO: 490838 - RNA, 22 nt, Human
uauauauuucuuguguguucuu

SEQ ID NO: 490839 - RNA, 32 nt, Human
uauaucaaacuaauuacaaccaagaaauaaua

SEQ ID NO: 490840 - RNA, 32 nt, Human
uauaucaaccacaaccuucugcaucacaguau

SEQ ID NO: 490841 - RNA, 32 nt, Human
uauaucaagcaauaaucucccacccaaggcuu

SEQ ID NO: 490842 - RNA, 32 nt, Human
uauaucacccagagugcgugggauauguugaa

SEQ ID NO: 490843 - RNA, 32 nt, Human
uauaucacccuuuagaucuugauuuccugguc

SEQ ID NO: 490844 - RNA, 32 nt, Human
uauaucaccuugaaaugucucucuucucaucu

SEQ ID NO: 490845 - RNA, 32 nt, Human
uauaucacuauacaggguaauugcuuuuauaa

SEQ ID NO: 490846 - RNA, 32 nt, Human
uauaucacugauuuuguagagcugcugggaga

SEQ ID NO: 490847 - RNA, 32 nt, Human
uauaucacuggcagagccuguaguuggaaagg

SEQ ID NO: 490848 - RNA, 32 nt, Human
uauaucacuggcauuuguaucuucaguauuuc

SEQ ID NO: 490849 - RNA, 32 nt, Human
uauaucagcuaaguguuccuggaacauaaaaa

SEQ ID NO: 490850 - RNA, 32 nt, Human
uauaucaggaauacaaggaugugaaauaaaac

SEQ ID NO: 490851 - RNA, 32 nt, Human
uauaucagggauuugagcaucuguagauuuug

SEQ ID NO: 490852 - RNA, 32 nt, Human
uauaucagugauauuucgaacugugaaaaugg

SEQ ID NO: 490853 - RNA, 32 nt, Human
uauaucauaaucaaggcuuugaacuugaugug

SEQ ID NO: 490854 - RNA, 32 nt, Human
uauaucauauugcuuuuuguccaucuuugugg

SEQ ID NO: 490855 - RNA, 32 nt, Human
uauaucaucuuacugccuguguguguggacuu

SEQ ID NO: 490856 - RNA, 32 nt, Human
uauaucauuccaccagcaccaccaagaccuga

SEQ ID NO: 490857 - RNA, 32 nt, Human
uauaucauuuccucuucauuaaagaacagcuu

SEQ ID NO: 490858 - RNA, 32 nt, Human
uauauccacacaaugaauaacagccacaaaaa

SEQ ID NO: 490859 - RNA, 32 nt, Human
uauauccacuucacuccucauuugcccaaugg

SEQ ID NO: 490860 - RNA, 32 nt, Human
uauauccauagaucuaaggggcaaacagauac

SEQ ID NO: 490861 - RNA, 32 nt, Human
uauauccauuuugcuucccagcacuuuuuagg

SEQ ID NO: 490862 - RNA, 32 nt, Human
uauaucccagcuacugggagguugaagcagaa

SEQ ID NO: 490863 - RNA, 32 nt, Human
uauauccccagcaccuaaaacagggucacaca

SEQ ID NO: 490864 - RNA, 32 nt, Human
uauaucccucaccucuggccucucaucccuuc

SEQ ID NO: 490865 - RNA, 32 nt, Human
uauaucccuccugugcugagcuaguuuucuau

SEQ ID NO: 490866 - RNA, 32 nt, Human
uauaucccuccuuuaccauaguacucccaccc

SEQ ID NO: 490867 - RNA, 22 nt, Human
uauaucccuucccaacccccau

SEQ ID NO: 490868 - RNA, 32 nt, Human
uauauccuauacuuuccaccuccauagggggu

SEQ ID NO: 490869 - RNA, 32 nt, Human
uauauccugaugcuggaugguauuaaucuugu

SEQ ID NO: 490870 - RNA, 32 nt, Human
uauauccugccugggcucuggccucugcucug

SEQ ID NO: 490871 - RNA, 32 nt, Human
uauauccuggcuuugugaccucagccaaguug

SEQ ID NO: 490872 - RNA, 32 nt, Human
uauauccuggguccuuucucccuccgucugcu

SEQ ID NO: 490873 - RNA, 32 nt, Human
uauauccuguguacuaauucuuugucauuuau

SEQ ID NO: 490874 - RNA, 32 nt, Human
uauauccuguguugugaccucaugguuuaagu

SEQ ID NO: 490875 - RNA, 23 nt, Human
uauaucgagauugccugcuuccu

SEQ ID NO: 490876 - RNA, 32 nt, Human
uauaucgaugauggaaauuagccacauguaca

SEQ ID NO: 490877 - RNA, 32 nt, Human
uauaucggucccggaagacauagaugcucccg

SEQ ID NO: 490878 - RNA, 32 nt, Human
uauaucuaaacauacaaguaugaacuauucua

SEQ ID NO: 490879 - RNA, 32 nt, Human
uauaucuaaauuuagaaaucauuuggguuaau

SEQ ID NO: 490880 - RNA, 32 nt, Human
uauaucuacauacaucaauuaaacuuaugucc

SEQ ID NO: 490881 - RNA, 32 nt, Human
uauaucuacuauuaaguagaaguggaucacca

SEQ ID NO: 490882 - RNA, 32 nt, Human
uauaucuagcuuuaggaaguugcccuuacagg

SEQ ID NO: 490883 - RNA, 32 nt, Human
uauaucuauaaauauauuaaaaagcaagucaa

SEQ ID NO: 490884 - RNA, 22 nt, Human
uauaucuauauguguguauaca

SEQ ID NO: 490885 - RNA, 32 nt, Human
uauaucucauuuccuucaaccuugccuccuca

SEQ ID NO: 490886 - RNA, 32 nt, Human
uauaucucugcucuuugaccucaaggucuaga

SEQ ID NO: 490887 - RNA, 32 nt, Human
uauaucucugugucucuccaucauuccaaagc

SEQ ID NO: 490888 - RNA, 32 nt, Human
uauaucugagucucccaucaaaggaccugcac

SEQ ID NO: 490889 - RNA, 32 nt, Human
uauaucugaguuugaaggauguuuauauaggg

SEQ ID NO: 490890 - RNA, 32 nt, Human
uauaucugcagugucuucuuccugggccuaca

SEQ ID NO: 490891 - RNA, 32 nt, Human
uauaucuggaaccucuuauaaauggagcacuu

SEQ ID NO: 490892 - RNA, 32 nt, Human
uauaucuggcagauugacauuuauacacuuuu

SEQ ID NO: 490893 - RNA, 32 nt, Human
uauaucuggcagcagacuuucaguggaaaccu

SEQ ID NO: 490894 - RNA, 29 nt, Human
uauaucuggcugcaaucacugcugcugcu

SEQ ID NO: 490895 - RNA, 29 nt, Human
uauaucuggcugccauuuuucugaugcau

SEQ ID NO: 490896 - RNA, 32 nt, Human
uauaucugggagagcuaggucccuuggagcuc

SEQ ID NO: 490897 - RNA, 32 nt, Human
uauaucugugaguguauauacaugcaugcaau

SEQ ID NO: 490898 - RNA, 21 nt, Human
uauaucuguggauucaaguua

SEQ ID NO: 490899 - RNA, 24 nt, Human
uauaucuguguauguguguauaca

SEQ ID NO: 490900 - RNA, 32 nt, Human
uauaucugugugaccuuaggcaagucaccgaa

SEQ ID NO: 490901 - RNA, 32 nt, Human
uauaucuuacuuuacacauacguguauguaca

SEQ ID NO: 490902 - RNA, 21 nt, Human
uauaucuuaugauucaaguca

SEQ ID NO: 490903 - RNA, 32 nt, Human
uauaucuucugugguuuugaaggaggugaguu

SEQ ID NO: 490904 - RNA, 32 nt, Human
uauaucuugguuguuguauuguaccagugaaa

SEQ ID NO: 490905 - RNA, 32 nt, Human
uauaucuuugggaacaucucucacccccuggg

SEQ ID NO: 490906 - RNA, 32 nt, Human
uauaucuuuuuauacacugccuaaaucaguac

SEQ ID NO: 490907 - RNA, 32 nt, Human
uauaugaaaagagguuuaacuggcucaugguu

SEQ ID NO: 490908 - RNA, 32 nt, Human
uauaugaaaagagguuuaauuggcucacaguu

SEQ ID NO: 490909 - RNA, 32 nt, Human
uauaugaacuccucagaccuuaaaccuuuucc

SEQ ID NO: 490910 - RNA, 32 nt, Human
uauaugaauauguauauguauauguauguaag

SEQ ID NO: 490911 - RNA, 32 nt, Human
uauaugacaaaugaaaagaauaacaaguuguc

SEQ ID NO: 490912 - RNA, 32 nt, Human
uauaugacaaauucucacuuaccaagaauggu

SEQ ID NO: 490913 - RNA, 32 nt, Human
uauaugacuaaaggagggcugaacucuguauu

SEQ ID NO: 490914 - RNA, 32 nt, Human
uauaugagauuaaagcauauaaacuggagugc

SEQ ID NO: 490915 - RNA, 32 nt, Human
uauaugaugccuguaaacacaacaguauuuau

SEQ ID NO: 490916 - RNA, 32 nt, Human
uauaugaugggggaguagaucuuucuaggagg

SEQ ID NO: 490917 - RNA, 32 nt, Human
uauaugauuccugccauuugcugcuaaaucug

SEQ ID NO: 490918 - RNA, 32 nt, Human
uauaugcaaagcacacuucugagaucuuucag

SEQ ID NO: 490919 - RNA, 32 nt, Human
uauaugcaacacaagccugucugccacccugg

SEQ ID NO: 490920 - RNA, 32 nt, Human
uauaugcacaaacacacacagaaauauauuca

SEQ ID NO: 490921 - RNA, 32 nt, Human
uauaugcacaggagucaaagagaugucuuuau

SEQ ID NO: 490922 - RNA, 32 nt, Human
uauaugcacaggcacacacauguaugcacaca

SEQ ID NO: 490923 - RNA, 32 nt, Human
uauaugcacaugcuccaagguccauacucagu

SEQ ID NO: 490924 - RNA, 32 nt, Human
uauaugcagacuauccauucucaggaagaaaa

SEQ ID NO: 490925 - RNA, 32 nt, Human
uauaugcaguuuuauccugugcccuaaagccu

SEQ ID NO: 490926 - RNA, 32 nt, Human
uauaugcauacagccuacauaacaaacgaagu

SEQ ID NO: 490927 - RNA, 32 nt, Human
uauaugcauaugcagacauauguauauggucu

SEQ ID NO: 490928 - RNA, 32 nt, Human
uauaugccaugcugggaggccacugagaaugc

SEQ ID NO: 490929 - RNA, 19 nt, Human
uauaugcuaaaagaaugca

SEQ ID NO: 490930 - RNA, 21 nt, Human
uauaugcuauagauguguaca

SEQ ID NO: 490931 - RNA, 32 nt, Human
uauaugcucucacucugaaauuccaagguugg

SEQ ID NO: 490932 - RNA, 32 nt, Human
uauauggaacauggcagaaagacugaaaaaua

SEQ ID NO: 490933 - RNA, 32 nt, Human
uauauggacuccguccuugaggaggaucucau

SEQ ID NO: 490934 - RNA, 32 nt, Human
uauauggacuuuaaugacacaauguuuagaga

SEQ ID NO: 490935 - RNA, 32 nt, Human
uauauggaugauauacuuugugcugcccccac

SEQ ID NO: 490936 - RNA, 32 nt, Human
uauauggcagacuauauuaacagcugcugaac

SEQ ID NO: 490937 - RNA, 32 nt, Human
uauauggcaguggcacuucuagauaucuguug

SEQ ID NO: 490938 - RNA, 32 nt, Human
uauauggccuccagaacugugggaaaauaaau

SEQ ID NO: 490939 - RNA, 32 nt, Human
uauauggcgcgaucucagcucacugcaaccuc

SEQ ID NO: 490940 - RNA, 32 nt, Human
uauauggcuucugcuucucuugugugugccuc

SEQ ID NO: 490941 - RNA, 28 nt, Human
uauaugggcauggcacuggagcuguacu

SEQ ID NO: 490942 - RNA, 32 nt, Human
uauaugggccagccuggauauacaacagagua

SEQ ID NO: 490943 - RNA, 32 nt, Human
uauaugguugccacacuugauuguagauggag

SEQ ID NO: 490944 - RNA, 30 nt, Human
uauauguaacauccugauuuacagcuucgg

SEQ ID NO: 490945 - RNA, 31 nt, Human
uauauguaacauccugauuuacagcuucggg

SEQ ID NO: 490946 - RNA, 32 nt, Human
uauauguaaccagcaaauauauuuuuccuuag

SEQ ID NO: 490947 - RNA, 20 nt, Human
uauauguacauauauacaca

SEQ ID NO: 490948 - RNA, 32 nt, Human
uauauguacucagaguauuuuuauuaaagaag

SEQ ID NO: 490949 - RNA, 32 nt, Human
uauauguagccacaaacacugaccucauguag

SEQ ID NO: 490950 - RNA, 32 nt, Human
uauauguauaaaugcuggugguggugaaagua

SEQ ID NO: 490951 - RNA, 24 nt, Human
uauauguauacacauauauauaca

SEQ ID NO: 490952 - RNA, 32 nt, Human
uauauguauacauauacacauauacacacaug

SEQ ID NO: 490953 - RNA, 24 nt, Human
uauauguauauacauauauacaua

SEQ ID NO: 490954 - RNA, 20 nt, Human
uauauguauauacauaucac

SEQ ID NO: 490955 - RNA, 32 nt, Human
uauauguauauguaugguuguaaauaucuaua

SEQ ID NO: 490956 - RNA, 32 nt, Human
uauauguauauguauguuuguacaaaucucca

SEQ ID NO: 490957 - RNA, 22 nt, Human
uauauguauauguguauguaua

SEQ ID NO: 490958 - RNA, 23 nt, Human
uauauguauauuauacauacaca

SEQ ID NO: 490959 - RNA, 32 nt, Human
uauauguauauuuauuuuuauguauguuacua

SEQ ID NO: 490960 - RNA, 32 nt, Human
uauaugucaaaucagaagagaagaacuauaaa

SEQ ID NO: 490961 - RNA, 32 nt, Human
uauaugucauuuucuccuuucuuuucacguua

SEQ ID NO: 490962 - RNA, 32 nt, Human
uauauguccaccaguauaauggcauugcugug

SEQ ID NO: 490963 - RNA, 32 nt, Human
uauaugucccuuggaagagaucaaagugagaa

SEQ ID NO: 490964 - RNA, 32 nt, Human
uauaugucugcaaucauggauaggaauaaaau

SEQ ID NO: 490965 - RNA, 32 nt, Human
uauaugucuuauguaugcuuucauucuuuaua

SEQ ID NO: 490966 - RNA, 32 nt, Human
uauaugugaaaguucuuaguagguacagaaau

SEQ ID NO: 490967 - RNA, 32 nt, Human
uauaugugauuaucacuguaagccacaaaggc

SEQ ID NO: 490968 - RNA, 22 nt, Human
uauaugugcauauauauacaua

SEQ ID NO: 490969 - RNA, 19 nt, Human
uauaugugccgacaugugg

SEQ ID NO: 490970 - RNA, 31 nt, Human
uauauguggguggcaaaugggaaugggagag

SEQ ID NO: 490971 - RNA, 32 nt, Human
uauauguguauauaaauauauguguguguaua

SEQ ID NO: 490972 - RNA, 22 nt, Human
uauauguguauauguauacaca

SEQ ID NO: 490973 - RNA, 22 nt, Human
uauauguguaugcaugugugca

SEQ ID NO: 490974 - RNA, 21 nt, Human
uauauguguaugugugugaca

SEQ ID NO: 490975 - RNA, 29 nt, Human
uauauguguaugugugugacaggaaaauc

SEQ ID NO: 490976 - RNA, 21 nt, Human
uauauguguaugugugugcac

SEQ ID NO: 490977 - RNA, 23 nt, Human
uauaugugucauauguauguaca

SEQ ID NO: 490978 - RNA, 24 nt, Human
uauauguguguauauauauacaca

SEQ ID NO: 490979 - RNA, 24 nt, Human
uauauguguguauauguauguaua

SEQ ID NO: 490980 - RNA, 22 nt, Human
uauauguguguguauguguaca

SEQ ID NO: 490981 - RNA, 32 nt, Human
uauauguguuuauagagauacacacacauaua

SEQ ID NO: 490982 - RNA, 32 nt, Human
uauauguugaaaaacugcuguggccuuuuaug

SEQ ID NO: 490983 - RNA, 32 nt, Human
uauauguuuccccuguuaauaucugguuaaau

SEQ ID NO: 490984 - RNA, 32 nt, Human
uauauguuuucagacacccucuauauuaucag

SEQ ID NO: 490985 - RNA, 21 nt, Human
uauauuaagcagcccagccuu

SEQ ID NO: 490986 - RNA, 32 nt, Human
uauauuacacauacacuguuauuugaaacacu

SEQ ID NO: 490987 - RNA, 32 nt, Human
uauauuacagaaguucuagucccacuugucaa

SEQ ID NO: 490988 - RNA, 32 nt, Human
uauauuaccacgacauuuaacaucaauauugu

SEQ ID NO: 490989 - RNA, 32 nt, Human
uauauuaccuguucugcuucaccaggagauca

SEQ ID NO: 490990 - RNA, 32 nt, Human
uauauuacuacuuauaauacuguggcuagucu

SEQ ID NO: 490991 - RNA, 32 nt, Human
uauauuacuuagauccuucuagucagaagcga

SEQ ID NO: 490992 - RNA, 32 nt, Human
uauauuagaaauuuccauuuuguuaaauaaau

SEQ ID NO: 490993 - RNA, 32 nt, Human
uauauuagaccagaccaccaugugucauugug

SEQ ID NO: 490994 - RNA, 32 nt, Human
uauauuagagaugccugcaucuuugacuauaa

SEQ ID NO: 490995 - RNA, 32 nt, Human
uauauuaucaccggcucucagccuaagagacu

SEQ ID NO: 490996 - RNA, 32 nt, Human
uauauuaucuguccauucugaggaaccaguga

SEQ ID NO: 490997 - RNA, 32 nt, Human
uauauuaugcagaaacagucuguucccccuca

SEQ ID NO: 490998 - RNA, 32 nt, Human
uauauuauuggcugugucuggaauucuugcuu

SEQ ID NO: 490999 - RNA, 32 nt, Human
uauauucacaucugcauucugugagugcgggu

SEQ ID NO: 491000 - RNA, 32 nt, Human
uauauucacaugugaaagcaagugaucuguug

SEQ ID NO: 491001 - RNA, 32 nt, Human
uauauucaguucauaaguguaauugaccauac

SEQ ID NO: 491002 - RNA, 32 nt, Human
uauauucaucuagauucaacacuuguuaguau

SEQ ID NO: 491003 - RNA, 32 nt, Human
uauauucauucaaagcuuuagaugugucccau

SEQ ID NO: 491004 - RNA, 32 nt, Human
uauauucauugaucaaacugauaugcuacagg

SEQ ID NO: 491005 - RNA, 32 nt, Human
uauauucauugugcaguggacacacaccuaau

SEQ ID NO: 491006 - RNA, 32 nt, Human
uauauuccauagagaagaaagaugggauagcu

SEQ ID NO: 491007 - RNA, 22 nt, Human
uauauuccaugaagacaaaaua

SEQ ID NO: 491008 - RNA, 32 nt, Human
uauauucuaaagaagaaagaaggcaggauagu

SEQ ID NO: 491009 - RNA, 32 nt, Human
uauauucuaguuuggaguacuugcuguaggau

SEQ ID NO: 491010 - RNA, 32 nt, Human
uauauucuauauguguaucuuccuaggcaaaa

SEQ ID NO: 491011 - RNA, 32 nt, Human
uauauucucccuuuuauauugcaucugcuguu

SEQ ID NO: 491012 - RNA, 24 nt, Human
uauauucugagagacaggacaguu

SEQ ID NO: 491013 - RNA, 32 nt, Human
uauauucuucuuuguaguccuucuucccaccc

SEQ ID NO: 491014 - RNA, 18 nt, Human
uauauucuuuagauaguu

SEQ ID NO: 491015 - RNA, 32 nt, Human
uauauucuuucaaguaaccaagcuguugacuu

SEQ ID NO: 491016 - RNA, 32 nt, Human
uauauucuuuccccucuuuuaaaacaaauggu

SEQ ID NO: 491017 - RNA, 32 nt, Human
uauauugacuaaaucaagaucugugauugaac

SEQ ID NO: 491018 - RNA, 32 nt, Human
uauauugacuaaauccagaucugugauugaac

SEQ ID NO: 491019 - RNA, 32 nt, Human
uauauugacuuucuuugguuuuccuugugcau

SEQ ID NO: 491020 - RNA, 32 nt, Human
uauauugagaccaguaacuuuacuguaaauuu

SEQ ID NO: 491021 - RNA, 32 nt, Human
uauauugcaugucuauuucuguuacacaauuu

SEQ ID NO: 491022 - RNA, 32 nt, Human
uauauugccaccaagacuuuccaggcucuucg

SEQ ID NO: 491023 - RNA, 32 nt, Human
uauauugcccaggcuggucuugaaguccuggc

SEQ ID NO: 491024 - RNA, 32 nt, Human
uauauugcugaauuccaaccucccuggggcgg

SEQ ID NO: 491025 - RNA, 32 nt, Human
uauauugcuggaaacucagcugugcuccagac

SEQ ID NO: 491026 - RNA, 32 nt, Human
uauauugucaugaagucuaaaaggaaauucuc

SEQ ID NO: 491027 - RNA, 32 nt, Human
uauauugucccauuaagcaaaaagcagguuau

SEQ ID NO: 491028 - RNA, 32 nt, Human
uauauuguccuccaccuccaucauuuucaaua

SEQ ID NO: 491029 - RNA, 32 nt, Human
uauauuguguucugcuugagguuuggggagga

SEQ ID NO: 491030 - RNA, 32 nt, Human
uauauuuaagaaugaguuaaaagggaacaaaa

SEQ ID NO: 491031 - RNA, 32 nt, Human
uauauuuaaugccuuuacaauaccuuuaauuu

SEQ ID NO: 491032 - RNA, 32 nt, Human
uauauuuacuaaaaaccuuagacauuaugaaa

SEQ ID NO: 491033 - RNA, 24 nt, Human
uauauuuagauauacguauauaca

SEQ ID NO: 491034 - RNA, 32 nt, Human
uauauuuagucuaaguaacacauacauguuua

SEQ ID NO: 491035 - RNA, 32 nt, Human
uauauuuauaaaguuauuuuaagaacucuaaa

SEQ ID NO: 491036 - RNA, 32 nt, Human
uauauuuauaaauaugugauuaucauuuauuu

SEQ ID NO: 491037 - RNA, 32 nt, Human
uauauuucacuuucucuuugacuugagaccuu

SEQ ID NO: 491038 - RNA, 32 nt, Human
uauauuucacuuucucuuugacuuuagaccuu

SEQ ID NO: 491039 - RNA, 32 nt, Human
uauauuucagcugggaaaagcuuacauuuaac

SEQ ID NO: 491040 - RNA, 32 nt, Human
uauauuucagugugguuagguuuuaguugaug

SEQ ID NO: 491041 - RNA, 32 nt, Human
uauauuucauucuuuugaaaauauccaugaaa

SEQ ID NO: 491042 - RNA, 32 nt, Human
uauauuucccuuuaggcugugauaguuuuuga

SEQ ID NO: 491043 - RNA, 32 nt, Human
uauauuuccuguuuuucccuuugcccacccug

SEQ ID NO: 491044 - RNA, 32 nt, Human
uauauuuccuucugacacuuggaagguauuga

SEQ ID NO: 491045 - RNA, 32 nt, Human
uauauuucugcauuuauuuacuucuguuuugu

SEQ ID NO: 491046 - RNA, 32 nt, Human
uauauuugaaauaagauccuggaaacgaauuu

SEQ ID NO: 491047 - RNA, 32 nt, Human
uauauuugaagugaauggugauuggaaauuuu

SEQ ID NO: 491048 - RNA, 32 nt, Human
uauauuugagagcaaucaaaucacacagcaug

SEQ ID NO: 491049 - RNA, 32 nt, Human
uauauuugagcccaacugcuuggacgccuucc

SEQ ID NO: 491050 - RNA, 32 nt, Human
uauauuugauaaguauuguuacauuugacaau

SEQ ID NO: 491051 - RNA, 32 nt, Human
uauauuugcuaaguaaaaauguugacagaaau

SEQ ID NO: 491052 - RNA, 32 nt, Human
uauauuugcuucaacaacuuugugcuuuccug

SEQ ID NO: 491053 - RNA, 32 nt, Human
uauauuuggagacagggucuauaaggagguaa

SEQ ID NO: 491054 - RNA, 32 nt, Human
uauauuuguaaaagaaccacagcagcuauuuu

SEQ ID NO: 491055 - RNA, 32 nt, Human
uauauuuguaaaccaagagaccggcugggugu

SEQ ID NO: 491056 - RNA, 22 nt, Human
uauauuuguauauauauguaca

SEQ ID NO: 491057 - RNA, 32 nt, Human
uauauuugugugugcagauguacauaaagaug

SEQ ID NO: 491058 - RNA, 32 nt, Human
uauauuuuaagccacaucaacugguuuaauau

SEQ ID NO: 491059 - RNA, 32 nt, Human
uauauuuuacagucuuaucugccuuuuuaucu

SEQ ID NO: 491060 - RNA, 31 nt, Human
uauauuuucacaugaaauaccaaaugucaca

SEQ ID NO: 491061 - RNA, 32 nt, Human
uauauuuucacuucugcauuauguacauaaag

SEQ ID NO: 491062 - RNA, 32 nt, Human
uauauuuucuuucucuuccuccuuccucuucc

SEQ ID NO: 491063 - RNA, 32 nt, Human
uauauuuugagacucuguuauugagugcauau

SEQ ID NO: 491064 - RNA, 32 nt, Human
uauauuuugaguuugauuucaccagaaauaau

SEQ ID NO: 491065 - RNA, 32 nt, Human
uauauuuugcaucucagcagaagguugagugc

SEQ ID NO: 491066 - RNA, 32 nt, Human
uauauuuuuaaucguucuuugcccuaaagacu

SEQ ID NO: 491067 - RNA, 32 nt, Human
uauauuuuugugcauccuucucccagaugacu

SEQ ID NO: 491068 - RNA, 32 nt, Human
uaucaaaauguagccuuuggggagggagggga

SEQ ID NO: 491069 - RNA, 32 nt, Human
uaucaaaauugcuuguuuaauucucuaaugca

SEQ ID NO: 491070 - RNA, 32 nt, Human
uaucaaacccccaagaugcugaugauaggccu

SEQ ID NO: 491071 - RNA, 32 nt, Human
uaucaaacuaauuacaaccaagaaauaauagu

SEQ ID NO: 491072 - RNA, 32 nt, Human
uaucaaacuuccggaacugccaccccaccagu

SEQ ID NO: 491073 - RNA, 32 nt, Human
uaucaaagcccaagaaauggaacuuugggcag

SEQ ID NO: 491074 - RNA, 32 nt, Human
uaucaaaguaaccacuucauuauauuuuagug

SEQ ID NO: 491075 - RNA, 32 nt, Human
uaucaaagugagaaaaugccucaauucacaua

SEQ ID NO: 491076 - RNA, 32 nt, Human
uaucaaaguguucuuccuccugucaguucagu

SEQ ID NO: 491077 - RNA, 22 nt, Human
uaucaacaagcauucaagguua

SEQ ID NO: 491078 - RNA, 32 nt, Human
uaucaacacagcauucauucucagggaauuga

SEQ ID NO: 491079 - RNA, 32 nt, Human
uaucaacacuguuacuuucguacauuggcugg

SEQ ID NO: 491080 - RNA, 32 nt, Human
uaucaacagcaaacuucagccguuucacuuuu

SEQ ID NO: 491081 - RNA, 32 nt, Human
uaucaacauauuuuggcaugaaucuguuuuug

SEQ ID NO: 491082 - RNA, 32 nt, Human
uaucaaccugucuaaagaguauuugaagcagu

SEQ ID NO: 491083 - RNA, 32 nt, Human
uaucaaccuuuccaucaugucuguuuuccugg

SEQ ID NO: 491084 - RNA, 32 nt, Human
uaucaacuaggggaggagagagggucuccagu

SEQ ID NO: 491085 - RNA, 32 nt, Human
uaucaacucacagccaaugggugaaagcagau

SEQ ID NO: 491086 - RNA, 32 nt, Human
uaucaacuccacccaucaucauuuggucauga

SEQ ID NO: 491087 - RNA, 32 nt, Human
uaucaacucccaguaccccucucugccguggc

SEQ ID NO: 491088 - RNA, 32 nt, Human
uaucaagaaaauaggcugggugcaguggcuca

SEQ ID NO: 491089 - RNA, 32 nt, Human
uaucaagaaagcagauuuggcaguucaaaaga

SEQ ID NO: 491090 - RNA, 32 nt, Human
uaucaagaagucagagaaaacacuuuccugga

SEQ ID NO: 491091 - RNA, 32 nt, Human
uaucaagacaugggggauagugaacagcauca

SEQ ID NO: 491092 - RNA, 32 nt, Human
uaucaagauaugguucaaauaggacuacuaga

SEQ ID NO: 491093 - RNA, 32 nt, Human
uaucaagccaguguaucagucuggagccuagg

SEQ ID NO: 491094 - RNA, 32 nt, Human
uaucaagccccugucuaaccuacgaccccaga

SEQ ID NO: 491095 - RNA, 32 nt, Human
uaucaaggcugacuuguguucauguggaguca

SEQ ID NO: 491096 - RNA, 32 nt, Human
uaucaagguuccugauucagcacuuugcucuu

SEQ ID NO: 491097 - RNA, 32 nt, Human
uaucaauaaagcuugauuuaacaaacaagaaa

SEQ ID NO: 491098 - RNA, 32 nt, Human
uaucaauaccuaaagaaagugcaucagugaag

SEQ ID NO: 491099 - RNA, 32 nt, Human
uaucaauaggugacuacuuacuacacaugaac

SEQ ID NO: 491100 - RNA, 32 nt, Human
uaucaaucuucauuuuaaaguuguuuuuguuc

SEQ ID NO: 491101 - RNA, 32 nt, Human
uaucacaaaaugcucucauaagaauuauugca

SEQ ID NO: 491102 - RNA, 32 nt, Human
uaucacacaaaacaccagagcugaggauaggg

SEQ ID NO: 491103 - RNA, 32 nt, Human
uaucacacaaugacugcauacagacuucaaau

SEQ ID NO: 491104 - RNA, 32 nt, Human
uaucacacaggcuuucaggacagacuuguaac

SEQ ID NO: 491105 - RNA, 32 nt, Human
uaucacaccacugcacuccagccugggugaca

SEQ ID NO: 491106 - RNA, 32 nt, Human
uaucacaccacugcacuucagccuggaugaca

SEQ ID NO: 491107 - RNA, 32 nt, Human
uaucacaccacugugcucuagccugggugaca

SEQ ID NO: 491108 - RNA, 32 nt, Human
uaucacagaccagcucugcagcaggggauugg

SEQ ID NO: 491109 - RNA, 32 nt, Human
uaucacagaucaagaauggaguacgagugauu

SEQ ID NO: 491110 - RNA, 32 nt, Human
uaucacagccaucucugggauuugaaauaucc

SEQ ID NO: 491111 - RNA, 32 nt, Human
uaucacagccgccuacgcccaccuauggccag

SEQ ID NO: 491112 - RNA, 32 nt, Human
uaucacagccuauaugguagauuccuuuccuu

SEQ ID NO: 491113 - RNA, 32 nt, Human
uaucacagccuucuuucaugauuuugcaguuu

SEQ ID NO: 491114 - RNA, 32 nt, Human
uaucacagcuacuugggaggcagcggcuggag

SEQ ID NO: 491115 - RNA, 32 nt, Human
uaucacaggccuggguggguggguugggggaa

SEQ ID NO: 491116 - RNA, 32 nt, Human
uaucacauagauuucaguuuuuagaaggguuu

SEQ ID NO: 491117 - RNA, 32 nt, Human
uaucacauugacuuccuuugaugucuuuuagu

SEQ ID NO: 491118 - RNA, 32 nt, Human
uaucacauuuuaauaccacagcacuuauaaug

SEQ ID NO: 491119 - RNA, 22 nt, Human
uaucaccaaaugcaaauuugau

SEQ ID NO: 491120 - RNA, 32 nt, Human
uaucaccaggugggagugcaguggcacaaucu

SEQ ID NO: 491121 - RNA, 32 nt, Human
uaucaccauucguucaugaaucaugccuagcu

SEQ ID NO: 491122 - RNA, 32 nt, Human
uaucacccaauugccucugacacugacuaaga

SEQ ID NO: 491123 - RNA, 32 nt, Human
uaucacccacacacaccucgcuggggcagggg

SEQ ID NO: 491124 - RNA, 23 nt, Human
uaucacccaggcuggagugcagu

SEQ ID NO: 491125 - RNA, 32 nt, Human
uaucacccccuaccccuccagcuccgcaaccc

SEQ ID NO: 491126 - RNA, 32 nt, Human
uaucacccccugcacugggauaccaaauuccc

SEQ ID NO: 491127 - RNA, 32 nt, Human
uaucacccugauuccucuaucucccccagccc

SEQ ID NO: 491128 - RNA, 32 nt, Human
uaucacccuggagcacuugguauuccagaccc

SEQ ID NO: 491129 - RNA, 32 nt, Human
uaucaccuccaggacuuucucguuuuccaccu

SEQ ID NO: 491130 - RNA, 32 nt, Human
uaucaccugugguuuuuccuuugagaugaaac

SEQ ID NO: 491131 - RNA, 32 nt, Human
uaucacgccgcugcacuccagcuugaaugaca

SEQ ID NO: 491132 - RNA, 32 nt, Human
uaucacggccacugcccaugucuuggacacug

SEQ ID NO: 491133 - RNA, 31 nt, Human
uaucacgggauugcuuuacauuuaaacuuuu

SEQ ID NO: 491134 - RNA, 32 nt, Human
uaucacgguacagcacgaagccaggcuccuuu

SEQ ID NO: 491135 - RNA, 32 nt, Human
uaucacuaaaauguuaucuucaagagauguua

SEQ ID NO: 491136 - RNA, 32 nt, Human
uaucacuaggaguaggcugagcucuggaaaca

SEQ ID NO: 491137 - RNA, 32 nt, Human
uaucacucaagggggaugcuguggaaaccugg

SEQ ID NO: 491138 - RNA, 32 nt, Human
uaucacugaacaaacuaaaggugcacugcuuu

SEQ ID NO: 491139 - RNA, 32 nt, Human
uaucacugcaaccuccgccuccuggguucaaa

SEQ ID NO: 491140 - RNA, 32 nt, Human
uaucacugcacuccagccuggcugacagagug

SEQ ID NO: 491141 - RNA, 32 nt, Human
uaucacugggguuucccauguugcagcacuuc

SEQ ID NO: 491142 - RNA, 32 nt, Human
uaucacuguagagggaaggaacagaggcccug

SEQ ID NO: 491143 - RNA, 32 nt, Human
uaucacugugaucuuauucugaggggagaaaa

SEQ ID NO: 491144 - RNA, 32 nt, Human
uaucacuguuuaauguuacccaacaagaguua

SEQ ID NO: 491145 - RNA, 32 nt, Human
uaucacuguuugcucaccuaauuuauauacag

SEQ ID NO: 491146 - RNA, 31 nt, Human
uaucacuuacugaagaauaccugaagugauc

SEQ ID NO: 491147 - RNA, 32 nt, Human
uaucacuuccagcacaagcugcagccugcauc

SEQ ID NO: 491148 - RNA, 32 nt, Human
uaucacuucucaggaaguugugagggugagga

SEQ ID NO: 491149 - RNA, 31 nt, Human
uaucacuugaaccuaggaguuggagaccaac

SEQ ID NO: 491150 - RNA, 32 nt, Human
uaucacuuucugagaucaucuuccucauuuau

SEQ ID NO: 491151 - RNA, 32 nt, Human
uaucacuuugggaggccuaggcaggcagauca

SEQ ID NO: 491152 - RNA, 32 nt, Human
uaucagaaaaauaccaaguuauuuuauaaaag

SEQ ID NO: 491153 - RNA, 32 nt, Human
uaucagaaucaucagagaugagcccagaagcu

SEQ ID NO: 491154 - RNA, 32 nt, Human
uaucagacagcugcuggaaaagaaugaaccuc

SEQ ID NO: 491155 - RNA, 32 nt, Human
uaucagacaguacagguauagaacauuuccag

SEQ ID NO: 491156 - RNA, 32 nt, Human
uaucagacauucucaaccuuguuuccaagguu

SEQ ID NO: 491157 - RNA, 32 nt, Human
uaucagacgugcucccucccauccuccagccc

SEQ ID NO: 491158 - RNA, 32 nt, Human
uaucagagacaaggguucaccauguugcccag

SEQ ID NO: 491159 - RNA, 32 nt, Human
uaucagagccgagccuggaaucaaacugccuc

SEQ ID NO: 491160 - RNA, 32 nt, Human
uaucagagcugucagcacuaccucuccccgcu

SEQ ID NO: 491161 - RNA, 32 nt, Human
uaucagaguaagccucuccccuccagagcccu

SEQ ID NO: 491162 - RNA, 32 nt, Human
uaucagagucaagugaacugugguguaugugc

SEQ ID NO: 491163 - RNA, 32 nt, Human
uaucagaucaaauaaaagcuacaaugacaagu

SEQ ID NO: 491164 - RNA, 32 nt, Human
uaucagaucacaaacuccuagagucuacaugc

SEQ ID NO: 491165 - RNA, 32 nt, Human
uaucagcacacgugugaucaccguaggguaac

SEQ ID NO: 491166 - RNA, 31 nt, Human
uaucagcacuuucagcaucggcucuucagca

SEQ ID NO: 491167 - RNA, 32 nt, Human
uaucagcagaguaguaggcacaguuguaaaaa

SEQ ID NO: 491168 - RNA, 32 nt, Human
uaucagcagccuguguaaccccuuuccuguaa

SEQ ID NO: 491169 - RNA, 32 nt, Human
uaucagccacccaggaagcacaugcacaacug

SEQ ID NO: 491170 - RNA, 32 nt, Human
uaucagccagaggcuucauuuuaucaucugug

SEQ ID NO: 491171 - RNA, 32 nt, Human
uaucagccagagggggaagaaggguggcucua

SEQ ID NO: 491172 - RNA, 32 nt, Human
uaucagcuauuuccugucuuacuugaaaaguc

SEQ ID NO: 491173 - RNA, 32 nt, Human
uaucagcucacuauaagcuccaccucccaggu

SEQ ID NO: 491174 - RNA, 32 nt, Human
uaucagcuguguccaaagacugugcuucaucc

SEQ ID NO: 491175 - RNA, 32 nt, Human
uaucaggaacagcuaugggagccccagggucu

SEQ ID NO: 491176 - RNA, 32 nt, Human
uaucaggaacuagggagagaaauaaaugcagg

SEQ ID NO: 491177 - RNA, 32 nt, Human
uaucaggagacagggucugagagcagacaacc

SEQ ID NO: 491178 - RNA, 32 nt, Human
uaucaggagcccaggucuccagcuggagggaa

SEQ ID NO: 491179 - RNA, 32 nt, Human
uaucaggaggcugaggcagagaaucacuugaa

SEQ ID NO: 491180 - RNA, 32 nt, Human
uaucaggaggugaugcuggagaccugcggacu

SEQ ID NO: 491181 - RNA, 32 nt, Human
uaucaggaguugucaaggcagagaagagagug

SEQ ID NO: 491182 - RNA, 32 nt, Human
uaucaggauacugugagcaacauggugucccu

SEQ ID NO: 491183 - RNA, 32 nt, Human
uaucaggcacugagccacugcgcccagucaac

SEQ ID NO: 491184 - RNA, 21 nt, Human
uaucaggcacuuuucaugcug

SEQ ID NO: 491185 - RNA, 27 nt, Human
uaucaggcauaagguuuucucaugcug

SEQ ID NO: 491186 - RNA, 32 nt, Human
uaucaggccagcugcagccucuugccuugacc

SEQ ID NO: 491187 - RNA, 32 nt, Human
uaucaggcucaaaugaaugaaaggaggauguu

SEQ ID NO: 491188 - RNA, 32 nt, Human
uaucaggcuggccgagagucacccauguucuc

SEQ ID NO: 491189 - RNA, 32 nt, Human
uaucaggcugggauaaagacuucugcagaaga

SEQ ID NO: 491190 - RNA, 32 nt, Human
uaucagggaaaucauagccaaggggaaaucua

SEQ ID NO: 491191 - RNA, 32 nt, Human
uaucaggggaauagaagggagaaagagaauau

SEQ ID NO: 491192 - RNA, 32 nt, Human
uaucagguacauuccagccuguuggcaacucc

SEQ ID NO: 491193 - RNA, 32 nt, Human
uaucaggugaagcaacacugggcaggauagag

SEQ ID NO: 491194 - RNA, 32 nt, Human
uaucaggugagcuguggaggugggguccuugg

SEQ ID NO: 491195 - RNA, 32 nt, Human
uaucagguuccagagggucugaugucuggcac

SEQ ID NO: 491196 - RNA, 32 nt, Human
uaucagguugacuauauagccauacuugaaaa

SEQ ID NO: 491197 - RNA, 32 nt, Human
uaucaguaaaacaaaggacuugccaugguuca

SEQ ID NO: 491198 - RNA, 32 nt, Human
uaucaguaauccagaauuuaguaguccaugcc

SEQ ID NO: 491199 - RNA, 32 nt, Human
uaucaguagacagcugcugcuuccaugaaacg

SEQ ID NO: 491200 - RNA, 32 nt, Human
uaucagucaaagaagacuuuugaugaggaaua

SEQ ID NO: 491201 - RNA, 21 nt, Human
uaucagucgugucaccagcug

SEQ ID NO: 491202 - RNA, 32 nt, Human
uaucagucuaaacuuagacugccuuuaauguu

SEQ ID NO: 491203 - RNA, 32 nt, Human
uaucagugcagugcguuuaccaugugaaccca

SEQ ID NO: 491204 - RNA, 32 nt, Human
uaucagugcuucccgagugagcauggaacacu

SEQ ID NO: 491205 - RNA, 32 nt, Human
uaucaguguuugcuucaggacuccaccuccuc

SEQ ID NO: 491206 - RNA, 32 nt, Human
uaucaguuacccacucggucccaguuuuguug

SEQ ID NO: 491207 - RNA, 32 nt, Human
uaucaguuaggggacccaagguuuguuuggga

SEQ ID NO: 491208 - RNA, 32 nt, Human
uaucaguuccuuccucccuucaagagucagcu

SEQ ID NO: 491209 - RNA, 32 nt, Human
uaucaguugaaauuaaaucgucuuccaacuug

SEQ ID NO: 491210 - RNA, 32 nt, Human
uaucaguugaguaucuacuaugugcuaggcac

SEQ ID NO: 491211 - RNA, 32 nt, Human
uaucauaaaagccauauauaaaagauccuuuc

SEQ ID NO: 491212 - RNA, 32 nt, Human
uaucauaaccaccagaaaucauacucuccuuu

SEQ ID NO: 491213 - RNA, 32 nt, Human
uaucauaaugugcccuguaucuauuggcagug

SEQ ID NO: 491214 - RNA, 32 nt, Human
uaucauacaugcacauaaaacacuucuugaga

SEQ ID NO: 491215 - RNA, 32 nt, Human
uaucauacuaccucuucuuucuguagggauga

SEQ ID NO: 491216 - RNA, 32 nt, Human
uaucauacuacuguugcuaguacuucauuaua

SEQ ID NO: 491217 - RNA, 32 nt, Human
uaucauacuuccugccucuccccucccccagu

SEQ ID NO: 491218 - RNA, 32 nt, Human
uaucauagacuugcuuucuggcacugguuucc

SEQ ID NO: 491219 - RNA, 32 nt, Human
uaucauagcuccaggauuacuguucagggggu

SEQ ID NO: 491220 - RNA, 32 nt, Human
uaucauauguguauuuaacaguuuuauaucuu

SEQ ID NO: 491221 - RNA, 32 nt, Human
uaucauauuaucuguguuagcauguaguauuu

SEQ ID NO: 491222 - RNA, 32 nt, Human
uaucaucaagagaauuuggaauucugagccag

SEQ ID NO: 491223 - RNA, 32 nt, Human
uaucaucacacaacucagccuggcugauuauc

SEQ ID NO: 491224 - RNA, 32 nt, Human
uaucaucagggaaaacgugggggaagaugaac

SEQ ID NO: 491225 - RNA, 32 nt, Human
uaucaucauaauuucugauguaaagagcauga

SEQ ID NO: 491226 - RNA, 23 nt, Human
uaucaucaucaucgucaucauca

SEQ ID NO: 491227 - RNA, 21 nt, Human
uaucauccaaggguagaugua

SEQ ID NO: 491228 - RNA, 32 nt, Human
uaucauccucaaggacauuacuagugacucag

SEQ ID NO: 491229 - RNA, 32 nt, Human
uaucauccuguaccgugccaucauggccaucg

SEQ ID NO: 491230 - RNA, 32 nt, Human
uaucauccuuacccuucucuuugucucaccca

SEQ ID NO: 491231 - RNA, 32 nt, Human
uaucaucucaggcgucaaccacaugcacacac

SEQ ID NO: 491232 - RNA, 32 nt, Human
uaucaucuccauuugaucaucuccuccaauga

SEQ ID NO: 491233 - RNA, 32 nt, Human
uaucaucucccaggauccaugagguccagugc

SEQ ID NO: 491234 - RNA, 32 nt, Human
uaucaucucccaggauccaugagguccagugu

SEQ ID NO: 491235 - RNA, 32 nt, Human
uaucaucuggcuauuugggaaggaaggacaca

SEQ ID NO: 491236 - RNA, 32 nt, Human
uaucaucuuggccauuuccuuuugagaacuug

SEQ ID NO: 491237 - RNA, 32 nt, Human
uaucaugaaagaaccaagaaucuaguaauuua

SEQ ID NO: 491238 - RNA, 32 nt, Human
uaucaugaauccauuuacugaaaguguccauu

SEQ ID NO: 491239 - RNA, 32 nt, Human
uaucaugagaacagcaaggagggagucugccc

SEQ ID NO: 491240 - RNA, 32 nt, Human
uaucaugagauggagacccucuaucucgugag

SEQ ID NO: 491241 - RNA, 32 nt, Human
uaucaugagcuguucaauaaugacggacgcau

SEQ ID NO: 491242 - RNA, 32 nt, Human
uaucaugaggcuguggaggggagggcugcuuc

SEQ ID NO: 491243 - RNA, 32 nt, Human
uaucaugauauucccccguugcucugaaugag

SEQ ID NO: 491244 - RNA, 18 nt, Human
uaucaugauggcauucca

SEQ ID NO: 491245 - RNA, 32 nt, Human
uaucaugcaaaugcuguauucuucuuuggugg

SEQ ID NO: 491246 - RNA, 32 nt, Human
uaucaugcaacuuggaaaacuguuaguaauaa

SEQ ID NO: 491247 - RNA, 32 nt, Human
uaucaugcagcuuuugaggagucuuuuacacu

SEQ ID NO: 491248 - RNA, 32 nt, Human
uaucaugccacugcacuccagccugggugaca

SEQ ID NO: 491249 - RNA, 32 nt, Human
uaucaugccccuguacuccagccugggugaca

SEQ ID NO: 491250 - RNA, 32 nt, Human
uaucaugcccugugcaaccucuuggccugauc

SEQ ID NO: 491251 - RNA, 32 nt, Human
uaucauggaguagagaaagaaagagcaagagc

SEQ ID NO: 491252 - RNA, 32 nt, Human
uaucauggcaguguucugacagauguauagug

SEQ ID NO: 491253 - RNA, 32 nt, Human
uaucauggcccaggagugaggcauucagggcu

SEQ ID NO: 491254 - RNA, 32 nt, Human
uaucauggcugcaaguaacuucaaaaggaugg

SEQ ID NO: 491255 - RNA, 32 nt, Human
uaucauggcuuccacugcaugaagauaaagag

SEQ ID NO: 491256 - RNA, 29 nt, Human
uaucauggggacaauucaucucuuucgaa

SEQ ID NO: 491257 - RNA, 32 nt, Human
uaucaugggugucaccauugccaucacucaag

SEQ ID NO: 491258 - RNA, 32 nt, Human
uaucauguaucucucuguggugguucauucca

SEQ ID NO: 491259 - RNA, 32 nt, Human
uaucauguccauauuacuugaggagacagcau

SEQ ID NO: 491260 - RNA, 32 nt, Human
uaucaugugcuagauuggaguggggaagugug

SEQ ID NO: 491261 - RNA, 32 nt, Human
uaucauguuaucuucauaacaugcauuuugca

SEQ ID NO: 491262 - RNA, 32 nt, Human
uaucauguuggccaggcuggucucgaacuccu

SEQ ID NO: 491263 - RNA, 32 nt, Human
uaucauucauucuguagccaauggcuuacagu

SEQ ID NO: 491264 - RNA, 32 nt, Human
uaucauucauucuucaguuguugauuuaggag

SEQ ID NO: 491265 - RNA, 32 nt, Human
uaucauucccguuugcaucgcuaaguaagcaa

SEQ ID NO: 491266 - RNA, 32 nt, Human
uaucauuccucuuacuuuauccuuuuuccuua

SEQ ID NO: 491267 - RNA, 32 nt, Human
uaucauugaacccaaaguaggaaaugauagcu

SEQ ID NO: 491268 - RNA, 32 nt, Human
uaucauugcaaauccauuaaagaaggagaagc

SEQ ID NO: 491269 - RNA, 32 nt, Human
uaucauuugagccaggagguugagguugcagu

SEQ ID NO: 491270 - RNA, 32 nt, Human
uaucauuugcuagcauuuaaaauauauaaaga

SEQ ID NO: 491271 - RNA, 32 nt, Human
uaucauuuuagcaccuucucucagggaugacc

SEQ ID NO: 491272 - RNA, 32 nt, Human
uaucauuuucauauccacuuccccaccacuga

SEQ ID NO: 491273 - RNA, 32 nt, Human
uaucauuuuucucccauaauguuuccauaauu

SEQ ID NO: 491274 - RNA, 32 nt, Human
uauccaaaaaccuugagauuugcucauaggaa

SEQ ID NO: 491275 - RNA, 32 nt, Human
uauccaaaaugaaauaaacagaaggaccaaaa

SEQ ID NO: 491276 - RNA, 20 nt, Human
uauccaaacgaggcauucca

SEQ ID NO: 491277 - RNA, 32 nt, Human
uauccaaacucugucuuaauguaaauguaacu

SEQ ID NO: 491278 - RNA, 32 nt, Human
uauccaaacuucuuuuaauuguucacagauuu

SEQ ID NO: 491279 - RNA, 32 nt, Human
uauccaaagaauaaggaggaggaugaacacuu

SEQ ID NO: 491280 - RNA, 32 nt, Human
uauccaaaggagcuugguaagugccuuacugc

SEQ ID NO: 491281 - RNA, 32 nt, Human
uauccaagagauugccaagaguagaagacaga

SEQ ID NO: 491282 - RNA, 32 nt, Human
uauccaaggagguggcugugcagguggccacc

SEQ ID NO: 491283 - RNA, 32 nt, Human
uauccaaggggauggacccaggcucgugggga

SEQ ID NO: 491284 - RNA, 32 nt, Human
uauccaauagcuaucagccacaugugacuacu

SEQ ID NO: 491285 - RNA, 32 nt, Human
uauccaaucugccugugacaugcauuuuacuc

SEQ ID NO: 491286 - RNA, 31 nt, Human
uauccacaaucauagacaaccaaagcaacaa

SEQ ID NO: 491287 - RNA, 32 nt, Human
uauccacagcaacugcugagccccacuacaua

SEQ ID NO: 491288 - RNA, 32 nt, Human
uauccaccaaagacuucauuuguguaucauca

SEQ ID NO: 491289 - RNA, 32 nt, Human
uauccaccagguggcagcaucuugucauacgu

SEQ ID NO: 491290 - RNA, 32 nt, Human
uauccacguucugggagugucauagaaucuca

SEQ ID NO: 491291 - RNA, 32 nt, Human
uauccacuaauggggcagagacaggaagagca

SEQ ID NO: 491292 - RNA, 32 nt, Human
uauccacucucaucuucuuccaauaucaagag

SEQ ID NO: 491293 - RNA, 32 nt, Human
uauccacugcccccucccuccuggugucucug

SEQ ID NO: 491294 - RNA, 32 nt, Human
uauccacuggguaacagugacuacccaugagg

SEQ ID NO: 491295 - RNA, 32 nt, Human
uauccacuguaaaaccauacuacuuucauuuu

SEQ ID NO: 491296 - RNA, 32 nt, Human
uauccacuucuuuugguuccccaguccaaaac

SEQ ID NO: 491297 - RNA, 32 nt, Human
uauccacuugcaaauacuacaaaaagauuguu

SEQ ID NO: 491298 - RNA, 32 nt, Human
uauccacuugcagacacuacaaaaagaguauu

SEQ ID NO: 491299 - RNA, 32 nt, Human
uauccagaaauguccaccugaacaugagccug

SEQ ID NO: 491300 - RNA, 32 nt, Human
uauccagaacucacagcccaaccugcaaccug

SEQ ID NO: 491301 - RNA, 32 nt, Human
uauccagagcauaauuuuccauggccauaguu

SEQ ID NO: 491302 - RNA, 32 nt, Human
uauccagaggcaaacuuuaugaggcuuugaaa

SEQ ID NO: 491303 - RNA, 32 nt, Human
uauccagccacgauggaugacauggcugugga

SEQ ID NO: 491304 - RNA, 32 nt, Human
uauccagccagaaauaaaaaucugccaguggu

SEQ ID NO: 491305 - RNA, 32 nt, Human
uauccagcccaagauuuggugccugcagccuc

SEQ ID NO: 491306 - RNA, 32 nt, Human
uauccagccuuuccuugcaucaucuuccucuu

SEQ ID NO: 491307 - RNA, 32 nt, Human
uauccagcggggaacagugguuacccacgagg

SEQ ID NO: 491308 - RNA, 32 nt, Human
uauccaggaaacacuugcuggagccacucgca

SEQ ID NO: 491309 - RNA, 32 nt, Human
uauccaggagguggaagugaauugcaagugga

SEQ ID NO: 491310 - RNA, 32 nt, Human
uauccaggaguaccacaaccaccaccagugcu

SEQ ID NO: 491311 - RNA, 32 nt, Human
uauccaggauccuuccuuuuccuucuuccucc

SEQ ID NO: 491312 - RNA, 32 nt, Human
uauccaggcugcaguggagccuggugaacuau

SEQ ID NO: 491313 - RNA, 21 nt, Human
uauccaggcuggaaugcggug

SEQ ID NO: 491314 - RNA, 32 nt, Human
uauccaggcuggccucaaacuccugggcucaa

SEQ ID NO: 491315 - RNA, 21 nt, Human
uauccaggcuggugugcagug

SEQ ID NO: 491316 - RNA, 32 nt, Human
uauccaggcuuacacucuagaaacccacaggc

SEQ ID NO: 491317 - RNA, 32 nt, Human
uauccaggguguuccaggugagcuggggaagg

SEQ ID NO: 491318 - RNA, 32 nt, Human
uauccagguguggcaugauggggcaggaggag

SEQ ID NO: 491319 - RNA, 32 nt, Human
uauccagguuccaagccuagaggcuccuuccg

SEQ ID NO: 491320 - RNA, 32 nt, Human
uauccagguuccggcuacacauuuucuaaguc

SEQ ID NO: 491321 - RNA, 32 nt, Human
uauccaguauagcagugacuuugacugcuguu

SEQ ID NO: 491322 - RNA, 32 nt, Human
uauccagucccaaccaacccuuccguuagaug

SEQ ID NO: 491323 - RNA, 32 nt, Human
uauccaguggagaauuuugggcucacccugua

SEQ ID NO: 491324 - RNA, 32 nt, Human
uauccauaaagugcauaugcucagaccaccua

SEQ ID NO: 491325 - RNA, 32 nt, Human
uauccauacacacuaaacacacagguauaugc

SEQ ID NO: 491326 - RNA, 32 nt, Human
uauccauacuauauacacuugaagcaauuggu

SEQ ID NO: 491327 - RNA, 32 nt, Human
uauccauaugugaagaacuggagaagaaggag

SEQ ID NO: 491328 - RNA, 32 nt, Human
uauccaucuguuuauuucuauaccuuucaaua

SEQ ID NO: 491329 - RNA, 32 nt, Human
uauccaugaggcugcugcgccauguugcacua

SEQ ID NO: 491330 - RNA, 31 nt, Human
uauccaugauuucucccuguauugaggcuag

SEQ ID NO: 491331 - RNA, 31 nt, Human
uauccauggacaaugucaacucuuaaugacu

SEQ ID NO: 491332 - RNA, 32 nt, Human
uauccauuaaaaauauuuaaaaauuagccaga

SEQ ID NO: 491333 - RNA, 32 nt, Human
uauccauuagcugggacuuaaaugacucacuu

SEQ ID NO: 491334 - RNA, 32 nt, Human
uauccauuccccugauugagggugggugggug

SEQ ID NO: 491335 - RNA, 32 nt, Human
uauccauuuaucuucucucucgugcuuaauua

SEQ ID NO: 491336 - RNA, 32 nt, Human
uauccauuucuuagcuaucaugcuccucaucu

SEQ ID NO: 491337 - RNA, 32 nt, Human
uaucccaaacuaagcuaugugaaauaagagaa

SEQ ID NO: 491338 - RNA, 32 nt, Human
uaucccaaagggguggccagagccaaagccag

SEQ ID NO: 491339 - RNA, 32 nt, Human
uaucccaaccuugccagcauguauccaggauu

SEQ ID NO: 491340 - RNA, 32 nt, Human
uaucccaccaacacucucccagcucccauguc

SEQ ID NO: 491341 - RNA, 32 nt, Human
uaucccacugcacucugcuuaaggguuccugc

SEQ ID NO: 491342 - RNA, 32 nt, Human
uaucccacuguauagauccacagggagcaaac

SEQ ID NO: 491343 - RNA, 32 nt, Human
uaucccagaaacaagaggguccuggccacagc

SEQ ID NO: 491344 - RNA, 32 nt, Human
uaucccagaggucgaggcugcagugagcugug

SEQ ID NO: 491345 - RNA, 32 nt, Human
uaucccagaguuucgaacaggucgugcugacc

SEQ ID NO: 491346 - RNA, 32 nt, Human
uaucccagcgugccccgcggcgggcccuaccg

SEQ ID NO: 491347 - RNA, 32 nt, Human
uaucccagcuacucgggaggccaaggcaggaa

SEQ ID NO: 491348 - RNA, 32 nt, Human
uaucccagcuacucgggaggcugaggcaggag

SEQ ID NO: 491349 - RNA, 32 nt, Human
uaucccagcuacugggagguugaagcagaauu

SEQ ID NO: 491350 - RNA, 32 nt, Human
uaucccagcuacuugggaggcagaggcaggag

SEQ ID NO: 491351 - RNA, 32 nt, Human
uaucccagcuacuugggaggcuaaggcaggga

SEQ ID NO: 491352 - RNA, 32 nt, Human
uaucccagcuacuugggaggcugaagcaugag

SEQ ID NO: 491353 - RNA, 32 nt, Human
uaucccaggaguuuuaguuugaagaauugcaa

SEQ ID NO: 491354 - RNA, 32 nt, Human
uaucccaggaucuggugcuuacucagcauauu

SEQ ID NO: 491355 - RNA, 32 nt, Human
uaucccaugagccucagcauccuggcacccgg

SEQ ID NO: 491356 - RNA, 31 nt, Human
uaucccaugccccagcccccacccucucgug

SEQ ID NO: 491357 - RNA, 32 nt, Human
uaucccauuuucugaugauuugaaggggagaa

SEQ ID NO: 491358 - RNA, 32 nt, Human
uauccccaacuucuagaccugcuccaaacuag

SEQ ID NO: 491359 - RNA, 32 nt, Human
uauccccaccuuggcuaucaucacccgaugag

SEQ ID NO: 491360 - RNA, 32 nt, Human
uauccccagcagaggcuacagaacagcaaaga

SEQ ID NO: 491361 - RNA, 32 nt, Human
uauccccaguaacagugaucccuuuucuuauu

SEQ ID NO: 491362 - RNA, 32 nt, Human
uauccccagugcugggauggcacacagguguc

SEQ ID NO: 491363 - RNA, 32 nt, Human
uauccccaguucucgggagaaagaguccgcga

SEQ ID NO: 491364 - RNA, 32 nt, Human
uauccccaucauuccaaaaugcuugcuugucu

SEQ ID NO: 491365 - RNA, 28 nt, Human
uaucccccaagugccuucccucaugccu

SEQ ID NO: 491366 - RNA, 32 nt, Human
uaucccccuaacaacagggaaguuuuaucagu

SEQ ID NO: 491367 - RNA, 32 nt, Human
uaucccccugcucuagccaagguggccgcagu

SEQ ID NO: 491368 - RNA, 32 nt, Human
uauccccuacaucuggcagcauguggagcagg

SEQ ID NO: 491369 - RNA, 32 nt, Human
uauccccuccccucugcuugagccuugagccu

SEQ ID NO: 491370 - RNA, 32 nt, Human
uauccccucuacucuuacuucccccaaauuua

SEQ ID NO: 491371 - RNA, 32 nt, Human
uauccccuugcaaauucuugucuuccaaucau

SEQ ID NO: 491372 - RNA, 32 nt, Human
uauccccuuuuaacagaugagaaaaauacaac

SEQ ID NO: 491373 - RNA, 32 nt, Human
uaucccgaaaaguuacaugucaccuccacgag

SEQ ID NO: 491374 - RNA, 32 nt, Human
uaucccgagggugcggcgugaagaggagccug

SEQ ID NO: 491375 - RNA, 32 nt, Human
uaucccgggaauucaagguugcagugagcuau

SEQ ID NO: 491376 - RNA, 32 nt, Human
uaucccggggagccaggaagcagugagcccag

SEQ ID NO: 491377 - RNA, 32 nt, Human
uaucccgguuccaagccuagaggauccuucca

SEQ ID NO: 491378 - RNA, 32 nt, Human
uaucccuacaauauuugcauuucauguuuuua

SEQ ID NO: 491379 - RNA, 32 nt, Human
uaucccuagaagcagagcuggaguaaggacuu

SEQ ID NO: 491380 - RNA, 32 nt, Human
uaucccuagcacaaagcaagugccuggcacau

SEQ ID NO: 491381 - RNA, 32 nt, Human
uaucccuaggagagaugaaauuugagagguga

SEQ ID NO: 491382 - RNA, 32 nt, Human
uaucccuauuccuaaagauucccaucaaugaa

SEQ ID NO: 491383 - RNA, 32 nt, Human
uaucccucacccuuccgcggaaagagcccccu

SEQ ID NO: 491384 - RNA, 32 nt, Human
uaucccuccagugguaccugucacugcaaaug

SEQ ID NO: 491385 - RNA, 32 nt, Human
uaucccuccucccauccacacacacaggcacc

SEQ ID NO: 491386 - RNA, 32 nt, Human
uaucccuccugagacaucuuugcugcaagauc

SEQ ID NO: 491387 - RNA, 32 nt, Human
uaucccugacagcugcugcacuagccuuccug

SEQ ID NO: 491388 - RNA, 32 nt, Human
uaucccugcccagccuguggugcuugaaacgu

SEQ ID NO: 491389 - RNA, 32 nt, Human
uaucccugcccagggcuguuuucaaauacaau

SEQ ID NO: 491390 - RNA, 31 nt, Human
uaucccugccucuucuucgcccuguucugug

SEQ ID NO: 491391 - RNA, 32 nt, Human
uaucccugcucccuuuuuccuccccuucccuc

SEQ ID NO: 491392 - RNA, 32 nt, Human
uaucccuggccacaccuggggaguagccaaga

SEQ ID NO: 491393 - RNA, 32 nt, Human
uaucccuguaacugccaagagcucaggagcca

SEQ ID NO: 491394 - RNA, 32 nt, Human
uaucccuuccagaauaccaagauaauguaagc

SEQ ID NO: 491395 - RNA, 32 nt, Human
uaucccuugguuuauuggcuucaacaucuucu

SEQ ID NO: 491396 - RNA, 32 nt, Human
uauccgaagccuuggcuggcgcaggcugaugg

SEQ ID NO: 491397 - RNA, 32 nt, Human
uauccgaagggcccucaauguccacaaagcca

SEQ ID NO: 491398 - RNA, 32 nt, Human
uauccgagaagaggaggguagaaaugaaggaa

SEQ ID NO: 491399 - RNA, 32 nt, Human
uauccgcaggcuuaaccagcagccuucucagg

SEQ ID NO: 491400 - RNA, 32 nt, Human
uauccgcccacaggaagccugcaguccuggaa

SEQ ID NO: 491401 - RNA, 18 nt, Human
uauccgccuggcauuuca

SEQ ID NO: 491402 - RNA, 32 nt, Human
uauccgcuuccuguggaagcaagaccaaaagg

SEQ ID NO: 491403 - RNA, 32 nt, Human
uauccgggacucgggucccaaccucucuaaac

SEQ ID NO: 491404 - RNA, 17 nt, Human
uauccgggguucauucc

SEQ ID NO: 491405 - RNA, 32 nt, Human
uauccgucuuacaacuuugauuuuggaaagua

SEQ ID NO: 491406 - RNA, 32 nt, Human
uauccgugcugccccggaccccugugacuggc

SEQ ID NO: 491407 - RNA, 32 nt, Human
uauccuaaacccuuaaccuaaauuuaacuuga

SEQ ID NO: 491408 - RNA, 32 nt, Human
uauccuagcuacucaggaggcugaggcaggag

SEQ ID NO: 491409 - RNA, 32 nt, Human
uauccuagguaucaucauuuauccaaguacuu

SEQ ID NO: 491410 - RNA, 32 nt, Human
uauccucaauaugcaugucugcccaucacauc

SEQ ID NO: 491411 - RNA, 32 nt, Human
uauccucagcuuauaggaaucucuccagguca

SEQ ID NO: 491412 - RNA, 32 nt, Human
uauccucaucuaaauacugagaggcuaguugg

SEQ ID NO: 491413 - RNA, 32 nt, Human
uauccuccacaucuagccugugcccagcacac

SEQ ID NO: 491414 - RNA, 32 nt, Human
uauccuccccuccacuccagcccaccggugac

SEQ ID NO: 491415 - RNA, 32 nt, Human
uauccucggcgaacaugucucuccugagucca

SEQ ID NO: 491416 - RNA, 32 nt, Human
uauccucucccacuuucucuucccucuacuca

SEQ ID NO: 491417 - RNA, 32 nt, Human
uauccucugagagacuuagagguggggaauaa

SEQ ID NO: 491418 - RNA, 32 nt, Human
uauccucuguaagaaugucagaaaagguugac

SEQ ID NO: 491419 - RNA, 32 nt, Human
uauccucuuccuccucuuccuccuccuggugg

SEQ ID NO: 491420 - RNA, 32 nt, Human
uauccucuuggacuucccagccuucagaacug

SEQ ID NO: 491421 - RNA, 32 nt, Human
uauccucuuuuuauugcuuugucuauguuuca

SEQ ID NO: 491422 - RNA, 32 nt, Human
uauccugaggagcaauugggggagguuuagaa

SEQ ID NO: 491423 - RNA, 32 nt, Human
uauccugaguacugggauuacaggcgcccacc

SEQ ID NO: 491424 - RNA, 32 nt, Human
uauccugcucuuuuggaaacguauuccggaag

SEQ ID NO: 491425 - RNA, 32 nt, Human
uauccuggaaacauaugucacaugcgggaacu

SEQ ID NO: 491426 - RNA, 32 nt, Human
uauccuggccaacauggugaaaccccgucucu

SEQ ID NO: 491427 - RNA, 32 nt, Human
uauccugggacuuggaagcuggcaggauuugc

SEQ ID NO: 491428 - RNA, 32 nt, Human
uauccugggccagaggggacagcuggacagug

SEQ ID NO: 491429 - RNA, 32 nt, Human
uauccuggggccacccucccugccuccaaaac

SEQ ID NO: 491430 - RNA, 32 nt, Human
uauccugggucuuggcuuuucccccauuuguu

SEQ ID NO: 491431 - RNA, 32 nt, Human
uauccugucccuccaccccacccuccaccuca

SEQ ID NO: 491432 - RNA, 32 nt, Human
uauccuguuuggagacuccaacagucagguga

SEQ ID NO: 491433 - RNA, 32 nt, Human
uauccuguuuuaugaagaaagcagaaauaauu

SEQ ID NO: 491434 - RNA, 32 nt, Human
uauccuuacuucugucuccacucugauaccag

SEQ ID NO: 491435 - RNA, 32 nt, Human
uauccuuaucuaguguuugauugucaaugcug

SEQ ID NO: 491436 - RNA, 32 nt, Human
uauccuuauucacggcauugggucaccaacuc

SEQ ID NO: 491437 - RNA, 32 nt, Human
uauccuuccaggcugcuuaagaauggacugcu

SEQ ID NO: 491438 - RNA, 32 nt, Human
uauccuucgugcgcuaugggagcugcuguggc

SEQ ID NO: 491439 - RNA, 32 nt, Human
uauccuucuugcaaagugcuucccuugauucc

SEQ ID NO: 491440 - RNA, 32 nt, Human
uauccuugaccuauaucuccccauuuccucuc

SEQ ID NO: 491441 - RNA, 32 nt, Human
uauccuugauuuuucauuguguaucuguuugg

SEQ ID NO: 491442 - RNA, 32 nt, Human
uauccuugcaccugacacuguccccacacaaa

SEQ ID NO: 491443 - RNA, 32 nt, Human
uauccuugggggcucccagggcaaggguuaag

SEQ ID NO: 491444 - RNA, 32 nt, Human
uauccuuuauaaggaaugugcuccuagccacu

SEQ ID NO: 491445 - RNA, 32 nt, Human
uauccuuuccccuuuguuuuccuuccuuucuu

SEQ ID NO: 491446 - RNA, 32 nt, Human
uauccuuuccucaaccuccuccuuucccaauu

SEQ ID NO: 491447 - RNA, 32 nt, Human
uauccuuucucuuuccucaucuccuaucacuc

SEQ ID NO: 491448 - RNA, 32 nt, Human
uauccuuuguccuguucagagagaccagggcc

SEQ ID NO: 491449 - RNA, 32 nt, Human
uauccuuuucccaacaaaagcucacagucuaa

SEQ ID NO: 491450 - RNA, 32 nt, Human
uaucgaaucuaucagcuuuuucucaauggaaa

SEQ ID NO: 491451 - RNA, 32 nt, Human
uaucgacuacuaaaugagagauuuucagaccc

SEQ ID NO: 491452 - RNA, 32 nt, Human
uaucgagccugaccaccgcaagccaggaagca

SEQ ID NO: 491453 - RNA, 32 nt, Human
uaucgauaaacaguaaaguaauucuaaauacc

SEQ ID NO: 491454 - RNA, 32 nt, Human
uaucgauagcccaggcaggaguacaguggcac

SEQ ID NO: 491455 - RNA, 32 nt, Human
uaucgaugacuugguggcuuuuccuugaaucc

SEQ ID NO: 491456 - RNA, 32 nt, Human
uaucgcaccacagcgcuccagccuggucgaca

SEQ ID NO: 491457 - RNA, 32 nt, Human
uaucgcaccacugcacuccagccugggcaaca

SEQ ID NO: 491458 - RNA, 32 nt, Human
uaucgcaccauuguacuccagccugugugaca

SEQ ID NO: 491459 - RNA, 32 nt, Human
uaucgcaugaugagcuaugaccacuggagcag

SEQ ID NO: 491460 - RNA, 32 nt, Human
uaucgccacugcacuccagccugggugacaga

SEQ ID NO: 491461 - RNA, 23 nt, Human
uaucgcccaggauggagugcagu

SEQ ID NO: 491462 - RNA, 23 nt, Human
uaucgcccaggcuggaguacagu

SEQ ID NO: 491463 - RNA, 23 nt, Human
uaucgcccaggcuggagugcaau

SEQ ID NO: 491464 - RNA, 23 nt, Human
uaucgcccaggcuggagugcagu

SEQ ID NO: 491465 - RNA, 32 nt, Human
uaucgccucugccucccaaaucuucaccugcu

SEQ ID NO: 491466 - RNA, 19 nt, Human
uaucgcgccaucacggaag

SEQ ID NO: 491467 - RNA, 32 nt, Human
uaucgcucuuccccucuccucggccacucccc

SEQ ID NO: 491468 - RNA, 32 nt, Human
uaucgcugccuugccaugucuuguucagaaga

SEQ ID NO: 491469 - RNA, 32 nt, Human
uaucgcuggaauuaaggugugagccacugugc

SEQ ID NO: 491470 - RNA, 32 nt, Human
uaucgcuuucccuuuuuccucucccuccgccc

SEQ ID NO: 491471 - RNA, 32 nt, Human
uaucggcagugugggaaaugcgaagcauuucu

SEQ ID NO: 491472 - RNA, 32 nt, Human
uaucggccuugugucagcaggucauggucccu

SEQ ID NO: 491473 - RNA, 32 nt, Human
uaucggggacugugccguguuccucucugccg

SEQ ID NO: 491474 - RNA, 32 nt, Human
uaucgggguacgggacagggaggaggccucau

SEQ ID NO: 491475 - RNA, 32 nt, Human
uaucggucuccuuuccccuccuccccguucuc

SEQ ID NO: 491476 - RNA, 32 nt, Human
uaucggugcaggaaaggcaaagaagggaacau

SEQ ID NO: 491477 - RNA, 32 nt, Human
uaucguaaaauuaagaaaggauaaaguuggua

SEQ ID NO: 491478 - RNA, 32 nt, Human
uaucguaucccuugccaucugaacuuguuugc

SEQ ID NO: 491479 - RNA, 32 nt, Human
uaucguaugauagaaagacauucuuccccagg

SEQ ID NO: 491480 - RNA, 32 nt, Human
uaucguauugaaucuagauuacauuggguuau

SEQ ID NO: 491481 - RNA, 32 nt, Human
uaucguccugcugaagcaggccacagcugugc

SEQ ID NO: 491482 - RNA, 32 nt, Human
uaucgucuggugugguggcucacaccuguaau

SEQ ID NO: 491483 - RNA, 32 nt, Human
uaucgugagaucugguaguuuaaaagugugua

SEQ ID NO: 491484 - RNA, 32 nt, Human
uaucgugccacugcacuccagccuggaggaca

SEQ ID NO: 491485 - RNA, 32 nt, Human
uaucgugccacugcauuccagccugggugaca

SEQ ID NO: 491486 - RNA, 32 nt, Human
uaucguggacuuuauaaaagcaaaggaaauug

SEQ ID NO: 491487 - RNA, 32 nt, Human
uaucgugugugcauguacaugcaugggcacug

SEQ ID NO: 491488 - RNA, 32 nt, Human
uaucguuuuugaaggagaucuuuuuaaaaccu

SEQ ID NO: 491489 - RNA, 32 nt, Human
uaucuaaaaaucaagucucggcaguggcucau

SEQ ID NO: 491490 - RNA, 32 nt, Human
uaucuaaaugccacucauuugguccugcgcau

SEQ ID NO: 491491 - RNA, 32 nt, Human
uaucuaaaugggauuuugaguucuccagcuau

SEQ ID NO: 491492 - RNA, 32 nt, Human
uaucuaaauuauaacauacaauuauuuuauaa

SEQ ID NO: 491493 - RNA, 32 nt, Human
uaucuaacuuuccuucccuccauugaguacgu

SEQ ID NO: 491494 - RNA, 32 nt, Human
uaucuaaggaaaaaggugaauauguuuuugua

SEQ ID NO: 491495 - RNA, 32 nt, Human
uaucuaauucuuuaaugauuccuauaaaucua

SEQ ID NO: 491496 - RNA, 32 nt, Human
uaucuacaaaggaaagagaaaggugagaaaua

SEQ ID NO: 491497 - RNA, 32 nt, Human
uaucuacaagccgcuggggcuugggggcucca

SEQ ID NO: 491498 - RNA, 32 nt, Human
uaucuacagaaggaaagaauccccuacgccac

SEQ ID NO: 491499 - RNA, 32 nt, Human
uaucuacaucuucacggucucugagauccuga

SEQ ID NO: 491500 - RNA, 32 nt, Human
uaucuaccccagaugccugccucugcccccac

SEQ ID NO: 491501 - RNA, 32 nt, Human
uaucuacccugacuaaagcuugaaaugcuaca

SEQ ID NO: 491502 - RNA, 32 nt, Human
uaucuacccugacuaaagcuugaaaugcugca

SEQ ID NO: 491503 - RNA, 32 nt, Human
uaucuacugagugccuguuaugugccaaacac

SEQ ID NO: 491504 - RNA, 31 nt, Human
uaucuacugcuacagauccuguugaagaaag

SEQ ID NO: 491505 - RNA, 32 nt, Human
uaucuacugcucaugaaaucucuggauuuaac

SEQ ID NO: 491506 - RNA, 32 nt, Human
uaucuacugcuccuuuuuacugccuucagagg

SEQ ID NO: 491507 - RNA, 32 nt, Human
uaucuacuuauccagguuugcaaauguacaug

SEQ ID NO: 491508 - RNA, 32 nt, Human
uaucuagaccuuagccagcaggagacucacug

SEQ ID NO: 491509 - RNA, 32 nt, Human
uaucuagccuccugccaaaauugaugcucaga

SEQ ID NO: 491510 - RNA, 32 nt, Human
uaucuaggaagaaugacugagggauaguauug

SEQ ID NO: 491511 - RNA, 32 nt, Human
uaucuaggaagugucuugccaggucaccaaau

SEQ ID NO: 491512 - RNA, 32 nt, Human
uaucuaggcuuagggagcccugggacccugcc

SEQ ID NO: 491513 - RNA, 32 nt, Human
uaucuaguauugaggcuugcucuuucaugugg

SEQ ID NO: 491514 - RNA, 32 nt, Human
uaucuagugaugcagaauaucaaggaggccac

SEQ ID NO: 491515 - RNA, 32 nt, Human
uaucuaguuccagcuacuugagaggcugaggc

SEQ ID NO: 491516 - RNA, 32 nt, Human
uaucuauaaagugaauguucaacaacaaugau

SEQ ID NO: 491517 - RNA, 32 nt, Human
uaucuauacauuuuacagucucuaauacuuag

SEQ ID NO: 491518 - RNA, 32 nt, Human
uaucuauaugcacauacauacauauauacaca

SEQ ID NO: 491519 - RNA, 32 nt, Human
uaucuaucucccagaacagaacaugugccaau

SEQ ID NO: 491520 - RNA, 32 nt, Human
uaucuaucuuuguucuccuuggcaacugagag

SEQ ID NO: 491521 - RNA, 32 nt, Human
uaucuaugcauacauauauacacacauaugua

SEQ ID NO: 491522 - RNA, 32 nt, Human
uaucuaugccuuucuggcugauuuuuguagag

SEQ ID NO: 491523 - RNA, 32 nt, Human
uaucuaugcuuugcaaagacuaaggcguauua

SEQ ID NO: 491524 - RNA, 32 nt, Human
uaucuauguaacaaaucgcagcacaggagucc

SEQ ID NO: 491525 - RNA, 32 nt, Human
uaucuaugugcagcaugacucucuccagguga

SEQ ID NO: 491526 - RNA, 32 nt, Human
uaucuauuaaaagacaaaaauuagcugggcgu

SEQ ID NO: 491527 - RNA, 32 nt, Human
uaucuauuuacacuauuagccuaguuuucuca

SEQ ID NO: 491528 - RNA, 32 nt, Human
uaucuauuucacuugaccccugcccaccucuc

SEQ ID NO: 491529 - RNA, 32 nt, Human
uaucuauuugcaccuuaaaagacagcuagauu

SEQ ID NO: 491530 - RNA, 32 nt, Human
uaucucaaguaauuuggugucauuuacaaaag

SEQ ID NO: 491531 - RNA, 32 nt, Human
uaucucaccuucccaaaagacacuguguaagu

SEQ ID NO: 491532 - RNA, 32 nt, Human
uaucucacgccuguagucccagcacuuuggga

SEQ ID NO: 491533 - RNA, 32 nt, Human
uaucucagaguccucaacguggguguggccga

SEQ ID NO: 491534 - RNA, 32 nt, Human
uaucucagccuccugaguagcugggauuacag

SEQ ID NO: 491535 - RNA, 25 nt, Human
uaucucagcucacugcaaacucugc

SEQ ID NO: 491536 - RNA, 32 nt, Human
uaucucagcucacugcaaccacugccucccag

SEQ ID NO: 491537 - RNA, 23 nt, Human
uaucucagcucacugcaaccucc

SEQ ID NO: 491538 - RNA, 32 nt, Human
uaucucagcucacugcaaccuccgccucccag

SEQ ID NO: 491539 - RNA, 32 nt, Human
uaucucagcuguacaugcucugccuguggaga

SEQ ID NO: 491540 - RNA, 32 nt, Human
uaucucaggcugggaagaacacaucuugggcc

SEQ ID NO: 491541 - RNA, 32 nt, Human
uaucucaguaaccuuaaauaggaaaaguacuc

SEQ ID NO: 491542 - RNA, 32 nt, Human
uaucucagugccuuuacagugccagggauggg

SEQ ID NO: 491543 - RNA, 32 nt, Human
uaucucaguucuguagcagaucccugguucag

SEQ ID NO: 491544 - RNA, 32 nt, Human
uaucucauaguuccggacuaaauacuggcuuu

SEQ ID NO: 491545 - RNA, 32 nt, Human
uaucucauccaccucuucucuuuguuggguau

SEQ ID NO: 491546 - RNA, 32 nt, Human
uaucucaucuguccccucuccuggggcuuaag

SEQ ID NO: 491547 - RNA, 32 nt, Human
uaucucaugccuauaaucccagcacuuuggga

SEQ ID NO: 491548 - RNA, 32 nt, Human
uaucucauuuuaaaaagaaguucuuuaugaaa

SEQ ID NO: 491549 - RNA, 32 nt, Human
uaucuccaaagagggauuacaaggucaaagag

SEQ ID NO: 491550 - RNA, 32 nt, Human
uaucuccacccacacuaucauagauuccuuag

SEQ ID NO: 491551 - RNA, 32 nt, Human
uaucuccacuaaaaauacaaaauuagcugggu

SEQ ID NO: 491552 - RNA, 32 nt, Human
uaucucccagacccuucucuugaaguccaaua

SEQ ID NO: 491553 - RNA, 32 nt, Human
uaucucccaggcucuguaucuacugguuccug

SEQ ID NO: 491554 - RNA, 32 nt, Human
uaucuccccaaaaauguauagugccuuguuuu

SEQ ID NO: 491555 - RNA, 32 nt, Human
uaucuccccaggagcagcaucucugagcaccc

SEQ ID NO: 491556 - RNA, 32 nt, Human
uaucucccugcccucugcucucacaggcuggg

SEQ ID NO: 491557 - RNA, 32 nt, Human
uaucucccuggcucacuggcaggugugggauc

SEQ ID NO: 491558 - RNA, 32 nt, Human
uaucuccgcaggcuauuuguucagagaggccu

SEQ ID NO: 491559 - RNA, 32 nt, Human
uaucuccggaaagaguccuggugacccagcga

SEQ ID NO: 491560 - RNA, 19 nt, Human
uaucuccuaguguuuaaau

SEQ ID NO: 491561 - RNA, 32 nt, Human
uaucuccucaucucccccucccuuuugggaaa

SEQ ID NO: 491562 - RNA, 32 nt, Human
uaucuccugcaaccucagugccucagccugag

SEQ ID NO: 491563 - RNA, 32 nt, Human
uaucuccugccugucugccucuguccugcuuu

SEQ ID NO: 491564 - RNA, 32 nt, Human
uaucuccuguucucugagaguaccaugguguu

SEQ ID NO: 491565 - RNA, 32 nt, Human
uaucuccuuuaucaaaacaacaguaauaacaa

SEQ ID NO: 491566 - RNA, 32 nt, Human
uaucucggcucacugcaaccacugccucccag

SEQ ID NO: 491567 - RNA, 25 nt, Human
uaucucggcucacugcaagcuccgc

SEQ ID NO: 491568 - RNA, 32 nt, Human
uaucucggugcugccgggggaggcgggaggag

SEQ ID NO: 491569 - RNA, 32 nt, Human
uaucucgucuuuccuccuuagaagaacagacc

SEQ ID NO: 491570 - RNA, 32 nt, Human
uaucucuaaaacacagaaggcggugcagggug

SEQ ID NO: 491571 - RNA, 32 nt, Human
uaucucuaauaaaaauacaaaaauuagcuggg

SEQ ID NO: 491572 - RNA, 32 nt, Human
uaucucuacagggguccucggucuccaucuac

SEQ ID NO: 491573 - RNA, 32 nt, Human
uaucucuacaucauuuuaacagcugguauggc

SEQ ID NO: 491574 - RNA, 32 nt, Human
uaucucuaccaaaaauacaaaaauuagccagg

SEQ ID NO: 491575 - RNA, 32 nt, Human
uaucucuacuaaaaacgcacagaaaaauuagc

SEQ ID NO: 491576 - RNA, 32 nt, Human
uaucucuacuaaaaauacaaaaagauuagcca

SEQ ID NO: 491577 - RNA, 32 nt, Human
uaucucuacuaaaaauacaaaaauuaaccagg

SEQ ID NO: 491578 - RNA, 32 nt, Human
uaucucuacuaaaaauacaaaaauuagccggg

SEQ ID NO: 491579 - RNA, 32 nt, Human
uaucucuacuaaaaauacaaaaauuagcuagg

SEQ ID NO: 491580 - RNA, 32 nt, Human
uaucucuacuaaaaauacaaaaauuagcuggg

SEQ ID NO: 491581 - RNA, 32 nt, Human
uaucucuacuaaaaauacaaaaauuaucgggg

SEQ ID NO: 491582 - RNA, 32 nt, Human
uaucucuacuaaaaauacaaaaauuaucuggg

SEQ ID NO: 491583 - RNA, 32 nt, Human
uaucucuacuaaaaauacaaaauuagccaggc

SEQ ID NO: 491584 - RNA, 32 nt, Human
uaucucuacuaaaaauaccaaaauuagcuggg

SEQ ID NO: 491585 - RNA, 32 nt, Human
uaucucuacuaaaaauagaaaaauuagcuagg

SEQ ID NO: 491586 - RNA, 32 nt, Human
uaucucuacuaaaauacaaaaauuagcugggc

SEQ ID NO: 491587 - RNA, 32 nt, Human
uaucucucauucucaccucaacccacuuuacc

SEQ ID NO: 491588 - RNA, 32 nt, Human
uaucucucauuucuuugccuucagcagaauca

SEQ ID NO: 491589 - RNA, 32 nt, Human
uaucucucccugggcugccaccagagaaggug

SEQ ID NO: 491590 - RNA, 32 nt, Human
uaucucuccuaaaaauacaaaaauuagccggg

SEQ ID NO: 491591 - RNA, 32 nt, Human
uaucucucugcaggcucgccucugggcuuugu

SEQ ID NO: 491592 - RNA, 32 nt, Human
uaucucucuguggacagugguggccgccgugc

SEQ ID NO: 491593 - RNA, 32 nt, Human
uaucucugaccuggaggucugccuguaucuuu

SEQ ID NO: 491594 - RNA, 32 nt, Human
uaucucugauaauucaaaaaugcuaauaaacu

SEQ ID NO: 491595 - RNA, 32 nt, Human
uaucucugcccuccuccacucccuuuuuguaa

SEQ ID NO: 491596 - RNA, 32 nt, Human
uaucucuggccuuacccugccuuccugccucc

SEQ ID NO: 491597 - RNA, 32 nt, Human
uaucucugggaaaaaggagcagcauuuggcca

SEQ ID NO: 491598 - RNA, 32 nt, Human
uaucucuggugcuggccucugccccuccaucc

SEQ ID NO: 491599 - RNA, 32 nt, Human
uaucucuguacuccuauaugaagagaacagua

SEQ ID NO: 491600 - RNA, 32 nt, Human
uaucucuguguugguguaucugugccauuggc

SEQ ID NO: 491601 - RNA, 32 nt, Human
uaucucuguuuugguaccaguaccaugauguu

SEQ ID NO: 491602 - RNA, 32 nt, Human
uaucucuucacacauccccaggcccagugcuu

SEQ ID NO: 491603 - RNA, 32 nt, Human
uaucucuucuuucucuuccucucccuccuccu

SEQ ID NO: 491604 - RNA, 32 nt, Human
uaucucuucuuucuguaucuauagguaaaucu

SEQ ID NO: 491605 - RNA, 32 nt, Human
uaucucuuuaugcaauaccucaauuuuucaua

SEQ ID NO: 491606 - RNA, 32 nt, Human
uaucucuuucccuggaaucaacuuguaugaaa

SEQ ID NO: 491607 - RNA, 32 nt, Human
uaucucuuucuuucucuuucuguuuccuggcc

SEQ ID NO: 491608 - RNA, 32 nt, Human
uaucucuuugucuugugucuuauuuauuacaa

SEQ ID NO: 491609 - RNA, 32 nt, Human
uaucucuuugugauaguuuaagccccugcacc

SEQ ID NO: 491610 - RNA, 32 nt, Human
uaucucuuuuugacauuguaauaaacuuguua

SEQ ID NO: 491611 - RNA, 32 nt, Human
uaucugaaagaaauaaccaucuucucaacaug

SEQ ID NO: 491612 - RNA, 32 nt, Human
uaucugaagcccucccagguguuaacauucca

SEQ ID NO: 491613 - RNA, 32 nt, Human
uaucugacaagaaacuuacuuaaccauugugu

SEQ ID NO: 491614 - RNA, 32 nt, Human
uaucugacuuaaaauuaugaauauuuugaaua

SEQ ID NO: 491615 - RNA, 32 nt, Human
uaucugagagugaaggaggggugggaaggugc

SEQ ID NO: 491616 - RNA, 32 nt, Human
uaucugagccacaaccuucuguaauucacuuc

SEQ ID NO: 491617 - RNA, 32 nt, Human
uaucugagucuuuccaagagcaauugccaagg

SEQ ID NO: 491618 - RNA, 32 nt, Human
uaucugaguuccacugggguaaggggaugaau

SEQ ID NO: 491619 - RNA, 32 nt, Human
uaucugaucuacucggggccucaggcuucuca

SEQ ID NO: 491620 - RNA, 32 nt, Human
uaucugcaaauacaagaaaugagaggcuucuc

SEQ ID NO: 491621 - RNA, 32 nt, Human
uaucugcaauacccaagccacagggaagaacu

SEQ ID NO: 491622 - RNA, 32 nt, Human
uaucugcacagcaacccagccuuuccgugcug

SEQ ID NO: 491623 - RNA, 32 nt, Human
uaucugcacccacccauaggugcucuugucua

SEQ ID NO: 491624 - RNA, 32 nt, Human
uaucugcacucccauguucauuucagcauuau

SEQ ID NO: 491625 - RNA, 32 nt, Human
uaucugcaggaguucaagaccagccuggggaa

SEQ ID NO: 491626 - RNA, 32 nt, Human
uaucugcaguguccuugcuguguagcucuuca

SEQ ID NO: 491627 - RNA, 32 nt, Human
uaucugcauaaauauaugucauauauacacau

SEQ ID NO: 491628 - RNA, 32 nt, Human
uaucugcauauucuuuuucccauguggcucua

SEQ ID NO: 491629 - RNA, 32 nt, Human
uaucugcaucgcuucccaccuccgggccuuug

SEQ ID NO: 491630 - RNA, 32 nt, Human
uaucugccaucaucugccauaggaaagauacc

SEQ ID NO: 491631 - RNA, 32 nt, Human
uaucugcccccaugcaggccaggcuggcuacc

SEQ ID NO: 491632 - RNA, 32 nt, Human
uaucugcccuggagccuguacagccaugccac

SEQ ID NO: 491633 - RNA, 32 nt, Human
uaucugccugcuccucucccuccuaaggaaaa

SEQ ID NO: 491634 - RNA, 32 nt, Human
uaucugccuguguggcuuugcauuucaaaugu

SEQ ID NO: 491635 - RNA, 32 nt, Human
uaucugccuucuaagaaggcagaccaggucuu

SEQ ID NO: 491636 - RNA, 32 nt, Human
uaucugcgcacccggagguggggugaggacgg

SEQ ID NO: 491637 - RNA, 32 nt, Human
uaucugcgccgugaggacuugucuccuaaucu

SEQ ID NO: 491638 - RNA, 32 nt, Human
uaucugcuacgguaacuucaucagcccgccaa

SEQ ID NO: 491639 - RNA, 32 nt, Human
uaucugcuaucaggcagcaccaaagguuuuug

SEQ ID NO: 491640 - RNA, 32 nt, Human
uaucugcucaggccuggcaugaccucaauuau

SEQ ID NO: 491641 - RNA, 32 nt, Human
uaucugcucauuuugacaaagugccucaugca

SEQ ID NO: 491642 - RNA, 32 nt, Human
uaucugcugcaccuucacucuccaggguacau

SEQ ID NO: 491643 - RNA, 32 nt, Human
uaucuggagaagguguacaacuuucaaacaca

SEQ ID NO: 491644 - RNA, 32 nt, Human
uaucuggagcagucggggcgggcaggcccagc

SEQ ID NO: 491645 - RNA, 32 nt, Human
uaucuggaggcuggaagucugagaucagagug

SEQ ID NO: 491646 - RNA, 32 nt, Human
uaucuggaucaguaauaaaauauuucaaaggc

SEQ ID NO: 491647 - RNA, 32 nt, Human
uaucuggcagaagaaauuucuaagcagcaaag

SEQ ID NO: 491648 - RNA, 32 nt, Human
uaucuggccagauuuaaguagauucuauuucc

SEQ ID NO: 491649 - RNA, 32 nt, Human
uaucuggccccugaacacaguauacgaagcau

SEQ ID NO: 491650 - RNA, 32 nt, Human
uaucuggcucaagccacucuuacuuuauggac

SEQ ID NO: 491651 - RNA, 32 nt, Human
uaucuggcuggacugaucugucucacaagaag

SEQ ID NO: 491652 - RNA, 32 nt, Human
uaucugggaggcagaguuugccgugagcugag

SEQ ID NO: 491653 - RNA, 32 nt, Human
uaucugggauccacauaauggagacauucuga

SEQ ID NO: 491654 - RNA, 32 nt, Human
uaucugggcuauauacaguccucaaauaaaua

SEQ ID NO: 491655 - RNA, 32 nt, Human
uaucugggucccuagaaggcccuagauguggg

SEQ ID NO: 491656 - RNA, 32 nt, Human
uaucuggucgugaacuccuggccucaagggau

SEQ ID NO: 491657 - RNA, 32 nt, Human
uaucuggugcugaucucacugcauaaugacuu

SEQ ID NO: 491658 - RNA, 32 nt, Human
uaucuguaaaaagagagaaaacauguuuuguu

SEQ ID NO: 491659 - RNA, 32 nt, Human
uaucuguaaaacaagggggugggccaggcgau

SEQ ID NO: 491660 - RNA, 32 nt, Human
uaucuguacuaaaaacacaaaauuagcugggu

SEQ ID NO: 491661 - RNA, 32 nt, Human
uaucuguagaaauugaauuuugcugcaacuaa

SEQ ID NO: 491662 - RNA, 32 nt, Human
uaucugucaaaccauuucuguuagaacgaugu

SEQ ID NO: 491663 - RNA, 32 nt, Human
uaucugucuugcaaaucaguaaacugaagcaa

SEQ ID NO: 491664 - RNA, 32 nt, Human
uaucugucuuuuugcuuuuagcauccuaauga

SEQ ID NO: 491665 - RNA, 32 nt, Human
uaucugugauaauuccagcaggguaaagcggg

SEQ ID NO: 491666 - RNA, 32 nt, Human
uaucugugcaauggaauauaaauaucacaaag

SEQ ID NO: 491667 - RNA, 32 nt, Human
uaucuguggaaaccaacagauauugcucuaua

SEQ ID NO: 491668 - RNA, 32 nt, Human
uaucuguggaaagcuaggcuucccaggcuggg

SEQ ID NO: 491669 - RNA, 32 nt, Human
uaucuguggaguuccugcuccguggacugcag

SEQ ID NO: 491670 - RNA, 32 nt, Human
uaucugugggggagggagggagacgugaagcc

SEQ ID NO: 491671 - RNA, 32 nt, Human
uaucuguguaggucauaucuucucuaguaaac

SEQ ID NO: 491672 - RNA, 32 nt, Human
uaucuguguauauaaauccacaugcacaugaa

SEQ ID NO: 491673 - RNA, 32 nt, Human
uaucuguguccagcggccccagcuccagccca

SEQ ID NO: 491674 - RNA, 32 nt, Human
uaucuguguccggcggccccagcuccagccca

SEQ ID NO: 491675 - RNA, 32 nt, Human
uaucuguguuagauucuagucuugccuaauuu

SEQ ID NO: 491676 - RNA, 32 nt, Human
uaucuguuacggccuccuuuuaucucucuucu

SEQ ID NO: 491677 - RNA, 32 nt, Human
uaucuguuuucaucuugagguggccaauaugg

SEQ ID NO: 491678 - RNA, 32 nt, Human
uaucuuaaaaagagcacugagcagggacuuaa

SEQ ID NO: 491679 - RNA, 32 nt, Human
uaucuuaaaaauggaaguccuaaaaauuaguu

SEQ ID NO: 491680 - RNA, 32 nt, Human
uaucuuaaaaugguucuaaaaauugcauucaa

SEQ ID NO: 491681 - RNA, 32 nt, Human
uaucuuaaagcacuuacagauaggccuucuug

SEQ ID NO: 491682 - RNA, 32 nt, Human
uaucuuaaaggcauuauucuccagccuuaaga

SEQ ID NO: 491683 - RNA, 32 nt, Human
uaucuuacauaccuccaccagacuggacuugc

SEQ ID NO: 491684 - RNA, 32 nt, Human
uaucuuagcugcacuccaacauugcauccuuu

SEQ ID NO: 491685 - RNA, 32 nt, Human
uaucuuauuaugaggcaaguauguuaagauuu

SEQ ID NO: 491686 - RNA, 29 nt, Human
uaucuucaccccacaaacaauaaagcaaa

SEQ ID NO: 491687 - RNA, 32 nt, Human
uaucuucacuuucuuuguccagucuuuuguuu

SEQ ID NO: 491688 - RNA, 32 nt, Human
uaucuucagcuuuggguaggaggaaucuuggu

SEQ ID NO: 491689 - RNA, 32 nt, Human
uaucuucaucauuuuguacauuuccuuuuuga

SEQ ID NO: 491690 - RNA, 32 nt, Human
uaucuucaugccauuacagcuuucuagaugcu

SEQ ID NO: 491691 - RNA, 32 nt, Human
uaucuucauguccagugagcaguguugcguuu

SEQ ID NO: 491692 - RNA, 32 nt, Human
uaucuuccaaaccccacuuucucccuccuccu

SEQ ID NO: 491693 - RNA, 32 nt, Human
uaucuuccaagagggugcuggggaggagaaag

SEQ ID NO: 491694 - RNA, 32 nt, Human
uaucuuccagaggaagaggaggaggcggcgaa

SEQ ID NO: 491695 - RNA, 32 nt, Human
uaucuuccagcuucugucagaacuuuagguca

SEQ ID NO: 491696 - RNA, 32 nt, Human
uaucuuccauuuuacagagagaaaaucccacc

SEQ ID NO: 491697 - RNA, 32 nt, Human
uaucuucccgagagaucagcuacagaggaacc

SEQ ID NO: 491698 - RNA, 32 nt, Human
uaucuucccgucucaaaauggacaugauggau

SEQ ID NO: 491699 - RNA, 32 nt, Human
uaucuucccucccucacuucccuuuucuccca

SEQ ID NO: 491700 - RNA, 32 nt, Human
uaucuuccucaccucucggccuucccacuugc

SEQ ID NO: 491701 - RNA, 32 nt, Human
uaucuucuacaaagaucacuucccaguccauc

SEQ ID NO: 491702 - RNA, 32 nt, Human
uaucuucuauuuuuaucaugaauucccuuuua

SEQ ID NO: 491703 - RNA, 32 nt, Human
uaucuucucacuucucacugguguuggaaaua

SEQ ID NO: 491704 - RNA, 32 nt, Human
uaucuucuccccuucugagccuguccauucau

SEQ ID NO: 491705 - RNA, 32 nt, Human
uaucuucucuggccucuccaguccugcuuacu

SEQ ID NO: 491706 - RNA, 32 nt, Human
uaucuucugaucaggaaguuugagugcuaugc

SEQ ID NO: 491707 - RNA, 32 nt, Human
uaucuucugcugcugcuuggaguuacauuuuc

SEQ ID NO: 491708 - RNA, 32 nt, Human
uaucuucugcuuccugacagcuucuuuuucaa

SEQ ID NO: 491709 - RNA, 32 nt, Human
uaucuucuggcugucuuccugcugugguggaa

SEQ ID NO: 491710 - RNA, 32 nt, Human
uaucuucugggagcuugggcacgaucucaggc

SEQ ID NO: 491711 - RNA, 20 nt, Human
uaucuucuguucuaacaaug

SEQ ID NO: 491712 - RNA, 32 nt, Human
uaucuucuucauuuuuaaccuguuuucauuug

SEQ ID NO: 491713 - RNA, 32 nt, Human
uaucuugagguauuuugccacuggcuucaugc

SEQ ID NO: 491714 - RNA, 32 nt, Human
uaucuugcaaagugaauguguccccuucccca

SEQ ID NO: 491715 - RNA, 32 nt, Human
uaucuugcacacaggugcucuaaccauguuua

SEQ ID NO: 491716 - RNA, 32 nt, Human
uaucuugccuccauaucaauccauucucauga

SEQ ID NO: 491717 - RNA, 32 nt, Human
uaucuugccuccuccuuuauuacccucugagu

SEQ ID NO: 491718 - RNA, 32 nt, Human
uaucuugcuuugacaaauaccaccgugcucag

SEQ ID NO: 491719 - RNA, 32 nt, Human
uaucuuggaauagggcccauguuuagacagag

SEQ ID NO: 491720 - RNA, 32 nt, Human
uaucuuggagugaggucacagaaggauagagc

SEQ ID NO: 491721 - RNA, 30 nt, Human
uaucuuggccucucccaugucucaguguug

SEQ ID NO: 491722 - RNA, 32 nt, Human
uaucuuggcugggaucucacacaugucuagga

SEQ ID NO: 491723 - RNA, 32 nt, Human
uaucuugggagggagaagggauggagcaggag

SEQ ID NO: 491724 - RNA, 32 nt, Human
uaucuugggaguugaguugucaagagaauuau

SEQ ID NO: 491725 - RNA, 32 nt, Human
uaucuugggcugccuuucucuaaguugguugu

SEQ ID NO: 491726 - RNA, 32 nt, Human
uaucuuggucaauuuaccugaccucagcuuuc

SEQ ID NO: 491727 - RNA, 32 nt, Human
uaucuugguuuggaaucgaaacuucugcuaca

SEQ ID NO: 491728 - RNA, 32 nt, Human
uaucuuguagaauugugagcaugugaaugagu

SEQ ID NO: 491729 - RNA, 32 nt, Human
uaucuuguaugccuauguaauucaaagugacu

SEQ ID NO: 491730 - RNA, 32 nt, Human
uaucuuguccgugugggcacacacugaguguu

SEQ ID NO: 491731 - RNA, 32 nt, Human
uaucuuguccuagcccaggccuccaugaagga

SEQ ID NO: 491732 - RNA, 32 nt, Human
uaucuugugcaucccuccucugcucuccauca

SEQ ID NO: 491733 - RNA, 32 nt, Human
uaucuuguuagagagcuuuucacugugaggaa

SEQ ID NO: 491734 - RNA, 32 nt, Human
uaucuuguucucuuccuccaaagacuuggaag

SEQ ID NO: 491735 - RNA, 32 nt, Human
uaucuuuaaauacuuuguacuaacuuuaucac

SEQ ID NO: 491736 - RNA, 32 nt, Human
uaucuuuaagcuauaaauguguuaacauguau

SEQ ID NO: 491737 - RNA, 32 nt, Human
uaucuuuaaucuccucuuuuaucuuggacuga

SEQ ID NO: 491738 - RNA, 32 nt, Human
uaucuuuacagauuuuucauuugagcauggag

SEQ ID NO: 491739 - RNA, 32 nt, Human
uaucuuuacaggagcagggaagagcaguagag

SEQ ID NO: 491740 - RNA, 32 nt, Human
uaucuuuauuuguacuuuuuccuuccucccug

SEQ ID NO: 491741 - RNA, 32 nt, Human
uaucuuucaucuuaccuguaauccuagcacuu

SEQ ID NO: 491742 - RNA, 32 nt, Human
uaucuuuccaggucauacuuguuuuuaaucau

SEQ ID NO: 491743 - RNA, 32 nt, Human
uaucuuucccuuccuucucuacccucaccucc

SEQ ID NO: 491744 - RNA, 32 nt, Human
uaucuuucucucuccaaaugucacugagcccu

SEQ ID NO: 491745 - RNA, 32 nt, Human
uaucuuucuguggcauuugagaacagaaacca

SEQ ID NO: 491746 - RNA, 26 nt, Human
uaucuuugcaauucugaauugugcug

SEQ ID NO: 491747 - RNA, 23 nt, Human
uaucuuugcacugaaguugucug

SEQ ID NO: 491748 - RNA, 32 nt, Human
uaucuuugcccaggaucugaaaggcaauacuu

SEQ ID NO: 491749 - RNA, 31 nt, Human
uaucuuugccucucuuugucucugcauuucc

SEQ ID NO: 491750 - RNA, 21 nt, Human
uaucuuuguucuuguuugcug

SEQ ID NO: 491751 - RNA, 32 nt, Human
uaucuuuuagggacugcagccaauguucccca

SEQ ID NO: 491752 - RNA, 32 nt, Human
uaucuuuucuaaaaauacaaaaauuagccaac

SEQ ID NO: 491753 - RNA, 32 nt, Human
uaucuuuucuaaaaauacaaaaauuagccagg

SEQ ID NO: 491754 - RNA, 32 nt, Human
uaucuuuugcuguccuguccagucccaucaac

SEQ ID NO: 491755 - RNA, 32 nt, Human
uaucuuuuggaggacuaauuuaccuuacugcu

SEQ ID NO: 491756 - RNA, 32 nt, Human
uaucuuuugggggagucuggaagccuguuggu

SEQ ID NO: 491757 - RNA, 32 nt, Human
uaucuuuuucacuuucuugccuguuuugcuuc

SEQ ID NO: 491758 - RNA, 32 nt, Human
uaucuuuuugagacagagucuugcucugucgc

SEQ ID NO: 491759 - RNA, 32 nt, Human
uaugaaaaaccugaaaucacaugccuuuguaa

SEQ ID NO: 491760 - RNA, 32 nt, Human
uaugaaaaaccugaaaucgcaugccuauucac

SEQ ID NO: 491761 - RNA, 32 nt, Human
uaugaaaaagauuauuugugcauuuuauugac

SEQ ID NO: 491762 - RNA, 18 nt, Human
uaugaaaacagugcagua

SEQ ID NO: 491763 - RNA, 32 nt, Human
uaugaaaaggagaggacacagagacagaggag

SEQ ID NO: 491764 - RNA, 32 nt, Human
uaugaaaauuccaguggauagacuuauauggc

SEQ ID NO: 491765 - RNA, 32 nt, Human
uaugaaacauaucaugguaaugacagaugcaa

SEQ ID NO: 491766 - RNA, 32 nt, Human
uaugaaacgucaucuucagugccugcagagug

SEQ ID NO: 491767 - RNA, 32 nt, Human
uaugaaacuuuacaacacuugugaaagcaacu

SEQ ID NO: 491768 - RNA, 32 nt, Human
uaugaaagcccccauucccaucacccccucca

SEQ ID NO: 491769 - RNA, 32 nt, Human
uaugaaaggagagagcaaagggugucugcguc

SEQ ID NO: 491770 - RNA, 32 nt, Human
uaugaaagugccuuuuacucagccugcacaga

SEQ ID NO: 491771 - RNA, 32 nt, Human
uaugaaauacuuuuguacuuaauccauuucuu

SEQ ID NO: 491772 - RNA, 32 nt, Human
uaugaaaugacuaaauuccuccuugcaguguu

SEQ ID NO: 491773 - RNA, 32 nt, Human
uaugaacaaugccacaacggugcucaacaugc

SEQ ID NO: 491774 - RNA, 32 nt, Human
uaugaacaccacugcacuccaccuguccacuu

SEQ ID NO: 491775 - RNA, 32 nt, Human
uaugaacacugaucaaguaguuguggagagau

SEQ ID NO: 491776 - RNA, 32 nt, Human
uaugaacagagaauauacucuguucauauaag

SEQ ID NO: 491777 - RNA, 32 nt, Human
uaugaacauaaggcaaauuaauguucuaggau

SEQ ID NO: 491778 - RNA, 32 nt, Human
uaugaaccacugcaccuggcccuggauugcau

SEQ ID NO: 491779 - RNA, 32 nt, Human
uaugaacccaaucucugccacaugucaauacc

SEQ ID NO: 491780 - RNA, 32 nt, Human
uaugaacccauugguuagagugcaguggcuuc

SEQ ID NO: 491781 - RNA, 32 nt, Human
uaugaacuauugccucuggacguugugagaau

SEQ ID NO: 491782 - RNA, 32 nt, Human
uaugaacucaucauuccagccugggcaacaag

SEQ ID NO: 491783 - RNA, 32 nt, Human
uaugaacucccucugugucacuguaugugaaa

SEQ ID NO: 491784 - RNA, 32 nt, Human
uaugaacucucaccggcuccccaagcccuccc

SEQ ID NO: 491785 - RNA, 32 nt, Human
uaugaacugcccaacuuccugucccuuucagg

SEQ ID NO: 491786 - RNA, 32 nt, Human
uaugaacuuuugcuuaacaaaauaacauacaa

SEQ ID NO: 491787 - RNA, 32 nt, Human
uaugaagaaaacaguuuuauuugagugcuuua

SEQ ID NO: 491788 - RNA, 32 nt, Human
uaugaagaacauuucccaugcaucuacaagcu

SEQ ID NO: 491789 - RNA, 32 nt, Human
uaugaagacaggacaucacauaugaaugcacg

SEQ ID NO: 491790 - RNA, 32 nt, Human
uaugaagagggaaaggaggagcacaaaggagu

SEQ ID NO: 491791 - RNA, 32 nt, Human
uaugaagcaccacugcccuguagaccugggau

SEQ ID NO: 491792 - RNA, 32 nt, Human
uaugaagccccuaaugcaaagcucuuuaccuc

SEQ ID NO: 491793 - RNA, 32 nt, Human
uaugaagcgcauugcauuuccauagcacugaa

SEQ ID NO: 491794 - RNA, 32 nt, Human
uaugaagcuaccucaaacuuccagucagguag

SEQ ID NO: 491795 - RNA, 32 nt, Human
uaugaagcuuucuccacccuggcucccaaggc

SEQ ID NO: 491796 - RNA, 32 nt, Human
uaugaaggagccugagccaugaagugggaagc

SEQ ID NO: 491797 - RNA, 32 nt, Human
uaugaaggauuucagaaauuuguaauaaaugu

SEQ ID NO: 491798 - RNA, 32 nt, Human
uaugaaggcaaucguagagugugcaggaggaa

SEQ ID NO: 491799 - RNA, 32 nt, Human
uaugaaggcaggggcucaguggccgggucccu

SEQ ID NO: 491800 - RNA, 32 nt, Human
uaugaaguaauguuaauuuuacuaagaauaaa

SEQ ID NO: 491801 - RNA, 32 nt, Human
uaugaaguagcuuugugucuguuaccugucca

SEQ ID NO: 491802 - RNA, 32 nt, Human
uaugaaguaugguaacagggagggagacaccu

SEQ ID NO: 491803 - RNA, 32 nt, Human
uaugaagucagcaaguccugugcucaggaugc

SEQ ID NO: 491804 - RNA, 32 nt, Human
uaugaagucuauuucuaguugacuguaacaug

SEQ ID NO: 491805 - RNA, 32 nt, Human
uaugaagucuuuuaacagucucucuuuauaua

SEQ ID NO: 491806 - RNA, 32 nt, Human
uaugaaguuacuuucuuaaugugaccuagcaa

SEQ ID NO: 491807 - RNA, 32 nt, Human
uaugaaguuguuuugcggugucagccuuuucu

SEQ ID NO: 491808 - RNA, 32 nt, Human
uaugaauaauaauaacaaacacugccuucugu

SEQ ID NO: 491809 - RNA, 32 nt, Human
uaugaauagggagggagagcacaauucagucc

SEQ ID NO: 491810 - RNA, 32 nt, Human
uaugaauauguauauguauauguauguaagau

SEQ ID NO: 491811 - RNA, 32 nt, Human
uaugaaucaaagcuuauauguaaacuucaagg

SEQ ID NO: 491812 - RNA, 32 nt, Human
uaugaauccaggagguggagcuugcagugagc

SEQ ID NO: 491813 - RNA, 32 nt, Human
uaugaaugaaaaugcaucuauuucagagccga

SEQ ID NO: 491814 - RNA, 32 nt, Human
uaugaaugcaccauugcacacuaaccugggug

SEQ ID NO: 491815 - RNA, 32 nt, Human
uaugaaugggauuauguucuucauuugacucu

SEQ ID NO: 491816 - RNA, 31 nt, Human
uaugaauggguggaaaggugugagacuggga

SEQ ID NO: 491817 - RNA, 32 nt, Human
uaugaauguggaaucuuggaaagugauauauu

SEQ ID NO: 491818 - RNA, 31 nt, Human
uaugaauuaacuucuuuacauuuagaaugcc

SEQ ID NO: 491819 - RNA, 32 nt, Human
uaugaauuacuauacauauacaugcauagaaa

SEQ ID NO: 491820 - RNA, 32 nt, Human
uaugaauugcugucuagccuuagucaauaaac

SEQ ID NO: 491821 - RNA, 32 nt, Human
uaugaauuuguguugggccacauucaaagcca

SEQ ID NO: 491822 - RNA, 32 nt, Human
uaugaauuuguguugggccacauucaaagcua

SEQ ID NO: 491823 - RNA, 32 nt, Human
uaugacaaccugaggcacugugcucggaaguu

SEQ ID NO: 491824 - RNA, 32 nt, Human
uaugacaagauguugagcucacugaaaagcaa

SEQ ID NO: 491825 - RNA, 32 nt, Human
uaugacaagcuguaucacugccuucguuuaua

SEQ ID NO: 491826 - RNA, 32 nt, Human
uaugacaccagaaaacucuucaugcuauugaa

SEQ ID NO: 491827 - RNA, 32 nt, Human
uaugacaccauggaaagaaaacauuagagaaa

SEQ ID NO: 491828 - RNA, 32 nt, Human
uaugacaccauguccacaaugguguacauaaa

SEQ ID NO: 491829 - RNA, 17 nt, Human
uaugacagcacagggga

SEQ ID NO: 491830 - RNA, 32 nt, Human
uaugacagcgucaagacugcccuuggcaccgu

SEQ ID NO: 491831 - RNA, 32 nt, Human
uaugacaguuuuugacuuaagauguggcuuuu

SEQ ID NO: 491832 - RNA, 32 nt, Human
uaugacaucaaaagcacaggaaacagaagcaa

SEQ ID NO: 491833 - RNA, 32 nt, Human
uaugacaucauccugaagaacuucgagaagcu

SEQ ID NO: 491834 - RNA, 32 nt, Human
uaugacaucuuuccuacuccagucccucucgu

SEQ ID NO: 491835 - RNA, 32 nt, Human
uaugacaugccacccucuccaugcccaaccua

SEQ ID NO: 491836 - RNA, 22 nt, Human
uaugacaugcuuaugcuuacca

SEQ ID NO: 491837 - RNA, 32 nt, Human
uaugacauguugauguuauaagcacaauagau

SEQ ID NO: 491838 - RNA, 32 nt, Human
uaugaccaaucaggaccaagucuuggagguga

SEQ ID NO: 491839 - RNA, 32 nt, Human
uaugaccacacaguuggauggaggcuucucca

SEQ ID NO: 491840 - RNA, 32 nt, Human
uaugacccaagaguagaugugaccucacuggg

SEQ ID NO: 491841 - RNA, 32 nt, Human
uaugacccagcaauuucacucucagguauaua

SEQ ID NO: 491842 - RNA, 32 nt, Human
uaugaccccugcacucccucuguaucaucuca

SEQ ID NO: 491843 - RNA, 32 nt, Human
uaugaccgugcaaaugagcucugcucuaaaau

SEQ ID NO: 491844 - RNA, 32 nt, Human
uaugaccucaacaaagagauaagguggagaaa

SEQ ID NO: 491845 - RNA, 32 nt, Human
uaugaccugccucuggcccugguccugggcgg

SEQ ID NO: 491846 - RNA, 32 nt, Human
uaugaccuguguuuuaccuggugaucaguucu

SEQ ID NO: 491847 - RNA, 32 nt, Human
uaugacgaguuaacaaguuggugaccugcaca

SEQ ID NO: 491848 - RNA, 32 nt, Human
uaugacgaugccacucgcugcauucaagucua

SEQ ID NO: 491849 - RNA, 32 nt, Human
uaugacggcguggaugccagaggugcugccca

SEQ ID NO: 491850 - RNA, 32 nt, Human
uaugacuaggacgggaagaggaagcacugccu

SEQ ID NO: 491851 - RNA, 32 nt, Human
uaugacuaugccacuguacuccagccugggua

SEQ ID NO: 491852 - RNA, 32 nt, Human
uaugacuccagaauuucccaaagcagugcaug

SEQ ID NO: 491853 - RNA, 32 nt, Human
uaugacucuccucuccugcaggugucuaucca

SEQ ID NO: 491854 - RNA, 23 nt, Human
uaugacucuugucuccuccucca

SEQ ID NO: 491855 - RNA, 32 nt, Human
uaugacugcacuccagccugggugacagaccc

SEQ ID NO: 491856 - RNA, 32 nt, Human
uaugacugcacuccagccugggugacagagca

SEQ ID NO: 491857 - RNA, 32 nt, Human
uaugacugcagacuggcucuccugccuuaaac

SEQ ID NO: 491858 - RNA, 32 nt, Human
uaugacugcaucacugcacuccagccugggca

SEQ ID NO: 491859 - RNA, 32 nt, Human
uaugacugccuaguacuuugugguguauaugc

SEQ ID NO: 491860 - RNA, 32 nt, Human
uaugacugcuugaaauagucucucucccaugg

SEQ ID NO: 491861 - RNA, 32 nt, Human
uaugacugggugcgguggcucacaccuguaau

SEQ ID NO: 491862 - RNA, 32 nt, Human
uaugacugugccacugcacuccagccugguca

SEQ ID NO: 491863 - RNA, 32 nt, Human
uaugacugugggagcuccuccuucccucccca

SEQ ID NO: 491864 - RNA, 32 nt, Human
uaugacuucuaaucuuagauucccaggaacug

SEQ ID NO: 491865 - RNA, 32 nt, Human
uaugacuugcuuuuuccauuccagucaucaua

SEQ ID NO: 491866 - RNA, 26 nt, Human
uaugacuugugucuccccuuguucca

SEQ ID NO: 491867 - RNA, 32 nt, Human
uaugacuuuuuauaaaauggcuguaaucauuu

SEQ ID NO: 491868 - RNA, 32 nt, Human
uaugagaaaacucuuaguucucaucagauacu

SEQ ID NO: 491869 - RNA, 32 nt, Human
uaugagaaaagaaugaaaguaguaagaauagc

SEQ ID NO: 491870 - RNA, 32 nt, Human
uaugagaaaggcacuagaugacuuuaggauuu

SEQ ID NO: 491871 - RNA, 32 nt, Human
uaugagaacagcuugaccauuuagaauuucag

SEQ ID NO: 491872 - RNA, 32 nt, Human
uaugagaacauaauuguuccagaucuggaggc

SEQ ID NO: 491873 - RNA, 32 nt, Human
uaugagaaugucuguuuccucuccuuguuaac

SEQ ID NO: 491874 - RNA, 32 nt, Human
uaugagaauuccccaucucccccaaucuccuc

SEQ ID NO: 491875 - RNA, 32 nt, Human
uaugagacacccacuguacaguucucagggcu

SEQ ID NO: 491876 - RNA, 32 nt, Human
uaugagagaacaguguuccuccgguguguugc

SEQ ID NO: 491877 - RNA, 32 nt, Human
uaugagagagccucaaaagagagggcaagaau

SEQ ID NO: 491878 - RNA, 32 nt, Human
uaugagaggcccccaccugcugccuuuggacg

SEQ ID NO: 491879 - RNA, 32 nt, Human
uaugagagggagccgcuccugguucuggaguc

SEQ ID NO: 491880 - RNA, 32 nt, Human
uaugagaguggauaucaaugccucacagaaac

SEQ ID NO: 491881 - RNA, 32 nt, Human
uaugagaucauccucauguuaaaccuuggauu

SEQ ID NO: 491882 - RNA, 31 nt, Human
uaugagaucauuuucccuugccugaguuuug

SEQ ID NO: 491883 - RNA, 32 nt, Human
uaugagauggguuucuaaguaucuuauugugu

SEQ ID NO: 491884 - RNA, 32 nt, Human
uaugagauguacaaguaagugucuuaucugua

SEQ ID NO: 491885 - RNA, 32 nt, Human
uaugagauucugauucagccagggggaggaca

SEQ ID NO: 491886 - RNA, 32 nt, Human
uaugagcaacucuauucauuccuugccaugug

SEQ ID NO: 491887 - RNA, 32 nt, Human
uaugagcagagggaggagaagaaggggugcuc

SEQ ID NO: 491888 - RNA, 32 nt, Human
uaugagcagccugcccugcaaucucuuucuca

SEQ ID NO: 491889 - RNA, 32 nt, Human
uaugagcagccugccuugaacccucucucuca

SEQ ID NO: 491890 - RNA, 32 nt, Human
uaugagcagcugcuguaacauacucaucaacu

SEQ ID NO: 491891 - RNA, 32 nt, Human
uaugagcagggacgcugagcuggggcagcagu

SEQ ID NO: 491892 - RNA, 32 nt, Human
uaugagccacugcaccuggaaaggagccagaa

SEQ ID NO: 491893 - RNA, 32 nt, Human
uaugagccaggagauggggacugugacauagg

SEQ ID NO: 491894 - RNA, 32 nt, Human
uaugagccugcccucacucccucuguggaauc

SEQ ID NO: 491895 - RNA, 32 nt, Human
uaugagcgucugucucugugggcuugggaugu

SEQ ID NO: 491896 - RNA, 32 nt, Human
uaugagcuaaaugucugucucuaaaggguuaa

SEQ ID NO: 491897 - RNA, 32 nt, Human
uaugagcugcccccgcccgcuccugagaauaa

SEQ ID NO: 491898 - RNA, 32 nt, Human
uaugagcugugagcaagacaucugcugcauag

SEQ ID NO: 491899 - RNA, 32 nt, Human
uaugagcuuccuauggaauuguccuuauguga

SEQ ID NO: 491900 - RNA, 32 nt, Human
uaugaggaacacacccuuguucccgucauuca

SEQ ID NO: 491901 - RNA, 32 nt, Human
uaugaggaaguugaccuuaagaacaaagaaca

SEQ ID NO: 491902 - RNA, 32 nt, Human
uaugaggacacaaaggcauaagagugauauaa

SEQ ID NO: 491903 - RNA, 32 nt, Human
uaugaggaggaggaggaggaggaugugaagau

SEQ ID NO: 491904 - RNA, 32 nt, Human
uaugaggauaaauaaucugcuuuugauagcaa

SEQ ID NO: 491905 - RNA, 32 nt, Human
uaugaggccagagacguggaaguggcucgcug

SEQ ID NO: 491906 - RNA, 32 nt, Human
uaugaggcccaucucagguuuggggauccccc

SEQ ID NO: 491907 - RNA, 32 nt, Human
uaugaggcccuccccauggcuuuagcugacuu

SEQ ID NO: 491908 - RNA, 32 nt, Human
uaugaggcgcucugguaaggugcucaggccag

SEQ ID NO: 491909 - RNA, 32 nt, Human
uaugagggagauugaggcugcagugagcugug

SEQ ID NO: 491910 - RNA, 32 nt, Human
uaugagggaggcagcaaggaguugggacuuca

SEQ ID NO: 491911 - RNA, 32 nt, Human
uaugagggcugccauucucuuccuucagcccu

SEQ ID NO: 491912 - RNA, 32 nt, Human
uaugaggugggugacccaggacagagaacgcu

SEQ ID NO: 491913 - RNA, 32 nt, Human
uaugaguacagacaaaacuacagacuuagucu

SEQ ID NO: 491914 - RNA, 32 nt, Human
uaugaguagccacugcacuccagccugggcaa

SEQ ID NO: 491915 - RNA, 32 nt, Human
uaugaguauucaagcuuuuucucucuauauuu

SEQ ID NO: 491916 - RNA, 32 nt, Human
uaugagucaacuuuccuguaaagcagaacaag

SEQ ID NO: 491917 - RNA, 26 nt, Human
uaugauaacaccacugcacuccugcu

SEQ ID NO: 491918 - RNA, 32 nt, Human
uaugauacacgugguuuuuaugugcucugugg

SEQ ID NO: 491919 - RNA, 32 nt, Human
uaugauacagaauuucauaagagccaugcugu

SEQ ID NO: 491920 - RNA, 32 nt, Human
uaugauacaggaaguucaggaggcagagucuc

SEQ ID NO: 491921 - RNA, 32 nt, Human
uaugauaccaacaaacaggaagugucaggaag

SEQ ID NO: 491922 - RNA, 32 nt, Human
uaugauagcaccacugcacuccagccugggca

SEQ ID NO: 491923 - RNA, 32 nt, Human
uaugauaguaccacugcacuccagccugggca

SEQ ID NO: 491924 - RNA, 32 nt, Human
uaugauauuguuuuaguacaagacgaaucauu

SEQ ID NO: 491925 - RNA, 32 nt, Human
uaugauauuuggaguccuggaaaaggaaaauu

SEQ ID NO: 491926 - RNA, 32 nt, Human
uaugaucacaccaccacacuccagccugagca

SEQ ID NO: 491927 - RNA, 32 nt, Human
uaugaucacaccacuacacuccagccuggaca

SEQ ID NO: 491928 - RNA, 32 nt, Human
uaugaucacaccacugcaauccagccucggua

SEQ ID NO: 491929 - RNA, 32 nt, Human
uaugaucacaccacugcacuccagccugggug

SEQ ID NO: 491930 - RNA, 32 nt, Human
uaugaucacaccacuguacuccagccugggca

SEQ ID NO: 491931 - RNA, 32 nt, Human
uaugaucacaccauugcacuucagccugggcg

SEQ ID NO: 491932 - RNA, 32 nt, Human
uaugaucacagcucacugcagcuuugaucuga

SEQ ID NO: 491933 - RNA, 32 nt, Human
uaugaucacgccacugcacuccagccugggcg

SEQ ID NO: 491934 - RNA, 32 nt, Human
uaugaucacgccacugcacuccagccugggua

SEQ ID NO: 491935 - RNA, 31 nt, Human
uaugaucacugguagccuaccaaagcuguag

SEQ ID NO: 491936 - RNA, 32 nt, Human
uaugaucagaagauuugggaaagauggaaucu

SEQ ID NO: 491937 - RNA, 32 nt, Human
uaugaucaugccacugcacuccaaccugggca

SEQ ID NO: 491938 - RNA, 32 nt, Human
uaugaucaugccacugcacuccagcaugggug

SEQ ID NO: 491939 - RNA, 32 nt, Human
uaugaucaugccacugcacuccagccugggca

SEQ ID NO: 491940 - RNA, 32 nt, Human
uaugaucaugccacugcacuccagccugggug

SEQ ID NO: 491941 - RNA, 32 nt, Human
uaugaucaugccacugcacuccagucugggug

SEQ ID NO: 491942 - RNA, 32 nt, Human
uaugaucaugccacuguacucuggccugagug

SEQ ID NO: 491943 - RNA, 32 nt, Human
uaugaucaugccagauuggagaagauccaagc

SEQ ID NO: 491944 - RNA, 32 nt, Human
uaugaucaugccauugcacuccagccugggug

SEQ ID NO: 491945 - RNA, 32 nt, Human
uaugaucaugccauugucuuccagccugagug

SEQ ID NO: 491946 - RNA, 32 nt, Human
uaugaucaugcuggacaccuggugaggaaaaa

SEQ ID NO: 491947 - RNA, 32 nt, Human
uaugaucaugcuguacaacaggguagaaaaug

SEQ ID NO: 491948 - RNA, 32 nt, Human
uaugaucauguguggugauaaagaccauccac

SEQ ID NO: 491949 - RNA, 32 nt, Human
uaugauccaucuuacugggcucaggccacaua

SEQ ID NO: 491950 - RNA, 32 nt, Human
uaugauccccuggggagguagcagggaccucu

SEQ ID NO: 491951 - RNA, 32 nt, Human
uaugauccugaagacagcucugcagccaacug

SEQ ID NO: 491952 - RNA, 32 nt, Human
uaugauccugccacugcacuccagccugggcg

SEQ ID NO: 491953 - RNA, 32 nt, Human
uaugaucgcaccacugcacuccagccugggug

SEQ ID NO: 491954 - RNA, 32 nt, Human
uaugaucgcgccacuacacuccagccugagca

SEQ ID NO: 491955 - RNA, 32 nt, Human
uaugaucgcgccacugcacuccaggcugggca

SEQ ID NO: 491956 - RNA, 32 nt, Human
uaugaucgcgccacugcacuccugccugggca

SEQ ID NO: 491957 - RNA, 32 nt, Human
uaugaucgugccacugcacuccagccugggca

SEQ ID NO: 491958 - RNA, 32 nt, Human
uaugaucucaccacuacacuccagccugggug

SEQ ID NO: 491959 - RNA, 32 nt, Human
uaugaucucaccacuguacuccagccugggug

SEQ ID NO: 491960 - RNA, 32 nt, Human
uaugaucuccucauugcgucccccucugccca

SEQ ID NO: 491961 - RNA, 32 nt, Human
uaugaucuugccauugcacuccagcugagagu

SEQ ID NO: 491962 - RNA, 32 nt, Human
uaugaugacuccaaguccaagcccacccuucc

SEQ ID NO: 491963 - RNA, 32 nt, Human
uaugaugagauggaugcccuguugagucuugg

SEQ ID NO: 491964 - RNA, 32 nt, Human
uaugaugaggcuuuugcuauggcuaaugaucc

SEQ ID NO: 491965 - RNA, 32 nt, Human
uaugaugaugccacuguacugcagcuugggua

SEQ ID NO: 491966 - RNA, 32 nt, Human
uaugaugccaaaagcugccacugugugguauu

SEQ ID NO: 491967 - RNA, 19 nt, Human
uaugauggaaaacagcaag

SEQ ID NO: 491968 - RNA, 32 nt, Human
uaugauggaagaggagaguuggauaggcugug

SEQ ID NO: 491969 - RNA, 32 nt, Human
uaugauggauuuuguaaauagauuuguuacag

SEQ ID NO: 491970 - RNA, 32 nt, Human
uaugauggcaccacugcacuccagccugggag

SEQ ID NO: 491971 - RNA, 32 nt, Human
uaugauggcaccacugcacuucagccugggug

SEQ ID NO: 491972 - RNA, 32 nt, Human
uaugauggcaccacuguacuccagccugggug

SEQ ID NO: 491973 - RNA, 32 nt, Human
uaugauggcacugcugcacuccagccugcggg

SEQ ID NO: 491974 - RNA, 32 nt, Human
uaugauggcaggcgccuguaaucccagcuacu

SEQ ID NO: 491975 - RNA, 32 nt, Human
uaugauggcugggagcucuggcagccauacgg

SEQ ID NO: 491976 - RNA, 32 nt, Human
uaugauggggcaugugccauagugcaggcuug

SEQ ID NO: 491977 - RNA, 32 nt, Human
uaugauggugccacuacacuccagccugggua

SEQ ID NO: 491978 - RNA, 32 nt, Human
uaugauggugccacugcauuccagccugggug

SEQ ID NO: 491979 - RNA, 32 nt, Human
uaugaugucauguacacaggugcugccucucc

SEQ ID NO: 491980 - RNA, 32 nt, Human
uaugauguuaucuggacugggcuguaaaaauc

SEQ ID NO: 491981 - RNA, 32 nt, Human
uaugauuacaccacugcacuucagucugugug

SEQ ID NO: 491982 - RNA, 32 nt, Human
uaugauuaugccacugcuuuccagccugggca

SEQ ID NO: 491983 - RNA, 32 nt, Human
uaugauucauccccaggauggaaaugugaagg

SEQ ID NO: 491984 - RNA, 32 nt, Human
uaugauuccaccauugcacuccagucugggca

SEQ ID NO: 491985 - RNA, 32 nt, Human
uaugauuccccaggcccugcaggauuuugggg

SEQ ID NO: 491986 - RNA, 32 nt, Human
uaugauuccuguacagugcacacauugguauu

SEQ ID NO: 491987 - RNA, 32 nt, Human
uaugauucuuaaaauacugaauuaguuucuaa

SEQ ID NO: 491988 - RNA, 32 nt, Human
uaugauugaaaaaucguaguagauggaaauau

SEQ ID NO: 491989 - RNA, 32 nt, Human
uaugauugcacagcugcacuccagccugugcu

SEQ ID NO: 491990 - RNA, 32 nt, Human
uaugauugcaccacugcacuccaaccugggca

SEQ ID NO: 491991 - RNA, 32 nt, Human
uaugauugcaccacugcacuccaaccugggug

SEQ ID NO: 491992 - RNA, 32 nt, Human
uaugauugcaccacugcacuccagccugggca

SEQ ID NO: 491993 - RNA, 32 nt, Human
uaugauugcaccacugcacuccagccugggug

SEQ ID NO: 491994 - RNA, 32 nt, Human
uaugauugcaccacugcacucuacucugggug

SEQ ID NO: 491995 - RNA, 32 nt, Human
uaugauugcaccauugcaccuccagccugggc

SEQ ID NO: 491996 - RNA, 32 nt, Human
uaugauugcagcccucagccugggcugccuga

SEQ ID NO: 491997 - RNA, 32 nt, Human
uaugauugcaucacugcacugcagccugggca

SEQ ID NO: 491998 - RNA, 32 nt, Human
uaugauugcgccgcugcacuccagccugggca

SEQ ID NO: 491999 - RNA, 32 nt, Human
uaugauuggaguuuaguuuauguuggccagcu

SEQ ID NO: 492000 - RNA, 32 nt, Human
uaugauuguaccacugcacuccagccugggca

SEQ ID NO: 492001 - RNA, 32 nt, Human
uaugauuguaccacugcacuccagccugggug

SEQ ID NO: 492002 - RNA, 32 nt, Human
uaugauuguccucaucaaucucuuuacaucuu

SEQ ID NO: 492003 - RNA, 31 nt, Human
uaugauugucucuguccuugccacaguuuuu

SEQ ID NO: 492004 - RNA, 32 nt, Human
uaugauugugccacacacuccagccugggugg

SEQ ID NO: 492005 - RNA, 32 nt, Human
uaugauugugccacugcacuccagccugggca

SEQ ID NO: 492006 - RNA, 32 nt, Human
uaugauugugccacugcacuccagccugggua

SEQ ID NO: 492007 - RNA, 32 nt, Human
uaugauugugccacugcacuccagccugggug

SEQ ID NO: 492008 - RNA, 32 nt, Human
uaugauugugccacugcgcuccaggcugggug

SEQ ID NO: 492009 - RNA, 32 nt, Human
uaugauuguggcauugcacuccagccugggug

SEQ ID NO: 492010 - RNA, 32 nt, Human
uaugauuuauccugagugcuguaucuauuacu

SEQ ID NO: 492011 - RNA, 32 nt, Human
uaugauuucaccacugcauucuagccugggca

SEQ ID NO: 492012 - RNA, 32 nt, Human
uaugauuuccaaaguccaaaucugucauuuaa

SEQ ID NO: 492013 - RNA, 32 nt, Human
uaugauuugcaaaugaggagagagaagaugag

SEQ ID NO: 492014 - RNA, 32 nt, Human
uaugauuuguagcucuagguuucuugaugauc

SEQ ID NO: 492015 - RNA, 32 nt, Human
uaugcaaaaagaauuuucccagauaggcuagc

SEQ ID NO: 492016 - RNA, 32 nt, Human
uaugcaaaaauucggggucccaacaaggagag

SEQ ID NO: 492017 - RNA, 32 nt, Human
uaugcaaaacggaugcgugauauuucuugcuu

SEQ ID NO: 492018 - RNA, 19 nt, Human
uaugcaaaauugcuuugua

SEQ ID NO: 492019 - RNA, 32 nt, Human
uaugcaaagagaagagaaagaaggaugcaaug

SEQ ID NO: 492020 - RNA, 32 nt, Human
uaugcaaaucagcacaaaaugugacauucuga

SEQ ID NO: 492021 - RNA, 24 nt, Human
uaugcaaauguauguauacaugua

SEQ ID NO: 492022 - RNA, 32 nt, Human
uaugcaacacaaacacuguccuuuuggguccc

SEQ ID NO: 492023 - RNA, 32 nt, Human
uaugcaaccccagucuacucagugaguuuucu

SEQ ID NO: 492024 - RNA, 32 nt, Human
uaugcaaccugacaaaccacugaggucauggu

SEQ ID NO: 492025 - RNA, 32 nt, Human
uaugcaaccugacaaaccauugaggucauggu

SEQ ID NO: 492026 - RNA, 32 nt, Human
uaugcaacuucaaauagucugaugccugcuuc

SEQ ID NO: 492027 - RNA, 32 nt, Human
uaugcaagccucaucaacaccacuuugcagca

SEQ ID NO: 492028 - RNA, 30 nt, Human
uaugcaagccugguguugcuccuguccuca

SEQ ID NO: 492029 - RNA, 24 nt, Human
uaugcaaguauguauauaugugua

SEQ ID NO: 492030 - RNA, 32 nt, Human
uaugcaaguccuccucccucaucucaaagggu

SEQ ID NO: 492031 - RNA, 23 nt, Human
uaugcaauauauaaauaaacagu

SEQ ID NO: 492032 - RNA, 32 nt, Human
uaugcaauauggugacaccccgucucuacuaa

SEQ ID NO: 492033 - RNA, 32 nt, Human
uaugcaaucauaagugauuugguuacugcaau

SEQ ID NO: 492034 - RNA, 32 nt, Human
uaugcacaaaucaccacgcacacuucacagua

SEQ ID NO: 492035 - RNA, 26 nt, Human
uaugcacaaggcaagagcagaaacca

SEQ ID NO: 492036 - RNA, 22 nt, Human
uaugcacacacacguacacgca

SEQ ID NO: 492037 - RNA, 32 nt, Human
uaugcacaccucagguugaagaugcuacauag

SEQ ID NO: 492038 - RNA, 32 nt, Human
uaugcacacucccauuccucuuggguuucauc

SEQ ID NO: 492039 - RNA, 32 nt, Human
uaugcacagaucuugcagcccagaaccaaguc

SEQ ID NO: 492040 - RNA, 32 nt, Human
uaugcacagcaacauggauaaauuucacagac

SEQ ID NO: 492041 - RNA, 32 nt, Human
uaugcacaggaacuaaaggaaaaagagaucga

SEQ ID NO: 492042 - RNA, 32 nt, Human
uaugcacaugcacacacauaccacuugagaac

SEQ ID NO: 492043 - RNA, 32 nt, Human
uaugcacauguguauauguacauguaugccug

SEQ ID NO: 492044 - RNA, 32 nt, Human
uaugcacgagagagacagaggaggaaagagac

SEQ ID NO: 492045 - RNA, 32 nt, Human
uaugcacgugauacauuuuauggagugccuca

SEQ ID NO: 492046 - RNA, 32 nt, Human
uaugcacgugugcacacaccacacacauacac

SEQ ID NO: 492047 - RNA, 23 nt, Human
uaugcacuauguauauacauaua

SEQ ID NO: 492048 - RNA, 32 nt, Human
uaugcacucuggccugcuucuccaguuacuug

SEQ ID NO: 492049 - RNA, 32 nt, Human
uaugcacuggguggaagaaggguaggagggcu

SEQ ID NO: 492050 - RNA, 32 nt, Human
uaugcacuugcugcugccuccugggcucugau

SEQ ID NO: 492051 - RNA, 32 nt, Human
uaugcagaagcauauuuugcugguuugaaaga

SEQ ID NO: 492052 - RNA, 20 nt, Human
uaugcagaccugacugccaa

SEQ ID NO: 492053 - RNA, 32 nt, Human
uaugcagacuauaccacuguacccacccagaa

SEQ ID NO: 492054 - RNA, 32 nt, Human
uaugcagagaaaaguuuuugacuggaaauaca

SEQ ID NO: 492055 - RNA, 32 nt, Human
uaugcagagcaucugucucuccacuacccgcu

SEQ ID NO: 492056 - RNA, 32 nt, Human
uaugcagagcccagaguggugggagaacagcu

SEQ ID NO: 492057 - RNA, 32 nt, Human
uaugcagagccuuggaaagaugggcaaaugcu

SEQ ID NO: 492058 - RNA, 32 nt, Human
uaugcagaggugcagaaccagggacuccuggg

SEQ ID NO: 492059 - RNA, 32 nt, Human
uaugcagcaagcaagggugaccuccaguggcc

SEQ ID NO: 492060 - RNA, 32 nt, Human
uaugcagcaugggguuuuuauuauguuuuacc

SEQ ID NO: 492061 - RNA, 32 nt, Human
uaugcagcugagcuccccacaggccggcccgg

SEQ ID NO: 492062 - RNA, 32 nt, Human
uaugcagcuggguccagacauaugagagggac

SEQ ID NO: 492063 - RNA, 32 nt, Human
uaugcaggaggaagaugacaaucauuguggaa

SEQ ID NO: 492064 - RNA, 32 nt, Human
uaugcaggcaacacuccuugcagauccagaaa

SEQ ID NO: 492065 - RNA, 32 nt, Human
uaugcagggacaaggagguugcugacuguacu

SEQ ID NO: 492066 - RNA, 32 nt, Human
uaugcagggagccagggugagggcagagugug

SEQ ID NO: 492067 - RNA, 32 nt, Human
uaugcagguaggccuaaugggggaagauggua

SEQ ID NO: 492068 - RNA, 32 nt, Human
uaugcagguauuccugucauuccugacugagg

SEQ ID NO: 492069 - RNA, 32 nt, Human
uaugcaggugauagacuagagaacaagaccuc

SEQ ID NO: 492070 - RNA, 32 nt, Human
uaugcaguauagaaaaguuaacacaaguacua

SEQ ID NO: 492071 - RNA, 32 nt, Human
uaugcagugcaucgaaaccuuuugcuugggga

SEQ ID NO: 492072 - RNA, 20 nt, Human
uaugcaguuaccugugccuu

SEQ ID NO: 492073 - RNA, 32 nt, Human
uaugcauacaugcacagagaugcauacacagg

SEQ ID NO: 492074 - RNA, 32 nt, Human
uaugcauagcgcugcacucagucggacugaac

SEQ ID NO: 492075 - RNA, 32 nt, Human
uaugcauaucuaaaagcacagcacuuaauccu

SEQ ID NO: 492076 - RNA, 32 nt, Human
uaugcauauguauguagauauguuuauaucua

SEQ ID NO: 492077 - RNA, 32 nt, Human
uaugcauauuuuaugggggcaguauuauuaca

SEQ ID NO: 492078 - RNA, 32 nt, Human
uaugcaucccuuagaacccugcucagacacca

SEQ ID NO: 492079 - RNA, 20 nt, Human
uaugcaucgcaauaaaacag

SEQ ID NO: 492080 - RNA, 32 nt, Human
uaugcaucugaacaagugggucucucccuuga

SEQ ID NO: 492081 - RNA, 32 nt, Human
uaugcaucugcaggaaacauagccuggcucug

SEQ ID NO: 492082 - RNA, 29 nt, Human
uaugcaugagauacuaauuaaugaugaaa

SEQ ID NO: 492083 - RNA, 32 nt, Human
uaugcaugugccuguucagagucuccagauac

SEQ ID NO: 492084 - RNA, 32 nt, Human
uaugcauguuaauuagcaauguaagcaauauu

SEQ ID NO: 492085 - RNA, 32 nt, Human
uaugcauguucugacugacaccaucuugaugc

SEQ ID NO: 492086 - RNA, 32 nt, Human
uaugcauguugcugggggaagccacuccggac

SEQ ID NO: 492087 - RNA, 32 nt, Human
uaugcauuaccuuaaugucucugugugguuag

SEQ ID NO: 492088 - RNA, 32 nt, Human
uaugcauuacuccacauccacccuuuaagaau

SEQ ID NO: 492089 - RNA, 32 nt, Human
uaugcauugggaacugcaggggcacagugaug

SEQ ID NO: 492090 - RNA, 32 nt, Human
uaugcauuucaugaugggguccaacaagaaca

SEQ ID NO: 492091 - RNA, 32 nt, Human
uaugcauuuguaacuguguucuuccucuucug

SEQ ID NO: 492092 - RNA, 32 nt, Human
uaugcauuuucucuuuuuacauauaggauuug

SEQ ID NO: 492093 - RNA, 32 nt, Human
uaugccaaaaggaaaacuaugacuguaugauu

SEQ ID NO: 492094 - RNA, 32 nt, Human
uaugccaaaauuaguuguuuaagugaaguuuu

SEQ ID NO: 492095 - RNA, 32 nt, Human
uaugccaaagcccaaggcaccggguggcauau

SEQ ID NO: 492096 - RNA, 19 nt, Human
uaugccaaaggcccggggg

SEQ ID NO: 492097 - RNA, 18 nt, Human
uaugccaacccaaggaga

SEQ ID NO: 492098 - RNA, 19 nt, Human
uaugccaaccggcuggggg

SEQ ID NO: 492099 - RNA, 32 nt, Human
uaugccaagcauuaagauaaacaaauaugaug

SEQ ID NO: 492100 - RNA, 32 nt, Human
uaugccaagccuugggaaucucagccuccccu

SEQ ID NO: 492101 - RNA, 32 nt, Human
uaugccaauguucacacugaaauacuguauug

SEQ ID NO: 492102 - RNA, 32 nt, Human
uaugccacauggucuucauuuaugccagguaa

SEQ ID NO: 492103 - RNA, 32 nt, Human
uaugccacugcaauuagaguauccaauaaagg

SEQ ID NO: 492104 - RNA, 32 nt, Human
uaugccacugcacuccagccuaggugacaaag

SEQ ID NO: 492105 - RNA, 32 nt, Human
uaugccacugcacuccagccugggcaacagag

SEQ ID NO: 492106 - RNA, 32 nt, Human
uaugccacugcacuccagccugggugacagag

SEQ ID NO: 492107 - RNA, 32 nt, Human
uaugccacugcacuccagccuggugacagagc

SEQ ID NO: 492108 - RNA, 32 nt, Human
uaugccacugcacucccgccugggugacaaag

SEQ ID NO: 492109 - RNA, 32 nt, Human
uaugccacugcacuucagccugggugacagag

SEQ ID NO: 492110 - RNA, 32 nt, Human
uaugccacugcuuuccagccugggcaacauag

SEQ ID NO: 492111 - RNA, 32 nt, Human
uaugccacuguacuccagccuggguaacagga

SEQ ID NO: 492112 - RNA, 32 nt, Human
uaugccacuguacuccagccugggugacagag

SEQ ID NO: 492113 - RNA, 32 nt, Human
uaugccacuguacuccagcgugggugacagag

SEQ ID NO: 492114 - RNA, 32 nt, Human
uaugccagauggccacacccccagccacagau

SEQ ID NO: 492115 - RNA, 17 nt, Human
uaugccagcgcccaggg

SEQ ID NO: 492116 - RNA, 32 nt, Human
uaugccagcugggccauuucucagacauucaa

SEQ ID NO: 492117 - RNA, 32 nt, Human
uaugccaggauuuugugaaggcugaggcagaa

SEQ ID NO: 492118 - RNA, 32 nt, Human
uaugccaggcgcugauguaagcacuuuaggua

SEQ ID NO: 492119 - RNA, 32 nt, Human
uaugccaggugcuucaccuguuauuucacuua

SEQ ID NO: 492120 - RNA, 32 nt, Human
uaugccagucacacccugcuccagaccucggu

SEQ ID NO: 492121 - RNA, 32 nt, Human
uaugccagugagcacaacacaggccgcauaug

SEQ ID NO: 492122 - RNA, 32 nt, Human
uaugccaucaugucacugcagagguaugaaaa

SEQ ID NO: 492123 - RNA, 19 nt, Human
uaugccaucuggcugccaa

SEQ ID NO: 492124 - RNA, 32 nt, Human
uaugccauuacacuccagccugggcaacagcg

SEQ ID NO: 492125 - RNA, 32 nt, Human
uaugccauugcacuccagccugggugacaaag

SEQ ID NO: 492126 - RNA, 32 nt, Human
uaugccauugcacuccagccugggugacagag

SEQ ID NO: 492127 - RNA, 32 nt, Human
uaugcccaaagcuuuucagggucuccaacucu

SEQ ID NO: 492128 - RNA, 32 nt, Human
uaugcccacaugcucaagcccagaaggcagaa

SEQ ID NO: 492129 - RNA, 32 nt, Human
uaugcccacggagcuaagagacaggaacacag

SEQ ID NO: 492130 - RNA, 32 nt, Human
uaugcccauaauaaucccagcacuuugggagg

SEQ ID NO: 492131 - RNA, 32 nt, Human
uaugcccaugucuucugagcagagccaccauu

SEQ ID NO: 492132 - RNA, 32 nt, Human
uaugccccaaaccaaaggguuuccugggcuuc

SEQ ID NO: 492133 - RNA, 32 nt, Human
uaugcccccacgaccauccucacugcagaacu

SEQ ID NO: 492134 - RNA, 32 nt, Human
uaugccccugcacaucagccugggugauagau

SEQ ID NO: 492135 - RNA, 32 nt, Human
uaugcccuagagcugcuccagcacccuugguu

SEQ ID NO: 492136 - RNA, 32 nt, Human
uaugcccuccaaacccucccaggauucaaagc

SEQ ID NO: 492137 - RNA, 32 nt, Human
uaugcccucccuuccuccugagccagcccaga

SEQ ID NO: 492138 - RNA, 32 nt, Human
uaugcccugaguagcgaguccaugucacucag

SEQ ID NO: 492139 - RNA, 32 nt, Human
uaugcccugcgcuccuccacagccugggccgg

SEQ ID NO: 492140 - RNA, 32 nt, Human
uaugcccuuugccucugcucugcacagugaaa

SEQ ID NO: 492141 - RNA, 32 nt, Human
uaugcccuuugcuccuggugggagagggagga

SEQ ID NO: 492142 - RNA, 32 nt, Human
uaugccgcagagccaggcacgccgugggcacu

SEQ ID NO: 492143 - RNA, 32 nt, Human
uaugccgcugcacuccagccugggggacagag

SEQ ID NO: 492144 - RNA, 32 nt, Human
uaugccuaccaaacauccaaagguagacgugg

SEQ ID NO: 492145 - RNA, 32 nt, Human
uaugccuagaaggugaugugaaugcgauucag

SEQ ID NO: 492146 - RNA, 32 nt, Human
uaugccuauagucccagcuacuugggaggcug

SEQ ID NO: 492147 - RNA, 32 nt, Human
uaugccuaugagucaguaaagacugaaguaau

SEQ ID NO: 492148 - RNA, 32 nt, Human
uaugccucacugguuguuauucuuagguuauu

SEQ ID NO: 492149 - RNA, 32 nt, Human
uaugccucagccccaucucugcuccuguuuga

SEQ ID NO: 492150 - RNA, 32 nt, Human
uaugccucuccaccucccaugucacccaugaa

SEQ ID NO: 492151 - RNA, 19 nt, Human
uaugccucuggcaugggga

SEQ ID NO: 492152 - RNA, 32 nt, Human
uaugccucuggcauggggaaauuaagggaaca

SEQ ID NO: 492153 - RNA, 32 nt, Human
uaugccucuguguaucucagcauuuuuauucc

SEQ ID NO: 492154 - RNA, 32 nt, Human
uaugccugacaggcaucugagcaaagguuuuu

SEQ ID NO: 492155 - RNA, 32 nt, Human
uaugccugaguguuuaugcuugcaaaaaguau

SEQ ID NO: 492156 - RNA, 32 nt, Human
uaugccugcacugcagcccagccccggacagc

SEQ ID NO: 492157 - RNA, 32 nt, Human
uaugccugccguuucccugccuccugcuucag

SEQ ID NO: 492158 - RNA, 32 nt, Human
uaugccugccugguaaggaaauccauuuuggc

SEQ ID NO: 492159 - RNA, 32 nt, Human
uaugccuggcacggaucucagcuggaucccug

SEQ ID NO: 492160 - RNA, 32 nt, Human
uaugccugguacaagcuggcagaggagguuuc

SEQ ID NO: 492161 - RNA, 32 nt, Human
uaugccuguaaaucccagcuauuugggaggcu

SEQ ID NO: 492162 - RNA, 23 nt, Human
uaugccuguaaccccagcacuuu

SEQ ID NO: 492163 - RNA, 21 nt, Human
uaugccuguaaucccagcacu

SEQ ID NO: 492164 - RNA, 23 nt, Human
uaugccuguaaucccagcacuuu

SEQ ID NO: 492165 - RNA, 32 nt, Human
uaugccuguaaucccagcuacucgggaggcug

SEQ ID NO: 492166 - RNA, 32 nt, Human
uaugccuguaaucccagcuacuuaggaggcug

SEQ ID NO: 492167 - RNA, 23 nt, Human
uaugccuguaaucccugcacuuu

SEQ ID NO: 492168 - RNA, 32 nt, Human
uaugccuguaccgauggcauggugcuauaucc

SEQ ID NO: 492169 - RNA, 32 nt, Human
uaugccuguagucccaacuacuuggaaggcug

SEQ ID NO: 492170 - RNA, 32 nt, Human
uaugccuguagucccagcuacucaggagguug

SEQ ID NO: 492171 - RNA, 32 nt, Human
uaugccuguagucccaguuacuugggaggcug

SEQ ID NO: 492172 - RNA, 32 nt, Human
uaugccuguaguuuucuaucaucccaguaggu

SEQ ID NO: 492173 - RNA, 32 nt, Human
uaugccugugaguuauccaagaccauguauga

SEQ ID NO: 492174 - RNA, 32 nt, Human
uaugccuguggucccagcuacugaggaggcug

SEQ ID NO: 492175 - RNA, 32 nt, Human
uaugccuguucugguuccuuguugacuugggg

SEQ ID NO: 492176 - RNA, 32 nt, Human
uaugccuuccaagaggaacuucagacacaaaa

SEQ ID NO: 492177 - RNA, 32 nt, Human
uaugccuucuucugcugccugguuuugggggc

SEQ ID NO: 492178 - RNA, 32 nt, Human
uaugccuuuucccaacuccagaaagugacaag

SEQ ID NO: 492179 - RNA, 32 nt, Human
uaugccuuuugagcugucuugacguucacaga

SEQ ID NO: 492180 - RNA, 32 nt, Human
uaugccuuuuucuagaucuugaugcaaacagu

SEQ ID NO: 492181 - RNA, 32 nt, Human
uaugcggaaagccacacagagccauuguuuuc

SEQ ID NO: 492182 - RNA, 32 nt, Human
uaugcggcguuauuucugagggcucuguucug

SEQ ID NO: 492183 - RNA, 32 nt, Human
uaugcggcuccucugcuuuugaguccaaugcu

SEQ ID NO: 492184 - RNA, 32 nt, Human
uaugcggugacggcggggugugguggccugug

SEQ ID NO: 492185 - RNA, 32 nt, Human
uaugcguauguauguauguauguaugcccuca

SEQ ID NO: 492186 - RNA, 32 nt, Human
uaugcgucagaaaagaaaugacagguuugaaa

SEQ ID NO: 492187 - RNA, 32 nt, Human
uaugcguggcgcuguguucacuuuccagaguc

SEQ ID NO: 492188 - RNA, 32 nt, Human
uaugcgugugugaaagcagguggaccauucca

SEQ ID NO: 492189 - RNA, 32 nt, Human
uaugcuaagcaggguuccaaguagcuaaauga

SEQ ID NO: 492190 - RNA, 32 nt, Human
uaugcuacuauacauugauuuacugccuguuu

SEQ ID NO: 492191 - RNA, 32 nt, Human
uaugcuacuuaaaaauauuaaaauagaguggu

SEQ ID NO: 492192 - RNA, 32 nt, Human
uaugcuacuugugaggcagaagaguuuucugu

SEQ ID NO: 492193 - RNA, 32 nt, Human
uaugcuagaacucugggcagggccuaaucuag

SEQ ID NO: 492194 - RNA, 32 nt, Human
uaugcuagaugcugggguugcagccacgagca

SEQ ID NO: 492195 - RNA, 32 nt, Human
uaugcuaugauggaguucuuuugugauuucuu

SEQ ID NO: 492196 - RNA, 32 nt, Human
uaugcucacaccacugcacuccauccugggca

SEQ ID NO: 492197 - RNA, 32 nt, Human
uaugcucacauuuguguuuuauuugaaaagug

SEQ ID NO: 492198 - RNA, 32 nt, Human
uaugcucagaugcccugguugccugaagaugg

SEQ ID NO: 492199 - RNA, 32 nt, Human
uaugcucagcacugcccccucucugauugcuu

SEQ ID NO: 492200 - RNA, 32 nt, Human
uaugcuccaaacacuccucuaagcacuuuaca

SEQ ID NO: 492201 - RNA, 32 nt, Human
uaugcuccaggguuguguucagugcaucauuc

SEQ ID NO: 492202 - RNA, 32 nt, Human
uaugcuccccuuccucugcuccuuaaggucac

SEQ ID NO: 492203 - RNA, 32 nt, Human
uaugcucgcaaucucagcuauuuggaagcuac

SEQ ID NO: 492204 - RNA, 32 nt, Human
uaugcucugggugacagcgggaaggugcuuuc

SEQ ID NO: 492205 - RNA, 32 nt, Human
uaugcugacaccagaaacucagagccagcuug

SEQ ID NO: 492206 - RNA, 32 nt, Human
uaugcugagccccugccacaugcaucaucauc

SEQ ID NO: 492207 - RNA, 32 nt, Human
uaugcugaggaccucagccauguggccgcugg

SEQ ID NO: 492208 - RNA, 32 nt, Human
uaugcugaggaccucagccauguggccucugg

SEQ ID NO: 492209 - RNA, 32 nt, Human
uaugcugauggaccaggaagcccugaauccau

SEQ ID NO: 492210 - RNA, 32 nt, Human
uaugcugauguagggcaggugagcccaaaaau

SEQ ID NO: 492211 - RNA, 32 nt, Human
uaugcugcagauucaucugaugaagaggagga

SEQ ID NO: 492212 - RNA, 32 nt, Human
uaugcugcaggcaaggguuuccauccccgcug

SEQ ID NO: 492213 - RNA, 25 nt, Human
uaugcugcaguccugcagucaccua

SEQ ID NO: 492214 - RNA, 32 nt, Human
uaugcugcauuuggcuggagcccgguguucag

SEQ ID NO: 492215 - RNA, 32 nt, Human
uaugcugcuaccucucuccuugaagggagcau

SEQ ID NO: 492216 - RNA, 32 nt, Human
uaugcugcucuaagucugcucucugcauguuu

SEQ ID NO: 492217 - RNA, 32 nt, Human
uaugcugcugcacuccagccuggacaacagag

SEQ ID NO: 492218 - RNA, 32 nt, Human
uaugcugcugcugugcuaagacugccuaugaa

SEQ ID NO: 492219 - RNA, 32 nt, Human
uaugcuggagauuacuuaggugggccaggauu

SEQ ID NO: 492220 - RNA, 32 nt, Human
uaugcuggaggcagagggcaagggaggggugg

SEQ ID NO: 492221 - RNA, 32 nt, Human
uaugcugggccauuuuucaucuugagauugcu

SEQ ID NO: 492222 - RNA, 32 nt, Human
uaugcuggguuauuggcaaagaagcaaacagg

SEQ ID NO: 492223 - RNA, 32 nt, Human
uaugcuggucucaaacucccaaccucagguga

SEQ ID NO: 492224 - RNA, 32 nt, Human
uaugcugguuauuucacugcuucaccuuccag

SEQ ID NO: 492225 - RNA, 32 nt, Human
uaugcuguagugacaacaacaaagauguauuu

SEQ ID NO: 492226 - RNA, 32 nt, Human
uaugcuguauauguuauguaauuuauuuuagg

SEQ ID NO: 492227 - RNA, 32 nt, Human
uaugcugucuggacaggcacacacaugcagau

SEQ ID NO: 492228 - RNA, 32 nt, Human
uaugcugucuuuccucuuccuccuagcuggcu

SEQ ID NO: 492229 - RNA, 32 nt, Human
uaugcuuaaagauccaccuccauuaacugcac

SEQ ID NO: 492230 - RNA, 32 nt, Human
uaugcuuaccaagaucaagugcauugaggggc

SEQ ID NO: 492231 - RNA, 32 nt, Human
uaugcuuagucuuccauauaaccuucuaugca

SEQ ID NO: 492232 - RNA, 32 nt, Human
uaugcuucagaauacaguuguuugcccugugc

SEQ ID NO: 492233 - RNA, 32 nt, Human
uaugcuucccacaaccucuccugggcccaggu

SEQ ID NO: 492234 - RNA, 32 nt, Human
uaugcuuccuuguuuccaugccaacaugcuga

SEQ ID NO: 492235 - RNA, 32 nt, Human
uaugcuucucaaaccucuaccuuuuucaaauu

SEQ ID NO: 492236 - RNA, 32 nt, Human
uaugcuucuccucucugagaauccugacuuac

SEQ ID NO: 492237 - RNA, 32 nt, Human
uaugcuucucuagcuccccaucuuccaggucc

SEQ ID NO: 492238 - RNA, 32 nt, Human
uaugcuugcaauacaagaauaucuucagaugg

SEQ ID NO: 492239 - RNA, 32 nt, Human
uaugcuugcggaccgcagcccagcaugccggu

SEQ ID NO: 492240 - RNA, 32 nt, Human
uaugcuugcuguggaccucauuuaagauugca

SEQ ID NO: 492241 - RNA, 32 nt, Human
uaugcuugugagugaccuucuagaaaggaacu

SEQ ID NO: 492242 - RNA, 32 nt, Human
uaugcuuuccgcaguccuaacuaugcugcguu

SEQ ID NO: 492243 - RNA, 32 nt, Human
uaugcuuuggcuuucaugccuccuggauauga

SEQ ID NO: 492244 - RNA, 32 nt, Human
uaugcuuuuuaauuucuagaacauggaaaccu

SEQ ID NO: 492245 - RNA, 32 nt, Human
uauggaaaacugucaggugaccaguccauuua

SEQ ID NO: 492246 - RNA, 32 nt, Human
uauggaaaaguuaaccauuauagaaaagcaaa

SEQ ID NO: 492247 - RNA, 32 nt, Human
uauggaaaccucuaaggugagaaaguuuugaa

SEQ ID NO: 492248 - RNA, 32 nt, Human
uauggaaagggagacuguuucagaggacuuga

SEQ ID NO: 492249 - RNA, 32 nt, Human
uauggaacucaggaggcggaggcugcagucaa

SEQ ID NO: 492250 - RNA, 32 nt, Human
uauggaacuucaaaggcccacauggcaagcca

SEQ ID NO: 492251 - RNA, 32 nt, Human
uauggaagccaagagcucccggcucaugauac

SEQ ID NO: 492252 - RNA, 32 nt, Human
uauggaagccaagagcucucggcucaugauac

SEQ ID NO: 492253 - RNA, 32 nt, Human
uauggaaggcggggcucauggcugauuggcaa

SEQ ID NO: 492254 - RNA, 32 nt, Human
uauggaauugcacauccaucucauaggaauug

SEQ ID NO: 492255 - RNA, 32 nt, Human
uauggacaacuuuuugccacuaacugaauucu

SEQ ID NO: 492256 - RNA, 32 nt, Human
uauggacacagcccgagagaugggcgcaaggg

SEQ ID NO: 492257 - RNA, 32 nt, Human
uauggacaggagcuaauggaagugacagucau

SEQ ID NO: 492258 - RNA, 32 nt, Human
uauggacaguuagcauuuaccaauauguaucu

SEQ ID NO: 492259 - RNA, 32 nt, Human
uauggacauccagcagaaaagaggaugcuuuu

SEQ ID NO: 492260 - RNA, 32 nt, Human
uauggacauggacuugugggcccugcagugca

SEQ ID NO: 492261 - RNA, 32 nt, Human
uauggaccagaagagagcuuugggacauuuuu

SEQ ID NO: 492262 - RNA, 32 nt, Human
uauggaccagugcccuccgcagacagcucaca

SEQ ID NO: 492263 - RNA, 32 nt, Human
uauggaccauucuagaauaccuugccauauuu

SEQ ID NO: 492264 - RNA, 32 nt, Human
uauggacgugagccaccacacccgcccuugaa

SEQ ID NO: 492265 - RNA, 32 nt, Human
uauggacucagaggaaugauguuuuaguuuug

SEQ ID NO: 492266 - RNA, 32 nt, Human
uauggacucucuucagcuucuggagaccucac

SEQ ID NO: 492267 - RNA, 32 nt, Human
uauggacuugacuuuucuuggacugacaacug

SEQ ID NO: 492268 - RNA, 32 nt, Human
uauggagaaagaaaccugaggagauugaaguu

SEQ ID NO: 492269 - RNA, 32 nt, Human
uauggagaaagagacgccucuggccuuggggg

SEQ ID NO: 492270 - RNA, 32 nt, Human
uauggagaacuccacguggaucucugauugcg

SEQ ID NO: 492271 - RNA, 32 nt, Human
uauggagacuccgucucuacagaagguuuuga

SEQ ID NO: 492272 - RNA, 32 nt, Human
uauggagacugucuggaaggcuuggaaugguu

SEQ ID NO: 492273 - RNA, 32 nt, Human
uauggagagaaaaagaggcacaccuggacgca

SEQ ID NO: 492274 - RNA, 32 nt, Human
uauggagagccagcagggucugggaguucucc

SEQ ID NO: 492275 - RNA, 32 nt, Human
uauggagagggcugcuuuuggggauuauuuau

SEQ ID NO: 492276 - RNA, 32 nt, Human
uauggagcacgagcagagggaaaaugacugcg

SEQ ID NO: 492277 - RNA, 32 nt, Human
uauggagcagggccacugaauuugcuguaauc

SEQ ID NO: 492278 - RNA, 32 nt, Human
uauggagcagggccgcugaacuugcuguaauc

SEQ ID NO: 492279 - RNA, 32 nt, Human
uauggagcccugcccacagccccuggucaucu

SEQ ID NO: 492280 - RNA, 32 nt, Human
uauggagccuccaucaucaugcucuuuuguga

SEQ ID NO: 492281 - RNA, 32 nt, Human
uauggagcuaagugccuuuuggaggauuucuu

SEQ ID NO: 492282 - RNA, 32 nt, Human
uauggagcuagauuuuuaaaaacacuguaaaa

SEQ ID NO: 492283 - RNA, 32 nt, Human
uauggagcugauuuucuagucuguggaucagc

SEQ ID NO: 492284 - RNA, 32 nt, Human
uauggaggcaaaucagcugggcccugcccuca

SEQ ID NO: 492285 - RNA, 32 nt, Human
uauggagggagaaacaugaguauagaggaggc

SEQ ID NO: 492286 - RNA, 32 nt, Human
uauggagguacccaaggcucagccagucucua

SEQ ID NO: 492287 - RNA, 32 nt, Human
uauggaguaaccaagugauggaagagguugga

SEQ ID NO: 492288 - RNA, 32 nt, Human
uauggaguagcucgcagagaucacagaaaugc

SEQ ID NO: 492289 - RNA, 32 nt, Human
uauggaguccugaagauacacagccaccacuc

SEQ ID NO: 492290 - RNA, 32 nt, Human
uauggagugggaaugaagauggggaacuuacg

SEQ ID NO: 492291 - RNA, 32 nt, Human
uauggaguucagggagcuucaggguuggcaaa

SEQ ID NO: 492292 - RNA, 19 nt, Human
uauggauaaagaugcagua

SEQ ID NO: 492293 - RNA, 32 nt, Human
uauggauauacugaugaagacuucaaaauuca

SEQ ID NO: 492294 - RNA, 32 nt, Human
uauggauccugccuccugccacgugcugggug

SEQ ID NO: 492295 - RNA, 32 nt, Human
uauggaucggccacugcacuccgggcugggcg

SEQ ID NO: 492296 - RNA, 32 nt, Human
uauggaugaagugaacccaugcagugacugga

SEQ ID NO: 492297 - RNA, 32 nt, Human
uauggaugcuuagugcccucacuucucucugu

SEQ ID NO: 492298 - RNA, 32 nt, Human
ucaaccucggaggcggagguugcagugagcca

SEQ ID NO: 492299 - RNA, 32 nt, Human
ucaaccucgguauuuucccuuggauauuaacu

SEQ ID NO: 492300 - RNA, 32 nt, Human
ucaaccucuagacagggaacagcuucaggaua

SEQ ID NO: 492301 - RNA, 32 nt, Human
ucaaccucucagagugcugggauuauaggugu

SEQ ID NO: 492302 - RNA, 32 nt, Human
ucaaccucuccaggaggcccugaagguggccu

SEQ ID NO: 492303 - RNA, 32 nt, Human
ucaaccucuccuccgcugucaugccugcuucc

SEQ ID NO: 492304 - RNA, 32 nt, Human
ucaaccucucuccagcccacucuuccaaaaua

SEQ ID NO: 492305 - RNA, 32 nt, Human
ucaaccucugcccacccgugcaugucaucaca

SEQ ID NO: 492306 - RNA, 32 nt, Human
ucaaccucuuacugcuguucucccuuucuccg

SEQ ID NO: 492307 - RNA, 32 nt, Human
ucaaccucuucuggcccugcguccugcagcga

SEQ ID NO: 492308 - RNA, 23 nt, Human
ucaaccucuugagcucaagcgau

SEQ ID NO: 492309 - RNA, 32 nt, Human
ucaaccucuuucugauagauuuccucuuucau

SEQ ID NO: 492310 - RNA, 32 nt, Human
ucaaccugaggcauuacugagccccggcgcca

SEQ ID NO: 492311 - RNA, 32 nt, Human
ucaaccugccuacuccccacacugccucaccu

SEQ ID NO: 492312 - RNA, 32 nt, Human
ucaaccugcucacuguucuaucuccaaaugag

SEQ ID NO: 492313 - RNA, 32 nt, Human
ucaaccuggagcucuacgccuccugcguuuac

SEQ ID NO: 492314 - RNA, 29 nt, Human
ucaaccuggcugcauucagcugccaugcc

SEQ ID NO: 492315 - RNA, 32 nt, Human
ucaaccugggagauggagguugcagugagccg

SEQ ID NO: 492316 - RNA, 32 nt, Human
ucaaccugggaggcagagguugcagugagcca

SEQ ID NO: 492317 - RNA, 32 nt, Human
ucaaccugggaggcagagguugcagugagccg

SEQ ID NO: 492318 - RNA, 32 nt, Human
ucaaccugggaggcggagguugcagugagcuu

SEQ ID NO: 492319 - RNA, 32 nt, Human
ucaaccugggagguagagguugcagugagccg

SEQ ID NO: 492320 - RNA, 32 nt, Human
ucaaccugggagguugaggcugcagugagcug

SEQ ID NO: 492321 - RNA, 32 nt, Human
ucaaccugggcaaagccuagugaaggcuucuc

SEQ ID NO: 492322 - RNA, 32 nt, Human
ucaaccugggcaacauagagagacccuaucuc

SEQ ID NO: 492323 - RNA, 32 nt, Human
ucaaccugggcaacauggugaccucccgucuc

SEQ ID NO: 492324 - RNA, 18 nt, Human
ucaaccuggucaagucuu

SEQ ID NO: 492325 - RNA, 32 nt, Human
ucaaccuguaucaagaacaaaaaugggaggag

SEQ ID NO: 492326 - RNA, 21 nt, Human
ucaaccugugugauggugcuu

SEQ ID NO: 492327 - RNA, 24 nt, Human
ucaaccuuccaggcugaagugauu

SEQ ID NO: 492328 - RNA, 23 nt, Human
ucaaccuucuggguucaagcgau

SEQ ID NO: 492329 - RNA, 32 nt, Human
ucaaccuuugaucucuugagaggaugguucac

SEQ ID NO: 492330 - RNA, 32 nt, Human
ucaaccuuugccuuauccaaccccucuucaga

SEQ ID NO: 492331 - RNA, 32 nt, Human
ucaacgacucagcuuugcacuccagggcugcg

SEQ ID NO: 492332 - RNA, 32 nt, Human
ucaacgcaguaauucccaucugccuuuauugc

SEQ ID NO: 492333 - RNA, 32 nt, Human
ucaacgccaaggagaugacccaucuuuugcag

SEQ ID NO: 492334 - RNA, 32 nt, Human
ucaacgccaagucauccucccaccucagccuc

SEQ ID NO: 492335 - RNA, 32 nt, Human
ucaacgccagccuggccaacauggugaaaccc

SEQ ID NO: 492336 - RNA, 32 nt, Human
ucaacgccagcuuucugugcuucugccuguca

SEQ ID NO: 492337 - RNA, 32 nt, Human
ucaacgccccgccucauuggaaaacugaaauc

SEQ ID NO: 492338 - RNA, 32 nt, Human
ucaacgccucuccucaaugcugggcccucuua

SEQ ID NO: 492339 - RNA, 32 nt, Human
ucaacgccugccuccccucgagcguccucagc

SEQ ID NO: 492340 - RNA, 32 nt, Human
ucaacggcaaguuucccucccuuuucugacug

SEQ ID NO: 492341 - RNA, 32 nt, Human
ucaacggcuaagcucaaacguuagucuugaca

SEQ ID NO: 492342 - RNA, 32 nt, Human
ucaacgggagucaccagcagccaagaaggaac

SEQ ID NO: 492343 - RNA, 32 nt, Human
ucaacgguccugcccucggucucccucuuccc

SEQ ID NO: 492344 - RNA, 32 nt, Human
ucaacggugacuugugggcagugccuucugcu

SEQ ID NO: 492345 - RNA, 32 nt, Human
ucaacguagcuacucaggaggcugagguggga

SEQ ID NO: 492346 - RNA, 32 nt, Human
ucaacguccuguacuccaguuuugacuacgag

SEQ ID NO: 492347 - RNA, 32 nt, Human
ucaacgugaccaaccuuccuugcuuacacaua

SEQ ID NO: 492348 - RNA, 32 nt, Human
ucaacgugagccaggagcagcgucccggcucc

SEQ ID NO: 492349 - RNA, 32 nt, Human
ucaacgugaggcucugcugccaugaaggugaa

SEQ ID NO: 492350 - RNA, 32 nt, Human
ucaacguggcauuaacugcaagcacagggguc

SEQ ID NO: 492351 - RNA, 32 nt, Human
ucaacgugggguccuuggacagcaagugaugg

SEQ ID NO: 492352 - RNA, 32 nt, Human
ucaacguguguggucuccucagucucugucag

SEQ ID NO: 492353 - RNA, 32 nt, Human
ucaacguguuagccaggauggucucagucucc

SEQ ID NO: 492354 - RNA, 22 nt, Human
ucaacguugacaagagguugcu

SEQ ID NO: 492355 - RNA, 32 nt, Human
ucaacguugcugcuaauacaagagucuuagag

SEQ ID NO: 492356 - RNA, 32 nt, Human
ucaacuaaaaauacaaaaauuagccaggugug

SEQ ID NO: 492357 - RNA, 32 nt, Human
ucaacuaaagaaauuaacccuaacccagccau

SEQ ID NO: 492358 - RNA, 32 nt, Human
ucaacuaauaauacaaaauuagccaggcgugg

SEQ ID NO: 492359 - RNA, 32 nt, Human
ucaacuacaaauaggcugggauucaaugugga

SEQ ID NO: 492360 - RNA, 32 nt, Human
ucaacuacauuuuagaaaggaggaaaucuaaa

SEQ ID NO: 492361 - RNA, 32 nt, Human
ucaacuagaccccacaccagggcacccuaaga

SEQ ID NO: 492362 - RNA, 32 nt, Human
ucaacuagacucccccucuccccugucuaaac

SEQ ID NO: 492363 - RNA, 32 nt, Human
ucaacuagccccggcaccagacucaaaggaug

SEQ ID NO: 492364 - RNA, 21 nt, Human
ucaacuaucagaaggcugcuu

SEQ ID NO: 492365 - RNA, 32 nt, Human
ucaacucaacgcaugcagccacuguagaaaag

SEQ ID NO: 492366 - RNA, 32 nt, Human
ucaacucaagcaauccucccaccucagccacc

SEQ ID NO: 492367 - RNA, 32 nt, Human
ucaacucaccgcaaccuccgccucccggguuc

SEQ ID NO: 492368 - RNA, 32 nt, Human
ucaacucaccgcaaccuccuccucuuggguuc

SEQ ID NO: 492369 - RNA, 32 nt, Human
ucaacucacugcaaccccugcucucagguuca

SEQ ID NO: 492370 - RNA, 32 nt, Human
ucaacucacugcaaccuccgcucccgguuuga

SEQ ID NO: 492371 - RNA, 32 nt, Human
ucaacucacugcaaccucugcccuucagguuc

SEQ ID NO: 492372 - RNA, 32 nt, Human
ucaacucaggcagacuggcuaaggaccagccc

SEQ ID NO: 492373 - RNA, 32 nt, Human
ucaacucaugccagcagccucagcgucugccu

SEQ ID NO: 492374 - RNA, 32 nt, Human
ucaacuccguucucaacaccuuccuuaagucu

SEQ ID NO: 492375 - RNA, 24 nt, Human
ucaacuccuaugaguggcaacuga

SEQ ID NO: 492376 - RNA, 18 nt, Human
ucaacuccugggcucaag

SEQ ID NO: 492377 - RNA, 22 nt, Human
ucaacuccugggcucaagcgau

SEQ ID NO: 492378 - RNA, 32 nt, Human
ucaacucgaagccaggagggggcuuccagguc

SEQ ID NO: 492379 - RNA, 32 nt, Human
ucaacucucaccucugcagcucagggaccucg

SEQ ID NO: 492380 - RNA, 32 nt, Human
ucaacucugagcugucugcaaggcuuaguaag

SEQ ID NO: 492381 - RNA, 32 nt, Human
ucaacucugcagcuccucucgcacccagagga

SEQ ID NO: 492382 - RNA, 19 nt, Human
ucaacucugccccacccca

SEQ ID NO: 492383 - RNA, 18 nt, Human
ucaacucugggcuuuugg

SEQ ID NO: 492384 - RNA, 32 nt, Human
ucaacucuguuacccaggcuggagugcagugg

SEQ ID NO: 492385 - RNA, 32 nt, Human
ucaacucuucuagcuugcuguuucuggaccaa

SEQ ID NO: 492386 - RNA, 32 nt, Human
ucaacucuucucaaaaucccaggcuggaaauu

SEQ ID NO: 492387 - RNA, 22 nt, Human
ucaacucuuggccucaagugau

SEQ ID NO: 492388 - RNA, 32 nt, Human
ucaacucuuuuuccgaugcucugcaccagauc

SEQ ID NO: 492389 - RNA, 32 nt, Human
ucaacugaagucagaguucaagacagccuggg

SEQ ID NO: 492390 - RNA, 32 nt, Human
ucaacugacuguacuugcuacuuuaaaaucua

SEQ ID NO: 492391 - RNA, 32 nt, Human
ucaacugaucaaaccaaaggaaaaguguugcu

SEQ ID NO: 492392 - RNA, 21 nt, Human
ucaacugauccuuccccacca

SEQ ID NO: 492393 - RNA, 32 nt, Human
ucaacugcaacauuuucuuuucugccuaucuu

SEQ ID NO: 492394 - RNA, 32 nt, Human
ucaacugcacuuccagucacccaggccuugca

SEQ ID NO: 492395 - RNA, 32 nt, Human
ucaacugccccaaaucucuuaauagcuucuag

SEQ ID NO: 492396 - RNA, 32 nt, Human
ucaacugccccagguuuaagcaauccucccac

SEQ ID NO: 492397 - RNA, 32 nt, Human
ucaacuggccuguagauuugugguguuccuag

SEQ ID NO: 492398 - RNA, 32 nt, Human
ucaacugggaaaaugaagaccugcuggaaaau

SEQ ID NO: 492399 - RNA, 32 nt, Human
ucaacugggagguuagaugggggccagggucc

SEQ ID NO: 492400 - RNA, 23 nt, Human
ucaacugggccaggagguaguuu

SEQ ID NO: 492401 - RNA, 32 nt, Human
ucaacugguguuuucagaccucaguuggauga

SEQ ID NO: 492402 - RNA, 32 nt, Human
ucaacuguaguuggcuuuugaaugaggaugac

SEQ ID NO: 492403 - RNA, 23 nt, Human
ucaacuguuacucuuuucuuuca

SEQ ID NO: 492404 - RNA, 29 nt, Human
ucaacuguugugugugugcaugccuuggg

SEQ ID NO: 492405 - RNA, 32 nt, Human
ucaacuguuucuuuaaaaugcauuuacugauu

SEQ ID NO: 492406 - RNA, 32 nt, Human
ucaacuuaugcagaacuggcaacuuacuacug

SEQ ID NO: 492407 - RNA, 32 nt, Human
ucaacuucagccaggcucucagacuggaggug

SEQ ID NO: 492408 - RNA, 32 nt, Human
ucaacuuccacucaccuaugaaugggguauuu

SEQ ID NO: 492409 - RNA, 20 nt, Human
ucaacuuccugggcucaagu

SEQ ID NO: 492410 - RNA, 22 nt, Human
ucaacuuccugggcucaaguga

SEQ ID NO: 492411 - RNA, 32 nt, Human
ucaacuuccuuuucuuucuuccuuccuuucuu

SEQ ID NO: 492412 - RNA, 32 nt, Human
ucaacuucugggcucccagugcccauuggcug

SEQ ID NO: 492413 - RNA, 32 nt, Human
ucaacuucuucaguugaguuaucugaaagugu

SEQ ID NO: 492414 - RNA, 32 nt, Human
ucaacuucuugggccuuggcucugaguuggaa

SEQ ID NO: 492415 - RNA, 32 nt, Human
ucaacuugaagcaagcuuucucucauaacgua

SEQ ID NO: 492416 - RNA, 23 nt, Human
ucaacuugcuaauuuaugccaga

SEQ ID NO: 492417 - RNA, 32 nt, Human
ucaacuugcugcaucaaagauaugagauuuuu

SEQ ID NO: 492418 - RNA, 32 nt, Human
ucaacuugguugcucugauaccccagagccug

SEQ ID NO: 492419 - RNA, 32 nt, Human
ucaacuuucucauuuggccugugcagaagaca

SEQ ID NO: 492420 - RNA, 32 nt, Human
ucaacuuugcaaccuccgaugagaagaaaaug

SEQ ID NO: 492421 - RNA, 32 nt, Human
ucaacuuugcagcugcugugucucuucgucgu

SEQ ID NO: 492422 - RNA, 32 nt, Human
ucaagaaaaagcaugagcuggccacacaugua

SEQ ID NO: 492423 - RNA, 32 nt, Human
ucaagaaaaccagcaacccagacuuccacugg

SEQ ID NO: 492424 - RNA, 23 nt, Human
ucaagaaaaugcccuccccucca

SEQ ID NO: 492425 - RNA, 32 nt, Human
ucaagaaacaaaggaaucuggggucuucugac

SEQ ID NO: 492426 - RNA, 21 nt, Human
ucaagaaacaaauacauuuua

SEQ ID NO: 492427 - RNA, 32 nt, Human
ucaagaaaccucuuuucacugcaccugaggcu

SEQ ID NO: 492428 - RNA, 32 nt, Human
ucaagaaacugauccuggagaucgagaccauc

SEQ ID NO: 492429 - RNA, 32 nt, Human
ucaagaaauccuuacagguaaguauugcuucc

SEQ ID NO: 492430 - RNA, 21 nt, Human
ucaagaaauuaaaaucaucua

SEQ ID NO: 492431 - RNA, 32 nt, Human
ucaagaacaauccugaagcacagugaacuuga

SEQ ID NO: 492432 - RNA, 32 nt, Human
ucaagaacagccuagccaacauggugaaaccc

SEQ ID NO: 492433 - RNA, 32 nt, Human
ucaagaacagccugaccaacauggugaaacuc

SEQ ID NO: 492434 - RNA, 32 nt, Human
ucaagaacagccuuaccaacaugaugaaacca

SEQ ID NO: 492435 - RNA, 32 nt, Human
ucaagaacauccuggcuaacacggugaaacuc

SEQ ID NO: 492436 - RNA, 32 nt, Human
ucaagaacaugcugggcagagcuuaagccacu

SEQ ID NO: 492437 - RNA, 32 nt, Human
ucaagaaccucaggagcgcugccagcuugaca

SEQ ID NO: 492438 - RNA, 32 nt, Human
ucaagaaccuguugagaggagcaccuagcaua

SEQ ID NO: 492439 - RNA, 32 nt, Human
ucaagaacucaagcuccaugaggagauguuuc

SEQ ID NO: 492440 - RNA, 32 nt, Human
ucaagaacugcaaaugagacaggaagcuguuc

SEQ ID NO: 492441 - RNA, 32 nt, Human
ucaagaagaguaucugacuuucuuggaagugu

SEQ ID NO: 492442 - RNA, 32 nt, Human
ucaagaaggaaaaggugacaucaguugugacc

SEQ ID NO: 492443 - RNA, 32 nt, Human
ucaagaaggccaggaaauaccuccauagcugg

SEQ ID NO: 492444 - RNA, 32 nt, Human
ucaagaagucaggcaggaggauuucccuuuua

SEQ ID NO: 492445 - RNA, 32 nt, Human
ucaagaauacagaaaaaugaaaauaacauuuu

SEQ ID NO: 492446 - RNA, 32 nt, Human
ucaagaaucuucuguuccacauccacacagcc

SEQ ID NO: 492447 - RNA, 32 nt, Human
ucaagaaucuuuccuuaauuacaugcaaauac

SEQ ID NO: 492448 - RNA, 31 nt, Human
ucaagaaugcucucugggcgcuguucuugca

SEQ ID NO: 492449 - RNA, 32 nt, Human
ucaagaauggcagcauccugugccucagcacg

SEQ ID NO: 492450 - RNA, 32 nt, Human
ucaagaauucacccaguguucuuuggaugucc

SEQ ID NO: 492451 - RNA, 32 nt, Human
ucaagacaaaccuggccaacauggugaaaccc

SEQ ID NO: 492452 - RNA, 32 nt, Human
ucaagacaagagcuguuaugcuguuuccuagc

SEQ ID NO: 492453 - RNA, 32 nt, Human
ucaagacaagccuggccaacauggugaaaccc

SEQ ID NO: 492454 - RNA, 31 nt, Human
ucaagacaagugugggcaacacagcaagacc

SEQ ID NO: 492455 - RNA, 32 nt, Human
ucaagacagacacccgggggccugugucugug

SEQ ID NO: 492456 - RNA, 32 nt, Human
ucaagacagauuccuuuuuaaaggaauucuga

SEQ ID NO: 492457 - RNA, 25 nt, Human
ucaagacaggugacaccagcacuuu

SEQ ID NO: 492458 - RNA, 32 nt, Human
ucaagacagugcuggcaaagcugcaguauuga

SEQ ID NO: 492459 - RNA, 32 nt, Human
ucaagaccaaacuggccaauauagugagaucc

SEQ ID NO: 492460 - RNA, 32 nt, Human
ucaagaccaaccugacuaacauggugaaaccc

SEQ ID NO: 492461 - RNA, 32 nt, Human
ucaagaccaaccuggccaacauugugaaaccc

SEQ ID NO: 492462 - RNA, 32 nt, Human
ucaagaccaaucugacuaacacggugaaaccc

SEQ ID NO: 492463 - RNA, 32 nt, Human
ucaagaccaaucuggccaacauggugaaaccc

SEQ ID NO: 492464 - RNA, 32 nt, Human
ucaagaccacccuggccaacauggugaaaccc

SEQ ID NO: 492465 - RNA, 32 nt, Human
ucaagaccacccuggccaacauggugacaccc

SEQ ID NO: 492466 - RNA, 32 nt, Human
ucaagaccacccuggccaacaugguuaaaccc

SEQ ID NO: 492467 - RNA, 32 nt, Human
ucaagaccacccuggccaaccuggugaaaccc

SEQ ID NO: 492468 - RNA, 32 nt, Human
ucaagaccacccuggcuaacacggugaaaccc

SEQ ID NO: 492469 - RNA, 23 nt, Human
ucaagaccagccagggcaacaug

SEQ ID NO: 492470 - RNA, 32 nt, Human
ucaagaccagccagggcaacaugaugagaccc

SEQ ID NO: 492471 - RNA, 32 nt, Human
ucaagaccagccagggcaacauggugagaccu

SEQ ID NO: 492472 - RNA, 32 nt, Human
ucaagaccagcccagccaacauggugaaaacc

SEQ ID NO: 492473 - RNA, 32 nt, Human
ucaagaccagcccaggcaacauggugacccca

SEQ ID NO: 492474 - RNA, 32 nt, Human
ucaagaccagccuagccaacauggugaaaccc

SEQ ID NO: 492475 - RNA, 32 nt, Human
ucaagaccagccuagccaagauggugaaaccc

SEQ ID NO: 492476 - RNA, 32 nt, Human
ucaagaccagccuaggcaacauagugagaugc

SEQ ID NO: 492477 - RNA, 32 nt, Human
ucaagaccagccuaggcaacauggugaaaccc

SEQ ID NO: 492478 - RNA, 32 nt, Human
ucaagaccagccuaggcaacuaagugaaaccc

SEQ ID NO: 492479 - RNA, 32 nt, Human
ucaagaccagccuaggcaauguagugacaccu

SEQ ID NO: 492480 - RNA, 32 nt, Human
ucaagaccagccuaggccagauggugaaaccc

SEQ ID NO: 492481 - RNA, 32 nt, Human
ucaagaccagccuagguaacauagugggaccc

SEQ ID NO: 492482 - RNA, 32 nt, Human
ucaagaccagccucaucaacauagugagaccc

SEQ ID NO: 492483 - RNA, 32 nt, Human
ucaagaccagccugaccaacaucgugaaaugc

SEQ ID NO: 492484 - RNA, 32 nt, Human
ucaagaccagccugaccaacauggagaaaccc

SEQ ID NO: 492485 - RNA, 32 nt, Human
ucaagaccagccugaccaacauggagaaacgc

SEQ ID NO: 492486 - RNA, 32 nt, Human
ucaagaccagccugaccaacauggauaaaucc

SEQ ID NO: 492487 - RNA, 32 nt, Human
ucaagaccagccugaccaacauggauuaaccc

SEQ ID NO: 492488 - RNA, 32 nt, Human
ucaagaccagccugaccaacauggcaaaacau

SEQ ID NO: 492489 - RNA, 32 nt, Human
ucaagaccagccugaccaacauggccaaaaac

SEQ ID NO: 492490 - RNA, 32 nt, Human
ucaagaccagccugaccaacauggcgaaaccc

SEQ ID NO: 492491 - RNA, 32 nt, Human
ucaagaccagccugaccaacauggugaaaccc

SEQ ID NO: 492492 - RNA, 32 nt, Human
ucaagaccagccugaccaacauggugaaaccu

SEQ ID NO: 492493 - RNA, 32 nt, Human
ucaagaccagccugaccaacauggugaaaucc

SEQ ID NO: 492494 - RNA, 32 nt, Human
ucaagaccagccugaccaacguggcgaaaccu

SEQ ID NO: 492495 - RNA, 32 nt, Human
ucaagaccagccugaccaauauagugaaacac

SEQ ID NO: 492496 - RNA, 32 nt, Human
ucaagaccagccugacgaacauggugaaaccc

SEQ ID NO: 492497 - RNA, 32 nt, Human
ucaagaccagccugagaaacauagugagcccu

SEQ ID NO: 492498 - RNA, 32 nt, Human
ucaagaccagccugagcaacauagugagaccc

SEQ ID NO: 492499 - RNA, 32 nt, Human
ucaagaccagccugagcaacaugaugaaacuc

SEQ ID NO: 492500 - RNA, 32 nt, Human
ucaagaccagccugaguaacaugaugagaccc

SEQ ID NO: 492501 - RNA, 32 nt, Human
ucaagaccagccugaucaacauggugaaaccc

SEQ ID NO: 492502 - RNA, 32 nt, Human
ucaagaccagccugcccaacauagugaaacuc

SEQ ID NO: 492503 - RNA, 32 nt, Human
ucaagaccagccugcccaacauggcaaaaccu

SEQ ID NO: 492504 - RNA, 32 nt, Human
ucaagaccagccugcccaacauggugaaaccc

SEQ ID NO: 492505 - RNA, 32 nt, Human
ucaagaccagccuggacaacauagugagaccu

SEQ ID NO: 492506 - RNA, 23 nt, Human
ucaagaccagccuggacaacaug

SEQ ID NO: 492507 - RNA, 32 nt, Human
ucaagaccagccuggacaacauggcaaaaccc

SEQ ID NO: 492508 - RNA, 32 nt, Human
ucaagaccagccuggacaacauggcaagaccc

SEQ ID NO: 492509 - RNA, 32 nt, Human
ucaagaccagccuggacaacauggugaaaccc

SEQ ID NO: 492510 - RNA, 32 nt, Human
ucaagaccagccuggacaauauagugaaaccc

SEQ ID NO: 492511 - RNA, 32 nt, Human
ucaagaccagccuggacagcuuagugagaucc

SEQ ID NO: 492512 - RNA, 32 nt, Human
ucaagaccagccuggcaaacauggugaaacgc

SEQ ID NO: 492513 - RNA, 32 nt, Human
ucaagaccagccuggccaaacauggugaaacc

SEQ ID NO: 492514 - RNA, 32 nt, Human
ucaagaccagccuggccaacaaggcgaaaccc

SEQ ID NO: 492515 - RNA, 32 nt, Human
ucaagaccagccuggccaacaaggugaaaccc

SEQ ID NO: 492516 - RNA, 32 nt, Human
ucaagaccagccuggccaacacagugaaaccc

SEQ ID NO: 492517 - RNA, 32 nt, Human
ucaagaccagccuggccaacacggugaaaccc

SEQ ID NO: 492518 - RNA, 32 nt, Human
ucaagaccagccuggccaacagggugaaaccc

SEQ ID NO: 492519 - RNA, 32 nt, Human
ucaagaccagccuggccaacauagugaaaacu

SEQ ID NO: 492520 - RNA, 32 nt, Human
ucaagaccagccuggccaacauagugaaaccc

SEQ ID NO: 492521 - RNA, 23 nt, Human
ucaagaccagccuggccaacaug

SEQ ID NO: 492522 - RNA, 32 nt, Human
ucaagaccagccuggccaacaugauaaaacac

SEQ ID NO: 492523 - RNA, 32 nt, Human
ucaagaccagccuggccaacaugauaaaaucu

SEQ ID NO: 492524 - RNA, 32 nt, Human
ucaagaccagccuggccaacaugaugaaaccc

SEQ ID NO: 492525 - RNA, 32 nt, Human
ucaagaccagccuggccaacaugaugaaaccu

SEQ ID NO: 492526 - RNA, 32 nt, Human
ucaagaccagccuggccaacaugaugagaccu

SEQ ID NO: 492527 - RNA, 32 nt, Human
ucaagaccagccuggccaacauggagaaaccc

SEQ ID NO: 492528 - RNA, 32 nt, Human
ucaagaccagccuggccaacauggcaaaaccc

SEQ ID NO: 492529 - RNA, 32 nt, Human
ucaagaccagccuggccaacauggcaaaaucc

SEQ ID NO: 492530 - RNA, 32 nt, Human
ucaagaccagccuggccaacauggcagaaacc

SEQ ID NO: 492531 - RNA, 32 nt, Human
ucaagaccagccuggccaacauggcgaaaacc

SEQ ID NO: 492532 - RNA, 32 nt, Human
ucaagaccagccuggccaacauggcgaaaccc

SEQ ID NO: 492533 - RNA, 32 nt, Human
ucaagaccagccuggccaacauggcgaaaccu

SEQ ID NO: 492534 - RNA, 32 nt, Human
ucaagaccagccuggccaacauggcgaaauuc

SEQ ID NO: 492535 - RNA, 32 nt, Human
ucaagaccagccuggccaacauggcgaauucc

SEQ ID NO: 492536 - RNA, 32 nt, Human
ucaagaccagccuggccaacaugguaaaaccc

SEQ ID NO: 492537 - RNA, 32 nt, Human
ucaagaccagccuggccaacauggucccagcu

SEQ ID NO: 492538 - RNA, 32 nt, Human
ucaagaccagccuggccaacauggugaaaacc

SEQ ID NO: 492539 - RNA, 32 nt, Human
ucaagaccagccuggccaacauggugaaacac

SEQ ID NO: 492540 - RNA, 32 nt, Human
ucaagaccagccuggccaacauggugaaaccc

SEQ ID NO: 492541 - RNA, 32 nt, Human
ucaagaccagccuggccaacauggugaaaccu

SEQ ID NO: 492542 - RNA, 32 nt, Human
ucaagaccagccuggccaacauggugaaacgu

SEQ ID NO: 492543 - RNA, 32 nt, Human
ucaagaccagccuggccaacauggugaaaucc

SEQ ID NO: 492544 - RNA, 32 nt, Human
ucaagaccagccuggccaacauggugaauccc

SEQ ID NO: 492545 - RNA, 32 nt, Human
ucaagaccagccuggccaacauggugaauuau

SEQ ID NO: 492546 - RNA, 32 nt, Human
ucaagaccagccuggccaacauggugagacac

SEQ ID NO: 492547 - RNA, 32 nt, Human
ucaagaccagccuggccaacaugguggaaccc

SEQ ID NO: 492548 - RNA, 32 nt, Human
ucaagaccagccuggccaacaugguguaaccu

SEQ ID NO: 492549 - RNA, 32 nt, Human
ucaagaccagccuggccaacaugguguaacgc

SEQ ID NO: 492550 - RNA, 32 nt, Human
ucaagaccagccuggccaacaugugaaacccc

SEQ ID NO: 492551 - RNA, 32 nt, Human
ucaagaccagccuggccaaccuggugaaaccc

SEQ ID NO: 492552 - RNA, 32 nt, Human
ucaagaccagccuggccaaccuggugaaaugc

SEQ ID NO: 492553 - RNA, 23 nt, Human
ucaagaccagccuggccaacgug

SEQ ID NO: 492554 - RNA, 32 nt, Human
ucaagaccagccuggccaacguggcaaauacc

SEQ ID NO: 492555 - RNA, 32 nt, Human
ucaagaccagccuggccaacguggugaaacac

SEQ ID NO: 492556 - RNA, 32 nt, Human
ucaagaccagccuggccaacguggugaaaccc

SEQ ID NO: 492557 - RNA, 32 nt, Human
ucaagaccagccuggccaacguggugaaaccu

SEQ ID NO: 492558 - RNA, 32 nt, Human
ucaagaccagccuggccaacguggugaaagcc

SEQ ID NO: 492559 - RNA, 32 nt, Human
ucaagaccagccuggccaacuuggugaaaccc

SEQ ID NO: 492560 - RNA, 32 nt, Human
ucaagaccagccuggccaagauggugaaaucc

SEQ ID NO: 492561 - RNA, 32 nt, Human
ucaagaccagccuggccaagaugguggaaccc

SEQ ID NO: 492562 - RNA, 32 nt, Human
ucaagaccagccuggccaauauggcaaaaccc

SEQ ID NO: 492563 - RNA, 32 nt, Human
ucaagaccagccuggccaauauggugaaaccc

SEQ ID NO: 492564 - RNA, 32 nt, Human
ucaagaccagccuggccaauguagugaaaccc

SEQ ID NO: 492565 - RNA, 32 nt, Human
ucaagaccagccuggccaaugugaugaaaccc

SEQ ID NO: 492566 - RNA, 32 nt, Human
ucaagaccagccuggccaauguggugaaaccc

SEQ ID NO: 492567 - RNA, 32 nt, Human
ucaagaccagccuggccacauggugcaacccc

SEQ ID NO: 492568 - RNA, 32 nt, Human
ucaagaccagccuggccagcauagugaaaccc

SEQ ID NO: 492569 - RNA, 32 nt, Human
ucaagaccagccuggccaucauggugaaaccc

SEQ ID NO: 492570 - RNA, 32 nt, Human
ucaagaccagccuggcccaaauggugaaaccc

SEQ ID NO: 492571 - RNA, 32 nt, Human
ucaagaccagccuggccgacauggcgaaaccc

SEQ ID NO: 492572 - RNA, 32 nt, Human
ucaagaccagccuggccgggguggugaaaccc

SEQ ID NO: 492573 - RNA, 23 nt, Human
ucaagaccagccuggcuaacaug

SEQ ID NO: 492574 - RNA, 32 nt, Human
ucaagaccagccuggcuaacauggcaaaaccc

SEQ ID NO: 492575 - RNA, 32 nt, Human
ucaagaccagccuggcuaacauggugaaaccu

SEQ ID NO: 492576 - RNA, 32 nt, Human
ucaagaccagccuggcuaacauggugaaaucc

SEQ ID NO: 492577 - RNA, 32 nt, Human
ucaagaccagccuggcuaacaugugaaacuaa

SEQ ID NO: 492578 - RNA, 32 nt, Human
ucaagaccagccuggcuaauauggugaaaccc

SEQ ID NO: 492579 - RNA, 32 nt, Human
ucaagaccagccuggcugacaccgugaaaccu

SEQ ID NO: 492580 - RNA, 21 nt, Human
ucaagaccagccugggcaaca

SEQ ID NO: 492581 - RNA, 32 nt, Human
ucaagaccagccugggcaacacagugacaccu

SEQ ID NO: 492582 - RNA, 32 nt, Human
ucaagaccagccugggcaacacagugaggccc

SEQ ID NO: 492583 - RNA, 32 nt, Human
ucaagaccagccugggcaacacagugagugag

SEQ ID NO: 492584 - RNA, 32 nt, Human
ucaagaccagccugggcaacacggugaaaccc

SEQ ID NO: 492585 - RNA, 32 nt, Human
ucaagaccagccugggcaacauaguaagaccc

SEQ ID NO: 492586 - RNA, 32 nt, Human
ucaagaccagccugggcaacauagugaaaccg

SEQ ID NO: 492587 - RNA, 32 nt, Human
ucaagaccagccugggcaacauagugagaacc

SEQ ID NO: 492588 - RNA, 32 nt, Human
ucaagaccagccugggcaacauagugagaaug

SEQ ID NO: 492589 - RNA, 32 nt, Human
ucaagaccagccugggcaacauagugagaccc

SEQ ID NO: 492590 - RNA, 32 nt, Human
ucaagaccagccugggcaacauagugagaccu

SEQ ID NO: 492591 - RNA, 32 nt, Human
ucaagaccagccugggcaacauagugagacgc

SEQ ID NO: 492592 - RNA, 32 nt, Human
ucaagaccagccugggcaacauagugagacuc

SEQ ID NO: 492593 - RNA, 32 nt, Human
ucaagaccagccugggcaacauggcaagaccc

SEQ ID NO: 492594 - RNA, 32 nt, Human
ucaagaccagccugggcaacauggcgaaaacc

SEQ ID NO: 492595 - RNA, 32 nt, Human
ucaagaccagccugggcaacauggcgaaaccc

SEQ ID NO: 492596 - RNA, 32 nt, Human
ucaagaccagccugggcaacauggcgagaccc

SEQ ID NO: 492597 - RNA, 32 nt, Human
ucaagaccagccugggcaacauggcuauaugg

SEQ ID NO: 492598 - RNA, 32 nt, Human
ucaagaccagccugggcaacaugguaaaacuc

SEQ ID NO: 492599 - RNA, 32 nt, Human
ucaagaccagccugggcaacauggugaaaccc

SEQ ID NO: 492600 - RNA, 32 nt, Human
ucaagaccagccugggcaacauggugaaaucc

SEQ ID NO: 492601 - RNA, 32 nt, Human
ucaagaccagccugggcaacauggugagaccc

SEQ ID NO: 492602 - RNA, 32 nt, Human
ucaagaccagccugggcaacauggugagauuu

SEQ ID NO: 492603 - RNA, 32 nt, Human
ucaagaccagccugggcaacgugguggugugc

SEQ ID NO: 492604 - RNA, 32 nt, Human
ucaagaccagccugggcaacuuagugaggccc

SEQ ID NO: 492605 - RNA, 32 nt, Human
ucaagaccagccugggcaauauagugagaccc

SEQ ID NO: 492606 - RNA, 32 nt, Human
ucaagaccagccugggcaauguaguaagaccc

SEQ ID NO: 492607 - RNA, 32 nt, Human
ucaagaccagccugggcaaugugaugaaacuc

SEQ ID NO: 492608 - RNA, 32 nt, Human
ucaagaccagccugggcagcauggugaaaccc

SEQ ID NO: 492609 - RNA, 21 nt, Human
ucaagaccagccuggguaaca

SEQ ID NO: 492610 - RNA, 32 nt, Human
ucaagaccagccuggguaacaaagugagaccc

SEQ ID NO: 492611 - RNA, 32 nt, Human
ucaagaccagccuggguaacauggugaaaucc

SEQ ID NO: 492612 - RNA, 32 nt, Human
ucaagaccagccuggucaacauagugagacac

SEQ ID NO: 492613 - RNA, 23 nt, Human
ucaagaccagccuggucaacaug

SEQ ID NO: 492614 - RNA, 32 nt, Human
ucaagaccagccuggucaacauggcaaaagcc

SEQ ID NO: 492615 - RNA, 32 nt, Human
ucaagaccagccuggucaacauggugaaaccc

SEQ ID NO: 492616 - RNA, 32 nt, Human
ucaagaccagccuggucaacauggugaaacug

SEQ ID NO: 492617 - RNA, 32 nt, Human
ucaagaccagccuggucaacauggugaaaucu

SEQ ID NO: 492618 - RNA, 32 nt, Human
ucaagaccagccuguccaacauggugaaaccc

SEQ ID NO: 492619 - RNA, 32 nt, Human
ucaagaccagccuugccaacauggugaaaccc

SEQ ID NO: 492620 - RNA, 32 nt, Human
ucaagaccagccuugccaagauggugacaccc

SEQ ID NO: 492621 - RNA, 32 nt, Human
ucaagaccagccuuggcaacauggugaaaccc

SEQ ID NO: 492622 - RNA, 32 nt, Human
ucaagaccagcguggccaacguggcgaaaccc

SEQ ID NO: 492623 - RNA, 32 nt, Human
ucaagaccagcugggccaacaugguuaaaccc

SEQ ID NO: 492624 - RNA, 32 nt, Human
ucaagaccagcuuggccaacauagugaaaucc

SEQ ID NO: 492625 - RNA, 32 nt, Human
ucaagaccagcuuggccaacauggagaaaccc

SEQ ID NO: 492626 - RNA, 32 nt, Human
ucaagaccagcuuggccaacauggcgaaaccc

SEQ ID NO: 492627 - RNA, 32 nt, Human
ucaagaccagcuuggccaacauggugaaaccc

SEQ ID NO: 492628 - RNA, 32 nt, Human
ucaagaccagcuuggccaacauggugaaaccu

SEQ ID NO: 492629 - RNA, 32 nt, Human
ucaagaccaggauaugaaaagagaagauaaga

SEQ ID NO: 492630 - RNA, 32 nt, Human
ucaagaccaggcuggccaacaugguaaaaccc

SEQ ID NO: 492631 - RNA, 32 nt, Human
ucaagaccaggcuggccaacauggugaaaccc

SEQ ID NO: 492632 - RNA, 32 nt, Human
ucaagaccaggcuggucaacauggcgaaaccc

SEQ ID NO: 492633 - RNA, 32 nt, Human
ucaagaccagggcagaggucauugaggucacu

SEQ ID NO: 492634 - RNA, 32 nt, Human
ucaagaccaguauggccaacaugguaagaccc

SEQ ID NO: 492635 - RNA, 32 nt, Human
ucaagaccagucugagcaacauggugagagcu

SEQ ID NO: 492636 - RNA, 32 nt, Human
ucaagaccagucugagcaauagagugaggccu

SEQ ID NO: 492637 - RNA, 32 nt, Human
ucaagaccagucuggccaacauggugaaaugc

SEQ ID NO: 492638 - RNA, 32 nt, Human
ucaagaccagucuggccaauauggagaaaccu

SEQ ID NO: 492639 - RNA, 32 nt, Human
ucaagaccagucugggcaacaugguaaaaccc

SEQ ID NO: 492640 - RNA, 32 nt, Human
ucaagaccagucugggcaacauggugagaccc

SEQ ID NO: 492641 - RNA, 32 nt, Human
ucaagaccauacuggcuaacacggugaaaccc

SEQ ID NO: 492642 - RNA, 32 nt, Human
ucaagaccaucccggcuaaaacggugaaaccc

SEQ ID NO: 492643 - RNA, 32 nt, Human
ucaagaccauccuggccaacacagugaaaccc

SEQ ID NO: 492644 - RNA, 32 nt, Human
ucaagaccauccuggccaacauagugaaaccc

SEQ ID NO: 492645 - RNA, 32 nt, Human
ucaagaccauccuggccaacaugaugaaaccc

SEQ ID NO: 492646 - RNA, 32 nt, Human
ucaagaccauccuggccaacauggugaaacca

SEQ ID NO: 492647 - RNA, 32 nt, Human
ucaagaccauccuggccaacauggugaaaccc

SEQ ID NO: 492648 - RNA, 32 nt, Human
ucaagaccauccuggccaacauggugaaaccu

SEQ ID NO: 492649 - RNA, 32 nt, Human
ucaagaccauccuggccaacauggugaaacgc

SEQ ID NO: 492650 - RNA, 32 nt, Human
ucaagaccauccuggcuaacaaggugaaaccu

SEQ ID NO: 492651 - RNA, 32 nt, Human
ucaagaccauccuggcuaacacagugaaaccc

SEQ ID NO: 492652 - RNA, 32 nt, Human
ucaagaccauccuggcuaacacggcgaaacgc

SEQ ID NO: 492653 - RNA, 32 nt, Human
ucaagaccauccuggcuaacacgguaaaaccc

SEQ ID NO: 492654 - RNA, 32 nt, Human
ucaagaccauccuggcuaacacggugaaaccc

SEQ ID NO: 492655 - RNA, 32 nt, Human
ucaagaccauccuggcuaacacggugaaacuc

SEQ ID NO: 492656 - RNA, 32 nt, Human
ucaagaccauccuggcuaacacggugauaccc

SEQ ID NO: 492657 - RNA, 32 nt, Human
ucaagaccauccuggcuaacacguugaaaccc

SEQ ID NO: 492658 - RNA, 32 nt, Human
ucaagaccauccuggcuaacauagugaaaccc

SEQ ID NO: 492659 - RNA, 32 nt, Human
ucaagaccauccuggcuaacauggugaaaccc

SEQ ID NO: 492660 - RNA, 32 nt, Human
ucaagaccaucguggcuuacacggugaaaccc

SEQ ID NO: 492661 - RNA, 32 nt, Human
ucaagaccaucuuggcuaacacagugaaaccc

SEQ ID NO: 492662 - RNA, 32 nt, Human
ucaagaccauucuggccaacauggugaaaccc

SEQ ID NO: 492663 - RNA, 32 nt, Human
ucaagacccuggggcuccgggucuucuuagca

SEQ ID NO: 492664 - RNA, 32 nt, Human
ucaagaccggccuggccaacauggugaaaccc

SEQ ID NO: 492665 - RNA, 32 nt, Human
ucaagaccuauguaauggacaagcagcaggcc

SEQ ID NO: 492666 - RNA, 32 nt, Human
ucaagaccugccuggccaacauggugaaaccc

SEQ ID NO: 492667 - RNA, 32 nt, Human
ucaagacggugaaaauugugugcugcuuaggc

SEQ ID NO: 492668 - RNA, 32 nt, Human
ucaagacuagccugaccaacauggugaaacuc

SEQ ID NO: 492669 - RNA, 32 nt, Human
ucaagacuagccuggccaacaucaugaaaccc

SEQ ID NO: 492670 - RNA, 32 nt, Human
ucaagacuagccuggccaacaugaugaaaccc

SEQ ID NO: 492671 - RNA, 32 nt, Human
ucaagacuagccuggccaacauggcaaaaccc

SEQ ID NO: 492672 - RNA, 32 nt, Human
ucaagacuagccuggccaacauggugaaaccc

SEQ ID NO: 492673 - RNA, 32 nt, Human
ucaagacuagccuggccaacauggugagacac

SEQ ID NO: 492674 - RNA, 32 nt, Human
ucaagacuagccuggccaacauguuguaaacc

SEQ ID NO: 492675 - RNA, 32 nt, Human
ucaagacuagccuggcugacauggugaaacuc

SEQ ID NO: 492676 - RNA, 32 nt, Human
ucaagacuagccuggucaacauggugaaaccc

SEQ ID NO: 492677 - RNA, 32 nt, Human
ucaagacuauccuggccaacauggugaaaccc

SEQ ID NO: 492678 - RNA, 32 nt, Human
ucaagacuauccuggcuaacacgguaaaaccc

SEQ ID NO: 492679 - RNA, 32 nt, Human
ucaagacucagggugucccgaagcugagcccc

SEQ ID NO: 492680 - RNA, 32 nt, Human
ucaagacuggacuugaacuccugggcucaagc

SEQ ID NO: 492681 - RNA, 32 nt, Human
ucaagacuguccuggacaacauggugaaaccc

SEQ ID NO: 492682 - RNA, 32 nt, Human
ucaagacuucugugucucacacaagcuuucaa

SEQ ID NO: 492683 - RNA, 32 nt, Human
ucaagagaaaacuacuuagugcaucagaagaa

SEQ ID NO: 492684 - RNA, 32 nt, Human
ucaagagaacaacagagugggucucuugggga

SEQ ID NO: 492685 - RNA, 32 nt, Human
ucaagagaauuccuguucuccuugugcuauga

SEQ ID NO: 492686 - RNA, 32 nt, Human
ucaagagagaagguagcacgucuuuguucaaa

SEQ ID NO: 492687 - RNA, 32 nt, Human
ucaagagagacacggcuccugccuucauggag

SEQ ID NO: 492688 - RNA, 32 nt, Human
ucaagagagggugugggauugggacccaggcc

SEQ ID NO: 492689 - RNA, 22 nt, Human
ucaagagauggagaccauccug

SEQ ID NO: 492690 - RNA, 32 nt, Human
ucaagagauucugccucagccuccagaguagc

SEQ ID NO: 492691 - RNA, 32 nt, Human
ucaagagcagccuggccaacauggugaaaccc

SEQ ID NO: 492692 - RNA, 32 nt, Human
ucaagagcagccuggccaacauugugaaaccc

SEQ ID NO: 492693 - RNA, 32 nt, Human
ucaagagcagccuggccaaccuggugaaaccc

SEQ ID NO: 492694 - RNA, 32 nt, Human
ucaagagcagccuggccaagauggugaaaccc

SEQ ID NO: 492695 - RNA, 32 nt, Human
ucaagagcagccuggucaacauggugaaacuc

SEQ ID NO: 492696 - RNA, 32 nt, Human
ucaagagcaggucccaggugugccugcagcag

SEQ ID NO: 492697 - RNA, 32 nt, Human
ucaagagcagucugggcaacauggugagaccc

SEQ ID NO: 492698 - RNA, 32 nt, Human
ucaagagcagugagguuuguucuuuccaguga

SEQ ID NO: 492699 - RNA, 32 nt, Human
ucaagagcaguugguugggagucugagaaguc

SEQ ID NO: 492700 - RNA, 32 nt, Human
ucaagagccaucuucgaucuuugcggccugag

SEQ ID NO: 492701 - RNA, 32 nt, Human
ucaagagccgacugucagccucggcgggccgg

SEQ ID NO: 492702 - RNA, 32 nt, Human
ucaagagccuccguaccuccccugggcggcgg

SEQ ID NO: 492703 - RNA, 32 nt, Human
ucaagagccuugauuauaguaggaagcugaaa

SEQ ID NO: 492704 - RNA, 32 nt, Human
ucaagagcuaccugggcagaagcuccaggccc

SEQ ID NO: 492705 - RNA, 32 nt, Human
ucaagagcuagaaccugcugcaagucacugcc

SEQ ID NO: 492706 - RNA, 32 nt, Human
ucaagagcuagaguuugaauggguuuuauaua

SEQ ID NO: 492707 - RNA, 32 nt, Human
ucaagagcuccaauggggucuccagcugaaag

SEQ ID NO: 492708 - RNA, 32 nt, Human
ucaagagcuuuuggauaaggaggcaggaagaa

SEQ ID NO: 492709 - RNA, 32 nt, Human
ucaagaggaagaagaagagggaggacucagga

SEQ ID NO: 492710 - RNA, 32 nt, Human
ucaagaggaagauagacaggaggaggagguca

SEQ ID NO: 492711 - RNA, 32 nt, Human
ucaagaggcugagacaggagaaacacuugaac

SEQ ID NO: 492712 - RNA, 32 nt, Human
ucaagaggcugaggcaagagaaucacuugaac

SEQ ID NO: 492713 - RNA, 32 nt, Human
ucaagaggcugaggcacgagaaucacuugaac

SEQ ID NO: 492714 - RNA, 32 nt, Human
ucaagaggcugaggcaggagaaucacuugcac

SEQ ID NO: 492715 - RNA, 32 nt, Human
ucaagaggcugaggcaggagaaucacuuguac

SEQ ID NO: 492716 - RNA, 32 nt, Human
ucaagaggcugaggcaggagaaucgccugaac

SEQ ID NO: 492717 - RNA, 32 nt, Human
ucaagaggcugaggcaggagaaucgcuugaac

SEQ ID NO: 492718 - RNA, 32 nt, Human
ucaagaggcugaggcaggagaauuccuugaac

SEQ ID NO: 492719 - RNA, 32 nt, Human
ucaagaggcugaggcaggagaauugcuugaac

SEQ ID NO: 492720 - RNA, 32 nt, Human
ucaagaggcugaggcaggagaauuguuugaac

SEQ ID NO: 492721 - RNA, 32 nt, Human
ucaagaggcugagguaggagaaucacuugaac

SEQ ID NO: 492722 - RNA, 32 nt, Human
ucaagaggcugaggugggagaaucgcuugaac

SEQ ID NO: 492723 - RNA, 32 nt, Human
ucaagaggcugcagcggcugcugcaggcccuc

SEQ ID NO: 492724 - RNA, 32 nt, Human
ucaagagggagguggaggcaggcacugaauaa

SEQ ID NO: 492725 - RNA, 32 nt, Human
ucaagagggagguuuccuccugagugaagaga

SEQ ID NO: 492726 - RNA, 32 nt, Human
ucaagagggugaggcaggagaaucgcuugaac

SEQ ID NO: 492727 - RNA, 32 nt, Human
ucaagagguaaauuguccugaaacccccauug

SEQ ID NO: 492728 - RNA, 32 nt, Human
ucaagaguaguugaaaguaucuugccacuguu

SEQ ID NO: 492729 - RNA, 32 nt, Human
ucaagagugcucuuuuuaucaccuucuggaaa

SEQ ID NO: 492730 - RNA, 32 nt, Human
ucaagaguggggucagcaagagaaacucuacg

SEQ ID NO: 492731 - RNA, 32 nt, Human
ucaagaguucaucucaggagacaaggacugug

SEQ ID NO: 492732 - RNA, 32 nt, Human
ucaagaguuucagaagcaacaggacagaccag

SEQ ID NO: 492733 - RNA, 32 nt, Human
ucaagauacuauacauuuaaagcaccccaaug

SEQ ID NO: 492734 - RNA, 32 nt, Human
ucaagaucagccugaccaacaugaugaaaccc

SEQ ID NO: 492735 - RNA, 32 nt, Human
ucaagaucagccugcgcaacauggcgaaaccc

SEQ ID NO: 492736 - RNA, 32 nt, Human
ucaagaucagccuggccaacauaaggagaccu

SEQ ID NO: 492737 - RNA, 32 nt, Human
ucaagaucagccuggccaacauggcaaaaccc

SEQ ID NO: 492738 - RNA, 32 nt, Human
ucaagaucagccuggccaacauggugaaaccc

SEQ ID NO: 492739 - RNA, 32 nt, Human
ucaagaucagccuggcuaacauggcgaaaccc

SEQ ID NO: 492740 - RNA, 32 nt, Human
ucaagaucagccugggaaacauagugagaccc

SEQ ID NO: 492741 - RNA, 32 nt, Human
ucaagaucagccugggcaacauagugaaaccu

SEQ ID NO: 492742 - RNA, 32 nt, Human
ucaagaucagccugggcaacauagugagaccu

SEQ ID NO: 492743 - RNA, 32 nt, Human
ucaagaucagccugggcaacauggugaaaccu

SEQ ID NO: 492744 - RNA, 32 nt, Human
ucaagaucagccugggcaauauagugaaaccc

SEQ ID NO: 492745 - RNA, 32 nt, Human
ucaagaucaggccacauaaggaacaggggaau

SEQ ID NO: 492746 - RNA, 23 nt, Human
ucaagaucagguugcuccacaca

SEQ ID NO: 492747 - RNA, 32 nt, Human
ucaagaucauccuggccaacauggugaaaccc

SEQ ID NO: 492748 - RNA, 32 nt, Human
ucaagaucccagguuacggaauggcaccaagu

SEQ ID NO: 492749 - RNA, 32 nt, Human
ucaagaucuucauuuauacagcuguuaaaucc

SEQ ID NO: 492750 - RNA, 22 nt, Human
ucaagaugagaauuaaaggcau

SEQ ID NO: 492751 - RNA, 32 nt, Human
ucaagaugcagguggaguacaugucauucagc

SEQ ID NO: 492752 - RNA, 32 nt, Human
ucaagaugcccuggcagcagauuucugcagga

SEQ ID NO: 492753 - RNA, 32 nt, Human
ucaagaugccucugcagccacaauucugaccu

SEQ ID NO: 492754 - RNA, 32 nt, Human
ucaagauggagacaaucuccacagccaccaug

SEQ ID NO: 492755 - RNA, 32 nt, Human
ucaagauggugacuugguuucuggaaacugcu

SEQ ID NO: 492756 - RNA, 32 nt, Human
ucaagauuacaacaucuguuacauucuaagug

SEQ ID NO: 492757 - RNA, 32 nt, Human
ucaagauuagccuggacaacauggugaaaccc

SEQ ID NO: 492758 - RNA, 32 nt, Human
ucaagauuagccuggccaacuuagugaaacuc

SEQ ID NO: 492759 - RNA, 32 nt, Human
ucaagauuccauuucuuaacagucuccaaucc

SEQ ID NO: 492760 - RNA, 32 nt, Human
ucaagauucuguaaaccaagcaaaugggggaa

SEQ ID NO: 492761 - RNA, 32 nt, Human
ucaagauuuugaucugagacaugcugaugcuu

SEQ ID NO: 492762 - RNA, 32 nt, Human
ucaagcaaaaugucucuuguggcccaucuuac

SEQ ID NO: 492763 - RNA, 32 nt, Human
ucaagcaaaccaccucaccacacuauccaggg

SEQ ID NO: 492764 - RNA, 32 nt, Human
ucaagcaauaauuguuuccaacuugucuggga

SEQ ID NO: 492765 - RNA, 32 nt, Human
ucaagcaauauggaagcaaccagcaaauuaac

SEQ ID NO: 492766 - RNA, 32 nt, Human
ucaagcaauccucccaucucagccucuuaaag

SEQ ID NO: 492767 - RNA, 32 nt, Human
ucaagcaauccuccugccucagccucucaagu

SEQ ID NO: 492768 - RNA, 32 nt, Human
ucaagcaauccucucaucuccaccuccagagu

SEQ ID NO: 492769 - RNA, 32 nt, Human
ucaagcaaucugccagccucagccucucaaag

SEQ ID NO: 492770 - RNA, 32 nt, Human
ucaagcaauucucccaccucagccucucgagu

SEQ ID NO: 492771 - RNA, 32 nt, Human
ucaagcaauucucccaccucagccucuugagu

SEQ ID NO: 492772 - RNA, 19 nt, Human
ucaagcaauucuccugccu

SEQ ID NO: 492773 - RNA, 32 nt, Human
ucaagcacaagcuccugaaggagugggccugg

SEQ ID NO: 492774 - RNA, 32 nt, Human
ucaagcacaggccagaauccacacuccugucc

SEQ ID NO: 492775 - RNA, 32 nt, Human
ucaagcaccaccacccggccguguggugcccg

SEQ ID NO: 492776 - RNA, 32 nt, Human
ucaagcaccugccccuugccuccuugaccaca

SEQ ID NO: 492777 - RNA, 32 nt, Human
ucaagcaccugucaugugccauugagcccacg

SEQ ID NO: 492778 - RNA, 32 nt, Human
ucaagcacuccuggagggaucugggugccggc

SEQ ID NO: 492779 - RNA, 32 nt, Human
ucaagcagaaccagaagagaacuuuacaccug

SEQ ID NO: 492780 - RNA, 20 nt, Human
ucaagcagcaucuucugguu

SEQ ID NO: 492781 - RNA, 32 nt, Human
ucaagcaggccccgcuggugcacugagagcca

SEQ ID NO: 492782 - RNA, 32 nt, Human
ucaagcaggucaggaaccugcuuuuuaacaag

SEQ ID NO: 492783 - RNA, 32 nt, Human
ucaagcagguuagagaaaauagagaugaauua

SEQ ID NO: 492784 - RNA, 32 nt, Human
ucaagcaguccucccaccccagccucugagua

SEQ ID NO: 492785 - RNA, 32 nt, Human
ucaagcaguccuccccacucagccucucuagu

SEQ ID NO: 492786 - RNA, 32 nt, Human
ucaagcaguucucccaccucagccucucgacu

SEQ ID NO: 492787 - RNA, 32 nt, Human
ucaagcaucucuacuuuuuacuggagugaaaa

SEQ ID NO: 492788 - RNA, 32 nt, Human
ucaagcauggccaaccuccaccuuccccucuc

SEQ ID NO: 492789 - RNA, 32 nt, Human
ucaagccaaacaguaaaaacuaccaagagaac

SEQ ID NO: 492790 - RNA, 32 nt, Human
ucaagccaagcccagaggcaguggcugggguc

SEQ ID NO: 492791 - RNA, 32 nt, Human
ucaagccacacaugcauguucgugcauccccc

SEQ ID NO: 492792 - RNA, 32 nt, Human
ucaagccacagaaacccagcaugucccuguca

SEQ ID NO: 492793 - RNA, 32 nt, Human
ucaagccacagacauuguggugucaccaucca

SEQ ID NO: 492794 - RNA, 32 nt, Human
ucaagccacaguuaucaaaggcuacauuuuca

SEQ ID NO: 492795 - RNA, 32 nt, Human
ucaagccacguaugucagaugacuugaauguu

SEQ ID NO: 492796 - RNA, 32 nt, Human
ucaagccacugaggcagggcagagggaccuuu

SEQ ID NO: 492797 - RNA, 32 nt, Human
ucaagccacugcacuccagccugggcgacaga

SEQ ID NO: 492798 - RNA, 32 nt, Human
ucaagccacuggcagccucaugccaccacauu

SEQ ID NO: 492799 - RNA, 32 nt, Human
ucaagccagacucugcaauuucucccaaggcu

SEQ ID NO: 492800 - RNA, 32 nt, Human
  misc_feature (28)..(30): n is a, c, g, or u
ucaagccaggagacccugucuggggugnnnau

SEQ ID NO: 492801 - RNA, 32 nt, Human
ucaagccagggccguuggcuuaugccuguaau

SEQ ID NO: 492802 - RNA, 32 nt, Human
ucaagccaucaugcggugggugcugccaugac

SEQ ID NO: 492803 - RNA, 21 nt, Human
ucaagccauccucccaccuca

SEQ ID NO: 492804 - RNA, 21 nt, Human
ucaagccauccucccuccuca

SEQ ID NO: 492805 - RNA, 32 nt, Human
ucaagccaucugccugccuccaccucccaaaa

SEQ ID NO: 492806 - RNA, 17 nt, Human
ucaagccaugugacuuu

SEQ ID NO: 492807 - RNA, 32 nt, Human
ucaagccauugcacuccagccugggcaacaag

SEQ ID NO: 492808 - RNA, 32 nt, Human
ucaagccauuguacuccagccuggacaacaag

SEQ ID NO: 492809 - RNA, 32 nt, Human
ucaagccauuuugccacucgcuucccugccau

SEQ ID NO: 492810 - RNA, 32 nt, Human
ucaagcccacagacuucaaauaacuucaagaa

SEQ ID NO: 492811 - RNA, 32 nt, Human
ucaagcccagagaagacugaggcuacggggaa

SEQ ID NO: 492812 - RNA, 32 nt, Human
ucaagcccaggaguuugaaguugcaaugagcu

SEQ ID NO: 492813 - RNA, 24 nt, Human
ucaagcccauaaucccagcacuuu

SEQ ID NO: 492814 - RNA, 32 nt, Human
ucaagcccauaaucccagcacuuugggaggcu

SEQ ID NO: 492815 - RNA, 18 nt, Human
ucaagccccacaguucuu

SEQ ID NO: 492816 - RNA, 32 nt, Human
ucaagccccagaggaggcggcaagaggaacag

SEQ ID NO: 492817 - RNA, 32 nt, Human
ucaagcccccuccaaaggcuccccuacccggu

SEQ ID NO: 492818 - RNA, 32 nt, Human
ucaagcccccuuccuugcucuggaccccuuag

SEQ ID NO: 492819 - RNA, 23 nt, Human
ucaagcccugaagcauggggcca

SEQ ID NO: 492820 - RNA, 32 nt, Human
ucaagcccugcugggaccuuguggcuuggcug

SEQ ID NO: 492821 - RNA, 32 nt, Human
ucaagcccugggaggucaaggcugcagugagc

SEQ ID NO: 492822 - RNA, 32 nt, Human
ucaagccgaagagucauccucucaccucaccc

SEQ ID NO: 492823 - RNA, 32 nt, Human
ucaagccgagggcagaggccuuuguacgcagc

SEQ ID NO: 492824 - RNA, 32 nt, Human
ucaagccgcccaggaacucgagauucugguua

SEQ ID NO: 492825 - RNA, 32 nt, Human
ucaagccuagccuggccaacauggugaaaccc

SEQ ID NO: 492826 - RNA, 23 nt, Human
ucaagccuauaaucccagcacuu

SEQ ID NO: 492827 - RNA, 24 nt, Human
ucaagccuauaaucccagcacuuu

SEQ ID NO: 492828 - RNA, 32 nt, Human
ucaagccuauaaucccagcacuuugggaggca

SEQ ID NO: 492829 - RNA, 32 nt, Human
ucaagccuauaaucccagcauguugagaggcu

SEQ ID NO: 492830 - RNA, 32 nt, Human
ucaagccucggacugcagagugugugacggcu

SEQ ID NO: 492831 - RNA, 32 nt, Human
ucaagccugaagauaguggcucugcuguuuuc

SEQ ID NO: 492832 - RNA, 18 nt, Human
ucaagccugauuauuuuu

SEQ ID NO: 492833 - RNA, 32 nt, Human
ucaagccugccuggcgucucugugccccugug

SEQ ID NO: 492834 - RNA, 24 nt, Human
ucaagccuggacaacagggcaaga

SEQ ID NO: 492835 - RNA, 23 nt, Human
ucaagccugggcaacagagcaag

SEQ ID NO: 492836 - RNA, 24 nt, Human
ucaagccugggcaacagagcaaga

SEQ ID NO: 492837 - RNA, 24 nt, Human
ucaagccugggcaacagagugaga

SEQ ID NO: 492838 - RNA, 32 nt, Human
ucaagccugggcaacagagugagaccccaacu

SEQ ID NO: 492839 - RNA, 32 nt, Human
ucaagccugggcgacagagcaaggcuucaucu

SEQ ID NO: 492840 - RNA, 24 nt, Human
ucaagccugggcgacagagcgaga

SEQ ID NO: 492841 - RNA, 32 nt, Human
ucaagccugggcgacagagcgagacuccgucu

SEQ ID NO: 492842 - RNA, 32 nt, Human
ucaagccuggggcagguggaagguggucugac

SEQ ID NO: 492843 - RNA, 32 nt, Human
ucaagccugggugacagagcaagacuccaucu

SEQ ID NO: 492844 - RNA, 32 nt, Human
ucaagccugggugacagagcgaaacuccgucu

SEQ ID NO: 492845 - RNA, 24 nt, Human
ucaagccuguaaucccaacacuuu

SEQ ID NO: 492846 - RNA, 32 nt, Human
ucaagccuguaaucccagcacguugggaggcc

SEQ ID NO: 492847 - RNA, 24 nt, Human
ucaagccuguaaucccagcacuuu

SEQ ID NO: 492848 - RNA, 32 nt, Human
ucaagccuguaaucccagcacuuuagguggcu

SEQ ID NO: 492849 - RNA, 32 nt, Human
ucaagccuguaaucccagcacuuugggaggcc

SEQ ID NO: 492850 - RNA, 32 nt, Human
ucaagccuguaaucccagcacuuugggaggcu

SEQ ID NO: 492851 - RNA, 32 nt, Human
ucaagccuguaaucccagcacuuuggguggcc

SEQ ID NO: 492852 - RNA, 24 nt, Human
ucaagccuguaaucccagcaguuu

SEQ ID NO: 492853 - RNA, 32 nt, Human
ucaagccuguaaucccagcauuuugggaggcc

SEQ ID NO: 492854 - RNA, 24 nt, Human
ucaagccuguaaucccaguacuuu

SEQ ID NO: 492855 - RNA, 32 nt, Human
ucaagccuguaauccuagcacuuugggaggca

SEQ ID NO: 492856 - RNA, 32 nt, Human
ucaagccuguaaugucagcacuuuaaaaggcu

SEQ ID NO: 492857 - RNA, 32 nt, Human
ucaagccuguaguuccagcuacucgggaggcu

SEQ ID NO: 492858 - RNA, 32 nt, Human
ucaagccugucaucccagcacugugggaggcc

SEQ ID NO: 492859 - RNA, 32 nt, Human
ucaagccugugggcagcaugcccagauuccca

SEQ ID NO: 492860 - RNA, 16 nt, Human
ucaagccuguugucuu

SEQ ID NO: 492861 - RNA, 16 nt, Human
ucaagccuguuuucuu

SEQ ID NO: 492862 - RNA, 32 nt, Human
ucaagccuuaaaggaggcugccguggagcacg

SEQ ID NO: 492863 - RNA, 16 nt, Human
ucaagccuucguucuu

SEQ ID NO: 492864 - RNA, 32 nt, Human
ucaagccuucugcuccccaauucucucuguug

SEQ ID NO: 492865 - RNA, 32 nt, Human
ucaagccuugacuguucuugcccggcaagaga

SEQ ID NO: 492866 - RNA, 18 nt, Human
ucaagccuugggauucuu

SEQ ID NO: 492867 - RNA, 18 nt, Human
ucaagccuuuuuauucuu

SEQ ID NO: 492868 - RNA, 19 nt, Human
ucaagcgauccuccugccu

SEQ ID NO: 492869 - RNA, 32 nt, Human
ucaagcgauccuucugccucagccucucuggu

SEQ ID NO: 492870 - RNA, 32 nt, Human
ucaagcgaugcucccaccuccaccucccaaag

SEQ ID NO: 492871 - RNA, 32 nt, Human
ucaagcgauucuccugacucagccucucaagu

SEQ ID NO: 492872 - RNA, 32 nt, Human
ucaagcgauucuccugccucagccucucaagu

SEQ ID NO: 492873 - RNA, 32 nt, Human
ucaagcgauucuccugccucagccucucgagu

SEQ ID NO: 492874 - RNA, 32 nt, Human
ucaagcgauucuccugccucagccucucuagu

SEQ ID NO: 492875 - RNA, 32 nt, Human
ucaagcgauucuccugccucagccucuggagu

SEQ ID NO: 492876 - RNA, 32 nt, Human
ucaagcgauucucuuaacucagccucuugagu

SEQ ID NO: 492877 - RNA, 32 nt, Human
ucaagcgauucuugugccucagccucucgagu

SEQ ID NO: 492878 - RNA, 32 nt, Human
ucaagcgcugacugggugccugccuggggcuu

SEQ ID NO: 492879 - RNA, 32 nt, Human
ucaagcggagccaagagaggagcagacaagga

SEQ ID NO: 492880 - RNA, 32 nt, Human
ucaagcgggccugggcuccaggaagcuggcca

SEQ ID NO: 492881 - RNA, 32 nt, Human
ucaagcgguccuucuaccucagccucuggagc

SEQ ID NO: 492882 - RNA, 32 nt, Human
ucaagcgugguggcucacgccuguaauccagc

SEQ ID NO: 492883 - RNA, 32 nt, Human
ucaagcuaaguggcaagcgggaagcugaaacu

SEQ ID NO: 492884 - RNA, 32 nt, Human
ucaagcuagggcagcagguagcucuucccagc

SEQ ID NO: 492885 - RNA, 32 nt, Human
ucaagcuaguaaaaccuuguacuucucuauug

SEQ ID NO: 492886 - RNA, 32 nt, Human
ucaagcuauaaaagcaggagguuaucugugca

SEQ ID NO: 492887 - RNA, 32 nt, Human
ucaagcuauccucccaccucagccucucaaau

SEQ ID NO: 492888 - RNA, 32 nt, Human
ucaagcuauucucaugccucagccucucaagu

SEQ ID NO: 492889 - RNA, 32 nt, Human
ucaagcucaaacaccaccucccuuauucagga

SEQ ID NO: 492890 - RNA, 32 nt, Human
ucaagcucaggaguucgagaccagcccggcca

SEQ ID NO: 492891 - RNA, 24 nt, Human
ucaagcuccugaacucaagcaauu

SEQ ID NO: 492892 - RNA, 32 nt, Human
ucaagcucugauuaaagugaaaaugcauuuuu

SEQ ID NO: 492893 - RNA, 32 nt, Human
ucaagcucugcaguuuccugucuggcacccug

SEQ ID NO: 492894 - RNA, 22 nt, Human
ucaagcugaagucagucuucuu

SEQ ID NO: 492895 - RNA, 32 nt, Human
ucaagcugauuuuauuggucaugagaacaaau

SEQ ID NO: 492896 - RNA, 32 nt, Human
ucaagcugcuguacuccuggccucagagcccc

SEQ ID NO: 492897 - RNA, 32 nt, Human
ucaagcuggccuacugccuccaacacacuacg

SEQ ID NO: 492898 - RNA, 31 nt, Human
ucaagcugggagagagaaaugacugagauga

SEQ ID NO: 492899 - RNA, 17 nt, Human
ucaagcugucaauuuuu

SEQ ID NO: 492900 - RNA, 29 nt, Human
ucaagcugucugugucuuugugugucugc

SEQ ID NO: 492901 - RNA, 18 nt, Human
ucaagcuguguaauuuuu

SEQ ID NO: 492902 - RNA, 32 nt, Human
ucaagcuuggaugacagagcaagacuccguuu

SEQ ID NO: 492903 - RNA, 18 nt, Human
ucaagcuugggaacuuuu

SEQ ID NO: 492904 - RNA, 24 nt, Human
ucaagcuugggugacagagcaaga

SEQ ID NO: 492905 - RNA, 32 nt, Human
ucaagcuugggugacagagcaagaccccgucc

SEQ ID NO: 492906 - RNA, 17 nt, Human
ucaagcuuucaagccuu

SEQ ID NO: 492907 - RNA, 24 nt, Human
ucaagcuuuccgagucaagugauu

SEQ ID NO: 492908 - RNA, 32 nt, Human
ucaagcuuuccuugccuuccagccacugcaaa

SEQ ID NO: 492909 - RNA, 32 nt, Human
ucaaggaaaaacacccacuacuuagcagacug

SEQ ID NO: 492910 - RNA, 32 nt, Human
ucaaggaaaccagaauuugacacacuccaaca

SEQ ID NO: 492911 - RNA, 32 nt, Human
ucaaggaagaaaggaaggaaggaaggcgagag

SEQ ID NO: 492912 - RNA, 22 nt, Human
ucaaggaagccuaugagaugcc

SEQ ID NO: 492913 - RNA, 32 nt, Human
ucaaggaaggaagugggaacaagguuggaugc

SEQ ID NO: 492914 - RNA, 32 nt, Human
ucaaggaaggguggggcaggcaguacccccaa

SEQ ID NO: 492915 - RNA, 32 nt, Human
ucaaggaagguagccgggcauggugccaggca

SEQ ID NO: 492916 - RNA, 32 nt, Human
ucaaggaauaggguggggcaaugugucauucu

SEQ ID NO: 492917 - RNA, 32 nt, Human
ucaaggaauauucaauauucugccuuucagaa

SEQ ID NO: 492918 - RNA, 32 nt, Human
ucaaggaauccuccugccccagccucucagau

SEQ ID NO: 492919 - RNA, 32 nt, Human
ucaaggaaugggaggccuuucacuggguccag

SEQ ID NO: 492920 - RNA, 32 nt, Human
ucaaggacaacagcagggugucacccagagcc

SEQ ID NO: 492921 - RNA, 32 nt, Human
ucaaggacaagcuucucauuauggcaggcaua

SEQ ID NO: 492922 - RNA, 32 nt, Human
ucaaggacacuggccuugcaggcccgagggag

SEQ ID NO: 492923 - RNA, 32 nt, Human
ucaaggaccauggccugagccugguggacgcc

SEQ ID NO: 492924 - RNA, 32 nt, Human
ucaaggaccgggagguaagagguuugggacug

SEQ ID NO: 492925 - RNA, 23 nt, Human
ucaaggaccuaguucuuuaggga

SEQ ID NO: 492926 - RNA, 32 nt, Human
ucaaggacuccucucuuucuucaccaagaagc

SEQ ID NO: 492927 - RNA, 32 nt, Human
ucaaggacugucccuccagcagucgccuccuc

SEQ ID NO: 492928 - RNA, 32 nt, Human
ucaaggacuuuaaucauacuuguuccaaagag

SEQ ID NO: 492929 - RNA, 32 nt, Human
ucaaggagacgcuggcccuggagcugcacgga

SEQ ID NO: 492930 - RNA, 32 nt, Human
ucaaggaggaaagagagggagauggaggaugu

SEQ ID NO: 492931 - RNA, 32 nt, Human
ucaaggaggagaagagugaggagaaaggaaac

SEQ ID NO: 492932 - RNA, 21 nt, Human
ucaaggaggaggcucccuuca

SEQ ID NO: 492933 - RNA, 32 nt, Human
ucaaggaggcacugggcucagccugggcauua

SEQ ID NO: 492934 - RNA, 32 nt, Human
ucaaggagggaccugugcccugcuccacaucc

SEQ ID NO: 492935 - RNA, 32 nt, Human
ucaaggaggugggggcagggaggaucacugga

SEQ ID NO: 492936 - RNA, 32 nt, Human
ucaaggaguacaaccuggucuggcgccccagg

SEQ ID NO: 492937 - RNA, 32 nt, Human
ucaaggagucaugggugccccugggaaauucc

SEQ ID NO: 492938 - RNA, 32 nt, Human
ucaaggaguuccauuccaggaggaagagaucu

SEQ ID NO: 492939 - RNA, 31 nt, Human
ucaaggauagaguacaguuguaggggaagua

SEQ ID NO: 492940 - RNA, 32 nt, Human
ucaaggauuuuuauugcucugugaguuauuuu

SEQ ID NO: 492941 - RNA, 32 nt, Human
ucaaggcaagccccagucucaagcuagaguuu

SEQ ID NO: 492942 - RNA, 32 nt, Human
ucaaggcaaugaccagaaugauaugcuuccug

SEQ ID NO: 492943 - RNA, 32 nt, Human
ucaaggcaauggucagcuacggcaugaucccg

SEQ ID NO: 492944 - RNA, 32 nt, Human
ucaaggcacaaacuggcaggugcuuaauuagg

SEQ ID NO: 492945 - RNA, 32 nt, Human
ucaaggcacccaggauugauugcaggaauauc

SEQ ID NO: 492946 - RNA, 32 nt, Human
ucaaggcaccuugaccgucgcccacccacacc

SEQ ID NO: 492947 - RNA, 32 nt, Human
ucaaggcagaccuacaagaugggguacuaaca

SEQ ID NO: 492948 - RNA, 32 nt, Human
ucaaggcagaggaggagaggaggaaaggaugg

SEQ ID NO: 492949 - RNA, 32 nt, Human
ucaaggcaguuuucuucuuugagaaacuaucc

SEQ ID NO: 492950 - RNA, 32 nt, Human
ucaaggccacaggcacacaggucucauugcuu

SEQ ID NO: 492951 - RNA, 32 nt, Human
ucaaggccagccuggacaacauaguaagaccc

SEQ ID NO: 492952 - RNA, 32 nt, Human
ucaaggccagccuggccaacauggugaacccc

SEQ ID NO: 492953 - RNA, 32 nt, Human
ucaaggccagccuggccaacgugaugaaacuc

SEQ ID NO: 492954 - RNA, 22 nt, Human
ucaaggccagccugggaacaug

SEQ ID NO: 492955 - RNA, 32 nt, Human
ucaaggccagccugggcaacauaguaagacuc

SEQ ID NO: 492956 - RNA, 32 nt, Human
ucaaggccagccugggcaacauagugaagccc

SEQ ID NO: 492957 - RNA, 32 nt, Human
ucaaggccagccugggcaacauggugaaaccc

SEQ ID NO: 492958 - RNA, 31 nt, Human
ucaaggccagccugggcaacauggugucucu

SEQ ID NO: 492959 - RNA, 32 nt, Human
ucaaggccagguguggugauucaugccugaaa

SEQ ID NO: 492960 - RNA, 32 nt, Human
ucaaggccaguucugcagugacaggcccaggg

SEQ ID NO: 492961 - RNA, 32 nt, Human
ucaaggccauccuggccaacauggugaaaccc

SEQ ID NO: 492962 - RNA, 32 nt, Human
ucaaggccauccuggcuaacacggugaaaccc

SEQ ID NO: 492963 - RNA, 32 nt, Human
ucaaggcccacauucuuaaauacugugcauaa

SEQ ID NO: 492964 - RNA, 32 nt, Human
ucaaggcccaggcugggguucagaccugcaga

SEQ ID NO: 492965 - RNA, 32 nt, Human
ucaaggccccauccaccucccucccuugacuc

SEQ ID NO: 492966 - RNA, 32 nt, Human
ucaaggccuaggagaauggggucacaugguca

SEQ ID NO: 492967 - RNA, 32 nt, Human
ucaaggccugggaguaaucuucagcucacugc

SEQ ID NO: 492968 - RNA, 32 nt, Human
ucaaggcgacacagcagagcccacagguggca

SEQ ID NO: 492969 - RNA, 32 nt, Human
ucaaggcggaucugggcuuccacccucaugaa

SEQ ID NO: 492970 - RNA, 32 nt, Human
ucaaggcgggagggccugcagugauucagcag

SEQ ID NO: 492971 - RNA, 32 nt, Human
ucaaggcgugaucucugucacuuuauuuuaau

SEQ ID NO: 492972 - RNA, 32 nt, Human
ucaaggcucacugcaaccucaaccuucugguu

SEQ ID NO: 492973 - RNA, 32 nt, Human
ucaaggcucacugcagccucaaccuucugggu

SEQ ID NO: 492974 - RNA, 32 nt, Human
ucaaggcucacugcagccuggaccuccugguu

SEQ ID NO: 492975 - RNA, 32 nt, Human
ucaaggcucacugcagccuugaacaccuggac

SEQ ID NO: 492976 - RNA, 32 nt, Human
ucaaggcucuuccguuccacauccacacagcc

SEQ ID NO: 492977 - RNA, 32 nt, Human
ucaaggcugcagugagcucaugaucauaccac

SEQ ID NO: 492978 - RNA, 32 nt, Human
ucaaggcugcugguuacauagacaugguagaa

SEQ ID NO: 492979 - RNA, 32 nt, Human
ucaagggaaacaaucacauuguuugauuccaa

SEQ ID NO: 492980 - RNA, 32 nt, Human
ucaagggaacaaagucugaagauggaacggag

SEQ ID NO: 492981 - RNA, 32 nt, Human
ucaagggaaguuuacuguugaagaacugucua

SEQ ID NO: 492982 - RNA, 32 nt, Human
ucaagggagcugauaaagaacuucuucccaaa

SEQ ID NO: 492983 - RNA, 32 nt, Human
ucaagggaggcagggccccugugggcacuagg

SEQ ID NO: 492984 - RNA, 31 nt, Human
ucaagggagggccuaaagcacuuguaacuuu

SEQ ID NO: 492985 - RNA, 32 nt, Human
ucaagggaggggccuugggcccacccucacag

SEQ ID NO: 492986 - RNA, 32 nt, Human
ucaagggaguaaguagagguggcuucagaaau

SEQ ID NO: 492987 - RNA, 32 nt, Human
ucaagggagucaggccacccaggagcagagga

SEQ ID NO: 492988 - RNA, 32 nt, Human
ucaagggauccucccaccucagccucuggagu

SEQ ID NO: 492989 - RNA, 32 nt, Human
ucaagggaucgucuugccucagucucccaagu

SEQ ID NO: 492990 - RNA, 32 nt, Human
ucaagggauguauuggaacaugucggaguaga

SEQ ID NO: 492991 - RNA, 32 nt, Human
ucaagggauucuccugccucagccucuugagu

SEQ ID NO: 492992 - RNA, 32 nt, Human
ucaagggcaaaaagucuacauacuuucauccu

SEQ ID NO: 492993 - RNA, 23 nt, Human
ucaagggcacacaaguucacaca

SEQ ID NO: 492994 - RNA, 32 nt, Human
ucaagggcaucgacaucugccucccagcacca

SEQ ID NO: 492995 - RNA, 32 nt, Human
ucaagggccagccuccagcgcugcucuuucug

SEQ ID NO: 492996 - RNA, 32 nt, Human
ucaagggccugaggcagauccagaggacaagc

SEQ ID NO: 492997 - RNA, 32 nt, Human
ucaagggcgagccugggcuacaggaggaucug

SEQ ID NO: 492998 - RNA, 32 nt, Human
ucaagggcuacaauucaagcacuuuuauucgu

SEQ ID NO: 492999 - RNA, 32 nt, Human
ucaagggcugcacugugcugaccaucgcccac

SEQ ID NO: 493000 - RNA, 32 nt, Human
ucaaggggaaaacaguuagacugugaaccugc

SEQ ID NO: 493001 - RNA, 32 nt, Human
ucaaggggaaggcaagacugggaugucuaguc

SEQ ID NO: 493002 - RNA, 32 nt, Human
ucaaggggaagggaguugucugccauucaaug

SEQ ID NO: 493003 - RNA, 32 nt, Human
ucaaggggcaggccuggggcccuucccuccug

SEQ ID NO: 493004 - RNA, 32 nt, Human
ucaaggggccccucaaaggcccucucuggggg

SEQ ID NO: 493005 - RNA, 32 nt, Human
ucaaggggccuuggcaucaggcccagacagag

SEQ ID NO: 493006 - RNA, 32 nt, Human
ucaagggguagggagagggaggagguugcaaa

SEQ ID NO: 493007 - RNA, 32 nt, Human
ucaaggguaaaauguuaggugucagcuuucag

SEQ ID NO: 493008 - RNA, 32 nt, Human
ucaaggguauacauauaugaaaagccaagaag

SEQ ID NO: 493009 - RNA, 32 nt, Human
ucaagggucaugguccucaucacacacauguc

SEQ ID NO: 493010 - RNA, 20 nt, Human
ucaagggugaaccaggccuu

SEQ ID NO: 493011 - RNA, 32 nt, Human
ucaagggugcagcucugcagcacaggcagccu

SEQ ID NO: 493012 - RNA, 32 nt, Human
ucaaggguggauccagcucgagacacccucgc

SEQ ID NO: 493013 - RNA, 32 nt, Human
ucaaggguguccugccugccuggguccagggc

SEQ ID NO: 493014 - RNA, 32 nt, Human
ucaaggguuggcaaacuacagcccacaggcca

SEQ ID NO: 493015 - RNA, 32 nt, Human
ucaaggguuuuccagguguagcuaacaguugc

SEQ ID NO: 493016 - RNA, 32 nt, Human
ucaagguaccgccuugcugaaguauuuauuua

SEQ ID NO: 493017 - RNA, 32 nt, Human
ucaaggucaaagcugagcuagccgggcaugag

SEQ ID NO: 493018 - RNA, 32 nt, Human
ucaaggucacugcaucagagcuguaacagauc

SEQ ID NO: 493019 - RNA, 32 nt, Human
ucaaggucaggagaucaagaccauccuggcua

SEQ ID NO: 493020 - RNA, 32 nt, Human
ucaaggucaggcaagugagcaccggggacuga

SEQ ID NO: 493021 - RNA, 32 nt, Human
ucaagguccacucaggcacaagagccacagua

SEQ ID NO: 493022 - RNA, 32 nt, Human
ucaagguccagccuugguccagggccguuugc

SEQ ID NO: 493023 - RNA, 32 nt, Human
ucaagguccuuucuauagacucaacaugcggu

SEQ ID NO: 493024 - RNA, 32 nt, Human
ucaaggucgcaccgcuacacuccagccugggu

SEQ ID NO: 493025 - RNA, 32 nt, Human
ucaaggucucuuuucauccuucaucugauucc

SEQ ID NO: 493026 - RNA, 24 nt, Human
ucaaggugacaucuguuuuacugg

SEQ ID NO: 493027 - RNA, 32 nt, Human
ucaaggugagagugagcuacaagaugaggcuu

SEQ ID NO: 493028 - RNA, 32 nt, Human
ucaaggugaugacggcacaaaauacuuagacu

SEQ ID NO: 493029 - RNA, 24 nt, Human
ucaaggugaugcucugucugcugg

SEQ ID NO: 493030 - RNA, 21 nt, Human
ucaaggugccuacuuugcugg

SEQ ID NO: 493031 - RNA, 32 nt, Human
ucaaggugccugaauccccugguaagugagug

SEQ ID NO: 493032 - RNA, 32 nt, Human
ucaagguggaacauacuguaaucuccagaugc

SEQ ID NO: 493033 - RNA, 32 nt, Human
ucaagguggccaccccagaugaagcuccugcc

SEQ ID NO: 493034 - RNA, 32 nt, Human
ucaaggugggagcagggcaagugccuucggag

SEQ ID NO: 493035 - RNA, 32 nt, Human
ucaagguggguggaucacuugaggucaggagu

SEQ ID NO: 493036 - RNA, 32 nt, Human
ucaagguggugguugaggagacagaggaccca

SEQ ID NO: 493037 - RNA, 32 nt, Human
ucaagguguagauuguacugaagagagagauu

SEQ ID NO: 493038 - RNA, 19 nt, Human
ucaagguguagcaagugua

SEQ ID NO: 493039 - RNA, 32 nt, Human
ucaaggugugggcuccugguggcugcucagug

SEQ ID NO: 493040 - RNA, 18 nt, Human
ucaagguuaaaauucuga

SEQ ID NO: 493041 - RNA, 32 nt, Human
ucaagguucacuguuguuuuguccucagaacc

SEQ ID NO: 493042 - RNA, 22 nt, Human
ucaagguucagcugcaggacca

SEQ ID NO: 493043 - RNA, 32 nt, Human
ucaagguugaacagauuucuagagccuuguuu

SEQ ID NO: 493044 - RNA, 32 nt, Human
ucaagguugcacagcaccuucaagauggggcu

SEQ ID NO: 493045 - RNA, 22 nt, Human
ucaagguugcgaguacaggcca

SEQ ID NO: 493046 - RNA, 21 nt, Human
ucaagguugguagugaaguca

SEQ ID NO: 493047 - RNA, 32 nt, Human
ucaagguuuaaccuuaaaauuaagauuuccuu

SEQ ID NO: 493048 - RNA, 32 nt, Human
ucaagguuuggaaagaaagaaaguugaguuuu

SEQ ID NO: 493049 - RNA, 19 nt, Human
ucaaguaaagcaaguugug

SEQ ID NO: 493050 - RNA, 24 nt, Human
ucaaguaacugggauuacaggcau

SEQ ID NO: 493051 - RNA, 32 nt, Human
ucaaguaagaauuggguuaagggaaaaauaga

SEQ ID NO: 493052 - RNA, 19 nt, Human
ucaaguaauaaauauuuaa

SEQ ID NO: 493053 - RNA, 19 nt, Human
ucaaguaauguggguugug

SEQ ID NO: 493054 - RNA, 32 nt, Human
ucaaguacacacuguuggcaaaaggcuaacac

SEQ ID NO: 493055 - RNA, 32 nt, Human
ucaaguaccagagaugucuccaagagcaccag

SEQ ID NO: 493056 - RNA, 32 nt, Human
ucaaguagacuccagugucuguuauucccuuc

SEQ ID NO: 493057 - RNA, 32 nt, Human
ucaaguagagcuggagaccaggauccguggcu

SEQ ID NO: 493058 - RNA, 32 nt, Human
ucaaguagccagaaacagguguucuggcuuua

SEQ ID NO: 493059 - RNA, 23 nt, Human
ucaaguagcugggacuacaggcg

SEQ ID NO: 493060 - RNA, 23 nt, Human
ucaaguagcugggauuacaagca

SEQ ID NO: 493061 - RNA, 24 nt, Human
ucaaguagcugggauuacaagcau

SEQ ID NO: 493062 - RNA, 30 nt, Human
ucaaguagcuugcauucuggaagcgaagaa

SEQ ID NO: 493063 - RNA, 32 nt, Human
ucaaguaguuucguaauuuccacacacagcac

SEQ ID NO: 493064 - RNA, 21 nt, Human
ucaaguauauaaaguuuugcc

SEQ ID NO: 493065 - RNA, 32 nt, Human
ucaaguauguauucagcaccuguugcaguaug

SEQ ID NO: 493066 - RNA, 32 nt, Human
ucaaguauuucccuacagaacuccucaagaaa

SEQ ID NO: 493067 - RNA, 32 nt, Human
ucaagucaauguuaauaaagcauuucaaaacc

SEQ ID NO: 493068 - RNA, 32 nt, Human
ucaagucaccacacuccagccugggugacaga

SEQ ID NO: 493069 - RNA, 32 nt, Human
ucaagucaccugcagauuuagcauuagacauc

SEQ ID NO: 493070 - RNA, 32 nt, Human
ucaagucacuaccaccaccacaauuaacagcu

SEQ ID NO: 493071 - RNA, 32 nt, Human
ucaagucacuccucagcugaggaccuguccau

SEQ ID NO: 493072 - RNA, 32 nt, Human
ucaagucagaggaggaagcugagggccccgag

SEQ ID NO: 493073 - RNA, 18 nt, Human
ucaagucagucaauuucc

SEQ ID NO: 493074 - RNA, 32 nt, Human
ucaagucaucuuugauuccuggaccuaauaaa

SEQ ID NO: 493075 - RNA, 32 nt, Human
ucaaguccacaucccugaagcugucagacagc

SEQ ID NO: 493076 - RNA, 32 nt, Human
ucaaguccagccugggcuacauagugagaccg

SEQ ID NO: 493077 - RNA, 32 nt, Human
ucaaguccaggaguucgagaccagccugggca

SEQ ID NO: 493078 - RNA, 32 nt, Human
ucaaguccauaaccacacuugcucucacauuu

SEQ ID NO: 493079 - RNA, 32 nt, Human
ucaaguccaugugucccauggcuggucagagc

SEQ ID NO: 493080 - RNA, 32 nt, Human
ucaagucccaggaguccugaccagagagcagg

SEQ ID NO: 493081 - RNA, 32 nt, Human
ucaagucccuccuggaagggagccagaggccc

SEQ ID NO: 493082 - RNA, 32 nt, Human
ucaagucgagccgcuucuaccugcugcugcug

SEQ ID NO: 493083 - RNA, 32 nt, Human
ucaagucgggcaagcggguggggaagcccuca

SEQ ID NO: 493084 - RNA, 32 nt, Human
ucaagucggguggaucaccugaggucaagagu

SEQ ID NO: 493085 - RNA, 32 nt, Human
ucaagucuccuguccuccuccuggagcagcag

SEQ ID NO: 493086 - RNA, 32 nt, Human
ucaagucugagccucaaggagccucugcgacu

SEQ ID NO: 493087 - RNA, 32 nt, Human
ucaagucugcaaccuaaaagugggagaucuug

SEQ ID NO: 493088 - RNA, 32 nt, Human
ucaagucugggagcugccggucccacucuguc

SEQ ID NO: 493089 - RNA, 24 nt, Human
ucaagucugggcgacagggugaga

SEQ ID NO: 493090 - RNA, 32 nt, Human
ucaagucuguaaucccagcgcuuugggaggcc

SEQ ID NO: 493091 - RNA, 19 nt, Human
ucaagucuucucaagucuu

SEQ ID NO: 493092 - RNA, 20 nt, Human
ucaagucuuuuuauuuuucc

SEQ ID NO: 493093 - RNA, 32 nt, Human
ucaagugaaaaggaggaccaagaggcaacagg

SEQ ID NO: 493094 - RNA, 21 nt, Human
ucaagugacccucccaccuca

SEQ ID NO: 493095 - RNA, 32 nt, Human
ucaagugacccucccaccucagccucucaagu

SEQ ID NO: 493096 - RNA, 32 nt, Human
ucaagugacccuuccacaucagccucuguaga

SEQ ID NO: 493097 - RNA, 32 nt, Human
ucaagugagcgcaagagguugaggcuccagug

SEQ ID NO: 493098 - RNA, 32 nt, Human
ucaagugauccaccagccuccaccucccgacg

SEQ ID NO: 493099 - RNA, 32 nt, Human
ucaagugauccgcccuccccagccucccaaag

SEQ ID NO: 493100 - RNA, 32 nt, Human
ucaagugauccucccaccucagccucucaagu

SEQ ID NO: 493101 - RNA, 32 nt, Human
ucaagugauccucccgccucagccucuugagu

SEQ ID NO: 493102 - RNA, 32 nt, Human
ucaagugauccucccgcuucagccucucaagc

SEQ ID NO: 493103 - RNA, 32 nt, Human
ucaagugauccuuccaccucagccucuggagu

SEQ ID NO: 493104 - RNA, 31 nt, Human
ucaagugaucugcccgccacagcaggcuggg

SEQ ID NO: 493105 - RNA, 19 nt, Human
ucaagugauuaagugugua

SEQ ID NO: 493106 - RNA, 21 nt, Human
ucaagugauucucccaucuca

SEQ ID NO: 493107 - RNA, 32 nt, Human
ucaagugauucucgugccucagccucuggagu

SEQ ID NO: 493108 - RNA, 32 nt, Human
ucaagugauucugccuguaaucccagaauuuu

SEQ ID NO: 493109 - RNA, 32 nt, Human
ucaagugauucuucugccucagccucucaagu

SEQ ID NO: 493110 - RNA, 32 nt, Human
ucaagugauucuugugccucagccucuccagu

SEQ ID NO: 493111 - RNA, 32 nt, Human
ucaagugcacacauaaccauaacaauucuuac

SEQ ID NO: 493112 - RNA, 32 nt, Human
ucaagugcagcucaauacuagcuucaguauaa

SEQ ID NO: 493113 - RNA, 32 nt, Human
ucaagugccugauccugcccugggcucagagc

SEQ ID NO: 493114 - RNA, 32 nt, Human
ucaagugccugauuaauugagguggcaacaua

SEQ ID NO: 493115 - RNA, 32 nt, Human
ucaagugccugccucugccccuuggugggcug

SEQ ID NO: 493116 - RNA, 32 nt, Human
ucaagugccuggaacagaacagccauucaaua

SEQ ID NO: 493117 - RNA, 32 nt, Human
ucaagugcucacugcaugaagacuggcuuguc

SEQ ID NO: 493118 - RNA, 32 nt, Human
ucaagugcuccucuucauuugaggacaccuac

SEQ ID NO: 493119 - RNA, 32 nt, Human
ucaagugcucuugccacagaacccaggugcuc

SEQ ID NO: 493120 - RNA, 32 nt, Human
ucaagugcugggacugggugggggcaggaugg

SEQ ID NO: 493121 - RNA, 32 nt, Human
ucaaguggagaaaagaggaauauuauuagaga

SEQ ID NO: 493122 - RNA, 32 nt, Human
ucaaguggagcauggcccucccuggcucccug

SEQ ID NO: 493123 - RNA, 32 nt, Human
ucaaguggaggcggaggaggaggcggaggagg

SEQ ID NO: 493124 - RNA, 32 nt, Human
ucaaguggcugggaugacuacaggcaugggcc

SEQ ID NO: 493125 - RNA, 32 nt, Human
ucaaguggcuuccaccucaaguggaagauuca

SEQ ID NO: 493126 - RNA, 32 nt, Human
ucaagugggccuuccugcucagccucuaugcc

SEQ ID NO: 493127 - RNA, 32 nt, Human
ucaaguggguuauuuagaguugaauagcaauu

SEQ ID NO: 493128 - RNA, 32 nt, Human
ucaagugguguuuuucacagucagaacuugaa

SEQ ID NO: 493129 - RNA, 21 nt, Human
ucaagugucaaccuugagguc

SEQ ID NO: 493130 - RNA, 18 nt, Human
ucaagugucaaucaucca

SEQ ID NO: 493131 - RNA, 32 nt, Human
ucaaguguccccagacccuucuugccugcugg

SEQ ID NO: 493132 - RNA, 32 nt, Human
ucaagugucugaucaagccucaguguaugggc

SEQ ID NO: 493133 - RNA, 32 nt, Human
ucaagugugagcugcggcugagcccagcgcuc

SEQ ID NO: 493134 - RNA, 32 nt, Human
ucaagugugcaucacuucuccuguucugccaa

SEQ ID NO: 493135 - RNA, 32 nt, Human
ucaagugugcccacccugcagucuucauccuc

SEQ ID NO: 493136 - RNA, 32 nt, Human
ucaaguguggguggacaguccuaauggggauc

SEQ ID NO: 493137 - RNA, 32 nt, Human
ucaaguguugcaggacagaugagcucaaggua

SEQ ID NO: 493138 - RNA, 32 nt, Human
ucaaguguuucuguuuauugggagacugccuu

SEQ ID NO: 493139 - RNA, 21 nt, Human
ucaaguuaagacaagguugua

SEQ ID NO: 493140 - RNA, 20 nt, Human
ucaaguuaccuaggcugcau

SEQ ID NO: 493141 - RNA, 32 nt, Human
ucaaguuauuuuuauaugaguuaaugugaaau

SEQ ID NO: 493142 - RNA, 32 nt, Human
ucaaguucacccucagaugcuuuccugggccc

SEQ ID NO: 493143 - RNA, 32 nt, Human
ucaaguuccagaggaacgggaugagcuccuga

SEQ ID NO: 493144 - RNA, 32 nt, Human
ucaaguucccagccagccaauggaugccagca

SEQ ID NO: 493145 - RNA, 32 nt, Human
ucaaguuccugggcucaaagaugggagucucc

SEQ ID NO: 493146 - RNA, 32 nt, Human
ucaaguucucauuccauuucuuugaugccacu

SEQ ID NO: 493147 - RNA, 32 nt, Human
ucaaguucuccuccuugaucaccguggccaga

SEQ ID NO: 493148 - RNA, 19 nt, Human
ucaaguucugucaauacuu

SEQ ID NO: 493149 - RNA, 32 nt, Human
ucaaguugccauagcagccucucucccaacaa

SEQ ID NO: 493150 - RNA, 32 nt, Human
ucaaguuggaaagaacaaaagaagaacaaaaa

SEQ ID NO: 493151 - RNA, 32 nt, Human
ucaaguuggauuugaacccagcugcucuguac

SEQ ID NO: 493152 - RNA, 24 nt, Human
ucaaguugggaggcccuccucuca

SEQ ID NO: 493153 - RNA, 32 nt, Human
ucaaguuguggucucagccaaaaugagugaua

SEQ ID NO: 493154 - RNA, 32 nt, Human
ucaaguuuaggucauuuagaagauuugacacu

SEQ ID NO: 493155 - RNA, 32 nt, Human
ucaaguuucauaaagaguucugauucccagag

SEQ ID NO: 493156 - RNA, 17 nt, Human
ucaaguuuccaauucuu

SEQ ID NO: 493157 - RNA, 24 nt, Human
ucaaguuuggcauagacucuuucc

SEQ ID NO: 493158 - RNA, 32 nt, Human
ucaaguuugggugacuggugcagaguuacuuc

SEQ ID NO: 493159 - RNA, 32 nt, Human
ucaaguuuucugcuuaguggcacugacauuaa

SEQ ID NO: 493160 - RNA, 32 nt, Human
ucaauaaaacauuuccuauagagccauaucau

SEQ ID NO: 493161 - RNA, 32 nt, Human
ucaauaaaacuguuucgaaaagaaggaaaagg

SEQ ID NO: 493162 - RNA, 32 nt, Human
ucaauaaaccagggacacaaugcacuguggaa

SEQ ID NO: 493163 - RNA, 32 nt, Human
ucaauaaaccaggggcacaaugcacuguggaa

SEQ ID NO: 493164 - RNA, 32 nt, Human
ucaauaaagaaagauggaaggaagggagaaau

SEQ ID NO: 493165 - RNA, 32 nt, Human
ucaauaaagccaagccgguccagcugcauuaa

SEQ ID NO: 493166 - RNA, 32 nt, Human
ucaauaaagguuccugaaucuuccugccaaaa

SEQ ID NO: 493167 - RNA, 32 nt, Human
ucaauaaauacugagggaacucagagaccagu

SEQ ID NO: 493168 - RNA, 32 nt, Human
ucaauaaauuccauguuuagcagaaauaggca

SEQ ID NO: 493169 - RNA, 32 nt, Human
ucaauaaucccagcuacucgggaggcugagac

SEQ ID NO: 493170 - RNA, 32 nt, Human
ucaauaaucuuaauuuugauauuugaauaaau

SEQ ID NO: 493171 - RNA, 32 nt, Human
ucaauaccagccuggccaacauggugaaaccc

SEQ ID NO: 493172 - RNA, 32 nt, Human
ucaauaccagccuggccaacguggugaaaccc

SEQ ID NO: 493173 - RNA, 32 nt, Human
ucaauaccagccugggcaacauaguaagaccc

SEQ ID NO: 493174 - RNA, 32 nt, Human
ucaauaccagcucagaccauguggaccgcgga

SEQ ID NO: 493175 - RNA, 32 nt, Human
ucaauaccuaguuaaacucauuucacuucucc

SEQ ID NO: 493176 - RNA, 32 nt, Human
ucaauacuacaaaaucaacaugauuucauaag

SEQ ID NO: 493177 - RNA, 32 nt, Human
ucaauacugaaagauuaaaauggggagguugc

SEQ ID NO: 493178 - RNA, 32 nt, Human
ucaauacugauggggaagcuggacacuuggag

SEQ ID NO: 493179 - RNA, 32 nt, Human
ucaauacugcuccaaaaggccuggcaugaaag

SEQ ID NO: 493180 - RNA, 32 nt, Human
ucaauagaacccaggagguggagacugcagug

SEQ ID NO: 493181 - RNA, 32 nt, Human
ucaauagaacuugccuccugaaccugacuagg

SEQ ID NO: 493182 - RNA, 32 nt, Human
ucaauagaugacguuuccuauguaaguaggua

SEQ ID NO: 493183 - RNA, 32 nt, Human
ucaauagauggcuauggaucaagcaugguugc

SEQ ID NO: 493184 - RNA, 32 nt, Human
ucaauagcuaagcaucuccuuacagucacuaa

SEQ ID NO: 493185 - RNA, 32 nt, Human
ucaauaggcuggaaagcuaaaaggauuuugca

SEQ ID NO: 493186 - RNA, 32 nt, Human
ucaauauaaagaaaaagacugcagagguagug

SEQ ID NO: 493187 - RNA, 32 nt, Human
ucaauauaaauaaaagagcagaaaaauauguc

SEQ ID NO: 493188 - RNA, 18 nt, Human
ucaauauccaacaugcca

SEQ ID NO: 493189 - RNA, 32 nt, Human
ucaauauccacuucuuucagccuacuguagac

SEQ ID NO: 493190 - RNA, 32 nt, Human
ucaauauccauuccucccuucuuucuuaaagu

SEQ ID NO: 493191 - RNA, 30 nt, Human
ucaauaugacggcugaagaaacagugaaug

SEQ ID NO: 493192 - RNA, 32 nt, Human
ucaauaugcccuuucacaugccuuagaccagu

SEQ ID NO: 493193 - RNA, 32 nt, Human
ucaauaugucauaacagcauucugaagucaga

SEQ ID NO: 493194 - RNA, 32 nt, Human
ucaauauuauggucaacuuuaagucuuaguuu

SEQ ID NO: 493195 - RNA, 31 nt, Human
ucaauauucaauaaagcugcugagaaucuag

SEQ ID NO: 493196 - RNA, 32 nt, Human
ucaauauucacacccauaaacauuacuaagcc

SEQ ID NO: 493197 - RNA, 32 nt, Human
ucaauauucccaauaucucccccaccaccucc

SEQ ID NO: 493198 - RNA, 32 nt, Human
ucaauauuggagagcuuucuguuuuucuacau

SEQ ID NO: 493199 - RNA, 32 nt, Human
ucaaucaaaggaugggaacuggaacugagaac

SEQ ID NO: 493200 - RNA, 32 nt, Human
ucaaucaaauuggccacuuaagaaauaaagag

SEQ ID NO: 493201 - RNA, 32 nt, Human
ucaaucaacccccagucuaccccgccucccuc

SEQ ID NO: 493202 - RNA, 32 nt, Human
ucaaucaagacacccaguaagccacauaauau

SEQ ID NO: 493203 - RNA, 20 nt, Human
ucaaucaaucaaucaucuua

SEQ ID NO: 493204 - RNA, 32 nt, Human
ucaaucaccauccuuuauaccaggauuugcau

SEQ ID NO: 493205 - RNA, 32 nt, Human
ucaaucacggaagaggcagucaaggaggaagg

SEQ ID NO: 493206 - RNA, 26 nt, Human
ucaaucagcaaauaaagccaugucua

SEQ ID NO: 493207 - RNA, 25 nt, Human
ucaaucagccuaguugaucagcuua

SEQ ID NO: 493208 - RNA, 32 nt, Human
ucaaucagguggagcaaggcccucuccugucc

SEQ ID NO: 493209 - RNA, 32 nt, Human
ucaaucauauuccucugggauuucuaaacagc

SEQ ID NO: 493210 - RNA, 26 nt, Human
ucaaucaucacagugggaaccucuug

SEQ ID NO: 493211 - RNA, 21 nt, Human
ucaaucaucucaaagauuuua

SEQ ID NO: 493212 - RNA, 32 nt, Human
ucaaucauuauagagaggaaaacaguacuuuu

SEQ ID NO: 493213 - RNA, 32 nt, Human
ucaauccaaaacugaugcagcuuguggaccac

SEQ ID NO: 493214 - RNA, 31 nt, Human
ucaauccaaguguccaucaaugguagacugg

SEQ ID NO: 493215 - RNA, 32 nt, Human
ucaauccacuccagauuugauuuacaauuguc

SEQ ID NO: 493216 - RNA, 32 nt, Human
ucaauccaguccuagcacuugaucucauuggg

SEQ ID NO: 493217 - RNA, 32 nt, Human
ucaauccaguuuucaaaacauaaguguaagca

SEQ ID NO: 493218 - RNA, 32 nt, Human
ucaauccaugaccauccucgcugugcuuggcu

SEQ ID NO: 493219 - RNA, 32 nt, Human
ucaaucccagguacuaaugaccuugcuuuggc

SEQ ID NO: 493220 - RNA, 32 nt, Human
ucaauccucaaauuagcaucacuugacccuau

SEQ ID NO: 493221 - RNA, 32 nt, Human
ucaauccuccacucuaagugauuccuccaggg

SEQ ID NO: 493222 - RNA, 32 nt, Human
ucaauccucuuucccaguccuaucuccugcuu

SEQ ID NO: 493223 - RNA, 32 nt, Human
ucaauccucuuucuuuauccuuagccacccug

SEQ ID NO: 493224 - RNA, 32 nt, Human
ucaauccugcaaccccagcugucccaccggug

SEQ ID NO: 493225 - RNA, 32 nt, Human
ucaauccuucuggccaagagugucuugcuugu

SEQ ID NO: 493226 - RNA, 32 nt, Human
ucaauccuuuaccaacugucccaugaagagua

SEQ ID NO: 493227 - RNA, 23 nt, Human
ucaaucggccuugugauauccug

SEQ ID NO: 493228 - RNA, 32 nt, Human
ucaaucgggcagcucccuuuuccacaagccuc

SEQ ID NO: 493229 - RNA, 32 nt, Human
ucaaucggggacuaaaauuucccacugaaaau

SEQ ID NO: 493230 - RNA, 21 nt, Human
ucaaucgucagcgacagccug

SEQ ID NO: 493231 - RNA, 32 nt, Human
ucaaucgucucucccuuuggaucucuggcauu

SEQ ID NO: 493232 - RNA, 32 nt, Human
ucaaucguggucucccucucccucucuuguug

SEQ ID NO: 493233 - RNA, 27 nt, Human
ucaaucuaaucuucgauggaaauucua

SEQ ID NO: 493234 - RNA, 32 nt, Human
ucaaucuacucaaagcaugggauuacuagaau

SEQ ID NO: 493235 - RNA, 23 nt, Human
ucaaucuacuguaaguacccagg

SEQ ID NO: 493236 - RNA, 32 nt, Human
ucaaucuagguggugccagcugauccaucaag

SEQ ID NO: 493237 - RNA, 32 nt, Human
ucaaucuagugccuccuugaggccaggaguuc

SEQ ID NO: 493238 - RNA, 32 nt, Human
ucaaucuauguuucucuuucugcuucucuacu

SEQ ID NO: 493239 - RNA, 32 nt, Human
ucaaucucccaagcccacaccacugcccugcu

SEQ ID NO: 493240 - RNA, 32 nt, Human
ucaaucuccugagaccagccucuaccuccaga

SEQ ID NO: 493241 - RNA, 23 nt, Human
ucaaucuccugggcucaaaugau

SEQ ID NO: 493242 - RNA, 32 nt, Human
ucaaucucuauccugaugucaugggaguccua

SEQ ID NO: 493243 - RNA, 32 nt, Human
ucaaucugcaaaauggggauggggaagguuca

SEQ ID NO: 493244 - RNA, 32 nt, Human
ucaaucugcacaauugacauuuuuggccggag

SEQ ID NO: 493245 - RNA, 23 nt, Human
ucaaucugcuuuugagguuguuu

SEQ ID NO: 493246 - RNA, 32 nt, Human
ucaaucuggaaggcagagguugcagugagauu

SEQ ID NO: 493247 - RNA, 31 nt, Human
ucaaucuggcuuuguugcugccaaaggagau

SEQ ID NO: 493248 - RNA, 32 nt, Human
ucaaucugugaagccuuuaucuaugggagauu

SEQ ID NO: 493249 - RNA, 21 nt, Human
ucaaucugugugagucuguuu

SEQ ID NO: 493250 - RNA, 32 nt, Human
ucaaucuucuccccagccccucccucccucag

SEQ ID NO: 493251 - RNA, 32 nt, Human
ucaaucuugaagaugggacuaggcuggugggg

SEQ ID NO: 493252 - RNA, 32 nt, Human
ucaaucuuuaguugcuucauaggcauucauga

SEQ ID NO: 493253 - RNA, 28 nt, Human
ucaaugaaacuugaugugaacuuccaaa

SEQ ID NO: 493254 - RNA, 32 nt, Human
ucaaugaaaggcagaugucccuuuaagguuug

SEQ ID NO: 493255 - RNA, 32 nt, Human
ucaaugaaaugauguggugaugcaugccuaua

SEQ ID NO: 493256 - RNA, 32 nt, Human
ucaaugaagaagcaaagaggugacugacugaa

SEQ ID NO: 493257 - RNA, 32 nt, Human
ucaaugacaaagaugaaagggaaagggggugu

SEQ ID NO: 493258 - RNA, 32 nt, Human
ucaaugacuguuuaucaugcaggugaaagggg

SEQ ID NO: 493259 - RNA, 32 nt, Human
ucaaugagcacuaaaggaaucauaggaauaug

SEQ ID NO: 493260 - RNA, 32 nt, Human
ucaaugagcagugcaauaagccagcaacuggg

SEQ ID NO: 493261 - RNA, 32 nt, Human
ucaaugagcugcagaaauucagcccaggacug

SEQ ID NO: 493262 - RNA, 17 nt, Human
ucaaugaggaaauucaa

SEQ ID NO: 493263 - RNA, 32 nt, Human
ucaaugagguuaugagaaaaacagcaggggca

SEQ ID NO: 493264 - RNA, 32 nt, Human
ucaaugauggccagcaggacucaucuccugcc

SEQ ID NO: 493265 - RNA, 28 nt, Human
ucaaugauguauaugaccucagcuuauu

SEQ ID NO: 493266 - RNA, 22 nt, Human
ucaaugauuaggaaucauucug

SEQ ID NO: 493267 - RNA, 32 nt, Human
ucaaugauuauuuccugccaagaaggugaacg

SEQ ID NO: 493268 - RNA, 32 nt, Human
ucaaugcaacagcaaauaagaaucucuagaac

SEQ ID NO: 493269 - RNA, 32 nt, Human
ucaaugcacacaccugcuguugcuuuugauuu

SEQ ID NO: 493270 - RNA, 32 nt, Human
ucaaugcagcugguaucucugagcucugagga

SEQ ID NO: 493271 - RNA, 32 nt, Human
ucaaugcauacuuaagaacaccuacuaugugc

SEQ ID NO: 493272 - RNA, 32 nt, Human
ucaaugccaagaaacgugucccuggcccauau

SEQ ID NO: 493273 - RNA, 32 nt, Human
ucaaugcccacuuagaucucccagaaauagca

SEQ ID NO: 493274 - RNA, 32 nt, Human
ucaaugcccagcccugacaccugcccuuuguc

SEQ ID NO: 493275 - RNA, 32 nt, Human
ucaaugccuuagccaaggaguccagcaccugu

SEQ ID NO: 493276 - RNA, 32 nt, Human
ucaaugcuaucuacucucuggccuacggagcc

SEQ ID NO: 493277 - RNA, 32 nt, Human
ucaaugcuggguggaggagggcagaaacgcag

SEQ ID NO: 493278 - RNA, 32 nt, Human
ucaaugcuguaauauaauuugcaccuggaaug

SEQ ID NO: 493279 - RNA, 32 nt, Human
ucaaugcuuuacuaauguuccaacacaaaaug

SEQ ID NO: 493280 - RNA, 32 nt, Human
ucaauggacaaacugacagggacugcuuugaa

SEQ ID NO: 493281 - RNA, 32 nt, Human
ucaauggagaacuuauagcugugcaaagaucu

SEQ ID NO: 493282 - RNA, 32 nt, Human
ucaauggagacaccaccuggcugcccauccug

SEQ ID NO: 493283 - RNA, 28 nt, Human
ucaauggauaaagugggaaaaaugugga

SEQ ID NO: 493284 - RNA, 32 nt, Human
ucaauggcccucaaggaacaaaguggguugug

SEQ ID NO: 493285 - RNA, 32 nt, Human
ucaauggcugucuugcucaauuggccagacau

SEQ ID NO: 493286 - RNA, 32 nt, Human
ucaauggcuuuuugccgcucuaccucuugugu

SEQ ID NO: 493287 - RNA, 31 nt, Human
ucaaugggaagaccuguuugcagagaggagc

SEQ ID NO: 493288 - RNA, 32 nt, Human
ucaaugggagagaaagggccugaguuucagcc

SEQ ID NO: 493289 - RNA, 32 nt, Human
ucaauggggaaaggacacagaaacaggaacug

SEQ ID NO: 493290 - RNA, 26 nt, Human
ucaauggguguccuaggaaccuuuua

SEQ ID NO: 493291 - RNA, 32 nt, Human
ucaaugggugucugaauaaacaaauugugauc

SEQ ID NO: 493292 - RNA, 32 nt, Human
ucaauggucaccaagguccugaagccuuccug

SEQ ID NO: 493293 - RNA, 32 nt, Human
ucaauggugcaggacagaaagccagucagacu

SEQ ID NO: 493294 - RNA, 32 nt, Human
ucaauggugcccaggcuggagugcaguggcgu

SEQ ID NO: 493295 - RNA, 32 nt, Human
ucaaugguguccaggcuggagugcaguggcgu

SEQ ID NO: 493296 - RNA, 32 nt, Human
ucaaugguugacugcaaagaagugagaagcca

SEQ ID NO: 493297 - RNA, 32 nt, Human
ucaaugguuguuaguauauucacaaaguugug

SEQ ID NO: 493298 - RNA, 32 nt, Human
ucaaugucaggcccgagaacagccugcggaau

SEQ ID NO: 493299 - RNA, 32 nt, Human
ucaaugucauucucuucucugccauccuuauu

SEQ ID NO: 493300 - RNA, 32 nt, Human
ucaaugucauucuuuucacagguccagugucu

SEQ ID NO: 493301 - RNA, 32 nt, Human
ucaaugucccacugaauccuguuggccaguau

SEQ ID NO: 493302 - RNA, 32 nt, Human
ucaaugugaguuuccgugcauggcuggugacu

SEQ ID NO: 493303 - RNA, 32 nt, Human
ucaaugugcacuccuagcuuggugucucagac

SEQ ID NO: 493304 - RNA, 32 nt, Human
ucaauguggcgaggaagaugcuggggccggua

SEQ ID NO: 493305 - RNA, 32 nt, Human
ucaauguggcucaaacuaaccgcccacacaug

SEQ ID NO: 493306 - RNA, 21 nt, Human
ucaauguggggcaucaggcca

SEQ ID NO: 493307 - RNA, 32 nt, Human
ucaauguucauaacuuaaaccuggguaccugg

SEQ ID NO: 493308 - RNA, 32 nt, Human
ucaauguugcccaggcuggagugcaguggcgu

SEQ ID NO: 493309 - RNA, 21 nt, Human
ucaauguuugggaccaucuua

SEQ ID NO: 493310 - RNA, 32 nt, Human
ucaauuagauauguuacauaggaugugccaac

SEQ ID NO: 493311 - RNA, 22 nt, Human
ucaauuauuuuucuuccuugca

SEQ ID NO: 493312 - RNA, 21 nt, Human
ucaauucaaaacaaagacagu

SEQ ID NO: 493313 - RNA, 32 nt, Human
ucaauucaaccaacauccaguccuggaagccc

SEQ ID NO: 493314 - RNA, 32 nt, Human
ucaauucacccagcucucuugccugcaggcug

SEQ ID NO: 493315 - RNA, 32 nt, Human
ucaauucagaagcauuuuaccagugaagcccu

SEQ ID NO: 493316 - RNA, 32 nt, Human
ucaauucaggagaaacuguacuggucagucac

SEQ ID NO: 493317 - RNA, 32 nt, Human
ucaauucaggccaagugugguggugcacaccu

SEQ ID NO: 493318 - RNA, 31 nt, Human
ucaauuccaugacuuaagguuggagagcuaa

SEQ ID NO: 493319 - RNA, 32 nt, Human
ucaauuccauuuuggggcauggggaaggcugu

SEQ ID NO: 493320 - RNA, 32 nt, Human
ucaauucccccuucccccuccaacacauacac

SEQ ID NO: 493321 - RNA, 32 nt, Human
ucaauucccuacucccucuuauguuuuuauau

SEQ ID NO: 493322 - RNA, 32 nt, Human
ucaauucccuugguccccagugcaguguuugg

SEQ ID NO: 493323 - RNA, 32 nt, Human
ucaauuccuaggauagcagagagauggacaac

SEQ ID NO: 493324 - RNA, 18 nt, Human
ucaauuccucccauuuca

SEQ ID NO: 493325 - RNA, 32 nt, Human
ucaauuccuugcaagaugcauucucucaaagc

SEQ ID NO: 493326 - RNA, 32 nt, Human
ucaauucucaauauauucaguaaugaagaaug

SEQ ID NO: 493327 - RNA, 32 nt, Human
ucaauucucauuuuguaguaucucaaacacaa

SEQ ID NO: 493328 - RNA, 32 nt, Human
ucaauucuguagagucaggggugaggaggagc

SEQ ID NO: 493329 - RNA, 32 nt, Human
ucaauucuugccuuauaccucagucuauucug

SEQ ID NO: 493330 - RNA, 32 nt, Human
ucaauucuuucauucccugaccagugagaggg

SEQ ID NO: 493331 - RNA, 32 nt, Human
ucaauugacugcaaccucugcuucccaggcuc

SEQ ID NO: 493332 - RNA, 32 nt, Human
ucaauugagcccaggaguucaagaccagccug

SEQ ID NO: 493333 - RNA, 32 nt, Human
ucaauugaggcaggauguucaaaugauugcag

SEQ ID NO: 493334 - RNA, 32 nt, Human
ucaauugcuucucaagucuaaccagccucagc

SEQ ID NO: 493335 - RNA, 32 nt, Human
ucaauugcuuugauuucucugccuguaagaua

SEQ ID NO: 493336 - RNA, 32 nt, Human
ucaauuggcccaguguuucuccaggcugggga

SEQ ID NO: 493337 - RNA, 32 nt, Human
ucaauugggcuuaaaaauugacaugcaaucuc

SEQ ID NO: 493338 - RNA, 32 nt, Human
ucaauugggggaaaauauuaacuuugcugaau

SEQ ID NO: 493339 - RNA, 32 nt, Human
ucaauuguaucugacccuucuuuaaguuaugu

SEQ ID NO: 493340 - RNA, 32 nt, Human
ucaauuguauuuuucuguucagaaaacuccaa

SEQ ID NO: 493341 - RNA, 32 nt, Human
ucaauuguccucuguguccugccugacauggc

SEQ ID NO: 493342 - RNA, 32 nt, Human
ucaauuguccuggcugauuaugcaucacucug

SEQ ID NO: 493343 - RNA, 32 nt, Human
ucaauugugugaacaguggcccgaaagguuau

SEQ ID NO: 493344 - RNA, 32 nt, Human
ucaauuguucaucaguggguaaaacaaauucu

SEQ ID NO: 493345 - RNA, 32 nt, Human
ucaauuguugcugcaucagauaugagagauuc

SEQ ID NO: 493346 - RNA, 23 nt, Human
ucaauuguuuuaagaaaacucua

SEQ ID NO: 493347 - RNA, 32 nt, Human
ucaauuuaaaucuugaggccacucaugguggc

SEQ ID NO: 493348 - RNA, 32 nt, Human
ucaauuuacagaccugacucuccucaccuucc

SEQ ID NO: 493349 - RNA, 22 nt, Human
ucaauuuagucuauccuggaua

SEQ ID NO: 493350 - RNA, 32 nt, Human
ucaauuuaucuucucccuggaauugggaccac

SEQ ID NO: 493351 - RNA, 32 nt, Human
ucaauuucaguauuuuguugagcuuugacaaa

SEQ ID NO: 493352 - RNA, 32 nt, Human
ucaauuuccauucauaaguccucacaaaccca

SEQ ID NO: 493353 - RNA, 32 nt, Human
ucaauuuccucccucacucccucuuaccuucc

SEQ ID NO: 493354 - RNA, 32 nt, Human
ucaauuuccucuucuuuuuccucugaccucug

SEQ ID NO: 493355 - RNA, 32 nt, Human
ucaauuucuuaggcuggagugcaguggcacga

SEQ ID NO: 493356 - RNA, 32 nt, Human
ucaauuucuucagcagacccuacagaggcaag

SEQ ID NO: 493357 - RNA, 32 nt, Human
ucaauuugcuggauuuaagcacugcugcacuu

SEQ ID NO: 493358 - RNA, 32 nt, Human
ucaauuuggucuuauuggcuccauuauacaua

SEQ ID NO: 493359 - RNA, 32 nt, Human
ucaauuuuaaggcauauuuaacaaaauuugaa

SEQ ID NO: 493360 - RNA, 32 nt, Human
ucaauuuuacuuggaaagccugggacacagaa

SEQ ID NO: 493361 - RNA, 32 nt, Human
ucaauuuuaguugaaauucucucuccauggcc

SEQ ID NO: 493362 - RNA, 32 nt, Human
ucaauuuucucauucucuagugauuaccuuca

SEQ ID NO: 493363 - RNA, 32 nt, Human
ucaauuuuggcuuuuguuuccauugcuuuugg

SEQ ID NO: 493364 - RNA, 32 nt, Human
ucacaaaaacagucugcaggcugugucuggcc

SEQ ID NO: 493365 - RNA, 32 nt, Human
ucacaaaaagauaagaaagauucaaagaauuc

SEQ ID NO: 493366 - RNA, 22 nt, Human
ucacaaaaauaaaaugaucaua

SEQ ID NO: 493367 - RNA, 24 nt, Human
ucacaaaaaucaguaagcacaaua

SEQ ID NO: 493368 - RNA, 22 nt, Human
ucacaaaacuguaauuuacuua

SEQ ID NO: 493369 - RNA, 19 nt, Human
ucacaaaaucuguuuagca

SEQ ID NO: 493370 - RNA, 31 nt, Human
ucacaaaauggaaucuuuugccaaagaaacc

SEQ ID NO: 493371 - RNA, 25 nt, Human
ucacaaaauugagugaaacacaaua

SEQ ID NO: 493372 - RNA, 32 nt, Human
ucacaaaauuuucaacaucacagucuaaaaua

SEQ ID NO: 493373 - RNA, 32 nt, Human
ucacaaaccagugacauuuccugaaaucaagc

SEQ ID NO: 493374 - RNA, 32 nt, Human
ucacaaaccuuccuugcuauuuguucuuaagu

SEQ ID NO: 493375 - RNA, 16 nt, Human
ucacaaacuccuccaa

SEQ ID NO: 493376 - RNA, 32 nt, Human
ucacaaacuccuccaaaccccaaaccccaaac

SEQ ID NO: 493377 - RNA, 19 nt, Human
ucacaaagaacugaaucuc

SEQ ID NO: 493378 - RNA, 32 nt, Human
ucacaaagaggauaccuggugacacgcccagg

SEQ ID NO: 493379 - RNA, 32 nt, Human
ucacaaagaguauaugcuaguuucuuguagau

SEQ ID NO: 493380 - RNA, 32 nt, Human
ucacaaagcuaaauaaauucucuuccauaccu

SEQ ID NO: 493381 - RNA, 32 nt, Human
ucacaaagcuaccaccugucaccagagccuac

SEQ ID NO: 493382 - RNA, 32 nt, Human
ucacaaagcuacuggucagcugggcagcucag

SEQ ID NO: 493383 - RNA, 32 nt, Human
ucacaaagcuguuuucacuguggccccuacau

SEQ ID NO: 493384 - RNA, 32 nt, Human
ucacaaagguggggguccuggugcaggcagug

SEQ ID NO: 493385 - RNA, 32 nt, Human
ucacaaagugaagaagucagagggcagucacc

SEQ ID NO: 493386 - RNA, 32 nt, Human
ucacaaaguuuuucacauuccauucagaauuc

SEQ ID NO: 493387 - RNA, 32 nt, Human
ucacaaauagccacauucugcucuacucucca

SEQ ID NO: 493388 - RNA, 32 nt, Human
ucacaaauggcagaacaguauguaaagcuggu

SEQ ID NO: 493389 - RNA, 32 nt, Human
ucacaacaauagguggaaguugcuagugcagu

SEQ ID NO: 493390 - RNA, 32 nt, Human
ucacaacacagcccaggugugggaacaguagg

SEQ ID NO: 493391 - RNA, 32 nt, Human
ucacaacaccacuucucacgcuuggguaauuu

SEQ ID NO: 493392 - RNA, 32 nt, Human
ucacaacagccaugucuuccucugccucuaac

SEQ ID NO: 493393 - RNA, 32 nt, Human
ucacaacagccauuuguuuucaaggucaaggc

SEQ ID NO: 493394 - RNA, 32 nt, Human
ucacaacagcccaaucugcaguugaggaaacc

SEQ ID NO: 493395 - RNA, 32 nt, Human
ucacaacaggaaaugcagacgugggagucacu

SEQ ID NO: 493396 - RNA, 32 nt, Human
ucacaacaguaagucccugacuccaccucuuc

SEQ ID NO: 493397 - RNA, 32 nt, Human
ucacaacaguaagucccuggccccaccucuuc

SEQ ID NO: 493398 - RNA, 32 nt, Human
ucacaacauugcacuucagccuggugacauga

SEQ ID NO: 493399 - RNA, 32 nt, Human
ucacaaccagccugaccaacauggagaaaccc

SEQ ID NO: 493400 - RNA, 32 nt, Human
ucacaaccagccuggucaacuugguaaaaccc

SEQ ID NO: 493401 - RNA, 22 nt, Human
ucacaaccccugacugcuccuc

SEQ ID NO: 493402 - RNA, 32 nt, Human
ucacaacccucagagucaaacuuugugaccgg

SEQ ID NO: 493403 - RNA, 32 nt, Human
ucacaacggacacuuugcuccacacacauaau

SEQ ID NO: 493404 - RNA, 32 nt, Human
ucacaacucacugcagccuggaccuccuagcc

SEQ ID NO: 493405 - RNA, 32 nt, Human
ucacaacuccaggugcucagacugccuguggc

SEQ ID NO: 493406 - RNA, 32 nt, Human
ucacaacugaaccaguucucuacuccuucccu

SEQ ID NO: 493407 - RNA, 32 nt, Human
ucacaacugaauagucuuguucuuuuaguagc

SEQ ID NO: 493408 - RNA, 32 nt, Human
ucacaacugcaaccuccgucucccggguucaa

SEQ ID NO: 493409 - RNA, 32 nt, Human
ucacaacuguaaccucaagcacuuugggaggc

SEQ ID NO: 493410 - RNA, 32 nt, Human
ucacaacuguaauccucgcacuuugggaggcu

SEQ ID NO: 493411 - RNA, 32 nt, Human
ucacaagaauagcaugggaaagacuggccccc

SEQ ID NO: 493412 - RNA, 32 nt, Human
ucacaagagcccaggagguugagaaugcagug

SEQ ID NO: 493413 - RNA, 32 nt, Human
ucacaagaguugcucccaagccuggaugaguu

SEQ ID NO: 493414 - RNA, 32 nt, Human
ucacaagaugacggcugggcuccugggcugcc

SEQ ID NO: 493415 - RNA, 32 nt, Human
ucacaaggcaauucauacuggagagaaaccuu

SEQ ID NO: 493416 - RNA, 32 nt, Human
ucacaaggcagugaggcugagguggggcggcc

SEQ ID NO: 493417 - RNA, 32 nt, Human
ucacaaggccgccucccaccucuggggcauug

SEQ ID NO: 493418 - RNA, 32 nt, Human
ucacaaggcgggaguuccagagagaggacaua

SEQ ID NO: 493419 - RNA, 32 nt, Human
ucacaaggcuuuggagaauugucuuccuaaau

SEQ ID NO: 493420 - RNA, 32 nt, Human
ucacaaggucaguaaugcugcaggaaaagcaa

SEQ ID NO: 493421 - RNA, 32 nt, Human
ucacaagguccuuaaaaguggaggaggggcca

SEQ ID NO: 493422 - RNA, 22 nt, Human
ucacaaggucuuuacuuaugca

SEQ ID NO: 493423 - RNA, 21 nt, Human
ucacaaguaaaagcuacagua

SEQ ID NO: 493424 - RNA, 32 nt, Human
ucacaaguaacuuggaaaauagaagcagaaua

SEQ ID NO: 493425 - RNA, 32 nt, Human
ucacaaguaagaugggacaggugaaugcuucu

SEQ ID NO: 493426 - RNA, 19 nt, Human
ucacaaguaaugucacaau

SEQ ID NO: 493427 - RNA, 18 nt, Human
ucacaaguaggagacaca

SEQ ID NO: 493428 - RNA, 21 nt, Human
ucacaaguaguagaagaacga

SEQ ID NO: 493429 - RNA, 32 nt, Human
ucacaagucucccacaggccauguaaagggua

SEQ ID NO: 493430 - RNA, 32 nt, Human
ucacaagucuguaaucccagcacuuugggagg

SEQ ID NO: 493431 - RNA, 31 nt, Human
ucacaagugggucucccuuguccgggacuau

SEQ ID NO: 493432 - RNA, 32 nt, Human
ucacaauaaucugggacccaggcuugugcccu

SEQ ID NO: 493433 - RNA, 32 nt, Human
ucacaauacccugcagccuugaccucaugggc

SEQ ID NO: 493434 - RNA, 32 nt, Human
ucacaauauaaauuaaacuaauucauuuuugu

SEQ ID NO: 493435 - RNA, 32 nt, Human
ucacaaucaugccacacacuucugcaaggacu

SEQ ID NO: 493436 - RNA, 32 nt, Human
ucacaaucuuccaaugacuucucccuccggug

SEQ ID NO: 493437 - RNA, 32 nt, Human
ucacaaugacacacacaucacacacacaucac

SEQ ID NO: 493438 - RNA, 32 nt, Human
ucacaaugggucucucccaguaagagugcacu

SEQ ID NO: 493439 - RNA, 32 nt, Human
ucacaaugugaagcugugggugcaguggcgcc

SEQ ID NO: 493440 - RNA, 18 nt, Human
ucacaauuaaaauucuga

SEQ ID NO: 493441 - RNA, 20 nt, Human
ucacaauuaauaaacacaau

SEQ ID NO: 493442 - RNA, 32 nt, Human
ucacaauuagcucuugccccuaccccacgcca

SEQ ID NO: 493443 - RNA, 32 nt, Human
ucacaauucagcuucuaugaccaaaaugaguu

SEQ ID NO: 493444 - RNA, 32 nt, Human
ucacaauucuguagguuaggaguccagguuaa

SEQ ID NO: 493445 - RNA, 32 nt, Human
ucacacaaagcccagacgcggagaaaauggcg

SEQ ID NO: 493446 - RNA, 21 nt, Human
ucacacaaauuccaauugaga

SEQ ID NO: 493447 - RNA, 32 nt, Human
ucacacaacaaccuucugcucaacugacuuau

SEQ ID NO: 493448 - RNA, 32 nt, Human
ucacacaacacuguucacugaggacagcacca

SEQ ID NO: 493449 - RNA, 32 nt, Human
ucacacaacaggcuuaucagaaaccuaccaga

SEQ ID NO: 493450 - RNA, 24 nt, Human
ucacacaaccaugacgcacugcuc

SEQ ID NO: 493451 - RNA, 32 nt, Human
ucacacaacugcacuccagccugggcaacaga

SEQ ID NO: 493452 - RNA, 32 nt, Human
ucacacaauugcaguccagccugggcagcaag

SEQ ID NO: 493453 - RNA, 20 nt, Human
ucacacacaacuggcaccca

SEQ ID NO: 493454 - RNA, 32 nt, Human
ucacacacaguauacacauacacaagugcaca

SEQ ID NO: 493455 - RNA, 32 nt, Human
ucacacacccuagccucacacguuaggaggac

SEQ ID NO: 493456 - RNA, 32 nt, Human
ucacacacccugacaucugggccccgcgccac

SEQ ID NO: 493457 - RNA, 32 nt, Human
ucacacacgacaguugacaggucuucacgcag

SEQ ID NO: 493458 - RNA, 32 nt, Human
ucacacacgcagcagagguuucccuugaagug

SEQ ID NO: 493459 - RNA, 32 nt, Human
ucacacacucagccucugccucagguggcagg

SEQ ID NO: 493460 - RNA, 32 nt, Human
ucacacacuguugcagcgcagguuggaaucaa

SEQ ID NO: 493461 - RNA, 32 nt, Human
ucacacagaaaagaauguuucaggccauguuc

SEQ ID NO: 493462 - RNA, 32 nt, Human
ucacacagaacaacuuucuaaccuaguagugg

SEQ ID NO: 493463 - RNA, 32 nt, Human
ucacacagaucuuccccgaggaagaggggcug

SEQ ID NO: 493464 - RNA, 31 nt, Human
ucacacagcagagucagaaguagaagccaga

SEQ ID NO: 493465 - RNA, 32 nt, Human
ucacacagcaggcaguggcaggcaguagugaa

SEQ ID NO: 493466 - RNA, 32 nt, Human
ucacacagcccuucccucuggggcccaacaau

SEQ ID NO: 493467 - RNA, 32 nt, Human
ucacacagccuggccuguaccugcaccccacu

SEQ ID NO: 493468 - RNA, 23 nt, Human
ucacacagcuaauaaaagucaga

SEQ ID NO: 493469 - RNA, 32 nt, Human
ucacacagcuuuuuagcuuacauaacuggugc

SEQ ID NO: 493470 - RNA, 32 nt, Human
ucacacaggaagcaaguuacagaaccaagggc

SEQ ID NO: 493471 - RNA, 31 nt, Human
ucacacaggcacuuuguacacauccugguuu

SEQ ID NO: 493472 - RNA, 32 nt, Human
ucacacaggccuggggcaaucucuugaccuca

SEQ ID NO: 493473 - RNA, 22 nt, Human
ucacacaggcuggagugcagug

SEQ ID NO: 493474 - RNA, 32 nt, Human
ucacacaggcuggagugcaguggcgugagcuc

SEQ ID NO: 493475 - RNA, 32 nt, Human
ucacacaggcuggagugcaguggugugaucuu

SEQ ID NO: 493476 - RNA, 32 nt, Human
ucacacaggcugggugcaguggcucaugccug

SEQ ID NO: 493477 - RNA, 32 nt, Human
ucacacagucagcuaaaagcacuguggggaag

SEQ ID NO: 493478 - RNA, 21 nt, Human
ucacacagucucugcagguca

SEQ ID NO: 493479 - RNA, 32 nt, Human
ucacacagucuggagugcuguggugcaauuau

SEQ ID NO: 493480 - RNA, 32 nt, Human
ucacacagugccugcccucaccuguggaauuu

SEQ ID NO: 493481 - RNA, 32 nt, Human
ucacacaguuugccacacacacuggcaaaggc

SEQ ID NO: 493482 - RNA, 32 nt, Human
ucacacauagaaacacccacauggacacaagg

SEQ ID NO: 493483 - RNA, 17 nt, Human
ucacacauccccagcca

SEQ ID NO: 493484 - RNA, 32 nt, Human
ucacacaucuguauuccagccugggcaauaga

SEQ ID NO: 493485 - RNA, 32 nt, Human
ucacacaucuguccuggaaaaggcugaaccag

SEQ ID NO: 493486 - RNA, 32 nt, Human
ucacacaucuuccuccaggucagggagugaag

SEQ ID NO: 493487 - RNA, 32 nt, Human
ucacacaugcacuuccacuaccuggggagaau

SEQ ID NO: 493488 - RNA, 32 nt, Human
ucacacaugccacauccauugcagagaugcuc

SEQ ID NO: 493489 - RNA, 32 nt, Human
ucacacauguuaauuccagcacuuugggagac

SEQ ID NO: 493490 - RNA, 32 nt, Human
ucacaccaaacagagccccacaccaagaaaag

SEQ ID NO: 493491 - RNA, 32 nt, Human
ucacaccaacagcacacaccccuuuuucccau

SEQ ID NO: 493492 - RNA, 32 nt, Human
ucacaccacaguacuccagccuaggugacaga

SEQ ID NO: 493493 - RNA, 32 nt, Human
ucacaccaccacacuccaaccuguguaacaga

SEQ ID NO: 493494 - RNA, 32 nt, Human
ucacaccaccacacuccagccugagcagcaga

SEQ ID NO: 493495 - RNA, 32 nt, Human
ucacaccaccgcacuccacccugggaagcaaa

SEQ ID NO: 493496 - RNA, 32 nt, Human
ucacaccaccucacuccagccugggcaacaua

SEQ ID NO: 493497 - RNA, 32 nt, Human
ucacaccacuaauaagcaacagagccaggauu

SEQ ID NO: 493498 - RNA, 32 nt, Human
ucacaccacuacacuccagccaaagcaacaag

SEQ ID NO: 493499 - RNA, 32 nt, Human
ucacaccacuacacuccagccuaggcaacaga

SEQ ID NO: 493500 - RNA, 32 nt, Human
ucacaccacuacacuccagccuggacaacaga

SEQ ID NO: 493501 - RNA, 32 nt, Human
ucacaccacuacacuccagccugggcgacaga

SEQ ID NO: 493502 - RNA, 32 nt, Human
ucacaccacuacacuccagccugggcgagacg

SEQ ID NO: 493503 - RNA, 32 nt, Human
ucacaccacuacucuccaaccugggugacaga

SEQ ID NO: 493504 - RNA, 32 nt, Human
ucacaccacuccacuccagucuggacaacaga

SEQ ID NO: 493505 - RNA, 32 nt, Human
ucacaccacugaccucuagccugguggcagag

SEQ ID NO: 493506 - RNA, 32 nt, Human
ucacaccacugcaauccagccucgguaacaca

SEQ ID NO: 493507 - RNA, 32 nt, Human
ucacaccacugcaauccagccugggcgacaaa

SEQ ID NO: 493508 - RNA, 32 nt, Human
ucacaccacugcaccccagccugggugacagc

SEQ ID NO: 493509 - RNA, 32 nt, Human
ucacaccacugcacuacagccucggcaauaga

SEQ ID NO: 493510 - RNA, 32 nt, Human
ucacaccacugcacucagccugggugacagag

SEQ ID NO: 493511 - RNA, 32 nt, Human
ucacaccacugcacuccaaccuggacaacaga

SEQ ID NO: 493512 - RNA, 32 nt, Human
ucacaccacugcacuccaaccugggaaacgca

SEQ ID NO: 493513 - RNA, 32 nt, Human
ucacaccacugcacuccagccagggcaacagu

SEQ ID NO: 493514 - RNA, 32 nt, Human
ucacaccacugcacuccagcccaggugacaga

SEQ ID NO: 493515 - RNA, 32 nt, Human
ucacaccacugcacuccagccuaggcaacaga

SEQ ID NO: 493516 - RNA, 32 nt, Human
ucacaccacugcacuccagccuggacaacaga

SEQ ID NO: 493517 - RNA, 32 nt, Human
ucacaccacugcacuccagccuggacgacaga

SEQ ID NO: 493518 - RNA, 32 nt, Human
ucacaccacugcacuccagccuggcaacagag

SEQ ID NO: 493519 - RNA, 32 nt, Human
ucacaccacugcacuccagccuggcgacagag

SEQ ID NO: 493520 - RNA, 32 nt, Human
ucacaccacugcacuccagccugggagagaga

SEQ ID NO: 493521 - RNA, 32 nt, Human
ucacaccacugcacuccagccugggcaacaag

SEQ ID NO: 493522 - RNA, 32 nt, Human
ucacaccacugcacuccagccugggcaacaga

SEQ ID NO: 493523 - RNA, 32 nt, Human
ucacaccacugcacuccagccugggcaacuga

SEQ ID NO: 493524 - RNA, 32 nt, Human
ucacaccacugcacuccagccugggcaauaga

SEQ ID NO: 493525 - RNA, 32 nt, Human
ucacaccacugcacuccagccugggcgacaga

SEQ ID NO: 493526 - RNA, 32 nt, Human
ucacaccacugcacuccagccugggcgacagu

SEQ ID NO: 493527 - RNA, 32 nt, Human
ucacaccacugcacuccagccugggcggcaga

SEQ ID NO: 493528 - RNA, 32 nt, Human
ucacaccacugcacuccagccugggcuacaga

SEQ ID NO: 493529 - RNA, 32 nt, Human
ucacaccacugcacuccagccugggggacaga

SEQ ID NO: 493530 - RNA, 32 nt, Human
ucacaccacugcacuccagccuggggugauag

SEQ ID NO: 493531 - RNA, 32 nt, Human
ucacaccacugcacuccagccugggugacaga

SEQ ID NO: 493532 - RNA, 32 nt, Human
ucacaccacugcacuccagccugggugacagc

SEQ ID NO: 493533 - RNA, 32 nt, Human
ucacaccacugcacuccagccugggugauaga

SEQ ID NO: 493534 - RNA, 32 nt, Human
ucacaccacugcacuccagccuggguggcaga

SEQ ID NO: 493535 - RNA, 32 nt, Human
ucacaccacugcacuccagccugggugucaga

SEQ ID NO: 493536 - RNA, 32 nt, Human
ucacaccacugcacuccagccuggucaacaga

SEQ ID NO: 493537 - RNA, 32 nt, Human
ucacaccacugcacuccagccuggugacagag

SEQ ID NO: 493538 - RNA, 32 nt, Human
ucacaccacugcacuccagccugugcgacaga

SEQ ID NO: 493539 - RNA, 32 nt, Human
ucacaccacugcacuccagccuuggcgacaaa

SEQ ID NO: 493540 - RNA, 32 nt, Human
ucacaccacugcacuccagccuuggcgacaga

SEQ ID NO: 493541 - RNA, 32 nt, Human
ucacaccacugcacuccagccuuggugacaga

SEQ ID NO: 493542 - RNA, 32 nt, Human
ucacaccacugcacuccagcuugggggauaga

SEQ ID NO: 493543 - RNA, 32 nt, Human
ucacaccacugcacuccagucugggcaacagu

SEQ ID NO: 493544 - RNA, 32 nt, Human
ucacaccacugcacuccagucugggcaccaga

SEQ ID NO: 493545 - RNA, 32 nt, Human
ucacaccacugcacuccagugugagcaacaga

SEQ ID NO: 493546 - RNA, 32 nt, Human
ucacaccacugcacuccauccagccuggguga

SEQ ID NO: 493547 - RNA, 32 nt, Human
ucacaccacugcacuccauccugggcaacaga

SEQ ID NO: 493548 - RNA, 32 nt, Human
ucacaccacugcacuccggccugggcgacaga

SEQ ID NO: 493549 - RNA, 32 nt, Human
ucacaccacugcacucuagccugggcaacaga

SEQ ID NO: 493550 - RNA, 32 nt, Human
ucacaccacugcacucuagccugggugacaga

SEQ ID NO: 493551 - RNA, 32 nt, Human
ucacaccacugcacucuggccugcaugcacuc

SEQ ID NO: 493552 - RNA, 32 nt, Human
ucacaccacugcacuucagccuggaugacaga

SEQ ID NO: 493553 - RNA, 32 nt, Human
ucacaccacugcacuucagccugggcaacaga

SEQ ID NO: 493554 - RNA, 32 nt, Human
ucacaccacugcacuucauccuaggcaacaga

SEQ ID NO: 493555 - RNA, 32 nt, Human
ucacaccacugcauuccagccugggcacuaga

SEQ ID NO: 493556 - RNA, 32 nt, Human
ucacaccacugcauuccagccugggugacaga

SEQ ID NO: 493557 - RNA, 32 nt, Human
ucacaccacugcauucccgccugggcagcaga

SEQ ID NO: 493558 - RNA, 32 nt, Human
ucacaccacugcauucuggccugggugacaga

SEQ ID NO: 493559 - RNA, 32 nt, Human
ucacaccacugcgcucuagccugggcaacaag

SEQ ID NO: 493560 - RNA, 32 nt, Human
ucacaccacuggcacuccagccugggcaacag

SEQ ID NO: 493561 - RNA, 32 nt, Human
ucacaccacuggcugccagucagggccugcca

SEQ ID NO: 493562 - RNA, 32 nt, Human
ucacaccacuguacuccagcccggcacuccag

SEQ ID NO: 493563 - RNA, 32 nt, Human
ucacaccacuguacuccagccugagugacaaa

SEQ ID NO: 493564 - RNA, 32 nt, Human
ucacaccacuguacuccagccuggaugacaga

SEQ ID NO: 493565 - RNA, 32 nt, Human
ucacaccacuguacuccagccugggcaacaga

SEQ ID NO: 493566 - RNA, 32 nt, Human
ucacaccacuguacuccagccugggugacaaa

SEQ ID NO: 493567 - RNA, 32 nt, Human
ucacaccacuguacuccagccuggugacagag

SEQ ID NO: 493568 - RNA, 32 nt, Human
ucacaccacuguauuccagccugggugacaga

SEQ ID NO: 493569 - RNA, 32 nt, Human
ucacaccacuguauuccagccugggugacuga

SEQ ID NO: 493570 - RNA, 32 nt, Human
ucacaccacugugcucuagccugggugacaaa

SEQ ID NO: 493571 - RNA, 32 nt, Human
ucacaccagugcacuccagccugggcgacaga

SEQ ID NO: 493572 - RNA, 32 nt, Human
ucacaccauaaggagauuucuguuuuucuuuu

SEQ ID NO: 493573 - RNA, 32 nt, Human
ucacaccaucgcacuccagccuaggcaacaag

SEQ ID NO: 493574 - RNA, 32 nt, Human
ucacaccauucuccggccucagucucccgagu

SEQ ID NO: 493575 - RNA, 32 nt, Human
ucacaccauugcacuccaaccugggcaacaag

SEQ ID NO: 493576 - RNA, 32 nt, Human
ucacaccauugcacuccaaccugggcgacagg

SEQ ID NO: 493577 - RNA, 32 nt, Human
ucacaccauugcacuccagccuagauaacaag

SEQ ID NO: 493578 - RNA, 32 nt, Human
ucacaccauugcacuccagccuaggcaacaag

SEQ ID NO: 493579 - RNA, 32 nt, Human
ucacaccauugcacuccagccuaggcauggug

SEQ ID NO: 493580 - RNA, 32 nt, Human
ucacaccauugcacuccagccugagcaacaga

SEQ ID NO: 493581 - RNA, 32 nt, Human
ucacaccauugcacuccagccugggaaacaag

SEQ ID NO: 493582 - RNA, 32 nt, Human
ucacaccauugcacuccagccugggcaaaaag

SEQ ID NO: 493583 - RNA, 32 nt, Human
ucacaccauugcacuccagccugggcaacaag

SEQ ID NO: 493584 - RNA, 32 nt, Human
ucacaccauugcacuccagccugggcaacaga

SEQ ID NO: 493585 - RNA, 32 nt, Human
ucacaccauugcacuccagccugggcgacaag

SEQ ID NO: 493586 - RNA, 32 nt, Human
ucacaccauugcacuccagccugggcgacaga

SEQ ID NO: 493587 - RNA, 32 nt, Human
ucacaccauugcacuccagccugggcgacagg

SEQ ID NO: 493588 - RNA, 32 nt, Human
ucacaccauugcacuccagcuugggcaacaau

SEQ ID NO: 493589 - RNA, 32 nt, Human
ucacaccauugcacugcagccugggugaagaa

SEQ ID NO: 493590 - RNA, 32 nt, Human
ucacaccauugcacuucaaccuggucaacaga

SEQ ID NO: 493591 - RNA, 32 nt, Human
ucacaccauugcacuucagccugggcgacaca

SEQ ID NO: 493592 - RNA, 32 nt, Human
ucacaccauugcccuccagccugggugacaga

SEQ ID NO: 493593 - RNA, 32 nt, Human
ucacaccauugcgcuucagccugggcaacaag

SEQ ID NO: 493594 - RNA, 32 nt, Human
ucacaccauugcuguccagccugggugacaga

SEQ ID NO: 493595 - RNA, 21 nt, Human
ucacacccacuccagcccucu

SEQ ID NO: 493596 - RNA, 24 nt, Human
ucacacccauaaucccaacacuuu

SEQ ID NO: 493597 - RNA, 24 nt, Human
ucacacccauaaucccagcacuuu

SEQ ID NO: 493598 - RNA, 32 nt, Human
ucacacccauaaucccagcacuuugggaggcu

SEQ ID NO: 493599 - RNA, 32 nt, Human
ucacacccauagcgggagagaccucaugcaga

SEQ ID NO: 493600 - RNA, 32 nt, Human
ucacaccccaagccucagaggauugucuuacc

SEQ ID NO: 493601 - RNA, 32 nt, Human
ucacacccccaccugcauuuugaagucauauu

SEQ ID NO: 493602 - RNA, 32 nt, Human
ucacacccccuccucaagcugggccugcccuc

SEQ ID NO: 493603 - RNA, 32 nt, Human
ucacaccccugcacuccagccugggugacagc

SEQ ID NO: 493604 - RNA, 32 nt, Human
ucacaccccugcccugggccggcaggauccgg

SEQ ID NO: 493605 - RNA, 24 nt, Human
ucacacccguaaucccagcacuuu

SEQ ID NO: 493606 - RNA, 32 nt, Human
ucacacccguaaucccagcacuuugcggggcc

SEQ ID NO: 493607 - RNA, 29 nt, Human
ucacacccguaaucccagcacuuugggag

SEQ ID NO: 493608 - RNA, 32 nt, Human
ucacacccuaccuuccccagacuugcacuggg

SEQ ID NO: 493609 - RNA, 32 nt, Human
ucacacccuccccauuaguauccuguuagggg

SEQ ID NO: 493610 - RNA, 32 nt, Human
ucacacccugacuucagggaaggugaaacagg

SEQ ID NO: 493611 - RNA, 25 nt, Human
ucacacccuguaaucccagcacuuu

SEQ ID NO: 493612 - RNA, 32 nt, Human
ucacacccuguaaucccagcacuuugggaggc

SEQ ID NO: 493613 - RNA, 32 nt, Human
ucacacccuucuucugaccagcuccugucccc

SEQ ID NO: 493614 - RNA, 32 nt, Human
ucacacccuuucccucucccugugugccugcc

SEQ ID NO: 493615 - RNA, 32 nt, Human
ucacaccgcugcacucaagccugggugacagu

SEQ ID NO: 493616 - RNA, 32 nt, Human
ucacaccgcugcacucaagcuugggugacaga

SEQ ID NO: 493617 - RNA, 32 nt, Human
ucacaccgcugcacuccagccugggcaacaag

SEQ ID NO: 493618 - RNA, 23 nt, Human
ucacaccgguaaucccaacacuu

SEQ ID NO: 493619 - RNA, 24 nt, Human
ucacaccgguaaucccagcacuuu

SEQ ID NO: 493620 - RNA, 32 nt, Human
ucacaccgguaaucccagcacuuugggaggcc

SEQ ID NO: 493621 - RNA, 32 nt, Human
ucacaccgguaaucccagcacuuugggaggcu

SEQ ID NO: 493622 - RNA, 22 nt, Human
ucacaccuaaucccagcacuuu

SEQ ID NO: 493623 - RNA, 32 nt, Human
ucacaccuaccccuaccguccagccuggccuc

SEQ ID NO: 493624 - RNA, 23 nt, Human
ucacaccuauaaucccaacacuu

SEQ ID NO: 493625 - RNA, 24 nt, Human
ucacaccuauaaucccaacacuuu

SEQ ID NO: 493626 - RNA, 32 nt, Human
ucacaccuauaaucccaacacuuucggaggcc

SEQ ID NO: 493627 - RNA, 24 nt, Human
ucacaccuauaaucccaauacuuu

SEQ ID NO: 493628 - RNA, 32 nt, Human
ucacaccuauaaucccaauacuuugggaggcc

SEQ ID NO: 493629 - RNA, 32 nt, Human
ucacaccuauaaucccagcaccuuggguggcc

SEQ ID NO: 493630 - RNA, 22 nt, Human
ucacaccuauaaucccagcacu

SEQ ID NO: 493631 - RNA, 32 nt, Human
ucacaccuauaaucccagcacuaugggaggcu

SEQ ID NO: 493632 - RNA, 32 nt, Human
ucacaccuauaaucccagcacucugggaggcc

SEQ ID NO: 493633 - RNA, 24 nt, Human
ucacaccuauaaucccagcacuuu

SEQ ID NO: 493634 - RNA, 32 nt, Human
ucacaccuauaaucccagcacuuuaggaggcc

SEQ ID NO: 493635 - RNA, 32 nt, Human
ucacaccuauaaucccagcacuuugggaagcc

SEQ ID NO: 493636 - RNA, 32 nt, Human
ucacaccuauaaucccagcacuuugggaggca

SEQ ID NO: 493637 - RNA, 32 nt, Human
ucacaccuauaaucccagcacuuugggaggcc

SEQ ID NO: 493638 - RNA, 32 nt, Human
ucacaccuauaaucccagcacuuugggaggcu

SEQ ID NO: 493639 - RNA, 32 nt, Human
ucacaccuauaaucccagcacuuugggagggu

SEQ ID NO: 493640 - RNA, 32 nt, Human
ucacaccuauaaucccagcacuuugggagguu

SEQ ID NO: 493641 - RNA, 24 nt, Human
ucacaccuauaaucccagcccuuu

SEQ ID NO: 493642 - RNA, 32 nt, Human
ucacaccuauaaucccagcccuuugggagacu

SEQ ID NO: 493643 - RNA, 24 nt, Human
ucacaccuauaaucccagcgcuuu

SEQ ID NO: 493644 - RNA, 32 nt, Human
ucacaccuauaaucccagcgcuuuggaggcug

SEQ ID NO: 493645 - RNA, 24 nt, Human
ucacaccuauaauccuagcgcuuu

SEQ ID NO: 493646 - RNA, 24 nt, Human
ucacaccuauaauccuaggacuuu

SEQ ID NO: 493647 - RNA, 24 nt, Human
ucacaccuauaauccuggcacuuu

SEQ ID NO: 493648 - RNA, 23 nt, Human
ucacaccuauaaucgagcacuuu

SEQ ID NO: 493649 - RNA, 24 nt, Human
ucacaccuauaauuccagcacuuu

SEQ ID NO: 493650 - RNA, 22 nt, Human
ucacaccuauagucccagcacu

SEQ ID NO: 493651 - RNA, 32 nt, Human
ucacaccucacugcagccucaaucuuagcugg

SEQ ID NO: 493652 - RNA, 32 nt, Human
ucacaccucacugcagccuuggccucucaggc

SEQ ID NO: 493653 - RNA, 32 nt, Human
ucacaccucagggcagcgagaguggaccuggu

SEQ ID NO: 493654 - RNA, 24 nt, Human
ucacaccucuaaucccagcacuuu

SEQ ID NO: 493655 - RNA, 32 nt, Human
ucacaccucuaaucccagcacuuugggaggcu

SEQ ID NO: 493656 - RNA, 32 nt, Human
ucacaccucucaucguggaguuccaccaugug

SEQ ID NO: 493657 - RNA, 32 nt, Human
ucacaccucuuucugccucuacauauggccua

SEQ ID NO: 493658 - RNA, 24 nt, Human
ucacaccugaaaucccagcacuuu

SEQ ID NO: 493659 - RNA, 32 nt, Human
ucacaccugaaaucccagcacuuugggaggcc

SEQ ID NO: 493660 - RNA, 32 nt, Human
ucacaccugaagacaugcucucacauauagag

SEQ ID NO: 493661 - RNA, 32 nt, Human
ucacaccugacugcacuccagccuggguggca

SEQ ID NO: 493662 - RNA, 24 nt, Human
ucacaccugcaaucccagcacuuu

SEQ ID NO: 493663 - RNA, 32 nt, Human
ucacaccugcaaucccagcacuuuggaaggcc

SEQ ID NO: 493664 - RNA, 32 nt, Human
ucacaccugcaaucccagcacuuugggaggcc

SEQ ID NO: 493665 - RNA, 32 nt, Human
ucacaccugcaaucccaguacuuugagaggcc

SEQ ID NO: 493666 - RNA, 24 nt, Human
ucacaccuggaaucccagcauuuu

SEQ ID NO: 493667 - RNA, 18 nt, Human
ucacaccugggcaaacuu

SEQ ID NO: 493668 - RNA, 24 nt, Human
ucacaccuguaaacccagcacuuu

SEQ ID NO: 493669 - RNA, 24 nt, Human
ucacaccuguaaccccaacacuuu

SEQ ID NO: 493670 - RNA, 22 nt, Human
ucacaccuguaaccccagcacu

SEQ ID NO: 493671 - RNA, 24 nt, Human
ucacaccuguaaccccagcacuuu

SEQ ID NO: 493672 - RNA, 32 nt, Human
ucacaccuguaaccccagcacuuugggacgcc

SEQ ID NO: 493673 - RNA, 32 nt, Human
ucacaccuguaaccccagcacuuugggaggcu

SEQ ID NO: 493674 - RNA, 32 nt, Human
ucacaccuguaacccccagcacuuugggaggc

SEQ ID NO: 493675 - RNA, 24 nt, Human
ucacaccuguaacccuagcacuuu

SEQ ID NO: 493676 - RNA, 32 nt, Human
ucacaccuguaacccuagcacuuugggaggcc

SEQ ID NO: 493677 - RNA, 32 nt, Human
ucacaccuguaauaaucccagcacuuugggag

SEQ ID NO: 493678 - RNA, 32 nt, Human
ucacaccuguaauaccagcacuuugggaagug

SEQ ID NO: 493679 - RNA, 24 nt, Human
ucacaccuguaauaccagcaguuu

SEQ ID NO: 493680 - RNA, 32 nt, Human
ucacaccuguaauaccagcaguuugagaagcu

SEQ ID NO: 493681 - RNA, 32 nt, Human
ucacaccuguaaucacagcacuuugggaggcc

SEQ ID NO: 493682 - RNA, 32 nt, Human
ucacaccuguaaucacagcacuuugggaggcu

SEQ ID NO: 493683 - RNA, 24 nt, Human
ucacaccuguaauccaagcacuuu

SEQ ID NO: 493684 - RNA, 32 nt, Human
ucacaccuguaauccaagcacuuugggaggcc

SEQ ID NO: 493685 - RNA, 32 nt, Human
ucacaccuguaaucccaacacucugggaagcc

SEQ ID NO: 493686 - RNA, 24 nt, Human
ucacaccuguaaucccaacacuuu

SEQ ID NO: 493687 - RNA, 32 nt, Human
ucacaccuguaaucccaacacuuugagaggcu

SEQ ID NO: 493688 - RNA, 32 nt, Human
ucacaccuguaaucccaacacuuugagcggcu

SEQ ID NO: 493689 - RNA, 32 nt, Human
ucacaccuguaaucccaacacuuuggaaggcc

SEQ ID NO: 493690 - RNA, 32 nt, Human
ucacaccuguaaucccaacacuuugggaagcc

SEQ ID NO: 493691 - RNA, 32 nt, Human
ucacaccuguaaucccaacacuuugggaaucu

SEQ ID NO: 493692 - RNA, 32 nt, Human
ucacaccuguaaucccaacacuuugggacguu

SEQ ID NO: 493693 - RNA, 32 nt, Human
ucacaccuguaaucccaacacuuugggagccc

SEQ ID NO: 493694 - RNA, 32 nt, Human
ucacaccuguaaucccaacacuuugggaggcc

SEQ ID NO: 493695 - RNA, 32 nt, Human
ucacaccuguaaucccaacacuuugggaggcu

SEQ ID NO: 493696 - RNA, 32 nt, Human
ucacaccuguaaucccaacacuuugggaugcu

SEQ ID NO: 493697 - RNA, 24 nt, Human
ucacaccuguaaucccaacaguuu

SEQ ID NO: 493698 - RNA, 24 nt, Human
ucacaccuguaaucccaacauuuu

SEQ ID NO: 493699 - RNA, 32 nt, Human
ucacaccuguaaucccaacauuuugggaaccc

SEQ ID NO: 493700 - RNA, 32 nt, Human
ucacaccuguaaucccaacauuuugggaggcc

SEQ ID NO: 493701 - RNA, 32 nt, Human
ucacaccuguaaucccaacccuuugggaggcc

SEQ ID NO: 493702 - RNA, 22 nt, Human
ucacaccuguaaucccaauacu

SEQ ID NO: 493703 - RNA, 32 nt, Human
ucacaccuguaaucccaauacugggaagccaa

SEQ ID NO: 493704 - RNA, 32 nt, Human
ucacaccuguaaucccaauacuuuggguggcu

SEQ ID NO: 493705 - RNA, 24 nt, Human
ucacaccuguaaucccagaacuuu

SEQ ID NO: 493706 - RNA, 32 nt, Human
ucacaccuguaaucccagaacuuugggaggcc

SEQ ID NO: 493707 - RNA, 32 nt, Human
ucacaccuguaaucccagagcuucgggaggcc

SEQ ID NO: 493708 - RNA, 20 nt, Human
ucacaccuguaaucccagca

SEQ ID NO: 493709 - RNA, 32 nt, Human
ucacaccuguaaucccagcaauuugggagacc

SEQ ID NO: 493710 - RNA, 21 nt, Human
ucacaccuguaaucccagcac

SEQ ID NO: 493711 - RNA, 32 nt, Human
ucacaccuguaaucccagcacacugggaggcc

SEQ ID NO: 493712 - RNA, 32 nt, Human
ucacaccuguaaucccagcaccuugggaggcu

SEQ ID NO: 493713 - RNA, 32 nt, Human
ucacaccuguaaucccagcacguugggaggcu

SEQ ID NO: 493714 - RNA, 22 nt, Human
ucacaccuguaaucccagcacu

SEQ ID NO: 493715 - RNA, 32 nt, Human
ucacaccuguaaucccagcacuaugggaggcc

SEQ ID NO: 493716 - RNA, 32 nt, Human
ucacaccuguaaucccagcacucugggaggcc

SEQ ID NO: 493717 - RNA, 32 nt, Human
ucacaccuguaaucccagcacucugggagggc

SEQ ID NO: 493718 - RNA, 32 nt, Human
ucacaccuguaaucccagcacuguggaaagac

SEQ ID NO: 493719 - RNA, 23 nt, Human
ucacaccuguaaucccagcacuu

SEQ ID NO: 493720 - RNA, 32 nt, Human
ucacaccuguaaucccagcacuuagagaggcc

SEQ ID NO: 493721 - RNA, 32 nt, Human
ucacaccuguaaucccagcacuuagggaagac

SEQ ID NO: 493722 - RNA, 32 nt, Human
ucacaccuguaaucccagcacuuagggaggcu

SEQ ID NO: 493723 - RNA, 32 nt, Human
ucacaccuguaaucccagcacuuagguaggcc

SEQ ID NO: 493724 - RNA, 32 nt, Human
ucacaccuguaaucccagcacuucgggaagcc

SEQ ID NO: 493725 - RNA, 32 nt, Human
ucacaccuguaaucccagcacuucgggaggcc

SEQ ID NO: 493726 - RNA, 32 nt, Human
ucacaccuguaaucccagcacuucgggagguc

SEQ ID NO: 493727 - RNA, 32 nt, Human
ucacaccuguaaucccagcacuugggaagccc

SEQ ID NO: 493728 - RNA, 32 nt, Human
ucacaccuguaaucccagcacuuggggaagcu

SEQ ID NO: 493729 - RNA, 32 nt, Human
ucacaccuguaaucccagcacuuggggaggcu

SEQ ID NO: 493730 - RNA, 24 nt, Human
ucacaccuguaaucccagcacuuu

SEQ ID NO: 493731 - RNA, 32 nt, Human
ucacaccuguaaucccagcacuuuaggagguc

SEQ ID NO: 493732 - RNA, 32 nt, Human
ucacaccuguaaucccagcacuuucggaggcc

SEQ ID NO: 493733 - RNA, 32 nt, Human
ucacaccuguaaucccagcacuuugagaggau

SEQ ID NO: 493734 - RNA, 32 nt, Human
ucacaccuguaaucccagcacuuugagaggcc

SEQ ID NO: 493735 - RNA, 32 nt, Human
ucacaccuguaaucccagcacuuugcggggcu

SEQ ID NO: 493736 - RNA, 32 nt, Human
ucacaccuguaaucccagcacuuuggcaggcc

SEQ ID NO: 493737 - RNA, 32 nt, Human
ucacaccuguaaucccagcacuuugggaaccc

SEQ ID NO: 493738 - RNA, 32 nt, Human
ucacaccuguaaucccagcacuuugggaagcu

SEQ ID NO: 493739 - RNA, 32 nt, Human
ucacaccuguaaucccagcacuuugggaaguc

SEQ ID NO: 493740 - RNA, 32 nt, Human
ucacaccuguaaucccagcacuuugggacacc

SEQ ID NO: 493741 - RNA, 32 nt, Human
ucacaccuguaaucccagcacuuugggagacu

SEQ ID NO: 493742 - RNA, 32 nt, Human
ucacaccuguaaucccagcacuuugggagccc

SEQ ID NO: 493743 - RNA, 32 nt, Human
ucacaccuguaaucccagcacuuugggagccu

SEQ ID NO: 493744 - RNA, 32 nt, Human
ucacaccuguaaucccagcacuuugggaggac

SEQ ID NO: 493745 - RNA, 32 nt, Human
ucacaccuguaaucccagcacuuugggaggcc

SEQ ID NO: 493746 - RNA, 32 nt, Human
ucacaccuguaaucccagcacuuugggaggcg

SEQ ID NO: 493747 - RNA, 32 nt, Human
ucacaccuguaaucccagcacuuugggaggcu

SEQ ID NO: 493748 - RNA, 32 nt, Human
ucacaccuguaaucccagcacuuugggagggc

SEQ ID NO: 493749 - RNA, 32 nt, Human
ucacaccuguaaucccagcacuuugggagguc

SEQ ID NO: 493750 - RNA, 32 nt, Human
ucacaccuguaaucccagcacuuugggaggug

SEQ ID NO: 493751 - RNA, 32 nt, Human
ucacaccuguaaucccagcacuuugggagucc

SEQ ID NO: 493752 - RNA, 32 nt, Human
ucacaccuguaaucccagcacuuugggagucu

SEQ ID NO: 493753 - RNA, 32 nt, Human
ucacaccuguaaucccagcacuuugggauuac

SEQ ID NO: 493754 - RNA, 32 nt, Human
ucacaccuguaaucccagcacuuugggauucc

SEQ ID NO: 493755 - RNA, 32 nt, Human
ucacaccuguaaucccagcacuuuggggagcu

SEQ ID NO: 493756 - RNA, 32 nt, Human
ucacaccuguaaucccagcacuuuggguggcu

SEQ ID NO: 493757 - RNA, 32 nt, Human
ucacaccuguaaucccagcacuuugguaggcc

SEQ ID NO: 493758 - RNA, 32 nt, Human
ucacaccuguaaucccagcacuuuuggaggcc

SEQ ID NO: 493759 - RNA, 24 nt, Human
ucacaccuguaaucccagcaguuu

SEQ ID NO: 493760 - RNA, 32 nt, Human
ucacaccuguaaucccagcaguuuggaaggcc

SEQ ID NO: 493761 - RNA, 32 nt, Human
ucacaccuguaaucccagcaguuugggaggcc

SEQ ID NO: 493762 - RNA, 24 nt, Human
ucacaccuguaaucccagcauuuu

SEQ ID NO: 493763 - RNA, 32 nt, Human
ucacaccuguaaucccagcauuuugggaagcu

SEQ ID NO: 493764 - RNA, 32 nt, Human
ucacaccuguaaucccagcauuuugggaggca

SEQ ID NO: 493765 - RNA, 32 nt, Human
ucacaccuguaaucccagcauuuugggaggcc

SEQ ID NO: 493766 - RNA, 32 nt, Human
ucacaccuguaaucccagcauuuugggaggcu

SEQ ID NO: 493767 - RNA, 32 nt, Human
ucacaccuguaaucccagcccuuugggaggcu

SEQ ID NO: 493768 - RNA, 21 nt, Human
ucacaccuguaaucccagccu

SEQ ID NO: 493769 - RNA, 24 nt, Human
ucacaccuguaaucccagcgcuuu

SEQ ID NO: 493770 - RNA, 32 nt, Human
ucacaccuguaaucccagcgcuuugggaggcu

SEQ ID NO: 493771 - RNA, 23 nt, Human
ucacaccuguaaucccagcuacu

SEQ ID NO: 493772 - RNA, 32 nt, Human
ucacaccuguaaucccagcuacucagcagggu

SEQ ID NO: 493773 - RNA, 32 nt, Human
ucacaccuguaaucccagcuacucaggaagcu

SEQ ID NO: 493774 - RNA, 32 nt, Human
ucacaccuguaaucccagcuacuugggaggcu

SEQ ID NO: 493775 - RNA, 32 nt, Human
ucacaccuguaaucccagcuauucacgaggcu

SEQ ID NO: 493776 - RNA, 24 nt, Human
ucacaccuguaaucccagcucuuu

SEQ ID NO: 493777 - RNA, 32 nt, Human
ucacaccuguaaucccagcucuuuggaggccg

SEQ ID NO: 493778 - RNA, 32 nt, Human
ucacaccuguaaucccagcucuuugggaggcc

SEQ ID NO: 493779 - RNA, 32 nt, Human
ucacaccuguaaucccagcuguuugggaggcu

SEQ ID NO: 493780 - RNA, 24 nt, Human
ucacaccuguaaucccaggacuuu

SEQ ID NO: 493781 - RNA, 32 nt, Human
ucacaccuguaaucccaggacuuugggaggcu

SEQ ID NO: 493782 - RNA, 21 nt, Human
ucacaccuguaaucccaguac

SEQ ID NO: 493783 - RNA, 32 nt, Human
ucacaccuguaaucccaguaccuugggaggcc

SEQ ID NO: 493784 - RNA, 24 nt, Human
ucacaccuguaaucccaguacuuu

SEQ ID NO: 493785 - RNA, 32 nt, Human
ucacaccuguaaucccaguacuuugagacgcu

SEQ ID NO: 493786 - RNA, 32 nt, Human
ucacaccuguaaucccaguacuuugggaggcc

SEQ ID NO: 493787 - RNA, 32 nt, Human
ucacaccuguaaucccagugcuuugggaggcc

SEQ ID NO: 493788 - RNA, 25 nt, Human
ucacaccuguaauccccagcacuuu

SEQ ID NO: 493789 - RNA, 32 nt, Human
ucacaccuguaauccccagcacuuugggaggc

SEQ ID NO: 493790 - RNA, 24 nt, Human
ucacaccuguaauccccgcacuuu

SEQ ID NO: 493791 - RNA, 32 nt, Human
ucacaccuguaauccccgcacuuuggaaggcc

SEQ ID NO: 493792 - RNA, 23 nt, Human
ucacaccuguaaucccgcacuuu

SEQ ID NO: 493793 - RNA, 24 nt, Human
ucacaccuguaaucccggcacuuu

SEQ ID NO: 493794 - RNA, 32 nt, Human
ucacaccuguaaucccggcacuuugggaggcu

SEQ ID NO: 493795 - RNA, 32 nt, Human
ucacaccuguaaucccggcauuuugggaggcc

SEQ ID NO: 493796 - RNA, 24 nt, Human
ucacaccuguaaucccugcacuuu

SEQ ID NO: 493797 - RNA, 32 nt, Human
ucacaccuguaaucccugcacuuugggaggcc

SEQ ID NO: 493798 - RNA, 24 nt, Human
ucacaccuguaaucccugcauuuu

SEQ ID NO: 493799 - RNA, 24 nt, Human
ucacaccuguaauccgaguacuuu

SEQ ID NO: 493800 - RNA, 32 nt, Human
ucacaccuguaauccgaguacuuugcggggcu

SEQ ID NO: 493801 - RNA, 23 nt, Human
ucacaccuguaauccuaacacuu

SEQ ID NO: 493802 - RNA, 32 nt, Human
ucacaccuguaauccuaacacuuggggaggcu

SEQ ID NO: 493803 - RNA, 24 nt, Human
ucacaccuguaauccuaacacuuu

SEQ ID NO: 493804 - RNA, 32 nt, Human
ucacaccuguaauccuaacacuuugggaggcu

SEQ ID NO: 493805 - RNA, 32 nt, Human
ucacaccuguaauccuaaguaacacuuuggga

SEQ ID NO: 493806 - RNA, 32 nt, Human
ucacaccuguaauccuagaacuuugggaggcc

SEQ ID NO: 493807 - RNA, 21 nt, Human
ucacaccuguaauccuagcac

SEQ ID NO: 493808 - RNA, 32 nt, Human
ucacaccuguaauccuagcacauugggaggcc

SEQ ID NO: 493809 - RNA, 32 nt, Human
ucacaccuguaauccuagcacguggggaggcu

SEQ ID NO: 493810 - RNA, 24 nt, Human
ucacaccuguaauccuagcacuuu

SEQ ID NO: 493811 - RNA, 32 nt, Human
ucacaccuguaauccuagcacuuugggaggcc

SEQ ID NO: 493812 - RNA, 32 nt, Human
ucacaccuguaauccuagcacuuugggaggcu

SEQ ID NO: 493813 - RNA, 32 nt, Human
ucacaccuguaauccuagcacuuugggagguc

SEQ ID NO: 493814 - RNA, 32 nt, Human
ucacaccuguaauccuagcaguuugggaggcc

SEQ ID NO: 493815 - RNA, 21 nt, Human
ucacaccuguaauccuagcau

SEQ ID NO: 493816 - RNA, 32 nt, Human
ucacaccuguaauccuagcaucuugggaggcc

SEQ ID NO: 493817 - RNA, 24 nt, Human
ucacaccuguaauccuagcgcuuu

SEQ ID NO: 493818 - RNA, 32 nt, Human
ucacaccuguaauccuagcgcuuugggaggcc

SEQ ID NO: 493819 - RNA, 32 nt, Human
ucacaccuguaauccugcacuuugggagucug

SEQ ID NO: 493820 - RNA, 32 nt, Human
ucacaccuguaaucucaacacuuugggaggcc

SEQ ID NO: 493821 - RNA, 24 nt, Human
ucacaccuguaaucucaacgcuuu

SEQ ID NO: 493822 - RNA, 32 nt, Human
ucacaccuguaaucucaacgcuuugggagggg

SEQ ID NO: 493823 - RNA, 32 nt, Human
ucacaccuguaaucucagcaaccugggagucc

SEQ ID NO: 493824 - RNA, 21 nt, Human
ucacaccuguaaucucagcac

SEQ ID NO: 493825 - RNA, 32 nt, Human
ucacaccuguaaucucagcacguugggaaguu

SEQ ID NO: 493826 - RNA, 32 nt, Human
ucacaccuguaaucucagcacucugggaggcc

SEQ ID NO: 493827 - RNA, 24 nt, Human
ucacaccuguaaucucagcacuuu

SEQ ID NO: 493828 - RNA, 32 nt, Human
ucacaccuguaaucucagcacuuugggaaguu

SEQ ID NO: 493829 - RNA, 32 nt, Human
ucacaccuguaaucucagcacuuugggaggcc

SEQ ID NO: 493830 - RNA, 32 nt, Human
ucacaccuguaaucucagcacuuugggaggcg

SEQ ID NO: 493831 - RNA, 32 nt, Human
ucacaccuguaaucucagcacuuugggaggcu

SEQ ID NO: 493832 - RNA, 32 nt, Human
ucacaccuguaaucucagcacuuugggugguc

SEQ ID NO: 493833 - RNA, 24 nt, Human
ucacaccuguaaucucagcauuuu

SEQ ID NO: 493834 - RNA, 32 nt, Human
ucacaccuguaaucucagcauuuugggaggcc

SEQ ID NO: 493835 - RNA, 23 nt, Human
ucacaccuguaaucucagccucc

SEQ ID NO: 493836 - RNA, 32 nt, Human
ucacaccuguaaucucagccucccagacggcu

SEQ ID NO: 493837 - RNA, 24 nt, Human
ucacaccuguaaucugaacacuuu

SEQ ID NO: 493838 - RNA, 32 nt, Human
ucacaccuguaaucugagcacauugggaggcc

SEQ ID NO: 493839 - RNA, 32 nt, Human
ucacaccuguaaucugagcauucugggaggcc

SEQ ID NO: 493840 - RNA, 32 nt, Human
ucacaccuguaaucuuaacacugugggaggcc

SEQ ID NO: 493841 - RNA, 32 nt, Human
ucacaccuguaaugcagcucguuggguggcug

SEQ ID NO: 493842 - RNA, 32 nt, Human
ucacaccuguaaugccagcacuuugggcagcu

SEQ ID NO: 493843 - RNA, 24 nt, Human
ucacaccuguaaugccagcccuuu

SEQ ID NO: 493844 - RNA, 32 nt, Human
ucacaccuguaaugccagcccuuugggaggcc

SEQ ID NO: 493845 - RNA, 24 nt, Human
ucacaccuguaauuccaacacuuu

SEQ ID NO: 493846 - RNA, 32 nt, Human
ucacaccuguaauuccaacacuuugggaggca

SEQ ID NO: 493847 - RNA, 32 nt, Human
ucacaccuguaauuccagcacuucaggaggcc

SEQ ID NO: 493848 - RNA, 32 nt, Human
ucacaccuguaauuccagcacuuggggaggcc

SEQ ID NO: 493849 - RNA, 24 nt, Human
ucacaccuguaauuccagcacuuu

SEQ ID NO: 493850 - RNA, 32 nt, Human
ucacaccuguaauuccagcacuuugggaggcc

SEQ ID NO: 493851 - RNA, 32 nt, Human
ucacaccuguaauuccagcacuuugggaggcu

SEQ ID NO: 493852 - RNA, 32 nt, Human
ucacaccuguaauuccagcacuuugggagguc

SEQ ID NO: 493853 - RNA, 32 nt, Human
ucacaccuguaauuccagcacuuugugaggcu

SEQ ID NO: 493854 - RNA, 32 nt, Human
ucacaccuguaauucccagcgcuuugggaauu

SEQ ID NO: 493855 - RNA, 32 nt, Human
ucacaccuguaauucuagcacuuugggaggcu

SEQ ID NO: 493856 - RNA, 32 nt, Human
ucacaccuguaauugcagcacucugggaggcc

SEQ ID NO: 493857 - RNA, 24 nt, Human
ucacaccuguaauugcagcacuuu

SEQ ID NO: 493858 - RNA, 32 nt, Human
ucacaccuguaauugcagcacuuugggaggcu

SEQ ID NO: 493859 - RNA, 32 nt, Human
ucacaccuguaauuucagcaccuugggaggcc

SEQ ID NO: 493860 - RNA, 32 nt, Human
ucacaccuguaauuucagcacucuggggaggu

SEQ ID NO: 493861 - RNA, 23 nt, Human
ucacaccuguacucccagcacuu

SEQ ID NO: 493862 - RNA, 24 nt, Human
ucacaccuguacucccagcauuuu

SEQ ID NO: 493863 - RNA, 24 nt, Human
ucacaccuguagucccagcacuuu

SEQ ID NO: 493864 - RNA, 32 nt, Human
ucacaccuguagucccagcuacuugggaggcu

SEQ ID NO: 493865 - RNA, 24 nt, Human
ucacaccuguauucccagcacuuu

SEQ ID NO: 493866 - RNA, 24 nt, Human
ucacaccugucaucccagcacuuu

SEQ ID NO: 493867 - RNA, 32 nt, Human
ucacaccugucaucccagcacuuugggaggcc

SEQ ID NO: 493868 - RNA, 32 nt, Human
ucacaccugucaucccagcaguuugggaggcc

SEQ ID NO: 493869 - RNA, 19 nt, Human
ucacaccugucauuccggc

SEQ ID NO: 493870 - RNA, 23 nt, Human
ucacaccugugacggaagcacuu

SEQ ID NO: 493871 - RNA, 24 nt, Human
ucacaccugugaucccaacauuuu

SEQ ID NO: 493872 - RNA, 22 nt, Human
ucacaccugugaucccagcacu

SEQ ID NO: 493873 - RNA, 23 nt, Human
ucacaccugugaucccagcacuu

SEQ ID NO: 493874 - RNA, 32 nt, Human
ucacaccugugaucccagcacuugggaagguc

SEQ ID NO: 493875 - RNA, 32 nt, Human
ucacaccugugaucccagcacuuggggagaac

SEQ ID NO: 493876 - RNA, 24 nt, Human
ucacaccugugaucccagcacuuu

SEQ ID NO: 493877 - RNA, 32 nt, Human
ucacaccugugaucccagcacuuugggaggcc

SEQ ID NO: 493878 - RNA, 32 nt, Human
ucacaccugugaucccagcacuuugggaggcu

SEQ ID NO: 493879 - RNA, 24 nt, Human
ucacaccugugaucccagcauuuu

SEQ ID NO: 493880 - RNA, 27 nt, Human
ucacaccugugauccccccagcacuuu

SEQ ID NO: 493881 - RNA, 21 nt, Human
ucacaccugugaucucagcac

SEQ ID NO: 493882 - RNA, 25 nt, Human
ucacaccuguggaaucccagcacuu

SEQ ID NO: 493883 - RNA, 32 nt, Human
ucacaccuguggucccagcucuuuggaaggcc

SEQ ID NO: 493884 - RNA, 32 nt, Human
ucacaccuguggugucagcuacucgggaggcu

SEQ ID NO: 493885 - RNA, 24 nt, Human
ucacaccuguuaaucccagcacuu

SEQ ID NO: 493886 - RNA, 24 nt, Human
ucacaccuguuaucccagcacuuu

SEQ ID NO: 493887 - RNA, 23 nt, Human
ucacaccuuaaucccagcacuuu

SEQ ID NO: 493888 - RNA, 32 nt, Human
ucacaccuucuguuccccuccuggccugugca

SEQ ID NO: 493889 - RNA, 25 nt, Human
ucacaccuuguaaucccagcacuuu

SEQ ID NO: 493890 - RNA, 24 nt, Human
ucacaccuuuaaucccagcacuuu

SEQ ID NO: 493891 - RNA, 32 nt, Human
ucacaccuuuaaucccagcacuuugggaagcc

SEQ ID NO: 493892 - RNA, 32 nt, Human
ucacaccuuuaaucccagcacuuugggagacu

SEQ ID NO: 493893 - RNA, 24 nt, Human
ucacaccuuuaauccuagcacuuu

SEQ ID NO: 493894 - RNA, 32 nt, Human
ucacacgaauaccugccuucucuggcuuuccu

SEQ ID NO: 493895 - RNA, 32 nt, Human
ucacacgacugcauucuagccugggugacaga

SEQ ID NO: 493896 - RNA, 32 nt, Human
ucacacgcaccguguccccacccaggacagca

SEQ ID NO: 493897 - RNA, 32 nt, Human
ucacacgccacugcacuccagccugggugaca

SEQ ID NO: 493898 - RNA, 32 nt, Human
ucacacgccuguaaucccagcacuuugggagg

SEQ ID NO: 493899 - RNA, 32 nt, Human
ucacacgcuggaagaagugggaaagguuugua

SEQ ID NO: 493900 - RNA, 32 nt, Human
ucacacggaaauggguacuugguggcauagag

SEQ ID NO: 493901 - RNA, 32 nt, Human
ucacacggaggcagagguggggaugagguaug

SEQ ID NO: 493902 - RNA, 32 nt, Human
ucacacuacagcccuggugggggagaaggggg

SEQ ID NO: 493903 - RNA, 32 nt, Human
ucacacuacugcacuccagccugggcaacaga

SEQ ID NO: 493904 - RNA, 32 nt, Human
ucacacuacugcacuccagccugggcgacaaa

SEQ ID NO: 493905 - RNA, 32 nt, Human
ucacacuacugcacuccugcaugggcgacuga

SEQ ID NO: 493906 - RNA, 32 nt, Human
ucacacuacugcauuccagccugagcaacaga

SEQ ID NO: 493907 - RNA, 32 nt, Human
ucacacuaucacugccccaaauugucuuucua

SEQ ID NO: 493908 - RNA, 32 nt, Human
ucacacuauugcacuccagccugggcgacagg

SEQ ID NO: 493909 - RNA, 32 nt, Human
ucacacucaguccuggccuugcucugagggua

SEQ ID NO: 493910 - RNA, 32 nt, Human
ucacacucauucucaacccccugacaaaacac

SEQ ID NO: 493911 - RNA, 32 nt, Human
ucacacuccacucaccuccaccucccaaagug

SEQ ID NO: 493912 - RNA, 32 nt, Human
ucacacuccagccuggguaacagagugagacu

SEQ ID NO: 493913 - RNA, 32 nt, Human
ucacacuccagugcuuuuaagcagguuuuccc

SEQ ID NO: 493914 - RNA, 32 nt, Human
ucacacuccugcucacuagcccccaggcgcag

SEQ ID NO: 493915 - RNA, 22 nt, Human
ucacacuccuggccucaaguga

SEQ ID NO: 493916 - RNA, 32 nt, Human
ucacacuccugggcucugaacacacacgccag

SEQ ID NO: 493917 - RNA, 23 nt, Human
ucacacucguccccagcuuagca

SEQ ID NO: 493918 - RNA, 32 nt, Human
ucacacucuccaggcuggagugcaguggcaca

SEQ ID NO: 493919 - RNA, 32 nt, Human
ucacacucuccucagcucucucaucuccugga

SEQ ID NO: 493920 - RNA, 32 nt, Human
ucacacucuuucaagagaagcuuccuuggaca

SEQ ID NO: 493921 - RNA, 32 nt, Human
ucacacucuuucaagagaagcuuccuuggguu

SEQ ID NO: 493922 - RNA, 32 nt, Human
ucacacugaggccuuggggacugaggcccugg

SEQ ID NO: 493923 - RNA, 32 nt, Human
ucacacugauaauacagacauaccugaaacug

SEQ ID NO: 493924 - RNA, 32 nt, Human
ucacacugcaggcaggcuuuagagugcuuuga

SEQ ID NO: 493925 - RNA, 32 nt, Human
ucacacugcccaggcuggagcauaguggcaag

SEQ ID NO: 493926 - RNA, 32 nt, Human
ucacacugcugcacuccagccugugcaacaga

SEQ ID NO: 493927 - RNA, 18 nt, Human
ucacacuggcccagagaa

SEQ ID NO: 493928 - RNA, 32 nt, Human
ucacacuggggaaacucauuuuccccugcagc

SEQ ID NO: 493929 - RNA, 32 nt, Human
ucacacugggguccccaaagaagucaagaucu

SEQ ID NO: 493930 - RNA, 23 nt, Human
ucacacuguaaugccagcacuuu

SEQ ID NO: 493931 - RNA, 32 nt, Human
ucacacuguaaugccagcacuuugggaggcua

SEQ ID NO: 493932 - RNA, 32 nt, Human
ucacacugucgccaggcuggagugcaguggug

SEQ ID NO: 493933 - RNA, 32 nt, Human
ucacacuuaaagucuucagcccagcuacuucc

SEQ ID NO: 493934 - RNA, 24 nt, Human
ucacacuuauaaucccagcacuuu

SEQ ID NO: 493935 - RNA, 32 nt, Human
ucacacuuauaaucccagcacuuugggaggcc

SEQ ID NO: 493936 - RNA, 24 nt, Human
ucacacuuaucaucucagcacuuu

SEQ ID NO: 493937 - RNA, 32 nt, Human
ucacacuucugccucuugcaaaauugcuggaa

SEQ ID NO: 493938 - RNA, 32 nt, Human
ucacacuugccucccauccugccugcagaaaa

SEQ ID NO: 493939 - RNA, 32 nt, Human
ucacacuugcuggcuugcgcaucaggacuggc

SEQ ID NO: 493940 - RNA, 24 nt, Human
ucacacuuguaaucccaacacuuu

SEQ ID NO: 493941 - RNA, 32 nt, Human
ucacacuuguaaucccaacacuuuggaaggcu

SEQ ID NO: 493942 - RNA, 32 nt, Human
ucacacuuguaaucccagcaauuugggaggcu

SEQ ID NO: 493943 - RNA, 24 nt, Human
ucacacuuguaaucccagcacuuu

SEQ ID NO: 493944 - RNA, 32 nt, Human
ucacacuuguaaucccagcacuuugagguggg

SEQ ID NO: 493945 - RNA, 32 nt, Human
ucacacuuguaaucccagcacuuugggaagcc

SEQ ID NO: 493946 - RNA, 32 nt, Human
ucacacuuguaaucccagcacuuugggaggcc

SEQ ID NO: 493947 - RNA, 32 nt, Human
ucacacuuguaaucccagcacuuugggaugcu

SEQ ID NO: 493948 - RNA, 32 nt, Human
ucacacuuguaaucccagcauuuugggaggcc

SEQ ID NO: 493949 - RNA, 32 nt, Human
ucacacuuguaauccuaguacuuugggaggcc

SEQ ID NO: 493950 - RNA, 32 nt, Human
ucacagaaaaaucugcccagagccuacccuca

SEQ ID NO: 493951 - RNA, 32 nt, Human
ucacagaaaacauuguuccucccuccacaccu

SEQ ID NO: 493952 - RNA, 32 nt, Human
ucacagaaacuggggaagggaaaacaaaccuu

SEQ ID NO: 493953 - RNA, 32 nt, Human
ucacagaaaggcagguuucauuucuuaucaca

SEQ ID NO: 493954 - RNA, 32 nt, Human
ucacagaacaaagaguaaagaggcugagugug

SEQ ID NO: 493955 - RNA, 32 nt, Human
ucacagaacaaagccagguacucuccaucacc

SEQ ID NO: 493956 - RNA, 32 nt, Human
ucacagaacccuuuuccugacucucauggaag

SEQ ID NO: 493957 - RNA, 32 nt, Human
ucacagaacuccaccauugugggcuuugagag

SEQ ID NO: 493958 - RNA, 32 nt, Human
ucacagaacuuguagucuucugccccaaacaa

SEQ ID NO: 493959 - RNA, 32 nt, Human
ucacagaagggccuggaugcaagguuacccuu

SEQ ID NO: 493960 - RNA, 32 nt, Human
ucacagaaguagugguuugcuuugauggaaau

SEQ ID NO: 493961 - RNA, 32 nt, Human
ucacagacacuacauaucuaaagcuuugacaa

SEQ ID NO: 493962 - RNA, 32 nt, Human
ucacagacacugcacagaccuuagggaauggc

SEQ ID NO: 493963 - RNA, 32 nt, Human
ucacagacagagagggugagggguugagccca

SEQ ID NO: 493964 - RNA, 32 nt, Human
ucacagacaugaggaagcaggcuguagauuua

SEQ ID NO: 493965 - RNA, 32 nt, Human
ucacagaccacagcuucuaugugagggagagc

SEQ ID NO: 493966 - RNA, 32 nt, Human
ucacagaccagaaaaaguuccaucuaaaauau

SEQ ID NO: 493967 - RNA, 32 nt, Human
ucacagacccucccccuaccaguggguguggc

SEQ ID NO: 493968 - RNA, 32 nt, Human
ucacagacccucucaggccucugacgagugag

SEQ ID NO: 493969 - RNA, 23 nt, Human
ucacagacugcagacccccggcu

SEQ ID NO: 493970 - RNA, 32 nt, Human
ucacagacuuaacagcccagcacuucauacga

SEQ ID NO: 493971 - RNA, 32 nt, Human
ucacagacuucccuaguguuuguacuacacgu

SEQ ID NO: 493972 - RNA, 32 nt, Human
ucacagagaaugucuuauacagcaacugcuca

SEQ ID NO: 493973 - RNA, 32 nt, Human
ucacagagauccagagaacagaaacaagagcc

SEQ ID NO: 493974 - RNA, 32 nt, Human
ucacagagcaccccaguuccucaccagcuacu

SEQ ID NO: 493975 - RNA, 19 nt, Human
ucacagagcagcaaguuca

SEQ ID NO: 493976 - RNA, 32 nt, Human
ucacagagcagugauaacuaccugccaguguc

SEQ ID NO: 493977 - RNA, 32 nt, Human
ucacagagcuaaaaacucaguucccaaauccc

SEQ ID NO: 493978 - RNA, 32 nt, Human
ucacagagcucucugguugggcugcucuauaa

SEQ ID NO: 493979 - RNA, 21 nt, Human
ucacagaggcccccucuguca

SEQ ID NO: 493980 - RNA, 32 nt, Human
ucacagaggcgguuguaagaggaugugguuau

SEQ ID NO: 493981 - RNA, 32 nt, Human
ucacagaggcucacccuuugccacuuuccuga

SEQ ID NO: 493982 - RNA, 32 nt, Human
ucacagaggcugccuuucuccugagcucgggg

SEQ ID NO: 493983 - RNA, 32 nt, Human
ucacagagggcacuguggucacacacagugcc

SEQ ID NO: 493984 - RNA, 32 nt, Human
ucacagagggcagggccaggguccagcagggg

SEQ ID NO: 493985 - RNA, 32 nt, Human
ucacagaggggcucgguggcccaggugguggu

SEQ ID NO: 493986 - RNA, 32 nt, Human
ucacagagucccaacucagaggaaaagggcca

SEQ ID NO: 493987 - RNA, 32 nt, Human
ucacagaguguggacaucagcccagggccgcg

SEQ ID NO: 493988 - RNA, 32 nt, Human
ucacagaucaucaagacuucucucuucuguca

SEQ ID NO: 493989 - RNA, 32 nt, Human
ucacagaugaacaaacuucuacacugauuuuu

SEQ ID NO: 493990 - RNA, 32 nt, Human
ucacagaugaaccugcagacccugccagagug

SEQ ID NO: 493991 - RNA, 32 nt, Human
ucacagaugagcgcaggcagagcucugugugc

SEQ ID NO: 493992 - RNA, 32 nt, Human
ucacagaugaggcugccccugcccccuccccg

SEQ ID NO: 493993 - RNA, 32 nt, Human
ucacagaugccaucaagcugauccucgcuugg

SEQ ID NO: 493994 - RNA, 32 nt, Human
ucacagauggauaaaugaggcugauguuugga

SEQ ID NO: 493995 - RNA, 32 nt, Human
ucacagauucacauacgacugaucuugauuuu

SEQ ID NO: 493996 - RNA, 32 nt, Human
ucacagauugcauaaauucacccaugaaucua

SEQ ID NO: 493997 - RNA, 32 nt, Human
ucacagauuuggugagaggagcacggagugcu

SEQ ID NO: 493998 - RNA, 32 nt, Human
ucacagcaaacuuggaaagaaggcuaugacuc

SEQ ID NO: 493999 - RNA, 24 nt, Human
ucacagcaaccucugccucccagg

SEQ ID NO: 494000 - RNA, 32 nt, Human
ucacagcaacuccugaggaaagugcuauucuu

SEQ ID NO: 494001 - RNA, 32 nt, Human
ucacagcaacuggcuggaaaagaaagggaaaa

SEQ ID NO: 494002 - RNA, 22 nt, Human
ucacagcaaggaccacagagcg

SEQ ID NO: 494003 - RNA, 19 nt, Human
ucacagcaaggaccggacg

SEQ ID NO: 494004 - RNA, 32 nt, Human
ucacagcacagagugaccgcugccuggcguuc

SEQ ID NO: 494005 - RNA, 32 nt, Human
ucacagcacagggagaaaaacugagguacaca

SEQ ID NO: 494006 - RNA, 21 nt, Human
ucacagcacccucagcaccuu

SEQ ID NO: 494007 - RNA, 32 nt, Human
ucacagcacuccuuugccccagagcagagaau

SEQ ID NO: 494008 - RNA, 32 nt, Human
ucacagcacugcacugcagccugggugacaaa

SEQ ID NO: 494009 - RNA, 32 nt, Human
ucacagcacugcacugcugccugggcgacagc

SEQ ID NO: 494010 - RNA, 32 nt, Human
ucacagcagcuggcuggcuugacuuugccaac

SEQ ID NO: 494011 - RNA, 32 nt, Human
ucacagcagucacaggcccaggaaggcggcag

SEQ ID NO: 494012 - RNA, 20 nt, Human
ucacagcauaauuucccggc

SEQ ID NO: 494013 - RNA, 32 nt, Human
ucacagcauauaggucaggaaagaauggagac

SEQ ID NO: 494014 - RNA, 32 nt, Human
ucacagcauauuguaugagacugugugagugc

SEQ ID NO: 494015 - RNA, 32 nt, Human
ucacagcauuuagugcuuccugccugguguga

SEQ ID NO: 494016 - RNA, 32 nt, Human
ucacagccaaaagccugggacucuuugugaag

SEQ ID NO: 494017 - RNA, 32 nt, Human
ucacagccaaggccccuuccacccucuccaga

SEQ ID NO: 494018 - RNA, 32 nt, Human
ucacagccaaggcuggacuggguuggcugcag

SEQ ID NO: 494019 - RNA, 32 nt, Human
ucacagccaauuucacacaguacuacgaagag

SEQ ID NO: 494020 - RNA, 18 nt, Human
ucacagccacccccacca

SEQ ID NO: 494021 - RNA, 32 nt, Human
ucacagccaccuggaacccaagccagcugagc

SEQ ID NO: 494022 - RNA, 32 nt, Human
ucacagccacuagaaacccaucagccuuuccc

SEQ ID NO: 494023 - RNA, 19 nt, Human
ucacagccacugcuuggca

SEQ ID NO: 494024 - RNA, 19 nt, Human
ucacagccagccaaaggca

SEQ ID NO: 494025 - RNA, 32 nt, Human
ucacagcccagagcauguuccagaucccagag

SEQ ID NO: 494026 - RNA, 32 nt, Human
ucacagcccaggagggaggguagcuuggcacu

SEQ ID NO: 494027 - RNA, 32 nt, Human
ucacagcccaucccaucuccccgacgccgccc

SEQ ID NO: 494028 - RNA, 32 nt, Human
ucacagccccucagcaccaagcagaagguggc

SEQ ID NO: 494029 - RNA, 32 nt, Human
ucacagccccuccauguuaccucccgcaccuc

SEQ ID NO: 494030 - RNA, 31 nt, Human
ucacagcccuucucugggucuugaagucccu

SEQ ID NO: 494031 - RNA, 32 nt, Human
ucacagccguaaucccagcuacucgggaggcu

SEQ ID NO: 494032 - RNA, 32 nt, Human
ucacagccucauuccugccuuuucucagccau

SEQ ID NO: 494033 - RNA, 32 nt, Human
ucacagccuccuuacucuccccaggcuuugcu

SEQ ID NO: 494034 - RNA, 32 nt, Human
ucacagccucuguaucucugcaggccauacug

SEQ ID NO: 494035 - RNA, 32 nt, Human
ucacagcggaggugacacacaccgcauggagu

SEQ ID NO: 494036 - RNA, 32 nt, Human
ucacagcguagcuguucccaggaaaggggugc

SEQ ID NO: 494037 - RNA, 32 nt, Human
ucacagcuaaguagcuguggccaccggcaguu

SEQ ID NO: 494038 - RNA, 31 nt, Human
ucacagcuacucagggagguugaggcagcag

SEQ ID NO: 494039 - RNA, 32 nt, Human
ucacagcuacucgggagguugaggcaggagaa

SEQ ID NO: 494040 - RNA, 24 nt, Human
ucacagcuauaaucucagcacuuu

SEQ ID NO: 494041 - RNA, 32 nt, Human
ucacagcuaugaauaagcuuucagguuuuauu

SEQ ID NO: 494042 - RNA, 32 nt, Human
ucacagcucacagcaggcuccaccucucaggc

SEQ ID NO: 494043 - RNA, 32 nt, Human
ucacagcucacugaagucucgaccucccaggc

SEQ ID NO: 494044 - RNA, 32 nt, Human
ucacagcucacugcaaccucaaacuccugggc

SEQ ID NO: 494045 - RNA, 32 nt, Human
ucacagcucacugcaaccucaauccugggcuc

SEQ ID NO: 494046 - RNA, 32 nt, Human
ucacagcucacugcaaccucuacucccaggcu

SEQ ID NO: 494047 - RNA, 32 nt, Human
ucacagcucacugcaaccuuacuccuaggcuc

SEQ ID NO: 494048 - RNA, 32 nt, Human
ucacagcucacugcagcccugaacuccugggc

SEQ ID NO: 494049 - RNA, 32 nt, Human
ucacagcucacugcagccucaaacuccugggc

SEQ ID NO: 494050 - RNA, 32 nt, Human
ucacagcucacugcagccucaaccucugaagg

SEQ ID NO: 494051 - RNA, 32 nt, Human
ucacagcucacugcagccucaaccuggguuca

SEQ ID NO: 494052 - RNA, 32 nt, Human
ucacagcucacugcagccuccaccuccugggc

SEQ ID NO: 494053 - RNA, 32 nt, Human
ucacagcucacugcagccuccaucuccuaggc

SEQ ID NO: 494054 - RNA, 32 nt, Human
ucacagcucacugcagccucgaccucccgggc

SEQ ID NO: 494055 - RNA, 32 nt, Human
ucacagcucacugcagccucgaccuccugcgc

SEQ ID NO: 494056 - RNA, 32 nt, Human
ucacagcucacugcagccucgaccuccuggac

SEQ ID NO: 494057 - RNA, 32 nt, Human
ucacagcucacugcagccucgaccuccugggc

SEQ ID NO: 494058 - RNA, 32 nt, Human
ucacagcucacugcagccucgacuucccaggc

SEQ ID NO: 494059 - RNA, 32 nt, Human
ucacagcucacugcagccuggaccuccuggcc

SEQ ID NO: 494060 - RNA, 32 nt, Human
ucacagcucacugcagccuugaccucccgggc

SEQ ID NO: 494061 - RNA, 32 nt, Human
ucacagcucacugcagccuugaccuccugggu

SEQ ID NO: 494062 - RNA, 32 nt, Human
ucacagcucacugcagccuugagcuccugggc

SEQ ID NO: 494063 - RNA, 32 nt, Human
ucacagcucacugcagccuuguccucccaggc

SEQ ID NO: 494064 - RNA, 32 nt, Human
ucacagcucacugcagcuuugaucugaccgcu

SEQ ID NO: 494065 - RNA, 32 nt, Human
ucacagcucacugcagguucagccuucugagu

SEQ ID NO: 494066 - RNA, 32 nt, Human
ucacagcucacugcagucucgaacuccuggac

SEQ ID NO: 494067 - RNA, 32 nt, Human
ucacagcucacugcugccucgaccuccgucag

SEQ ID NO: 494068 - RNA, 32 nt, Human
ucacagcucacuguagccucgaccuuccaggc

SEQ ID NO: 494069 - RNA, 32 nt, Human
ucacagcucacuguagccucuaacucccaggc

SEQ ID NO: 494070 - RNA, 32 nt, Human
ucacagcucacuguagccuugaucuccugggc

SEQ ID NO: 494071 - RNA, 32 nt, Human
ucacagcuccuggccuuguugugcauaugagg

SEQ ID NO: 494072 - RNA, 32 nt, Human
ucacagcucugccucacagcacccuggccaag

SEQ ID NO: 494073 - RNA, 32 nt, Human
ucacagcugcuuggauggcugaggcaggagaa

SEQ ID NO: 494074 - RNA, 32 nt, Human
ucacagcuggacccugcuucacccucaccccc

SEQ ID NO: 494075 - RNA, 32 nt, Human
ucacagcuguaaucccagcacuuagggagguc

SEQ ID NO: 494076 - RNA, 24 nt, Human
ucacagcuguaaucccagcacuuu

SEQ ID NO: 494077 - RNA, 32 nt, Human
ucacagcuguaaucccagcacuuugagguugg

SEQ ID NO: 494078 - RNA, 32 nt, Human
ucacagcuguguaugugugcucaaauuuaucc

SEQ ID NO: 494079 - RNA, 32 nt, Human
ucacagcuucuccaagugccuagugaaacggg

SEQ ID NO: 494080 - RNA, 32 nt, Human
ucacagcuuggcugagcucugucucugcaggu

SEQ ID NO: 494081 - RNA, 32 nt, Human
ucacaggaaauguugauuuucuaagguccuca

SEQ ID NO: 494082 - RNA, 16 nt, Human
ucacaggaaggcuguc

SEQ ID NO: 494083 - RNA, 22 nt, Human
ucacaggaauucugauugcuga

SEQ ID NO: 494084 - RNA, 32 nt, Human
ucacaggacggcuccugggcagcugggcccuc

SEQ ID NO: 494085 - RNA, 32 nt, Human
ucacaggacucugcagauagugccucugcaaa

SEQ ID NO: 494086 - RNA, 32 nt, Human
ucacaggacuugugauuguguuaaauucucac

SEQ ID NO: 494087 - RNA, 32 nt, Human
ucacaggagccacugcacuccagccuggguga

SEQ ID NO: 494088 - RNA, 32 nt, Human
ucacaggaugaauuaagaauugccaagguguu

SEQ ID NO: 494089 - RNA, 32 nt, Human
ucacaggaugacacccucccauaccccauagc

SEQ ID NO: 494090 - RNA, 32 nt, Human
ucacaggaugccuuauuugucuucuacacccc

SEQ ID NO: 494091 - RNA, 32 nt, Human
ucacaggcagcucugagccgcgcuuuccccuc

SEQ ID NO: 494092 - RNA, 32 nt, Human
ucacaggcaggaaccucaugcucugaggaagu

SEQ ID NO: 494093 - RNA, 32 nt, Human
ucacaggcauauucccugcacacacaugcaua

SEQ ID NO: 494094 - RNA, 32 nt, Human
ucacaggcaugccacguggccugagaugauuc

SEQ ID NO: 494095 - RNA, 21 nt, Human
ucacaggccagcuggccgggg

SEQ ID NO: 494096 - RNA, 22 nt, Human
ucacaggccauccuugcugcuc

SEQ ID NO: 494097 - RNA, 32 nt, Human
ucacaggcccuuacugggaugcagagaggaga

SEQ ID NO: 494098 - RNA, 32 nt, Human
ucacaggccuagcucaugucauggaucaggug

SEQ ID NO: 494099 - RNA, 32 nt, Human
ucacaggccugcgggagccagggugggcagcc

SEQ ID NO: 494100 - RNA, 20 nt, Human
ucacaggccugguucuggca

SEQ ID NO: 494101 - RNA, 32 nt, Human
ucacaggccugguucuggcaguucuuugcgga

SEQ ID NO: 494102 - RNA, 32 nt, Human
ucacaggcucaagcaauucuccugccucagcc

SEQ ID NO: 494103 - RNA, 32 nt, Human
ucacaggcucagggcaaagaaguggccuccug

SEQ ID NO: 494104 - RNA, 32 nt, Human
ucacaggcuggggacagagguggcccugguuc

SEQ ID NO: 494105 - RNA, 32 nt, Human
ucacaggcuugugagggccccgucgcugccug

SEQ ID NO: 494106 - RNA, 32 nt, Human
ucacaggcuuugcucaccagggcacaggaagg

SEQ ID NO: 494107 - RNA, 24 nt, Human
ucacagggaggcauucauggagcu

SEQ ID NO: 494108 - RNA, 32 nt, Human
ucacagggccacaaagaacaaguuuccccaug

SEQ ID NO: 494109 - RNA, 32 nt, Human
ucacagggccaguauucuuuuuaccauguucc

SEQ ID NO: 494110 - RNA, 31 nt, Human
ucacagggcuaucuucugcauuuaaagaaua

SEQ ID NO: 494111 - RNA, 32 nt, Human
ucacagggcuguaacacuguuacuguacagag

SEQ ID NO: 494112 - RNA, 32 nt, Human
ucacaggucaccauggggaauucuagccccca

SEQ ID NO: 494113 - RNA, 18 nt, Human
ucacaggucacgcuggca

SEQ ID NO: 494114 - RNA, 32 nt, Human
ucacaggucacugcagcccugaccuccugggc

SEQ ID NO: 494115 - RNA, 19 nt, Human
ucacaggucagaagcuuag

SEQ ID NO: 494116 - RNA, 32 nt, Human
ucacaggucucaaagcaggaacaguggguuug

SEQ ID NO: 494117 - RNA, 32 nt, Human
ucacaggugaagccucgguaggucccagggag

SEQ ID NO: 494118 - RNA, 32 nt, Human
ucacaggugccuuuagaaguaccauuucaugu

SEQ ID NO: 494119 - RNA, 26 nt, Human
ucacaggugcucugcucguggcccca

SEQ ID NO: 494120 - RNA, 21 nt, Human
ucacagguuccuucauuaaca

SEQ ID NO: 494121 - RNA, 32 nt, Human
ucacagguugacugaagcacaaguugccccug

SEQ ID NO: 494122 - RNA, 32 nt, Human
ucacaguaauccucagaguggcccaggugggu

SEQ ID NO: 494123 - RNA, 32 nt, Human
ucacaguacagcucuugucuuuaccaacugcc

SEQ ID NO: 494124 - RNA, 32 nt, Human
ucacaguagacagaauaaacaagucauaucua

SEQ ID NO: 494125 - RNA, 32 nt, Human
ucacagucauuuccacagccucaaccacuguc

SEQ ID NO: 494126 - RNA, 32 nt, Human
ucacaguccaggaagagggguggccaguccua

SEQ ID NO: 494127 - RNA, 32 nt, Human
ucacagucggcaggcagcauggggaagggagg

SEQ ID NO: 494128 - RNA, 32 nt, Human
ucacagucuaauucucccagacuaggauuuuu

SEQ ID NO: 494129 - RNA, 32 nt, Human
ucacagucucauuccccuccgucacuagcacg

SEQ ID NO: 494130 - RNA, 32 nt, Human
ucacagucucccugaaggagcugcagaguaac

SEQ ID NO: 494131 - RNA, 32 nt, Human
ucacagucucucuugggaggaaacaaugaauu

SEQ ID NO: 494132 - RNA, 32 nt, Human
ucacagugaacugccugucucucucgaguuga

SEQ ID NO: 494133 - RNA, 32 nt, Human
ucacagugacagugucauggggagcugggcgg

SEQ ID NO: 494134 - RNA, 21 nt, Human
ucacagugcauauacacaaua

SEQ ID NO: 494135 - RNA, 32 nt, Human
ucacagugccccugcaaguugcagccucaguu

SEQ ID NO: 494136 - RNA, 32 nt, Human
ucacagugcuucuguucagguugcacacuggg

SEQ ID NO: 494137 - RNA, 32 nt, Human
ucacaguggcuuaggccagggugggagcagug

SEQ ID NO: 494138 - RNA, 32 nt, Human
ucacagugugucucccuuuuugguuuucuuuu

SEQ ID NO: 494139 - RNA, 32 nt, Human
ucacaguucacugcagccucaaccucuccaga

SEQ ID NO: 494140 - RNA, 32 nt, Human
ucacaguucacugcagccugggugacacucca

SEQ ID NO: 494141 - RNA, 32 nt, Human
ucacaguucuggaggcugcaaaguccaauauu

SEQ ID NO: 494142 - RNA, 22 nt, Human
ucacaguuggucccccuugccu

SEQ ID NO: 494143 - RNA, 32 nt, Human
ucacaguuucaggcuuuuaugaggaaagcguu

SEQ ID NO: 494144 - RNA, 32 nt, Human
ucacaguuugccuguugaucucuaauuuucua

SEQ ID NO: 494145 - RNA, 31 nt, Human
ucacauacaauuuguauccauuuaaagugua

SEQ ID NO: 494146 - RNA, 32 nt, Human
ucacauacacacacauagacgccuuucccuau

SEQ ID NO: 494147 - RNA, 32 nt, Human
ucacauacacagauugucuucagagccaaacg

SEQ ID NO: 494148 - RNA, 32 nt, Human
ucacauacauuugaacauuuuauaauuauuga

SEQ ID NO: 494149 - RNA, 32 nt, Human
ucacauacauuugaccauuuuauaauuauuga

SEQ ID NO: 494150 - RNA, 32 nt, Human
ucacauaccagcuguuuuucagucuccugcuc

SEQ ID NO: 494151 - RNA, 32 nt, Human
ucacauacccacuuagcaaaaccaaagcaccu

SEQ ID NO: 494152 - RNA, 32 nt, Human
ucacauaggaacagaugcaaguucacucuguu

SEQ ID NO: 494153 - RNA, 32 nt, Human
ucacauaucugccugugagacuggauugagac

SEQ ID NO: 494154 - RNA, 32 nt, Human
ucacauaugaaucaucacaggucgauccaggc

SEQ ID NO: 494155 - RNA, 32 nt, Human
ucacauaugcagccucaaauguuacacagaua

SEQ ID NO: 494156 - RNA, 32 nt, Human
ucacaucaccagcucaccucugguagccauag

SEQ ID NO: 494157 - RNA, 32 nt, Human
ucacaucacugcacuccagccuggguaacaga

SEQ ID NO: 494158 - RNA, 32 nt, Human
ucacaucacugcacuccauccugggugacaga

SEQ ID NO: 494159 - RNA, 32 nt, Human
ucacaucacugcaguccagccugggugacaga

SEQ ID NO: 494160 - RNA, 32 nt, Human
ucacaucaugcuguuuuauccuugaacuucua

SEQ ID NO: 494161 - RNA, 32 nt, Human
ucacauccaaagugaugcuuugcuuuggguuu

SEQ ID NO: 494162 - RNA, 32 nt, Human
ucacauccagggcugugucuuccuugggggag

SEQ ID NO: 494163 - RNA, 32 nt, Human
ucacaucccaggagaauuccacggagaggaau

SEQ ID NO: 494164 - RNA, 32 nt, Human
ucacaucccugggugaagauggggagacagug

SEQ ID NO: 494165 - RNA, 32 nt, Human
ucacaucccuucaagaguccugaagaucaagc

SEQ ID NO: 494166 - RNA, 32 nt, Human
ucacauccgauuucuccuccugccccagccuc

SEQ ID NO: 494167 - RNA, 20 nt, Human
ucacauccugagcugcuccu

SEQ ID NO: 494168 - RNA, 32 nt, Human
ucacauccugagcugcuccuggcugauaacca

SEQ ID NO: 494169 - RNA, 32 nt, Human
ucacauccugggugggacagagcaggacaaug

SEQ ID NO: 494170 - RNA, 32 nt, Human
ucacauccuucauggaaggagaugucugggau

SEQ ID NO: 494171 - RNA, 32 nt, Human
ucacauccuucuuggaaucucagucugugagu

SEQ ID NO: 494172 - RNA, 32 nt, Human
ucacauccuuugcccaugugucuaugagguua

SEQ ID NO: 494173 - RNA, 32 nt, Human
ucacaucgggcagaggugacgcuguggaccug

SEQ ID NO: 494174 - RNA, 32 nt, Human
ucacaucuaaccucaucuucuucaccauuugg

SEQ ID NO: 494175 - RNA, 32 nt, Human
ucacaucuccaaugaaucugcccaugccuaug

SEQ ID NO: 494176 - RNA, 24 nt, Human
ucacaucuguaaccccagcacuuu

SEQ ID NO: 494177 - RNA, 32 nt, Human
ucacaucuguaaccccagcacuuugggaggcu

SEQ ID NO: 494178 - RNA, 24 nt, Human
ucacaucuguaauccaagcacuuu

SEQ ID NO: 494179 - RNA, 32 nt, Human
ucacaucuguaauccaagcacuuugggagguc

SEQ ID NO: 494180 - RNA, 24 nt, Human
ucacaucuguaaucccaacacuuu

SEQ ID NO: 494181 - RNA, 32 nt, Human
ucacaucuguaaucccaacacuuugggaggcu

SEQ ID NO: 494182 - RNA, 24 nt, Human
ucacaucuguaaucccagcacuuu

SEQ ID NO: 494183 - RNA, 32 nt, Human
ucacaucuguaaucccagcacuuuggaaggcu

SEQ ID NO: 494184 - RNA, 32 nt, Human
ucacaucuguaaucccagcacuuugggagacu

SEQ ID NO: 494185 - RNA, 32 nt, Human
ucacaucuguaaucccagcacuuugggaggca

SEQ ID NO: 494186 - RNA, 32 nt, Human
ucacaucuguaaucccagcacuuugggaggcc

SEQ ID NO: 494187 - RNA, 32 nt, Human
ucacaucuguaaucccagcacuuugggaggcu

SEQ ID NO: 494188 - RNA, 32 nt, Human
ucacaucuguaaucccagcacuuugggagucc

SEQ ID NO: 494189 - RNA, 32 nt, Human
ucacaucuguaaucccagcacuuuuggaggcu

SEQ ID NO: 494190 - RNA, 24 nt, Human
ucacaucuguaaucucaacacuuu

SEQ ID NO: 494191 - RNA, 32 nt, Human
ucacaucuguaaucucagcauuuugggaggcc

SEQ ID NO: 494192 - RNA, 32 nt, Human
ucacaucuguaaucucagcucuuuggaaggca

SEQ ID NO: 494193 - RNA, 24 nt, Human
ucacaucuguaaugccagcacuuu

SEQ ID NO: 494194 - RNA, 32 nt, Human
ucacaucuuagcagugauuuuuauccaauuuu

SEQ ID NO: 494195 - RNA, 31 nt, Human
ucacaucuuaugucugccaugccaggggugu

SEQ ID NO: 494196 - RNA, 32 nt, Human
ucacaucuuuaaucccagcaauuugggaggcu

SEQ ID NO: 494197 - RNA, 32 nt, Human
ucacaucuuuaaucccagcaguuugggaggcu

SEQ ID NO: 494198 - RNA, 32 nt, Human
ucacaugaacccaggagguugaagcugcggug

SEQ ID NO: 494199 - RNA, 32 nt, Human
ucacaugaauccaggagguggagguugcagug

SEQ ID NO: 494200 - RNA, 32 nt, Human
ucacaugacccuuccauguuaaagcugacuuu

SEQ ID NO: 494201 - RNA, 21 nt, Human
ucacaugacuguccccuccca

SEQ ID NO: 494202 - RNA, 32 nt, Human
ucacaugagcccaggagguugaggcugcagug

SEQ ID NO: 494203 - RNA, 32 nt, Human
ucacaugaugauaccugcuuuucucaggccug

SEQ ID NO: 494204 - RNA, 32 nt, Human
ucacaugcaagggacaggguuacauccccaag

SEQ ID NO: 494205 - RNA, 32 nt, Human
ucacaugccaaggaaaauggcacggaagaccc

SEQ ID NO: 494206 - RNA, 32 nt, Human
ucacaugcccacugcagcccuccagccucugg

SEQ ID NO: 494207 - RNA, 32 nt, Human
ucacaugcccugcuucagcugguaaugggacu

SEQ ID NO: 494208 - RNA, 32 nt, Human
ucacaugcggugaaccugugaggcagauccau

SEQ ID NO: 494209 - RNA, 32 nt, Human
ucacaugcuauucccaugucaugggcccaggg

SEQ ID NO: 494210 - RNA, 32 nt, Human
ucacaugcucccugacuuaguucuguuuagaa

SEQ ID NO: 494211 - RNA, 32 nt, Human
ucacaugcugguuuguuugcuugcuuguuuac

SEQ ID NO: 494212 - RNA, 32 nt, Human
ucacaugcuuaugcuacucaggaggcugaggu

SEQ ID NO: 494213 - RNA, 32 nt, Human
ucacaugcuucucaccuaaguccccagggucc

SEQ ID NO: 494214 - RNA, 32 nt, Human
ucacauggacccugagcaaggaaggagggagg

SEQ ID NO: 494215 - RNA, 32 nt, Human
ucacauggcaaaagcuuugaaaaucauaaaga

SEQ ID NO: 494216 - RNA, 32 nt, Human
ucacauggcagagagaaagagagagaaagagu

SEQ ID NO: 494217 - RNA, 32 nt, Human
ucacauggcuccuaccuccagcacagaagcgg

SEQ ID NO: 494218 - RNA, 32 nt, Human
ucacauggcucucaaaauuccugaaaauucaa

SEQ ID NO: 494219 - RNA, 32 nt, Human
ucacaugggcccaggcugagugugagugagca

SEQ ID NO: 494220 - RNA, 32 nt, Human
ucacauggguguccuugggaccacugacccug

SEQ ID NO: 494221 - RNA, 18 nt, Human
ucacauggucugcuuagc

SEQ ID NO: 494222 - RNA, 32 nt, Human
ucacauggugagaaggaggaugaagggaggag

SEQ ID NO: 494223 - RNA, 32 nt, Human
ucacaugugaaaagcuuaauaaauuccaucua

SEQ ID NO: 494224 - RNA, 32 nt, Human
ucacaugugcauccacuucuuuucauccauug

SEQ ID NO: 494225 - RNA, 32 nt, Human
ucacaugugugccugugucuucuguccuggag

SEQ ID NO: 494226 - RNA, 32 nt, Human
ucacauguucacuugcuuuuccuuccaucugu

SEQ ID NO: 494227 - RNA, 32 nt, Human
ucacauguucucuuggacuuuauauaaaucug

SEQ ID NO: 494228 - RNA, 32 nt, Human
ucacauguucucuuuagcacaccauuccugca

SEQ ID NO: 494229 - RNA, 32 nt, Human
ucacauguucuuuguucaaucauagaauauau

SEQ ID NO: 494230 - RNA, 32 nt, Human
ucacauuacauggcuucaucuaccuccaggcu

SEQ ID NO: 494231 - RNA, 21 nt, Human
ucacauuaucuugcuaucacu

SEQ ID NO: 494232 - RNA, 32 nt, Human
ucacauuauucuauguaagugaucacuuguca

SEQ ID NO: 494233 - RNA, 32 nt, Human
ucacauuauucuauguaagugaugacuuguca

SEQ ID NO: 494234 - RNA, 32 nt, Human
ucacauuauuuauuuuucauugugagauacua

SEQ ID NO: 494235 - RNA, 32 nt, Human
ucacauucaguuauaaucauuuagcaauauua

SEQ ID NO: 494236 - RNA, 32 nt, Human
ucacauucauuucuuagguccauucucagagc

SEQ ID NO: 494237 - RNA, 32 nt, Human
ucacauuccagauggcagaacagggaaaggau

SEQ ID NO: 494238 - RNA, 32 nt, Human
ucacauuccugcucucuaccuacuucuuggua

SEQ ID NO: 494239 - RNA, 24 nt, Human
ucacauucguaaucccagcacuuu

SEQ ID NO: 494240 - RNA, 32 nt, Human
ucacauucuaggguaugugggaguguauauga

SEQ ID NO: 494241 - RNA, 32 nt, Human
ucacauucucaccuagcaacaacuggcuggag

SEQ ID NO: 494242 - RNA, 32 nt, Human
ucacauucugaaguccuuggagucaagacuuc

SEQ ID NO: 494243 - RNA, 32 nt, Human
ucacauucuuugucgucuccccagagaaagca

SEQ ID NO: 494244 - RNA, 32 nt, Human
ucacauugaaaugaggauuuugcuuaaaacag

SEQ ID NO: 494245 - RNA, 32 nt, Human
ucacauugaugaaguugcucuagcuagaaagc

SEQ ID NO: 494246 - RNA, 32 nt, Human
ucacauugccuucugaagaggagggaguauua

SEQ ID NO: 494247 - RNA, 17 nt, Human
ucacauuggaacucuga

SEQ ID NO: 494248 - RNA, 32 nt, Human
ucacauuggagcugguguugucugaaguuuuc

SEQ ID NO: 494249 - RNA, 19 nt, Human
ucacauugggucucugguc

SEQ ID NO: 494250 - RNA, 31 nt, Human
ucacauugggucucugguccugugucuucac

SEQ ID NO: 494251 - RNA, 32 nt, Human
ucacauuguggaggcacgagggcuggagucca

SEQ ID NO: 494252 - RNA, 32 nt, Human
ucacauuguuaagaaaaauacuuuuuaaaguu

SEQ ID NO: 494253 - RNA, 32 nt, Human
ucacauuucugcccuccaccuuggcggucagc

SEQ ID NO: 494254 - RNA, 24 nt, Human
ucacauuuguaaucccagcacuuu

SEQ ID NO: 494255 - RNA, 32 nt, Human
ucacauuuguaaucccagcacuuuggaaggcc

SEQ ID NO: 494256 - RNA, 32 nt, Human
ucacauuuucuuuccugguuuucugguucugc

SEQ ID NO: 494257 - RNA, 32 nt, Human
ucaccaaaaagacacugcagaaacccugagca

SEQ ID NO: 494258 - RNA, 23 nt, Human
ucaccaaaaccaaacagagacag

SEQ ID NO: 494259 - RNA, 32 nt, Human
ucaccaaaagauuaaaugaaaccacccugugu

SEQ ID NO: 494260 - RNA, 32 nt, Human
ucaccaaaagccccaggcauuucagaaggugg

SEQ ID NO: 494261 - RNA, 32 nt, Human
ucaccaaacaacuucagaaagacagugacugu

SEQ ID NO: 494262 - RNA, 32 nt, Human
ucaccaaacacaugcuaggauauaacccccaa

SEQ ID NO: 494263 - RNA, 21 nt, Human
ucaccaaagagauuauuuuga

SEQ ID NO: 494264 - RNA, 31 nt, Human
ucaccaaagggaccuguuaccuggaccaggu

SEQ ID NO: 494265 - RNA, 32 nt, Human
ucaccaaagggcagaaaacaacagcucaagcc

SEQ ID NO: 494266 - RNA, 32 nt, Human
ucaccaaaguguugggauuacuggugugagcc

SEQ ID NO: 494267 - RNA, 32 nt, Human
ucaccaacacugccuuccuccagccugucccu

SEQ ID NO: 494268 - RNA, 32 nt, Human
ucaccaacauggagaaaucccaucucuacuaa

SEQ ID NO: 494269 - RNA, 32 nt, Human
ucaccaaccaggagaaauucaccuaggacugg

SEQ ID NO: 494270 - RNA, 32 nt, Human
ucaccaacccagaaccuccuugaucaucacag

SEQ ID NO: 494271 - RNA, 32 nt, Human
ucaccaacucagacuucacauguggucacuga

SEQ ID NO: 494272 - RNA, 32 nt, Human
ucaccaacucagugcuauuaauucuccuucuc

SEQ ID NO: 494273 - RNA, 32 nt, Human
ucaccaacuuuuucuuccucauagaagcaaca

SEQ ID NO: 494274 - RNA, 19 nt, Human
ucaccaagaacaaagucug

SEQ ID NO: 494275 - RNA, 22 nt, Human
ucaccaagaagcaaguuucuga

SEQ ID NO: 494276 - RNA, 21 nt, Human
ucaccaagacgcccauccugg

SEQ ID NO: 494277 - RNA, 32 nt, Human
ucaccaagagaggcacgcucacccucacccuc

SEQ ID NO: 494278 - RNA, 32 nt, Human
ucaccaagcucugaacugggauuucauuuugu

SEQ ID NO: 494279 - RNA, 32 nt, Human
ucaccaaggaaaugcgaucaacucagaggaga

SEQ ID NO: 494280 - RNA, 32 nt, Human
ucaccaaggcuggagggcaauagcaugaucac

SEQ ID NO: 494281 - RNA, 32 nt, Human
ucaccaaggcuggagugcagcggugugaucuc

SEQ ID NO: 494282 - RNA, 32 nt, Human
ucaccaaggcuggagugcaggggcacaaucuc

SEQ ID NO: 494283 - RNA, 32 nt, Human
ucaccaaggcuggagugcauuggugcaaucuu

SEQ ID NO: 494284 - RNA, 32 nt, Human
ucaccaagggccuggcaccaggugcccagucu

SEQ ID NO: 494285 - RNA, 32 nt, Human
ucaccaaggucugcuuggacaaugggcuggcu

SEQ ID NO: 494286 - RNA, 22 nt, Human
ucaccaagucaccucccucuga

SEQ ID NO: 494287 - RNA, 32 nt, Human
ucaccaauuuggcuggucucgacuccuggcug

SEQ ID NO: 494288 - RNA, 32 nt, Human
ucaccacacaauacaaauacuugcuccagccg

SEQ ID NO: 494289 - RNA, 32 nt, Human
ucaccacaccuggcugauuuuguauuuuuagu

SEQ ID NO: 494290 - RNA, 32 nt, Human
ucaccacacuccuuaggaagugccaguggugg

SEQ ID NO: 494291 - RNA, 32 nt, Human
ucaccacagacuauaaggaaauggaauuauuu

SEQ ID NO: 494292 - RNA, 32 nt, Human
ucaccacagaggggucccuaagccacagacau

SEQ ID NO: 494293 - RNA, 32 nt, Human
ucaccacauacccucacuucccccuucccuac

SEQ ID NO: 494294 - RNA, 32 nt, Human
ucaccacaucugcuucccaccaugcuucuaag

SEQ ID NO: 494295 - RNA, 32 nt, Human
ucaccaccagaaccaacuccucuuucaaacac

SEQ ID NO: 494296 - RNA, 18 nt, Human
ucaccaccaugcccggcu

SEQ ID NO: 494297 - RNA, 32 nt, Human
ucaccacccaggaaaggggaaaugcggcccgc

SEQ ID NO: 494298 - RNA, 32 nt, Human
ucaccacccaguuuuucccucuggacccagga

SEQ ID NO: 494299 - RNA, 32 nt, Human
ucaccacccgcaccccugacccuccuggucca

SEQ ID NO: 494300 - RNA, 32 nt, Human
ucaccaccgcucauggugcgcgcgucucgggc

SEQ ID NO: 494301 - RNA, 32 nt, Human
ucaccaccggacauggugcuuggggcuuugug

SEQ ID NO: 494302 - RNA, 32 nt, Human
ucaccaccuccugcuguggguggagagccuug

SEQ ID NO: 494303 - RNA, 32 nt, Human
ucaccaccucuaauuucagcuucagcaguugc

SEQ ID NO: 494304 - RNA, 32 nt, Human
ucaccaccucugcaccugcugucuugagacuc

SEQ ID NO: 494305 - RNA, 32 nt, Human
ucaccaccuucccagcucucccucuggcccug

SEQ ID NO: 494306 - RNA, 32 nt, Human
ucaccaccuugaugcugugugccuccuuccug

SEQ ID NO: 494307 - RNA, 32 nt, Human
ucaccacgagaagccagucauaaagauaaagg

SEQ ID NO: 494308 - RNA, 32 nt, Human
ucaccacggacaggaagagcagcucuggcuau

SEQ ID NO: 494309 - RNA, 32 nt, Human
ucaccacgguaaacugggauguuuucaaaagu

SEQ ID NO: 494310 - RNA, 32 nt, Human
ucaccacguuagccaggauggucuccaucucc

SEQ ID NO: 494311 - RNA, 32 nt, Human
ucaccacguugcccaggcuggucuccagcucc

SEQ ID NO: 494312 - RNA, 32 nt, Human
ucaccacuacacuccagccugggugacagcaa

SEQ ID NO: 494313 - RNA, 32 nt, Human
ucaccacuagcguaaaagcaaaaagcuuuuac

SEQ ID NO: 494314 - RNA, 32 nt, Human
ucaccacucacugcggccucaaccuucagggc

SEQ ID NO: 494315 - RNA, 32 nt, Human
ucaccacuccugcaacaacaacaaauacggcu

SEQ ID NO: 494316 - RNA, 19 nt, Human
ucaccacucucuacuuuga

SEQ ID NO: 494317 - RNA, 32 nt, Human
ucaccacugaacuccagccugggcgacagagg

SEQ ID NO: 494318 - RNA, 32 nt, Human
ucaccacugcaacccagggucccagcuggcug

SEQ ID NO: 494319 - RNA, 32 nt, Human
ucaccacugcacuccagccugggcagcagagc

SEQ ID NO: 494320 - RNA, 32 nt, Human
ucaccacugcccuccagccugggugacagagc

SEQ ID NO: 494321 - RNA, 32 nt, Human
ucaccacuggccgccucuccuugccaggccug

SEQ ID NO: 494322 - RNA, 31 nt, Human
ucaccacuggccucugggcacuugugcugag

SEQ ID NO: 494323 - RNA, 32 nt, Human
ucaccacuguacuccagccugggugacagagc

SEQ ID NO: 494324 - RNA, 32 nt, Human
ucaccacugucccguggaugccuguguaccuc

SEQ ID NO: 494325 - RNA, 32 nt, Human
ucaccacuuaagauagaagcagcagcugcaua

SEQ ID NO: 494326 - RNA, 32 nt, Human
ucaccacuuggcugcuugagauugguucugcu

SEQ ID NO: 494327 - RNA, 32 nt, Human
ucaccagacaccucuugccucuguaccugguc

SEQ ID NO: 494328 - RNA, 32 nt, Human
ucaccagagacaccugccggcugacaaggaca

SEQ ID NO: 494329 - RNA, 32 nt, Human
ucaccagagauggaccagggaggacaggaugc

SEQ ID NO: 494330 - RNA, 32 nt, Human
ucaccagagccaaguccucucccuucagauca

SEQ ID NO: 494331 - RNA, 32 nt, Human
ucaccagaguccaaacaaaaagcuaagcuagg

SEQ ID NO: 494332 - RNA, 32 nt, Human
ucaccagauggaacuuaccuugcuguuggaug

SEQ ID NO: 494333 - RNA, 32 nt, Human
ucaccagcaaagugcacugaugugugagcucu

SEQ ID NO: 494334 - RNA, 32 nt, Human
ucaccagcaacaaaagagguuaucuuaccaua

SEQ ID NO: 494335 - RNA, 20 nt, Human
ucaccagcagacacacuggg

SEQ ID NO: 494336 - RNA, 21 nt, Human
ucaccagcagcuccccugagc

SEQ ID NO: 494337 - RNA, 32 nt, Human
ucaccagcagcugggccagcugugacacuguu

SEQ ID NO: 494338 - RNA, 32 nt, Human
ucaccagcccuccccuccccagggucauagag

SEQ ID NO: 494339 - RNA, 32 nt, Human
ucaccagcccugcacugaugucacuuuaugua

SEQ ID NO: 494340 - RNA, 32 nt, Human
ucaccagccgcuuacgggacccugccaugccu

SEQ ID NO: 494341 - RNA, 32 nt, Human
ucaccagccugggcuaagcuccugggcugugc

SEQ ID NO: 494342 - RNA, 32 nt, Human
ucaccagcuacugcagaggcauuuugcauuug

SEQ ID NO: 494343 - RNA, 32 nt, Human
ucaccagcuccaagccccagacagcaguucag

SEQ ID NO: 494344 - RNA, 21 nt, Human
ucaccagcucuccagccagga

SEQ ID NO: 494345 - RNA, 23 nt, Human
ucaccagcucugugaccuugggc

SEQ ID NO: 494346 - RNA, 32 nt, Human
ucaccagcucuucacaucccugggugaagaug

SEQ ID NO: 494347 - RNA, 32 nt, Human
ucaccaggaaugcgaggccacccuggaccaga

SEQ ID NO: 494348 - RNA, 32 nt, Human
ucaccaggacagucacccccaaacuugacccc

SEQ ID NO: 494349 - RNA, 18 nt, Human
ucaccaggacuccauucu

SEQ ID NO: 494350 - RNA, 31 nt, Human
ucaccaggacugccugggccuguguucauuc

SEQ ID NO: 494351 - RNA, 32 nt, Human
ucaccaggagcaaacccaagucuuaguugcua

SEQ ID NO: 494352 - RNA, 21 nt, Human
ucaccaggauggagugcagug

SEQ ID NO: 494353 - RNA, 32 nt, Human
ucaccaggcccaggagcuggcgccucagcaac

SEQ ID NO: 494354 - RNA, 32 nt, Human
ucaccaggccugguagaugagauggcuugucu

SEQ ID NO: 494355 - RNA, 32 nt, Human
ucaccaggcuccuccccacagcuguuggcauc

SEQ ID NO: 494356 - RNA, 32 nt, Human
ucaccaggcuucuucugccucccuugguaacc

SEQ ID NO: 494357 - RNA, 32 nt, Human
ucaccagggacguggcuuacaguuccagcagg

SEQ ID NO: 494358 - RNA, 32 nt, Human
ucaccagggccaagccacgaaggguuuuauaa

SEQ ID NO: 494359 - RNA, 32 nt, Human
ucaccagggcccuguccuggcugcccucaccc

SEQ ID NO: 494360 - RNA, 32 nt, Human
ucaccagggucugaggggcagcucuggccagu

SEQ ID NO: 494361 - RNA, 32 nt, Human
ucaccagguagaaaugcgauuugcucacugag

SEQ ID NO: 494362 - RNA, 32 nt, Human
ucaccaggugagcaaggcuggggaacaaugga

SEQ ID NO: 494363 - RNA, 32 nt, Human
ucaccagucggacugugcuguggcuaaccagg

SEQ ID NO: 494364 - RNA, 32 nt, Human
ucaccagugcacuccagccugggugacagagc

SEQ ID NO: 494365 - RNA, 31 nt, Human
ucaccaguguggagagaaaggugcuggcaua

SEQ ID NO: 494366 - RNA, 32 nt, Human
ucaccaguuagccuguggggcuguucacucuu

SEQ ID NO: 494367 - RNA, 32 nt, Human
ucaccauacugccugggcagguuuccaacucc

SEQ ID NO: 494368 - RNA, 32 nt, Human
ucaccauauuagccaggauggucuccaucucc

SEQ ID NO: 494369 - RNA, 32 nt, Human
ucaccaucaaagauuuuauugaguuuuucaua

SEQ ID NO: 494370 - RNA, 32 nt, Human
ucaccaucaagcaauccaugucauagggaaac

SEQ ID NO: 494371 - RNA, 32 nt, Human
ucaccaucacagugacugcaacaccauaaggc

SEQ ID NO: 494372 - RNA, 32 nt, Human
ucaccaucauuagcuuccuccugggucauuua

SEQ ID NO: 494373 - RNA, 32 nt, Human
ucaccauccagccugaugcauccugggaggga

SEQ ID NO: 494374 - RNA, 32 nt, Human
ucaccauccaucugccccacgcuccaagccug

SEQ ID NO: 494375 - RNA, 32 nt, Human
ucaccauccuccugggggagcagggggugggu

SEQ ID NO: 494376 - RNA, 32 nt, Human
ucaccauccuuuauaccaggauuugcauaucc

SEQ ID NO: 494377 - RNA, 32 nt, Human
ucaccaucuccaagccugucaacaucacugca

SEQ ID NO: 494378 - RNA, 32 nt, Human
ucaccaucugaugccauguacccacuucagaa

SEQ ID NO: 494379 - RNA, 32 nt, Human
ucaccaugaaagucaccuaggccaggcauggu

SEQ ID NO: 494380 - RNA, 32 nt, Human
ucaccaugaagcgaaacacagagaagcggauu

SEQ ID NO: 494381 - RNA, 32 nt, Human
ucaccaugaagcuuccucucgggccgacagcu

SEQ ID NO: 494382 - RNA, 32 nt, Human
ucaccaugaggacacuuaucucuuucaguggu

SEQ ID NO: 494383 - RNA, 32 nt, Human
ucaccaugagguuugccuuuguggaaaacucg

SEQ ID NO: 494384 - RNA, 32 nt, Human
ucaccaugauagccaggauggucuugaucucc

SEQ ID NO: 494385 - RNA, 30 nt, Human
ucaccaugccaaucaaaccuguugggugga

SEQ ID NO: 494386 - RNA, 32 nt, Human
ucaccaugcccuuccugcauccuucccccaac

SEQ ID NO: 494387 - RNA, 32 nt, Human
ucaccaugccuggcuaauuuuguauuuuuagu

SEQ ID NO: 494388 - RNA, 32 nt, Human
ucaccaugcuucccuaccccagccuguuucuu

SEQ ID NO: 494389 - RNA, 30 nt, Human
ucaccauggacuuccagcaucgccccgggg

SEQ ID NO: 494390 - RNA, 30 nt, Human
ucaccauggccaagggcuucuauauuucca

SEQ ID NO: 494391 - RNA, 20 nt, Human
ucaccauguaacacacaaua

SEQ ID NO: 494392 - RNA, 32 nt, Human
ucaccauguaacacacaauacaugcaugcacu

SEQ ID NO: 494393 - RNA, 32 nt, Human
ucaccauguaacacacaauacaugcaugcauu

SEQ ID NO: 494394 - RNA, 32 nt, Human
ucaccauguaggccaggauggucucgaacucu

SEQ ID NO: 494395 - RNA, 32 nt, Human
ucaccaugucagccaggauggucuugaucucc

SEQ ID NO: 494396 - RNA, 32 nt, Human
ucaccaugucggccaggcuggucuccaacuac

SEQ ID NO: 494397 - RNA, 32 nt, Human
ucaccaugucucaaacuccugaccucaggcga

SEQ ID NO: 494398 - RNA, 32 nt, Human
ucaccaugucucccccacccugccucaguucu

SEQ ID NO: 494399 - RNA, 32 nt, Human
ucaccaugugagccaggauggucucaaucucc

SEQ ID NO: 494400 - RNA, 32 nt, Human
ucaccauguggggcuguacuacgugguggucu

SEQ ID NO: 494401 - RNA, 32 nt, Human
ucaccaugugggguucagcugagguuguagcc

SEQ ID NO: 494402 - RNA, 32 nt, Human
ucaccauguuaaccaggauggucucgaucucu

SEQ ID NO: 494403 - RNA, 32 nt, Human
ucaccauguuagccaggauggucucaaacucc

SEQ ID NO: 494404 - RNA, 32 nt, Human
ucaccauguuagccaggauggucucaaucucc

SEQ ID NO: 494405 - RNA, 32 nt, Human
ucaccauguuagccaggauggucuccaucucc

SEQ ID NO: 494406 - RNA, 32 nt, Human
ucaccauguuagccaggauggucucgaucucc

SEQ ID NO: 494407 - RNA, 32 nt, Human
ucaccauguuagccaggauggucucgaugauc

SEQ ID NO: 494408 - RNA, 32 nt, Human
ucaccauguuagccaggauggucucgcucucc

SEQ ID NO: 494409 - RNA, 32 nt, Human
ucaccauguuagccaggauggucuggaucucc

SEQ ID NO: 494410 - RNA, 32 nt, Human
ucaccauguuagccaggauggucuugaucuga

SEQ ID NO: 494411 - RNA, 32 nt, Human
ucaccauguuagccaggaugguuucgaucucc

SEQ ID NO: 494412 - RNA, 32 nt, Human
ucaccauguuauauuuucuuuuaagacauuaa

SEQ ID NO: 494413 - RNA, 32 nt, Human
ucaccauguugaccaggauggucucaaucucc

SEQ ID NO: 494414 - RNA, 32 nt, Human
ucaccauguugaccaggauggucucaaucucu

SEQ ID NO: 494415 - RNA, 32 nt, Human
ucaccauguuggccaggauggucucaaacuug

SEQ ID NO: 494416 - RNA, 32 nt, Human
ucaccauguuggccaggauggucucaaucucc

SEQ ID NO: 494417 - RNA, 32 nt, Human
ucaccauguuggccaggauggucucaaucucu

SEQ ID NO: 494418 - RNA, 32 nt, Human
ucaccauguuggccaggauggucuccgucucc

SEQ ID NO: 494419 - RNA, 32 nt, Human
ucaccauguuggccaggauggucucgaacucc

SEQ ID NO: 494420 - RNA, 32 nt, Human
ucaccauguuggccaggauggucucgagucuc

SEQ ID NO: 494421 - RNA, 32 nt, Human
ucaccauguuggccaggauggucucgaucucc

SEQ ID NO: 494422 - RNA, 32 nt, Human
ucaccauguuggccaggauggucucgaucucu

SEQ ID NO: 494423 - RNA, 32 nt, Human
ucaccauguuggccaggauggucucgcccucc

SEQ ID NO: 494424 - RNA, 32 nt, Human
ucaccauguuggccaggauggucucggucucc

SEQ ID NO: 494425 - RNA, 32 nt, Human
ucaccauguuggccaggauggucuggaucucu

SEQ ID NO: 494426 - RNA, 32 nt, Human
ucaccauguuggccaggauggucuugaucucc

SEQ ID NO: 494427 - RNA, 32 nt, Human
ucaccauguuggccaggcuggucuccaacucc

SEQ ID NO: 494428 - RNA, 32 nt, Human
ucaccauguuggccaggcuggucuccaucacc

SEQ ID NO: 494429 - RNA, 32 nt, Human
ucaccauguuggccaggcuggucuccaucucc

SEQ ID NO: 494430 - RNA, 32 nt, Human
ucaccauguuguccaggauggucuugaucucc

SEQ ID NO: 494431 - RNA, 32 nt, Human
ucaccauuacacuccagccugggcgacaagaa

SEQ ID NO: 494432 - RNA, 32 nt, Human
ucaccauuacacuccagccugggcgacaagag

SEQ ID NO: 494433 - RNA, 32 nt, Human
ucaccauucccaagccccuggccacucuaagc

SEQ ID NO: 494434 - RNA, 32 nt, Human
ucaccauugcacuccagccuggaugacagaga

SEQ ID NO: 494435 - RNA, 32 nt, Human
ucaccauugcacuccagccuggaugacagagu

SEQ ID NO: 494436 - RNA, 32 nt, Human
ucaccauugcacuccagccugggcgacugagc

SEQ ID NO: 494437 - RNA, 32 nt, Human
ucaccauugucaacauuuugaccaacagcagg

SEQ ID NO: 494438 - RNA, 32 nt, Human
ucaccauugucugcacaaauccuugaaaauaa

SEQ ID NO: 494439 - RNA, 32 nt, Human
ucaccauuuugguagaugagguugucugguga

SEQ ID NO: 494440 - RNA, 32 nt, Human
ucaccauuuuuccugcugcacugaccaaucag

SEQ ID NO: 494441 - RNA, 32 nt, Human
ucaccauuuuuguccuguaucuguaaacacuu

SEQ ID NO: 494442 - RNA, 32 nt, Human
ucacccaaagcaguggccaacaucgcggaccc

SEQ ID NO: 494443 - RNA, 32 nt, Human
ucacccaacaccacucagguugucuucucaac

SEQ ID NO: 494444 - RNA, 21 nt, Human
ucacccaagccagagugcagu

SEQ ID NO: 494445 - RNA, 22 nt, Human
ucacccaagccagagugcagug

SEQ ID NO: 494446 - RNA, 23 nt, Human
ucacccaagccagagugcagugg

SEQ ID NO: 494447 - RNA, 32 nt, Human
ucacccaagcuggaaugcaauggcacaauuuc

SEQ ID NO: 494448 - RNA, 32 nt, Human
ucacccaagcuggaguacaguggcacaaacau

SEQ ID NO: 494449 - RNA, 22 nt, Human
ucacccaagcuggagugcagug

SEQ ID NO: 494450 - RNA, 32 nt, Human
ucacccaagcuggagugcaguggugcaaacac

SEQ ID NO: 494451 - RNA, 32 nt, Human
ucacccaagcuggagugcaguggugcaaucuu

SEQ ID NO: 494452 - RNA, 32 nt, Human
ucacccaagcuggugugcaguggugugaucuu

SEQ ID NO: 494453 - RNA, 32 nt, Human
ucacccaaguuggagugcaguggccccgcaau

SEQ ID NO: 494454 - RNA, 32 nt, Human
ucacccaauguucacaucugcacucaaggucg

SEQ ID NO: 494455 - RNA, 32 nt, Human
ucacccacaaaacaauguaaucccagcgaugg

SEQ ID NO: 494456 - RNA, 32 nt, Human
ucacccacaacccucuggaaguggccuugccc

SEQ ID NO: 494457 - RNA, 32 nt, Human
ucacccacagccagggcagguucccgaggcug

SEQ ID NO: 494458 - RNA, 32 nt, Human
ucacccaccagcuguaacucaguuugugugag

SEQ ID NO: 494459 - RNA, 32 nt, Human
ucacccacccaccuccuucauuaucagcaaua

SEQ ID NO: 494460 - RNA, 32 nt, Human
ucacccaccugugccgcccugccuuguuaccu

SEQ ID NO: 494461 - RNA, 32 nt, Human
ucacccacgaggcuggguggccagcagucugg

SEQ ID NO: 494462 - RNA, 32 nt, Human
ucacccacgcuggagugcaaugguguggucuu

SEQ ID NO: 494463 - RNA, 32 nt, Human
ucacccacgcuggagugcugugaugcgaucuc

SEQ ID NO: 494464 - RNA, 20 nt, Human
ucacccacucauucauuaca

SEQ ID NO: 494465 - RNA, 32 nt, Human
ucacccagacacacaccccagcaccuggcacu

SEQ ID NO: 494466 - RNA, 22 nt, Human
ucacccagacuagagugcagug

SEQ ID NO: 494467 - RNA, 22 nt, Human
ucacccagacuggaaugcagug

SEQ ID NO: 494468 - RNA, 22 nt, Human
ucacccagacuggaguacaaug

SEQ ID NO: 494469 - RNA, 32 nt, Human
ucacccagacuggagugcaauggcuugaucuu

SEQ ID NO: 494470 - RNA, 22 nt, Human
ucacccagacuggagugcagug

SEQ ID NO: 494471 - RNA, 32 nt, Human
ucacccagacuggagugcaguggcacaaucuc

SEQ ID NO: 494472 - RNA, 32 nt, Human
ucacccagacuggagugcaguggcgcgaucuc

SEQ ID NO: 494473 - RNA, 32 nt, Human
ucacccagacuggagugcaguggugcgaucuc

SEQ ID NO: 494474 - RNA, 32 nt, Human
ucacccagacuggagugcaguggugugaucau

SEQ ID NO: 494475 - RNA, 21 nt, Human
ucacccagacuggcgugcagu

SEQ ID NO: 494476 - RNA, 22 nt, Human
ucacccagacuggcgugcagug

SEQ ID NO: 494477 - RNA, 23 nt, Human
ucacccagacuggcgugcagugg

SEQ ID NO: 494478 - RNA, 32 nt, Human
ucacccagagucagggagagaugaaaauaaua

SEQ ID NO: 494479 - RNA, 21 nt, Human
ucacccagccauggugugguc

SEQ ID NO: 494480 - RNA, 32 nt, Human
ucacccagccccggaagauaggggcaagcagc

SEQ ID NO: 494481 - RNA, 32 nt, Human
ucacccagcuacucaggaggcugaggcaggag

SEQ ID NO: 494482 - RNA, 32 nt, Human
ucacccagcucuggaacugccugcuucacauu

SEQ ID NO: 494483 - RNA, 32 nt, Human
ucacccaggacagccuguggccuuugugagcc

SEQ ID NO: 494484 - RNA, 32 nt, Human
ucacccaggagcaggcucccaagugaagaaac

SEQ ID NO: 494485 - RNA, 32 nt, Human
ucacccaggauggagugcaguguugugaucau

SEQ ID NO: 494486 - RNA, 32 nt, Human
ucacccaggcaggagugcaguggcacagucau

SEQ ID NO: 494487 - RNA, 32 nt, Human
ucacccaggcaggagugcaguggcguuaucuu

SEQ ID NO: 494488 - RNA, 21 nt, Human
ucacccaggccagaguguagu

SEQ ID NO: 494489 - RNA, 22 nt, Human
ucacccaggccagaguguagug

SEQ ID NO: 494490 - RNA, 23 nt, Human
ucacccaggccagaguguagugg

SEQ ID NO: 494491 - RNA, 22 nt, Human
ucacccaggccggagugcagug

SEQ ID NO: 494492 - RNA, 32 nt, Human
ucacccaggccggagugcaguggcacaaucaa

SEQ ID NO: 494493 - RNA, 32 nt, Human
ucacccaggccggagugcaguggugcgauccc

SEQ ID NO: 494494 - RNA, 32 nt, Human
ucacccaggccggagugcagugguguaaucuc

SEQ ID NO: 494495 - RNA, 32 nt, Human
ucacccaggcgggaguggugcaauggcuugau

SEQ ID NO: 494496 - RNA, 32 nt, Human
ucacccaggcgggaguuagguggcaugauuuc

SEQ ID NO: 494497 - RNA, 22 nt, Human
ucacccaggcuagaaugcagug

SEQ ID NO: 494498 - RNA, 22 nt, Human
ucacccaggcuagaguacagug

SEQ ID NO: 494499 - RNA, 22 nt, Human
ucacccaggcuagagugcaaug

SEQ ID NO: 494500 - RNA, 21 nt, Human
ucacccaggcuagagugcagu

SEQ ID NO: 494501 - RNA, 32 nt, Human
ucacccaggcuagagugcaguagcacgaucuu

SEQ ID NO: 494502 - RNA, 22 nt, Human
ucacccaggcuagagugcagug

SEQ ID NO: 494503 - RNA, 32 nt, Human
ucacccaggcuagagugcaguggagcgaucuc

SEQ ID NO: 494504 - RNA, 32 nt, Human
ucacccaggcuagagugcaguggcacaaaaau

SEQ ID NO: 494505 - RNA, 32 nt, Human
ucacccaggcuagagugcaguggcgcgaucuc

SEQ ID NO: 494506 - RNA, 32 nt, Human
ucacccaggcuagagugcaguggcgugaucuu

SEQ ID NO: 494507 - RNA, 32 nt, Human
ucacccaggcuagagugcaguggugcaaucuc

SEQ ID NO: 494508 - RNA, 32 nt, Human
ucacccaggcugaacugcaguggugugaucua

SEQ ID NO: 494509 - RNA, 32 nt, Human
ucacccaggcugaagugcaguagugcaaucuc

SEQ ID NO: 494510 - RNA, 22 nt, Human
ucacccaggcugaagugcagug

SEQ ID NO: 494511 - RNA, 32 nt, Human
ucacccaggcugaagugcaguggagcaaucuc

SEQ ID NO: 494512 - RNA, 32 nt, Human
ucacccaggcugaagugcagugguacaaucuu

SEQ ID NO: 494513 - RNA, 32 nt, Human
ucacccaggcugaagugcagugguacgaucau

SEQ ID NO: 494514 - RNA, 32 nt, Human
ucacccaggcugcagugcaauggcgcgaucuc

SEQ ID NO: 494515 - RNA, 22 nt, Human
ucacccaggcugcagugccaug

SEQ ID NO: 494516 - RNA, 32 nt, Human
ucacccaggcugcagugccaugcagacaccuc

SEQ ID NO: 494517 - RNA, 32 nt, Human
ucacccaggcugcaguguaguggugcaaacau

SEQ ID NO: 494518 - RNA, 32 nt, Human
ucacccaggcugcuggaguacaguggcacaau

SEQ ID NO: 494519 - RNA, 32 nt, Human
ucacccaggcuggaaugacgaagugaaguagu

SEQ ID NO: 494520 - RNA, 21 nt, Human
ucacccaggcuggaaugcagu

SEQ ID NO: 494521 - RNA, 22 nt, Human
ucacccaggcuggaaugcagug

SEQ ID NO: 494522 - RNA, 32 nt, Human
ucacccaggcuggaaugcagugcaguggcaca

SEQ ID NO: 494523 - RNA, 23 nt, Human
ucacccaggcuggaaugcagugg

SEQ ID NO: 494524 - RNA, 32 nt, Human
ucacccaggcuggaaugcaguggcacaauguc

SEQ ID NO: 494525 - RNA, 32 nt, Human
ucacccaggcuggaaugcaguggcacaauuuu

SEQ ID NO: 494526 - RNA, 32 nt, Human
ucacccaggcuggaaugcaguggcgugaucuc

SEQ ID NO: 494527 - RNA, 32 nt, Human
ucacccaggcuggaaugcaguggugugaacug

SEQ ID NO: 494528 - RNA, 32 nt, Human
ucacccaggcuggaaugcaguggugugaucuu

SEQ ID NO: 494529 - RNA, 32 nt, Human
ucacccaggcuggacugcaaugacgcgaucuu

SEQ ID NO: 494530 - RNA, 32 nt, Human
ucacccaggcuggagagcaauugcacaaacac

SEQ ID NO: 494531 - RNA, 22 nt, Human
ucacccaggcuggagcacacug

SEQ ID NO: 494532 - RNA, 32 nt, Human
ucacccaggcuggagcacacuggugcgaucau

SEQ ID NO: 494533 - RNA, 22 nt, Human
ucacccaggcuggagcgcagug

SEQ ID NO: 494534 - RNA, 32 nt, Human
ucacccaggcuggagcgcaguggugugaucuc

SEQ ID NO: 494535 - RNA, 32 nt, Human
ucacccaggcuggagcguaauggcacaaucuu

SEQ ID NO: 494536 - RNA, 21 nt, Human
ucacccaggcuggaguacaau

SEQ ID NO: 494537 - RNA, 22 nt, Human
ucacccaggcuggaguacaaug

SEQ ID NO: 494538 - RNA, 32 nt, Human
ucacccaggcuggaguacaaugaugcgaucuc

SEQ ID NO: 494539 - RNA, 32 nt, Human
ucacccaggcuggaguacaauggcgugaucuc

SEQ ID NO: 494540 - RNA, 22 nt, Human
ucacccaggcuggaguacacug

SEQ ID NO: 494541 - RNA, 21 nt, Human
ucacccaggcuggaguacagu

SEQ ID NO: 494542 - RNA, 22 nt, Human
ucacccaggcuggaguacagug

SEQ ID NO: 494543 - RNA, 23 nt, Human
ucacccaggcuggaguacagugg

SEQ ID NO: 494544 - RNA, 32 nt, Human
ucacccaggcuggaguacaguggcgugaucac

SEQ ID NO: 494545 - RNA, 32 nt, Human
ucacccaggcuggaguacaguggcgugauuuu

SEQ ID NO: 494546 - RNA, 32 nt, Human
ucacccaggcuggaguaccgguggugggaucu

SEQ ID NO: 494547 - RNA, 22 nt, Human
ucacccaggcuggaguagagug

SEQ ID NO: 494548 - RNA, 22 nt, Human
ucacccaggcuggaguauagug

SEQ ID NO: 494549 - RNA, 32 nt, Human
ucacccaggcuggaguauaguggcacaaacau

SEQ ID NO: 494550 - RNA, 32 nt, Human
ucacccaggcuggaguauaguggugugaucuu

SEQ ID NO: 494551 - RNA, 32 nt, Human
ucacccaggcuggaguccaauggggcggucau

SEQ ID NO: 494552 - RNA, 21 nt, Human
ucacccaggcuggaguccagu

SEQ ID NO: 494553 - RNA, 22 nt, Human
ucacccaggcuggaguccagug

SEQ ID NO: 494554 - RNA, 23 nt, Human
ucacccaggcuggaguccagugg

SEQ ID NO: 494555 - RNA, 32 nt, Human
ucacccaggcuggaguccaguggcacaaucuu

SEQ ID NO: 494556 - RNA, 32 nt, Human
ucacccaggcuggaguccaguggugugaucau

SEQ ID NO: 494557 - RNA, 32 nt, Human
ucacccaggcuggagucuagugucgugaucuu

SEQ ID NO: 494558 - RNA, 32 nt, Human
ucacccaggcuggagugaggugguacaaucuc

SEQ ID NO: 494559 - RNA, 19 nt, Human
ucacccaggcuggagugca

SEQ ID NO: 494560 - RNA, 32 nt, Human
ucacccaggcuggagugcaaaggugcaaucau

SEQ ID NO: 494561 - RNA, 21 nt, Human
ucacccaggcuggagugcaau

SEQ ID NO: 494562 - RNA, 22 nt, Human
ucacccaggcuggagugcaaug

SEQ ID NO: 494563 - RNA, 32 nt, Human
ucacccaggcuggagugcaaugacgcaaucuc

SEQ ID NO: 494564 - RNA, 32 nt, Human
ucacccaggcuggagugcaaugcugcgaucuc

SEQ ID NO: 494565 - RNA, 32 nt, Human
ucacccaggcuggagugcaauggcacaaucuc

SEQ ID NO: 494566 - RNA, 32 nt, Human
ucacccaggcuggagugcaauggcacgaucuc

SEQ ID NO: 494567 - RNA, 32 nt, Human
ucacccaggcuggagugcaauggcacgaucuu

SEQ ID NO: 494568 - RNA, 32 nt, Human
ucacccaggcuggagugcaauggcauguucau

SEQ ID NO: 494569 - RNA, 32 nt, Human
ucacccaggcuggagugcaauggcgcaaucau

SEQ ID NO: 494570 - RNA, 32 nt, Human
ucacccaggcuggagugcaauggcgcgaucuc

SEQ ID NO: 494571 - RNA, 32 nt, Human
ucacccaggcuggagugcaauggcgcgaucuu

SEQ ID NO: 494572 - RNA, 32 nt, Human
ucacccaggcuggagugcaauggcgugaccuc

SEQ ID NO: 494573 - RNA, 32 nt, Human
ucacccaggcuggagugcaauggcgugaucuc

SEQ ID NO: 494574 - RNA, 32 nt, Human
ucacccaggcuggagugcaaugggcacaauua

SEQ ID NO: 494575 - RNA, 32 nt, Human
ucacccaggcuggagugcaauggugagaucuc

SEQ ID NO: 494576 - RNA, 32 nt, Human
ucacccaggcuggagugcaauggugcaaucuc

SEQ ID NO: 494577 - RNA, 32 nt, Human
ucacccaggcuggagugcaauggugcaauuuc

SEQ ID NO: 494578 - RNA, 32 nt, Human
ucacccaggcuggagugcaauggugccaucuu

SEQ ID NO: 494579 - RNA, 32 nt, Human
ucacccaggcuggagugcaauggugcgaucuc

SEQ ID NO: 494580 - RNA, 32 nt, Human
ucacccaggcuggagugcaaugguguguuguc

SEQ ID NO: 494581 - RNA, 32 nt, Human
ucacccaggcuggagugcaauugugcaaucuc

SEQ ID NO: 494582 - RNA, 22 nt, Human
ucacccaggcuggagugcacug

SEQ ID NO: 494583 - RNA, 20 nt, Human
ucacccaggcuggagugcag

SEQ ID NO: 494584 - RNA, 32 nt, Human
ucacccaggcuggagugcagcaguugaucaga

SEQ ID NO: 494585 - RNA, 32 nt, Human
ucacccaggcuggagugcagcaguugcucaga

SEQ ID NO: 494586 - RNA, 21 nt, Human
ucacccaggcuggagugcagu

SEQ ID NO: 494587 - RNA, 32 nt, Human
ucacccaggcuggagugcaguagcacgauagc

SEQ ID NO: 494588 - RNA, 32 nt, Human
ucacccaggcuggagugcaguagcaugaucag

SEQ ID NO: 494589 - RNA, 32 nt, Human
ucacccaggcuggagugcaguagcaugaucga

SEQ ID NO: 494590 - RNA, 32 nt, Human
ucacccaggcuggagugcaguagcgcgaucuc

SEQ ID NO: 494591 - RNA, 32 nt, Human
ucacccaggcuggagugcaguagugcaaucag

SEQ ID NO: 494592 - RNA, 32 nt, Human
ucacccaggcuggagugcaguagugcgaucuc

SEQ ID NO: 494593 - RNA, 22 nt, Human
ucacccaggcuggagugcagug

SEQ ID NO: 494594 - RNA, 32 nt, Human
ucacccaggcuggagugcagugcacaaucucg

SEQ ID NO: 494595 - RNA, 32 nt, Human
ucacccaggcuggagugcagugcugcgaucac

SEQ ID NO: 494596 - RNA, 32 nt, Human
ucacccaggcuggagugcagugcugugauauu

SEQ ID NO: 494597 - RNA, 32 nt, Human
ucacccaggcuggagugcagugcugugaucuu

SEQ ID NO: 494598 - RNA, 23 nt, Human
ucacccaggcuggagugcagugg

SEQ ID NO: 494599 - RNA, 32 nt, Human
ucacccaggcuggagugcaguggagcaaucuc

SEQ ID NO: 494600 - RNA, 32 nt, Human
ucacccaggcuggagugcaguggcacaaccuu

SEQ ID NO: 494601 - RNA, 32 nt, Human
ucacccaggcuggagugcaguggcacaaucac

SEQ ID NO: 494602 - RNA, 32 nt, Human
ucacccaggcuggagugcaguggcacaaucau

SEQ ID NO: 494603 - RNA, 32 nt, Human
ucacccaggcuggagugcaguggcacaaucuc

SEQ ID NO: 494604 - RNA, 32 nt, Human
ucacccaggcuggagugcaguggcacaaucuu

SEQ ID NO: 494605 - RNA, 32 nt, Human
ucacccaggcuggagugcaguggcccaaucuc

SEQ ID NO: 494606 - RNA, 32 nt, Human
ucacccaggcuggagugcaguggcgcaaucac

SEQ ID NO: 494607 - RNA, 32 nt, Human
ucacccaggcuggagugcaguggcgcaaucuc

SEQ ID NO: 494608 - RNA, 32 nt, Human
ucacccaggcuggagugcaguggcgcaaucuu

SEQ ID NO: 494609 - RNA, 32 nt, Human
ucacccaggcuggagugcaguggcgccaucuc

SEQ ID NO: 494610 - RNA, 32 nt, Human
ucacccaggcuggagugcaguggcgccaucuu

SEQ ID NO: 494611 - RNA, 32 nt, Human
ucacccaggcuggagugcaguggcgcgaucuc

SEQ ID NO: 494612 - RNA, 32 nt, Human
ucacccaggcuggagugcaguggcgcgaucuu

SEQ ID NO: 494613 - RNA, 32 nt, Human
ucacccaggcuggagugcaguggcgcgauguc

SEQ ID NO: 494614 - RNA, 32 nt, Human
ucacccaggcuggagugcaguggcgugauccc

SEQ ID NO: 494615 - RNA, 32 nt, Human
ucacccaggcuggagugcaguggcgugaucuc

SEQ ID NO: 494616 - RNA, 32 nt, Human
ucacccaggcuggagugcaguggcgugaucug

SEQ ID NO: 494617 - RNA, 32 nt, Human
ucacccaggcuggagugcaguggcgugaucuu

SEQ ID NO: 494618 - RNA, 32 nt, Human
ucacccaggcuggagugcaguggcgugauuuu

SEQ ID NO: 494619 - RNA, 32 nt, Human
ucacccaggcuggagugcaguggcucaauuuu

SEQ ID NO: 494620 - RNA, 32 nt, Human
ucacccaggcuggagugcaguggggcaaucuu

SEQ ID NO: 494621 - RNA, 32 nt, Human
ucacccaggcuggagugcagugguacaaucau

SEQ ID NO: 494622 - RNA, 32 nt, Human
ucacccaggcuggagugcagugguacagucuc

SEQ ID NO: 494623 - RNA, 32 nt, Human
ucacccaggcuggagugcagugguaugaccau

SEQ ID NO: 494624 - RNA, 32 nt, Human
ucacccaggcuggagugcagugguaugaucuu

SEQ ID NO: 494625 - RNA, 32 nt, Human
ucacccaggcuggagugcaguggugacagauc

SEQ ID NO: 494626 - RNA, 32 nt, Human
ucacccaggcuggagugcaguggugagauuuu

SEQ ID NO: 494627 - RNA, 32 nt, Human
ucacccaggcuggagugcaguggugcaaucac

SEQ ID NO: 494628 - RNA, 32 nt, Human
ucacccaggcuggagugcaguggugcaaucau

SEQ ID NO: 494629 - RNA, 32 nt, Human
ucacccaggcuggagugcaguggugcaaucgc

SEQ ID NO: 494630 - RNA, 32 nt, Human
ucacccaggcuggagugcaguggugcaaucuc

SEQ ID NO: 494631 - RNA, 32 nt, Human
ucacccaggcuggagugcaguggugcaaucuu

SEQ ID NO: 494632 - RNA, 32 nt, Human
ucacccaggcuggagugcaguggugcagucau

SEQ ID NO: 494633 - RNA, 32 nt, Human
ucacccaggcuggagugcaguggugcgaccuc

SEQ ID NO: 494634 - RNA, 32 nt, Human
ucacccaggcuggagugcaguggugcgagcuc

SEQ ID NO: 494635 - RNA, 32 nt, Human
ucacccaggcuggagugcaguggugcgaucuc

SEQ ID NO: 494636 - RNA, 32 nt, Human
ucacccaggcuggagugcaguggugcgaucug

SEQ ID NO: 494637 - RNA, 32 nt, Human
ucacccaggcuggagugcaguggugcgaucuu

SEQ ID NO: 494638 - RNA, 32 nt, Human
ucacccaggcuggagugcaguggugugaacag

SEQ ID NO: 494639 - RNA, 32 nt, Human
ucacccaggcuggagugcaguggugugacggc

SEQ ID NO: 494640 - RNA, 32 nt, Human
ucacccaggcuggagugcaguggugugagcuc

SEQ ID NO: 494641 - RNA, 32 nt, Human
ucacccaggcuggagugcaguggugugaucac

SEQ ID NO: 494642 - RNA, 32 nt, Human
ucacccaggcuggagugcaguggugugaucau

SEQ ID NO: 494643 - RNA, 32 nt, Human
ucacccaggcuggagugcaguggugugaucuc

SEQ ID NO: 494644 - RNA, 32 nt, Human
ucacccaggcuggagugcaguggugugaucuu

SEQ ID NO: 494645 - RNA, 32 nt, Human
ucacccaggcuggagugcaguggugugauuuc

SEQ ID NO: 494646 - RNA, 32 nt, Human
ucacccaggcuggagugcagugucgugaucaa

SEQ ID NO: 494647 - RNA, 32 nt, Human
ucacccaggcuggagugcaguguggcuggagg

SEQ ID NO: 494648 - RNA, 32 nt, Human
ucacccaggcuggagugcaguguugcaguccg

SEQ ID NO: 494649 - RNA, 32 nt, Human
ucacccaggcuggagugccauagugugaucuc

SEQ ID NO: 494650 - RNA, 32 nt, Human
ucacccaggcuggagugcgauggcgcgaucuu

SEQ ID NO: 494651 - RNA, 32 nt, Human
ucacccaggcuggagugcgguggcgcaaucuc

SEQ ID NO: 494652 - RNA, 32 nt, Human
ucacccaggcuggagugcgguggcgcaaucuu

SEQ ID NO: 494653 - RNA, 32 nt, Human
ucacccaggcuggagugcgguggugcaaucuu

SEQ ID NO: 494654 - RNA, 21 nt, Human
ucacccaggcuggagugcugu

SEQ ID NO: 494655 - RNA, 32 nt, Human
ucacccaggcuggagugcuguggugcaaucuc

SEQ ID NO: 494656 - RNA, 32 nt, Human
ucacccaggcuggagugcuguggugugauuuu

SEQ ID NO: 494657 - RNA, 32 nt, Human
ucacccaggcuggagugcugugguguuaccuc

SEQ ID NO: 494658 - RNA, 21 nt, Human
ucacccaggcuggaguggagu

SEQ ID NO: 494659 - RNA, 22 nt, Human
ucacccaggcuggaguggagug

SEQ ID NO: 494660 - RNA, 23 nt, Human
ucacccaggcuggaguggagugg

SEQ ID NO: 494661 - RNA, 32 nt, Human
ucacccaggcuggaguggaguggcgcuauccc

SEQ ID NO: 494662 - RNA, 32 nt, Human
ucacccaggcuggaguggagugguaugaucuu

SEQ ID NO: 494663 - RNA, 20 nt, Human
ucacccaggcuggaguguaa

SEQ ID NO: 494664 - RNA, 32 nt, Human
ucacccaggcuggaguguaagugacaugauca

SEQ ID NO: 494665 - RNA, 22 nt, Human
ucacccaggcuggaguguagug

SEQ ID NO: 494666 - RNA, 32 nt, Human
ucacccaggcuggaguguaguggcgcaaucuc

SEQ ID NO: 494667 - RNA, 32 nt, Human
ucacccaggcuggaguguaguggugcaauccu

SEQ ID NO: 494668 - RNA, 32 nt, Human
ucacccaggcuggaguguaguggugcagucuu

SEQ ID NO: 494669 - RNA, 32 nt, Human
ucacccaggcuggaguguagugguguaaucuc

SEQ ID NO: 494670 - RNA, 32 nt, Human
ucacccaggcuggaguguaguggugugauccu

SEQ ID NO: 494671 - RNA, 32 nt, Human
ucacccaggcuggagugugcaguggcgcggug

SEQ ID NO: 494672 - RNA, 32 nt, Human
ucacccaggcuggaguuauagugacgugaucc

SEQ ID NO: 494673 - RNA, 32 nt, Human
ucacccaggcuggaguucaguggugcgaccuc

SEQ ID NO: 494674 - RNA, 16 nt, Human
ucacccaggcuggcag

SEQ ID NO: 494675 - RNA, 23 nt, Human
ucacccaggcuggcagaucaugg

SEQ ID NO: 494676 - RNA, 32 nt, Human
ucacccaggcuggcgugcaauaguucaaucuc

SEQ ID NO: 494677 - RNA, 22 nt, Human
ucacccaggcuggcgugcaaug

SEQ ID NO: 494678 - RNA, 32 nt, Human
ucacccaggcuggcgugcaauggcgcaguuga

SEQ ID NO: 494679 - RNA, 32 nt, Human
ucacccaggcugggaauugcaguggcacaauc

SEQ ID NO: 494680 - RNA, 20 nt, Human
ucacccaggcuggggugcag

SEQ ID NO: 494681 - RNA, 32 nt, Human
ucacccaggcuggggugcaguggcgcgaucuu

SEQ ID NO: 494682 - RNA, 32 nt, Human
ucacccaggcuggggugcaguggcgugaucuu

SEQ ID NO: 494683 - RNA, 32 nt, Human
ucacccaggcuggugugcaggggugcggucau

SEQ ID NO: 494684 - RNA, 32 nt, Human
ucacccaggcuguaguacaguggugccaucuc

SEQ ID NO: 494685 - RNA, 32 nt, Human
ucacccaggcuugagugcaguggugcgaucac

SEQ ID NO: 494686 - RNA, 32 nt, Human
ucacccagggccugaccccagaguggucccaa

SEQ ID NO: 494687 - RNA, 18 nt, Human
ucacccaggugcucaguc

SEQ ID NO: 494688 - RNA, 32 nt, Human
ucacccagguggcuggaguacaguggccugau

SEQ ID NO: 494689 - RNA, 32 nt, Human
ucacccagguucgaguucaguggugccaucuc

SEQ ID NO: 494690 - RNA, 32 nt, Human
ucacccagguuggagcacaguggugcaaucau

SEQ ID NO: 494691 - RNA, 32 nt, Human
ucacccagguuggagugcagcaggggcaugau

SEQ ID NO: 494692 - RNA, 32 nt, Human
ucacccagguuggagugcaguggcgugaucuc

SEQ ID NO: 494693 - RNA, 32 nt, Human
ucacccagguuggagugcaguggugugaucuc

SEQ ID NO: 494694 - RNA, 32 nt, Human
ucacccagguuggagugcaguggugugaucuu

SEQ ID NO: 494695 - RNA, 32 nt, Human
ucacccagguuggagugcauugguguggucuu

SEQ ID NO: 494696 - RNA, 32 nt, Human
ucacccaguauacuccauaccagccugaggug

SEQ ID NO: 494697 - RNA, 32 nt, Human
ucacccagucuggagugcaguggugugaucac

SEQ ID NO: 494698 - RNA, 32 nt, Human
ucacccagucuggaguggaguggcauaaucuu

SEQ ID NO: 494699 - RNA, 18 nt, Human
ucacccagugaucagucg

SEQ ID NO: 494700 - RNA, 32 nt, Human
ucacccaguugacccaucucucagccucucug

SEQ ID NO: 494701 - RNA, 32 nt, Human
ucacccaguuuggagugcaguggugcagucuc

SEQ ID NO: 494702 - RNA, 32 nt, Human
ucacccaucaaaccagugaauuucucaaucuu

SEQ ID NO: 494703 - RNA, 32 nt, Human
ucacccauccccagcauugggaaagggucaca

SEQ ID NO: 494704 - RNA, 32 nt, Human
ucacccauccuagaggccaggcaggagcccuu

SEQ ID NO: 494705 - RNA, 22 nt, Human
ucacccaucucagcaagcccag

SEQ ID NO: 494706 - RNA, 32 nt, Human
ucacccaucugugugcuuccauccugcauuaa

SEQ ID NO: 494707 - RNA, 32 nt, Human
ucacccaucuuucuguuugucauucuuaucuc

SEQ ID NO: 494708 - RNA, 32 nt, Human
ucacccaucuuuguucccaucugaggacucag

SEQ ID NO: 494709 - RNA, 23 nt, Human
ucacccaugcuaggcaagcccag

SEQ ID NO: 494710 - RNA, 32 nt, Human
ucacccaugcuaggguccccaaagcacugggg

SEQ ID NO: 494711 - RNA, 32 nt, Human
ucacccaugcuggaguacaauggcacaaacac

SEQ ID NO: 494712 - RNA, 32 nt, Human
ucaccccaagcaccugcuggcugcuggaagca

SEQ ID NO: 494713 - RNA, 32 nt, Human
ucaccccacaaccaccaccaccacaauaaaca

SEQ ID NO: 494714 - RNA, 32 nt, Human
ucaccccacaugcucccuguuucucaugcuuu

SEQ ID NO: 494715 - RNA, 32 nt, Human
ucaccccacccccuccagccagaggcgagaau

SEQ ID NO: 494716 - RNA, 26 nt, Human
ucaccccaccgcccucuuaaguuucu

SEQ ID NO: 494717 - RNA, 32 nt, Human
ucaccccaccucucgcugcucagcucgguuuc

SEQ ID NO: 494718 - RNA, 32 nt, Human
ucaccccaccuugcaugcaccuugcuaccugc

SEQ ID NO: 494719 - RNA, 32 nt, Human
ucaccccacucagcucaccucucccuccaccu

SEQ ID NO: 494720 - RNA, 32 nt, Human
ucaccccacugcauuccagccugggugacaga

SEQ ID NO: 494721 - RNA, 32 nt, Human
ucaccccacuguccuccagccugggcaacaga

SEQ ID NO: 494722 - RNA, 32 nt, Human
ucaccccacugugcuguagccugggugacagu

SEQ ID NO: 494723 - RNA, 32 nt, Human
ucaccccagaaacuccccuuguacccccuucc

SEQ ID NO: 494724 - RNA, 32 nt, Human
ucaccccagacuccugacugucucccgggacu

SEQ ID NO: 494725 - RNA, 32 nt, Human
ucaccccagcaugagugcugagauauggacuc

SEQ ID NO: 494726 - RNA, 32 nt, Human
ucaccccagcuccaucagggcuggcagucccg

SEQ ID NO: 494727 - RNA, 32 nt, Human
ucaccccagcuggagugcaguagcacgaucuu

SEQ ID NO: 494728 - RNA, 32 nt, Human
ucaccccagcuggagugcaguggugcgaucuc

SEQ ID NO: 494729 - RNA, 32 nt, Human
ucaccccaggaggcugcugcuaugauucccac

SEQ ID NO: 494730 - RNA, 32 nt, Human
ucaccccaggccacugccacacugggccugaa

SEQ ID NO: 494731 - RNA, 32 nt, Human
ucaccccaggcuugagaacaggugaccauccc

SEQ ID NO: 494732 - RNA, 25 nt, Human
ucaccccagguucucaccucagggg

SEQ ID NO: 494733 - RNA, 32 nt, Human
ucaccccauaggcugaguggaagcucauguuc

SEQ ID NO: 494734 - RNA, 32 nt, Human
ucaccccauugcacuccagccuggacaacaag

SEQ ID NO: 494735 - RNA, 32 nt, Human
ucaccccauuucacuccagccugggcgacaag

SEQ ID NO: 494736 - RNA, 32 nt, Human
ucacccccaagugucucccacgacugcccucc

SEQ ID NO: 494737 - RNA, 32 nt, Human
ucacccccaccaccaggcuucuauuugggauu

SEQ ID NO: 494738 - RNA, 18 nt, Human
ucacccccaccaccccca

SEQ ID NO: 494739 - RNA, 32 nt, Human
ucacccccagaacccgcagcugugggaagagc

SEQ ID NO: 494740 - RNA, 32 nt, Human
ucacccccagcacagggggauucugagcagug

SEQ ID NO: 494741 - RNA, 15 nt, Human
ucacccccagcggcu

SEQ ID NO: 494742 - RNA, 32 nt, Human
ucacccccauaacaccagcaggguggggguua

SEQ ID NO: 494743 - RNA, 32 nt, Human
ucacccccgcgacuaucuccccaaaacggagc

SEQ ID NO: 494744 - RNA, 32 nt, Human
ucacccccucauuuccccagugaccauagcca

SEQ ID NO: 494745 - RNA, 32 nt, Human
ucacccccucggcuugguccuggcaggcaucc

SEQ ID NO: 494746 - RNA, 32 nt, Human
ucacccccuggcugagaagcccugaaguaaag

SEQ ID NO: 494747 - RNA, 25 nt, Human
ucacccccuguaaucccagcacuuu

SEQ ID NO: 494748 - RNA, 32 nt, Human
ucacccccuguaaucccagcacuuugggaagc

SEQ ID NO: 494749 - RNA, 32 nt, Human
ucacccccuuccauuacccauucuccacagaa

SEQ ID NO: 494750 - RNA, 32 nt, Human
ucacccccuucccaucuacacgucccucccca

SEQ ID NO: 494751 - RNA, 19 nt, Human
ucaccccggccucuugcaa

SEQ ID NO: 494752 - RNA, 32 nt, Human
ucaccccggcuggagugcaguggugugaucuu

SEQ ID NO: 494753 - RNA, 32 nt, Human
ucaccccuccccuccccuccucagagcccacc

SEQ ID NO: 494754 - RNA, 32 nt, Human
ucaccccugcacuccagccugggcaacagagu

SEQ ID NO: 494755 - RNA, 32 nt, Human
ucaccccugcugcuggagugcaauugcacaau

SEQ ID NO: 494756 - RNA, 32 nt, Human
ucaccccuggaaucccagcacuuugggaggcg

SEQ ID NO: 494757 - RNA, 32 nt, Human
ucaccccuggggacagaggucagccuaaggug

SEQ ID NO: 494758 - RNA, 24 nt, Human
ucaccccuguaaucccagcacuuu

SEQ ID NO: 494759 - RNA, 32 nt, Human
ucaccccuguaaucccagcacuuugggaggcc

SEQ ID NO: 494760 - RNA, 32 nt, Human
ucaccccuguaaucccagcacuuugggaggcu

SEQ ID NO: 494761 - RNA, 32 nt, Human
ucaccccuguaaucccagcacuuugggugggu

SEQ ID NO: 494762 - RNA, 32 nt, Human
ucaccccuguaaucccagcacuuugugaggcc

SEQ ID NO: 494763 - RNA, 24 nt, Human
ucaccccuguaaucccaguacuuu

SEQ ID NO: 494764 - RNA, 32 nt, Human
ucaccccuguaaucccaguacuuugggaggcc

SEQ ID NO: 494765 - RNA, 32 nt, Human
ucaccccuguaauccuagcacuuugggaggcu

SEQ ID NO: 494766 - RNA, 32 nt, Human
ucaccccuguaaucgcagcacuuugggaggcu

SEQ ID NO: 494767 - RNA, 24 nt, Human
ucaccccuguaaucucagcacuuu

SEQ ID NO: 494768 - RNA, 32 nt, Human
ucaccccuguaaucucagcacuuuggguggcc

SEQ ID NO: 494769 - RNA, 32 nt, Human
ucaccccuguaaucucagcauuuugggaggcu

SEQ ID NO: 494770 - RNA, 32 nt, Human
ucaccccugucugaccuuauuguugcucacac

SEQ ID NO: 494771 - RNA, 22 nt, Human
ucaccccuucagccgagcccag

SEQ ID NO: 494772 - RNA, 32 nt, Human
ucaccccuugcaauaacgucacugccugugac

SEQ ID NO: 494773 - RNA, 32 nt, Human
ucaccccuuguccuuuuccacccuuuuaagag

SEQ ID NO: 494774 - RNA, 32 nt, Human
ucaccccuuuaaucccagcacuuuggaaggcc

SEQ ID NO: 494775 - RNA, 32 nt, Human
ucaccccuuugccuugcugucugucuccaccc

SEQ ID NO: 494776 - RNA, 32 nt, Human
ucaccccuuugucuccaaccuccauuucuguu

SEQ ID NO: 494777 - RNA, 32 nt, Human
ucacccgagcuggagugcaguggugcagucuu

SEQ ID NO: 494778 - RNA, 32 nt, Human
ucacccgcacacugggagggcagccagguggg

SEQ ID NO: 494779 - RNA, 32 nt, Human
ucacccgcgcgacuauguuugcugauuuuucg

SEQ ID NO: 494780 - RNA, 32 nt, Human
ucacccggcagccucuuguccagcgcugaccc

SEQ ID NO: 494781 - RNA, 32 nt, Human
ucacccgggaaagaggugagaggaugggaagg

SEQ ID NO: 494782 - RNA, 32 nt, Human
ucacccgggaagggaaagcagccagcagcccu

SEQ ID NO: 494783 - RNA, 32 nt, Human
ucacccgggcuggagugcaauggcucgaucuc

SEQ ID NO: 494784 - RNA, 32 nt, Human
ucacccgggcuggagugcaguggcgccaucuc

SEQ ID NO: 494785 - RNA, 32 nt, Human
ucacccgggcuggagugcaguggcgcgaucuc

SEQ ID NO: 494786 - RNA, 32 nt, Human
ucacccgggcuggagugcaguggcgugaucuu

SEQ ID NO: 494787 - RNA, 32 nt, Human
ucacccgggcuggagugcaguggugcgaucuc

SEQ ID NO: 494788 - RNA, 32 nt, Human
ucacccgggcuggaguguaacguggcaugauc

SEQ ID NO: 494789 - RNA, 32 nt, Human
ucacccgggcugggcucuacuaccuguacugu

SEQ ID NO: 494790 - RNA, 32 nt, Human
ucacccggggcuccccucucugcuccacgcca

SEQ ID NO: 494791 - RNA, 32 nt, Human
ucacccgggguucguguuaaaugcagauucug

SEQ ID NO: 494792 - RNA, 32 nt, Human
ucacccguucaucauguguacugagcagcuac

SEQ ID NO: 494793 - RNA, 32 nt, Human
ucacccuacaaaccaccauggcucuaaacccu

SEQ ID NO: 494794 - RNA, 32 nt, Human
ucacccuagccugacuggaagcagaaaaugac

SEQ ID NO: 494795 - RNA, 32 nt, Human
ucagccccuccgaccuucucacugaccaguug

SEQ ID NO: 494796 - RNA, 21 nt, Human
ucagccccuccuggggugcuu

SEQ ID NO: 494797 - RNA, 25 nt, Human
ucagccccuccuggggugcuugugg

SEQ ID NO: 494798 - RNA, 22 nt, Human
ucagccccucgagcgugggcuc

SEQ ID NO: 494799 - RNA, 24 nt, Human
ucagccccucuuuucccacauuca

SEQ ID NO: 494800 - RNA, 32 nt, Human
ucagccccugaacaauaauggccucucaugcu

SEQ ID NO: 494801 - RNA, 21 nt, Human
ucagccccugaugcccaggcu

SEQ ID NO: 494802 - RNA, 21 nt, Human
ucagccccugcaaggcgcuca

SEQ ID NO: 494803 - RNA, 32 nt, Human
ucagccccugcaccuggggugugugauucacg

SEQ ID NO: 494804 - RNA, 24 nt, Human
ucagccccugccgaccuuagcuua

SEQ ID NO: 494805 - RNA, 22 nt, Human
ucagccccugccucccaggcca

SEQ ID NO: 494806 - RNA, 32 nt, Human
ucagccccugcucccauccaguggccagucgg

SEQ ID NO: 494807 - RNA, 32 nt, Human
ucagccccugggaacaggccccacgcccucuc

SEQ ID NO: 494808 - RNA, 32 nt, Human
ucagccccuucccuguguccaccuuucucucc

SEQ ID NO: 494809 - RNA, 21 nt, Human
ucagccccuuccuccccacuc

SEQ ID NO: 494810 - RNA, 21 nt, Human
ucagccccuuccuccucacca

SEQ ID NO: 494811 - RNA, 26 nt, Human
ucagccccuucuucuuuccugccuca

SEQ ID NO: 494812 - RNA, 32 nt, Human
ucagcccgaaugccugucaguuucauggaggg

SEQ ID NO: 494813 - RNA, 23 nt, Human
ucagcccgacugcccuccuccca

SEQ ID NO: 494814 - RNA, 32 nt, Human
ucagcccgaggguucugcucuuccugcauguu

SEQ ID NO: 494815 - RNA, 32 nt, Human
ucagcccgauccugcccuuuccuugaacggga

SEQ ID NO: 494816 - RNA, 32 nt, Human
ucagcccgccucugccccacugcuuccugccu

SEQ ID NO: 494817 - RNA, 32 nt, Human
ucagcccggaggaggaggaggaggaggaggag

SEQ ID NO: 494818 - RNA, 20 nt, Human
ucagcccggcugugaacguc

SEQ ID NO: 494819 - RNA, 32 nt, Human
ucagcccgggagguggagguugcagugagcca

SEQ ID NO: 494820 - RNA, 32 nt, Human
ucagcccgggcaacauggugaaaccccgucuc

SEQ ID NO: 494821 - RNA, 32 nt, Human
ucagcccuaccugcaaccaccgcuugccaugg

SEQ ID NO: 494822 - RNA, 32 nt, Human
ucagcccuagaggaauagacucagggauuuca

SEQ ID NO: 494823 - RNA, 32 nt, Human
ucagcccucgcucuccccuuuccacagccucc

SEQ ID NO: 494824 - RNA, 23 nt, Human
ucagcccucgugucccgggcuca

SEQ ID NO: 494825 - RNA, 32 nt, Human
ucagcccucuacugagucccuuagccaagcag

SEQ ID NO: 494826 - RNA, 32 nt, Human
ucagcccucuacugcaggaccaguccaugagc

SEQ ID NO: 494827 - RNA, 32 nt, Human
ucagcccucuuccugccagcaggaagccucug

SEQ ID NO: 494828 - RNA, 32 nt, Human
ucagcccucuucucccugcuccaguagucucc

SEQ ID NO: 494829 - RNA, 32 nt, Human
ucagcccugagauccugcacaagguggagugu

SEQ ID NO: 494830 - RNA, 32 nt, Human
ucagcccugagcgugcugaguucuguguuucu

SEQ ID NO: 494831 - RNA, 32 nt, Human
ucagcccugauuggccaguuugaugagaccaa

SEQ ID NO: 494832 - RNA, 32 nt, Human
ucagcccugcagcuguaguacagugcugugcc

SEQ ID NO: 494833 - RNA, 32 nt, Human
ucagcccugccugcccuggccugggcucuccc

SEQ ID NO: 494834 - RNA, 32 nt, Human
ucagcccugcucaugaggcagcaaacccugca

SEQ ID NO: 494835 - RNA, 32 nt, Human
ucagcccugcuccuccugccuccuggggucca

SEQ ID NO: 494836 - RNA, 32 nt, Human
ucagcccugcugucaccaccuugucaugcacc

SEQ ID NO: 494837 - RNA, 32 nt, Human
ucagcccugggcaacauagugagaccccuguc

SEQ ID NO: 494838 - RNA, 32 nt, Human
ucagcccuggggaucagaaaggugggcuugcu

SEQ ID NO: 494839 - RNA, 32 nt, Human
ucagcccugucagcuccugguggcugaguuga

SEQ ID NO: 494840 - RNA, 32 nt, Human
ucagcccugugucugucacaggcugggucaaa

SEQ ID NO: 494841 - RNA, 23 nt, Human
ucagcccuucccaccaggcacuu

SEQ ID NO: 494842 - RNA, 20 nt, Human
ucagcccuucccuguaacuu

SEQ ID NO: 494843 - RNA, 19 nt, Human
ucagcccuucugcuucugg

SEQ ID NO: 494844 - RNA, 32 nt, Human
ucagcccuuucaaacaugcuuaccucgaguga

SEQ ID NO: 494845 - RNA, 32 nt, Human
ucagcccuuuccaaagucgccaaaaacccaca

SEQ ID NO: 494846 - RNA, 20 nt, Human
ucagcccuuuccuguggccu

SEQ ID NO: 494847 - RNA, 32 nt, Human
ucagcccuuugucaaucauaaugguuuuuaaa

SEQ ID NO: 494848 - RNA, 22 nt, Human
ucagccgaaagccccccgccca

SEQ ID NO: 494849 - RNA, 32 nt, Human
ucagccgaaucccagccccuucccuugggccu

SEQ ID NO: 494850 - RNA, 32 nt, Human
ucagccgacaagaggcaccaugaaauuggaau

SEQ ID NO: 494851 - RNA, 32 nt, Human
ucagccgagcccaggggaggcacaaagggcag

SEQ ID NO: 494852 - RNA, 32 nt, Human
ucagccgagggugaauucucaggacuggucgg

SEQ ID NO: 494853 - RNA, 25 nt, Human
ucagccgauccucugcucagguuca

SEQ ID NO: 494854 - RNA, 32 nt, Human
ucagccgcaacucgucgugcaugugggcaugg

SEQ ID NO: 494855 - RNA, 32 nt, Human
ucagccgcauggcuccccugugccccagcccc

SEQ ID NO: 494856 - RNA, 32 nt, Human
ucagccgcgggccgcugggaacuccacucggg

SEQ ID NO: 494857 - RNA, 32 nt, Human
ucagccgcuccugguggggaauggcuggggcu

SEQ ID NO: 494858 - RNA, 32 nt, Human
ucagccgcugcuuugucuccuuagcucggguc

SEQ ID NO: 494859 - RNA, 32 nt, Human
ucagccgcuucucaaguggguaggaaagcaga

SEQ ID NO: 494860 - RNA, 32 nt, Human
ucagccggacuggccgggccuggacccaugcc

SEQ ID NO: 494861 - RNA, 32 nt, Human
ucagccggccaagaaaaggaagcuccgucccu

SEQ ID NO: 494862 - RNA, 32 nt, Human
ucagccggcugguggagagggaggccggccuc

SEQ ID NO: 494863 - RNA, 32 nt, Human
ucagccggcuucccugagggaggagaacacug

SEQ ID NO: 494864 - RNA, 32 nt, Human
ucagccgggaggcccagaguguucugcagagg

SEQ ID NO: 494865 - RNA, 31 nt, Human
ucagccgggcaggaaagaugggaugaagccc

SEQ ID NO: 494866 - RNA, 32 nt, Human
ucagccgggcuggggcugcuggggaagcccug

SEQ ID NO: 494867 - RNA, 32 nt, Human
ucagccgggguccacucucagggcacaggugg

SEQ ID NO: 494868 - RNA, 32 nt, Human
ucagccggugaacccucucucccaucaccguc

SEQ ID NO: 494869 - RNA, 32 nt, Human
ucagccgucacugucugugucacugcaguggu

SEQ ID NO: 494870 - RNA, 32 nt, Human
ucagccgugcccugcuccaucucccucgccag

SEQ ID NO: 494871 - RNA, 19 nt, Human
ucagccuaagggaguggga

SEQ ID NO: 494872 - RNA, 31 nt, Human
ucagccuaaguguccauccacgaaugaauga

SEQ ID NO: 494873 - RNA, 32 nt, Human
ucagccuacccacccuccccaucuuugcugag

SEQ ID NO: 494874 - RNA, 32 nt, Human
ucagccuacugccucggaucucuccagccgaa

SEQ ID NO: 494875 - RNA, 32 nt, Human
ucagccuagaucuagcagugagagagcccucu

SEQ ID NO: 494876 - RNA, 23 nt, Human
ucagccuaggcaacauaguaaga

SEQ ID NO: 494877 - RNA, 32 nt, Human
ucagccuaggcaacauaguaagaccucaucuc

SEQ ID NO: 494878 - RNA, 32 nt, Human
ucagccuaggcaacauggugaaauccugucuu

SEQ ID NO: 494879 - RNA, 32 nt, Human
ucagccucacaaguagcugggauuacaggugc

SEQ ID NO: 494880 - RNA, 32 nt, Human
ucagccucacacaccacguauuaagucaguca

SEQ ID NO: 494881 - RNA, 32 nt, Human
ucagccucacccacagcagccccaucgccaaa

SEQ ID NO: 494882 - RNA, 32 nt, Human
ucagccucacgggcccucagcacuuuguguuu

SEQ ID NO: 494883 - RNA, 32 nt, Human
ucagccucacugccugcuuauugccucuuucu

SEQ ID NO: 494884 - RNA, 32 nt, Human
ucagccucagacccuccucuggccccggccuu

SEQ ID NO: 494885 - RNA, 32 nt, Human
ucagccucagugggguuccugauguuuaucua

SEQ ID NO: 494886 - RNA, 32 nt, Human
ucagccuccaaaagugcugggauuauaggugu

SEQ ID NO: 494887 - RNA, 32 nt, Human
ucagccuccaaaguagcugggauuacaggcac

SEQ ID NO: 494888 - RNA, 32 nt, Human
ucagccuccaaaguagcugggauuacaggcau

SEQ ID NO: 494889 - RNA, 32 nt, Human
ucagccuccaaaguagcugggauuacagguuu

SEQ ID NO: 494890 - RNA, 32 nt, Human
ucagccuccaaggcuuuaaagccacauuucag

SEQ ID NO: 494891 - RNA, 32 nt, Human
ucagccuccagaauagcugggauuacaggcgu

SEQ ID NO: 494892 - RNA, 32 nt, Human
ucagccuccaguuuccugagcagguacuuagc

SEQ ID NO: 494893 - RNA, 32 nt, Human
ucagccuccauuuugaaggcugucuacacuua

SEQ ID NO: 494894 - RNA, 32 nt, Human
ucagccucccaaaaagcugggauuacuagcau

SEQ ID NO: 494895 - RNA, 32 nt, Human
ucagccucccaaaagcugggauuacaggcgug

SEQ ID NO: 494896 - RNA, 32 nt, Human
ucagccucccaaaaugcugggacuaugggcau

SEQ ID NO: 494897 - RNA, 32 nt, Human
ucagccucccaaaaugcugggauuacaggcau

SEQ ID NO: 494898 - RNA, 32 nt, Human
ucagccucccaaaaugcugggauuacaggcgu

SEQ ID NO: 494899 - RNA, 32 nt, Human
ucagccucccaaaaugcugggauuacaggcuu

SEQ ID NO: 494900 - RNA, 32 nt, Human
ucagccucccaaaaugcuuggauuacaggcau

SEQ ID NO: 494901 - RNA, 32 nt, Human
ucagccucccaaaauggugggauuacaggugu

SEQ ID NO: 494902 - RNA, 32 nt, Human
ucagccucccaaaauucugggauuacaggcau

SEQ ID NO: 494903 - RNA, 32 nt, Human
ucagccucccaaacuacugggauuacagguug

SEQ ID NO: 494904 - RNA, 32 nt, Human
ucagccucccaaacugcugggauuacaggcgu

SEQ ID NO: 494905 - RNA, 32 nt, Human
ucagccucccaaacugcugggauuacaggugu

SEQ ID NO: 494906 - RNA, 32 nt, Human
ucagccucccaaagagcugggauuacaggugu

SEQ ID NO: 494907 - RNA, 32 nt, Human
ucagccucccaaaggguugggauuaccggcau

SEQ ID NO: 494908 - RNA, 32 nt, Human
ucagccucccaaaguacugggauuacaaacau

SEQ ID NO: 494909 - RNA, 32 nt, Human
ucagccucccaaaguacugggauuacaggcau

SEQ ID NO: 494910 - RNA, 32 nt, Human
ucagccucccaaaguacugggauuacaggcgu

SEQ ID NO: 494911 - RNA, 32 nt, Human
ucagccucccaaaguacugggauuauaggcau

SEQ ID NO: 494912 - RNA, 32 nt, Human
ucagccucccaaaguacugggauuauaggugu

SEQ ID NO: 494913 - RNA, 32 nt, Human
ucagccucccaaaguccugggauuacaggcgu

SEQ ID NO: 494914 - RNA, 32 nt, Human
ucagccucccaaaguccugggauuacaggcug

SEQ ID NO: 494915 - RNA, 32 nt, Human
ucagccucccaaagugcagggauuacaggcac

SEQ ID NO: 494916 - RNA, 32 nt, Human
ucagccucccaaagugcagggauuacaggcau

SEQ ID NO: 494917 - RNA, 32 nt, Human
ucagccucccaaagugccgccgggauuacagg

SEQ ID NO: 494918 - RNA, 32 nt, Human
ucagccucccaaagugccgggauuacaggcgu

SEQ ID NO: 494919 - RNA, 32 nt, Human
ucagccucccaaagugcuaggauuacacagcc

SEQ ID NO: 494920 - RNA, 32 nt, Human
ucagccucccaaagugcuaggauuacaggaua

SEQ ID NO: 494921 - RNA, 32 nt, Human
ucagccucccaaagugcuaggauuacaggcau

SEQ ID NO: 494922 - RNA, 32 nt, Human
ucagccucccaaagugcuaggauuacaggccu

SEQ ID NO: 494923 - RNA, 32 nt, Human
ucagccucccaaagugcuaggauuacaggcgu

SEQ ID NO: 494924 - RNA, 32 nt, Human
ucagccucccaaagugcuaggauuacaggugu

SEQ ID NO: 494925 - RNA, 32 nt, Human
ucagccucccaaagugcuaggauuacgggugu

SEQ ID NO: 494926 - RNA, 32 nt, Human
ucagccucccaaagugcuaggauuauaggcgu

SEQ ID NO: 494927 - RNA, 32 nt, Human
ucagccucccaaagugcuaggguuacagacau

SEQ ID NO: 494928 - RNA, 32 nt, Human
ucagccucccaaagugcuaugauuacagacgu

SEQ ID NO: 494929 - RNA, 32 nt, Human
ucagccucccaaagugcucggauuacagacau

SEQ ID NO: 494930 - RNA, 32 nt, Human
ucagccucccaaagugcugagauuacaagcgu

SEQ ID NO: 494931 - RNA, 32 nt, Human
ucagccucccaaagugcugagauuacagacau

SEQ ID NO: 494932 - RNA, 32 nt, Human
ucagccucccaaagugcugagauuacaggcau

SEQ ID NO: 494933 - RNA, 32 nt, Human
ucagccucccaaagugcugagauuacaggcgu

SEQ ID NO: 494934 - RNA, 32 nt, Human
ucagccucccaaagugcugagauuacaggggu

SEQ ID NO: 494935 - RNA, 32 nt, Human
ucagccucccaaagugcugagauuacaggugu

SEQ ID NO: 494936 - RNA, 32 nt, Human
ucagccucccaaagugcugagauuacuggcuu

SEQ ID NO: 494937 - RNA, 32 nt, Human
ucagccucccaaagugcugagauuauaggcac

SEQ ID NO: 494938 - RNA, 32 nt, Human
ucagccucccaaagugcugauauuacaggcgu

SEQ ID NO: 494939 - RNA, 32 nt, Human
ucagccucccaaagugcugcugggauuacagg

SEQ ID NO: 494940 - RNA, 32 nt, Human
ucagccucccaaagugcuggaauuacaggcgu

SEQ ID NO: 494941 - RNA, 32 nt, Human
ucagccucccaaagugcuggaauuauaggcgu

SEQ ID NO: 494942 - RNA, 32 nt, Human
ucagccucccaaagugcuggauuacaggcgug

SEQ ID NO: 494943 - RNA, 32 nt, Human
ucagccucccaaagugcuggcauuacaggcgu

SEQ ID NO: 494944 - RNA, 32 nt, Human
ucagccucccaaagugcugggacuacagacau

SEQ ID NO: 494945 - RNA, 32 nt, Human
ucagccucccaaagugcugggacuacaggcau

SEQ ID NO: 494946 - RNA, 32 nt, Human
ucagccucccaaagugcugggacuacaggcgu

SEQ ID NO: 494947 - RNA, 32 nt, Human
ucagccucccaaagugcugggaucacaggcau

SEQ ID NO: 494948 - RNA, 32 nt, Human
ucagccucccaaagugcugggaugacaggcgu

SEQ ID NO: 494949 - RNA, 32 nt, Human
ucagccucccaaagugcugggaugacaggugu

SEQ ID NO: 494950 - RNA, 32 nt, Human
ucagccucccaaagugcugggaugacaguugu

SEQ ID NO: 494951 - RNA, 32 nt, Human
ucagccucccaaagugcugggauuaacaggua

SEQ ID NO: 494952 - RNA, 32 nt, Human
ucagccucccaaagugcugggauuacaagcgu

SEQ ID NO: 494953 - RNA, 32 nt, Human
ucagccucccaaagugcugggauuacaaguau

SEQ ID NO: 494954 - RNA, 32 nt, Human
ucagccucccaaagugcugggauuacaagugu

SEQ ID NO: 494955 - RNA, 32 nt, Human
ucagccucccaaagugcugggauuacagaccu

SEQ ID NO: 494956 - RNA, 32 nt, Human
ucagccucccaaagugcugggauuacagacgu

SEQ ID NO: 494957 - RNA, 32 nt, Human
ucagccucccaaagugcugggauuacagauga

SEQ ID NO: 494958 - RNA, 32 nt, Human
ucagccucccaaagugcugggauuacagaugu

SEQ ID NO: 494959 - RNA, 32 nt, Human
ucagccucccaaagugcugggauuacagcccu

SEQ ID NO: 494960 - RNA, 32 nt, Human
ucagccucccaaagugcugggauuacagcgaa

SEQ ID NO: 494961 - RNA, 32 nt, Human
ucagccucccaaagugcugggauuacagcgug

SEQ ID NO: 494962 - RNA, 32 nt, Human
ucagccucccaaagugcugggauuacaggaau

SEQ ID NO: 494963 - RNA, 32 nt, Human
ucagccucccaaagugcugggauuacaggagu

SEQ ID NO: 494964 - RNA, 32 nt, Human
ucagccucccaaagugcugggauuacaggcaa

SEQ ID NO: 494965 - RNA, 32 nt, Human
ucagccucccaaagugcugggauuacaggcau

SEQ ID NO: 494966 - RNA, 32 nt, Human
ucagccucccaaagugcugggauuacaggcca

SEQ ID NO: 494967 - RNA, 32 nt, Human
ucagccucccaaagugcugggauuacaggccc

SEQ ID NO: 494968 - RNA, 32 nt, Human
ucagccucccaaagugcugggauuacaggccu

SEQ ID NO: 494969 - RNA, 32 nt, Human
ucagccucccaaagugcugggauuacaggcgc

SEQ ID NO: 494970 - RNA, 32 nt, Human
ucagccucccaaagugcugggauuacaggcgg

SEQ ID NO: 494971 - RNA, 32 nt, Human
ucagccucccaaagugcugggauuacaggcgu

SEQ ID NO: 494972 - RNA, 32 nt, Human
ucagccucccaaagugcugggauuacaggcuu

SEQ ID NO: 494973 - RNA, 32 nt, Human
ucagccucccaaagugcugggauuacaggggu

SEQ ID NO: 494974 - RNA, 32 nt, Human
ucagccucccaaagugcugggauuacagguau

SEQ ID NO: 494975 - RNA, 32 nt, Human
ucagccucccaaagugcugggauuacaggugg

SEQ ID NO: 494976 - RNA, 32 nt, Human
ucagccucccaaagugcugggauuacaggugu

SEQ ID NO: 494977 - RNA, 32 nt, Human
ucagccucccaaagugcugggauuacagucau

SEQ ID NO: 494978 - RNA, 32 nt, Human
ucagccucccaaagugcugggauuacaguugc

SEQ ID NO: 494979 - RNA, 32 nt, Human
ucagccucccaaagugcugggauuaccggcuu

SEQ ID NO: 494980 - RNA, 32 nt, Human
ucagccucccaaagugcugggauuaccgguau

SEQ ID NO: 494981 - RNA, 32 nt, Human
ucagccucccaaagugcugggauuacuggugu

SEQ ID NO: 494982 - RNA, 32 nt, Human
ucagccucccaaagugcugggauuauacguau

SEQ ID NO: 494983 - RNA, 32 nt, Human
ucagccucccaaagugcugggauuauaggcau

SEQ ID NO: 494984 - RNA, 32 nt, Human
ucagccucccaaagugcugggauuauaggcgu

SEQ ID NO: 494985 - RNA, 32 nt, Human
ucagccucccaaagugcugggauuauaggcug

SEQ ID NO: 494986 - RNA, 32 nt, Human
ucagccucccaaagugcugggauuauaggugu

SEQ ID NO: 494987 - RNA, 32 nt, Human
ucagccucccaaagugcugggauuccagacca

SEQ ID NO: 494988 - RNA, 32 nt, Human
ucagccucccaaagugcugggauugcaggcau

SEQ ID NO: 494989 - RNA, 32 nt, Human
ucagccucccaaagugcugggauugcaggugc

SEQ ID NO: 494990 - RNA, 32 nt, Human
ucagccucccaaagugcugggauugcaggugu

SEQ ID NO: 494991 - RNA, 32 nt, Human
ucagccucccaaagugcugggcuuacgggccu

SEQ ID NO: 494992 - RNA, 32 nt, Human
ucagccucccaaagugcugggguuacaggcau

SEQ ID NO: 494993 - RNA, 32 nt, Human
ucagccucccaaagugcugggguuacaggcgu

SEQ ID NO: 494994 - RNA, 32 nt, Human
ucagccucccaaagugcugggguuacaggugu

SEQ ID NO: 494995 - RNA, 32 nt, Human
ucagccucccaaagugcugguauuacagaugu

SEQ ID NO: 494996 - RNA, 32 nt, Human
ucagccucccaaagugcuuggauuacaggcau

SEQ ID NO: 494997 - RNA, 32 nt, Human
ucagccucccaaaguggugggauuacaggugu

SEQ ID NO: 494998 - RNA, 32 nt, Human
ucagccucccaaaguggugggauuauaggcau

SEQ ID NO: 494999 - RNA, 32 nt, Human
ucagccucccaaaguguggggauuacaggugc

SEQ ID NO: 495000 - RNA, 32 nt, Human
ucagccucccaaaguguugagauuacaggcau

SEQ ID NO: 495001 - RNA, 32 nt, Human
ucagccucccaaaguguugcacuacugaauac

SEQ ID NO: 495002 - RNA, 32 nt, Human
ucagccucccaaaguguugggauuacagacau

SEQ ID NO: 495003 - RNA, 32 nt, Human
ucagccucccaaaguguugggauuacaggcau

SEQ ID NO: 495004 - RNA, 32 nt, Human
ucagccucccaaaguguugggauuacaggcgu

SEQ ID NO: 495005 - RNA, 32 nt, Human
ucagccucccaaaguguugggauuacaggugu

SEQ ID NO: 495006 - RNA, 32 nt, Human
ucagccucccaaaguguugggauugcagauau

SEQ ID NO: 495007 - RNA, 32 nt, Human
ucagccucccaaaguucugggauuacaagugu

SEQ ID NO: 495008 - RNA, 32 nt, Human
ucagccucccaaaguucugggauuacaggcau

SEQ ID NO: 495009 - RNA, 32 nt, Human
ucagccucccaaaguucugggauuacaggugu

SEQ ID NO: 495010 - RNA, 32 nt, Human
ucagccucccaaaguuuugggauuacagaccu

SEQ ID NO: 495011 - RNA, 32 nt, Human
ucagccucccaaauagcggggauuacuggugc

SEQ ID NO: 495012 - RNA, 32 nt, Human
ucagccucccaaauagcugggacuacaaggug

SEQ ID NO: 495013 - RNA, 32 nt, Human
ucagccucccaaauagcugggacuacaggcac

SEQ ID NO: 495014 - RNA, 32 nt, Human
ucagccucccaaauagcugggacuacaggucu

SEQ ID NO: 495015 - RNA, 32 nt, Human
ucagccucccaaauagcugggaucacuggcac

SEQ ID NO: 495016 - RNA, 32 nt, Human
ucagccucccaaauagcugggauuacaggcac

SEQ ID NO: 495017 - RNA, 32 nt, Human
ucagccucccaaauagcugggauuacaggugc

SEQ ID NO: 495018 - RNA, 32 nt, Human
ucagccucccaaauagcugggauuacaguugc

SEQ ID NO: 495019 - RNA, 32 nt, Human
ucagccucccaaauagcuggggcuaccauggu

SEQ ID NO: 495020 - RNA, 32 nt, Human
ucagccucccaaauagcugugauuacaggcgu

SEQ ID NO: 495021 - RNA, 32 nt, Human
ucagccucccaaauuacugggauuacaggcau

SEQ ID NO: 495022 - RNA, 32 nt, Human
ucagccucccaaauugcugggauuacaggcau

SEQ ID NO: 495023 - RNA, 32 nt, Human
ucagccucccaaauugcugggauuacaggcgu

SEQ ID NO: 495024 - RNA, 32 nt, Human
ucagccucccaaauugcugggauuuacaggca

SEQ ID NO: 495025 - RNA, 32 nt, Human
ucagccucccaaauuugcugggauuccagggu

SEQ ID NO: 495026 - RNA, 32 nt, Human
ucagccucccaacaugcugggauuauagacau

SEQ ID NO: 495027 - RNA, 32 nt, Human
ucagccucccaacguacugggauuacaggcgu

SEQ ID NO: 495028 - RNA, 32 nt, Human
ucagccucccaacgugcugggauuacagccgg

SEQ ID NO: 495029 - RNA, 32 nt, Human
ucagccucccaacuagcugggauuacaggcgu

SEQ ID NO: 495030 - RNA, 32 nt, Human
ucagccucccaacuugcugggauuacaggugu

SEQ ID NO: 495031 - RNA, 32 nt, Human
ucagccucccaagcaccugggauuacaagcau

SEQ ID NO: 495032 - RNA, 32 nt, Human
ucagccucccaagcagcugggauuacaggcgc

SEQ ID NO: 495033 - RNA, 32 nt, Human
ucagccucccaagcagcugggauuauagacac

SEQ ID NO: 495034 - RNA, 32 nt, Human
ucagccucccaagcauauaacccccuaaggaa

SEQ ID NO: 495035 - RNA, 32 nt, Human
ucagccucccaaggagcugggauuacaggcac

SEQ ID NO: 495036 - RNA, 32 nt, Human
ucagccucccaaggcugggauuacagguaugc

SEQ ID NO: 495037 - RNA, 32 nt, Human
ucagccucccaaggugcugggauuacaggcac

SEQ ID NO: 495038 - RNA, 32 nt, Human
ucagccucccaaggugcugggauuacaggcau

SEQ ID NO: 495039 - RNA, 32 nt, Human
ucagccucccaaggugcugggauuacaggugu

SEQ ID NO: 495040 - RNA, 32 nt, Human
ucagccucccaaggugcugggauugcaggccg

SEQ ID NO: 495041 - RNA, 32 nt, Human
ucagccucccaagguguugggauuacagaugu

SEQ ID NO: 495042 - RNA, 32 nt, Human
ucagccucccaaguaacugggauuacaggcau

SEQ ID NO: 495043 - RNA, 32 nt, Human
ucagccucccaaguaccugggauuacaggcau

SEQ ID NO: 495044 - RNA, 32 nt, Human
ucagccucccaaguagcugggauaacaggcgc

SEQ ID NO: 495045 - RNA, 32 nt, Human
ucagccucccaaguagcugggaugacaggcgc

SEQ ID NO: 495046 - RNA, 32 nt, Human
ucagccucccaaguagcugggauuaaaggcac

SEQ ID NO: 495047 - RNA, 32 nt, Human
ucagccucccaaguagcugggauuacaccacc

SEQ ID NO: 495048 - RNA, 32 nt, Human
ucagccucccaaguagcugggauuacagacuc

SEQ ID NO: 495049 - RNA, 32 nt, Human
ucagccucccaaguagcugggauuacagauca

SEQ ID NO: 495050 - RNA, 32 nt, Human
ucagccucccaaguagcugggauuacagaugu

SEQ ID NO: 495051 - RNA, 32 nt, Human
ucagccucccaaguagcugggauuacagauug

SEQ ID NO: 495052 - RNA, 32 nt, Human
ucagccucccaaguagcugggauuacagcgau

SEQ ID NO: 495053 - RNA, 32 nt, Human
ucagccucccaaguagcugggauuacaggcac

SEQ ID NO: 495054 - RNA, 32 nt, Human
ucagccucccaaguagcugggauuacaggcag

SEQ ID NO: 495055 - RNA, 32 nt, Human
ucagccucccaaguagcugggauuacaggcau

SEQ ID NO: 495056 - RNA, 32 nt, Human
ucagccucccaaguagcugggauuacaggcgc

SEQ ID NO: 495057 - RNA, 32 nt, Human
ucagccucccaaguagcugggauuacaggcgu

SEQ ID NO: 495058 - RNA, 32 nt, Human
ucagccucccaaguagcugggauuacaggugc

SEQ ID NO: 495059 - RNA, 32 nt, Human
ucagccucccaaguagcugggauuacaggugu

SEQ ID NO: 495060 - RNA, 32 nt, Human
ucagccucccaaguagcugggauuacagucag

SEQ ID NO: 495061 - RNA, 32 nt, Human
ucagccucccaaguagcugggauuacagugcc

SEQ ID NO: 495062 - RNA, 32 nt, Human
ucagccucccaaguagcugggauuacaguucc

SEQ ID NO: 495063 - RNA, 32 nt, Human
ucagccucccaaguagcugggauuacaguuuc

SEQ ID NO: 495064 - RNA, 32 nt, Human
ucagccucccaaguagcugggauuacaugugu

SEQ ID NO: 495065 - RNA, 32 nt, Human
ucagccucccaaguagcugggauuacgggcau

SEQ ID NO: 495066 - RNA, 32 nt, Human
ucagccucccaaguagcugggauuacuggugc

SEQ ID NO: 495067 - RNA, 32 nt, Human
ucagccucccaaguagcugggauuauaggcac

SEQ ID NO: 495068 - RNA, 32 nt, Human
ucagccucccaaguagcugggauuauaggugu

SEQ ID NO: 495069 - RNA, 32 nt, Human
ucagccucccaaguagcugggauugcaggcgc

SEQ ID NO: 495070 - RNA, 32 nt, Human
ucagccucccaaguagcugggauuguaagagu

SEQ ID NO: 495071 - RNA, 32 nt, Human
ucagccucccaaguaggugggauuacaggcau

SEQ ID NO: 495072 - RNA, 32 nt, Human
ucagccucccaaguaggugggauuacaggcgc

SEQ ID NO: 495073 - RNA, 32 nt, Human
ucagccucccaaguaguugggauuacaggcac

SEQ ID NO: 495074 - RNA, 32 nt, Human
ucagccucccaaguaguugggauuacaggcau

SEQ ID NO: 495075 - RNA, 32 nt, Human
ucagccucccaaguaguugggauuacgggcau

SEQ ID NO: 495076 - RNA, 32 nt, Human
ucagccucccaagucacugggauuauagacau

SEQ ID NO: 495077 - RNA, 32 nt, Human
ucagccucccaaguggcugggauuacaggcgc

SEQ ID NO: 495078 - RNA, 32 nt, Human
ucagccucccaaguggcugggauuauaggugc

SEQ ID NO: 495079 - RNA, 32 nt, Human
ucagccucccaaguggcugggauugcaggcau

SEQ ID NO: 495080 - RNA, 32 nt, Human
ucagccucccaaguugcugggacuacaggugc

SEQ ID NO: 495081 - RNA, 32 nt, Human
ucagccucccaaugugcugggauuacaggcau

SEQ ID NO: 495082 - RNA, 32 nt, Human
ucagccucccacagugcugggauuacaggcau

SEQ ID NO: 495083 - RNA, 32 nt, Human
ucagccucccacagugcugggauuacaggcgu

SEQ ID NO: 495084 - RNA, 32 nt, Human
ucagccucccagacggcugggauuccaggcgu

SEQ ID NO: 495085 - RNA, 32 nt, Human
ucagccucccagacuguugggauuacaggcau

SEQ ID NO: 495086 - RNA, 32 nt, Human
ucagccucccagagugcugggauuacaauugu

SEQ ID NO: 495087 - RNA, 32 nt, Human
ucagccucccagagugcugggauuacaggugu

SEQ ID NO: 495088 - RNA, 32 nt, Human
ucagccucccagguagcugggauuacaggcac

SEQ ID NO: 495089 - RNA, 32 nt, Human
ucagccucccagguagcugggauuacaggcau

SEQ ID NO: 495090 - RNA, 32 nt, Human
ucagccucccagguagcugggauuacaggcuc

SEQ ID NO: 495091 - RNA, 32 nt, Human
ucagccucccagguggcugggauuacaggcau

SEQ ID NO: 495092 - RNA, 32 nt, Human
ucagccucccagguugcugggguuacaggugu

SEQ ID NO: 495093 - RNA, 32 nt, Human
ucagccucccagugcugggauuauagguguga

SEQ ID NO: 495094 - RNA, 32 nt, Human
ucagccucccagugugcugggauuacaggcau

SEQ ID NO: 495095 - RNA, 32 nt, Human
ucagccucccauagcugggacuacaggcgccc

SEQ ID NO: 495096 - RNA, 32 nt, Human
ucagccuccccaagugcugggauuacaggcgu

SEQ ID NO: 495097 - RNA, 32 nt, Human
ucagccuccccaguagcugggauuacaggcac

SEQ ID NO: 495098 - RNA, 32 nt, Human
ucagccuccccaguagcugggauuacaggcgc

SEQ ID NO: 495099 - RNA, 32 nt, Human
ucagccuccccaguagcugggauuacaggcgu

SEQ ID NO: 495100 - RNA, 32 nt, Human
ucagccuccccaguagcugggauuacaggcuc

SEQ ID NO: 495101 - RNA, 32 nt, Human
ucagccuccccaguagcugggauuacaguguu

SEQ ID NO: 495102 - RNA, 32 nt, Human
ucagccucccgaagagcugggauuacacgcau

SEQ ID NO: 495103 - RNA, 32 nt, Human
ucagccucccgaagugcugggauuacaggcgu

SEQ ID NO: 495104 - RNA, 32 nt, Human
ucagccucccgaaguguugggauuacaggcac

SEQ ID NO: 495105 - RNA, 32 nt, Human
ucagccucccgaauagcugggauuacacgugc

SEQ ID NO: 495106 - RNA, 32 nt, Human
ucagccucccgaauagcugggauuacaggcgc

SEQ ID NO: 495107 - RNA, 32 nt, Human
ucagccucccgaauaucugggauuacaggugc

SEQ ID NO: 495108 - RNA, 32 nt, Human
ucagccucccgagcagcugggauuacaggcgc

SEQ ID NO: 495109 - RNA, 32 nt, Human
ucagccucccgaguaacugggauuacaggcgg

SEQ ID NO: 495110 - RNA, 32 nt, Human
ucagccucccgaguaacugggauuacaggcuu

SEQ ID NO: 495111 - RNA, 32 nt, Human
ucagccucccgaguaccugggauuacaggcau

SEQ ID NO: 495112 - RNA, 32 nt, Human
ucagccucccgaguagcagggauuaccggugu

SEQ ID NO: 495113 - RNA, 32 nt, Human
ucagccucccgaguagcggggauuacaggcac

SEQ ID NO: 495114 - RNA, 32 nt, Human
ucagccucccgaguagcggggauuacaggcgc

SEQ ID NO: 495115 - RNA, 32 nt, Human
ucagccucccgaguagcugggaucacaggugu

SEQ ID NO: 495116 - RNA, 32 nt, Human
ucagccucccgaguagcugggauuacaagcac

SEQ ID NO: 495117 - RNA, 32 nt, Human
ucagccucccgaguagcugggauuacaagugc

SEQ ID NO: 495118 - RNA, 32 nt, Human
ucagccucccgaguagcugggauuacagacau

SEQ ID NO: 495119 - RNA, 32 nt, Human
ucagccucccgaguagcugggauuacaggaag

SEQ ID NO: 495120 - RNA, 32 nt, Human
ucagccucccgaguagcugggauuacaggaau

SEQ ID NO: 495121 - RNA, 32 nt, Human
ucagccucccgaguagcugggauuacaggagc

SEQ ID NO: 495122 - RNA, 32 nt, Human
ucagccucccgaguagcugggauuacaggagg

SEQ ID NO: 495123 - RNA, 32 nt, Human
ucagccucccgaguagcugggauuacaggaug

SEQ ID NO: 495124 - RNA, 32 nt, Human
ucagccucccgaguagcugggauuacaggcac

SEQ ID NO: 495125 - RNA, 32 nt, Human
ucagccucccgaguagcugggauuacaggcau

SEQ ID NO: 495126 - RNA, 32 nt, Human
ucagccucccgaguagcugggauuacaggcgc

SEQ ID NO: 495127 - RNA, 32 nt, Human
ucagccucccgaguagcugggauuacaggcgu

SEQ ID NO: 495128 - RNA, 32 nt, Human
ucagccucccgaguagcugggauuacagggug

SEQ ID NO: 495129 - RNA, 32 nt, Human
ucagccucccgaguagcugggauuacagguga

SEQ ID NO: 495130 - RNA, 32 nt, Human
ucagccucccgaguagcugggauuacaggugc

SEQ ID NO: 495131 - RNA, 32 nt, Human
ucagccucccgaguagcugggauuacaggugg

SEQ ID NO: 495132 - RNA, 32 nt, Human
ucagccucccgaguagcugggauuacaggugu

SEQ ID NO: 495133 - RNA, 32 nt, Human
ucagccucccgaguagcugggauuacgggcau

SEQ ID NO: 495134 - RNA, 32 nt, Human
ucagccucccgaguagcugggauuacgggcgc

SEQ ID NO: 495135 - RNA, 32 nt, Human
ucagccucccgaguagcugggauuacuggugc

SEQ ID NO: 495136 - RNA, 32 nt, Human
ucagccucccgaguagcugggauuagaggcgc

SEQ ID NO: 495137 - RNA, 32 nt, Human
ucagccucccgaguagcugggauuagaggcgu

SEQ ID NO: 495138 - RNA, 32 nt, Human
ucagccucccgaguagcugggauuauagacac

SEQ ID NO: 495139 - RNA, 32 nt, Human
ucagccucccgaguagcugggauuauaggcac

SEQ ID NO: 495140 - RNA, 32 nt, Human
ucagccucccgaguagcugggauuauaggcga

SEQ ID NO: 495141 - RNA, 32 nt, Human
ucagccucccgaguagcugggauuaugggcgc

SEQ ID NO: 495142 - RNA, 32 nt, Human
ucagccucccgaguagcugggauuccaggcgc

SEQ ID NO: 495143 - RNA, 32 nt, Human
ucagccucccgaguagcugggauugcaggagc

SEQ ID NO: 495144 - RNA, 32 nt, Human
ucagccucccgaguagcugggauugcaggcgc

SEQ ID NO: 495145 - RNA, 32 nt, Human
ucagccucccgaguagcugggauugcagguac

SEQ ID NO: 495146 - RNA, 32 nt, Human
ucagccucccgaguagcugggauugcaggugc

SEQ ID NO: 495147 - RNA, 32 nt, Human
ucagccucccgaguaguugggauuacaggcgc

SEQ ID NO: 495148 - RNA, 32 nt, Human
ucagccucccgaguaguugggauuacagguga

SEQ ID NO: 495149 - RNA, 32 nt, Human
ucagccucccgaguggcugggauuagcggcau

SEQ ID NO: 495150 - RNA, 32 nt, Human
ucagccucccgaguugcugggacuacagguga

SEQ ID NO: 495151 - RNA, 32 nt, Human
ucagccucccgaguugcugggacuauaggugu

SEQ ID NO: 495152 - RNA, 32 nt, Human
ucagccucccgaguugcugggauugcgggcau

SEQ ID NO: 495153 - RNA, 19 nt, Human
ucagccucccgcuccaggc

SEQ ID NO: 495154 - RNA, 32 nt, Human
ucagccucccggguagcugggauuacaggcau

SEQ ID NO: 495155 - RNA, 32 nt, Human
ucagccucccggguagcugggauugcagacgu

SEQ ID NO: 495156 - RNA, 32 nt, Human
ucagccucccguguagcugggauuacaggcgc

SEQ ID NO: 495157 - RNA, 32 nt, Human
ucagccucccuaauagcugggacuacaggcaa

SEQ ID NO: 495158 - RNA, 32 nt, Human
ucagccucccuaauaguugggauuacaggcac

SEQ ID NO: 495159 - RNA, 32 nt, Human
ucagccucccuaguagcugggauuacagccau

SEQ ID NO: 495160 - RNA, 32 nt, Human
ucagccucccuaguagcugggauuacaggcac

SEQ ID NO: 495161 - RNA, 32 nt, Human
ucagccucccuaguagcugggauuacaggcau

SEQ ID NO: 495162 - RNA, 32 nt, Human
ucagccucccuaguagcugggauuacaggcgc

SEQ ID NO: 495163 - RNA, 32 nt, Human
ucagccucccuaguagcugggauuacaggugc

SEQ ID NO: 495164 - RNA, 32 nt, Human
ucagccucccuaguggcugggauuacaggcgc

SEQ ID NO: 495165 - RNA, 32 nt, Human
ucagccuccgaaagugcugggauuacaggcgu

SEQ ID NO: 495166 - RNA, 32 nt, Human
ucagccuccgaaagugcugggauuacaguugu

SEQ ID NO: 495167 - RNA, 32 nt, Human
ucagccuccgaaguagcugggauuacaggcgc

SEQ ID NO: 495168 - RNA, 32 nt, Human
ucagccuccggaguagcugggauuacaggcac

SEQ ID NO: 495169 - RNA, 32 nt, Human
ucagccuccggaguagcugggauuacaggcau

SEQ ID NO: 495170 - RNA, 32 nt, Human
ucagccuccggaguagcugggauuacaggcgu

SEQ ID NO: 495171 - RNA, 32 nt, Human
ucagccuccggcccuggaacccucuccaggga

SEQ ID NO: 495172 - RNA, 32 nt, Human
ucagccuccguuuuguucucucuccuuuuccu

SEQ ID NO: 495173 - RNA, 32 nt, Human
ucagccuccuaaagcacugggauuacaggcuu

SEQ ID NO: 495174 - RNA, 32 nt, Human
ucagccuccuaaagcacugggauuacaggugu

SEQ ID NO: 495175 - RNA, 32 nt, Human
ucagccuccuaaagugcugggauuacaggccu

SEQ ID NO: 495176 - RNA, 32 nt, Human
ucagccuccuaaagugcugggauuauagcugu

SEQ ID NO: 495177 - RNA, 32 nt, Human
ucagccuccuaaguaccugggauuacaggcau

SEQ ID NO: 495178 - RNA, 32 nt, Human
ucagccuccuaaguagcugggauuacaggaaa

SEQ ID NO: 495179 - RNA, 32 nt, Human
ucagccuccuaaguagcugggauuacaggcac

SEQ ID NO: 495180 - RNA, 32 nt, Human
ucagccuccuaaguagcugggauuacaggcau

SEQ ID NO: 495181 - RNA, 32 nt, Human
ucagccuccuaaguagcugggauuacaggcgc

SEQ ID NO: 495182 - RNA, 32 nt, Human
ucagccuccuaaguaucugggauuacaggcau

SEQ ID NO: 495183 - RNA, 32 nt, Human
ucagccuccuagagugcugggauuacagacau

SEQ ID NO: 495184 - RNA, 32 nt, Human
ucagccuccuagauaacugggauuacaggugc

SEQ ID NO: 495185 - RNA, 32 nt, Human
ucagccuccugaauagcugggauuacaggcac

SEQ ID NO: 495186 - RNA, 32 nt, Human
ucagccuccugaauagcugggauuacaggugc

SEQ ID NO: 495187 - RNA, 32 nt, Human
ucagccuccugagucgcugggauuacugagau

SEQ ID NO: 495188 - RNA, 24 nt, Human
ucagccuccugggcucaagcaauu

SEQ ID NO: 495189 - RNA, 32 nt, Human
ucagccuccuuccuagagacagacucaugcag

SEQ ID NO: 495190 - RNA, 24 nt, Human
ucagccuccuuguuuguccgguuc

SEQ ID NO: 495191 - RNA, 32 nt, Human
ucagccucgaguagcugggacuacaggcgcau

SEQ ID NO: 495192 - RNA, 32 nt, Human
ucagccucguaaagugcugggauuacaggggu

SEQ ID NO: 495193 - RNA, 32 nt, Human
ucagccucguaaauugcugggauuacaggcau

SEQ ID NO: 495194 - RNA, 23 nt, Human
ucagccucuacccucagaguuca

SEQ ID NO: 495195 - RNA, 32 nt, Human
ucagccucuagccuucacuccugggcuccaaa

SEQ ID NO: 495196 - RNA, 32 nt, Human
ucagccucucaaacugcugggauuauaggcau

SEQ ID NO: 495197 - RNA, 32 nt, Human
ucagccucucaaagagcugggauuacaggcau

SEQ ID NO: 495198 - RNA, 32 nt, Human
ucagccucucaaagcgcugggauuacaggcau

SEQ ID NO: 495199 - RNA, 32 nt, Human
ucagccucucaaagugcugggauuacaagcau

SEQ ID NO: 495200 - RNA, 32 nt, Human
ucagccucucaaagugcugggauuacaggccu

SEQ ID NO: 495201 - RNA, 32 nt, Human
ucagccucucaaagugcugggauuacaggcgu

SEQ ID NO: 495202 - RNA, 32 nt, Human
ucagccucucaaagugcugggauuacaggugu

SEQ ID NO: 495203 - RNA, 32 nt, Human
ucagccucucaaagugcugggauuacaguagg

SEQ ID NO: 495204 - RNA, 32 nt, Human
ucagccucucaaagugcugggauuacgggcau

SEQ ID NO: 495205 - RNA, 32 nt, Human
ucagccucucaaagugcugggauuauaggcgu

SEQ ID NO: 495206 - RNA, 32 nt, Human
ucagccucucaaagugcugggauuauaggcuu

SEQ ID NO: 495207 - RNA, 32 nt, Human
ucagccucucaaguaacugggauuacaggcau

SEQ ID NO: 495208 - RNA, 32 nt, Human
ucagccucucaaguagcggauuacaggcgccc

SEQ ID NO: 495209 - RNA, 32 nt, Human
ucagccucucaaguagcugggauuacaagcau

SEQ ID NO: 495210 - RNA, 32 nt, Human
ucagccucucaaguagcugggauuacagggca

SEQ ID NO: 495211 - RNA, 32 nt, Human
ucagccucucaaguagcugggauuacagggcu

SEQ ID NO: 495212 - RNA, 24 nt, Human
ucagccucuccaaccuggcaccca

SEQ ID NO: 495213 - RNA, 32 nt, Human
ucagccucuccaagugcugggauuacaggcau

SEQ ID NO: 495214 - RNA, 32 nt, Human
ucagccucuccaggcaccaucucccuuccugu

SEQ ID NO: 495215 - RNA, 32 nt, Human
ucagccucuccccucuccuuucucucccugcc

SEQ ID NO: 495216 - RNA, 20 nt, Human
ucagccucuccucugggcuc

SEQ ID NO: 495217 - RNA, 17 nt, Human
ucagccucuccugccuc

SEQ ID NO: 495218 - RNA, 32 nt, Human
ucagccucucgagcagcugggauuacagguau

SEQ ID NO: 495219 - RNA, 32 nt, Human
ucagccucucgaguagcugggauuacaggcac

SEQ ID NO: 495220 - RNA, 32 nt, Human
ucagccucucgaguagcugggauuacaggcau

SEQ ID NO: 495221 - RNA, 32 nt, Human
ucagccucucgaguagcugggauuacaggcgc

SEQ ID NO: 495222 - RNA, 32 nt, Human
ucagccucucgaguagcugggauuauaggcgu

SEQ ID NO: 495223 - RNA, 32 nt, Human
ucagccucucgaguggcugggauuacaggcau

SEQ ID NO: 495224 - RNA, 32 nt, Human
ucagccucucgguggugggauuaugaaugauu

SEQ ID NO: 495225 - RNA, 24 nt, Human
ucagccucucuaaggggcaguuca

SEQ ID NO: 495226 - RNA, 23 nt, Human
ucagccucucuuuggugacguca

SEQ ID NO: 495227 - RNA, 32 nt, Human
ucagccucugaaauugcugggauuacaggcau

SEQ ID NO: 495228 - RNA, 24 nt, Human
ucagccucugaggauccaggcuca

SEQ ID NO: 495229 - RNA, 22 nt, Human
ucagccucugaguuccagguuc

SEQ ID NO: 495230 - RNA, 21 nt, Human
ucagccucugcaaggcacuca

SEQ ID NO: 495231 - RNA, 25 nt, Human
ucagccucugccagacagaguuaga

SEQ ID NO: 495232 - RNA, 24 nt, Human
ucagccucuggcccucuuggcuca

SEQ ID NO: 495233 - RNA, 32 nt, Human
ucagccucugguucuccucgaguccuugggga

SEQ ID NO: 495234 - RNA, 32 nt, Human
ucagccucuguggggcacucagagacgggguu

SEQ ID NO: 495235 - RNA, 32 nt, Human
ucagccucuucaugaucuaucucccucucuuu

SEQ ID NO: 495236 - RNA, 32 nt, Human
ucagccugaaagugcuaggauuacaggcguga

SEQ ID NO: 495237 - RNA, 32 nt, Human
ucagccugaccaacaugaugaaaccccguugc

SEQ ID NO: 495238 - RNA, 32 nt, Human
ucagccugagagaaggagcuggcgagaaccuu

SEQ ID NO: 495239 - RNA, 22 nt, Human
ucagccugagcaacauagcaag

SEQ ID NO: 495240 - RNA, 32 nt, Human
ucagccugagcccugucccugcccuucucugc

SEQ ID NO: 495241 - RNA, 32 nt, Human
ucagccugagccugaguaccgcuaaggcuuua

SEQ ID NO: 495242 - RNA, 32 nt, Human
ucagccugcaccccucccuugucucauagaug

SEQ ID NO: 495243 - RNA, 32 nt, Human
ucagccugcaccugaugccguaucuuuccccu

SEQ ID NO: 495244 - RNA, 32 nt, Human
ucagccugcagaagcagagcaagcauaugaaa

SEQ ID NO: 495245 - RNA, 32 nt, Human
ucagccugcaguaccucuaccuccaggagaac

SEQ ID NO: 495246 - RNA, 32 nt, Human
ucagccugccaaagugcugggauuacuggcgu

SEQ ID NO: 495247 - RNA, 32 nt, Human
ucagccugccaaguagcugggauuacaggcau

SEQ ID NO: 495248 - RNA, 32 nt, Human
ucagccugcccaacauggugaaaccucgucuc

SEQ ID NO: 495249 - RNA, 32 nt, Human
ucagccugccuacuccuucuccaucuuuucuu

SEQ ID NO: 495250 - RNA, 32 nt, Human
ucagccugcucacuucacuucugcauuauauc

SEQ ID NO: 495251 - RNA, 18 nt, Human
ucagccugcucccuggga

SEQ ID NO: 495252 - RNA, 32 nt, Human
ucagccugcucuucucucugguggcuccaccc

SEQ ID NO: 495253 - RNA, 18 nt, Human
ucagccugcugcucagca

SEQ ID NO: 495254 - RNA, 18 nt, Human
ucagccuggaaggcgagg

SEQ ID NO: 495255 - RNA, 32 nt, Human
ucagccuggagaccgaagcgcuucacugagcg

SEQ ID NO: 495256 - RNA, 32 nt, Human
ucagccuggagugagcacagccuggacccugg

SEQ ID NO: 495257 - RNA, 32 nt, Human
ucagccuggauccccagccucugccaacggcc

SEQ ID NO: 495258 - RNA, 32 nt, Human
ucagccuggcacugcccagcccuccagccgua

SEQ ID NO: 495259 - RNA, 32 nt, Human
ucagccuggcagcugcccaucccauaaccaaa

SEQ ID NO: 495260 - RNA, 32 nt, Human
ucagccuggccaacauaaggagaccuaagugc

SEQ ID NO: 495261 - RNA, 32 nt, Human
ucagccuggccaacauaaggagaccuaagugu

SEQ ID NO: 495262 - RNA, 32 nt, Human
ucagccuggccaacaugaugaaaccuugucuu

SEQ ID NO: 495263 - RNA, 23 nt, Human
ucagccuggccaauauggugaaa

SEQ ID NO: 495264 - RNA, 32 nt, Human
ucagccuggccugcucucaccaccuccuccaa

SEQ ID NO: 495265 - RNA, 32 nt, Human
ucagccuggcugucagagcuugcaguguaauc

SEQ ID NO: 495266 - RNA, 18 nt, Human
ucagccugggaagugagg

SEQ ID NO: 495267 - RNA, 32 nt, Human
ucagccugggaggucaaggcugcagugagcug

SEQ ID NO: 495268 - RNA, 32 nt, Human
ucagccugggcaacaagagugaaacuccaucu

SEQ ID NO: 495269 - RNA, 32 nt, Human
ucagccugggcaacacagggagacucaucucu

SEQ ID NO: 495270 - RNA, 32 nt, Human
ucagccugggcaacacagugagacuccaucuc

SEQ ID NO: 495271 - RNA, 23 nt, Human
ucagccugggcaacagagcaaga

SEQ ID NO: 495272 - RNA, 32 nt, Human
ucagccugggcaacagagcgagacuccaucuc

SEQ ID NO: 495273 - RNA, 32 nt, Human
ucagccugggcaacagagugagacuccaucuc

SEQ ID NO: 495274 - RNA, 32 nt, Human
ucagccugggcaacauagcaagauuuugucuc

SEQ ID NO: 495275 - RNA, 32 nt, Human
ucagccugggcaacauagcaauacuccgucuc

SEQ ID NO: 495276 - RNA, 32 nt, Human
ucagccugggcaacauagcaggaccccaucuc

SEQ ID NO: 495277 - RNA, 32 nt, Human
ucagccugggcaacauagugaaaccuggucuc

SEQ ID NO: 495278 - RNA, 32 nt, Human
ucagccugggcaacauagugagaccuccauuu

SEQ ID NO: 495279 - RNA, 32 nt, Human
ucagccugggcaacauggccagaccuccucuc

SEQ ID NO: 495280 - RNA, 32 nt, Human
ucagccugggcaacauggugaaaccucgucuc

SEQ ID NO: 495281 - RNA, 32 nt, Human
ucagccugggcaacauggugaaaccuugucuc

SEQ ID NO: 495282 - RNA, 32 nt, Human
ucagccugggcaacaugguggaacccugucuc

SEQ ID NO: 495283 - RNA, 32 nt, Human
ucagccugggcaauauagugaaaccccaucuc

SEQ ID NO: 495284 - RNA, 32 nt, Human
ucagccugggcaaugugauaaaaccccaucuc

SEQ ID NO: 495285 - RNA, 32 nt, Human
ucagccugggcagcuucccccugccuuuugca

SEQ ID NO: 495286 - RNA, 19 nt, Human
ucagccugggcgaccgaga

SEQ ID NO: 495287 - RNA, 32 nt, Human
ucagccuggggagcugaaggggagacgcgucu

SEQ ID NO: 495288 - RNA, 18 nt, Human
ucagccuggggggcucca

SEQ ID NO: 495289 - RNA, 22 nt, Human
ucagccugggugacagagcaag

SEQ ID NO: 495290 - RNA, 23 nt, Human
ucagccugggugacagagcaaga

SEQ ID NO: 495291 - RNA, 23 nt, Human
ucagccugguauggaaagcaagg

SEQ ID NO: 495292 - RNA, 20 nt, Human
ucagccuggucccaccccca

SEQ ID NO: 495293 - RNA, 32 nt, Human
ucagccuguccgauuccuccucccucuggccg

SEQ ID NO: 495294 - RNA, 22 nt, Human
ucagccugucuccagggcugcu

SEQ ID NO: 495295 - RNA, 18 nt, Human
ucagccugucugcucucu

SEQ ID NO: 495296 - RNA, 20 nt, Human
ucagccugugaccagcucuu

SEQ ID NO: 495297 - RNA, 32 nt, Human
ucagccuguggagucugaguuuugaaggaugu

SEQ ID NO: 495298 - RNA, 32 nt, Human
ucagccuguggcccagcacuggucaagaaaac

SEQ ID NO: 495299 - RNA, 32 nt, Human
ucagccuucaaacccagcaaacagucagcuau

SEQ ID NO: 495300 - RNA, 18 nt, Human
ucagccuucagguggaga

SEQ ID NO: 495301 - RNA, 32 nt, Human
ucagccuuccaaaauguugggauuacaggcgu

SEQ ID NO: 495302 - RNA, 32 nt, Human
ucagccuuccaaagugcugggaugacagcgug

SEQ ID NO: 495303 - RNA, 32 nt, Human
ucagccuuccaaagugcugggauuacaggcau

SEQ ID NO: 495304 - RNA, 32 nt, Human
ucagccuuccaaagugcugggauuacaggcgu

SEQ ID NO: 495305 - RNA, 32 nt, Human
ucagccuuccaaagugcugggauuacaggugu

SEQ ID NO: 495306 - RNA, 32 nt, Human
ucagccuuccaaagugcugggauucugggugu

SEQ ID NO: 495307 - RNA, 32 nt, Human
ucagccuuccaaaguguugggauuauaggcgu

SEQ ID NO: 495308 - RNA, 32 nt, Human
ucagccuuccaagaagcugggauuacaagcgc

SEQ ID NO: 495309 - RNA, 32 nt, Human
ucagccuuccaaguagcugggauuacaagugc

SEQ ID NO: 495310 - RNA, 32 nt, Human
ucagccuuccaaguagcugggauuacaggagu

SEQ ID NO: 495311 - RNA, 32 nt, Human
ucagccuuccaaguagcugggauuacaggugu

SEQ ID NO: 495312 - RNA, 32 nt, Human
ucagccuucccaagguucuauccuguuccgag

SEQ ID NO: 495313 - RNA, 32 nt, Human
ucagccuucccaagugcugggauuacaggugu

SEQ ID NO: 495314 - RNA, 32 nt, Human
ucagccuucccaccagcccuggagaggaggaa

SEQ ID NO: 495315 - RNA, 32 nt, Human
ucagccuucccuguucuccagccuaggugguu

SEQ ID NO: 495316 - RNA, 32 nt, Human
ucagccuuccgaguagcugggauuacaggcac

SEQ ID NO: 495317 - RNA, 32 nt, Human
ucagccuuccgaguagcugggauuacaggcgc

SEQ ID NO: 495318 - RNA, 32 nt, Human
ucagccuuccgaguagcugggauuacaggcuc

SEQ ID NO: 495319 - RNA, 32 nt, Human
ucagccuuccgaguagcugggauuacaggugc

SEQ ID NO: 495320 - RNA, 32 nt, Human
ucagccuuccgaguagcugggauuacaggugu

SEQ ID NO: 495321 - RNA, 32 nt, Human
ucagccuucggccucagaauggggccugcacu

SEQ ID NO: 495322 - RNA, 32 nt, Human
ucagccuucuaaagugcugggauuacaggcgu

SEQ ID NO: 495323 - RNA, 32 nt, Human
ucagccuucucccuccccagggccacuuguug

SEQ ID NO: 495324 - RNA, 32 nt, Human
ucagccuucuuuucccuucccugagggccggc

SEQ ID NO: 495325 - RNA, 32 nt, Human
ucagccuugaacugcagcgucaccucuucccu

SEQ ID NO: 495326 - RNA, 32 nt, Human
ucagccuugcagauauguguggcauuuacuag

SEQ ID NO: 495327 - RNA, 32 nt, Human
ucagccuugcagccccgcgcccggagcaucuc

SEQ ID NO: 495328 - RNA, 18 nt, Human
ucagccuugccugcuuuc

SEQ ID NO: 495329 - RNA, 32 nt, Human
ucagccuugccugcuuucaucucucccagcuu

SEQ ID NO: 495330 - RNA, 32 nt, Human
ucagccuugccuggcucuccuuguagcagauu

SEQ ID NO: 495331 - RNA, 32 nt, Human
ucagccuugugagucaccuggcaggccccagc

SEQ ID NO: 495332 - RNA, 32 nt, Human
ucagccuuucaaguggcugggaugacuacagg

SEQ ID NO: 495333 - RNA, 32 nt, Human
ucagccuuucaucuauccauccuuccucuuua

SEQ ID NO: 495334 - RNA, 21 nt, Human
ucagccuuuccccuccccucc

SEQ ID NO: 495335 - RNA, 32 nt, Human
ucagccuuuguaucuccuuggccaaagcaagu

SEQ ID NO: 495336 - RNA, 32 nt, Human
ucagccuuuugcccaacuugugucuacugucg

SEQ ID NO: 495337 - RNA, 32 nt, Human
ucagcgacccaaagugcugggauuacaggugu

SEQ ID NO: 495338 - RNA, 32 nt, Human
ucagcgacuugggaggcugagguggagaauug

SEQ ID NO: 495339 - RNA, 32 nt, Human
ucagcgagaaacugugcggagcuccagcagcu

SEQ ID NO: 495340 - RNA, 32 nt, Human
ucagcgagagugagcuggauguggccgggcug

SEQ ID NO: 495341 - RNA, 32 nt, Human
ucagcgagcagguguguguggguccuccacca

SEQ ID NO: 495342 - RNA, 32 nt, Human
ucagcgaggagccauaaugugcauaugugcac

SEQ ID NO: 495343 - RNA, 32 nt, Human
ucagcgagugaguggaggggaagucaaggugc

SEQ ID NO: 495344 - RNA, 32 nt, Human
ucagcgcacaagucaguguaaaccacuuagau

SEQ ID NO: 495345 - RNA, 32 nt, Human
ucagcgcaguggagaaggcucacaguuaccua

SEQ ID NO: 495346 - RNA, 20 nt, Human
ucagcgcaucugcuacagca

SEQ ID NO: 495347 - RNA, 32 nt, Human
ucagcgccacugcuccugccacagugaggggc

SEQ ID NO: 495348 - RNA, 32 nt, Human
ucagcgcccagccuggggaauuuaaacacucc

SEQ ID NO: 495349 - RNA, 32 nt, Human
ucagcgcggagcugggccgguucuccacagcc

SEQ ID NO: 495350 - RNA, 32 nt, Human
ucagcgcgugagccacacugucuccaccacca

SEQ ID NO: 495351 - RNA, 32 nt, Human
ucagcgcuagggaacugagaccagagaaagaa

SEQ ID NO: 495352 - RNA, 32 nt, Human
ucagcgcucugccuuccagcuagauguuguca

SEQ ID NO: 495353 - RNA, 32 nt, Human
ucagcgcugccccugcccccacccucaccccc

SEQ ID NO: 495354 - RNA, 32 nt, Human
ucagcgcugccucugcuggugccuucuccccc

SEQ ID NO: 495355 - RNA, 32 nt, Human
ucagcgcugggugggaaggcauugagaaugga

SEQ ID NO: 495356 - RNA, 19 nt, Human
ucagcggaacagggugaga

SEQ ID NO: 495357 - RNA, 32 nt, Human
ucagcggacagaacugggauggauacacacau

SEQ ID NO: 495358 - RNA, 32 nt, Human
ucagcggagccccaggccccggggccggagau

SEQ ID NO: 495359 - RNA, 32 nt, Human
ucagcggagggguuugggagucaggccugggc

SEQ ID NO: 495360 - RNA, 32 nt, Human
ucagcggaggugagaggagaggaggagaaaac

SEQ ID NO: 495361 - RNA, 32 nt, Human
ucagcggcaggcgaagggggcugaggaaagga

SEQ ID NO: 495362 - RNA, 32 nt, Human
ucagcggccaaggggagugacaacagccagac

SEQ ID NO: 495363 - RNA, 21 nt, Human
ucagcggccaucacucugcca

SEQ ID NO: 495364 - RNA, 32 nt, Human
ucagcggccgugacggggccagcuggacacac

SEQ ID NO: 495365 - RNA, 32 nt, Human
ucagcggccuggcagagguuucagcgcugagg

SEQ ID NO: 495366 - RNA, 32 nt, Human
ucagcggcugccccaccauggcuaccugggcc

SEQ ID NO: 495367 - RNA, 32 nt, Human
ucagcgggcaucuccuggagacaggcagacau

SEQ ID NO: 495368 - RNA, 32 nt, Human
ucagcggggccacccagggcucgcgggguccc

SEQ ID NO: 495369 - RNA, 32 nt, Human
ucagcggggugagccuacggccaggaugggug

SEQ ID NO: 495370 - RNA, 32 nt, Human
ucagcguaggugagcuguggccuuuugcgagg

SEQ ID NO: 495371 - RNA, 19 nt, Human
ucagcgucaccuccuccca

SEQ ID NO: 495372 - RNA, 32 nt, Human
ucagcguccaaaugccucagucaugaaauugu

SEQ ID NO: 495373 - RNA, 32 nt, Human
ucagcgucccaaagugcugggauuauaggcgu

SEQ ID NO: 495374 - RNA, 32 nt, Human
ucagcgucccagagugcugggauuacaguugu

SEQ ID NO: 495375 - RNA, 32 nt, Human
ucagcgucccgaagugcugggauuacaggugu

SEQ ID NO: 495376 - RNA, 32 nt, Human
ucagcgucccgaguaacugggauuacaggcac

SEQ ID NO: 495377 - RNA, 32 nt, Human
ucagcgucugcagucaagucucuuguauucgg

SEQ ID NO: 495378 - RNA, 32 nt, Human
ucagcgugaccuggaccugcugggcaggaucc

SEQ ID NO: 495379 - RNA, 32 nt, Human
ucagcguggaaccugaggacgcagggagggag

SEQ ID NO: 495380 - RNA, 32 nt, Human
ucagcguggcuuggacggggccugugucagag

SEQ ID NO: 495381 - RNA, 32 nt, Human
ucagcgugggguggaggagaaguggaguuugg

SEQ ID NO: 495382 - RNA, 32 nt, Human
ucagcguuugcucaguuaagggagagguagag

SEQ ID NO: 495383 - RNA, 20 nt, Human
ucagcuaaaaauggagucua

SEQ ID NO: 495384 - RNA, 32 nt, Human
ucagcuaaaauccuaacuuucuccuuauuucu

SEQ ID NO: 495385 - RNA, 20 nt, Human
ucagcuaaaggaguacagca

SEQ ID NO: 495386 - RNA, 32 nt, Human
ucagcuaagagaagugggagggccagagcuuu

SEQ ID NO: 495387 - RNA, 32 nt, Human
ucagcuaagcuucaguggccugcuccaucccc

SEQ ID NO: 495388 - RNA, 32 nt, Human
ucagcuacaguuuaauuccacacuguuacaga

SEQ ID NO: 495389 - RNA, 32 nt, Human
ucagcuaccccuagcuccuuguggguuggccc

SEQ ID NO: 495390 - RNA, 32 nt, Human
ucagcuaccucacgggaaccagccugcuguuc

SEQ ID NO: 495391 - RNA, 32 nt, Human
ucagcuaccuuuuaaagaggcuaaguuaucuu

SEQ ID NO: 495392 - RNA, 20 nt, Human
ucagcuagaaagaggcuguu

SEQ ID NO: 495393 - RNA, 32 nt, Human
ucagcuagacacacccagcccagauucaacag

SEQ ID NO: 495394 - RNA, 32 nt, Human
ucagcuagacacacucaggaggacuacugagg

SEQ ID NO: 495395 - RNA, 32 nt, Human
ucagcuagccagauuaguaaccucuuugucca

SEQ ID NO: 495396 - RNA, 32 nt, Human
ucagcuaggaagggggaguggcgcuggcaggc

SEQ ID NO: 495397 - RNA, 32 nt, Human
ucagcuaggaggcugaggcaggagaaucacug

SEQ ID NO: 495398 - RNA, 32 nt, Human
ucagcuagucucuccaccuuggccauuuccag

SEQ ID NO: 495399 - RNA, 20 nt, Human
ucagcuauagcugcaguuua

SEQ ID NO: 495400 - RNA, 32 nt, Human
ucagcuaucuugucugguuuucuugagaccuc

SEQ ID NO: 495401 - RNA, 32 nt, Human
ucagcuauggccugggcuccagcuuuggcucu

SEQ ID NO: 495402 - RNA, 32 nt, Human
ucagcuaugucaggaaauauggcuggacauaa

SEQ ID NO: 495403 - RNA, 32 nt, Human
ucagcuauucucggaagagagaagggagaggg

SEQ ID NO: 495404 - RNA, 32 nt, Human
ucagcuauugaggaggcugaggcaggagaauu

SEQ ID NO: 495405 - RNA, 32 nt, Human
ucagcuauuuuuaaaguuugugaauggagugu

SEQ ID NO: 495406 - RNA, 32 nt, Human
ucagcucaaaaacaagaagugaagccagacag

SEQ ID NO: 495407 - RNA, 31 nt, Human
ucagcucaaagcuagaaacaccaaggucuuu

SEQ ID NO: 495408 - RNA, 32 nt, Human
ucagcucaacaucuucuguuaguuauagcugc

SEQ ID NO: 495409 - RNA, 18 nt, Human
ucagcucaaugcuacaca

SEQ ID NO: 495410 - RNA, 32 nt, Human
ucagcucacagcaaccuccgccucccagguuc

SEQ ID NO: 495411 - RNA, 32 nt, Human
ucagcucacagcaaccuccgccucccggguuc

SEQ ID NO: 495412 - RNA, 32 nt, Human
ucagcucaccaaaucucugccucccaggcuua

SEQ ID NO: 495413 - RNA, 32 nt, Human
ucagcucaccacaaccuccgccucccagguuc

SEQ ID NO: 495414 - RNA, 32 nt, Human
ucagcucaccgcaaccuccaccuccaggguug

SEQ ID NO: 495415 - RNA, 32 nt, Human
ucagcucaccgcaaccuccacucgcagguuca

SEQ ID NO: 495416 - RNA, 32 nt, Human
ucagcucaccgcaaccuccgccucccggguuc

SEQ ID NO: 495417 - RNA, 32 nt, Human
ucagcucaccgcaaccucugccucccagauuc

SEQ ID NO: 495418 - RNA, 32 nt, Human
ucagcucaccgcauccuccaccucccagguuc

SEQ ID NO: 495419 - RNA, 32 nt, Human
ucagcucaccucaaccuccgccucccggguuc

SEQ ID NO: 495420 - RNA, 32 nt, Human
ucagcucaccucucccuccaccuccucuccac

SEQ ID NO: 495421 - RNA, 32 nt, Human
ucagcucaccucucuguauccuugcccugugg

SEQ ID NO: 495422 - RNA, 32 nt, Human
ucagcucacggcaaccuccgccucccggguuc

SEQ ID NO: 495423 - RNA, 32 nt, Human
ucagcucacuacaaccuccgccucccauguuc

SEQ ID NO: 495424 - RNA, 32 nt, Human
ucagcucacuacaaccuccugcuccuggguuc

SEQ ID NO: 495425 - RNA, 32 nt, Human
ucagcucacuauaagcuccaccucccagguuc

SEQ ID NO: 495426 - RNA, 32 nt, Human
ucagcucacucugcaaccuccacuucccaggu

SEQ ID NO: 495427 - RNA, 32 nt, Human
ucagcucacugaaccucugccucccaggucaa

SEQ ID NO: 495428 - RNA, 32 nt, Human
ucagcucacugcaaacuccaccucccagguuc

SEQ ID NO: 495429 - RNA, 32 nt, Human
ucagcucacugcaaacucugccucccgaauuc

SEQ ID NO: 495430 - RNA, 32 nt, Human
ucagcucacugcaacaccgccucccggguuca

SEQ ID NO: 495431 - RNA, 32 nt, Human
ucagcucacugcaacauccaccuccuggguuc

SEQ ID NO: 495432 - RNA, 32 nt, Human
ucagcucacugcaacauccgccucugggguuc

SEQ ID NO: 495433 - RNA, 32 nt, Human
ucagcucacugcaaccacugccucccaggcuc

SEQ ID NO: 495434 - RNA, 32 nt, Human
ucagcucacugcaaccuacgccuucuggguuc

SEQ ID NO: 495435 - RNA, 32 nt, Human
ucagcucacugcaaccuccaccucccagacuc

SEQ ID NO: 495436 - RNA, 32 nt, Human
ucagcucacugcaaccuccaccucccaggauc

SEQ ID NO: 495437 - RNA, 32 nt, Human
ucagcucacugcaaccuccaccucccaggcuc

SEQ ID NO: 495438 - RNA, 32 nt, Human
ucagcucacugcaaccuccaccucccaggugc

SEQ ID NO: 495439 - RNA, 32 nt, Human
ucagcucacugcaaccuccaccucccagguuc

SEQ ID NO: 495440 - RNA, 32 nt, Human
ucagcucacugcaaccuccaccucccggguca

SEQ ID NO: 495441 - RNA, 32 nt, Human
ucagcucacugcaaccuccaccucccggguuc

SEQ ID NO: 495442 - RNA, 32 nt, Human
ucagcucacugcaaccuccaccucccggguuu

SEQ ID NO: 495443 - RNA, 32 nt, Human
ucagcucacugcaaccuccaccucccugguuc

SEQ ID NO: 495444 - RNA, 32 nt, Human
ucagcucacugcaaccuccaccuccggguuca

SEQ ID NO: 495445 - RNA, 32 nt, Human
ucagcucacugcaaccuccaccuccuggauuc

SEQ ID NO: 495446 - RNA, 32 nt, Human
ucagcucacugcaaccuccaccuccuggguuc

SEQ ID NO: 495447 - RNA, 32 nt, Human
ucagcucacugcaaccuccaccuccuggguug

SEQ ID NO: 495448 - RNA, 32 nt, Human
ucagcucacugcaaccuccaccucgcagguuc

SEQ ID NO: 495449 - RNA, 32 nt, Human
ucagcucacugcaaccuccaccucucagguuc

SEQ ID NO: 495450 - RNA, 32 nt, Human
ucagcucacugcaaccuccaccucuuauguuc

SEQ ID NO: 495451 - RNA, 32 nt, Human
ucagcucacugcaaccuccaccuugcgugucu

SEQ ID NO: 495452 - RNA, 32 nt, Human
ucagcucacugcaaccuccaucuccagguuuc

SEQ ID NO: 495453 - RNA, 32 nt, Human
ucagcucacugcaaccuccaucucccggauuc

SEQ ID NO: 495454 - RNA, 32 nt, Human
ucagcucacugcaaccuccaucuccuggauuc

SEQ ID NO: 495455 - RNA, 32 nt, Human
ucagcucacugcaaccucccccuccuggguuc

SEQ ID NO: 495456 - RNA, 32 nt, Human
ucagcucacugcaaccuccgcaucccggguuc

SEQ ID NO: 495457 - RNA, 32 nt, Human
ucagcucacugcaaccuccgcccccuggguuc

SEQ ID NO: 495458 - RNA, 32 nt, Human
ucagcucacugcaaccuccgccucccaaguuc

SEQ ID NO: 495459 - RNA, 32 nt, Human
ucagcucacugcaaccuccgccucccagguuc

SEQ ID NO: 495460 - RNA, 32 nt, Human
ucagcucacugcaaccuccgccucccggguuc

SEQ ID NO: 495461 - RNA, 32 nt, Human
ucagcucacugcaaccuccgccuccugagguu

SEQ ID NO: 495462 - RNA, 32 nt, Human
ucagcucacugcaaccuccgccuccugggauc

SEQ ID NO: 495463 - RNA, 32 nt, Human
ucagcucacugcaaccuccgccuccuggguuc

SEQ ID NO: 495464 - RNA, 32 nt, Human
ucagcucacugcaaccuccgccucuuggguuc

SEQ ID NO: 495465 - RNA, 32 nt, Human
ucagcucacugcaaccuccgccugcuggguuc

SEQ ID NO: 495466 - RNA, 32 nt, Human
ucagcucacugcaaccuccgccuucuggguuc

SEQ ID NO: 495467 - RNA, 32 nt, Human
ucagcucacugcaaccuccgguucccgggcuc

SEQ ID NO: 495468 - RNA, 32 nt, Human
ucagcucacugcaaccuccgucuccaggguuc

SEQ ID NO: 495469 - RNA, 32 nt, Human
ucagcucacugcaaccuccgucucuacuaaaa

SEQ ID NO: 495470 - RNA, 32 nt, Human
ucagcucacugcaaccuccuccucccggguuc

SEQ ID NO: 495471 - RNA, 32 nt, Human
ucagcucacugcaaccuccuccuucuggguuc

SEQ ID NO: 495472 - RNA, 32 nt, Human
ucagcucacugcaaccucgaccucuuggguuc

SEQ ID NO: 495473 - RNA, 32 nt, Human
ucagcucacugcaaccucuaccuccuggguuc

SEQ ID NO: 495474 - RNA, 32 nt, Human
ucagcucacugcaaccucucucucccggguuc

SEQ ID NO: 495475 - RNA, 32 nt, Human
ucagcucacugcaaccucugccuccagaguuc

SEQ ID NO: 495476 - RNA, 32 nt, Human
ucagcucacugcaaccucugccucccagguuc

SEQ ID NO: 495477 - RNA, 32 nt, Human
ucagcucacugcaaccucugccucccaguuca

SEQ ID NO: 495478 - RNA, 32 nt, Human
ucagcucacugcaaccucugccucccggauuc

SEQ ID NO: 495479 - RNA, 32 nt, Human
ucagcucacugcaaccucugccucccggauuu

SEQ ID NO: 495480 - RNA, 32 nt, Human
ucagcucacugcaaccucugccucccggguuc

SEQ ID NO: 495481 - RNA, 32 nt, Human
ucagcucacugcaaccucugccuucuggauuc

SEQ ID NO: 495482 - RNA, 32 nt, Human
ucagcucacugcaaccucugcuucccggguuc

SEQ ID NO: 495483 - RNA, 32 nt, Human
ucagcucacugcaaccucugucucccggguuc

SEQ ID NO: 495484 - RNA, 32 nt, Human
ucagcucacugcaaccugugccucccggcuuc

SEQ ID NO: 495485 - RNA, 32 nt, Human
ucagcucacugcaaccuucaccucccagguuc

SEQ ID NO: 495486 - RNA, 32 nt, Human
ucagcucacugcaaccuucgccucccagcuuc

SEQ ID NO: 495487 - RNA, 32 nt, Human
ucagcucacugcaaccuuggccucccguguuc

SEQ ID NO: 495488 - RNA, 32 nt, Human
ucagcucacugcaaccuuugucucccgggcuc

SEQ ID NO: 495489 - RNA, 32 nt, Human
ucagcucacugcaacguccaccuccuggguuc

SEQ ID NO: 495490 - RNA, 32 nt, Human
ucagcucacugcaacguccaccucuugaguuc

SEQ ID NO: 495491 - RNA, 32 nt, Human
ucagcucacugcaacgucugccucccggguuc

SEQ ID NO: 495492 - RNA, 32 nt, Human
ucagcucacugcaacuuccaccucccagguuc

SEQ ID NO: 495493 - RNA, 32 nt, Human
ucagcucacugcaacuuccgcaucccagguuc

SEQ ID NO: 495494 - RNA, 32 nt, Human
ucagcucacugcaacuucugccucccagguuc

SEQ ID NO: 495495 - RNA, 32 nt, Human
ucagcucacugcaagcuccaacucccggguuc

SEQ ID NO: 495496 - RNA, 32 nt, Human
ucagcucacugcaagcuccaccucccggguuc

SEQ ID NO: 495497 - RNA, 32 nt, Human
ucagcucacugcaagcuccaccucccggguuu

SEQ ID NO: 495498 - RNA, 32 nt, Human
ucagcucacugcaagcuccaccuuccggguuc

SEQ ID NO: 495499 - RNA, 32 nt, Human
ucagcucacugcaagcuccgccucccagguuc

SEQ ID NO: 495500 - RNA, 32 nt, Human
ucagcucacugcaagcuccgccucccggguac

SEQ ID NO: 495501 - RNA, 32 nt, Human
ucagcucacugcaagcuccgccuccucccggg

SEQ ID NO: 495502 - RNA, 32 nt, Human
ucagcucacugcaagcucuaccucuugguuca

SEQ ID NO: 495503 - RNA, 32 nt, Human
ucagcucacugcaagcucugccucccggguuc

SEQ ID NO: 495504 - RNA, 32 nt, Human
ucagcucacugcaagcucugccucucagguuc

SEQ ID NO: 495505 - RNA, 32 nt, Human
ucagcucacugcaaucuccaccuccuggguuc

SEQ ID NO: 495506 - RNA, 32 nt, Human
ucagcucacugcaaucuccgccucccggguuc

SEQ ID NO: 495507 - RNA, 32 nt, Human
ucagcucacugcaaucuucaccuccuaggcuc

SEQ ID NO: 495508 - RNA, 32 nt, Human
ucagcucacugcacccuccgccucucggguuc

SEQ ID NO: 495509 - RNA, 32 nt, Human
ucagcucacugcacccuugaccucccauacuc

SEQ ID NO: 495510 - RNA, 32 nt, Human
ucagcucacugcagccacugccucccagguuc

SEQ ID NO: 495511 - RNA, 32 nt, Human
ucagcucacugcagcccccgccucccagguuc

SEQ ID NO: 495512 - RNA, 32 nt, Human
ucagcucacugcagccuccaacucucugguuc

SEQ ID NO: 495513 - RNA, 32 nt, Human
ucagcucacugcagccuccaccucccagguuc

SEQ ID NO: 495514 - RNA, 32 nt, Human
ucagcucacugcagccuccaccuccuggguuc

SEQ ID NO: 495515 - RNA, 32 nt, Human
ucagcucacugcagccuccacuuccuggguuc

SEQ ID NO: 495516 - RNA, 32 nt, Human
ucagcucacugcagccuccgucucccagguuc

SEQ ID NO: 495517 - RNA, 32 nt, Human
ucagcucacugcagccucugccucccggguuc

SEQ ID NO: 495518 - RNA, 32 nt, Human
ucagcucacugcagccucugucucccgggcuc

SEQ ID NO: 495519 - RNA, 32 nt, Human
ucagcucacugcagcuuugaccuugccgggcu

SEQ ID NO: 495520 - RNA, 32 nt, Human
ucagcucacugcagucucugccucccggguuc

SEQ ID NO: 495521 - RNA, 32 nt, Human
ucagcucacugcauccucugccucccggguuc

SEQ ID NO: 495522 - RNA, 32 nt, Human
ucagcucacugcgaccuccaccucccauguuc

SEQ ID NO: 495523 - RNA, 32 nt, Human
ucagcucacugcgaccuccaccuccuggguuc

SEQ ID NO: 495524 - RNA, 32 nt, Human
ucagcucacuggcaacaucugccucccggguu

SEQ ID NO: 495525 - RNA, 32 nt, Human
ucagcucacuguaaccuccaccucccggauuc

SEQ ID NO: 495526 - RNA, 32 nt, Human
ucagcucacuguacuccagcccggguucaagc

SEQ ID NO: 495527 - RNA, 32 nt, Human
ucagcucagcacucagucagugguaacuugug

SEQ ID NO: 495528 - RNA, 32 nt, Human
ucagcucagcagagcaagaccccagagaugcu

SEQ ID NO: 495529 - RNA, 32 nt, Human
ucagcucagcucccugccuugucacauuuguc

SEQ ID NO: 495530 - RNA, 32 nt, Human
ucagcucagcuggccuggaaugggccaggcug

SEQ ID NO: 495531 - RNA, 32 nt, Human
ucagcucaggacugcuauuuagcuccucuuaa

SEQ ID NO: 495532 - RNA, 32 nt, Human
ucagcucagggguguccugggccagguagugg

SEQ ID NO: 495533 - RNA, 32 nt, Human
ucagcucagugcaaccuccgcccccugggauc

SEQ ID NO: 495534 - RNA, 32 nt, Human
ucagcucagugcaaccuccgccucccgaguuc

SEQ ID NO: 495535 - RNA, 32 nt, Human
ucagcucauccaggcuggacaaaccaguuccu

SEQ ID NO: 495536 - RNA, 32 nt, Human
ucagcucauccuggggaugucugcucauggga

SEQ ID NO: 495537 - RNA, 22 nt, Human
ucagcucauggagcggcaauag

SEQ ID NO: 495538 - RNA, 32 nt, Human
ucagcucauugcaaccucugccuaacggguuc

SEQ ID NO: 495539 - RNA, 32 nt, Human
ucagcucauugcaaccucugucucccagguuc

SEQ ID NO: 495540 - RNA, 32 nt, Human
ucagcucauugcaacuuccaccuccuggguug

SEQ ID NO: 495541 - RNA, 18 nt, Human
ucagcuccaaaagcaucu

SEQ ID NO: 495542 - RNA, 17 nt, Human
ucagcuccaaacgccuc

SEQ ID NO: 495543 - RNA, 21 nt, Human
ucagcuccaaacuuagcuuuu

SEQ ID NO: 495544 - RNA, 20 nt, Human
ucagcuccaaagcgaaucuu

SEQ ID NO: 495545 - RNA, 32 nt, Human
ucagcuccaagcggaagauuuccccagcuuuc

SEQ ID NO: 495546 - RNA, 21 nt, Human
ucagcuccaaggagcgcgcuc

SEQ ID NO: 495547 - RNA, 32 nt, Human
ucagcuccaauaaacugugcucugccuacccu

SEQ ID NO: 495548 - RNA, 32 nt, Human
ucagcuccacacaaagcugcagaaggacgaaa

SEQ ID NO: 495549 - RNA, 19 nt, Human
ucagcuccaccaaacgcuc

SEQ ID NO: 495550 - RNA, 19 nt, Human
ucagcuccagcuccaggcu

SEQ ID NO: 495551 - RNA, 22 nt, Human
ucagcuccauuucuggagucug

SEQ ID NO: 495552 - RNA, 32 nt, Human
ucagcucccagcccagcuuccaugcagcuuua

SEQ ID NO: 495553 - RNA, 32 nt, Human
ucagcucccaggcuaggcuguggccgccggug

SEQ ID NO: 495554 - RNA, 32 nt, Human
ucagcuccccucggagaagagcuguucacagc

SEQ ID NO: 495555 - RNA, 32 nt, Human
ucagcucccgggacguuuggagcugcugcuaa

SEQ ID NO: 495556 - RNA, 32 nt, Human
ucagcucccugcaaccuccgccucccggguuc

SEQ ID NO: 495557 - RNA, 32 nt, Human
ucagcucccugccuguuucccguaaggcugua

SEQ ID NO: 495558 - RNA, 32 nt, Human
ucagcucccugugcgacccuccagggaugcag

SEQ ID NO: 495559 - RNA, 28 nt, Human
ucagcucccugugcugccugauuucuca

SEQ ID NO: 495560 - RNA, 32 nt, Human
ucagcucccuuuaaccuccagcuccuggguuc

SEQ ID NO: 495561 - RNA, 32 nt, Human
ucagcuccgaccauguugcugugugauuaucu

SEQ ID NO: 495562 - RNA, 32 nt, Human
ucagcuccgcuggucugucugugcauccacug

SEQ ID NO: 495563 - RNA, 20 nt, Human
ucagcuccggguacacuucc

SEQ ID NO: 495564 - RNA, 32 nt, Human
ucagcuccuaaauuuggcuggcuuuguuuuuc

SEQ ID NO: 495565 - RNA, 32 nt, Human
ucagcuccuagagggagauuguuagaucauga

SEQ ID NO: 495566 - RNA, 32 nt, Human
ucagcuccuauccucuggacggggagcaucau

SEQ ID NO: 495567 - RNA, 32 nt, Human
ucagcuccuaucucuguauggccuggucuuuc

SEQ ID NO: 495568 - RNA, 32 nt, Human
ucagcuccuaucucuguauggccugguuuuuc

SEQ ID NO: 495569 - RNA, 32 nt, Human
ucagcuccuccagccccaccucccagcauggu

SEQ ID NO: 495570 - RNA, 32 nt, Human
ucagcuccucccccugccguugguuaauaaac

SEQ ID NO: 495571 - RNA, 24 nt, Human
ucagcuccuccucuuaggagcuca

SEQ ID NO: 495572 - RNA, 32 nt, Human
ucagcuccugcugcucuuagggaaaggaggcc

SEQ ID NO: 495573 - RNA, 28 nt, Human
ucagcuccuggagcugccucucugcacu

SEQ ID NO: 495574 - RNA, 32 nt, Human
ucagcuccuuccaccacaaccccacgcgccca

SEQ ID NO: 495575 - RNA, 24 nt, Human
ucagcuccuuccugugguuugcca

SEQ ID NO: 495576 - RNA, 32 nt, Human
ucagcuccuugcagauguagcccuugcccauc

SEQ ID NO: 495577 - RNA, 19 nt, Human
ucagcuccuuuacagccuu

SEQ ID NO: 495578 - RNA, 32 nt, Human
ucagcucgaugcagaaccaccaugcuccagac

SEQ ID NO: 495579 - RNA, 32 nt, Human
ucagcucgccgcaaccuccgccucccagguuc

SEQ ID NO: 495580 - RNA, 19 nt, Human
ucagcucgccgugcucugg

SEQ ID NO: 495581 - RNA, 32 nt, Human
ucagcucgcugcaacccccaccucccagguuc

SEQ ID NO: 495582 - RNA, 32 nt, Human
ucagcucgcugcaaccuccaccuccugggcuc

SEQ ID NO: 495583 - RNA, 32 nt, Human
ucagcucgcugcaaccuccaccuccuggguuc

SEQ ID NO: 495584 - RNA, 32 nt, Human
ucagcucgcugcaaccuccaccuuccggguuc

SEQ ID NO: 495585 - RNA, 32 nt, Human
ucagcucuccaucugucucugccuggcaggcg

SEQ ID NO: 495586 - RNA, 22 nt, Human
ucagcucuccuccucuagcuca

SEQ ID NO: 495587 - RNA, 20 nt, Human
ucagcucuccugcugcagca

SEQ ID NO: 495588 - RNA, 32 nt, Human
ucagcucucucaucuccuggaaccauggccag

SEQ ID NO: 495589 - RNA, 32 nt, Human
ucagcucucuggaagguggcccugcccggacc

SEQ ID NO: 495590 - RNA, 32 nt, Human
ucagcucugacagccccuccuccaggaaggcc

SEQ ID NO: 495591 - RNA, 32 nt, Human
ucagcucugacucccaccuccacaccccaaug

SEQ ID NO: 495592 - RNA, 31 nt, Human
ucagcucugacucucccuugccuuaagggga

SEQ ID NO: 495593 - RNA, 32 nt, Human
ucagcucugaguagcugggauuauaggcaugc

SEQ ID NO: 495594 - RNA, 32 nt, Human
ucagcucugccagugcaggcugggcagccugg

SEQ ID NO: 495595 - RNA, 20 nt, Human
ucagcucuggacccccuccc

SEQ ID NO: 495596 - RNA, 23 nt, Human
ucagcucuggaugcuaccccugg

SEQ ID NO: 495597 - RNA, 29 nt, Human
ucagcucuggcgccuucaucccccugccu

SEQ ID NO: 495598 - RNA, 32 nt, Human
ucagcucugucugucugggugcucacgggagg

SEQ ID NO: 495599 - RNA, 32 nt, Human
ucagcucugucugugugggugcucacaggagg

SEQ ID NO: 495600 - RNA, 32 nt, Human
ucagcucugucugugugggugcucacgggagg

SEQ ID NO: 495601 - RNA, 32 nt, Human
ucagcucuuaccucaccucccuccauuuacau

SEQ ID NO: 495602 - RNA, 32 nt, Human
ucagcucuucucucagaaguucagcuguugaa

SEQ ID NO: 495603 - RNA, 32 nt, Human
ucagcucuucugacuuaagugugcaaaauauu

SEQ ID NO: 495604 - RNA, 32 nt, Human
ucagcucuugauacggaaacgagugucuucac

SEQ ID NO: 495605 - RNA, 25 nt, Human
ucagcucuugguuaauuuagguuca

SEQ ID NO: 495606 - RNA, 22 nt, Human
ucagcucuuguuuugcugcugg

SEQ ID NO: 495607 - RNA, 32 nt, Human
ucagcucuuuaagcaucucucuccaaggaaca

SEQ ID NO: 495608 - RNA, 32 nt, Human
ucagcucuuuucuccagcuuuugcaguguccu

SEQ ID NO: 495609 - RNA, 24 nt, Human
ucagcugaaaagugguuggggaug

SEQ ID NO: 495610 - RNA, 32 nt, Human
ucagcugaaacaguccuggacuuucaaaaacc

SEQ ID NO: 495611 - RNA, 32 nt, Human
ucagcugaauuguccaagguugcccagaaggu

SEQ ID NO: 495612 - RNA, 23 nt, Human
ucagcugacgccaggucaggcac

SEQ ID NO: 495613 - RNA, 32 nt, Human
ucagcugagauggugccacugcacuccagccu

SEQ ID NO: 495614 - RNA, 32 nt, Human
ucagcugagcaguggcccuggccacaaaacca

SEQ ID NO: 495615 - RNA, 32 nt, Human
ucagcugaggacacauccccacccugccuccc

SEQ ID NO: 495616 - RNA, 32 nt, Human
ucagcugauucugaccucagcgucuccauggc

SEQ ID NO: 495617 - RNA, 32 nt, Human
ucagcugcaagaacaucaaaccagagugccca

SEQ ID NO: 495618 - RNA, 32 nt, Human
ucagcugcaagucagcaauuucccagguacca

SEQ ID NO: 495619 - RNA, 22 nt, Human
ucagcugcaauucugagggggg

SEQ ID NO: 495620 - RNA, 32 nt, Human
ucagcugccacaacagcuaugccaccacccua

SEQ ID NO: 495621 - RNA, 32 nt, Human
ucagcugccauccugcccuccagggacaacgc

SEQ ID NO: 495622 - RNA, 32 nt, Human
ucagcugccauccuggacuucccugaaugagg

SEQ ID NO: 495623 - RNA, 32 nt, Human
ucagcugcccaggcuggagugugguggcgcca

SEQ ID NO: 495624 - RNA, 19 nt, Human
ucagcugcccugggguccc

SEQ ID NO: 495625 - RNA, 32 nt, Human
ucagcugcccugguggggguugugugagagag

SEQ ID NO: 495626 - RNA, 32 nt, Human
ucagcugcccuuccaaggagcuucugcugcug

SEQ ID NO: 495627 - RNA, 32 nt, Human
ucagcugccgcgcuguugcuaggcaacagcgu

SEQ ID NO: 495628 - RNA, 32 nt, Human
ucagcugccuggggagugagccucccuggucc

SEQ ID NO: 495629 - RNA, 20 nt, Human
ucagcugcgccccccuccca

SEQ ID NO: 495630 - RNA, 32 nt, Human
ucagcugcucagaucccacuuuugccagacgc

SEQ ID NO: 495631 - RNA, 32 nt, Human
ucagcugcuccuccucuccuaggagaccagag

SEQ ID NO: 495632 - RNA, 32 nt, Human
ucagcugcugacacgcagccugcucuggagcc

SEQ ID NO: 495633 - RNA, 32 nt, Human
ucagcugcugcaaccuccaccucccggguuca

SEQ ID NO: 495634 - RNA, 32 nt, Human
ucagcugcuggccugcacucaucaccucuucc

SEQ ID NO: 495635 - RNA, 32 nt, Human
ucagcugcuuugacaaaaugacuggcuccuga

SEQ ID NO: 495636 - RNA, 32 nt, Human
ucagcuggacacugcccaaccgcaccucaggc

SEQ ID NO: 495637 - RNA, 32 nt, Human
ucagcuggagccaagcaaggaaaggguaccag

SEQ ID NO: 495638 - RNA, 32 nt, Human
ucagcuggagggagcauggcagugagccaagg

SEQ ID NO: 495639 - RNA, 32 nt, Human
ucagcuggagggcugcagagccccucccaaua

SEQ ID NO: 495640 - RNA, 32 nt, Human
ucagcuggauguguuuacguggagaggcgugg

SEQ ID NO: 495641 - RNA, 18 nt, Human
ucagcuggccacagccca

SEQ ID NO: 495642 - RNA, 32 nt, Human
ucagcuggcccugcccagccacccuggacaug

SEQ ID NO: 495643 - RNA, 32 nt, Human
ucagcuggcccugcccagccacccuggacgug

SEQ ID NO: 495644 - RNA, 32 nt, Human
ucagcuggcucucaucaggcugcagcccccuc

SEQ ID NO: 495645 - RNA, 32 nt, Human
ucagcugggaccccaaaccuccucagcucacc

SEQ ID NO: 495646 - RNA, 32 nt, Human
ucagcugggacggcuugccucggcuccauggg

SEQ ID NO: 495647 - RNA, 32 nt, Human
ucagcugggaguguccaucaucaggggaagau

SEQ ID NO: 495648 - RNA, 32 nt, Human
ucagcugggccgaaauaagaucacacacauca

SEQ ID NO: 495649 - RNA, 32 nt, Human
ucagcuggggccugggcuguggacagaaggau

SEQ ID NO: 495650 - RNA, 32 nt, Human
ucagcuggggguggaggggcaauuggaaggcu

SEQ ID NO: 495651 - RNA, 32 nt, Human
ucagcugguagaaacagcccuuggggacuaca

SEQ ID NO: 495652 - RNA, 32 nt, Human
ucagcuggucucaaaacuggccacugccucag

SEQ ID NO: 495653 - RNA, 32 nt, Human
ucagcugguggcuguggagcugaguccccucc

SEQ ID NO: 495654 - RNA, 32 nt, Human
ucagcuguaacccucacccacagccugcuggg

SEQ ID NO: 495655 - RNA, 32 nt, Human
ucagcuguaggaaggggccccuuuguaaacaa

SEQ ID NO: 495656 - RNA, 32 nt, Human
ucagcuguaucauuagacuuguauuuagagcg

SEQ ID NO: 495657 - RNA, 32 nt, Human
ucagcugucacuggcgauguccuaggggugcu

SEQ ID NO: 495658 - RNA, 32 nt, Human
ucagcugucaucugcagccucugccuccagcc

SEQ ID NO: 495659 - RNA, 32 nt, Human
ucagcuguccccaucagaggcccuucucccag

SEQ ID NO: 495660 - RNA, 32 nt, Human
ucagcugucugcccucugggcuuggguagggg

SEQ ID NO: 495661 - RNA, 32 nt, Human
ucagcugucuugcccaggcuggaguucagggg

SEQ ID NO: 495662 - RNA, 32 nt, Human
ucagcugucuuguuccaccaguauuuaccagg

SEQ ID NO: 495663 - RNA, 32 nt, Human
ucagcugugauggauauagagaaucagaggca

SEQ ID NO: 495664 - RNA, 32 nt, Human
ucagcugugcaggagccaugaggcaccaaccu

SEQ ID NO: 495665 - RNA, 32 nt, Human
ucagcuguggagugugguuggagaugaagugg

SEQ ID NO: 495666 - RNA, 32 nt, Human
ucagcuguuacccacucugggaccagcagucu

SEQ ID NO: 495667 - RNA, 32 nt, Human
ucagcuguuucauuauugugugccucgagcau

SEQ ID NO: 495668 - RNA, 32 nt, Human
ucagcuguuuguuaguuuuugcuuuauuuaaa

SEQ ID NO: 495669 - RNA, 32 nt, Human
ucagcuuaaaggacacuccuugcagggacuga

SEQ ID NO: 495670 - RNA, 32 nt, Human
ucagcuuaaugcaaccucuaccucccagguuc

SEQ ID NO: 495671 - RNA, 32 nt, Human
ucagcuuacuacagccaggucuccucucugcg

SEQ ID NO: 495672 - RNA, 32 nt, Human
ucagcuuacucaaccucugccucuuggguuuc

SEQ ID NO: 495673 - RNA, 32 nt, Human
ucagcuuacugcaaccucugccucccggguuc

SEQ ID NO: 495674 - RNA, 32 nt, Human
ucagcuuacugcaaccucugucucccggguuc

SEQ ID NO: 495675 - RNA, 32 nt, Human
ucagcuuagacugaggaaaacucuccauuaug

SEQ ID NO: 495676 - RNA, 32 nt, Human
ucagcuuagcagucuuucaugguggaagugac

SEQ ID NO: 495677 - RNA, 32 nt, Human
ucagcuuagcccagagguagcuugguggcaaa

SEQ ID NO: 495678 - RNA, 32 nt, Human
ucagcuuagcuugucuguggaacuccugacgu

SEQ ID NO: 495679 - RNA, 32 nt, Human
ucagcuuauaggaaucucuccaggucaacagg

SEQ ID NO: 495680 - RNA, 31 nt, Human
ucagcuucaauaaaccuguccacaaugaaaa

SEQ ID NO: 495681 - RNA, 32 nt, Human
ucagcuucauucucucucagcugugcagugga

SEQ ID NO: 495682 - RNA, 32 nt, Human
ucagcuuccaacuacaaagacagacuuggucc

SEQ ID NO: 495683 - RNA, 32 nt, Human
ucagcuucccaaaaugcugggauuacaagcau

SEQ ID NO: 495684 - RNA, 32 nt, Human
ucagcuucccaaagugcagggauuacaagugu

SEQ ID NO: 495685 - RNA, 32 nt, Human
ucagcuucccaaagugccgggauuacaagcuu

SEQ ID NO: 495686 - RNA, 32 nt, Human
ucagcuucccaaagugcugggauuacagacau

SEQ ID NO: 495687 - RNA, 32 nt, Human
ucagcuucccaaagugcugggauuacaggcau

SEQ ID NO: 495688 - RNA, 32 nt, Human
ucagcuucccaaagugcugggauuacaggugu

SEQ ID NO: 495689 - RNA, 32 nt, Human
ucagcuucccaaaguguugggauuacccaugu

SEQ ID NO: 495690 - RNA, 32 nt, Human
ucagcuucccaagcagcugggauuacaggugc

SEQ ID NO: 495691 - RNA, 32 nt, Human
ucagcuucccaaggagcugggacugcaggcau

SEQ ID NO: 495692 - RNA, 32 nt, Human
ucagcuucccaaguagcugggauuacaggcac

SEQ ID NO: 495693 - RNA, 32 nt, Human
ucagcuucccaaguagcugggauuacaggcgu

SEQ ID NO: 495694 - RNA, 32 nt, Human
ucagcuucccaaguaguugggauuacaggcgc

SEQ ID NO: 495695 - RNA, 32 nt, Human
ucagcuucccaaguggcugggauuacaggcau

SEQ ID NO: 495696 - RNA, 32 nt, Human
ucagcuucccaaguggcugggauuacaggcgc

SEQ ID NO: 495697 - RNA, 32 nt, Human
ucagcuucccagaguguugugggaaucuuggu

SEQ ID NO: 495698 - RNA, 32 nt, Human
ucagcuucccagcugcccuggcuuagccuucc

SEQ ID NO: 495699 - RNA, 32 nt, Human
ucagcuucccgaguagcugggauuacagaugu

SEQ ID NO: 495700 - RNA, 32 nt, Human
ucagcuucccgaguagcugggauuacaggcac

SEQ ID NO: 495701 - RNA, 32 nt, Human
ucagcuucccgaguagcugggauuacaggcgu

SEQ ID NO: 495702 - RNA, 32 nt, Human
ucagcuucccgaguagcugggauuacagguau

SEQ ID NO: 495703 - RNA, 32 nt, Human
ucagcuucccgaguagcugggauuauaggcac

SEQ ID NO: 495704 - RNA, 32 nt, Human
ucagcuucccuaguaauggauuacaggcgccc

SEQ ID NO: 495705 - RNA, 21 nt, Human
ucagcuucccucccaggauca

SEQ ID NO: 495706 - RNA, 32 nt, Human
ucagcuuccuaaagugcugggauuacaggcgu

SEQ ID NO: 495707 - RNA, 32 nt, Human
ucagcuuccuaaagugcugggauuacuggcau

SEQ ID NO: 495708 - RNA, 32 nt, Human
ucagcuuccuaaguagcugggauuacaggcgu

SEQ ID NO: 495709 - RNA, 32 nt, Human
ucagcuuccucuagcccggcccucucuaaggg

SEQ ID NO: 495710 - RNA, 32 nt, Human
ucagcuucgagccgaggugcagugagcuggug

SEQ ID NO: 495711 - RNA, 23 nt, Human
ucagcuucuaaucccagcacuuu

SEQ ID NO: 495712 - RNA, 32 nt, Human
ucagcuucucaaagugcugggauuacaggcgu

SEQ ID NO: 495713 - RNA, 32 nt, Human
ucagcuucucacuagacuaucucccuuauucu

SEQ ID NO: 495714 - RNA, 21 nt, Human
ucagcuucuccacucaggcuc

SEQ ID NO: 495715 - RNA, 20 nt, Human
ucagcuucucccugccacuu

SEQ ID NO: 495716 - RNA, 32 nt, Human
ucagcuucuccucuggcaucuguuagccgacu

SEQ ID NO: 495717 - RNA, 32 nt, Human
ucagcuucuccuggugggggugcuuugccugu

SEQ ID NO: 495718 - RNA, 32 nt, Human
ucagcuucucucugacugaaggacauucagag

SEQ ID NO: 495719 - RNA, 32 nt, Human
ucagcuucucuggcuccugggccaggugugcg

SEQ ID NO: 495720 - RNA, 32 nt, Human
ucagcuucugccucauaacacacacaagaacu

SEQ ID NO: 495721 - RNA, 32 nt, Human
ucagcuucuggguggugggugggguggggugg

SEQ ID NO: 495722 - RNA, 25 nt, Human
ucagcuucuuuugaagggggcauuu

SEQ ID NO: 495723 - RNA, 17 nt, Human
ucagcuugagcugaaaa

SEQ ID NO: 495724 - RNA, 32 nt, Human
ucagcuugagucugcagaaugccuugcaaauc

SEQ ID NO: 495725 - RNA, 32 nt, Human
ucagcuugccaugauagucugaccucauuaau

SEQ ID NO: 495726 - RNA, 32 nt, Human
ucagcuugcucucuauugaugaugcuuucuuu

SEQ ID NO: 495727 - RNA, 32 nt, Human
ucagcuuggaccaagacaaaauaauuuaguuc

SEQ ID NO: 495728 - RNA, 23 nt, Human
ucagcuugggcaacagagcaaga

SEQ ID NO: 495729 - RNA, 32 nt, Human
ucagcuugggcaacagagugauacuccaucuc

SEQ ID NO: 495730 - RNA, 22 nt, Human
ucagcuuggggagugaacacuu

SEQ ID NO: 495731 - RNA, 23 nt, Human
ucagcuugggugacagagccaga

SEQ ID NO: 495732 - RNA, 30 nt, Human
ucagcuugguucuagugagaaagacagaua

SEQ ID NO: 495733 - RNA, 32 nt, Human
ucagcuuuccaaguagcugggauuacaggcac

SEQ ID NO: 495734 - RNA, 32 nt, Human
ucagcuuuccccaaacuggaaugugucuuugc

SEQ ID NO: 495735 - RNA, 23 nt, Human
ucagcuuugaccuuccaggcuca

SEQ ID NO: 495736 - RNA, 32 nt, Human
ucagcuuugcuccccuauccucugcuuugcca

SEQ ID NO: 495737 - RNA, 32 nt, Human
ucagcuuuuaguaaccugcuguggucagcaua

SEQ ID NO: 495738 - RNA, 32 nt, Human
ucagcuuuuagucccagcuauggaagggagcu

SEQ ID NO: 495739 - RNA, 32 nt, Human
ucagcuuuuauaaggcagcaguaccuguccaa

SEQ ID NO: 495740 - RNA, 32 nt, Human
ucagcuuuuggggguccaucaaaggagguugc

SEQ ID NO: 495741 - RNA, 32 nt, Human
ucaggaaaaagcuucuuuugagauaucuuuag

SEQ ID NO: 495742 - RNA, 32 nt, Human
ucaggaaaaucaggcuguggagucuagaaacu

SEQ ID NO: 495743 - RNA, 32 nt, Human
ucaggaaaauugccuuucucuauuuguuaaga

SEQ ID NO: 495744 - RNA, 32 nt, Human
ucaggaaaauuuaagaaaaagaauaguuaguu

SEQ ID NO: 495745 - RNA, 32 nt, Human
ucaggaaacucauauugugaauauagguauca

SEQ ID NO: 495746 - RNA, 32 nt, Human
ucaggaaacugaggugggagaaucgcuugagc

SEQ ID NO: 495747 - RNA, 32 nt, Human
ucaggaaagccuuuaugguguggcuaaaggag

SEQ ID NO: 495748 - RNA, 32 nt, Human
ucaggaaagguggucaggaaaacucuggcugg

SEQ ID NO: 495749 - RNA, 32 nt, Human
ucaggaaauacugauagacucacuuaguaaaa

SEQ ID NO: 495750 - RNA, 25 nt, Human
ucaggaaauauaauuugagaauacu

SEQ ID NO: 495751 - RNA, 32 nt, Human
ucaggaaaugcacucggcaucugcacaguccu

SEQ ID NO: 495752 - RNA, 32 nt, Human
ucaggaaccaacacaagcacaaccacgggcau

SEQ ID NO: 495753 - RNA, 32 nt, Human
ucaggaaccaguugcuguuucuucccaugucg

SEQ ID NO: 495754 - RNA, 32 nt, Human
ucaggaaccaucaguccccuuguaauaaaggu

SEQ ID NO: 495755 - RNA, 32 nt, Human
ucaggaacccaccaggaucucccuucucccua

SEQ ID NO: 495756 - RNA, 32 nt, Human
ucaggaacccuucucugaucaucaggauucuc

SEQ ID NO: 495757 - RNA, 32 nt, Human
ucaggaaccucagaggagggggcucuggggac

SEQ ID NO: 495758 - RNA, 32 nt, Human
ucaggaacucacaaagcuaugugaccuuacac

SEQ ID NO: 495759 - RNA, 32 nt, Human
ucaggaagacuuggccaggccguguuccgugu

SEQ ID NO: 495760 - RNA, 32 nt, Human
ucaggaagagaaaguagagaagaaaagaauga

SEQ ID NO: 495761 - RNA, 32 nt, Human
ucaggaagagcuauggcccagaaacaacaggg

SEQ ID NO: 495762 - RNA, 32 nt, Human
ucaggaagaggccaggauggugguguggggag

SEQ ID NO: 495763 - RNA, 19 nt, Human
ucaggaagagguguaggga

SEQ ID NO: 495764 - RNA, 32 nt, Human
ucaggaagauacaauuggaauuagcuuuugua

SEQ ID NO: 495765 - RNA, 32 nt, Human
ucaggaagcaccgggaagaugcaggccugcau

SEQ ID NO: 495766 - RNA, 32 nt, Human
ucaggaagccaaggugggcagaugacuugagg

SEQ ID NO: 495767 - RNA, 32 nt, Human
ucaggaagccucucuuucuucacuuaccauua

SEQ ID NO: 495768 - RNA, 32 nt, Human
ucaggaagcgccagagcgccugggacagcuug

SEQ ID NO: 495769 - RNA, 32 nt, Human
ucaggaagcugagacacgagaaucacuugaac

SEQ ID NO: 495770 - RNA, 32 nt, Human
ucaggaagcugaggcaggagaaucacuugaac

SEQ ID NO: 495771 - RNA, 32 nt, Human
ucaggaagcugaggcaggagaaucgcuugaac

SEQ ID NO: 495772 - RNA, 32 nt, Human
ucaggaagcuguagaaggaguguuugucaauu

SEQ ID NO: 495773 - RNA, 32 nt, Human
ucaggaagcugugcagccucugccauugccau

SEQ ID NO: 495774 - RNA, 32 nt, Human
ucaggaaggaagagaccugggcacccaagacc

SEQ ID NO: 495775 - RNA, 32 nt, Human
ucaggaaggagagaucugacugagcgacacca

SEQ ID NO: 495776 - RNA, 32 nt, Human
ucaggaaggcaggagacaggagacgggaccuc

SEQ ID NO: 495777 - RNA, 32 nt, Human
ucaggaaggccuuuucuaucggcagcaauucc

SEQ ID NO: 495778 - RNA, 32 nt, Human
ucaggaagggagcaccggagaagacuugcaca

SEQ ID NO: 495779 - RNA, 32 nt, Human
ucaggaagggagcccagcuggugacaagagag

SEQ ID NO: 495780 - RNA, 32 nt, Human
ucaggaaggggugaaauagcuggcagauacaa

SEQ ID NO: 495781 - RNA, 32 nt, Human
ucaggaagugugagcacgggccuggcuggcac

SEQ ID NO: 495782 - RNA, 32 nt, Human
ucaggaaucuucuccccagagacuccuaagug

SEQ ID NO: 495783 - RNA, 32 nt, Human
ucaggaauggugcuagccucugcaacacgaca

SEQ ID NO: 495784 - RNA, 32 nt, Human
ucaggaauuaugccaccaugcccggcuaguug

SEQ ID NO: 495785 - RNA, 32 nt, Human
ucaggaauucaaaaccagccuggccaacaugc

SEQ ID NO: 495786 - RNA, 32 nt, Human
ucaggaauucaagaccagccuggccaacaugu

SEQ ID NO: 495787 - RNA, 32 nt, Human
ucaggaauucacccaggcagccuggagucagc

SEQ ID NO: 495788 - RNA, 32 nt, Human
ucaggaauucuuugcuuuggcuucugucuguu

SEQ ID NO: 495789 - RNA, 32 nt, Human
ucaggaauugcuuggauugauacauggacccc

SEQ ID NO: 495790 - RNA, 21 nt, Human
ucaggaauuuaggguaugauc

SEQ ID NO: 495791 - RNA, 32 nt, Human
ucaggaauuucagccaauaggagccagccagg

SEQ ID NO: 495792 - RNA, 32 nt, Human
ucaggacaaauagcuaaugcauuuuugccuua

SEQ ID NO: 495793 - RNA, 32 nt, Human
ucaggacacaugcacacgcauguacacagagg

SEQ ID NO: 495794 - RNA, 21 nt, Human
ucaggacagaaagguguccaa

SEQ ID NO: 495795 - RNA, 32 nt, Human
ucaggacagauggggaacagcagaagccgugu

SEQ ID NO: 495796 - RNA, 32 nt, Human
ucaggacaggcagagguggucagggagaaggu

SEQ ID NO: 495797 - RNA, 32 nt, Human
ucaggacagugcagcugcauuuaucagagcac

SEQ ID NO: 495798 - RNA, 32 nt, Human
ucaggacauuuuauagagccuuuuccaguuuu

SEQ ID NO: 495799 - RNA, 32 nt, Human
ucaggaccaagcuucugauccucccaaauauu

SEQ ID NO: 495800 - RNA, 23 nt, Human
ucaggaccacagguucuuaugau

SEQ ID NO: 495801 - RNA, 24 nt, Human
ucaggaccacaguggaguaugauc

SEQ ID NO: 495802 - RNA, 23 nt, Human
ucaggaccacaguuugaaauguc

SEQ ID NO: 495803 - RNA, 32 nt, Human
ucaggaccaccagggcauggaacuggagacca

SEQ ID NO: 495804 - RNA, 32 nt, Human
ucaggaccacccugccaaggcagaauaaaccg

SEQ ID NO: 495805 - RNA, 32 nt, Human
ucaggaccagccucgcaagcauuuuaauagac

SEQ ID NO: 495806 - RNA, 32 nt, Human
ucaggaccagccugaccaacauggugaaaccc

SEQ ID NO: 495807 - RNA, 32 nt, Human
ucaggaccagccuggccaacaugaugaaaccc

SEQ ID NO: 495808 - RNA, 32 nt, Human
ucaggaccagccuggccaauauggugaaaccc

SEQ ID NO: 495809 - RNA, 32 nt, Human
ucaggaccagccuggccagcauggugaaaccc

SEQ ID NO: 495810 - RNA, 32 nt, Human
ucaggaccagccuggucaagauggugaaacuc

SEQ ID NO: 495811 - RNA, 32 nt, Human
ucaggaccauccuggcuaacaccgugaaacuc

SEQ ID NO: 495812 - RNA, 32 nt, Human
ucaggaccauccuggcuaacauggugaaaccc

SEQ ID NO: 495813 - RNA, 32 nt, Human
ucaggacccacugcuguaugagucacaauuau

SEQ ID NO: 495814 - RNA, 32 nt, Human
ucaggacccaggaguccaggccccagccccuc

SEQ ID NO: 495815 - RNA, 32 nt, Human
ucaggacccuccugccuccucuccaggcccuu

SEQ ID NO: 495816 - RNA, 32 nt, Human
ucaggacccuucuacuuuuuccuuccugcccu

SEQ ID NO: 495817 - RNA, 32 nt, Human
ucaggaccucaaggggcucggcuaugagaagg

SEQ ID NO: 495818 - RNA, 24 nt, Human
ucaggaccucacucagaaagacua

SEQ ID NO: 495819 - RNA, 32 nt, Human
ucaggaccuccuugcagcaccagaagaacccu

SEQ ID NO: 495820 - RNA, 32 nt, Human
ucaggaccugcagacaguacaggcuagauaac

SEQ ID NO: 495821 - RNA, 32 nt, Human
ucaggaccuggacaccaugcagcggcugaaca

SEQ ID NO: 495822 - RNA, 32 nt, Human
ucaggaccugggcagugagggagcccgggcag

SEQ ID NO: 495823 - RNA, 32 nt, Human
ucaggacucacaucuucacuccugggccuuug

SEQ ID NO: 495824 - RNA, 20 nt, Human
ucaggacucacucugcugcu

SEQ ID NO: 495825 - RNA, 32 nt, Human
ucaggacucaggcuucuccaucauucucuguu

SEQ ID NO: 495826 - RNA, 32 nt, Human
ucaggacucagugacaucgccucccagccgac

SEQ ID NO: 495827 - RNA, 32 nt, Human
ucaggacuccagcccacugccacugggugaca

SEQ ID NO: 495828 - RNA, 32 nt, Human
ucaggacuccugggucccaggggucggaauug

SEQ ID NO: 495829 - RNA, 32 nt, Human
ucaggacucugagucugaucaugaauuuuaug

SEQ ID NO: 495830 - RNA, 32 nt, Human
ucaggacucugccuccaccacccccgugggca

SEQ ID NO: 495831 - RNA, 32 nt, Human
ucaggacucugccuccaccaccccugugggca

SEQ ID NO: 495832 - RNA, 32 nt, Human
ucaggacugaaauacauuaaugugggugauuu

SEQ ID NO: 495833 - RNA, 32 nt, Human
ucaggacugcacucucuucucggcugcacuaa

SEQ ID NO: 495834 - RNA, 32 nt, Human
ucaggacugcagcuccagccucuucaggccca

SEQ ID NO: 495835 - RNA, 32 nt, Human
ucaggacugcgaagauggugacccugcggaag

SEQ ID NO: 495836 - RNA, 32 nt, Human
ucaggacuggcucccccaucugcuccaaggga

SEQ ID NO: 495837 - RNA, 32 nt, Human
ucaggacugggcccugauugauaacaccucag

SEQ ID NO: 495838 - RNA, 32 nt, Human
ucaggacugggcucucuggccugcuggggcuc

SEQ ID NO: 495839 - RNA, 32 nt, Human
ucaggacugucugagccccacccugcgagggu

SEQ ID NO: 495840 - RNA, 32 nt, Human
ucaggacuuccagaccagccuggucaacaugg

SEQ ID NO: 495841 - RNA, 32 nt, Human
ucaggagaacuccaguagaggguuugggugcu

SEQ ID NO: 495842 - RNA, 32 nt, Human
ucaggagaaucacuugagcucaggaguucuag

SEQ ID NO: 495843 - RNA, 32 nt, Human
ucaggagaccaggaaaauggccacagggcucc

SEQ ID NO: 495844 - RNA, 22 nt, Human
ucaggagaccucuggaauacua

SEQ ID NO: 495845 - RNA, 32 nt, Human
ucaggagaccuggugauuugaccugcaccugu

SEQ ID NO: 495846 - RNA, 32 nt, Human
ucaggagacgguuuugagaucaacuggucuga

SEQ ID NO: 495847 - RNA, 32 nt, Human
ucaggagacucgcuugaaccugggagguggag

SEQ ID NO: 495848 - RNA, 32 nt, Human
ucaggagacugaagcaggagaaucgcucgagc

SEQ ID NO: 495849 - RNA, 32 nt, Human
ucaggagacugagacaggagaaucgcuugagc

SEQ ID NO: 495850 - RNA, 32 nt, Human
ucaggagacugaggcaggagaaucacuugaac

SEQ ID NO: 495851 - RNA, 32 nt, Human
ucaggagacugaggcaggagaaucgcuugaac

SEQ ID NO: 495852 - RNA, 32 nt, Human
ucaggagacugaguuaggagaaucccuugagc

SEQ ID NO: 495853 - RNA, 32 nt, Human
ucaggagagacgcagcccugggggccagcugg

SEQ ID NO: 495854 - RNA, 32 nt, Human
ucaggagagagcuuccuguuucuaaguggccu

SEQ ID NO: 495855 - RNA, 32 nt, Human
ucaggagagagggugaagcggagcagcccgag

SEQ ID NO: 495856 - RNA, 32 nt, Human
ucaggagagcagcagacaagcuggacugggga

SEQ ID NO: 495857 - RNA, 32 nt, Human
ucaggagagccacaggugccacugccuccuca

SEQ ID NO: 495858 - RNA, 32 nt, Human
ucaggagaguuaaggagguugugggugggauu

SEQ ID NO: 495859 - RNA, 22 nt, Human
ucaggagaucaggaccauccug

SEQ ID NO: 495860 - RNA, 32 nt, Human
ucaggagcaaauggaauccaggccuucccaga

SEQ ID NO: 495861 - RNA, 16 nt, Human
ucaggagcagagccag

SEQ ID NO: 495862 - RNA, 32 nt, Human
ucaggagcagaggccggagcuguccaucagca

SEQ ID NO: 495863 - RNA, 32 nt, Human
ucaggagcagggagcuugcggggcgcaggaag

SEQ ID NO: 495864 - RNA, 32 nt, Human
ucaggagcaggggccuggccuccuggguucuu

SEQ ID NO: 495865 - RNA, 20 nt, Human
ucaggagcaggugcugcaca

SEQ ID NO: 495866 - RNA, 32 nt, Human
ucaggagcaguggagcagugagcugccuccuc

SEQ ID NO: 495867 - RNA, 32 nt, Human
ucaggagcaguggcaagaugggagcugguugg

SEQ ID NO: 495868 - RNA, 32 nt, Human
ucaggagcauuuuccugccagucagcacaauu

SEQ ID NO: 495869 - RNA, 32 nt, Human
ucaggagccaagucugcuucugugauauuauc

SEQ ID NO: 495870 - RNA, 32 nt, Human
ucaggagccauuuuucccacauaguauauuag

SEQ ID NO: 495871 - RNA, 32 nt, Human
ucaggagcccagcuggcugggcccagcugccu

SEQ ID NO: 495872 - RNA, 32 nt, Human
ucaggagcccagcugucugcaguggcugacag

SEQ ID NO: 495873 - RNA, 32 nt, Human
ucaggagcccaggaguuugagguuggccugga

SEQ ID NO: 495874 - RNA, 32 nt, Human
ucaggagccgguggugggcgucugaggagaag

SEQ ID NO: 495875 - RNA, 32 nt, Human
ucaggagccugaggcaggagaauugcuugaac

SEQ ID NO: 495876 - RNA, 32 nt, Human
ucaggagccugcaccaguccugccuguccuuc

SEQ ID NO: 495877 - RNA, 18 nt, Human
ucaggagcgcccccuccc

SEQ ID NO: 495878 - RNA, 32 nt, Human
ucaggagcucaagaccagccuggcuaacaugg

SEQ ID NO: 495879 - RNA, 32 nt, Human
ucaggagcucaagaccagccuggguaacaaag

SEQ ID NO: 495880 - RNA, 32 nt, Human
ucaggagcucaagaccagccuggucaacaugg

SEQ ID NO: 495881 - RNA, 32 nt, Human
ucaggagcucaagaucagccugggcaacaugg

SEQ ID NO: 495882 - RNA, 32 nt, Human
ucaggagcucaaggcuggagugucuugacagu

SEQ ID NO: 495883 - RNA, 32 nt, Human
ucaggagcuccgcguagcaccugcccaaccaa

SEQ ID NO: 495884 - RNA, 32 nt, Human
ucaggagcucgagaccagccuggccgacaugg

SEQ ID NO: 495885 - RNA, 32 nt, Human
ucaggagcucgagaccauccugggcaacauaa

SEQ ID NO: 495886 - RNA, 32 nt, Human
ucaggagcucggcuucuugcuccagccgggca

SEQ ID NO: 495887 - RNA, 22 nt, Human
ucaggagcugggauuacaggcg

SEQ ID NO: 495888 - RNA, 32 nt, Human
ucaggagcuggggcuuggggagcugcuggagg

SEQ ID NO: 495889 - RNA, 32 nt, Human
ucaggagcuguguagaaaauguuagucaauca

SEQ ID NO: 495890 - RNA, 32 nt, Human
ucaggagcuugagaccagccugggcaacaugg

SEQ ID NO: 495891 - RNA, 32 nt, Human
ucaggaggaaaaagcuugcauuucuguguguu

SEQ ID NO: 495892 - RNA, 32 nt, Human
ucaggaggaaguggguggggccagauaagaga

SEQ ID NO: 495893 - RNA, 32 nt, Human
ucaggaggagagaaggaaggagaggugaucuc

SEQ ID NO: 495894 - RNA, 32 nt, Human
ucaggaggaucucuugagccugggaggucaag

SEQ ID NO: 495895 - RNA, 32 nt, Human
ucaggaggaugaggcaggagaaucacuugaac

SEQ ID NO: 495896 - RNA, 32 nt, Human
ucaggaggaugaggcaggagaccugcuugaac

SEQ ID NO: 495897 - RNA, 32 nt, Human
ucaggaggaugcugugcacacugugugugaug

SEQ ID NO: 495898 - RNA, 32 nt, Human
ucaggaggcaaaggcaggagaguugcuugaac

SEQ ID NO: 495899 - RNA, 32 nt, Human
ucaggaggccaaagcaggagaauugcuugaac

SEQ ID NO: 495900 - RNA, 32 nt, Human
ucaggaggccaguguggccggggaagaggugg

SEQ ID NO: 495901 - RNA, 32 nt, Human
ucaggaggccgaggcaggagaauugcuggaac

SEQ ID NO: 495902 - RNA, 32 nt, Human
ucaggaggccgaggcaggagaauugcuugaac

SEQ ID NO: 495903 - RNA, 32 nt, Human
ucaggaggccucaggaggccagccugccauga

SEQ ID NO: 495904 - RNA, 32 nt, Human
ucaggaggcuaaggcaggagaaucacuugaac

SEQ ID NO: 495905 - RNA, 32 nt, Human
ucaggaggcuaaggcaggagaaucgcuugaac

SEQ ID NO: 495906 - RNA, 32 nt, Human
ucaggaggcuaaggcgggagaaucacuugaac

SEQ ID NO: 495907 - RNA, 32 nt, Human
ucaggaggcuaaggcgggagaaucgcuugaau

SEQ ID NO: 495908 - RNA, 32 nt, Human
ucaggaggcuacagcaggagaauugcuugaac

SEQ ID NO: 495909 - RNA, 32 nt, Human
ucaggaggcugaaacaggagaaucacuugaac

SEQ ID NO: 495910 - RNA, 32 nt, Human
ucaggaggcugaagcaagagaaucacuugaac

SEQ ID NO: 495911 - RNA, 32 nt, Human
ucaggaggcugaagcaagagaaucgcuugaac

SEQ ID NO: 495912 - RNA, 32 nt, Human
ucaggaggcugaagcaccagaaucucuugaac

SEQ ID NO: 495913 - RNA, 32 nt, Human
ucaggaggcugaagcagaagaacugcuugaac

SEQ ID NO: 495914 - RNA, 32 nt, Human
ucaggaggcugaagcagaagaaucacuugaac

SEQ ID NO: 495915 - RNA, 32 nt, Human
ucaggaggcugaagcaggagaaucacuugaac

SEQ ID NO: 495916 - RNA, 32 nt, Human
ucaggaggcugaagcaggagaaucgcuggaac

SEQ ID NO: 495917 - RNA, 32 nt, Human
ucaggaggcugaagcaggagaaucgcuugaac

SEQ ID NO: 495918 - RNA, 32 nt, Human
ucaggaggcugaagcaggaggauagcuugagc

SEQ ID NO: 495919 - RNA, 32 nt, Human
ucaggaggcugaagcaggaggaucacuugagc

SEQ ID NO: 495920 - RNA, 32 nt, Human
ucaggaggcugaagcaggaugauagcuugauu

SEQ ID NO: 495921 - RNA, 32 nt, Human
ucaggaggcugaagugggaggaucccuugagc

SEQ ID NO: 495922 - RNA, 32 nt, Human
ucaggaggcugacauaggagaauugcuugaau

SEQ ID NO: 495923 - RNA, 32 nt, Human
ucaggaggcugagacaggagaaucaccugaac

SEQ ID NO: 495924 - RNA, 32 nt, Human
ucaggaggcugagacaggagaaucacuugaac

SEQ ID NO: 495925 - RNA, 32 nt, Human
ucaggaggcugagacaggagaaucgcuugaac

SEQ ID NO: 495926 - RNA, 32 nt, Human
ucaggaggcugaggaagaucacuugaacccgg

SEQ ID NO: 495927 - RNA, 32 nt, Human
ucaggaggcugaggaaggagaaucacuugaac

SEQ ID NO: 495928 - RNA, 32 nt, Human
ucaggaggcugaggcaagagaaucacuggaac

SEQ ID NO: 495929 - RNA, 32 nt, Human
ucaggaggcugaggcaagagaaucacuugaac

SEQ ID NO: 495930 - RNA, 32 nt, Human
ucaggaggcugaggcacaagaaucacuugaac

SEQ ID NO: 495931 - RNA, 32 nt, Human
ucaggaggcugaggcagaagaaucacuugaac

SEQ ID NO: 495932 - RNA, 32 nt, Human
ucaggaggcugaggcagaauugcuugaaccca

SEQ ID NO: 495933 - RNA, 32 nt, Human
ucaggaggcugaggcagaauugcuugaaccug

SEQ ID NO: 495934 - RNA, 32 nt, Human
ucaggaggcugaggcaggagaacugcuugaac

SEQ ID NO: 495935 - RNA, 32 nt, Human
ucaggaggcugaggcaggagaagggcgugaac

SEQ ID NO: 495936 - RNA, 32 nt, Human
ucaggaggcugaggcaggagaaucaauugaac

SEQ ID NO: 495937 - RNA, 32 nt, Human
ucaggaggcugaggcaggagaaucacucggac

SEQ ID NO: 495938 - RNA, 32 nt, Human
ucaggaggcugaggcaggagaaucacuugaac

SEQ ID NO: 495939 - RNA, 32 nt, Human
ucaggaggcugaggcaggagaaucacuugaag

SEQ ID NO: 495940 - RNA, 32 nt, Human
ucaggaggcugaggcaggagaaucacuugaau

SEQ ID NO: 495941 - RNA, 32 nt, Human
ucaggaggcugaggcaggagaaucacuugacc

SEQ ID NO: 495942 - RNA, 32 nt, Human
ucaggaggcugaggcaggagaaucacuugaga

SEQ ID NO: 495943 - RNA, 32 nt, Human
ucaggaggcugaggcaggagaaucacuugagc

SEQ ID NO: 495944 - RNA, 32 nt, Human
ucaggaggcugaggcaggagaaucacuuggac

SEQ ID NO: 495945 - RNA, 32 nt, Human
ucaggaggcugaggcaggagaaucacuuguac

SEQ ID NO: 495946 - RNA, 32 nt, Human
ucaggaggcugaggcaggagaaucacuuucac

SEQ ID NO: 495947 - RNA, 32 nt, Human
ucaggaggcugaggcaggagaaucagagguug

SEQ ID NO: 495948 - RNA, 32 nt, Human
ucaggaggcugaggcaggagaaucauuucaac

SEQ ID NO: 495949 - RNA, 32 nt, Human
ucaggaggcugaggcaggagaaucccuugaac

SEQ ID NO: 495950 - RNA, 32 nt, Human
ucaggaggcugaggcaggagaaucgccugaac

SEQ ID NO: 495951 - RNA, 32 nt, Human
ucaggaggcugaggcaggagaaucgcgugaac

SEQ ID NO: 495952 - RNA, 32 nt, Human
ucaggaggcugaggcaggagaaucgcuagaac

SEQ ID NO: 495953 - RNA, 32 nt, Human
ucaggaggcugaggcaggagaaucgcuggaac

SEQ ID NO: 495954 - RNA, 32 nt, Human
ucaggaggcugaggcaggagaaucgcuuaaac

SEQ ID NO: 495955 - RNA, 32 nt, Human
ucaggaggcugaggcaggagaaucgcuugaaa

SEQ ID NO: 495956 - RNA, 32 nt, Human
ucaggaggcugaggcaggagaaucgcuugaac

SEQ ID NO: 495957 - RNA, 32 nt, Human
ucaggaggcugaggcaggagaaucgcuugaau

SEQ ID NO: 495958 - RNA, 32 nt, Human
ucaggaggcugaggcaggagaaucgcuugagc

SEQ ID NO: 495959 - RNA, 32 nt, Human
ucaggaggcugaggcaggagaaucgcuuggac

SEQ ID NO: 495960 - RNA, 32 nt, Human
ucaggaggcugaggcaggagaaucgcuuguac

SEQ ID NO: 495961 - RNA, 32 nt, Human
ucaggaggcugaggcaggagaaucguuugaac

SEQ ID NO: 495962 - RNA, 32 nt, Human
ucaggaggcugaggcaggagaaucucuugaac

SEQ ID NO: 495963 - RNA, 32 nt, Human
ucaggaggcugaggcaggagaauggcaugaac

SEQ ID NO: 495964 - RNA, 32 nt, Human
ucaggaggcugaggcaggagaauggcgagaac

SEQ ID NO: 495965 - RNA, 32 nt, Human
ucaggaggcugaggcaggagaauggcguaaac

SEQ ID NO: 495966 - RNA, 32 nt, Human
ucaggaggcugaggcaggagaauggcgugaac

SEQ ID NO: 495967 - RNA, 32 nt, Human
ucaggaggcugaggcaggagaauggcuucaac

SEQ ID NO: 495968 - RNA, 32 nt, Human
ucaggaggcugaggcaggagaauggcuugaac

SEQ ID NO: 495969 - RNA, 32 nt, Human
ucaggaggcugaggcaggagaauuacuugaac

SEQ ID NO: 495970 - RNA, 32 nt, Human
ucaggaggcugaggcaggagaauuacuuuaac

SEQ ID NO: 495971 - RNA, 32 nt, Human
ucaggaggcugaggcaggagaauucuuuuaac

SEQ ID NO: 495972 - RNA, 32 nt, Human
ucaggaggcugaggcaggagaauugauugaac

SEQ ID NO: 495973 - RNA, 32 nt, Human
ucaggaggcugaggcaggagaauugcuuaaac

SEQ ID NO: 495974 - RNA, 32 nt, Human
ucaggaggcugaggcaggagaauugcuugaaa

SEQ ID NO: 495975 - RNA, 32 nt, Human
ucaggaggcugaggcaggagaauugcuugaac

SEQ ID NO: 495976 - RNA, 32 nt, Human
ucaggaggcugaggcaggagaauugcuugaau

SEQ ID NO: 495977 - RNA, 32 nt, Human
ucaggaggcugaggcaggagaauugcuuggac

SEQ ID NO: 495978 - RNA, 32 nt, Human
ucaggaggcugaggcaggagaauuguuugaac

SEQ ID NO: 495979 - RNA, 32 nt, Human
ucaggaggcugaggcaggagaauuugcuugau

SEQ ID NO: 495980 - RNA, 32 nt, Human
ucaggaggcugaggcaggagacuggcuugaac

SEQ ID NO: 495981 - RNA, 32 nt, Human
ucaggaggcugaggcaggagagucacuugaac

SEQ ID NO: 495982 - RNA, 32 nt, Human
ucaggaggcugaggcaggagaguggacugagc

SEQ ID NO: 495983 - RNA, 32 nt, Human
ucaggaggcugaggcaggagauucgcuugaac

SEQ ID NO: 495984 - RNA, 32 nt, Human
ucaggaggcugaggcaggaggaucacagugac

SEQ ID NO: 495985 - RNA, 32 nt, Human
ucaggaggcugaggcaggaggaucacuugaac

SEQ ID NO: 495986 - RNA, 32 nt, Human
ucaggaggcugaggcaggaggaucacuugagc

SEQ ID NO: 495987 - RNA, 32 nt, Human
ucaggaggcugaggcaggggaaucgcuugaac

SEQ ID NO: 495988 - RNA, 32 nt, Human
ucaggaggcugaggcaggugaaucacuugaac

SEQ ID NO: 495989 - RNA, 32 nt, Human
ucaggaggcugaggcaugagaaucacuugaac

SEQ ID NO: 495990 - RNA, 32 nt, Human
ucaggaggcugaggccggagaaucgcuugagc

SEQ ID NO: 495991 - RNA, 32 nt, Human
ucaggaggcugaggcgggagaaucacuugaac

SEQ ID NO: 495992 - RNA, 32 nt, Human
ucaggaggcugaggcgggagaaucccuugaac

SEQ ID NO: 495993 - RNA, 32 nt, Human
ucaggaggcugaggcuagagaaucacuugaac

SEQ ID NO: 495994 - RNA, 32 nt, Human
ucaggaggcugaggcuggagaaucauuugaac

SEQ ID NO: 495995 - RNA, 32 nt, Human
ucaggaggcugagggaggagaaucccuugaac

SEQ ID NO: 495996 - RNA, 32 nt, Human
ucaggaggcugagguaggagaaucaccugagc

SEQ ID NO: 495997 - RNA, 32 nt, Human
ucaggaggcugagguaggagaaucacuugaac

SEQ ID NO: 495998 - RNA, 32 nt, Human
ucaggaggcugagguaggagaaucauugaacc

SEQ ID NO: 495999 - RNA, 32 nt, Human
ucaggaggcugagguaggagaaucgcuugaac

SEQ ID NO: 496000 - RNA, 32 nt, Human
ucaggaggcugaggugggagaaucgcuugaac

SEQ ID NO: 496001 - RNA, 32 nt, Human
ucaggaggcugaggugggaggaucauuugagc

SEQ ID NO: 496002 - RNA, 32 nt, Human
ucaggaggcugagucaggagaaucacuugaac

SEQ ID NO: 496003 - RNA, 32 nt, Human
ucaggaggcugggacaggagaaucgcuugaac

SEQ ID NO: 496004 - RNA, 32 nt, Human
ucaggaggcuggggcaggagaaucgcuugaac

SEQ ID NO: 496005 - RNA, 32 nt, Human
ucaggaggcuggggcaggagaauggcaugaac

SEQ ID NO: 496006 - RNA, 32 nt, Human
ucaggaggcuuaggcaggagaauugcuugaac

SEQ ID NO: 496007 - RNA, 32 nt, Human
ucaggaggcuuagguaggagaauagcuugagc

SEQ ID NO: 496008 - RNA, 32 nt, Human
ucaggaggcuugaacccuggaggcagagguug

SEQ ID NO: 496009 - RNA, 32 nt, Human
ucaggagggcaggcugagguggggaaggaggg

SEQ ID NO: 496010 - RNA, 32 nt, Human
ucaggagggugaggcaggagauuugcuugaac

SEQ ID NO: 496011 - RNA, 25 nt, Human
ucaggaggucagccuggccaauaug

SEQ ID NO: 496012 - RNA, 32 nt, Human
ucaggaggugcugguguccaccuccagggccc

SEQ ID NO: 496013 - RNA, 20 nt, Human
ucaggagguggagguugcag

SEQ ID NO: 496014 - RNA, 23 nt, Human
ucaggagguggagguugcaguga

SEQ ID NO: 496015 - RNA, 32 nt, Human
ucaggagguugagacaggagaaucgcuuaaac

SEQ ID NO: 496016 - RNA, 32 nt, Human
ucaggagguugaggcaggagaaucacuugaac

SEQ ID NO: 496017 - RNA, 32 nt, Human
ucaggagguugaggcaggagaaucgcuugaac

SEQ ID NO: 496018 - RNA, 32 nt, Human
ucaggagguugagguaggagaauugcuugaac

SEQ ID NO: 496019 - RNA, 32 nt, Human
ucaggagguuggggcagaauugcuugaaccca

SEQ ID NO: 496020 - RNA, 32 nt, Human
ucaggagguugggggaaaagauguuuaugagu

SEQ ID NO: 496021 - RNA, 32 nt, Human
ucaggaguccaggacccaggagagggaagaau

SEQ ID NO: 496022 - RNA, 32 nt, Human
ucaggagucugaggcacgagaaucaccugaac

SEQ ID NO: 496023 - RNA, 32 nt, Human
ucaggagucugaggcaggagaaucgcuugaac

SEQ ID NO: 496024 - RNA, 32 nt, Human
ucaggagucugaggcaggagaauggcaugaac

SEQ ID NO: 496025 - RNA, 32 nt, Human
ucaggagucugaggcaggagaauugcuugaac

SEQ ID NO: 496026 - RNA, 32 nt, Human
ucaggagucugccacuugucaaagaaggagcu

SEQ ID NO: 496027 - RNA, 32 nt, Human
ucaggagucugugcugugcacccuggguuaua

SEQ ID NO: 496028 - RNA, 32 nt, Human
ucaggagugaagaugccacagagccgggcucc

SEQ ID NO: 496029 - RNA, 32 nt, Human
ucaggagugacagaucacagggugagggccac

SEQ ID NO: 496030 - RNA, 32 nt, Human
ucaggagugccucccuggccuggguagcuacc

SEQ ID NO: 496031 - RNA, 32 nt, Human
ucaggagugguggcaugugccuguaaucccag

SEQ ID NO: 496032 - RNA, 32 nt, Human
ucaggaguucaagacaagaccagccuggccaa

SEQ ID NO: 496033 - RNA, 18 nt, Human
ucaggaguucaagacgag

SEQ ID NO: 496034 - RNA, 32 nt, Human
ucaggaguucaaggccagccugggcaacaugg

SEQ ID NO: 496035 - RNA, 22 nt, Human
ucaggaguucgggaccauccug

SEQ ID NO: 496036 - RNA, 32 nt, Human
ucaggaguugaggaguucaggaguucaagacc

SEQ ID NO: 496037 - RNA, 32 nt, Human
ucaggaguuuaacaucagccugggcaacauag

SEQ ID NO: 496038 - RNA, 32 nt, Human
ucaggaguuucagaucagucuggccaacaaac

SEQ ID NO: 496039 - RNA, 32 nt, Human
ucaggaguuugaaaccagccugggcaacauag

SEQ ID NO: 496040 - RNA, 32 nt, Human
ucaggaguuugagaccagccugggcaacacgg

SEQ ID NO: 496041 - RNA, 32 nt, Human
ucaggaguuugagaccagccugggcaacauag

SEQ ID NO: 496042 - RNA, 32 nt, Human
ucaggaguuugagaccagccugggcaacauga

SEQ ID NO: 496043 - RNA, 32 nt, Human
ucaggaguuugagaccagccugggcaacaugg

SEQ ID NO: 496044 - RNA, 32 nt, Human
ucaggaguuugagaccagccugggcaauauag

SEQ ID NO: 496045 - RNA, 32 nt, Human
ucaggaguuugagaccagccugggcaauaucg

SEQ ID NO: 496046 - RNA, 32 nt, Human
ucaggaguuugagaccagccuggguaauaugg

SEQ ID NO: 496047 - RNA, 32 nt, Human
ucaggauauccccacccccacccugggaaaga

SEQ ID NO: 496048 - RNA, 32 nt, Human
ucaggauaugcuguuuugcugugugcagaugg

SEQ ID NO: 496049 - RNA, 32 nt, Human
ucaggaucaaugcuuugcauccuucaauccaa

SEQ ID NO: 496050 - RNA, 32 nt, Human
ucaggaucaccacgcaucucaggauuggucua

SEQ ID NO: 496051 - RNA, 32 nt, Human
ucaggauccacuccagaccuauugaaucucaa

SEQ ID NO: 496052 - RNA, 32 nt, Human
ucaggaucccacccuccaucccgucugcccug

SEQ ID NO: 496053 - RNA, 32 nt, Human
ucaggaucugacacccucuugucccaacacca

SEQ ID NO: 496054 - RNA, 32 nt, Human
ucaggaucugcugccucuuguuccaaggauua

SEQ ID NO: 496055 - RNA, 32 nt, Human
ucaggaucugggcuucuguccucugcuguucu

SEQ ID NO: 496056 - RNA, 32 nt, Human
ucaggaucuugggaacagcuagucuuccucug

SEQ ID NO: 496057 - RNA, 32 nt, Human
ucaggaugaaaaggacacagaaggccagauga

SEQ ID NO: 496058 - RNA, 32 nt, Human
ucaggaugaauuucuucuuucugccaucuuuu

SEQ ID NO: 496059 - RNA, 31 nt, Human
ucaggaugacuucugcucuucuauggcaaua

SEQ ID NO: 496060 - RNA, 32 nt, Human
ucaggaugaucacauuuuucugccuguguacu

SEQ ID NO: 496061 - RNA, 32 nt, Human
ucaggaugcucacaaaccugcagcuggaagcu

SEQ ID NO: 496062 - RNA, 30 nt, Human
ucaggaugcuguugcugggagcuguucuac

SEQ ID NO: 496063 - RNA, 32 nt, Human
ucaggauggaaaggaaaauacugaguuuagca

SEQ ID NO: 496064 - RNA, 32 nt, Human
ucaggauggagugaagaccuggagaggagggg

SEQ ID NO: 496065 - RNA, 32 nt, Human
ucaggauggcugcagugccagccuggggcagc

SEQ ID NO: 496066 - RNA, 30 nt, Human
ucaggaugucugcccguggcccggcuaucg

SEQ ID NO: 496067 - RNA, 32 nt, Human
ucaggauguugccagggauuacuccaauccca

SEQ ID NO: 496068 - RNA, 32 nt, Human
ucaggauuacaaaggauuuagccucaaguagu

SEQ ID NO: 496069 - RNA, 32 nt, Human
ucaggauucauuuggaaaguggguaaaagggg

SEQ ID NO: 496070 - RNA, 32 nt, Human
ucaggauuccacugacguccugggcagccagu

SEQ ID NO: 496071 - RNA, 32 nt, Human
ucaggauucggucuguuuccaucccagcauuc

SEQ ID NO: 496072 - RNA, 32 nt, Human
ucaggauucugaggcaggagaauggcaugaac

SEQ ID NO: 496073 - RNA, 32 nt, Human
ucaggauucuguggcuguagacugaucacaga

SEQ ID NO: 496074 - RNA, 32 nt, Human
ucaggcaaaaacaaaaaccuaaaacucaucag

SEQ ID NO: 496075 - RNA, 32 nt, Human
ucaggcaacugauuucaaaugccuaugaaacc

SEQ ID NO: 496076 - RNA, 32 nt, Human
ucaggcaagcuugccagacaucaauccagcaa

SEQ ID NO: 496077 - RNA, 32 nt, Human
ucaggcacagucaggggcugagguuggaggag

SEQ ID NO: 496078 - RNA, 18 nt, Human
ucaggcaccacccccucc

SEQ ID NO: 496079 - RNA, 32 nt, Human
ucaggcaccacuguuaaucacugagacugauu

SEQ ID NO: 496080 - RNA, 32 nt, Human
ucaggcaccagcacagggcucugggugacuca

SEQ ID NO: 496081 - RNA, 32 nt, Human
ucaggcacccggggccagagacauaugggcca

SEQ ID NO: 496082 - RNA, 32 nt, Human
ucaggcacugagccacugcgcccagucaacaa

SEQ ID NO: 496083 - RNA, 32 nt, Human
ucaggcacugaggaggccgagagaugaggccg

SEQ ID NO: 496084 - RNA, 32 nt, Human
ucaggcacugcugccuuccugccucccaaggc

SEQ ID NO: 496085 - RNA, 32 nt, Human
ucaggcagacagcaggcuggagcccagcauuc

SEQ ID NO: 496086 - RNA, 32 nt, Human
ucaggcagagaggcccucccaugcccacaaca

SEQ ID NO: 496087 - RNA, 23 nt, Human
ucaggcagaggaaagaacccugu

SEQ ID NO: 496088 - RNA, 32 nt, Human
ucaggcagaggccaguacagaggaggagccau

SEQ ID NO: 496089 - RNA, 32 nt, Human
ucaggcagagggaacagcgugugcaaaagccc

SEQ ID NO: 496090 - RNA, 32 nt, Human
ucaggcagagggacucagggauggggacugcc

SEQ ID NO: 496091 - RNA, 32 nt, Human
ucaggcagaucuccugcccucucugagccuug

SEQ ID NO: 496092 - RNA, 32 nt, Human
ucaggcagcaguggcgccuggugucaggucug

SEQ ID NO: 496093 - RNA, 32 nt, Human
ucaggcagccacggccagggagcuaugagggu

SEQ ID NO: 496094 - RNA, 22 nt, Human
ucaggcagccccaaacuggugc

SEQ ID NO: 496095 - RNA, 22 nt, Human
ucaggcagccgcaaaaccuggc

SEQ ID NO: 496096 - RNA, 32 nt, Human
ucaggcagccucucccccuccuuccuggaccc

SEQ ID NO: 496097 - RNA, 32 nt, Human
ucaggcagcuagugauagagguggggccaagc

SEQ ID NO: 496098 - RNA, 32 nt, Human
ucaggcaggaagcagaaggaagggcaaugggc

SEQ ID NO: 496099 - RNA, 32 nt, Human
ucaggcaggagagaugguuuaaagaggaagau

SEQ ID NO: 496100 - RNA, 32 nt, Human
ucaggcaggaggaucacuugaacccaggaauu

SEQ ID NO: 496101 - RNA, 32 nt, Human
ucaggcaggaggaucacuugagcuuaggaguu

SEQ ID NO: 496102 - RNA, 32 nt, Human
ucaggcaggaggugggcagugaaggggaauac

SEQ ID NO: 496103 - RNA, 32 nt, Human
ucaggcaggcccuggcccuggaggcugagcug

SEQ ID NO: 496104 - RNA, 32 nt, Human
ucaggcaggcggggcccaugguuggucccugc

SEQ ID NO: 496105 - RNA, 32 nt, Human
ucaggcagggaguccagggugccuggaagagg

SEQ ID NO: 496106 - RNA, 24 nt, Human
ucaggcagguaaucccagaacuuu

SEQ ID NO: 496107 - RNA, 32 nt, Human
ucaggcagucccuaugauggugguuauggauc

SEQ ID NO: 496108 - RNA, 21 nt, Human
ucaggcaguccugggauccuc

SEQ ID NO: 496109 - RNA, 21 nt, Human
ucaggcagucugccugccuca

SEQ ID NO: 496110 - RNA, 32 nt, Human
ucaggcagugcacuccuggagccaagagggaa

SEQ ID NO: 496111 - RNA, 32 nt, Human
ucaggcaguggccaagagcccaaagggcuaag

SEQ ID NO: 496112 - RNA, 23 nt, Human
ucaggcaguugucacacugcauc

SEQ ID NO: 496113 - RNA, 32 nt, Human
ucaggcaucccugccccgcucuccuugagggc

SEQ ID NO: 496114 - RNA, 32 nt, Human
ucaggcaucccugcccugcucuccuugagggc

SEQ ID NO: 496115 - RNA, 32 nt, Human
ucaggcaucucuaggaccuugcuggacggugg

SEQ ID NO: 496116 - RNA, 32 nt, Human
ucaggcaucugcacuccuccgagcccggugga

SEQ ID NO: 496117 - RNA, 32 nt, Human
ucaggcaugcagauaccccagacugccacucu

SEQ ID NO: 496118 - RNA, 24 nt, Human
ucaggcauggcugacagcuugugc

SEQ ID NO: 496119 - RNA, 32 nt, Human
ucaggcaugguggcacaugccuguaaucccag

SEQ ID NO: 496120 - RNA, 32 nt, Human
ucaggcaugguggcucacaccuguaaucccag

SEQ ID NO: 496121 - RNA, 32 nt, Human
ucaggcaugguggcucaggccuguaaucccag

SEQ ID NO: 496122 - RNA, 32 nt, Human
ucaggcaugguggguugugccuguaaucccag

SEQ ID NO: 496123 - RNA, 32 nt, Human
ucaggcaugguggugggcgccuguaaucccag

SEQ ID NO: 496124 - RNA, 32 nt, Human
ucaggcaugguggugggcgccuguaauuccag

SEQ ID NO: 496125 - RNA, 32 nt, Human
ucaggcaugucagagaagggaggacucacuag

SEQ ID NO: 496126 - RNA, 21 nt, Human
ucaggcaugugacuggccuaa

SEQ ID NO: 496127 - RNA, 32 nt, Human
ucaggcauuccagaggugaacuguccauugcu

SEQ ID NO: 496128 - RNA, 20 nt, Human
ucaggcauuucauuaggacc

SEQ ID NO: 496129 - RNA, 32 nt, Human
ucaggccaacagggcuuccugggauacaagag

SEQ ID NO: 496130 - RNA, 32 nt, Human
ucaggccaagcccaauacagccauuaaagaug

SEQ ID NO: 496131 - RNA, 32 nt, Human
ucaggccaagugcaccacacacccucaugggu

SEQ ID NO: 496132 - RNA, 32 nt, Human
ucaggccacagcuccggccacagcucuggcuc

SEQ ID NO: 496133 - RNA, 25 nt, Human
ucaggccaccugcccccuucuccca

SEQ ID NO: 496134 - RNA, 32 nt, Human
ucaggccacugcacuccagccugaacaacaaa

SEQ ID NO: 496135 - RNA, 32 nt, Human
ucaggccacugcacuccagccugggcaacaga

SEQ ID NO: 496136 - RNA, 32 nt, Human
ucaggccacugcacuccagccuggguaacaga

SEQ ID NO: 496137 - RNA, 32 nt, Human
ucaggccacugcauuuagccugggcgacagag

SEQ ID NO: 496138 - RNA, 32 nt, Human
ucaggccagcaacuauccuugccaggguuuuu

SEQ ID NO: 496139 - RNA, 32 nt, Human
ucaggccagcaaggaagagaguuugaguuguu

SEQ ID NO: 496140 - RNA, 32 nt, Human
ucaggccagcacuuugggaggcugagucgggc

SEQ ID NO: 496141 - RNA, 32 nt, Human
ucaggccagcugcuugggcuucauccuccuca

SEQ ID NO: 496142 - RNA, 32 nt, Human
ucaggccaggaaggaggggaaaagagugagag

SEQ ID NO: 496143 - RNA, 32 nt, Human
ucaggccaggagaagucugaugacucacucac

SEQ ID NO: 496144 - RNA, 32 nt, Human
ucaggccaggagagacggaagaacuggcaagc

SEQ ID NO: 496145 - RNA, 32 nt, Human
ucaggccaggaguucaagaucaaccaaccugg

SEQ ID NO: 496146 - RNA, 32 nt, Human
ucaggccaggugugaauccugagguccaugga

SEQ ID NO: 496147 - RNA, 32 nt, Human
ucaggccaucacagaacaccccagcuuccuca

SEQ ID NO: 496148 - RNA, 32 nt, Human
ucaggccaucucuggcugucuuccugucucuc

SEQ ID NO: 496149 - RNA, 32 nt, Human
ucaggccaugagaaugaagagaggaugggaag

SEQ ID NO: 496150 - RNA, 32 nt, Human
ucaggccauggacucaggaccugcccggugau

SEQ ID NO: 496151 - RNA, 32 nt, Human
ucaggccauucaccugccuccugucaguagug

SEQ ID NO: 496152 - RNA, 32 nt, Human
ucaggccauugcacuccagccugggcaauagg

SEQ ID NO: 496153 - RNA, 32 nt, Human
ucaggccauugcacuucagccugggugacaga

SEQ ID NO: 496154 - RNA, 32 nt, Human
ucaggcccaagugccauccauaguccaucucc

SEQ ID NO: 496155 - RNA, 32 nt, Human
ucaggcccagaaccagaugcagagggaacagc

SEQ ID NO: 496156 - RNA, 32 nt, Human
ucaggcccagaacuugcccuccaguggaccuu

SEQ ID NO: 496157 - RNA, 32 nt, Human
ucaggcccagaacuugccuccagucggccuuu

SEQ ID NO: 496158 - RNA, 32 nt, Human
ucaggcccagcacauccagccuggcaucccac

SEQ ID NO: 496159 - RNA, 32 nt, Human
ucaggcccagccgccagaccucagagaucuca

SEQ ID NO: 496160 - RNA, 32 nt, Human
ucaggcccaguucucgugcccuuagaggggaa

SEQ ID NO: 496161 - RNA, 32 nt, Human
ucaggcccauucuuucugaucugcgcccccag

SEQ ID NO: 496162 - RNA, 32 nt, Human
ucaggcccccagugggaccacaugccacugcc

SEQ ID NO: 496163 - RNA, 22 nt, Human
ucaggcccccgcucgggcccga

SEQ ID NO: 496164 - RNA, 25 nt, Human
ucaggccccgggcuucccuucuccc

SEQ ID NO: 496165 - RNA, 21 nt, Human
ucaggccccuccuucagccug

SEQ ID NO: 496166 - RNA, 32 nt, Human
ucaggcccgaaggucucucuggcucuaggacc

SEQ ID NO: 496167 - RNA, 32 nt, Human
ucaggcccuaggcuggccuaggaagcucagca

SEQ ID NO: 496168 - RNA, 32 nt, Human
ucaggcccucacugacccucaggggagccccc

SEQ ID NO: 496169 - RNA, 32 nt, Human
ucaggcccucagggugcugagguuuuccuuug

SEQ ID NO: 496170 - RNA, 32 nt, Human
ucaggcccuccccuccccuccccuccccuccc

SEQ ID NO: 496171 - RNA, 32 nt, Human
ucaggcccugcucacucccggggccaccaaac

SEQ ID NO: 496172 - RNA, 32 nt, Human
ucaggcccuggcuuucugcagcaacaguggag

SEQ ID NO: 496173 - RNA, 32 nt, Human
ucaggccgcauccugaacugcuucuccaagga

SEQ ID NO: 496174 - RNA, 32 nt, Human
ucaggccggacagaaaacaugacccaucaaug

SEQ ID NO: 496175 - RNA, 32 nt, Human
ucaggccggcagcagcagcagagagcagagag

SEQ ID NO: 496176 - RNA, 32 nt, Human
ucaggccggggccaagagugagcugcuaacac

SEQ ID NO: 496177 - RNA, 32 nt, Human
ucaggccuacagccacauccccaagcccacca

SEQ ID NO: 496178 - RNA, 32 nt, Human
ucaggccuauaaccccagcucccuaggagacc

SEQ ID NO: 496179 - RNA, 32 nt, Human
ucaggccuauaaucccaguacuuugggaggcc

SEQ ID NO: 496180 - RNA, 32 nt, Human
ucaggccucaaacccuuucauaccuuuauucu

SEQ ID NO: 496181 - RNA, 32 nt, Human
ucaggccuccagacuguacuuccagaugucuc

SEQ ID NO: 496182 - RNA, 18 nt, Human
ucaggccucccaaaggca

SEQ ID NO: 496183 - RNA, 32 nt, Human
ucaggccucccucucucuucugcuccacccuu

SEQ ID NO: 496184 - RNA, 32 nt, Human
ucaggccucuccaagcccggagcauccccagc

SEQ ID NO: 496185 - RNA, 20 nt, Human
ucaggccucucuccagcagg

SEQ ID NO: 496186 - RNA, 32 nt, Human
ucaggccucugcucuccgaccucucuccucug

SEQ ID NO: 496187 - RNA, 21 nt, Human
ucaggccucugugccgcacca

SEQ ID NO: 496188 - RNA, 32 nt, Human
ucaggccucuugagaaauggaugcugucucag

SEQ ID NO: 496189 - RNA, 32 nt, Human
ucaggccugcagcccccucccaugucugucug

SEQ ID NO: 496190 - RNA, 32 nt, Human
ucaggccugcugcaggagcucugagaacaaga

SEQ ID NO: 496191 - RNA, 32 nt, Human
ucaggccugcuggccuccugcugugaacauuu

SEQ ID NO: 496192 - RNA, 32 nt, Human
ucaggccuggcuuagagguagcggguggcugg

SEQ ID NO: 496193 - RNA, 32 nt, Human
ucaggccugggcaacauagaugugagcaccua

SEQ ID NO: 496194 - RNA, 32 nt, Human
ucaggccuggugugguggcucacaccuguaau

SEQ ID NO: 496195 - RNA, 23 nt, Human
ucaggccuguaaccccagcacuu

SEQ ID NO: 496196 - RNA, 32 nt, Human
ucaggccuguaaccccagcacuucgggaggcu

SEQ ID NO: 496197 - RNA, 32 nt, Human
ucaggccuguaaccccaguacuuugggaggcc

SEQ ID NO: 496198 - RNA, 24 nt, Human
ucaggccuguaaucccaacacuuu

SEQ ID NO: 496199 - RNA, 32 nt, Human
ucaggccuguaaucccaacacuuugggaggcc

SEQ ID NO: 496200 - RNA, 32 nt, Human
ucaggccuguaaucccaacccuuuggaaggua

SEQ ID NO: 496201 - RNA, 22 nt, Human
ucaggccuguaaucccagcacu

SEQ ID NO: 496202 - RNA, 32 nt, Human
ucaggccuguaaucccagcacucugggaggcc

SEQ ID NO: 496203 - RNA, 32 nt, Human
ucaggccuguaaucccagcacugugggaggcc

SEQ ID NO: 496204 - RNA, 23 nt, Human
ucaggccuguaaucccagcacuu

SEQ ID NO: 496205 - RNA, 32 nt, Human
ucaggccuguaaucccagcacuucaggaagcc

SEQ ID NO: 496206 - RNA, 24 nt, Human
ucaggccuguaaucccagcacuuu

SEQ ID NO: 496207 - RNA, 32 nt, Human
ucaggccuguaaucccagcacuuugggaagcc

SEQ ID NO: 496208 - RNA, 32 nt, Human
ucaggccuguaaucccagcacuuugggaggcc

SEQ ID NO: 496209 - RNA, 32 nt, Human
ucaggccuguaaucccagcacuuugggaggcu

SEQ ID NO: 496210 - RNA, 24 nt, Human
ucaggccuguaaucccagcauuuu

SEQ ID NO: 496211 - RNA, 32 nt, Human
ucaggccuguaaucccagcauuuucagaggcu

SEQ ID NO: 496212 - RNA, 32 nt, Human
ucaggccuguaaucccagcauuuugggaggcu

SEQ ID NO: 496213 - RNA, 32 nt, Human
ucaggccuguaaucccagcuacuagggaggcg

SEQ ID NO: 496214 - RNA, 32 nt, Human
ucaggccuguaaucccagcucuggaagcugaa

SEQ ID NO: 496215 - RNA, 32 nt, Human
ucaggccuguaauccuaacacuuugggaggcc

SEQ ID NO: 496216 - RNA, 32 nt, Human
ucaggccuguaauccuggcacuuugggaggcc

SEQ ID NO: 496217 - RNA, 24 nt, Human
ucaggccuguaaucucagcacuuu

SEQ ID NO: 496218 - RNA, 32 nt, Human
ucaggccuguaaucucagcacuuugggaggcc

SEQ ID NO: 496219 - RNA, 32 nt, Human
ucaggccuguaauuccagcacuuugggaggcc

SEQ ID NO: 496220 - RNA, 22 nt, Human
ucaggccugugacccggccaga

SEQ ID NO: 496221 - RNA, 32 nt, Human
ucaggccugugaucccagcacuuugggaggcu

SEQ ID NO: 496222 - RNA, 32 nt, Human
ucaggccuguggagucagaacccgcucuucag

SEQ ID NO: 496223 - RNA, 32 nt, Human
ucaggccuguucuagcaucuggccggggcggc

SEQ ID NO: 496224 - RNA, 32 nt, Human
ucaggccuuaugcuaagggugaguaauuccau

SEQ ID NO: 496225 - RNA, 32 nt, Human
ucaggccuuccugacuucucccccucuuggcu

SEQ ID NO: 496226 - RNA, 32 nt, Human
ucaggccuuugaaggggcagcuucuggaaguu

SEQ ID NO: 496227 - RNA, 32 nt, Human
ucaggcgagcagggugggcaagugggaggagg

SEQ ID NO: 496228 - RNA, 32 nt, Human
ucaggcgauccaucugccucagccugaaagug

SEQ ID NO: 496229 - RNA, 32 nt, Human
ucaggcgcagccggccacgauccugcccaucc

SEQ ID NO: 496230 - RNA, 32 nt, Human
ucaggcgcaguggcucacaccuguaaucccag

SEQ ID NO: 496231 - RNA, 32 nt, Human
ucaggcgcaguggcucaugccuguaaucccag

SEQ ID NO: 496232 - RNA, 32 nt, Human
ucaggcgcaugugccaguuggggccccgcggg

SEQ ID NO: 496233 - RNA, 32 nt, Human
ucaggcgcgguggcucacgccuguaaucccag

SEQ ID NO: 496234 - RNA, 32 nt, Human
ucaggcggcugcaggcuucagccugcgcuggu

SEQ ID NO: 496235 - RNA, 32 nt, Human
ucaggcgugguggcgggcgccuguaaucccag

SEQ ID NO: 496236 - RNA, 32 nt, Human
ucaggcguuuucuccccaccaagcccccaccc

SEQ ID NO: 496237 - RNA, 32 nt, Human
ucaggcuacagcacuccagccugggcaacaag

SEQ ID NO: 496238 - RNA, 20 nt, Human
ucaggcuagagugcaguggc

SEQ ID NO: 496239 - RNA, 20 nt, Human
ucaggcuagucucgaacucc

SEQ ID NO: 496240 - RNA, 32 nt, Human
ucaggcuauauguauaagguggaugugaaaca

SEQ ID NO: 496241 - RNA, 32 nt, Human
ucaggcuauccccauucccccucuugggccuc

SEQ ID NO: 496242 - RNA, 32 nt, Human
ucaggcucaaaaaugcagacccugccgaaaca

SEQ ID NO: 496243 - RNA, 32 nt, Human
ucaggcucaagaaguggaggagagggaaaacc

SEQ ID NO: 496244 - RNA, 32 nt, Human
ucaggcucaagcaaaccucucaccucagccug

SEQ ID NO: 496245 - RNA, 32 nt, Human
ucaggcucaagcaauccucccgccucagccuc

SEQ ID NO: 496246 - RNA, 32 nt, Human
ucaggcucaagcaauccucccgccucagccuu

SEQ ID NO: 496247 - RNA, 32 nt, Human
ucaggcucaagcgauccucccaucucagccuc

SEQ ID NO: 496248 - RNA, 32 nt, Human
ucaggcucaagcgauucucccaccucagccau

SEQ ID NO: 496249 - RNA, 32 nt, Human
ucaggcucagccccagcccucagcccagucaa

SEQ ID NO: 496250 - RNA, 32 nt, Human
ucaggcucaggugauccucccaucucagccug

SEQ ID NO: 496251 - RNA, 32 nt, Human
ucaggcucaguggcucaugccuguaaucccag

SEQ ID NO: 496252 - RNA, 32 nt, Human
ucaggcucauuuucuucucaacucuggcucuc

SEQ ID NO: 496253 - RNA, 32 nt, Human
ucaggcucccaaagugcugagauuacaggcau

SEQ ID NO: 496254 - RNA, 32 nt, Human
ucaggcucccaaguagcugggauuacaggugc

SEQ ID NO: 496255 - RNA, 32 nt, Human
ucaggcucccgaguagcugggauuacaggcau

SEQ ID NO: 496256 - RNA, 32 nt, Human
ucaggcuccucaugccaagagaucaccaagca

SEQ ID NO: 496257 - RNA, 32 nt, Human
ucaggcuccucccagguuauguuuucauagug

SEQ ID NO: 496258 - RNA, 32 nt, Human
ucaggcuccugagcacggcuucccuuuuugaa

SEQ ID NO: 496259 - RNA, 32 nt, Human
ucaggcuccugcaggccagcugcaugcucucc

SEQ ID NO: 496260 - RNA, 32 nt, Human
ucaggcucuaauggcugaagaaucaagaaagc

SEQ ID NO: 496261 - RNA, 20 nt, Human
ucaggcucugccuuggccug

SEQ ID NO: 496262 - RNA, 32 nt, Human
ucaggcucugcuucacuguccagccuuggaac

SEQ ID NO: 496263 - RNA, 32 nt, Human
ucaggcucuggccuccauccuccagggccacc

SEQ ID NO: 496264 - RNA, 32 nt, Human
ucaggcucuguggagggcauuugcugccccag

SEQ ID NO: 496265 - RNA, 32 nt, Human
ucaggcugaaaucuggcaucaucucagguucc

SEQ ID NO: 496266 - RNA, 32 nt, Human
ucaggcugacuucuucucaaucccagaaauau

SEQ ID NO: 496267 - RNA, 32 nt, Human
ucaggcugagccugacucugaagcuguuccca

SEQ ID NO: 496268 - RNA, 32 nt, Human
ucaggcugaggaaaguuucaacaggcacuugg

SEQ ID NO: 496269 - RNA, 32 nt, Human
ucaggcugaggcaggagaaucgcuugaacuga

SEQ ID NO: 496270 - RNA, 32 nt, Human
ucaggcugaggcaggagaauugcuugaaccug

SEQ ID NO: 496271 - RNA, 32 nt, Human
ucaggcugaggcaggagggucacuugacccag

SEQ ID NO: 496272 - RNA, 32 nt, Human
ucaggcugaucuggaacuucugaccucaggug

SEQ ID NO: 496273 - RNA, 32 nt, Human
ucaggcugccaggggaggaggagaagccagca

SEQ ID NO: 496274 - RNA, 32 nt, Human
ucaggcugcgugccuccgucugccugugugcu

SEQ ID NO: 496275 - RNA, 32 nt, Human
ucaggcugcuucugacaggcccaagucacagc

SEQ ID NO: 496276 - RNA, 32 nt, Human
ucaggcugcuucuguuuaaaauauaaaagaaa

SEQ ID NO: 496277 - RNA, 32 nt, Human
ucaggcuggaauagaguggacugaggaagaug

SEQ ID NO: 496278 - RNA, 32 nt, Human
ucaggcuggacaccccuccaccuggcggucca

SEQ ID NO: 496279 - RNA, 18 nt, Human
ucaggcuggagugcagug

SEQ ID NO: 496280 - RNA, 19 nt, Human
ucaggcuggagugcagugg

SEQ ID NO: 496281 - RNA, 32 nt, Human
ucaggcuggagugcaguggcacaaucacggcu

SEQ ID NO: 496282 - RNA, 32 nt, Human
ucaggcuggagugcaguggcacaaucuuagcu

SEQ ID NO: 496283 - RNA, 32 nt, Human
ucaggcuggagugcaguggcaugaucucggcu

SEQ ID NO: 496284 - RNA, 32 nt, Human
ucaggcuggagugcaguggcaugaucuuagcu

SEQ ID NO: 496285 - RNA, 32 nt, Human
ucaggcuggagugcaguggcgcgaucaugguu

SEQ ID NO: 496286 - RNA, 32 nt, Human
ucaggcuggagugcaguggcgcgaucuugguu

SEQ ID NO: 496287 - RNA, 32 nt, Human
ucaggcuggagugcaguggcucacugcaaccu

SEQ ID NO: 496288 - RNA, 32 nt, Human
ucaggcuggagugcagugguacgaucuuggcu

SEQ ID NO: 496289 - RNA, 32 nt, Human
ucaggcuggagugcagugguauaaucaugccu

SEQ ID NO: 496290 - RNA, 32 nt, Human
ucaggcuggagugcagugguauaaucucagcu

SEQ ID NO: 496291 - RNA, 32 nt, Human
ucaggcuggagugcaguggugugaucucaguu

SEQ ID NO: 496292 - RNA, 32 nt, Human
ucaggcuggagugcaguggugugaucucggcu

SEQ ID NO: 496293 - RNA, 19 nt, Human
ucaggcuggagugcggugg

SEQ ID NO: 496294 - RNA, 32 nt, Human
ucaggcuggagugcggugguauaaucucagcc

SEQ ID NO: 496295 - RNA, 32 nt, Human
ucaggcuggagugcgguggugugaucuuggcu

SEQ ID NO: 496296 - RNA, 32 nt, Human
ucaggcugggaaccugaacacacacuuguguu

SEQ ID NO: 496297 - RNA, 32 nt, Human
ucaggcugggaggauagcacaggcuaggggcu

SEQ ID NO: 496298 - RNA, 32 nt, Human
ucaggcugggcacgguggcucacagcuauaau

SEQ ID NO: 496299 - RNA, 32 nt, Human
ucaggcugggcagaggucacacagugaguaaa

SEQ ID NO: 496300 - RNA, 32 nt, Human
ucaggcugggcuguggugccagcauagauagg

SEQ ID NO: 496301 - RNA, 32 nt, Human
ucaggcuggggucugcagugcagcauuaaugg

SEQ ID NO: 496302 - RNA, 32 nt, Human
ucaggcuggguagauggagcucugcugacuuc

SEQ ID NO: 496303 - RNA, 18 nt, Human
ucaggcugggugcagugg

SEQ ID NO: 496304 - RNA, 32 nt, Human
ucaggcuggucuugaacuccugacguggugau

SEQ ID NO: 496305 - RNA, 32 nt, Human
ucaggcuggugaaggcggcaggaagcuggagc

SEQ ID NO: 496306 - RNA, 32 nt, Human
ucaggcuguauccuucuaccuccuggcccagg

SEQ ID NO: 496307 - RNA, 32 nt, Human
ucaggcugucaccgaggaaacuccuuugaugg

SEQ ID NO: 496308 - RNA, 31 nt, Human
ucaggcugucccugagggccuguguuuugag

SEQ ID NO: 496309 - RNA, 32 nt, Human
ucaggcuguuaccugcccccucaggcccuaag

SEQ ID NO: 496310 - RNA, 20 nt, Human
ucaggcuuaucauccuugca

SEQ ID NO: 496311 - RNA, 32 nt, Human
ucaggcuuaugaagguaagcaugccaugacca

SEQ ID NO: 496312 - RNA, 32 nt, Human
ucaggcuucagcuugguuuguuaaauugagag

SEQ ID NO: 496313 - RNA, 32 nt, Human
ucaggcuucccaacaccuccuucccaacaccu

SEQ ID NO: 496314 - RNA, 32 nt, Human
ucaggcuucccagacaccuccuucccaaacac

SEQ ID NO: 496315 - RNA, 32 nt, Human
ucaggcuugcagagaaauacucacaucugugc

SEQ ID NO: 496316 - RNA, 32 nt, Human
ucaggcuugccaagagguuggaagggaaaugg

SEQ ID NO: 496317 - RNA, 32 nt, Human
ucaggcuugcccaggaaaggggcugugcuguc

SEQ ID NO: 496318 - RNA, 32 nt, Human
ucaggcuugguggcucaugccuauaauccugg

SEQ ID NO: 496319 - RNA, 32 nt, Human
ucagggaacagaacagaucugcagggccagug

SEQ ID NO: 496320 - RNA, 32 nt, Human
ucagggaagagggagaguaagagggaagccuc

SEQ ID NO: 496321 - RNA, 32 nt, Human
ucagggaagcuggaccaccuggaguugauccu

SEQ ID NO: 496322 - RNA, 32 nt, Human
ucagggaaggcagaagggcaggcaagccggau

SEQ ID NO: 496323 - RNA, 32 nt, Human
ucagggaaucugcaaucuaugaaaauuacaug

SEQ ID NO: 496324 - RNA, 32 nt, Human
ucagggacacacaagcacuuucacaucgaggc

SEQ ID NO: 496325 - RNA, 32 nt, Human
ucagggacacacaaggacuuucacaucgaggc

SEQ ID NO: 496326 - RNA, 32 nt, Human
ucagggacacacacuugugcacaugugugcac

SEQ ID NO: 496327 - RNA, 32 nt, Human
ucagggacagaagggaagggacccacaggaag

SEQ ID NO: 496328 - RNA, 32 nt, Human
ucagggacagagccaugcugggaagacgccug

SEQ ID NO: 496329 - RNA, 32 nt, Human
ucagggacagggccaugggguagggugagaag

SEQ ID NO: 496330 - RNA, 32 nt, Human
ucagggacauggcacgggcaccugcucugucu

SEQ ID NO: 496331 - RNA, 32 nt, Human
ucagggaccccaaacggagggacuggcugaag

SEQ ID NO: 496332 - RNA, 32 nt, Human
ucagggaccucccugccccaacgucucccaag

SEQ ID NO: 496333 - RNA, 21 nt, Human
ucagggaccucgcccccuccc

SEQ ID NO: 496334 - RNA, 32 nt, Human
ucagggacucuccagccuacuccuuuucugaa

SEQ ID NO: 496335 - RNA, 32 nt, Human
ucagggagaagaaaggaggcagcgaagcagau

SEQ ID NO: 496336 - RNA, 32 nt, Human
ucagggagaauguggcauuugaggacucucuu

SEQ ID NO: 496337 - RNA, 18 nt, Human
ucagggagacaaguugua

SEQ ID NO: 496338 - RNA, 32 nt, Human
ucagggagagaagggcagacccauucucaaag

SEQ ID NO: 496339 - RNA, 32 nt, Human
ucagggagaggaagaaagagggaugggguggg

SEQ ID NO: 496340 - RNA, 32 nt, Human
ucagggagagggcuagagcucacacccagcuc

SEQ ID NO: 496341 - RNA, 32 nt, Human
ucagggagaggggacgccagacacacggccug

SEQ ID NO: 496342 - RNA, 32 nt, Human
ucagggagcacagggugcaggagcggcggcga

SEQ ID NO: 496343 - RNA, 32 nt, Human
ucagggagccaguagugagaaaccccacgaau

SEQ ID NO: 496344 - RNA, 32 nt, Human
ucagggagccgugcccuugaaagcgguguauu

SEQ ID NO: 496345 - RNA, 32 nt, Human
ucagggagccuuuucuggaggaggugagaccu

SEQ ID NO: 496346 - RNA, 32 nt, Human
ucagggagcugcagagagaacaagaccugaga

SEQ ID NO: 496347 - RNA, 32 nt, Human
ucagggagcuggcucccccagcaaaggcccuu

SEQ ID NO: 496348 - RNA, 32 nt, Human
ucagggaggauucugugugggguuggaaguaa

SEQ ID NO: 496349 - RNA, 32 nt, Human
ucagggaggcggagguuguggugagccgagau

SEQ ID NO: 496350 - RNA, 32 nt, Human
ucagggagggcaccacucccagaggaacagga

SEQ ID NO: 496351 - RNA, 32 nt, Human
ucagggagggcagaggguggcagcgagggcag

SEQ ID NO: 496352 - RNA, 32 nt, Human
ucagggagggccuggggugggggccaggggcc

SEQ ID NO: 496353 - RNA, 32 nt, Human
ucagggaggugauuucccaaaguaauugccca

SEQ ID NO: 496354 - RNA, 32 nt, Human
ucagggaguaaauaagcuaaagcaaaucacac

SEQ ID NO: 496355 - RNA, 32 nt, Human
ucagggagucugcucugccucccaggcgggau

SEQ ID NO: 496356 - RNA, 32 nt, Human
ucagggagugcuuccuggaggagcugauaccu

SEQ ID NO: 496357 - RNA, 32 nt, Human
ucagggaucacugcaaccucugccuccugggu

SEQ ID NO: 496358 - RNA, 32 nt, Human
ucagggaucaugagggagagugcguuggagcc

SEQ ID NO: 496359 - RNA, 21 nt, Human
ucagggaucuagaacuagaaa

SEQ ID NO: 496360 - RNA, 32 nt, Human
ucagggaucuauggcccuuggcccagccccac

SEQ ID NO: 496361 - RNA, 32 nt, Human
ucagggaucuuucuucccagcccuggagccug

SEQ ID NO: 496362 - RNA, 32 nt, Human
ucagggaugagguggcguugagcugggcggga

SEQ ID NO: 496363 - RNA, 32 nt, Human
ucagggaugcagauguaugagacuggauaacu

SEQ ID NO: 496364 - RNA, 32 nt, Human
ucagggauggagcugcugcugaagggacuugu

SEQ ID NO: 496365 - RNA, 32 nt, Human
ucagggauggcaugcaagaccaccgccaccac

SEQ ID NO: 496366 - RNA, 32 nt, Human
ucagggauggggagccucaugggugaaagagg

SEQ ID NO: 496367 - RNA, 32 nt, Human
ucagggaugguagcuauuuuucugccaugaga

SEQ ID NO: 496368 - RNA, 32 nt, Human
ucagggauguauaaaguacuuguguucugcug

SEQ ID NO: 496369 - RNA, 32 nt, Human
ucagggauuccugguccuuccuucccacacua

SEQ ID NO: 496370 - RNA, 32 nt, Human
ucagggauuggcagaggggaccaaggggacau

SEQ ID NO: 496371 - RNA, 32 nt, Human
ucagggcaaaaauaacagcccauguugaacuc

SEQ ID NO: 496372 - RNA, 32 nt, Human
ucagggcaaaggacagggaccugggagccgag

SEQ ID NO: 496373 - RNA, 32 nt, Human
ucagggcaacagcauuaagcacaucugugaau

SEQ ID NO: 496374 - RNA, 32 nt, Human
ucagggcacacuccagccugacuuuggcacuc

SEQ ID NO: 496375 - RNA, 32 nt, Human
ucagggcacaugcacacagacauuuaucucug

SEQ ID NO: 496376 - RNA, 32 nt, Human
ucagggcacgcaggaccaguuugauugaggag

SEQ ID NO: 496377 - RNA, 32 nt, Human
ucagggcacugcacuggaacacuggguguucc

SEQ ID NO: 496378 - RNA, 32 nt, Human
ucagggcagagcagguguuuaucugccccggc

SEQ ID NO: 496379 - RNA, 32 nt, Human
ucagggcagagggaggaaggacagcagaccag

SEQ ID NO: 496380 - RNA, 32 nt, Human
ucagggcaggcccugcucccccuaccuccuug

SEQ ID NO: 496381 - RNA, 32 nt, Human
ucagggcaggggucugugucuccaccccaagg

SEQ ID NO: 496382 - RNA, 32 nt, Human
ucagggcauggucucaucuccgcaucaggaau

SEQ ID NO: 496383 - RNA, 32 nt, Human
ucagggcauuagagagaaugagccuggugggu

SEQ ID NO: 496384 - RNA, 32 nt, Human
ucagggcauuucucccuccagccagggcccaa

SEQ ID NO: 496385 - RNA, 32 nt, Human
ucagggccaaccacagcuucccgagucauuca

SEQ ID NO: 496386 - RNA, 32 nt, Human
ucagggccacugcuccauugcucugggggcug

SEQ ID NO: 496387 - RNA, 32 nt, Human
ucagggccaguucuggugggcagcagagaccu

SEQ ID NO: 496388 - RNA, 32 nt, Human
ucagggcccagaauguccaggucuccaggguc

SEQ ID NO: 496389 - RNA, 32 nt, Human
ucagggcccagcaguguuccuccaucagcaug

SEQ ID NO: 496390 - RNA, 32 nt, Human
ucagggcccagggagcccccagaggacuuuau

SEQ ID NO: 496391 - RNA, 32 nt, Human
ucagggcccauuucaucucuggcagugccuug

SEQ ID NO: 496392 - RNA, 32 nt, Human
ucagggccugaguccccaugcccugcucuaug

SEQ ID NO: 496393 - RNA, 32 nt, Human
ucagggccugcucucugucaugugaugcuaua

SEQ ID NO: 496394 - RNA, 32 nt, Human
ucagggccuggaacaggcagaguggcccugag

SEQ ID NO: 496395 - RNA, 32 nt, Human
ucagggccuggaugcaggugccaagcucucca

SEQ ID NO: 496396 - RNA, 32 nt, Human
ucagggccuggcaggccagugucuggguuuuu

SEQ ID NO: 496397 - RNA, 32 nt, Human
ucagggccugggaaaagaagaugaggaaauug

SEQ ID NO: 496398 - RNA, 32 nt, Human
ucagggccugggcagccccaauuucuggccca

SEQ ID NO: 496399 - RNA, 32 nt, Human
ucagggccuucccucccugccugggugucggg

SEQ ID NO: 496400 - RNA, 32 nt, Human
ucagggccuugacaccacagagccaagcaaca

SEQ ID NO: 496401 - RNA, 32 nt, Human
ucagggccuuucuccuccccaccuguagcuga

SEQ ID NO: 496402 - RNA, 32 nt, Human
ucagggcgcaauggcggcgcugggcggggaug

SEQ ID NO: 496403 - RNA, 32 nt, Human
ucagggcgcacguguuuguucacauguccagc

SEQ ID NO: 496404 - RNA, 32 nt, Human
ucagggcgcaggagggaaugagcuguggauuu

SEQ ID NO: 496405 - RNA, 32 nt, Human
ucagggcgccucuccaguccacggucaugacc

SEQ ID NO: 496406 - RNA, 32 nt, Human
ucagggcgugcuucugccccagaagaccaaga

SEQ ID NO: 496407 - RNA, 32 nt, Human
ucagggcuagcacaucuuucucuauuauccuu

SEQ ID NO: 496408 - RNA, 31 nt, Human
ucagggcucaauaaggauuugcugaaugaau

SEQ ID NO: 496409 - RNA, 32 nt, Human
ucagggcucacugcagccucgaccuccugggc

SEQ ID NO: 496410 - RNA, 32 nt, Human
ucagggcucacugcagcuuugacuucccaggc

SEQ ID NO: 496411 - RNA, 32 nt, Human
ucagggcucacuguaaccuccgacuccugggu

SEQ ID NO: 496412 - RNA, 32 nt, Human
ucagggcuccacccuuugggccuguagcucuu

SEQ ID NO: 496413 - RNA, 32 nt, Human
ucagggcucccaggacccuggggaggaggcgg

SEQ ID NO: 496414 - RNA, 22 nt, Human
ucagggcuccucaucuuggccu

SEQ ID NO: 496415 - RNA, 32 nt, Human
ucagggcucuagacccgagcccuccaaaccug

SEQ ID NO: 496416 - RNA, 32 nt, Human
ucagggcugaggaggagaagcaggggcaggag

SEQ ID NO: 496417 - RNA, 32 nt, Human
ucagggcugagugcaugagucugcaccuccag

SEQ ID NO: 496418 - RNA, 24 nt, Human
ucagggcugcagugagguacgauc

SEQ ID NO: 496419 - RNA, 32 nt, Human
ucagggcugcauuuccagccagccuggaagua

SEQ ID NO: 496420 - RNA, 32 nt, Human
ucagggcugcugggggcaacuggccauuugcc

SEQ ID NO: 496421 - RNA, 32 nt, Human
ucagggcugggcagguccuggggaggcugaga

SEQ ID NO: 496422 - RNA, 32 nt, Human
ucagggcuguagccugacaaaggguuuccuaa

SEQ ID NO: 496423 - RNA, 22 nt, Human
ucagggcugucacaucuacauc

SEQ ID NO: 496424 - RNA, 32 nt, Human
ucaggggacagaaagagagcacuuucgacaca

SEQ ID NO: 496425 - RNA, 21 nt, Human
ucaggggacucagcccugagg

SEQ ID NO: 496426 - RNA, 22 nt, Human
ucaggggacuggauagauucuu

SEQ ID NO: 496427 - RNA, 31 nt, Human
ucaggggagagcuggaagaaagacugucaac

SEQ ID NO: 496428 - RNA, 22 nt, Human
ucaggggaggauucggucuucu

SEQ ID NO: 496429 - RNA, 32 nt, Human
ucaggggaggucagaggaucccacuuccugag

SEQ ID NO: 496430 - RNA, 22 nt, Human
ucaggggauuuccucuggcuca

SEQ ID NO: 496431 - RNA, 32 nt, Human
ucaggggcacuggccucucugcagggccuucc

SEQ ID NO: 496432 - RNA, 32 nt, Human
ucaggggcacuucaggcuccacaggcgucaug

SEQ ID NO: 496433 - RNA, 32 nt, Human
ucaggggcagcugggcgcaggagcuggugggc

SEQ ID NO: 496434 - RNA, 21 nt, Human
ucaggggcaucucucuggcuc

SEQ ID NO: 496435 - RNA, 32 nt, Human
ucaggggcccccagugaaaugcaggugagggu

SEQ ID NO: 496436 - RNA, 32 nt, Human
ucaggggccuggggcuccugggauuucugugu

SEQ ID NO: 496437 - RNA, 32 nt, Human
ucaggggccuuccucugcccacagagggaguu

SEQ ID NO: 496438 - RNA, 32 nt, Human
ucaggggcucagagcagaguuggaaacacagu

SEQ ID NO: 496439 - RNA, 32 nt, Human
ucaggggcugcacucagacucccuggccaagc

SEQ ID NO: 496440 - RNA, 20 nt, Human
ucaggggcugcccgcuccca

SEQ ID NO: 496441 - RNA, 32 nt, Human
ucaggggcugggaagugucccucuccagcccu

SEQ ID NO: 496442 - RNA, 32 nt, Human
ucaggggcuucacauggaggagcugcagauag

SEQ ID NO: 496443 - RNA, 32 nt, Human
ucaggggcuucugcagggugagcugcuucugu

SEQ ID NO: 496444 - RNA, 32 nt, Human
ucaggggcuucugcuuuugcauccuucucauu

SEQ ID NO: 496445 - RNA, 32 nt, Human
ucagggggauagcggguggugagggaaggggc

SEQ ID NO: 496446 - RNA, 32 nt, Human
ucagggggcaagagccuuucucuccagcuaca

SEQ ID NO: 496447 - RNA, 32 nt, Human
ucagggggccagaagcagcaacuguuuuucau

SEQ ID NO: 496448 - RNA, 32 nt, Human
ucagggggcugagcuggagacugagcuggggc

SEQ ID NO: 496449 - RNA, 32 nt, Human
ucagggggcugaggcaggagaauugcuugaac

SEQ ID NO: 496450 - RNA, 32 nt, Human
ucagggggcugagucaugggaaucacuugaac

SEQ ID NO: 496451 - RNA, 32 nt, Human
ucagggggucaguuaucaugucccugaaaggg

SEQ ID NO: 496452 - RNA, 32 nt, Human
ucaggggguguugccagguguggcuggggaag

SEQ ID NO: 496453 - RNA, 32 nt, Human
ucaggggguugaggcaggagaaucgcuucaac

SEQ ID NO: 496454 - RNA, 32 nt, Human
ucaggggucacugaggccugagacccaggacu

SEQ ID NO: 496455 - RNA, 25 nt, Human
ucagggguccaccuucucuggcuca

SEQ ID NO: 496456 - RNA, 32 nt, Human
ucagggguccagcucugcagggugggggcuag

SEQ ID NO: 496457 - RNA, 32 nt, Human
ucaggggucccagaaagggacagggaaauaaa

SEQ ID NO: 496458 - RNA, 21 nt, Human
ucaggggugagcucuggucca

SEQ ID NO: 496459 - RNA, 32 nt, Human
ucagggguuugagaccagccugggcaacaugg

SEQ ID NO: 496460 - RNA, 32 nt, Human
ucaggguaaccuucucccuugucaucucagcc

SEQ ID NO: 496461 - RNA, 32 nt, Human
ucaggguaaugugcuugguuugcacauguugu

SEQ ID NO: 496462 - RNA, 32 nt, Human
ucaggguagccaccgaacaugaugcucgggca

SEQ ID NO: 496463 - RNA, 32 nt, Human
ucaggguaguagaccugucagauuggagguca

SEQ ID NO: 496464 - RNA, 32 nt, Human
ucaggguauggggagggagggagccagugcuc

SEQ ID NO: 496465 - RNA, 32 nt, Human
ucagggucacccaagcaacaaagucccgagca

SEQ ID NO: 496466 - RNA, 31 nt, Human
ucagggucacucagcagguccuggaggauuu

SEQ ID NO: 496467 - RNA, 32 nt, Human
ucagggucagcccucagggugcuggggcccuu

SEQ ID NO: 496468 - RNA, 32 nt, Human
ucagggucaguguggcuaugccugggaauucc

SEQ ID NO: 496469 - RNA, 21 nt, Human
ucaggguccaggggccucuga

SEQ ID NO: 496470 - RNA, 32 nt, Human
ucaggguccugcaagcaguggggaagggggcc

SEQ ID NO: 496471 - RNA, 32 nt, Human
ucaggguccuucaccgucucuccagucucgga

SEQ ID NO: 496472 - RNA, 32 nt, Human
ucagggucuagaguggagagaaaucgguaaga

SEQ ID NO: 496473 - RNA, 32 nt, Human
ucagggucucagaaaguaggcaggggaggaga

SEQ ID NO: 496474 - RNA, 32 nt, Human
ucagggucucagggagccaguucaaggucugg

SEQ ID NO: 496475 - RNA, 32 nt, Human
ucagggucuccuccucaccccaccccaggccc

SEQ ID NO: 496476 - RNA, 32 nt, Human
ucagggucugcucuccucugaugguccaggcg

SEQ ID NO: 496477 - RNA, 32 nt, Human
ucagggucuucccauggugauucagaauagau

SEQ ID NO: 496478 - RNA, 32 nt, Human
ucagggugaaggacagaguccuggguggggca

SEQ ID NO: 496479 - RNA, 32 nt, Human
ucagggugaggcuggaggggacaggauggggu

SEQ ID NO: 496480 - RNA, 32 nt, Human
ucagggugccaaggaggcagggcugaacacca

SEQ ID NO: 496481 - RNA, 32 nt, Human
ucagggugggaggcacaagaucauuccuguug

SEQ ID NO: 496482 - RNA, 32 nt, Human
ucagggugggauuagggugaggcaagugaggc

SEQ ID NO: 496483 - RNA, 19 nt, Human
ucagggugggccugugcug

SEQ ID NO: 496484 - RNA, 32 nt, Human
ucaggguggggugggcaugggguggggguaug

SEQ ID NO: 496485 - RNA, 32 nt, Human
ucaggguggguacauuuaaaacugacaaguau

SEQ ID NO: 496486 - RNA, 31 nt, Human
ucaggguggguggcagggggauauagugagg

SEQ ID NO: 496487 - RNA, 32 nt, Human
ucaggguggguggcagggggauauagugaggg

SEQ ID NO: 496488 - RNA, 32 nt, Human
ucaggguggguugucugucugcauuugggagg

SEQ ID NO: 496489 - RNA, 32 nt, Human
ucaggguuagaaacagucuugcgagguaggcc

SEQ ID NO: 496490 - RNA, 32 nt, Human
ucaggguuauucaguccucugccucauggcug

SEQ ID NO: 496491 - RNA, 32 nt, Human
ucaggguucucagagccccuggcagauggagg

SEQ ID NO: 496492 - RNA, 32 nt, Human
ucaggguucucugaugccaaagggccuagacu

SEQ ID NO: 496493 - RNA, 32 nt, Human
ucaggguucucugguccaagacccugcuuuaa

SEQ ID NO: 496494 - RNA, 32 nt, Human
ucaggguucugucuugccuucauguggaccuu

SEQ ID NO: 496495 - RNA, 20 nt, Human
ucaggguuggcaaacauuuu

SEQ ID NO: 496496 - RNA, 32 nt, Human
ucaggguuucaggaguccagccccaggaggca

SEQ ID NO: 496497 - RNA, 32 nt, Human
ucaggguuugcaccuugagacauaaucuaccu

SEQ ID NO: 496498 - RNA, 23 nt, Human
ucaggguuuggauuagcagugga

SEQ ID NO: 496499 - RNA, 32 nt, Human
ucaggguuuguucccaccauugcccugagcug

SEQ ID NO: 496500 - RNA, 32 nt, Human
ucaggguuuucugugagccucucaccuuacag

SEQ ID NO: 496501 - RNA, 32 nt, Human
ucaggguuuuucuauucuggacaaugaauuug

SEQ ID NO: 496502 - RNA, 32 nt, Human
ucagguaacaggcagauacaggaaaagcugcu

SEQ ID NO: 496503 - RNA, 32 nt, Human
ucagguacagaaguauugauacaacuaagauc

SEQ ID NO: 496504 - RNA, 32 nt, Human
ucagguacagcagcugaggcugcccugaggaa

SEQ ID NO: 496505 - RNA, 32 nt, Human
ucagguaccagccuggccgggacccggcugug

SEQ ID NO: 496506 - RNA, 18 nt, Human
ucagguaccuggaguuua

SEQ ID NO: 496507 - RNA, 21 nt, Human
ucagguacggagaggauucuc

SEQ ID NO: 496508 - RNA, 32 nt, Human
ucagguacuagggggucuagaccugaggcugc

SEQ ID NO: 496509 - RNA, 32 nt, Human
ucagguacugcucuccccuuccaaccccauuu

SEQ ID NO: 496510 - RNA, 32 nt, Human
ucagguagaagaagaaaggugccacuccggca

SEQ ID NO: 496511 - RNA, 32 nt, Human
ucagguagauuucuuccacugauaacuugagu

SEQ ID NO: 496512 - RNA, 32 nt, Human
ucagguagccucucggcucucucugcuccgcu

SEQ ID NO: 496513 - RNA, 24 nt, Human
ucagguagcugagacuacaggcgu

SEQ ID NO: 496514 - RNA, 32 nt, Human
ucagguaggaggucagcacaagauaacggguc

SEQ ID NO: 496515 - RNA, 32 nt, Human
ucagguagggcugagacucucaggugaggaug

SEQ ID NO: 496516 - RNA, 20 nt, Human
ucagguauccuuaggaccuc

SEQ ID NO: 496517 - RNA, 32 nt, Human
ucagguaugccucaccaauuugcccgucuuua

SEQ ID NO: 496518 - RNA, 32 nt, Human
ucagguaugguggcucaugccuguaaucccag

SEQ ID NO: 496519 - RNA, 32 nt, Human
ucagguauucuuugagacacacaguaucauua

SEQ ID NO: 496520 - RNA, 21 nt, Human
ucagguauugguuagauucuc

SEQ ID NO: 496521 - RNA, 32 nt, Human
ucagguauuguacucgggaggcugagguggga

SEQ ID NO: 496522 - RNA, 32 nt, Human
ucaggucaacacugcacuccagccugggcgac

SEQ ID NO: 496523 - RNA, 32 nt, Human
ucaggucaaucagcaaggacccaucucugccc

SEQ ID NO: 496524 - RNA, 32 nt, Human
ucaggucacagcaugcagaagaacaguccaac

SEQ ID NO: 496525 - RNA, 32 nt, Human
ucaggucacauugcucacagggcacaguucuc

SEQ ID NO: 496526 - RNA, 32 nt, Human
ucaggucacugcaaccucugccucccagguuc

SEQ ID NO: 496527 - RNA, 32 nt, Human
ucaggucacugcacaaauauaucugcaauuau

SEQ ID NO: 496528 - RNA, 32 nt, Human
ucaggucacugugcggcccugcuccaaacucc

SEQ ID NO: 496529 - RNA, 32 nt, Human
ucaggucagaagacaugccuggagggaugucu

SEQ ID NO: 496530 - RNA, 32 nt, Human
ucaggucagcagcagaggcuccuggccuucuu

SEQ ID NO: 496531 - RNA, 32 nt, Human
ucaggucagcucaggcuggagcaggcauauga

SEQ ID NO: 496532 - RNA, 32 nt, Human
ucaggucagcucaggcuggagcagguauauga

SEQ ID NO: 496533 - RNA, 32 nt, Human
ucaggucaggagaggcagaguugagguucugc

SEQ ID NO: 496534 - RNA, 32 nt, Human
ucaggucaggagcuggaaguucaccugcaggu

SEQ ID NO: 496535 - RNA, 32 nt, Human
ucaggucaggaggcuggaguggagggaaggca

SEQ ID NO: 496536 - RNA, 32 nt, Human
ucaggucaggccagggcagugcugcugcagag

SEQ ID NO: 496537 - RNA, 32 nt, Human
ucaggucagggacuuggacaggagucaguguc

SEQ ID NO: 496538 - RNA, 32 nt, Human
ucaggucagggugggcuggaaaguggugccac

SEQ ID NO: 496539 - RNA, 32 nt, Human
ucagguccagccuucccuguagccagacaguu

SEQ ID NO: 496540 - RNA, 32 nt, Human
ucaggucccaacggggcugaguucuagcccag

SEQ ID NO: 496541 - RNA, 32 nt, Human
ucaggucccagagggccaccguguccauuaca

SEQ ID NO: 496542 - RNA, 32 nt, Human
ucaggucccauguugucccugcugccucccuc

SEQ ID NO: 496543 - RNA, 32 nt, Human
ucaggucccugcugccaagagucagauaggcc

SEQ ID NO: 496544 - RNA, 32 nt, Human
ucagguccugggacuaaggcggggacaugacu

SEQ ID NO: 496545 - RNA, 32 nt, Human
ucagguccugguggcaucucaggguccugccc

SEQ ID NO: 496546 - RNA, 32 nt, Human
ucagguccuguccuuaugggccugugucuggu

SEQ ID NO: 496547 - RNA, 32 nt, Human
ucagguccuuuuuggagggcaaaggaaguucc

SEQ ID NO: 496548 - RNA, 32 nt, Human
ucaggucgggaguucaagaccagccuggccaa

SEQ ID NO: 496549 - RNA, 32 nt, Human
ucaggucucagugucccuaucuguaagaucaa

SEQ ID NO: 496550 - RNA, 32 nt, Human
ucaggucucccaucucccucagugaccuggau

SEQ ID NO: 496551 - RNA, 32 nt, Human
ucaggucugaaacccacccacccgcaagccua

SEQ ID NO: 496552 - RNA, 32 nt, Human
ucaggucugaaaucuuuagcacuuaaggaaaa

SEQ ID NO: 496553 - RNA, 32 nt, Human
ucaggucugaagcagguuuggggccugcugac

SEQ ID NO: 496554 - RNA, 32 nt, Human
ucaggucugauaguccucugcuaaaacaacac

SEQ ID NO: 496555 - RNA, 32 nt, Human
ucaggucugggcugagaugugugcagagggcc

SEQ ID NO: 496556 - RNA, 32 nt, Human
ucaggucugguggcaggagggcagcagugugc

SEQ ID NO: 496557 - RNA, 23 nt, Human
ucaggucuuauucaagaauagua

SEQ ID NO: 496558 - RNA, 32 nt, Human
ucaggucuuauucaagaauaguaagucauauu

SEQ ID NO: 496559 - RNA, 32 nt, Human
ucaggucuuugaggccagcccuagccaacaug

SEQ ID NO: 496560 - RNA, 32 nt, Human
ucaggugaaagagaugcccuaaagaggacuga

SEQ ID NO: 496561 - RNA, 32 nt, Human
ucaggugaacagcucggagaagcugcagcugc

SEQ ID NO: 496562 - RNA, 32 nt, Human
ucaggugaaugggaccagucucucuucuucca

SEQ ID NO: 496563 - RNA, 23 nt, Human
ucaggugacaaccauuaugauca

SEQ ID NO: 496564 - RNA, 22 nt, Human
ucaggugaccagcuugugucuc

SEQ ID NO: 496565 - RNA, 32 nt, Human
ucaggugacggacucagacuccuggcuucaug

SEQ ID NO: 496566 - RNA, 32 nt, Human
ucaggugagaagcagaggaaggagaggagagg

SEQ ID NO: 496567 - RNA, 32 nt, Human
ucaggugagugcaggccaaggcgggggugaga

SEQ ID NO: 496568 - RNA, 32 nt, Human
ucaggugauauugcaauucuguauuuaaagcu

SEQ ID NO: 496569 - RNA, 32 nt, Human
ucaggugauccacccaccccagccucccaaag

SEQ ID NO: 496570 - RNA, 32 nt, Human
ucaggugauccacccaccucagccucucaaag

SEQ ID NO: 496571 - RNA, 32 nt, Human
ucaggugauccgcccgccucagccucugaaau

SEQ ID NO: 496572 - RNA, 32 nt, Human
ucaggugauccgccugccucagccucucaaag

SEQ ID NO: 496573 - RNA, 32 nt, Human
ucaggugauccgccugucucagccucuccaag

SEQ ID NO: 496574 - RNA, 32 nt, Human
ucaggugauccucccaucucagccucucgagu

SEQ ID NO: 496575 - RNA, 32 nt, Human
ucaggugauccuccugccucagccucuuaagu

SEQ ID NO: 496576 - RNA, 32 nt, Human
ucaggugaugaacaggcugaaaucaguacuuc

SEQ ID NO: 496577 - RNA, 32 nt, Human
ucaggugauucacccaccucagcuucccaaag

SEQ ID NO: 496578 - RNA, 32 nt, Human
ucaggugauucucuugccucagccucugaagu

SEQ ID NO: 496579 - RNA, 20 nt, Human
ucaggugauuuguaugcuca

SEQ ID NO: 496580 - RNA, 32 nt, Human
ucaggugcaacccagucugccuagcagccccc

SEQ ID NO: 496581 - RNA, 32 nt, Human
ucaggugcaagcauguguguucccggggcgcg

SEQ ID NO: 496582 - RNA, 21 nt, Human
ucaggugcacacaucaccagg

SEQ ID NO: 496583 - RNA, 32 nt, Human
ucaggugcacacaucaccaggugcaucugcag

SEQ ID NO: 496584 - RNA, 32 nt, Human
ucaggugcagcaggguccuccuugucugguuc

SEQ ID NO: 496585 - RNA, 32 nt, Human
ucaggugcagggaggaaauggaagcacguucu

SEQ ID NO: 496586 - RNA, 32 nt, Human
ucaggugcccccauugccucaggcuggcccug

SEQ ID NO: 496587 - RNA, 32 nt, Human
ucaggugccguggcucacaccuguaaucccag

SEQ ID NO: 496588 - RNA, 32 nt, Human
ucaggugccucugccauagcuucugucgccug

SEQ ID NO: 496589 - RNA, 32 nt, Human
ucaggugcugcagcuccaccucagagggcacu

SEQ ID NO: 496590 - RNA, 32 nt, Human
ucaggugcuucugugcuugcuguccuaccucu

SEQ ID NO: 496591 - RNA, 32 nt, Human
ucaggugcuuguucuguccucuugccuuuuac

SEQ ID NO: 496592 - RNA, 32 nt, Human
ucagguggcagaggugaaagaaaauaauguau

SEQ ID NO: 496593 - RNA, 18 nt, Human
ucagguggccaugccuca

SEQ ID NO: 496594 - RNA, 32 nt, Human
ucagguggcccaugccugggaucuucucuaug

SEQ ID NO: 496595 - RNA, 32 nt, Human
ucagguggccucagccuggcccaggggaccag

SEQ ID NO: 496596 - RNA, 32 nt, Human
ucagguggcuaaggcaggagaaucacuucagc

SEQ ID NO: 496597 - RNA, 32 nt, Human
ucagguggcugaggcaggagaaucacuugaac

SEQ ID NO: 496598 - RNA, 32 nt, Human
ucaggugggaggaagagagaccucagggaaaa

SEQ ID NO: 496599 - RNA, 32 nt, Human
ucaggugggaggauugcuugaggccagccugg

SEQ ID NO: 496600 - RNA, 32 nt, Human
ucaggugggaggauugcuugaggccaggaguu

SEQ ID NO: 496601 - RNA, 32 nt, Human
ucaggugggcugggaccuaggaagcuccaucu

SEQ ID NO: 496602 - RNA, 32 nt, Human
ucagguggggucucgcucugucaccuagacua

SEQ ID NO: 496603 - RNA, 32 nt, Human
ucagguggggucuuccucgguugcguaccugg

SEQ ID NO: 496604 - RNA, 32 nt, Human
ucaggugucuauaauuguagcacauggagaaa

SEQ ID NO: 496605 - RNA, 32 nt, Human
ucagguguggcggugcgugccuguaaucccag

SEQ ID NO: 496606 - RNA, 32 nt, Human
ucagguguggcugcugugggggcaggugccag

SEQ ID NO: 496607 - RNA, 29 nt, Human
ucagguguggcuucucucacaccuggcgc

SEQ ID NO: 496608 - RNA, 32 nt, Human
ucaggugugguggugcaugccuguaaucccag

SEQ ID NO: 496609 - RNA, 32 nt, Human
ucagguguucaaggaaacggucuacccuucuu

SEQ ID NO: 496610 - RNA, 32 nt, Human
ucagguguugggggaugggguguggaggcagc

SEQ ID NO: 496611 - RNA, 32 nt, Human
ucagguuaucaaaggcaaguagaguaauaaau

SEQ ID NO: 496612 - RNA, 32 nt, Human
ucagguucaagcaauucucaugcuucagccuc

SEQ ID NO: 496613 - RNA, 32 nt, Human
ucagguucaagcaauucuccugccucagccuc

SEQ ID NO: 496614 - RNA, 32 nt, Human
ucagguucaagcaauucuccugccuccgccuc

SEQ ID NO: 496615 - RNA, 32 nt, Human
ucagguucaagugauucuccugccucugccuc

SEQ ID NO: 496616 - RNA, 32 nt, Human
ucagguucauuuccauaguucccugcggccuc

SEQ ID NO: 496617 - RNA, 32 nt, Human
ucagguuccagagcuuggagguuccaggucca

SEQ ID NO: 496618 - RNA, 32 nt, Human
ucagguucccaagacuucaguccuggucugcu

SEQ ID NO: 496619 - RNA, 32 nt, Human
ucagguuccuagaccaccccagaugcaggggc

SEQ ID NO: 496620 - RNA, 31 nt, Human
ucagguucgcccucugggccagguccuucac

SEQ ID NO: 496621 - RNA, 32 nt, Human
ucagguucuagaacagugucauccaacauaaa

SEQ ID NO: 496622 - RNA, 32 nt, Human
ucagguucugccucugggaggcugugugcacc

SEQ ID NO: 496623 - RNA, 32 nt, Human
ucagguugaagacccugguucuuccaguuccu

SEQ ID NO: 496624 - RNA, 32 nt, Human
ucagguugacucuguacaucugaauagugagu

SEQ ID NO: 496625 - RNA, 32 nt, Human
ucagguuggaagggguguaggaagagggguga

SEQ ID NO: 496626 - RNA, 32 nt, Human
ucagguuggaguccuguccuuacucugcugca

SEQ ID NO: 496627 - RNA, 32 nt, Human
ucagguuggcaccucuggaggugcccaggcuu

SEQ ID NO: 496628 - RNA, 32 nt, Human
ucagguugucaugggggaaacugaggcacagg

SEQ ID NO: 496629 - RNA, 32 nt, Human
ucagguuuagagcccauguccacccaugucca

SEQ ID NO: 496630 - RNA, 32 nt, Human
ucagguuuccagagcugaggaguggugccuau

SEQ ID NO: 496631 - RNA, 32 nt, Human
ucagguuuccggcuacugacagugguagaguc

SEQ ID NO: 496632 - RNA, 32 nt, Human
ucagguuugcucccccucuacccuuuccccca

SEQ ID NO: 496633 - RNA, 32 nt, Human
ucagguuuuccuucuaggugcuguuccggugg

SEQ ID NO: 496634 - RNA, 32 nt, Human
ucagguuuuggaaaauggaagaagcacaaagg

SEQ ID NO: 496635 - RNA, 32 nt, Human
ucagguuuuuccuauugcaccaugaaguccuu

SEQ ID NO: 496636 - RNA, 32 nt, Human
ucaguaaacacauuaccaaauuuuaaauaagg

SEQ ID NO: 496637 - RNA, 32 nt, Human
ucaguaaaguacaaaguguuuauuuuacaaaa

SEQ ID NO: 496638 - RNA, 32 nt, Human
ucaguaaauuguuuguucuaagccacuuuuaa

SEQ ID NO: 496639 - RNA, 32 nt, Human
ucaguaacaccagcuuccugucagcugcaacc

SEQ ID NO: 496640 - RNA, 32 nt, Human
ucaguaacuauaccugguacauuuccugugug

SEQ ID NO: 496641 - RNA, 32 nt, Human
ucaguaacucacuguuucuaagccuccuggac

SEQ ID NO: 496642 - RNA, 32 nt, Human
ucaguaacugauuuaccuugaucacuuuucaa

SEQ ID NO: 496643 - RNA, 32 nt, Human
ucaguaacugcucccccuucuccauauaagca

SEQ ID NO: 496644 - RNA, 32 nt, Human
ucaguaagcucugcucaaagaagaggaucuau

SEQ ID NO: 496645 - RNA, 32 nt, Human
ucaguaaggagguagaguagauuugugaacag

SEQ ID NO: 496646 - RNA, 32 nt, Human
ucaguaauacgguuuccccugggguugaccag

SEQ ID NO: 496647 - RNA, 32 nt, Human
ucaguaauacugggugacucacuugagugacc

SEQ ID NO: 496648 - RNA, 32 nt, Human
ucaguaaucacuuuucagaagacuucuaugga

SEQ ID NO: 496649 - RNA, 32 nt, Human
ucaguaaucugaguuuuugauggccuuuuaaa

SEQ ID NO: 496650 - RNA, 32 nt, Human
ucaguaauguacugaaaucuuauaagugaaua

SEQ ID NO: 496651 - RNA, 18 nt, Human
ucaguaauguuaauucuu

SEQ ID NO: 496652 - RNA, 32 nt, Human
ucaguaauuccugcccagaagacuuuuauuua

SEQ ID NO: 496653 - RNA, 32 nt, Human
ucaguaauuucugcuuuuuagccagggccagu

SEQ ID NO: 496654 - RNA, 32 nt, Human
ucaguacaaagccacaauaggagcugacuuuc

SEQ ID NO: 496655 - RNA, 32 nt, Human
ucaguacacagaagagacggaugugagacacc

SEQ ID NO: 496656 - RNA, 32 nt, Human
ucaguacaucuauuuugugaacaucaguugga

SEQ ID NO: 496657 - RNA, 32 nt, Human
ucaguaccaaguagcuggagguggugaucaga

SEQ ID NO: 496658 - RNA, 32 nt, Human
ucaguaccaguucugccagccacagugagccc

SEQ ID NO: 496659 - RNA, 32 nt, Human
ucaguacccagggccucuucagcucuuuguag

SEQ ID NO: 496660 - RNA, 32 nt, Human
ucaguacccugccuucuugacugguuuccguu

SEQ ID NO: 496661 - RNA, 20 nt, Human
ucaguaccugaggggcugcu

SEQ ID NO: 496662 - RNA, 32 nt, Human
ucaguaccuucaccugucucagucucuagagc

SEQ ID NO: 496663 - RNA, 32 nt, Human
ucaguacuauacuguaaggagaagcugagaaa

SEQ ID NO: 496664 - RNA, 31 nt, Human
ucaguacucaauaaauauuugugggauguug

SEQ ID NO: 496665 - RNA, 32 nt, Human
ucaguacuggaggacacagucaaguguuuggu

SEQ ID NO: 496666 - RNA, 32 nt, Human
ucaguacugggaaagggugaggcugaggcugc

SEQ ID NO: 496667 - RNA, 32 nt, Human
ucaguacuucuggagccaaggugggaggauug

SEQ ID NO: 496668 - RNA, 32 nt, Human
ucaguacuugaccacaucccaggauuuauggu

SEQ ID NO: 496669 - RNA, 32 nt, Human
ucaguacuugacuccuuuuuauggccuuagga

SEQ ID NO: 496670 - RNA, 32 nt, Human
ucaguacuugccuccuugcuggcauugaauua

SEQ ID NO: 496671 - RNA, 32 nt, Human
ucaguacuugcuggaaaagaauauggauucug

SEQ ID NO: 496672 - RNA, 32 nt, Human
ucaguacuuggcugcuuuucugugaaaauuau

SEQ ID NO: 496673 - RNA, 32 nt, Human
ucaguacuuuguuuccccagguagaguggggg

SEQ ID NO: 496674 - RNA, 21 nt, Human
ucaguagaaacagcaguugua

SEQ ID NO: 496675 - RNA, 32 nt, Human
ucaguagaagagagaggaaaguagacuccauc

SEQ ID NO: 496676 - RNA, 32 nt, Human
ucaguagagacagggucucaccauguuagcca

SEQ ID NO: 496677 - RNA, 32 nt, Human
ucaguagagacaggguuucaccauguuggcca

SEQ ID NO: 496678 - RNA, 32 nt, Human
ucaguagagacaggguuucgccauguugccca

SEQ ID NO: 496679 - RNA, 32 nt, Human
ucaguagagacagguuucaccacauuggucag

SEQ ID NO: 496680 - RNA, 32 nt, Human
ucaguagagacggguuucaucaugguggccag

SEQ ID NO: 496681 - RNA, 32 nt, Human
ucaguagagauggguuucaccauguuggccag

SEQ ID NO: 496682 - RNA, 21 nt, Human
ucaguagagggaaccgacuug

SEQ ID NO: 496683 - RNA, 32 nt, Human
ucaguagauuucugggcuccuauauucacuag

SEQ ID NO: 496684 - RNA, 32 nt, Human
ucaguagcagaggacgauccuccgaugaaagc

SEQ ID NO: 496685 - RNA, 32 nt, Human
ucaguagcauuuuuagccaucucgaucacagc

SEQ ID NO: 496686 - RNA, 32 nt, Human
ucaguagccagccuggguccugccagggcuuc

SEQ ID NO: 496687 - RNA, 32 nt, Human
ucaguagccagcuuguccucacccucaggaag

SEQ ID NO: 496688 - RNA, 32 nt, Human
ucaguagcccuccuccuaccacugaaccccau

SEQ ID NO: 496689 - RNA, 32 nt, Human
ucaguagccuccaaccaugcaaugauucaaua

SEQ ID NO: 496690 - RNA, 32 nt, Human
ucaguagccugaguguuauacuagagaucuaa

SEQ ID NO: 496691 - RNA, 32 nt, Human
ucaguagcuuucuuacagcgucuuugaaagug

SEQ ID NO: 496692 - RNA, 32 nt, Human
ucaguaggaagagcugaggcugccugggaggc

SEQ ID NO: 496693 - RNA, 32 nt, Human
ucaguaggaaggggugaggcagcuguccugag

SEQ ID NO: 496694 - RNA, 32 nt, Human
ucaguaggagcagaaaaguuacuggggaguac

SEQ ID NO: 496695 - RNA, 32 nt, Human
ucaguaggagcuugucuucccugggcccccag

SEQ ID NO: 496696 - RNA, 32 nt, Human
ucaguaggcccaggagcaucaaaacgggaaca

SEQ ID NO: 496697 - RNA, 18 nt, Human
ucaguagggcaaaauguu

SEQ ID NO: 496698 - RNA, 32 nt, Human
ucaguagucacacccucacagcuggccugccc

SEQ ID NO: 496699 - RNA, 32 nt, Human
ucaguagucaucucuguaaaucugcaauuucu

SEQ ID NO: 496700 - RNA, 19 nt, Human
ucaguaguucuccuugcug

SEQ ID NO: 496701 - RNA, 30 nt, Human
ucaguaguuugcauuucagaaagccuuuca

SEQ ID NO: 496702 - RNA, 32 nt, Human
ucaguauagcugugcaccucugggcaaauagu

SEQ ID NO: 496703 - RNA, 32 nt, Human
ucaguaucaaaccaaagauuucuaucucuucc

SEQ ID NO: 496704 - RNA, 32 nt, Human
ucaguaucacucaacuucacuuuaugaaccaa

SEQ ID NO: 496705 - RNA, 32 nt, Human
ucaguaucccacaugggaguguucccuagguu

SEQ ID NO: 496706 - RNA, 32 nt, Human
ucaguaucccagauuguaauuuugccaagugu

SEQ ID NO: 496707 - RNA, 32 nt, Human
ucaguauccuccugucacaggagggaguuggg

SEQ ID NO: 496708 - RNA, 32 nt, Human
ucaguaucugcugcuuuugauguugcaagaca

SEQ ID NO: 496709 - RNA, 32 nt, Human
ucaguauuaaaaccagcuuaacuucuaugaca

SEQ ID NO: 496710 - RNA, 32 nt, Human
ucaguauucucaucugucauggcggccaagac

SEQ ID NO: 496711 - RNA, 32 nt, Human
ucaguauucuucccuuuguuucaucaaaggga

SEQ ID NO: 496712 - RNA, 31 nt, Human
ucaguauuuauguucuaucauuuaaaaagag

SEQ ID NO: 496713 - RNA, 32 nt, Human
ucaguauuuauuucugucucuggauuugacuu

SEQ ID NO: 496714 - RNA, 32 nt, Human
ucaguauuucaagcucuauuucuguggcacau

SEQ ID NO: 496715 - RNA, 32 nt, Human
ucaguauuucugcacucuuagcuggauucuaa

SEQ ID NO: 496716 - RNA, 32 nt, Human
ucaguauuuuucauuuaccauaugaaguuuag

SEQ ID NO: 496717 - RNA, 32 nt, Human
ucagucaaccagcaguggacuacagcucacua

SEQ ID NO: 496718 - RNA, 32 nt, Human
ucagucaacucaugccagcagccucagcgucu

SEQ ID NO: 496719 - RNA, 32 nt, Human
ucagucaacuuaaaucugaacuuuuucuuaaa

SEQ ID NO: 496720 - RNA, 32 nt, Human
ucagucaaggacaaaccucccaccucacagac

SEQ ID NO: 496721 - RNA, 32 nt, Human
ucagucacagagaggcaggagagagguucugu

SEQ ID NO: 496722 - RNA, 32 nt, Human
ucagucacaggcaaaggcuggguuuggcuggg

SEQ ID NO: 496723 - RNA, 32 nt, Human
ucagucacaggccugggcuuccuggccugagu

SEQ ID NO: 496724 - RNA, 20 nt, Human
ucagucacccaggcugaaaa

SEQ ID NO: 496725 - RNA, 32 nt, Human
ucagucacccuccagugugcauugacgaccag

SEQ ID NO: 496726 - RNA, 27 nt, Human
ucagucacccugacccagagggcugcc

SEQ ID NO: 496727 - RNA, 32 nt, Human
ucagucaccugucaggguuugugcggguuggg

SEQ ID NO: 496728 - RNA, 22 nt, Human
ucagucaccuuugggguugcca

SEQ ID NO: 496729 - RNA, 32 nt, Human
ucagucacucccuugaauggugcaaugaauua

SEQ ID NO: 496730 - RNA, 32 nt, Human
ucagucacugcacuggugcaaaggcaagcaga

SEQ ID NO: 496731 - RNA, 32 nt, Human
ucagucacugccugggcugugugguucugggc

SEQ ID NO: 496732 - RNA, 32 nt, Human
ucagucacuggggcggaggcagcggcuguagc

SEQ ID NO: 496733 - RNA, 32 nt, Human
ucagucagacagggagcugggcuaagauggcc

SEQ ID NO: 496734 - RNA, 22 nt, Human
ucagucagauucaacuauuuua

SEQ ID NO: 496735 - RNA, 21 nt, Human
ucagucagccacaccuuccug

SEQ ID NO: 496736 - RNA, 22 nt, Human
ucagucagccaguggcuucuug

SEQ ID NO: 496737 - RNA, 22 nt, Human
ucagucagcccaccuuguccug

SEQ ID NO: 496738 - RNA, 23 nt, Human
ucagucagcccagugggaucuua

SEQ ID NO: 496739 - RNA, 19 nt, Human
ucagucagcuauccuugca

SEQ ID NO: 496740 - RNA, 32 nt, Human
ucagucaguagaaccuacccacccucacggcc

SEQ ID NO: 496741 - RNA, 21 nt, Human
ucagucaguaugaacuuccug

SEQ ID NO: 496742 - RNA, 32 nt, Human
ucagucaucauuaaacuucucuggaccaaaaa

SEQ ID NO: 496743 - RNA, 32 nt, Human
ucagucaucucugcaagggacccugacgccug

SEQ ID NO: 496744 - RNA, 25 nt, Human
ucagucaucuucagggaccagucug

SEQ ID NO: 496745 - RNA, 31 nt, Human
ucagucaugaccaucuguaucuuguuaccug

SEQ ID NO: 496746 - RNA, 32 nt, Human
ucagucaugcugcaacaacugagacacugaga

SEQ ID NO: 496747 - RNA, 32 nt, Human
ucagucauggcggaagguaaagagguagcagc

SEQ ID NO: 496748 - RNA, 32 nt, Human
ucagucauguaaccccgggagggaccuucccu

SEQ ID NO: 496749 - RNA, 32 nt, Human
ucaguccaacauccuuuucuccaucagcaacu

SEQ ID NO: 496750 - RNA, 32 nt, Human
ucaguccaacuugcacgaagcucgcauugaaa

SEQ ID NO: 496751 - RNA, 32 nt, Human
ucaguccaagcuguggaaaagcuccccuuauc

SEQ ID NO: 496752 - RNA, 32 nt, Human
ucaguccacagcuguaugccccagucacacaa

SEQ ID NO: 496753 - RNA, 32 nt, Human
ucaguccacggaccugcugagcugcagccacu

SEQ ID NO: 496754 - RNA, 32 nt, Human
ucaguccacugcaaccucugcccucccggguu

SEQ ID NO: 496755 - RNA, 20 nt, Human
ucaguccaggcaggaagcag

SEQ ID NO: 496756 - RNA, 32 nt, Human
ucaguccaggcuggagagguuggggccggggu

SEQ ID NO: 496757 - RNA, 32 nt, Human
ucaguccagguggagguugguuuuguaguucu

SEQ ID NO: 496758 - RNA, 32 nt, Human
ucaguccauagagacgaacagaaugagaccuu

SEQ ID NO: 496759 - RNA, 32 nt, Human
ucaguccaugacaguuacuaaaggacauuuua

SEQ ID NO: 496760 - RNA, 32 nt, Human
ucagucccaaagagucaguauugggugguaac

SEQ ID NO: 496761 - RNA, 32 nt, Human
ucagucccaagugcccuuuuacagagaaugcc

SEQ ID NO: 496762 - RNA, 32 nt, Human
ucagucccagagggguggucaccccacccuuc

SEQ ID NO: 496763 - RNA, 32 nt, Human
ucagucccagaucuugcucugccuugggguuc

SEQ ID NO: 496764 - RNA, 32 nt, Human
ucagucccagcccuguagcugugugucuuggg

SEQ ID NO: 496765 - RNA, 32 nt, Human
ucaguccccaccuguacaacaacggaaaggug

SEQ ID NO: 496766 - RNA, 20 nt, Human
ucagucccccgcccccuccc

SEQ ID NO: 496767 - RNA, 32 nt, Human
ucagucccccuuccucccacucuccacccuac

SEQ ID NO: 496768 - RNA, 20 nt, Human
ucaguccccgugcugugcuu

SEQ ID NO: 496769 - RNA, 32 nt, Human
ucaguccccucagaccacggugaugccuugac

SEQ ID NO: 496770 - RNA, 22 nt, Human
ucaguccccucauauagguuua

SEQ ID NO: 496771 - RNA, 22 nt, Human
ucaguccccucucucuggguca

SEQ ID NO: 496772 - RNA, 32 nt, Human
ucagucccgcucuccuaccacacccaccuuuc

SEQ ID NO: 496773 - RNA, 22 nt, Human
ucagucccucccuccuggcuca

SEQ ID NO: 496774 - RNA, 32 nt, Human
ucagucccugccugcccugccuaggucuagcc

SEQ ID NO: 496775 - RNA, 22 nt, Human
ucagucccugcugggugacuca

SEQ ID NO: 496776 - RNA, 32 nt, Human
ucagucccuuccaagcugcacuggucauuggg

SEQ ID NO: 496777 - RNA, 32 nt, Human
ucagucccuuccucugcuguguuuuucuugag

SEQ ID NO: 496778 - RNA, 32 nt, Human
ucaguccgucugucuucucuuuccucugcccu

SEQ ID NO: 496779 - RNA, 32 nt, Human
ucaguccuagaaggucucugaagaucuggacu

SEQ ID NO: 496780 - RNA, 23 nt, Human
ucaguccucaggcccaaggcuca

SEQ ID NO: 496781 - RNA, 32 nt, Human
ucaguccuccccacccuccuuccucugucucc

SEQ ID NO: 496782 - RNA, 32 nt, Human
ucaguccucugguuaugaccucaaguccuacu

SEQ ID NO: 496783 - RNA, 19 nt, Human
ucaguccucuuggagucua

SEQ ID NO: 496784 - RNA, 32 nt, Human
ucaguccucuuucaaagguagccaucauggau

SEQ ID NO: 496785 - RNA, 32 nt, Human
ucaguccucuuucugugccuggcauaucuggu

SEQ ID NO: 496786 - RNA, 32 nt, Human
ucaguccugaaccacauuacuuuccugucuac

SEQ ID NO: 496787 - RNA, 32 nt, Human
ucaguccugaggaaaaauauuggggacuccaa

SEQ ID NO: 496788 - RNA, 32 nt, Human
ucaguccugccuggguccuggugccuuggacc

SEQ ID NO: 496789 - RNA, 32 nt, Human
ucaguccugggcaaagguauuaguacaauaag

SEQ ID NO: 496790 - RNA, 32 nt, Human
ucaguccugucugacugaccucagggccucac

SEQ ID NO: 496791 - RNA, 32 nt, Human
ucaguccugucugaucgaggccucgccucucu

SEQ ID NO: 496792 - RNA, 32 nt, Human
ucaguccugugcauccaggcuguuaggugacu

SEQ ID NO: 496793 - RNA, 32 nt, Human
ucaguccuuacggguaaacagauugagcaugg

SEQ ID NO: 496794 - RNA, 18 nt, Human
ucaguccuucguguaaca

SEQ ID NO: 496795 - RNA, 21 nt, Human
ucagucgaaaggggcuggggc

SEQ ID NO: 496796 - RNA, 32 nt, Human
ucagucgauuucaguucugauaauguuaagaa

SEQ ID NO: 496797 - RNA, 32 nt, Human
ucagucgcccaggcuggagugcaguggcauga

SEQ ID NO: 496798 - RNA, 32 nt, Human
ucagucgcucaggcuggagugcaguggcgcga

SEQ ID NO: 496799 - RNA, 32 nt, Human
ucagucgcuucuguuuagaggaaggcccccua

SEQ ID NO: 496800 - RNA, 32 nt, Human
ucagucggccugcgcuccucagccuggcgguu

SEQ ID NO: 496801 - RNA, 32 nt, Human
ucagucggggagaugagaggaggcaugaagcu

SEQ ID NO: 496802 - RNA, 32 nt, Human
ucagucgguaugcucuggcaucccauuucuuc

SEQ ID NO: 496803 - RNA, 32 nt, Human
ucagucgucauuuuuaaguccagugagcauug

SEQ ID NO: 496804 - RNA, 32 nt, Human
ucagucuaagcuguggaaaagcuccccuuauc

SEQ ID NO: 496805 - RNA, 32 nt, Human
ucagucuaggaagaaagagaaaguagcaggaa

SEQ ID NO: 496806 - RNA, 32 nt, Human
ucagucuaugcagcaaaagcacagagacuuaa

SEQ ID NO: 496807 - RNA, 32 nt, Human
ucagucuauguucuuuagguagcuagacacaa

SEQ ID NO: 496808 - RNA, 32 nt, Human
ucagucucaaaacaaaaacaaaaacaaacaaa

SEQ ID NO: 496809 - RNA, 32 nt, Human
ucagucucaaagcacaaggagguucagcccag

SEQ ID NO: 496810 - RNA, 32 nt, Human
ucagucucacgaccuacccccaccccggacug

SEQ ID NO: 496811 - RNA, 32 nt, Human
ucagucucaguuacuuagaauggaacccagag

SEQ ID NO: 496812 - RNA, 32 nt, Human
ucagucucaugcuccuggaauaccuucaauag

SEQ ID NO: 496813 - RNA, 32 nt, Human
ucagucuccacaacaggacgaagcuggcugag

SEQ ID NO: 496814 - RNA, 32 nt, Human
ucagucucccaaagcgcugggauuacaggcag

SEQ ID NO: 496815 - RNA, 32 nt, Human
ucagucucccaaagggcugggauuaaaggcau

SEQ ID NO: 496816 - RNA, 32 nt, Human
ucagucucccaaagugcugagauuacaggcau

SEQ ID NO: 496817 - RNA, 32 nt, Human
ucagucucccaaagugcugggauuacaggcau

SEQ ID NO: 496818 - RNA, 32 nt, Human
ucagucucccaaagugcugggauuacaggcgu

SEQ ID NO: 496819 - RNA, 32 nt, Human
ucagucucccaaagugcugggauuauaggcgu

SEQ ID NO: 496820 - RNA, 32 nt, Human
ucagucucccaaagugcugguauuacaggcgu

SEQ ID NO: 496821 - RNA, 32 nt, Human
ucagucucccaaauugccgggauuacaggcau

SEQ ID NO: 496822 - RNA, 32 nt, Human
ucagucucccaaguagcagggauuacaggcau

SEQ ID NO: 496823 - RNA, 32 nt, Human
ucagucucccaaguagcugggauuacaggugu

SEQ ID NO: 496824 - RNA, 32 nt, Human
ucagucucccaaguagcugggauuauaggcau

SEQ ID NO: 496825 - RNA, 32 nt, Human
ucagucucccaggacucugcugccucagccag

SEQ ID NO: 496826 - RNA, 32 nt, Human
ucagucucccagguagcugggauuacaggcau

SEQ ID NO: 496827 - RNA, 32 nt, Human
ucagucucccgaagugcugggauuacagaugu

SEQ ID NO: 496828 - RNA, 32 nt, Human
ucagucucccgaguagcugggauuacaggcac

SEQ ID NO: 496829 - RNA, 32 nt, Human
ucagucucccgaguagcugggauuacaggcgu

SEQ ID NO: 496830 - RNA, 32 nt, Human
ucagucucccgaguagcugggauuauaggcgc

SEQ ID NO: 496831 - RNA, 32 nt, Human
ucagucucccuaagugcugggauuacagacgu

SEQ ID NO: 496832 - RNA, 32 nt, Human
ucagucuccgaugccaucaugcagccugguua

SEQ ID NO: 496833 - RNA, 32 nt, Human
ucagucuccgguucagcuuccgacaccagagu

SEQ ID NO: 496834 - RNA, 32 nt, Human
ucagucuccugcucaaaacaggagcgcagcag

SEQ ID NO: 496835 - RNA, 22 nt, Human
ucagucuccugucccagcuuca

SEQ ID NO: 496836 - RNA, 32 nt, Human
ucagucucgagccucagucucccgucugggac

SEQ ID NO: 496837 - RNA, 32 nt, Human
ucagucucucaaagugcugggauuacaggcau

SEQ ID NO: 496838 - RNA, 32 nt, Human
ucagucucucaaagugcugggauuacaggugu

SEQ ID NO: 496839 - RNA, 20 nt, Human
ucagucucucccuggcucuc

SEQ ID NO: 496840 - RNA, 32 nt, Human
ucagucucucugccucugccugccuccugguc

SEQ ID NO: 496841 - RNA, 32 nt, Human
ucagucucucuuccgccuuccuucccuccuuu

SEQ ID NO: 496842 - RNA, 32 nt, Human
ucagucucugcaguuucucuaccugcccccag

SEQ ID NO: 496843 - RNA, 32 nt, Human
ucagucucuucuccuuccccugccugcaacag

SEQ ID NO: 496844 - RNA, 32 nt, Human
ucagucugccgaguagcugggauuacaggcau

SEQ ID NO: 496845 - RNA, 31 nt, Human
ucagucugccucuuuuucuuuguucccugag

SEQ ID NO: 496846 - RNA, 32 nt, Human
ucagucugccugcugcugugcgguagcuccag

SEQ ID NO: 496847 - RNA, 32 nt, Human
ucagucugggcaacacgaugaaaccccaucuc

SEQ ID NO: 496848 - RNA, 32 nt, Human
ucagucugggcaacacgaugaaacuccgucuc

SEQ ID NO: 496849 - RNA, 32 nt, Human
ucagucugggcaauauggugacaccccaucuc

SEQ ID NO: 496850 - RNA, 32 nt, Human
ucagucuggucuguuacuuuucugccuagagg

SEQ ID NO: 496851 - RNA, 32 nt, Human
ucagucugucaccaggcuggagugcaguggca

SEQ ID NO: 496852 - RNA, 32 nt, Human
ucagucuguggaaccuguugggaguuucuuca

SEQ ID NO: 496853 - RNA, 32 nt, Human
ucagucuguugagucuguugugacugucuuau

SEQ ID NO: 496854 - RNA, 32 nt, Human
ucagucuguuggacucuucaaaccagguucuu

SEQ ID NO: 496855 - RNA, 32 nt, Human
ucagucuguuggcagacuggagugcaaucaug

SEQ ID NO: 496856 - RNA, 32 nt, Human
ucagucuuaaaacccaaaggcucuuuucagag

SEQ ID NO: 496857 - RNA, 32 nt, Human
ucagucuuacacugcccuucugaccccuacaa

SEQ ID NO: 496858 - RNA, 32 nt, Human
ucagucuucccaacuucuuacaccauugcuuu

SEQ ID NO: 496859 - RNA, 32 nt, Human
ucagucuuccgaguagcugggauuacaggcgu

SEQ ID NO: 496860 - RNA, 32 nt, Human
ucagucuucggggaagagaggugggguggggc

SEQ ID NO: 496861 - RNA, 32 nt, Human
ucagucuucuagaaacagagacaagaaaggca

SEQ ID NO: 496862 - RNA, 32 nt, Human
ucagucuucuaggagggcagagugaaucccag

SEQ ID NO: 496863 - RNA, 32 nt, Human
ucagucuuguguccguuccugagaaggagcuc

SEQ ID NO: 496864 - RNA, 32 nt, Human
ucagucuuguugcccaggcuggagugcaaugg

SEQ ID NO: 496865 - RNA, 32 nt, Human
ucagucuuguuugaaggagguggugauggugg

SEQ ID NO: 496866 - RNA, 32 nt, Human
ucagucuuuucagauugcauugacuguccucu

SEQ ID NO: 496867 - RNA, 32 nt, Human
ucagucuuuuccaugaacuucuccccugguag

SEQ ID NO: 496868 - RNA, 32 nt, Human
ucagucuuuugcagguaucuaaccuugccaug

SEQ ID NO: 496869 - RNA, 32 nt, Human
ucagugaaaccucauaugacgcuuuuauagug

SEQ ID NO: 496870 - RNA, 32 nt, Human
ucagugaacuacucugagauuuacugucuuca

SEQ ID NO: 496871 - RNA, 32 nt, Human
ucagugaacuuggccugccuguucuguccuau

SEQ ID NO: 496872 - RNA, 32 nt, Human
ucagugaagauaugcgugcacgcacagacaga

SEQ ID NO: 496873 - RNA, 23 nt, Human
ucagugaaggugguggggcugcc

SEQ ID NO: 496874 - RNA, 32 nt, Human
ucagugaaugcacaggaucaacaggguuuguu

SEQ ID NO: 496875 - RNA, 32 nt, Human
ucagugacacccagagcagcgagagucauguu

SEQ ID NO: 496876 - RNA, 21 nt, Human
ucagugacccagcugucccca

SEQ ID NO: 496877 - RNA, 32 nt, Human
ucagugagaccagcuuaaaugaauaguuguua

SEQ ID NO: 496878 - RNA, 32 nt, Human
ucagugagagcaaaagcaucuucuguuagucu

SEQ ID NO: 496879 - RNA, 32 nt, Human
ucagugagagugcaaccccacccuccacagga

SEQ ID NO: 496880 - RNA, 32 nt, Human
ucagugagauacaauccagucuucucaugcac

SEQ ID NO: 496881 - RNA, 32 nt, Human
ucagugaggaagagagaagccgcaagaagaaa

SEQ ID NO: 496882 - RNA, 32 nt, Human
ucagugaggacagccuauguccagcuuugcug

SEQ ID NO: 496883 - RNA, 32 nt, Human
ucagugaggacuugucaguaaggacuuggucc

SEQ ID NO: 496884 - RNA, 32 nt, Human
ucagugaggcccauccuggcuauccucuuuca

SEQ ID NO: 496885 - RNA, 32 nt, Human
ucagugaggcugguugaagaccagagguaaac

SEQ ID NO: 496886 - RNA, 32 nt, Human
ucagugagguaggccagcuuuuaugacgcacc

SEQ ID NO: 496887 - RNA, 32 nt, Human
ucagugagguggggaaaggaagucuuccuguc

SEQ ID NO: 496888 - RNA, 32 nt, Human
ucagugaguagaaagguauccaaggugaagcc

SEQ ID NO: 496889 - RNA, 16 nt, Human
ucagugaguuguucga

SEQ ID NO: 496890 - RNA, 32 nt, Human
ucagugaugaggaggacaacacugccuuucaa

SEQ ID NO: 496891 - RNA, 32 nt, Human
ucagugauuccagguuuuaaauaauuuguaag

SEQ ID NO: 496892 - RNA, 32 nt, Human
ucagugauuuuucugccucggccuccugagua

SEQ ID NO: 496893 - RNA, 32 nt, Human
ucagugcaaguuccccagccaaaagagcaccu

SEQ ID NO: 496894 - RNA, 32 nt, Human
ucagugcacaugcacacaccccacacgcauac

SEQ ID NO: 496895 - RNA, 32 nt, Human
ucagugcaccaucaagagaugcagccccgugg

SEQ ID NO: 496896 - RNA, 32 nt, Human
ucagugcaguguccagacugcguauuucaguu

SEQ ID NO: 496897 - RNA, 32 nt, Human
ucagugccaccuggacacuacccuuggagcau

SEQ ID NO: 496898 - RNA, 32 nt, Human
ucagugccagacuugaacauuuuaucccuaau

SEQ ID NO: 496899 - RNA, 32 nt, Human
ucagugccagugccugugccagagguggcgag

SEQ ID NO: 496900 - RNA, 32 nt, Human
ucagugccauguccacaguaucugccauacuc

SEQ ID NO: 496901 - RNA, 22 nt, Human
ucagugcccagcagccaucuua

SEQ ID NO: 496902 - RNA, 32 nt, Human
ucagugcccaggaagaaggcagcugggacagg

SEQ ID NO: 496903 - RNA, 32 nt, Human
ucagugcccaggccccacacagucuucaaagg

SEQ ID NO: 496904 - RNA, 32 nt, Human
ucagugcccauguuugcuagcugccuccaugu

SEQ ID NO: 496905 - RNA, 32 nt, Human
ucagugccccaggaagaggaaguggcaggguc

SEQ ID NO: 496906 - RNA, 32 nt, Human
ucagugccgaggaggaggaagaaaaacaggcc

SEQ ID NO: 496907 - RNA, 25 nt, Human
ucagugccucugaguaggugccaug

SEQ ID NO: 496908 - RNA, 32 nt, Human
ucagugccugcacuucacauccagcaaauuaa

SEQ ID NO: 496909 - RNA, 32 nt, Human
ucagugccugggaaugcucaaggcccagcuug

SEQ ID NO: 496910 - RNA, 32 nt, Human
ucagugccuuucugcaccccuucucuccuggg

SEQ ID NO: 496911 - RNA, 32 nt, Human
ucagugcgcugcucuccagcccgcuugaacgc

SEQ ID NO: 496912 - RNA, 32 nt, Human
ucagugcgggguuucgguggccgcccugcugg

SEQ ID NO: 496913 - RNA, 32 nt, Human
ucagugcucccuuccucuccucuccuucuagu

SEQ ID NO: 496914 - RNA, 32 nt, Human
ucagugcuccucaaacauuaaaguguacaucc

SEQ ID NO: 496915 - RNA, 32 nt, Human
ucagugcucucagcuggcagugcaaugcuugu

SEQ ID NO: 496916 - RNA, 32 nt, Human
ucagugcugaugugccucaaggcacaugagug

SEQ ID NO: 496917 - RNA, 32 nt, Human
ucagugcuguaguucaaccaccaaucccccug

SEQ ID NO: 496918 - RNA, 32 nt, Human
ucagugcuguccugggaguccucugacucaga

SEQ ID NO: 496919 - RNA, 32 nt, Human
ucagugcuguuugcuugcauguuaacaacaaa

SEQ ID NO: 496920 - RNA, 32 nt, Human
ucagugcuucccuggaaagguggacccccaga

SEQ ID NO: 496921 - RNA, 32 nt, Human
ucagugcuuuccagucucagcaugguuuggag

SEQ ID NO: 496922 - RNA, 32 nt, Human
ucaguggaaguuaagaggggugagaaaacaaa

SEQ ID NO: 496923 - RNA, 32 nt, Human
ucaguggacacauugcugccaggaagagcugc

SEQ ID NO: 496924 - RNA, 32 nt, Human
ucaguggacagaaauacgccuguuccacuugu

SEQ ID NO: 496925 - RNA, 32 nt, Human
ucaguggaccaaaucucuacccuuccccaacc

SEQ ID NO: 496926 - RNA, 32 nt, Human
ucaguggacugaauuguauggaaggaaauuga

SEQ ID NO: 496927 - RNA, 32 nt, Human
ucaguggagagggagaaccgcugcuagucgac

SEQ ID NO: 496928 - RNA, 32 nt, Human
ucaguggagcuuggugggggaggugggcgcag

SEQ ID NO: 496929 - RNA, 32 nt, Human
ucaguggagugaaguucaggaggcauggagcu

SEQ ID NO: 496930 - RNA, 32 nt, Human
ucaguggagugagcugaccgaggcagagcgac

SEQ ID NO: 496931 - RNA, 32 nt, Human
ucaguggaucuggucugaguuucaaucugcca

SEQ ID NO: 496932 - RNA, 32 nt, Human
ucaguggcaaaguuucuugcccuugaaaucca

SEQ ID NO: 496933 - RNA, 32 nt, Human
ucaguggcagacaguugugugauugacaucac

SEQ ID NO: 496934 - RNA, 32 nt, Human
ucaguggcagagccaccagggacaagugaggc

SEQ ID NO: 496935 - RNA, 32 nt, Human
ucaguggcaggaucucagcucacugcaaccuc

SEQ ID NO: 496936 - RNA, 32 nt, Human
ucaguggccacugagcaucugggcagcucugu

SEQ ID NO: 496937 - RNA, 32 nt, Human
ucaguggccagaggaucaccagugcauccuuc

SEQ ID NO: 496938 - RNA, 32 nt, Human
ucaguggccuagucaugcuuucuacucauguc

SEQ ID NO: 496939 - RNA, 32 nt, Human
ucaguggcgauggcaugacagagcuagagcuc

SEQ ID NO: 496940 - RNA, 32 nt, Human
ucaguggcgcgaucucagcucacuacaagcuc

SEQ ID NO: 496941 - RNA, 32 nt, Human
ucaguggcucaugccuguaaucccagcauuuu

SEQ ID NO: 496942 - RNA, 32 nt, Human
ucaguggcugugucuacacaaggcucaccacu

SEQ ID NO: 496943 - RNA, 32 nt, Human
ucagugggaacugggaauguuuuuagcuggug

SEQ ID NO: 496944 - RNA, 32 nt, Human
ucagugggaagguguaaggaggggcuugcuaa

SEQ ID NO: 496945 - RNA, 32 nt, Human
ucagugggacccauucagaguuuacagaugcu

SEQ ID NO: 496946 - RNA, 19 nt, Human
ucagugggacuggagccua

SEQ ID NO: 496947 - RNA, 32 nt, Human
ucagugggagcgggacagggacacagggcacc

SEQ ID NO: 496948 - RNA, 32 nt, Human
ucagugggcagcagggacagggggcugugaag

SEQ ID NO: 496949 - RNA, 32 nt, Human
ucagugggcccaaacccuugaaauccgugaaa

SEQ ID NO: 496950 - RNA, 32 nt, Human
ucagugggccgcagccccagacccccugcgca

SEQ ID NO: 496951 - RNA, 32 nt, Human
ucagugggccugggacaguggcugcucuugac

SEQ ID NO: 496952 - RNA, 32 nt, Human
ucaguggggaaaguuggggagguggagaacca

SEQ ID NO: 496953 - RNA, 32 nt, Human
ucaguggggaccccucgcaacccugccuguca

SEQ ID NO: 496954 - RNA, 32 nt, Human
ucaguggggagcuguagcggggugggggcuag

SEQ ID NO: 496955 - RNA, 32 nt, Human
ucagugggggagggcaccucagcaaccucuga

SEQ ID NO: 496956 - RNA, 22 nt, Human
ucagugggggcaaggggcucuu

SEQ ID NO: 496957 - RNA, 32 nt, Human
ucagugggggcagucaggccaaacuucucauu

SEQ ID NO: 496958 - RNA, 32 nt, Human
ucagugggucugucacccucucuccuugaagc

SEQ ID NO: 496959 - RNA, 32 nt, Human
ucaguggguggagugccagggaggaggaggca

SEQ ID NO: 496960 - RNA, 32 nt, Human
ucagugggugggcagagguuuagaaagguggu

SEQ ID NO: 496961 - RNA, 32 nt, Human
ucagugguauucuauuauagcagcaugaaaug

SEQ ID NO: 496962 - RNA, 32 nt, Human
ucaguggucauggcuguugucuugccaccccc

SEQ ID NO: 496963 - RNA, 32 nt, Human
ucaguggucuucauccugacacagugguuuga

SEQ ID NO: 496964 - RNA, 32 nt, Human
ucaguggugacgguggcugagagcuccuggau

SEQ ID NO: 496965 - RNA, 32 nt, Human
ucaguggugcaaacacagcucucuccacaacc

SEQ ID NO: 496966 - RNA, 32 nt, Human
ucaguggugcuucuagacgagcuguucaccgg

SEQ ID NO: 496967 - RNA, 32 nt, Human
ucagugguuaccauuuguuugcaggaaaaaga

SEQ ID NO: 496968 - RNA, 32 nt, Human
ucagugguuuguuccuucuuauuucugaagag

SEQ ID NO: 496969 - RNA, 32 nt, Human
ucaguguaaagcagucauuagaauugauuaua

SEQ ID NO: 496970 - RNA, 23 nt, Human
ucaguguaagguacugagccaag

SEQ ID NO: 496971 - RNA, 32 nt, Human
ucaguguacgaggcagacggcggcagugcggc

SEQ ID NO: 496972 - RNA, 19 nt, Human
ucaguguaucacuggaguc

SEQ ID NO: 496973 - RNA, 32 nt, Human
ucaguguauuagauguauuaccuccaugcucu

SEQ ID NO: 496974 - RNA, 32 nt, Human
ucagugucaagaaucaacaguuccauggagcc

SEQ ID NO: 496975 - RNA, 32 nt, Human
ucagugucacccggaagcagaguuuaauguga

SEQ ID NO: 496976 - RNA, 32 nt, Human
ucaguguccuaacuggagcccagagugccuug

SEQ ID NO: 496977 - RNA, 32 nt, Human
ucaguguccucuucaacuugcucucuuuccca

SEQ ID NO: 496978 - RNA, 22 nt, Human
ucaguguccugaggaacaggac

SEQ ID NO: 496979 - RNA, 32 nt, Human
ucaguguccuuacccccuccuaccucuuuucu

SEQ ID NO: 496980 - RNA, 32 nt, Human
ucagugucuacaaauaaagugcauuagcacac

SEQ ID NO: 496981 - RNA, 32 nt, Human
ucagugucuggaguccuuggugcagaaaguac

SEQ ID NO: 496982 - RNA, 32 nt, Human
ucagugucuguggccacaauccuguacuguuc

SEQ ID NO: 496983 - RNA, 32 nt, Human
ucagugucuuccucuuaaaccucaaucaucga

SEQ ID NO: 496984 - RNA, 32 nt, Human
ucagugucuucuuuuucuacugcaagcacaug

SEQ ID NO: 496985 - RNA, 32 nt, Human
ucagugugaacuguucuauuuuuguguuauaa

SEQ ID NO: 496986 - RNA, 32 nt, Human
ucagugugaccaggaugggcgggaggggaucu

SEQ ID NO: 496987 - RNA, 32 nt, Human
ucagugugagccagauggagcaggaacaugua

SEQ ID NO: 496988 - RNA, 32 nt, Human
ucagugugagccuuaaauuagggagggccaaa

SEQ ID NO: 496989 - RNA, 32 nt, Human
ucagugugaggagagccaggaggcaggugcug

SEQ ID NO: 496990 - RNA, 32 nt, Human
ucagugugauuuuugucuucugcuccuucuac

SEQ ID NO: 496991 - RNA, 32 nt, Human
ucagugugcagcaaauuuguucuuuugguuuc

SEQ ID NO: 496992 - RNA, 32 nt, Human
ucagugugccccuaccuguucuccccuccagg

SEQ ID NO: 496993 - RNA, 32 nt, Human
ucagugugcccuucucuuaucugccaugucca

SEQ ID NO: 496994 - RNA, 32 nt, Human
ucagugugcgaaauggcuugcaggggacagga

SEQ ID NO: 496995 - RNA, 32 nt, Human
ucagugugcuuugggaauucagugaaaucaug

SEQ ID NO: 496996 - RNA, 32 nt, Human
ucaguguggcugcuuuggcuuggugaagcccu

SEQ ID NO: 496997 - RNA, 32 nt, Human
ucaguguggcuucuggaagugucuccuauccu

SEQ ID NO: 496998 - RNA, 32 nt, Human
ucagugugggagaacugaagacuuccgguugg

SEQ ID NO: 496999 - RNA, 32 nt, Human
ucaguguggggugggagcaggaaggcuguugg

SEQ ID NO: 497000 - RNA, 32 nt, Human
ucaguguguaaauaaagcucuuuugccacccc

SEQ ID NO: 497001 - RNA, 19 nt, Human
ucaguguguaggugccaug

SEQ ID NO: 497002 - RNA, 32 nt, Human
ucaguguguuguuccccucuauguauccauau

SEQ ID NO: 497003 - RNA, 32 nt, Human
ucaguguuacuuugcuuaauacuuagguagcc

SEQ ID NO: 497004 - RNA, 32 nt, Human
ucaguguuccaggacuggguguucugcugguc

SEQ ID NO: 497005 - RNA, 32 nt, Human
ucaguguucccaggaccuuagugcauggucgg

SEQ ID NO: 497006 - RNA, 32 nt, Human
ucaguguuccugucccaaaccccacacagaau

SEQ ID NO: 497007 - RNA, 32 nt, Human
ucaguguucucuuaacagauaaccggagugau

SEQ ID NO: 497008 - RNA, 32 nt, Human
ucaguguucugccucuggcagcugugcuaaca

SEQ ID NO: 497009 - RNA, 32 nt, Human
ucaguguuguguccauggaguuuuaggagggg

SEQ ID NO: 497010 - RNA, 32 nt, Human
ucaguguuuaugguuuuauacucugaauucua

SEQ ID NO: 497011 - RNA, 32 nt, Human
ucaguguuucacguaagacuuuuugguuugau

SEQ ID NO: 497012 - RNA, 32 nt, Human
ucaguguuugugaagaggcaggacuggccaga

SEQ ID NO: 497013 - RNA, 32 nt, Human
ucaguguuuucugcaaggguugugaccugaaa

SEQ ID NO: 497014 - RNA, 21 nt, Human
ucaguuaaaguuagguugcca

SEQ ID NO: 497015 - RNA, 32 nt, Human
ucaguuaagaucaaaccucacaaagagaaaua

SEQ ID NO: 497016 - RNA, 32 nt, Human
ucaguuaagugugcacuaagccuggaccacau

SEQ ID NO: 497017 - RNA, 32 nt, Human
ucaguuaaucuaggauuguauauugccaaggu

SEQ ID NO: 497018 - RNA, 32 nt, Human
ucaguuaaugcaacuucaaccuuccagaugcu

SEQ ID NO: 497019 - RNA, 32 nt, Human
ucaguuaaugucuuaaucauguauuuaggguu

SEQ ID NO: 497020 - RNA, 32 nt, Human
ucaguuaauuuaaagugguuauucuuggaagu

SEQ ID NO: 497021 - RNA, 19 nt, Human
ucaguuacaaaaaguugua

SEQ ID NO: 497022 - RNA, 32 nt, Human
ucaguuacagcaaucauucaaucugaacaggg

SEQ ID NO: 497023 - RNA, 23 nt, Human
ucaguuagcucagaagccaccug

SEQ ID NO: 497024 - RNA, 32 nt, Human
ucaguuaggaucauagacuuucccugacucgu

SEQ ID NO: 497025 - RNA, 20 nt, Human
ucaguuaguccaggaccacu

SEQ ID NO: 497026 - RNA, 17 nt, Human
ucaguuauaaaggaguu

SEQ ID NO: 497027 - RNA, 18 nt, Human
ucaguuauaaggagucug

SEQ ID NO: 497028 - RNA, 17 nt, Human
ucaguuauauauuccuu

SEQ ID NO: 497029 - RNA, 24 nt, Human
ucaguuauauuuugguggagucug

SEQ ID NO: 497030 - RNA, 17 nt, Human
ucaguuaucugcagucu

SEQ ID NO: 497031 - RNA, 17 nt, Human
ucaguuauggccaucua

SEQ ID NO: 497032 - RNA, 32 nt, Human
ucaguuauguauauuuguuuuccuuguuuuuc

SEQ ID NO: 497033 - RNA, 32 nt, Human
ucaguuauugcuguuuucuuccuuccuuggau

SEQ ID NO: 497034 - RNA, 19 nt, Human
ucaguuauuggugagucua

SEQ ID NO: 497035 - RNA, 19 nt, Human
ucaguuauugugaagucug

SEQ ID NO: 497036 - RNA, 32 nt, Human
ucaguuauuuugaagguccagcauccugauua

SEQ ID NO: 497037 - RNA, 19 nt, Human
ucaguuauuuugagagucu

SEQ ID NO: 497038 - RNA, 21 nt, Human
ucaguuauuuuuaaugugcca

SEQ ID NO: 497039 - RNA, 19 nt, Human
ucaguuauuuuugaagcua

SEQ ID NO: 497040 - RNA, 32 nt, Human
ucaguucaacacagcaagugcuucacuuccaa

SEQ ID NO: 497041 - RNA, 32 nt, Human
ucaguucaauccaacauccuuauauugcaaug

SEQ ID NO: 497042 - RNA, 32 nt, Human
ucaguucacgcauuccucccaccuccaccucc

SEQ ID NO: 497043 - RNA, 32 nt, Human
ucaguucacugcaaccuccacccugcagguuc

SEQ ID NO: 497044 - RNA, 32 nt, Human
ucaguucacugcaaccuccaccucccagguuc

SEQ ID NO: 497045 - RNA, 32 nt, Human
ucaguucacugcaaccuccacuuccuagguuc

SEQ ID NO: 497046 - RNA, 32 nt, Human
ucaguucacugcaaccucugccucccacguuc

SEQ ID NO: 497047 - RNA, 32 nt, Human
ucaguucacugcaaccucugccucccggguuc

SEQ ID NO: 497048 - RNA, 32 nt, Human
ucaguucacugcaaccucugccuccuggguuc

SEQ ID NO: 497049 - RNA, 32 nt, Human
ucaguucacugcaacuucugccucccgaguuc

SEQ ID NO: 497050 - RNA, 32 nt, Human
ucaguucacugcaagcuccgccuccucguuuc

SEQ ID NO: 497051 - RNA, 32 nt, Human
ucaguucacugcagccuccgcccuccagguuc

SEQ ID NO: 497052 - RNA, 32 nt, Human
ucaguucacugcagccucgaccucccaggcuc

SEQ ID NO: 497053 - RNA, 32 nt, Human
ucaguucagaacacuuugggccacauagugau

SEQ ID NO: 497054 - RNA, 32 nt, Human
ucaguucagaguuguacacuguguacauuugg

SEQ ID NO: 497055 - RNA, 32 nt, Human
ucaguucagcuuuggagaauggggugugagug

SEQ ID NO: 497056 - RNA, 32 nt, Human
ucaguucaggcagcucugcuggagggcggugc

SEQ ID NO: 497057 - RNA, 31 nt, Human
ucaguucaguuucagcggugccaaccucuuu

SEQ ID NO: 497058 - RNA, 32 nt, Human
ucaguucauaugcagaacguauuuagccauua

SEQ ID NO: 497059 - RNA, 32 nt, Human
ucaguucaugcaaccuccgccuccuggguuca

SEQ ID NO: 497060 - RNA, 32 nt, Human
ucaguuccagaacuuaccucagugcacuuggg

SEQ ID NO: 497061 - RNA, 32 nt, Human
ucaguuccagccuucucucaaggagaggcaaa

SEQ ID NO: 497062 - RNA, 21 nt, Human
ucaguucccuaaucugugaaa

SEQ ID NO: 497063 - RNA, 32 nt, Human
ucaguucccugggaguuuuuguggcagccuuu

SEQ ID NO: 497064 - RNA, 32 nt, Human
ucaguuccuagccuggaucccaaaaagguaca

SEQ ID NO: 497065 - RNA, 32 nt, Human
ucaguuccucaccccucucccugcuuucuuug

SEQ ID NO: 497066 - RNA, 32 nt, Human
ucaguuccugcuucuggucuucuccugggcuc

SEQ ID NO: 497067 - RNA, 32 nt, Human
ucaguuccuggagcuuacggagcuccaaagcu

SEQ ID NO: 497068 - RNA, 32 nt, Human
ucaguuccuguuucuucccauuuccuggcaca

SEQ ID NO: 497069 - RNA, 32 nt, Human
ucaguuccuuggagagggcagggacuccgccc

SEQ ID NO: 497070 - RNA, 32 nt, Human
ucaguucgcucugugaugucaagugcagaaug

SEQ ID NO: 497071 - RNA, 24 nt, Human
ucaguucucucagccccagguuca

SEQ ID NO: 497072 - RNA, 32 nt, Human
ucaguucucucccugccacuuccagggaucug

SEQ ID NO: 497073 - RNA, 32 nt, Human
ucaguucucucccuuccucucuccuuauagac

SEQ ID NO: 497074 - RNA, 32 nt, Human
ucaguucugcugcugucuuuacugcucucaac

SEQ ID NO: 497075 - RNA, 32 nt, Human
ucaguucuggcacaucccaacccuucacauuu

SEQ ID NO: 497076 - RNA, 25 nt, Human
ucaguucugugucguguucggguuu

SEQ ID NO: 497077 - RNA, 32 nt, Human
ucaguugaaacgagguuucaccauauuggcca

SEQ ID NO: 497078 - RNA, 32 nt, Human
ucaguugaacccaggagguggagguugcagug

SEQ ID NO: 497079 - RNA, 32 nt, Human
ucaguugagcccaggaguucaagaccagccug

SEQ ID NO: 497080 - RNA, 32 nt, Human
ucaguugagccccagaguucaagaccagccug

SEQ ID NO: 497081 - RNA, 32 nt, Human
ucaguugagggcugagggagagacugaggugc

SEQ ID NO: 497082 - RNA, 32 nt, Human
ucaguugauccaccugccucagccucugcauu

SEQ ID NO: 497083 - RNA, 32 nt, Human
ucaguugaucuuuugaccaagaccucaagaga

SEQ ID NO: 497084 - RNA, 32 nt, Human
ucaguugcagagcaggaagccuggaucccagc

SEQ ID NO: 497085 - RNA, 32 nt, Human
ucaguugcuauuucucuucguaaugaauuuuc

SEQ ID NO: 497086 - RNA, 32 nt, Human
ucaguugggcaugagccuggagagaugugacu

SEQ ID NO: 497087 - RNA, 32 nt, Human
ucaguugggcuggggguugcuccacacccuaa

SEQ ID NO: 497088 - RNA, 23 nt, Human
ucaguugggggccaccugaccca

SEQ ID NO: 497089 - RNA, 32 nt, Human
ucaguugguggcagugguugguuuaaaguaga

SEQ ID NO: 497090 - RNA, 32 nt, Human
ucaguugguuccaaguauguuagaucagcuaa

SEQ ID NO: 497091 - RNA, 32 nt, Human
ucaguuguauagcaaguauuuacugaguagcu

SEQ ID NO: 497092 - RNA, 32 nt, Human
ucaguuguccccaucaucauggagacccaaaa

SEQ ID NO: 497093 - RNA, 32 nt, Human
ucaguuguccugagagagaugaagcagccuug

SEQ ID NO: 497094 - RNA, 32 nt, Human
ucaguugucuaaacuucgggcucucuuccacc

SEQ ID NO: 497095 - RNA, 32 nt, Human
ucaguugugaccagcuuugcaaagggagcggu

SEQ ID NO: 497096 - RNA, 32 nt, Human
ucaguugugaggaccucugcucugugcucagc

SEQ ID NO: 497097 - RNA, 32 nt, Human
ucaguugugcacugaggccggcugguccuuga

SEQ ID NO: 497098 - RNA, 32 nt, Human
ucaguugugcucccuggucccuucccuguugc

SEQ ID NO: 497099 - RNA, 32 nt, Human
ucaguuguguuuugggccugucggguccuuca

SEQ ID NO: 497100 - RNA, 32 nt, Human
ucaguuguucagagaagagggggaggauucgc

SEQ ID NO: 497101 - RNA, 32 nt, Human
ucaguuuacagauguuaaggaacuuauaauca

SEQ ID NO: 497102 - RNA, 32 nt, Human
ucaguuuaccugcacaugcuuucuuucauuuc

SEQ ID NO: 497103 - RNA, 32 nt, Human
ucaguuuagcauuacauugucuugagcaccag

SEQ ID NO: 497104 - RNA, 32 nt, Human
ucaguuuaugcaacuucugccuccccagguuc

SEQ ID NO: 497105 - RNA, 32 nt, Human
ucaguuuauuuggcaaacaugacaacauuuuu

SEQ ID NO: 497106 - RNA, 32 nt, Human
ucaguuucaccaccucccucuuccagacugca

SEQ ID NO: 497107 - RNA, 26 nt, Human
ucaguuucagucagggacauauuuug

SEQ ID NO: 497108 - RNA, 32 nt, Human
ucaguuucauuuccacggacccuccugccugg

SEQ ID NO: 497109 - RNA, 32 nt, Human
ucaguuuccagaaauacaaguuagauaauugg

SEQ ID NO: 497110 - RNA, 32 nt, Human
ucaguuuccagccuacagacuuucggggguuc

SEQ ID NO: 497111 - RNA, 21 nt, Human
ucaguuuccccagcugugaaa

SEQ ID NO: 497112 - RNA, 32 nt, Human
ucaguuucccccaaaugagcaaaggggauaaa

SEQ ID NO: 497113 - RNA, 32 nt, Human
ucaguuucccccaucuccucugccagaggcuc

SEQ ID NO: 497114 - RNA, 32 nt, Human
ucaguuucccucccuucucccuccauccgcag

SEQ ID NO: 497115 - RNA, 32 nt, Human
ucaguuuccgaaucucuuucccuuccccugug

SEQ ID NO: 497116 - RNA, 21 nt, Human
ucaguuuccucaucugcagaa

SEQ ID NO: 497117 - RNA, 21 nt, Human
ucaguuuccucaucugucaaa

SEQ ID NO: 497118 - RNA, 32 nt, Human
ucaguuuccuuguaagcagguaaugaaaauua

SEQ ID NO: 497119 - RNA, 21 nt, Human
ucaguuuccuugucugugaaa

SEQ ID NO: 497120 - RNA, 32 nt, Human
ucaguuucuaguguaagcuugcagugacuuuu

SEQ ID NO: 497121 - RNA, 32 nt, Human
ucaguuucucagacuguagccauugaaaauua

SEQ ID NO: 497122 - RNA, 32 nt, Human
ucaguuucucuccaggccaccaugucugcagg

SEQ ID NO: 497123 - RNA, 32 nt, Human
ucaguuucucucccucuccucaccccucuauc

SEQ ID NO: 497124 - RNA, 32 nt, Human
ucaguuugaacaaaccacuuugcccaaccuga

SEQ ID NO: 497125 - RNA, 32 nt, Human
ucaguuugacagacacagccugaaugcccaag

SEQ ID NO: 497126 - RNA, 32 nt, Human
ucaguuugagauacuagguuuuaucaccugcu

SEQ ID NO: 497127 - RNA, 32 nt, Human
ucaguuugcaacaugucuguaccaagauggua

SEQ ID NO: 497128 - RNA, 32 nt, Human
ucaguuugccaaggcugaugguauugggucac

SEQ ID NO: 497129 - RNA, 32 nt, Human
ucaguuugcccaucugucccagugcuaacaca

SEQ ID NO: 497130 - RNA, 19 nt, Human
ucaguuugggaagaggaga

SEQ ID NO: 497131 - RNA, 32 nt, Human
ucaguuuguggugaaauuccaguuuauuauca

SEQ ID NO: 497132 - RNA, 32 nt, Human
ucaguuuguggugaaauuccgguuuauuauca

SEQ ID NO: 497133 - RNA, 32 nt, Human
ucaguuuuccuuaaaacgcgcacacaacucua

SEQ ID NO: 497134 - RNA, 32 nt, Human
ucaguuuucucccacauucaccccugcccaga

SEQ ID NO: 497135 - RNA, 32 nt, Human
ucaguuuugaggccgagaguccucuggcgccc

SEQ ID NO: 497136 - RNA, 32 nt, Human
ucaguuuuggagaggaauauguucuuuauauc

SEQ ID NO: 497137 - RNA, 21 nt, Human
ucaguuuugggguaugggggg

SEQ ID NO: 497138 - RNA, 32 nt, Human
ucaguuuugguguggagaaagaggccaguuua

SEQ ID NO: 497139 - RNA, 32 nt, Human
ucaguuuuugacugaccuggauauccaugagc

SEQ ID NO: 497140 - RNA, 24 nt, Human
ucauaaaaauauuuuuaaaaucag

SEQ ID NO: 497141 - RNA, 32 nt, Human
ucauaaaaauuacaauuuaugaugcaaauaau

SEQ ID NO: 497142 - RNA, 32 nt, Human
ucauaaaacuaaccugaaaaacaaauaaaugc

SEQ ID NO: 497143 - RNA, 32 nt, Human
ucauaaaacucauaauguugauauaaucaaga

SEQ ID NO: 497144 - RNA, 32 nt, Human
ucauaaaagaaagguuuaauugacucacaguu

SEQ ID NO: 497145 - RNA, 32 nt, Human
ucauaaaagcccucauauccacuggcaguccc

SEQ ID NO: 497146 - RNA, 32 nt, Human
ucauaaaaggauucacacuggagagaaacccu

SEQ ID NO: 497147 - RNA, 32 nt, Human
ucauaaaccaaguuaugagagcagagcugaga

SEQ ID NO: 497148 - RNA, 32 nt, Human
ucauaaaccacuuuggaaaauaauuccaacaa

SEQ ID NO: 497149 - RNA, 32 nt, Human
ucauaaaccagcugcgguaacagacaagccuu

SEQ ID NO: 497150 - RNA, 32 nt, Human
ucauaaaccuggcucaugcccaacacauuucu

SEQ ID NO: 497151 - RNA, 32 nt, Human
ucauaaacugaucacuaucuauuaugcagcua

SEQ ID NO: 497152 - RNA, 32 nt, Human
ucauaaagaggaggagaaacagggugagucaa

SEQ ID NO: 497153 - RNA, 23 nt, Human
ucauaaagaugaguaaagucuca

SEQ ID NO: 497154 - RNA, 32 nt, Human
ucauaaaggcacaagugcacacacaucuaugc

SEQ ID NO: 497155 - RNA, 21 nt, Human
ucauaaaggguuaaaaaucca

SEQ ID NO: 497156 - RNA, 32 nt, Human
ucauaacaacaauuaauuuccucuggggccug

SEQ ID NO: 497157 - RNA, 32 nt, Human
ucauaacacugcacuccaggcuggacaacaca

SEQ ID NO: 497158 - RNA, 32 nt, Human
ucauaacaugccacuguauacaguuugaagcu

SEQ ID NO: 497159 - RNA, 21 nt, Human
ucauaacccacacaggcccac

SEQ ID NO: 497160 - RNA, 32 nt, Human
ucauaacucacugcagccucaaacuucuggcc

SEQ ID NO: 497161 - RNA, 32 nt, Human
ucauaacucuagagaaaaacuucaucuucauc

SEQ ID NO: 497162 - RNA, 32 nt, Human
ucauaagaaaaaucagcugaaguguuaccaac

SEQ ID NO: 497163 - RNA, 32 nt, Human
ucauaagaaagaggccagaaggucaaagaggu

SEQ ID NO: 497164 - RNA, 32 nt, Human
ucauaagaaguccauauacugaagagcguuug

SEQ ID NO: 497165 - RNA, 32 nt, Human
ucauaagacaugcacacuaauacacauacaca

SEQ ID NO: 497166 - RNA, 32 nt, Human
ucauaagauggaaaugcuauaccuuaccuacc

SEQ ID NO: 497167 - RNA, 32 nt, Human
ucauaagcaagcucagaccugcccccaguuca

SEQ ID NO: 497168 - RNA, 32 nt, Human
ucauaagcccccaaauuaacaggaugaggagg

SEQ ID NO: 497169 - RNA, 32 nt, Human
ucauaagcuccccagaugauuccuguguacau

SEQ ID NO: 497170 - RNA, 32 nt, Human
ucauaagcuuugaauuuucuguuaucucugau

SEQ ID NO: 497171 - RNA, 32 nt, Human
ucauaaggcaauucauacuggagagaaaccuu

SEQ ID NO: 497172 - RNA, 32 nt, Human
ucauaaggcaauucauacuggagagaauccuu

SEQ ID NO: 497173 - RNA, 32 nt, Human
ucauaaggcaauucauaguggagagaaaccuu

SEQ ID NO: 497174 - RNA, 32 nt, Human
ucauaaggcuaagcuaggggugaacagaaggc

SEQ ID NO: 497175 - RNA, 32 nt, Human
ucauaaggcuauucauauuggagagaaacguu

SEQ ID NO: 497176 - RNA, 31 nt, Human
ucauaagggcacuucuuuaggcauuucauua

SEQ ID NO: 497177 - RNA, 32 nt, Human
ucauaagggcuggagugcuguggugccaucau

SEQ ID NO: 497178 - RNA, 32 nt, Human
ucauaaggguuauuuuaauaacuggcauucuc

SEQ ID NO: 497179 - RNA, 32 nt, Human
ucauaagguaguccacugaagugcagucauca

SEQ ID NO: 497180 - RNA, 32 nt, Human
ucauaagguccuuccuagcaaggcaaagggau

SEQ ID NO: 497181 - RNA, 32 nt, Human
ucauaaguagacuccacugggguagagguauu

SEQ ID NO: 497182 - RNA, 32 nt, Human
ucauaagugggguggcggggccagucuaggga

SEQ ID NO: 497183 - RNA, 32 nt, Human
ucauaaguuauccccaagggguucagggacua

SEQ ID NO: 497184 - RNA, 18 nt, Human
ucauaauaaaucaucuca

SEQ ID NO: 497185 - RNA, 28 nt, Human
ucauaaucaagugcuggcuaaugucagc

SEQ ID NO: 497186 - RNA, 32 nt, Human
ucauaaucccuccuggcuuugugugaauagcu

SEQ ID NO: 497187 - RNA, 32 nt, Human
ucauaaucugucuuuuuccuugauagaacuua

SEQ ID NO: 497188 - RNA, 32 nt, Human
ucauaaugggggcggaggcgggagugagagga

SEQ ID NO: 497189 - RNA, 32 nt, Human
ucauaauguggcagagguggugggaagaagaa

SEQ ID NO: 497190 - RNA, 32 nt, Human
ucauaauucaugaaagcccaguucugaagauu

SEQ ID NO: 497191 - RNA, 32 nt, Human
ucauacaagcacauguguaauauuucuauuau

SEQ ID NO: 497192 - RNA, 27 nt, Human
ucauacacacauacauacauaugcaca

SEQ ID NO: 497193 - RNA, 32 nt, Human
ucauacagaauaguuucaccacccucaaaauc

SEQ ID NO: 497194 - RNA, 32 nt, Human
ucauacagagagaagauucaguucagccuaaa

SEQ ID NO: 497195 - RNA, 32 nt, Human
ucauacagcaagacacaugagacauagauuag

SEQ ID NO: 497196 - RNA, 32 nt, Human
ucauacagcugcaggauucgagacuacagcug

SEQ ID NO: 497197 - RNA, 32 nt, Human
ucauacaggagaaaggcccuauccaugucaag

SEQ ID NO: 497198 - RNA, 32 nt, Human
ucauacaggagagaaaccucacaagugugaug

SEQ ID NO: 497199 - RNA, 32 nt, Human
ucauacaggagagaaacucacaagugugauga

SEQ ID NO: 497200 - RNA, 32 nt, Human
ucauacagggucuccaaugcagccaaggagag

SEQ ID NO: 497201 - RNA, 32 nt, Human
ucauacagucccagagaugugaaguuaucaag

SEQ ID NO: 497202 - RNA, 25 nt, Human
ucauacaguuaguguugccagugaa

SEQ ID NO: 497203 - RNA, 32 nt, Human
ucauacaucaccccuggcuggccggcaacagg

SEQ ID NO: 497204 - RNA, 32 nt, Human
ucauacaugaagucaggaaaagaaaagaaacu

SEQ ID NO: 497205 - RNA, 32 nt, Human
ucauacauuuccaacuuggucugcaucucuuu

SEQ ID NO: 497206 - RNA, 32 nt, Human
ucauaccaacaugcuccagccugagugagaga

SEQ ID NO: 497207 - RNA, 32 nt, Human
ucauaccacaugcugccuaugggacuucaguu

SEQ ID NO: 497208 - RNA, 32 nt, Human
ucauaccaccgcacuccagccugagcaacaga

SEQ ID NO: 497209 - RNA, 32 nt, Human
ucauaccacggcacuccagccugggugacagu

SEQ ID NO: 497210 - RNA, 32 nt, Human
ucauaccacugcacuccagccuggcgacagag

SEQ ID NO: 497211 - RNA, 32 nt, Human
ucauaccacugcacuccagccugggcgacaga

SEQ ID NO: 497212 - RNA, 32 nt, Human
ucauaccacugcacuccagccugggugacaga

SEQ ID NO: 497213 - RNA, 32 nt, Human
ucauaccacugcacuccagucugggcaacaga

SEQ ID NO: 497214 - RNA, 32 nt, Human
ucauaccacugcacugcagccugagugacaca

SEQ ID NO: 497215 - RNA, 32 nt, Human
ucauaccacugcacuuaacuuggcaacagagc

SEQ ID NO: 497216 - RNA, 32 nt, Human
ucauaccacuguacugcagucugggccacaca

SEQ ID NO: 497217 - RNA, 32 nt, Human
ucauaccacuucauuccagccugggugacaga

SEQ ID NO: 497218 - RNA, 32 nt, Human
ucauaccacuugauaagcaucuugaaacacca

SEQ ID NO: 497219 - RNA, 32 nt, Human
ucauaccaguaacuacugaaguagaagauucu

SEQ ID NO: 497220 - RNA, 32 nt, Human
ucauaccagugcacuccaggcgggugacagag

SEQ ID NO: 497221 - RNA, 32 nt, Human
ucauaccauggagucaugagcugucugggaag

SEQ ID NO: 497222 - RNA, 32 nt, Human
ucauaccauugcacuccagccuaggcaacaag

SEQ ID NO: 497223 - RNA, 32 nt, Human
ucauaccauugcacuccagccugggcaacaag

SEQ ID NO: 497224 - RNA, 32 nt, Human
ucauacccaguaagaugcaagaaaggaauauc

SEQ ID NO: 497225 - RNA, 32 nt, Human
ucauacccucacauuaguucacuugagcugcc

SEQ ID NO: 497226 - RNA, 32 nt, Human
ucauacccugaccucugaccucaccuacagcu

SEQ ID NO: 497227 - RNA, 32 nt, Human
ucauacccuugccucuugugccccagcaccuu

SEQ ID NO: 497228 - RNA, 32 nt, Human
ucauaccuauaaucccagcccuuugagaggcc

SEQ ID NO: 497229 - RNA, 24 nt, Human
ucauaccuauagucccagcacuuu

SEQ ID NO: 497230 - RNA, 32 nt, Human
ucauaccuauaguuggucuuagauaagaaaug

SEQ ID NO: 497231 - RNA, 32 nt, Human
ucauaccucacugcagcuucaacuuccugggc

SEQ ID NO: 497232 - RNA, 32 nt, Human
ucauaccucacugcggccucaaacuccugggc

SEQ ID NO: 497233 - RNA, 32 nt, Human
ucauaccucauggucucucuuuaauugaccaa

SEQ ID NO: 497234 - RNA, 32 nt, Human
ucauaccugcuuguauuccugcuucugguguu

SEQ ID NO: 497235 - RNA, 25 nt, Human
ucauaccuguaaaucccagcacuuu

SEQ ID NO: 497236 - RNA, 32 nt, Human
ucauaccuguaaaucccagcacuuugggaggc

SEQ ID NO: 497237 - RNA, 32 nt, Human
ucauaccuguaaauccuaggacuuagggaggc

SEQ ID NO: 497238 - RNA, 32 nt, Human
ucauaccuguaaucccaacaauuugggaggcc

SEQ ID NO: 497239 - RNA, 32 nt, Human
ucauaccuguaaucccaagcagcugggauuac

SEQ ID NO: 497240 - RNA, 20 nt, Human
ucauaccuguaaucccagca

SEQ ID NO: 497241 - RNA, 32 nt, Human
ucauaccuguaaucccagcaauuugggaggcu

SEQ ID NO: 497242 - RNA, 24 nt, Human
ucauaccuguaaucccagcacuuu

SEQ ID NO: 497243 - RNA, 32 nt, Human
ucauaccuguaaucccagcacuuugggaagcc

SEQ ID NO: 497244 - RNA, 32 nt, Human
ucauaccuguaaucccagcacuuugggaggcc

SEQ ID NO: 497245 - RNA, 32 nt, Human
ucauaccuguaaucccagcacuuugggaggcu

SEQ ID NO: 497246 - RNA, 24 nt, Human
ucauaccuguaaucccagcaguuu

SEQ ID NO: 497247 - RNA, 32 nt, Human
ucauaccuguaaucccagcaguuugggaggcc

SEQ ID NO: 497248 - RNA, 23 nt, Human
ucauaccuguaaucccagcauuu

SEQ ID NO: 497249 - RNA, 32 nt, Human
ucauaccuguaaucccagcauuuggggaggcc

SEQ ID NO: 497250 - RNA, 32 nt, Human
ucauaccuguaaucccaggacuuugggaggcc

SEQ ID NO: 497251 - RNA, 32 nt, Human
ucauaccuguaaucccggcacuuugggaggcc

SEQ ID NO: 497252 - RNA, 22 nt, Human
ucauaccuguaauccuagcacu

SEQ ID NO: 497253 - RNA, 32 nt, Human
ucauaccuguaauccuagcacucugggaggcc

SEQ ID NO: 497254 - RNA, 32 nt, Human
ucauaccuguaaucucagcacugugggaggcc

SEQ ID NO: 497255 - RNA, 24 nt, Human
ucauaccuguaaugccagcacuuu

SEQ ID NO: 497256 - RNA, 32 nt, Human
ucauaccuguaaugccagcacuuugggaggcc

SEQ ID NO: 497257 - RNA, 25 nt, Human
ucauaccuguuaauuccagcacuuu

SEQ ID NO: 497258 - RNA, 32 nt, Human
ucauaccuguuaauuccagcacuuugggaggc

SEQ ID NO: 497259 - RNA, 24 nt, Human
ucauaccuguuauaccagcacuuu

SEQ ID NO: 497260 - RNA, 32 nt, Human
ucauaccuguucuaguucaucuccacguuuau

SEQ ID NO: 497261 - RNA, 24 nt, Human
ucauaccuuuaaucccagcacuuu

SEQ ID NO: 497262 - RNA, 32 nt, Human
ucauacggaguaagcugcucugccugugugag

SEQ ID NO: 497263 - RNA, 32 nt, Human
ucauacguccaccaugggguccuaccaauaga

SEQ ID NO: 497264 - RNA, 24 nt, Human
ucauacguguaaucccaguacuuu

SEQ ID NO: 497265 - RNA, 32 nt, Human
ucauacguguaaucccaguacuuuggaaggug

SEQ ID NO: 497266 - RNA, 32 nt, Human
ucauacuacuauacuucuggguugaacagaau

SEQ ID NO: 497267 - RNA, 32 nt, Human
ucauacuacugcacuccagccugggcgacaag

SEQ ID NO: 497268 - RNA, 32 nt, Human
ucauacuaggguaauaaauguggcagauuuuu

SEQ ID NO: 497269 - RNA, 32 nt, Human
ucauacucacugcagccuugaccgccugggcu

SEQ ID NO: 497270 - RNA, 19 nt, Human
ucauacuccugggcucaag

SEQ ID NO: 497271 - RNA, 32 nt, Human
ucauacucuauacucagggcuuaaugaacugg

SEQ ID NO: 497272 - RNA, 32 nt, Human
uccacagccugagagguguccccaaagaaagg

SEQ ID NO: 497273 - RNA, 32 nt, Human
uccacagcgccgaguacuccagccgggacgca

SEQ ID NO: 497274 - RNA, 32 nt, Human
uccacagcgcgacugcuccagcauuuuuccuu

SEQ ID NO: 497275 - RNA, 19 nt, Human
uccacagcucagagaagaa

SEQ ID NO: 497276 - RNA, 32 nt, Human
uccacagcuccugccguucuccuugccaggaa

SEQ ID NO: 497277 - RNA, 20 nt, Human
uccacagcucuuccuugagc

SEQ ID NO: 497278 - RNA, 32 nt, Human
uccacagcuggacaggagagacaccgccugcg

SEQ ID NO: 497279 - RNA, 21 nt, Human
uccacagcuguccuggccgca

SEQ ID NO: 497280 - RNA, 32 nt, Human
uccacagcuguuagcagcaucugccccaauuu

SEQ ID NO: 497281 - RNA, 21 nt, Human
uccacaggaaaccugaccuga

SEQ ID NO: 497282 - RNA, 20 nt, Human
uccacaggaacccagcauuc

SEQ ID NO: 497283 - RNA, 32 nt, Human
uccacaggcacuuucaccuaaguuucugccac

SEQ ID NO: 497284 - RNA, 32 nt, Human
uccacaggccccuccaccuuccagcuaaccag

SEQ ID NO: 497285 - RNA, 31 nt, Human
uccacaggcgcccccaccacagcagaacagc

SEQ ID NO: 497286 - RNA, 22 nt, Human
uccacagggaauacagcauccu

SEQ ID NO: 497287 - RNA, 32 nt, Human
uccacagggaggcagguggccacggcgagguc

SEQ ID NO: 497288 - RNA, 32 nt, Human
uccacagggcugggcccaugcacagccauccu

SEQ ID NO: 497289 - RNA, 32 nt, Human
uccacagggcuggguuuucuugcaccuugggu

SEQ ID NO: 497290 - RNA, 32 nt, Human
uccacagggucccacagccacguguuuagacc

SEQ ID NO: 497291 - RNA, 32 nt, Human
uccacagggucugagcuccucagaggugggag

SEQ ID NO: 497292 - RNA, 32 nt, Human
uccacagguacuuugcagucauaccacaccca

SEQ ID NO: 497293 - RNA, 32 nt, Human
uccacagguuucccuccgccuccugagggccu

SEQ ID NO: 497294 - RNA, 32 nt, Human
uccacaguacugggugacugguauagucugau

SEQ ID NO: 497295 - RNA, 32 nt, Human
uccacaguauaugauccauccagacauuugca

SEQ ID NO: 497296 - RNA, 32 nt, Human
uccacagucaaccacuucaccucacugggcaa

SEQ ID NO: 497297 - RNA, 32 nt, Human
uccacagucagggaaggacucucacuuauuug

SEQ ID NO: 497298 - RNA, 32 nt, Human
uccacagucccaaugccucugcuuuuuguuuu

SEQ ID NO: 497299 - RNA, 22 nt, Human
uccacaguccggagcccggcgg

SEQ ID NO: 497300 - RNA, 24 nt, Human
uccacagucugcccucaucccucu

SEQ ID NO: 497301 - RNA, 32 nt, Human
uccacagucuguuccuguucugauauucugag

SEQ ID NO: 497302 - RNA, 25 nt, Human
uccacagucuucuggguggcagcga

SEQ ID NO: 497303 - RNA, 32 nt, Human
uccacagugaccuggaucaggguggggacaag

SEQ ID NO: 497304 - RNA, 19 nt, Human
uccacagugagaacuggac

SEQ ID NO: 497305 - RNA, 32 nt, Human
uccacagugcccagguuucucauguuguaaau

SEQ ID NO: 497306 - RNA, 32 nt, Human
uccacagugcugcuaauaucccagcuccagcc

SEQ ID NO: 497307 - RNA, 23 nt, Human
uccacaguuauguaaggcaguga

SEQ ID NO: 497308 - RNA, 18 nt, Human
uccacaguucccaaagcu

SEQ ID NO: 497309 - RNA, 32 nt, Human
uccacauaaaagugcucuccugccugggcagc

SEQ ID NO: 497310 - RNA, 32 nt, Human
uccacauaaccugaggaccauggaugcugaug

SEQ ID NO: 497311 - RNA, 24 nt, Human
uccacauagcuaccuaccuauuca

SEQ ID NO: 497312 - RNA, 26 nt, Human
uccacauagcugggggugacuguuca

SEQ ID NO: 497313 - RNA, 32 nt, Human
uccacauauacaaccauacauacuugcacaug

SEQ ID NO: 497314 - RNA, 18 nt, Human
uccacaucaaaagaagaa

SEQ ID NO: 497315 - RNA, 32 nt, Human
uccacaucaagaaaauaguuucccaucugaaa

SEQ ID NO: 497316 - RNA, 32 nt, Human
uccacaucaagauagcugggcccaguguggaa

SEQ ID NO: 497317 - RNA, 32 nt, Human
uccacaucagccagggcaucagaaguugggcc

SEQ ID NO: 497318 - RNA, 32 nt, Human
uccacauccccgccucccagacauauaccagg

SEQ ID NO: 497319 - RNA, 32 nt, Human
uccacaucgccaaggugccacagggggagcaa

SEQ ID NO: 497320 - RNA, 20 nt, Human
uccacaucucccugcugcuc

SEQ ID NO: 497321 - RNA, 25 nt, Human
uccacaugaaaccuacacacuguca

SEQ ID NO: 497322 - RNA, 32 nt, Human
uccacaugacucugccucccaaagugcugcca

SEQ ID NO: 497323 - RNA, 32 nt, Human
uccacaugccaagaggaugcaggauuucuaca

SEQ ID NO: 497324 - RNA, 32 nt, Human
uccacaugcuccaagccacagguccccaaaua

SEQ ID NO: 497325 - RNA, 22 nt, Human
uccacauggauaagcaccuacu

SEQ ID NO: 497326 - RNA, 32 nt, Human
uccacauggcaaaaccccaucuguaccaaaaa

SEQ ID NO: 497327 - RNA, 32 nt, Human
uccacauguauuaacagaaagaucccagaauu

SEQ ID NO: 497328 - RNA, 32 nt, Human
uccacauguuggccaggaugguuucggucucu

SEQ ID NO: 497329 - RNA, 32 nt, Human
uccacauuagcagggaagaauuuggaagauuu

SEQ ID NO: 497330 - RNA, 32 nt, Human
uccacauucuugcugucaucucagccauccac

SEQ ID NO: 497331 - RNA, 32 nt, Human
uccacauugaccccucccuagccuggcaggug

SEQ ID NO: 497332 - RNA, 21 nt, Human
uccacauugagaugggcccag

SEQ ID NO: 497333 - RNA, 32 nt, Human
uccacauugagaugggcccagauggaagagug

SEQ ID NO: 497334 - RNA, 32 nt, Human
uccacauugcaacuuugcaucucuauuaggaa

SEQ ID NO: 497335 - RNA, 32 nt, Human
uccacauuggccucugcagcugggugaccaga

SEQ ID NO: 497336 - RNA, 32 nt, Human
uccacauugguggugaugaugggugaguuucc

SEQ ID NO: 497337 - RNA, 19 nt, Human
uccacauuuauaacuuuca

SEQ ID NO: 497338 - RNA, 32 nt, Human
uccacauuuguuguguuccuagggcuucucua

SEQ ID NO: 497339 - RNA, 32 nt, Human
uccacauuuuaaaaugacuugcacuugugcau

SEQ ID NO: 497340 - RNA, 32 nt, Human
uccaccaaaccagcuccaggugaccagacucu

SEQ ID NO: 497341 - RNA, 32 nt, Human
uccaccaaaggaguuugggauugaguuuugcu

SEQ ID NO: 497342 - RNA, 32 nt, Human
uccaccaaauuagugccucuuagaugauguga

SEQ ID NO: 497343 - RNA, 32 nt, Human
uccaccaaccugcgcaggcagcacuuuuggcc

SEQ ID NO: 497344 - RNA, 32 nt, Human
uccaccaagcacugcauguaggacagggcaca

SEQ ID NO: 497345 - RNA, 32 nt, Human
uccaccaaggccagaagggaaaaaggaagaac

SEQ ID NO: 497346 - RNA, 32 nt, Human
uccaccaagugggggaaggggaagggagagaa

SEQ ID NO: 497347 - RNA, 32 nt, Human
uccaccaaugaccccucgcgcugcuuccagaa

SEQ ID NO: 497348 - RNA, 32 nt, Human
uccaccacacauacccucuaagccagcaagau

SEQ ID NO: 497349 - RNA, 32 nt, Human
uccaccacagccgcuugcacguauagauacug

SEQ ID NO: 497350 - RNA, 32 nt, Human
uccaccacaggcacugcuguguggaacgaguu

SEQ ID NO: 497351 - RNA, 32 nt, Human
uccaccacaugagaacacagccagcaggugcc

SEQ ID NO: 497352 - RNA, 32 nt, Human
uccaccaccaacuucucagcauguuucucucc

SEQ ID NO: 497353 - RNA, 22 nt, Human
uccaccaccaccaccgccgccg

SEQ ID NO: 497354 - RNA, 32 nt, Human
uccaccaccaccgccuccuacccuucuuaaca

SEQ ID NO: 497355 - RNA, 23 nt, Human
uccaccacccuuucccccuucuc

SEQ ID NO: 497356 - RNA, 32 nt, Human
uccaccaccucuccaucccagggagccacgac

SEQ ID NO: 497357 - RNA, 32 nt, Human
uccaccaccucuguagcaaccagcucagagaa

SEQ ID NO: 497358 - RNA, 32 nt, Human
uccaccacugaggcccaggcucccaggaccca

SEQ ID NO: 497359 - RNA, 32 nt, Human
uccaccacugcacccaggacccgcugaacccu

SEQ ID NO: 497360 - RNA, 32 nt, Human
uccaccacugucccuucuccccgcuucaaaau

SEQ ID NO: 497361 - RNA, 32 nt, Human
uccaccacuucuuccuccacccaggaccuaau

SEQ ID NO: 497362 - RNA, 32 nt, Human
uccaccagacacagcucgggccuguguaauug

SEQ ID NO: 497363 - RNA, 32 nt, Human
uccaccagaggagagcacaggagagcuaggca

SEQ ID NO: 497364 - RNA, 32 nt, Human
uccaccagagggcagaccugcacucuccauuc

SEQ ID NO: 497365 - RNA, 32 nt, Human
uccaccagauaaccagcuaaucccaggaauuu

SEQ ID NO: 497366 - RNA, 32 nt, Human
uccaccagauagcagagggguaagagaggaug

SEQ ID NO: 497367 - RNA, 32 nt, Human
uccaccagcacaagaagaggaggcaggggcag

SEQ ID NO: 497368 - RNA, 32 nt, Human
uccaccaggaaucagaggcagcuguuaccagg

SEQ ID NO: 497369 - RNA, 32 nt, Human
uccaccaggagucuggagugcaauggcacgau

SEQ ID NO: 497370 - RNA, 32 nt, Human
uccaccagguaccggugcgcccagggcagcca

SEQ ID NO: 497371 - RNA, 32 nt, Human
uccaccauaagcaacagaacaccuauacuugc

SEQ ID NO: 497372 - RNA, 32 nt, Human
uccaccauauuucuccccacucuguaccuucu

SEQ ID NO: 497373 - RNA, 32 nt, Human
uccaccaucagggcuggaaggaagagaaaggg

SEQ ID NO: 497374 - RNA, 32 nt, Human
uccaccaucauuaaggagaggaguguggaggc

SEQ ID NO: 497375 - RNA, 32 nt, Human
uccaccaugucacccucauggagcuuucguua

SEQ ID NO: 497376 - RNA, 32 nt, Human
uccaccauugauaucucccagagguacagaaa

SEQ ID NO: 497377 - RNA, 32 nt, Human
uccaccauugcacuccagucugggcaacagag

SEQ ID NO: 497378 - RNA, 32 nt, Human
uccacccaauaugccacguacgccaacaggga

SEQ ID NO: 497379 - RNA, 32 nt, Human
uccacccaaugccccgccccugcuccaaauca

SEQ ID NO: 497380 - RNA, 32 nt, Human
uccacccacccacacacauacauacauacacc

SEQ ID NO: 497381 - RNA, 32 nt, Human
uccacccacccagugacagagcacaggcagcc

SEQ ID NO: 497382 - RNA, 21 nt, Human
uccacccaccugccccauguc

SEQ ID NO: 497383 - RNA, 19 nt, Human
uccacccaccuuggccucc

SEQ ID NO: 497384 - RNA, 18 nt, Human
uccacccaccuuggccuu

SEQ ID NO: 497385 - RNA, 32 nt, Human
uccacccacugaggcucaguuuccccaugugc

SEQ ID NO: 497386 - RNA, 32 nt, Human
uccacccagcaggcagaguggcguggccuccc

SEQ ID NO: 497387 - RNA, 32 nt, Human
uccacccagcaugucuccugcccaugcagcug

SEQ ID NO: 497388 - RNA, 32 nt, Human
uccacccagccggccacugugugucauggcuc

SEQ ID NO: 497389 - RNA, 24 nt, Human
uccacccaggaggaggcacuggca

SEQ ID NO: 497390 - RNA, 32 nt, Human
uccacccaguugagacacaccaugcuuguuca

SEQ ID NO: 497391 - RNA, 32 nt, Human
uccaccccaagaaagccaaauacaacauaaac

SEQ ID NO: 497392 - RNA, 32 nt, Human
uccaccccaccaccccucuaaguccgacccac

SEQ ID NO: 497393 - RNA, 20 nt, Human
uccaccccagagucucaggc

SEQ ID NO: 497394 - RNA, 21 nt, Human
uccaccccagccccgcccagg

SEQ ID NO: 497395 - RNA, 32 nt, Human
uccaccccaggcucugggaggcucccugagau

SEQ ID NO: 497396 - RNA, 18 nt, Human
uccaccccaguccccggg

SEQ ID NO: 497397 - RNA, 32 nt, Human
uccaccccaucccagacucccaccccagggau

SEQ ID NO: 497398 - RNA, 32 nt, Human
uccaccccaucuuaagcucugucuuccguggc

SEQ ID NO: 497399 - RNA, 20 nt, Human
uccaccccaugugccucagg

SEQ ID NO: 497400 - RNA, 32 nt, Human
uccacccccaccccuuaacuuggguaccccuc

SEQ ID NO: 497401 - RNA, 32 nt, Human
uccacccccacuguuguggucagccccagaga

SEQ ID NO: 497402 - RNA, 32 nt, Human
uccacccccauccugcgcccagucuccucgau

SEQ ID NO: 497403 - RNA, 32 nt, Human
uccacccccucagaucaggcauagccauaguc

SEQ ID NO: 497404 - RNA, 22 nt, Human
uccacccccuggugccugcagg

SEQ ID NO: 497405 - RNA, 32 nt, Human
uccacccccuuuccuuccuuuccucucuguac

SEQ ID NO: 497406 - RNA, 32 nt, Human
uccaccccgacccgcacacacacccacacugc

SEQ ID NO: 497407 - RNA, 32 nt, Human
uccaccccgcauuccacucaucagcuucacaa

SEQ ID NO: 497408 - RNA, 32 nt, Human
uccaccccgccuggccuggcguccaccucugc

SEQ ID NO: 497409 - RNA, 32 nt, Human
uccaccccucaccaacaccucugcaguccucu

SEQ ID NO: 497410 - RNA, 32 nt, Human
uccaccccucauuuccuuuuugcacacauuac

SEQ ID NO: 497411 - RNA, 32 nt, Human
uccaccccuccugcuuccccaggcauuaugaa

SEQ ID NO: 497412 - RNA, 21 nt, Human
uccaccccugacaacccgaga

SEQ ID NO: 497413 - RNA, 32 nt, Human
uccaccccugcuccccagagacuuccugcuuu

SEQ ID NO: 497414 - RNA, 32 nt, Human
uccaccccugggaggcagaagccaggcauagc

SEQ ID NO: 497415 - RNA, 32 nt, Human
uccaccccuucuguucgccacacccugcgucu

SEQ ID NO: 497416 - RNA, 32 nt, Human
uccaccccuuggugcuggcaguguuuggggac

SEQ ID NO: 497417 - RNA, 31 nt, Human
uccacccgcaggccucccaugcuccaagcag

SEQ ID NO: 497418 - RNA, 32 nt, Human
uccacccgccagggagaggggagccagagccg

SEQ ID NO: 497419 - RNA, 32 nt, Human
uccacccgccggccucccgcagccuggccagg

SEQ ID NO: 497420 - RNA, 32 nt, Human
uccacccgccuucucacuaucucuuuugccua

SEQ ID NO: 497421 - RNA, 32 nt, Human
uccacccgcucccaggguuucccaccacaggg

SEQ ID NO: 497422 - RNA, 31 nt, Human
uccacccguccuggggugguuggaggccugg

SEQ ID NO: 497423 - RNA, 32 nt, Human
uccacccgugucccucaugggugagcccucca

SEQ ID NO: 497424 - RNA, 32 nt, Human
uccacccguucccacugcccugggcagccauc

SEQ ID NO: 497425 - RNA, 32 nt, Human
uccacccuacaccccucugucucccuccauuc

SEQ ID NO: 497426 - RNA, 32 nt, Human
uccacccuagcacaucugggcucuacccucgc

SEQ ID NO: 497427 - RNA, 32 nt, Human
uccacccuaggcuucucuccucccucuucccu

SEQ ID NO: 497428 - RNA, 32 nt, Human
uccacccucacccuuuuccuuucccaugaacc

SEQ ID NO: 497429 - RNA, 32 nt, Human
uccacccucagcucccugcacaauucauggga

SEQ ID NO: 497430 - RNA, 32 nt, Human
uccacccuccaggagaccccagugucuguggu

SEQ ID NO: 497431 - RNA, 32 nt, Human
uccacccuccauuccuccuccccugggccucu

SEQ ID NO: 497432 - RNA, 32 nt, Human
uccacccuccccgugcugcuguguucugcucc

SEQ ID NO: 497433 - RNA, 32 nt, Human
uccacccucugccugccugccugccugcuguc

SEQ ID NO: 497434 - RNA, 22 nt, Human
uccacccucugugccgccgccg

SEQ ID NO: 497435 - RNA, 32 nt, Human
uccacccucuuugguuccuugugguccugcuc

SEQ ID NO: 497436 - RNA, 32 nt, Human
uccacccugcaacccccaucccccaccgggcc

SEQ ID NO: 497437 - RNA, 32 nt, Human
uccacccugcagccgcugccuccugggccccg

SEQ ID NO: 497438 - RNA, 32 nt, Human
uccacccugcaggggcccagacugccugcagg

SEQ ID NO: 497439 - RNA, 24 nt, Human
uccacccugcccgugcugcugcuc

SEQ ID NO: 497440 - RNA, 32 nt, Human
uccacccugccuccucuguucugaaauuccau

SEQ ID NO: 497441 - RNA, 32 nt, Human
uccacccugccugccgucugugcuuccuccug

SEQ ID NO: 497442 - RNA, 32 nt, Human
uccacccugccugccugggccgccucuguggc

SEQ ID NO: 497443 - RNA, 32 nt, Human
uccacccugccugugucuggggccugggggcu

SEQ ID NO: 497444 - RNA, 32 nt, Human
uccacccuggaccaccucugggggucugucag

SEQ ID NO: 497445 - RNA, 32 nt, Human
uccacccugggaacuguggaaaaaguaggaga

SEQ ID NO: 497446 - RNA, 24 nt, Human
uccacccugggcaacagagcaaga

SEQ ID NO: 497447 - RNA, 32 nt, Human
uccacccugggcaacagagcaagaccccaucu

SEQ ID NO: 497448 - RNA, 32 nt, Human
uccacccugggcaacagagcaagacuccaugu

SEQ ID NO: 497449 - RNA, 24 nt, Human
uccacccugggcgacagagcaaga

SEQ ID NO: 497450 - RNA, 32 nt, Human
uccacccugggcgacagagcaagauucuauca

SEQ ID NO: 497451 - RNA, 24 nt, Human
uccacccugggcgacagagugaga

SEQ ID NO: 497452 - RNA, 32 nt, Human
uccacccugggugacagagugaagacucccuc

SEQ ID NO: 497453 - RNA, 32 nt, Human
uccacccugugggcacaauaacauaacuguug

SEQ ID NO: 497454 - RNA, 22 nt, Human
uccacccuuaacccugugcuca

SEQ ID NO: 497455 - RNA, 32 nt, Human
uccacccuuaugucacagugcuucauguguac

SEQ ID NO: 497456 - RNA, 32 nt, Human
uccacccuucaaccaguggcuccugggagacu

SEQ ID NO: 497457 - RNA, 22 nt, Human
uccacccuuccugccucauguc

SEQ ID NO: 497458 - RNA, 21 nt, Human
uccacccuuuaaaagcauuga

SEQ ID NO: 497459 - RNA, 32 nt, Human
uccacccuuuccugcggcaccaccucccuuuu

SEQ ID NO: 497460 - RNA, 32 nt, Human
uccacccuuugcugcugaccucggcugcuccu

SEQ ID NO: 497461 - RNA, 22 nt, Human
uccacccuuuuuucuaaguguu

SEQ ID NO: 497462 - RNA, 32 nt, Human
uccaccgaggccagguuggggaaguucagccu

SEQ ID NO: 497463 - RNA, 32 nt, Human
uccaccgccauccuucaccucucccucagccu

SEQ ID NO: 497464 - RNA, 22 nt, Human
uccaccgccgccgccgccgccg

SEQ ID NO: 497465 - RNA, 32 nt, Human
uccaccgcucgaguucucuacucuccauaucc

SEQ ID NO: 497466 - RNA, 32 nt, Human
uccaccgcuuuggagaccucaggacuuggaua

SEQ ID NO: 497467 - RNA, 32 nt, Human
uccaccggaaggacgaggggcaggacgugugg

SEQ ID NO: 497468 - RNA, 32 nt, Human
uccaccggcacgagggcggaaaagaaagccuc

SEQ ID NO: 497469 - RNA, 32 nt, Human
uccaccggcugcagacccauggccgagcgcgg

SEQ ID NO: 497470 - RNA, 32 nt, Human
uccaccgggccuuccuggugggcauguacggc

SEQ ID NO: 497471 - RNA, 26 nt, Human
uccaccguacucugugaaucuaauua

SEQ ID NO: 497472 - RNA, 32 nt, Human
uccaccguuccaggcagcagcacucccaccug

SEQ ID NO: 497473 - RNA, 32 nt, Human
uccaccuaaacaucaucucccaaauuuuaauc

SEQ ID NO: 497474 - RNA, 32 nt, Human
uccaccuacugaacuagaaccugcucaggauu

SEQ ID NO: 497475 - RNA, 32 nt, Human
uccaccuagaccaagucggcagucucccuaca

SEQ ID NO: 497476 - RNA, 25 nt, Human
uccaccuauucacccauacaaccuu

SEQ ID NO: 497477 - RNA, 32 nt, Human
uccaccucaacacacauccaucucaagaggaa

SEQ ID NO: 497478 - RNA, 32 nt, Human
uccaccucacuguccccagccugccugccucc

SEQ ID NO: 497479 - RNA, 32 nt, Human
uccaccucaucuuccuccuguuggcuccucag

SEQ ID NO: 497480 - RNA, 32 nt, Human
uccaccucaugcagugagccagccuggccgcu

SEQ ID NO: 497481 - RNA, 32 nt, Human
uccaccuccacaugcuccgccuccaggucccg

SEQ ID NO: 497482 - RNA, 32 nt, Human
uccaccuccaccgccaccuccaccuccggcac

SEQ ID NO: 497483 - RNA, 23 nt, Human
uccaccuccagccaccccagguc

SEQ ID NO: 497484 - RNA, 32 nt, Human
uccaccucccaaaaugcugagauuacaggugu

SEQ ID NO: 497485 - RNA, 32 nt, Human
uccaccucccaaacugcugggauuacaggugu

SEQ ID NO: 497486 - RNA, 32 nt, Human
uccaccucccaaaguacugggauuacaggcau

SEQ ID NO: 497487 - RNA, 32 nt, Human
uccaccucccaaagugcuaggauuacaggcgu

SEQ ID NO: 497488 - RNA, 32 nt, Human
uccaccucccaaagugcugggauuacaggcgu

SEQ ID NO: 497489 - RNA, 32 nt, Human
uccaccucccaaaguguucggauuacaaacgu

SEQ ID NO: 497490 - RNA, 32 nt, Human
uccaccucccaaaguguugugauuacaggcgu

SEQ ID NO: 497491 - RNA, 32 nt, Human
uccaccucccaaggugcugggauuacaggcau

SEQ ID NO: 497492 - RNA, 32 nt, Human
uccaccucccaagguguugggauuacaggcgu

SEQ ID NO: 497493 - RNA, 32 nt, Human
uccaccucccagggugcugggauuacaggugu

SEQ ID NO: 497494 - RNA, 32 nt, Human
uccaccuccccgucuuccucugggugccaaau

SEQ ID NO: 497495 - RNA, 32 nt, Human
uccaccucccgcagugcugggauuacaggcau

SEQ ID NO: 497496 - RNA, 32 nt, Human
uccaccucccuccaccaggauggcagccagga

SEQ ID NO: 497497 - RNA, 32 nt, Human
uccaccuccuuucagcugcuccugggccucag

SEQ ID NO: 497498 - RNA, 32 nt, Human
uccaccucggagaccacccucccccagccaga

SEQ ID NO: 497499 - RNA, 32 nt, Human
uccaccucuccucuguccuugcugccucagag

SEQ ID NO: 497500 - RNA, 32 nt, Human
uccaccucuccuuuuugccauuucacuuauug

SEQ ID NO: 497501 - RNA, 32 nt, Human
uccaccucugcggcuccuaccugggugcaauc

SEQ ID NO: 497502 - RNA, 32 nt, Human
uccaccucugggagcuggaguccacuggggug

SEQ ID NO: 497503 - RNA, 32 nt, Human
uccaccugcaggaaggccagagguucuggugg

SEQ ID NO: 497504 - RNA, 21 nt, Human
uccaccugccaggcucaagca

SEQ ID NO: 497505 - RNA, 32 nt, Human
uccaccugccuuggccuuccagagugcuggga

SEQ ID NO: 497506 - RNA, 32 nt, Human
uccaccuggacucugcccaggccagcguguuc

SEQ ID NO: 497507 - RNA, 32 nt, Human
uccaccugggcaacaagaacgaaacuccguau

SEQ ID NO: 497508 - RNA, 32 nt, Human
uccaccugggugcugggcugggcucuaaagcc

SEQ ID NO: 497509 - RNA, 32 nt, Human
uccaccuguauguacagugauaacguguguga

SEQ ID NO: 497510 - RNA, 32 nt, Human
uccaccuguccggauccagcugucuggucaug

SEQ ID NO: 497511 - RNA, 32 nt, Human
uccaccugucucaaacucuaaggucggcacuu

SEQ ID NO: 497512 - RNA, 32 nt, Human
uccaccugucuucauccuccccugcacuccag

SEQ ID NO: 497513 - RNA, 32 nt, Human
uccaccugugcuacccgguccagaccucccag

SEQ ID NO: 497514 - RNA, 32 nt, Human
uccaccuguuguuccuggacucugacacauga

SEQ ID NO: 497515 - RNA, 32 nt, Human
uccaccuuaaggcuuuaaaagacagugaagcu

SEQ ID NO: 497516 - RNA, 32 nt, Human
uccaccuuagcagagggcaaguucuuucaucg

SEQ ID NO: 497517 - RNA, 32 nt, Human
uccaccuucacaaguauccuucaaaggcaucc

SEQ ID NO: 497518 - RNA, 21 nt, Human
uccaccuucagcauuuacugu

SEQ ID NO: 497519 - RNA, 21 nt, Human
uccaccuuccaggcuuacuca

SEQ ID NO: 497520 - RNA, 23 nt, Human
uccaccuucccuagucaccagcu

SEQ ID NO: 497521 - RNA, 24 nt, Human
uccaccuuccugcacucauucuca

SEQ ID NO: 497522 - RNA, 19 nt, Human
uccaccuuccuuugugcuc

SEQ ID NO: 497523 - RNA, 32 nt, Human
uccaccuucucccaaggccagcccacauagcc

SEQ ID NO: 497524 - RNA, 22 nt, Human
uccaccuucucugccuccaguc

SEQ ID NO: 497525 - RNA, 21 nt, Human
uccaccuucucuucacucuca

SEQ ID NO: 497526 - RNA, 32 nt, Human
uccaccuugauauugcacuuccaggcuccaga

SEQ ID NO: 497527 - RNA, 32 nt, Human
uccaccuuggcugggaagacuauggugcugcc

SEQ ID NO: 497528 - RNA, 32 nt, Human
uccaccuugucacuccagguucuggugacccc

SEQ ID NO: 497529 - RNA, 22 nt, Human
uccaccuuuaccuaacuaccuu

SEQ ID NO: 497530 - RNA, 23 nt, Human
uccaccuuuccacucaacaaccu

SEQ ID NO: 497531 - RNA, 21 nt, Human
uccaccuuucccuuggauuca

SEQ ID NO: 497532 - RNA, 32 nt, Human
uccaccuuucucucugaaucucucuccugucu

SEQ ID NO: 497533 - RNA, 24 nt, Human
uccaccuuugggucgcuuugcugu

SEQ ID NO: 497534 - RNA, 32 nt, Human
uccaccuuugugcaaaugcgaaccacaucuca

SEQ ID NO: 497535 - RNA, 32 nt, Human
uccaccuuuuucucccccacacuucgcggcuu

SEQ ID NO: 497536 - RNA, 32 nt, Human
uccacgaacuuuugucauucagccugggagac

SEQ ID NO: 497537 - RNA, 32 nt, Human
uccacgacggugacacgcuucccuggauuggc

SEQ ID NO: 497538 - RNA, 32 nt, Human
uccacgacucauugucuugcugcccagagcug

SEQ ID NO: 497539 - RNA, 32 nt, Human
uccacgagaccaugcuccucagaagcuaccca

SEQ ID NO: 497540 - RNA, 32 nt, Human
uccacgagccugacccccguaaagggucugug

SEQ ID NO: 497541 - RNA, 32 nt, Human
uccacgaggcugucaccacccugguagcacug

SEQ ID NO: 497542 - RNA, 32 nt, Human
uccacgagggucccaggcagagcugcagagcu

SEQ ID NO: 497543 - RNA, 32 nt, Human
uccacgauccuucccugaacacuguaguuuuc

SEQ ID NO: 497544 - RNA, 32 nt, Human
uccacgauguacaaagucauuucggccaguag

SEQ ID NO: 497545 - RNA, 32 nt, Human
uccacgcaaagaggaggaaauuuggaaauaca

SEQ ID NO: 497546 - RNA, 32 nt, Human
uccacgcagccuggugauggcaggccuggguu

SEQ ID NO: 497547 - RNA, 32 nt, Human
uccacgcagcuggcagagagcacagugaucac

SEQ ID NO: 497548 - RNA, 32 nt, Human
uccacgcauggagaacugcagcugugaggccc

SEQ ID NO: 497549 - RNA, 32 nt, Human
uccacgccaggccacgacggagggcgacuacc

SEQ ID NO: 497550 - RNA, 32 nt, Human
uccacgccgcucacuccagccgaggcccccgc

SEQ ID NO: 497551 - RNA, 32 nt, Human
uccacgccgcuuuugcccccucccuccccucc

SEQ ID NO: 497552 - RNA, 23 nt, Human
uccacgcggacaggcaguuccag

SEQ ID NO: 497553 - RNA, 20 nt, Human
uccacgcguacccuaaggcc

SEQ ID NO: 497554 - RNA, 32 nt, Human
uccacgcucuuugguuccuugugguccugcuc

SEQ ID NO: 497555 - RNA, 23 nt, Human
uccacgcugcaggacccgcgccg

SEQ ID NO: 497556 - RNA, 32 nt, Human
uccacgcugccuccuccucgaguuuuccucgg

SEQ ID NO: 497557 - RNA, 32 nt, Human
uccacgcugccuggagcagguuguuagagagc

SEQ ID NO: 497558 - RNA, 32 nt, Human
uccacgcugugaagcuuuguucuuuuggucuu

SEQ ID NO: 497559 - RNA, 22 nt, Human
uccacggacuucggagcauaga

SEQ ID NO: 497560 - RNA, 32 nt, Human
uccacggaggguggaagaggagaggguggaag

SEQ ID NO: 497561 - RNA, 32 nt, Human
uccacggcagcaucuucagcucuuggguuuag

SEQ ID NO: 497562 - RNA, 32 nt, Human
uccacggcagcuugagccccuuagcaccaugu

SEQ ID NO: 497563 - RNA, 32 nt, Human
uccacggccguacaauccccagcccuuccagc

SEQ ID NO: 497564 - RNA, 32 nt, Human
uccacggcuccugcuucugcccccaggguucg

SEQ ID NO: 497565 - RNA, 18 nt, Human
uccacggcugcccagggc

SEQ ID NO: 497566 - RNA, 32 nt, Human
uccacgggagagaagacgagccucccggcugu

SEQ ID NO: 497567 - RNA, 22 nt, Human
uccacggggucugccuuugcag

SEQ ID NO: 497568 - RNA, 32 nt, Human
uccacgggugccccuagcuggcccagagccgg

SEQ ID NO: 497569 - RNA, 32 nt, Human
uccacggguggaccaggauggagucuccugcc

SEQ ID NO: 497570 - RNA, 32 nt, Human
uccacgguagcagccacacuuccuucagaagg

SEQ ID NO: 497571 - RNA, 32 nt, Human
uccacggugacggguggcucuguggcugguag

SEQ ID NO: 497572 - RNA, 32 nt, Human
uccacggugccccguagcagcagguccugcgg

SEQ ID NO: 497573 - RNA, 24 nt, Human
uccacgguguucuggcagcaggga

SEQ ID NO: 497574 - RNA, 32 nt, Human
uccacgguuugcuuucugcaggauuuaaaaua

SEQ ID NO: 497575 - RNA, 21 nt, Human
uccacguaauucaauuucuca

SEQ ID NO: 497576 - RNA, 19 nt, Human
uccacgucaguucaugagg

SEQ ID NO: 497577 - RNA, 32 nt, Human
uccacguccagccugggaccuggcaucucugg

SEQ ID NO: 497578 - RNA, 32 nt, Human
uccacgucccgcccccuuccucuuccugccuc

SEQ ID NO: 497579 - RNA, 32 nt, Human
uccacgucccuggccuuccuccccuuccaggc

SEQ ID NO: 497580 - RNA, 32 nt, Human
uccacguccuuaucuucuugaugcaagacaau

SEQ ID NO: 497581 - RNA, 22 nt, Human
uccacgugaaaagaccaccaaa

SEQ ID NO: 497582 - RNA, 32 nt, Human
uccacgugcaggccaagagcacugagacaccc

SEQ ID NO: 497583 - RNA, 32 nt, Human
uccacgugcucgccucugcccagccugcccca

SEQ ID NO: 497584 - RNA, 32 nt, Human
uccacguguccacccuccugcucaugcagagg

SEQ ID NO: 497585 - RNA, 22 nt, Human
uccacguguucugguggaauga

SEQ ID NO: 497586 - RNA, 32 nt, Human
uccacguugggggacugaggccaacucuccuu

SEQ ID NO: 497587 - RNA, 32 nt, Human
uccacguuugacauuccaucagauuucgucca

SEQ ID NO: 497588 - RNA, 32 nt, Human
uccacuaaaaacaaaaacaauuagcugggcau

SEQ ID NO: 497589 - RNA, 32 nt, Human
uccacuaaaaauacaaaaauuagccaggcaug

SEQ ID NO: 497590 - RNA, 32 nt, Human
uccacuaaaaauacaaaaauuagccaggcgug

SEQ ID NO: 497591 - RNA, 32 nt, Human
uccacuaaaaauacaaaaauuagccaggugug

SEQ ID NO: 497592 - RNA, 32 nt, Human
uccacuaaaaauacaaaaauuagccgggcgug

SEQ ID NO: 497593 - RNA, 32 nt, Human
uccacuaaaaauacaaaaauuagccgggugug

SEQ ID NO: 497594 - RNA, 32 nt, Human
uccacuaaaaauacaaaauuagccgggcaugg

SEQ ID NO: 497595 - RNA, 32 nt, Human
uccacuaaaaauacaaaauuagccgggugugg

SEQ ID NO: 497596 - RNA, 32 nt, Human
uccacuaaaaauacaaaauuagcugggcgugg

SEQ ID NO: 497597 - RNA, 32 nt, Human
uccacuaaaaauacaaaauuagcugggugugg

SEQ ID NO: 497598 - RNA, 32 nt, Human
uccacuaaaauacaaaauuagcuggguguggu

SEQ ID NO: 497599 - RNA, 32 nt, Human
uccacuaaccaccaccaccaccaccgccgcca

SEQ ID NO: 497600 - RNA, 32 nt, Human
uccacuaacugcacuuccuucccacuggaaaa

SEQ ID NO: 497601 - RNA, 32 nt, Human
uccacuaagaacaccugcauucuucccuuauc

SEQ ID NO: 497602 - RNA, 32 nt, Human
uccacuacccuguuaagagcagccugggaacg

SEQ ID NO: 497603 - RNA, 32 nt, Human
uccacuacucaucucuggaauuagccgcuuaa

SEQ ID NO: 497604 - RNA, 19 nt, Human
uccacuacuccaccucaga

SEQ ID NO: 497605 - RNA, 32 nt, Human
uccacuagacccccuuccccagccucucuagu

SEQ ID NO: 497606 - RNA, 20 nt, Human
uccacuagagcugccugcca

SEQ ID NO: 497607 - RNA, 32 nt, Human
uccacuauucuggccuucuacaaguuccaaaa

SEQ ID NO: 497608 - RNA, 32 nt, Human
uccacucaacaucaagauaagcugcucuauau

SEQ ID NO: 497609 - RNA, 32 nt, Human
uccacucaaccaggccuccaccugccauggag

SEQ ID NO: 497610 - RNA, 31 nt, Human
uccacucaaguguccuuuucuguaggcagga

SEQ ID NO: 497611 - RNA, 32 nt, Human
uccacucacugcaacuuccgccuccugggguc

SEQ ID NO: 497612 - RNA, 32 nt, Human
uccacucacugcagccuccgccucugggguuc

SEQ ID NO: 497613 - RNA, 32 nt, Human
uccacucacugcaggcuccgccucccggguuc

SEQ ID NO: 497614 - RNA, 32 nt, Human
uccacucaggugcacacaucaccaggugcauc

SEQ ID NO: 497615 - RNA, 32 nt, Human
uccacucauccccuucuucucuccuuggccuc

SEQ ID NO: 497616 - RNA, 32 nt, Human
uccacuccaaggcugccugccugcuguaaaca

SEQ ID NO: 497617 - RNA, 26 nt, Human
uccacuccaaucagucuaucuucaca

SEQ ID NO: 497618 - RNA, 32 nt, Human
uccacuccagccugagcaacacagugagaccc

SEQ ID NO: 497619 - RNA, 32 nt, Human
uccacuccagccugggcaacagugugagaccu

SEQ ID NO: 497620 - RNA, 32 nt, Human
uccacuccagcuguuucccaaauccuuccuuc

SEQ ID NO: 497621 - RNA, 32 nt, Human
uccacucccugaggccacuuagccugagacau

SEQ ID NO: 497622 - RNA, 32 nt, Human
uccacucccugccugugcugguugcagccuca

SEQ ID NO: 497623 - RNA, 32 nt, Human
uccacuccuccccucacuccccugcucccccg

SEQ ID NO: 497624 - RNA, 32 nt, Human
uccacuccucuccaggagcuagccugugcccu

SEQ ID NO: 497625 - RNA, 32 nt, Human
uccacuccugcucucccuccugcaggugaccc

SEQ ID NO: 497626 - RNA, 32 nt, Human
uccacuccuuacugccaagucucaagcauacc

SEQ ID NO: 497627 - RNA, 32 nt, Human
uccacuccuuggcuggaggcagugcugaggcc

SEQ ID NO: 497628 - RNA, 32 nt, Human
uccacucggccugggagguucuggauuuuggc

SEQ ID NO: 497629 - RNA, 32 nt, Human
uccacucggggaacuccuuuccaagcugaccu

SEQ ID NO: 497630 - RNA, 22 nt, Human
uccacucggggguggagugaga

SEQ ID NO: 497631 - RNA, 24 nt, Human
uccacucguccgcacgguacgucu

SEQ ID NO: 497632 - RNA, 32 nt, Human
uccacucgugguugugauuuucaccuucucaa

SEQ ID NO: 497633 - RNA, 27 nt, Human
uccacucuagaggccaggccaccagca

SEQ ID NO: 497634 - RNA, 32 nt, Human
uccacucuaguugaguucugcagcaugcagcg

SEQ ID NO: 497635 - RNA, 32 nt, Human
uccacucucccagcucagggcuccagcuguug

SEQ ID NO: 497636 - RNA, 32 nt, Human
uccacucuccccucucucugggaucauagagu

SEQ ID NO: 497637 - RNA, 32 nt, Human
uccacucucccucaagccugugcucagguugc

SEQ ID NO: 497638 - RNA, 32 nt, Human
uccacucugauagaauuauuucacaaauaaua

SEQ ID NO: 497639 - RNA, 32 nt, Human
uccacucugauccugcaucccacucccuggga

SEQ ID NO: 497640 - RNA, 32 nt, Human
uccacucugcagccucaaacuccugggcucca

SEQ ID NO: 497641 - RNA, 32 nt, Human
uccacucugcagucuaggugggugauauucug

SEQ ID NO: 497642 - RNA, 32 nt, Human
uccacucugccucuugcaagcugugugacccc

SEQ ID NO: 497643 - RNA, 32 nt, Human
uccacucugccucuugcaagcugugugacccu

SEQ ID NO: 497644 - RNA, 32 nt, Human
uccacucugcucugagcagccugggaugcuga

SEQ ID NO: 497645 - RNA, 32 nt, Human
uccacucugcuucucugacuucugccuggaga

SEQ ID NO: 497646 - RNA, 32 nt, Human
uccacucugggcaggugacuggaauagcugau

SEQ ID NO: 497647 - RNA, 32 nt, Human
uccacucuguccguggaguggagcugcugguu

SEQ ID NO: 497648 - RNA, 32 nt, Human
uccacucuuucugcccucaccugggcaacguu

SEQ ID NO: 497649 - RNA, 21 nt, Human
uccacucuuuucuucuucaca

SEQ ID NO: 497650 - RNA, 20 nt, Human
uccacugaagcugacuuagc

SEQ ID NO: 497651 - RNA, 32 nt, Human
uccacugaauauuuaaauuuuccucuuaaaug

SEQ ID NO: 497652 - RNA, 20 nt, Human
uccacugaccaggcugugaa

SEQ ID NO: 497653 - RNA, 32 nt, Human
uccacugacuccagagagggagauccccagua

SEQ ID NO: 497654 - RNA, 18 nt, Human
uccacugacugccuguca

SEQ ID NO: 497655 - RNA, 32 nt, Human
uccacugagaagccacuucaagaggcuggugc

SEQ ID NO: 497656 - RNA, 32 nt, Human
uccacugagagcuguucuuuugcucaauaaaa

SEQ ID NO: 497657 - RNA, 32 nt, Human
uccacugagauguuugcauggagagaaacaua

SEQ ID NO: 497658 - RNA, 32 nt, Human
uccacugagauucucuaugaggauguacagaa

SEQ ID NO: 497659 - RNA, 32 nt, Human
uccacugagccaagaucgcucccacugcacuc

SEQ ID NO: 497660 - RNA, 32 nt, Human
uccacugagcugacaguaaagcugcagugauu

SEQ ID NO: 497661 - RNA, 32 nt, Human
uccacugagggccgagacuuugucuuugcggc

SEQ ID NO: 497662 - RNA, 32 nt, Human
uccacugagguugggguguacuaguuacacau

SEQ ID NO: 497663 - RNA, 32 nt, Human
uccacugaugcaggagcugccaccccaagggg

SEQ ID NO: 497664 - RNA, 32 nt, Human
uccacugauuccuucuuagccauggagagcau

SEQ ID NO: 497665 - RNA, 32 nt, Human
uccacugauuuccugauguccaugucuauaug

SEQ ID NO: 497666 - RNA, 32 nt, Human
uccacugcaccacuacucccaagccuagggau

SEQ ID NO: 497667 - RNA, 32 nt, Human
uccacugcacuccagcccaggugacaguguga

SEQ ID NO: 497668 - RNA, 32 nt, Human
uccacugcacuccagccugggugacagaccga

SEQ ID NO: 497669 - RNA, 32 nt, Human
uccacugcacuccagccugggugacagaucca

SEQ ID NO: 497670 - RNA, 32 nt, Human
uccacugcagcucugggcuccauuucccuuug

SEQ ID NO: 497671 - RNA, 32 nt, Human
uccacugccaagcaggacuuggcacaugagca

SEQ ID NO: 497672 - RNA, 32 nt, Human
uccacugcccuggcagcagcagguguggccaa

SEQ ID NO: 497673 - RNA, 32 nt, Human
uccacugccucccagguucaugccauucuccu

SEQ ID NO: 497674 - RNA, 32 nt, Human
uccacugccugggagcagcucacucagcuugc

SEQ ID NO: 497675 - RNA, 32 nt, Human
uccacugcguugucccauccagccuccacucg

SEQ ID NO: 497676 - RNA, 32 nt, Human
uccacugcuaacaacaggacugccuuucccug

SEQ ID NO: 497677 - RNA, 32 nt, Human
uccacugcuaucuucuucuguccugaguuugg

SEQ ID NO: 497678 - RNA, 32 nt, Human
uccacugcugcucccggguccugcugcccgag

SEQ ID NO: 497679 - RNA, 32 nt, Human
uccacugcuucuaccuccccucccaggacccc

SEQ ID NO: 497680 - RNA, 32 nt, Human
uccacuggaucaccgccgucacugccuguucc

SEQ ID NO: 497681 - RNA, 32 nt, Human
uccacuggcacuucccugcuuugcuaccaucg

SEQ ID NO: 497682 - RNA, 32 nt, Human
uccacuggcagcuugcacucucagccugaaaa

SEQ ID NO: 497683 - RNA, 32 nt, Human
uccacuggcuggcugcgggcuccagcggccgu

SEQ ID NO: 497684 - RNA, 32 nt, Human
uccacugggaaaaggggaaaaagggaauucuu

SEQ ID NO: 497685 - RNA, 32 nt, Human
uccacugggaagagacaggaauucuaccuaca

SEQ ID NO: 497686 - RNA, 32 nt, Human
uccacugggaucaugagucacucugaagccac

SEQ ID NO: 497687 - RNA, 32 nt, Human
uccacugggcugcccaagcugcaugucaccug

SEQ ID NO: 497688 - RNA, 32 nt, Human
uccacugggguuucuuucaguuucccaaauac

SEQ ID NO: 497689 - RNA, 32 nt, Human
uccacuggucucaaaagucaccugccuacaaa

SEQ ID NO: 497690 - RNA, 19 nt, Human
uccacugguucccauggcc

SEQ ID NO: 497691 - RNA, 24 nt, Human
uccacuguacacgcuguauauagg

SEQ ID NO: 497692 - RNA, 32 nt, Human
uccacugucaccaagcuggauggcaagcugcg

SEQ ID NO: 497693 - RNA, 32 nt, Human
uccacugucacuguuucucugcuguugcaaau

SEQ ID NO: 497694 - RNA, 32 nt, Human
uccacugucauaaucucuuuccaucuuacuug

SEQ ID NO: 497695 - RNA, 32 nt, Human
uccacugucaucaaacuggccauguccuggcc

SEQ ID NO: 497696 - RNA, 18 nt, Human
uccacugucuccacucuc

SEQ ID NO: 497697 - RNA, 32 nt, Human
uccacugucuguuccuuuugcugucugaacuu

SEQ ID NO: 497698 - RNA, 32 nt, Human
uccacugugaacugaggaggggaggggugugc

SEQ ID NO: 497699 - RNA, 32 nt, Human
uccacugugcacgguuaaaaggccaacuccac

SEQ ID NO: 497700 - RNA, 32 nt, Human
uccacugugcaggaguggccggggaagcuggc

SEQ ID NO: 497701 - RNA, 32 nt, Human
uccacugugcccaccacugcccucccccuugc

SEQ ID NO: 497702 - RNA, 32 nt, Human
uccacuguggacccccaaaaccuguccugucc

SEQ ID NO: 497703 - RNA, 23 nt, Human
uccacuguggagauggcuggggc

SEQ ID NO: 497704 - RNA, 19 nt, Human
uccacugugggacccuuga

SEQ ID NO: 497705 - RNA, 32 nt, Human
uccacuguggugugcucuccagcucuucaccu

SEQ ID NO: 497706 - RNA, 32 nt, Human
uccacuguuccaucuguggccuaggcauggcg

SEQ ID NO: 497707 - RNA, 32 nt, Human
uccacuguuguguuuggcaugaacacagucuu

SEQ ID NO: 497708 - RNA, 21 nt, Human
uccacuuaacucgcgccgccg

SEQ ID NO: 497709 - RNA, 32 nt, Human
uccacuuaaggaugaggcagacuuggugacaa

SEQ ID NO: 497710 - RNA, 32 nt, Human
uccacuuauaauaccaacugucuugucagacu

SEQ ID NO: 497711 - RNA, 20 nt, Human
uccacuuauccccuccguga

SEQ ID NO: 497712 - RNA, 32 nt, Human
uccacuucacaauauuugauauucaggagcau

SEQ ID NO: 497713 - RNA, 32 nt, Human
uccacuucaugaguguuuuacaacagcacuug

SEQ ID NO: 497714 - RNA, 32 nt, Human
uccacuuccaugccuggaggaagccugcaacc

SEQ ID NO: 497715 - RNA, 32 nt, Human
uccacuucccccaggucuugguuuugagaaac

SEQ ID NO: 497716 - RNA, 32 nt, Human
uccacuuccuuucuucuucuucuaaaauauug

SEQ ID NO: 497717 - RNA, 32 nt, Human
uccacuucgccuucugccaugacuguccguuu

SEQ ID NO: 497718 - RNA, 32 nt, Human
uccacuucuaacuccacuggcuccaugauucu

SEQ ID NO: 497719 - RNA, 32 nt, Human
uccacuucucacaggccuccucuuucaaauaa

SEQ ID NO: 497720 - RNA, 32 nt, Human
uccacuucucacucuuauggucucaaagcuug

SEQ ID NO: 497721 - RNA, 32 nt, Human
uccacuucuccaagaauggaagccugaacuga

SEQ ID NO: 497722 - RNA, 32 nt, Human
uccacuucuccccucacuuuccccucacccau

SEQ ID NO: 497723 - RNA, 32 nt, Human
uccacuucucugcuuccuccacguccuaacga

SEQ ID NO: 497724 - RNA, 32 nt, Human
uccacuucugcagcaagcuucuuccuggacau

SEQ ID NO: 497725 - RNA, 32 nt, Human
uccacuucuuaaugcuuuccucccuggcauga

SEQ ID NO: 497726 - RNA, 32 nt, Human
uccacuugagguucaugagaauguaucuuuuu

SEQ ID NO: 497727 - RNA, 32 nt, Human
uccacuugcacacacgcacacacucaugcuca

SEQ ID NO: 497728 - RNA, 31 nt, Human
uccacuugcauaauucaugccaacacugguu

SEQ ID NO: 497729 - RNA, 32 nt, Human
uccacuugcuuccaaggugcuagggaaguuuc

SEQ ID NO: 497730 - RNA, 32 nt, Human
uccacuuggccaaacuuuagccaagcuccuca

SEQ ID NO: 497731 - RNA, 32 nt, Human
uccacuuggcuccucucacuucccaggggguc

SEQ ID NO: 497732 - RNA, 32 nt, Human
uccacuugucccagguuagggggcuugccuug

SEQ ID NO: 497733 - RNA, 32 nt, Human
uccacuuguucagucugaaaugcagcucccug

SEQ ID NO: 497734 - RNA, 32 nt, Human
uccacuuuaaaauucuuuagugcucaaaacca

SEQ ID NO: 497735 - RNA, 32 nt, Human
uccacuuuaaggcuuuaaaagacagugaagcu

SEQ ID NO: 497736 - RNA, 32 nt, Human
uccacuuuccauccugucugggucugaaaaca

SEQ ID NO: 497737 - RNA, 32 nt, Human
uccacuuuccauuuucucuuucaccucauuuu

SEQ ID NO: 497738 - RNA, 32 nt, Human
uccacuuuccuucaggcucugugaauacuuca

SEQ ID NO: 497739 - RNA, 32 nt, Human
uccacuuugccucccccaaucacugcggcggc

SEQ ID NO: 497740 - RNA, 32 nt, Human
uccacuuugccucugcugcucugccagucugc

SEQ ID NO: 497741 - RNA, 19 nt, Human
uccacuuuuccacuucuca

SEQ ID NO: 497742 - RNA, 19 nt, Human
uccacuuuuuccacucuua

SEQ ID NO: 497743 - RNA, 23 nt, Human
uccagaaaaaauaucuuucagga

SEQ ID NO: 497744 - RNA, 32 nt, Human
uccagaaaaaggagguuggggcaccaaaacca

SEQ ID NO: 497745 - RNA, 22 nt, Human
uccagaaaacagggcuaacuua

SEQ ID NO: 497746 - RNA, 24 nt, Human
uccagaaaacuccuggaagacccg

SEQ ID NO: 497747 - RNA, 25 nt, Human
uccagaaaagaggcuaggagaggcc

SEQ ID NO: 497748 - RNA, 21 nt, Human
uccagaaaaggggcugggaug

SEQ ID NO: 497749 - RNA, 32 nt, Human
uccagaaaaggguggcugcagauggagcagcu

SEQ ID NO: 497750 - RNA, 32 nt, Human
uccagaaacagcuuggccagcuuugugaaccu

SEQ ID NO: 497751 - RNA, 22 nt, Human
uccagaaacauggcagagcaga

SEQ ID NO: 497752 - RNA, 25 nt, Human
uccagaaagagugaccugguguccc

SEQ ID NO: 497753 - RNA, 23 nt, Human
uccagaaagaucugcucugcugc

SEQ ID NO: 497754 - RNA, 18 nt, Human
uccagaaagcaccaagga

SEQ ID NO: 497755 - RNA, 32 nt, Human
uccagaaagcagagaagauaccagaggaggga

SEQ ID NO: 497756 - RNA, 25 nt, Human
uccagaaagccagcucucuucugaa

SEQ ID NO: 497757 - RNA, 32 nt, Human
uccagaaagcugagguuucuccaggucugacc

SEQ ID NO: 497758 - RNA, 32 nt, Human
uccagaaaggguugcuagccuuaacuucagcu

SEQ ID NO: 497759 - RNA, 20 nt, Human
uccagaaagucacacucuca

SEQ ID NO: 497760 - RNA, 32 nt, Human
uccagaaaucauacugcauacaugcuacaaaa

SEQ ID NO: 497761 - RNA, 32 nt, Human
uccagaaaugagcacaucagaggcucuggggu

SEQ ID NO: 497762 - RNA, 32 nt, Human
uccagaacacaaaucagagggaaagggggugu

SEQ ID NO: 497763 - RNA, 32 nt, Human
uccagaacagaagaaagaugaaagccagaaga

SEQ ID NO: 497764 - RNA, 32 nt, Human
uccagaaccaacugcauugguuuuccaugacc

SEQ ID NO: 497765 - RNA, 32 nt, Human
uccagaaccauccccuuuuuccauuuuuauau

SEQ ID NO: 497766 - RNA, 32 nt, Human
uccagaacccagccuccuggguuuccccaguc

SEQ ID NO: 497767 - RNA, 32 nt, Human
uccagaaccucagcagaucugagccaccgccu

SEQ ID NO: 497768 - RNA, 18 nt, Human
uccagaacuccacuguca

SEQ ID NO: 497769 - RNA, 24 nt, Human
uccagaagaaugaaggucuagaga

SEQ ID NO: 497770 - RNA, 32 nt, Human
uccagaagagaagaaagacauggcugacagug

SEQ ID NO: 497771 - RNA, 32 nt, Human
uccagaagagaugggaaaaggucaucaaaggg

SEQ ID NO: 497772 - RNA, 18 nt, Human
uccagaagagccccugcc

SEQ ID NO: 497773 - RNA, 20 nt, Human
uccagaagaguggaaaugcc

SEQ ID NO: 497774 - RNA, 32 nt, Human
uccagaagaugccagcuucucucuccagggug

SEQ ID NO: 497775 - RNA, 20 nt, Human
uccagaagaugugagaagcc

SEQ ID NO: 497776 - RNA, 32 nt, Human
uccagaagccccgcggaacagagagcccugcu

SEQ ID NO: 497777 - RNA, 32 nt, Human
uccagaagccccgucuaaccaaccuauucaga

SEQ ID NO: 497778 - RNA, 18 nt, Human
uccagaagccuaauccau

SEQ ID NO: 497779 - RNA, 32 nt, Human
uccagaagccuccuguuggccuuggaauaugg

SEQ ID NO: 497780 - RNA, 32 nt, Human
uccagaagcucccagaugugugcaccugugga

SEQ ID NO: 497781 - RNA, 32 nt, Human
uccagaagcugaacuccagcccuaagagcccc

SEQ ID NO: 497782 - RNA, 32 nt, Human
uccagaagcugaggcuggagaaucacuugaac

SEQ ID NO: 497783 - RNA, 19 nt, Human
uccagaaggaccauucuca

SEQ ID NO: 497784 - RNA, 32 nt, Human
uccagaaggcaaauacuuuuguaucagaggaa

SEQ ID NO: 497785 - RNA, 21 nt, Human
uccagaaggcggagguugcag

SEQ ID NO: 497786 - RNA, 32 nt, Human
uccagaaggcggagguugcagugagcugagau

SEQ ID NO: 497787 - RNA, 21 nt, Human
uccagaagggacagugaugcc

SEQ ID NO: 497788 - RNA, 19 nt, Human
uccagaagggagaauccgu

SEQ ID NO: 497789 - RNA, 21 nt, Human
uccagaagucagagccaacuc

SEQ ID NO: 497790 - RNA, 32 nt, Human
uccagaagugcgggguaggggaagaagagcua

SEQ ID NO: 497791 - RNA, 23 nt, Human
uccagaaguggccuagaaaugcc

SEQ ID NO: 497792 - RNA, 32 nt, Human
uccagaaucacugcuaaguucuugucaacaag

SEQ ID NO: 497793 - RNA, 32 nt, Human
uccagaauccugcuuaagguuuuaggguaccu

SEQ ID NO: 497794 - RNA, 32 nt, Human
uccagaaucgcaaucccuucuccccacagcca

SEQ ID NO: 497795 - RNA, 32 nt, Human
uccagaauggcaguagcuuuagcaagcagaug

SEQ ID NO: 497796 - RNA, 32 nt, Human
uccagaauggccaccaggcuucccagaguucu

SEQ ID NO: 497797 - RNA, 32 nt, Human
uccagaaugguauggaaucugagggaagauuu

SEQ ID NO: 497798 - RNA, 24 nt, Human
uccagaauguaccguucaucgccg

SEQ ID NO: 497799 - RNA, 32 nt, Human
uccagaauuaacaagaaagccaucucuuccuc

SEQ ID NO: 497800 - RNA, 20 nt, Human
uccagaauuuucaccuggua

SEQ ID NO: 497801 - RNA, 32 nt, Human
uccagacaagggcaagaguuagccagaugcuc

SEQ ID NO: 497802 - RNA, 32 nt, Human
uccagacaaugccagcauaaauccauccaucc

SEQ ID NO: 497803 - RNA, 32 nt, Human
uccagacacaaguugucauuuagaugaagcuu

SEQ ID NO: 497804 - RNA, 32 nt, Human
uccagacacacgugcacaggcgcagauaugcu

SEQ ID NO: 497805 - RNA, 32 nt, Human
uccagacacuauacuuccaacugcccuuucuu

SEQ ID NO: 497806 - RNA, 32 nt, Human
uccagacacugcgcccuccacccucacucugc

SEQ ID NO: 497807 - RNA, 32 nt, Human
uccagacaggguggggcuuagaauggggcuuc

SEQ ID NO: 497808 - RNA, 32 nt, Human
uccagacauuuacucuuaaucacugcauuaau

SEQ ID NO: 497809 - RNA, 32 nt, Human
uccagaccaaccuggccaacaugguaaaaccc

SEQ ID NO: 497810 - RNA, 32 nt, Human
uccagaccacccuggccaacauggugaaaccc

SEQ ID NO: 497811 - RNA, 32 nt, Human
uccagaccagccugaccaaaauggugaaaccu

SEQ ID NO: 497812 - RNA, 32 nt, Human
uccagaccagccugaccaacguggugaaacuc

SEQ ID NO: 497813 - RNA, 32 nt, Human
uccagaccagccuggccaacauagugaaaccc

SEQ ID NO: 497814 - RNA, 32 nt, Human
uccagaccagccuggccaacaugaugaaaccc

SEQ ID NO: 497815 - RNA, 32 nt, Human
uccagaccagccuggccaacauggcaaaaccc

SEQ ID NO: 497816 - RNA, 32 nt, Human
uccagaccagccuggccaacauggcgaaaccc

SEQ ID NO: 497817 - RNA, 32 nt, Human
uccagaccagccuggccaacauggcuuucuuc

SEQ ID NO: 497818 - RNA, 32 nt, Human
uccagaccagccuggccaacauggugaaaccc

SEQ ID NO: 497819 - RNA, 32 nt, Human
uccagaccagccuggccaacauggugaaaccu

SEQ ID NO: 497820 - RNA, 32 nt, Human
uccagaccagccuggccaacauggugaaacuc

SEQ ID NO: 497821 - RNA, 32 nt, Human
uccagaccagccuggccaccuuagugagaucc

SEQ ID NO: 497822 - RNA, 32 nt, Human
uccagaccagccuggccaucauggugaaaucc

SEQ ID NO: 497823 - RNA, 32 nt, Human
uccagaccagccuggcuaauauggugaaaccu

SEQ ID NO: 497824 - RNA, 32 nt, Human
uccagaccagccugggcaacauagugagacuc

SEQ ID NO: 497825 - RNA, 32 nt, Human
uccagaccagccugggcaacauagugagaucc

SEQ ID NO: 497826 - RNA, 32 nt, Human
uccagaccagccugggcagcaucgugagaccc

SEQ ID NO: 497827 - RNA, 32 nt, Human
uccagaccagccuggucaacauggugaaaccc

SEQ ID NO: 497828 - RNA, 32 nt, Human
uccagaccagccuguucaacauggcgaaaccc

SEQ ID NO: 497829 - RNA, 32 nt, Human
uccagaccaggcauugcccagccugggaaucu

SEQ ID NO: 497830 - RNA, 32 nt, Human
uccagaccaggcugggucacaugacaaagccc

SEQ ID NO: 497831 - RNA, 32 nt, Human
uccagaccauccuggccaacauggugaaaucg

SEQ ID NO: 497832 - RNA, 32 nt, Human
uccagaccauccuggcuaacacggugaaaccc

SEQ ID NO: 497833 - RNA, 32 nt, Human
uccagaccaucuuggcuaacagggugaaaccc

SEQ ID NO: 497834 - RNA, 32 nt, Human
uccagacccaggaagccugaggggaaggaagg

SEQ ID NO: 497835 - RNA, 32 nt, Human
uccagaccccaagagaggguucuuggaucucg

SEQ ID NO: 497836 - RNA, 16 nt, Human
uccagacccgccgcug

SEQ ID NO: 497837 - RNA, 18 nt, Human
uccagacccgcugcuguc

SEQ ID NO: 497838 - RNA, 23 nt, Human
uccagacccugcugaacgagcua

SEQ ID NO: 497839 - RNA, 19 nt, Human
uccagacccugugcucuua

SEQ ID NO: 497840 - RNA, 24 nt, Human
uccagaccgagggcucugcugcuu

SEQ ID NO: 497841 - RNA, 32 nt, Human
uccagaccgcagcugcaaaugcagcuucaacu

SEQ ID NO: 497842 - RNA, 32 nt, Human
uccagaccguccuggcuaacauggugaaaccc

SEQ ID NO: 497843 - RNA, 32 nt, Human
uccagaccuaccucggaccaaauguucucuac

SEQ ID NO: 497844 - RNA, 32 nt, Human
uccagaccucaagugaucugcccgccucggcc

SEQ ID NO: 497845 - RNA, 24 nt, Human
uccagaccucaggugauccacccg

SEQ ID NO: 497846 - RNA, 24 nt, Human
uccagaccucaggugauccgccca

SEQ ID NO: 497847 - RNA, 24 nt, Human
uccagaccucaggugaucuaccca

SEQ ID NO: 497848 - RNA, 32 nt, Human
uccagaccucaugauuuacccaccucggccuc

SEQ ID NO: 497849 - RNA, 21 nt, Human
uccagaccucgcguccucucg

SEQ ID NO: 497850 - RNA, 18 nt, Human
uccagaccucgguucuua

SEQ ID NO: 497851 - RNA, 32 nt, Human
uccagaccuuggcaaauguuaucuguggggga

SEQ ID NO: 497852 - RNA, 19 nt, Human
uccagacgcucccagggcc

SEQ ID NO: 497853 - RNA, 32 nt, Human
uccagacuaaggcuucuaaccaggcuggagcc

SEQ ID NO: 497854 - RNA, 32 nt, Human
uccagacuagaagaaagugaggcagcucaccu

SEQ ID NO: 497855 - RNA, 32 nt, Human
uccagacucuccccucucccacccuucuaccc

SEQ ID NO: 497856 - RNA, 22 nt, Human
uccagacuggacaacagagcaa

SEQ ID NO: 497857 - RNA, 18 nt, Human
uccagacuggcacuuuca

SEQ ID NO: 497858 - RNA, 32 nt, Human
uccagacugggcgacagagcaagacucugucu

SEQ ID NO: 497859 - RNA, 32 nt, Human
uccagacugggcgcgaccacuaacccgguuaa

SEQ ID NO: 497860 - RNA, 32 nt, Human
uccagacugggggagagagcaagacucugucu

SEQ ID NO: 497861 - RNA, 24 nt, Human
uccagacugggugacacagcgaga

SEQ ID NO: 497862 - RNA, 32 nt, Human
uccagacugggugacacagcgagacuucaucu

SEQ ID NO: 497863 - RNA, 32 nt, Human
uccagacugggugacagagugagacuccaucu

SEQ ID NO: 497864 - RNA, 32 nt, Human
uccagacuggucucaaacuccugggcucaagc

SEQ ID NO: 497865 - RNA, 24 nt, Human
uccagacugugcgacagagcgaga

SEQ ID NO: 497866 - RNA, 32 nt, Human
uccagacuucacacaguauucucccccacgcc

SEQ ID NO: 497867 - RNA, 32 nt, Human
uccagacuuccucugcuggucuggccugguga

SEQ ID NO: 497868 - RNA, 32 nt, Human
uccagacuugcaaauccaguguggaccugaug

SEQ ID NO: 497869 - RNA, 32 nt, Human
uccagacuugccugugagugccccuugaugga

SEQ ID NO: 497870 - RNA, 32 nt, Human
uccagacuuggugacagagcaagacuccaucu

SEQ ID NO: 497871 - RNA, 32 nt, Human
uccagacuuuguccaacauuuauuccuauggc

SEQ ID NO: 497872 - RNA, 32 nt, Human
uccagagaaaagccacuuuaaaaacagcugaa

SEQ ID NO: 497873 - RNA, 32 nt, Human
uccagagaaggugggagcggagaguuugaagu

SEQ ID NO: 497874 - RNA, 32 nt, Human
uccagagacacuccugaaauuguccuaaguca

SEQ ID NO: 497875 - RNA, 32 nt, Human
uccagagacaguggccuugcucugguugucca

SEQ ID NO: 497876 - RNA, 32 nt, Human
uccagagaccccagcaccuggcccaggaugca

SEQ ID NO: 497877 - RNA, 32 nt, Human
uccagagagaagcagcagagagaggcgcugga

SEQ ID NO: 497878 - RNA, 32 nt, Human
uccagagagaguuggcugccacagccucugcc

SEQ ID NO: 497879 - RNA, 32 nt, Human
uccagagagcagcucccuuucucaggagcuug

SEQ ID NO: 497880 - RNA, 32 nt, Human
uccagagagcagugggagacgcuggcagcagg

SEQ ID NO: 497881 - RNA, 18 nt, Human
uccagagagcccagggcc

SEQ ID NO: 497882 - RNA, 32 nt, Human
uccagagagcugccuuccacaagaccagcaga

SEQ ID NO: 497883 - RNA, 22 nt, Human
uccagagaggcccuucuuugga

SEQ ID NO: 497884 - RNA, 32 nt, Human
uccagagaggcuggaugacuugcucaaguuca

SEQ ID NO: 497885 - RNA, 32 nt, Human
uccagagagggcauggaggcuccauacaaccu

SEQ ID NO: 497886 - RNA, 27 nt, Human
uccagagaguggaccuugacucuucca

SEQ ID NO: 497887 - RNA, 32 nt, Human
uccagagaugaagauuuaugaagucagugaag

SEQ ID NO: 497888 - RNA, 32 nt, Human
uccagagauggaaacucacuccccuacaaaag

SEQ ID NO: 497889 - RNA, 22 nt, Human
uccagagauuuuaccagagguu

SEQ ID NO: 497890 - RNA, 32 nt, Human
uccagagcaaaccgcccagaguagaagaugga

SEQ ID NO: 497891 - RNA, 32 nt, Human
uccagagcaaggcccagcugggcagaggguga

SEQ ID NO: 497892 - RNA, 32 nt, Human
uccagagcacugagcagagaggcuggugauga

SEQ ID NO: 497893 - RNA, 32 nt, Human
uccagagcagccuguggccuguaaagcauaua

SEQ ID NO: 497894 - RNA, 31 nt, Human
uccagagcaggacuggagcuuugugcucagc

SEQ ID NO: 497895 - RNA, 32 nt, Human
uccagagcauuaauuguaucacuguguauggu

SEQ ID NO: 497896 - RNA, 32 nt, Human
uccagagcauugacuuccucuuccuagacuug

SEQ ID NO: 497897 - RNA, 32 nt, Human
uccagagcauuuugcauacaucuuuaggguua

SEQ ID NO: 497898 - RNA, 32 nt, Human
uccagagccaggagaguuggaccauugagggc

SEQ ID NO: 497899 - RNA, 32 nt, Human
uccagagccaugggagcggaaaggaggcugcu

SEQ ID NO: 497900 - RNA, 22 nt, Human
uccagagcccagcguucaguua

SEQ ID NO: 497901 - RNA, 32 nt, Human
uccagagccugcucugaauuugacuuuggcau

SEQ ID NO: 497902 - RNA, 32 nt, Human
uccagagccugggaugggcuuuucccuguggg

SEQ ID NO: 497903 - RNA, 26 nt, Human
uccagagccugggcgacagagcgaga

SEQ ID NO: 497904 - RNA, 26 nt, Human
uccagagccugggugacagagcaaga

SEQ ID NO: 497905 - RNA, 19 nt, Human
uccagagccuucgcuccca

SEQ ID NO: 497906 - RNA, 32 nt, Human
uccagagcucacugcccuucuagaugugccuu

SEQ ID NO: 497907 - RNA, 26 nt, Human
uccagagcugcaaguuuuaaaguguu

SEQ ID NO: 497908 - RNA, 21 nt, Human
uccagagcuggagugcagcgg

SEQ ID NO: 497909 - RNA, 32 nt, Human
uccagagcuguggguagaggacaucgccucac

SEQ ID NO: 497910 - RNA, 32 nt, Human
uccagagcuucaaaggcaacacaagcucgcaa

SEQ ID NO: 497911 - RNA, 32 nt, Human
uccagagcuuggagguuccagguccagaucca

SEQ ID NO: 497912 - RNA, 32 nt, Human
uccagaggaaaaacagaggaugcugaaguaca

SEQ ID NO: 497913 - RNA, 32 nt, Human
uccagaggaagaggaggaggcggcgaagcguu

SEQ ID NO: 497914 - RNA, 32 nt, Human
uccagaggaagcaaggaggagggagguggggu

SEQ ID NO: 497915 - RNA, 32 nt, Human
uccagaggaauguuuugcuauguagggaaauu

SEQ ID NO: 497916 - RNA, 32 nt, Human
uccagaggaccaagaaauaccugugugacaca

SEQ ID NO: 497917 - RNA, 32 nt, Human
uccagaggagccccucuuggacugccuggguu

SEQ ID NO: 497918 - RNA, 32 nt, Human
uccagaggagcguuucccaagacacuggcugc

SEQ ID NO: 497919 - RNA, 32 nt, Human
uccagaggcaacaggugucuuccggucccagg

SEQ ID NO: 497920 - RNA, 32 nt, Human
uccagaggcaagcacaauauuacagaggaacu

SEQ ID NO: 497921 - RNA, 32 nt, Human
uccagaggcaggcagaggaaauauugucagag

SEQ ID NO: 497922 - RNA, 25 nt, Human
uccagaggcccugagcagcuuucag

SEQ ID NO: 497923 - RNA, 32 nt, Human
uccagaggccuggaagggagguggagguccag

SEQ ID NO: 497924 - RNA, 20 nt, Human
uccagaggcggagguugcag

SEQ ID NO: 497925 - RNA, 32 nt, Human
uccagaggcuaagaaauuucuguuaguaaaag

SEQ ID NO: 497926 - RNA, 32 nt, Human
uccagaggcuaaggcaggagaauugcuugaac

SEQ ID NO: 497927 - RNA, 21 nt, Human
uccagaggcuauguucaguug

SEQ ID NO: 497928 - RNA, 32 nt, Human
uccagaggcucuagaggagaaucuuuccuugc

SEQ ID NO: 497929 - RNA, 32 nt, Human
uccagaggcugaaaugggaggaucucuugagc

SEQ ID NO: 497930 - RNA, 32 nt, Human
uccagaggcugaggcaggagaaucacuugaac

SEQ ID NO: 497931 - RNA, 32 nt, Human
uccagaggcugaggcaggagaaucgcuugaac

SEQ ID NO: 497932 - RNA, 32 nt, Human
uccagaggcugaggcaggagaauggcuugaac

SEQ ID NO: 497933 - RNA, 32 nt, Human
uccagaggcugcacccagaacagugggacaug

SEQ ID NO: 497934 - RNA, 32 nt, Human
uccagagggcaccugccugcaggaugggccgg

SEQ ID NO: 497935 - RNA, 21 nt, Human
uccagaggggccgauuaggga

SEQ ID NO: 497936 - RNA, 32 nt, Human
uccagaggggugcuggugggcucugcagggcc

SEQ ID NO: 497937 - RNA, 23 nt, Human
uccagaggguggacggagcgggg

SEQ ID NO: 497938 - RNA, 32 nt, Human
uccagaggucgcccagcuccggcgcugacggg

SEQ ID NO: 497939 - RNA, 32 nt, Human
uccagaggugucgaaauguccuggggaccuga

SEQ ID NO: 497940 - RNA, 32 nt, Human
uccagagucaucucagcccugccuuucucugg

SEQ ID NO: 497941 - RNA, 32 nt, Human
uccagagucucuuuuuacacuucaccuccuuc

SEQ ID NO: 497942 - RNA, 32 nt, Human
uccagagugaagauaguccaaguccuaagaga

SEQ ID NO: 497943 - RNA, 32 nt, Human
uccagagugcaggagccaagugcucggggacc

SEQ ID NO: 497944 - RNA, 24 nt, Human
uccagagugggaaacagagcaaga

SEQ ID NO: 497945 - RNA, 32 nt, Human
uccagaguuguaucucugaugccugugcccau

SEQ ID NO: 497946 - RNA, 17 nt, Human
uccagaguuuccucuca

SEQ ID NO: 497947 - RNA, 32 nt, Human
uccagauaaacccaccuaagugaaauggccau

SEQ ID NO: 497948 - RNA, 32 nt, Human
uccagauaaccaguuuucacaucugagacauu

SEQ ID NO: 497949 - RNA, 24 nt, Human
uccagauaacuccauccugucgag

SEQ ID NO: 497950 - RNA, 19 nt, Human
uccagauaagagagcugaa

SEQ ID NO: 497951 - RNA, 32 nt, Human
uccagaucaacaaaagugucuuucaaagaaaa

SEQ ID NO: 497952 - RNA, 32 nt, Human
uccagaucaaugaggaccagacugccuauucg

SEQ ID NO: 497953 - RNA, 32 nt, Human
uccagaucacacacaugcacacacacauaugc

SEQ ID NO: 497954 - RNA, 23 nt, Human
uccagaucagaaaccugcugcuc

SEQ ID NO: 497955 - RNA, 32 nt, Human
uccagaucagcaugggcaacaugguaagaccu

SEQ ID NO: 497956 - RNA, 32 nt, Human
uccagaucagccuggccaacauggugaaaccc

SEQ ID NO: 497957 - RNA, 32 nt, Human
uccagaucagcuguuuugccuguugcucaguu

SEQ ID NO: 497958 - RNA, 18 nt, Human
uccagaucauaucccucu

SEQ ID NO: 497959 - RNA, 32 nt, Human
uccagaucauuagcuucuuaaaaaucccagcu

SEQ ID NO: 497960 - RNA, 32 nt, Human
uccagaucccacacuccuuccucggcacuucc

SEQ ID NO: 497961 - RNA, 18 nt, Human
uccagaucccaguauuca

SEQ ID NO: 497962 - RNA, 18 nt, Human
uccagaucccuaccccuc

SEQ ID NO: 497963 - RNA, 18 nt, Human
uccagaucccucacauca

SEQ ID NO: 497964 - RNA, 20 nt, Human
uccagaucccuccuccuccc

SEQ ID NO: 497965 - RNA, 32 nt, Human
uccagaucccugcagccugccacuaccccgag

SEQ ID NO: 497966 - RNA, 32 nt, Human
uccagauccuuuacuacugaacucacagggcu

SEQ ID NO: 497967 - RNA, 18 nt, Human
uccagauccuuuauuuca

SEQ ID NO: 497968 - RNA, 18 nt, Human
uccagaucgcucacauca

SEQ ID NO: 497969 - RNA, 18 nt, Human
uccagaucgcuuccucuc

SEQ ID NO: 497970 - RNA, 32 nt, Human
uccagaucgguuugaugaugaauuaguaauga

SEQ ID NO: 497971 - RNA, 18 nt, Human
uccagaucuccagggcuc

SEQ ID NO: 497972 - RNA, 16 nt, Human
uccagaucuccaucca

SEQ ID NO: 497973 - RNA, 20 nt, Human
uccagaucuggggucucuua

SEQ ID NO: 497974 - RNA, 20 nt, Human
uccagaucuguuugcucuua

SEQ ID NO: 497975 - RNA, 18 nt, Human
uccagaucuucauugcca

SEQ ID NO: 497976 - RNA, 32 nt, Human
uccagaugacucuccugcuccuucggggaaag

SEQ ID NO: 497977 - RNA, 23 nt, Human
uccagaugauagaggcuaacuca

SEQ ID NO: 497978 - RNA, 30 nt, Human
uccagaugccuggacccagaguguggggga

SEQ ID NO: 497979 - RNA, 32 nt, Human
uccagaugcgagccaccgcaccagucccccaa

SEQ ID NO: 497980 - RNA, 32 nt, Human
uccagaugcugaggcaggagaauggcaugaac

SEQ ID NO: 497981 - RNA, 19 nt, Human
uccagaugcuguuaccuca

SEQ ID NO: 497982 - RNA, 32 nt, Human
uccagauggagguggaggguugauuugggaag

SEQ ID NO: 497983 - RNA, 32 nt, Human
uccagauggaguuucgcucuugucccccaggc

SEQ ID NO: 497984 - RNA, 18 nt, Human
uccagauggcccacucuc

SEQ ID NO: 497985 - RNA, 21 nt, Human
uccagauggcugggagaugcc

SEQ ID NO: 497986 - RNA, 32 nt, Human
uccagauggguuuuguuaggggugggggagaa

SEQ ID NO: 497987 - RNA, 32 nt, Human
uccagauggucuucagaguugucuuuauaugu

SEQ ID NO: 497988 - RNA, 32 nt, Human
uccagaugucccagccuccaucaggccagacc

SEQ ID NO: 497989 - RNA, 32 nt, Human
uccagauguggucaacuucuggaacacucgcu

SEQ ID NO: 497990 - RNA, 32 nt, Human
uccagauguuccgugacaagcauuucaugucu

SEQ ID NO: 497991 - RNA, 18 nt, Human
uccagauuaaccauccca

SEQ ID NO: 497992 - RNA, 18 nt, Human
uccagauucaccacccuc

SEQ ID NO: 497993 - RNA, 32 nt, Human
uccagauucacgacauuccugucccauguaga

SEQ ID NO: 497994 - RNA, 32 nt, Human
uccagauucccuucaagcaucucccucauccu

SEQ ID NO: 497995 - RNA, 32 nt, Human
uccagauuccugugguucaucccaaggaaauu

SEQ ID NO: 497996 - RNA, 32 nt, Human
uccagauucuguguuccucccuucccugcccc

SEQ ID NO: 497997 - RNA, 32 nt, Human
uccagauucuuaagccaacaaaagugccuuca

SEQ ID NO: 497998 - RNA, 18 nt, Human
uccagauucuuagucuca

SEQ ID NO: 497999 - RNA, 32 nt, Human
uccagauugcaaccuggccugcaucccagcuc

SEQ ID NO: 498000 - RNA, 18 nt, Human
uccagauuguagcucuua

SEQ ID NO: 498001 - RNA, 20 nt, Human
uccagauuucaaaaaucuca

SEQ ID NO: 498002 - RNA, 32 nt, Human
uccagauuucauuugauguuguucacauugca

SEQ ID NO: 498003 - RNA, 18 nt, Human
uccagauuugcacuucca

SEQ ID NO: 498004 - RNA, 32 nt, Human
uccagauuugcccccgccuuguuuugaaagcc

SEQ ID NO: 498005 - RNA, 32 nt, Human
uccagauuugggcuauuucuguaugauccaau

SEQ ID NO: 498006 - RNA, 32 nt, Human
uccagauuuggguggagccucugugggaacca

SEQ ID NO: 498007 - RNA, 19 nt, Human
uccagauuuuagauucuca

SEQ ID NO: 498008 - RNA, 32 nt, Human
uccagcaaaaggaaucucauguugacuccugg

SEQ ID NO: 498009 - RNA, 32 nt, Human
uccagcaaacggaggacugaacuggggagagu

SEQ ID NO: 498010 - RNA, 32 nt, Human
uccagcaaaggacacagucaacagggugaaaa

SEQ ID NO: 498011 - RNA, 32 nt, Human
uccagcaaaggacaccugcagagaugucccca

SEQ ID NO: 498012 - RNA, 32 nt, Human
uccagcaaauucccgugucuguggucaccauu

SEQ ID NO: 498013 - RNA, 32 nt, Human
uccagcaaccaggaugaucuuguuaaaacauu

SEQ ID NO: 498014 - RNA, 32 nt, Human
uccagcaaccugcacuccagccugggugacag

SEQ ID NO: 498015 - RNA, 19 nt, Human
uccagcaagucucaggcca

SEQ ID NO: 498016 - RNA, 21 nt, Human
uccagcaauagcauccaaggg

SEQ ID NO: 498017 - RNA, 32 nt, Human
uccagcaaugguaaccugcucacuccagaacu

SEQ ID NO: 498018 - RNA, 32 nt, Human
uccagcaauuuccaaaagcuggagcuguguaa

SEQ ID NO: 498019 - RNA, 32 nt, Human
uccagcacaauuaugacaauucagagaagcaa

SEQ ID NO: 498020 - RNA, 32 nt, Human
uccagcacacacacauaagcacugaaaucacu

SEQ ID NO: 498021 - RNA, 32 nt, Human
uccagcacacugacucaaagaugugggcagcu

SEQ ID NO: 498022 - RNA, 32 nt, Human
uccagcacagaaggaaucugugcagaugagca

SEQ ID NO: 498023 - RNA, 24 nt, Human
uccagcacaugggcucuggaccac

SEQ ID NO: 498024 - RNA, 22 nt, Human
uccagcaccaccacacccagug

SEQ ID NO: 498025 - RNA, 32 nt, Human
uccagcaccagaaaauuaccucucuuagcccc

SEQ ID NO: 498026 - RNA, 32 nt, Human
uccagcacccaccucccuacucucccucaugg

SEQ ID NO: 498027 - RNA, 27 nt, Human
uccagcacccugggcgacagagugaga

SEQ ID NO: 498028 - RNA, 21 nt, Human
uccagcaccuugcugugcugc

SEQ ID NO: 498029 - RNA, 18 nt, Human
uccagcacuaccauugua

SEQ ID NO: 498030 - RNA, 32 nt, Human
uccagcacugccaucaauaaccugcagccaug

SEQ ID NO: 498031 - RNA, 32 nt, Human
uccagcacugccucucccugugcauuagaccc

SEQ ID NO: 498032 - RNA, 32 nt, Human
uccagcacugggcaggcacagagcaggggcug

SEQ ID NO: 498033 - RNA, 32 nt, Human
uccagcacuugggagcugacugugcuggaggu

SEQ ID NO: 498034 - RNA, 32 nt, Human
uccagcagaacugcuuggauuuuucuaccagg

SEQ ID NO: 498035 - RNA, 22 nt, Human
uccagcagaaggcucuggccca

SEQ ID NO: 498036 - RNA, 32 nt, Human
uccagcagacagcucuucaagggugucuuguu

SEQ ID NO: 498037 - RNA, 23 nt, Human
uccagcagacuacucuggcccca

SEQ ID NO: 498038 - RNA, 30 nt, Human
uccagcagacugugcaugcuccugucccca

SEQ ID NO: 498039 - RNA, 32 nt, Human
uccagcagagcaccucacuccuuugaagagca

SEQ ID NO: 498040 - RNA, 32 nt, Human
uccagcagagcugaucugccucucacacaggu

SEQ ID NO: 498041 - RNA, 26 nt, Human
uccagcagaggaccucccacccaaug

SEQ ID NO: 498042 - RNA, 32 nt, Human
uccagcagaguugguucuuucugaggucugca

SEQ ID NO: 498043 - RNA, 22 nt, Human
uccagcagcaguagccagggcu

SEQ ID NO: 498044 - RNA, 32 nt, Human
uccagcagccaagaggguagugguguaccgga

SEQ ID NO: 498045 - RNA, 32 nt, Human
uccagcagccaagauggugaagcagaucgaga

SEQ ID NO: 498046 - RNA, 32 nt, Human
uccagcagccuagcauccccuaccuccaugcc

SEQ ID NO: 498047 - RNA, 30 nt, Human
uccagcagccucuccuguuccuccugccac

SEQ ID NO: 498048 - RNA, 20 nt, Human
uccagcagccuugggguccc

SEQ ID NO: 498049 - RNA, 32 nt, Human
uccagcagcgaugaugaggacaaggaagaaga

SEQ ID NO: 498050 - RNA, 32 nt, Human
uccagcagcugcuuccuguaaugcaggacucc

SEQ ID NO: 498051 - RNA, 32 nt, Human
uccagcaggagcacagcucagcagggucccug

SEQ ID NO: 498052 - RNA, 23 nt, Human
uccagcaggagccgucuccacca

SEQ ID NO: 498053 - RNA, 32 nt, Human
uccagcaggcagcuggggcugagugaaaacau

SEQ ID NO: 498054 - RNA, 20 nt, Human
uccagcaggcgcgcggccag

SEQ ID NO: 498055 - RNA, 32 nt, Human
uccagcagggcucaugguggucucagagggcg

SEQ ID NO: 498056 - RNA, 21 nt, Human
uccagcaggggagggguggga

SEQ ID NO: 498057 - RNA, 32 nt, Human
uccagcaggggcccugcccaccagaacacagu

SEQ ID NO: 498058 - RNA, 32 nt, Human
uccagcagguaacaguggauacccacaaugca

SEQ ID NO: 498059 - RNA, 32 nt, Human
uccagcagguccuccugcucccagaggugacc

SEQ ID NO: 498060 - RNA, 21 nt, Human
uccagcagguggagguugcag

SEQ ID NO: 498061 - RNA, 24 nt, Human
uccagcagguggagguugcaguga

SEQ ID NO: 498062 - RNA, 32 nt, Human
uccagcagguggagguugcagugagccaagau

SEQ ID NO: 498063 - RNA, 32 nt, Human
uccagcagguuucugcccugacauucucuugu

SEQ ID NO: 498064 - RNA, 32 nt, Human
uccagcagucgccuccucccacccugagcccc

SEQ ID NO: 498065 - RNA, 27 nt, Human
uccagcagucugggcgacagagugaga

SEQ ID NO: 498066 - RNA, 32 nt, Human
uccagcagugauguggagaauucuuuuaaugg

SEQ ID NO: 498067 - RNA, 21 nt, Human
uccagcaucagucacauguaa

SEQ ID NO: 498068 - RNA, 25 nt, Human
uccagcauccgagcuggcgaggaaa

SEQ ID NO: 498069 - RNA, 30 nt, Human
uccagcauccucuccagcucccguagaguc

SEQ ID NO: 498070 - RNA, 31 nt, Human
uccagcauccucucugugggcuguucaccaa

SEQ ID NO: 498071 - RNA, 32 nt, Human
uccagcaucucuccguagccugggugaagucc

SEQ ID NO: 498072 - RNA, 32 nt, Human
uccagcaugaacagacugguccuugcugcuuu

SEQ ID NO: 498073 - RNA, 32 nt, Human
uccagcaugccuggcugauuuuuguauuuuua

SEQ ID NO: 498074 - RNA, 32 nt, Human
uccagcaugcuuguauguauauuucagaaccu

SEQ ID NO: 498075 - RNA, 32 nt, Human
uccagcaugggcaacauaacaagaccccaucc

SEQ ID NO: 498076 - RNA, 32 nt, Human
uccagcaugggugacagagugagauccugucu

SEQ ID NO: 498077 - RNA, 24 nt, Human
uccagcaugggugauggagagaga

SEQ ID NO: 498078 - RNA, 31 nt, Human
uccagcauggguuucagcacagcagacggcg

SEQ ID NO: 498079 - RNA, 31 nt, Human
uccagcauggugcucgcggccccgcugcugc

SEQ ID NO: 498080 - RNA, 32 nt, Human
uccagcauucucgugugaacugcagaggagcc

SEQ ID NO: 498081 - RNA, 32 nt, Human
uccagcauuggaacuucugaucuucaagcagg

SEQ ID NO: 498082 - RNA, 32 nt, Human
uccagcauuuuuccuucaagguucauccaugu

SEQ ID NO: 498083 - RNA, 32 nt, Human
uccagccaaaaccaaagauuucuuaaugauug

SEQ ID NO: 498084 - RNA, 32 nt, Human
uccagccaacugucucuccacccuuccagaau

SEQ ID NO: 498085 - RNA, 32 nt, Human
uccagccaagcccaggcaucaggaggcuguua

SEQ ID NO: 498086 - RNA, 32 nt, Human
uccagccaagccccagcauccaaggaccggca

SEQ ID NO: 498087 - RNA, 32 nt, Human
uccagccacaccaccucugccuuccaucugac

SEQ ID NO: 498088 - RNA, 32 nt, Human
uccagccacagcacuccagccugggugacaga

SEQ ID NO: 498089 - RNA, 25 nt, Human
uccagccaccccugucccaacccca

SEQ ID NO: 498090 - RNA, 32 nt, Human
uccagccaccuucuccauauccaucuuuuauu

SEQ ID NO: 498091 - RNA, 22 nt, Human
uccagccacugcccuggccuca

SEQ ID NO: 498092 - RNA, 32 nt, Human
uccagccacuggcugcuaacaagucaccaaaa

SEQ ID NO: 498093 - RNA, 32 nt, Human
uccagccagaacugacagcccagaccccauac

SEQ ID NO: 498094 - RNA, 24 nt, Human
uccagccagagugacagagcaaga

SEQ ID NO: 498095 - RNA, 32 nt, Human
uccagccagagugacagagcaagacuccaucu

SEQ ID NO: 498096 - RNA, 32 nt, Human
uccagccagccaaauccauccugcucuuccau

SEQ ID NO: 498097 - RNA, 32 nt, Human
uccagccagcccccaaacaagauuccucucca

SEQ ID NO: 498098 - RNA, 21 nt, Human
uccagccagcguccgccgccg

SEQ ID NO: 498099 - RNA, 20 nt, Human
uccagccaggagucugcacu

SEQ ID NO: 498100 - RNA, 21 nt, Human
uccagccaggauccacaugga

SEQ ID NO: 498101 - RNA, 24 nt, Human
uccagccaggaugacagagcaaga

SEQ ID NO: 498102 - RNA, 32 nt, Human
uccagccaggaugacagagcaagacugcaucu

SEQ ID NO: 498103 - RNA, 32 nt, Human
uccagccaggcugcagggagugaggcacacgg

SEQ ID NO: 498104 - RNA, 24 nt, Human
uccagccagggcaacagagugaga

SEQ ID NO: 498105 - RNA, 23 nt, Human
uccagccaggggauagagcgaga

SEQ ID NO: 498106 - RNA, 22 nt, Human
uccagccagggggauggguccc

SEQ ID NO: 498107 - RNA, 23 nt, Human
uccagccagggguggggaugggg

SEQ ID NO: 498108 - RNA, 24 nt, Human
uccagccagggugacagagugaga

SEQ ID NO: 498109 - RNA, 32 nt, Human
uccagccagguugacagaaugagacccugucu

SEQ ID NO: 498110 - RNA, 25 nt, Human
uccagccaguggaguccuggcucca

SEQ ID NO: 498111 - RNA, 21 nt, Human
uccagccauccucucaccuca

SEQ ID NO: 498112 - RNA, 23 nt, Human
uccagccaugacuccuguacagc

SEQ ID NO: 498113 - RNA, 32 nt, Human
uccagccaugacugcaaacccgggcaucuuug

SEQ ID NO: 498114 - RNA, 32 nt, Human
uccagccauugcuccccucucccugccacccu

SEQ ID NO: 498115 - RNA, 32 nt, Human
uccagccauugcugcuuugugcucugagcagg

SEQ ID NO: 498116 - RNA, 32 nt, Human
uccagcccaaagauaaauuuuguuuguccagu

SEQ ID NO: 498117 - RNA, 32 nt, Human
uccagcccaacagaaggaaggaggagggcgcc

SEQ ID NO: 498118 - RNA, 32 nt, Human
uccagcccacagccugggucucagggaucuug

SEQ ID NO: 498119 - RNA, 32 nt, Human
uccagcccacugccacugggugacacagacug

SEQ ID NO: 498120 - RNA, 32 nt, Human
uccagcccagcacucuucaugcucauucauuu

SEQ ID NO: 498121 - RNA, 32 nt, Human
uccagcccaggacuucgaggcugcaaugagcu

SEQ ID NO: 498122 - RNA, 32 nt, Human
uccagcccaggaguucaagaccagccugggca

SEQ ID NO: 498123 - RNA, 24 nt, Human
uccagcccaggcaacagagcguga

SEQ ID NO: 498124 - RNA, 32 nt, Human
uccagcccaggcaacagagcgugacuccgucu

SEQ ID NO: 498125 - RNA, 32 nt, Human
uccagcccaggcaacagaguaagacucagucu

SEQ ID NO: 498126 - RNA, 24 nt, Human
uccagcccaggcaacagagugaga

SEQ ID NO: 498127 - RNA, 32 nt, Human
uccagcccaggcaacagagugagacuccgucu

SEQ ID NO: 498128 - RNA, 24 nt, Human
uccagcccaggcaauagaguaaga

SEQ ID NO: 498129 - RNA, 24 nt, Human
uccagcccagguaacagagugaga

SEQ ID NO: 498130 - RNA, 32 nt, Human
uccagcccaggugacagagcaagacuccaucu

SEQ ID NO: 498131 - RNA, 24 nt, Human
uccagcccaggugacagagcgaga

SEQ ID NO: 498132 - RNA, 32 nt, Human
uccagcccaggugacagagcgagacuccaucu

SEQ ID NO: 498133 - RNA, 24 nt, Human
uccagcccaggugacagagggaga

SEQ ID NO: 498134 - RNA, 24 nt, Human
uccagcccaggugacagagugaga

SEQ ID NO: 498135 - RNA, 32 nt, Human
uccagcccauccuggccaacauggugaaaccc

SEQ ID NO: 498136 - RNA, 32 nt, Human
uccagccccaacaaaggguucucuuuguaucu

SEQ ID NO: 498137 - RNA, 32 nt, Human
uccagccccacucauccucucggauguucugc

SEQ ID NO: 498138 - RNA, 32 nt, Human
uccagccccagacaacagcccaggcaucuccu

SEQ ID NO: 498139 - RNA, 27 nt, Human
uccagccccagacccgccggggucccu

SEQ ID NO: 498140 - RNA, 32 nt, Human
uccagccccaggacaggaaacagaacugccug

SEQ ID NO: 498141 - RNA, 32 nt, Human
uccagccccaggcuguggugaggggccucaca

SEQ ID NO: 498142 - RNA, 32 nt, Human
uccagcccccaccccaccuccugggacccuca

SEQ ID NO: 498143 - RNA, 32 nt, Human
uccagcccccagcaaccaccaaucugcuuucu

SEQ ID NO: 498144 - RNA, 22 nt, Human
uccagcccccaggaagccugcu

SEQ ID NO: 498145 - RNA, 24 nt, Human
uccagccccccaagccuggccuca

SEQ ID NO: 498146 - RNA, 21 nt, Human
uccagccccccucucuggccc

SEQ ID NO: 498147 - RNA, 32 nt, Human
uccagcccccuugagcugggaacucaggcucc

SEQ ID NO: 498148 - RNA, 20 nt, Human
uccagcccccuugucuugga

SEQ ID NO: 498149 - RNA, 24 nt, Human
uccagccccucacgccuccucuca

SEQ ID NO: 498150 - RNA, 32 nt, Human
uccagccccuccaaccucccucuguccacagg

SEQ ID NO: 498151 - RNA, 32 nt, Human
uccagccccuccaacuucaucgacugcccagc

SEQ ID NO: 498152 - RNA, 32 nt, Human
uccagccccuccaccccuccccuacccccaca

SEQ ID NO: 498153 - RNA, 32 nt, Human
uccagccccucccucuggguucccaaguugaa

SEQ ID NO: 498154 - RNA, 24 nt, Human
uccagccccucucacugcccuuca

SEQ ID NO: 498155 - RNA, 21 nt, Human
uccagccccucucuuccuuca

SEQ ID NO: 498156 - RNA, 22 nt, Human
uccagccccucucuugucucca

SEQ ID NO: 498157 - RNA, 32 nt, Human
uccagccccugagaguugcugucucccagugg

SEQ ID NO: 498158 - RNA, 21 nt, Human
uccagccccugauggggcaga

SEQ ID NO: 498159 - RNA, 32 nt, Human
uccagccccugccagaccuccugcuaccgucc

SEQ ID NO: 498160 - RNA, 32 nt, Human
uccagccccugugacauccgccuggauuggga

SEQ ID NO: 498161 - RNA, 24 nt, Human
uccagcccgagugacagaaugagg

SEQ ID NO: 498162 - RNA, 32 nt, Human
uccagcccggaugacagagcaagacucuguau

SEQ ID NO: 498163 - RNA, 32 nt, Human
uccagcccggcacuccagccuggcgacaagag

SEQ ID NO: 498164 - RNA, 21 nt, Human
uccagcccggccuggccgcca

SEQ ID NO: 498165 - RNA, 32 nt, Human
uccagcccggcuucccuucucucugaaauccu

SEQ ID NO: 498166 - RNA, 24 nt, Human
uccagcccgggcgacagagcaaga

SEQ ID NO: 498167 - RNA, 32 nt, Human
uccagcccgggcgacagagcaagacucugugu

SEQ ID NO: 498168 - RNA, 24 nt, Human
uccagcccgggcgacagagcgaga

SEQ ID NO: 498169 - RNA, 32 nt, Human
uccagcccgggcgacagagcgagacuccaucu

SEQ ID NO: 498170 - RNA, 32 nt, Human
uccagcccgggcgacagagcgagacucugucu

SEQ ID NO: 498171 - RNA, 24 nt, Human
uccagcccgggcgacagagugaga

SEQ ID NO: 498172 - RNA, 24 nt, Human
uccagcccgggugacaauacaaga

SEQ ID NO: 498173 - RNA, 24 nt, Human
uccagcccgggugacagagcaaga

SEQ ID NO: 498174 - RNA, 32 nt, Human
uccagcccgggugacagagcaagacuccgucu

SEQ ID NO: 498175 - RNA, 32 nt, Human
uccagcccgggugacagagcaagacugugucu

SEQ ID NO: 498176 - RNA, 24 nt, Human
uccagcccgggugacagagcgaga

SEQ ID NO: 498177 - RNA, 32 nt, Human
uccagcccgggugacagagcgagacucuaucu

SEQ ID NO: 498178 - RNA, 32 nt, Human
uccagcccgggugacagagcgagacucuggcu

SEQ ID NO: 498179 - RNA, 22 nt, Human
uccagcccgggugacagaguga

SEQ ID NO: 498180 - RNA, 32 nt, Human
uccagcccuaaaggaaggguagacccgugucu

SEQ ID NO: 498181 - RNA, 32 nt, Human
uccagcccuagggguacgggagagggaaagac

SEQ ID NO: 498182 - RNA, 32 nt, Human
uccagcccucucacugugucccucucucugga

SEQ ID NO: 498183 - RNA, 32 nt, Human
uccagcccugcagcuauucaccaauaucaguc

SEQ ID NO: 498184 - RNA, 32 nt, Human
uccagcccugcagggagccgcucaagucuggg

SEQ ID NO: 498185 - RNA, 32 nt, Human
uccagcccugcucucccuggucuccaggcagg

SEQ ID NO: 498186 - RNA, 24 nt, Human
uccagcccuggcgacagagugaga

SEQ ID NO: 498187 - RNA, 32 nt, Human
uccagcccugggaaauuuccuuucuccagacu

SEQ ID NO: 498188 - RNA, 23 nt, Human
uccagcccuggugacagaggaga

SEQ ID NO: 498189 - RNA, 32 nt, Human
uccagcccugucucaaccauacuccaaauuag

SEQ ID NO: 498190 - RNA, 32 nt, Human
uccagcccuuaaaucccccagcuuccaaacuu

SEQ ID NO: 498191 - RNA, 32 nt, Human
uccagccgcacucucuacauuaauaguaggca

SEQ ID NO: 498192 - RNA, 20 nt, Human
uccagccgccgccgccgccg

SEQ ID NO: 498193 - RNA, 32 nt, Human
uccagccggggcaacagagcaagacucugccu

SEQ ID NO: 498194 - RNA, 24 nt, Human
uccagccggggugacagagugaga

SEQ ID NO: 498195 - RNA, 32 nt, Human
uccagccggggugacagagugagacuccgacu

SEQ ID NO: 498196 - RNA, 25 nt, Human
uccagccgugguuaggugguccuag

SEQ ID NO: 498197 - RNA, 23 nt, Human
uccagccuaagcaaauagcaaga

SEQ ID NO: 498198 - RNA, 24 nt, Human
uccagccuaagcaacagagcaaga

SEQ ID NO: 498199 - RNA, 24 nt, Human
uccagccuaagcaauagagcgaga

SEQ ID NO: 498200 - RNA, 22 nt, Human
uccagccuacuagcgggcgggg

SEQ ID NO: 498201 - RNA, 24 nt, Human
uccagccuagacaacagggcaagg

SEQ ID NO: 498202 - RNA, 23 nt, Human
uccagccuaggcaacaagagcaa

SEQ ID NO: 498203 - RNA, 23 nt, Human
uccagccuaggcaacaagagcga

SEQ ID NO: 498204 - RNA, 23 nt, Human
uccagccuaggcaacaagaguga

SEQ ID NO: 498205 - RNA, 23 nt, Human
uccagccuaggcaacacgagcaa

SEQ ID NO: 498206 - RNA, 32 nt, Human
uccagccuaggcaacagagacucugucucaaa

SEQ ID NO: 498207 - RNA, 24 nt, Human
uccagccuaggcaacagagcaaga

SEQ ID NO: 498208 - RNA, 24 nt, Human
uccagccuaggcaacagagcgaga

SEQ ID NO: 498209 - RNA, 24 nt, Human
uccagccuaggcaacagagggaga

SEQ ID NO: 498210 - RNA, 20 nt, Human
uccagccuaggcaacagagu

SEQ ID NO: 498211 - RNA, 24 nt, Human
uccagccuaggcaacagagugaga

SEQ ID NO: 498212 - RNA, 21 nt, Human
uccagccuaggcauggugaga

SEQ ID NO: 498213 - RNA, 24 nt, Human
uccagccuaggcgacagagcgaga

SEQ ID NO: 498214 - RNA, 32 nt, Human
uccagccuaggcgacagagcgagacucugucu

SEQ ID NO: 498215 - RNA, 24 nt, Human
uccagccuaggcgacagagugaga

SEQ ID NO: 498216 - RNA, 32 nt, Human
uccagccuaggcgacagagugagacccugucu

SEQ ID NO: 498217 - RNA, 24 nt, Human
uccagccuaggcgacggggcaaga

SEQ ID NO: 498218 - RNA, 25 nt, Human
uccagccuaggguggggaagugagg

SEQ ID NO: 498219 - RNA, 32 nt, Human
uccagccuaggucagagguggggacagagaac

SEQ ID NO: 498220 - RNA, 24 nt, Human
uccagccuaggugacagaaugaga

SEQ ID NO: 498221 - RNA, 32 nt, Human
uccagccuaggugacagaaugagacucuaucu

SEQ ID NO: 498222 - RNA, 24 nt, Human
uccagccuaggugacagagcaaga

SEQ ID NO: 498223 - RNA, 32 nt, Human
uccagccuaggugacagagcaagacuccaucu

SEQ ID NO: 498224 - RNA, 32 nt, Human
uccagccuaggugacagagcaagacucugucu

SEQ ID NO: 498225 - RNA, 24 nt, Human
uccagccuaggugacagagcgaga

SEQ ID NO: 498226 - RNA, 32 nt, Human
uccagccuaggugacagagcgagacuccgucu

SEQ ID NO: 498227 - RNA, 32 nt, Human
uccagccuaggugacagagggagacucugccu

SEQ ID NO: 498228 - RNA, 24 nt, Human
uccagccuaggugacagagugaga

SEQ ID NO: 498229 - RNA, 32 nt, Human
uccagccuaggugacagagugagacccugucu

SEQ ID NO: 498230 - RNA, 32 nt, Human
uccagccuaggugacagagugagacuccaccu

SEQ ID NO: 498231 - RNA, 32 nt, Human
uccagccuaggugacagagugagacuccgucu

SEQ ID NO: 498232 - RNA, 24 nt, Human
uccagccuaggugacagggcaaga

SEQ ID NO: 498233 - RNA, 24 nt, Human
uccagccuaggugauagagcaaga

SEQ ID NO: 498234 - RNA, 32 nt, Human
uccagccuaggugauagagcaagacucugucc

SEQ ID NO: 498235 - RNA, 23 nt, Human
uccagccuaguaauggagcaaga

SEQ ID NO: 498236 - RNA, 32 nt, Human
uccagccuagucucaaacuccuggguucaagc

SEQ ID NO: 498237 - RNA, 32 nt, Human
uccagccucacaaaaggauucuuucaacuucu

SEQ ID NO: 498238 - RNA, 32 nt, Human
uccagccucacgcccgugggcugcaguuggaa

SEQ ID NO: 498239 - RNA, 19 nt, Human
uccagccucagagggccca

SEQ ID NO: 498240 - RNA, 24 nt, Human
uccagccucagcaauagagugaga

SEQ ID NO: 498241 - RNA, 23 nt, Human
uccagccucagccagggcaggga

SEQ ID NO: 498242 - RNA, 32 nt, Human
uccagccucaggacacacagggaacggcugca

SEQ ID NO: 498243 - RNA, 32 nt, Human
uccagccuccacagcugaccuccaagucggac

SEQ ID NO: 498244 - RNA, 32 nt, Human
uccagccuccaguggaggcuucagaggacagc

SEQ ID NO: 498245 - RNA, 26 nt, Human
uccagccuccccuacccagggucucu

SEQ ID NO: 498246 - RNA, 32 nt, Human
uccagccuccccucaggcuuuccagucaccag

SEQ ID NO: 498247 - RNA, 32 nt, Human
uccagccuccuggccuucggacucugaaucug

SEQ ID NO: 498248 - RNA, 24 nt, Human
uccagccucgccgacaaagcgaga

SEQ ID NO: 498249 - RNA, 32 nt, Human
uccagccucggcaacagagcaagacuccgucu

SEQ ID NO: 498250 - RNA, 24 nt, Human
uccagccucggugacagagcaaga

SEQ ID NO: 498251 - RNA, 32 nt, Human
uccagccucggugacagagcaagacuccaucu

SEQ ID NO: 498252 - RNA, 32 nt, Human
uccagccucggugacagagcaagacuguuuug

SEQ ID NO: 498253 - RNA, 32 nt, Human
uccagccucuacuggcaaccugaaccuuuccc

SEQ ID NO: 498254 - RNA, 32 nt, Human
uccagccucuaucaugggaguuccugccaugu

SEQ ID NO: 498255 - RNA, 20 nt, Human
uccagccucucccuccagca

SEQ ID NO: 498256 - RNA, 32 nt, Human
uccagccucugccucacacuccuguccucuga

SEQ ID NO: 498257 - RNA, 32 nt, Human
uccagccucugccucccgaagugcuguauuac

SEQ ID NO: 498258 - RNA, 24 nt, Human
uccagccugaacaacauaacaaga

SEQ ID NO: 498259 - RNA, 32 nt, Human
uccagccugaacaacauaacaagacccugucu

SEQ ID NO: 498260 - RNA, 32 nt, Human
uccagccugaagaucugggggcacaguauagc

SEQ ID NO: 498261 - RNA, 32 nt, Human
uccagccugaccagcccuggccuagucguggg

SEQ ID NO: 498262 - RNA, 22 nt, Human
uccagccugaccccagagcaga

SEQ ID NO: 498263 - RNA, 32 nt, Human
uccagccugaccuucacaucuggaaggauuuu

SEQ ID NO: 498264 - RNA, 23 nt, Human
uccagccugacgacaaagcgaga

SEQ ID NO: 498265 - RNA, 24 nt, Human
uccagccugagacaucaggggaga

SEQ ID NO: 498266 - RNA, 24 nt, Human
uccagccugagagacagaaugaga

SEQ ID NO: 498267 - RNA, 24 nt, Human
uccagccugagcaacacagugaga

SEQ ID NO: 498268 - RNA, 32 nt, Human
uccagccugagcaacacagugagacccuaucu

SEQ ID NO: 498269 - RNA, 22 nt, Human
uccagccugagcaacagagcaa

SEQ ID NO: 498270 - RNA, 24 nt, Human
uccagccugagcaacagagcaaga

SEQ ID NO: 498271 - RNA, 32 nt, Human
uccagccugagcaacagagcaagacucuaucu

SEQ ID NO: 498272 - RNA, 24 nt, Human
uccagccugagcaacagagccgga

SEQ ID NO: 498273 - RNA, 24 nt, Human
uccagccugagcaacagagcgaga

SEQ ID NO: 498274 - RNA, 20 nt, Human
uccagccugagcaacagagu

SEQ ID NO: 498275 - RNA, 24 nt, Human
uccagccugagcaacagagugaga

SEQ ID NO: 498276 - RNA, 32 nt, Human
uccagccugagcaacagagugagacccugucu

SEQ ID NO: 498277 - RNA, 24 nt, Human
uccagccugagcagcagagcggga

SEQ ID NO: 498278 - RNA, 24 nt, Human
uccagccugagcgacagagcaaga

SEQ ID NO: 498279 - RNA, 32 nt, Human
uccagccugagcgacagagcaagacuccgucu

SEQ ID NO: 498280 - RNA, 32 nt, Human
uccagccugagcgacagagcgagacuccgucu

SEQ ID NO: 498281 - RNA, 32 nt, Human
uccagccugagcgacagagcgagacucugccu

SEQ ID NO: 498282 - RNA, 24 nt, Human
uccagccugagcgacagaguaaga

SEQ ID NO: 498283 - RNA, 24 nt, Human
uccagccugagcgacagagugaga

SEQ ID NO: 498284 - RNA, 24 nt, Human
uccagccugagcuacagagcaaga

SEQ ID NO: 498285 - RNA, 32 nt, Human
uccagccugagguggcuucagauggagaugag

SEQ ID NO: 498286 - RNA, 32 nt, Human
uccagccugagguggugaaggcaggaugcucu

SEQ ID NO: 498287 - RNA, 24 nt, Human
uccagccugagugacagaacaagg

SEQ ID NO: 498288 - RNA, 24 nt, Human
uccagccugagugacagaaugaga

SEQ ID NO: 498289 - RNA, 32 nt, Human
uccagccugagugacagaaugagaccuugucu

SEQ ID NO: 498290 - RNA, 24 nt, Human
uccagccugagugacagagcgaga

SEQ ID NO: 498291 - RNA, 32 nt, Human
uccagccugagugacagagcgagacccugucu

SEQ ID NO: 498292 - RNA, 32 nt, Human
uccagccugagugacagagcgagacuccaucu

SEQ ID NO: 498293 - RNA, 32 nt, Human
uccagccugagugacagagcgagacucuaucu

SEQ ID NO: 498294 - RNA, 32 nt, Human
uccagccugagugacagagcgagacucugucu

SEQ ID NO: 498295 - RNA, 24 nt, Human
uccagccugagugacagagugaga

SEQ ID NO: 498296 - RNA, 32 nt, Human
uccagccugagugacagagugagacccugccu

SEQ ID NO: 498297 - RNA, 32 nt, Human
uccagccugagugacagagugagacccugucu

SEQ ID NO: 498298 - RNA, 22 nt, Human
uccagccugagugaggaagcaa

SEQ ID NO: 498299 - RNA, 24 nt, Human
uccagccugagugauagagugaga

SEQ ID NO: 498300 - RNA, 23 nt, Human
uccagccugaugacagagcaaga

SEQ ID NO: 498301 - RNA, 24 nt, Human
uccagccugcacaguagagugagg

SEQ ID NO: 498302 - RNA, 22 nt, Human
uccagccugccccggagcugga

SEQ ID NO: 498303 - RNA, 32 nt, Human
uccagccugccuggaaaugcugugggcucagg

SEQ ID NO: 498304 - RNA, 21 nt, Human
uccagccugcgagggucccag

SEQ ID NO: 498305 - RNA, 24 nt, Human
uccagccugcgcaacagagcgaga

SEQ ID NO: 498306 - RNA, 24 nt, Human
uccagccugcgcgacagaucgaga

SEQ ID NO: 498307 - RNA, 23 nt, Human
uccagccugcggacagaccaaga

SEQ ID NO: 498308 - RNA, 24 nt, Human
uccagccugcgggacagagugaga

SEQ ID NO: 498309 - RNA, 32 nt, Human
uccagccugcgggacagagugagacccugucu

SEQ ID NO: 498310 - RNA, 24 nt, Human
uccagccugcgugacaaagugaga

SEQ ID NO: 498311 - RNA, 32 nt, Human
uccagccugcgugacaaagugagacccucucu

SEQ ID NO: 498312 - RNA, 23 nt, Human
uccagccugcuucaggagggagg

SEQ ID NO: 498313 - RNA, 23 nt, Human
uccagccuggaaaacaaguguga

SEQ ID NO: 498314 - RNA, 24 nt, Human
uccagccuggaaaacggagugaga

SEQ ID NO: 498315 - RNA, 24 nt, Human
uccagccuggaagaccaaacgaga

SEQ ID NO: 498316 - RNA, 22 nt, Human
uccagccuggaaggcagagaga

SEQ ID NO: 498317 - RNA, 24 nt, Human
uccagccuggaaggcagagagaga

SEQ ID NO: 498318 - RNA, 25 nt, Human
uccagccuggacaacaagagcaaga

SEQ ID NO: 498319 - RNA, 32 nt, Human
uccagccuggacaacaagagcaagacuccauc

SEQ ID NO: 498320 - RNA, 23 nt, Human
uccagccuggacaacaagagcga

SEQ ID NO: 498321 - RNA, 32 nt, Human
uccagccuggacaacaagagcgaaacuccguc

SEQ ID NO: 498322 - RNA, 32 nt, Human
uccagccuggacaacaagagcgaaacucuguc

SEQ ID NO: 498323 - RNA, 32 nt, Human
uccagccuggacaacaagagcgaaauucuguc

SEQ ID NO: 498324 - RNA, 32 nt, Human
uccagccuggacaacaagagugaaacgcuauc

SEQ ID NO: 498325 - RNA, 24 nt, Human
uccagccuggacaacacagugaga

SEQ ID NO: 498326 - RNA, 32 nt, Human
uccagccuggacaacacagugagacucugucu

SEQ ID NO: 498327 - RNA, 24 nt, Human
uccagccuggacaacagaaagaga

SEQ ID NO: 498328 - RNA, 32 nt, Human
uccagccuggacaacagaaagagaccuugucu

SEQ ID NO: 498329 - RNA, 21 nt, Human
uccagccuggacaacagacaa

SEQ ID NO: 498330 - RNA, 24 nt, Human
uccagccuggacaacagagcaaga

SEQ ID NO: 498331 - RNA, 32 nt, Human
uccagccuggacaacagagcaagaccuucucu

SEQ ID NO: 498332 - RNA, 32 nt, Human
uccagccuggacaacagagcaagacuccgacg

SEQ ID NO: 498333 - RNA, 32 nt, Human
uccagccuggacaacagagcaagacuccuucu

SEQ ID NO: 498334 - RNA, 24 nt, Human
uccagccuggacaacagagcgaga

SEQ ID NO: 498335 - RNA, 32 nt, Human
uccagccuggacaacagagcgagacuccaucu

SEQ ID NO: 498336 - RNA, 24 nt, Human
uccagccuggacaacagagcuaga

SEQ ID NO: 498337 - RNA, 32 nt, Human
uccagccuggacaacagagcuagacuccaucu

SEQ ID NO: 498338 - RNA, 24 nt, Human
uccagccuggacaacagagggaga

SEQ ID NO: 498339 - RNA, 32 nt, Human
uccagccuggacaacagagggagacucugucu

SEQ ID NO: 498340 - RNA, 22 nt, Human
uccagccuggacaacagaguaa

SEQ ID NO: 498341 - RNA, 32 nt, Human
uccagccuggacaacagaguaaaacccugucu

SEQ ID NO: 498342 - RNA, 24 nt, Human
uccagccuggacaacagagugaga

SEQ ID NO: 498343 - RNA, 32 nt, Human
uccagccuggacaacagagugagaaccugucu

SEQ ID NO: 498344 - RNA, 32 nt, Human
uccagccuggacaacagagugagacucguaau

SEQ ID NO: 498345 - RNA, 24 nt, Human
uccagccuggacaacagaguggga

SEQ ID NO: 498346 - RNA, 32 nt, Human
uccagccuggacaacagagugggacucugucu

SEQ ID NO: 498347 - RNA, 24 nt, Human
uccagccuggacaacagauugaga

SEQ ID NO: 498348 - RNA, 32 nt, Human
uccagccuggacaacagauugagacccugucu

SEQ ID NO: 498349 - RNA, 32 nt, Human
uccagccuggacaacagcgagagcuccaucuc

SEQ ID NO: 498350 - RNA, 24 nt, Human
uccagccuggacaacauagugaga

SEQ ID NO: 498351 - RNA, 24 nt, Human
uccagccuggacaacggagugaga

SEQ ID NO: 498352 - RNA, 32 nt, Human
uccagccuggacaacggagugagacucugggg

SEQ ID NO: 498353 - RNA, 32 nt, Human
uccagccuggacagagaaaccucuccagccac

SEQ ID NO: 498354 - RNA, 24 nt, Human
uccagccuggacagcagaacaaga

SEQ ID NO: 498355 - RNA, 20 nt, Human
uccagccuggacagcaggag

SEQ ID NO: 498356 - RNA, 23 nt, Human
uccagccuggacagcaggagcga

SEQ ID NO: 498357 - RNA, 32 nt, Human
uccagccuggacagcaggagcgaaacuccguc

SEQ ID NO: 498358 - RNA, 24 nt, Human
uccagccuggacgacagagcaaga

SEQ ID NO: 498359 - RNA, 32 nt, Human
uccagccuggacgacagagcaagacucagucu

SEQ ID NO: 498360 - RNA, 32 nt, Human
uccagccuggacgacagagcgagacuccaucu

SEQ ID NO: 498361 - RNA, 32 nt, Human
uccagccuggacgacagagcgagacuccgucu

SEQ ID NO: 498362 - RNA, 24 nt, Human
uccagccuggacgacagagugaga

SEQ ID NO: 498363 - RNA, 24 nt, Human
uccagccuggacgacugagugaga

SEQ ID NO: 498364 - RNA, 32 nt, Human
uccagccuggacgacugagugagacccugucu

SEQ ID NO: 498365 - RNA, 24 nt, Human
uccagccuggacgauauagccaga

SEQ ID NO: 498366 - RNA, 32 nt, Human
uccagccuggaggacagagcgagacucuaucu

SEQ ID NO: 498367 - RNA, 24 nt, Human
uccagccuggaggccagagugaga

SEQ ID NO: 498368 - RNA, 24 nt, Human
uccagccuggagugcaggaggggg

SEQ ID NO: 498369 - RNA, 24 nt, Human
uccagccuggauaaaagagcaaga

SEQ ID NO: 498370 - RNA, 24 nt, Human
uccagccuggauaacagagcgaga

SEQ ID NO: 498371 - RNA, 24 nt, Human
uccagccuggauaauagagugaga

SEQ ID NO: 498372 - RNA, 32 nt, Human
uccagccuggauaauagagugagacccuaugu

SEQ ID NO: 498373 - RNA, 32 nt, Human
uccagccuggauccccucacacugaacccuuc

SEQ ID NO: 498374 - RNA, 23 nt, Human
uccagccuggaugacaagaguga

SEQ ID NO: 498375 - RNA, 32 nt, Human
uccagccuggaugacagagcaagacucugucu

SEQ ID NO: 498376 - RNA, 32 nt, Human
uccagccuggaugacagagcgagacuccgccu

SEQ ID NO: 498377 - RNA, 22 nt, Human
uccagccuggaugacagaguga

SEQ ID NO: 498378 - RNA, 24 nt, Human
uccagccuggaugacagagugaga

SEQ ID NO: 498379 - RNA, 32 nt, Human
uccagccuggaugacagagugagacuccaucu

SEQ ID NO: 498380 - RNA, 32 nt, Human
uccagccuggaugacagagugagacuccgucu

SEQ ID NO: 498381 - RNA, 32 nt, Human
uccagccuggaugacagagugagacuucaucu

SEQ ID NO: 498382 - RNA, 22 nt, Human
uccagccuggaugacagagugg

SEQ ID NO: 498383 - RNA, 23 nt, Human
uccagccuggaugacagagugga

SEQ ID NO: 498384 - RNA, 22 nt, Human
uccagccuggaugacagcgaga

SEQ ID NO: 498385 - RNA, 25 nt, Human
uccagccuggaugaccugggacccc

SEQ ID NO: 498386 - RNA, 24 nt, Human
uccagccuggaugacggagccaga

SEQ ID NO: 498387 - RNA, 32 nt, Human
uccagccuggaugacggagccagauccuguuu

SEQ ID NO: 498388 - RNA, 24 nt, Human
uccagccuggaugacgggaugaga

SEQ ID NO: 498389 - RNA, 24 nt, Human
uccagccuggaugauagagcaaga

SEQ ID NO: 498390 - RNA, 32 nt, Human
uccagccuggaugauagagcaagacccugucu

SEQ ID NO: 498391 - RNA, 23 nt, Human
uccagccuggcaacagagcaaga

SEQ ID NO: 498392 - RNA, 23 nt, Human
uccagccuggcaacagagcaagg

SEQ ID NO: 498393 - RNA, 23 nt, Human
uccagccuggcaacagagcgaga

SEQ ID NO: 498394 - RNA, 23 nt, Human
uccagccuggcaacagagugaga

SEQ ID NO: 498395 - RNA, 17 nt, Human
uccagccuggcacuucc

SEQ ID NO: 498396 - RNA, 23 nt, Human
uccagccuggccacagagcgaga

SEQ ID NO: 498397 - RNA, 24 nt, Human
uccagccuggcccacagagugaga

SEQ ID NO: 498398 - RNA, 32 nt, Human
uccagccuggccgacagagcaagauucugucu

SEQ ID NO: 498399 - RNA, 23 nt, Human
uccagccuggcgacaaagcgaga

SEQ ID NO: 498400 - RNA, 24 nt, Human
uccagccuggcgacaagagcgaga

SEQ ID NO: 498401 - RNA, 24 nt, Human
uccagccuggcgacaagagugaga

SEQ ID NO: 498402 - RNA, 23 nt, Human
uccagccuggcgacacagugaga

SEQ ID NO: 498403 - RNA, 23 nt, Human
uccagccuggcgacagagagaga

SEQ ID NO: 498404 - RNA, 22 nt, Human
uccagccuggcgacagagcaag

SEQ ID NO: 498405 - RNA, 23 nt, Human
uccagccuggcgacagagcaaga

SEQ ID NO: 498406 - RNA, 23 nt, Human
uccagccuggcgacagagcgaga

SEQ ID NO: 498407 - RNA, 23 nt, Human
uccagccuggcgacagagcuaga

SEQ ID NO: 498408 - RNA, 23 nt, Human
uccagccuggcgacagagggaga

SEQ ID NO: 498409 - RNA, 23 nt, Human
uccagccuggcgacagagugaga

SEQ ID NO: 498410 - RNA, 23 nt, Human
uccagccuggcgacugagcgaga

SEQ ID NO: 498411 - RNA, 23 nt, Human
uccagccuggcuacagagugaga

SEQ ID NO: 498412 - RNA, 24 nt, Human
uccagccuggcugacagagcaaga

SEQ ID NO: 498413 - RNA, 24 nt, Human
uccagccuggcugacagagcgaga

SEQ ID NO: 498414 - RNA, 32 nt, Human
uccagccuggcugacagagcgagacugucucu

SEQ ID NO: 498415 - RNA, 22 nt, Human
uccagccuggcugacagugaga

SEQ ID NO: 498416 - RNA, 32 nt, Human
uccagccuggcugacagugcaagacucugucu

SEQ ID NO: 498417 - RNA, 23 nt, Human
uccagccuggcugugagccaaga

SEQ ID NO: 498418 - RNA, 23 nt, Human
uccagccugggaaacaagaguga

SEQ ID NO: 498419 - RNA, 22 nt, Human
uccagccugggaaacagagcga

SEQ ID NO: 498420 - RNA, 23 nt, Human
uccagccugggaaauagagugag

SEQ ID NO: 498421 - RNA, 24 nt, Human
uccagccugggaagcagagugaga

SEQ ID NO: 498422 - RNA, 32 nt, Human
uccagccugggaagcagagugagacccugucu

SEQ ID NO: 498423 - RNA, 24 nt, Human
uccagccugggagacacagcgaga

SEQ ID NO: 498424 - RNA, 32 nt, Human
uccagccugggagacacagugagacccugucu

SEQ ID NO: 498425 - RNA, 24 nt, Human
uccagccugggagacagagcaaga

SEQ ID NO: 498426 - RNA, 32 nt, Human
uccagccugggagacagagcaagacucagucu

SEQ ID NO: 498427 - RNA, 32 nt, Human
uccagccugggagacagagcaagacuccaucu

SEQ ID NO: 498428 - RNA, 32 nt, Human
uccagccugggagacagagcaagacuccgucu

SEQ ID NO: 498429 - RNA, 32 nt, Human
uccagccugggagacagagcaagacucugucu

SEQ ID NO: 498430 - RNA, 32 nt, Human
uccagccugggagacagagccagacuccaucu

SEQ ID NO: 498431 - RNA, 22 nt, Human
uccagccugggagacagagcga

SEQ ID NO: 498432 - RNA, 24 nt, Human
uccagccugggagacagagcgaga

SEQ ID NO: 498433 - RNA, 32 nt, Human
uccagccugggagacagagcgagacgcugucu

SEQ ID NO: 498434 - RNA, 32 nt, Human
uccagccugggagacagagcgagacuccaucu

SEQ ID NO: 498435 - RNA, 32 nt, Human
uccagccugggagacagagcgagacuccgucu

SEQ ID NO: 498436 - RNA, 32 nt, Human
uccagccugggagacagagcgagacucugucu

SEQ ID NO: 498437 - RNA, 32 nt, Human
uccagccugggagacagagcgagacucuuguc

SEQ ID NO: 498438 - RNA, 24 nt, Human
uccagccugggagacagagugaga

SEQ ID NO: 498439 - RNA, 24 nt, Human
uccagccugggagacagaguuaga

SEQ ID NO: 498440 - RNA, 22 nt, Human
uccagccugggagacagcaaga

SEQ ID NO: 498441 - RNA, 32 nt, Human
uccagccugggagacggagcaagacuccaucu

SEQ ID NO: 498442 - RNA, 24 nt, Human
uccagccugggagauacagcgaga

SEQ ID NO: 498443 - RNA, 24 nt, Human
uccagccugggagauagagcaaga

SEQ ID NO: 498444 - RNA, 32 nt, Human
uccagccugggagauagagcaagacuccaucu

SEQ ID NO: 498445 - RNA, 22 nt, Human
uccagccugggagauggugaga

SEQ ID NO: 498446 - RNA, 22 nt, Human
uccagccugggcaaaaaagcaa

SEQ ID NO: 498447 - RNA, 20 nt, Human
uccagccugggcaaaaagag

SEQ ID NO: 498448 - RNA, 23 nt, Human
uccagccugggcaaaaagagcaa

SEQ ID NO: 498449 - RNA, 22 nt, Human
uccagccugggcaaaagagcaa

SEQ ID NO: 498450 - RNA, 24 nt, Human
uccagccugggcaaaauagcgaga

SEQ ID NO: 498451 - RNA, 24 nt, Human
uccagccugggcaacaaaacgaga

SEQ ID NO: 498452 - RNA, 24 nt, Human
uccagccugggcaacaaagcaaga

SEQ ID NO: 498453 - RNA, 24 nt, Human
uccagccugggcaacaaagcuaga

SEQ ID NO: 498454 - RNA, 24 nt, Human
uccagccugggcaacaaagugaga

SEQ ID NO: 498455 - RNA, 23 nt, Human
uccagccugggcaacaacaguga

SEQ ID NO: 498456 - RNA, 19 nt, Human
uccagccugggcaacaaga

SEQ ID NO: 498457 - RNA, 23 nt, Human
uccagccugggcaacaagaacaa

SEQ ID NO: 498458 - RNA, 23 nt, Human
uccagccugggcaacaagaauga

SEQ ID NO: 498459 - RNA, 21 nt, Human
uccagccugggcaacaagaga

SEQ ID NO: 498460 - RNA, 24 nt, Human
uccagccugggcaacaagagaaga

SEQ ID NO: 498461 - RNA, 23 nt, Human
uccagccugggcaacaagagaga

SEQ ID NO: 498462 - RNA, 23 nt, Human
uccagccugggcaacaagagcaa

SEQ ID NO: 498463 - RNA, 25 nt, Human
uccagccugggcaacaagagcaaga

SEQ ID NO: 498464 - RNA, 23 nt, Human
uccagccugggcaacaagagcga

SEQ ID NO: 498465 - RNA, 24 nt, Human
uccagccugggcaacaagagcgag

SEQ ID NO: 498466 - RNA, 25 nt, Human
uccagccugggcaacaagagcgagg

SEQ ID NO: 498467 - RNA, 21 nt, Human
uccagccugggcaacaagagg

SEQ ID NO: 498468 - RNA, 23 nt, Human
uccagccugggcaacaagaggaa

SEQ ID NO: 498469 - RNA, 23 nt, Human
uccagccugggcaacaagaggga

SEQ ID NO: 498470 - RNA, 21 nt, Human
uccagccugggcaacaagagu

SEQ ID NO: 498471 - RNA, 23 nt, Human
uccagccugggcaacaagaguaa

SEQ ID NO: 498472 - RNA, 24 nt, Human
uccagccugggcaacaagaguaag

SEQ ID NO: 498473 - RNA, 25 nt, Human
uccagccugggcaacaagaguaaga

SEQ ID NO: 498474 - RNA, 23 nt, Human
uccagccugggcaacaagaguga

SEQ ID NO: 498475 - RNA, 25 nt, Human
uccagccugggcaacaagagugaga

SEQ ID NO: 498476 - RNA, 23 nt, Human
uccagccugggcaacaagagugg

SEQ ID NO: 498477 - RNA, 21 nt, Human
uccagccugggcaacaagcga

SEQ ID NO: 498478 - RNA, 23 nt, Human
uccagccugggcaacaagggcaa

SEQ ID NO: 498479 - RNA, 23 nt, Human
uccagccugggcaacaagugcga

SEQ ID NO: 498480 - RNA, 20 nt, Human
uccagccugggcaacacaga

SEQ ID NO: 498481 - RNA, 24 nt, Human
uccagccugggcaacacagagaga

SEQ ID NO: 498482 - RNA, 24 nt, Human
uccagccugggcaacacagcaaga

SEQ ID NO: 498483 - RNA, 32 nt, Human
uccagccugggcaacacagcaagacucugucg

SEQ ID NO: 498484 - RNA, 32 nt, Human
uccagccugggcaacacagcaagacucugucu

SEQ ID NO: 498485 - RNA, 24 nt, Human
uccagccugggcaacacagcgaga

SEQ ID NO: 498486 - RNA, 24 nt, Human
uccagccugggcaacacagugaga

SEQ ID NO: 498487 - RNA, 23 nt, Human
uccagccugggcaacacgagcga

SEQ ID NO: 498488 - RNA, 22 nt, Human
uccagccugggcaacagaacaa

SEQ ID NO: 498489 - RNA, 24 nt, Human
uccagccugggcaacagaacaaga

SEQ ID NO: 498490 - RNA, 24 nt, Human
uccagccugggcaacagaacgaga

SEQ ID NO: 498491 - RNA, 24 nt, Human
uccagccugggcaacagaagaaga

SEQ ID NO: 498492 - RNA, 24 nt, Human
uccagccugggcaacagaaugaga

SEQ ID NO: 498493 - RNA, 32 nt, Human
uccagccugggcaacagaaugagacccuuccg

SEQ ID NO: 498494 - RNA, 20 nt, Human
uccagccugggcaacagaca

SEQ ID NO: 498495 - RNA, 27 nt, Human
uccagccugggcaacagacagagugag

SEQ ID NO: 498496 - RNA, 28 nt, Human
uccagccugggcaacagacagagugaga

SEQ ID NO: 498497 - RNA, 20 nt, Human
uccagccugggcaacagaga

SEQ ID NO: 498498 - RNA, 32 nt, Human
uccagccugggcaacagagaacccugucucua

SEQ ID NO: 498499 - RNA, 32 nt, Human
uccagccugggcaacagagacccugucucaac

SEQ ID NO: 498500 - RNA, 32 nt, Human
uccagccugggcaacagagacucugucucaaa

SEQ ID NO: 498501 - RNA, 22 nt, Human
uccagccugggcaacagagaga

SEQ ID NO: 498502 - RNA, 32 nt, Human
uccagccugggcaacagagagacugucuccaa

SEQ ID NO: 498503 - RNA, 24 nt, Human
uccagccugggcaacagagagaga

SEQ ID NO: 498504 - RNA, 32 nt, Human
uccagccugggcaacagagagcgacucucuca

SEQ ID NO: 498505 - RNA, 22 nt, Human
uccagccugggcaacagagcaa

SEQ ID NO: 498506 - RNA, 32 nt, Human
uccagccugggcaacagagcaaaacccugucu

SEQ ID NO: 498507 - RNA, 32 nt, Human
uccagccugggcaacagagcaaaacuccgucu

SEQ ID NO: 498508 - RNA, 32 nt, Human
uccagccugggcaacagagcaaaacuuucagg

SEQ ID NO: 498509 - RNA, 24 nt, Human
uccagccugggcaacagagcaaga

SEQ ID NO: 498510 - RNA, 32 nt, Human
uccagccugggcaacagagcaagacccaucuc

SEQ ID NO: 498511 - RNA, 32 nt, Human
uccagccugggcaacagagcaagaccccaucc

SEQ ID NO: 498512 - RNA, 32 nt, Human
uccagccugggcaacagagcaagaccccaucu

SEQ ID NO: 498513 - RNA, 32 nt, Human
uccagccugggcaacagagcaagacccugucu

SEQ ID NO: 498514 - RNA, 32 nt, Human
uccagccugggcaacagagcaagaccucgucu

SEQ ID NO: 498515 - RNA, 32 nt, Human
uccagccugggcaacagagcaagaccuugucu

SEQ ID NO: 498516 - RNA, 32 nt, Human
uccagccugggcaacagagcaagacuccaucu

SEQ ID NO: 498517 - RNA, 32 nt, Human
uccagccugggcaacagagcaagacuccgucu

SEQ ID NO: 498518 - RNA, 32 nt, Human
uccagccugggcaacagagcaagacucggucu

SEQ ID NO: 498519 - RNA, 32 nt, Human
uccagccugggcaacagagcaagacucugccu

SEQ ID NO: 498520 - RNA, 32 nt, Human
uccagccugggcaacagagcaagacucugucu

SEQ ID NO: 498521 - RNA, 32 nt, Human
uccagccugggcaacagagcaagacugccuca

SEQ ID NO: 498522 - RNA, 32 nt, Human
uccagccugggcaacagagcaagacugucuca

SEQ ID NO: 498523 - RNA, 32 nt, Human
uccagccugggcaacagagcaagauccugucu

SEQ ID NO: 498524 - RNA, 24 nt, Human
uccagccugggcaacagagcaagg

SEQ ID NO: 498525 - RNA, 32 nt, Human
uccagccugggcaacagagcaaggcucugucu

SEQ ID NO: 498526 - RNA, 32 nt, Human
uccagccugggcaacagagcaaggcucuguuu

SEQ ID NO: 498527 - RNA, 32 nt, Human
uccagccugggcaacagagcaaggcugucucu

SEQ ID NO: 498528 - RNA, 32 nt, Human
uccagccugggcaacagagcauaacuccaucu

SEQ ID NO: 498529 - RNA, 24 nt, Human
uccagccugggcaacagagccaga

SEQ ID NO: 498530 - RNA, 24 nt, Human
uccagccugggcaacagagccagg

SEQ ID NO: 498531 - RNA, 24 nt, Human
uccagccugggcaacagagcgaga

SEQ ID NO: 498532 - RNA, 32 nt, Human
uccagccugggcaacagagcgagacuacaucu

SEQ ID NO: 498533 - RNA, 32 nt, Human
uccagccugggcaacagagcgagacuccaucu

SEQ ID NO: 498534 - RNA, 32 nt, Human
uccagccugggcaacagagcgagacuucaucu

SEQ ID NO: 498535 - RNA, 24 nt, Human
uccagccugggcaacagagcgagg

SEQ ID NO: 498536 - RNA, 24 nt, Human
uccagccugggcaacagagcuaga

SEQ ID NO: 498537 - RNA, 22 nt, Human
uccagccugggcaacagaggga

SEQ ID NO: 498538 - RNA, 23 nt, Human
uccagccugggcaacagagggag

SEQ ID NO: 498539 - RNA, 24 nt, Human
uccagccugggcaacagagggaga

SEQ ID NO: 498540 - RNA, 32 nt, Human
uccagccugggcaacagagggagacuccaucu

SEQ ID NO: 498541 - RNA, 32 nt, Human
uccagccugggcaacagagggagacuucaucu

SEQ ID NO: 498542 - RNA, 20 nt, Human
uccagccugggcaacagagu

SEQ ID NO: 498543 - RNA, 22 nt, Human
uccagccugggcaacagaguaa

SEQ ID NO: 498544 - RNA, 24 nt, Human
uccagccugggcaacagaguaaga

SEQ ID NO: 498545 - RNA, 32 nt, Human
uccagccugggcaacagaguaagaacugucuc

SEQ ID NO: 498546 - RNA, 32 nt, Human
uccagccugggcaacagaguaagacuccaucu

SEQ ID NO: 498547 - RNA, 22 nt, Human
uccagccugggcaacagaguga

SEQ ID NO: 498548 - RNA, 23 nt, Human
uccagccugggcaacagagugag

SEQ ID NO: 498549 - RNA, 24 nt, Human
uccagccugggcaacagagugaga

SEQ ID NO: 498550 - RNA, 32 nt, Human
uccagccugggcaacagagugagacccuaucu

SEQ ID NO: 498551 - RNA, 32 nt, Human
uccagccugggcaacagagugagacccugccu

SEQ ID NO: 498552 - RNA, 32 nt, Human
uccagccugggcaacagagugagacccugucu

SEQ ID NO: 498553 - RNA, 32 nt, Human
uccagccugggcaacagagugagacccuguuu

SEQ ID NO: 498554 - RNA, 32 nt, Human
uccagccugggcaacagagugagacuaucuca

SEQ ID NO: 498555 - RNA, 32 nt, Human
uccagccugggcaacagagugagacuccaucu

SEQ ID NO: 498556 - RNA, 32 nt, Human
uccagccugggcaacagagugagacugucuca

SEQ ID NO: 498557 - RNA, 24 nt, Human
uccagccugggcaacagagugagg

SEQ ID NO: 498558 - RNA, 22 nt, Human
uccagccugggcaacagagugg

SEQ ID NO: 498559 - RNA, 24 nt, Human
uccagccugggcaacagaguggga

SEQ ID NO: 498560 - RNA, 32 nt, Human
uccagccugggcaacagagugggacuccaucu

SEQ ID NO: 498561 - RNA, 24 nt, Human
uccagccugggcaacagaugaaga

SEQ ID NO: 498562 - RNA, 22 nt, Human
uccagccugggcaacagcgaga

SEQ ID NO: 498563 - RNA, 24 nt, Human
uccagccugggcaacagcgugaga

SEQ ID NO: 498564 - RNA, 23 nt, Human
uccagccugggcaacaggaguaa

SEQ ID NO: 498565 - RNA, 24 nt, Human
uccagccugggcaacagggcaaga

SEQ ID NO: 498566 - RNA, 23 nt, Human
uccagccugggcaacagguaaga

SEQ ID NO: 498567 - RNA, 23 nt, Human
uccagccugggcaacaggugaga

SEQ ID NO: 498568 - RNA, 19 nt, Human
uccagccugggcaacagug

SEQ ID NO: 498569 - RNA, 22 nt, Human
uccagccugggcaacagugaga

SEQ ID NO: 498570 - RNA, 24 nt, Human
uccagccugggcaacagugugaga

SEQ ID NO: 498571 - RNA, 24 nt, Human
uccagccugggcaacaguguuaag

SEQ ID NO: 498572 - RNA, 22 nt, Human
uccagccugggcaacauagcaa

SEQ ID NO: 498573 - RNA, 23 nt, Human
uccagccugggcaacauagcaag

SEQ ID NO: 498574 - RNA, 24 nt, Human
uccagccugggcaacauagcaaga

SEQ ID NO: 498575 - RNA, 32 nt, Human
uccagccugggcaacauagcaagacuccaucu

SEQ ID NO: 498576 - RNA, 24 nt, Human
uccagccugggcaacauaguaaga

SEQ ID NO: 498577 - RNA, 24 nt, Human
uccagccugggcaacauagugaga

SEQ ID NO: 498578 - RNA, 32 nt, Human
uccagccugggcaacauagugagaccccaucu

SEQ ID NO: 498579 - RNA, 23 nt, Human
uccagccugggcaacaugaguga

SEQ ID NO: 498580 - RNA, 32 nt, Human
uccagccugggcaaccaggugagacccugccu

SEQ ID NO: 498581 - RNA, 21 nt, Human
uccagccugggcaacgaaaag

SEQ ID NO: 498582 - RNA, 21 nt, Human
uccagccugggcaacgagagg

SEQ ID NO: 498583 - RNA, 23 nt, Human
uccagccugggcaacgagaggga

SEQ ID NO: 498584 - RNA, 24 nt, Human
uccagccugggcaacgagagggga

SEQ ID NO: 498585 - RNA, 23 nt, Human
uccagccugggcaacgagaguga

SEQ ID NO: 498586 - RNA, 21 nt, Human
uccagccugggcaacgagcaa

SEQ ID NO: 498587 - RNA, 23 nt, Human
uccagccugggcaacgagcaaga

SEQ ID NO: 498588 - RNA, 21 nt, Human
uccagccugggcaacgagcga

SEQ ID NO: 498589 - RNA, 21 nt, Human
uccagccugggcaacgaguga

SEQ ID NO: 498590 - RNA, 24 nt, Human
uccagccugggcaacggagcaaga

SEQ ID NO: 498591 - RNA, 24 nt, Human
uccagccugggcaacggagugaga

SEQ ID NO: 498592 - RNA, 24 nt, Human
uccagccugggcaacggauugaga

SEQ ID NO: 498593 - RNA, 23 nt, Human
uccagccugggcaacgggcgaga

SEQ ID NO: 498594 - RNA, 22 nt, Human
uccagccugggcaacguaguaa

SEQ ID NO: 498595 - RNA, 32 nt, Human
uccagccugggcaacguggugagacccugucu

SEQ ID NO: 498596 - RNA, 19 nt, Human
uccagccugggcaacugag

SEQ ID NO: 498597 - RNA, 22 nt, Human
uccagccugggcaacugagcaa

SEQ ID NO: 498598 - RNA, 24 nt, Human
uccagccugggcaacugagcaaga

SEQ ID NO: 498599 - RNA, 32 nt, Human
uccagccugggcaacugagcaagacugucuca

SEQ ID NO: 498600 - RNA, 23 nt, Human
uccagccugggcaauaagagcaa

SEQ ID NO: 498601 - RNA, 23 nt, Human
uccagccugggcaauaagagcga

SEQ ID NO: 498602 - RNA, 23 nt, Human
uccagccugggcaauaagaguga

SEQ ID NO: 498603 - RNA, 32 nt, Human
uccagccugggcaauacagugagacccugucu

SEQ ID NO: 498604 - RNA, 24 nt, Human
uccagccugggcaauagagcaaga

SEQ ID NO: 498605 - RNA, 32 nt, Human
uccagccugggcaauagagcaagacuccaucu

SEQ ID NO: 498606 - RNA, 32 nt, Human
uccagccugggcaauagagcaagacugcaaga

SEQ ID NO: 498607 - RNA, 24 nt, Human
uccagccugggcaauagaguaaga

SEQ ID NO: 498608 - RNA, 24 nt, Human
uccagccugggcaauagagugaga

SEQ ID NO: 498609 - RNA, 24 nt, Human
uccagccugggcaauagggcaaga

SEQ ID NO: 498610 - RNA, 24 nt, Human
uccagccugggcaauaggguaaga

SEQ ID NO: 498611 - RNA, 24 nt, Human
uccagccugggcaauauagcaaga

SEQ ID NO: 498612 - RNA, 22 nt, Human
uccagccugggcaauggagaga

SEQ ID NO: 498613 - RNA, 23 nt, Human
uccagccugggcaauggagagag

SEQ ID NO: 498614 - RNA, 24 nt, Human
uccagccugggcaauggagagagg

SEQ ID NO: 498615 - RNA, 24 nt, Human
uccagccugggcaauggagugaga

SEQ ID NO: 498616 - RNA, 24 nt, Human
uccagccugggcaccaaugugaga

SEQ ID NO: 498617 - RNA, 24 nt, Human
uccagccugggcaccacagcaaga

SEQ ID NO: 498618 - RNA, 24 nt, Human
uccagccugggcaccagagcgaga

SEQ ID NO: 498619 - RNA, 24 nt, Human
uccagccugggcacuagagugaga

SEQ ID NO: 498620 - RNA, 23 nt, Human
uccagccugggcagcaagagcaa

SEQ ID NO: 498621 - RNA, 23 nt, Human
uccagccugggcagcaagaguga

SEQ ID NO: 498622 - RNA, 22 nt, Human
uccagccugggcagcagagcaa

SEQ ID NO: 498623 - RNA, 24 nt, Human
uccagccugggcagcagagcaaga

SEQ ID NO: 498624 - RNA, 32 nt, Human
uccagccugggcagcagagcaagacucugucu

SEQ ID NO: 498625 - RNA, 24 nt, Human
uccagccugggcagcagagcgaga

SEQ ID NO: 498626 - RNA, 24 nt, Human
uccagccugggcagcagaggaaga

SEQ ID NO: 498627 - RNA, 24 nt, Human
uccagccugggcagcagagugaga

SEQ ID NO: 498628 - RNA, 24 nt, Human
uccagccugggcagcauaguguga

SEQ ID NO: 498629 - RNA, 24 nt, Human
uccagccugggcagcugaacaaga

SEQ ID NO: 498630 - RNA, 24 nt, Human
uccagccugggcaguauagcaaga

SEQ ID NO: 498631 - RNA, 24 nt, Human
uccagccugggccacaaggcaaga

SEQ ID NO: 498632 - RNA, 24 nt, Human
uccagccugggccacacagugaga

SEQ ID NO: 498633 - RNA, 24 nt, Human
uccagccugggccacagaacgaga

SEQ ID NO: 498634 - RNA, 24 nt, Human
uccagccugggccacagaaugaga

SEQ ID NO: 498635 - RNA, 32 nt, Human
uccagccugggccacagaaugagacuccaucu

SEQ ID NO: 498636 - RNA, 32 nt, Human
uccagccugggccacagagcaagacuccgucu

SEQ ID NO: 498637 - RNA, 24 nt, Human
uccagccugggccacagagugaga

SEQ ID NO: 498638 - RNA, 24 nt, Human
uccagccugggccacauagcaaga

SEQ ID NO: 498639 - RNA, 24 nt, Human
uccagccugggcgaaagagaaaga

SEQ ID NO: 498640 - RNA, 24 nt, Human
uccagccugggcgaaagggcaaga

SEQ ID NO: 498641 - RNA, 32 nt, Human
uccagccugggcgaaagggcaagacuccaucu

SEQ ID NO: 498642 - RNA, 24 nt, Human
uccagccugggcgaaagggugaga

SEQ ID NO: 498643 - RNA, 24 nt, Human
uccagccugggcgacaaagcaaga

SEQ ID NO: 498644 - RNA, 32 nt, Human
uccagccugggcgacaaagcaagacuccgucu

SEQ ID NO: 498645 - RNA, 32 nt, Human
uccagccugggcgacaaagcaagacucugucu

SEQ ID NO: 498646 - RNA, 22 nt, Human
uccagccugggcgacaaagcga

SEQ ID NO: 498647 - RNA, 24 nt, Human
uccagccugggcgacaaagcgaga

SEQ ID NO: 498648 - RNA, 24 nt, Human
uccagccugggcgacaaagugaga

SEQ ID NO: 498649 - RNA, 23 nt, Human
uccagccugggcgacaagagcaa

SEQ ID NO: 498650 - RNA, 25 nt, Human
uccagccugggcgacaagagcaaga

SEQ ID NO: 498651 - RNA, 23 nt, Human
uccagccugggcgacaagagcga

SEQ ID NO: 498652 - RNA, 24 nt, Human
uccagccugggcgacaagagcgag

SEQ ID NO: 498653 - RNA, 25 nt, Human
uccagccugggcgacaagagcgaga

SEQ ID NO: 498654 - RNA, 23 nt, Human
uccagccugggcgacaagaggga

SEQ ID NO: 498655 - RNA, 24 nt, Human
uccagccugggcgacaagagggag

SEQ ID NO: 498656 - RNA, 23 nt, Human
uccagccugggcgacaagaguga

SEQ ID NO: 498657 - RNA, 24 nt, Human
uccagccugggcgacacagcaaga

SEQ ID NO: 498658 - RNA, 32 nt, Human
uccagccugggcgacacagcaagacuccgucu

SEQ ID NO: 498659 - RNA, 24 nt, Human
uccagccugggcgacacagcgaga

SEQ ID NO: 498660 - RNA, 24 nt, Human
uccagccugggcgacagaacaaga

SEQ ID NO: 498661 - RNA, 24 nt, Human
uccagccugggcgacagaacgaga

SEQ ID NO: 498662 - RNA, 21 nt, Human
uccagccugggcgacagaagu

SEQ ID NO: 498663 - RNA, 24 nt, Human
uccagccugggcgacagaaugaga

SEQ ID NO: 498664 - RNA, 32 nt, Human
uccagccugggcgacagaaugagacccugucu

SEQ ID NO: 498665 - RNA, 32 nt, Human
uccagccugggcgacagaaugagacuccaucu

SEQ ID NO: 498666 - RNA, 32 nt, Human
uccagccugggcgacagaaugagacucugucu

SEQ ID NO: 498667 - RNA, 24 nt, Human
uccagccugggcgacagaccgaga

SEQ ID NO: 498668 - RNA, 19 nt, Human
uccagccugggcgacagag

SEQ ID NO: 498669 - RNA, 32 nt, Human
uccagccugggcgacagagaaccucucuaaaa

SEQ ID NO: 498670 - RNA, 24 nt, Human
uccagccugggcgacagagagaga

SEQ ID NO: 498671 - RNA, 22 nt, Human
uccagccugggcgacagagcaa

SEQ ID NO: 498672 - RNA, 24 nt, Human
uccagccugggcgacagagcaaga

SEQ ID NO: 498673 - RNA, 32 nt, Human
uccagccugggcgacagagcaagacacugucu

SEQ ID NO: 498674 - RNA, 32 nt, Human
uccagccugggcgacagagcaagacccugcuu

SEQ ID NO: 498675 - RNA, 32 nt, Human
uccagccugggcgacagagcaagacccugucu

SEQ ID NO: 498676 - RNA, 32 nt, Human
uccagccugggcgacagagcaagacgccaucu

SEQ ID NO: 498677 - RNA, 32 nt, Human
uccagccugggcgacagagcaagacucagucu

SEQ ID NO: 498678 - RNA, 32 nt, Human
uccagccugggcgacagagcaagacuccaccu

SEQ ID NO: 498679 - RNA, 32 nt, Human
uccagccugggcgacagagcaagacuccaucu

SEQ ID NO: 498680 - RNA, 32 nt, Human
uccagccugggcgacagagcaagacuccauuu

SEQ ID NO: 498681 - RNA, 32 nt, Human
uccagccugggcgacagagcaagacucccucu

SEQ ID NO: 498682 - RNA, 32 nt, Human
uccagccugggcgacagagcaagacuccgucu

SEQ ID NO: 498683 - RNA, 32 nt, Human
uccagccugggcgacagagcaagacuccuucu

SEQ ID NO: 498684 - RNA, 32 nt, Human
uccagccugggcgacagagcaagacucggucu

SEQ ID NO: 498685 - RNA, 31 nt, Human
uccagccugggcgacagagcaagacucucuc

SEQ ID NO: 498686 - RNA, 32 nt, Human
uccagccugggcgacagagcaagacucucuca

SEQ ID NO: 498687 - RNA, 32 nt, Human
uccagccugggcgacagagcaagacucugucu

SEQ ID NO: 498688 - RNA, 32 nt, Human
uccagccugggcgacagagcaagaucguuucu

SEQ ID NO: 498689 - RNA, 32 nt, Human
uccagccugggcgacagagcaagauuccguuc

SEQ ID NO: 498690 - RNA, 24 nt, Human
uccagccugggcgacagagcaagg

SEQ ID NO: 498691 - RNA, 32 nt, Human
uccagccugggcgacagagcaaggcucugucu

SEQ ID NO: 498692 - RNA, 32 nt, Human
uccagccugggcgacagagcaagucucaaaaa

SEQ ID NO: 498693 - RNA, 32 nt, Human
uccagccugggcgacagagcaauacucccguc

SEQ ID NO: 498694 - RNA, 32 nt, Human
uccagccugggcgacagagcaauacucuuuau

SEQ ID NO: 498695 - RNA, 32 nt, Human
uccagccugggcgacagagcacgacuucaucu

SEQ ID NO: 498696 - RNA, 24 nt, Human
uccagccugggcgacagagcagga

SEQ ID NO: 498697 - RNA, 32 nt, Human
uccagccugggcgacagagcaggacuccaucu

SEQ ID NO: 498698 - RNA, 32 nt, Human
uccagccugggcgacagagcaggacucucucu

SEQ ID NO: 498699 - RNA, 32 nt, Human
uccagccugggcgacagagcaggacucuuucu

SEQ ID NO: 498700 - RNA, 24 nt, Human
uccagccugggcgacagagccaga

SEQ ID NO: 498701 - RNA, 32 nt, Human
uccagccugggcgacagagccagacucaaucu

SEQ ID NO: 498702 - RNA, 32 nt, Human
uccagccugggcgacagagccagacuccaucu

SEQ ID NO: 498703 - RNA, 32 nt, Human
uccagccugggcgacagagccagacuccgacu

SEQ ID NO: 498704 - RNA, 32 nt, Human
uccagccugggcgacagagccagacuccgucu

SEQ ID NO: 498705 - RNA, 32 nt, Human
uccagccugggcgacagagccagacucuuguc

SEQ ID NO: 498706 - RNA, 32 nt, Human
uccagccugggcgacagagccagacugucuca

SEQ ID NO: 498707 - RNA, 22 nt, Human
uccagccugggcgacagagcga

SEQ ID NO: 498708 - RNA, 32 nt, Human
uccagccugggcgacagagcgaaacuccgucu

SEQ ID NO: 498709 - RNA, 24 nt, Human
uccagccugggcgacagagcgaga

SEQ ID NO: 498710 - RNA, 32 nt, Human
uccagccugggcgacagagcgagaccccaucu

SEQ ID NO: 498711 - RNA, 32 nt, Human
uccagccugggcgacagagcgagacuccaucu

SEQ ID NO: 498712 - RNA, 32 nt, Human
uccagccugggcgacagagcgagacuccgccu

SEQ ID NO: 498713 - RNA, 32 nt, Human
uccagccugggcgacagagcgagacuccgucu

SEQ ID NO: 498714 - RNA, 32 nt, Human
uccagccugggcgacagagcgagacuccgugg

SEQ ID NO: 498715 - RNA, 32 nt, Human
uccagccugggcgacagagcgagacucugucu

SEQ ID NO: 498716 - RNA, 32 nt, Human
uccagccugggcgacagagcgagacucugugu

SEQ ID NO: 498717 - RNA, 32 nt, Human
uccagccugggcgacagagcgagacugucuca

SEQ ID NO: 498718 - RNA, 32 nt, Human
uccagccugggcgacagagcgagacuucgucu

SEQ ID NO: 498719 - RNA, 32 nt, Human
uccagccugggcgacagagcgagacuuuggcu

SEQ ID NO: 498720 - RNA, 32 nt, Human
uccagccugggcgacagagcgagaguuugucu

SEQ ID NO: 498721 - RNA, 32 nt, Human
uccagccugggcgacagagcgagauuccgucu

SEQ ID NO: 498722 - RNA, 32 nt, Human
uccagccugggcgacagagcgagauucugucu

SEQ ID NO: 498723 - RNA, 24 nt, Human
uccagccugggcgacagagcuaga

SEQ ID NO: 498724 - RNA, 32 nt, Human
uccagccugggcgacagagcuagacuccgucu

SEQ ID NO: 498725 - RNA, 24 nt, Human
uccagccugggcgacagagggaga

SEQ ID NO: 498726 - RNA, 24 nt, Human
uccagccugggcgacagaggguga

SEQ ID NO: 498727 - RNA, 20 nt, Human
uccagccugggcgacagagu

SEQ ID NO: 498728 - RNA, 24 nt, Human
uccagccugggcgacagaguaaga

SEQ ID NO: 498729 - RNA, 22 nt, Human
uccagccugggcgacagaguga

SEQ ID NO: 498730 - RNA, 24 nt, Human
uccagccugggcgacagagugaga

SEQ ID NO: 498731 - RNA, 32 nt, Human
uccagccugggcgacagagugagacccagacu

SEQ ID NO: 498732 - RNA, 32 nt, Human
uccagccugggcgacagagugagaccccaucu

SEQ ID NO: 498733 - RNA, 32 nt, Human
uccagccugggcgacagagugagacccugccu

SEQ ID NO: 498734 - RNA, 24 nt, Human
uccagccugggcgacagagugagg

SEQ ID NO: 498735 - RNA, 22 nt, Human
uccagccugggcgacagagugg

SEQ ID NO: 498736 - RNA, 22 nt, Human
uccagccugggcgacagcaaga

SEQ ID NO: 498737 - RNA, 24 nt, Human
uccagccugggcgacagggcaaga

SEQ ID NO: 498738 - RNA, 32 nt, Human
uccagccugggcgacagggcaagacucugucu

SEQ ID NO: 498739 - RNA, 24 nt, Human
uccagccugggcgacagggugaga

SEQ ID NO: 498740 - RNA, 24 nt, Human
uccagccugggcgacaguaccaga

SEQ ID NO: 498741 - RNA, 20 nt, Human
uccagccugggcgacaguga

SEQ ID NO: 498742 - RNA, 24 nt, Human
uccagccugggcgacagugcaaga

SEQ ID NO: 498743 - RNA, 32 nt, Human
uccagccugggcgacagugcaagacucugucu

SEQ ID NO: 498744 - RNA, 22 nt, Human
uccagccugggcgacaucuaga

SEQ ID NO: 498745 - RNA, 21 nt, Human
uccagccugggcgacgagcaa

SEQ ID NO: 498746 - RNA, 21 nt, Human
uccagccugggcgacgaguga

SEQ ID NO: 498747 - RNA, 24 nt, Human
uccagccugggcgacggagcgaga

SEQ ID NO: 498748 - RNA, 24 nt, Human
uccagccugggcgacggagugaga

SEQ ID NO: 498749 - RNA, 22 nt, Human
uccagccugggcgacugugaga

SEQ ID NO: 498750 - RNA, 24 nt, Human
uccagccugggcgagacggcaaga

SEQ ID NO: 498751 - RNA, 32 nt, Human
uccagccugggcgagagaaugagacucuaucu

SEQ ID NO: 498752 - RNA, 32 nt, Human
uccagccugggcgagagagcaagacuccaucu

SEQ ID NO: 498753 - RNA, 24 nt, Human
uccagccugggcgauagagcaaga

SEQ ID NO: 498754 - RNA, 32 nt, Human
uccagccugggcgauagagcaagacucugucu

SEQ ID NO: 498755 - RNA, 24 nt, Human
uccagccugggcgauagagcuaga

SEQ ID NO: 498756 - RNA, 24 nt, Human
uccagccugggcgauagagggaga

SEQ ID NO: 498757 - RNA, 24 nt, Human
uccagccugggcgauagagugaga

SEQ ID NO: 498758 - RNA, 21 nt, Human
uccagccugggcgaugagcaa

SEQ ID NO: 498759 - RNA, 32 nt, Human
uccagccugggcgauggagcaagacucagucu

SEQ ID NO: 498760 - RNA, 32 nt, Human
uccagccugggcgauggagcaagacuccaucu

SEQ ID NO: 498761 - RNA, 24 nt, Human
uccagccugggcgauggagcgaga

SEQ ID NO: 498762 - RNA, 24 nt, Human
uccagccugggcgauggagugaga

SEQ ID NO: 498763 - RNA, 21 nt, Human
uccagccugggcggagccgga

SEQ ID NO: 498764 - RNA, 22 nt, Human
uccagccugggcggcagagcaa

SEQ ID NO: 498765 - RNA, 32 nt, Human
uccagccugggcggcagagcaaaacugaaaaa

SEQ ID NO: 498766 - RNA, 24 nt, Human
uccagccugggcggcagagcaaga

SEQ ID NO: 498767 - RNA, 32 nt, Human
uccagccugggcggcagagcaagacucccucu

SEQ ID NO: 498768 - RNA, 32 nt, Human
uccagccugggcggcagagcaagacuccgucu

SEQ ID NO: 498769 - RNA, 32 nt, Human
uccagccugggcggcagagcaagacucuguau

SEQ ID NO: 498770 - RNA, 32 nt, Human
uccagccugggcggcagagcaagauucugucu

SEQ ID NO: 498771 - RNA, 24 nt, Human
uccagccugggcggcagagugaga

SEQ ID NO: 498772 - RNA, 24 nt, Human
uccagccugggcgucagagugaga

SEQ ID NO: 498773 - RNA, 24 nt, Human
uccagccugggcuacaaagcagga

SEQ ID NO: 498774 - RNA, 24 nt, Human
uccagccugggcuacagagcaaga

SEQ ID NO: 498775 - RNA, 32 nt, Human
uccagccugggcuacagagcaagacuccaccu

SEQ ID NO: 498776 - RNA, 24 nt, Human
uccagccugggcuacagagcgaga

SEQ ID NO: 498777 - RNA, 20 nt, Human
uccagccugggcuacagagu

SEQ ID NO: 498778 - RNA, 24 nt, Human
uccagccugggcuacagagugaga

SEQ ID NO: 498779 - RNA, 24 nt, Human
uccagccugggcuacauagugaga

SEQ ID NO: 498780 - RNA, 22 nt, Human
uccagccugggcucaaaaaaga

SEQ ID NO: 498781 - RNA, 21 nt, Human
uccagccugggcuccgcagga

SEQ ID NO: 498782 - RNA, 29 nt, Human
uccagccugggcuucagagcaagacucgg

SEQ ID NO: 498783 - RNA, 24 nt, Human
uccagccuggggaacagagcaaga

SEQ ID NO: 498784 - RNA, 32 nt, Human
uccagccuggggaacagagcaagacugucuca

SEQ ID NO: 498785 - RNA, 32 nt, Human
uccagccuggggaacagagcaagauucugucu

SEQ ID NO: 498786 - RNA, 23 nt, Human
uccagccuggggacagagcaaga

SEQ ID NO: 498787 - RNA, 25 nt, Human
uccagccuggggagacagagcgaga

SEQ ID NO: 498788 - RNA, 26 nt, Human
uccagccuggggcugacagagcaaga

SEQ ID NO: 498789 - RNA, 24 nt, Human
uccagccuggggcugaggcugagg

SEQ ID NO: 498790 - RNA, 22 nt, Human
uccagccugggggaaagaguga

SEQ ID NO: 498791 - RNA, 25 nt, Human
uccagccugggggacaagagugaga

SEQ ID NO: 498792 - RNA, 22 nt, Human
uccagccugggggacagaaaga

SEQ ID NO: 498793 - RNA, 24 nt, Human
uccagccugggggacagagcaaga

SEQ ID NO: 498794 - RNA, 32 nt, Human
uccagccugggggacagagcaagacccugccu

SEQ ID NO: 498795 - RNA, 32 nt, Human
uccagccugggggacagagcaagaccgugucu

SEQ ID NO: 498796 - RNA, 32 nt, Human
uccagccugggggacagagcaagacucuaucu

SEQ ID NO: 498797 - RNA, 32 nt, Human
uccagccugggggacagagcaagacuguuguc

SEQ ID NO: 498798 - RNA, 24 nt, Human
uccagccugggggacagagcaagg

SEQ ID NO: 498799 - RNA, 32 nt, Human
uccagccugggggacagagcaaggcuccgucu

SEQ ID NO: 498800 - RNA, 24 nt, Human
uccagccugggggacagagcacga

SEQ ID NO: 498801 - RNA, 24 nt, Human
uccagccugggggacagagcgaga

SEQ ID NO: 498802 - RNA, 32 nt, Human
uccagccugggggacagagcgagacuccgucu

SEQ ID NO: 498803 - RNA, 32 nt, Human
uccagccugggggacagagcgagacucugccu

SEQ ID NO: 498804 - RNA, 24 nt, Human
uccagccugggggacagagugaga

SEQ ID NO: 498805 - RNA, 32 nt, Human
uccagccugggggacagagugagacccugucu

SEQ ID NO: 498806 - RNA, 24 nt, Human
uccagccuggggugacagagcaag

SEQ ID NO: 498807 - RNA, 25 nt, Human
uccagccuggggugauagaacaaga

SEQ ID NO: 498808 - RNA, 24 nt, Human
uccagccuggguaaaagagugaga

SEQ ID NO: 498809 - RNA, 23 nt, Human
uccagccuggguaacaagagcaa

SEQ ID NO: 498810 - RNA, 21 nt, Human
uccagccuggguaacagacgc

SEQ ID NO: 498811 - RNA, 24 nt, Human
uccagccuggguaacagagcaaga

SEQ ID NO: 498812 - RNA, 32 nt, Human
uccagccuggguaacagagcaagaccaugucu

SEQ ID NO: 498813 - RNA, 32 nt, Human
uccagccuggguaacagagcaagacuccaucu

SEQ ID NO: 498814 - RNA, 32 nt, Human
uccagccuggguaacagagcaagacucugucu

SEQ ID NO: 498815 - RNA, 31 nt, Human
uccagccuggguaacagagcaagagucuguc

SEQ ID NO: 498816 - RNA, 24 nt, Human
uccagccuggguaacagagcgaga

SEQ ID NO: 498817 - RNA, 24 nt, Human
uccagccuggguaacagagcuaga

SEQ ID NO: 498818 - RNA, 24 nt, Human
uccagccuggguaacagagugaga

SEQ ID NO: 498819 - RNA, 25 nt, Human
uccagccugggucagaagggguggg

SEQ ID NO: 498820 - RNA, 32 nt, Human
uccagccugggugaaagagcgagacuccaucu

SEQ ID NO: 498821 - RNA, 24 nt, Human
uccagccugggugaaagagcuaga

SEQ ID NO: 498822 - RNA, 32 nt, Human
uccagccugggugaaagagcuagauucucucu

SEQ ID NO: 498823 - RNA, 24 nt, Human
uccagccugggugaaggagugaga

SEQ ID NO: 498824 - RNA, 32 nt, Human
uccagccugggugaaggagugagacccugucu

SEQ ID NO: 498825 - RNA, 24 nt, Human
uccagccugggugacaaagcaaga

SEQ ID NO: 498826 - RNA, 32 nt, Human
uccagccugggugacaaagcaagacuccaucu

SEQ ID NO: 498827 - RNA, 32 nt, Human
uccagccugggugacaaagcaagacugugucu

SEQ ID NO: 498828 - RNA, 32 nt, Human
uccagccugggugacaaagcaagauucugucu

SEQ ID NO: 498829 - RNA, 32 nt, Human
uccagccugggugacaaagcaaggcccugucu

SEQ ID NO: 498830 - RNA, 32 nt, Human
uccagccugggugacaaagcgagacuccaucu

SEQ ID NO: 498831 - RNA, 23 nt, Human
uccagccugggugacaaaggaga

SEQ ID NO: 498832 - RNA, 24 nt, Human
uccagccugggugacaaaguaaga

SEQ ID NO: 498833 - RNA, 32 nt, Human
uccagccugggugacaaaguaagacccugccu

SEQ ID NO: 498834 - RNA, 24 nt, Human
uccagccugggugacaaagucaga

SEQ ID NO: 498835 - RNA, 32 nt, Human
uccagccugggugacaaagucagacuccaucu

SEQ ID NO: 498836 - RNA, 24 nt, Human
uccagccugggugacaaagugaga

SEQ ID NO: 498837 - RNA, 32 nt, Human
uccagccugggugacaaagugagacuccaucu

SEQ ID NO: 498838 - RNA, 32 nt, Human
uccagccugggugacaaagugagacuccguca

SEQ ID NO: 498839 - RNA, 32 nt, Human
uccagccugggugacaaagugagacucuaucu

SEQ ID NO: 498840 - RNA, 21 nt, Human
uccagccugggugacaagagc

SEQ ID NO: 498841 - RNA, 23 nt, Human
uccagccugggugacaagagcaa

SEQ ID NO: 498842 - RNA, 32 nt, Human
uccagccugggugacaagagcaaaacuccauc

SEQ ID NO: 498843 - RNA, 32 nt, Human
uccagccugggugacaagagcaaaacucuguc

SEQ ID NO: 498844 - RNA, 25 nt, Human
uccagccugggugacaagagcaaga

SEQ ID NO: 498845 - RNA, 32 nt, Human
uccagccugggugacaagagcaagacuccgug

SEQ ID NO: 498846 - RNA, 23 nt, Human
uccagccugggugacaagagcga

SEQ ID NO: 498847 - RNA, 32 nt, Human
uccagccugggugacaagagcgaaacuccauc

SEQ ID NO: 498848 - RNA, 23 nt, Human
uccagccugggugacaagaguga

SEQ ID NO: 498849 - RNA, 32 nt, Human
uccagccugggugacaagagugaaacuccauc

SEQ ID NO: 498850 - RNA, 25 nt, Human
uccagccugggugacaagagugaga

SEQ ID NO: 498851 - RNA, 32 nt, Human
uccagccugggugacaagagugagacuccguc

SEQ ID NO: 498852 - RNA, 32 nt, Human
uccagccugggugacaagagugagacucuguc

SEQ ID NO: 498853 - RNA, 24 nt, Human
uccagccugggugacaagggaaga

SEQ ID NO: 498854 - RNA, 32 nt, Human
uccagccugggugacaagggaagacucucucu

SEQ ID NO: 498855 - RNA, 32 nt, Human
uccagccugggugacacagcaagacucugucu

SEQ ID NO: 498856 - RNA, 32 nt, Human
uccagccugggugacacagcgacacucugucu

SEQ ID NO: 498857 - RNA, 24 nt, Human
uccagccugggugacacagcgaga

SEQ ID NO: 498858 - RNA, 32 nt, Human
uccagccugggugacacagcgagacuccgucu

SEQ ID NO: 498859 - RNA, 32 nt, Human
uccagccugggugacacagcgagacucugucu

SEQ ID NO: 498860 - RNA, 24 nt, Human
uccagccugggugacacagugaga

SEQ ID NO: 498861 - RNA, 32 nt, Human
uccagccugggugacacagugagacccugucc

SEQ ID NO: 498862 - RNA, 32 nt, Human
uccagccugggugacacagugagacuccaucu

SEQ ID NO: 498863 - RNA, 24 nt, Human
uccagccugggugacagaacaaga

SEQ ID NO: 498864 - RNA, 32 nt, Human
uccagccugggugacagaacaagacucugucu

SEQ ID NO: 498865 - RNA, 32 nt, Human
uccagccugggugacagaacaagacugucuca

SEQ ID NO: 498866 - RNA, 24 nt, Human
uccagccugggugacagaacgaga

SEQ ID NO: 498867 - RNA, 32 nt, Human
uccagccugggugacagaacgagacccugucu

SEQ ID NO: 498868 - RNA, 32 nt, Human
uccagccugggugacagaacgagacuccaccu

SEQ ID NO: 498869 - RNA, 32 nt, Human
uccagccugggugacagaacgagacuccgucu

SEQ ID NO: 498870 - RNA, 24 nt, Human
uccagccugggugacagaauaaga

SEQ ID NO: 498871 - RNA, 22 nt, Human
uccagccugggugacagaauga

SEQ ID NO: 498872 - RNA, 24 nt, Human
uccagccugggugacagaaugaga

SEQ ID NO: 498873 - RNA, 32 nt, Human
uccagccugggugacagaaugagacccuguca

SEQ ID NO: 498874 - RNA, 32 nt, Human
uccagccugggugacagaaugagacuccaucc

SEQ ID NO: 498875 - RNA, 32 nt, Human
uccagccugggugacagaaugaggcucccguc

SEQ ID NO: 498876 - RNA, 24 nt, Human
uccagccugggugacagaccgaga

SEQ ID NO: 498877 - RNA, 32 nt, Human
uccagccugggugacagaccgagacucugucu

SEQ ID NO: 498878 - RNA, 24 nt, Human
uccagccugggugacagacuaaga

SEQ ID NO: 498879 - RNA, 32 nt, Human
uccagccugggugacagacuaagacuccgucu

SEQ ID NO: 498880 - RNA, 19 nt, Human
uccagccugggugacagag

SEQ ID NO: 498881 - RNA, 23 nt, Human
uccagccugggugacagagacag

SEQ ID NO: 498882 - RNA, 32 nt, Human
uccagccugggugacagagacagugagacucu

SEQ ID NO: 498883 - RNA, 22 nt, Human
uccagccugggugacagagaga

SEQ ID NO: 498884 - RNA, 32 nt, Human
uccagccugggugacagagagacucugucuca

SEQ ID NO: 498885 - RNA, 24 nt, Human
uccagccugggugacagagagaga

SEQ ID NO: 498886 - RNA, 32 nt, Human
uccagccugggugacagagagagacccugucu

SEQ ID NO: 498887 - RNA, 32 nt, Human
uccagccugggugacagagagagacuccaucu

SEQ ID NO: 498888 - RNA, 32 nt, Human
uccagccugggugacagagagagacuccgucu

SEQ ID NO: 498889 - RNA, 32 nt, Human
uccagccugggugacagagagagacuccgugu

SEQ ID NO: 498890 - RNA, 32 nt, Human
uccagccugggugacagagagauacccugucu

SEQ ID NO: 498891 - RNA, 20 nt, Human
uccagccugggugacagagc

SEQ ID NO: 498892 - RNA, 22 nt, Human
uccagccugggugacagagcaa

SEQ ID NO: 498893 - RNA, 32 nt, Human
uccagccugggugacagagcaaacucucucuu

SEQ ID NO: 498894 - RNA, 32 nt, Human
uccagccugggugacagagcaacacugugucu

SEQ ID NO: 498895 - RNA, 24 nt, Human
uccagccugggugacagagcaaga

SEQ ID NO: 498896 - RNA, 32 nt, Human
uccagccugggugacagagcaagaaaauaaua

SEQ ID NO: 498897 - RNA, 32 nt, Human
uccagccugggugacagagcaagaaucauucu

SEQ ID NO: 498898 - RNA, 32 nt, Human
uccagccugggugacagagcaagacauaaaag

SEQ ID NO: 498899 - RNA, 32 nt, Human
uccagccugggugacagagcaagacccugucu

SEQ ID NO: 498900 - RNA, 32 nt, Human
uccagccugggugacagagcaagacccuguuu

SEQ ID NO: 498901 - RNA, 32 nt, Human
uccagccugggugacagagcaagaccugucac

SEQ ID NO: 498902 - RNA, 32 nt, Human
uccagccugggugacagagcaagacuccaucu

SEQ ID NO: 498903 - RNA, 32 nt, Human
uccagccugggugacagagcaagacuccauuu

SEQ ID NO: 498904 - RNA, 32 nt, Human
uccagccugggugacagagcaagacucccucu

SEQ ID NO: 498905 - RNA, 32 nt, Human
uccagccugggugacagagcaagacuccgucu

SEQ ID NO: 498906 - RNA, 32 nt, Human
uccagccugggugacagagcaagacucucucu

SEQ ID NO: 498907 - RNA, 32 nt, Human
uccagccugggugacagagcaagacucucuuu

SEQ ID NO: 498908 - RNA, 32 nt, Human
uccagccugggugacagagcaagacucugccu

SEQ ID NO: 498909 - RNA, 32 nt, Human
uccagccugggugacagagcaagacucuguau

SEQ ID NO: 498910 - RNA, 32 nt, Human
uccagccugggugacagagcaagacucugucu

SEQ ID NO: 498911 - RNA, 32 nt, Human
uccagccugggugacagagcaagacugcguuu

SEQ ID NO: 498912 - RNA, 32 nt, Human
uccagccugggugacagagcaagacuucauaa

SEQ ID NO: 498913 - RNA, 32 nt, Human
uccagccugggugacagagcaagacuuggucu

SEQ ID NO: 498914 - RNA, 32 nt, Human
uccagccugggugacagagcaagagacccugu

SEQ ID NO: 498915 - RNA, 32 nt, Human
uccagccugggugacagagcaagagucugucu

SEQ ID NO: 498916 - RNA, 32 nt, Human
uccagccugggugacagagcaagaucuugucu

SEQ ID NO: 498917 - RNA, 32 nt, Human
uccagccugggugacagagcaagauuccgugg

SEQ ID NO: 498918 - RNA, 24 nt, Human
uccagccugggugacagagcaagg

SEQ ID NO: 498919 - RNA, 32 nt, Human
uccagccugggugacagagcaaggcucccauc

SEQ ID NO: 498920 - RNA, 32 nt, Human
uccagccugggugacagagcaaggcucugucu

SEQ ID NO: 498921 - RNA, 32 nt, Human
uccagccugggugacagagcaauacccugucu

SEQ ID NO: 498922 - RNA, 28 nt, Human
uccagccugggugacagagcagacucca

SEQ ID NO: 498923 - RNA, 24 nt, Human
uccagccugggugacagagcagga

SEQ ID NO: 498924 - RNA, 32 nt, Human
uccagccugggugacagagcaggacccugucu

SEQ ID NO: 498925 - RNA, 32 nt, Human
uccagccugggugacagagccacuccgucuca

SEQ ID NO: 498926 - RNA, 24 nt, Human
uccagccugggugacagagccaga

SEQ ID NO: 498927 - RNA, 32 nt, Human
uccagccugggugacagagccagacacugucu

SEQ ID NO: 498928 - RNA, 32 nt, Human
uccagccugggugacagagccagaccccgucc

SEQ ID NO: 498929 - RNA, 32 nt, Human
uccagccugggugacagagccagacuccaucu

SEQ ID NO: 498930 - RNA, 32 nt, Human
uccagccugggugacagagccagacuccgucu

SEQ ID NO: 498931 - RNA, 32 nt, Human
uccagccugggugacagagccagacucugucc

SEQ ID NO: 498932 - RNA, 32 nt, Human
uccagccugggugacagagccagacucugucu

SEQ ID NO: 498933 - RNA, 32 nt, Human
uccagccugggugacagagcgacccucugucu

SEQ ID NO: 498934 - RNA, 24 nt, Human
uccagccugggugacagagcgaga

SEQ ID NO: 498935 - RNA, 32 nt, Human
uccagccugggugacagagcgagaaucagucu

SEQ ID NO: 498936 - RNA, 32 nt, Human
uccagccugggugacagagcgagaccaugucu

SEQ ID NO: 498937 - RNA, 32 nt, Human
uccagccugggugacagagcgagacccagacu

SEQ ID NO: 498938 - RNA, 32 nt, Human
uccagccugggugacagagcgagaccccaucu

SEQ ID NO: 498939 - RNA, 32 nt, Human
uccagccugggugacagagcgagacccuauuc

SEQ ID NO: 498940 - RNA, 32 nt, Human
uccagccugggugacagagcgagacccugucu

SEQ ID NO: 498941 - RNA, 32 nt, Human
uccagccugggugacagagcgagaccgucuca

SEQ ID NO: 498942 - RNA, 32 nt, Human
uccagccugggugacagagcgagacuaucuca

SEQ ID NO: 498943 - RNA, 32 nt, Human
uccagccugggugacagagcgagacucagucu

SEQ ID NO: 498944 - RNA, 32 nt, Human
uccagccugggugacagagcgagacuccaucu

SEQ ID NO: 498945 - RNA, 32 nt, Human
uccagccugggugacagagcgagacuccauuu

SEQ ID NO: 498946 - RNA, 32 nt, Human
uccagccugggugacagagcgagacuccguau

SEQ ID NO: 498947 - RNA, 32 nt, Human
uccagccugggugacagagcgagacuccgucu

SEQ ID NO: 498948 - RNA, 32 nt, Human
uccagccugggugacagagcgagacucuggcu

SEQ ID NO: 498949 - RNA, 32 nt, Human
uccagccugggugacagagcgagacucugucu

SEQ ID NO: 498950 - RNA, 32 nt, Human
uccagccugggugacagagcgagacucuguuu

SEQ ID NO: 498951 - RNA, 31 nt, Human
uccagccugggugacagagcgagacugucuc

SEQ ID NO: 498952 - RNA, 32 nt, Human
uccagccugggugacagagcgagacugucuca

SEQ ID NO: 498953 - RNA, 32 nt, Human
uccagccugggugacagagcgagacuguguuu

SEQ ID NO: 498954 - RNA, 32 nt, Human
uccagccugggugacagagcgagacuuauaga

SEQ ID NO: 498955 - RNA, 32 nt, Human
uccagccugggugacagagcgagacuuaucuc

SEQ ID NO: 498956 - RNA, 32 nt, Human
uccagccugggugacagagcgagacuuugucc

SEQ ID NO: 498957 - RNA, 24 nt, Human
uccagccugggugacagagcgagg

SEQ ID NO: 498958 - RNA, 25 nt, Human
uccagccugggugacagagcgaggc

SEQ ID NO: 498959 - RNA, 24 nt, Human
uccagccugggugacagagcguga

SEQ ID NO: 498960 - RNA, 32 nt, Human
uccagccugggugacagagcgugagacuccgu

SEQ ID NO: 498961 - RNA, 24 nt, Human
uccagccugggugacagagcuaga

SEQ ID NO: 498962 - RNA, 32 nt, Human
uccagccugggugacagagcuagacucugucu

SEQ ID NO: 498963 - RNA, 32 nt, Human
uccagccugggugacagaggaagacucagaau

SEQ ID NO: 498964 - RNA, 22 nt, Human
uccagccugggugacagaggga

SEQ ID NO: 498965 - RNA, 32 nt, Human
uccagccugggugacagagggaaacuccaucu

SEQ ID NO: 498966 - RNA, 24 nt, Human
uccagccugggugacagagggaga

SEQ ID NO: 498967 - RNA, 32 nt, Human
uccagccugggugacagagggagacuccaucu

SEQ ID NO: 498968 - RNA, 32 nt, Human
uccagccugggugacagagggagacuccgucc

SEQ ID NO: 498969 - RNA, 32 nt, Human
uccagccugggugacagagggagacuccgucu

SEQ ID NO: 498970 - RNA, 32 nt, Human
uccagccugggugacagagggagacucugucu

SEQ ID NO: 498971 - RNA, 20 nt, Human
uccagccugggugacagagu

SEQ ID NO: 498972 - RNA, 22 nt, Human
uccagccugggugacagaguaa

SEQ ID NO: 498973 - RNA, 32 nt, Human
uccagccugggugacagaguaacacucugucu

SEQ ID NO: 498974 - RNA, 24 nt, Human
uccagccugggugacagaguaaga

SEQ ID NO: 498975 - RNA, 32 nt, Human
uccagccugggugacagaguaagacccugucu

SEQ ID NO: 498976 - RNA, 32 nt, Human
uccagccugggugacagaguaagacuccaugu

SEQ ID NO: 498977 - RNA, 32 nt, Human
uccagccugggugacagaguaagacuccgucu

SEQ ID NO: 498978 - RNA, 32 nt, Human
uccagccugggugacagaguaagacucugucu

SEQ ID NO: 498979 - RNA, 32 nt, Human
uccagccugggugacagaguaauacucgguuu

SEQ ID NO: 498980 - RNA, 32 nt, Human
uccagccugggugacagaguaggacccugucu

SEQ ID NO: 498981 - RNA, 24 nt, Human
uccagccugggugacagagucaga

SEQ ID NO: 498982 - RNA, 32 nt, Human
uccagccugggugacagagucagacccuaucu

SEQ ID NO: 498983 - RNA, 32 nt, Human
uccagccugggugacagagucagacccugucu

SEQ ID NO: 498984 - RNA, 22 nt, Human
uccagccugggugacagaguga

SEQ ID NO: 498985 - RNA, 23 nt, Human
uccagccugggugacagagugag

SEQ ID NO: 498986 - RNA, 24 nt, Human
uccagccugggugacagagugaga

SEQ ID NO: 498987 - RNA, 32 nt, Human
uccagccugggugacagagugagacaccaucu

SEQ ID NO: 498988 - RNA, 32 nt, Human
uccagccugggugacagagugagaccccaucu

SEQ ID NO: 498989 - RNA, 32 nt, Human
uccagccugggugacagagugagacccccacu

SEQ ID NO: 498990 - RNA, 32 nt, Human
uccagccugggugacagagugagacccuauuu

SEQ ID NO: 498991 - RNA, 32 nt, Human
uccagccugggugacagagugagacccugccu

SEQ ID NO: 498992 - RNA, 32 nt, Human
uccagccugggugacagagugagacccuggcu

SEQ ID NO: 498993 - RNA, 32 nt, Human
uccagccugggugacagagugagacccugucc

SEQ ID NO: 498994 - RNA, 32 nt, Human
uccagccugggugacagagugagacccugucu

SEQ ID NO: 498995 - RNA, 32 nt, Human
uccagccugggugacagagugagacccuguuc

SEQ ID NO: 498996 - RNA, 32 nt, Human
uccagccugggugacagagugagaccucauuu

SEQ ID NO: 498997 - RNA, 32 nt, Human
uccagccugggugacagagugagacucagucu

SEQ ID NO: 498998 - RNA, 32 nt, Human
uccagccugggugacagagugagacuccaacu

SEQ ID NO: 498999 - RNA, 32 nt, Human
uccagccugggugacagagugagacuccaccu

SEQ ID NO: 499000 - RNA, 32 nt, Human
uccagccugggugacagagugagacuccauca

SEQ ID NO: 499001 - RNA, 32 nt, Human
uccagccugggugacagagugagacuccaucu

SEQ ID NO: 499002 - RNA, 32 nt, Human
uccagccugggugacagagugagacuccgucu

SEQ ID NO: 499003 - RNA, 32 nt, Human
uccagccugggugacagagugagacuccgugu

SEQ ID NO: 499004 - RNA, 32 nt, Human
uccagccugggugacagagugagacucugucu

SEQ ID NO: 499005 - RNA, 32 nt, Human
uccagccugggugacagagugagacucuguuu

SEQ ID NO: 499006 - RNA, 32 nt, Human
uccagccugggugacagagugagacucuuguc

SEQ ID NO: 499007 - RNA, 32 nt, Human
uccagccugggugacagagugagacugucuca

SEQ ID NO: 499008 - RNA, 32 nt, Human
uccagccugggugacagagugagacuuugucu

SEQ ID NO: 499009 - RNA, 32 nt, Human
uccagccugggugacagagugagaucccgucu

SEQ ID NO: 499010 - RNA, 32 nt, Human
uccagccugggugacagagugagauccugucu

SEQ ID NO: 499011 - RNA, 32 nt, Human
uccagccugggugacagagugagauuccgccu

SEQ ID NO: 499012 - RNA, 32 nt, Human
uccagccugggugacagagugagauuccgucu

SEQ ID NO: 499013 - RNA, 32 nt, Human
uccagccugggugacagagugagauucugucu

SEQ ID NO: 499014 - RNA, 24 nt, Human
uccagccugggugacagagugagg

SEQ ID NO: 499015 - RNA, 32 nt, Human
uccagccugggugacagagugagugagacucu

SEQ ID NO: 499016 - RNA, 32 nt, Human
uccagccugggugacagagugauacuccaucu

SEQ ID NO: 499017 - RNA, 24 nt, Human
uccagccugggugacagaguggga

SEQ ID NO: 499018 - RNA, 24 nt, Human
uccagccugggugacagauccaga

SEQ ID NO: 499019 - RNA, 32 nt, Human
uccagccugggugacagauccagacucugucu

SEQ ID NO: 499020 - RNA, 24 nt, Human
uccagccugggugacagauugaga

SEQ ID NO: 499021 - RNA, 32 nt, Human
uccagccugggugacagauugagacucccucu

SEQ ID NO: 499022 - RNA, 22 nt, Human
uccagccugggugacagcaaga

SEQ ID NO: 499023 - RNA, 32 nt, Human
uccagccugggugacagcaagacccugucucg

SEQ ID NO: 499024 - RNA, 24 nt, Human
uccagccugggugacagcaagaga

SEQ ID NO: 499025 - RNA, 24 nt, Human
uccagccugggugacagcacgaga

SEQ ID NO: 499026 - RNA, 22 nt, Human
uccagccugggugacagcgaga

SEQ ID NO: 499027 - RNA, 32 nt, Human
uccagccugggugacagcgagacccugucuca

SEQ ID NO: 499028 - RNA, 32 nt, Human
uccagccugggugacagcgagacccugucucc

SEQ ID NO: 499029 - RNA, 24 nt, Human
uccagccugggugacagcgcgaga

SEQ ID NO: 499030 - RNA, 32 nt, Human
uccagccugggugacagcgcgagacuccaucu

SEQ ID NO: 499031 - RNA, 24 nt, Human
uccagccugggugacagcguaaga

SEQ ID NO: 499032 - RNA, 32 nt, Human
uccagccugggugacagcguaagacucucuca

SEQ ID NO: 499033 - RNA, 22 nt, Human
uccagccugggugacagcuaga

SEQ ID NO: 499034 - RNA, 24 nt, Human
uccagccugggugacagggcaaga

SEQ ID NO: 499035 - RNA, 32 nt, Human
uccagccugggugacagggcaagacccugucu

SEQ ID NO: 499036 - RNA, 32 nt, Human
uccagccugggugacagggcaagacucugucu

SEQ ID NO: 499037 - RNA, 24 nt, Human
uccagccugggugacagggcgaga

SEQ ID NO: 499038 - RNA, 32 nt, Human
uccagccugggugacagggcgagacucugucu

SEQ ID NO: 499039 - RNA, 22 nt, Human
uccagccugggugacaggguga

SEQ ID NO: 499040 - RNA, 24 nt, Human
uccagccugggugacagggugaga

SEQ ID NO: 499041 - RNA, 32 nt, Human
uccagccugggugacagggugagacucugucu

SEQ ID NO: 499042 - RNA, 20 nt, Human
uccagccugggugacaguga

SEQ ID NO: 499043 - RNA, 21 nt, Human
uccagccugggugacagugag

SEQ ID NO: 499044 - RNA, 22 nt, Human
uccagccugggugacagugaga

SEQ ID NO: 499045 - RNA, 32 nt, Human
uccagccugggugacagugagacuguggcuca

SEQ ID NO: 499046 - RNA, 32 nt, Human
uccagccugggugacagugagacuuugucaca

SEQ ID NO: 499047 - RNA, 22 nt, Human
uccagccugggugacaguguga

SEQ ID NO: 499048 - RNA, 32 nt, Human
uccagccugggugacagugugaaacuuugucu

SEQ ID NO: 499049 - RNA, 24 nt, Human
uccagccugggugacauagcaaga

SEQ ID NO: 499050 - RNA, 32 nt, Human
uccagccugggugacauagcaagacccugucu

SEQ ID NO: 499051 - RNA, 24 nt, Human
uccagccugggugacauaucaaga

SEQ ID NO: 499052 - RNA, 32 nt, Human
uccagccugggugacauaucaagaccuguuug

SEQ ID NO: 499053 - RNA, 24 nt, Human
uccagccugggugaccgagugaga

SEQ ID NO: 499054 - RNA, 32 nt, Human
uccagccugggugaccgagugagacuguuucu

SEQ ID NO: 499055 - RNA, 32 nt, Human
uccagccugggugacgagcgaaacuccaucuc

SEQ ID NO: 499056 - RNA, 21 nt, Human
uccagccugggugacgaguga

SEQ ID NO: 499057 - RNA, 24 nt, Human
uccagccugggugacggaacggga

SEQ ID NO: 499058 - RNA, 24 nt, Human
uccagccugggugacggagaaaga

SEQ ID NO: 499059 - RNA, 32 nt, Human
uccagccugggugacggagcgagacuccaucu

SEQ ID NO: 499060 - RNA, 24 nt, Human
uccagccugggugacggagugaga

SEQ ID NO: 499061 - RNA, 32 nt, Human
uccagccugggugacggagugagacuccaucu

SEQ ID NO: 499062 - RNA, 22 nt, Human
uccagccugggugacggugaga

SEQ ID NO: 499063 - RNA, 31 nt, Human
uccagccugggugacggugagacuuugucuc

SEQ ID NO: 499064 - RNA, 19 nt, Human
uccagccugggugacuagc

SEQ ID NO: 499065 - RNA, 21 nt, Human
uccagccugggugacuagcaa

SEQ ID NO: 499066 - RNA, 32 nt, Human
uccagccugggugacuagcaaaacuccaucuc

SEQ ID NO: 499067 - RNA, 19 nt, Human
uccagccugggugacugag

SEQ ID NO: 499068 - RNA, 24 nt, Human
uccagccugggugacugagcaaga

SEQ ID NO: 499069 - RNA, 32 nt, Human
uccagccugggugacugagcaagacucugccu

SEQ ID NO: 499070 - RNA, 24 nt, Human
uccagccugggugacugagcgaga

SEQ ID NO: 499071 - RNA, 32 nt, Human
uccagccugggugacugagcgagacuccaucu

SEQ ID NO: 499072 - RNA, 32 nt, Human
uccagccugggugacugagcgagacucugucu

SEQ ID NO: 499073 - RNA, 32 nt, Human
uccagccugggugacugagcgagauucugucu

SEQ ID NO: 499074 - RNA, 24 nt, Human
uccagccugggugacugagggaga

SEQ ID NO: 499075 - RNA, 32 nt, Human
uccagccugggugacugagggagacucugucu

SEQ ID NO: 499076 - RNA, 32 nt, Human
uccagccugggugacugagugagacccuguuu

SEQ ID NO: 499077 - RNA, 24 nt, Human
uccagccugggugagaaagcaaga

SEQ ID NO: 499078 - RNA, 32 nt, Human
uccagccugggugagaaagcaagacccuauau

SEQ ID NO: 499079 - RNA, 23 nt, Human
uccagccugggugagaagagcga

SEQ ID NO: 499080 - RNA, 32 nt, Human
uccagccugggugagaagagcgaaacuccguc

SEQ ID NO: 499081 - RNA, 32 nt, Human
uccagccugggugagagagcaagacccugccu

SEQ ID NO: 499082 - RNA, 24 nt, Human
uccagccugggugagagagugaga

SEQ ID NO: 499083 - RNA, 32 nt, Human
uccagccugggugaggagagcgagacucuuuc

SEQ ID NO: 499084 - RNA, 21 nt, Human
uccagccugggugauaagagc

SEQ ID NO: 499085 - RNA, 25 nt, Human
uccagccugggugauaagagcaaga

SEQ ID NO: 499086 - RNA, 32 nt, Human
uccagccugggugauaagagcaagacucuugc

SEQ ID NO: 499087 - RNA, 23 nt, Human
uccagccugggugauaagaguga

SEQ ID NO: 499088 - RNA, 24 nt, Human
uccagccugggugauagagcaaga

SEQ ID NO: 499089 - RNA, 32 nt, Human
uccagccugggugauagagcaagaccccaacu

SEQ ID NO: 499090 - RNA, 32 nt, Human
uccagccugggugauagagcaagacccuaucu

SEQ ID NO: 499091 - RNA, 32 nt, Human
uccagccugggugauagagcaagacugucuca

SEQ ID NO: 499092 - RNA, 24 nt, Human
uccagccugggugauagagcugga

SEQ ID NO: 499093 - RNA, 24 nt, Human
uccagccugggugauagagugaga

SEQ ID NO: 499094 - RNA, 32 nt, Human
uccagccugggugauagagugagaacuugucu

SEQ ID NO: 499095 - RNA, 32 nt, Human
uccagccugggugauagagugagacccucguc

SEQ ID NO: 499096 - RNA, 32 nt, Human
uccagccugggugauagagugagauucagucu

SEQ ID NO: 499097 - RNA, 32 nt, Human
uccagccugggugauaggaugagacuccaucu

SEQ ID NO: 499098 - RNA, 32 nt, Human
uccagccugggugaugaagacgagacucuguc

SEQ ID NO: 499099 - RNA, 19 nt, Human
uccagccugggugauggag

SEQ ID NO: 499100 - RNA, 24 nt, Human
uccagccugggugauggagcaaga

SEQ ID NO: 499101 - RNA, 32 nt, Human
uccagccugggugauggagcaagacuccaucu

SEQ ID NO: 499102 - RNA, 25 nt, Human
uccagccugggugaugggagugaga

SEQ ID NO: 499103 - RNA, 32 nt, Human
uccagccuggguggacagaacaaggcccuguc

SEQ ID NO: 499104 - RNA, 32 nt, Human
uccagccuggguggacagagcaagacuccguc

SEQ ID NO: 499105 - RNA, 32 nt, Human
uccagccuggguggcaaagcaagaccccuguc

SEQ ID NO: 499106 - RNA, 32 nt, Human
uccagccuggguggcaaagugagacucuggcu

SEQ ID NO: 499107 - RNA, 19 nt, Human
uccagccuggguggcagag

SEQ ID NO: 499108 - RNA, 24 nt, Human
uccagccuggguggcagagagaga

SEQ ID NO: 499109 - RNA, 32 nt, Human
uccagccuggguggcagagagagacucugucu

SEQ ID NO: 499110 - RNA, 20 nt, Human
uccagccuggguggcagagc

SEQ ID NO: 499111 - RNA, 22 nt, Human
uccagccuggguggcagagcaa

SEQ ID NO: 499112 - RNA, 32 nt, Human
uccagccuggguggcagagcaacacuucgucu

SEQ ID NO: 499113 - RNA, 31 nt, Human
uccagccuggguggcagagcaagacugucuc

SEQ ID NO: 499114 - RNA, 24 nt, Human
uccagccuggguggcagagccaga

SEQ ID NO: 499115 - RNA, 32 nt, Human
uccagccuggguggcagagccagacccugacu

SEQ ID NO: 499116 - RNA, 24 nt, Human
uccagccuggguggcagagcgaga

SEQ ID NO: 499117 - RNA, 32 nt, Human
uccagccuggguggcagagcgagacccugucu

SEQ ID NO: 499118 - RNA, 24 nt, Human
uccagccuggguggcagagugaga

SEQ ID NO: 499119 - RNA, 32 nt, Human
uccagccuggguggcagagugagacccugucu

SEQ ID NO: 499120 - RNA, 32 nt, Human
uccagccuggguggcagagugagacucgucuc

SEQ ID NO: 499121 - RNA, 32 nt, Human
uccagccugggugguagaucaaggcuuuguuu

SEQ ID NO: 499122 - RNA, 32 nt, Human
uccagccugggugucagagcaagacucugguu

SEQ ID NO: 499123 - RNA, 24 nt, Human
uccagccugggugucagagcgaga

SEQ ID NO: 499124 - RNA, 24 nt, Human
uccagccuggguuacagagcgaga

SEQ ID NO: 499125 - RNA, 32 nt, Human
uccagccuggguuacagagugagacccugucu

SEQ ID NO: 499126 - RNA, 32 nt, Human
uccagccugguauaaccucuggcuccaugggc

SEQ ID NO: 499127 - RNA, 24 nt, Human
uccagccuggucaacaaagcaaga

SEQ ID NO: 499128 - RNA, 24 nt, Human
uccagccuggucaacagagcaaga

SEQ ID NO: 499129 - RNA, 32 nt, Human
uccagccuggucaacagagcaagacuccaucu

SEQ ID NO: 499130 - RNA, 24 nt, Human
uccagccuggucaacagagugaga

SEQ ID NO: 499131 - RNA, 24 nt, Human
uccagccuggucaauggagugcga

SEQ ID NO: 499132 - RNA, 24 nt, Human
uccagccugguccagagagaaaga

SEQ ID NO: 499133 - RNA, 23 nt, Human
uccagccuggucgacaagagaga

SEQ ID NO: 499134 - RNA, 22 nt, Human
uccagccuggucgacagaguga

SEQ ID NO: 499135 - RNA, 24 nt, Human
uccagccuggucgacagagugaga

SEQ ID NO: 499136 - RNA, 23 nt, Human
uccagccuggugacagagcaaga

SEQ ID NO: 499137 - RNA, 23 nt, Human
uccagccuggugacagagcgaga

SEQ ID NO: 499138 - RNA, 23 nt, Human
uccagccuggugacagagugaga

SEQ ID NO: 499139 - RNA, 23 nt, Human
uccagccuggugauagaacgaga

SEQ ID NO: 499140 - RNA, 23 nt, Human
uccagccugguuacagagcgaga

SEQ ID NO: 499141 - RNA, 24 nt, Human
uccagccugguugacagagcaaga

SEQ ID NO: 499142 - RNA, 32 nt, Human
uccagccugguugacagagcaagacuccgucu

SEQ ID NO: 499143 - RNA, 32 nt, Human
uccagccugguugacagagcaagacucugucu

SEQ ID NO: 499144 - RNA, 24 nt, Human
uccagccugguugacagagugaga

SEQ ID NO: 499145 - RNA, 32 nt, Human
uccagccugguugacagagugagacuccgucu

SEQ ID NO: 499146 - RNA, 20 nt, Human
uccagccuguaggggaguga

SEQ ID NO: 499147 - RNA, 32 nt, Human
uccagccuguaugcacagacccccagguuauu

SEQ ID NO: 499148 - RNA, 32 nt, Human
uccagccugugaugggcaggccuaggcugcca

SEQ ID NO: 499149 - RNA, 24 nt, Human
uccagccugugcaacagagccaga

SEQ ID NO: 499150 - RNA, 24 nt, Human
uccagccugugcaacagagcgagg

SEQ ID NO: 499151 - RNA, 24 nt, Human
uccagccugugcgacagaaugaga

SEQ ID NO: 499152 - RNA, 32 nt, Human
uccagccugugcgacagaaugagacacugucu

SEQ ID NO: 499153 - RNA, 24 nt, Human
uccagccugugugacagaaugaga

SEQ ID NO: 499154 - RNA, 22 nt, Human
uccagccugugugacagagcaa

SEQ ID NO: 499155 - RNA, 24 nt, Human
uccagccugugugacagagcaaga

SEQ ID NO: 499156 - RNA, 32 nt, Human
uccagccugugugacagagcaauacucuuguc

SEQ ID NO: 499157 - RNA, 24 nt, Human
uccagccugugugauggagagaga

SEQ ID NO: 499158 - RNA, 32 nt, Human
uccagccuguguuucaggagaggacugugcug

SEQ ID NO: 499159 - RNA, 23 nt, Human
uccagccuguugacaaagcaaga

SEQ ID NO: 499160 - RNA, 21 nt, Human
uccagccuguuggagggggga

SEQ ID NO: 499161 - RNA, 24 nt, Human
uccagccuuccagguggcgugaga

SEQ ID NO: 499162 - RNA, 20 nt, Human
uccagccuuccccuggcccc

SEQ ID NO: 499163 - RNA, 32 nt, Human
uccagccuugagccccuccacccccaaauccu

SEQ ID NO: 499164 - RNA, 32 nt, Human
uccagccuuggaaaguaggaaaguaggcugcu

SEQ ID NO: 499165 - RNA, 24 nt, Human
uccagccuuggcaacaaagcaaga

SEQ ID NO: 499166 - RNA, 24 nt, Human
uccagccuuggcaacagagugaga

SEQ ID NO: 499167 - RNA, 32 nt, Human
uccagccuuggcaacagagugagacccugucu

SEQ ID NO: 499168 - RNA, 32 nt, Human
uccagccuuggcaacauaaugagacacuguca

SEQ ID NO: 499169 - RNA, 24 nt, Human
uccagccuuggcgacagagcgaga

SEQ ID NO: 499170 - RNA, 32 nt, Human
uccagccuuggcgacagagcgagacuccaucu

SEQ ID NO: 499171 - RNA, 24 nt, Human
uccagccuuggcgacagagggaga

SEQ ID NO: 499172 - RNA, 32 nt, Human
uccagccuuggugacagagcaagacccugucu

SEQ ID NO: 499173 - RNA, 32 nt, Human
uccagccuuggugacagagcaagacucugucu

SEQ ID NO: 499174 - RNA, 24 nt, Human
uccagccuuggugacagagugaga

SEQ ID NO: 499175 - RNA, 32 nt, Human
uccagccuuggugacagagugagacucugucu

SEQ ID NO: 499176 - RNA, 22 nt, Human
uccagccuuguauggaguuaga

SEQ ID NO: 499177 - RNA, 32 nt, Human
uccagcgaggagugccccugcccaccacccag

SEQ ID NO: 499178 - RNA, 22 nt, Human
uccagcgagugcccacccaaug

SEQ ID NO: 499179 - RNA, 32 nt, Human
uccagcgauccucccgcuucagccucuagagu

SEQ ID NO: 499180 - RNA, 32 nt, Human
uccagcgauucuccugccucagccucuugaau

SEQ ID NO: 499181 - RNA, 32 nt, Human
uccagcgccagccuggcccugagugcgaacuc

SEQ ID NO: 499182 - RNA, 32 nt, Human
uccagcgcccaucuccccuuccgugccccaga

SEQ ID NO: 499183 - RNA, 32 nt, Human
uccagcgccugacagccaggaccccaggcagc

SEQ ID NO: 499184 - RNA, 32 nt, Human
uccagcgccugaggcaggagaaucgcuugaac

SEQ ID NO: 499185 - RNA, 32 nt, Human
uccagcgccuggugcagcuccucuucggggau

SEQ ID NO: 499186 - RNA, 32 nt, Human
uccagcgccuucuguccugccugcccaguccc

SEQ ID NO: 499187 - RNA, 32 nt, Human
uccagcgcgacagccuuggaccugggacugga

SEQ ID NO: 499188 - RNA, 18 nt, Human
uccagcgcucgccucucg

SEQ ID NO: 499189 - RNA, 32 nt, Human
uccagcgcugagauuuuccuugcagaucuauc

SEQ ID NO: 499190 - RNA, 32 nt, Human
uccagcgcugccucugcugccgggccuggacc

SEQ ID NO: 499191 - RNA, 32 nt, Human
uccagcggcccaggcgggggacagugccguuc

SEQ ID NO: 499192 - RNA, 32 nt, Human
uccagcggccucugcaggaucugcagcugugg

SEQ ID NO: 499193 - RNA, 21 nt, Human
uccagcggcgacagagcaaga

SEQ ID NO: 499194 - RNA, 32 nt, Human
uccagcggcugccccagcuacgcugggaggag

SEQ ID NO: 499195 - RNA, 32 nt, Human
uccagcgggucugaguccagccucgggagccc

SEQ ID NO: 499196 - RNA, 32 nt, Human
uccagcggucugcuuccuuggagccagugugg

SEQ ID NO: 499197 - RNA, 18 nt, Human
uccagcgugaccagggcc

SEQ ID NO: 499198 - RNA, 24 nt, Human
uccagcgugggcaacagagugaga

SEQ ID NO: 499199 - RNA, 24 nt, Human
uccagcgugggcgacagagcaaga

SEQ ID NO: 499200 - RNA, 24 nt, Human
uccagcgugggcgacagagcgaga

SEQ ID NO: 499201 - RNA, 24 nt, Human
uccagcgugggugacagagugaga

SEQ ID NO: 499202 - RNA, 32 nt, Human
uccagcgugucuccagccguguugguaccauu

SEQ ID NO: 499203 - RNA, 32 nt, Human
uccagcguuacccuuuuuacggcuucacaacc

SEQ ID NO: 499204 - RNA, 19 nt, Human
uccagcuaaaucccaccuc

SEQ ID NO: 499205 - RNA, 32 nt, Human
uccagcuaaccaggccaggccggggcggugga

SEQ ID NO: 499206 - RNA, 19 nt, Human
uccagcuaagagggcccau

SEQ ID NO: 499207 - RNA, 20 nt, Human
uccagcuaagucugcaagcc

SEQ ID NO: 499208 - RNA, 21 nt, Human
uccagcuacucaggaggcuga

SEQ ID NO: 499209 - RNA, 21 nt, Human
uccagcuacucgggaggcuga

SEQ ID NO: 499210 - RNA, 32 nt, Human
uccagcuacucgggaggcugagguagagaauc

SEQ ID NO: 499211 - RNA, 32 nt, Human
uccagcuacuucuguuguuuacgacguugccu

SEQ ID NO: 499212 - RNA, 32 nt, Human
uccagcuaggcacuggcccaguucacuguacc

SEQ ID NO: 499213 - RNA, 32 nt, Human
uccagcuaucuaagauacacacacaaccacac

SEQ ID NO: 499214 - RNA, 32 nt, Human
uccagcuaucuucuccuuuccacuggugccag

SEQ ID NO: 499215 - RNA, 28 nt, Human
uccagcuauguggcugccucuucugcug

SEQ ID NO: 499216 - RNA, 32 nt, Human
uccagcucaaaggccaccuccuccuagaagcc

SEQ ID NO: 499217 - RNA, 32 nt, Human
uccagcucagagcuccucccaccccaacauac

SEQ ID NO: 499218 - RNA, 32 nt, Human
uccagcucagccgccagaccccagggagacac

SEQ ID NO: 499219 - RNA, 32 nt, Human
uccagcucagucuccagcuccaccuccggcuc

SEQ ID NO: 499220 - RNA, 32 nt, Human
uccagcucagugcccagagacagcccccacau

SEQ ID NO: 499221 - RNA, 32 nt, Human
uccagcucaguucuguguacaaaccauggagg

SEQ ID NO: 499222 - RNA, 32 nt, Human
uccagcuccacgacaaacuuucugccuucccc

SEQ ID NO: 499223 - RNA, 32 nt, Human
uccagcuccagccccacagcccgcggcgcccg

SEQ ID NO: 499224 - RNA, 32 nt, Human
uccagcuccagccgcagcuuaggcagcggagg

SEQ ID NO: 499225 - RNA, 32 nt, Human
uccagcuccagccugcuggggccugugcugac

SEQ ID NO: 499226 - RNA, 23 nt, Human
uccagcuccauccccacccaaug

SEQ ID NO: 499227 - RNA, 32 nt, Human
uccagcucccagagaagacucuaucacagugc

SEQ ID NO: 499228 - RNA, 32 nt, Human
uccagcucccauggaggguggggaagaagaag

SEQ ID NO: 499229 - RNA, 32 nt, Human
uccagcuccccauuuccuuucucaccuccucc

SEQ ID NO: 499230 - RNA, 22 nt, Human
uccagcuccccuguccucuuca

SEQ ID NO: 499231 - RNA, 22 nt, Human
uccagcuccggggcaggcugga

SEQ ID NO: 499232 - RNA, 32 nt, Human
uccagcuccuaagucgugggccugguuucagc

SEQ ID NO: 499233 - RNA, 32 nt, Human
uccagcuccucccacgggguccccguagcccc

SEQ ID NO: 499234 - RNA, 32 nt, Human
uccagcuccucggggagaggggaugcacacgu

SEQ ID NO: 499235 - RNA, 19 nt, Human
uccagcuccugcuccuucg

SEQ ID NO: 499236 - RNA, 19 nt, Human
uccagcuccuuccuccucu

SEQ ID NO: 499237 - RNA, 22 nt, Human
uccagcuccuuccuuccuuccc

SEQ ID NO: 499238 - RNA, 32 nt, Human
uccagcuccuuucuggagaaucuaaggugaac

SEQ ID NO: 499239 - RNA, 21 nt, Human
uccagcucggacugggcggga

SEQ ID NO: 499240 - RNA, 24 nt, Human
uccagcucgggcaacaaagugaga

SEQ ID NO: 499241 - RNA, 25 nt, Human
uccagcucgggugacaagagugaga

SEQ ID NO: 499242 - RNA, 25 nt, Human
uccagcucggguggcgguggcggga

SEQ ID NO: 499243 - RNA, 32 nt, Human
uccagcucguccagggugugcaggaguggcag

SEQ ID NO: 499244 - RNA, 32 nt, Human
uccagcucuaggauucaaugaucaggggacuu

SEQ ID NO: 499245 - RNA, 32 nt, Human
uccagcucuauguguugaguuaccuugggcaa

SEQ ID NO: 499246 - RNA, 32 nt, Human
uccagcucugcagcaguugucuccuaauguga

SEQ ID NO: 499247 - RNA, 32 nt, Human
uccagcucugcaguguggcugcuucuugauuc

SEQ ID NO: 499248 - RNA, 32 nt, Human
uccagcucuggcccucagcugcuugacaggac

SEQ ID NO: 499249 - RNA, 32 nt, Human
uccagcucuuauauguagcacagggaaaggac

SEQ ID NO: 499250 - RNA, 32 nt, Human
uccagcucuuccaggcugcaugucccccucaa

SEQ ID NO: 499251 - RNA, 31 nt, Human
uccagcugaacaucaccuaggagggccaugc

SEQ ID NO: 499252 - RNA, 32 nt, Human
uccagcugaacccaaacuacaaguggguuuaa

SEQ ID NO: 499253 - RNA, 32 nt, Human
uccagcugaaucucaaacagaaggcaguaaug

SEQ ID NO: 499254 - RNA, 22 nt, Human
uccagcugaccucuggcuccug

SEQ ID NO: 499255 - RNA, 32 nt, Human
uccagcugagccacgccugccgggccaccugc

SEQ ID NO: 499256 - RNA, 32 nt, Human
uccagcugagccugaaucugacucuugagggu

SEQ ID NO: 499257 - RNA, 26 nt, Human
uccagcugagggggacagauccaggg

SEQ ID NO: 499258 - RNA, 32 nt, Human
uccagcugagguaccuggcucaucucauuggg

SEQ ID NO: 499259 - RNA, 32 nt, Human
uccagcugagugaagcuaggcaaauggagugg

SEQ ID NO: 499260 - RNA, 32 nt, Human
uccagcugcacucuccucuccugggacccagc

SEQ ID NO: 499261 - RNA, 32 nt, Human
uccagcugcagggccagggggugcaggugaua

SEQ ID NO: 499262 - RNA, 25 nt, Human
uccagcugccaggcucugaugcacu

SEQ ID NO: 499263 - RNA, 32 nt, Human
uccagcugcccuuccuuagaccaucacaugcc

SEQ ID NO: 499264 - RNA, 22 nt, Human
uccagcugccgagaccugcagg

SEQ ID NO: 499265 - RNA, 32 nt, Human
uccagcugccuacuuucugcccggaucucugg

SEQ ID NO: 499266 - RNA, 31 nt, Human
uccagcugccucucauguacuugucuguugg

SEQ ID NO: 499267 - RNA, 24 nt, Human
uccagcugcucggccggggcgaga

SEQ ID NO: 499268 - RNA, 32 nt, Human
uccagcugcugccucccaacccaugcccgcua

SEQ ID NO: 499269 - RNA, 20 nt, Human
uccagcugcugcucauacua

SEQ ID NO: 499270 - RNA, 18 nt, Human
uccagcugcuucaggcua

SEQ ID NO: 499271 - RNA, 32 nt, Human
uccagcugcuuuugcacaugugagaauggcca

SEQ ID NO: 499272 - RNA, 20 nt, Human
uccagcuggagugacagagc

SEQ ID NO: 499273 - RNA, 32 nt, Human
uccagcugggagagacagugggcgucguccau

SEQ ID NO: 499274 - RNA, 32 nt, Human
uccagcugggagguggucucugugugccacuc

SEQ ID NO: 499275 - RNA, 23 nt, Human
uccagcugggcgacagagcgaga

SEQ ID NO: 499276 - RNA, 32 nt, Human
uccagcuggggagggggaaaaggugggaaagc

SEQ ID NO: 499277 - RNA, 32 nt, Human
uccagcugucucuccccuguccccacaugucu

SEQ ID NO: 499278 - RNA, 32 nt, Human
uccagcugugcuguguuucuggaguccuuugg

SEQ ID NO: 499279 - RNA, 32 nt, Human
uccagcuguucuuccugcacaggccaucgagc

SEQ ID NO: 499280 - RNA, 24 nt, Human
uccagcuuaggugacagagugaga

SEQ ID NO: 499281 - RNA, 24 nt, Human
uccagcuuagguggcaaagugaga

SEQ ID NO: 499282 - RNA, 32 nt, Human
uccagcuuauagucuuccaguuuaaugaacua

SEQ ID NO: 499283 - RNA, 32 nt, Human
uccagcuuaucugccgaggauucccccuggaa

SEQ ID NO: 499284 - RNA, 32 nt, Human
uccagcuucaccgaccuccaugccgcugccug

SEQ ID NO: 499285 - RNA, 32 nt, Human
uccagcuucaccuccuuuucuggacccgaggg

SEQ ID NO: 499286 - RNA, 22 nt, Human
uccagcuucagcuccagcucca

SEQ ID NO: 499287 - RNA, 32 nt, Human
uccagcuucauagacuccucuguaucacugcc

SEQ ID NO: 499288 - RNA, 27 nt, Human
uccagcuucaugugacccugggucccu

SEQ ID NO: 499289 - RNA, 22 nt, Human
uccagcuucccugccaaacuca

SEQ ID NO: 499290 - RNA, 22 nt, Human
uccagcuucccugucucuuccu

SEQ ID NO: 499291 - RNA, 32 nt, Human
uccagcuuccuccucaaccucguccucugccc

SEQ ID NO: 499292 - RNA, 32 nt, Human
uccagcuucuagccucaagcagucuucccauc

SEQ ID NO: 499293 - RNA, 24 nt, Human
uccagcuucugcucagagcgcgga

SEQ ID NO: 499294 - RNA, 21 nt, Human
uccagcuucugcucugcccca

SEQ ID NO: 499295 - RNA, 32 nt, Human
uccagcuucuugcugaugagcuuguuguugag

SEQ ID NO: 499296 - RNA, 26 nt, Human
uccagcuugaaugagugggguugggg

SEQ ID NO: 499297 - RNA, 32 nt, Human
uccagcuugcagugguccccagccuggagcag

SEQ ID NO: 499298 - RNA, 32 nt, Human
uccagcuugcccugccuccagcaggaaaucuu

SEQ ID NO: 499299 - RNA, 32 nt, Human
uccagcuugccugcccuuccucaucucucccu

SEQ ID NO: 499300 - RNA, 23 nt, Human
uccagcuuggcaacagagcgaga

SEQ ID NO: 499301 - RNA, 23 nt, Human
uccagcuugggagacaagagcga

SEQ ID NO: 499302 - RNA, 24 nt, Human
uccagcuugggcaacaaagugaga

SEQ ID NO: 499303 - RNA, 24 nt, Human
uccagcuugggcaacagagcaaga

SEQ ID NO: 499304 - RNA, 32 nt, Human
uccagcuugggcaacagagcaagacuccaucu

SEQ ID NO: 499305 - RNA, 24 nt, Human
uccagcuugggcaacagaguaaga

SEQ ID NO: 499306 - RNA, 24 nt, Human
uccagcuugggcaacagagugaga

SEQ ID NO: 499307 - RNA, 32 nt, Human
uccagcuugggcaacagagugagacccugucu

SEQ ID NO: 499308 - RNA, 24 nt, Human
uccagcuugggcaacagggcgaga

SEQ ID NO: 499309 - RNA, 21 nt, Human
uccagcuugggcaacgagcaa

SEQ ID NO: 499310 - RNA, 22 nt, Human
uccagcuugggcaacgagcaaa

SEQ ID NO: 499311 - RNA, 24 nt, Human
uccagcuugggcaccagagcaaga

SEQ ID NO: 499312 - RNA, 24 nt, Human
uccagcuugggcgacagagcaaga

SEQ ID NO: 499313 - RNA, 32 nt, Human
uccagcuugggcgacagagcaagacugucuca

SEQ ID NO: 499314 - RNA, 24 nt, Human
uccagcuugggcgacagagcgaga

SEQ ID NO: 499315 - RNA, 32 nt, Human
uccagcuugggcgacagagcgagacucugucu

SEQ ID NO: 499316 - RNA, 24 nt, Human
uccagcuugggcgacggagugaga

SEQ ID NO: 499317 - RNA, 32 nt, Human
uccagcuugggcgacggagugagacccugucu

SEQ ID NO: 499318 - RNA, 32 nt, Human
uccagcuugggggauagagugagacccugucu

SEQ ID NO: 499319 - RNA, 21 nt, Human
uccagcuuggggucagguggg

SEQ ID NO: 499320 - RNA, 24 nt, Human
uccagcuugggugacaaaguaaga

SEQ ID NO: 499321 - RNA, 32 nt, Human
uccagcuugggugacaaaguaagacccugucu

SEQ ID NO: 499322 - RNA, 24 nt, Human
uccagcuugggugacacagugaga

SEQ ID NO: 499323 - RNA, 32 nt, Human
uccagcuugggugacacagugagacugugucu

SEQ ID NO: 499324 - RNA, 19 nt, Human
uccagcuugggugacagag

SEQ ID NO: 499325 - RNA, 24 nt, Human
uccagcuugggugacagagcaaga

SEQ ID NO: 499326 - RNA, 32 nt, Human
uccagcuugggugacagagcaagacuccaucu

SEQ ID NO: 499327 - RNA, 32 nt, Human
uccagcuugggugacagagcaagagucuguca

SEQ ID NO: 499328 - RNA, 24 nt, Human
uccagcuugggugacagagcgaga

SEQ ID NO: 499329 - RNA, 32 nt, Human
uccagcuugggugacagagcgagacuccguau

SEQ ID NO: 499330 - RNA, 23 nt, Human
uccagcuugggugacagagugag

SEQ ID NO: 499331 - RNA, 24 nt, Human
uccagcuugggugacagagugaga

SEQ ID NO: 499332 - RNA, 32 nt, Human
uccagcuugggugacagagugagacuccaucu

SEQ ID NO: 499333 - RNA, 32 nt, Human
uccagcuugggugacagagugagacucugucu

SEQ ID NO: 499334 - RNA, 32 nt, Human
uccagcuugguggugaaugcugaggagaguca

SEQ ID NO: 499335 - RNA, 32 nt, Human
uccagcuuucaggcuuacuggggaggguggaa

SEQ ID NO: 499336 - RNA, 32 nt, Human
uccagcuuuccuguauuucuucccaagagcau

SEQ ID NO: 499337 - RNA, 32 nt, Human
uccagcuuuguguaauucucuuugccagcugc

SEQ ID NO: 499338 - RNA, 32 nt, Human
uccagcuuuucucaaguuaguuauaggaugua

SEQ ID NO: 499339 - RNA, 32 nt, Human
uccagcuuuugugacuauaacugcuaugaaca

SEQ ID NO: 499340 - RNA, 32 nt, Human
uccaggaaaagaaaggaacacccauccaugug

SEQ ID NO: 499341 - RNA, 32 nt, Human
uccaggaaaagaggaagaagaaguagaggagc

SEQ ID NO: 499342 - RNA, 24 nt, Human
uccaggaaaauggacccugagaug

SEQ ID NO: 499343 - RNA, 32 nt, Human
uccaggaaagagagcuaauucacucucucuuu

SEQ ID NO: 499344 - RNA, 21 nt, Human
uccaggaaaguguuucuggga

SEQ ID NO: 499345 - RNA, 25 nt, Human
uccaggaaauugaucaacucuucca

SEQ ID NO: 499346 - RNA, 32 nt, Human
uccaggaaccaaaaagagcaucccuaugggcu

SEQ ID NO: 499347 - RNA, 19 nt, Human
uccaggaacuccacuccca

SEQ ID NO: 499348 - RNA, 32 nt, Human
uccaggaacuucccaggagagccagcugggaa

SEQ ID NO: 499349 - RNA, 32 nt, Human
uccaggaagaaaagagggcaaagggaacaaug

SEQ ID NO: 499350 - RNA, 21 nt, Human
uccaggaagaacuguggggug

SEQ ID NO: 499351 - RNA, 32 nt, Human
uccaggaagaccagacucccacccuuccacac

SEQ ID NO: 499352 - RNA, 32 nt, Human
uccaggaagcaagcggagguugcagugaguug

SEQ ID NO: 499353 - RNA, 22 nt, Human
uccaggaagccuccuccuugga

SEQ ID NO: 499354 - RNA, 32 nt, Human
uccaggaagccuuccuuuauccauccaggaag

SEQ ID NO: 499355 - RNA, 32 nt, Human
uccaggaagcugagaauuaaaagcugaagaug

SEQ ID NO: 499356 - RNA, 32 nt, Human
uccaggaaggcagggacaccacugaguguuac

SEQ ID NO: 499357 - RNA, 21 nt, Human
uccaggaaggccagcccuggg

SEQ ID NO: 499358 - RNA, 21 nt, Human
uccaggaaggggaguucuggg

SEQ ID NO: 499359 - RNA, 32 nt, Human
uccaggaaguccaaaucaggaucaugaagagg

SEQ ID NO: 499360 - RNA, 25 nt, Human
uccaggaaguccauacccuggggug

SEQ ID NO: 499361 - RNA, 21 nt, Human
uccaggaagucuuuccugaua

SEQ ID NO: 499362 - RNA, 21 nt, Human
uccaggaauaauguuuuggga

SEQ ID NO: 499363 - RNA, 32 nt, Human
uccaggaauacuggccagagggccgugcugaa

SEQ ID NO: 499364 - RNA, 32 nt, Human
uccaggaauacuggccagagggcugugcugaa

SEQ ID NO: 499365 - RNA, 24 nt, Human
uccaggaauggagccuuuguggua

SEQ ID NO: 499366 - RNA, 32 nt, Human
uccaggaauuugagaccagcaugggaaacaga

SEQ ID NO: 499367 - RNA, 19 nt, Human
uccaggacaacaaugugga

SEQ ID NO: 499368 - RNA, 32 nt, Human
uccaggacaauccagccucugcccuggaacug

SEQ ID NO: 499369 - RNA, 32 nt, Human
uccaggacagcccucuggagccguggggccug

SEQ ID NO: 499370 - RNA, 32 nt, Human
uccaggaccagcccugcuggggcccaggccca

SEQ ID NO: 499371 - RNA, 22 nt, Human
uccaggaccagggguccugcuc

SEQ ID NO: 499372 - RNA, 20 nt, Human
uccaggacccagagcuguuc

SEQ ID NO: 499373 - RNA, 18 nt, Human
uccaggaccccuguggcu

SEQ ID NO: 499374 - RNA, 32 nt, Human
uccaggacccucgaaaccccagccccuaggga

SEQ ID NO: 499375 - RNA, 21 nt, Human
uccaggacccucgggcagcuc

SEQ ID NO: 499376 - RNA, 21 nt, Human
uccaggacccugacuugucuc

SEQ ID NO: 499377 - RNA, 20 nt, Human
uccaggaccggaugccccuc

SEQ ID NO: 499378 - RNA, 32 nt, Human
uccaggaccucaccagguccucgucagacucc

SEQ ID NO: 499379 - RNA, 17 nt, Human
uccaggaccucagcugc

SEQ ID NO: 499380 - RNA, 32 nt, Human
uccaggaccuccauuccacucaucucuggccu

SEQ ID NO: 499381 - RNA, 20 nt, Human
uccaggaccuucccuaccuc

SEQ ID NO: 499382 - RNA, 22 nt, Human
uccaggaccuugcuuccuucuc

SEQ ID NO: 499383 - RNA, 21 nt, Human
uccaggaccuuguucucugcu

SEQ ID NO: 499384 - RNA, 32 nt, Human
uccaggacggaaaauucggagagcaugagaau

SEQ ID NO: 499385 - RNA, 32 nt, Human
uccaggacucaucugcaacauuugcaaucuuu

SEQ ID NO: 499386 - RNA, 25 nt, Human
uccaggacucugucagcucugcugc

SEQ ID NO: 499387 - RNA, 32 nt, Human
uccaggacugagaaaggggaaagggaagggug

SEQ ID NO: 499388 - RNA, 32 nt, Human
uccaggacugagagcccagcugccucugccca

SEQ ID NO: 499389 - RNA, 23 nt, Human
uccaggacugccacagagcaaga

SEQ ID NO: 499390 - RNA, 32 nt, Human
uccaggacugggucugaccuggugggagcacc

SEQ ID NO: 499391 - RNA, 32 nt, Human
uccaggacugucccuccuugagacaccaguug

SEQ ID NO: 499392 - RNA, 32 nt, Human
uccaggacuuccagacagaguaccagguuuua

SEQ ID NO: 499393 - RNA, 21 nt, Human
uccaggagaaacugcagagca

SEQ ID NO: 499394 - RNA, 32 nt, Human
uccaggagagaaagggaccgcuuggagcaguu

SEQ ID NO: 499395 - RNA, 23 nt, Human
uccaggagagcaacccuggggug

SEQ ID NO: 499396 - RNA, 32 nt, Human
uccaggagaggugcacgcagccucccauccca

SEQ ID NO: 499397 - RNA, 32 nt, Human
uccaggagauuucaauccaggcuaucuguguu

SEQ ID NO: 499398 - RNA, 32 nt, Human
uccaggagcacacggcccugccccauccuggg

SEQ ID NO: 499399 - RNA, 32 nt, Human
uccaggagcagcaggagcauggccgaggaucu

SEQ ID NO: 499400 - RNA, 32 nt, Human
uccaggagcauggaccgaggugcagugguggg

SEQ ID NO: 499401 - RNA, 32 nt, Human
uccaggagccacgggcucccaccccgagcaua

SEQ ID NO: 499402 - RNA, 32 nt, Human
uccaggagccccgggauugaaggaugguggcg

SEQ ID NO: 499403 - RNA, 32 nt, Human
uccaggagcugcaagaaguccauauuguuccu

SEQ ID NO: 499404 - RNA, 32 nt, Human
uccaggaggaaccagcccugccaacaccugga

SEQ ID NO: 499405 - RNA, 32 nt, Human
uccaggaggaagagaucuauacccuaagcaga

SEQ ID NO: 499406 - RNA, 32 nt, Human
uccaggaggaggagguugcagugagccgagau

SEQ ID NO: 499407 - RNA, 32 nt, Human
uccaggaggcaaagguugcagugagccaaaau

SEQ ID NO: 499408 - RNA, 32 nt, Human
uccaggaggcagagcuugcagugagcugagau

SEQ ID NO: 499409 - RNA, 21 nt, Human
uccaggaggcagagguugcag

SEQ ID NO: 499410 - RNA, 32 nt, Human
uccaggaggcagagguugcagugaguggaggu

SEQ ID NO: 499411 - RNA, 32 nt, Human
uccaggaggcagcauucuaugggcuuaugagc

SEQ ID NO: 499412 - RNA, 32 nt, Human
uccaggaggcgaagguugcagugagcugagau

SEQ ID NO: 499413 - RNA, 32 nt, Human
uccaggaggcgcaggcugcagugagcucugau

SEQ ID NO: 499414 - RNA, 32 nt, Human
uccaggaggcggaggcugcagugagcugugau

SEQ ID NO: 499415 - RNA, 21 nt, Human
uccaggaggcggagguugcag

SEQ ID NO: 499416 - RNA, 32 nt, Human
uccaggaggcggagguugcagugaaccaagau

SEQ ID NO: 499417 - RNA, 32 nt, Human
uccaggaggcggagguugcagugagccaagau

SEQ ID NO: 499418 - RNA, 32 nt, Human
uccaggaggcggagguugcagugagccgagau

SEQ ID NO: 499419 - RNA, 32 nt, Human
uccaggaggcggaguuuguggugaguugagau

SEQ ID NO: 499420 - RNA, 32 nt, Human
uccaggaggcguuuggggguggggaaggcacc

SEQ ID NO: 499421 - RNA, 19 nt, Human
uccaggagggaggcuggga

SEQ ID NO: 499422 - RNA, 32 nt, Human
uccaggaggggccugucgagcugcaguuuaug

SEQ ID NO: 499423 - RNA, 32 nt, Human
uccaggaggguguaaguucugaaugguuccuu

SEQ ID NO: 499424 - RNA, 32 nt, Human
uccaggaggucgaggcugcagugagccaagau

SEQ ID NO: 499425 - RNA, 32 nt, Human
uccaggagguggagccugcagugagccaagau

SEQ ID NO: 499426 - RNA, 24 nt, Human
uccaggagguggagcuugcaguga

SEQ ID NO: 499427 - RNA, 32 nt, Human
uccaggagguggagcuugcagugagccgagac

SEQ ID NO: 499428 - RNA, 21 nt, Human
uccaggagguggaggcugcag

SEQ ID NO: 499429 - RNA, 32 nt, Human
uccaggagguggaggcugcagugagcuaugau

SEQ ID NO: 499430 - RNA, 21 nt, Human
uccaggagguggagguugcag

SEQ ID NO: 499431 - RNA, 24 nt, Human
uccaggagguggagguugcaguga

SEQ ID NO: 499432 - RNA, 32 nt, Human
uccaggagguggagguugcagugagcugagau

SEQ ID NO: 499433 - RNA, 32 nt, Human
uccaggagguugaggcugcagugagcugugau

SEQ ID NO: 499434 - RNA, 32 nt, Human
uccaggaguacccugaagaccacccagguggg

SEQ ID NO: 499435 - RNA, 32 nt, Human
uccaggagucaacaaaccccggcugaggcuga

SEQ ID NO: 499436 - RNA, 32 nt, Human
uccaggaguucaaggcugcagugaguugugau

SEQ ID NO: 499437 - RNA, 32 nt, Human
uccaggauagcuuugaggauaagcugcggaug

SEQ ID NO: 499438 - RNA, 32 nt, Human
uccaggauaugugucauuucccaugaggggcc

SEQ ID NO: 499439 - RNA, 21 nt, Human
uccaggaucgcuguaccgcuc

SEQ ID NO: 499440 - RNA, 21 nt, Human
uccaggaugcacagagugaga

SEQ ID NO: 499441 - RNA, 20 nt, Human
uccaggaugccuccugcugc

SEQ ID NO: 499442 - RNA, 32 nt, Human
uccaggauggacucagugcagagcaggacaug

SEQ ID NO: 499443 - RNA, 20 nt, Human
uccaggauggagugcagugg

SEQ ID NO: 499444 - RNA, 31 nt, Human
uccaggauggccagccuguuccgguccuauc

SEQ ID NO: 499445 - RNA, 32 nt, Human
uccaggaugggcugcagguugcagucagggcu

SEQ ID NO: 499446 - RNA, 32 nt, Human
uccaggauguacaaagaacucucaaaccggau

SEQ ID NO: 499447 - RNA, 32 nt, Human
uccaggauguggaggaaggaagaugagaaaua

SEQ ID NO: 499448 - RNA, 32 nt, Human
uccaggauucgcccucucccaugccuucaagu

SEQ ID NO: 499449 - RNA, 32 nt, Human
uccaggcaacagugccugcaaggccugaauua

SEQ ID NO: 499450 - RNA, 32 nt, Human
uccaggcaagaaaaaugugcagaugcugcggc

SEQ ID NO: 499451 - RNA, 32 nt, Human
uccaggcaagagaaagaagaaaaagaagaaga

SEQ ID NO: 499452 - RNA, 32 nt, Human
uccaggcaaggaguaaauggccccagcagaug

SEQ ID NO: 499453 - RNA, 32 nt, Human
uccaggcaauuuccauagaucugcaguccugc

SEQ ID NO: 499454 - RNA, 32 nt, Human
uccaggcacagaccaggugaggggauauuuag

SEQ ID NO: 499455 - RNA, 32 nt, Human
uccaggcacaggcugguggugcuggagaagga

SEQ ID NO: 499456 - RNA, 22 nt, Human
uccaggcacauagccccaacca

SEQ ID NO: 499457 - RNA, 32 nt, Human
uccaggcaccacucagcucuggcucuuccugg

SEQ ID NO: 499458 - RNA, 32 nt, Human
uccaggcacuucuucccuugaguggguggacu

SEQ ID NO: 499459 - RNA, 32 nt, Human
uccaggcagagaaggagcagaggcucucccgg

SEQ ID NO: 499460 - RNA, 20 nt, Human
uccaggcagaguggggcgga

SEQ ID NO: 499461 - RNA, 32 nt, Human
uccaggcagcaggcuggcauggggacuucauc

SEQ ID NO: 499462 - RNA, 32 nt, Human
uccaggcagccccacuguaagacaucucauug

SEQ ID NO: 499463 - RNA, 32 nt, Human
uccaggcagccuguccugacccucagcagccu

SEQ ID NO: 499464 - RNA, 25 nt, Human
uccaggcagcggggacagggcgagg

SEQ ID NO: 499465 - RNA, 16 nt, Human
uccaggcaggaagcag

SEQ ID NO: 499466 - RNA, 32 nt, Human
uccaggcaggagccuugccucucagguggcgg

SEQ ID NO: 499467 - RNA, 32 nt, Human
uccaggcaggagcugagcauggggugggcagu

SEQ ID NO: 499468 - RNA, 20 nt, Human
uccaggcaggagugcagugg

SEQ ID NO: 499469 - RNA, 31 nt, Human
uccaggcaggcgaggagaagcugugcuguga

SEQ ID NO: 499470 - RNA, 32 nt, Human
uccaggcagggggcaaacacaugugaaggccc

SEQ ID NO: 499471 - RNA, 32 nt, Human
uccaggcaggguguaggggaauguauuagucc

SEQ ID NO: 499472 - RNA, 32 nt, Human
uccaggcaguguuuuuaagugauaugaguuag

SEQ ID NO: 499473 - RNA, 24 nt, Human
uccaggcaucacguccacaugcaa

SEQ ID NO: 499474 - RNA, 31 nt, Human
uccaggcaucucuucugacaaacacugcagg

SEQ ID NO: 499475 - RNA, 32 nt, Human
uccaggcaugagccacugcgcccagucuacac

SEQ ID NO: 499476 - RNA, 32 nt, Human
uccaggcaugaggugguuccugcccuggacgc

SEQ ID NO: 499477 - RNA, 32 nt, Human
uccaggcaugcaccaccaugccuggcuaauuu

SEQ ID NO: 499478 - RNA, 32 nt, Human
uccaggcauucgggggccugaggucccuccag

SEQ ID NO: 499479 - RNA, 24 nt, Human
uccaggccacacaaccccaaacca

SEQ ID NO: 499480 - RNA, 22 nt, Human
uccaggccaccugucucuguaa

SEQ ID NO: 499481 - RNA, 32 nt, Human
uccaggccaccuucuccaucugcucacugagg

SEQ ID NO: 499482 - RNA, 19 nt, Human
uccaggccacucacccagc

SEQ ID NO: 499483 - RNA, 32 nt, Human
uccaggccagcuuugaggauaagcugcugaug

SEQ ID NO: 499484 - RNA, 32 nt, Human
uccaggccaggcaaggggcugguccaugaugu

SEQ ID NO: 499485 - RNA, 32 nt, Human
uccaggccaggugugagggacaucccaugugg

SEQ ID NO: 499486 - RNA, 23 nt, Human
uccaggccaguuugaagacuaca

SEQ ID NO: 499487 - RNA, 32 nt, Human
uccaggccaucuuuugucccaguccuagguaa

SEQ ID NO: 499488 - RNA, 32 nt, Human
uccaggccaugcuggagguacccccgaggcac

SEQ ID NO: 499489 - RNA, 21 nt, Human
uccaggcccagccuggcccca

SEQ ID NO: 499490 - RNA, 32 nt, Human
uccaggcccagcuccugcaucuuggcggccuc

SEQ ID NO: 499491 - RNA, 32 nt, Human
uccaggcccagcuccugcaucuugguggcccc

SEQ ID NO: 499492 - RNA, 32 nt, Human
uccaggcccagcugcagcaacaacagucauua

SEQ ID NO: 499493 - RNA, 32 nt, Human
uccaggcccagggcaugguccugcugcuucac

SEQ ID NO: 499494 - RNA, 32 nt, Human
uccaggcccaugucacuggucagcgugguuuu

SEQ ID NO: 499495 - RNA, 32 nt, Human
uccaggccccaggccucuuuguggacccaucu

SEQ ID NO: 499496 - RNA, 21 nt, Human
uccaggcccgagagaccagca

SEQ ID NO: 499497 - RNA, 32 nt, Human
uccaggcccggggaaggagccucugccucaag

SEQ ID NO: 499498 - RNA, 32 nt, Human
uccaggcccuccucucugggccccuggugugu

SEQ ID NO: 499499 - RNA, 21 nt, Human
uccaggcccugcaugccguca

SEQ ID NO: 499500 - RNA, 24 nt, Human
uccaggcccugcccgaccccauca

SEQ ID NO: 499501 - RNA, 32 nt, Human
uccaggcccugccuugucccugcuccugugcu

SEQ ID NO: 499502 - RNA, 21 nt, Human
uccaggcccuggcaggugggg

SEQ ID NO: 499503 - RNA, 32 nt, Human
uccaggcccuggccacgggaugacuguggaga

SEQ ID NO: 499504 - RNA, 32 nt, Human
uccaggcccugugcaccuuaccccagagacag

SEQ ID NO: 499505 - RNA, 32 nt, Human
uccaggcccuuagggaaguugucuccuuccau

SEQ ID NO: 499506 - RNA, 18 nt, Human
uccaggccgcagagccag

SEQ ID NO: 499507 - RNA, 22 nt, Human
uccaggccggaguccaguggug

SEQ ID NO: 499508 - RNA, 19 nt, Human
uccaggccuaccaggggca

SEQ ID NO: 499509 - RNA, 32 nt, Human
uccaggccuccccuaccucauguccucucauu

SEQ ID NO: 499510 - RNA, 32 nt, Human
uccaggccucgcugccggucagcugcucggca

SEQ ID NO: 499511 - RNA, 19 nt, Human
uccaggccucggccuuccu

SEQ ID NO: 499512 - RNA, 32 nt, Human
uccaggccucuaguuccagaaggauccaagac

SEQ ID NO: 499513 - RNA, 32 nt, Human
uccaggccucucucugcuccaucccccugccu

SEQ ID NO: 499514 - RNA, 18 nt, Human
uccaggccucuuugccca

SEQ ID NO: 499515 - RNA, 18 nt, Human
uccaggccugcaggggca

SEQ ID NO: 499516 - RNA, 25 nt, Human
uccaggccugggugacagugcgaga

SEQ ID NO: 499517 - RNA, 24 nt, Human
uccaggccugucugaaccccacca

SEQ ID NO: 499518 - RNA, 32 nt, Human
uccaggccuugccucccccgaccgccauggag

SEQ ID NO: 499519 - RNA, 32 nt, Human
uccaggccuuucaccugcucugccuugaaaug

SEQ ID NO: 499520 - RNA, 32 nt, Human
uccaggcgcacagacaccaacugugugacacc

SEQ ID NO: 499521 - RNA, 22 nt, Human
uccaggcggugcuccuggggug

SEQ ID NO: 499522 - RNA, 32 nt, Human
uccaggcgugagccacugcgcccggccagccc

SEQ ID NO: 499523 - RNA, 32 nt, Human
uccaggcgugagccacugcggccagcacauuu

SEQ ID NO: 499524 - RNA, 32 nt, Human
uccaggcgugagccaucgugcccagcuagacg

SEQ ID NO: 499525 - RNA, 32 nt, Human
uccaggcuagaggguggggcuuuugcugggga

SEQ ID NO: 499526 - RNA, 20 nt, Human
uccaggcuagagugcagugg

SEQ ID NO: 499527 - RNA, 32 nt, Human
uccaggcuagucucgaauuccugggcucaagu

SEQ ID NO: 499528 - RNA, 32 nt, Human
uccaggcucaagcgguccuucuaccucagccu

SEQ ID NO: 499529 - RNA, 32 nt, Human
uccaggcucaggcuggagccgugauggcaccg

SEQ ID NO: 499530 - RNA, 32 nt, Human
uccaggcucauuugcuuccaccuagcuucggu

SEQ ID NO: 499531 - RNA, 32 nt, Human
uccaggcuccaguaggagagaaagaacuccuc

SEQ ID NO: 499532 - RNA, 32 nt, Human
uccaggcuccauccuuccucugugcagauaau

SEQ ID NO: 499533 - RNA, 32 nt, Human
uccaggcuccugcugcagcuccugggccgcac

SEQ ID NO: 499534 - RNA, 32 nt, Human
uccaggcuccuuuccuacauccuucccgcgcc

SEQ ID NO: 499535 - RNA, 32 nt, Human
uccaggcucugccuggccugacccuguccugu

SEQ ID NO: 499536 - RNA, 32 nt, Human
uccaggcugaucuugaaccucugaccucaggu

SEQ ID NO: 499537 - RNA, 23 nt, Human
uccaggcugauguuucuggugug

SEQ ID NO: 499538 - RNA, 32 nt, Human
uccaggcugcacuaagccaagauccuaccacu

SEQ ID NO: 499539 - RNA, 32 nt, Human
uccaggcugcuuccuguuggcuggguuugguu

SEQ ID NO: 499540 - RNA, 20 nt, Human
uccaggcuggaaugcgguga

SEQ ID NO: 499541 - RNA, 32 nt, Human
uccaggcuggacaacacagcaagacuccaucu

SEQ ID NO: 499542 - RNA, 24 nt, Human
uccaggcuggacgacagagcaaga

SEQ ID NO: 499543 - RNA, 32 nt, Human
uccaggcuggacgacagagcaagacccuguau

SEQ ID NO: 499544 - RNA, 32 nt, Human
uccaggcuggaggagugcagucguacagucau

SEQ ID NO: 499545 - RNA, 20 nt, Human
uccaggcuggagggcaguga

SEQ ID NO: 499546 - RNA, 19 nt, Human
uccaggcuggagugcaaug

SEQ ID NO: 499547 - RNA, 20 nt, Human
uccaggcuggagugcaaugg

SEQ ID NO: 499548 - RNA, 20 nt, Human
uccaggcuggagugcagcga

SEQ ID NO: 499549 - RNA, 18 nt, Human
uccaggcuggagugcagu

SEQ ID NO: 499550 - RNA, 19 nt, Human
uccaggcuggagugcagug

SEQ ID NO: 499551 - RNA, 20 nt, Human
uccaggcuggagugcaguga

SEQ ID NO: 499552 - RNA, 22 nt, Human
uccaggcuggagugcagugaug

SEQ ID NO: 499553 - RNA, 20 nt, Human
uccaggcuggagugcagugg

SEQ ID NO: 499554 - RNA, 23 nt, Human
uccaggcuggagugcaguggcgu

SEQ ID NO: 499555 - RNA, 23 nt, Human
uccaggcuggagugcaguggugu

SEQ ID NO: 499556 - RNA, 19 nt, Human
uccaggcuggagugcggug

SEQ ID NO: 499557 - RNA, 20 nt, Human
uccaggcuggagugcggugg

SEQ ID NO: 499558 - RNA, 20 nt, Human
uccaggcuggaguucagugg

SEQ ID NO: 499559 - RNA, 24 nt, Human
uccaggcuggaugauagagcaaga

SEQ ID NO: 499560 - RNA, 32 nt, Human
uccaggcuggaugauagagcaagaucuugucu

SEQ ID NO: 499561 - RNA, 32 nt, Human
uccaggcuggccuugagcuccugggcucaagc

SEQ ID NO: 499562 - RNA, 32 nt, Human
uccaggcugggacacagaacuuaugacuuuug

SEQ ID NO: 499563 - RNA, 24 nt, Human
uccaggcugggcaacagagugaga

SEQ ID NO: 499564 - RNA, 32 nt, Human
uccaggcugggcaacggagugagacccugucu

SEQ ID NO: 499565 - RNA, 24 nt, Human
uccaggcugggcgacagagcgaga

SEQ ID NO: 499566 - RNA, 32 nt, Human
uccaggcugggcgacagagcgagacuccgucu

SEQ ID NO: 499567 - RNA, 24 nt, Human
uccaggcugggcgacagagugaga

SEQ ID NO: 499568 - RNA, 32 nt, Human
uccaggcuggggccucacagguggggcuguua

SEQ ID NO: 499569 - RNA, 32 nt, Human
uccaggcuggguaacagaaugagaccuuaucu

SEQ ID NO: 499570 - RNA, 32 nt, Human
uccaggcugggugacagagcgagacuccaucu

SEQ ID NO: 499571 - RNA, 32 nt, Human
uccaggcugggugacagagcgagacuccaugu

SEQ ID NO: 499572 - RNA, 32 nt, Human
uccaggcugggugacagauuaagcaagacucu

SEQ ID NO: 499573 - RNA, 32 nt, Human
uccaggcuggucuugaacuccugggcucaagc

SEQ ID NO: 499574 - RNA, 32 nt, Human
uccaggcuggucuugaacuccugggcucaagu

SEQ ID NO: 499575 - RNA, 20 nt, Human
uccaggcuggugugcaguga

SEQ ID NO: 499576 - RNA, 32 nt, Human
uccaggcugugccuacacagcagugcugguga

SEQ ID NO: 499577 - RNA, 32 nt, Human
uccaggcuucacucaacucauggacuccucug

SEQ ID NO: 499578 - RNA, 26 nt, Human
uccaggcuucauccuagagacuguca

SEQ ID NO: 499579 - RNA, 32 nt, Human
uccaggcuuccacccagcuguggggacugcug

SEQ ID NO: 499580 - RNA, 22 nt, Human
uccaggcuugaaaggcagcaaa

SEQ ID NO: 499581 - RNA, 25 nt, Human
uccaggcuugagugacagagcaaga

SEQ ID NO: 499582 - RNA, 32 nt, Human
uccaggcuuucuaaccacaccuacccagggug

SEQ ID NO: 499583 - RNA, 32 nt, Human
uccagggaacgagugugucucaaggggcauuu

SEQ ID NO: 499584 - RNA, 32 nt, Human
uccagggaagaugauagccugccccuuccucu

SEQ ID NO: 499585 - RNA, 21 nt, Human
uccagggaaggcguugggaug

SEQ ID NO: 499586 - RNA, 32 nt, Human
uccagggaaguuaguccucuggccucaauucu

SEQ ID NO: 499587 - RNA, 32 nt, Human
uccagggaauuuaaguaacuugcucaauauca

SEQ ID NO: 499588 - RNA, 32 nt, Human
uccagggacaacaagugggugguccagaagua

SEQ ID NO: 499589 - RNA, 32 nt, Human
uccagggacagaggggguggccucccaacuca

SEQ ID NO: 499590 - RNA, 21 nt, Human
uccagggacccgcacccagug

SEQ ID NO: 499591 - RNA, 18 nt, Human
uccagggaccucugcugc

SEQ ID NO: 499592 - RNA, 23 nt, Human
uccagggagacccuccugggaug

SEQ ID NO: 499593 - RNA, 18 nt, Human
uccagggagcagaguguc

SEQ ID NO: 499594 - RNA, 32 nt, Human
uccagggagcaucucugcucuaccccugcccc

SEQ ID NO: 499595 - RNA, 32 nt, Human
uccagggagcauucaccugcccugucuccaaa

SEQ ID NO: 499596 - RNA, 19 nt, Human
uccagggagccccgaggcc

SEQ ID NO: 499597 - RNA, 32 nt, Human
uccagggaggagaagagggacuccagaauggc

SEQ ID NO: 499598 - RNA, 32 nt, Human
uccagggagggcccugcgccccgcggcgcucc

SEQ ID NO: 499599 - RNA, 32 nt, Human
uccagggaucaccauggagaucaccagggauc

SEQ ID NO: 499600 - RNA, 32 nt, Human
uccagggaugcucggcccuggcucugugccag

SEQ ID NO: 499601 - RNA, 32 nt, Human
uccagggauggacacagguccgcugaacgcgg

SEQ ID NO: 499602 - RNA, 32 nt, Human
uccagggauucaaggccaaccugggcaauaga

SEQ ID NO: 499603 - RNA, 24 nt, Human
uccagggcagaaacagcccaucca

SEQ ID NO: 499604 - RNA, 32 nt, Human
uccagggccaacuccuagcuaccaguggcuuc

SEQ ID NO: 499605 - RNA, 32 nt, Human
uccagggccaacuccuagcuaccgguggcuuc

SEQ ID NO: 499606 - RNA, 32 nt, Human
uccagggccagccugcaguacagaggcuggag

SEQ ID NO: 499607 - RNA, 24 nt, Human
uccagggccaggcagcccacccag

SEQ ID NO: 499608 - RNA, 32 nt, Human
uccagggccaugggagauacaauuccaaguuc

SEQ ID NO: 499609 - RNA, 25 nt, Human
uccagggcccaagcagcccgcccag

SEQ ID NO: 499610 - RNA, 20 nt, Human
uccagggcccccgcugucuc

SEQ ID NO: 499611 - RNA, 22 nt, Human
uccagggcccugagcucggugg

SEQ ID NO: 499612 - RNA, 32 nt, Human
uccagggcccugcuucagacguacugaccgag

SEQ ID NO: 499613 - RNA, 32 nt, Human
uccagggccuccugccccuccccuuccuccag

SEQ ID NO: 499614 - RNA, 23 nt, Human
uccagggccucugcuccaaagga

SEQ ID NO: 499615 - RNA, 32 nt, Human
uccagggccuggcaaggcuggcucucugcagg

SEQ ID NO: 499616 - RNA, 32 nt, Human
uccagggccugggacugcuccuuccccagcca

SEQ ID NO: 499617 - RNA, 22 nt, Human
uccagggcggaccuggggcccc

SEQ ID NO: 499618 - RNA, 32 nt, Human
uccagggcuagguagagagggcccaggcaggc

SEQ ID NO: 499619 - RNA, 32 nt, Human
uccagggcucaaaugauccucccaucucggcc

SEQ ID NO: 499620 - RNA, 32 nt, Human
uccagggcucaagcaguccucccaccucagcc

SEQ ID NO: 499621 - RNA, 32 nt, Human
uccagggcucaaggauccuccugccucagucu

SEQ ID NO: 499622 - RNA, 32 nt, Human
uccagggcucaagggauccucccaccucagcc

SEQ ID NO: 499623 - RNA, 32 nt, Human
uccagggcuccuggugcuccccaugugggaau

SEQ ID NO: 499624 - RNA, 32 nt, Human
uccagggcugaaugccuucuuccugcaggcuc

SEQ ID NO: 499625 - RNA, 23 nt, Human
uccagggcuggaauccugugcuc

SEQ ID NO: 499626 - RNA, 32 nt, Human
uccagggcuuccgggaugcuguuuuccuuuuu

SEQ ID NO: 499627 - RNA, 32 nt, Human
uccagggcuuuggguuuugugcauggguagac

SEQ ID NO: 499628 - RNA, 21 nt, Human
uccaggggacagaauaaccca

SEQ ID NO: 499629 - RNA, 32 nt, Human
uccaggggacauuucagccaugcugaaaggga

SEQ ID NO: 499630 - RNA, 32 nt, Human
uccaggggagaaaccugagucucagagcaggg

SEQ ID NO: 499631 - RNA, 32 nt, Human
uccaggggagggagauggaggcacccaaacug

SEQ ID NO: 499632 - RNA, 32 nt, Human
uccaggggccuuuggucugcccuaccuuaacc

SEQ ID NO: 499633 - RNA, 32 nt, Human
uccagggggacucugugcuaugguacaaaccu

SEQ ID NO: 499634 - RNA, 32 nt, Human
uccagggggucacuccucccaccccaccuacc

SEQ ID NO: 499635 - RNA, 32 nt, Human
uccagggguccagggccagccugagaugcccg

SEQ ID NO: 499636 - RNA, 32 nt, Human
uccaggggugugaccugggacgggugggccug

SEQ ID NO: 499637 - RNA, 32 nt, Human
uccagggguguucacaggcuuucacagcaagg

SEQ ID NO: 499638 - RNA, 19 nt, Human
uccaggguaccccgaggcc

SEQ ID NO: 499639 - RNA, 32 nt, Human
uccaggguagaagacugagggagcacaggaga

SEQ ID NO: 499640 - RNA, 32 nt, Human
uccagggucaccaagcagcagagcucugggga

SEQ ID NO: 499641 - RNA, 24 nt, Human
uccagggucauuacacacagcaug

SEQ ID NO: 499642 - RNA, 32 nt, Human
uccagggucugcaggcuggggcucgggcuuug

SEQ ID NO: 499643 - RNA, 32 nt, Human
uccagggucuggcagagccucugagaugaugc

SEQ ID NO: 499644 - RNA, 32 nt, Human
uccagggugggacccagaguuacuggccccuc

SEQ ID NO: 499645 - RNA, 32 nt, Human
uccagggugggcacccacagugacucagagga

SEQ ID NO: 499646 - RNA, 32 nt, Human
uccagggugggcuacaugcaaugugguugcug

SEQ ID NO: 499647 - RNA, 32 nt, Human
uccagggugggugggagugggcugagggcucg

SEQ ID NO: 499648 - RNA, 32 nt, Human
uccaggguuagggggagcaggaagcccagaua

SEQ ID NO: 499649 - RNA, 32 nt, Human
uccaggguucaagcgauucucuugccucagcc

SEQ ID NO: 499650 - RNA, 32 nt, Human
uccaggguucaagugauucucccaccucagcc

SEQ ID NO: 499651 - RNA, 32 nt, Human
uccaggguucaagugauucuccugccucagcc

SEQ ID NO: 499652 - RNA, 32 nt, Human
uccaggguuccaaggucugcucucuaccaauc

SEQ ID NO: 499653 - RNA, 32 nt, Human
uccaggguuccaguggggagcuuguagugugg

SEQ ID NO: 499654 - RNA, 32 nt, Human
uccaggguugacgccauucuccugccucagcc

SEQ ID NO: 499655 - RNA, 22 nt, Human
uccaggguuugggucgcuuugc

SEQ ID NO: 499656 - RNA, 32 nt, Human
uccagguaaccagcuaacucuugggcucaggc

SEQ ID NO: 499657 - RNA, 21 nt, Human
uccagguacacuuggcacuca

SEQ ID NO: 499658 - RNA, 32 nt, Human
uccagguacuggggacuaguagaaagaucuga

SEQ ID NO: 499659 - RNA, 32 nt, Human
uccagguagcugccugugaaugcacugcucuc

SEQ ID NO: 499660 - RNA, 32 nt, Human
uccagguaguuuucuuccucuaccuccacauc

SEQ ID NO: 499661 - RNA, 32 nt, Human
uccaggucauucucucugacucucaucugcac

SEQ ID NO: 499662 - RNA, 32 nt, Human
uccagguccaucuugcccuccaccucugcaug

SEQ ID NO: 499663 - RNA, 32 nt, Human
uccaggucccagaggguggaaggagccaggac

SEQ ID NO: 499664 - RNA, 32 nt, Human
uccaggucccauccucuccucacucaagggau

SEQ ID NO: 499665 - RNA, 32 nt, Human
uccagguccuggcaaauguagccuacaucauc

SEQ ID NO: 499666 - RNA, 32 nt, Human
uccagguccuuuccuucucgucuuccucucuc

SEQ ID NO: 499667 - RNA, 23 nt, Human
uccaggucguccugaggaugccg

SEQ ID NO: 499668 - RNA, 32 nt, Human
uccaggucuagaaggccaggccucuacuaggu

SEQ ID NO: 499669 - RNA, 32 nt, Human
uccaggucucccugaccugccugcucuaugcc

SEQ ID NO: 499670 - RNA, 32 nt, Human
uccaggucuccucugaggaagcauucugacuu

SEQ ID NO: 499671 - RNA, 32 nt, Human
uccaggucuugugcuaaagaaacaugucaguc

SEQ ID NO: 499672 - RNA, 32 nt, Human
uccaggugaggguagggcacauucuaaaggaa

SEQ ID NO: 499673 - RNA, 32 nt, Human
uccaggugagucucccaucugcagagacgcgg

SEQ ID NO: 499674 - RNA, 32 nt, Human
uccaggugcagcuguggauggaagacagggau

SEQ ID NO: 499675 - RNA, 32 nt, Human
uccaggugcccccaacauuugagaaccccaag

SEQ ID NO: 499676 - RNA, 32 nt, Human
uccaggugcccuggcuggagucaguccucauc

SEQ ID NO: 499677 - RNA, 32 nt, Human
uccaggugccguggagcagcaggcuggcuuug

SEQ ID NO: 499678 - RNA, 32 nt, Human
uccaggugcuagcucuggacagcagcugauuu

SEQ ID NO: 499679 - RNA, 32 nt, Human
uccaggugcucccaccacacacccagcccugc

SEQ ID NO: 499680 - RNA, 32 nt, Human
uccaggugcuggaucauagcacuuggacuguu

SEQ ID NO: 499681 - RNA, 32 nt, Human
uccaggugcuguuaguggaggaaaugcuaaau

SEQ ID NO: 499682 - RNA, 32 nt, Human
uccagguggagcuggagcaggaggacagcaag

SEQ ID NO: 499683 - RNA, 32 nt, Human
uccagguggcggagguugcagugagccgagau

SEQ ID NO: 499684 - RNA, 32 nt, Human
uccaggugggagagacacucccagggacaagg

SEQ ID NO: 499685 - RNA, 32 nt, Human
uccaggugggcagccacuugggccaagacugc

SEQ ID NO: 499686 - RNA, 21 nt, Human
uccaggugggcucccccgggc

SEQ ID NO: 499687 - RNA, 19 nt, Human
uccagguguccaccuggua

SEQ ID NO: 499688 - RNA, 21 nt, Human
uccagguguccuucgcaccca

SEQ ID NO: 499689 - RNA, 32 nt, Human
uccagguguccuugccuuucuucccaaaguca

SEQ ID NO: 499690 - RNA, 32 nt, Human
uccaggugucugcaccucacacuggacccacc

SEQ ID NO: 499691 - RNA, 29 nt, Human
uccaggugucuguguucccaggaaccaaa

SEQ ID NO: 499692 - RNA, 32 nt, Human
uccaggugugaccauugcugaaaacuugugcc

SEQ ID NO: 499693 - RNA, 32 nt, Human
uccaggugugagccacuucacccagccacauu

SEQ ID NO: 499694 - RNA, 32 nt, Human
uccaggugugagcuacugugcccagcuaaaau

SEQ ID NO: 499695 - RNA, 32 nt, Human
uccaggugugcggccgccugagcccgagccag

SEQ ID NO: 499696 - RNA, 32 nt, Human
uccagguuccaacucuugauucuaucacaaaa

SEQ ID NO: 499697 - RNA, 32 nt, Human
uccagguucccaggaacccaagaggagcugga

SEQ ID NO: 499698 - RNA, 32 nt, Human
uccagguucugggcaugagaggccguggccuc

SEQ ID NO: 499699 - RNA, 32 nt, Human
uccagguucuugggaggaagggagaaaagaag

SEQ ID NO: 499700 - RNA, 32 nt, Human
uccagguugaagcaaagcugaaugccaggcac

SEQ ID NO: 499701 - RNA, 24 nt, Human
uccagguugggcaacagagcaaga

SEQ ID NO: 499702 - RNA, 22 nt, Human
uccagguuggguugggggcacu

SEQ ID NO: 499703 - RNA, 32 nt, Human
uccagguugguagaucagcuuagguagaacag

SEQ ID NO: 499704 - RNA, 32 nt, Human
uccagguuucaagugauucuccugccucagcc

SEQ ID NO: 499705 - RNA, 32 nt, Human
uccaguaaaggguuuuggcugcauuuggggaa

SEQ ID NO: 499706 - RNA, 22 nt, Human
uccaguaaaugucccaccagug

SEQ ID NO: 499707 - RNA, 32 nt, Human
uccaguaacacauagacugugcgcauaggccu

SEQ ID NO: 499708 - RNA, 32 nt, Human
uccaguaagcagggcacugcccagggagacug

SEQ ID NO: 499709 - RNA, 32 nt, Human
uccaguaaugaagugguaacuaaccuggaagu

SEQ ID NO: 499710 - RNA, 32 nt, Human
uccaguacaucuuuaaacaaggccccagagac

SEQ ID NO: 499711 - RNA, 23 nt, Human
uccaguaccggcgggacacagca

SEQ ID NO: 499712 - RNA, 32 nt, Human
uccaguaccugcugcugaucuguuucagccga

SEQ ID NO: 499713 - RNA, 32 nt, Human
uccaguacuagucccagaauuuagaauaugcu

SEQ ID NO: 499714 - RNA, 23 nt, Human
uccaguaggcauccacuguggaa

SEQ ID NO: 499715 - RNA, 32 nt, Human
uccaguaggugaccucacagugacucaagcua

SEQ ID NO: 499716 - RNA, 32 nt, Human
uccaguagugggaaaacugggguggggguggg

SEQ ID NO: 499717 - RNA, 21 nt, Human
uccaguaguugaacacuguca

SEQ ID NO: 499718 - RNA, 32 nt, Human
uccaguauaccucuucuggaugccauucucca

SEQ ID NO: 499719 - RNA, 32 nt, Human
uccaguaucuuccuucaccuccuccucuuagg

SEQ ID NO: 499720 - RNA, 32 nt, Human
uccaguaucuuccuucagcuccuccucuuagg

SEQ ID NO: 499721 - RNA, 24 nt, Human
uccaguaugggugacagagugaga

SEQ ID NO: 499722 - RNA, 32 nt, Human
uccagucaaaccugccucccacuucucacuaa

SEQ ID NO: 499723 - RNA, 32 nt, Human
uccagucaacccacagaccccagaaagaguac

SEQ ID NO: 499724 - RNA, 32 nt, Human
uccagucaauagagacauugacugguuggcug

SEQ ID NO: 499725 - RNA, 31 nt, Human
uccagucacagcucagacuucauagagcugu

SEQ ID NO: 499726 - RNA, 32 nt, Human
uccagucacagcuggacugggucugcccaccu

SEQ ID NO: 499727 - RNA, 32 nt, Human
uccagucacaugcccccacuuccccacaggug

SEQ ID NO: 499728 - RNA, 32 nt, Human
uccagucagaagcagcccuuggcugggugagg

SEQ ID NO: 499729 - RNA, 32 nt, Human
uccagucagccuguccuggcugagcuccugcg

SEQ ID NO: 499730 - RNA, 32 nt, Human
uccagucagccuuggaggccucugccuagaca

SEQ ID NO: 499731 - RNA, 32 nt, Human
uccagucaggaggcauaguuuuuagugaacaa

SEQ ID NO: 499732 - RNA, 32 nt, Human
uccagucagugcagucauguaugaggagaauu

SEQ ID NO: 499733 - RNA, 22 nt, Human
uccagucauaaaaauguguucu

SEQ ID NO: 499734 - RNA, 32 nt, Human
uccagucaugguacuaccccagccuggggucc

SEQ ID NO: 499735 - RNA, 32 nt, Human
uccagucauugacaggcauuuccucuuugcua

SEQ ID NO: 499736 - RNA, 32 nt, Human
uccagucauuuugcagaaauguuuccauuugg

SEQ ID NO: 499737 - RNA, 19 nt, Human
uccaguccaaccugaucca

SEQ ID NO: 499738 - RNA, 32 nt, Human
uccaguccaugguccaugcaggcuccuuucau

SEQ ID NO: 499739 - RNA, 21 nt, Human
uccagucccacgcuggcccca

SEQ ID NO: 499740 - RNA, 32 nt, Human
uccagucccaggacacagcagcggccaccaug

SEQ ID NO: 499741 - RNA, 32 nt, Human
uccagucccaggaguccuucagccucuggggg

SEQ ID NO: 499742 - RNA, 22 nt, Human
uccaguccccagccuggcccca

SEQ ID NO: 499743 - RNA, 32 nt, Human
uccaguccuaggagaacagucccugggucagc

SEQ ID NO: 499744 - RNA, 32 nt, Human
uccaguccucaagggaauacugaagaugcuga

SEQ ID NO: 499745 - RNA, 32 nt, Human
uccaguccucagagaaauaaucacuuucuuaa

SEQ ID NO: 499746 - RNA, 32 nt, Human
uccaguccuccaagaaccagcacugccggagc

SEQ ID NO: 499747 - RNA, 32 nt, Human
uccaguccuccccuuggaucugccuuuguccu

SEQ ID NO: 499748 - RNA, 32 nt, Human
uccaguccucgcacugcuguguguucugguca

SEQ ID NO: 499749 - RNA, 32 nt, Human
uccaguccucuccuggaaauggaggaccagga

SEQ ID NO: 499750 - RNA, 32 nt, Human
uccaguccucugcuucuucugcaauaaaugau

SEQ ID NO: 499751 - RNA, 32 nt, Human
uccaguccuggagcagcuggaagaugcuguca

SEQ ID NO: 499752 - RNA, 19 nt, Human
uccaguccuuguaaucuua

SEQ ID NO: 499753 - RNA, 32 nt, Human
uccaguccuuuuaaaaucugagcagaaaaauu

SEQ ID NO: 499754 - RNA, 32 nt, Human
uccagucgaauccugcuucuuggugcccugau

SEQ ID NO: 499755 - RNA, 32 nt, Human
uccagucgagguaccggguucaucucacuagg

SEQ ID NO: 499756 - RNA, 24 nt, Human
uccagucggguuaacagagcaaga

SEQ ID NO: 499757 - RNA, 32 nt, Human
uccagucuaagaagucccauugccaaagcuuu

SEQ ID NO: 499758 - RNA, 32 nt, Human
uccagucuacacacccagcccaggcuuaacuc

SEQ ID NO: 499759 - RNA, 21 nt, Human
uccagucuacuuugggguucu

SEQ ID NO: 499760 - RNA, 32 nt, Human
uccagucuaggugacagagcaagacuccaucu

SEQ ID NO: 499761 - RNA, 32 nt, Human
uccagucuaggugacagagcgagacuccaucu

SEQ ID NO: 499762 - RNA, 32 nt, Human
uccagucucaagugauccucugccucagccuc

SEQ ID NO: 499763 - RNA, 23 nt, Human
uccagucucacagcagagugauc

SEQ ID NO: 499764 - RNA, 21 nt, Human
uccagucuccaccaggaaccu

SEQ ID NO: 499765 - RNA, 32 nt, Human
uccagucuccaccuucccgccuauucccccag

SEQ ID NO: 499766 - RNA, 32 nt, Human
uccagucuccacuguuggcucuccagcaacca

SEQ ID NO: 499767 - RNA, 21 nt, Human
uccagucuccagaacugugaa

SEQ ID NO: 499768 - RNA, 32 nt, Human
uccagucucccuccccugacucccucugcugu

SEQ ID NO: 499769 - RNA, 32 nt, Human
uccagucuccuccucaguucugugccugagaa

SEQ ID NO: 499770 - RNA, 23 nt, Human
uccagucucgaccccgagccccu

SEQ ID NO: 499771 - RNA, 32 nt, Human
uccagucucggcucuuaaaacuaugagcauuu

SEQ ID NO: 499772 - RNA, 32 nt, Human
uccagucucugaguucuaccugauguaacucu

SEQ ID NO: 499773 - RNA, 32 nt, Human
uccagucucugccuaauuuuuaguguuuaaua

SEQ ID NO: 499774 - RNA, 32 nt, Human
uccagucucugccucuguguucacacggccuu

SEQ ID NO: 499775 - RNA, 22 nt, Human
uccagucugagagcaggggagg

SEQ ID NO: 499776 - RNA, 24 nt, Human
uccagucugagcaacagaacgaga

SEQ ID NO: 499777 - RNA, 32 nt, Human
uccagucugcucucagcuugugccuuguaaau

SEQ ID NO: 499778 - RNA, 32 nt, Human
uccagucuggacaacagagcaagacucugucu

SEQ ID NO: 499779 - RNA, 32 nt, Human
uccagucuggacaacagagugagacccugugu

SEQ ID NO: 499780 - RNA, 24 nt, Human
uccagucuggaccacagagugaga

SEQ ID NO: 499781 - RNA, 32 nt, Human
uccagucuggaccacagagugagacccuguuu

SEQ ID NO: 499782 - RNA, 24 nt, Human
uccagucuggacgacagagugaga

SEQ ID NO: 499783 - RNA, 23 nt, Human
uccagucuggaguuggagcaagg

SEQ ID NO: 499784 - RNA, 24 nt, Human
uccagucuggaugacagagagaga

SEQ ID NO: 499785 - RNA, 23 nt, Human
uccagucuggcaacagagcaaga

SEQ ID NO: 499786 - RNA, 32 nt, Human
uccagucuggccccagcaaacccggaggccgc

SEQ ID NO: 499787 - RNA, 20 nt, Human
uccagucuggccgggcgggg

SEQ ID NO: 499788 - RNA, 25 nt, Human
uccagucugggacaacagagcaaga

SEQ ID NO: 499789 - RNA, 32 nt, Human
uccagucugggcaacagacggagacugugucu

SEQ ID NO: 499790 - RNA, 24 nt, Human
uccagucugggcaacagagcaaga

SEQ ID NO: 499791 - RNA, 32 nt, Human
uccagucugggcaacagagcaagacccugccu

SEQ ID NO: 499792 - RNA, 32 nt, Human
uccagucugggcaacagagcaagacucugugu

SEQ ID NO: 499793 - RNA, 24 nt, Human
uccagucugggcaacagagcgaga

SEQ ID NO: 499794 - RNA, 24 nt, Human
uccagucugggcaacagagugaga

SEQ ID NO: 499795 - RNA, 32 nt, Human
uccagucugggcaacagagugagacccugucu

SEQ ID NO: 499796 - RNA, 24 nt, Human
uccagucugggcaacagugcaaga

SEQ ID NO: 499797 - RNA, 24 nt, Human
uccagucugggcgacagagcaaga

SEQ ID NO: 499798 - RNA, 32 nt, Human
uccagucugggcgacagagcaagacucugacu

SEQ ID NO: 499799 - RNA, 24 nt, Human
uccagucugggcgacagagcgaga

SEQ ID NO: 499800 - RNA, 32 nt, Human
uccagucugggcgacagagcgagacucugucu

SEQ ID NO: 499801 - RNA, 25 nt, Human
uccagucugggcgacaggagcaaga

SEQ ID NO: 499802 - RNA, 21 nt, Human
uccagucugggcugagugggg

SEQ ID NO: 499803 - RNA, 22 nt, Human
uccagucuggggaggagagaga

SEQ ID NO: 499804 - RNA, 24 nt, Human
uccagucuggguaacagagcgaga

SEQ ID NO: 499805 - RNA, 22 nt, Human
uccagucuggguaacagggaga

SEQ ID NO: 499806 - RNA, 23 nt, Human
uccagucuggguaagaagaguga

SEQ ID NO: 499807 - RNA, 24 nt, Human
uccagucugggugaaagagcgaga

SEQ ID NO: 499808 - RNA, 24 nt, Human
uccagucugggugacagagagaga

SEQ ID NO: 499809 - RNA, 32 nt, Human
uccagucugggugacagagcaagacucaguca

SEQ ID NO: 499810 - RNA, 32 nt, Human
uccagucugggugacagagcaagacucggucu

SEQ ID NO: 499811 - RNA, 24 nt, Human
uccagucugggugacagagugaga

SEQ ID NO: 499812 - RNA, 32 nt, Human
uccagucugggugacagagugagacuccgccu

SEQ ID NO: 499813 - RNA, 32 nt, Human
uccagucugggugacagagugagacucugucu

SEQ ID NO: 499814 - RNA, 22 nt, Human
uccagucugggugacagcaaga

SEQ ID NO: 499815 - RNA, 24 nt, Human
uccagucugggugacagcgugaga

SEQ ID NO: 499816 - RNA, 23 nt, Human
uccagucugggugagaccugagg

SEQ ID NO: 499817 - RNA, 24 nt, Human
uccagucugggugucagaaugaga

SEQ ID NO: 499818 - RNA, 32 nt, Human
uccagucugggugucagaaugagaccccaucu

SEQ ID NO: 499819 - RNA, 23 nt, Human
uccagucugggugucccagcgag

SEQ ID NO: 499820 - RNA, 25 nt, Human
uccagucuggucggcaagagugaga

SEQ ID NO: 499821 - RNA, 24 nt, Human
uccagucugguugacagagugaga

SEQ ID NO: 499822 - RNA, 25 nt, Human
uccagucugguuuugagagcagggg

SEQ ID NO: 499823 - RNA, 32 nt, Human
uccagucugugcaucaugaaugauaagcuguu

SEQ ID NO: 499824 - RNA, 32 nt, Human
uccagucuguggugaugcugucugucugucug

SEQ ID NO: 499825 - RNA, 23 nt, Human
uccagucuguguguagggagaga

SEQ ID NO: 499826 - RNA, 32 nt, Human
uccagucuucauuuuacauacacacacauauu

SEQ ID NO: 499827 - RNA, 24 nt, Human
uccagucuuccaccuggaagcccu

SEQ ID NO: 499828 - RNA, 32 nt, Human
uccagucuuggcacuuuuuccaauuugacuga

SEQ ID NO: 499829 - RNA, 32 nt, Human
uccagucuuuaagcccagcugugcucgggugu

SEQ ID NO: 499830 - RNA, 32 nt, Human
uccagugaaaacaagacugaaauaugaugacc

SEQ ID NO: 499831 - RNA, 32 nt, Human
uccagugaaaacagcugccuuccggauuaugu

SEQ ID NO: 499832 - RNA, 32 nt, Human
uccagugaaacuuuagucacaaaaacagucug

SEQ ID NO: 499833 - RNA, 32 nt, Human
uccagugacagcugagacaacaaggaccacgg

SEQ ID NO: 499834 - RNA, 22 nt, Human
uccagugaccgacagagcaaga

SEQ ID NO: 499835 - RNA, 18 nt, Human
uccagugaccuggaccug

SEQ ID NO: 499836 - RNA, 32 nt, Human
uccagugagauggagucgcgagucgcggacgc

SEQ ID NO: 499837 - RNA, 32 nt, Human
uccagugagaugggugcuguucuugagcagcu

SEQ ID NO: 499838 - RNA, 32 nt, Human
uccagugaguccauguggagagagcacugugu

SEQ ID NO: 499839 - RNA, 32 nt, Human
uccagugaguuacccagggcuccagggagccc

SEQ ID NO: 499840 - RNA, 27 nt, Human
uccagugcaaaaguggccaguaccaaa

SEQ ID NO: 499841 - RNA, 32 nt, Human
uccagugcacucgagccugggugacagggcaa

SEQ ID NO: 499842 - RNA, 32 nt, Human
uccagugcaguggugugaucauggcucacugc

SEQ ID NO: 499843 - RNA, 32 nt, Human
uccagugccaugaacucagccgcuguccuggg

SEQ ID NO: 499844 - RNA, 32 nt, Human
uccagugccaugagccugacacaugaaggucu

SEQ ID NO: 499845 - RNA, 32 nt, Human
uccagugccguuuuggaaagauguugccuuug

SEQ ID NO: 499846 - RNA, 32 nt, Human
uccagugcuacgugucccuggcauuuuaggug

SEQ ID NO: 499847 - RNA, 32 nt, Human
uccagugcuagaaaauuuagcccuuuaaaacg

SEQ ID NO: 499848 - RNA, 32 nt, Human
uccagugcuagugcuagcuuugcacugccuuu

SEQ ID NO: 499849 - RNA, 32 nt, Human
uccagugcuccaggcugggggccguggauccu

SEQ ID NO: 499850 - RNA, 32 nt, Human
uccaguggaaacaagugcauagaugugaauug

SEQ ID NO: 499851 - RNA, 32 nt, Human
uccaguggaagccacauaugguagcaagagcc

SEQ ID NO: 499852 - RNA, 32 nt, Human
uccaguggaaggcauauaggagugaugguucc

SEQ ID NO: 499853 - RNA, 19 nt, Human
uccaguggaccagcauuca

SEQ ID NO: 499854 - RNA, 21 nt, Human
uccaguggaccugggaacccu

SEQ ID NO: 499855 - RNA, 32 nt, Human
uccaguggagccagaugccgagaccgaguguc

SEQ ID NO: 499856 - RNA, 32 nt, Human
uccaguggaggaagaaggaaggagaggcuugg

SEQ ID NO: 499857 - RNA, 32 nt, Human
uccaguggauccuuaguuuucucuucacugcc

SEQ ID NO: 499858 - RNA, 31 nt, Human
uccaguggcacaaucucggcucacugcaucc

SEQ ID NO: 499859 - RNA, 31 nt, Human
uccaguggcacuaucucagcucacugcaacc

SEQ ID NO: 499860 - RNA, 32 nt, Human
uccaguggcagggagggagggagcuccuuucc

SEQ ID NO: 499861 - RNA, 32 nt, Human
uccaguggccacucucaggcagaguucagauu

SEQ ID NO: 499862 - RNA, 32 nt, Human
uccaguggccccugggguuccagccuguagca

SEQ ID NO: 499863 - RNA, 32 nt, Human
uccaguggccuuuccucacucuguaguguuug

SEQ ID NO: 499864 - RNA, 32 nt, Human
uccaguggcgccccgugcgcaccagcugccug

SEQ ID NO: 499865 - RNA, 32 nt, Human
uccaguggcucacaccuguaaucccaguacuu

SEQ ID NO: 499866 - RNA, 32 nt, Human
uccagugggaacugaagagggcccaagucgga

SEQ ID NO: 499867 - RNA, 24 nt, Human
uccagugggaagguagccuggcca

SEQ ID NO: 499868 - RNA, 32 nt, Human
uccagugggaccccaaaccccacacugcgcug

SEQ ID NO: 499869 - RNA, 23 nt, Human
uccagugggacgucuggcccuca

SEQ ID NO: 499870 - RNA, 32 nt, Human
uccagugggacuagcaguugucacucuguucu

SEQ ID NO: 499871 - RNA, 32 nt, Human
uccagugggaggcggaggccgugagcgcccag

SEQ ID NO: 499872 - RNA, 32 nt, Human
uccagugggaugaacagacaaaccccacaagc

SEQ ID NO: 499873 - RNA, 32 nt, Human
uccagugggcaggacccuuggcaggcaagccc

SEQ ID NO: 499874 - RNA, 21 nt, Human
ucccgaccucaggugauccac

SEQ ID NO: 499875 - RNA, 24 nt, Human
ucccgaccucaggugauccaccca

SEQ ID NO: 499876 - RNA, 24 nt, Human
ucccgaccucaggugauccacccg

SEQ ID NO: 499877 - RNA, 24 nt, Human
ucccgaccucaggugauccgccca

SEQ ID NO: 499878 - RNA, 24 nt, Human
ucccgaccucaggugauccgcccg

SEQ ID NO: 499879 - RNA, 24 nt, Human
ucccgaccucaggugaucuacccg

SEQ ID NO: 499880 - RNA, 24 nt, Human
ucccgaccucaggugaucugccca

SEQ ID NO: 499881 - RNA, 23 nt, Human
ucccgaccucaggugaucuguuc

SEQ ID NO: 499882 - RNA, 32 nt, Human
ucccgaccucauuccauuucuaucuucugacc

SEQ ID NO: 499883 - RNA, 32 nt, Human
ucccgaccucgugaucugcccaccucagccuc

SEQ ID NO: 499884 - RNA, 32 nt, Human
ucccgaccucuagccuggcggcaccuucccag

SEQ ID NO: 499885 - RNA, 32 nt, Human
ucccgacgcugugguugcuguaagggguccuc

SEQ ID NO: 499886 - RNA, 32 nt, Human
ucccgacuccucaguggaggaggagcugcggu

SEQ ID NO: 499887 - RNA, 19 nt, Human
ucccgacucugggccagcg

SEQ ID NO: 499888 - RNA, 32 nt, Human
ucccgacugcccaccuccuccuccucccccuc

SEQ ID NO: 499889 - RNA, 32 nt, Human
ucccgagacguguaaugacaccacacuuguuu

SEQ ID NO: 499890 - RNA, 32 nt, Human
ucccgagagaggaggaagcccggagagagacg

SEQ ID NO: 499891 - RNA, 32 nt, Human
ucccgagcaucaugaguaacgugucugcucag

SEQ ID NO: 499892 - RNA, 32 nt, Human
ucccgagccauggggguguugauguccaagcg

SEQ ID NO: 499893 - RNA, 17 nt, Human
ucccgagcccuggccgc

SEQ ID NO: 499894 - RNA, 17 nt, Human
ucccgagccgcggccgc

SEQ ID NO: 499895 - RNA, 32 nt, Human
ucccgagcgccuucccggugaccccgcagugg

SEQ ID NO: 499896 - RNA, 24 nt, Human
ucccgagcugugagcgcagucuga

SEQ ID NO: 499897 - RNA, 21 nt, Human
ucccgaggacacaaacaggca

SEQ ID NO: 499898 - RNA, 32 nt, Human
ucccgaggagauggaggagcuggagaaggagc

SEQ ID NO: 499899 - RNA, 32 nt, Human
ucccgaggcaugagccaccacgccaagcccag

SEQ ID NO: 499900 - RNA, 25 nt, Human
ucccgaggccaauucccugcuccuu

SEQ ID NO: 499901 - RNA, 32 nt, Human
ucccgaggccccuggguccuucuagcuuuucu

SEQ ID NO: 499902 - RNA, 21 nt, Human
ucccgaggcgcccaagcugga

SEQ ID NO: 499903 - RNA, 32 nt, Human
ucccgagguauuucaccucuuaagagggaauc

SEQ ID NO: 499904 - RNA, 19 nt, Human
ucccgaguauggaccgugu

SEQ ID NO: 499905 - RNA, 32 nt, Human
ucccgaguggcuggacaaaaugagcuacgucu

SEQ ID NO: 499906 - RNA, 32 nt, Human
ucccgaguucaagcgauucuccugccucagcc

SEQ ID NO: 499907 - RNA, 32 nt, Human
ucccgaguucaagugaugcuccugcuucggcc

SEQ ID NO: 499908 - RNA, 32 nt, Human
ucccgaguucaagugauucuccugccucagcc

SEQ ID NO: 499909 - RNA, 32 nt, Human
ucccgaguucaagugauucuccuggcucaccc

SEQ ID NO: 499910 - RNA, 32 nt, Human
ucccgaguucaagugauuuuccugccucagcu

SEQ ID NO: 499911 - RNA, 32 nt, Human
ucccgaguugaguaacugggaccacagcuaug

SEQ ID NO: 499912 - RNA, 24 nt, Human
ucccgaucucaggugauccgcccg

SEQ ID NO: 499913 - RNA, 32 nt, Human
ucccgcaaggcaggcuggaggugccggugggc

SEQ ID NO: 499914 - RNA, 32 nt, Human
ucccgcacaugccucccacccuaggagggagg

SEQ ID NO: 499915 - RNA, 32 nt, Human
ucccgcaccccaggcuggggcagcgagggcgu

SEQ ID NO: 499916 - RNA, 32 nt, Human
ucccgcacuccuuaggcaagauuucccaguaa

SEQ ID NO: 499917 - RNA, 20 nt, Human
ucccgcacugauccccucca

SEQ ID NO: 499918 - RNA, 32 nt, Human
ucccgcagaaagucauguccagcuggaaccca

SEQ ID NO: 499919 - RNA, 32 nt, Human
ucccgcagaccauguuccauguuucuuuuagg

SEQ ID NO: 499920 - RNA, 32 nt, Human
ucccgcagagccggugccaucugugggggcuu

SEQ ID NO: 499921 - RNA, 32 nt, Human
ucccgcagcacccuccagccuugcagaagcag

SEQ ID NO: 499922 - RNA, 32 nt, Human
ucccgcaggaaggagggguccggccugaggcc

SEQ ID NO: 499923 - RNA, 32 nt, Human
ucccgcaggcaggcagaggcugcccuguaacc

SEQ ID NO: 499924 - RNA, 32 nt, Human
ucccgcaguccugggagccagcggccaccugc

SEQ ID NO: 499925 - RNA, 32 nt, Human
ucccgcaguggaaucagccuucccagggaccu

SEQ ID NO: 499926 - RNA, 32 nt, Human
ucccgcaguuagaauuuuguuuggagcccucu

SEQ ID NO: 499927 - RNA, 32 nt, Human
ucccgcauucaagugauucuccagccucagcc

SEQ ID NO: 499928 - RNA, 32 nt, Human
ucccgcauucagauuucauuugcuguugcuuu

SEQ ID NO: 499929 - RNA, 32 nt, Human
ucccgccaccggccgcuucuguccucggaccc

SEQ ID NO: 499930 - RNA, 32 nt, Human
ucccgccaccuccccucuccucuucuccccuc

SEQ ID NO: 499931 - RNA, 32 nt, Human
ucccgccacucacuccagccuggauaaaagag

SEQ ID NO: 499932 - RNA, 32 nt, Human
ucccgccacugcacgccagccugggcgacaga

SEQ ID NO: 499933 - RNA, 32 nt, Human
ucccgccacugcacuccagacugggcgacaga

SEQ ID NO: 499934 - RNA, 31 nt, Human
ucccgccacugcacuccagcacuccgcucuc

SEQ ID NO: 499935 - RNA, 32 nt, Human
ucccgccacugcacuccagcccaggugacaga

SEQ ID NO: 499936 - RNA, 32 nt, Human
ucccgccacugcacuccagccugggcaacaga

SEQ ID NO: 499937 - RNA, 32 nt, Human
ucccgccacugcacuccagccugggcgacaga

SEQ ID NO: 499938 - RNA, 32 nt, Human
ucccgccacugcacuccagccugggugacaga

SEQ ID NO: 499939 - RNA, 32 nt, Human
ucccgccacugcacucuagccugggugacaga

SEQ ID NO: 499940 - RNA, 23 nt, Human
ucccgccagccugcccgccugcu

SEQ ID NO: 499941 - RNA, 18 nt, Human
ucccgccagcguggccag

SEQ ID NO: 499942 - RNA, 32 nt, Human
ucccgccccacacccacccuccuggcucuucc

SEQ ID NO: 499943 - RNA, 32 nt, Human
ucccgccccagccuccugaguagcugggacua

SEQ ID NO: 499944 - RNA, 32 nt, Human
ucccgccccagccuggcccagggugaaggaag

SEQ ID NO: 499945 - RNA, 32 nt, Human
ucccgcccccagaggcucagcacuuuggacau

SEQ ID NO: 499946 - RNA, 32 nt, Human
ucccgccccggccaaccaugccaagccugccu

SEQ ID NO: 499947 - RNA, 24 nt, Human
ucccgccccugcccccacccccgg

SEQ ID NO: 499948 - RNA, 32 nt, Human
ucccgccccuugccugacccucagggagucag

SEQ ID NO: 499949 - RNA, 32 nt, Human
ucccgcccuccagcaugcagcagacugcuggc

SEQ ID NO: 499950 - RNA, 32 nt, Human
ucccgcccucggcccggccucccagcucucua

SEQ ID NO: 499951 - RNA, 32 nt, Human
ucccgcccugcagaggggcuccagcuguucag

SEQ ID NO: 499952 - RNA, 32 nt, Human
ucccgcccuuucuccucaugcacccggccucg

SEQ ID NO: 499953 - RNA, 24 nt, Human
ucccgcccuuuuggacccccgggc

SEQ ID NO: 499954 - RNA, 32 nt, Human
ucccgccgcaccucugcaucuccugggcguca

SEQ ID NO: 499955 - RNA, 32 nt, Human
ucccgccgccuccagccucuccccucuggcag

SEQ ID NO: 499956 - RNA, 20 nt, Human
ucccgccggcccgcgccgcu

SEQ ID NO: 499957 - RNA, 32 nt, Human
ucccgccggcgccaccaccgcggucacucacc

SEQ ID NO: 499958 - RNA, 32 nt, Human
ucccgccggguccucccuccccagaccccaga

SEQ ID NO: 499959 - RNA, 32 nt, Human
ucccgccgguaaucccaaagcuuugggaagcc

SEQ ID NO: 499960 - RNA, 32 nt, Human
ucccgccguguggcccucaucgaagccccgug

SEQ ID NO: 499961 - RNA, 32 nt, Human
ucccgccucaccccgcuccaucacaccagcug

SEQ ID NO: 499962 - RNA, 18 nt, Human
ucccgccucagccaccca

SEQ ID NO: 499963 - RNA, 32 nt, Human
ucccgccucaguagcugggauuacaggugccc

SEQ ID NO: 499964 - RNA, 32 nt, Human
ucccgccuccaauggcuguuucuguuuuccuu

SEQ ID NO: 499965 - RNA, 32 nt, Human
ucccgccuccacugcaacaucaucuacgacua

SEQ ID NO: 499966 - RNA, 32 nt, Human
ucccgccuccacugcaacaucuucuccuacga

SEQ ID NO: 499967 - RNA, 32 nt, Human
ucccgccuccaggaucuccucucaccugcccc

SEQ ID NO: 499968 - RNA, 22 nt, Human
ucccgccuccaggccucggggc

SEQ ID NO: 499969 - RNA, 21 nt, Human
ucccgccucccacuccccagc

SEQ ID NO: 499970 - RNA, 22 nt, Human
ucccgccucccagccccggcgc

SEQ ID NO: 499971 - RNA, 32 nt, Human
ucccgccuccccucggucuuccgaggcgcccg

SEQ ID NO: 499972 - RNA, 32 nt, Human
ucccgccucccgccucccuccagcugcgagug

SEQ ID NO: 499973 - RNA, 32 nt, Human
ucccgccuccuccucuugcuccuccucggcgu

SEQ ID NO: 499974 - RNA, 32 nt, Human
ucccgccucggcagcgucacugcccaguagcu

SEQ ID NO: 499975 - RNA, 32 nt, Human
ucccgccucgggagcugggacaacaggugccc

SEQ ID NO: 499976 - RNA, 20 nt, Human
ucccgccucucucccgccca

SEQ ID NO: 499977 - RNA, 26 nt, Human
ucccgccucuuccuccgcccccgggc

SEQ ID NO: 499978 - RNA, 32 nt, Human
ucccgccuggaaucccagcacuuugggaggcc

SEQ ID NO: 499979 - RNA, 24 nt, Human
ucccgccuggcuguuauucuucca

SEQ ID NO: 499980 - RNA, 24 nt, Human
ucccgccugggcgacagagcgaga

SEQ ID NO: 499981 - RNA, 32 nt, Human
ucccgccugggcgacagagcgagacucugucu

SEQ ID NO: 499982 - RNA, 32 nt, Human
ucccgccugggugacaaagcaauauucugugu

SEQ ID NO: 499983 - RNA, 32 nt, Human
ucccgccugggugacagagugagacucuaucu

SEQ ID NO: 499984 - RNA, 32 nt, Human
ucccgccuguaaucccagaacuuugggaggcu

SEQ ID NO: 499985 - RNA, 32 nt, Human
ucccgccuguaaucccagcacuuugggaagcc

SEQ ID NO: 499986 - RNA, 32 nt, Human
ucccgccuguaaucccagcacuuugggaggcc

SEQ ID NO: 499987 - RNA, 32 nt, Human
ucccgccuguaaucccaguacuuugggaagcc

SEQ ID NO: 499988 - RNA, 32 nt, Human
ucccgccuguaaucccauuacuuugggaggcc

SEQ ID NO: 499989 - RNA, 32 nt, Human
ucccgccuguaauccuagcacuuugggaggcc

SEQ ID NO: 499990 - RNA, 32 nt, Human
ucccgccuguccaucgcucuagcugcuaauac

SEQ ID NO: 499991 - RNA, 32 nt, Human
ucccgccuguucccgcccucucaccagugcac

SEQ ID NO: 499992 - RNA, 32 nt, Human
ucccgccuuggucucccagaguguuaggauua

SEQ ID NO: 499993 - RNA, 32 nt, Human
ucccgccuuuguccagcucuggguuuucaaac

SEQ ID NO: 499994 - RNA, 17 nt, Human
ucccgcgccgggucgcg

SEQ ID NO: 499995 - RNA, 32 nt, Human
ucccgcgggcccuggugcccuggcaugaaggc

SEQ ID NO: 499996 - RNA, 32 nt, Human
ucccgcggggccugggcugcgggcccacgggu

SEQ ID NO: 499997 - RNA, 32 nt, Human
ucccgcgugaaacagagguucaagagggaauc

SEQ ID NO: 499998 - RNA, 32 nt, Human
ucccgcguggagcaggcuugcccagcugggaa

SEQ ID NO: 499999 - RNA, 32 nt, Human
ucccgcucaaccagggcaccaggacgaggugg

SEQ ID NO: 500000 - RNA, 32 nt, Human
ucccgcucaaggcugccccagccuggggucuc

SEQ ID NO: 500001 - RNA, 22 nt, Human
ucccgcucaccuucccgcugcu

SEQ ID NO: 500002 - RNA, 21 nt, Human
ucccgcuccaccagcuuccag

SEQ ID NO: 500003 - RNA, 32 nt, Human
ucccgcucccuguggccccacagcccccgugg

SEQ ID NO: 500004 - RNA, 21 nt, Human
ucccgcuccgcagccccgggc

SEQ ID NO: 500005 - RNA, 32 nt, Human
ucccgcuccuucagcuccuccagcucccguuc

SEQ ID NO: 500006 - RNA, 32 nt, Human
ucccgcucgcgcccucaggucucccucccuuu

SEQ ID NO: 500007 - RNA, 22 nt, Human
ucccgcucgcucugcagcugcu

SEQ ID NO: 500008 - RNA, 32 nt, Human
ucccgcugaaguauuuggcuaccagccagauc

SEQ ID NO: 500009 - RNA, 31 nt, Human
ucccgcugccucuaccugccugguccagcug

SEQ ID NO: 500010 - RNA, 32 nt, Human
ucccgcugcguguccagguccaaaguggagag

SEQ ID NO: 500011 - RNA, 32 nt, Human
ucccgcuggaagccuccaucucuuuggaaaaa

SEQ ID NO: 500012 - RNA, 32 nt, Human
ucccgcuggccggggccguuuccccagagcgg

SEQ ID NO: 500013 - RNA, 32 nt, Human
ucccgcugggcagaggaugggcgcugggucga

SEQ ID NO: 500014 - RNA, 32 nt, Human
ucccgcuggucucccugaggacugagggugaa

SEQ ID NO: 500015 - RNA, 32 nt, Human
ucccgcuguccagcaaggccccgagacuuuuc

SEQ ID NO: 500016 - RNA, 32 nt, Human
ucccgcugugaucuugggcaagugacuuucuc

SEQ ID NO: 500017 - RNA, 19 nt, Human
ucccgcuucagccucucaa

SEQ ID NO: 500018 - RNA, 20 nt, Human
ucccgcuucccccuccccca

SEQ ID NO: 500019 - RNA, 19 nt, Human
ucccgcuucgccccgaguc

SEQ ID NO: 500020 - RNA, 32 nt, Human
ucccgcuuuccucaccacauacagcucuucuc

SEQ ID NO: 500021 - RNA, 32 nt, Human
ucccgcuuugcugccaaugcaacagcccugga

SEQ ID NO: 500022 - RNA, 32 nt, Human
ucccggaaccucugcucagccuggugaaccac

SEQ ID NO: 500023 - RNA, 32 nt, Human
ucccggaaggcaaauggcuggcguggaagcac

SEQ ID NO: 500024 - RNA, 23 nt, Human
ucccggaaggccacucauggcca

SEQ ID NO: 500025 - RNA, 32 nt, Human
ucccggaaucauguugucccacugccuauuaa

SEQ ID NO: 500026 - RNA, 32 nt, Human
ucccggacaagauaugagaaaugaguguugga

SEQ ID NO: 500027 - RNA, 20 nt, Human
ucccggacagcuggacccag

SEQ ID NO: 500028 - RNA, 32 nt, Human
ucccggacaggccgcuugcugcagaggaucca

SEQ ID NO: 500029 - RNA, 32 nt, Human
ucccggacuccagugauccucccgccucagcc

SEQ ID NO: 500030 - RNA, 24 nt, Human
ucccggacucgggugauccacccg

SEQ ID NO: 500031 - RNA, 32 nt, Human
ucccggacuuaucuacucuucacuuuccugau

SEQ ID NO: 500032 - RNA, 32 nt, Human
ucccggagagcacggaaccgcacgcacgucag

SEQ ID NO: 500033 - RNA, 32 nt, Human
ucccggagccagguggagucucgcucugucgc

SEQ ID NO: 500034 - RNA, 32 nt, Human
ucccggagcccggccguagaggcugcaaucgc

SEQ ID NO: 500035 - RNA, 32 nt, Human
ucccggagccggaagccaggaggaaacuacac

SEQ ID NO: 500036 - RNA, 32 nt, Human
ucccggaggcuggccgggcaggcguggugcgc

SEQ ID NO: 500037 - RNA, 32 nt, Human
ucccggagggcccugagcugagggcauugcuu

SEQ ID NO: 500038 - RNA, 32 nt, Human
ucccggauucaagccauucuccugccucagcc

SEQ ID NO: 500039 - RNA, 32 nt, Human
ucccggauucaagcgauucuccugccucagcc

SEQ ID NO: 500040 - RNA, 32 nt, Human
ucccggauucaagugauuccccugccuuagcc

SEQ ID NO: 500041 - RNA, 32 nt, Human
ucccggauucaagugauuccccugucucagcc

SEQ ID NO: 500042 - RNA, 32 nt, Human
ucccggauucaagugauucuccagccucagcc

SEQ ID NO: 500043 - RNA, 32 nt, Human
ucccggauucaagugauucuccugccucagcc

SEQ ID NO: 500044 - RNA, 21 nt, Human
ucccggcaacaucucugggaa

SEQ ID NO: 500045 - RNA, 32 nt, Human
ucccggcaaccaggggugccccaggcuagcuc

SEQ ID NO: 500046 - RNA, 32 nt, Human
ucccggcaccaucccuuccuucaucugacuua

SEQ ID NO: 500047 - RNA, 32 nt, Human
ucccggcacccaucuguaucaucagugccucu

SEQ ID NO: 500048 - RNA, 32 nt, Human
ucccggcagcagcgggggaccggaaguggcuc

SEQ ID NO: 500049 - RNA, 32 nt, Human
ucccggcagcugaccagaaucucuuggagggu

SEQ ID NO: 500050 - RNA, 32 nt, Human
ucccggcaguugguucccggaggcagaaucug

SEQ ID NO: 500051 - RNA, 22 nt, Human
ucccggccaucuagggucagca

SEQ ID NO: 500052 - RNA, 32 nt, Human
ucccggccauucucccucuuguuuucacuuca

SEQ ID NO: 500053 - RNA, 32 nt, Human
ucccggcccagucugaccaucucccuccaguu

SEQ ID NO: 500054 - RNA, 32 nt, Human
ucccggccccucugccccuccucauagcccag

SEQ ID NO: 500055 - RNA, 32 nt, Human
ucccggcccgggaggcggcgguggaugcggcg

SEQ ID NO: 500056 - RNA, 32 nt, Human
ucccggcccugagcgugugucgcugccauauu

SEQ ID NO: 500057 - RNA, 22 nt, Human
ucccggcccuggcggggugcug

SEQ ID NO: 500058 - RNA, 23 nt, Human
ucccggccgcccggcgcccuggg

SEQ ID NO: 500059 - RNA, 32 nt, Human
ucccggccuccccucgcucugaggcucggggu

SEQ ID NO: 500060 - RNA, 32 nt, Human
ucccggccuccuucaccuuucucaucuccaga

SEQ ID NO: 500061 - RNA, 32 nt, Human
ucccggccugcaagguggaguucuagccccau

SEQ ID NO: 500062 - RNA, 31 nt, Human
ucccggcgaggugaucccaugcgcgagggcg

SEQ ID NO: 500063 - RNA, 32 nt, Human
ucccggcgucuccugccagcuuccugcaaagc

SEQ ID NO: 500064 - RNA, 32 nt, Human
ucccggcgugagccaccgcgcccagcccucaa

SEQ ID NO: 500065 - RNA, 32 nt, Human
ucccggcucaaguccuuccucucucuuuccuu

SEQ ID NO: 500066 - RNA, 32 nt, Human
ucccggcucacucccugguccugcacuggggg

SEQ ID NO: 500067 - RNA, 32 nt, Human
ucccggcucacugcaaccuccaccucccaggu

SEQ ID NO: 500068 - RNA, 32 nt, Human
ucccggcucacugcaaccuccgccucccuggu

SEQ ID NO: 500069 - RNA, 32 nt, Human
ucccggcucacugcagccuugacuccgugagc

SEQ ID NO: 500070 - RNA, 20 nt, Human
ucccggcuccacccccucca

SEQ ID NO: 500071 - RNA, 32 nt, Human
ucccggcuccacccccuccaagcucaguggac

SEQ ID NO: 500072 - RNA, 20 nt, Human
ucccggcugaagugcagugg

SEQ ID NO: 500073 - RNA, 20 nt, Human
ucccggcugcgggugcuuug

SEQ ID NO: 500074 - RNA, 23 nt, Human
ucccggcuggccagggcccuggg

SEQ ID NO: 500075 - RNA, 32 nt, Human
ucccggcuggcuggcuccgaguguggggcgcu

SEQ ID NO: 500076 - RNA, 32 nt, Human
ucccggcugggaagaggcacagaggaagucac

SEQ ID NO: 500077 - RNA, 32 nt, Human
ucccggcuucaagugauucuccugccucagcc

SEQ ID NO: 500078 - RNA, 32 nt, Human
ucccgggaagaaauucuuaucacugcauuacc

SEQ ID NO: 500079 - RNA, 32 nt, Human
ucccgggaagcagcggcacuuuucucccugga

SEQ ID NO: 500080 - RNA, 32 nt, Human
ucccgggaagccacccucccagcucugaggac

SEQ ID NO: 500081 - RNA, 32 nt, Human
ucccgggaauucaagguugcagugagcuauga

SEQ ID NO: 500082 - RNA, 32 nt, Human
ucccgggaccaggcguucucuccucucgccuc

SEQ ID NO: 500083 - RNA, 32 nt, Human
ucccgggagagggcgggcuccguggcagcccc

SEQ ID NO: 500084 - RNA, 32 nt, Human
ucccgggagccaggacuucaguuucucuuguc

SEQ ID NO: 500085 - RNA, 32 nt, Human
ucccgggaugugcccugacaugguuaauuuau

SEQ ID NO: 500086 - RNA, 32 nt, Human
ucccgggauuacaggugugugccaccacaccu

SEQ ID NO: 500087 - RNA, 32 nt, Human
ucccgggauuucggggaugacacgggggccag

SEQ ID NO: 500088 - RNA, 32 nt, Human
ucccgggcacuucuccccaccucggccccgcg

SEQ ID NO: 500089 - RNA, 32 nt, Human
ucccgggccagcugccccaccccugcccaugc

SEQ ID NO: 500090 - RNA, 32 nt, Human
ucccgggccagcugccugcggaccgcuuccuu

SEQ ID NO: 500091 - RNA, 32 nt, Human
ucccgggcccgccggcccugagcucccggcgg

SEQ ID NO: 500092 - RNA, 32 nt, Human
ucccgggcccggagcagcccaccggccacccc

SEQ ID NO: 500093 - RNA, 32 nt, Human
ucccgggcgccuucccugcugggccccuggca

SEQ ID NO: 500094 - RNA, 20 nt, Human
ucccgggcgcggacacggaa

SEQ ID NO: 500095 - RNA, 32 nt, Human
ucccgggcgcgggcgggggucgugugcuugga

SEQ ID NO: 500096 - RNA, 32 nt, Human
ucccgggcucaagacauccuccugccucggcc

SEQ ID NO: 500097 - RNA, 32 nt, Human
ucccgggcucaagcaauccucccaccucagcc

SEQ ID NO: 500098 - RNA, 32 nt, Human
ucccgggcucaagcaauccuccugccucagcu

SEQ ID NO: 500099 - RNA, 32 nt, Human
ucccgggcucaagcaguucucuuuccucagcc

SEQ ID NO: 500100 - RNA, 32 nt, Human
ucccgggcucaagcgauccuccugccucagcc

SEQ ID NO: 500101 - RNA, 32 nt, Human
ucccgggcucaagcgauucuccugccucagcc

SEQ ID NO: 500102 - RNA, 32 nt, Human
ucccgggcucaagcgauucucucaccucagcc

SEQ ID NO: 500103 - RNA, 32 nt, Human
ucccgggcucaagcgauucucuugccucagcc

SEQ ID NO: 500104 - RNA, 32 nt, Human
ucccgggcucaagugacccucccaccucagcc

SEQ ID NO: 500105 - RNA, 32 nt, Human
ucccgggcucaagugauucucccgccucaguc

SEQ ID NO: 500106 - RNA, 32 nt, Human
ucccgggcucaagugauucuccucccucagcc

SEQ ID NO: 500107 - RNA, 32 nt, Human
ucccgggcucaagugguccuccugccucagcc

SEQ ID NO: 500108 - RNA, 32 nt, Human
ucccgggcucaccccauucuccugccucagcc

SEQ ID NO: 500109 - RNA, 32 nt, Human
ucccgggcucacgccauucuccugccucagcc

SEQ ID NO: 500110 - RNA, 24 nt, Human
ucccgggcucacgccauucuucca

SEQ ID NO: 500111 - RNA, 32 nt, Human
ucccgggcuccagugauccucccgccucagcc

SEQ ID NO: 500112 - RNA, 32 nt, Human
ucccgggcuccuggcuuugccucugggauccc

SEQ ID NO: 500113 - RNA, 32 nt, Human
ucccgggcugcacuuuggguccagcuguggaa

SEQ ID NO: 500114 - RNA, 32 nt, Human
ucccgggcuggugggucaagugcauugcucag

SEQ ID NO: 500115 - RNA, 32 nt, Human
ucccgggcuguaacuugcucuuuuguuuccca

SEQ ID NO: 500116 - RNA, 32 nt, Human
ucccggggaggagagagcagcuucugccacuu

SEQ ID NO: 500117 - RNA, 28 nt, Human
ucccggggcaccagcagcagagccaggg

SEQ ID NO: 500118 - RNA, 32 nt, Human
ucccggggcucccuccggggccgcggucgggg

SEQ ID NO: 500119 - RNA, 17 nt, Human
ucccgggggaagucguc

SEQ ID NO: 500120 - RNA, 32 nt, Human
ucccggggguggccuuggaggcuguggccacg

SEQ ID NO: 500121 - RNA, 32 nt, Human
ucccggguacaagugauucuccugccucaacc

SEQ ID NO: 500122 - RNA, 32 nt, Human
ucccggguccaagugauucuccugccucagcc

SEQ ID NO: 500123 - RNA, 32 nt, Human
ucccgggucucagcuagaacacgguggaagag

SEQ ID NO: 500124 - RNA, 19 nt, Human
ucccgggugaccccucaca

SEQ ID NO: 500125 - RNA, 32 nt, Human
ucccgggugaguguccaggcaugccagcggaa

SEQ ID NO: 500126 - RNA, 32 nt, Human
ucccggguucaaacgauucuccugccucagcc

SEQ ID NO: 500127 - RNA, 32 nt, Human
ucccggguucaaaugauucuccugccucaguc

SEQ ID NO: 500128 - RNA, 32 nt, Human
ucccggguucaagccauucuccugccucaguc

SEQ ID NO: 500129 - RNA, 32 nt, Human
ucccggguucaagcgauucuccugccucagcc

SEQ ID NO: 500130 - RNA, 32 nt, Human
ucccggguucaagcgauucuccugccucagcu

SEQ ID NO: 500131 - RNA, 32 nt, Human
ucccggguucaagcgauucuccugccucaguc

SEQ ID NO: 500132 - RNA, 32 nt, Human
ucccggguucaagcgauucuccugccucggcc

SEQ ID NO: 500133 - RNA, 32 nt, Human
ucccggguucaagcgauucuccugccugagcc

SEQ ID NO: 500134 - RNA, 32 nt, Human
ucccggguucaagcuauucuccugccucagcc

SEQ ID NO: 500135 - RNA, 32 nt, Human
ucccggguucaagugaucguccugccuuaggc

SEQ ID NO: 500136 - RNA, 32 nt, Human
ucccggguucaagugauucaugugccucagcc

SEQ ID NO: 500137 - RNA, 32 nt, Human
ucccggguucaagugauuccccuaccucagcc

SEQ ID NO: 500138 - RNA, 32 nt, Human
ucccggguucaagugauuccccugugugagcc

SEQ ID NO: 500139 - RNA, 32 nt, Human
ucccggguucaagugauucucaucucagccuc

SEQ ID NO: 500140 - RNA, 32 nt, Human
ucccggguucaagugauucucaugccucagcc

SEQ ID NO: 500141 - RNA, 32 nt, Human
ucccggguucaagugauucuccagccucagcc

SEQ ID NO: 500142 - RNA, 32 nt, Human
ucccggguucaagugauucuccugccucagcc

SEQ ID NO: 500143 - RNA, 32 nt, Human
ucccggguucaagugauucuccugccucggcc

SEQ ID NO: 500144 - RNA, 32 nt, Human
ucccggguucaagugauucuccugccuuagcc

SEQ ID NO: 500145 - RNA, 32 nt, Human
ucccggguucaagugauucuccugcuucagcu

SEQ ID NO: 500146 - RNA, 32 nt, Human
ucccggguucaagugauucuccugucucagcc

SEQ ID NO: 500147 - RNA, 32 nt, Human
ucccggguucaagugauucucgugccucagcu

SEQ ID NO: 500148 - RNA, 32 nt, Human
ucccggguucaagugauucucuggccucagcc

SEQ ID NO: 500149 - RNA, 32 nt, Human
ucccggguucaagugauucucuugccucagcc

SEQ ID NO: 500150 - RNA, 32 nt, Human
ucccggguucaagugauucuucugccucagcc

SEQ ID NO: 500151 - RNA, 32 nt, Human
ucccggguucaagugauucuucugccucagcu

SEQ ID NO: 500152 - RNA, 32 nt, Human
ucccggguucaagugauucuucugucucagcc

SEQ ID NO: 500153 - RNA, 32 nt, Human
ucccggguucacaccauucuccugccucagcc

SEQ ID NO: 500154 - RNA, 32 nt, Human
ucccggguucacgccauccuccugccucagcc

SEQ ID NO: 500155 - RNA, 32 nt, Human
ucccggguucacgccauucuccugccucagac

SEQ ID NO: 500156 - RNA, 32 nt, Human
ucccggguucacgccauucuccugccucagcc

SEQ ID NO: 500157 - RNA, 32 nt, Human
ucccggguucacgccauucuccugccucagcg

SEQ ID NO: 500158 - RNA, 32 nt, Human
ucccggguucacgccauucuccugccucagcu

SEQ ID NO: 500159 - RNA, 32 nt, Human
ucccggguucacgccauucucuugccucagcc

SEQ ID NO: 500160 - RNA, 32 nt, Human
ucccggguucacgcccuucuccugccucagcc

SEQ ID NO: 500161 - RNA, 32 nt, Human
ucccggguucacgccguucuccugccucagcc

SEQ ID NO: 500162 - RNA, 32 nt, Human
ucccggguucacgucauucuccugccucagcc

SEQ ID NO: 500163 - RNA, 32 nt, Human
ucccggguucaggccauucuccugccucagcc

SEQ ID NO: 500164 - RNA, 32 nt, Human
ucccggguucaggcuauucuccugccucagcc

SEQ ID NO: 500165 - RNA, 32 nt, Human
ucccggguucaugccauucuccugccucagcc

SEQ ID NO: 500166 - RNA, 32 nt, Human
ucccggguucaugccauucuccugccucagcg

SEQ ID NO: 500167 - RNA, 32 nt, Human
ucccggguucauggcauucuccugccucagcc

SEQ ID NO: 500168 - RNA, 32 nt, Human
ucccggguucaugugauucuccugccucagcc

SEQ ID NO: 500169 - RNA, 23 nt, Human
ucccggguuccagccucucagug

SEQ ID NO: 500170 - RNA, 32 nt, Human
ucccggguucucaccauucuccugccucagcc

SEQ ID NO: 500171 - RNA, 32 nt, Human
ucccggguucugacaguacgaugagcugcccc

SEQ ID NO: 500172 - RNA, 32 nt, Human
ucccggguugacaccauuuuccugccucagcc

SEQ ID NO: 500173 - RNA, 32 nt, Human
ucccgguauaggggccucucuccucucaucgg

SEQ ID NO: 500174 - RNA, 32 nt, Human
ucccggucaccagcaaccaugacggaccagca

SEQ ID NO: 500175 - RNA, 32 nt, Human
ucccggucauggcacacaccugugcccagacg

SEQ ID NO: 500176 - RNA, 32 nt, Human
ucccgguccacugcaaccuccacuucccgggu

SEQ ID NO: 500177 - RNA, 32 nt, Human
ucccggucgggaguucucuccaggcggcacga

SEQ ID NO: 500178 - RNA, 32 nt, Human
ucccggucuagagguuuuucuucuugguccuu

SEQ ID NO: 500179 - RNA, 32 nt, Human
ucccggucucacuccagcaucuccccaggcaa

SEQ ID NO: 500180 - RNA, 32 nt, Human
ucccggugacucuggaccugagguugcgugag

SEQ ID NO: 500181 - RNA, 32 nt, Human
ucccggugccagguucuuggagcugugaggag

SEQ ID NO: 500182 - RNA, 32 nt, Human
ucccggugccccugccaagauguggaaggggc

SEQ ID NO: 500183 - RNA, 31 nt, Human
ucccggugccucucuagggcccuggugacca

SEQ ID NO: 500184 - RNA, 32 nt, Human
ucccgguggaagcaagggagcccagccggagc

SEQ ID NO: 500185 - RNA, 32 nt, Human
ucccgguggaagccucgcaacgaagggccgga

SEQ ID NO: 500186 - RNA, 32 nt, Human
ucccggugugccgcugccguagggaagcagga

SEQ ID NO: 500187 - RNA, 32 nt, Human
ucccgguucccuccccagcuccucgucuuuga

SEQ ID NO: 500188 - RNA, 32 nt, Human
ucccgguuucaagugauucuccugccuccgcc

SEQ ID NO: 500189 - RNA, 32 nt, Human
ucccgguuucacuccuucucagccugggcucc

SEQ ID NO: 500190 - RNA, 32 nt, Human
ucccguacucuccagaguacugaagauucucc

SEQ ID NO: 500191 - RNA, 32 nt, Human
ucccguagcccuuccuggaucuggagagagca

SEQ ID NO: 500192 - RNA, 32 nt, Human
ucccguaggaaacugugggaccagagauaucc

SEQ ID NO: 500193 - RNA, 32 nt, Human
ucccguauccacgcaggaaggccgggggacug

SEQ ID NO: 500194 - RNA, 24 nt, Human
ucccgucacacacugcagcaggga

SEQ ID NO: 500195 - RNA, 32 nt, Human
ucccguccaacaggcuggaguacaauggcgag

SEQ ID NO: 500196 - RNA, 32 nt, Human
ucccguccaaggaagcagaguuguuaaagagu

SEQ ID NO: 500197 - RNA, 32 nt, Human
ucccgucccgggagcugggagcagcgcgggca

SEQ ID NO: 500198 - RNA, 32 nt, Human
ucccguccuccccuccccuucccuugcuucuc

SEQ ID NO: 500199 - RNA, 32 nt, Human
ucccguccucggggccccugcagccacccaac

SEQ ID NO: 500200 - RNA, 32 nt, Human
ucccgucucugaagcaccugcccagggccugg

SEQ ID NO: 500201 - RNA, 32 nt, Human
ucccgucugugagcucccugcccagcaccacc

SEQ ID NO: 500202 - RNA, 32 nt, Human
ucccgugacagaggaggggagggguggugccu

SEQ ID NO: 500203 - RNA, 32 nt, Human
ucccgugacugcugccucaucgauaccccauu

SEQ ID NO: 500204 - RNA, 32 nt, Human
ucccgugagucuccagccugcccagcaccagc

SEQ ID NO: 500205 - RNA, 22 nt, Human
ucccgugccagauucucucaca

SEQ ID NO: 500206 - RNA, 19 nt, Human
ucccgugccccuuccucac

SEQ ID NO: 500207 - RNA, 32 nt, Human
ucccgugccuguacaaagacaugcaugugcau

SEQ ID NO: 500208 - RNA, 32 nt, Human
ucccgugcuccuggcugcagcugggaagcuuc

SEQ ID NO: 500209 - RNA, 32 nt, Human
ucccgugcuccuugagguuauccacaggaaca

SEQ ID NO: 500210 - RNA, 32 nt, Human
ucccgugcuguuucccuggcagacacacaggc

SEQ ID NO: 500211 - RNA, 19 nt, Human
ucccguggcggcccucaca

SEQ ID NO: 500212 - RNA, 32 nt, Human
ucccguggcugguucuaggccccauucaagcc

SEQ ID NO: 500213 - RNA, 32 nt, Human
ucccguggcuuugugcuuaugucauuucuucu

SEQ ID NO: 500214 - RNA, 31 nt, Human
ucccgugggcacuuccacauccucugggccu

SEQ ID NO: 500215 - RNA, 32 nt, Human
ucccgugguggaggcggggagagggaaggacc

SEQ ID NO: 500216 - RNA, 32 nt, Human
ucccguguccugggcagcuucuguuucccucu

SEQ ID NO: 500217 - RNA, 32 nt, Human
ucccgugugaguugcugucugccccuugucag

SEQ ID NO: 500218 - RNA, 32 nt, Human
ucccguguucaagcgauucuccugccucagcc

SEQ ID NO: 500219 - RNA, 32 nt, Human
ucccguguucaagcgauucuccugccuuggcc

SEQ ID NO: 500220 - RNA, 32 nt, Human
ucccguguucacaccauucuccugccucagcc

SEQ ID NO: 500221 - RNA, 32 nt, Human
ucccguguucacgccauucuccugccucagcc

SEQ ID NO: 500222 - RNA, 32 nt, Human
ucccguguuuuugcacaaagccauuaugcagg

SEQ ID NO: 500223 - RNA, 32 nt, Human
ucccguucacauuuggaaaauguucuccuaag

SEQ ID NO: 500224 - RNA, 32 nt, Human
ucccguuggaugaauugcuccugcugaaacuc

SEQ ID NO: 500225 - RNA, 25 nt, Human
ucccguuguucaggugaccuggcua

SEQ ID NO: 500226 - RNA, 32 nt, Human
ucccguuucauuccuuucucuuccucaacaaa

SEQ ID NO: 500227 - RNA, 32 nt, Human
ucccguuucccucuugcuuccucucucgucau

SEQ ID NO: 500228 - RNA, 21 nt, Human
ucccguuuccuccugcgccca

SEQ ID NO: 500229 - RNA, 32 nt, Human
ucccguuucuccuggcugaggaagggaaggga

SEQ ID NO: 500230 - RNA, 32 nt, Human
ucccguuuucucuuugcuuucucuccaacugc

SEQ ID NO: 500231 - RNA, 32 nt, Human
ucccguuuuucauaaacagaaguaagaugucc

SEQ ID NO: 500232 - RNA, 32 nt, Human
ucccuaaaauacugcaugugugugcauacaug

SEQ ID NO: 500233 - RNA, 32 nt, Human
ucccuaaaaugagagaggacugggauugaaag

SEQ ID NO: 500234 - RNA, 20 nt, Human
ucccuaaacagccccucaca

SEQ ID NO: 500235 - RNA, 32 nt, Human
ucccuaaagcaaccggauaaucccagaagcau

SEQ ID NO: 500236 - RNA, 32 nt, Human
ucccuaaaggggagucaaguucccuggguugu

SEQ ID NO: 500237 - RNA, 22 nt, Human
ucccuaaaucugccucuucugc

SEQ ID NO: 500238 - RNA, 32 nt, Human
ucccuaaauguucacuccacuuacccagcuug

SEQ ID NO: 500239 - RNA, 32 nt, Human
ucccuaacacacuugcuacaucucauguccuu

SEQ ID NO: 500240 - RNA, 32 nt, Human
ucccuaaccacuuccuccuccacccgaccauc

SEQ ID NO: 500241 - RNA, 32 nt, Human
ucccuaagacagauuggcuuucuaaugaguuu

SEQ ID NO: 500242 - RNA, 32 nt, Human
ucccuaagcagccugaggguugacuggauugg

SEQ ID NO: 500243 - RNA, 32 nt, Human
ucccuaagccagcugcccccagagccacaguu

SEQ ID NO: 500244 - RNA, 32 nt, Human
ucccuaagcccauggguuacagaaugcuaggg

SEQ ID NO: 500245 - RNA, 32 nt, Human
ucccuaaggcauacuuuucuagcuaccuucug

SEQ ID NO: 500246 - RNA, 32 nt, Human
ucccuaaguccuucccugcaggcacgcaccau

SEQ ID NO: 500247 - RNA, 32 nt, Human
ucccuaaguugcugggauuacaggugugagcc

SEQ ID NO: 500248 - RNA, 32 nt, Human
ucccuaaucccuggcccucccagcugucuggg

SEQ ID NO: 500249 - RNA, 21 nt, Human
ucccuaaucuuuggguggcuu

SEQ ID NO: 500250 - RNA, 32 nt, Human
ucccuaaugaacacgcaugggcugaaaugaag

SEQ ID NO: 500251 - RNA, 32 nt, Human
ucccuaauuucccaguccuugucuugaacaau

SEQ ID NO: 500252 - RNA, 23 nt, Human
ucccuaauuugagaaguaaccuu

SEQ ID NO: 500253 - RNA, 32 nt, Human
ucccuaauuugccagugggaacuccuaaauca

SEQ ID NO: 500254 - RNA, 32 nt, Human
ucccuacaaaugaagacuuaucagggcccuag

SEQ ID NO: 500255 - RNA, 32 nt, Human
ucccuacaacaggcugcugugcagccuggggc

SEQ ID NO: 500256 - RNA, 32 nt, Human
ucccuacaggauaaaagcuucucuccauuaca

SEQ ID NO: 500257 - RNA, 32 nt, Human
ucccuacaucuucucuucugacuuuggcuaca

SEQ ID NO: 500258 - RNA, 32 nt, Human
ucccuaccacaaaucagggcucagggagaggc

SEQ ID NO: 500259 - RNA, 32 nt, Human
ucccuaccagccagggguuuccaagggaccuu

SEQ ID NO: 500260 - RNA, 32 nt, Human
ucccuacccacguuccagccucuaggugaguc

SEQ ID NO: 500261 - RNA, 32 nt, Human
ucccuacccacuguaacuggcauucccauagu

SEQ ID NO: 500262 - RNA, 32 nt, Human
ucccuaccccucucccccaaauacagcugaag

SEQ ID NO: 500263 - RNA, 32 nt, Human
ucccuaccccucucccccaaaugcagcugaag

SEQ ID NO: 500264 - RNA, 32 nt, Human
ucccuacccgcuguagccagagcugcuucaca

SEQ ID NO: 500265 - RNA, 32 nt, Human
ucccuacccuagccuugcucucagccaccuug

SEQ ID NO: 500266 - RNA, 32 nt, Human
ucccuacccugacuccuuccccaaacccaggg

SEQ ID NO: 500267 - RNA, 32 nt, Human
ucccuacccuggggcaccucugacccuggacc

SEQ ID NO: 500268 - RNA, 32 nt, Human
ucccuacccuuaauccccacaugggaagaagc

SEQ ID NO: 500269 - RNA, 32 nt, Human
ucccuaccucaccaggcuacuggcagcagcau

SEQ ID NO: 500270 - RNA, 32 nt, Human
ucccuaccuggagccucaccuccaaggaaauu

SEQ ID NO: 500271 - RNA, 32 nt, Human
ucccuaccuuaggcuccugaguagcugggacu

SEQ ID NO: 500272 - RNA, 32 nt, Human
ucccuaccuucucuuuuguuagggaggccuca

SEQ ID NO: 500273 - RNA, 32 nt, Human
ucccuaccuugccagcuucuucauaggaccag

SEQ ID NO: 500274 - RNA, 32 nt, Human
ucccuacgugcccacuggcacacacacgugcu

SEQ ID NO: 500275 - RNA, 32 nt, Human
ucccuacuccauccuucccuggugauucuuga

SEQ ID NO: 500276 - RNA, 32 nt, Human
ucccuacucuuuccucaucucuucccaaacuc

SEQ ID NO: 500277 - RNA, 32 nt, Human
ucccuacugcugguuucugccuucuccaugcu

SEQ ID NO: 500278 - RNA, 32 nt, Human
ucccuacuuucucugcagccagacuggaugcu

SEQ ID NO: 500279 - RNA, 32 nt, Human
ucccuagaaauggcagccugcauguggagaag

SEQ ID NO: 500280 - RNA, 32 nt, Human
ucccuagaaauugcucucaucugaugaguucu

SEQ ID NO: 500281 - RNA, 32 nt, Human
ucccuagaccaagcuggucacccggcugggaa

SEQ ID NO: 500282 - RNA, 32 nt, Human
ucccuagaccuccuucccucccuccucacguc

SEQ ID NO: 500283 - RNA, 32 nt, Human
ucccuagacuguaagcucuucaaggagcaaga

SEQ ID NO: 500284 - RNA, 32 nt, Human
ucccuagagcucaagaaagcugguccaggagg

SEQ ID NO: 500285 - RNA, 32 nt, Human
ucccuagaugagcuucacaucucagguaacug

SEQ ID NO: 500286 - RNA, 19 nt, Human
ucccuagcaaagccuacag

SEQ ID NO: 500287 - RNA, 32 nt, Human
ucccuagcacugagagguguggguagguaaaa

SEQ ID NO: 500288 - RNA, 32 nt, Human
ucccuagcccgcagucuuuuucucugucccuu

SEQ ID NO: 500289 - RNA, 32 nt, Human
ucccuagccuauggagcacgcagccaccacag

SEQ ID NO: 500290 - RNA, 32 nt, Human
ucccuagccucuuccuuuuucauuagcccaaa

SEQ ID NO: 500291 - RNA, 32 nt, Human
ucccuagcuccagccucuuccugggccagcca

SEQ ID NO: 500292 - RNA, 32 nt, Human
ucccuagcuccuggccccugccaggggcuuac

SEQ ID NO: 500293 - RNA, 32 nt, Human
ucccuagcugagccacgcugcccaugcagcag

SEQ ID NO: 500294 - RNA, 32 nt, Human
ucccuagcuggcggcucuauucugagcaguuc

SEQ ID NO: 500295 - RNA, 32 nt, Human
ucccuagcuguggcugagccaagauugcacuu

SEQ ID NO: 500296 - RNA, 32 nt, Human
ucccuagcuuggugccuucuccugcaggaguc

SEQ ID NO: 500297 - RNA, 21 nt, Human
ucccuaggcaggcccugcagg

SEQ ID NO: 500298 - RNA, 32 nt, Human
ucccuaggcccagggaggaagcaggucugaag

SEQ ID NO: 500299 - RNA, 32 nt, Human
ucccuaggcugaaggcagaaauuacuuaaauc

SEQ ID NO: 500300 - RNA, 32 nt, Human
ucccuaggcuggucccgaacgcuuggacccga

SEQ ID NO: 500301 - RNA, 32 nt, Human
ucccuagucuuguugccccaguuccuucugga

SEQ ID NO: 500302 - RNA, 32 nt, Human
ucccuaguggagcgcaggggaggcagaaguca

SEQ ID NO: 500303 - RNA, 32 nt, Human
ucccuagugucccuucagccugggcugaccag

SEQ ID NO: 500304 - RNA, 32 nt, Human
ucccuaguucaaaugauucuccugccucagcc

SEQ ID NO: 500305 - RNA, 32 nt, Human
ucccuaguucugaaagagacuugcugugugau

SEQ ID NO: 500306 - RNA, 32 nt, Human
ucccuaguuuccucuccuccagcccagaccca

SEQ ID NO: 500307 - RNA, 32 nt, Human
ucccuauaccauccacccucauggugucuucu

SEQ ID NO: 500308 - RNA, 32 nt, Human
ucccuauagagaaaccauugccaucauuguag

SEQ ID NO: 500309 - RNA, 32 nt, Human
ucccuauaggagcuggugagauugcagccugc

SEQ ID NO: 500310 - RNA, 32 nt, Human
ucccuaucacacaaaugauguuauuuuggacu

SEQ ID NO: 500311 - RNA, 32 nt, Human
ucccuaucaccuuuuguauuuuaaugcaauua

SEQ ID NO: 500312 - RNA, 32 nt, Human
ucccuaucagccccuccagcugccucaguuau

SEQ ID NO: 500313 - RNA, 32 nt, Human
ucccuaugaaagauuccacagagauguuuaug

SEQ ID NO: 500314 - RNA, 32 nt, Human
ucccuaugaggaggaagaucaacgaagucaca

SEQ ID NO: 500315 - RNA, 32 nt, Human
ucccuaugccacgguucccacccucccucacc

SEQ ID NO: 500316 - RNA, 32 nt, Human
ucccuauggaaagagacagaggguguuagaug

SEQ ID NO: 500317 - RNA, 32 nt, Human
ucccuaugggugccugaccugagggcagagac

SEQ ID NO: 500318 - RNA, 32 nt, Human
ucccuauggguucugugaccacugcuggacca

SEQ ID NO: 500319 - RNA, 32 nt, Human
ucccuauuugugaauucugggauuacugacuu

SEQ ID NO: 500320 - RNA, 32 nt, Human
ucccucaaacuaacaccccacacugcuuuggg

SEQ ID NO: 500321 - RNA, 32 nt, Human
ucccucaaagagagaucuuacuagaaccugua

SEQ ID NO: 500322 - RNA, 32 nt, Human
ucccucaagcccucaaguagguguuggagaga

SEQ ID NO: 500323 - RNA, 32 nt, Human
ucccucaaguuuauguucucaugcccucaauc

SEQ ID NO: 500324 - RNA, 32 nt, Human
ucccucaauaaauacauuacuguacucuggaa

SEQ ID NO: 500325 - RNA, 32 nt, Human
ucccucaaugagggaggaaggcagggacaccc

SEQ ID NO: 500326 - RNA, 32 nt, Human
ucccucacaaugcggaaagacagacuucuuca

SEQ ID NO: 500327 - RNA, 32 nt, Human
ucccucacagcccuuggcuggggcuccuccag

SEQ ID NO: 500328 - RNA, 32 nt, Human
ucccucacaggagccaccaccagccaccucuc

SEQ ID NO: 500329 - RNA, 32 nt, Human
ucccucaccagccucaccccuguggugggcuu

SEQ ID NO: 500330 - RNA, 32 nt, Human
ucccucacccacacacugggcgugaggagucu

SEQ ID NO: 500331 - RNA, 32 nt, Human
ucccucacccaccuucugucuagguucacuug

SEQ ID NO: 500332 - RNA, 32 nt, Human
ucccucacccccagcacagggggauucugagc

SEQ ID NO: 500333 - RNA, 32 nt, Human
ucccucaccccuguaagccagacaguuuguuc

SEQ ID NO: 500334 - RNA, 31 nt, Human
ucccucacccucucugggccucaguuucccc

SEQ ID NO: 500335 - RNA, 32 nt, Human
ucccucacccuugagucaaucuuuccauguca

SEQ ID NO: 500336 - RNA, 32 nt, Human
ucccucaccuccaaaagagcaaaaguacuuuc

SEQ ID NO: 500337 - RNA, 32 nt, Human
ucccucaccugccugccugucucccuccucug

SEQ ID NO: 500338 - RNA, 32 nt, Human
ucccucacgagguggggcucaggcuggaggag

SEQ ID NO: 500339 - RNA, 32 nt, Human
ucccucacgccucccuugauuuauguacuacc

SEQ ID NO: 500340 - RNA, 32 nt, Human
ucccucacuacagcuccagucauuaccagcgc

SEQ ID NO: 500341 - RNA, 32 nt, Human
ucccucacucaacacuuugaauacuuauuguu

SEQ ID NO: 500342 - RNA, 32 nt, Human
ucccucacucauucaaaccacucuguguagcc

SEQ ID NO: 500343 - RNA, 19 nt, Human
ucccucacucauuuagcca

SEQ ID NO: 500344 - RNA, 32 nt, Human
ucccucacugcuggacuggagcugggcuccug

SEQ ID NO: 500345 - RNA, 32 nt, Human
ucccucacuuaacccagacuugcucagcugag

SEQ ID NO: 500346 - RNA, 32 nt, Human
ucccucacuuccacgcaugggcucagaacaca

SEQ ID NO: 500347 - RNA, 32 nt, Human
ucccucacuucugcccuuucccuuccuccucc

SEQ ID NO: 500348 - RNA, 32 nt, Human
ucccucagacaggggcuggguggggaggcucu

SEQ ID NO: 500349 - RNA, 32 nt, Human
ucccucagacgcagccccaccaugguccuucg

SEQ ID NO: 500350 - RNA, 32 nt, Human
ucccucagagagaggugacaacagagggggua

SEQ ID NO: 500351 - RNA, 32 nt, Human
ucccucagagguggaggugaggggaaagugaa

SEQ ID NO: 500352 - RNA, 32 nt, Human
ucccucagaguguggguccuucaaacaaugua

SEQ ID NO: 500353 - RNA, 32 nt, Human
ucccucagccaaaucacuuuuccaucucuaaa

SEQ ID NO: 500354 - RNA, 32 nt, Human
ucccucagccacucugccccaagaugggccgu

SEQ ID NO: 500355 - RNA, 32 nt, Human
ucccucagccaggcaggguugcagcugagggc

SEQ ID NO: 500356 - RNA, 32 nt, Human
ucccucagcccauuugcaacucugccucuguu

SEQ ID NO: 500357 - RNA, 32 nt, Human
ucccucagccuccaggcuucagucuucccaac

SEQ ID NO: 500358 - RNA, 32 nt, Human
ucccucagccuccugaguagcuaggaccauag

SEQ ID NO: 500359 - RNA, 30 nt, Human
ucccucagccucucagugccuguccugacc

SEQ ID NO: 500360 - RNA, 27 nt, Human
ucccucagccugugcacccagcauaga

SEQ ID NO: 500361 - RNA, 32 nt, Human
ucccucagcucccagcccagcuuccaugcagc

SEQ ID NO: 500362 - RNA, 19 nt, Human
ucccucagcugagccugcu

SEQ ID NO: 500363 - RNA, 32 nt, Human
ucccucaggaacagcuccagcaccaauaaaga

SEQ ID NO: 500364 - RNA, 32 nt, Human
ucccucaggccugggcggugcagcuuccagag

SEQ ID NO: 500365 - RNA, 32 nt, Human
ucccucaggcuggagugcaguagcgugaucuc

SEQ ID NO: 500366 - RNA, 31 nt, Human
ucccucagggagacaaguuguagaggcaaca

SEQ ID NO: 500367 - RNA, 32 nt, Human
ucccucaggugccauucucccagggcuuaggc

SEQ ID NO: 500368 - RNA, 32 nt, Human
ucccucaguaaagccagaguccuaaaggccuc

SEQ ID NO: 500369 - RNA, 18 nt, Human
ucccucaucagacuguga

SEQ ID NO: 500370 - RNA, 32 nt, Human
ucccucauccuccccaauccccaaacuccuuc

SEQ ID NO: 500371 - RNA, 32 nt, Human
ucccucauccuggugggcacagagauaggcau

SEQ ID NO: 500372 - RNA, 32 nt, Human
ucccucaucuccauagaauaccagcuucugaa

SEQ ID NO: 500373 - RNA, 32 nt, Human
ucccucaucucuggcaggaaagauccacagcu

SEQ ID NO: 500374 - RNA, 32 nt, Human
ucccucaucuggacuccagcgguggcuucuug

SEQ ID NO: 500375 - RNA, 32 nt, Human
ucccucaucuuccuuuaccccucuucucuguc

SEQ ID NO: 500376 - RNA, 18 nt, Human
ucccucaugaaaaaugac

SEQ ID NO: 500377 - RNA, 32 nt, Human
ucccucauuaccccucugggcuuaguccaucc

SEQ ID NO: 500378 - RNA, 21 nt, Human
ucccuccaaaccucccagcca

SEQ ID NO: 500379 - RNA, 32 nt, Human
ucccuccaaggcagcaaagcagaaucgggagc

SEQ ID NO: 500380 - RNA, 32 nt, Human
ucccuccaaguggguccagauagggggcgccc

SEQ ID NO: 500381 - RNA, 32 nt, Human
ucccuccacaagggcuucugauauugucuuag

SEQ ID NO: 500382 - RNA, 32 nt, Human
ucccuccacaauaacagaaacacucccaggga

SEQ ID NO: 500383 - RNA, 21 nt, Human
ucccuccacacugcagccggg

SEQ ID NO: 500384 - RNA, 32 nt, Human
ucccuccacagccccugcuaucugccaucucc

SEQ ID NO: 500385 - RNA, 24 nt, Human
ucccuccaccccagaagcccugac

SEQ ID NO: 500386 - RNA, 32 nt, Human
ucccuccacccccauucugagucucuguccuu

SEQ ID NO: 500387 - RNA, 18 nt, Human
ucccuccacccccuccca

SEQ ID NO: 500388 - RNA, 32 nt, Human
ucccuccacuaguuggggccacugcacugagg

SEQ ID NO: 500389 - RNA, 32 nt, Human
ucccuccacuccucucaacugccucagcgauu

SEQ ID NO: 500390 - RNA, 20 nt, Human
ucccuccagacaguaccaca

SEQ ID NO: 500391 - RNA, 32 nt, Human
ucccuccagagcaacagcuucucaacaggcaa

SEQ ID NO: 500392 - RNA, 32 nt, Human
ucccuccagaggcugagaauugcuugaaccug

SEQ ID NO: 500393 - RNA, 32 nt, Human
ucccuccagcacaaccuguccccacacguggg

SEQ ID NO: 500394 - RNA, 32 nt, Human
ucccuccagcacguccccugcaccacggcaua

SEQ ID NO: 500395 - RNA, 32 nt, Human
ucccuccagcacugccgagguucucugccgag

SEQ ID NO: 500396 - RNA, 32 nt, Human
ucccuccagcugucaggccacgcccagggccc

SEQ ID NO: 500397 - RNA, 32 nt, Human
ucccuccaggauuguggaguuucuuuuacagc

SEQ ID NO: 500398 - RNA, 32 nt, Human
ucccuccagggaucaaaagcauccaaggaauu

SEQ ID NO: 500399 - RNA, 32 nt, Human
ucccuccagguggggcuggagccugcuggcgc

SEQ ID NO: 500400 - RNA, 32 nt, Human
ucccuccagucccuucuccaucccucccuuuu

SEQ ID NO: 500401 - RNA, 32 nt, Human
ucccuccaguggcaccuccuggaaacagucca

SEQ ID NO: 500402 - RNA, 32 nt, Human
ucccuccaguuccuccccagccccuucacuuc

SEQ ID NO: 500403 - RNA, 32 nt, Human
ucccuccaugccucucuggucagugugccuua

SEQ ID NO: 500404 - RNA, 32 nt, Human
ucccuccaugccuucagaguuaggagugagaa

SEQ ID NO: 500405 - RNA, 32 nt, Human
ucccuccaugggcugcuaacccuugccguagc

SEQ ID NO: 500406 - RNA, 32 nt, Human
ucccucccacacccagccuacuggguggacuc

SEQ ID NO: 500407 - RNA, 17 nt, Human
ucccucccaccccuccc

SEQ ID NO: 500408 - RNA, 19 nt, Human
ucccucccaccuccccaca

SEQ ID NO: 500409 - RNA, 32 nt, Human
ucccucccaccucugugaccucaggccuacgc

SEQ ID NO: 500410 - RNA, 32 nt, Human
ucccucccagaggugggaguaacugcugguag

SEQ ID NO: 500411 - RNA, 32 nt, Human
ucccucccagaugggcugggccuuugggcccu

SEQ ID NO: 500412 - RNA, 23 nt, Human
ucccucccagccagcagauuaca

SEQ ID NO: 500413 - RNA, 32 nt, Human
ucccucccauucugccccagcuuccuccagug

SEQ ID NO: 500414 - RNA, 32 nt, Human
ucccuccccagaggaggcgggagggugggcuc

SEQ ID NO: 500415 - RNA, 32 nt, Human
ucccuccccaggguguuccucccugugaccca

SEQ ID NO: 500416 - RNA, 32 nt, Human
ucccucccccuucacccacucccuccagaaca

SEQ ID NO: 500417 - RNA, 32 nt, Human
ucccucccccuucauaaaggccucccuuguca

SEQ ID NO: 500418 - RNA, 32 nt, Human
ucccucccccuuccucucuuccuuccuucccu

SEQ ID NO: 500419 - RNA, 32 nt, Human
ucccucccccuucuccuucacccccaaguguc

SEQ ID NO: 500420 - RNA, 32 nt, Human
ucccucccccuucucugucccccgccucucgc

SEQ ID NO: 500421 - RNA, 32 nt, Human
ucccuccccucccucucgcuccuuccuuuccg

SEQ ID NO: 500422 - RNA, 32 nt, Human
ucccuccccucuccacccaccccacagcaggc

SEQ ID NO: 500423 - RNA, 32 nt, Human
ucccuccccugccugguucccagggcaggcug

SEQ ID NO: 500424 - RNA, 32 nt, Human
ucccuccccuugccugugccaggugaggucag

SEQ ID NO: 500425 - RNA, 21 nt, Human
ucccuccccuuuaugcuuaau

SEQ ID NO: 500426 - RNA, 21 nt, Human
ucccucccgccgcagcgcggg

SEQ ID NO: 500427 - RNA, 32 nt, Human
ucccucccuccagaugcagaggcuggggaguc

SEQ ID NO: 500428 - RNA, 32 nt, Human
ucccucccuccccucaauacccucaguacuga

SEQ ID NO: 500429 - RNA, 20 nt, Human
ucccucccucccucuucugc

SEQ ID NO: 500430 - RNA, 32 nt, Human
ucccucccuccugugcugcugcuuuuugaucu

SEQ ID NO: 500431 - RNA, 32 nt, Human
ucccucccucgcgcaucuccagccuaaggguu

SEQ ID NO: 500432 - RNA, 32 nt, Human
ucccucccucguuuccagcuccugggcgaauc

SEQ ID NO: 500433 - RNA, 32 nt, Human
ucccucccugcccugcugaauccuaaagcugu

SEQ ID NO: 500434 - RNA, 32 nt, Human
ucccucccugucuuccugcucagcuuucuccc

SEQ ID NO: 500435 - RNA, 32 nt, Human
ucccucccuuccccuccccuucuaccuccucc

SEQ ID NO: 500436 - RNA, 32 nt, Human
ucccucccuuucuccuaaagccugguccccag

SEQ ID NO: 500437 - RNA, 32 nt, Human
ucccuccgaagaggaguccgaagaggacagcg

SEQ ID NO: 500438 - RNA, 32 nt, Human
ucccuccgcggcgggcccugcccacaccuccu

SEQ ID NO: 500439 - RNA, 32 nt, Human
ucccuccggcccccucccuggaguccacagcg

SEQ ID NO: 500440 - RNA, 32 nt, Human
ucccuccggccggcaggcugggcgcagggggc

SEQ ID NO: 500441 - RNA, 32 nt, Human
ucccuccggccgguccccagcugcaguggcug

SEQ ID NO: 500442 - RNA, 32 nt, Human
ucccuccgucccacuccacuccaggcugccgg

SEQ ID NO: 500443 - RNA, 32 nt, Human
ucccuccucacagauaaaugaaaaguaaguau

SEQ ID NO: 500444 - RNA, 32 nt, Human
ucccuccucacaucccucccacccucggucau

SEQ ID NO: 500445 - RNA, 32 nt, Human
ucccuccucaccagcucuccagccaggacgau

SEQ ID NO: 500446 - RNA, 32 nt, Human
ucccuccucaucaucaggcagauacagagcac

SEQ ID NO: 500447 - RNA, 32 nt, Human
ucccuccuccacccuccacucauuuuguucuu

SEQ ID NO: 500448 - RNA, 32 nt, Human
ucccuccuccacugcagaacuccaguaaaauc

SEQ ID NO: 500449 - RNA, 32 nt, Human
ucccuccuccaggcauccuggugccugcauac

SEQ ID NO: 500450 - RNA, 32 nt, Human
ucccuccucccaggcuggugugagugugcgug

SEQ ID NO: 500451 - RNA, 32 nt, Human
ucccuccucccagggguucagauguggugggg

SEQ ID NO: 500452 - RNA, 32 nt, Human
ucccuccuccccgccugcagcucucuuuaauu

SEQ ID NO: 500453 - RNA, 32 nt, Human
ucccuccuccuaugucuccauccuccaaaucu

SEQ ID NO: 500454 - RNA, 32 nt, Human
ucccuccuccuccccucucccucccccucucc

SEQ ID NO: 500455 - RNA, 32 nt, Human
ucccuccuccucuuucaccuucauacaagcag

SEQ ID NO: 500456 - RNA, 32 nt, Human
ucccuccuccugcccccaccucaggccucacu

SEQ ID NO: 500457 - RNA, 32 nt, Human
ucccuccucuaaaccacuuugaugaggaccaa

SEQ ID NO: 500458 - RNA, 32 nt, Human
ucccuccucuacucugaccuggggccccagca

SEQ ID NO: 500459 - RNA, 32 nt, Human
ucccuccucucccucacucauguccccuccca

SEQ ID NO: 500460 - RNA, 32 nt, Human
ucccuccucugccucuguucgcauaguaagaa

SEQ ID NO: 500461 - RNA, 32 nt, Human
ucccuccucugucaccaccagccucuccaagc

SEQ ID NO: 500462 - RNA, 32 nt, Human
ucccuccucuucucagagaccucccuuuccaa

SEQ ID NO: 500463 - RNA, 32 nt, Human
ucccuccugacccagggauggaggcuuugagu

SEQ ID NO: 500464 - RNA, 32 nt, Human
ucccuccugcacaccuggccuccugggccucc

SEQ ID NO: 500465 - RNA, 32 nt, Human
ucccuccugcagccucugcucagaacgcccuu

SEQ ID NO: 500466 - RNA, 32 nt, Human
ucccuccugcagccugcccccuaggcagcucg

SEQ ID NO: 500467 - RNA, 32 nt, Human
ucccuccugcaucuccccuggaguguucacuu

SEQ ID NO: 500468 - RNA, 32 nt, Human
ucccuccugccgacuccuggguugagcuguug

SEQ ID NO: 500469 - RNA, 32 nt, Human
ucccuccugccugcccgccagccugaccugug

SEQ ID NO: 500470 - RNA, 32 nt, Human
ucccuccugccugugggagcugcaccguggag

SEQ ID NO: 500471 - RNA, 32 nt, Human
ucccuccugcgcccgggcgcccccagcggguu

SEQ ID NO: 500472 - RNA, 32 nt, Human
ucccuccuggggauucuggggaaugggaugca

SEQ ID NO: 500473 - RNA, 32 nt, Human
ucccuccuguagggcacaaggccaggcugccu

SEQ ID NO: 500474 - RNA, 32 nt, Human
ucccuccuguagucccagcuacuugggaggcu

SEQ ID NO: 500475 - RNA, 32 nt, Human
ucccuccuguggccuccacugcaggcaggaca

SEQ ID NO: 500476 - RNA, 32 nt, Human
ucccuccuuacaaccaccgccaccuccuagug

SEQ ID NO: 500477 - RNA, 32 nt, Human
ucccuccuucccuuccccuuccuuccuuccuu

SEQ ID NO: 500478 - RNA, 32 nt, Human
ucccuccuuccuuccacucuccuuccuuuugc

SEQ ID NO: 500479 - RNA, 32 nt, Human
ucccuccuucucccucuccuucacacuacagu

SEQ ID NO: 500480 - RNA, 28 nt, Human
ucccuccuucuugcugccuccuccuccu

SEQ ID NO: 500481 - RNA, 32 nt, Human
ucccuccuugccucccccuccagccucccacu

SEQ ID NO: 500482 - RNA, 32 nt, Human
ucccucgaccucucucuucucacuuucuuccc

SEQ ID NO: 500483 - RNA, 32 nt, Human
ucccucgaguuguggugugaagagauaaauca

SEQ ID NO: 500484 - RNA, 32 nt, Human
ucccucgcaaguagcugggauuacaggcgccu

SEQ ID NO: 500485 - RNA, 32 nt, Human
ucccucgcaccacgugcccuccuggccgcgcc

SEQ ID NO: 500486 - RNA, 32 nt, Human
ucccucgcucaccccauccucucucccgcccc

SEQ ID NO: 500487 - RNA, 32 nt, Human
ucccucgcucucucccccuucucuccccuucu

SEQ ID NO: 500488 - RNA, 32 nt, Human
ucccucgcuguucaacugcuagcaugauuugu

SEQ ID NO: 500489 - RNA, 32 nt, Human
ucccucgcuguugaggccaccaugccuuacug

SEQ ID NO: 500490 - RNA, 32 nt, Human
ucccucggagacgcagguugcaguggacauug

SEQ ID NO: 500491 - RNA, 31 nt, Human
ucccucggcuucucugggucuagugcgggug

SEQ ID NO: 500492 - RNA, 32 nt, Human
ucccucgggcugcggacucugccuccuggguc

SEQ ID NO: 500493 - RNA, 32 nt, Human
ucccucggggccugagaagaucugguccucaa

SEQ ID NO: 500494 - RNA, 32 nt, Human
ucccucggucgggggucgaggcugcuuccguu

SEQ ID NO: 500495 - RNA, 18 nt, Human
ucccucgucgccgccucg

SEQ ID NO: 500496 - RNA, 32 nt, Human
ucccucgugcugucucuugccugucccaccug

SEQ ID NO: 500497 - RNA, 32 nt, Human
ucccucuaagaacaugacacugagaugaucaa

SEQ ID NO: 500498 - RNA, 32 nt, Human
ucccucuacacgcaaaucccaggcugggggau

SEQ ID NO: 500499 - RNA, 21 nt, Human
ucccucuacccagauugugaa

SEQ ID NO: 500500 - RNA, 32 nt, Human
ucccucucaaaaccagaacaucaacagugcug

SEQ ID NO: 500501 - RNA, 32 nt, Human
ucccucucaaauaccaugauguaucaugggcu

SEQ ID NO: 500502 - RNA, 32 nt, Human
ucccucucaagcucugcccuucccagcccagc

SEQ ID NO: 500503 - RNA, 19 nt, Human
ucccucucaaguguuccac

SEQ ID NO: 500504 - RNA, 32 nt, Human
ucccucucacacugccucagugcucacaaccu

SEQ ID NO: 500505 - RNA, 32 nt, Human
ucccucucagaccacuggaaugcaaguccuuc

SEQ ID NO: 500506 - RNA, 32 nt, Human
ucccucucaggcagagagguugccgagugauu

SEQ ID NO: 500507 - RNA, 32 nt, Human
ucccucuccagaaguccauuggaauauuaagc

SEQ ID NO: 500508 - RNA, 32 nt, Human
ucccucuccaucccaucuuugcagccucuugg

SEQ ID NO: 500509 - RNA, 32 nt, Human
ucccucucccagccuccaccccagggucugca

SEQ ID NO: 500510 - RNA, 32 nt, Human
ucccucucccagcugucagugcuuuuggacuu

SEQ ID NO: 500511 - RNA, 32 nt, Human
ucccucucccuccuccauuccucucucccugc

SEQ ID NO: 500512 - RNA, 32 nt, Human
ucccucucccucucccacucucccucucuuuc

SEQ ID NO: 500513 - RNA, 18 nt, Human
ucccucuccggggcuccu

SEQ ID NO: 500514 - RNA, 32 nt, Human
ucccucuccuaggagcacaggaaauggugcag

SEQ ID NO: 500515 - RNA, 32 nt, Human
ucccucuccucccagcccaugguaaccagcau

SEQ ID NO: 500516 - RNA, 32 nt, Human
ucccucuccucccugagcaccugcugcugcga

SEQ ID NO: 500517 - RNA, 32 nt, Human
ucccucuccuccucagcuacuuauuccccacc

SEQ ID NO: 500518 - RNA, 32 nt, Human
ucccucuccuccuucccccucaucuccccuuc

SEQ ID NO: 500519 - RNA, 22 nt, Human
ucccucuccugccaccucucca

SEQ ID NO: 500520 - RNA, 32 nt, Human
ucccucuccuuuccuucuucuucccucagauu

SEQ ID NO: 500521 - RNA, 17 nt, Human
ucccucucuaccugcca

SEQ ID NO: 500522 - RNA, 32 nt, Human
ucccucucucaucccuuccccuucccuuccuu

SEQ ID NO: 500523 - RNA, 32 nt, Human
ucccucucuccccucccccuccaguccacgac

SEQ ID NO: 500524 - RNA, 32 nt, Human
ucccucucuccccuggcccgcaaaguuuuggc

SEQ ID NO: 500525 - RNA, 32 nt, Human
ucccucucuccuccucucccuggcuuuguguu

SEQ ID NO: 500526 - RNA, 32 nt, Human
ucccucucuccuccucuuccucucucuggacg

SEQ ID NO: 500527 - RNA, 32 nt, Human
ucccucucucucccucucucucccucucucuu

SEQ ID NO: 500528 - RNA, 18 nt, Human
ucccucucucucuucugc

SEQ ID NO: 500529 - RNA, 32 nt, Human
ucccucucucucuucugcuucucccucuggcu

SEQ ID NO: 500530 - RNA, 32 nt, Human
ucccucucucuuccuuuuccugccgucuuucu

SEQ ID NO: 500531 - RNA, 32 nt, Human
ucccucucucuuucuucuuucuccugccaucc

SEQ ID NO: 500532 - RNA, 32 nt, Human
ucccucucugcuccuucucucuuccacagguc

SEQ ID NO: 500533 - RNA, 32 nt, Human
ucccucucugcucuccugucccuugagcccuu

SEQ ID NO: 500534 - RNA, 32 nt, Human
ucccucucuggaccucaguuucccucuguaua

SEQ ID NO: 500535 - RNA, 32 nt, Human
ucccucucuggcccccuggccuggggaaagcc

SEQ ID NO: 500536 - RNA, 32 nt, Human
ucccucucuggcggccucugcagcagcacagc

SEQ ID NO: 500537 - RNA, 32 nt, Human
ucccucucugucuaggugucaugguucugugu

SEQ ID NO: 500538 - RNA, 32 nt, Human
ucccucucuuccaaggagaugucagcugagcu

SEQ ID NO: 500539 - RNA, 32 nt, Human
ucccucucuuccaccuccccaggcugggcucc

SEQ ID NO: 500540 - RNA, 32 nt, Human
ucccucucuucccauucuccuuuuaaaucucu

SEQ ID NO: 500541 - RNA, 32 nt, Human
ucccucugaagaucucuuaggagugcaccagu

SEQ ID NO: 500542 - RNA, 19 nt, Human
ucccucugaagugcagugg

SEQ ID NO: 500543 - RNA, 32 nt, Human
ucccucugagcaguuuccccacugugucuguc

SEQ ID NO: 500544 - RNA, 20 nt, Human
ucccucugaguggggccagg

SEQ ID NO: 500545 - RNA, 32 nt, Human
ucccucugcacccucuggaacccuggcccaau

SEQ ID NO: 500546 - RNA, 32 nt, Human
ucccucugcaggagacucuugcagugacggaa

SEQ ID NO: 500547 - RNA, 32 nt, Human
ucccucugcaggcugggggcagaggccugagg

SEQ ID NO: 500548 - RNA, 32 nt, Human
ucccucugcaggucacagacacacagagccca

SEQ ID NO: 500549 - RNA, 32 nt, Human
ucccucugcaugggaugugacccccuccucua

SEQ ID NO: 500550 - RNA, 19 nt, Human
ucccucugccaagccugcu

SEQ ID NO: 500551 - RNA, 32 nt, Human
ucccucugccaaggccugugccagagggguug

SEQ ID NO: 500552 - RNA, 32 nt, Human
ucccucugcccaggugggggccguggcuggaa

SEQ ID NO: 500553 - RNA, 32 nt, Human
ucccucugccuagaacacucucucccaaguau

SEQ ID NO: 500554 - RNA, 15 nt, Human
ucccucugccugcca

SEQ ID NO: 500555 - RNA, 32 nt, Human
ucccucugcgggcuucucuugcucugagccuc

SEQ ID NO: 500556 - RNA, 32 nt, Human
ucccucugcugacccccugcagccuggagcca

SEQ ID NO: 500557 - RNA, 32 nt, Human
ucccucugcugcugccuuggcuuccuccuaau

SEQ ID NO: 500558 - RNA, 32 nt, Human
ucccucugcuggucugugcuggucucagaagg

SEQ ID NO: 500559 - RNA, 32 nt, Human
ucccucugcuguguucccacagacagaaacgc

SEQ ID NO: 500560 - RNA, 32 nt, Human
ucccucugcuucuuuucucuucugcccuccuu

SEQ ID NO: 500561 - RNA, 32 nt, Human
ucccucuggagcuuccaccuggccagggagga

SEQ ID NO: 500562 - RNA, 32 nt, Human
ucccucuggaguuuccuucaucugccccacac

SEQ ID NO: 500563 - RNA, 32 nt, Human
ucccucuggauccuuuucuugacaagcaguca

SEQ ID NO: 500564 - RNA, 32 nt, Human
ucccucuggcucccgggucacucuuguggccc

SEQ ID NO: 500565 - RNA, 32 nt, Human
ucccucugguaacaucuucccaccacacauau

SEQ ID NO: 500566 - RNA, 29 nt, Human
ucccucuggugucugccaucccccucccu

SEQ ID NO: 500567 - RNA, 32 nt, Human
ucccucuguaaaguuggagugcaggggacaag

SEQ ID NO: 500568 - RNA, 32 nt, Human
ucccucuguaauuucaaaaugaaugaaauuca

SEQ ID NO: 500569 - RNA, 32 nt, Human
ucccucuguaccaucugcuguggaaugcagga

SEQ ID NO: 500570 - RNA, 32 nt, Human
ucccucuguauacuuuaaagcucucuacaguc

SEQ ID NO: 500571 - RNA, 32 nt, Human
ucccucuguauaugugugugggaugggaagug

SEQ ID NO: 500572 - RNA, 32 nt, Human
ucccucugucaccaggcuggagugcaguggug

SEQ ID NO: 500573 - RNA, 32 nt, Human
ucccucuguccucugucagccuggccugaccc

SEQ ID NO: 500574 - RNA, 32 nt, Human
ucccucuguccugggaauuccucuuuguggca

SEQ ID NO: 500575 - RNA, 32 nt, Human
ucccucugucugucugucuaucuacuugucug

SEQ ID NO: 500576 - RNA, 32 nt, Human
ucccucugugccaggccagagugcaguggugc

SEQ ID NO: 500577 - RNA, 20 nt, Human
ucccucugugguugcugcau

SEQ ID NO: 500578 - RNA, 32 nt, Human
ucccucuguugacuggucaucuggaccaucgu

SEQ ID NO: 500579 - RNA, 32 nt, Human
ucccucuuaacguuccccuccugguuuugccu

SEQ ID NO: 500580 - RNA, 32 nt, Human
ucccucuuccauuccucgagcuacuccagggc

SEQ ID NO: 500581 - RNA, 32 nt, Human
ucccucuucccuccucccuccauccuuguuuu

SEQ ID NO: 500582 - RNA, 32 nt, Human
ucccucuuccuugguucccucuucccuggucc

SEQ ID NO: 500583 - RNA, 32 nt, Human
ucccucuucgguguucuucuucucuucucugc

SEQ ID NO: 500584 - RNA, 32 nt, Human
ucccucuucuccccagccuccuccagggcugc

SEQ ID NO: 500585 - RNA, 32 nt, Human
ucccucuucucccccaguucccugggcaauca

SEQ ID NO: 500586 - RNA, 32 nt, Human
ucccucuucuccccucccccuccucaccgucu

SEQ ID NO: 500587 - RNA, 32 nt, Human
ucccucuucucuugccugaucaucuaguuuuu

SEQ ID NO: 500588 - RNA, 32 nt, Human
ucccucuucuucuuuuucauccuucugucucu

SEQ ID NO: 500589 - RNA, 32 nt, Human
ucccucuucuuucuuacuuccauaaguaugua

SEQ ID NO: 500590 - RNA, 32 nt, Human
ucccucuugcugucucuguuucucauucucuu

SEQ ID NO: 500591 - RNA, 32 nt, Human
ucccucuuguagagccacaggguuaaaaggga

SEQ ID NO: 500592 - RNA, 32 nt, Human
ucccucuuguuacccaggcuggagugcagugg

SEQ ID NO: 500593 - RNA, 32 nt, Human
ucccucuuguugcccaggcuggagugcaacgg

SEQ ID NO: 500594 - RNA, 32 nt, Human
ucccucuuguugcccaggcuggagugcaaugg

SEQ ID NO: 500595 - RNA, 32 nt, Human
ucccucuuucccacccuccaccucucacgggc

SEQ ID NO: 500596 - RNA, 32 nt, Human
ucccucuuuccuuacaccuuguggaucaugug

SEQ ID NO: 500597 - RNA, 32 nt, Human
ucccucuuuccuuccuuccuccuggucuguuc

SEQ ID NO: 500598 - RNA, 32 nt, Human
ucccucuuucuuucccucccucccucccuccc

SEQ ID NO: 500599 - RNA, 32 nt, Human
ucccucuuugccugugugagcaucucugugua

SEQ ID NO: 500600 - RNA, 32 nt, Human
ucccucuuuuucucccuucucuggggcgcagg

SEQ ID NO: 500601 - RNA, 24 nt, Human
ucccugaaauaugguagccuggcc

SEQ ID NO: 500602 - RNA, 32 nt, Human
ucccugaacauacagugcccuuuacacuugau

SEQ ID NO: 500603 - RNA, 32 nt, Human
ucccugaacucuuggggcugagcugcaaccac

SEQ ID NO: 500604 - RNA, 32 nt, Human
ucccugaagagugcccuggucacagcacccuu

SEQ ID NO: 500605 - RNA, 32 nt, Human
ucccugaagccaggccacccagccaucagcag

SEQ ID NO: 500606 - RNA, 32 nt, Human
ucccugaagcgaguacacauugccagagccca

SEQ ID NO: 500607 - RNA, 32 nt, Human
ucccugaaggggcugcugacugccccagaauc

SEQ ID NO: 500608 - RNA, 32 nt, Human
ucccugaaucaccgacuggaggagaguuaccu

SEQ ID NO: 500609 - RNA, 32 nt, Human
ucccugaauccauggagguguucuguuugggg

SEQ ID NO: 500610 - RNA, 32 nt, Human
ucccugaaugagagcacagaggcauugaauuc

SEQ ID NO: 500611 - RNA, 32 nt, Human
ucccugacaaaacuaaagaacucuccuauuca

SEQ ID NO: 500612 - RNA, 31 nt, Human
ucccugacaaugucuccuacucaagcagggc

SEQ ID NO: 500613 - RNA, 23 nt, Human
ucccugacaauguggccuggcca

SEQ ID NO: 500614 - RNA, 32 nt, Human
ucccugacaccucugcacucccuugggcagag

SEQ ID NO: 500615 - RNA, 21 nt, Human
ucccugacacugcggggcuug

SEQ ID NO: 500616 - RNA, 18 nt, Human
ucccugaccagacuggaa

SEQ ID NO: 500617 - RNA, 32 nt, Human
ucccugacccagcaucagaaaacacauauugg

SEQ ID NO: 500618 - RNA, 32 nt, Human
ucccugacccagggcuggugaggaguggggcc

SEQ ID NO: 500619 - RNA, 24 nt, Human
ucccugaccuagccauggcacaga

SEQ ID NO: 500620 - RNA, 27 nt, Human
ucccugaccugagaacccuggggccug

SEQ ID NO: 500621 - RNA, 32 nt, Human
ucccugaccugcaccagguggcaccaaggguc

SEQ ID NO: 500622 - RNA, 32 nt, Human
ucccugaccuggagaggguuagaaagaaccaa

SEQ ID NO: 500623 - RNA, 32 nt, Human
ucccugacggcccuugcugccugcauggcuga

SEQ ID NO: 500624 - RNA, 32 nt, Human
ucccugacuccuggugcccucucccuuugucc

SEQ ID NO: 500625 - RNA, 21 nt, Human
ucccugacucucugugaccug

SEQ ID NO: 500626 - RNA, 32 nt, Human
ucccugacuguaaaugcuccauuuuuaaaguu

SEQ ID NO: 500627 - RNA, 32 nt, Human
ucccugacuucagaagugaagccacauaccuu

SEQ ID NO: 500628 - RNA, 32 nt, Human
ucccugagaaaggagaaaaagaugggauugcc

SEQ ID NO: 500629 - RNA, 32 nt, Human
ucccugagacccauaagguucaucuuauggga

SEQ ID NO: 500630 - RNA, 32 nt, Human
ucccugagacgggagucaaaaucagcaucccu

SEQ ID NO: 500631 - RNA, 32 nt, Human
ucccugagagacaugguuuccaugagcacagu

SEQ ID NO: 500632 - RNA, 31 nt, Human
ucccugagagucucuguuucaucaggacauu

SEQ ID NO: 500633 - RNA, 32 nt, Human
ucccugagauggauaccucuaccugcauggcc

SEQ ID NO: 500634 - RNA, 32 nt, Human
ucccugagcaggcaaggagcucuugcauuugc

SEQ ID NO: 500635 - RNA, 32 nt, Human
ucccugagccagccccagcagagacuggagag

SEQ ID NO: 500636 - RNA, 32 nt, Human
ucccugagccaguggcauccugccugggcccc

SEQ ID NO: 500637 - RNA, 22 nt, Human
ucccugagccccuuggcacuua

SEQ ID NO: 500638 - RNA, 32 nt, Human
ucccugagccgccugccaccucccacuccuga

SEQ ID NO: 500639 - RNA, 32 nt, Human
ucccugagccucuaguuccucacucuuccuuu

SEQ ID NO: 500640 - RNA, 32 nt, Human
ucccugagccucugaaagugaacuccccgacc

SEQ ID NO: 500641 - RNA, 32 nt, Human
ucccugagcuguucuucugccccauacugaag

SEQ ID NO: 500642 - RNA, 32 nt, Human
ucccugagcuuucuggcuucaggcugggaggc

SEQ ID NO: 500643 - RNA, 32 nt, Human
ucccugaggcagagguugcagugagcugagau

SEQ ID NO: 500644 - RNA, 32 nt, Human
ucccugaggcagcaggagcugguguguacugg

SEQ ID NO: 500645 - RNA, 32 nt, Human
ucccugaggcgaggguagcgggugcauggcgc

SEQ ID NO: 500646 - RNA, 32 nt, Human
ucccugaggcugccucugggccuguggaucca

SEQ ID NO: 500647 - RNA, 32 nt, Human
ucccugaggcuggacuccagaucugcaccgcc

SEQ ID NO: 500648 - RNA, 32 nt, Human
ucccugaguagcugggacuacaggcacacacc

SEQ ID NO: 500649 - RNA, 32 nt, Human
ucccugagucuuguccuccugagaggaagccc

SEQ ID NO: 500650 - RNA, 32 nt, Human
ucccugagugccuguguagcuggggaugggga

SEQ ID NO: 500651 - RNA, 32 nt, Human
ucccugagugcugggaggaggcugcaguacuc

SEQ ID NO: 500652 - RNA, 32 nt, Human
ucccugauagccacuuacuuuccuauccuaaa

SEQ ID NO: 500653 - RNA, 32 nt, Human
ucccugaucaguccucccagacugcacuggag

SEQ ID NO: 500654 - RNA, 32 nt, Human
ucccugauccccaggcuuggggcaauugguaa

SEQ ID NO: 500655 - RNA, 21 nt, Human
ucccugaucucaugggacuua

SEQ ID NO: 500656 - RNA, 31 nt, Human
ucccugaugaaggcuccugaggcccucgacc

SEQ ID NO: 500657 - RNA, 32 nt, Human
ucccugaugccugcuuucaguugaggguuggg

SEQ ID NO: 500658 - RNA, 32 nt, Human
ucccugaugucaggaugccuuuguuaggaucu

SEQ ID NO: 500659 - RNA, 32 nt, Human
ucccugauuacauaaugcucuucugagcacuu

SEQ ID NO: 500660 - RNA, 32 nt, Human
ucccugauugucaagaccuacucugaagaucu

SEQ ID NO: 500661 - RNA, 32 nt, Human
ucccugauuuucaaacugguugccugcaucuu

SEQ ID NO: 500662 - RNA, 27 nt, Human
ucccugauuuuucuuucaugggacuug

SEQ ID NO: 500663 - RNA, 32 nt, Human
ucccugcacaugcaggcaugcaugcacauacg

SEQ ID NO: 500664 - RNA, 32 nt, Human
ucccugcacaugcccuuuugccugugucaugu

SEQ ID NO: 500665 - RNA, 32 nt, Human
ucccugcaccacucucuucauccugggggcuc

SEQ ID NO: 500666 - RNA, 32 nt, Human
ucccugcaccucugccccaaggcugcccggcg

SEQ ID NO: 500667 - RNA, 32 nt, Human
ucccugcacuguucccugcacuguuccccaug

SEQ ID NO: 500668 - RNA, 32 nt, Human
ucccugcagauucaugaagaugagcauccgga

SEQ ID NO: 500669 - RNA, 32 nt, Human
ucccugcagcagaggcagaggcggcggcggca

SEQ ID NO: 500670 - RNA, 32 nt, Human
ucccugcagccaccguucagagcccgggcgag

SEQ ID NO: 500671 - RNA, 32 nt, Human
ucccugcagccccuccuuagcccaugucaugc

SEQ ID NO: 500672 - RNA, 32 nt, Human
ucccugcagccucaacaccacccugcugucca

SEQ ID NO: 500673 - RNA, 32 nt, Human
ucccugcagccuggcuggcuuuucuucuucuu

SEQ ID NO: 500674 - RNA, 32 nt, Human
ucccugcagcucagcacccccagccuggugcu

SEQ ID NO: 500675 - RNA, 32 nt, Human
ucccugcagcugagccugucucucacgggacc

SEQ ID NO: 500676 - RNA, 21 nt, Human
ucccugcaggccacacuccaa

SEQ ID NO: 500677 - RNA, 22 nt, Human
ucccugcaggccgcacugccaa

SEQ ID NO: 500678 - RNA, 32 nt, Human
ucccugcaggucucggggcuccuggguugcuu

SEQ ID NO: 500679 - RNA, 32 nt, Human
ucccugcagguuaagaauccacacaaccaagu

SEQ ID NO: 500680 - RNA, 32 nt, Human
ucccugcagucaucucuuugcacuuuguuacu

SEQ ID NO: 500681 - RNA, 22 nt, Human
ucccugcaguccugggggccua

SEQ ID NO: 500682 - RNA, 32 nt, Human
ucccugcagugucacuguuaaagcaacaguca

SEQ ID NO: 500683 - RNA, 32 nt, Human
ucccugcaucauacccaggaacugccagcucc

SEQ ID NO: 500684 - RNA, 32 nt, Human
ucccugcaucuugguccuuguccccuuggcca

SEQ ID NO: 500685 - RNA, 18 nt, Human
ucccugcaugacugugaa

SEQ ID NO: 500686 - RNA, 32 nt, Human
ucccugcauggcccgaugaccugcacuccugu

SEQ ID NO: 500687 - RNA, 32 nt, Human
ucccugcauggggaucuguaaagagaaaguuu

SEQ ID NO: 500688 - RNA, 32 nt, Human
ucccugcauuagugccugguuacuggguaccu

SEQ ID NO: 500689 - RNA, 32 nt, Human
ucccugccaaccuccuccucccugcccagccu

SEQ ID NO: 500690 - RNA, 32 nt, Human
ucccugccaccaggaugcccaagaggaagguc

SEQ ID NO: 500691 - RNA, 32 nt, Human
ucccugccaccaguuuucaccuagccagucuu

SEQ ID NO: 500692 - RNA, 32 nt, Human
ucccugccaccauccuccuuccugggcuccag

SEQ ID NO: 500693 - RNA, 32 nt, Human
ucccugccacgcccuggcaggacacaggcacu

SEQ ID NO: 500694 - RNA, 32 nt, Human
ucccugccacuguggguggaagggcccucuuc

SEQ ID NO: 500695 - RNA, 32 nt, Human
ucccugccagucucccccucuucugccagccu

SEQ ID NO: 500696 - RNA, 32 nt, Human
ucccugccaucagguugcugggaguggagaug

SEQ ID NO: 500697 - RNA, 32 nt, Human
ucccugccaucuggcccuucccuuugucucag

SEQ ID NO: 500698 - RNA, 32 nt, Human
ucccugccauuuuucacaccucucuuaauuuu

SEQ ID NO: 500699 - RNA, 32 nt, Human
ucccugcccacucugggccuugcugacaccug

SEQ ID NO: 500700 - RNA, 32 nt, Human
ucccugcccagccagggacuucuacucugcaa

SEQ ID NO: 500701 - RNA, 32 nt, Human
ucccugcccagccuguggugcuugaaacguuu

SEQ ID NO: 500702 - RNA, 32 nt, Human
ucccugcccaggcuggagcuggccaauucucc

SEQ ID NO: 500703 - RNA, 21 nt, Human
ucccugccccaaccggagagg

SEQ ID NO: 500704 - RNA, 32 nt, Human
ucccugcccccaggugucuacacaccugugua

SEQ ID NO: 500705 - RNA, 32 nt, Human
ucccugcccccgaccuggaguggauaagacaa

SEQ ID NO: 500706 - RNA, 32 nt, Human
ucccugcccccgggggcuucacaugccacugg

SEQ ID NO: 500707 - RNA, 32 nt, Human
ucccugccccuccagauugccuggugaucuau

SEQ ID NO: 500708 - RNA, 32 nt, Human
ucccugccccucccccugucuuuccacucugu

SEQ ID NO: 500709 - RNA, 32 nt, Human
ucccugccccucuccccuucacaccugcugga

SEQ ID NO: 500710 - RNA, 31 nt, Human
ucccugccccucucugccuguucuggacugu

SEQ ID NO: 500711 - RNA, 32 nt, Human
ucccugcccgcuggucaagaccacgccuggga

SEQ ID NO: 500712 - RNA, 32 nt, Human
ucccugcccuccagucccuccugcuuuuuagc

SEQ ID NO: 500713 - RNA, 32 nt, Human
ucccugcccucugcucucacaggcuggggaug

SEQ ID NO: 500714 - RNA, 32 nt, Human
ucccugcccugagacuguucugaggcccuggg

SEQ ID NO: 500715 - RNA, 32 nt, Human
ucccugcccugccuccagccuugguggcuccu

SEQ ID NO: 500716 - RNA, 32 nt, Human
ucccugcccugcucugcuagggagagaacgcc

SEQ ID NO: 500717 - RNA, 32 nt, Human
ucccugccuaucuccuccgcccgccuucuccu

SEQ ID NO: 500718 - RNA, 32 nt, Human
ucccugccuaugcugacauuccauuguagaaa

SEQ ID NO: 500719 - RNA, 32 nt, Human
ucccugccucagccucaugaauagcugggauu

SEQ ID NO: 500720 - RNA, 32 nt, Human
ucccugccuccccauuccccuggcugcacuuc

SEQ ID NO: 500721 - RNA, 24 nt, Human
ucccugccuccuccucucuucugc

SEQ ID NO: 500722 - RNA, 21 nt, Human
ucccugccucucaauucgcug

SEQ ID NO: 500723 - RNA, 32 nt, Human
ucccugccucuccugccucccuucccacuucc

SEQ ID NO: 500724 - RNA, 32 nt, Human
ucccugccugagggucacaguaccuugaaugg

SEQ ID NO: 500725 - RNA, 32 nt, Human
ucccugccugccugcugacccguggccccagc

SEQ ID NO: 500726 - RNA, 32 nt, Human
ucccugccugcucuuuaggccuuuggcaccca

SEQ ID NO: 500727 - RNA, 32 nt, Human
ucccugccuggaccauucccagcucccugcuc

SEQ ID NO: 500728 - RNA, 32 nt, Human
ucccugccuggaucucaccagcacuuucccuc

SEQ ID NO: 500729 - RNA, 32 nt, Human
ucccugccuggaucucacgagcacuuucccuc

SEQ ID NO: 500730 - RNA, 32 nt, Human
ucccugccuguggccccuccccugcagacgga

SEQ ID NO: 500731 - RNA, 32 nt, Human
ucccugccuucuugcccugcccucucuguagc

SEQ ID NO: 500732 - RNA, 32 nt, Human
ucccugccuugcacaagugcaggaugggggaa

SEQ ID NO: 500733 - RNA, 32 nt, Human
ucccugccuuucuucccuuugccuuucucucu

SEQ ID NO: 500734 - RNA, 32 nt, Human
ucccugccuuuucuagcuucugggggcuccag

SEQ ID NO: 500735 - RNA, 32 nt, Human
ucccugcgcgccgccucucacucacagccucc

SEQ ID NO: 500736 - RNA, 32 nt, Human
ucccugcggcagaaccuccugcccugcaccug

SEQ ID NO: 500737 - RNA, 32 nt, Human
ucccugcggccuccagcagugaagaguuccac

SEQ ID NO: 500738 - RNA, 24 nt, Human
ucccugcuaggccagcccugcagg

SEQ ID NO: 500739 - RNA, 32 nt, Human
ucccugcucacacccacacuggcugcugauug

SEQ ID NO: 500740 - RNA, 32 nt, Human
ucccugcucacucagccaccucccucucccuc

SEQ ID NO: 500741 - RNA, 32 nt, Human
ucccugcucacugcagccuccgcuucccuggu

SEQ ID NO: 500742 - RNA, 22 nt, Human
ucccugcucaguccagcacagg

SEQ ID NO: 500743 - RNA, 32 nt, Human
ucccugcucccaccuggaaccuugccagcgug

SEQ ID NO: 500744 - RNA, 32 nt, Human
ucccugcucccagcucucucuccuggagucug

SEQ ID NO: 500745 - RNA, 32 nt, Human
ucccugcuccuccaaagcccacgucgccugcg

SEQ ID NO: 500746 - RNA, 32 nt, Human
ucccugcuccuuccugucccuuuaccgguccc

SEQ ID NO: 500747 - RNA, 32 nt, Human
ucccugcucucaucucagcucccuccaggccu

SEQ ID NO: 500748 - RNA, 32 nt, Human
ucccugcucucccaggccccugccacagccuc

SEQ ID NO: 500749 - RNA, 32 nt, Human
ucccugcucugcccccaacuggcuguauaacc

SEQ ID NO: 500750 - RNA, 32 nt, Human
ucccugcucugccucccacccaguugccugaa

SEQ ID NO: 500751 - RNA, 32 nt, Human
ucccugcucugggagcauugcuagccuucuac

SEQ ID NO: 500752 - RNA, 32 nt, Human
ucccugcucuuuccuuuuucccggcuuccuuc

SEQ ID NO: 500753 - RNA, 21 nt, Human
ucccugcugcagcgcuagaaa

SEQ ID NO: 500754 - RNA, 22 nt, Human
ucccugcugcaguccacaggga

SEQ ID NO: 500755 - RNA, 32 nt, Human
ucccugcugccacuuaucccagcuccaaguuu

SEQ ID NO: 500756 - RNA, 32 nt, Human
ucccugcugccaugaaacuuugccuuaagaag

SEQ ID NO: 500757 - RNA, 32 nt, Human
ucccugcuggaaggcauucucagagcuuuaug

SEQ ID NO: 500758 - RNA, 32 nt, Human
ucccugcuggccuccagccagugccacuugga

SEQ ID NO: 500759 - RNA, 19 nt, Human
ucccugcugggcugccuca

SEQ ID NO: 500760 - RNA, 32 nt, Human
ucccugcugggugggacagaggacaaaggaga

SEQ ID NO: 500761 - RNA, 31 nt, Human
ucccugcuucuuuucugaccgggaaauaaau

SEQ ID NO: 500762 - RNA, 32 nt, Human
ucccugcuugcagcugugaagggggcaggaau

SEQ ID NO: 500763 - RNA, 32 nt, Human
ucccugcuuuacugcugagcuccugcuggagg

SEQ ID NO: 500764 - RNA, 25 nt, Human
ucccuggaaacaacucuggcacaga

SEQ ID NO: 500765 - RNA, 32 nt, Human
ucccuggaaacagugcccaccccacaucacua

SEQ ID NO: 500766 - RNA, 32 nt, Human
ucccuggaagccucuuuggaaaccacauagag

SEQ ID NO: 500767 - RNA, 32 nt, Human
ucccuggaaguggcagcagcagugagcaguca

SEQ ID NO: 500768 - RNA, 22 nt, Human
ucccuggaaguuugcggcagga

SEQ ID NO: 500769 - RNA, 22 nt, Human
ucccuggacacacuaugcagca

SEQ ID NO: 500770 - RNA, 32 nt, Human
ucccuggacacauucguggggcaggaaaaaga

SEQ ID NO: 500771 - RNA, 20 nt, Human
ucccuggacacgaagccagg

SEQ ID NO: 500772 - RNA, 24 nt, Human
ucccuggacagggcacagcaagga

SEQ ID NO: 500773 - RNA, 22 nt, Human
ucccuggacauacguuagcaca

SEQ ID NO: 500774 - RNA, 32 nt, Human
ucccuggaccaccaccccacguagcugcucac

SEQ ID NO: 500775 - RNA, 32 nt, Human
ucccuggaccaggguggcacagcuccaggcuc

SEQ ID NO: 500776 - RNA, 29 nt, Human
ucccuggacccaaaguguagccucuguaa

SEQ ID NO: 500777 - RNA, 29 nt, Human
ucccuggacccauugcaucaccucuguaa

SEQ ID NO: 500778 - RNA, 23 nt, Human
ucccuggaccccugcagggcagg

SEQ ID NO: 500779 - RNA, 32 nt, Human
ucccuggacccuaguacacucuaccuccuugg

SEQ ID NO: 500780 - RNA, 24 nt, Human
ucccuggacccuggcuggcaugga

SEQ ID NO: 500781 - RNA, 32 nt, Human
ucccuggaccugccugacaggccacaggagca

SEQ ID NO: 500782 - RNA, 22 nt, Human
ucccuggacgugcggccgcgga

SEQ ID NO: 500783 - RNA, 32 nt, Human
ucccuggacuaccuucaggaggcacgagagcu

SEQ ID NO: 500784 - RNA, 32 nt, Human
ucccuggacuccucugaccugacugcuuccga

SEQ ID NO: 500785 - RNA, 24 nt, Human
ucccuggacugagcucagcgcagg

SEQ ID NO: 500786 - RNA, 32 nt, Human
ucccuggagaggcggagcugaauggcccggac

SEQ ID NO: 500787 - RNA, 22 nt, Human
ucccuggagcaggcagugugga

SEQ ID NO: 500788 - RNA, 32 nt, Human
ucccuggagcccgggaaggaggcugccuggcu

SEQ ID NO: 500789 - RNA, 23 nt, Human
ucccuggagcccgugcccaggga

SEQ ID NO: 500790 - RNA, 22 nt, Human
ucccuggagcggcagcugcgga

SEQ ID NO: 500791 - RNA, 32 nt, Human
ucccuggaggcacgcaccacugcuucccacug

SEQ ID NO: 500792 - RNA, 32 nt, Human
ucccuggaggccuggucaguggggccucaucu

SEQ ID NO: 500793 - RNA, 32 nt, Human
ucccuggagggcaagcccugcccacagaaagc

SEQ ID NO: 500794 - RNA, 21 nt, Human
ucccuggagggcagcaaugga

SEQ ID NO: 500795 - RNA, 32 nt, Human
ucccuggaguuucuggaagaugccgugggaug

SEQ ID NO: 500796 - RNA, 26 nt, Human
ucccuggauaguccacugugugcaga

SEQ ID NO: 500797 - RNA, 22 nt, Human
ucccuggaugcagagacacggg

SEQ ID NO: 500798 - RNA, 32 nt, Human
ucccuggauggcaggaaggaagcaggugggag

SEQ ID NO: 500799 - RNA, 32 nt, Human
ucccuggaugugagacauggaaucaaaggaga

SEQ ID NO: 500800 - RNA, 32 nt, Human
ucccuggauucuggcaaaucuccgucuaguaa

SEQ ID NO: 500801 - RNA, 32 nt, Human
ucccuggauugcugggaauggaagccaggguu

SEQ ID NO: 500802 - RNA, 20 nt, Human
ucccuggcaccugccuggcc

SEQ ID NO: 500803 - RNA, 32 nt, Human
ucccuggcagggccuggagaagucuggaggcu

SEQ ID NO: 500804 - RNA, 32 nt, Human
ucccuggcaguggauugugggaggcucuugcu

SEQ ID NO: 500805 - RNA, 32 nt, Human
ucccuggccaagaagccaggagagggacggcu

SEQ ID NO: 500806 - RNA, 32 nt, Human
ucccuggccacagccucagcuugggagccucu

SEQ ID NO: 500807 - RNA, 32 nt, Human
ucccuggccacugccccugccgcggaggcagc

SEQ ID NO: 500808 - RNA, 32 nt, Human
ucccuggccauccugaauauccagaauggugu

SEQ ID NO: 500809 - RNA, 22 nt, Human
ucccuggccaucuucagagggg

SEQ ID NO: 500810 - RNA, 24 nt, Human
ucccuggcccagcaaaccaagagg

SEQ ID NO: 500811 - RNA, 32 nt, Human
ucccuggcccaggaguuuuccaguguguugcu

SEQ ID NO: 500812 - RNA, 19 nt, Human
ucccuggccccuucggaga

SEQ ID NO: 500813 - RNA, 32 nt, Human
ucccuggcccucaggcccuccuuccagggaug

SEQ ID NO: 500814 - RNA, 20 nt, Human
ucccuggcccuccccagaga

SEQ ID NO: 500815 - RNA, 21 nt, Human
ucccuggcccuguagcacaga

SEQ ID NO: 500816 - RNA, 21 nt, Human
ucccuggcccuuccugagagg

SEQ ID NO: 500817 - RNA, 21 nt, Human
ucccuggccggcugggaucug

SEQ ID NO: 500818 - RNA, 32 nt, Human
ucccuggccuccagugcccaccaggaggaucu

SEQ ID NO: 500819 - RNA, 32 nt, Human
ucccuggccuggggccacaccugcugcccucc

SEQ ID NO: 500820 - RNA, 21 nt, Human
ucccuggccugguggggccug

SEQ ID NO: 500821 - RNA, 32 nt, Human
ucccuggcgaggcagacgcugcggguggagac

SEQ ID NO: 500822 - RNA, 32 nt, Human
ucccuggcgauccucaccugcccagccauggc

SEQ ID NO: 500823 - RNA, 32 nt, Human
ucccuggcgccuggagugcacacagcccaguc

SEQ ID NO: 500824 - RNA, 32 nt, Human
ucccuggcguccucucccuccuggccagaugu

SEQ ID NO: 500825 - RNA, 22 nt, Human
ucccuggcgugccgcagacaga

SEQ ID NO: 500826 - RNA, 24 nt, Human
ucccuggcguguguaggccuggcc

SEQ ID NO: 500827 - RNA, 32 nt, Human
ucccuggcuacagcaaaggacgaugucugccu

SEQ ID NO: 500828 - RNA, 32 nt, Human
ucccuggcucaagcaauucuccuaugucagcc

SEQ ID NO: 500829 - RNA, 32 nt, Human
ucccuggcucaagcagucuucaucucagccuc

SEQ ID NO: 500830 - RNA, 32 nt, Human
ucccuggcucaagcgaucccuccccucagccu

SEQ ID NO: 500831 - RNA, 32 nt, Human
ucccuggcucaagugaucuuccagccucagcc

SEQ ID NO: 500832 - RNA, 32 nt, Human
ucccuggcucaagugauucuccugccucagcc

SEQ ID NO: 500833 - RNA, 32 nt, Human
ucccuggcucaagugggcacuguaccuuuugc

SEQ ID NO: 500834 - RNA, 21 nt, Human
ucccuggcuccccugaaucug

SEQ ID NO: 500835 - RNA, 32 nt, Human
ucccuggcucgcugucccgcagccugggcggg

SEQ ID NO: 500836 - RNA, 32 nt, Human
ucccuggcucggcucccugccuccgcgucgca

SEQ ID NO: 500837 - RNA, 26 nt, Human
ucccuggcucuaugcagaggggccug

SEQ ID NO: 500838 - RNA, 32 nt, Human
ucccuggcucugcccuucuuacugcaaaccau

SEQ ID NO: 500839 - RNA, 22 nt, Human
ucccuggcugcacguugggacc

SEQ ID NO: 500840 - RNA, 32 nt, Human
ucccuggcuggucucggacuccugggcucaag

SEQ ID NO: 500841 - RNA, 32 nt, Human
ucccuggcuguuccuuucaggcuuccgugcag

SEQ ID NO: 500842 - RNA, 21 nt, Human
ucccuggcuuaacucagaaag

SEQ ID NO: 500843 - RNA, 32 nt, Human
ucccuggcuucucugcugcaauuuuugucuuu

SEQ ID NO: 500844 - RNA, 24 nt, Human
ucccuggcuucucuggggcacuug

SEQ ID NO: 500845 - RNA, 32 nt, Human
ucccuggcuucuuucuuucccucucucuuucu

SEQ ID NO: 500846 - RNA, 31 nt, Human
ucccuggcuugcucugggccucaguuucccu

SEQ ID NO: 500847 - RNA, 18 nt, Human
ucccugggaaagggguug

SEQ ID NO: 500848 - RNA, 21 nt, Human
ucccugggaacgcagagcagg

SEQ ID NO: 500849 - RNA, 32 nt, Human
ucccugggacagauccaggucugcagaucgac

SEQ ID NO: 500850 - RNA, 21 nt, Human
ucccugggagagcagcacaga

SEQ ID NO: 500851 - RNA, 32 nt, Human
ucccugggaggaaggcuccaaauucucacuac

SEQ ID NO: 500852 - RNA, 22 nt, Human
ucccugggcaacacuggucagg

SEQ ID NO: 500853 - RNA, 21 nt, Human
ucccugggcacaugugcacac

SEQ ID NO: 500854 - RNA, 21 nt, Human
ucccugggcacccaagccggg

SEQ ID NO: 500855 - RNA, 23 nt, Human
ucccugggcacccugcaggcagg

SEQ ID NO: 500856 - RNA, 23 nt, Human
ucccugggcagagccagcucggg

SEQ ID NO: 500857 - RNA, 32 nt, Human
ucccugggcaggaagacugaggaggaagggau

SEQ ID NO: 500858 - RNA, 22 nt, Human
ucccugggcagggccagagggg

SEQ ID NO: 500859 - RNA, 32 nt, Human
ucccugggcaguuaccaaacaguuauucuagu

SEQ ID NO: 500860 - RNA, 22 nt, Human
ucccugggcaucuuuggccagg

SEQ ID NO: 500861 - RNA, 25 nt, Human
ucccugggccaccgggcagccuggg

SEQ ID NO: 500862 - RNA, 32 nt, Human
ucccugggccccuucucuccugggcagccaca

SEQ ID NO: 500863 - RNA, 22 nt, Human
ucccugggccgcgguggccagg

SEQ ID NO: 500864 - RNA, 32 nt, Human
ucccugggccucauggucugucuccucuagcc

SEQ ID NO: 500865 - RNA, 32 nt, Human
ucccugggccuccagcccggccuuccagccau

SEQ ID NO: 500866 - RNA, 21 nt, Human
ucccugggccugaggcacgga

SEQ ID NO: 500867 - RNA, 26 nt, Human
ucccugggcgccaacuagaguaugga

SEQ ID NO: 500868 - RNA, 32 nt, Human
ucccugggcggggagcgggggaagggaugggg

SEQ ID NO: 500869 - RNA, 32 nt, Human
ucccugggcuauggaucgaggagcugcuacuc

SEQ ID NO: 500870 - RNA, 32 nt, Human
ucccugggcucagcaacccaggaggccaugac

SEQ ID NO: 500871 - RNA, 32 nt, Human
ucccugggcuccuugccagcucccucuucccu

SEQ ID NO: 500872 - RNA, 32 nt, Human
ucccugggcucuggggcugaaggauuccagcc

SEQ ID NO: 500873 - RNA, 32 nt, Human
ucccugggcugccugcacucaguucucagccu

SEQ ID NO: 500874 - RNA, 18 nt, Human
ucccugggcuggcauggg

SEQ ID NO: 500875 - RNA, 26 nt, Human
ucccugggcugugcugcaggcacagg

SEQ ID NO: 500876 - RNA, 32 nt, Human
ucccugggcuuacugugcagcaggugcuuuuu

SEQ ID NO: 500877 - RNA, 32 nt, Human
ucccugggcuuccccacugccugcugaaggga

SEQ ID NO: 500878 - RNA, 16 nt, Human
ucccuggggagcuguc

SEQ ID NO: 500879 - RNA, 32 nt, Human
ucccuggggaucugcauuucuaacaggcuccu

SEQ ID NO: 500880 - RNA, 32 nt, Human
ucccuggggcagcugcucccugggccucugag

SEQ ID NO: 500881 - RNA, 32 nt, Human
ucccuggggcccuggccuaccacucacuggcc

SEQ ID NO: 500882 - RNA, 21 nt, Human
ucccuggggcggcagcgcgga

SEQ ID NO: 500883 - RNA, 32 nt, Human
ucccuggggcuccucuggccguguggggcuag

SEQ ID NO: 500884 - RNA, 20 nt, Human
ucccugggggagaccuauga

SEQ ID NO: 500885 - RNA, 21 nt, Human
ucccuggggggcaggggccag

SEQ ID NO: 500886 - RNA, 32 nt, Human
ucccugggguaguaggauaauggggaacagug

SEQ ID NO: 500887 - RNA, 24 nt, Human
ucccuggggucacgcgcagccgga

SEQ ID NO: 500888 - RNA, 32 nt, Human
ucccugggguccccaaauccaggcuagagcau

SEQ ID NO: 500889 - RNA, 32 nt, Human
ucccugggguccugccuuccaaccacggcauu

SEQ ID NO: 500890 - RNA, 32 nt, Human
ucccuggggucuggcucacugccuuaucagga

SEQ ID NO: 500891 - RNA, 32 nt, Human
ucccugggguucuccuccucucccagggccuc

SEQ ID NO: 500892 - RNA, 32 nt, Human
ucccugggucaaaggagaaugguggagcucuu

SEQ ID NO: 500893 - RNA, 32 nt, Human
ucccugggucacccaccccucgcugcuugccc

SEQ ID NO: 500894 - RNA, 21 nt, Human
ucccugggucauccagugaga

SEQ ID NO: 500895 - RNA, 32 nt, Human
ucccugggugccgcacguccagccugugucca

SEQ ID NO: 500896 - RNA, 32 nt, Human
ucccuggguuugagcaauccucccaccucagc

SEQ ID NO: 500897 - RNA, 32 nt, Human
ucccuggguuuucugccccagccuccuccuuc

SEQ ID NO: 500898 - RNA, 32 nt, Human
ucccugguacuccagcuuugagguccuaggaa

SEQ ID NO: 500899 - RNA, 32 nt, Human
ucccugguacuuccagcuuccaacucuaggga

SEQ ID NO: 500900 - RNA, 32 nt, Human
ucccugguccugauggcagaacccacccgauc

SEQ ID NO: 500901 - RNA, 32 nt, Human
ucccuggugaaggcuuaaagaugaggaagaug

SEQ ID NO: 500902 - RNA, 32 nt, Human
ucccuggugaaguguugcagguugugaacucu

SEQ ID NO: 500903 - RNA, 23 nt, Human
ucccuggugcaaguguucaucca

SEQ ID NO: 500904 - RNA, 24 nt, Human
ucccuggugcagguggccuggcca

SEQ ID NO: 500905 - RNA, 32 nt, Human
ucccuggugcagguggccuggccagcccacug

SEQ ID NO: 500906 - RNA, 22 nt, Human
ucccuggugcauaggaccuggc

SEQ ID NO: 500907 - RNA, 20 nt, Human
ucccuggugcccuccuggcc

SEQ ID NO: 500908 - RNA, 32 nt, Human
ucccuggugcccuccuggcccugcugcccagu

SEQ ID NO: 500909 - RNA, 24 nt, Human
ucccuggugcuccccgcgcagcca

SEQ ID NO: 500910 - RNA, 32 nt, Human
ucccuggugcugccucacacuccugagaucca

SEQ ID NO: 500911 - RNA, 22 nt, Human
ucccuggugcuggcaccaacca

SEQ ID NO: 500912 - RNA, 32 nt, Human
ucccugguggcucuccccuuuggagagagcua

SEQ ID NO: 500913 - RNA, 32 nt, Human
ucccuggugugucuguucucuccucuguccca

SEQ ID NO: 500914 - RNA, 32 nt, Human
ucccugguucaaacgauucuccugccucagcc

SEQ ID NO: 500915 - RNA, 32 nt, Human
ucccugguucaagcgauucuccugccucagcc

SEQ ID NO: 500916 - RNA, 32 nt, Human
ucccugguucaagcgauucuccugccuccucc

SEQ ID NO: 500917 - RNA, 32 nt, Human
ucccugguucaagcgauucuccugccuuagcc

SEQ ID NO: 500918 - RNA, 32 nt, Human
ucccugguucaagcgauucucuugccucagcu

SEQ ID NO: 500919 - RNA, 32 nt, Human
ucccugguucaagcgauuguccugccucagcc

SEQ ID NO: 500920 - RNA, 32 nt, Human
ucccugguucaagugauucuccugccucagcc

SEQ ID NO: 500921 - RNA, 32 nt, Human
ucccugguucaagugauucuccugccucaucc

SEQ ID NO: 500922 - RNA, 20 nt, Human
ucccugguucaggcccagcc

SEQ ID NO: 500923 - RNA, 32 nt, Human
ucccugguugccucucuugccccuuguccuga

SEQ ID NO: 500924 - RNA, 25 nt, Human
ucccugguuugggcuggccuggcca

SEQ ID NO: 500925 - RNA, 32 nt, Human
ucccuguaaaaugcagauuacagguauuaaag

SEQ ID NO: 500926 - RNA, 32 nt, Human
ucccuguaaucccagugcuuugggaggccgaa

SEQ ID NO: 500927 - RNA, 32 nt, Human
ucccuguagcagcagaugguacagugaguguu

SEQ ID NO: 500928 - RNA, 20 nt, Human
ucccuguagcccagccugca

SEQ ID NO: 500929 - RNA, 32 nt, Human
ucccuguagugaaguccaggagggugggacag

SEQ ID NO: 500930 - RNA, 26 nt, Human
ucccuguauuccaaaaccugcugcau

SEQ ID NO: 500931 - RNA, 32 nt, Human
ucccugucacccagccauggugugguccaggc

SEQ ID NO: 500932 - RNA, 32 nt, Human
ucccugucacuggagcacgcuggcagauuugg

SEQ ID NO: 500933 - RNA, 32 nt, Human
ucccugucagccacacccuuugucucccccua

SEQ ID NO: 500934 - RNA, 32 nt, Human
ucccuguccauguccacagaaggagauucacu

SEQ ID NO: 500935 - RNA, 32 nt, Human
ucccugucccagcugcuccuggggaguagaag

SEQ ID NO: 500936 - RNA, 32 nt, Human
ucccugucccccaaccugcagggaagaugacc

SEQ ID NO: 500937 - RNA, 20 nt, Human
ucccugucccccuccucugu

SEQ ID NO: 500938 - RNA, 32 nt, Human
ucccuguccccucggagaguucagggagagcu

SEQ ID NO: 500939 - RNA, 18 nt, Human
ucccuguccccucuucug

SEQ ID NO: 500940 - RNA, 31 nt, Human
ucccuguccccucuugggccugagguccucc

SEQ ID NO: 500941 - RNA, 32 nt, Human
ucccuguccuagucuugaucuguucugggcca

SEQ ID NO: 500942 - RNA, 32 nt, Human
ucccuguccucagacagugccaccauggccau

SEQ ID NO: 500943 - RNA, 32 nt, Human
ucccuguccuccuccuggauuguugaggaaaa

SEQ ID NO: 500944 - RNA, 32 nt, Human
ucccuguccuugccaaccaugccagugccugg

SEQ ID NO: 500945 - RNA, 32 nt, Human
ucccugucucacacuucuuuucucccaucccg

SEQ ID NO: 500946 - RNA, 32 nt, Human
ucccugucuccuccauccuggcugugcaguag

SEQ ID NO: 500947 - RNA, 32 nt, Human
ucccugucugauagagggaaccccuguacuga

SEQ ID NO: 500948 - RNA, 22 nt, Human
ucccugucuggaggcucaccuu

SEQ ID NO: 500949 - RNA, 32 nt, Human
ucccugucugucuguguuaguagaaaaauaaa

SEQ ID NO: 500950 - RNA, 32 nt, Human
ucccugucuucucuccccauuuuguccuuugc

SEQ ID NO: 500951 - RNA, 32 nt, Human
ucccugucuucuguccccaucuuccugccgau

SEQ ID NO: 500952 - RNA, 32 nt, Human
ucccugucuuucucugagccugucuccuuccu

SEQ ID NO: 500953 - RNA, 32 nt, Human
ucccugugaggcugggcugaggcacggauccc

SEQ ID NO: 500954 - RNA, 32 nt, Human
ucccugugauaccucucagaugacaacaaagu

SEQ ID NO: 500955 - RNA, 32 nt, Human
ucccugugauaggacaacuaguacauuuaaua

SEQ ID NO: 500956 - RNA, 24 nt, Human
ucccugugcagcauucaaaaauca

SEQ ID NO: 500957 - RNA, 32 nt, Human
ucccugugcccgugugccccagggcaggaaag

SEQ ID NO: 500958 - RNA, 32 nt, Human
ucccugugcccucucagcucugaggcuggccg

SEQ ID NO: 500959 - RNA, 32 nt, Human
ucccugugcccucuugcugccugccugucugc

SEQ ID NO: 500960 - RNA, 32 nt, Human
ucccugugcccugccuugcuuccuccaggacu

SEQ ID NO: 500961 - RNA, 32 nt, Human
ucccugugccggacuccagccggggcgacgag

SEQ ID NO: 500962 - RNA, 32 nt, Human
ucccugugcuccaccugccuccgcagaaggaa

SEQ ID NO: 500963 - RNA, 32 nt, Human
ucccugugcugggggagccucagucugcccuu

SEQ ID NO: 500964 - RNA, 23 nt, Human
ucccuguggaaaggggccuauga

SEQ ID NO: 500965 - RNA, 21 nt, Human
ucccuguggaauguaccuaug

SEQ ID NO: 500966 - RNA, 32 nt, Human
ucccuguggagccagggcugagccuugucacg

SEQ ID NO: 500967 - RNA, 32 nt, Human
ucccuguggagugggcucugcccacggggcag

SEQ ID NO: 500968 - RNA, 32 nt, Human
ucccuguggcaugaaccccacaggguauuaaa

SEQ ID NO: 500969 - RNA, 32 nt, Human
ucccuguggccagcgugaacagagccaugccc

SEQ ID NO: 500970 - RNA, 24 nt, Human
ucccuguggcuacaguagcgcaga

SEQ ID NO: 500971 - RNA, 32 nt, Human
ucccugugggaugucaucacccugggaaccgg

SEQ ID NO: 500972 - RNA, 32 nt, Human
ucccugugggcaagggcuuggcggcaguccug

SEQ ID NO: 500973 - RNA, 32 nt, Human
ucccuguguccacagguguucuccagugccaa

SEQ ID NO: 500974 - RNA, 32 nt, Human
ucccugugucccagacccuccugcugccacca

SEQ ID NO: 500975 - RNA, 32 nt, Human
ucccuguguggggcucaagccuggugcacuua

SEQ ID NO: 500976 - RNA, 32 nt, Human
ucccugugugggggaagggcaccccacagucu

SEQ ID NO: 500977 - RNA, 32 nt, Human
ucccuguguugcucugagccugguuggcaucc

SEQ ID NO: 500978 - RNA, 32 nt, Human
ucccuguguuuccuugcccuuuagaaaaugaa

SEQ ID NO: 500979 - RNA, 32 nt, Human
ucccuguuagcaauggcagagaccagccugga

SEQ ID NO: 500980 - RNA, 32 nt, Human
ucccuguucauaccaucucugcacccacaauc

SEQ ID NO: 500981 - RNA, 32 nt, Human
ucccuguuccagcugcucccucacuggccucc

SEQ ID NO: 500982 - RNA, 32 nt, Human
ucccuguuccagguuuauuuaauuccaaaggu

SEQ ID NO: 500983 - RNA, 32 nt, Human
ucccuguucccugagaccuggccucaaagggc

SEQ ID NO: 500984 - RNA, 23 nt, Human
ucccuguuccucacucagagagg

SEQ ID NO: 500985 - RNA, 32 nt, Human
ucccuguucugccucuuuaacucaguuaaguu

SEQ ID NO: 500986 - RNA, 22 nt, Human
ucccuguugccaguuagagagg

SEQ ID NO: 500987 - RNA, 32 nt, Human
ucccuguugcccaaguuggagugcaaucuugg

SEQ ID NO: 500988 - RNA, 32 nt, Human
ucccuguuguaacaucaagugaucagaacuaa

SEQ ID NO: 500989 - RNA, 32 nt, Human
ucccuuaaagauuuucugcuugaagucucccu

SEQ ID NO: 500990 - RNA, 32 nt, Human
ucccuuaacaguguugaauucaacugaaggcg

SEQ ID NO: 500991 - RNA, 32 nt, Human
ucccuuaaguuccccuguucaaggcauaccuu

SEQ ID NO: 500992 - RNA, 32 nt, Human
ucccuuaccaggaguguggcaagccucccugg

SEQ ID NO: 500993 - RNA, 22 nt, Human
ucccuuacccaucuugcuucca

SEQ ID NO: 500994 - RNA, 32 nt, Human
ucccuuacccccacuuccccagcacuuugaag

SEQ ID NO: 500995 - RNA, 32 nt, Human
ucccuuaccccucccuuagucuuggguuaagu

SEQ ID NO: 500996 - RNA, 32 nt, Human
ucccuuacgcccuuccuccucucccuccuccu

SEQ ID NO: 500997 - RNA, 32 nt, Human
ucccuuacgguuugugcugcuguuucuggggc

SEQ ID NO: 500998 - RNA, 32 nt, Human
ucccuuacuccccucucgcucccucuacccuc

SEQ ID NO: 500999 - RNA, 21 nt, Human
ucccuuacucuucggggguuu

SEQ ID NO: 501000 - RNA, 32 nt, Human
ucccuuacugacuguuucguggcccuauuaau

SEQ ID NO: 501001 - RNA, 32 nt, Human
ucccuuacugagcuugcugagcuccggggccc

SEQ ID NO: 501002 - RNA, 32 nt, Human
ucccuuacuuagucugccuucucuccacuuuu

SEQ ID NO: 501003 - RNA, 32 nt, Human
ucccuuagagcaaaggagagacagcccccauu

SEQ ID NO: 501004 - RNA, 32 nt, Human
ucccuuagcccugacuuuacuugcugugggaa

SEQ ID NO: 501005 - RNA, 32 nt, Human
ucccuuagcuacucaggaggccgaggcacaac

SEQ ID NO: 501006 - RNA, 32 nt, Human
ucccuuagcuacucaggaggccgaggcagaaa

SEQ ID NO: 501007 - RNA, 32 nt, Human
ucccuuagcuacucaggaggcugaggcaggag

SEQ ID NO: 501008 - RNA, 32 nt, Human
ucccuuaguaaucauuugugccuaaugcaucc

SEQ ID NO: 501009 - RNA, 32 nt, Human
ucccuuaguacagugugcugaccucaugagcc

SEQ ID NO: 501010 - RNA, 32 nt, Human
ucccuucaaccauaguaguuccucuguaccga

SEQ ID NO: 501011 - RNA, 20 nt, Human
ucccuucaagccucccaggc

SEQ ID NO: 501012 - RNA, 32 nt, Human
ucccuucaauaugccucuggcuguuccgcuua

SEQ ID NO: 501013 - RNA, 32 nt, Human
ucccuucacaagcccucucucucccucucuuu

SEQ ID NO: 501014 - RNA, 32 nt, Human
ucccuucaccacagugccugacccgcggcccc

SEQ ID NO: 501015 - RNA, 32 nt, Human
ucccuucaccuugcuugccuccugccucggaa

SEQ ID NO: 501016 - RNA, 32 nt, Human
ucccuucacugcacuuucuuccugccuuaggu

SEQ ID NO: 501017 - RNA, 32 nt, Human
ucccuucagaacuugaaguuucucccacugcc

SEQ ID NO: 501018 - RNA, 32 nt, Human
ucccuucagacucaggggcuccaccaaugcca

SEQ ID NO: 501019 - RNA, 32 nt, Human
ucccuucagcaacuuauuuugcuuuaauugcu

SEQ ID NO: 501020 - RNA, 32 nt, Human
ucccuucagccggcagagcgagcccagcgugg

SEQ ID NO: 501021 - RNA, 32 nt, Human
ucccuucaggacagugcuccccucuagcccag

SEQ ID NO: 501022 - RNA, 32 nt, Human
ucccuucaggcggagguugcagugagccgaga

SEQ ID NO: 501023 - RNA, 32 nt, Human
ucccuucaguacugcagcgccacccaguggaa

SEQ ID NO: 501024 - RNA, 32 nt, Human
ucccuucagucaguguccccaggguccagccu

SEQ ID NO: 501025 - RNA, 32 nt, Human
ucccuucauacuccucacccuacgcaccgcau

SEQ ID NO: 501026 - RNA, 32 nt, Human
ucccuucauucugcagugagauugccgagacc

SEQ ID NO: 501027 - RNA, 22 nt, Human
ucccuuccaagacccaagugca

SEQ ID NO: 501028 - RNA, 32 nt, Human
ucccuuccaagucucacaccucccuuaguccc

SEQ ID NO: 501029 - RNA, 32 nt, Human
ucccuuccaauguaaucucugccaacaccaug

SEQ ID NO: 501030 - RNA, 17 nt, Human
ucccuuccaccaccaaa

SEQ ID NO: 501031 - RNA, 32 nt, Human
ucccuuccagcuguuccauucucuccaccacc

SEQ ID NO: 501032 - RNA, 28 nt, Human
ucccuuccaggguucgccucaucugagg

SEQ ID NO: 501033 - RNA, 24 nt, Human
ucccuucccacagaccauaaacca

SEQ ID NO: 501034 - RNA, 21 nt, Human
ucccuucccaccccaacugca

SEQ ID NO: 501035 - RNA, 21 nt, Human
ucccuucccaccccucacuca

SEQ ID NO: 501036 - RNA, 32 nt, Human
ucccuucccagagggucuuacuguuccagggu

SEQ ID NO: 501037 - RNA, 22 nt, Human
ucccuucccagccuuguaacca

SEQ ID NO: 501038 - RNA, 32 nt, Human
ucccuucccccacuucacguccuuccugggac

SEQ ID NO: 501039 - RNA, 32 nt, Human
ucccuuccccuccacuaaaucuacucucuauu

SEQ ID NO: 501040 - RNA, 32 nt, Human
ucccuuccccuuccuuccuuccuuccuuccuu

SEQ ID NO: 501041 - RNA, 23 nt, Human
ucccuucccuccccccucagggg

SEQ ID NO: 501042 - RNA, 32 nt, Human
ucccuucccucccucccuccccucucugcugg

SEQ ID NO: 501043 - RNA, 32 nt, Human
ucccuucccuccuccuuccucauccuucuguc

SEQ ID NO: 501044 - RNA, 31 nt, Human
ucccuucccugccucuugccugugucccagc

SEQ ID NO: 501045 - RNA, 32 nt, Human
ucccuucccugccucuugccugugucccagcc

SEQ ID NO: 501046 - RNA, 32 nt, Human
ucccuucccuuccaucucuuccuuuccuuucc

SEQ ID NO: 501047 - RNA, 32 nt, Human
ucccuucccuuucaagguugucuugggaaccu

SEQ ID NO: 501048 - RNA, 32 nt, Human
ucccuucccuuucacucuuuccuucuuuccuu

SEQ ID NO: 501049 - RNA, 32 nt, Human
ucccuucccuuucccagggccuucucacagcc

SEQ ID NO: 501050 - RNA, 32 nt, Human
ucccuucccuuuccuuuucccuuucccuuucc

SEQ ID NO: 501051 - RNA, 24 nt, Human
ucccuucccuuuucucugcucaau

SEQ ID NO: 501052 - RNA, 32 nt, Human
ucccuuccggaaagcuugcuuugaaaaacuua

SEQ ID NO: 501053 - RNA, 32 nt, Human
ucccuuccuccaccacccugcucucaaaggcc

SEQ ID NO: 501054 - RNA, 32 nt, Human
ucccuuccuccacgugaggacauggcauuuac

SEQ ID NO: 501055 - RNA, 32 nt, Human
ucccuuccucccauuggccucuccuugccaaa

SEQ ID NO: 501056 - RNA, 32 nt, Human
ucccuuccucccucccuuccucccggcggccg

SEQ ID NO: 501057 - RNA, 32 nt, Human
ucccuuccuccuccuccagaugccuuuucucu

SEQ ID NO: 501058 - RNA, 32 nt, Human
ucccuuccuccucuccccuuuacccccuuccu

SEQ ID NO: 501059 - RNA, 32 nt, Human
ucccuuccucuccuuguauguaauaccuuuuu

SEQ ID NO: 501060 - RNA, 32 nt, Human
ucccuuccuuccucuccugucucccuccucug

SEQ ID NO: 501061 - RNA, 32 nt, Human
ucccuuccuugcagaauccuugcuccugaaua

SEQ ID NO: 501062 - RNA, 32 nt, Human
ucccuuccuuucccccuuccucccucccccuu

SEQ ID NO: 501063 - RNA, 32 nt, Human
ucccuucgccacccuccacccacccaccucgc

SEQ ID NO: 501064 - RNA, 32 nt, Human
ucccuucggaggaaaauuucaggcugaagguu

SEQ ID NO: 501065 - RNA, 21 nt, Human
ucccuucuaaguugucuucuu

SEQ ID NO: 501066 - RNA, 32 nt, Human
ucccuucuacagccucagaaaccagacucguu

SEQ ID NO: 501067 - RNA, 32 nt, Human
ucccuucuacuucacuccucaggggagugaag

SEQ ID NO: 501068 - RNA, 32 nt, Human
ucccuucuacuuugaagagaaggggauaggaa

SEQ ID NO: 501069 - RNA, 32 nt, Human
ucccuucuaggaagaaaaacuaugaugauguu

SEQ ID NO: 501070 - RNA, 22 nt, Human
ucccuucuaggccucugccuca

SEQ ID NO: 501071 - RNA, 23 nt, Human
ucccuucuauccaacauucaaca

SEQ ID NO: 501072 - RNA, 32 nt, Human
ucccuucucacugccacugcucuugccucuug

SEQ ID NO: 501073 - RNA, 32 nt, Human
ucccuucucagcguuccagucacuucaggagg

SEQ ID NO: 501074 - RNA, 32 nt, Human
ucccuucucaguaugccagcugucucaauggc

SEQ ID NO: 501075 - RNA, 31 nt, Human
ucccuucucaucuagaauaaaccaggccucu

SEQ ID NO: 501076 - RNA, 32 nt, Human
ucccuucuccacuggccagcuugggccucauc

SEQ ID NO: 501077 - RNA, 32 nt, Human
ucccuucuccagucuuuuccuuuuacucuggu

SEQ ID NO: 501078 - RNA, 32 nt, Human
ucccuucuccauccugccauguccauccucca

SEQ ID NO: 501079 - RNA, 19 nt, Human
ucccuucucccaccuuagu

SEQ ID NO: 501080 - RNA, 32 nt, Human
ucccuucucccagggucaugcagggaucugcu

SEQ ID NO: 501081 - RNA, 32 nt, Human
ucccuucucccaucccuggccuggggccucug

SEQ ID NO: 501082 - RNA, 32 nt, Human
ucccuucuccuccccucuccccacucccggug

SEQ ID NO: 501083 - RNA, 21 nt, Human
ucccuucucguguuugcuuaa

SEQ ID NO: 501084 - RNA, 32 nt, Human
ucccuucucucccacucacauuucaaccccug

SEQ ID NO: 501085 - RNA, 32 nt, Human
ucccuucucugccuugcuucaacccuuagugu

SEQ ID NO: 501086 - RNA, 32 nt, Human
ucccuucugagaucugaggacauggacaccaa

SEQ ID NO: 501087 - RNA, 32 nt, Human
ucccuucugagggucccuuugcagucccagua

SEQ ID NO: 501088 - RNA, 32 nt, Human
ucccuucugccaccccuaccucaccccuaguc

SEQ ID NO: 501089 - RNA, 32 nt, Human
ucccuucugccaucacuggcucuuguccucuc

SEQ ID NO: 501090 - RNA, 32 nt, Human
ucccuucugccccucucuaccucuuccacuca

SEQ ID NO: 501091 - RNA, 32 nt, Human
ucccuucugccuuccggcuuaaagcuguggau

SEQ ID NO: 501092 - RNA, 32 nt, Human
ucccuucugcuccaccuucucucucugcccuc

SEQ ID NO: 501093 - RNA, 32 nt, Human
ucccuucugcucccagaagcuuuuguugcuca

SEQ ID NO: 501094 - RNA, 32 nt, Human
ucccuucugggacccaggcuucagugucacac

SEQ ID NO: 501095 - RNA, 32 nt, Human
ucccuucugggggcuggagggagccggggcag

SEQ ID NO: 501096 - RNA, 32 nt, Human
ucccuucugucuuugcccucuguuccuuccag

SEQ ID NO: 501097 - RNA, 32 nt, Human
ucccuucuguucuguucauguagcacagauaa

SEQ ID NO: 501098 - RNA, 32 nt, Human
ucccuucuguuuuaaaggagguauuuuggaaa

SEQ ID NO: 501099 - RNA, 32 nt, Human
ucccuucuuccucuuggaguccccagugucua

SEQ ID NO: 501100 - RNA, 32 nt, Human
ucccuucuuggggcgcagaggcucagccagcu

SEQ ID NO: 501101 - RNA, 32 nt, Human
ucccuucuuuccucacugcuccucuccaccca

SEQ ID NO: 501102 - RNA, 32 nt, Human
ucccuugaacccaggaggcagaaguugcagug

SEQ ID NO: 501103 - RNA, 32 nt, Human
ucccuugaacccaggaggcagagguugcaaug

SEQ ID NO: 501104 - RNA, 32 nt, Human
ucccuugacgcagcugccccagaagagcugaa

SEQ ID NO: 501105 - RNA, 32 nt, Human
ucccuugacuucuuacauuuugcucacuccug

SEQ ID NO: 501106 - RNA, 32 nt, Human
ucccuugagcccaggaggucgaggcugcagug

SEQ ID NO: 501107 - RNA, 32 nt, Human
ucccuugagcccaggaguuccagaccagccug

SEQ ID NO: 501108 - RNA, 32 nt, Human
ucccuugagcccaggaguuggagagcaacauc

SEQ ID NO: 501109 - RNA, 32 nt, Human
ucccuugagccccagaggcagagguuguggug

SEQ ID NO: 501110 - RNA, 32 nt, Human
ucccuugagccuaggagguugaggcugcagug

SEQ ID NO: 501111 - RNA, 20 nt, Human
ucccuugagcuguaaacacu

SEQ ID NO: 501112 - RNA, 32 nt, Human
ucccuugaggugccuccucuccucugcccagg

SEQ ID NO: 501113 - RNA, 32 nt, Human
ucccuugaguccaggagguugaggcugcagug

SEQ ID NO: 501114 - RNA, 32 nt, Human
ucccuugaucauacagugaggcuacagugacu

SEQ ID NO: 501115 - RNA, 32 nt, Human
ucccuugcaggcaaucucuuugaacagagguu

SEQ ID NO: 501116 - RNA, 32 nt, Human
ucccuugcccauucccuccacccccaagcccc

SEQ ID NO: 501117 - RNA, 32 nt, Human
ucccuugccccauuaucuuuucaccucccagg

SEQ ID NO: 501118 - RNA, 32 nt, Human
ucccuugcccucuccagcuccaccucacccag

SEQ ID NO: 501119 - RNA, 32 nt, Human
ucccuugccuccaugcaauucugaacuucaga

SEQ ID NO: 501120 - RNA, 32 nt, Human
ucccuugcuggagcuagaaugagggggaggcc

SEQ ID NO: 501121 - RNA, 18 nt, Human
ucccuugcuggugucaua

SEQ ID NO: 501122 - RNA, 32 nt, Human
ucccuugcuguaugcugaucaucgccagaggu

SEQ ID NO: 501123 - RNA, 32 nt, Human
ucccuugcuuucuuucucuuccagucauggca

SEQ ID NO: 501124 - RNA, 32 nt, Human
ucccuuggccccucucuguuuacccucccugu

SEQ ID NO: 501125 - RNA, 32 nt, Human
ucccuugggcuggagcugcaguaccguaccug

SEQ ID NO: 501126 - RNA, 32 nt, Human
ucccuuggggcugagggacuugggaaucaggc

SEQ ID NO: 501127 - RNA, 32 nt, Human
ucccuugguuggauucuucaacacagccaaug

SEQ ID NO: 501128 - RNA, 32 nt, Human
ucccuugucuauguucuugucuuucagaauaa

SEQ ID NO: 501129 - RNA, 32 nt, Human
ucccuugugcagccuggggcucugcccaggcc

SEQ ID NO: 501130 - RNA, 32 nt, Human
ucccuuguggccaaauuucccucccagggagc

SEQ ID NO: 501131 - RNA, 32 nt, Human
ucccuugugguuucagcacagaaccugaaugc

SEQ ID NO: 501132 - RNA, 32 nt, Human
ucccuugugugugugacauucucucaugggac

SEQ ID NO: 501133 - RNA, 32 nt, Human
ucccuuguugucuuugaaaauacuucauuuuc

SEQ ID NO: 501134 - RNA, 32 nt, Human
ucccuuuacagcucuccuccagcccugggcac

SEQ ID NO: 501135 - RNA, 32 nt, Human
ucccuuuagccugucuucgggccugccacaau

SEQ ID NO: 501136 - RNA, 32 nt, Human
ucccuuuagugcagggcucugcauuuacugug

SEQ ID NO: 501137 - RNA, 32 nt, Human
ucccuuuaugacgucuuuucucaaaucaaagu

SEQ ID NO: 501138 - RNA, 28 nt, Human
ucccuuuaugggucugccucauuggauu

SEQ ID NO: 501139 - RNA, 32 nt, Human
ucccuuuauugagcuccuccacuggggagaua

SEQ ID NO: 501140 - RNA, 32 nt, Human
ucccuuucacucuucgcccagcauccugcccc

SEQ ID NO: 501141 - RNA, 32 nt, Human
ucccuuucacuguggcuaauguuugcuaggcc

SEQ ID NO: 501142 - RNA, 32 nt, Human
ucccuuucagaagaaaagaccacaggcaucag

SEQ ID NO: 501143 - RNA, 32 nt, Human
ucccuuucagagccagggaaggguccagacag

SEQ ID NO: 501144 - RNA, 19 nt, Human
ucccuuuccaagccugccu

SEQ ID NO: 501145 - RNA, 19 nt, Human
ucccuuuccaccccccaca

SEQ ID NO: 501146 - RNA, 19 nt, Human
ucccuuuccagaaguccac

SEQ ID NO: 501147 - RNA, 21 nt, Human
ucccuuuccagauccaugagg

SEQ ID NO: 501148 - RNA, 32 nt, Human
ucccuuucccacuugaggacccuggggagaga

SEQ ID NO: 501149 - RNA, 32 nt, Human
ucccuuucccccacuuucucacuuauucuagg

SEQ ID NO: 501150 - RNA, 32 nt, Human
ucccuuucccucucugcugagcauuuaaccau

SEQ ID NO: 501151 - RNA, 32 nt, Human
ucccuuucccuggccaggaagggccaccagca

SEQ ID NO: 501152 - RNA, 32 nt, Human
ucccuuucccuuugguaggugcaccugagcac

SEQ ID NO: 501153 - RNA, 24 nt, Human
ucccuuuccuccccaccacuaccu

SEQ ID NO: 501154 - RNA, 32 nt, Human
ucccuuuccuccucucccuccuguggauucuc

SEQ ID NO: 501155 - RNA, 32 nt, Human
ucccuuuccucuugcuguuuccuuccuguguu

SEQ ID NO: 501156 - RNA, 32 nt, Human
ucccuuuccugcucuggccuccuugaaaguuc

SEQ ID NO: 501157 - RNA, 32 nt, Human
ucccuuuccuucuguuccgguuucuggucgua

SEQ ID NO: 501158 - RNA, 32 nt, Human
ucccuuuccuuuccuuucauuuucuuuccuuu

SEQ ID NO: 501159 - RNA, 32 nt, Human
ucccuuuccuuuccuuuccucuugaccuucuu

SEQ ID NO: 501160 - RNA, 32 nt, Human
ucccuuucucacugcuucaccuucccaaugug

SEQ ID NO: 501161 - RNA, 32 nt, Human
ucccuuucucacuuuuggaaggugacuuuuca

SEQ ID NO: 501162 - RNA, 32 nt, Human
ucccuuucucccucucuuccucccucuuuugc

SEQ ID NO: 501163 - RNA, 32 nt, Human
ucccuuucuccuccugcucuuucuccccgcug

SEQ ID NO: 501164 - RNA, 32 nt, Human
ucccuuucucggcuaugggaaggaaggauugc

SEQ ID NO: 501165 - RNA, 32 nt, Human
ucccuuucucucuacuuccucuucuuaauugg

SEQ ID NO: 501166 - RNA, 32 nt, Human
ucccuuucuuucucccagcuuugccucccuua

SEQ ID NO: 501167 - RNA, 32 nt, Human
ucccuuugcaaaaaucacggguguagagaugg

SEQ ID NO: 501168 - RNA, 23 nt, Human
ucccuuugcaaaaugugaaaaga

SEQ ID NO: 501169 - RNA, 32 nt, Human
ucccuuugcaccugagaggggaaguucucagc

SEQ ID NO: 501170 - RNA, 32 nt, Human
ucccuuugccuccccaucuggugcuuucuugc

SEQ ID NO: 501171 - RNA, 32 nt, Human
ucccuuuggcagcugcaauacacaguguuauu

SEQ ID NO: 501172 - RNA, 32 nt, Human
ucccuuuggccugcaguuuguaccaaauccuu

SEQ ID NO: 501173 - RNA, 32 nt, Human
ucccuuugggccaggucggggagccagaccug

SEQ ID NO: 501174 - RNA, 32 nt, Human
ucccuuuggggaaggugaagaggucaaaugag

SEQ ID NO: 501175 - RNA, 32 nt, Human
ucccuuuggucaaggagagggagagagaggua

SEQ ID NO: 501176 - RNA, 32 nt, Human
ucccuuuggucuuuagggaaaauaaacaggaa

SEQ ID NO: 501177 - RNA, 32 nt, Human
ucccuuuguccucaccaaagccaguagguaaa

SEQ ID NO: 501178 - RNA, 32 nt, Human
ucccuuugugugcauacgccucuuguucaugu

SEQ ID NO: 501179 - RNA, 32 nt, Human
ucccuuuguucuguuuuauuugacuacagucu

SEQ ID NO: 501180 - RNA, 32 nt, Human
ucccuuuuacucagccuuucuguucuaccuag

SEQ ID NO: 501181 - RNA, 32 nt, Human
ucccuuuuauucaccacuugacuucuaacauu

SEQ ID NO: 501182 - RNA, 32 nt, Human
ucccuuuucagaaaguccuuagugcaaaccac

SEQ ID NO: 501183 - RNA, 32 nt, Human
ucccuuuuccuaagccucuggguccccuccag

SEQ ID NO: 501184 - RNA, 32 nt, Human
ucccuuuuccuuccugugcccucugaaagcua

SEQ ID NO: 501185 - RNA, 32 nt, Human
ucccuuuucucacucucauccccaccacagau

SEQ ID NO: 501186 - RNA, 32 nt, Human
ucccuuuucucaguccaugaggcugggggugc

SEQ ID NO: 501187 - RNA, 32 nt, Human
ucccuuuucucaucauugggguuagcgggugc

SEQ ID NO: 501188 - RNA, 32 nt, Human
ucccuuuucuccccacuccuccagaaggcaua

SEQ ID NO: 501189 - RNA, 32 nt, Human
ucccuuuucucuucucucuccuccugggaaaa

SEQ ID NO: 501190 - RNA, 32 nt, Human
ucccuuuucugcuucucugcuccucuuaaggc

SEQ ID NO: 501191 - RNA, 32 nt, Human
ucccuuuucuuuucuuuucuuucuacugugac

SEQ ID NO: 501192 - RNA, 32 nt, Human
ucccuuuugccacccuucccagucccaggacg

SEQ ID NO: 501193 - RNA, 19 nt, Human
ucccuuuuggaguuuaugc

SEQ ID NO: 501194 - RNA, 32 nt, Human
ucccuuuuguuccuugaaguugcccuugcucu

SEQ ID NO: 501195 - RNA, 32 nt, Human
ucccuuuuguuuuacuccucacuccucuauuu

SEQ ID NO: 501196 - RNA, 31 nt, Human
ucccuuuuguuuuggaggccuguguccuugu

SEQ ID NO: 501197 - RNA, 32 nt, Human
ucccuuuuuccgcccgucccaggcuggauaga

SEQ ID NO: 501198 - RNA, 20 nt, Human
ucccuuuuuccuucuccugc

SEQ ID NO: 501199 - RNA, 22 nt, Human
uccgaaaaacacagcccugaca

SEQ ID NO: 501200 - RNA, 32 nt, Human
uccgaaagugaacuuuugcugaagcgaaguag

SEQ ID NO: 501201 - RNA, 32 nt, Human
uccgaacaccaagaagaaagcacacaguucac

SEQ ID NO: 501202 - RNA, 32 nt, Human
uccgaacaccuccagauuccggcuucuacaug

SEQ ID NO: 501203 - RNA, 32 nt, Human
uccgaacacgauggcagaucugggcagugcug

SEQ ID NO: 501204 - RNA, 23 nt, Human
uccgaacccuuucuccccuuccc

SEQ ID NO: 501205 - RNA, 32 nt, Human
uccgaaccuccucugugaagcauucgagacag

SEQ ID NO: 501206 - RNA, 32 nt, Human
uccgaagaaagugacucucugagaaccagccc

SEQ ID NO: 501207 - RNA, 32 nt, Human
uccgaagagacagggucuucuauguugcccag

SEQ ID NO: 501208 - RNA, 32 nt, Human
uccgaagaugcuccaucugaucaaagugacac

SEQ ID NO: 501209 - RNA, 32 nt, Human
uccgaagccccuugucccuuucuuggggauug

SEQ ID NO: 501210 - RNA, 32 nt, Human
uccgaagcgccauccacgucuccugggccgug

SEQ ID NO: 501211 - RNA, 32 nt, Human
uccgaaggaaccuggggcagagcuggaagagg

SEQ ID NO: 501212 - RNA, 32 nt, Human
uccgaaggccguggggaugguggagagcgccg

SEQ ID NO: 501213 - RNA, 32 nt, Human
uccgaaguagcugggaauuacaggcacccacc

SEQ ID NO: 501214 - RNA, 24 nt, Human
uccgaaguccuuugucagggcuga

SEQ ID NO: 501215 - RNA, 32 nt, Human
uccgaauccuacuccauccuucauggagaccc

SEQ ID NO: 501216 - RNA, 32 nt, Human
uccgaauccugauccaggcgggggccaggggc

SEQ ID NO: 501217 - RNA, 32 nt, Human
uccgaauuagaaaagaggaagucuauugcccc

SEQ ID NO: 501218 - RNA, 32 nt, Human
uccgacaaagacacaucaccuugcaaaugaca

SEQ ID NO: 501219 - RNA, 32 nt, Human
uccgacaccagaguggaacccaguaagcacca

SEQ ID NO: 501220 - RNA, 32 nt, Human
uccgacacccacccccucuuuguguacuucag

SEQ ID NO: 501221 - RNA, 32 nt, Human
uccgacagcugggcagccugaguaaauaugca

SEQ ID NO: 501222 - RNA, 21 nt, Human
uccgacaggugcucuggggug

SEQ ID NO: 501223 - RNA, 32 nt, Human
uccgacauuagaaacaaaacaaaaagaacugu

SEQ ID NO: 501224 - RNA, 32 nt, Human
uccgaccaugccaccugcccugggggcucccc

SEQ ID NO: 501225 - RNA, 32 nt, Human
uccgacccagaacgcuucaguucugcucugca

SEQ ID NO: 501226 - RNA, 32 nt, Human
uccgaccccucggaccccggccgcgcauucca

SEQ ID NO: 501227 - RNA, 32 nt, Human
uccgacccgcccuccucaccacccucauccgg

SEQ ID NO: 501228 - RNA, 32 nt, Human
uccgacccggaggcggaaccggcagugcagcc

SEQ ID NO: 501229 - RNA, 32 nt, Human
uccgaccgcccaacguuugccucccagccuga

SEQ ID NO: 501230 - RNA, 32 nt, Human
uccgaccuguaaucccagcacgucgggaggcc

SEQ ID NO: 501231 - RNA, 32 nt, Human
uccgacgcgccgcuggccucagccuggacgcg

SEQ ID NO: 501232 - RNA, 21 nt, Human
uccgacgcuuuguccccaccu

SEQ ID NO: 501233 - RNA, 32 nt, Human
uccgacguaaacaaucuccuucacgagauguc

SEQ ID NO: 501234 - RNA, 32 nt, Human
uccgacgugcagccuggcagugcagugagcug

SEQ ID NO: 501235 - RNA, 32 nt, Human
uccgacuccagcucugggcaagauccauaaac

SEQ ID NO: 501236 - RNA, 31 nt, Human
uccgacugccucucgccucaguuuaaccauc

SEQ ID NO: 501237 - RNA, 32 nt, Human
uccgacugcugaccaagcuaggagagacccgg

SEQ ID NO: 501238 - RNA, 24 nt, Human
uccgacuggcugcagcggacacug

SEQ ID NO: 501239 - RNA, 32 nt, Human
uccgacugguccacuccucauccuggugucuu

SEQ ID NO: 501240 - RNA, 32 nt, Human
uccgacuguacccagaggugccugagguccua

SEQ ID NO: 501241 - RNA, 32 nt, Human
uccgagaagaggaggguagaaaugaaggaaaa

SEQ ID NO: 501242 - RNA, 32 nt, Human
uccgagaagggguggagaaacaggaugggaac

SEQ ID NO: 501243 - RNA, 32 nt, Human
uccgagacaagcuugucggacgcccagccggg

SEQ ID NO: 501244 - RNA, 32 nt, Human
uccgagaccagccugggcaacauagugagacc

SEQ ID NO: 501245 - RNA, 32 nt, Human
uccgagacucuucaguucagguaucaacccug

SEQ ID NO: 501246 - RNA, 32 nt, Human
uccgagagaaucaggauggaggccguggcgac

SEQ ID NO: 501247 - RNA, 32 nt, Human
uccgagcaguucugguuccuccuggccauccg

SEQ ID NO: 501248 - RNA, 23 nt, Human
uccgagccacuccgcggggaccg

SEQ ID NO: 501249 - RNA, 32 nt, Human
uccgagcccaggagcuggcuguggcuucuccc

SEQ ID NO: 501250 - RNA, 20 nt, Human
uccgagcccaggccugcagc

SEQ ID NO: 501251 - RNA, 32 nt, Human
uccgagcccggugggaggcucccggagcgcag

SEQ ID NO: 501252 - RNA, 32 nt, Human
uccgagcugcaaggagggugcgcuggaggagg

SEQ ID NO: 501253 - RNA, 24 nt, Human
uccgagcugcagcacuccaaggcu

SEQ ID NO: 501254 - RNA, 32 nt, Human
uccgaggaccugcugguggccauggcucuguc

SEQ ID NO: 501255 - RNA, 32 nt, Human
uccgaggagaaaggacuuccacacggcagcca

SEQ ID NO: 501256 - RNA, 32 nt, Human
uccgaggaggaggaggaggagggaggagggga

SEQ ID NO: 501257 - RNA, 32 nt, Human
uccgaggaggggguggguaaaagggagaggga

SEQ ID NO: 501258 - RNA, 32 nt, Human
uccgaggcaccacuguuucuugccuggaguug

SEQ ID NO: 501259 - RNA, 32 nt, Human
uccgaggcuuccuggucuagaguugcuggcaa

SEQ ID NO: 501260 - RNA, 32 nt, Human
uccgaggcuucugcacucgccugggaagaggc

SEQ ID NO: 501261 - RNA, 21 nt, Human
uccgagggcaccugugaccug

SEQ ID NO: 501262 - RNA, 32 nt, Human
uccgagggcuuccugaugugacggacugugaa

SEQ ID NO: 501263 - RNA, 31 nt, Human
uccgaggggguggaagggggugggcacacuc

SEQ ID NO: 501264 - RNA, 32 nt, Human
uccgaggugcaaagccuggugccccgagcccu

SEQ ID NO: 501265 - RNA, 32 nt, Human
uccgagguggccuggguggaggcuaugguggg

SEQ ID NO: 501266 - RNA, 32 nt, Human
uccgaguaacuuuagaacaugucgcuucaaau

SEQ ID NO: 501267 - RNA, 32 nt, Human
uccgagucagaucugcacuagcaaccagaacu

SEQ ID NO: 501268 - RNA, 32 nt, Human
uccgaguccccugcuccgccagccugcgcgcc

SEQ ID NO: 501269 - RNA, 32 nt, Human
uccgaguccugcagccagccuccugggacacc

SEQ ID NO: 501270 - RNA, 32 nt, Human
uccgagucuacccagcccuuguuagauucaga

SEQ ID NO: 501271 - RNA, 32 nt, Human
uccgagucuuugucucuuuugggucccugucu

SEQ ID NO: 501272 - RNA, 32 nt, Human
uccgagugccuggcccagucucucccgccucg

SEQ ID NO: 501273 - RNA, 19 nt, Human
uccgagugugugccaucca

SEQ ID NO: 501274 - RNA, 32 nt, Human
uccgauagccccaggaaacgaauccacagagg

SEQ ID NO: 501275 - RNA, 32 nt, Human
uccgauccuccccuuccccuguccuuccuucg

SEQ ID NO: 501276 - RNA, 32 nt, Human
uccgaucuccauggggaggagggacuuaagcc

SEQ ID NO: 501277 - RNA, 32 nt, Human
uccgaugacaugaguccucccaggugaccuca

SEQ ID NO: 501278 - RNA, 32 nt, Human
uccgaugauucuguggcuuuccaauccaguaa

SEQ ID NO: 501279 - RNA, 32 nt, Human
uccgaugcugacccguccuccugggcucccca

SEQ ID NO: 501280 - RNA, 32 nt, Human
uccgauguccugcacucggccuggauccucau

SEQ ID NO: 501281 - RNA, 32 nt, Human
uccgaugucuuugcccuccugcagaagcaauc

SEQ ID NO: 501282 - RNA, 32 nt, Human
uccgauguggguggggugaggagagaggcagc

SEQ ID NO: 501283 - RNA, 32 nt, Human
uccgaugugguuuuugcugauuuccuuugaug

SEQ ID NO: 501284 - RNA, 32 nt, Human
uccgauguuugugccaucugauccugaugucu

SEQ ID NO: 501285 - RNA, 32 nt, Human
uccgauuccccaggcugaauugggagugagau

SEQ ID NO: 501286 - RNA, 32 nt, Human
uccgauucucugcuguagcuuccaguggagaa

SEQ ID NO: 501287 - RNA, 32 nt, Human
uccgauucuuugucccugccucuugggcagca

SEQ ID NO: 501288 - RNA, 32 nt, Human
uccgauugauccugugaggaugaauuugcauu

SEQ ID NO: 501289 - RNA, 23 nt, Human
uccgauugcuccugcccccaccu

SEQ ID NO: 501290 - RNA, 32 nt, Human
uccgauuggcugagucccacacuuuggagcca

SEQ ID NO: 501291 - RNA, 32 nt, Human
uccgauuucucaaucuuuuccccaccuuuccc

SEQ ID NO: 501292 - RNA, 23 nt, Human
uccgcaaauuuucuuccauuuca

SEQ ID NO: 501293 - RNA, 20 nt, Human
uccgcaacagaaccaucuca

SEQ ID NO: 501294 - RNA, 32 nt, Human
uccgcaaccucaggggccugggauuccugugg

SEQ ID NO: 501295 - RNA, 32 nt, Human
uccgcaaccucugcuguccuccgcggcgcccc

SEQ ID NO: 501296 - RNA, 21 nt, Human
uccgcaaggcugcgacuggcc

SEQ ID NO: 501297 - RNA, 31 nt, Human
uccgcaauguggcugaggaagggagccaaaa

SEQ ID NO: 501298 - RNA, 21 nt, Human
uccgcacaccucuggcugucu

SEQ ID NO: 501299 - RNA, 23 nt, Human
uccgcacagccugucucugcuca

SEQ ID NO: 501300 - RNA, 32 nt, Human
uccgcacagccugucucugcucaguugcaaua

SEQ ID NO: 501301 - RNA, 32 nt, Human
uccgcacaguguccagcagcaauuuauucuuu

SEQ ID NO: 501302 - RNA, 28 nt, Human
uccgcacccagugcugccgcucgugcuc

SEQ ID NO: 501303 - RNA, 32 nt, Human
uccgcaccccauuccuccccucccauggccaa

SEQ ID NO: 501304 - RNA, 21 nt, Human
uccgcaccccgccccaugccc

SEQ ID NO: 501305 - RNA, 32 nt, Human
uccgcacccuuuccuucauaccucacuauaug

SEQ ID NO: 501306 - RNA, 32 nt, Human
uccgcacgacuguuacagaggucuccagagcc

SEQ ID NO: 501307 - RNA, 32 nt, Human
uccgcacgggauuugcagauuuacagaauggc

SEQ ID NO: 501308 - RNA, 32 nt, Human
uccgcacgugcccacacacacgcaguucagcc

SEQ ID NO: 501309 - RNA, 32 nt, Human
uccgcacuaccugaacauuguaauacagacaa

SEQ ID NO: 501310 - RNA, 32 nt, Human
uccgcacuauugucccuucuuccucacugcac

SEQ ID NO: 501311 - RNA, 32 nt, Human
uccgcacucucucuuccuucugucuacacccc

SEQ ID NO: 501312 - RNA, 32 nt, Human
uccgcacugacgcugcucagccgguccaucac

SEQ ID NO: 501313 - RNA, 32 nt, Human
uccgcagagcuaugacgucauggcaggcacgc

SEQ ID NO: 501314 - RNA, 32 nt, Human
uccgcagaugcagagguugagguggcugcggg

SEQ ID NO: 501315 - RNA, 24 nt, Human
uccgcagcaagguugacugcccca

SEQ ID NO: 501316 - RNA, 20 nt, Human
uccgcagcaggcuuggccag

SEQ ID NO: 501317 - RNA, 32 nt, Human
uccgcagccugggaaccuucucccucguacag

SEQ ID NO: 501318 - RNA, 32 nt, Human
uccgcagcucgcagccaccccaaagggaggaa

SEQ ID NO: 501319 - RNA, 22 nt, Human
uccgcagcuucagccuccgccg

SEQ ID NO: 501320 - RNA, 32 nt, Human
uccgcaggaagaggcgcggggugcaggcuugu

SEQ ID NO: 501321 - RNA, 32 nt, Human
uccgcagggaggcggcggcagcugcggcgggg

SEQ ID NO: 501322 - RNA, 32 nt, Human
uccgcagucacaguccagccacugaccgcagc

SEQ ID NO: 501323 - RNA, 32 nt, Human
uccgcagugaagcccgcggcgccuagggcgca

SEQ ID NO: 501324 - RNA, 32 nt, Human
uccgcaguggcugcuuuccuggaagacguuuc

SEQ ID NO: 501325 - RNA, 23 nt, Human
uccgcauccaggagaugcugcuu

SEQ ID NO: 501326 - RNA, 32 nt, Human
uccgcaucccccaaggcaguguggagauggac

SEQ ID NO: 501327 - RNA, 23 nt, Human
uccgcaucccucgccccccuccc

SEQ ID NO: 501328 - RNA, 32 nt, Human
uccgcaucgacgcacacauuccagaguacagu

SEQ ID NO: 501329 - RNA, 32 nt, Human
uccgcaucucagcccucucaggagcagucuuc

SEQ ID NO: 501330 - RNA, 23 nt, Human
uccgcaucucaggugaucugcuc

SEQ ID NO: 501331 - RNA, 32 nt, Human
uccgcaugagcuguugcccuccaggggccugg

SEQ ID NO: 501332 - RNA, 32 nt, Human
uccgcaugcaccuggccggccaccugccacug

SEQ ID NO: 501333 - RNA, 32 nt, Human
uccgcaugcacggcugccucuccagccaccuc

SEQ ID NO: 501334 - RNA, 32 nt, Human
uccgcauuauuggaggagagagagccucccuc

SEQ ID NO: 501335 - RNA, 32 nt, Human
uccgcauuugguaucuuuuacacuucaaccaa

SEQ ID NO: 501336 - RNA, 32 nt, Human
uccgccaaccuccucagucucccaggccuggg

SEQ ID NO: 501337 - RNA, 32 nt, Human
uccgccaaucagaaacuuccugccuggggccc

SEQ ID NO: 501338 - RNA, 32 nt, Human
uccgccacagccgccgccuccacccccggccc

SEQ ID NO: 501339 - RNA, 32 nt, Human
uccgccaccaccgcugccgcagccuggcuggg

SEQ ID NO: 501340 - RNA, 32 nt, Human
uccgccaccggcuucugaacagccuggcggga

SEQ ID NO: 501341 - RNA, 32 nt, Human
uccgccacucacugaaguuuugcauucuggcu

SEQ ID NO: 501342 - RNA, 32 nt, Human
uccgccacugcacuccagccugggugacagag

SEQ ID NO: 501343 - RNA, 32 nt, Human
uccgccagacuccugcccaggccaggacugag

SEQ ID NO: 501344 - RNA, 32 nt, Human
uccgccagcaccggaggaagaaagaggagggg

SEQ ID NO: 501345 - RNA, 32 nt, Human
uccgccagcuccugccuggcugccagauauac

SEQ ID NO: 501346 - RNA, 32 nt, Human
uccgccaggcuggagugcaguggcgcgaucuu

SEQ ID NO: 501347 - RNA, 32 nt, Human
uccgccagggugacacagcgguguacgccgag

SEQ ID NO: 501348 - RNA, 32 nt, Human
uccgccagugaaacugcccagcccuucucugc

SEQ ID NO: 501349 - RNA, 32 nt, Human
uccgccagugcaggaacccggugcucgcuggg

SEQ ID NO: 501350 - RNA, 16 nt, Human
uccgccagugcuuuca

SEQ ID NO: 501351 - RNA, 32 nt, Human
uccgccaguucaugccccagaccuucucgggu

SEQ ID NO: 501352 - RNA, 32 nt, Human
uccgccaucuacccuccgcuccugggcgcgcu

SEQ ID NO: 501353 - RNA, 31 nt, Human
uccgccaugaggagaagugaggugcuggcgg

SEQ ID NO: 501354 - RNA, 31 nt, Human
uccgccauggccucucuacucgccaaggacg

SEQ ID NO: 501355 - RNA, 32 nt, Human
uccgccauuacacuccagccugggugacagag

SEQ ID NO: 501356 - RNA, 32 nt, Human
uccgccauugcaaacacgaagcucuuccagaa

SEQ ID NO: 501357 - RNA, 32 nt, Human
uccgcccacccccauucuccaagcuucagccc

SEQ ID NO: 501358 - RNA, 32 nt, Human
uccgcccagccucuccccgcucuggauccugc

SEQ ID NO: 501359 - RNA, 32 nt, Human
uccgcccagcggcccugcgucuucccagguga

SEQ ID NO: 501360 - RNA, 28 nt, Human
uccgcccccagugcugcguucucccccu

SEQ ID NO: 501361 - RNA, 32 nt, Human
uccgcccccagugcugcguucucccccucuug

SEQ ID NO: 501362 - RNA, 32 nt, Human
uccgcccccuagugagagauaaggaccucagg

SEQ ID NO: 501363 - RNA, 27 nt, Human
uccgcccccugccgccacauuuccuua

SEQ ID NO: 501364 - RNA, 32 nt, Human
uccgccccgcacuccguuucccgguuuccccc

SEQ ID NO: 501365 - RNA, 32 nt, Human
uccgccccgcaucaccuggccaggggcggacc

SEQ ID NO: 501366 - RNA, 32 nt, Human
uccgccccucccccucccccucgaacaaaugg

SEQ ID NO: 501367 - RNA, 18 nt, Human
uccgccccuccugcucca

SEQ ID NO: 501368 - RNA, 32 nt, Human
uccgccccucgcgcuccagccacucggccgca

SEQ ID NO: 501369 - RNA, 32 nt, Human
uccgcccgcuggcugcagagcaucccugggag

SEQ ID NO: 501370 - RNA, 32 nt, Human
uccgcccgucccaggcuggauagagucccuuc

SEQ ID NO: 501371 - RNA, 32 nt, Human
uccgcccuacuuccuccuccuguuggcggcgg

SEQ ID NO: 501372 - RNA, 32 nt, Human
uccgcccucaccagcacagcaccaagccuugc

SEQ ID NO: 501373 - RNA, 18 nt, Human
uccgcccucacccagcca

SEQ ID NO: 501374 - RNA, 32 nt, Human
uccgcccucgcucucccuccgcgccaccagac

SEQ ID NO: 501375 - RNA, 32 nt, Human
uccgcccucucccacucucucuuuccggugug

SEQ ID NO: 501376 - RNA, 32 nt, Human
uccgcccugccggguccccaccagggaggcgc

SEQ ID NO: 501377 - RNA, 32 nt, Human
uccgcccugccugccugccuguguggucugcc

SEQ ID NO: 501378 - RNA, 32 nt, Human
uccgcccuggaaggccaggucacaaaggccau

SEQ ID NO: 501379 - RNA, 32 nt, Human
uccgcccuggauacccagaagcuaagaaggug

SEQ ID NO: 501380 - RNA, 32 nt, Human
uccgccgaagaaaaggugagaaaggaauucug

SEQ ID NO: 501381 - RNA, 32 nt, Human
uccgccgaagggaggggguggaagaggaggac

SEQ ID NO: 501382 - RNA, 32 nt, Human
uccgccgagcacaagcuccagcaucccgucag

SEQ ID NO: 501383 - RNA, 32 nt, Human
uccgccgcacacucccccuggguccucaggcc

SEQ ID NO: 501384 - RNA, 19 nt, Human
uccgccgcagccuugcugg

SEQ ID NO: 501385 - RNA, 32 nt, Human
uccgccgcagucucagcugcagcugcaggacu

SEQ ID NO: 501386 - RNA, 19 nt, Human
uccgccgccccuaugcugg

SEQ ID NO: 501387 - RNA, 19 nt, Human
uccgccgccgccgccgccg

SEQ ID NO: 501388 - RNA, 32 nt, Human
uccgccgccgcucccguuuccggcgggggaga

SEQ ID NO: 501389 - RNA, 32 nt, Human
uccgccgcuccaggacucggcgcggagggaau

SEQ ID NO: 501390 - RNA, 32 nt, Human
uccgccgcuccucugcugucagcgccggcagc

SEQ ID NO: 501391 - RNA, 19 nt, Human
uccgccgcugccgccgccg

SEQ ID NO: 501392 - RNA, 32 nt, Human
uccgccggagccuggccauaggguagucucgg

SEQ ID NO: 501393 - RNA, 32 nt, Human
uccgccggcauuuucccaucugccuuuucucu

SEQ ID NO: 501394 - RNA, 32 nt, Human
uccgccggggcagcaagagcgaaacuccaucu

SEQ ID NO: 501395 - RNA, 32 nt, Human
uccgccguccagggccucuccgucucggcccc

SEQ ID NO: 501396 - RNA, 32 nt, Human
uccgccgugucucucgggggcggcucgcgggg

SEQ ID NO: 501397 - RNA, 32 nt, Human
uccgccuaucgcuccccucggcuacgcugcca

SEQ ID NO: 501398 - RNA, 32 nt, Human
uccgccucacccaguacaucgacgggcagggu

SEQ ID NO: 501399 - RNA, 32 nt, Human
uccgccucacuggguguggccuggcuucuggg

SEQ ID NO: 501400 - RNA, 32 nt, Human
uccgccucccaaagcgcuggcauuacaggcga

SEQ ID NO: 501401 - RNA, 32 nt, Human
uccgccucccaaagugcuaggauuacagguau

SEQ ID NO: 501402 - RNA, 32 nt, Human
uccgccucccaaagugcuggaauuacaggcau

SEQ ID NO: 501403 - RNA, 32 nt, Human
uccgccucccaaagugcuggaauuacuggcau

SEQ ID NO: 501404 - RNA, 32 nt, Human
uccgccucccaaagugcugggaugacaggcgu

SEQ ID NO: 501405 - RNA, 32 nt, Human
uccgccucccaaagugcugggauuacaggcgu

SEQ ID NO: 501406 - RNA, 32 nt, Human
uccgccucccaaagugcugggauuacagguau

SEQ ID NO: 501407 - RNA, 32 nt, Human
uccgccucccaaagugcugggauuacaggugu

SEQ ID NO: 501408 - RNA, 32 nt, Human
uccgccucccaaagugcugggauugcaggcau

SEQ ID NO: 501409 - RNA, 32 nt, Human
uccgccucccaaaguguugggauuacaagcgu

SEQ ID NO: 501410 - RNA, 32 nt, Human
uccgccucccaaguagcugggauuacaggcau

SEQ ID NO: 501411 - RNA, 32 nt, Human
uccgccucccaaguagcugggauuacagguac

SEQ ID NO: 501412 - RNA, 32 nt, Human
uccgccucccacccucuccccaucugcucugg

SEQ ID NO: 501413 - RNA, 32 nt, Human
uccgccucccgaguagcugggauuacaggcau

SEQ ID NO: 501414 - RNA, 32 nt, Human
uccgccuccucccuccccuugaggcuggagcg

SEQ ID NO: 501415 - RNA, 32 nt, Human
uccgccucguaauccuccuccgaccggugccc

SEQ ID NO: 501416 - RNA, 32 nt, Human
uccgccucuccccuccccacuggcucugucug

SEQ ID NO: 501417 - RNA, 32 nt, Human
uccgccucucucccugccucccucucucucuu

SEQ ID NO: 501418 - RNA, 32 nt, Human
uccgccucugcacuccagccugggugacaaga

SEQ ID NO: 501419 - RNA, 32 nt, Human
uccgccucugcuggcacauuuccccagaccug

SEQ ID NO: 501420 - RNA, 32 nt, Human
uccgccucuucaccuacuguucugccugccug

SEQ ID NO: 501421 - RNA, 32 nt, Human
uccgccucuucuuccuccugcguccucccccg

SEQ ID NO: 501422 - RNA, 32 nt, Human
uccgccugcagccgugaaaggaagcuggguca

SEQ ID NO: 501423 - RNA, 32 nt, Human
uccgccugcaggaccuccucuuggccacuugg

SEQ ID NO: 501424 - RNA, 32 nt, Human
uccgccugcagggcauuccagaaagaugagga

SEQ ID NO: 501425 - RNA, 32 nt, Human
uccgccugccagcccaccccagccuggggaga

SEQ ID NO: 501426 - RNA, 24 nt, Human
uccgccugccgcccgcuggccugc

SEQ ID NO: 501427 - RNA, 31 nt, Human
uccgccuggaaccugccgagggaacgugugg

SEQ ID NO: 501428 - RNA, 32 nt, Human
uccgccuggccuggccauacugugucccaucg

SEQ ID NO: 501429 - RNA, 32 nt, Human
uccgccuggguuggggacagagagcagagagg

SEQ ID NO: 501430 - RNA, 32 nt, Human
uccgccuguagucccagcuacucaggaggcug

SEQ ID NO: 501431 - RNA, 32 nt, Human
uccgccuuccacgugcacccacugccucuucc

SEQ ID NO: 501432 - RNA, 32 nt, Human
uccgccuucuccccucccgcuguccaugcuug

SEQ ID NO: 501433 - RNA, 24 nt, Human
uccgccuugcucagccccuccaug

SEQ ID NO: 501434 - RNA, 32 nt, Human
uccgccuuuaaugcuacugaacauccaggacc

SEQ ID NO: 501435 - RNA, 32 nt, Human
uccgcgaccagccucaagcaggcugcucucug

SEQ ID NO: 501436 - RNA, 19 nt, Human
uccgcgagucucugggagg

SEQ ID NO: 501437 - RNA, 32 nt, Human
uccgcgauacaguuaggauggcuguaguaccu

SEQ ID NO: 501438 - RNA, 32 nt, Human
uccgcgcagcccccugaccugcagccuccgga

SEQ ID NO: 501439 - RNA, 23 nt, Human
uccgcgccaagccguccccgccg

SEQ ID NO: 501440 - RNA, 22 nt, Human
uccgcgccacccacccucgccg

SEQ ID NO: 501441 - RNA, 24 nt, Human
uccgcgccaggcccggccccgccg

SEQ ID NO: 501442 - RNA, 23 nt, Human
uccgcgcccggagcgccccgccg

SEQ ID NO: 501443 - RNA, 24 nt, Human
uccgcgccgccgccagccccgcug

SEQ ID NO: 501444 - RNA, 18 nt, Human
uccgcgccgccgccgccg

SEQ ID NO: 501445 - RNA, 32 nt, Human
uccgcgccucccucccccucgagccgccacga

SEQ ID NO: 501446 - RNA, 22 nt, Human
uccgcgcgccugggagacgcug

SEQ ID NO: 501447 - RNA, 32 nt, Human
uccgcgcggccgaguccaucuccugggaaaug

SEQ ID NO: 501448 - RNA, 32 nt, Human
uccgcgcuccccucagcuccugcagugcuaau

SEQ ID NO: 501449 - RNA, 32 nt, Human
uccgcgcucgcaacuucggccucccccggcuc

SEQ ID NO: 501450 - RNA, 24 nt, Human
uccgcgcugcgccacaucccaccg

SEQ ID NO: 501451 - RNA, 23 nt, Human
uccgcgcugcuucccccgcgccg

SEQ ID NO: 501452 - RNA, 32 nt, Human
uccgcggagacacccauccgugaaccccaggu

SEQ ID NO: 501453 - RNA, 32 nt, Human
uccgcggaggagguggaggaggcggcggcggc

SEQ ID NO: 501454 - RNA, 32 nt, Human
uccgcggccaugaaguuucgggccaagaucgu

SEQ ID NO: 501455 - RNA, 20 nt, Human
uccgcggcccuuuccaccuc

SEQ ID NO: 501456 - RNA, 32 nt, Human
uccgcggccuuccuccucccugcuccagaauu

SEQ ID NO: 501457 - RNA, 19 nt, Human
uccgcgggccccggccggg

SEQ ID NO: 501458 - RNA, 32 nt, Human
uccgcgggcgcaggcccagcucaggcccccag

SEQ ID NO: 501459 - RNA, 32 nt, Human
uccgcggucugcggcccauggaagaggaggag

SEQ ID NO: 501460 - RNA, 32 nt, Human
uccgcggugaagcacugccucagcuaccagca

SEQ ID NO: 501461 - RNA, 32 nt, Human
uccgcggugcccagcucuccagccuggggauu

SEQ ID NO: 501462 - RNA, 32 nt, Human
uccgcggugggauguugagcugaggccggagg

SEQ ID NO: 501463 - RNA, 32 nt, Human
uccgcgucucccaggacgcaugaagguggcac

SEQ ID NO: 501464 - RNA, 32 nt, Human
uccgcguggaacacaggagccgcaaccaccug

SEQ ID NO: 501465 - RNA, 32 nt, Human
uccgcguggcucacuccagccucggauguuuc

SEQ ID NO: 501466 - RNA, 32 nt, Human
uccgcguuccuugagcaaauggcucaccccug

SEQ ID NO: 501467 - RNA, 32 nt, Human
uccgcguugccuggcucuccgggcacgcgggc

SEQ ID NO: 501468 - RNA, 32 nt, Human
uccgcuaaaaaugcaaaaauuagccaggcgug

SEQ ID NO: 501469 - RNA, 32 nt, Human
uccgcuaagggaucagggagaggaagaaagag

SEQ ID NO: 501470 - RNA, 32 nt, Human
uccgcucaccuugccaggcuuuucagaggccu

SEQ ID NO: 501471 - RNA, 32 nt, Human
uccgcucacugcaacauccgccucccggacuc

SEQ ID NO: 501472 - RNA, 32 nt, Human
uccgcucacugcaaccuccaccuccuggcuuc

SEQ ID NO: 501473 - RNA, 32 nt, Human
uccgcucacugcaaccuccgccucccagguuc

SEQ ID NO: 501474 - RNA, 32 nt, Human
uccgcucacugcaaccucugccucccgguuca

SEQ ID NO: 501475 - RNA, 32 nt, Human
uccgcucacugcaaccucugcuucccggguuc

SEQ ID NO: 501476 - RNA, 32 nt, Human
uccgcucacugcaagcuccgccucccggguuc

SEQ ID NO: 501477 - RNA, 32 nt, Human
uccgcucacugcagccuccgccuccuggguuc

SEQ ID NO: 501478 - RNA, 32 nt, Human
uccgcucaugccacuguaagcagcccuagcuc

SEQ ID NO: 501479 - RNA, 19 nt, Human
uccgcucccaggccugcca

SEQ ID NO: 501480 - RNA, 32 nt, Human
uccgcucccuccugucaccuaccagggcagac

SEQ ID NO: 501481 - RNA, 32 nt, Human
uccgcuccguggacuggaaagcuguuccgcag

SEQ ID NO: 501482 - RNA, 32 nt, Human
uccgcuccuccacccaguucaggaacccgcga

SEQ ID NO: 501483 - RNA, 32 nt, Human
uccgcuccuccggcucucauggcauugugcca

SEQ ID NO: 501484 - RNA, 32 nt, Human
uccgcuccugcucgcaaccucgcgguuccugg

SEQ ID NO: 501485 - RNA, 32 nt, Human
uccgcuccuggcugccacaggguccuccgaug

SEQ ID NO: 501486 - RNA, 32 nt, Human
uccgcucgcagcaaccucugccucccagguuc

SEQ ID NO: 501487 - RNA, 32 nt, Human
uccgcucgcccuggggccgcucagggagccgg

SEQ ID NO: 501488 - RNA, 32 nt, Human
uccgcucgcuacaaccuccaccucccagcugc

SEQ ID NO: 501489 - RNA, 32 nt, Human
uccgcucucuuuuuccccaacagaccugucuu

SEQ ID NO: 501490 - RNA, 32 nt, Human
uccgcucugaaggcacugugugggugcugcgu

SEQ ID NO: 501491 - RNA, 32 nt, Human
uccgcucugcaugcccugucugugccaugagu

SEQ ID NO: 501492 - RNA, 32 nt, Human
uccgcucuggggaggcagcgcuggcggcgggg

SEQ ID NO: 501493 - RNA, 32 nt, Human
uccgcucuuccaggacggccucugugcugcug

SEQ ID NO: 501494 - RNA, 32 nt, Human
uccgcucuuggcuuccagaaaaguuuggagaa

SEQ ID NO: 501495 - RNA, 32 nt, Human
uccgcugagaaagcuucacguuaugcuuagug

SEQ ID NO: 501496 - RNA, 32 nt, Human
uccgcugagauauuuguguggagagaaacaua

SEQ ID NO: 501497 - RNA, 19 nt, Human
uccgcugcagcuggccaca

SEQ ID NO: 501498 - RNA, 32 nt, Human
uccgcugccuugcccuccauccuuccucuguu

SEQ ID NO: 501499 - RNA, 32 nt, Human
uccgcugcugcaggaacccagcuagcuggcca

SEQ ID NO: 501500 - RNA, 32 nt, Human
uccgcugcuucuguggaagugagcaugguugg

SEQ ID NO: 501501 - RNA, 21 nt, Human
uccgcugcuugcaaccucuag

SEQ ID NO: 501502 - RNA, 32 nt, Human
uccgcugcuuuaccaggaaggauggaaggggc

SEQ ID NO: 501503 - RNA, 32 nt, Human
uccgcuggcacccagaggcaauggguaagguu

SEQ ID NO: 501504 - RNA, 32 nt, Human
uccgcuggcgcaggcaggaggagcaggaggau

SEQ ID NO: 501505 - RNA, 32 nt, Human
uccgcuggggcagagggucgcggcggcuggga

SEQ ID NO: 501506 - RNA, 32 nt, Human
uccgcuggugcagcuuuccuuuuugccucuuu

SEQ ID NO: 501507 - RNA, 32 nt, Human
uccgcugguggaggugagggcgcccggcaggc

SEQ ID NO: 501508 - RNA, 32 nt, Human
uccgcuggugucacuauggccugggugagagg

SEQ ID NO: 501509 - RNA, 32 nt, Human
uccgcugucccagggugccauggagauggaga

SEQ ID NO: 501510 - RNA, 32 nt, Human
uccgcugugaugacauuuagaccucauuugug

SEQ ID NO: 501511 - RNA, 32 nt, Human
uccgcugugcuuccucugcaguaugaagacuu

SEQ ID NO: 501512 - RNA, 32 nt, Human
uccgcugugggugguccccagcacuccucugu

SEQ ID NO: 501513 - RNA, 32 nt, Human
uccgcuguuuccucugccaccaugaggaacau

SEQ ID NO: 501514 - RNA, 32 nt, Human
uccgcuuaauuucaaagauaaaaugcaguuac

SEQ ID NO: 501515 - RNA, 32 nt, Human
uccgcuucccaggcuggggugcaguggugcga

SEQ ID NO: 501516 - RNA, 32 nt, Human
uccgcuucccagguaauauuauuuaaauaaaa

SEQ ID NO: 501517 - RNA, 25 nt, Human
uccgcuuccuggagguuugcaguga

SEQ ID NO: 501518 - RNA, 32 nt, Human
uccgcuucucccugcagcccugccuuugcuga

SEQ ID NO: 501519 - RNA, 32 nt, Human
uccgcuucuccuccucuuccucccaggacgug

SEQ ID NO: 501520 - RNA, 32 nt, Human
uccgcuuggcccugccuucugccgcauccccg

SEQ ID NO: 501521 - RNA, 32 nt, Human
uccgcuuugcacuccaccccgguagcagcucc

SEQ ID NO: 501522 - RNA, 32 nt, Human
uccgcuuuguccugcugacccacuuagaccuc

SEQ ID NO: 501523 - RNA, 32 nt, Human
uccggaagcugaggcaggagaauggcuugaac

SEQ ID NO: 501524 - RNA, 31 nt, Human
uccggaaggcacuuuaaucaugccuaagagc

SEQ ID NO: 501525 - RNA, 32 nt, Human
uccggaagggagcaccggagaagacuugcaca

SEQ ID NO: 501526 - RNA, 32 nt, Human
uccggaaguggaggcgggagcggcacggcagc

SEQ ID NO: 501527 - RNA, 32 nt, Human
uccggaaugccacccacaucuuccauuuccau

SEQ ID NO: 501528 - RNA, 32 nt, Human
uccggacaaaggacggaggaggggcuggacgg

SEQ ID NO: 501529 - RNA, 32 nt, Human
uccggacaaauauccacccaagagaaccaauc

SEQ ID NO: 501530 - RNA, 32 nt, Human
uccggacaccaugucugugcgcuuuucuucua

SEQ ID NO: 501531 - RNA, 32 nt, Human
uccggacagcggucaaggcaaggaugucaugc

SEQ ID NO: 501532 - RNA, 32 nt, Human
uccggaccagcccucgggagucgccgacccgg

SEQ ID NO: 501533 - RNA, 32 nt, Human
uccggaccccacucugcccuccaaaaagacaa

SEQ ID NO: 501534 - RNA, 32 nt, Human
uccggaccugccucgagccucaggcugcugaa

SEQ ID NO: 501535 - RNA, 32 nt, Human
uccggacggggcgcucucccacccucaggcuc

SEQ ID NO: 501536 - RNA, 32 nt, Human
uccggacgugccacuucugccucguagaagac

SEQ ID NO: 501537 - RNA, 32 nt, Human
uccggacuuucauuuugggaggauggaugaac

SEQ ID NO: 501538 - RNA, 32 nt, Human
uccggagaccagccuggccaacauggugaaac

SEQ ID NO: 501539 - RNA, 32 nt, Human
uccggagagaggaucagguguuuucagguuaa

SEQ ID NO: 501540 - RNA, 32 nt, Human
uccggagagaugguggguugccauucugguag

SEQ ID NO: 501541 - RNA, 32 nt, Human
uccggagaggagaaggaggaagaagaggagga

SEQ ID NO: 501542 - RNA, 32 nt, Human
uccggagaugagccggcgaggccaggugcggg

SEQ ID NO: 501543 - RNA, 32 nt, Human
uccggagcagccgccgcccgaccgcgccgagc

SEQ ID NO: 501544 - RNA, 32 nt, Human
uccggagccgcccaccagguugccaggaggag

SEQ ID NO: 501545 - RNA, 32 nt, Human
uccggagccuugaggccaggagggcagugagc

SEQ ID NO: 501546 - RNA, 32 nt, Human
uccggaggcugagccaggagaaucgcuugaac

SEQ ID NO: 501547 - RNA, 32 nt, Human
uccggaggcugaggcaggagaaucacuugaag

SEQ ID NO: 501548 - RNA, 32 nt, Human
uccggaggcugaggcaggagaaucgcuugaac

SEQ ID NO: 501549 - RNA, 32 nt, Human
uccggaggcugaggcaggagaaucucuugaac

SEQ ID NO: 501550 - RNA, 32 nt, Human
uccggaggcugaggcaggagaauggcgugaac

SEQ ID NO: 501551 - RNA, 32 nt, Human
uccggagggauaauuggcagggcaguucgguc

SEQ ID NO: 501552 - RNA, 32 nt, Human
uccggaggggacccagcuccucugagccauac

SEQ ID NO: 501553 - RNA, 32 nt, Human
uccggaguaaugggguucagcucuugcaacgu

SEQ ID NO: 501554 - RNA, 23 nt, Human
uccggaguagcgccgggcucccu

SEQ ID NO: 501555 - RNA, 32 nt, Human
uccggaguccaaaacuccugccucucggccgc

SEQ ID NO: 501556 - RNA, 32 nt, Human
uccggaucagugaccaccaccacguucagguu

SEQ ID NO: 501557 - RNA, 32 nt, Human
uccggauccucuucauucuuuucggcuacuca

SEQ ID NO: 501558 - RNA, 21 nt, Human
uccggaugaaguaccagagug

SEQ ID NO: 501559 - RNA, 32 nt, Human
uccggaugacugcgggcaggccuggauaauau

SEQ ID NO: 501560 - RNA, 32 nt, Human
uccggaugccccugcuauagggagaggcagca

SEQ ID NO: 501561 - RNA, 32 nt, Human
uccggaugcucacuccaaagucucagcaggcc

SEQ ID NO: 501562 - RNA, 32 nt, Human
uccggaugcugagacaggagaaucucuugaac

SEQ ID NO: 501563 - RNA, 32 nt, Human
uccggauggagggagagguugugcugaccacc

SEQ ID NO: 501564 - RNA, 32 nt, Human
uccggauggaguuuccccucugcggcugccuc

SEQ ID NO: 501565 - RNA, 32 nt, Human
uccggcaccuccaaaccuaccccacagucagu

SEQ ID NO: 501566 - RNA, 32 nt, Human
uccggcacuugggcuccagucgcgcccuccaa

SEQ ID NO: 501567 - RNA, 32 nt, Human
uccggcagccacagaaggcugcagcccagccc

SEQ ID NO: 501568 - RNA, 32 nt, Human
uccggcagccuggcuccagucugacccaaacc

SEQ ID NO: 501569 - RNA, 24 nt, Human
uccggcagguggagcuugcaguga

SEQ ID NO: 501570 - RNA, 32 nt, Human
uccggcauaugcaaagauaggcagugcuguuc

SEQ ID NO: 501571 - RNA, 21 nt, Human
uccggccacugggaggcgcug

SEQ ID NO: 501572 - RNA, 32 nt, Human
uccggccagccgcgguccagagcgcgcgaggu

SEQ ID NO: 501573 - RNA, 32 nt, Human
uccggccagcugccugcccucuugucugugcu

SEQ ID NO: 501574 - RNA, 32 nt, Human
uccggccagcuuccuggguaccaaaauagcaa

SEQ ID NO: 501575 - RNA, 32 nt, Human
uccggccaggccuuguaggaaaaggccccgcc

SEQ ID NO: 501576 - RNA, 32 nt, Human
uccggccaggguggagugggugaggcagacau

SEQ ID NO: 501577 - RNA, 32 nt, Human
uccggcccacugucuguggcccauugucauug

SEQ ID NO: 501578 - RNA, 24 nt, Human
uccggcccaucuaucgggcaccgg

SEQ ID NO: 501579 - RNA, 32 nt, Human
uccggccccaggcuggccugagcugccgggca

SEQ ID NO: 501580 - RNA, 32 nt, Human
uccggccccgucagcgugugcugguccagcca

SEQ ID NO: 501581 - RNA, 32 nt, Human
uccggccccugccugcugggccgcccggguug

SEQ ID NO: 501582 - RNA, 21 nt, Human
uccggccccuucccccuuccc

SEQ ID NO: 501583 - RNA, 32 nt, Human
uccggcccuagccuggccgggcgggugccggg

SEQ ID NO: 501584 - RNA, 32 nt, Human
uccggcccuccuccuccuccugguccuugcua

SEQ ID NO: 501585 - RNA, 32 nt, Human
uccggccgccucgcccuuccccggcuccgcuc

SEQ ID NO: 501586 - RNA, 23 nt, Human
uccggccgcucugcacaaacugg

SEQ ID NO: 501587 - RNA, 23 nt, Human
uccggccgcuucauugucaccgg

SEQ ID NO: 501588 - RNA, 22 nt, Human
uccggccggucugcggcguugg

SEQ ID NO: 501589 - RNA, 19 nt, Human
uccggccugagcugucgca

SEQ ID NO: 501590 - RNA, 22 nt, Human
uccggccugaggcggcuggggc

SEQ ID NO: 501591 - RNA, 23 nt, Human
uccggccugaugacagagcgaga

SEQ ID NO: 501592 - RNA, 32 nt, Human
uccggccugccugccugccugccugccucucc

SEQ ID NO: 501593 - RNA, 32 nt, Human
uccggccugccugugcuguccccgcgcccugu

SEQ ID NO: 501594 - RNA, 32 nt, Human
uccggccugcucacggcgcuccaggccugccc

SEQ ID NO: 501595 - RNA, 32 nt, Human
uccggccuggagcucccagggccgaggucacu

SEQ ID NO: 501596 - RNA, 23 nt, Human
uccggccugggaugcgggccagg

SEQ ID NO: 501597 - RNA, 32 nt, Human
uccggccugggcaacagagacccugucucuau

SEQ ID NO: 501598 - RNA, 24 nt, Human
uccggccugggcaacagaggaaga

SEQ ID NO: 501599 - RNA, 24 nt, Human
uccggccugggcaacguagugaga

SEQ ID NO: 501600 - RNA, 32 nt, Human
uccggccugggcagcgccccagaagccucaua

SEQ ID NO: 501601 - RNA, 24 nt, Human
uccggccugggcgacagagcgaga

SEQ ID NO: 501602 - RNA, 32 nt, Human
uccggccugggcgacagagcgagacuccgucu

SEQ ID NO: 501603 - RNA, 32 nt, Human
uccggccugggcgacagagcgagacucugucu

SEQ ID NO: 501604 - RNA, 32 nt, Human
uccggccugggcgacagagcgagacugucuca

SEQ ID NO: 501605 - RNA, 22 nt, Human
uccggccugggcgagagugaga

SEQ ID NO: 501606 - RNA, 32 nt, Human
uccggccugggcugcuggaugcagcagcggcu

SEQ ID NO: 501607 - RNA, 24 nt, Human
uccggccuggggacaagagcaaga

SEQ ID NO: 501608 - RNA, 32 nt, Human
uccggccuggggacaagagcaagacuucgccu

SEQ ID NO: 501609 - RNA, 24 nt, Human
uccggccugggugaaagagcgaga

SEQ ID NO: 501610 - RNA, 32 nt, Human
uccggccugggugaaagagcgagacuccgucu

SEQ ID NO: 501611 - RNA, 32 nt, Human
uccggccugggugacaaagcaagacucugucu

SEQ ID NO: 501612 - RNA, 24 nt, Human
uccggccugggugacagaaggagg

SEQ ID NO: 501613 - RNA, 32 nt, Human
uccggccugggugacagaaggaggcucugccu

SEQ ID NO: 501614 - RNA, 24 nt, Human
uccggccugggugacagagccaga

SEQ ID NO: 501615 - RNA, 32 nt, Human
uccggccugggugacagagccagacuccaucu

SEQ ID NO: 501616 - RNA, 32 nt, Human
uccggccugggugacagagugagacccgugcu

SEQ ID NO: 501617 - RNA, 32 nt, Human
uccggccugggugauggagcaagaccucgucu

SEQ ID NO: 501618 - RNA, 22 nt, Human
uccggccuggugaccgauggga

SEQ ID NO: 501619 - RNA, 23 nt, Human
uccggccuguguguggcgcgagg

SEQ ID NO: 501620 - RNA, 32 nt, Human
uccggccuucuaagagguaugugucaaccuca

SEQ ID NO: 501621 - RNA, 32 nt, Human
uccggcgcgugguacaagcacguggcgagucc

SEQ ID NO: 501622 - RNA, 32 nt, Human
uccggcggcagcgcuuccucuggcagggccga

SEQ ID NO: 501623 - RNA, 22 nt, Human
uccggcggccccucugcugcuc

SEQ ID NO: 501624 - RNA, 32 nt, Human
uccggcggccgggagagcgagugagcgagcgg

SEQ ID NO: 501625 - RNA, 32 nt, Human
uccggcggccucucuccucucccucagugacu

SEQ ID NO: 501626 - RNA, 32 nt, Human
uccggcggccucugcugccgccuccggagacg

SEQ ID NO: 501627 - RNA, 32 nt, Human
uccggcgggcugggcugggaccccucugccuc

SEQ ID NO: 501628 - RNA, 32 nt, Human
uccggcggggacccagggagugguuugggguc

SEQ ID NO: 501629 - RNA, 32 nt, Human
uccggcgugccgcucuucuccuccaggccggc

SEQ ID NO: 501630 - RNA, 32 nt, Human
uccggcgugguggcacacuccuguaaucccag

SEQ ID NO: 501631 - RNA, 32 nt, Human
uccggcuaccugcccucccugccuuccccagg

SEQ ID NO: 501632 - RNA, 21 nt, Human
uccggcuacuugggaggcuga

SEQ ID NO: 501633 - RNA, 22 nt, Human
uccggcuagugcuucugugaua

SEQ ID NO: 501634 - RNA, 23 nt, Human
uccggcuaugcuucuucauacca

SEQ ID NO: 501635 - RNA, 32 nt, Human
uccggcucacugcaguuuugaccucccaggcu

SEQ ID NO: 501636 - RNA, 32 nt, Human
uccggcuccgagcgugguucccuucccguguc

SEQ ID NO: 501637 - RNA, 32 nt, Human
uccggcuccuccaucuuggccucggcaguggc

SEQ ID NO: 501638 - RNA, 32 nt, Human
uccggcucgccucgggcugggcucgggcuccg

SEQ ID NO: 501639 - RNA, 32 nt, Human
uccggcucucugggugagagaccgagaggggc

SEQ ID NO: 501640 - RNA, 32 nt, Human
uccggcucugggcgugguucccuucccguguc

SEQ ID NO: 501641 - RNA, 32 nt, Human
uccggcugaggucucccagagacaggcuuucc

SEQ ID NO: 501642 - RNA, 32 nt, Human
uccggcuuccaccagcccaucgcuccacgcuc

SEQ ID NO: 501643 - RNA, 32 nt, Human
uccggcuucccaagggguacugugcagacuga

SEQ ID NO: 501644 - RNA, 32 nt, Human
uccggcuucucuuccuaaggagggucugcggc

SEQ ID NO: 501645 - RNA, 22 nt, Human
uccggcuugggcgagagugaga

SEQ ID NO: 501646 - RNA, 32 nt, Human
uccggcuuugggccuggcaggcuggcacaucc

SEQ ID NO: 501647 - RNA, 21 nt, Human
uccgggaaagcagaggaugca

SEQ ID NO: 501648 - RNA, 25 nt, Human
uccgggaaagcagagguugcaguga

SEQ ID NO: 501649 - RNA, 32 nt, Human
uccgggaacuguggugcugcuuucugugcaca

SEQ ID NO: 501650 - RNA, 24 nt, Human
uccgggaagcagagguuguaguga

SEQ ID NO: 501651 - RNA, 32 nt, Human
uccgggaagccgcggcgagcgcgcaccgccuu

SEQ ID NO: 501652 - RNA, 32 nt, Human
uccgggaagucccgcgccagcccaggagaacc

SEQ ID NO: 501653 - RNA, 27 nt, Human
uccgggaagucuuccugguggcaguga

SEQ ID NO: 501654 - RNA, 32 nt, Human
uccgggacaagccuggccacccucgcugugau

SEQ ID NO: 501655 - RNA, 21 nt, Human
uccgggacccguucccugcuc

SEQ ID NO: 501656 - RNA, 25 nt, Human
uccgggaccggugacaggcgcgggg

SEQ ID NO: 501657 - RNA, 32 nt, Human
uccgggacucuagcagcggucuccgcgacccc

SEQ ID NO: 501658 - RNA, 32 nt, Human
uccgggagaaggcagagggcagaggcaggaaa

SEQ ID NO: 501659 - RNA, 24 nt, Human
uccgggagaugcauguugcaguga

SEQ ID NO: 501660 - RNA, 23 nt, Human
uccgggagcagugguggcggugg

SEQ ID NO: 501661 - RNA, 32 nt, Human
uccgggaggaaggcgcccggcugcgucugcag

SEQ ID NO: 501662 - RNA, 32 nt, Human
uccgggaggcagagauugcagugggccuagau

SEQ ID NO: 501663 - RNA, 23 nt, Human
uccgggaggcagagguugcagga

SEQ ID NO: 501664 - RNA, 24 nt, Human
uccgggaggcagagguugcaguga

SEQ ID NO: 501665 - RNA, 24 nt, Human
uccgggaggcagagguugcuguga

SEQ ID NO: 501666 - RNA, 32 nt, Human
uccgggaggcccagggaaggugcaauggauga

SEQ ID NO: 501667 - RNA, 24 nt, Human
uccgggaggcggagcuugcagcga

SEQ ID NO: 501668 - RNA, 32 nt, Human
uccgggaggcggagcuugcagcgagccgggau

SEQ ID NO: 501669 - RNA, 32 nt, Human
uccgggaggcggagguugcagugaaccgaacc

SEQ ID NO: 501670 - RNA, 32 nt, Human
uccgggaggcggagguugcggugagccaaggu

SEQ ID NO: 501671 - RNA, 24 nt, Human
uccgggaggcgggucuugcaguga

SEQ ID NO: 501672 - RNA, 32 nt, Human
uccgggaggcgggucuugcagugagcagagau

SEQ ID NO: 501673 - RNA, 20 nt, Human
uccgggagggaugcuucugg

SEQ ID NO: 501674 - RNA, 32 nt, Human
uccgggagggugcaggcaggagagggaaaggc

SEQ ID NO: 501675 - RNA, 32 nt, Human
uccgggagguggagguugcagugagccaagau

SEQ ID NO: 501676 - RNA, 21 nt, Human
uccgggaggugguucgggaua

SEQ ID NO: 501677 - RNA, 18 nt, Human
uccgggauccccacucuc

SEQ ID NO: 501678 - RNA, 25 nt, Human
uccgggcaagcggagguugcaguga

SEQ ID NO: 501679 - RNA, 32 nt, Human
uccgggcaagggaagacaggcggcgagacgga

SEQ ID NO: 501680 - RNA, 25 nt, Human
uccgggcaaguggagguugcuauga

SEQ ID NO: 501681 - RNA, 32 nt, Human
uccgggcacagaagaaaaagaauuauuccauc

SEQ ID NO: 501682 - RNA, 32 nt, Human
uccgggcaggagccuugccucucagguggcgg

SEQ ID NO: 501683 - RNA, 32 nt, Human
uccgggcaggccugaggcugggaucccgugcu

SEQ ID NO: 501684 - RNA, 32 nt, Human
uccgggcagugagagggagggagcgccggccg

SEQ ID NO: 501685 - RNA, 20 nt, Human
uccgggccagcccugcuggg

SEQ ID NO: 501686 - RNA, 32 nt, Human
uccgggcccaccugcgggugcaccuuaaaucg

SEQ ID NO: 501687 - RNA, 32 nt, Human
uccgggcccagcucuuccucccggcugcgucu

SEQ ID NO: 501688 - RNA, 32 nt, Human
uccgggccccugcccuccucugcaccugacca

SEQ ID NO: 501689 - RNA, 21 nt, Human
uccgggccucugccgaccuca

SEQ ID NO: 501690 - RNA, 32 nt, Human
uccgggccucugcggagcccugggcagcucug

SEQ ID NO: 501691 - RNA, 26 nt, Human
uccgggccugccugagguugcaguga

SEQ ID NO: 501692 - RNA, 23 nt, Human
uccgggccuguggauuuugcagu

SEQ ID NO: 501693 - RNA, 32 nt, Human
uccgggccuuucucuggcuuccuuggcuugcc

SEQ ID NO: 501694 - RNA, 32 nt, Human
uccgggcgcgagaagaggggagccaggccgag

SEQ ID NO: 501695 - RNA, 22 nt, Human
uccgggcggggacggggcgggg

SEQ ID NO: 501696 - RNA, 32 nt, Human
uccgggcuaagagggccagcucccagccucuu

SEQ ID NO: 501697 - RNA, 26 nt, Human
uccgggcuaguguaagcuugcaguga

SEQ ID NO: 501698 - RNA, 20 nt, Human
uccgggcucuccugcugcuc

SEQ ID NO: 501699 - RNA, 32 nt, Human
uccgggcugcaucaucuuccuggacuguuucu

SEQ ID NO: 501700 - RNA, 32 nt, Human
uccgggcuggaaggcuggcguaggacuugggg

SEQ ID NO: 501701 - RNA, 32 nt, Human
uccgggcugggcgacagagcgagacccugucu

SEQ ID NO: 501702 - RNA, 32 nt, Human
uccgggcuggggagaaguugaaggguccuugu

SEQ ID NO: 501703 - RNA, 32 nt, Human
uccgggcuguguccuaaaugcaaagcacaccu

SEQ ID NO: 501704 - RNA, 25 nt, Human
uccgggcuugcuggagguuguggga

SEQ ID NO: 501705 - RNA, 32 nt, Human
uccggggaagggcagaggucaccaggcugguc

SEQ ID NO: 501706 - RNA, 22 nt, Human
uccggggagaacaucccuccca

SEQ ID NO: 501707 - RNA, 32 nt, Human
uccggggaggcccuagagcagagcagagcagc

SEQ ID NO: 501708 - RNA, 32 nt, Human
uccggggagggcccugggccagcggcuguccg

SEQ ID NO: 501709 - RNA, 32 nt, Human
uccggggaggggcacagggcuccagauaguaa

SEQ ID NO: 501710 - RNA, 32 nt, Human
uccggggagguggaaguugcagugggccaaga

SEQ ID NO: 501711 - RNA, 32 nt, Human
uccggggcccucucugcaccggacagucggaa

SEQ ID NO: 501712 - RNA, 32 nt, Human
uccggggccuggggccuccuugccuggcuucu

SEQ ID NO: 501713 - RNA, 32 nt, Human
uccggggcuacaccgagugcuugcagcggguu

SEQ ID NO: 501714 - RNA, 32 nt, Human
uccggggcucaagcgauccucccgcuucagcc

SEQ ID NO: 501715 - RNA, 32 nt, Human
uccggggcucaagcgcuucuccugccucagcc

SEQ ID NO: 501716 - RNA, 32 nt, Human
uccgggggaacccgguccggaggcagcagugu

SEQ ID NO: 501717 - RNA, 32 nt, Human
uccgggggcagggagaggcuagaggggcagga

SEQ ID NO: 501718 - RNA, 32 nt, Human
uccgggggcccaggcggggaaguggggugcgg

SEQ ID NO: 501719 - RNA, 21 nt, Human
uccggggggcggggggaggga

SEQ ID NO: 501720 - RNA, 32 nt, Human
uccgggguucaagccauucuccugccuaagcc

SEQ ID NO: 501721 - RNA, 32 nt, Human
uccgggguucaagcgauucuccugccucagcc

SEQ ID NO: 501722 - RNA, 32 nt, Human
uccggguaauccagcacccugaggcuucacug

SEQ ID NO: 501723 - RNA, 21 nt, Human
uccggguagcagcuccagggc

SEQ ID NO: 501724 - RNA, 26 nt, Human
uccgggucagggugaccucuggggug

SEQ ID NO: 501725 - RNA, 32 nt, Human
uccgggucugggcucggagauuacaggcggcc

SEQ ID NO: 501726 - RNA, 32 nt, Human
uccgggugcaucgcugcguccugggugcacgu

SEQ ID NO: 501727 - RNA, 32 nt, Human
uccgggugccgguugagguugcuggugggccu

SEQ ID NO: 501728 - RNA, 32 nt, Human
uccggguggcugcuccggcccuuccgccucca

SEQ ID NO: 501729 - RNA, 32 nt, Human
uccggguggcugguucucagugguugucucau

SEQ ID NO: 501730 - RNA, 23 nt, Human
uccgggugggcguccauggugcu

SEQ ID NO: 501731 - RNA, 32 nt, Human
uccgggugucaccuccagagggcgccggcugc

SEQ ID NO: 501732 - RNA, 32 nt, Human
uccggguugggagcuugcugugucuaaccucc

SEQ ID NO: 501733 - RNA, 32 nt, Human
uccggguugggauggagauaggaggaucucag

SEQ ID NO: 501734 - RNA, 24 nt, Human
uccggguuugcaggagguugcagu

SEQ ID NO: 501735 - RNA, 32 nt, Human
uccgguagggaaauggucgugcuuucgguccc

SEQ ID NO: 501736 - RNA, 32 nt, Human
uccggucauuugugcccuucucuugucaucuc

SEQ ID NO: 501737 - RNA, 32 nt, Human
uccggucauuugugccuuucucuugucaucuc

SEQ ID NO: 501738 - RNA, 32 nt, Human
uccgguccuggagcuugcaucgguuucuucag

SEQ ID NO: 501739 - RNA, 32 nt, Human
uccgguccuggccugggcugggcccagccuga

SEQ ID NO: 501740 - RNA, 32 nt, Human
uccgguccuuucuccuccccuagcuggggaga

SEQ ID NO: 501741 - RNA, 24 nt, Human
uccggucugagcgacagagcaaga

SEQ ID NO: 501742 - RNA, 32 nt, Human
uccggucuggcgcucccuuuucuccacaccca

SEQ ID NO: 501743 - RNA, 20 nt, Human
uccggucuggguccccgaga

SEQ ID NO: 501744 - RNA, 24 nt, Human
uccggugaagcggagguguggugg

SEQ ID NO: 501745 - RNA, 31 nt, Human
uccggugccaauaaauccuuguggaaucuga

SEQ ID NO: 501746 - RNA, 32 nt, Human
uccggugccugcaccaaaucaggaagcuccua

SEQ ID NO: 501747 - RNA, 32 nt, Human
uccggugcgcagccaguggagcucuuuucacc

SEQ ID NO: 501748 - RNA, 32 nt, Human
uccgguggagccaauucaccagcaggucccgg

SEQ ID NO: 501749 - RNA, 32 nt, Human
uccgguggaggcagaggcaguccuggggcucu

SEQ ID NO: 501750 - RNA, 32 nt, Human
uccgguggcggggagagcgggcucccagcgcu

SEQ ID NO: 501751 - RNA, 32 nt, Human
uccgguggcucacgccuguaaucccagcaauu

SEQ ID NO: 501752 - RNA, 32 nt, Human
uccgguggcugcagggcgcaggguagccgugu

SEQ ID NO: 501753 - RNA, 32 nt, Human
uccggugggcggagcuuggaggcggcgggaac

SEQ ID NO: 501754 - RNA, 32 nt, Human
uccgguggugcuggaggcuccacucuccuuag

SEQ ID NO: 501755 - RNA, 32 nt, Human
uccggugguuguucgagacuugcccaaugagu

SEQ ID NO: 501756 - RNA, 32 nt, Human
uccggugugguggcucacaccuguaaucccaa

SEQ ID NO: 501757 - RNA, 32 nt, Human
uccgguguuugccuuuucagauuauagaagua

SEQ ID NO: 501758 - RNA, 32 nt, Human
uccgguuauucacuugaguuguugcuuauacu

SEQ ID NO: 501759 - RNA, 32 nt, Human
uccgguuauuuaagucauuucugugauucuau

SEQ ID NO: 501760 - RNA, 32 nt, Human
uccgguucauucuuaccuguguuaggccaugu

SEQ ID NO: 501761 - RNA, 32 nt, Human
uccgguuccuaaauauccuggcccagguucuc

SEQ ID NO: 501762 - RNA, 24 nt, Human
uccgguucuguggcgggugcgaga

SEQ ID NO: 501763 - RNA, 32 nt, Human
uccgguugagacgcacucccacccugggugcu

SEQ ID NO: 501764 - RNA, 32 nt, Human
uccgguugagaguuucccaguuuccugauagu

SEQ ID NO: 501765 - RNA, 19 nt, Human
uccgguuggagccauugca

SEQ ID NO: 501766 - RNA, 32 nt, Human
uccgguuucuauggccuugcuguguacuuucc

SEQ ID NO: 501767 - RNA, 32 nt, Human
uccgguuugcaguacuugcacacauuuuggag

SEQ ID NO: 501768 - RNA, 32 nt, Human
uccgguuugcaucacccggaccgggggauuag

SEQ ID NO: 501769 - RNA, 25 nt, Human
uccgguuugccuacgccaagaggac

SEQ ID NO: 501770 - RNA, 32 nt, Human
uccgguuuuaauauugcuggauuugcuaccuu

SEQ ID NO: 501771 - RNA, 32 nt, Human
uccguaacucggcuguguucuguucauguuug

SEQ ID NO: 501772 - RNA, 32 nt, Human
uccguaagaugaaggucacaaagaaagucaac

SEQ ID NO: 501773 - RNA, 32 nt, Human
uccguaagcuuagugggccugaaucugcggac

SEQ ID NO: 501774 - RNA, 32 nt, Human
uccguacccacugcugaugguuucccagagcc

SEQ ID NO: 501775 - RNA, 32 nt, Human
uccguaccccuucaaauccuuacucuccuaaa

SEQ ID NO: 501776 - RNA, 32 nt, Human
uccguaccuugccuagccucucccucuccccc

SEQ ID NO: 501777 - RNA, 32 nt, Human
uccguacugugaagaaagaacucuccacccca

SEQ ID NO: 501778 - RNA, 32 nt, Human
uccguagcccaggcuggagugcaguggcacag

SEQ ID NO: 501779 - RNA, 32 nt, Human
uccguagccugggugaagucccagaagcuggu

SEQ ID NO: 501780 - RNA, 32 nt, Human
uccguagggcuggacccuacaggcuccagagc

SEQ ID NO: 501781 - RNA, 32 nt, Human
uccguaguccccgccccaccucccaggaagua

SEQ ID NO: 501782 - RNA, 32 nt, Human
uccguaucggggacugugccguguuccucucu

SEQ ID NO: 501783 - RNA, 32 nt, Human
uccguauucuucuuucaguuucuccauuagau

SEQ ID NO: 501784 - RNA, 32 nt, Human
uccgucaacucauauuuucaugcuguucauga

SEQ ID NO: 501785 - RNA, 32 nt, Human
uccgucacccaggcuggagugcaguggcaaga

SEQ ID NO: 501786 - RNA, 32 nt, Human
uccgucacccaggcuggagugcaguggcgcca

SEQ ID NO: 501787 - RNA, 32 nt, Human
uccgucaccccagcucugccugugccuuuauc

SEQ ID NO: 501788 - RNA, 32 nt, Human
uccgucacuccgauagccucacggccacccug

SEQ ID NO: 501789 - RNA, 32 nt, Human
uccgucagagugcuccuggugccaugaacgga

SEQ ID NO: 501790 - RNA, 32 nt, Human
uccgucaguuauuaguggauggagauucccac

SEQ ID NO: 501791 - RNA, 32 nt, Human
uccgucauccaugcccucccaggacccuccac

SEQ ID NO: 501792 - RNA, 32 nt, Human
uccguccaggaggacaaagugggauuugaaga

SEQ ID NO: 501793 - RNA, 32 nt, Human
uccguccaucugucccgcugccccgcggccca

SEQ ID NO: 501794 - RNA, 32 nt, Human
uccgucccaggcccauuuuugacagauggcgg

SEQ ID NO: 501795 - RNA, 32 nt, Human
uccgucccccuuccgccuucucccuuuucuca

SEQ ID NO: 501796 - RNA, 32 nt, Human
uccguccccgccgccucacugcagccagcgug

SEQ ID NO: 501797 - RNA, 32 nt, Human
uccgucccugggauguccucauccccuuuucg

SEQ ID NO: 501798 - RNA, 19 nt, Human
uccgucccugucccgggcu

SEQ ID NO: 501799 - RNA, 32 nt, Human
uccgucccuuggggaccacaggcaucagcagu

SEQ ID NO: 501800 - RNA, 32 nt, Human
uccguccgccgccaccacccacuccggacaca

SEQ ID NO: 501801 - RNA, 32 nt, Human
uccguccgcgucgcgucaccccaaacccuaag

SEQ ID NO: 501802 - RNA, 32 nt, Human
uccguccgguucuugcuauauugccccaggcu

SEQ ID NO: 501803 - RNA, 32 nt, Human
uccguccguccccuccugccugccccucuucu

SEQ ID NO: 501804 - RNA, 32 nt, Human
uccguccuccugucucagggcuggcaggggga

SEQ ID NO: 501805 - RNA, 32 nt, Human
uccguccugcuccccagcucacucucugaagc

SEQ ID NO: 501806 - RNA, 24 nt, Human
uccguccugggugacaaagugaga

SEQ ID NO: 501807 - RNA, 32 nt, Human
uccguccugggugacaaagugagacucccucu

SEQ ID NO: 501808 - RNA, 32 nt, Human
uccguccuuucuuugcugucaugcuggcuugc

SEQ ID NO: 501809 - RNA, 32 nt, Human
uccgucgaucuauuuucgucccuguccucuug

SEQ ID NO: 501810 - RNA, 32 nt, Human
uccgucggaggaaaaugacuccccagucgcug

SEQ ID NO: 501811 - RNA, 32 nt, Human
uccgucggcccagacugaagugcaguggcaca

SEQ ID NO: 501812 - RNA, 32 nt, Human
uccgucguagaagaauuagaguagaaguuguc

SEQ ID NO: 501813 - RNA, 24 nt, Human
uccgucucagacacaccuccauga

SEQ ID NO: 501814 - RNA, 32 nt, Human
uccgucuccacuaaaauacaaaauuagcuggg

SEQ ID NO: 501815 - RNA, 32 nt, Human
uccgucuccggcccugaaccagcuccagcccu

SEQ ID NO: 501816 - RNA, 32 nt, Human
uccgucucgcucaucaucaccgacauguccuu

SEQ ID NO: 501817 - RNA, 32 nt, Human
uccgucucucaaagugcugggauuagaggugu

SEQ ID NO: 501818 - RNA, 32 nt, Human
uccgucucuggagagcucugggcacuuaacau

SEQ ID NO: 501819 - RNA, 32 nt, Human
uccgucucuggagcccaccagggaaggcccuc

SEQ ID NO: 501820 - RNA, 32 nt, Human
uccgucucuuucucccucagauccuccccaca

SEQ ID NO: 501821 - RNA, 32 nt, Human
uccgucugccuaaaucacuuuucucgcagaag

SEQ ID NO: 501822 - RNA, 31 nt, Human
uccgucugccucuuuggucaguuucaggucc

SEQ ID NO: 501823 - RNA, 32 nt, Human
uccgucuguggcuuguuucuccauucucuuau

SEQ ID NO: 501824 - RNA, 32 nt, Human
uccgucuuacaacuaagacauucuuuuuauua

SEQ ID NO: 501825 - RNA, 32 nt, Human
uccgucuucacauugugcacagaucugaggau

SEQ ID NO: 501826 - RNA, 32 nt, Human
uccgucuucugguccacucugcucugagcagc

SEQ ID NO: 501827 - RNA, 32 nt, Human
uccgucuuguaaauguuuggcacuuugcuacu

SEQ ID NO: 501828 - RNA, 32 nt, Human
uccgugaaaccagccucagaucagggcccugc

SEQ ID NO: 501829 - RNA, 32 nt, Human
uccgugaagggagugccucucugggacccccu

SEQ ID NO: 501830 - RNA, 32 nt, Human
uccgugacccuccggcugcucggagugaacag

SEQ ID NO: 501831 - RNA, 27 nt, Human
uccgugagagugagugacggagugaga

SEQ ID NO: 501832 - RNA, 32 nt, Human
uccgugagcucuugggaaaggggugaauucac

SEQ ID NO: 501833 - RNA, 23 nt, Human
uccgugaggugguagaauacucu

SEQ ID NO: 501834 - RNA, 32 nt, Human
uccgugcacacagcguucucugauugccaagc

SEQ ID NO: 501835 - RNA, 32 nt, Human
uccgugcacgucaaaugcuccuuucccuugug

SEQ ID NO: 501836 - RNA, 32 nt, Human
uccgugcagauacucucuucacuauuccuagg

SEQ ID NO: 501837 - RNA, 32 nt, Human
uccgugcauuugacggcauccauguccaaggc

SEQ ID NO: 501838 - RNA, 32 nt, Human
uccgugcccaggcuggagcuggccaauucucc

SEQ ID NO: 501839 - RNA, 32 nt, Human
uccgugcucagaggauccagaacggcagcugg

SEQ ID NO: 501840 - RNA, 32 nt, Human
uccgugcugaugaagaggaaacccacuuacag

SEQ ID NO: 501841 - RNA, 32 nt, Human
uccgugcuggacagcuccuuccucacguucuc

SEQ ID NO: 501842 - RNA, 32 nt, Human
uccgugcuuuucugguugagaucaugucauug

SEQ ID NO: 501843 - RNA, 32 nt, Human
uccguggagacagcagauccgagaagcggcga

SEQ ID NO: 501844 - RNA, 32 nt, Human
uccguggagagcugugcuuggaagagaaggac

SEQ ID NO: 501845 - RNA, 32 nt, Human
uccguggagaggcagagcuuucauacugaauu

SEQ ID NO: 501846 - RNA, 32 nt, Human
uccguggagagggacuggcagagcugaggcca

SEQ ID NO: 501847 - RNA, 24 nt, Human
uccguggaggccucugagcacaga

SEQ ID NO: 501848 - RNA, 32 nt, Human
uccguggaucuuucaugucucuguacauccug

SEQ ID NO: 501849 - RNA, 32 nt, Human
uccguggcgccucgccagcugcaggacgacgc

SEQ ID NO: 501850 - RNA, 32 nt, Human
uccguggcgcuaguccagcacgcccaggguua

SEQ ID NO: 501851 - RNA, 32 nt, Human
uccguggcguagggagcacuguuucuuuccag

SEQ ID NO: 501852 - RNA, 32 nt, Human
uccgugggacccucagcagcucuggcucugcc

SEQ ID NO: 501853 - RNA, 32 nt, Human
uccgugggcuuccguggugcagcccuggggca

SEQ ID NO: 501854 - RNA, 32 nt, Human
uccguggggagcaggagagggaggcggcggac

SEQ ID NO: 501855 - RNA, 17 nt, Human
uccguggugccuggaga

SEQ ID NO: 501856 - RNA, 32 nt, Human
uccguggugccuucuagcuuagaaccauuuuc

SEQ ID NO: 501857 - RNA, 22 nt, Human
uccguggugucccccgcaccca

SEQ ID NO: 501858 - RNA, 32 nt, Human
uccgugguuucauuucacuguggucaaucaca

SEQ ID NO: 501859 - RNA, 32 nt, Human
uccguguagggagcgggcggcggcgggggagg

SEQ ID NO: 501860 - RNA, 32 nt, Human
uccgugucucugagccccggguggcaggaccc

SEQ ID NO: 501861 - RNA, 32 nt, Human
uccgugucuggcuucaucuaaguggccugguc

SEQ ID NO: 501862 - RNA, 32 nt, Human
uccgugugagccacugagugguuaucaccuca

SEQ ID NO: 501863 - RNA, 32 nt, Human
uccgugugcugucugccaccuccucgggccac

SEQ ID NO: 501864 - RNA, 32 nt, Human
uccgugugcuguucuuuuggguucugagaggg

SEQ ID NO: 501865 - RNA, 32 nt, Human
uccgugugucaucugcaggagugaguaggccu

SEQ ID NO: 501866 - RNA, 32 nt, Human
uccguguuuuuaucacaccugcuccccagauu

SEQ ID NO: 501867 - RNA, 32 nt, Human
uccguuaaguguccuuaggaugcagugauuaa

SEQ ID NO: 501868 - RNA, 21 nt, Human
uccguuacugugagguugcug

SEQ ID NO: 501869 - RNA, 30 nt, Human
uccguuagccucucugggccucuguccauc

SEQ ID NO: 501870 - RNA, 31 nt, Human
uccguuagccucucugggccucuguccaucu

SEQ ID NO: 501871 - RNA, 32 nt, Human
uccguuaucuaaacccgucacuccaggaaaca

SEQ ID NO: 501872 - RNA, 32 nt, Human
uccguuaucucaucugaucuuuugcucuucca

SEQ ID NO: 501873 - RNA, 32 nt, Human
uccguuauguuuagaguagaaaauguuuaggu

SEQ ID NO: 501874 - RNA, 32 nt, Human
uccguucaccugugcaaaggcuuccucagaca

SEQ ID NO: 501875 - RNA, 32 nt, Human
uccguucacugcagccuccaccuccccgguuc

SEQ ID NO: 501876 - RNA, 32 nt, Human
uccguucagcauuccacgccccucucugcccu

SEQ ID NO: 501877 - RNA, 32 nt, Human
uccguucagggcccgcucagaaccugaggacc

SEQ ID NO: 501878 - RNA, 32 nt, Human
uccguucauagaaauuguguuugcuaacaagg

SEQ ID NO: 501879 - RNA, 32 nt, Human
uccguuccaguugcugccuaagccccauccuu

SEQ ID NO: 501880 - RNA, 32 nt, Human
uccguuccccuucaucuccgucccccucuuug

SEQ ID NO: 501881 - RNA, 21 nt, Human
uccguuccccuuuccccuccc

SEQ ID NO: 501882 - RNA, 32 nt, Human
uccguuccccuuuccccucccuucccuauccc

SEQ ID NO: 501883 - RNA, 32 nt, Human
uccguucccucaggaccccacugggugccgcu

SEQ ID NO: 501884 - RNA, 32 nt, Human
uccguuccucaagcuccgggcuggggcuuugg

SEQ ID NO: 501885 - RNA, 32 nt, Human
uccguucuccagaucuguuugcucuuaacagg

SEQ ID NO: 501886 - RNA, 32 nt, Human
uccguucuguucugcugggaguucuagaacca

SEQ ID NO: 501887 - RNA, 32 nt, Human
uccguugacucagugcugcugcuccagggugg

SEQ ID NO: 501888 - RNA, 32 nt, Human
uccguugacuucuguacaucuacaaugaauac

SEQ ID NO: 501889 - RNA, 32 nt, Human
uccguugagcaucuagacguuuccuuggcucu

SEQ ID NO: 501890 - RNA, 32 nt, Human
uccguugccaggcuggagugcuguggcgcuau

SEQ ID NO: 501891 - RNA, 32 nt, Human
uccguugcccagguuggagugcaguggcccau

SEQ ID NO: 501892 - RNA, 32 nt, Human
uccguugccucccagcccucuguauccaccug

SEQ ID NO: 501893 - RNA, 32 nt, Human
uccguuggaaacuugggcugaguaccgcggcg

SEQ ID NO: 501894 - RNA, 32 nt, Human
uccguugucggccucccacugcaguaucaccu

SEQ ID NO: 501895 - RNA, 32 nt, Human
uccguugucucucugcugugucgcccaacacu

SEQ ID NO: 501896 - RNA, 32 nt, Human
uccguuucgucucuuggaaacagcuccccacc

SEQ ID NO: 501897 - RNA, 32 nt, Human
uccguuucugcucccuccaccccacgaggacg

SEQ ID NO: 501898 - RNA, 32 nt, Human
uccguuugcacugguggagaccccacaauggg

SEQ ID NO: 501899 - RNA, 32 nt, Human
uccguuuguggacccucagacucuuagucccc

SEQ ID NO: 501900 - RNA, 32 nt, Human
uccguuuuagcugucagacuucaguggguccc

SEQ ID NO: 501901 - RNA, 32 nt, Human
uccguuuuauccaucagagucagugcuauaaa

SEQ ID NO: 501902 - RNA, 32 nt, Human
uccguuuuccagcucaguguagacccucgggc

SEQ ID NO: 501903 - RNA, 32 nt, Human
uccuaaaaauacagaaaauuagccuggcaugg

SEQ ID NO: 501904 - RNA, 32 nt, Human
uccuaaaacuccucaaguucaucuggcucaga

SEQ ID NO: 501905 - RNA, 32 nt, Human
uccuaaaacuucucuccuuucucuccauaaaa

SEQ ID NO: 501906 - RNA, 32 nt, Human
uccuaaaaggccacucucccugccuuuggauu

SEQ ID NO: 501907 - RNA, 32 nt, Human
uccuaaaaguccaggagggggccaggcgcagu

SEQ ID NO: 501908 - RNA, 32 nt, Human
uccuaaaauauacaaaaauuagccgggcaugg

SEQ ID NO: 501909 - RNA, 32 nt, Human
uccuaaacagagagagaaaaaggguaucugcc

SEQ ID NO: 501910 - RNA, 32 nt, Human
uccuaaaccagccugggcaacauagugauacc

SEQ ID NO: 501911 - RNA, 32 nt, Human
uccuaaacccugcugccuucccaaaaauacca

SEQ ID NO: 501912 - RNA, 32 nt, Human
uccuaaacucuacagaaaauuagacagguaug

SEQ ID NO: 501913 - RNA, 32 nt, Human
uccuaaacuggucuuugugcucucuuuguuuu

SEQ ID NO: 501914 - RNA, 32 nt, Human
uccuaaagagcagugaaggaaaugucagguua

SEQ ID NO: 501915 - RNA, 32 nt, Human
uccuaaagcauuccuaggaauauuuuccccgc

SEQ ID NO: 501916 - RNA, 32 nt, Human
uccuaaagcuuuagacucagagcccagggucc

SEQ ID NO: 501917 - RNA, 32 nt, Human
uccuaaagugcuggagauuacaggcaugagcc

SEQ ID NO: 501918 - RNA, 31 nt, Human
uccuaaauauguuucugacugcagaccaaag

SEQ ID NO: 501919 - RNA, 32 nt, Human
uccuaaaugucagaagauauucugaacuggau

SEQ ID NO: 501920 - RNA, 32 nt, Human
uccuaacaaugucuuggaagugggaugauggu

SEQ ID NO: 501921 - RNA, 32 nt, Human
uccuaacacagcacaacaggaggucucuguca

SEQ ID NO: 501922 - RNA, 32 nt, Human
uccuaacacugccaucucgcggauggggucug

SEQ ID NO: 501923 - RNA, 32 nt, Human
uccuaaccagccuggucaacauggugaaaccc

SEQ ID NO: 501924 - RNA, 32 nt, Human
uccuaacccugccuuuuuagucccgguggagc

SEQ ID NO: 501925 - RNA, 32 nt, Human
uccuaacccugggcucccuggaggacucuaga

SEQ ID NO: 501926 - RNA, 32 nt, Human
uccuaaccucaagugauccacccgccucagcc

SEQ ID NO: 501927 - RNA, 32 nt, Human
uccuaaccucaagugauccacccgccuuugcc

SEQ ID NO: 501928 - RNA, 26 nt, Human
uccuaaccucaagugauccucccacc

SEQ ID NO: 501929 - RNA, 21 nt, Human
uccuaaccucaggugauccac

SEQ ID NO: 501930 - RNA, 24 nt, Human
uccuaaccucaggugauccaccca

SEQ ID NO: 501931 - RNA, 24 nt, Human
uccuaaccucaggugauccacccg

SEQ ID NO: 501932 - RNA, 24 nt, Human
uccuaaccucgggugauccaccca

SEQ ID NO: 501933 - RNA, 32 nt, Human
uccuaaccuuucuucuggguccuuccucagau

SEQ ID NO: 501934 - RNA, 31 nt, Human
uccuaacuacacacagggaggagggaauuau

SEQ ID NO: 501935 - RNA, 21 nt, Human
uccuaacuacuguauuuguua

SEQ ID NO: 501936 - RNA, 32 nt, Human
uccuaacucuccucgcugacccuaucugggag

SEQ ID NO: 501937 - RNA, 32 nt, Human
uccuaacuugagugccccaagguccaacucuc

SEQ ID NO: 501938 - RNA, 32 nt, Human
uccuaacuugggaggcugaguugggaggaugg

SEQ ID NO: 501939 - RNA, 31 nt, Human
uccuaagaacaaugccaacaaagcuuacaac

SEQ ID NO: 501940 - RNA, 32 nt, Human
uccuaagaacaaugccaacaaagcuuacaaca

SEQ ID NO: 501941 - RNA, 32 nt, Human
uccuaagacgccaggaggaguuucaguguaag

SEQ ID NO: 501942 - RNA, 32 nt, Human
uccuaagacuggccugcagcuuugccaacauu

SEQ ID NO: 501943 - RNA, 32 nt, Human
uccuaagagccaggcaugguggcucaugccug

SEQ ID NO: 501944 - RNA, 32 nt, Human
uccuaagagugcaguucccaugagucacuucc

SEQ ID NO: 501945 - RNA, 32 nt, Human
uccuaagcauugaaauggcaagugcaaccaaa

SEQ ID NO: 501946 - RNA, 32 nt, Human
uccuaagcuaucucucaugguuccuauguuuu

SEQ ID NO: 501947 - RNA, 32 nt, Human
uccuaagcucaagugauccucccaccucagcc

SEQ ID NO: 501948 - RNA, 21 nt, Human
uccuaagcucugacagucuaa

SEQ ID NO: 501949 - RNA, 32 nt, Human
uccuaagcugacacaggcugcagagaaaagug

SEQ ID NO: 501950 - RNA, 32 nt, Human
uccuaagcuggcugucuugugugcagccugag

SEQ ID NO: 501951 - RNA, 32 nt, Human
uccuaaggaggaagaggaaggcagcccuggag

SEQ ID NO: 501952 - RNA, 32 nt, Human
uccuaaggcacccuuugcaucuucccauccac

SEQ ID NO: 501953 - RNA, 32 nt, Human
uccuaaggcuuugaccagcuucccaggcugga

SEQ ID NO: 501954 - RNA, 32 nt, Human
uccuaagggaacacugcucagaaaguacugca

SEQ ID NO: 501955 - RNA, 32 nt, Human
uccuaagggaccacacccuuccuccuuccccu

SEQ ID NO: 501956 - RNA, 32 nt, Human
uccuaaggggagugccugcgagccucggguga

SEQ ID NO: 501957 - RNA, 32 nt, Human
uccuaaggucaccaagaauaucagggcugugg

SEQ ID NO: 501958 - RNA, 32 nt, Human
uccuaaggucuccagccagggcuucugagaug

SEQ ID NO: 501959 - RNA, 32 nt, Human
uccuaagguuuccagugugucaccaacaaaaa

SEQ ID NO: 501960 - RNA, 23 nt, Human
uccuaaguagcugggauuacagg

SEQ ID NO: 501961 - RNA, 23 nt, Human
uccuaaguaucugggauuacagg

SEQ ID NO: 501962 - RNA, 22 nt, Human
uccuaagugagagagagccugg

SEQ ID NO: 501963 - RNA, 32 nt, Human
uccuaagugucaccccgcuguaagcuccuuug

SEQ ID NO: 501964 - RNA, 32 nt, Human
uccuaaguuaaauaaaugcaagccucugaacu

SEQ ID NO: 501965 - RNA, 32 nt, Human
uccuaaguucaggcgauucuccugccucagcu

SEQ ID NO: 501966 - RNA, 32 nt, Human
uccuaauaugaucuaaaacccuaaaugguuau

SEQ ID NO: 501967 - RNA, 32 nt, Human
uccuaaucgcccucaccucuggcuucaggucc

SEQ ID NO: 501968 - RNA, 32 nt, Human
uccuaaucuuuuaaaaucaagaagaaccaugg

SEQ ID NO: 501969 - RNA, 32 nt, Human
uccuaauguagaacauuuaggagugacaggag

SEQ ID NO: 501970 - RNA, 32 nt, Human
uccuaauguguuuugccuuaaccucuuuucuc

SEQ ID NO: 501971 - RNA, 22 nt, Human
uccuaauuguuucuguaugugu

SEQ ID NO: 501972 - RNA, 32 nt, Human
uccuaauuucaaaacaucaccuugccacccug

SEQ ID NO: 501973 - RNA, 32 nt, Human
uccuacaaaagugccuacagccccagcccagu

SEQ ID NO: 501974 - RNA, 32 nt, Human
uccuacaaacuaauguauuugugcacaagaca

SEQ ID NO: 501975 - RNA, 32 nt, Human
uccuacaagauguaagacuguuuauaauuaaa

SEQ ID NO: 501976 - RNA, 32 nt, Human
uccuacaauggaaugcacacuccagucuuggu

SEQ ID NO: 501977 - RNA, 32 nt, Human
uccuacacaaugcguugccuggcuccacgccc

SEQ ID NO: 501978 - RNA, 23 nt, Human
uccuacacaauucauuuacucca

SEQ ID NO: 501979 - RNA, 32 nt, Human
uccuacacagccaaccuugcugccuuccucac

SEQ ID NO: 501980 - RNA, 32 nt, Human
uccuacacaguucucaggccccggcuaaaugg

SEQ ID NO: 501981 - RNA, 32 nt, Human
uccuacacaucuauaauccccaccccauggcu

SEQ ID NO: 501982 - RNA, 32 nt, Human
uccuacaccugcuuuggaaagacaugcacuuu

SEQ ID NO: 501983 - RNA, 32 nt, Human
uccuacacucacucuccucuggcaccaauaua

SEQ ID NO: 501984 - RNA, 32 nt, Human
uccuacacugauuuugaaauacuaagaucaga

SEQ ID NO: 501985 - RNA, 32 nt, Human
uccuacagagaagguuccaaagcugagcaccc

SEQ ID NO: 501986 - RNA, 32 nt, Human
uccuacagcuguucagcugugccucaucaggg

SEQ ID NO: 501987 - RNA, 32 nt, Human
uccuacaggacugucugucuccugccccauga

SEQ ID NO: 501988 - RNA, 32 nt, Human
uccuacagugcucucccucccugggcagauug

SEQ ID NO: 501989 - RNA, 24 nt, Human
uccuacaucccuuucucccuuccc

SEQ ID NO: 501990 - RNA, 32 nt, Human
uccuacaugcagcugugaacaguugugcccga

SEQ ID NO: 501991 - RNA, 32 nt, Human
uccuaccaacaauccccuccucccauggccug

SEQ ID NO: 501992 - RNA, 32 nt, Human
uccuaccaagcagauuggaaacaaauacuacu

SEQ ID NO: 501993 - RNA, 32 nt, Human
uccuaccaagcccuaccaagcaggaguuaaua

SEQ ID NO: 501994 - RNA, 32 nt, Human
uccuaccacugcacuucagccuaggugacaua

SEQ ID NO: 501995 - RNA, 32 nt, Human
uccuaccagaucggagcccugcccuuuaccac

SEQ ID NO: 501996 - RNA, 32 nt, Human
uccuaccaggcccugaggucaggauggggagc

SEQ ID NO: 501997 - RNA, 32 nt, Human
uccuaccaucccaggaggcaggcacagccagg

SEQ ID NO: 501998 - RNA, 32 nt, Human
uccuaccauuugaggauacagugagaagccuu

SEQ ID NO: 501999 - RNA, 32 nt, Human
uccuacccaaguggccuccagcuguccguuag

SEQ ID NO: 502000 - RNA, 32 nt, Human
uccuacccaaugcuggguagguccuuuaagag

SEQ ID NO: 502001 - RNA, 32 nt, Human
uccuacccauggcuacagaggaauggcccaag

SEQ ID NO: 502002 - RNA, 32 nt, Human
uccuacccaugggaaaccccagauucugaagc

SEQ ID NO: 502003 - RNA, 32 nt, Human
uccuacccccgcccgccauccccaguugcagg

SEQ ID NO: 502004 - RNA, 23 nt, Human
uccuacccccuucucccucuccc

SEQ ID NO: 502005 - RNA, 23 nt, Human
uccuaccccuguccuggggcugg

SEQ ID NO: 502006 - RNA, 32 nt, Human
uccuacccugcucuaccgcuuuucugggucac

SEQ ID NO: 502007 - RNA, 22 nt, Human
uccuacccuucccuuccuuccc

SEQ ID NO: 502008 - RNA, 32 nt, Human
uccuaccuaguggaaagagcaaggcagcucuc

SEQ ID NO: 502009 - RNA, 32 nt, Human
uccuaccugcagcuucacuuugcucuagucuc

SEQ ID NO: 502010 - RNA, 32 nt, Human
uccuaccugcccccaacccacccuccaccccg

SEQ ID NO: 502011 - RNA, 32 nt, Human
uccuaccugccugaccugcccagcauugccaa

SEQ ID NO: 502012 - RNA, 32 nt, Human
uccuaccugccugaccugcccggcauugccaa

SEQ ID NO: 502013 - RNA, 32 nt, Human
uccuaccugccuggugucggugagcuccuuga

SEQ ID NO: 502014 - RNA, 32 nt, Human
uccuaccugucugauauaaacuuucucugggu

SEQ ID NO: 502015 - RNA, 32 nt, Human
uccuaccuuuuauucauggguaguuuugcaaa

SEQ ID NO: 502016 - RNA, 32 nt, Human
uccuacgcaggaggcaacagaggcucagacau

SEQ ID NO: 502017 - RNA, 21 nt, Human
uccuacggacaggucaccucu

SEQ ID NO: 502018 - RNA, 32 nt, Human
uccuacgggcuguagauggagcuguccggccc

SEQ ID NO: 502019 - RNA, 31 nt, Human
uccuacguccuggcugggccuggucccaggc

SEQ ID NO: 502020 - RNA, 25 nt, Human
uccuacuacuggccucucccuuucc

SEQ ID NO: 502021 - RNA, 32 nt, Human
uccuacuaggggcgggcccugcauuugcugga

SEQ ID NO: 502022 - RNA, 32 nt, Human
uccuacucaccaggggcucuucagagcagcag

SEQ ID NO: 502023 - RNA, 32 nt, Human
uccuacuccacccuccccuggugauaagcaug

SEQ ID NO: 502024 - RNA, 32 nt, Human
uccuacucccuucugucucccugcccucugcc

SEQ ID NO: 502025 - RNA, 22 nt, Human
uccuacuccugccaugcauuga

SEQ ID NO: 502026 - RNA, 32 nt, Human
uccuacuccuuuuccucuaccccuugcucugg

SEQ ID NO: 502027 - RNA, 32 nt, Human
uccuacucggcucugcaguccuacucaagcgg

SEQ ID NO: 502028 - RNA, 32 nt, Human
uccuacucuccccucccugcuccuucgcuuuu

SEQ ID NO: 502029 - RNA, 23 nt, Human
uccuacucuccccuucccuuccc

SEQ ID NO: 502030 - RNA, 32 nt, Human
uccuacucugcugccagcaucggucccgaucc

SEQ ID NO: 502031 - RNA, 24 nt, Human
uccuacucuucuuucucccugccc

SEQ ID NO: 502032 - RNA, 21 nt, Human
uccuacugccccuccaucuca

SEQ ID NO: 502033 - RNA, 32 nt, Human
uccuacuggacccucuugcccagccggcugca

SEQ ID NO: 502034 - RNA, 32 nt, Human
uccuacugucauggguuugggauuuguaacgg

SEQ ID NO: 502035 - RNA, 32 nt, Human
uccuacuuaccuccagaccacuggagucaugg

SEQ ID NO: 502036 - RNA, 32 nt, Human
uccuacuucugggauugcagaucagggguggg

SEQ ID NO: 502037 - RNA, 32 nt, Human
uccuacuugaagccaaggugggaggaucacca

SEQ ID NO: 502038 - RNA, 32 nt, Human
uccuacuugcccacccuuccuugcugguucag

SEQ ID NO: 502039 - RNA, 32 nt, Human
uccuacuuuccucauugccuaggcaaccauuu

SEQ ID NO: 502040 - RNA, 32 nt, Human
uccuacuuuuagguuuucccaggacaggacag

SEQ ID NO: 502041 - RNA, 20 nt, Human
uccuagaagcccuugguccc

SEQ ID NO: 502042 - RNA, 32 nt, Human
uccuagaagugcugugucccugaggcacaccu

SEQ ID NO: 502043 - RNA, 32 nt, Human
uccuagaauaagaggugagaaucucaugauuu

SEQ ID NO: 502044 - RNA, 32 nt, Human
uccuagacauuagguggguccucugcccucug

SEQ ID NO: 502045 - RNA, 21 nt, Human
uccuagacauugaggggccca

SEQ ID NO: 502046 - RNA, 20 nt, Human
uccuagaccagccagcucca

SEQ ID NO: 502047 - RNA, 18 nt, Human
uccuagacccgugaccug

SEQ ID NO: 502048 - RNA, 32 nt, Human
uccuagacccuuggacucucagaugcagggcc

SEQ ID NO: 502049 - RNA, 17 nt, Human
uccuagacccuuucucc

SEQ ID NO: 502050 - RNA, 21 nt, Human
uccuagacgugguucccucca

SEQ ID NO: 502051 - RNA, 32 nt, Human
uccuagacucaagugauccuccugucuuggcc

SEQ ID NO: 502052 - RNA, 32 nt, Human
uccuagagaagguagucccugaaggaaaagua

SEQ ID NO: 502053 - RNA, 32 nt, Human
uccuagagacaggauuucgccauguugccugg

SEQ ID NO: 502054 - RNA, 32 nt, Human
uccuagagagggcccugagcaccagcuugauc

SEQ ID NO: 502055 - RNA, 32 nt, Human
uccuagagcacacucuucaucucuccaccccc

SEQ ID NO: 502056 - RNA, 32 nt, Human
uccuagagcucaccuccaggacccagagucug

SEQ ID NO: 502057 - RNA, 24 nt, Human
uccuagaggaagguguuauuuuca

SEQ ID NO: 502058 - RNA, 25 nt, Human
uccuagaggaccaccuccugagaga

SEQ ID NO: 502059 - RNA, 32 nt, Human
uccuagaggagccacagcccaggggcagauga

SEQ ID NO: 502060 - RNA, 32 nt, Human
uccuagaggcagagguugaagauggaagaggg

SEQ ID NO: 502061 - RNA, 32 nt, Human
uccuagaggcagcugcagcugcccagccaugg

SEQ ID NO: 502062 - RNA, 32 nt, Human
uccuagaggcugcuuggcccagaagagccagg

SEQ ID NO: 502063 - RNA, 32 nt, Human
uccuagagucccccuaggucucuggcugccca

SEQ ID NO: 502064 - RNA, 22 nt, Human
uccuagauagucgcccacucca

SEQ ID NO: 502065 - RNA, 32 nt, Human
uccuagaugacagucuuugcacuguguccuca

SEQ ID NO: 502066 - RNA, 31 nt, Human
uccuagauggccuugcagauaccaccuuccg

SEQ ID NO: 502067 - RNA, 32 nt, Human
uccuagcaaggagcuuucugaagaccucccug

SEQ ID NO: 502068 - RNA, 32 nt, Human
uccuagcagccuggugagcucacuccuucccc

SEQ ID NO: 502069 - RNA, 32 nt, Human
uccuagcaggagagaggcucuggggcagcccc

SEQ ID NO: 502070 - RNA, 32 nt, Human
uccuagcagguccugaauccagagacaaaaau

SEQ ID NO: 502071 - RNA, 32 nt, Human
uccuagcagguguaucaccuaaggucaggagu

SEQ ID NO: 502072 - RNA, 32 nt, Human
uccuagccacaaaaucacugcuuagguugcaa

SEQ ID NO: 502073 - RNA, 32 nt, Human
uccuagccacuagaggcugaggugggaggauc

SEQ ID NO: 502074 - RNA, 32 nt, Human
uccuagccagcugcugaaacaugugaacucca

SEQ ID NO: 502075 - RNA, 32 nt, Human
uccuagccaggccaaguauaugagaaagguaa

SEQ ID NO: 502076 - RNA, 32 nt, Human
uccuagccauggucagacuguacaaaacgguu

SEQ ID NO: 502077 - RNA, 32 nt, Human
uccuagcccgagaagccgaaucucccuaaucc

SEQ ID NO: 502078 - RNA, 32 nt, Human
uccuagcccuucaguaagaccuugccaggaga

SEQ ID NO: 502079 - RNA, 32 nt, Human
uccuagccucaagcagucuucuugccucagcc

SEQ ID NO: 502080 - RNA, 32 nt, Human
uccuagccucaagugauccuccugucucaacc

SEQ ID NO: 502081 - RNA, 32 nt, Human
uccuagccugaagugauccuccugccucggcc

SEQ ID NO: 502082 - RNA, 32 nt, Human
uccuagccugugaauuucugucuuccauuguu

SEQ ID NO: 502083 - RNA, 32 nt, Human
uccuagccuuccauugcuaugcacugaaugag

SEQ ID NO: 502084 - RNA, 32 nt, Human
uccuagccuuugcuuuucuuuguauuuuuccu

SEQ ID NO: 502085 - RNA, 32 nt, Human
uccuagcuccacccuccccgugcugcuguguu

SEQ ID NO: 502086 - RNA, 21 nt, Human
uccuagcuccuaacuaugaga

SEQ ID NO: 502087 - RNA, 32 nt, Human
uccuagcucugcucucagagcuaggcacaugg

SEQ ID NO: 502088 - RNA, 32 nt, Human
uccuagcugcuccagucucagccugggcagcu

SEQ ID NO: 502089 - RNA, 32 nt, Human
uccuagcugugucugggaacauugguuuaugu

SEQ ID NO: 502090 - RNA, 32 nt, Human
uccuagcuuaucucccugcuucauaucucucc

SEQ ID NO: 502091 - RNA, 32 nt, Human
uccuagcuuccuagggaagacaguguacaguu

SEQ ID NO: 502092 - RNA, 22 nt, Human
uccuagcuucucucuccuuccc

SEQ ID NO: 502093 - RNA, 32 nt, Human
uccuaggaaccagcuucuacuuugacauaaaa

SEQ ID NO: 502094 - RNA, 32 nt, Human
uccuaggaagcauaugaagugcaucaggaacc

SEQ ID NO: 502095 - RNA, 32 nt, Human
uccuaggacagagagccauaaguagcccuuug

SEQ ID NO: 502096 - RNA, 32 nt, Human
uccuaggagacagacuuugauagugauuuaga

SEQ ID NO: 502097 - RNA, 32 nt, Human
uccuaggagaggguagaugugagccagccuga

SEQ ID NO: 502098 - RNA, 32 nt, Human
uccuaggauggccacggagagccacucgcucc

SEQ ID NO: 502099 - RNA, 24 nt, Human
uccuaggauuacaggugugcacca

SEQ ID NO: 502100 - RNA, 24 nt, Human
uccuaggauuauaggcaugagcca

SEQ ID NO: 502101 - RNA, 32 nt, Human
uccuaggcagagugccugugcgugagggcgcc

SEQ ID NO: 502102 - RNA, 32 nt, Human
uccuaggcagucucacgagcaagugugcuguu

SEQ ID NO: 502103 - RNA, 32 nt, Human
uccuaggcauucacucggagccuggaugaugg

SEQ ID NO: 502104 - RNA, 32 nt, Human
uccuaggcgugggggcagauggguggacagcu

SEQ ID NO: 502105 - RNA, 32 nt, Human
uccuaggcucaagagauccuccugccucagcc

SEQ ID NO: 502106 - RNA, 32 nt, Human
uccuaggcucaagagauucuccugccucagcc

SEQ ID NO: 502107 - RNA, 32 nt, Human
uccuaggcucaagcaauccucccaucuuagcc

SEQ ID NO: 502108 - RNA, 32 nt, Human
uccuaggcucaagcaguccucuugccucagcc

SEQ ID NO: 502109 - RNA, 32 nt, Human
uccuaggcucaagccauccucccaccucagcc

SEQ ID NO: 502110 - RNA, 32 nt, Human
uccuaggcucaagccauuuucccaccucagcc

SEQ ID NO: 502111 - RNA, 32 nt, Human
uccuaggcucaagcgauccuaucaccucaguc

SEQ ID NO: 502112 - RNA, 32 nt, Human
uccuaggcucaagcgauccucccaccucaacc

SEQ ID NO: 502113 - RNA, 32 nt, Human
uccuaggcucaagugauccucccaccucagcc

SEQ ID NO: 502114 - RNA, 32 nt, Human
uccuaggcucaagugauccuccugcuucagca

SEQ ID NO: 502115 - RNA, 32 nt, Human
uccuaggcucaagugauccuccugcuucagcc

SEQ ID NO: 502116 - RNA, 32 nt, Human
uccuaggcucagauaggagaguuuaaaagaau

SEQ ID NO: 502117 - RNA, 32 nt, Human
uccuaggcucaggugauccuccugccucaggc

SEQ ID NO: 502118 - RNA, 32 nt, Human
uccuaggcuccagugauccucucaccucagcu

SEQ ID NO: 502119 - RNA, 32 nt, Human
uccuaggcuggucucgaacuccugggcuuaaa

SEQ ID NO: 502120 - RNA, 32 nt, Human
uccuaggcuuaagugauccucccgccuuagcc

SEQ ID NO: 502121 - RNA, 32 nt, Human
uccuagggcacuucuaguuucacguaaauauu

SEQ ID NO: 502122 - RNA, 32 nt, Human
uccuagggccuggguacagggcaugaguugga

SEQ ID NO: 502123 - RNA, 32 nt, Human
uccuagggcucggacuccccagccuuuccgca

SEQ ID NO: 502124 - RNA, 32 nt, Human
uccuagggcuguaguuauuugggaguuucaua

SEQ ID NO: 502125 - RNA, 32 nt, Human
uccuaggggaacccaauauucagguuuuccug

SEQ ID NO: 502126 - RNA, 32 nt, Human
uccuagggggauguuacuuucagugucaccgg

SEQ ID NO: 502127 - RNA, 22 nt, Human
uccuagggggucuguauuguca

SEQ ID NO: 502128 - RNA, 32 nt, Human
uccuagggguagcagagggaagggaggauuuu

SEQ ID NO: 502129 - RNA, 32 nt, Human
uccuaggggugcugcauuuugcuuccggggaa

SEQ ID NO: 502130 - RNA, 32 nt, Human
uccuagggguuauuucugugccagacacauuc

SEQ ID NO: 502131 - RNA, 32 nt, Human
uccuaggucacacuuuucagaaaaagaaucug

SEQ ID NO: 502132 - RNA, 32 nt, Human
uccuaggugaagcuguuuggagggguaagaga

SEQ ID NO: 502133 - RNA, 32 nt, Human
uccuaggugcugcagugaacagaagagacaaa

SEQ ID NO: 502134 - RNA, 32 nt, Human
uccuagguucaagugauucuacucucucagcc

SEQ ID NO: 502135 - RNA, 32 nt, Human
uccuagguucaagugauucuccuaccuccuga

SEQ ID NO: 502136 - RNA, 32 nt, Human
uccuagguucaagugauucuccugccucagcc

SEQ ID NO: 502137 - RNA, 32 nt, Human
uccuaguagaggcugaaggccacaggggaggc

SEQ ID NO: 502138 - RNA, 32 nt, Human
uccuaguagauaagugaagagcagggaaagag

SEQ ID NO: 502139 - RNA, 32 nt, Human
uccuagucacacacaaacacaggagcucacac

SEQ ID NO: 502140 - RNA, 32 nt, Human
uccuaguccaaacagcugcagcuuugggcauu

SEQ ID NO: 502141 - RNA, 32 nt, Human
uccuagucccucccuucccucuccuugagugc

SEQ ID NO: 502142 - RNA, 32 nt, Human
uccuaguccggccagaggaggccguuuacgag

SEQ ID NO: 502143 - RNA, 20 nt, Human
uccuaguccugggacugcaa

SEQ ID NO: 502144 - RNA, 32 nt, Human
uccuaguccuuuuaaugcuguguguucuguua

SEQ ID NO: 502145 - RNA, 27 nt, Human
uccuagugagauucucugcucuugaua

SEQ ID NO: 502146 - RNA, 32 nt, Human
uccuagugcaaccguccccuacccagggacug

SEQ ID NO: 502147 - RNA, 32 nt, Human
uccuagugguggaauuugaacacuucucacuu

SEQ ID NO: 502148 - RNA, 32 nt, Human
uccuaguguuauguuccagucugcccaccugu

SEQ ID NO: 502149 - RNA, 20 nt, Human
uccuaguguuggcacuuccu

SEQ ID NO: 502150 - RNA, 23 nt, Human
uccuaguguuugccuucuuggua

SEQ ID NO: 502151 - RNA, 32 nt, Human
uccuaguuaucagugucuuacugugaagaaaa

SEQ ID NO: 502152 - RNA, 32 nt, Human
uccuaguucaccuccucagcugugcugauguc

SEQ ID NO: 502153 - RNA, 32 nt, Human
uccuaguucaucccuucucuuccaggcagccg

SEQ ID NO: 502154 - RNA, 32 nt, Human
uccuaguucugccccaggcucuucuuuccgcu

SEQ ID NO: 502155 - RNA, 32 nt, Human
uccuaguugccuggggaaacccuggaaugggc

SEQ ID NO: 502156 - RNA, 32 nt, Human
uccuauaauugaggcauaccacccucaaaaac

SEQ ID NO: 502157 - RNA, 32 nt, Human
uccuauacagccugcagaaccgugagccagcu

SEQ ID NO: 502158 - RNA, 32 nt, Human
uccuauagaaugcauaccuuccucccucuaga

SEQ ID NO: 502159 - RNA, 32 nt, Human
uccuauagaugucucagauguucaguuuuccu

SEQ ID NO: 502160 - RNA, 24 nt, Human
uccuauaucauuccauuuauugga

SEQ ID NO: 502161 - RNA, 32 nt, Human
uccuauaugaucuuccaaacagucccaugugg

SEQ ID NO: 502162 - RNA, 32 nt, Human
uccuauauuuuugucuucuuccuuuccccucu

SEQ ID NO: 502163 - RNA, 32 nt, Human
uccuaucaacacuaaauggugugacuuggccu

SEQ ID NO: 502164 - RNA, 21 nt, Human
uccuaucaguucaaaacaaca

SEQ ID NO: 502165 - RNA, 32 nt, Human
uccuaucaucaucuagcaccuguccgguuccc

SEQ ID NO: 502166 - RNA, 32 nt, Human
uccuaucauccucugcucagcagugaccuccc

SEQ ID NO: 502167 - RNA, 32 nt, Human
uccuaucaugcuucaugugucauuccaagguu

SEQ ID NO: 502168 - RNA, 32 nt, Human
uccuauccaccugcauccacacauggccugca

SEQ ID NO: 502169 - RNA, 32 nt, Human
uccuauccauuucaaagcagaagcuguggaau

SEQ ID NO: 502170 - RNA, 32 nt, Human
uccuaucccccacuccaaaccaggacgaccug

SEQ ID NO: 502171 - RNA, 32 nt, Human
uccuaucccccagcugcaguaggggaguggcc

SEQ ID NO: 502172 - RNA, 32 nt, Human
uccuauccugggcugcucaauguucccaggcc

SEQ ID NO: 502173 - RNA, 32 nt, Human
uccuaucuauggacuucauuuuagucaccaug

SEQ ID NO: 502174 - RNA, 32 nt, Human
uccuaucucauagcucaugcuacuacauaagc

SEQ ID NO: 502175 - RNA, 23 nt, Human
uccuaucucucauucucaccuca

SEQ ID NO: 502176 - RNA, 32 nt, Human
uccuaucugauucgggccccacccuuaugacu

SEQ ID NO: 502177 - RNA, 32 nt, Human
uccuaucuggauggguauugaucauguccaac

SEQ ID NO: 502178 - RNA, 32 nt, Human
uccuaucuguggugacaugugcaccaaaaccu

SEQ ID NO: 502179 - RNA, 32 nt, Human
uccuaucuucauccacaaucucuacccuuuau

SEQ ID NO: 502180 - RNA, 32 nt, Human
uccuaugaacaacguaccaacacuuucugauu

SEQ ID NO: 502181 - RNA, 32 nt, Human
uccuaugacaucuuuguuucugcugcaucuuu

SEQ ID NO: 502182 - RNA, 32 nt, Human
uccuaugacuccuguuuucucucucacagaua

SEQ ID NO: 502183 - RNA, 32 nt, Human
uccuaugaucauccucuagauaccagauagag

SEQ ID NO: 502184 - RNA, 32 nt, Human
uccuaugauguauacugccacuaaccuuccaa

SEQ ID NO: 502185 - RNA, 32 nt, Human
uccuaugccaguuccacaugcuggauuauggu

SEQ ID NO: 502186 - RNA, 29 nt, Human
uccuaugcucaugagccuuuuguguuuuc

SEQ ID NO: 502187 - RNA, 32 nt, Human
uccuaugcucugggugaauagagccugauggu

SEQ ID NO: 502188 - RNA, 32 nt, Human
uccuaugcugguggcagagcaauugacucuga

SEQ ID NO: 502189 - RNA, 32 nt, Human
uccuauggagccagcggcaaggcuccagagga

SEQ ID NO: 502190 - RNA, 32 nt, Human
uccuaugguccaugcagaauuuucuguuuagu

SEQ ID NO: 502191 - RNA, 32 nt, Human
uccuauggugaccucucagaugccagcgaccu

SEQ ID NO: 502192 - RNA, 32 nt, Human
uccuaugugucacauucaucacagguuucaua

SEQ ID NO: 502193 - RNA, 31 nt, Human
uccuauguguuucuuuggccuguguaucagu

SEQ ID NO: 502194 - RNA, 22 nt, Human
uccuauuaccagcuucuaaaug

SEQ ID NO: 502195 - RNA, 32 nt, Human
uccuauuacuuucugcccuggggacguccugu

SEQ ID NO: 502196 - RNA, 32 nt, Human
uccuauuagccccuccuuccaggagcuagaac

SEQ ID NO: 502197 - RNA, 26 nt, Human
uccuauucagaacuaugugcuuguca

SEQ ID NO: 502198 - RNA, 32 nt, Human
uccuauucagcauccuggaacuuaugugggau

SEQ ID NO: 502199 - RNA, 32 nt, Human
uccuauuccaauaugucaucuuuacucagaau

SEQ ID NO: 502200 - RNA, 32 nt, Human
uccuauuccauggcuucaggugccauccucuc

SEQ ID NO: 502201 - RNA, 23 nt, Human
uccuauucucccuuucuccccuc

SEQ ID NO: 502202 - RNA, 32 nt, Human
uccuauucucuagcccuucuauucucccaagg

SEQ ID NO: 502203 - RNA, 32 nt, Human
uccuauuuauucagcaccgcacuacccaggaa

SEQ ID NO: 502204 - RNA, 32 nt, Human
uccuauuuucgcugagcuuuuccucuuauuuc

SEQ ID NO: 502205 - RNA, 32 nt, Human
uccuauuuucuuuuuaacuuuuuaaagacugc

SEQ ID NO: 502206 - RNA, 32 nt, Human
uccucaaaaacgaccaccuccaggacucagug

SEQ ID NO: 502207 - RNA, 23 nt, Human
uccucaaaaacuuguguuuguua

SEQ ID NO: 502208 - RNA, 32 nt, Human
uccucaaaacggccuauccacgcccagcuuuu

SEQ ID NO: 502209 - RNA, 32 nt, Human
uccucaaaacucagaacguggccgggcguggu

SEQ ID NO: 502210 - RNA, 32 nt, Human
uccucaaaagaaugucagaguaaauguauuag

SEQ ID NO: 502211 - RNA, 21 nt, Human
uccucaaaagcagcagcaagu

SEQ ID NO: 502212 - RNA, 32 nt, Human
uccucaaaaggagacucuuuugcucaacauua

SEQ ID NO: 502213 - RNA, 32 nt, Human
uccucaaacaggcugaggagguuccgaggcuc

SEQ ID NO: 502214 - RNA, 20 nt, Human
uccucaaaccuuguguagca

SEQ ID NO: 502215 - RNA, 20 nt, Human
uccucaaagccaaggaagcc

SEQ ID NO: 502216 - RNA, 32 nt, Human
uccucaaagcuaaucugaauucuguaggcuaa

SEQ ID NO: 502217 - RNA, 32 nt, Human
uccucaaauagagcccugggggcagagcuccu

SEQ ID NO: 502218 - RNA, 32 nt, Human
uccucaaaugucccccauugaggacaacagcc

SEQ ID NO: 502219 - RNA, 32 nt, Human
uccucaacagguuggaugaugagggagaucuu

SEQ ID NO: 502220 - RNA, 21 nt, Human
uccucaacauccuggccuuug

SEQ ID NO: 502221 - RNA, 32 nt, Human
uccucaacaugguccuugucccaagcccaggg

SEQ ID NO: 502222 - RNA, 32 nt, Human
uccucaaccacaacuucugaccucccagggug

SEQ ID NO: 502223 - RNA, 32 nt, Human
uccucaaccuccaucccugcccucucugggcu

SEQ ID NO: 502224 - RNA, 21 nt, Human
uccucaaccuccuccuuuccc

SEQ ID NO: 502225 - RNA, 32 nt, Human
uccucaacucacugcaaccuccgcucccgguu

SEQ ID NO: 502226 - RNA, 22 nt, Human
uccucaacucccagccaucugu

SEQ ID NO: 502227 - RNA, 26 nt, Human
uccucaacugggugacaagggugagg

SEQ ID NO: 502228 - RNA, 32 nt, Human
uccucaacuguacaaugaacuauucucaugaa

SEQ ID NO: 502229 - RNA, 32 nt, Human
uccucaacuuccagacaacguguccucaggca

SEQ ID NO: 502230 - RNA, 32 nt, Human
uccucaacuuccugggcucaagugauccuucc

SEQ ID NO: 502231 - RNA, 24 nt, Human
uccucaagaaauaaaaggaagcca

SEQ ID NO: 502232 - RNA, 22 nt, Human
uccucaagaaaucuuagaacca

SEQ ID NO: 502233 - RNA, 21 nt, Human
uccucaagaggacacaacaag

SEQ ID NO: 502234 - RNA, 32 nt, Human
uccucaagaggcugaagaaggaagaggaggaa

SEQ ID NO: 502235 - RNA, 24 nt, Human
uccucaagcagaccuacagcaagu

SEQ ID NO: 502236 - RNA, 23 nt, Human
uccucaagcagagugcggcacgu

SEQ ID NO: 502237 - RNA, 32 nt, Human
uccucaagccuggucugcuccuucuuucacgu

SEQ ID NO: 502238 - RNA, 32 nt, Human
uccucaaggaggugaaggucaugcgaugccug

SEQ ID NO: 502239 - RNA, 24 nt, Human
uccucaaggauccagaacuagaaa

SEQ ID NO: 502240 - RNA, 24 nt, Human
uccucaaggaucuagaaccagaaa

SEQ ID NO: 502241 - RNA, 32 nt, Human
uccucaagggagcuggugggaaggagggaggg

SEQ ID NO: 502242 - RNA, 32 nt, Human
uccucaaguaauccuccugccuuagcauucca

SEQ ID NO: 502243 - RNA, 32 nt, Human
uccucaaguaccaccugcugcuccaggaaauu

SEQ ID NO: 502244 - RNA, 32 nt, Human
uccucaagugaggggaggaggaagcagauaga

SEQ ID NO: 502245 - RNA, 31 nt, Human
uccucaaguuaguuauguuguaggaguguac

SEQ ID NO: 502246 - RNA, 32 nt, Human
uccucacaacacccucuucacccuccacgcca

SEQ ID NO: 502247 - RNA, 23 nt, Human
uccucacaacagcccccugaaag

SEQ ID NO: 502248 - RNA, 32 nt, Human
uccucacaagucucccacaggccauguaaagg

SEQ ID NO: 502249 - RNA, 32 nt, Human
uccucacacacuucuagauucuucccagcuca

SEQ ID NO: 502250 - RNA, 32 nt, Human
uccucacagacugccaagucccagagcccacc

SEQ ID NO: 502251 - RNA, 32 nt, Human
uccucacagcgccaucaccaauggccaaaacu

SEQ ID NO: 502252 - RNA, 32 nt, Human
uccucacaggcuuccagguuaggcacugugaa

SEQ ID NO: 502253 - RNA, 32 nt, Human
uccucacagugaacacucaguggcccauggca

SEQ ID NO: 502254 - RNA, 32 nt, Human
uccucacauggcagagagaaagagagagaaag

SEQ ID NO: 502255 - RNA, 32 nt, Human
uccucacaugugacaaagggccagcagucuac

SEQ ID NO: 502256 - RNA, 32 nt, Human
uccucacauuccagcacuuucccaccugacuc

SEQ ID NO: 502257 - RNA, 32 nt, Human
uccucaccaagcucauuacaucugccagggcc

SEQ ID NO: 502258 - RNA, 32 nt, Human
uccucaccacaguccacagaagccacaaacag

SEQ ID NO: 502259 - RNA, 21 nt, Human
uccucaccaccuucagacccu

SEQ ID NO: 502260 - RNA, 32 nt, Human
uccucaccacuuucuaugccagucucccauuu

SEQ ID NO: 502261 - RNA, 32 nt, Human
uccucaccagcaguugcugauuuugaaaacag

SEQ ID NO: 502262 - RNA, 32 nt, Human
uccucaccagcucuccagccaggacgaucaca

SEQ ID NO: 502263 - RNA, 32 nt, Human
uccucaccagugugcugaugaucccccaugcc

SEQ ID NO: 502264 - RNA, 32 nt, Human
uccucaccaugcccugcuaucuccagcugcug

SEQ ID NO: 502265 - RNA, 32 nt, Human
uccucaccauggccugggccaggugugacaga

SEQ ID NO: 502266 - RNA, 32 nt, Human
uccucacccaaaucucaucuugaauucuacuc

SEQ ID NO: 502267 - RNA, 32 nt, Human
uccucacccaggcuggaaugcaguggugugaa

SEQ ID NO: 502268 - RNA, 32 nt, Human
uccucacccaugggacuguagugcaauuaaac

SEQ ID NO: 502269 - RNA, 32 nt, Human
uccucaccccagcccuccaccucucggggacu

SEQ ID NO: 502270 - RNA, 32 nt, Human
uccucacccggcaccacaucuguguuuuccca

SEQ ID NO: 502271 - RNA, 32 nt, Human
uccucacccucggggagcaacauggcagauaa

SEQ ID NO: 502272 - RNA, 32 nt, Human
uccucacccuggcuccauccagucucuugccu

SEQ ID NO: 502273 - RNA, 32 nt, Human
uccucacccuugcugcuccugaugcaaaacca

SEQ ID NO: 502274 - RNA, 32 nt, Human
uccucacccuugcuuaggaguaaaacaauaua

SEQ ID NO: 502275 - RNA, 32 nt, Human
uccucaccgcagauguuucugccucuuaagga

SEQ ID NO: 502276 - RNA, 32 nt, Human
uccucaccgcccgccgugcaagagucgagccg

SEQ ID NO: 502277 - RNA, 31 nt, Human
uccucaccggcgcaggcuaggagggggcggc

SEQ ID NO: 502278 - RNA, 32 nt, Human
uccucaccgugaugcauucugccuuccugucu

SEQ ID NO: 502279 - RNA, 32 nt, Human
uccucaccuaauuccuccaucacaaccauuaa

SEQ ID NO: 502280 - RNA, 32 nt, Human
uccucaccucaagugauccacccgccucggcc

SEQ ID NO: 502281 - RNA, 21 nt, Human
uccucaccucaggugauccac

SEQ ID NO: 502282 - RNA, 32 nt, Human
uccucaccucgagugauccgccugccucggcc

SEQ ID NO: 502283 - RNA, 32 nt, Human
uccucaccuucucuccccuuuccaugccgucc

SEQ ID NO: 502284 - RNA, 32 nt, Human
uccucaccuuuccuucucaccuguccugcuuu

SEQ ID NO: 502285 - RNA, 32 nt, Human
uccucacgaauggcuccaaccuccugggugcg

SEQ ID NO: 502286 - RNA, 32 nt, Human
uccucacggggguggagggagccggagccugc

SEQ ID NO: 502287 - RNA, 32 nt, Human
uccucacgugggccaggccuucacacacccaa

SEQ ID NO: 502288 - RNA, 18 nt, Human
uccucacuagaggggcag

SEQ ID NO: 502289 - RNA, 32 nt, Human
uccucacucacccuccagccaugcuggcuucc

SEQ ID NO: 502290 - RNA, 32 nt, Human
uccucacucacugcaacuggaucuucagccuc

SEQ ID NO: 502291 - RNA, 32 nt, Human
uccucacucagcccugccgcugcccagggccc

SEQ ID NO: 502292 - RNA, 32 nt, Human
uccucacucaggacacacaugaauguucccca

SEQ ID NO: 502293 - RNA, 32 nt, Human
uccucacuccugcccaccccucaggcuguucc

SEQ ID NO: 502294 - RNA, 32 nt, Human
uccucacuccugccucuccacgcugccccguc

SEQ ID NO: 502295 - RNA, 22 nt, Human
uccucacucgcucacccagaca

SEQ ID NO: 502296 - RNA, 32 nt, Human
uccucacugcauccccaauccccuucccagaa

SEQ ID NO: 502297 - RNA, 32 nt, Human
uccucacuggauggugguggcuccuugcaggg

SEQ ID NO: 502298 - RNA, 32 nt, Human
uccucacuguacaggagaauguggggaucuuu

SEQ ID NO: 502299 - RNA, 32 nt, Human
uccucacuuccucuccaggagggagcgagagu

SEQ ID NO: 502300 - RNA, 32 nt, Human
uccucagaacagauggcucaggguaggguaga

SEQ ID NO: 502301 - RNA, 23 nt, Human
uccucagaaccuccucucuuccc

SEQ ID NO: 502302 - RNA, 21 nt, Human
uccucagaaggggaaaaggga

SEQ ID NO: 502303 - RNA, 32 nt, Human
uccucagacaaucauggcacauggacaucaga

SEQ ID NO: 502304 - RNA, 17 nt, Human
uccucagagaagcuguu

SEQ ID NO: 502305 - RNA, 32 nt, Human
uccucagagagacccuaccagaugcggaugga

SEQ ID NO: 502306 - RNA, 32 nt, Human
uccucagagaggcugaguguccccuccaggca

SEQ ID NO: 502307 - RNA, 32 nt, Human
uccucagagcaggggccagaugauuuuccucc

SEQ ID NO: 502308 - RNA, 32 nt, Human
uccucagagccagcuucuccucucaaugucug

SEQ ID NO: 502309 - RNA, 32 nt, Human
uccucagaggaggaggaggaggaggcagcucc

SEQ ID NO: 502310 - RNA, 32 nt, Human
uccucagaggaugaagccaccaggaauuucag

SEQ ID NO: 502311 - RNA, 32 nt, Human
uccucagaggcagagaaugacuaaguacgggg

SEQ ID NO: 502312 - RNA, 32 nt, Human
uccucagaggccugugcccaucgcaggccugg

SEQ ID NO: 502313 - RNA, 32 nt, Human
uccucagaucccccuucucuccugcuuccucc

SEQ ID NO: 502314 - RNA, 23 nt, Human
uccucagaucgccuugcggccug

SEQ ID NO: 502315 - RNA, 32 nt, Human
uccucagaucuauuuucccaguguccauuucu

SEQ ID NO: 502316 - RNA, 32 nt, Human
uccucagaugaagaggaugacagugacuuaga

SEQ ID NO: 502317 - RNA, 32 nt, Human
uccucagauuuucucacagacccuucccaauu

SEQ ID NO: 502318 - RNA, 32 nt, Human
uccucagcaacaaaaugcaucuccaacugcau

SEQ ID NO: 502319 - RNA, 22 nt, Human
uccucagcacccgugucagugg

SEQ ID NO: 502320 - RNA, 23 nt, Human
uccucagcaccuggcaucggagg

SEQ ID NO: 502321 - RNA, 19 nt, Human
uccucagcagcccaaggac

SEQ ID NO: 502322 - RNA, 32 nt, Human
uccucagcagccgccacagcagcauagaguac

SEQ ID NO: 502323 - RNA, 23 nt, Human
uccucagcaggaaaucaaugugg

SEQ ID NO: 502324 - RNA, 32 nt, Human
uccucagcaggcgccucaccagccuccacacc

SEQ ID NO: 502325 - RNA, 32 nt, Human
uccucagcaucgcaaggccucuccuggcucug

SEQ ID NO: 502326 - RNA, 21 nt, Human
uccucagcauggccucagugg

SEQ ID NO: 502327 - RNA, 23 nt, Human
uccucagcauuccaggucggcgg

SEQ ID NO: 502328 - RNA, 32 nt, Human
uccucagccacuuugguguuuucucaaggauu

SEQ ID NO: 502329 - RNA, 22 nt, Human
uccucagccccauggcuggggc

SEQ ID NO: 502330 - RNA, 32 nt, Human
uccucagcccuggaugaaguggagaagaccua

SEQ ID NO: 502331 - RNA, 32 nt, Human
uccucagccucccagcauucaaucguagccuu

SEQ ID NO: 502332 - RNA, 32 nt, Human
uccucagccucgaaaacugggcucuggaaugc

SEQ ID NO: 502333 - RNA, 32 nt, Human
uccucagccucuggcccucuuggcucagauuc

SEQ ID NO: 502334 - RNA, 32 nt, Human
uccucagccugauccuggaagagacucggggc

SEQ ID NO: 502335 - RNA, 22 nt, Human
uccucagccugggcucccagga

SEQ ID NO: 502336 - RNA, 32 nt, Human
uccucagccugggguuugaccacccaccugac

SEQ ID NO: 502337 - RNA, 20 nt, Human
uccucagcgacccacuggug

SEQ ID NO: 502338 - RNA, 24 nt, Human
uccucagcggcgggaagcuggcgg

SEQ ID NO: 502339 - RNA, 32 nt, Human
uccucagcgggugggaaccucggggcccaggg

SEQ ID NO: 502340 - RNA, 32 nt, Human
uccucagcuaccaaacugggacucacagcuuu

SEQ ID NO: 502341 - RNA, 32 nt, Human
uccucagcuccccuccuugcuuccucgagugu

SEQ ID NO: 502342 - RNA, 32 nt, Human
uccucagcugaggaccuguccauggcucccug

SEQ ID NO: 502343 - RNA, 32 nt, Human
uccucagcuguggaguccagcagucacucugu

SEQ ID NO: 502344 - RNA, 32 nt, Human
uccucagcuuauugaucucugugguaaccacu

SEQ ID NO: 502345 - RNA, 32 nt, Human
uccucagcuucccugagggcugccuagaaucu

SEQ ID NO: 502346 - RNA, 32 nt, Human
uccucagcuucgagccgaggugcagugagcug

SEQ ID NO: 502347 - RNA, 32 nt, Human
uccucagcuugguucccagccugcugauugac

SEQ ID NO: 502348 - RNA, 32 nt, Human
uccucaggaaacugcugccuccccuaagaauc

SEQ ID NO: 502349 - RNA, 32 nt, Human
uccucaggaaguggagaucuagccaggucaga

SEQ ID NO: 502350 - RNA, 32 nt, Human
uccucaggaguccacagacuggaguggaccug

SEQ ID NO: 502351 - RNA, 18 nt, Human
uccucaggcacccugggc

SEQ ID NO: 502352 - RNA, 32 nt, Human
uccucaggccggccuuucuuccggcgacaccc

SEQ ID NO: 502353 - RNA, 21 nt, Human
uccucaggcgguggcuggagg

SEQ ID NO: 502354 - RNA, 32 nt, Human
uccucagggcuggguaccugcucuccgagucu

SEQ ID NO: 502355 - RNA, 32 nt, Human
uccucagggggauuuguuccuguccuggggau

SEQ ID NO: 502356 - RNA, 32 nt, Human
uccucagggucugagcacaucuggaagugagg

SEQ ID NO: 502357 - RNA, 32 nt, Human
uccucagggucugucucacucucaggacuauu

SEQ ID NO: 502358 - RNA, 32 nt, Human
uccucagggugaggacgggaucuguggaggug

SEQ ID NO: 502359 - RNA, 32 nt, Human
uccucagggugagggcccugaggaagaacuga

SEQ ID NO: 502360 - RNA, 32 nt, Human
uccucaggguucccacugaggggucccuucag

SEQ ID NO: 502361 - RNA, 32 nt, Human
uccucaggguucuccucuucucucacaggcgg

SEQ ID NO: 502362 - RNA, 32 nt, Human
uccucagguagauuucuuccacugauaacuug

SEQ ID NO: 502363 - RNA, 32 nt, Human
uccucagguggaggcaguagcccaggaccagu

SEQ ID NO: 502364 - RNA, 18 nt, Human
uccucagucaaguucaga

SEQ ID NO: 502365 - RNA, 32 nt, Human
uccucaguccacugcugaggacacucaguguc

SEQ ID NO: 502366 - RNA, 32 nt, Human
uccucagucucuugucucaccuugcgcaucuc

SEQ ID NO: 502367 - RNA, 22 nt, Human
uccucagugaaaauaaaagcca

SEQ ID NO: 502368 - RNA, 32 nt, Human
uccucagugaaugacguugcagggucuucaug

SEQ ID NO: 502369 - RNA, 32 nt, Human
uccucagugagcucaugagguuuucauuuuua

SEQ ID NO: 502370 - RNA, 32 nt, Human
uccucagugagcugguguauaauccaagacag

SEQ ID NO: 502371 - RNA, 32 nt, Human
uccucagugagcuuugauaugguccaaaaaca

SEQ ID NO: 502372 - RNA, 32 nt, Human
uccucagugcagcucugccagcaucaaggcuu

SEQ ID NO: 502373 - RNA, 32 nt, Human
uccucagugcaggaguuggggacaggcugggg

SEQ ID NO: 502374 - RNA, 32 nt, Human
uccucaguggugccugcaaccccugguucacc

SEQ ID NO: 502375 - RNA, 32 nt, Human
uccucagugugugguuccugcguccuucccca

SEQ ID NO: 502376 - RNA, 32 nt, Human
uccucaguguuguagguugagcgaaugcuacc

SEQ ID NO: 502377 - RNA, 32 nt, Human
uccucaguucaucaggacuuuucucaggacaa

SEQ ID NO: 502378 - RNA, 32 nt, Human
uccucaguucccagcugggauugcuaugcacu

SEQ ID NO: 502379 - RNA, 19 nt, Human
uccucaguuucucaugggu

SEQ ID NO: 502380 - RNA, 32 nt, Human
uccucauaagauaaggagaggccaggccuggu

SEQ ID NO: 502381 - RNA, 32 nt, Human
uccuuagccuccauucagccucaggucuuuug

SEQ ID NO: 502382 - RNA, 32 nt, Human
uccuuagccugcacuccaaccuggcaauuuug

SEQ ID NO: 502383 - RNA, 32 nt, Human
uccuuagcgaggacgaguucuaugaugcgcug

SEQ ID NO: 502384 - RNA, 32 nt, Human
uccuuagcgccugucugcucuccucuaacuag

SEQ ID NO: 502385 - RNA, 32 nt, Human
uccuuagcuugguaugagacagaucggaucca

SEQ ID NO: 502386 - RNA, 32 nt, Human
uccuuaggaagacauuugguuuucaucaugau

SEQ ID NO: 502387 - RNA, 32 nt, Human
uccuuaggaagagauagaaggcacagaagauc

SEQ ID NO: 502388 - RNA, 21 nt, Human
uccuuaggcaaggaaaauggc

SEQ ID NO: 502389 - RNA, 32 nt, Human
uccuuaggcccugccucugggcucagacccca

SEQ ID NO: 502390 - RNA, 25 nt, Human
uccuuaggccucccucucccuuccc

SEQ ID NO: 502391 - RNA, 32 nt, Human
uccuuaggcugcagcuugccacuccugggcug

SEQ ID NO: 502392 - RNA, 32 nt, Human
uccuuagggccuggcccugcaguugucucugc

SEQ ID NO: 502393 - RNA, 32 nt, Human
uccuuagggugggagacauauuccagagcugg

SEQ ID NO: 502394 - RNA, 32 nt, Human
uccuuagguucuccccuucccccuggugcccc

SEQ ID NO: 502395 - RNA, 32 nt, Human
uccuuagucauuguuccuuaucagauccucug

SEQ ID NO: 502396 - RNA, 32 nt, Human
uccuuagugagccuggacagagcaaggagagg

SEQ ID NO: 502397 - RNA, 32 nt, Human
uccuuaguggugcuugcagucacaggaagcag

SEQ ID NO: 502398 - RNA, 32 nt, Human
uccuuaguucagagccugcaaaugaucacugu

SEQ ID NO: 502399 - RNA, 31 nt, Human
uccuuaguucaguucuuuacuguuccucgaa

SEQ ID NO: 502400 - RNA, 32 nt, Human
uccuuaguucccgugugaaagcagaggaaccc

SEQ ID NO: 502401 - RNA, 32 nt, Human
uccuuauaaaucugugcagcugccuuauagua

SEQ ID NO: 502402 - RNA, 32 nt, Human
uccuuauaaaugguguuuagucuuccuguugc

SEQ ID NO: 502403 - RNA, 32 nt, Human
uccuuauaagagaagauagggcgggcauggug

SEQ ID NO: 502404 - RNA, 21 nt, Human
uccuuauaccuucucccuucc

SEQ ID NO: 502405 - RNA, 32 nt, Human
uccuuaucagugccaugagggcagaggugcua

SEQ ID NO: 502406 - RNA, 32 nt, Human
uccuuauccccuggcccuggccuugcagcgug

SEQ ID NO: 502407 - RNA, 32 nt, Human
uccuuauccucuuccuccucuuccuccuccug

SEQ ID NO: 502408 - RNA, 32 nt, Human
uccuuaucuccugcccugucuuggcacaacuc

SEQ ID NO: 502409 - RNA, 32 nt, Human
uccuuaucuugccacuucuacagugccuuuug

SEQ ID NO: 502410 - RNA, 32 nt, Human
uccuuaugcucuuuuaaagccaaugauuccca

SEQ ID NO: 502411 - RNA, 21 nt, Human
uccuuaugugaaaguugcugg

SEQ ID NO: 502412 - RNA, 32 nt, Human
uccuuauuaaagcuucccagcguaugaaauuc

SEQ ID NO: 502413 - RNA, 32 nt, Human
uccuuauuaauacaaacacaaaaaucauuaac

SEQ ID NO: 502414 - RNA, 32 nt, Human
uccuuauuagcuuuauuuuacuuuauguuuuu

SEQ ID NO: 502415 - RNA, 32 nt, Human
uccuuauucacacccugcuucuaaccccaacc

SEQ ID NO: 502416 - RNA, 32 nt, Human
uccuuauucuaauccuccuccccuggaauuac

SEQ ID NO: 502417 - RNA, 21 nt, Human
uccuucaaaaacauucacuuu

SEQ ID NO: 502418 - RNA, 32 nt, Human
uccuucaaaaucagaguucacacuggaucaag

SEQ ID NO: 502419 - RNA, 32 nt, Human
uccuucaaagugguucaucuuggucuauuacu

SEQ ID NO: 502420 - RNA, 19 nt, Human
uccuucaacaccugcugca

SEQ ID NO: 502421 - RNA, 32 nt, Human
uccuucaagaaguuccucugauaggaagcuag

SEQ ID NO: 502422 - RNA, 24 nt, Human
uccuucaagccaagucauccccuu

SEQ ID NO: 502423 - RNA, 23 nt, Human
uccuucaagccuucagccccucc

SEQ ID NO: 502424 - RNA, 32 nt, Human
uccuucaaggccagagaguucacaccagauca

SEQ ID NO: 502425 - RNA, 32 nt, Human
uccuucaauauccauucuuuacuuuucacaua

SEQ ID NO: 502426 - RNA, 21 nt, Human
uccuucaauguuucugccuuu

SEQ ID NO: 502427 - RNA, 32 nt, Human
uccuucacagagacucuugccauucccuuugg

SEQ ID NO: 502428 - RNA, 32 nt, Human
uccuucacagccgcugagcccagaggucccgc

SEQ ID NO: 502429 - RNA, 32 nt, Human
uccuucacagcuuugcuuuucugccucuucuc

SEQ ID NO: 502430 - RNA, 32 nt, Human
uccuucacauaguuugauaaaaagaucaauaa

SEQ ID NO: 502431 - RNA, 21 nt, Human
uccuucaccaauagagugcac

SEQ ID NO: 502432 - RNA, 32 nt, Human
uccuucaccagcaaaguggaaaaagaagcguu

SEQ ID NO: 502433 - RNA, 32 nt, Human
uccuucacccaccacccccaucaucaccgauu

SEQ ID NO: 502434 - RNA, 32 nt, Human
uccuucaccccaaaugaggugaccgcuacauu

SEQ ID NO: 502435 - RNA, 21 nt, Human
uccuucaccccaguggccugc

SEQ ID NO: 502436 - RNA, 32 nt, Human
uccuucaccgucucuccagucucggauccgga

SEQ ID NO: 502437 - RNA, 32 nt, Human
uccuucaccuccccacuccagccccggcucag

SEQ ID NO: 502438 - RNA, 32 nt, Human
uccuucaccuccccacuuuggagcucagauuu

SEQ ID NO: 502439 - RNA, 32 nt, Human
uccuucacucaucaguaaaauguaauaauugc

SEQ ID NO: 502440 - RNA, 32 nt, Human
uccuucacucuccucugagucucccucuuucc

SEQ ID NO: 502441 - RNA, 32 nt, Human
uccuucacuucucgccggaguguguggaggag

SEQ ID NO: 502442 - RNA, 22 nt, Human
uccuucagaaaaggaugccucu

SEQ ID NO: 502443 - RNA, 32 nt, Human
uccuucagaacacuucucugugcucaguggga

SEQ ID NO: 502444 - RNA, 25 nt, Human
uccuucagaagaagcuucauucccu

SEQ ID NO: 502445 - RNA, 32 nt, Human
uccuucagagcugugaugagaggaagggaaac

SEQ ID NO: 502446 - RNA, 32 nt, Human
uccuucagaguuucagcugcauccuggugucc

SEQ ID NO: 502447 - RNA, 32 nt, Human
uccuucagccuccgaagggugauggaaaugga

SEQ ID NO: 502448 - RNA, 32 nt, Human
uccuucagccuccuccucccucaucuguuccc

SEQ ID NO: 502449 - RNA, 32 nt, Human
uccuucagcucagggccacagcuuaaacagcu

SEQ ID NO: 502450 - RNA, 23 nt, Human
uccuucaggaagauguccacuca

SEQ ID NO: 502451 - RNA, 23 nt, Human
uccuucaggcuggagugcagugg

SEQ ID NO: 502452 - RNA, 32 nt, Human
uccuucagguugaacaguagcuucagcgguuu

SEQ ID NO: 502453 - RNA, 32 nt, Human
uccuucagucauuagagguggaagggaggggu

SEQ ID NO: 502454 - RNA, 32 nt, Human
uccuucaguugaguuuucuugucuugaacaua

SEQ ID NO: 502455 - RNA, 21 nt, Human
uccuucaguuucauccccuuu

SEQ ID NO: 502456 - RNA, 32 nt, Human
uccuucauaaggauuugggcucuuagcuccuu

SEQ ID NO: 502457 - RNA, 23 nt, Human
uccuucauaccaccugguucuug

SEQ ID NO: 502458 - RNA, 32 nt, Human
uccuucaucagcaaauggagaagauggccaug

SEQ ID NO: 502459 - RNA, 32 nt, Human
uccuucauccccaacgcuccucaccuagcccc

SEQ ID NO: 502460 - RNA, 32 nt, Human
uccuucauccuuuuauccucccuuuuuggaac

SEQ ID NO: 502461 - RNA, 32 nt, Human
uccuucaucuaaccaauucauuucucagcuuc

SEQ ID NO: 502462 - RNA, 32 nt, Human
uccuucaucugccaggcccuggcauuguuuac

SEQ ID NO: 502463 - RNA, 32 nt, Human
uccuucaucuuccaccaugauuaugaggcguc

SEQ ID NO: 502464 - RNA, 32 nt, Human
uccuucaugagacaggauucaguacugagcua

SEQ ID NO: 502465 - RNA, 32 nt, Human
uccuucaugagcuguuuugcacugugagguaa

SEQ ID NO: 502466 - RNA, 25 nt, Human
uccuucaugcccucccucccuuucc

SEQ ID NO: 502467 - RNA, 32 nt, Human
uccuucaugccuguaaucccagcacuuuggga

SEQ ID NO: 502468 - RNA, 32 nt, Human
uccuucauguccagcagacagcaucuacuccu

SEQ ID NO: 502469 - RNA, 32 nt, Human
uccuucauuaggagcaugaaugguugaaugug

SEQ ID NO: 502470 - RNA, 32 nt, Human
uccuucauuccuccucugucucuuugcacuuu

SEQ ID NO: 502471 - RNA, 32 nt, Human
uccuucauugcagccccucuucuuuuaguucu

SEQ ID NO: 502472 - RNA, 32 nt, Human
uccuuccaaaccacaguuauuugcccaaacua

SEQ ID NO: 502473 - RNA, 32 nt, Human
uccuuccaaaggcagcucagaagauuagaacc

SEQ ID NO: 502474 - RNA, 32 nt, Human
uccuuccaaauacccacccugccagcagcccu

SEQ ID NO: 502475 - RNA, 22 nt, Human
uccuuccaaaugagccacaaca

SEQ ID NO: 502476 - RNA, 32 nt, Human
uccuuccaagccccuccucagaugggccugca

SEQ ID NO: 502477 - RNA, 32 nt, Human
uccuuccaagggcaggaccccauauuccuccu

SEQ ID NO: 502478 - RNA, 23 nt, Human
uccuuccaaguggggccccgaca

SEQ ID NO: 502479 - RNA, 32 nt, Human
uccuuccaauauaacuaggcaaaaagaaguga

SEQ ID NO: 502480 - RNA, 21 nt, Human
uccuuccacacagccccugca

SEQ ID NO: 502481 - RNA, 32 nt, Human
uccuuccacaccaucccucugcccuagaccuu

SEQ ID NO: 502482 - RNA, 21 nt, Human
uccuuccacacuuuccugaca

SEQ ID NO: 502483 - RNA, 23 nt, Human
uccuuccacagcgagaacugcac

SEQ ID NO: 502484 - RNA, 32 nt, Human
uccuuccacagcuguucaguuugucggucucu

SEQ ID NO: 502485 - RNA, 32 nt, Human
uccuuccaccccgacccgcacacacacccaca

SEQ ID NO: 502486 - RNA, 25 nt, Human
uccuuccaccucagacuccaaagca

SEQ ID NO: 502487 - RNA, 32 nt, Human
uccuuccaccugaggggagcacucugacuccu

SEQ ID NO: 502488 - RNA, 22 nt, Human
uccuuccacggaaggccccaca

SEQ ID NO: 502489 - RNA, 32 nt, Human
uccuuccacuacuccccagccuagaagaucca

SEQ ID NO: 502490 - RNA, 19 nt, Human
uccuuccacuaucauuccc

SEQ ID NO: 502491 - RNA, 32 nt, Human
uccuuccacucuuuacccagcagauuucauuc

SEQ ID NO: 502492 - RNA, 32 nt, Human
uccuuccacucuuuucuucuucacauaauuug

SEQ ID NO: 502493 - RNA, 32 nt, Human
uccuuccacuggccagcauucuccucuauuag

SEQ ID NO: 502494 - RNA, 32 nt, Human
uccuuccacuuccuugcuggguggccugugau

SEQ ID NO: 502495 - RNA, 32 nt, Human
uccuuccagaggagggcuggagggacaggagg

SEQ ID NO: 502496 - RNA, 32 nt, Human
uccuuccagcuacucaggaggcugaggcagga

SEQ ID NO: 502497 - RNA, 32 nt, Human
uccuuccagcuggucugcucugaguggcuuau

SEQ ID NO: 502498 - RNA, 32 nt, Human
uccuuccaggguuuagggagugcagugauguc

SEQ ID NO: 502499 - RNA, 32 nt, Human
uccuuccaguguccuuagaacauuuuaauuca

SEQ ID NO: 502500 - RNA, 32 nt, Human
uccuuccaucucuucucucucuugcccuaucu

SEQ ID NO: 502501 - RNA, 32 nt, Human
uccuuccaucuguggccaccucccgggcuguc

SEQ ID NO: 502502 - RNA, 32 nt, Human
uccuuccaugaagaaaacugcugcuuucagca

SEQ ID NO: 502503 - RNA, 32 nt, Human
uccuuccaugaagacugaggcaggcggagcug

SEQ ID NO: 502504 - RNA, 32 nt, Human
uccuuccaugguguguugcugacauugucacu

SEQ ID NO: 502505 - RNA, 32 nt, Human
uccuuccauguggucugaauguuggcaccagc

SEQ ID NO: 502506 - RNA, 32 nt, Human
uccuucccaacaccuccuucccaaaccccucc

SEQ ID NO: 502507 - RNA, 32 nt, Human
uccuucccaacaccuccuucccaaaccccucu

SEQ ID NO: 502508 - RNA, 32 nt, Human
uccuucccaagugagucucucugggccuuagg

SEQ ID NO: 502509 - RNA, 32 nt, Human
uccuucccaaucucccugccagggcccacagc

SEQ ID NO: 502510 - RNA, 32 nt, Human
uccuucccaaugaacaccucucugccacccca

SEQ ID NO: 502511 - RNA, 32 nt, Human
uccuucccacccagaggacccugcacugccuu

SEQ ID NO: 502512 - RNA, 32 nt, Human
uccuucccacggucaacucgggaccucccagc

SEQ ID NO: 502513 - RNA, 32 nt, Human
uccuucccacugcacuccccaguggcuggcgu

SEQ ID NO: 502514 - RNA, 32 nt, Human
uccuucccagaacacauaacccaagaaaaagc

SEQ ID NO: 502515 - RNA, 32 nt, Human
uccuucccagcacucccagccugggauaagcc

SEQ ID NO: 502516 - RNA, 32 nt, Human
uccuucccagccgccucugcuccucgggcuca

SEQ ID NO: 502517 - RNA, 32 nt, Human
uccuucccaggcugaugcuggguccucucucu

SEQ ID NO: 502518 - RNA, 32 nt, Human
uccuucccaucuucugugcuuccagagaacaa

SEQ ID NO: 502519 - RNA, 32 nt, Human
uccuuccccaaagagaucucuggccuuuuacc

SEQ ID NO: 502520 - RNA, 32 nt, Human
uccuuccccagccaggacccugugcuggggcu

SEQ ID NO: 502521 - RNA, 32 nt, Human
uccuuccccaggaauuagaccaagaagccugg

SEQ ID NO: 502522 - RNA, 32 nt, Human
uccuucccccuucucaccauaacccccucuca

SEQ ID NO: 502523 - RNA, 32 nt, Human
uccuucccccuugccuucuucucccccuuccc

SEQ ID NO: 502524 - RNA, 32 nt, Human
uccuuccccgagccccugccccggcuccccgc

SEQ ID NO: 502525 - RNA, 32 nt, Human
uccuuccccuacugcugccuaaguggucuucc

SEQ ID NO: 502526 - RNA, 22 nt, Human
uccuuccccucccugaacccca

SEQ ID NO: 502527 - RNA, 32 nt, Human
uccuuccccugaccuagguguagagaccucca

SEQ ID NO: 502528 - RNA, 32 nt, Human
uccuuccccugccuucagcucaaguuugcuga

SEQ ID NO: 502529 - RNA, 32 nt, Human
uccuuccccuggcugauggacuaauugccugu

SEQ ID NO: 502530 - RNA, 21 nt, Human
uccuuccccuucucccugccc

SEQ ID NO: 502531 - RNA, 32 nt, Human
uccuucccgcuuuuccccuucucccuccugcu

SEQ ID NO: 502532 - RNA, 32 nt, Human
uccuucccggagcccgggacaggcugggcgcg

SEQ ID NO: 502533 - RNA, 32 nt, Human
uccuucccguuuccuuucaauuuacuuucuac

SEQ ID NO: 502534 - RNA, 32 nt, Human
uccuucccuccccgcuuucugaaccucucaac

SEQ ID NO: 502535 - RNA, 32 nt, Human
uccuucccuccccucccccucugccuuuugua

SEQ ID NO: 502536 - RNA, 32 nt, Human
uccuucccuccccuccccucccuuccccuccg

SEQ ID NO: 502537 - RNA, 32 nt, Human
uccuucccuccccuucccuuuuucccuucccc

SEQ ID NO: 502538 - RNA, 32 nt, Human
uccuucccucuuuccaacucccuggguccugg

SEQ ID NO: 502539 - RNA, 32 nt, Human
uccuucccugcaggcacgcaccaucuggggca

SEQ ID NO: 502540 - RNA, 32 nt, Human
uccuucccugcucuccacaucccagaucccca

SEQ ID NO: 502541 - RNA, 32 nt, Human
uccuucccuggaucccucccucccaggucugg

SEQ ID NO: 502542 - RNA, 32 nt, Human
uccuucccuguaaauuugacagugccacauac

SEQ ID NO: 502543 - RNA, 32 nt, Human
uccuucccuucccagucucccuuuucucucuc

SEQ ID NO: 502544 - RNA, 32 nt, Human
uccuucccuuccccucagccuuugguacuguu

SEQ ID NO: 502545 - RNA, 32 nt, Human
uccuucccuuccccuuccuuccuuccuuccuu

SEQ ID NO: 502546 - RNA, 32 nt, Human
uccuucccuuucuccuguccucguccuggccu

SEQ ID NO: 502547 - RNA, 32 nt, Human
uccuucccuuugucuuucuuccaucuuccaac

SEQ ID NO: 502548 - RNA, 24 nt, Human
uccuucccuuuucucaccaaagca

SEQ ID NO: 502549 - RNA, 32 nt, Human
uccuuccgaaucucauccucccuccuccucuc

SEQ ID NO: 502550 - RNA, 32 nt, Human
uccuuccgccucugggccucaggcugccuguc

SEQ ID NO: 502551 - RNA, 32 nt, Human
uccuuccguccucagcgggcagggaacaccuc

SEQ ID NO: 502552 - RNA, 32 nt, Human
uccuuccuacccccuucucccucucccuuccc

SEQ ID NO: 502553 - RNA, 32 nt, Human
uccuuccuacuucuuuucuuccuuccucuucc

SEQ ID NO: 502554 - RNA, 32 nt, Human
uccuuccuauacauuguuuacacuucaacuac

SEQ ID NO: 502555 - RNA, 32 nt, Human
uccuuccucacugguacugccugcuguuuucu

SEQ ID NO: 502556 - RNA, 32 nt, Human
uccuuccuccacugcgcuuacuccucugaccc

SEQ ID NO: 502557 - RNA, 32 nt, Human
uccuuccuccucuauagcuucugggugucccc

SEQ ID NO: 502558 - RNA, 32 nt, Human
uccuuccucuccccuccucccaucccucauag

SEQ ID NO: 502559 - RNA, 32 nt, Human
uccuuccucucuccuccccuccuuccucucuc

SEQ ID NO: 502560 - RNA, 32 nt, Human
uccuuccucucuccucuccuccuuccugucuc

SEQ ID NO: 502561 - RNA, 32 nt, Human
uccuuccucugccuuuuuguuucauauggggc

SEQ ID NO: 502562 - RNA, 32 nt, Human
uccuuccucugcuccuccuuuggagaagcaau

SEQ ID NO: 502563 - RNA, 32 nt, Human
uccuuccucuguaaucccagcuacucaggagg

SEQ ID NO: 502564 - RNA, 32 nt, Human
uccuuccucuuacccuuccucccucagccugc

SEQ ID NO: 502565 - RNA, 22 nt, Human
uccuuccucuuccccaagugca

SEQ ID NO: 502566 - RNA, 32 nt, Human
uccuuccucuuccucucuuaaaacuaucuuag

SEQ ID NO: 502567 - RNA, 32 nt, Human
uccuuccugaaacuauauuuugucauaucaaa

SEQ ID NO: 502568 - RNA, 32 nt, Human
uccuuccugaccaagucugccaaccaauggcc

SEQ ID NO: 502569 - RNA, 32 nt, Human
uccuuccugcccuucugccugccugugucugc

SEQ ID NO: 502570 - RNA, 32 nt, Human
uccuuccugccucuuccagcucccaggggcuc

SEQ ID NO: 502571 - RNA, 32 nt, Human
uccuuccugccugaaauugcugcugcccaucg

SEQ ID NO: 502572 - RNA, 32 nt, Human
uccuuccugccugagcccugcacugucccaga

SEQ ID NO: 502573 - RNA, 32 nt, Human
uccuuccugccuggccgcgggccggccgggcc

SEQ ID NO: 502574 - RNA, 32 nt, Human
uccuuccugcucaagaaaauuagugcucagcc

SEQ ID NO: 502575 - RNA, 32 nt, Human
uccuuccugggggccgaggaaguggggccacu

SEQ ID NO: 502576 - RNA, 32 nt, Human
uccuuccugguugaggaguuucugggagaaug

SEQ ID NO: 502577 - RNA, 32 nt, Human
uccuuccugugaugccaucaccagagaaggug

SEQ ID NO: 502578 - RNA, 32 nt, Human
uccuuccuuaggaccugggggccaggcugacu

SEQ ID NO: 502579 - RNA, 32 nt, Human
uccuuccuuaguuucaaagugucucauucuca

SEQ ID NO: 502580 - RNA, 32 nt, Human
uccuuccuucccucccuuccuccuucucuccu

SEQ ID NO: 502581 - RNA, 32 nt, Human
uccuuccuuccuacccccuucucccucucccu

SEQ ID NO: 502582 - RNA, 32 nt, Human
uccuuccuuccuccuccuccuucucuuuccuc

SEQ ID NO: 502583 - RNA, 32 nt, Human
uccuuccuuccuuccuuccucucucuuucuuu

SEQ ID NO: 502584 - RNA, 32 nt, Human
uccuuccuuccuuccuucuuccuuccuccccu

SEQ ID NO: 502585 - RNA, 32 nt, Human
uccuuccuucuauccauuuucugcccauaauu

SEQ ID NO: 502586 - RNA, 32 nt, Human
uccuuccuucucagggucuccccagcccaguc

SEQ ID NO: 502587 - RNA, 32 nt, Human
uccuuccuucuucccuugaucucccucuuccu

SEQ ID NO: 502588 - RNA, 32 nt, Human
uccuuccuucuuccucugcucaggagaaaacu

SEQ ID NO: 502589 - RNA, 32 nt, Human
uccuuccuucuuuccuccuacagugcugagca

SEQ ID NO: 502590 - RNA, 32 nt, Human
uccuuccuucuuucuuucccuuucccuuucuu

SEQ ID NO: 502591 - RNA, 32 nt, Human
uccuuccuugccccaucuuccucccaacugga

SEQ ID NO: 502592 - RNA, 32 nt, Human
uccuuccuugguucacccuccacccccucccc

SEQ ID NO: 502593 - RNA, 32 nt, Human
uccuuccuuucccagcagcagugcccugcaga

SEQ ID NO: 502594 - RNA, 32 nt, Human
uccuuccuuuuccauuuuccucuggccccucu

SEQ ID NO: 502595 - RNA, 20 nt, Human
uccuucgcugcuggcuugua

SEQ ID NO: 502596 - RNA, 32 nt, Human
uccuucggcagauugcagccccauuccccaca

SEQ ID NO: 502597 - RNA, 32 nt, Human
uccuucgucugcaucuucuucucagcugccuu

SEQ ID NO: 502598 - RNA, 32 nt, Human
uccuucguguggcuauaccauguauguuugua

SEQ ID NO: 502599 - RNA, 32 nt, Human
uccuucuaaaaaggggaaauuuggacacagag

SEQ ID NO: 502600 - RNA, 32 nt, Human
uccuucuaaaaauuugggaggggaauauagua

SEQ ID NO: 502601 - RNA, 32 nt, Human
uccuucuaacaaccacaccaguucuccaacaa

SEQ ID NO: 502602 - RNA, 32 nt, Human
uccuucuaccaggaccucagaagcccagaccu

SEQ ID NO: 502603 - RNA, 32 nt, Human
uccuucuacccacuuuagguuccuuggcuggg

SEQ ID NO: 502604 - RNA, 32 nt, Human
uccuucuagaugguccuugagcaaaacuuaau

SEQ ID NO: 502605 - RNA, 32 nt, Human
uccuucuagcauccuucauccuucagguacca

SEQ ID NO: 502606 - RNA, 32 nt, Human
uccuucuaggagagaggugaaagaaaccuggc

SEQ ID NO: 502607 - RNA, 32 nt, Human
uccuucucaagacuggugccucaggccuuucu

SEQ ID NO: 502608 - RNA, 32 nt, Human
uccuucucacugccuggucacauggugccuag

SEQ ID NO: 502609 - RNA, 32 nt, Human
uccuucucacugcgugucgucuccugaccaga

SEQ ID NO: 502610 - RNA, 32 nt, Human
uccuucucagaaggaggcucccgggggugagc

SEQ ID NO: 502611 - RNA, 32 nt, Human
uccuucucagucuccagaacugugagaaauaa

SEQ ID NO: 502612 - RNA, 32 nt, Human
uccuucucauuuccacuacucacucuagcuuc

SEQ ID NO: 502613 - RNA, 32 nt, Human
uccuucuccacacccagcaccccgcaggagaa

SEQ ID NO: 502614 - RNA, 32 nt, Human
uccuucuccaccagacgagcaccaagaagcug

SEQ ID NO: 502615 - RNA, 32 nt, Human
uccuucuccagccucuucucccgggaacucag

SEQ ID NO: 502616 - RNA, 32 nt, Human
uccuucuccaucaucucaucucuggaugcugu

SEQ ID NO: 502617 - RNA, 32 nt, Human
uccuucucccagaggaaggcagaaacaccuca

SEQ ID NO: 502618 - RNA, 32 nt, Human
uccuucucccuaauacauggcaucacaguucc

SEQ ID NO: 502619 - RNA, 32 nt, Human
uccuucucccucgacauuuucucccucuuucu

SEQ ID NO: 502620 - RNA, 32 nt, Human
uccuucuccggggucagccaggaagauguccc

SEQ ID NO: 502621 - RNA, 32 nt, Human
uccuucuccguggagcucagaggcagcuuacg

SEQ ID NO: 502622 - RNA, 23 nt, Human
uccuucuccuaccauuucccuuu

SEQ ID NO: 502623 - RNA, 32 nt, Human
uccuucuccuacucccugucuuucuggcauuu

SEQ ID NO: 502624 - RNA, 32 nt, Human
uccuucuccuacucuauauucccuuugccuuc

SEQ ID NO: 502625 - RNA, 32 nt, Human
uccuucuccucaccaucuucccagacggaguu

SEQ ID NO: 502626 - RNA, 32 nt, Human
uccuucuccucuuguagccagaauucuggaca

SEQ ID NO: 502627 - RNA, 32 nt, Human
uccuucuccuucugccaugauugugaggccuc

SEQ ID NO: 502628 - RNA, 21 nt, Human
uccuucucgcaggaccagaug

SEQ ID NO: 502629 - RNA, 32 nt, Human
uccuucucucacucccuuucuucaugcuucca

SEQ ID NO: 502630 - RNA, 32 nt, Human
uccuucucucacucccuuucuucaugcuuccc

SEQ ID NO: 502631 - RNA, 32 nt, Human
uccuucucuccucauucuucaacuaucuuuga

SEQ ID NO: 502632 - RNA, 32 nt, Human
uccuucucuccuccuucuucauucuacaccac

SEQ ID NO: 502633 - RNA, 32 nt, Human
uccuucucuccucugcugcagcuacugauauc

SEQ ID NO: 502634 - RNA, 32 nt, Human
uccuucucucuuucucuuuacucaugcucuaa

SEQ ID NO: 502635 - RNA, 32 nt, Human
uccuucucugaggcucagguccuugcuugaac

SEQ ID NO: 502636 - RNA, 32 nt, Human
uccuucucuggccaucuccuucccuccuucca

SEQ ID NO: 502637 - RNA, 32 nt, Human
uccuucucuguugccaauucuggaaccaaaau

SEQ ID NO: 502638 - RNA, 32 nt, Human
uccuucucuucuucuccucuccggcuucgcgc

SEQ ID NO: 502639 - RNA, 32 nt, Human
uccuucucuuucuccuucuuggaugucugaua

SEQ ID NO: 502640 - RNA, 32 nt, Human
uccuucugaagccccuuggcucugccuuggcc

SEQ ID NO: 502641 - RNA, 32 nt, Human
uccuucugcagcaggacucaccuacugacuca

SEQ ID NO: 502642 - RNA, 32 nt, Human
uccuucugcauccuuuggccaauaaaaguugc

SEQ ID NO: 502643 - RNA, 32 nt, Human
uccuucugccagcagcucacacugcuugaagu

SEQ ID NO: 502644 - RNA, 32 nt, Human
uccuucugccauggcccuguggaugcgccucc

SEQ ID NO: 502645 - RNA, 32 nt, Human
uccuucugcccuuguaagcccaucccagcuac

SEQ ID NO: 502646 - RNA, 32 nt, Human
uccuucugccucuguccacauuuccccaugug

SEQ ID NO: 502647 - RNA, 32 nt, Human
uccuucugccuggaauacucucuccccagauu

SEQ ID NO: 502648 - RNA, 32 nt, Human
uccuucugccuucuggucuccucgugccuccu

SEQ ID NO: 502649 - RNA, 32 nt, Human
uccuucugcuaacccagggaggguccuaagag

SEQ ID NO: 502650 - RNA, 32 nt, Human
uccuucuggaaggugauugccauguacacaac

SEQ ID NO: 502651 - RNA, 29 nt, Human
uccuucuggcugcaguaagcucccuggau

SEQ ID NO: 502652 - RNA, 32 nt, Human
uccuucugggacagcuucccugccucagaaaa

SEQ ID NO: 502653 - RNA, 32 nt, Human
uccuucugggaccucaggcaagugacuucgcc

SEQ ID NO: 502654 - RNA, 32 nt, Human
uccuucugggcuccaggauugucuccccacuc

SEQ ID NO: 502655 - RNA, 32 nt, Human
uccuucuggggagaccccacacccaagcacau

SEQ ID NO: 502656 - RNA, 32 nt, Human
uccuucugucucuuggaaagauacagcuccag

SEQ ID NO: 502657 - RNA, 20 nt, Human
uccuucugugagugcugcgu

SEQ ID NO: 502658 - RNA, 21 nt, Human
uccuucugugcuugcuugcau

SEQ ID NO: 502659 - RNA, 32 nt, Human
uccuucuguggcuuggagaugauaggaugauu

SEQ ID NO: 502660 - RNA, 32 nt, Human
uccuucuguuucucugaauaucuucauuucua

SEQ ID NO: 502661 - RNA, 32 nt, Human
uccuucuuacauucuuucccucucacaccauc

SEQ ID NO: 502662 - RNA, 28 nt, Human
uccuucuuaucgccugccucaucgcuca

SEQ ID NO: 502663 - RNA, 32 nt, Human
uccuucuuccaauguuccuccccucucuguau

SEQ ID NO: 502664 - RNA, 32 nt, Human
uccuucuuccaucccuucuuccaucuuuccag

SEQ ID NO: 502665 - RNA, 32 nt, Human
uccuucuuccccacuucucucuucccucauuc

SEQ ID NO: 502666 - RNA, 32 nt, Human
uccuucuucccuucaucaccaaaggagccucu

SEQ ID NO: 502667 - RNA, 32 nt, Human
uccuucuuccucccucuccuccuccccuuccc

SEQ ID NO: 502668 - RNA, 32 nt, Human
uccuucuuccuugacugcucuucaccagggau

SEQ ID NO: 502669 - RNA, 32 nt, Human
uccuucuucuccagcuccuccugcucccucug

SEQ ID NO: 502670 - RNA, 32 nt, Human
uccuucuucuccgccaccgagcucuuugaguc

SEQ ID NO: 502671 - RNA, 32 nt, Human
uccuucuucuuaacccucucccauccauuuuu

SEQ ID NO: 502672 - RNA, 19 nt, Human
uccuucuugaccucaucac

SEQ ID NO: 502673 - RNA, 32 nt, Human
uccuucuugccugcccugucuccugggaucag

SEQ ID NO: 502674 - RNA, 32 nt, Human
uccuucuuggucucacacuugggacucaaaaa

SEQ ID NO: 502675 - RNA, 32 nt, Human
uccuucuuucuuucccuuucccuuucuuuucu

SEQ ID NO: 502676 - RNA, 32 nt, Human
uccuugaaaauucauaucauaaagucaguugu

SEQ ID NO: 502677 - RNA, 32 nt, Human
uccuugaaaccagcucaggcuacugccacuca

SEQ ID NO: 502678 - RNA, 32 nt, Human
uccuugaaaguacauuuaacucacuacaguua

SEQ ID NO: 502679 - RNA, 32 nt, Human
uccuugaagcaccccagcauccuuucaauaaa

SEQ ID NO: 502680 - RNA, 32 nt, Human
uccuugaagggcccagauucuaccacacagca

SEQ ID NO: 502681 - RNA, 32 nt, Human
uccuugaaggggcgggcaccaggcuagguccg

SEQ ID NO: 502682 - RNA, 32 nt, Human
uccuugaagucagcuuuggaccacaauaauuu

SEQ ID NO: 502683 - RNA, 24 nt, Human
uccuugaaucaccugugggacuug

SEQ ID NO: 502684 - RNA, 32 nt, Human
uccuugacaaagcucucagcuccaaugaggua

SEQ ID NO: 502685 - RNA, 20 nt, Human
uccuugacauuugggaucug

SEQ ID NO: 502686 - RNA, 32 nt, Human
uccuugaccaggcugaaaggugaccucggggu

SEQ ID NO: 502687 - RNA, 32 nt, Human
uccuugaccagggucucacacccuggaggaau

SEQ ID NO: 502688 - RNA, 21 nt, Human
uccuugacccuuccccuuucc

SEQ ID NO: 502689 - RNA, 32 nt, Human
uccuugaccucacgugcugcugccuucucugc

SEQ ID NO: 502690 - RNA, 32 nt, Human
uccuugaccucauuuacaaagcaaaaagagau

SEQ ID NO: 502691 - RNA, 32 nt, Human
uccuugacgccugggcagaggcugcagcugca

SEQ ID NO: 502692 - RNA, 32 nt, Human
uccuugacucaauugauccucccaucucagcc

SEQ ID NO: 502693 - RNA, 22 nt, Human
uccuugacuccaucgggcgcuu

SEQ ID NO: 502694 - RNA, 32 nt, Human
uccuugacucgcaguccucccaccgcaccuuc

SEQ ID NO: 502695 - RNA, 32 nt, Human
uccuugagaagaugcaggacaaguagacugga

SEQ ID NO: 502696 - RNA, 32 nt, Human
uccuugagacacaccuggcacccgucaucggc

SEQ ID NO: 502697 - RNA, 32 nt, Human
uccuugagacuggagagcagccagcaggugcc

SEQ ID NO: 502698 - RNA, 32 nt, Human
uccuugagacuucauuccccagcaagcucagc

SEQ ID NO: 502699 - RNA, 32 nt, Human
uccuugagccaucagagagaguguauguucac

SEQ ID NO: 502700 - RNA, 32 nt, Human
uccuugagcccaggagguugaggcugcaguga

SEQ ID NO: 502701 - RNA, 22 nt, Human
uccuugagcugaaccgcacuga

SEQ ID NO: 502702 - RNA, 32 nt, Human
uccuugagcuuugccugucucuugccuuauca

SEQ ID NO: 502703 - RNA, 32 nt, Human
uccuugaggccaggagguugaggcugcaguga

SEQ ID NO: 502704 - RNA, 32 nt, Human
uccuugagggggugaggcagaggaucacuuga

SEQ ID NO: 502705 - RNA, 32 nt, Human
uccuugaggugcaucauuagguuguuuauuug

SEQ ID NO: 502706 - RNA, 32 nt, Human
uccuugagugugggggauuugggugaaugagg

SEQ ID NO: 502707 - RNA, 32 nt, Human
uccuugauagccacuucacucugcuacuacuc

SEQ ID NO: 502708 - RNA, 32 nt, Human
uccuugaucaucguucuuaauucuccauuagu

SEQ ID NO: 502709 - RNA, 32 nt, Human
uccuugaucucagggaucuucuccguuugcau

SEQ ID NO: 502710 - RNA, 23 nt, Human
uccuugauggaggggagaaggga

SEQ ID NO: 502711 - RNA, 32 nt, Human
uccuugaugggcaugugugauggggaaggagc

SEQ ID NO: 502712 - RNA, 23 nt, Human
uccuugauuccacuaugggaccu

SEQ ID NO: 502713 - RNA, 32 nt, Human
uccuugauuuagcacuauuuacauacaggcca

SEQ ID NO: 502714 - RNA, 20 nt, Human
uccuugauuugugaccuuga

SEQ ID NO: 502715 - RNA, 22 nt, Human
uccuugcaaagagaauccugua

SEQ ID NO: 502716 - RNA, 32 nt, Human
uccuugcaaccaggcagcugagaccagggucu

SEQ ID NO: 502717 - RNA, 32 nt, Human
uccuugcaagaccugcuugcucagcuuuuucu

SEQ ID NO: 502718 - RNA, 23 nt, Human
uccuugcacuagcuacauccuca

SEQ ID NO: 502719 - RNA, 32 nt, Human
uccuugcagaacuucugugcacaugacaucuu

SEQ ID NO: 502720 - RNA, 32 nt, Human
uccuugcagagccuguggcuugcauuuccuac

SEQ ID NO: 502721 - RNA, 32 nt, Human
uccuugcagagcuuuacugaggcccuccauau

SEQ ID NO: 502722 - RNA, 32 nt, Human
uccuugcagcagagcagggcugaggggaaggg

SEQ ID NO: 502723 - RNA, 22 nt, Human
uccuugcaggaaaccagucuca

SEQ ID NO: 502724 - RNA, 32 nt, Human
uccuugcaggagaaagcuaagccucaagauag

SEQ ID NO: 502725 - RNA, 32 nt, Human
uccuugcaggcagaaggcaguagggccccugc

SEQ ID NO: 502726 - RNA, 31 nt, Human
uccuugcaggcuuguugccuguugaaagaag

SEQ ID NO: 502727 - RNA, 32 nt, Human
uccuugcagugaagccaccaugggugaccguc

SEQ ID NO: 502728 - RNA, 32 nt, Human
uccuugcaugcacaccuuccuccacccuccac

SEQ ID NO: 502729 - RNA, 32 nt, Human
uccuugccaggccuccccaaccccuggccuca

SEQ ID NO: 502730 - RNA, 32 nt, Human
uccuugcccaggcuggagugcaguggcgcgau

SEQ ID NO: 502731 - RNA, 22 nt, Human
uccuugccccaaccuggcccca

SEQ ID NO: 502732 - RNA, 32 nt, Human
uccuugccccuucaguauucucucuuugcgau

SEQ ID NO: 502733 - RNA, 32 nt, Human
uccuugcccuccacuaccaauuucuauuuccu

SEQ ID NO: 502734 - RNA, 32 nt, Human
uccuugcccugccucaguuuaccugcacaugc

SEQ ID NO: 502735 - RNA, 32 nt, Human
uccuugcccuguuccccaccucccggcuccag

SEQ ID NO: 502736 - RNA, 32 nt, Human
uccuugcccuguuccccaccuccuggcuccag

SEQ ID NO: 502737 - RNA, 21 nt, Human
uccuugcccuuuucccuuccc

SEQ ID NO: 502738 - RNA, 21 nt, Human
uccuugccgcaccgagugcac

SEQ ID NO: 502739 - RNA, 32 nt, Human
uccuugccgccucaccgccggccuccucgacu

SEQ ID NO: 502740 - RNA, 32 nt, Human
uccuugccucaccaaccuucccauacacaguc

SEQ ID NO: 502741 - RNA, 32 nt, Human
uccuugccucucccuauggccugcuggcccac

SEQ ID NO: 502742 - RNA, 32 nt, Human
uccuugccugggugggaggagcgaaagugggg

SEQ ID NO: 502743 - RNA, 32 nt, Human
uccuugccuuaaagagcucucuagucuaacgg

SEQ ID NO: 502744 - RNA, 32 nt, Human
uccuugccuucccauuuauccauguuucacuu

SEQ ID NO: 502745 - RNA, 32 nt, Human
uccuugccuugcuucucccauuuccugaucua

SEQ ID NO: 502746 - RNA, 32 nt, Human
uccuugccuuucuccugucuuucuguguuuau

SEQ ID NO: 502747 - RNA, 32 nt, Human
uccuugcguggccgagauccagcuucaacgaa

SEQ ID NO: 502748 - RNA, 32 nt, Human
uccuugcguggcgaaggucgugccucaggucu

SEQ ID NO: 502749 - RNA, 32 nt, Human
uccuugcguuccugucuggcguauucugaaga

SEQ ID NO: 502750 - RNA, 32 nt, Human
uccuugcuacuucucuuccuccucaaugaaau

SEQ ID NO: 502751 - RNA, 32 nt, Human
uccuugcucacaugcugccaucaugucaggua

SEQ ID NO: 502752 - RNA, 17 nt, Human
uccuugcucccacccca

SEQ ID NO: 502753 - RNA, 32 nt, Human
uccuugcugaugaacugagauggucccaacug

SEQ ID NO: 502754 - RNA, 32 nt, Human
uccuugcugcucccuacugacucuagcuuacu

SEQ ID NO: 502755 - RNA, 32 nt, Human
uccuugcuucucuguggccugugccauggggc

SEQ ID NO: 502756 - RNA, 32 nt, Human
uccuugcuucuuugaugugauaguuuugagau

SEQ ID NO: 502757 - RNA, 32 nt, Human
uccuugcuugcaaucucaucugauuuugcuag

SEQ ID NO: 502758 - RNA, 32 nt, Human
uccuugcuuuccccaucuguuggaccaaauaa

SEQ ID NO: 502759 - RNA, 32 nt, Human
uccuugcuuugucagcuugcaaaggaggagag

SEQ ID NO: 502760 - RNA, 32 nt, Human
uccuugcuuuucaaagauuuuggcuuaaaccc

SEQ ID NO: 502761 - RNA, 22 nt, Human
uccuuggaaacaacauaccucu

SEQ ID NO: 502762 - RNA, 32 nt, Human
uccuuggaaagagacgucgcuuucauccccaa

SEQ ID NO: 502763 - RNA, 27 nt, Human
uccuuggaaauaguaaagaacuacucu

SEQ ID NO: 502764 - RNA, 32 nt, Human
uccuuggaccaaucagagaugcuguagcuccu

SEQ ID NO: 502765 - RNA, 23 nt, Human
uccuuggaccucuuaccaaacca

SEQ ID NO: 502766 - RNA, 32 nt, Human
uccuuggacuccucaaacuucuccagcgccug

SEQ ID NO: 502767 - RNA, 32 nt, Human
uccuuggacuugucugggggcugcaguggagu

SEQ ID NO: 502768 - RNA, 32 nt, Human
uccuuggagcuuccugggcccuucccugggcc

SEQ ID NO: 502769 - RNA, 24 nt, Human
uccuuggaucucuguauguacagg

SEQ ID NO: 502770 - RNA, 32 nt, Human
uccuuggauggcaccauccacccugcaggcuu

SEQ ID NO: 502771 - RNA, 32 nt, Human
uccuuggauguuugugggaaaugcagauugcu

SEQ ID NO: 502772 - RNA, 20 nt, Human
uccuuggcaacaaccuguca

SEQ ID NO: 502773 - RNA, 32 nt, Human
uccuuggcaaucaaccaacguugcuaugaaau

SEQ ID NO: 502774 - RNA, 32 nt, Human
uccuuggcagaacucaguuaaaucuuugaaga

SEQ ID NO: 502775 - RNA, 32 nt, Human
uccuuggcaggggcacugugaugaggaguaag

SEQ ID NO: 502776 - RNA, 32 nt, Human
uccuuggccagccuuuugccucccucgauacu

SEQ ID NO: 502777 - RNA, 32 nt, Human
uccuuggccauucccucuccccucucuaucca

SEQ ID NO: 502778 - RNA, 32 nt, Human
uccuuggcccagucugugccauuuucucugcg

SEQ ID NO: 502779 - RNA, 32 nt, Human
uccuuggcccuugccagacauuagcaccauga

SEQ ID NO: 502780 - RNA, 32 nt, Human
uccuuggccuccaggguccauuaaggugagaa

SEQ ID NO: 502781 - RNA, 32 nt, Human
uccuuggcgacgcagggggccuagagagcccc

SEQ ID NO: 502782 - RNA, 24 nt, Human
uccuuggcgcugccugggguccuu

SEQ ID NO: 502783 - RNA, 32 nt, Human
uccuuggcgucaccccuccacauuguccagau

SEQ ID NO: 502784 - RNA, 32 nt, Human
uccuuggcucaagcaauccugcugccuuggcc

SEQ ID NO: 502785 - RNA, 32 nt, Human
uccuuggcucaagcuguccucuggccucagcc

SEQ ID NO: 502786 - RNA, 32 nt, Human
uccuuggcucaaggcauccucccaccucagcu

SEQ ID NO: 502787 - RNA, 32 nt, Human
uccuuggcucaagugauucucccaccuuagcc

SEQ ID NO: 502788 - RNA, 24 nt, Human
uccuuggcuccacccgcaggccua

SEQ ID NO: 502789 - RNA, 32 nt, Human
uccuuggcuccaggagcccacaggcuggggag

SEQ ID NO: 502790 - RNA, 32 nt, Human
uccuuggcugaagugauccugucgucucggcu

SEQ ID NO: 502791 - RNA, 32 nt, Human
uccuuggcuuaccugaccucuugcugucucug

SEQ ID NO: 502792 - RNA, 32 nt, Human
uccuuggcuuguagacucuguguucucccuuu

SEQ ID NO: 502793 - RNA, 32 nt, Human
uccuugggaggcuaaggcaggagaauagcaug

SEQ ID NO: 502794 - RNA, 32 nt, Human
uccuugggaggcugaggcaggagaauugcuug

SEQ ID NO: 502795 - RNA, 32 nt, Human
uccuugggaugaagaggguagagugggcugcu

SEQ ID NO: 502796 - RNA, 32 nt, Human
uccuugggcccaaacuucuccagucucucaug

SEQ ID NO: 502797 - RNA, 24 nt, Human
uccuugggcccuuuuucccuuccc

SEQ ID NO: 502798 - RNA, 32 nt, Human
uccuugggcuauauuuucucuccucgaguugc

SEQ ID NO: 502799 - RNA, 32 nt, Human
uccuugggcuuauccugggugcuuauaggaga

SEQ ID NO: 502800 - RNA, 32 nt, Human
uccuuggggaaugaccacgcaacugggcccag

SEQ ID NO: 502801 - RNA, 24 nt, Human
uccuuggggagcuugcagcacagg

SEQ ID NO: 502802 - RNA, 32 nt, Human
uccuuggggcuugccacccacuccuuugcugu

SEQ ID NO: 502803 - RNA, 32 nt, Human
uccuugggugagcucugaacaccagcuuuggc

SEQ ID NO: 502804 - RNA, 32 nt, Human
uccuugguaagccugcacaccuggcuuccuaa

SEQ ID NO: 502805 - RNA, 32 nt, Human
uccuuggucaccaggcaaugggagcuguagac

SEQ ID NO: 502806 - RNA, 32 nt, Human
uccuuggucacugaggccauuggaucuuccuc

SEQ ID NO: 502807 - RNA, 32 nt, Human
uccuuggucaguguccaugcuuucugggcagg

SEQ ID NO: 502808 - RNA, 32 nt, Human
uccuugguccuucugagagucaagaucuuuuc

SEQ ID NO: 502809 - RNA, 32 nt, Human
uccuuggucucugccacugcccugccucuccu

SEQ ID NO: 502810 - RNA, 32 nt, Human
uccuuggucuggagaagagaucugagguccca

SEQ ID NO: 502811 - RNA, 20 nt, Human
uccuuggugggcagcauccu

SEQ ID NO: 502812 - RNA, 32 nt, Human
uccuugguguccuaggagaaacagacaagcaa

SEQ ID NO: 502813 - RNA, 32 nt, Human
uccuugguucaaacgauucuccugccucagcc

SEQ ID NO: 502814 - RNA, 32 nt, Human
uccuugguucaagcgauucuccugccucagcc

SEQ ID NO: 502815 - RNA, 32 nt, Human
uccuugguucagagggaagugggucugcuuca

SEQ ID NO: 502816 - RNA, 32 nt, Human
uccuugguucgcccgguuuucuguuuucagua

SEQ ID NO: 502817 - RNA, 21 nt, Human
uccuuguaacuggaaugcccu

SEQ ID NO: 502818 - RNA, 23 nt, Human
uccuuguaacuucaacugacucu

SEQ ID NO: 502819 - RNA, 32 nt, Human
uccuuguaagaguggcuggaaggcuccgcgga

SEQ ID NO: 502820 - RNA, 32 nt, Human
uccuuguagacagaugaugagacgccaaagua

SEQ ID NO: 502821 - RNA, 23 nt, Human
uccuuguaggcagaacauacucu

SEQ ID NO: 502822 - RNA, 32 nt, Human
uccuuguaggcugaagucagucugacuugaag

SEQ ID NO: 502823 - RNA, 32 nt, Human
uccuuguaguaagcuguuuucugcucagccac

SEQ ID NO: 502824 - RNA, 32 nt, Human
uccuuguaguuucuucccuccuguucucuggu

SEQ ID NO: 502825 - RNA, 32 nt, Human
uccuuguaucucugcaguguggauugaacaga

SEQ ID NO: 502826 - RNA, 32 nt, Human
uccuuguaucuucuccccuucugagccugucc

SEQ ID NO: 502827 - RNA, 32 nt, Human
uccuuguauuuuaaauauuuguauuuauuuca

SEQ ID NO: 502828 - RNA, 32 nt, Human
uccuugucaaugcuucccagugaagagaguac

SEQ ID NO: 502829 - RNA, 32 nt, Human
uccuuguccuacucucacaucugcauuccucu

SEQ ID NO: 502830 - RNA, 16 nt, Human
uccuuguccucaccca

SEQ ID NO: 502831 - RNA, 32 nt, Human
uccuugucuccccucuccccacuuauucuccu

SEQ ID NO: 502832 - RNA, 32 nt, Human
uccuugucucgguucagguccagaccuccccg

SEQ ID NO: 502833 - RNA, 25 nt, Human
uccuugucugcacugcugguauggg

SEQ ID NO: 502834 - RNA, 32 nt, Human
uccuugucugcucuccuuugaaccuuggcagc

SEQ ID NO: 502835 - RNA, 32 nt, Human
uccuugucuucgugguuccuggcucagcagga

SEQ ID NO: 502836 - RNA, 32 nt, Human
uccuugugaacaagccccuaggcccacagucu

SEQ ID NO: 502837 - RNA, 32 nt, Human
uccuugugacuggaugacugaggucuccauuu

SEQ ID NO: 502838 - RNA, 32 nt, Human
uccuugugacuuacuaauggcugcaaugccaa

SEQ ID NO: 502839 - RNA, 32 nt, Human
uccuugugagaaauaaaguggagcagccucau

SEQ ID NO: 502840 - RNA, 32 nt, Human
uccuugugcacacccuugugccuuugcucgca

SEQ ID NO: 502841 - RNA, 32 nt, Human
uccuugugcccucaccagacacccuguuggcc

SEQ ID NO: 502842 - RNA, 32 nt, Human
uccuuguggcccacccuguccuuguuucugug

SEQ ID NO: 502843 - RNA, 32 nt, Human
uccuugugggccgcgugggcccccagggccag

SEQ ID NO: 502844 - RNA, 32 nt, Human
uccuugugggccuaccaggcuugguggagcca

SEQ ID NO: 502845 - RNA, 32 nt, Human
uccuuguggggagguggauccucugccagcag

SEQ ID NO: 502846 - RNA, 32 nt, Human
uccuuguguacuccagcauugguuauagucau

SEQ ID NO: 502847 - RNA, 32 nt, Human
uccuugugucccucgucccacaggaggacaca

SEQ ID NO: 502848 - RNA, 32 nt, Human
uccuugugugugucuuggagugcauuugacuc

SEQ ID NO: 502849 - RNA, 32 nt, Human
uccuuguguuuugaggucacugagguaggaag

SEQ ID NO: 502850 - RNA, 32 nt, Human
uccuuguguuuuguccugccucuuguuucugu

SEQ ID NO: 502851 - RNA, 32 nt, Human
uccuuguuauccuuguuuccuuagcuugguau

SEQ ID NO: 502852 - RNA, 32 nt, Human
uccuuguucaaaacauuuaaucaucuuaagca

SEQ ID NO: 502853 - RNA, 32 nt, Human
uccuuguucaguucuuguccaggccuuugggu

SEQ ID NO: 502854 - RNA, 25 nt, Human
uccuuguuccagggaacagcugcuu

SEQ ID NO: 502855 - RNA, 18 nt, Human
uccuuguucugcugccca

SEQ ID NO: 502856 - RNA, 21 nt, Human
uccuuguucuguucugggcca

SEQ ID NO: 502857 - RNA, 32 nt, Human
uccuuguuucuuucuucccugcacccgcuucu

SEQ ID NO: 502858 - RNA, 32 nt, Human
uccuuguuugacuucagaccuggaucuaauag

SEQ ID NO: 502859 - RNA, 32 nt, Human
uccuuuaaaauuauugguuaauacuuugagac

SEQ ID NO: 502860 - RNA, 32 nt, Human
uccuuuaaaggauggaggcaacuuggccaacu

SEQ ID NO: 502861 - RNA, 23 nt, Human
uccuuuaacagaaaguuugccaa

SEQ ID NO: 502862 - RNA, 32 nt, Human
uccuuuaacucccuuuuuacacuuuaugguaa

SEQ ID NO: 502863 - RNA, 32 nt, Human
uccuuuaaucuuuugccccagccauccaguau

SEQ ID NO: 502864 - RNA, 32 nt, Human
uccuuuacagaaaaguuuucugaccucaauuc

SEQ ID NO: 502865 - RNA, 21 nt, Human
uccuuuaccaccguggugaca

SEQ ID NO: 502866 - RNA, 32 nt, Human
uccuuuacccaguuuuuccuuuguaggauggg

SEQ ID NO: 502867 - RNA, 32 nt, Human
uccuuuacucuccucugagucucccucuuucc

SEQ ID NO: 502868 - RNA, 32 nt, Human
uccuuuacucuuuaacagugcagguggucagu

SEQ ID NO: 502869 - RNA, 32 nt, Human
uccuuuagacuggccuagccugggcaucacug

SEQ ID NO: 502870 - RNA, 30 nt, Human
uccuuuagccucuccccaccuguccaaacu

SEQ ID NO: 502871 - RNA, 32 nt, Human
uccuuuagccuggaggucaaggcugcagugag

SEQ ID NO: 502872 - RNA, 24 nt, Human
uccuuuagggccaggcucaccccu

SEQ ID NO: 502873 - RNA, 32 nt, Human
uccuuuauagguuuuauuucuggucauagaga

SEQ ID NO: 502874 - RNA, 32 nt, Human
uccuuuauauuguguuagaggcugaggauaua

SEQ ID NO: 502875 - RNA, 32 nt, Human
uccuuuauccccuccuuuaccccacauaugca

SEQ ID NO: 502876 - RNA, 32 nt, Human
uccuuuaucugugacuucaugcucugauaacu

SEQ ID NO: 502877 - RNA, 32 nt, Human
uccuuuaucuuucugagucucagauucuucau

SEQ ID NO: 502878 - RNA, 21 nt, Human
uccuuuauggagacaaccccu

SEQ ID NO: 502879 - RNA, 32 nt, Human
uccuuuauuucucucccaaccuggcugcaaag

SEQ ID NO: 502880 - RNA, 32 nt, Human
uccuuuauuucucucccuuucucuucaccucu

SEQ ID NO: 502881 - RNA, 32 nt, Human
uccuuuauuuucuuauccucccuucucuuguu

SEQ ID NO: 502882 - RNA, 32 nt, Human
uccuuucaaccagauaacuuccuaaguggaga

SEQ ID NO: 502883 - RNA, 32 nt, Human
uccuuucaagacagaaagagacaggagacaug

SEQ ID NO: 502884 - RNA, 32 nt, Human
uccuuucaauaugacaguuuugugcuucucuc

SEQ ID NO: 502885 - RNA, 32 nt, Human
uccuuucacucccaaaugcaaacagucucuuc

SEQ ID NO: 502886 - RNA, 32 nt, Human
uccuuucacuccugccugacugccaagccacc

SEQ ID NO: 502887 - RNA, 32 nt, Human
uccuuucacugccuuaaucuuugcaacagggu

SEQ ID NO: 502888 - RNA, 32 nt, Human
uccuuucagacacauccucggacacacaugcg

SEQ ID NO: 502889 - RNA, 32 nt, Human
uccuuucagcauggcagggggcuugagauauu

SEQ ID NO: 502890 - RNA, 32 nt, Human
uccuuucagccuugcugacuucucccuauaag

SEQ ID NO: 502891 - RNA, 32 nt, Human
uccuuucaggccagggcaucccagaggucaau

SEQ ID NO: 502892 - RNA, 32 nt, Human
uccuuucauccugauucagcucugccuugcau

SEQ ID NO: 502893 - RNA, 32 nt, Human
uccuuuccacucugccccagcucccuggaucc

SEQ ID NO: 502894 - RNA, 32 nt, Human
uccuuuccagagccgugaccucaggcucaccu

SEQ ID NO: 502895 - RNA, 32 nt, Human
uccuuuccaggugaagggugacuuggcugaag

SEQ ID NO: 502896 - RNA, 32 nt, Human
uccuuuccaguccagcaccuccuggggcaggc

SEQ ID NO: 502897 - RNA, 32 nt, Human
uccuuucccagagguaucaugguaucccaaga

SEQ ID NO: 502898 - RNA, 32 nt, Human
uccuuucccccucccucacuccuuccuuugcg

SEQ ID NO: 502899 - RNA, 32 nt, Human
uccuuuccccuccaaagggcaagaauucacac

SEQ ID NO: 502900 - RNA, 32 nt, Human
uccuuuccccuccccucucuuccuccccucug

SEQ ID NO: 502901 - RNA, 32 nt, Human
uccuuuccccuucauucucacccugucugcuu

SEQ ID NO: 502902 - RNA, 32 nt, Human
uccuuucccucccauucuccugagggacucaa

SEQ ID NO: 502903 - RNA, 32 nt, Human
uccuuucccugccucuuguccaauggaguggg

SEQ ID NO: 502904 - RNA, 32 nt, Human
uccuuucccugccuucucccauacauuccaaa

SEQ ID NO: 502905 - RNA, 32 nt, Human
uccuuucccuucccuuacuucuccccuucccc

SEQ ID NO: 502906 - RNA, 32 nt, Human
uccuuucccuuucuuuccuuuuucccuguccu

SEQ ID NO: 502907 - RNA, 32 nt, Human
uccuuucccuuucuuuucuuuugcuuuccuuu

SEQ ID NO: 502908 - RNA, 32 nt, Human
uccuuuccuaucuuccuuccucucucucuucc

SEQ ID NO: 502909 - RNA, 32 nt, Human
uccuuuccuccccuucugccuuccccuuccuu

SEQ ID NO: 502910 - RNA, 32 nt, Human
uccuuuccuccuccugugcuuccuuucucguu

SEQ ID NO: 502911 - RNA, 32 nt, Human
uccuuuccucucugcugacuccacauuuccaa

SEQ ID NO: 502912 - RNA, 32 nt, Human
uccuuuccugaaagccucaucuaccuuaauuu

SEQ ID NO: 502913 - RNA, 32 nt, Human
uccuuuccugccucugugccccugccucuccc

SEQ ID NO: 502914 - RNA, 32 nt, Human
uccuuuccugccuugugaccucagauggucac

SEQ ID NO: 502915 - RNA, 32 nt, Human
uccuuuccugcucuugguuuucccaggugagc

SEQ ID NO: 502916 - RNA, 32 nt, Human
uccuuuccuguccugguacuuggcaccuugua

SEQ ID NO: 502917 - RNA, 32 nt, Human
uccuuuccuuccccuaagauguuuccagggcc

SEQ ID NO: 502918 - RNA, 32 nt, Human
uccuuuccuuucucccuucccccaccaaccuc

SEQ ID NO: 502919 - RNA, 32 nt, Human
uccuuucgaggcuggggcuagauggauacccc

SEQ ID NO: 502920 - RNA, 32 nt, Human
uccuuucgcccacacauuggcggaggagaaac

SEQ ID NO: 502921 - RNA, 32 nt, Human
uccuuucuagccccugcaucuccaacaagucc

SEQ ID NO: 502922 - RNA, 32 nt, Human
uccuuucuauagacucaacaugcgguugcccg

SEQ ID NO: 502923 - RNA, 32 nt, Human
uccuuucuccagaauggguucugggugggucc

SEQ ID NO: 502924 - RNA, 32 nt, Human
uccuuucuccauccuugaucagagauaaacua

SEQ ID NO: 502925 - RNA, 32 nt, Human
uccuuucucccauucuucccugccucuucccu

SEQ ID NO: 502926 - RNA, 32 nt, Human
uccuuucuccccucagguaggggucccacggc

SEQ ID NO: 502927 - RNA, 32 nt, Human
uccuuucuccccucuuuguguggccccagcca

SEQ ID NO: 502928 - RNA, 32 nt, Human
uccuuucuccucccucuccuuuuccugccaca

SEQ ID NO: 502929 - RNA, 32 nt, Human
uccuuucuccuggcuccagccugaaguguggg

SEQ ID NO: 502930 - RNA, 32 nt, Human
uccuuucuccuuccuuccaaaauaacaugucc

SEQ ID NO: 502931 - RNA, 32 nt, Human
uccuuucuccuugggugaugugcaauccaucg

SEQ ID NO: 502932 - RNA, 32 nt, Human
uccuuucucgcaaucuuccugcauuguacaca

SEQ ID NO: 502933 - RNA, 32 nt, Human
uccuuucucugacccaggcaccucgagggcua

SEQ ID NO: 502934 - RNA, 32 nt, Human
uccuuucucuguccucuccugagguucugccu

SEQ ID NO: 502935 - RNA, 22 nt, Human
uccuuucucuuucucucuuccc

SEQ ID NO: 502936 - RNA, 32 nt, Human
uccuuucugaucccugagccugugccacgccc

SEQ ID NO: 502937 - RNA, 32 nt, Human
uccuuucugcagcugagaugcacgcagaccca

SEQ ID NO: 502938 - RNA, 32 nt, Human
uccuuucugcagcugccuuucagcacaggugg

SEQ ID NO: 502939 - RNA, 32 nt, Human
uccuuucugcuuucuaguugguguuuuguuga

SEQ ID NO: 502940 - RNA, 32 nt, Human
uccuuucuggaaggagcugccgcccaggaacc

SEQ ID NO: 502941 - RNA, 18 nt, Human
uccuuucuggagcuccuu

SEQ ID NO: 502942 - RNA, 32 nt, Human
uccuuucuggccccagccuagguggaggcaag

SEQ ID NO: 502943 - RNA, 32 nt, Human
uccuuucuuaccacucucuccuggggccgaca

SEQ ID NO: 502944 - RNA, 32 nt, Human
uccuuucuuccucucguuccccaaauccgagg

SEQ ID NO: 502945 - RNA, 32 nt, Human
uccuuucuucuccauucccugaugcaucaaca

SEQ ID NO: 502946 - RNA, 32 nt, Human
uccuuucuucugaguugagcagacucacuggc

SEQ ID NO: 502947 - RNA, 32 nt, Human
uccuuucuucuuucuguuuucuuucccguguu

SEQ ID NO: 502948 - RNA, 32 nt, Human
uccuuucuuuccuaccauguaacccugcuuug

SEQ ID NO: 502949 - RNA, 32 nt, Human
uccuuugaaagacugugcuguccuuuaacaua

SEQ ID NO: 502950 - RNA, 32 nt, Human
uccuuugaaagccagaacaauggaucggcuuc

SEQ ID NO: 502951 - RNA, 32 nt, Human
uccuuugaagcacagccuauuucugagccaag

SEQ ID NO: 502952 - RNA, 32 nt, Human
uccuuugaggcagagguuuaaguguaggccug

SEQ ID NO: 502953 - RNA, 32 nt, Human
uccuuugaggcaggcgaggggcugggaguggg

SEQ ID NO: 502954 - RNA, 32 nt, Human
uccuuugauauuuaugacaguacuucugaagc

SEQ ID NO: 502955 - RNA, 32 nt, Human
uccuuugcagaacuucagggacugggagcaga

SEQ ID NO: 502956 - RNA, 32 nt, Human
uccuuugcagcaaaccguaaguuauaaggaug

SEQ ID NO: 502957 - RNA, 32 nt, Human
uccuuugcagugcagcugcccuguagauuuug

SEQ ID NO: 502958 - RNA, 32 nt, Human
uccuuugcaguggaugcuuaaguuuccuuauc

SEQ ID NO: 502959 - RNA, 32 nt, Human
uccuuugcauucgauuguccaucgggaccaca

SEQ ID NO: 502960 - RNA, 32 nt, Human
uccuuugccugucugcccuccuggaugcuauu

SEQ ID NO: 502961 - RNA, 32 nt, Human
uccuuugcggugagcuauguuuacauugacac

SEQ ID NO: 502962 - RNA, 32 nt, Human
uccuuugcucacauguuucccugcugaccuuc

SEQ ID NO: 502963 - RNA, 32 nt, Human
uccuuugcucucuuugcuucuaccucaaauag

SEQ ID NO: 502964 - RNA, 32 nt, Human
uccuuuggagccaccuugucccuggcuagaca

SEQ ID NO: 502965 - RNA, 32 nt, Human
uccuuuggauuuuggggagaaccaagcccugg

SEQ ID NO: 502966 - RNA, 32 nt, Human
uccuuuggcaacacccucacagacacacucag

SEQ ID NO: 502967 - RNA, 32 nt, Human
uccuuuggccguuuccaagaucugcagugcac

SEQ ID NO: 502968 - RNA, 32 nt, Human
uccuuuggcuggcaaaugucuacaucuugaaa

SEQ ID NO: 502969 - RNA, 32 nt, Human
uccuuugggaaaggagaaguuaagcaacaucu

SEQ ID NO: 502970 - RNA, 32 nt, Human
uccuuugggccucugcuucucucaccuaaaaa

SEQ ID NO: 502971 - RNA, 32 nt, Human
uccuuugggccuggggcugugcuuggcuugaa

SEQ ID NO: 502972 - RNA, 32 nt, Human
uccuuugggguucaucuuugacauuugccacc

SEQ ID NO: 502973 - RNA, 32 nt, Human
uccuuugggugagaacaugugaaccaggcacc

SEQ ID NO: 502974 - RNA, 32 nt, Human
uccuuuggucaaugaaaacuuggcuuuaagac

SEQ ID NO: 502975 - RNA, 32 nt, Human
uccuuugguccaguaggaggugcccuucacuc

SEQ ID NO: 502976 - RNA, 32 nt, Human
uccuuugguggaccccaggacuucggcccacu

SEQ ID NO: 502977 - RNA, 32 nt, Human
uccuuuguagauccgcaacuuaaggauuuugu

SEQ ID NO: 502978 - RNA, 22 nt, Human
uccuuuguauaggacccugaca

SEQ ID NO: 502979 - RNA, 32 nt, Human
uccuuuguauaugaugcagcagcauaaaugua

SEQ ID NO: 502980 - RNA, 32 nt, Human
uccuuuguauucucucagugccuuacagcagg

SEQ ID NO: 502981 - RNA, 32 nt, Human
uccuuugucaucuguugccacauccauggaac

SEQ ID NO: 502982 - RNA, 32 nt, Human
uccuuugugaagagcauccauuuaaaagacuu

SEQ ID NO: 502983 - RNA, 32 nt, Human
uccuuugugccaggccccaucuggauguccau

SEQ ID NO: 502984 - RNA, 32 nt, Human
uccuuuguucuuucaguacuuugaggcgacaa

SEQ ID NO: 502985 - RNA, 32 nt, Human
uccuuuguugcaaaaguguggacacuuuugac

SEQ ID NO: 502986 - RNA, 32 nt, Human
uccuuuguuguucucaggaacauaguugcagg

SEQ ID NO: 502987 - RNA, 32 nt, Human
uccuuuuaaacaauguaugaaagauguauuuu

SEQ ID NO: 502988 - RNA, 32 nt, Human
uccuuuuaacuccagagccucugggucucccc

SEQ ID NO: 502989 - RNA, 32 nt, Human
uccuuuuaagccugcagaacuguaaguaaauu

SEQ ID NO: 502990 - RNA, 32 nt, Human
uccuuuuacagugaggugucucucacuggggg

SEQ ID NO: 502991 - RNA, 32 nt, Human
uccuuuuaccccuaugucccccggcuauacuu

SEQ ID NO: 502992 - RNA, 32 nt, Human
uccuuuuagcugguugugcuuugacuaacuga

SEQ ID NO: 502993 - RNA, 32 nt, Human
uccuuuucaaaaacuggagacacagaagaggg

SEQ ID NO: 502994 - RNA, 32 nt, Human
uccuuuucaacacaucuauugaaaguguugga

SEQ ID NO: 502995 - RNA, 32 nt, Human
uccuuuucaccucauagaggaaucaagcaaga

SEQ ID NO: 502996 - RNA, 32 nt, Human
uccuuuucacuggaugauguaugagggaauuu

SEQ ID NO: 502997 - RNA, 32 nt, Human
uccuuuucaugccuagcaucugcuugaguuau

SEQ ID NO: 502998 - RNA, 32 nt, Human
uccuuuucauuguuccauaguauuccaucgug

SEQ ID NO: 502999 - RNA, 32 nt, Human
uccuuuuccacaauaggccagaaagugcucca

SEQ ID NO: 503000 - RNA, 24 nt, Human
uccuuuuccacaucccuaacagca

SEQ ID NO: 503001 - RNA, 32 nt, Human
uccuuuuccaggcugcugaguaaagucuggcu

SEQ ID NO: 503002 - RNA, 24 nt, Human
uccuuuucccacaguucugggaca

SEQ ID NO: 503003 - RNA, 22 nt, Human
uccuuuucccguuuagucccag

SEQ ID NO: 503004 - RNA, 24 nt, Human
uccuuuucccuaaucauucccuuu

SEQ ID NO: 503005 - RNA, 32 nt, Human
uccuuuucccuccaccaugaagauggguuaag

SEQ ID NO: 503006 - RNA, 21 nt, Human
uccuuuucccucccucuuccc

SEQ ID NO: 503007 - RNA, 21 nt, Human
uccuuuucccucucccuuucc

SEQ ID NO: 503008 - RNA, 32 nt, Human
uccuuuucccucucucccuuggaguaucaaug

SEQ ID NO: 503009 - RNA, 22 nt, Human
uccuuuuccucccucccuuccu

SEQ ID NO: 503010 - RNA, 32 nt, Human
uccuuuuccucuucuagaacuuaccuacagug

SEQ ID NO: 503011 - RNA, 32 nt, Human
uccuuuuccucuucucucuuugccuggcuucc

SEQ ID NO: 503012 - RNA, 32 nt, Human
uccuuuuccucuugugaccaccacaugucuag

SEQ ID NO: 503013 - RNA, 32 nt, Human
uccuuuuccuucaagccuagcccuucucucau

SEQ ID NO: 503014 - RNA, 22 nt, Human
uccuuuuccuuucucugguaac

SEQ ID NO: 503015 - RNA, 32 nt, Human
uccuuuuccuuuuccuccucucuuccuuaccu

SEQ ID NO: 503016 - RNA, 32 nt, Human
uccuuuucuaacucucccuugcucgcuguaaa

SEQ ID NO: 503017 - RNA, 32 nt, Human
uccuuuucuauuggcacagcugccgucauucc

SEQ ID NO: 503018 - RNA, 32 nt, Human
uccuuuucucacucuuucucucaucacucacc

SEQ ID NO: 503019 - RNA, 32 nt, Human
uccuuuucuccccucauuuccucuucuccuua

SEQ ID NO: 503020 - RNA, 32 nt, Human
uccuuuucuccucucucugcaucugcgcuuuc

SEQ ID NO: 503021 - RNA, 32 nt, Human
uccuuuucucugagaaagguaauagauaacca

SEQ ID NO: 503022 - RNA, 32 nt, Human
uccuuuucugagugagucuaggauaguuucuu

SEQ ID NO: 503023 - RNA, 24 nt, Human
uccuuuucugaugguggcuggggc

SEQ ID NO: 503024 - RNA, 32 nt, Human
uccuuuucugcuguaacgaaaguuugcaauag

SEQ ID NO: 503025 - RNA, 22 nt, Human
uccuuuucugggcccuagcaca

SEQ ID NO: 503026 - RNA, 32 nt, Human
uccuuuucuguccaccuucccucucucuucua

SEQ ID NO: 503027 - RNA, 32 nt, Human
uccuuuucuguggcuuuuaauuuggaauuuuc

SEQ ID NO: 503028 - RNA, 23 nt, Human
uccuuuucuuguuccugaucuca

SEQ ID NO: 503029 - RNA, 32 nt, Human
uccuuuucuuucuuccuuccuuucuuucuucc

SEQ ID NO: 503030 - RNA, 32 nt, Human
uccuuuucuuuucuccccuugggucuuauuau

SEQ ID NO: 503031 - RNA, 32 nt, Human
uccuuuugaaguauuccuucagauccugcaug

SEQ ID NO: 503032 - RNA, 32 nt, Human
uccuuuugccacccccuccuucccugccucuu

SEQ ID NO: 503033 - RNA, 32 nt, Human
uccuuuugccagucaccaccagccugaccuca

SEQ ID NO: 503034 - RNA, 32 nt, Human
uccuuuugccuucugguauacuuccuuacuuu

SEQ ID NO: 503035 - RNA, 32 nt, Human
uccuuuugccuuggcuuagaggcugcagcacu

SEQ ID NO: 503036 - RNA, 32 nt, Human
uccuuuuggagggagagcagagaccaugucug

SEQ ID NO: 503037 - RNA, 32 nt, Human
uccuuuuggccagcucuaaagcagcaguggac

SEQ ID NO: 503038 - RNA, 32 nt, Human
uccuuuuggcugccaccugcacugcugccauc

SEQ ID NO: 503039 - RNA, 32 nt, Human
uccuuuuggggugaugaaauguuagggaacua

SEQ ID NO: 503040 - RNA, 25 nt, Human
uccuuuugguugcaaauaacaggaa

SEQ ID NO: 503041 - RNA, 32 nt, Human
uccuuuuguaucauucagccuuuuguuuuagu

SEQ ID NO: 503042 - RNA, 32 nt, Human
uccuuuuguuaacugaugaaguugaucagauc

SEQ ID NO: 503043 - RNA, 32 nt, Human
uccuuuuguuacugaaguguguuuuauggacu

SEQ ID NO: 503044 - RNA, 32 nt, Human
uccuuuuguuauauacacaguauuauaugcac

SEQ ID NO: 503045 - RNA, 32 nt, Human
uccuuuuuaaacuucuccccugcuuuauuugg

SEQ ID NO: 503046 - RNA, 32 nt, Human
uccuuuuuaagcugcaaagaagcauuugcaga

SEQ ID NO: 503047 - RNA, 32 nt, Human
uccuuuuuacagucuuugucuuugcagcaagc

SEQ ID NO: 503048 - RNA, 32 nt, Human
uccuuuuuaccucauuuauuugguacuuuccc

SEQ ID NO: 503049 - RNA, 32 nt, Human
uccuuuuuacucuccuguaucuuuuucacucc

SEQ ID NO: 503050 - RNA, 32 nt, Human
uccuuuuuauagcagcccucucaccagaagau

SEQ ID NO: 503051 - RNA, 32 nt, Human
uccuuuuuauguuuggaggcagugacaaaagg

SEQ ID NO: 503052 - RNA, 23 nt, Human
uccuuuuuauuucuuugguaaca

SEQ ID NO: 503053 - RNA, 32 nt, Human
uccuuuuucacucacaaacagcagggagguca

SEQ ID NO: 503054 - RNA, 32 nt, Human
uccuuuuucacuugaccacccuugcucauugg

SEQ ID NO: 503055 - RNA, 32 nt, Human
uccuuuuucauaauuaauuuuauccaagauug

SEQ ID NO: 503056 - RNA, 32 nt, Human
uccuuuuuccuccucuuccuccuuccuccuuc

SEQ ID NO: 503057 - RNA, 32 nt, Human
uccuuuuucugggucccuucccacuuccuucc

SEQ ID NO: 503058 - RNA, 32 nt, Human
uccuuuuugccucuuugccauuuccuuggaaa

SEQ ID NO: 503059 - RNA, 32 nt, Human
uccuuuuuggugagcuucauggguggaguuau

SEQ ID NO: 503060 - RNA, 32 nt, Human
uccuuuuuggugggcugggcugacggcacaac

SEQ ID NO: 503061 - RNA, 21 nt, Human
uccuuuuuuaauccagcagca

SEQ ID NO: 503062 - RNA, 32 nt, Human
ucgaaaaagcccaagacagcagaagcagacac

SEQ ID NO: 503063 - RNA, 32 nt, Human
ucgaaaaauacuggguaagcuguaaagaacuc

SEQ ID NO: 503064 - RNA, 32 nt, Human
ucgaaaacacagaagaaugaaggacaugccag

SEQ ID NO: 503065 - RNA, 32 nt, Human
ucgaaaaccagccugaccaacguggagaaacc

SEQ ID NO: 503066 - RNA, 32 nt, Human
ucgaaaaccuaaacgugaucaucucuuggaug

SEQ ID NO: 503067 - RNA, 32 nt, Human
ucgaaaagaaaaggagaaauaaaucaaacagc

SEQ ID NO: 503068 - RNA, 32 nt, Human
ucgaaaagagcacuucacacagacaaguggcu

SEQ ID NO: 503069 - RNA, 32 nt, Human
ucgaaacaaaggauccaggauuuaacugggag

SEQ ID NO: 503070 - RNA, 32 nt, Human
ucgaaacaauccuggccaacauggugaaacca

SEQ ID NO: 503071 - RNA, 32 nt, Human
ucgaaacaggcaguguuguaagcacggggaca

SEQ ID NO: 503072 - RNA, 32 nt, Human
ucgaaaccagcauauuuuuggaaagcuaaaug

SEQ ID NO: 503073 - RNA, 32 nt, Human
ucgaaaccagccuggccaaaacagugaaaccc

SEQ ID NO: 503074 - RNA, 32 nt, Human
ucgaaaccagccuggccaacaaggugagaccc

SEQ ID NO: 503075 - RNA, 32 nt, Human
ucgaaaccagccuggccaacauagugaaaccc

SEQ ID NO: 503076 - RNA, 32 nt, Human
ucgaaaccagccuggccaacauggagaaaccc

SEQ ID NO: 503077 - RNA, 32 nt, Human
ucgaaaccagccuggccaacauggugaaaccc

SEQ ID NO: 503078 - RNA, 32 nt, Human
ucgaaaccagccuggccaacuugaugaaaccc

SEQ ID NO: 503079 - RNA, 32 nt, Human
ucgaaaccagccugggcaacauagugagaccc

SEQ ID NO: 503080 - RNA, 32 nt, Human
ucgaaaccagccuucccaacauggugaaaccc

SEQ ID NO: 503081 - RNA, 32 nt, Human
ucgaaaccauccuggcuaacacggugaaaccu

SEQ ID NO: 503082 - RNA, 32 nt, Human
ucgaaacgcacgggcagggacacacacgacac

SEQ ID NO: 503083 - RNA, 32 nt, Human
ucgaaacguuuucauccaugcuuagcaucuac

SEQ ID NO: 503084 - RNA, 32 nt, Human
ucgaaacuagccuggccaacaucaugaaaccc

SEQ ID NO: 503085 - RNA, 32 nt, Human
ucgaaagcacuggccccgaacuguguuucugc

SEQ ID NO: 503086 - RNA, 32 nt, Human
ucgaaagcauuaauucacuuuccuuuuuccua

SEQ ID NO: 503087 - RNA, 32 nt, Human
ucgaaaggucuccagccucaucgaauucuuga

SEQ ID NO: 503088 - RNA, 32 nt, Human
ucgaaaguuggcaaauggggccaaggcugcac

SEQ ID NO: 503089 - RNA, 32 nt, Human
ucgaaaucagccuggccaagaugaugaagccc

SEQ ID NO: 503090 - RNA, 32 nt, Human
ucgaaaugcugugccaguugcucugguauuca

SEQ ID NO: 503091 - RNA, 32 nt, Human
ucgaaauucuggagucaagcagucugccugcc

SEQ ID NO: 503092 - RNA, 32 nt, Human
ucgaacauacucaaacacuuuugggccaggau

SEQ ID NO: 503093 - RNA, 32 nt, Human
ucgaaccauuguacuccagccugggugacaga

SEQ ID NO: 503094 - RNA, 32 nt, Human
ucgaacccaggaggcagagguugcagugagcc

SEQ ID NO: 503095 - RNA, 32 nt, Human
ucgaacccaggagguggagguugcagugagcc

SEQ ID NO: 503096 - RNA, 23 nt, Human
ucgaaccccugaccucaagugau

SEQ ID NO: 503097 - RNA, 22 nt, Human
ucgaaccccugagcucagguga

SEQ ID NO: 503098 - RNA, 32 nt, Human
ucgaacccucgcuuuccagcagucgccggauu

SEQ ID NO: 503099 - RNA, 32 nt, Human
ucgaacucaggggguggagguugcagugaguu

SEQ ID NO: 503100 - RNA, 22 nt, Human
ucgaacuccagaccucagguga

SEQ ID NO: 503101 - RNA, 22 nt, Human
ucgaacucccaaccucagguga

SEQ ID NO: 503102 - RNA, 22 nt, Human
ucgaacucccagccucagguga

SEQ ID NO: 503103 - RNA, 23 nt, Human
ucgaacucccgaccucaagugau

SEQ ID NO: 503104 - RNA, 22 nt, Human
ucgaacucccgaccucagguga

SEQ ID NO: 503105 - RNA, 22 nt, Human
ucgaacucccgaucucagguga

SEQ ID NO: 503106 - RNA, 22 nt, Human
ucgaacuccgcaucucagguga

SEQ ID NO: 503107 - RNA, 23 nt, Human
ucgaacuccuaaccucaagugau

SEQ ID NO: 503108 - RNA, 23 nt, Human
ucgaacuccuagccucaagcgau

SEQ ID NO: 503109 - RNA, 23 nt, Human
ucgaacuccugaacgcaagugau

SEQ ID NO: 503110 - RNA, 24 nt, Human
ucgaacuccugaacucaagugauu

SEQ ID NO: 503111 - RNA, 23 nt, Human
ucgaacuccugaccucaagcgau

SEQ ID NO: 503112 - RNA, 22 nt, Human
ucgaacuccugaccucaaguga

SEQ ID NO: 503113 - RNA, 23 nt, Human
ucgaacuccugaccucaagugau

SEQ ID NO: 503114 - RNA, 22 nt, Human
ucgaacuccugaccucagguga

SEQ ID NO: 503115 - RNA, 32 nt, Human
ucgaacuccugacugaccuugugguccaccug

SEQ ID NO: 503116 - RNA, 22 nt, Human
ucgaacuccugacuuuagguga

SEQ ID NO: 503117 - RNA, 22 nt, Human
ucgaacuccugagcucagguga

SEQ ID NO: 503118 - RNA, 22 nt, Human
ucgaacuccugaucucagguga

SEQ ID NO: 503119 - RNA, 32 nt, Human
ucgaacuccugcauuccaaccagccuggguga

SEQ ID NO: 503120 - RNA, 22 nt, Human
ucgaacuccugcccucagguga

SEQ ID NO: 503121 - RNA, 23 nt, Human
ucgaacuccuggccucaagcgau

SEQ ID NO: 503122 - RNA, 23 nt, Human
ucgaacuccuggccucaagugau

SEQ ID NO: 503123 - RNA, 24 nt, Human
ucgaacuccuggccucaagugauu

SEQ ID NO: 503124 - RNA, 22 nt, Human
ucgaacuccuggccucagguga

SEQ ID NO: 503125 - RNA, 22 nt, Human
ucgaacuccuggcucaagugau

SEQ ID NO: 503126 - RNA, 23 nt, Human
ucgaacuccugggcucaacugau

SEQ ID NO: 503127 - RNA, 19 nt, Human
ucgaacuccugggcucaag

SEQ ID NO: 503128 - RNA, 23 nt, Human
ucgaacuccugggcucaagcgau

SEQ ID NO: 503129 - RNA, 23 nt, Human
ucgaacuccugggcucaagugau

SEQ ID NO: 503130 - RNA, 22 nt, Human
ucgaacuccugggcucggguga

SEQ ID NO: 503131 - RNA, 22 nt, Human
ucgaacuccuuaccucagguga

SEQ ID NO: 503132 - RNA, 23 nt, Human
ucgaacucuaggcucaagugauu

SEQ ID NO: 503133 - RNA, 32 nt, Human
ucgaacucuguaaucccagcacuuugggaggc

SEQ ID NO: 503134 - RNA, 21 nt, Human
ucgaacucuuucuuucuucca

SEQ ID NO: 503135 - RNA, 32 nt, Human
ucgaacugcuguagcuggcacaucauugggcu

SEQ ID NO: 503136 - RNA, 32 nt, Human
ucgaacuucucaacccucagagacuuagaucu

SEQ ID NO: 503137 - RNA, 23 nt, Human
ucgaacuucugagcucaagcgau

SEQ ID NO: 503138 - RNA, 24 nt, Human
ucgaacuucugggcucaagcaauu

SEQ ID NO: 503139 - RNA, 32 nt, Human
ucgaagacaaaacacauuucuacccaaguuua

SEQ ID NO: 503140 - RNA, 32 nt, Human
ucgaagacaaggcuuuugaauuaacugaaucc

SEQ ID NO: 503141 - RNA, 32 nt, Human
ucgaagacucgagagggggaggggguaaggag

SEQ ID NO: 503142 - RNA, 32 nt, Human
ucgaagagauggggucuggcuguguugcccag

SEQ ID NO: 503143 - RNA, 21 nt, Human
ucgaagauguagggagcacuu

SEQ ID NO: 503144 - RNA, 20 nt, Human
ucgaagcagccacugagcca

SEQ ID NO: 503145 - RNA, 22 nt, Human
ucgaagccacuucugaagccac

SEQ ID NO: 503146 - RNA, 32 nt, Human
ucgaagccagccugggcaacaaagugagaccg

SEQ ID NO: 503147 - RNA, 32 nt, Human
ucgaagccaggaguucgaaaccagccugugca

SEQ ID NO: 503148 - RNA, 32 nt, Human
ucgaagccucuuugcugaccuggaggugaucu

SEQ ID NO: 503149 - RNA, 32 nt, Human
ucgaagcucacugugccucuuguuuccgaggg

SEQ ID NO: 503150 - RNA, 32 nt, Human
ucgaaggacacacacuuccacacuguuuguga

SEQ ID NO: 503151 - RNA, 19 nt, Human
ucgaaggagcagccugggc

SEQ ID NO: 503152 - RNA, 32 nt, Human
ucgaaggcgccuucuccuccugggagaucgug

SEQ ID NO: 503153 - RNA, 32 nt, Human
ucgaaggcucaggugauucucucaccucagcc

SEQ ID NO: 503154 - RNA, 22 nt, Human
ucgaaguaguugggacuacagg

SEQ ID NO: 503155 - RNA, 32 nt, Human
ucgaagucacaugauaacacacacaggagaug

SEQ ID NO: 503156 - RNA, 32 nt, Human
ucgaagucagaaggcuggggcagaucacuuca

SEQ ID NO: 503157 - RNA, 32 nt, Human
ucgaagucagccuggccaacguggugaaaccc

SEQ ID NO: 503158 - RNA, 32 nt, Human
ucgaaguccaauaacuguagacuucagaagaa

SEQ ID NO: 503159 - RNA, 32 nt, Human
ucgaagucccucucuuuugccaacccucauuu

SEQ ID NO: 503160 - RNA, 32 nt, Human
ucgaagucucacugcaccagugucuuugaugg

SEQ ID NO: 503161 - RNA, 32 nt, Human
ucgaagucuugaauccuagcuaguuugggguu

SEQ ID NO: 503162 - RNA, 32 nt, Human
ucgaagugguuccuuggcagacugccuuuccu

SEQ ID NO: 503163 - RNA, 32 nt, Human
ucgaaguugagggugcaaaaaugcagaguaau

SEQ ID NO: 503164 - RNA, 32 nt, Human
ucgaauacuaccuuugugugccucagggccuc

SEQ ID NO: 503165 - RNA, 32 nt, Human
ucgaauacuguucgcucgcugugugaccuugg

SEQ ID NO: 503166 - RNA, 32 nt, Human
ucgaauaucugguuuuaaaugauagagguuuu

SEQ ID NO: 503167 - RNA, 32 nt, Human
ucgaauccuggaggaggaaauaaagggaaagg

SEQ ID NO: 503168 - RNA, 32 nt, Human
ucgaaucuggaacuuccacaccugaggcaccu

SEQ ID NO: 503169 - RNA, 29 nt, Human
ucgaaugacuucagcaagauccugcuuuc

SEQ ID NO: 503170 - RNA, 32 nt, Human
ucgaauuaauuaagcugacaaaaugaaaauga

SEQ ID NO: 503171 - RNA, 32 nt, Human
ucgaauuugggagccagcgagggaccugacag

SEQ ID NO: 503172 - RNA, 32 nt, Human
ucgacaacuacaugcaacaagaugcccaugaa

SEQ ID NO: 503173 - RNA, 21 nt, Human
ucgacaaggucucacucuguc

SEQ ID NO: 503174 - RNA, 20 nt, Human
ucgacacaaauucuacagcu

SEQ ID NO: 503175 - RNA, 32 nt, Human
ucgacaccaaccugagcaacauggcgaaaccc

SEQ ID NO: 503176 - RNA, 32 nt, Human
ucgacaccagccuggccaacacagugaaaugu

SEQ ID NO: 503177 - RNA, 32 nt, Human
ucgacaccagccuggccaacauggugaaaccu

SEQ ID NO: 503178 - RNA, 32 nt, Human
ucgacaccauccuggcuaacacggugaaaccc

SEQ ID NO: 503179 - RNA, 32 nt, Human
ucgacaccaucuugggcaacauggugaaaccc

SEQ ID NO: 503180 - RNA, 32 nt, Human
ucgacacccaaccccugaaccccacacacucu

SEQ ID NO: 503181 - RNA, 32 nt, Human
ucgacaccgccaggaccuggagggggugccug

SEQ ID NO: 503182 - RNA, 32 nt, Human
ucgacacugugggugaggccugguuuuuguuu

SEQ ID NO: 503183 - RNA, 32 nt, Human
ucgacagcacagaagggcuguccugugucccc

SEQ ID NO: 503184 - RNA, 32 nt, Human
ucgacagcaguguuuucucuccuuuucugggc

SEQ ID NO: 503185 - RNA, 32 nt, Human
ucgacagcaugcuggccaacguggugaaaccc

SEQ ID NO: 503186 - RNA, 32 nt, Human
ucgacagcauuuuccucugcuuugaaagcccc

SEQ ID NO: 503187 - RNA, 25 nt, Human
ucgacagccuucaggagccggucug

SEQ ID NO: 503188 - RNA, 32 nt, Human
ucgacagugagcugaguacuucagaauuggag

SEQ ID NO: 503189 - RNA, 32 nt, Human
ucgacaguucucuuguauuugcuuccuagguu

SEQ ID NO: 503190 - RNA, 32 nt, Human
ucgacauccugcacacccucagccuggcgcug

SEQ ID NO: 503191 - RNA, 32 nt, Human
ucgacaugagauaccuggcauuuugggaagug

SEQ ID NO: 503192 - RNA, 24 nt, Human
ucgacauugagaccaagaugcacg

SEQ ID NO: 503193 - RNA, 31 nt, Human
ucgaccaacaacaacgaggaggagaaguccc

SEQ ID NO: 503194 - RNA, 32 nt, Human
ucgaccacauaggaauuuccaggcaccaaaau

SEQ ID NO: 503195 - RNA, 28 nt, Human
ucgaccagcuucuuugugccucuuuucu

SEQ ID NO: 503196 - RNA, 32 nt, Human
ucgaccagcuucuuugugccucuuuucucucc

SEQ ID NO: 503197 - RNA, 32 nt, Human
ucgaccaggcuggagugcaggggcacaaucuu

SEQ ID NO: 503198 - RNA, 32 nt, Human
ucgaccaguccucccuucuguucucucuuucc

SEQ ID NO: 503199 - RNA, 32 nt, Human
ucgacccaucaggacgccagagcugcuucagc

SEQ ID NO: 503200 - RNA, 32 nt, Human
ucgaccccaaguugaaaaggaauuugguuucu

SEQ ID NO: 503201 - RNA, 32 nt, Human
ucgacccccuggggccccagucuggcucaguc

SEQ ID NO: 503202 - RNA, 32 nt, Human
ucgacccgccuuccucugcugaaaaggcugcu

SEQ ID NO: 503203 - RNA, 32 nt, Human
ucgacccugcccccuugggcucaggccccgcc

SEQ ID NO: 503204 - RNA, 19 nt, Human
ucgacccuucgccucggcc

SEQ ID NO: 503205 - RNA, 31 nt, Human
ucgaccggcagccuccgcacagcagaccuug

SEQ ID NO: 503206 - RNA, 32 nt, Human
ucgaccucacaaagugcugggauuacaggcau

SEQ ID NO: 503207 - RNA, 32 nt, Human
ucgaccucccaaagugcuaggauuacagguuu

SEQ ID NO: 503208 - RNA, 32 nt, Human
ucgaccucccaaagugcugagauuacaggcau

SEQ ID NO: 503209 - RNA, 32 nt, Human
ucgaccucccaaagugcugagauuacaggcuu

SEQ ID NO: 503210 - RNA, 32 nt, Human
ucgaccucccaaagugcugggauuacagaaug

SEQ ID NO: 503211 - RNA, 32 nt, Human
ucgaccucccaaagugcugggauuacaggcau

SEQ ID NO: 503212 - RNA, 32 nt, Human
ucgaccucccaaagugcugggauuacaggcgu

SEQ ID NO: 503213 - RNA, 32 nt, Human
ucgaccucccaaagugcugggauuacaggugu

SEQ ID NO: 503214 - RNA, 32 nt, Human
ucgaccucccaaagugcugugauuacaggugu

SEQ ID NO: 503215 - RNA, 32 nt, Human
ucgaccucccaggugauccucccaccucagcu

SEQ ID NO: 503216 - RNA, 32 nt, Human
ucgaccuccgcaccaaucaggugguggucauu

SEQ ID NO: 503217 - RNA, 32 nt, Human
ucgaccucucaaguagcugggauuacaagcac

SEQ ID NO: 503218 - RNA, 32 nt, Human
ucgacgaggcggagccgcgagagcgcggccca

SEQ ID NO: 503219 - RNA, 32 nt, Human
ucgacgccugugacagggagaaaggauacuuc

SEQ ID NO: 503220 - RNA, 32 nt, Human
ucgacggcugggccaccgucucggugaucgcg

SEQ ID NO: 503221 - RNA, 23 nt, Human
ucgacgggcuaggaacuguccug

SEQ ID NO: 503222 - RNA, 32 nt, Human
ucgacgugagcagccucagggcagagacggau

SEQ ID NO: 503223 - RNA, 32 nt, Human
ucgacucacaugggagaaucgaggucugcuac

SEQ ID NO: 503224 - RNA, 32 nt, Human
ucgacucacugcaaaaucugccucccggguuc

SEQ ID NO: 503225 - RNA, 32 nt, Human
ucgacucacugcaaccuccaccucccagguuc

SEQ ID NO: 503226 - RNA, 32 nt, Human
ucgacucacugcaaccuccgccucccgaguuc

SEQ ID NO: 503227 - RNA, 32 nt, Human
ucgacucacugcaaccucugccucccagguuc

SEQ ID NO: 503228 - RNA, 32 nt, Human
ucgacucacugcaaccuucgccucccaggaga

SEQ ID NO: 503229 - RNA, 32 nt, Human
ucgacucacugcaaccuucgccucccagguuc

SEQ ID NO: 503230 - RNA, 32 nt, Human
ucgacucacugcaacuuccaccuccuggaguc

SEQ ID NO: 503231 - RNA, 32 nt, Human
ucgacucacugcaagcuccgccucccggguuc

SEQ ID NO: 503232 - RNA, 32 nt, Human
ucgacucacugcagccuccgccuccuggguuc

SEQ ID NO: 503233 - RNA, 32 nt, Human
ucgacucacugcagccuugaccucccgggccc

SEQ ID NO: 503234 - RNA, 32 nt, Human
ucgacuccaguucuggcugcccgcgggccucu

SEQ ID NO: 503235 - RNA, 32 nt, Human
ucgacucggcuuucuugccaaaggaggguucc

SEQ ID NO: 503236 - RNA, 32 nt, Human
ucgacucucccaaaagaggucgguauuuuaga

SEQ ID NO: 503237 - RNA, 32 nt, Human
ucgacugaccucaacaggugucuccaagcagc

SEQ ID NO: 503238 - RNA, 32 nt, Human
ucgacugccguguuccuuuuccucuuggaggu

SEQ ID NO: 503239 - RNA, 32 nt, Human
ucgacuggaggcugccaggaauucaggaugca

SEQ ID NO: 503240 - RNA, 32 nt, Human
ucgacuucccaaagugcugggauuacagcgug

SEQ ID NO: 503241 - RNA, 32 nt, Human
ucgacuucccaaagugcugggauuacaggugu

SEQ ID NO: 503242 - RNA, 32 nt, Human
ucgacuucccagagugcugggauuacaggcgu

SEQ ID NO: 503243 - RNA, 32 nt, Human
ucgacuucugggcccgccuccauggccagguc

SEQ ID NO: 503244 - RNA, 32 nt, Human
ucgacuuuccugauaauucugaugucucaagc

SEQ ID NO: 503245 - RNA, 18 nt, Human
ucgacuuugccccagcca

SEQ ID NO: 503246 - RNA, 32 nt, Human
ucgagaaaagccugggcaacauggugaaaccc

SEQ ID NO: 503247 - RNA, 32 nt, Human
ucgagaacagccuggcuaacacggugaaaccc

SEQ ID NO: 503248 - RNA, 32 nt, Human
ucgagaacagucuggccaacauggcgaaaccu

SEQ ID NO: 503249 - RNA, 32 nt, Human
ucgagaagcagcacaaaacagaguaagacagu

SEQ ID NO: 503250 - RNA, 32 nt, Human
ucgagaagccaagggugaggaggcaggaagca

SEQ ID NO: 503251 - RNA, 32 nt, Human
ucgagaagugagagagggucgggggcgguggc

SEQ ID NO: 503252 - RNA, 32 nt, Human
ucgagaauacccuggccaacauggugaaaccc

SEQ ID NO: 503253 - RNA, 32 nt, Human
ucgagacaauccuggccaacauggugaaaccc

SEQ ID NO: 503254 - RNA, 32 nt, Human
ucgagaccaaccuagccaacauggugaaaccc

SEQ ID NO: 503255 - RNA, 32 nt, Human
ucgagaccaaccuggccaaaguggugaaaccc

SEQ ID NO: 503256 - RNA, 32 nt, Human
ucgagaccaaccuggcuaacacagugaaaccc

SEQ ID NO: 503257 - RNA, 32 nt, Human
ucgagaccaaccuggcuaacacggugaaaccc

SEQ ID NO: 503258 - RNA, 32 nt, Human
ucgagaccaaccuugggcaacauagcaagacc

SEQ ID NO: 503259 - RNA, 32 nt, Human
ucgagaccaacuugggcaacauggugaaacac

SEQ ID NO: 503260 - RNA, 32 nt, Human
ucgagaccacccuggccaacauggugaaaccc

SEQ ID NO: 503261 - RNA, 32 nt, Human
ucgagaccacccuggccaacguggugaaaccc

SEQ ID NO: 503262 - RNA, 32 nt, Human
ucgagaccacccuggccaauauggugaaaccc

SEQ ID NO: 503263 - RNA, 32 nt, Human
ucgagaccacccuggcuaacacggugaaaccc

SEQ ID NO: 503264 - RNA, 32 nt, Human
ucgagaccacccuggcuaacauggugaaagcc

SEQ ID NO: 503265 - RNA, 32 nt, Human
ucgagaccacccugggcaacauggugaaaccc

SEQ ID NO: 503266 - RNA, 32 nt, Human
ucgagaccagcaccagccuggccaacacggug

SEQ ID NO: 503267 - RNA, 32 nt, Human
ucgagaccagcaugaccaacauggugaaaccc

SEQ ID NO: 503268 - RNA, 32 nt, Human
ucgagaccagccagaccaacaugaugaaaccc

SEQ ID NO: 503269 - RNA, 32 nt, Human
ucgagaccagccaggccaacauggugaaaacu

SEQ ID NO: 503270 - RNA, 32 nt, Human
ucgagaccagccaggccaacauggugaaaccc

SEQ ID NO: 503271 - RNA, 32 nt, Human
ucgagaccagccagggcaacauggugaaaccc

SEQ ID NO: 503272 - RNA, 32 nt, Human
ucgagaccagcccagccaacauggcgaaacca

SEQ ID NO: 503273 - RNA, 32 nt, Human
ucgagaccagcccggccaacauggugaaaccc

SEQ ID NO: 503274 - RNA, 32 nt, Human
ucgagaccagccgggccaacauggugaaaccc

SEQ ID NO: 503275 - RNA, 32 nt, Human
ucgagaccagccuaaacaacauagugaaaccc

SEQ ID NO: 503276 - RNA, 32 nt, Human
ucgagaccagccuaaccaacauggugaaaccc

SEQ ID NO: 503277 - RNA, 32 nt, Human
ucgagaccagccuagccaacauggugaaaccu

SEQ ID NO: 503278 - RNA, 32 nt, Human
ucgagaccagccuagccaacauggugaacuac

SEQ ID NO: 503279 - RNA, 32 nt, Human
ucgagaccagccuagcuaacaugguaaaacuc

SEQ ID NO: 503280 - RNA, 32 nt, Human
ucgagaccagccuaggcaacauggagaaaccc

SEQ ID NO: 503281 - RNA, 32 nt, Human
ucgagaccagccuaggugacauagugagaccc

SEQ ID NO: 503282 - RNA, 32 nt, Human
ucgagaccagccucagcaacacagugaaaccc

SEQ ID NO: 503283 - RNA, 32 nt, Human
ucgagaccagccucgccaacauggcgaaaccc

SEQ ID NO: 503284 - RNA, 32 nt, Human
ucgagaccagccugaacaacacggugaaaccc

SEQ ID NO: 503285 - RNA, 32 nt, Human
ucgagaccagccugaccaacacggugaaaccc

SEQ ID NO: 503286 - RNA, 32 nt, Human
ucgagaccagccugaccaacauagugaaaccc

SEQ ID NO: 503287 - RNA, 32 nt, Human
ucgagaccagccugaccaacaugaugaaaugc

SEQ ID NO: 503288 - RNA, 32 nt, Human
ucgagaccagccugaccaacauggagaaaccc

SEQ ID NO: 503289 - RNA, 32 nt, Human
ucgagaccagccugaccaacauggagaaacuc

SEQ ID NO: 503290 - RNA, 32 nt, Human
ucgagaccagccugaccaacauggagaaaugc

SEQ ID NO: 503291 - RNA, 32 nt, Human
ucgagaccagccugaccaacauggagaagccc

SEQ ID NO: 503292 - RNA, 32 nt, Human
ucgagaccagccugaccaacauggagauaucc

SEQ ID NO: 503293 - RNA, 32 nt, Human
ucgagaccagccugaccaacauggcaaaaccc

SEQ ID NO: 503294 - RNA, 32 nt, Human
ucgagaccagccugaccaacauggcgaaaccc

SEQ ID NO: 503295 - RNA, 32 nt, Human
ucgagaccagccugaccaacaugguaaaacca

SEQ ID NO: 503296 - RNA, 32 nt, Human
ucgagaccagccugaccaacauggugaaaacc

SEQ ID NO: 503297 - RNA, 32 nt, Human
ucgagaccagccugaccaacauggugaaacac

SEQ ID NO: 503298 - RNA, 32 nt, Human
ucgagaccagccugaccaacauggugaaaccc

SEQ ID NO: 503299 - RNA, 32 nt, Human
ucgagaccagccugaccaacauggugaaaccu

SEQ ID NO: 503300 - RNA, 32 nt, Human
ucgagaccagccugaccaacauggugaaacgc

SEQ ID NO: 503301 - RNA, 32 nt, Human
ucgagaccagccugaccaacauggugaaagcc

SEQ ID NO: 503302 - RNA, 32 nt, Human
ucgagaccagccugaccaacauggugaaaucc

SEQ ID NO: 503303 - RNA, 32 nt, Human
ucgagaccagccugaccaacauggugagaccc

SEQ ID NO: 503304 - RNA, 32 nt, Human
ucgagaccagccugaccaacauggugaggccc

SEQ ID NO: 503305 - RNA, 32 nt, Human
ucgagaccagccugaccaacguggugaaaccc

SEQ ID NO: 503306 - RNA, 32 nt, Human
ucgagaccagccugaccaagaugaugaaacgc

SEQ ID NO: 503307 - RNA, 32 nt, Human
ucgagaccagccugaccaauauggugaaaccc

SEQ ID NO: 503308 - RNA, 32 nt, Human
ucgagaccagccugaccagcaugguggaaccc

SEQ ID NO: 503309 - RNA, 32 nt, Human
ucgagaccagccugagaaacauagugagcccu

SEQ ID NO: 503310 - RNA, 32 nt, Human
ucgagaccagccugagcaacacugugagaccc

SEQ ID NO: 503311 - RNA, 32 nt, Human
ucgagaccagccugagcaacauggcgaaaccc

SEQ ID NO: 503312 - RNA, 32 nt, Human
ucgagaccagccugagcaacauggugaaaccc

SEQ ID NO: 503313 - RNA, 32 nt, Human
ucgagaccagccugaucggcauggugaaaccc

SEQ ID NO: 503314 - RNA, 32 nt, Human
ucgagaccagccugccaacauggugaaacccu

SEQ ID NO: 503315 - RNA, 32 nt, Human
ucgagaccagccugcccaaaaaggugaaaccc

SEQ ID NO: 503316 - RNA, 32 nt, Human
ucgagaccagccugcccaaauggugaaacccc

SEQ ID NO: 503317 - RNA, 32 nt, Human
ucgagaccagccugcccaacauggugaaaccu

SEQ ID NO: 503318 - RNA, 32 nt, Human
ucgagaccagccugcccaauauggugaaaccc

SEQ ID NO: 503319 - RNA, 32 nt, Human
ucgagaccagccugccuaacauggugaaaccc

SEQ ID NO: 503320 - RNA, 32 nt, Human
ucgagaccagccuggaaaauguggugaaaucc

SEQ ID NO: 503321 - RNA, 32 nt, Human
ucgagaccagccuggacaacauagugagaccc

SEQ ID NO: 503322 - RNA, 32 nt, Human
ucgagaccagccuggacaacauagugagaccu

SEQ ID NO: 503323 - RNA, 32 nt, Human
ucgagaccagccuggacaacaucgugaaaccu

SEQ ID NO: 503324 - RNA, 32 nt, Human
ucgagaccagccuggacaacauugugaaaccu

SEQ ID NO: 503325 - RNA, 32 nt, Human
ucgagaccagccuggcaaacauggcgaaaccc

SEQ ID NO: 503326 - RNA, 32 nt, Human
ucgagaccagccuggcaacauggcaagacccu

SEQ ID NO: 503327 - RNA, 32 nt, Human
ucgagaccagccuggccaaaauagugaaacuc

SEQ ID NO: 503328 - RNA, 32 nt, Human
ucgagaccagccuggccaacaaggugaaaccc

SEQ ID NO: 503329 - RNA, 32 nt, Human
ucgagaccagccuggccaacacggugaaaacc

SEQ ID NO: 503330 - RNA, 32 nt, Human
ucgagaccagccuggccaacacggugaaaccc

SEQ ID NO: 503331 - RNA, 32 nt, Human
ucgagaccagccuggccaacacggugagaccc

SEQ ID NO: 503332 - RNA, 32 nt, Human
ucgagaccagccuggccaacacuggucucugu

SEQ ID NO: 503333 - RNA, 23 nt, Human
ucgagaccagccuggccaacaua

SEQ ID NO: 503334 - RNA, 32 nt, Human
ucgagaccagccuggccaacauaguaaaaccu

SEQ ID NO: 503335 - RNA, 32 nt, Human
ucgagaccagccuggccaacauagugaaaccc

SEQ ID NO: 503336 - RNA, 23 nt, Human
ucgagaccagccuggccaacaug

SEQ ID NO: 503337 - RNA, 32 nt, Human
ucgagaccagccuggccaacaugaugaaaccc

SEQ ID NO: 503338 - RNA, 32 nt, Human
ucgagaccagccuggccaacaugaugaaaccu

SEQ ID NO: 503339 - RNA, 32 nt, Human
ucgagaccagccuggccaacauggcaaaacca

SEQ ID NO: 503340 - RNA, 32 nt, Human
ucgagaccagccuggccaacauggcaaaaccc

SEQ ID NO: 503341 - RNA, 32 nt, Human
ucgagaccagccuggccaacauggcaaaaccu

SEQ ID NO: 503342 - RNA, 32 nt, Human
ucgagaccagccuggccaacauggcaaaaucc

SEQ ID NO: 503343 - RNA, 32 nt, Human
ucgagaccagccuggccaacauggcaagaccc

SEQ ID NO: 503344 - RNA, 32 nt, Human
ucgagaccagccuggccaacauggcgaaaacc

SEQ ID NO: 503345 - RNA, 32 nt, Human
ucgagaccagccuggccaacauggcgaaacac

SEQ ID NO: 503346 - RNA, 32 nt, Human
ucgagaccagccuggccaacauggcgaaaccc

SEQ ID NO: 503347 - RNA, 32 nt, Human
ucgagaccagccuggccaacauggcgaaaccu

SEQ ID NO: 503348 - RNA, 32 nt, Human
ucgagaccagccuggccaacauggcgaaacuc

SEQ ID NO: 503349 - RNA, 32 nt, Human
ucgagaccagccuggccaacauggcgaaaucc

SEQ ID NO: 503350 - RNA, 32 nt, Human
ucgagaccagccuggccaacauggcggaaccc

SEQ ID NO: 503351 - RNA, 32 nt, Human
ucgagaccagccuggccaacaugguaaaaccc

SEQ ID NO: 503352 - RNA, 32 nt, Human
ucgagaccagccuggccaacaugguaaaacuc

SEQ ID NO: 503353 - RNA, 32 nt, Human
ucgagaccagccuggccaacaugguaaacgcu

SEQ ID NO: 503354 - RNA, 32 nt, Human
ucgagaccagccuggccaacauggucaaaacc

SEQ ID NO: 503355 - RNA, 32 nt, Human
ucgagaccagccuggccaacauggugaaaacc

SEQ ID NO: 503356 - RNA, 30 nt, Human
ucgagaccagccuggccaacauggugaaac

SEQ ID NO: 503357 - RNA, 32 nt, Human
ucgagaccagccuggccaacauggugaaaccc

SEQ ID NO: 503358 - RNA, 32 nt, Human
ucgagaccagccuggccaacauggugaaaccu

SEQ ID NO: 503359 - RNA, 32 nt, Human
ucgagaccagccuggccaacauggugaaacgc

SEQ ID NO: 503360 - RNA, 32 nt, Human
ucgagaccagccuggccaacauggugaaacuc

SEQ ID NO: 503361 - RNA, 32 nt, Human
ucgagaccagccuggccaacauggugaacccu

SEQ ID NO: 503362 - RNA, 32 nt, Human
ucgagaccagccuggccaacauggugaagccc

SEQ ID NO: 503363 - RNA, 32 nt, Human
ucgagaccagccuggccaacauggugauaccc

SEQ ID NO: 503364 - RNA, 32 nt, Human
ucgagaccagccuggccaacauggugugagac

SEQ ID NO: 503365 - RNA, 32 nt, Human
ucgagaccagccuggccaacaugguuaaaccc

SEQ ID NO: 503366 - RNA, 32 nt, Human
ucgagaccagccuggccaaccaacauggugaa

SEQ ID NO: 503367 - RNA, 23 nt, Human
ucgagaccagccuggccaacgug

SEQ ID NO: 503368 - RNA, 32 nt, Human
ucgagaccagccuggccaacguggugaaaccc

SEQ ID NO: 503369 - RNA, 32 nt, Human
ucgagaccagccuggccaacguggugaaacgc

SEQ ID NO: 503370 - RNA, 32 nt, Human
ucgagaccagccuggccaacuuggugaaaccc

SEQ ID NO: 503371 - RNA, 32 nt, Human
ucgagaccagccuggccaagauggcgaaacgc

SEQ ID NO: 503372 - RNA, 32 nt, Human
ucgagaccagccuggccaauaaggugaaaccc

SEQ ID NO: 503373 - RNA, 32 nt, Human
ucgagaccagccuggccaauaaggugaaacuc

SEQ ID NO: 503374 - RNA, 32 nt, Human
ucgagaccagccuggccaauacggcaaaaccu

SEQ ID NO: 503375 - RNA, 23 nt, Human
ucgagaccagccuggccaauaug

SEQ ID NO: 503376 - RNA, 32 nt, Human
ucgagaccagccuggccaauauggugaaaccc

SEQ ID NO: 503377 - RNA, 32 nt, Human
ucgagaccagccuggccaauauggugaaaccu

SEQ ID NO: 503378 - RNA, 32 nt, Human
ucgagaccagccuggccaauguggugaaaccc

SEQ ID NO: 503379 - RNA, 32 nt, Human
ucgagaccagccuggccacauggcaaaacccc

SEQ ID NO: 503380 - RNA, 32 nt, Human
ucgagaccagccuggccacauggugaaacccu

SEQ ID NO: 503381 - RNA, 32 nt, Human
ucgagaccagccuggccagcaaggugaaaccc

SEQ ID NO: 503382 - RNA, 32 nt, Human
ucgagaccagccuggccagcauggcaaaaccc

SEQ ID NO: 503383 - RNA, 32 nt, Human
ucgagaccagccuggccagcauggcgaaaccc

SEQ ID NO: 503384 - RNA, 32 nt, Human
ucgagaccagccuggccagcauggugaaaccc

SEQ ID NO: 503385 - RNA, 32 nt, Human
ucgagaccagccuggccagcauggugaaacuc

SEQ ID NO: 503386 - RNA, 32 nt, Human
ucgagaccagccuggccagcauggugagaccc

SEQ ID NO: 503387 - RNA, 32 nt, Human
ucgagaccagccuggccauuauggugaaaccc

SEQ ID NO: 503388 - RNA, 32 nt, Human
ucgagaccagccuggcccacauggugaaaccc

SEQ ID NO: 503389 - RNA, 32 nt, Human
ucgagaccagccuggccgacauggcgaaaccc

SEQ ID NO: 503390 - RNA, 32 nt, Human
ucgagaccagccuggcuaacacagugaaaccc

SEQ ID NO: 503391 - RNA, 32 nt, Human
ucgagaccagccuggcuaacacggugaaaccc

SEQ ID NO: 503392 - RNA, 32 nt, Human
ucgagaccagccuggcuaacauggcaaaaccc

SEQ ID NO: 503393 - RNA, 32 nt, Human
ucgagaccagccuggcuaacauggcaaaaccu

SEQ ID NO: 503394 - RNA, 32 nt, Human
ucgagaccagccuggcuaacauggugaaaccc

SEQ ID NO: 503395 - RNA, 32 nt, Human
ucgagaccagccuggcuggcuagcauggugag

SEQ ID NO: 503396 - RNA, 32 nt, Human
ucgagaccagccugggcaacaaagugagacuc

SEQ ID NO: 503397 - RNA, 32 nt, Human
ucgagaccagccugggcaacauagugagaccc

SEQ ID NO: 503398 - RNA, 32 nt, Human
ucgagaccagccugggcaacauagugagaccu

SEQ ID NO: 503399 - RNA, 32 nt, Human
ucgagaccagccugggcaacauagugagacuc

SEQ ID NO: 503400 - RNA, 32 nt, Human
ucgagaccagccugggcaacauggagagaccc

SEQ ID NO: 503401 - RNA, 32 nt, Human
ucgagaccagccugggcaacauggcgagaccc

SEQ ID NO: 503402 - RNA, 32 nt, Human
ucgagaccagccugggcaacauggugaaaccc

SEQ ID NO: 503403 - RNA, 32 nt, Human
ucgagaccagccugggcaacauggugaaaucc

SEQ ID NO: 503404 - RNA, 32 nt, Human
ucgagaccagccugggcaacauggugagaccc

SEQ ID NO: 503405 - RNA, 32 nt, Human
ucgagaccagccugggcaacgcagugagagac

SEQ ID NO: 503406 - RNA, 32 nt, Human
ucgagaccagccugggcaacguggcgaaaucc

SEQ ID NO: 503407 - RNA, 32 nt, Human
ucgagaccagccugggcaacguggugaaaccc

SEQ ID NO: 503408 - RNA, 32 nt, Human
ucgagaccagccugggcaagauggugaaaccc

SEQ ID NO: 503409 - RNA, 32 nt, Human
ucgagaccagccugggcaucguagugagacuc

SEQ ID NO: 503410 - RNA, 32 nt, Human
ucgagaccagccugggcgacacggugaaaccc

SEQ ID NO: 503411 - RNA, 32 nt, Human
ucgagaccagccugggcuacauagugagacca

SEQ ID NO: 503412 - RNA, 32 nt, Human
ucgagaccagccuggucaacauggcaaaacau

SEQ ID NO: 503413 - RNA, 32 nt, Human
ucgagaccagccuggucaacauggcgaaaucc

SEQ ID NO: 503414 - RNA, 32 nt, Human
ucgagaccagccuggucaacauggugaaaccc

SEQ ID NO: 503415 - RNA, 32 nt, Human
ucgagaccagccuggucaacuuggugaaaaca

SEQ ID NO: 503416 - RNA, 32 nt, Human
ucgagaccagccuggucaagauggugaaaccc

SEQ ID NO: 503417 - RNA, 32 nt, Human
ucgagaccagccuggucaauauggugaaaccc

SEQ ID NO: 503418 - RNA, 32 nt, Human
ucgagaccagccuguccaacauggcgaaccuc

SEQ ID NO: 503419 - RNA, 32 nt, Human
ucgagaccagccuguucagcauagcaggaccc

SEQ ID NO: 503420 - RNA, 32 nt, Human
ucgagaccagccuugccaacauagugaaaccc

SEQ ID NO: 503421 - RNA, 32 nt, Human
ucgagaccagccuuggccaacauggcgaaacc

SEQ ID NO: 503422 - RNA, 32 nt, Human
ucgagaccagcguggucaacaugguguaaccc

SEQ ID NO: 503423 - RNA, 32 nt, Human
ucgagaccagcuuaggcaacacggugaaaccc

SEQ ID NO: 503424 - RNA, 23 nt, Human
ucgagaccagcuuggccaacaug

SEQ ID NO: 503425 - RNA, 32 nt, Human
ucgagaccagcuuggccaacauggugaagcuc

SEQ ID NO: 503426 - RNA, 32 nt, Human
ucgagaccagcuuggccaacauggugagcccc

SEQ ID NO: 503427 - RNA, 32 nt, Human
ucgagaccagcuugggcaacauggagaaaccc

SEQ ID NO: 503428 - RNA, 32 nt, Human
ucgagaccagcuugggcaacauggcgaaaccc

SEQ ID NO: 503429 - RNA, 32 nt, Human
ucgagaccagcuugggcaacauggugaaaccu

SEQ ID NO: 503430 - RNA, 32 nt, Human
ucgagaccaggcuggccaacacggugaaacgc

SEQ ID NO: 503431 - RNA, 32 nt, Human
ucgagaccagguuggccaacauggugagaccc

SEQ ID NO: 503432 - RNA, 32 nt, Human
ucgagaccagucuggccaacauagugaaagcc

SEQ ID NO: 503433 - RNA, 32 nt, Human
ucgagaccagucuggccaacauagugaaaucc

SEQ ID NO: 503434 - RNA, 32 nt, Human
ucgagaccagucuggccaacaucgugaaaccc

SEQ ID NO: 503435 - RNA, 32 nt, Human
ucgagaccagucuggccaacauggcgaaaccu

SEQ ID NO: 503436 - RNA, 32 nt, Human
ucgagaccagucuggccaaccuggugaaaccc

SEQ ID NO: 503437 - RNA, 32 nt, Human
ucgagaccagucugggcaacauguugagaccu

SEQ ID NO: 503438 - RNA, 32 nt, Human
ucgagaccagucuggucaacauggugaaaccc

SEQ ID NO: 503439 - RNA, 32 nt, Human
ucgagaccaucccggcuaacauggugaaaccc

SEQ ID NO: 503440 - RNA, 32 nt, Human
ucgagaccauccuagccaacaucgugaaaccc

SEQ ID NO: 503441 - RNA, 32 nt, Human
ucgagaccauccugcccaacauggugaaaccc

SEQ ID NO: 503442 - RNA, 32 nt, Human
ucgagaccauccuggauaacacggagaaaccc

SEQ ID NO: 503443 - RNA, 32 nt, Human
ucgagaccauccuggcaaacacggugaaaccc

SEQ ID NO: 503444 - RNA, 32 nt, Human
ucgagaccauccuggccaaaauggugaaaccu

SEQ ID NO: 503445 - RNA, 32 nt, Human
ucgagaccauccuggccaacacggugaaaccc

SEQ ID NO: 503446 - RNA, 32 nt, Human
ucgagaccauccuggccaacaucgugaaaccc

SEQ ID NO: 503447 - RNA, 32 nt, Human
ucgagaccauccuggccaacaugaugaaaccc

SEQ ID NO: 503448 - RNA, 32 nt, Human
ucgagaccauccuggccaacauggcgaaaccc

SEQ ID NO: 503449 - RNA, 32 nt, Human
ucgagaccauccuggccaacauggugaaacac

SEQ ID NO: 503450 - RNA, 32 nt, Human
ucgagaccauccuggccaacauggugaaaccc

SEQ ID NO: 503451 - RNA, 32 nt, Human
ucgagaccauccuggccaacauggugaaaccu

SEQ ID NO: 503452 - RNA, 32 nt, Human
ucgagaccauccuggccaacauuguaaaaccc

SEQ ID NO: 503453 - RNA, 32 nt, Human
ucgagaccauccuggccaaccaugaugaaacu

SEQ ID NO: 503454 - RNA, 32 nt, Human
ucgagaccauccuggccaacguggugaaaccc

SEQ ID NO: 503455 - RNA, 32 nt, Human
ucgagaccauccuggccaacguggugaagccc

SEQ ID NO: 503456 - RNA, 32 nt, Human
ucgagaccauccuggccaauauggugaaaccc

SEQ ID NO: 503457 - RNA, 32 nt, Human
ucgagaccauccuggcgaacauggugaaaccc

SEQ ID NO: 503458 - RNA, 32 nt, Human
ucgagaccauccuggcgaacauggugagaccc

SEQ ID NO: 503459 - RNA, 32 nt, Human
ucgagaccauccuggcuaacaaggugaaaccc

SEQ ID NO: 503460 - RNA, 32 nt, Human
ucgagaccauccuggcuaacacagugaaaccc

SEQ ID NO: 503461 - RNA, 32 nt, Human
ucgagaccauccuggcuaacacagugaaaccu

SEQ ID NO: 503462 - RNA, 32 nt, Human
ucgagaccauccuggcuaacacgaugaaaccc

SEQ ID NO: 503463 - RNA, 32 nt, Human
ucgagaccauccuggcuaacacggcaugggua

SEQ ID NO: 503464 - RNA, 32 nt, Human
ucgagaccauccuggcuaacacggcgaaaccc

SEQ ID NO: 503465 - RNA, 32 nt, Human
ucgagaccauccuggcuaacacgggugaaacc

SEQ ID NO: 503466 - RNA, 32 nt, Human
ucgagaccauccuggcuaacacggugaaaacc

SEQ ID NO: 503467 - RNA, 32 nt, Human
ucgagaccauccuggcuaacacggugaaaccc

SEQ ID NO: 503468 - RNA, 32 nt, Human
ucgagaccauccuggcuaacacggugaaaccg

SEQ ID NO: 503469 - RNA, 32 nt, Human
ucgagaccauccuggcuaacacggugaaaccu

SEQ ID NO: 503470 - RNA, 32 nt, Human
ucgagaccauccuggcuaacacggugaaacuc

SEQ ID NO: 503471 - RNA, 32 nt, Human
ucgagaccauccuggcuaacagggugaaacca

SEQ ID NO: 503472 - RNA, 32 nt, Human
ucgagaccauccuggcuaacagggugaaaccc

SEQ ID NO: 503473 - RNA, 32 nt, Human
ucgagaccauccuggcuaacagugaaacccug

SEQ ID NO: 503474 - RNA, 32 nt, Human
ucgagaccauccuggcuaacaugguaaaaccc

SEQ ID NO: 503475 - RNA, 32 nt, Human
ucgagaccauccuggcuaacauggugaaaccc

SEQ ID NO: 503476 - RNA, 32 nt, Human
ucgagaccauccugguuaacacggugaaaccc

SEQ ID NO: 503477 - RNA, 32 nt, Human
ucgagaccauccugucuaacacggugaaaccc

SEQ ID NO: 503478 - RNA, 32 nt, Human
ucgagaccaucguggcuaacauggugaaaccc

SEQ ID NO: 503479 - RNA, 32 nt, Human
ucgagaccaucuuggccaacauggugaaaccc

SEQ ID NO: 503480 - RNA, 32 nt, Human
ucgagaccaucuuggcuaacaaggugaaaccc

SEQ ID NO: 503481 - RNA, 32 nt, Human
ucgagaccaucuuggcuaacauggugaaaccc

SEQ ID NO: 503482 - RNA, 32 nt, Human
ucgagaccaugcuggcuaacauggugaaaccc

SEQ ID NO: 503483 - RNA, 32 nt, Human
ucgagaccauggugaaaccccgucucuacuaa

SEQ ID NO: 503484 - RNA, 32 nt, Human
ucgagaccauucuggccaacauagugaaaccc

SEQ ID NO: 503485 - RNA, 32 nt, Human
ucgagaccauucuggcuaacacugaaaccccg

SEQ ID NO: 503486 - RNA, 32 nt, Human
ucgagaccgcccuggcuaacauggugaaacau

SEQ ID NO: 503487 - RNA, 32 nt, Human
ucgagaccggccuggccaacauggugaaaccc

SEQ ID NO: 503488 - RNA, 32 nt, Human
ucgagaccggccuggccaacguggugaaacac

SEQ ID NO: 503489 - RNA, 32 nt, Human
ucgagaccggccuggccaauauggugaaaccc

SEQ ID NO: 503490 - RNA, 32 nt, Human
ucgagaccggccuggucaacauggugaaaccc

SEQ ID NO: 503491 - RNA, 32 nt, Human
ucgagaccggguggagaaugaggcagaaaaag

SEQ ID NO: 503492 - RNA, 32 nt, Human
ucgagaccggucuggccaacauggugaaaccc

SEQ ID NO: 503493 - RNA, 32 nt, Human
ucgagaccguccuggcuaacaccgugaaaccc

SEQ ID NO: 503494 - RNA, 32 nt, Human
ucgagaccugccugaccaacaugcugaaaccc

SEQ ID NO: 503495 - RNA, 32 nt, Human
ucgagacgacccuggccaacauggugaaaucc

SEQ ID NO: 503496 - RNA, 32 nt, Human
ucgagacgauccuggccaacacggugaaaccc

SEQ ID NO: 503497 - RNA, 32 nt, Human
ucgagacggguuucaccacguuggccaggaug

SEQ ID NO: 503498 - RNA, 32 nt, Human
ucgagacuagccugaccaacauggugaaacua

SEQ ID NO: 503499 - RNA, 32 nt, Human
ucgagacuagccuggccaacaugguaaaaccc

SEQ ID NO: 503500 - RNA, 32 nt, Human
ucgagacuagccuggccaacauggugauaccc

SEQ ID NO: 503501 - RNA, 32 nt, Human
ucgagacuagccuggccaauaugguaaaaccc

SEQ ID NO: 503502 - RNA, 32 nt, Human
ucgagacuagccuggccaccguggcgaaacac

SEQ ID NO: 503503 - RNA, 32 nt, Human
ucgagacuagccuggcuaauacagugaaaccc

SEQ ID NO: 503504 - RNA, 32 nt, Human
ucgagacuagcuuggccaacauggugaaaccu

SEQ ID NO: 503505 - RNA, 32 nt, Human
ucgagacuauccuggcuaacacgguaaaaccc

SEQ ID NO: 503506 - RNA, 32 nt, Human
ucgagacuauccuggcuaacacggugaaaccc

SEQ ID NO: 503507 - RNA, 32 nt, Human
ucgagacugaggcugcucagcagccacugggu

SEQ ID NO: 503508 - RNA, 32 nt, Human
ucgagacuugacuuuccagagcaacuuuggau

SEQ ID NO: 503509 - RNA, 32 nt, Human
ucgagacuuuccuggcuaacagggugaauccc

SEQ ID NO: 503510 - RNA, 32 nt, Human
ucgagagacagagagacggagcgcgcuuuccu

SEQ ID NO: 503511 - RNA, 32 nt, Human
ucgagagagcgccggccuagaggcucauuauc

SEQ ID NO: 503512 - RNA, 32 nt, Human
ucgagagcagccuggccaacaccgugaaccuc

SEQ ID NO: 503513 - RNA, 32 nt, Human
ucgagagcagccuggccaacaugaugaaaccc

SEQ ID NO: 503514 - RNA, 32 nt, Human
ucgagagcagccuggccaauaugaugaaaccc

SEQ ID NO: 503515 - RNA, 32 nt, Human
ucgagagcagccugggcaacauggugaaagcc

SEQ ID NO: 503516 - RNA, 32 nt, Human
ucgagagcagccuggucaacauagugaaaccc

SEQ ID NO: 503517 - RNA, 32 nt, Human
ucgagagcauccuggccaacguggugaaaccc

SEQ ID NO: 503518 - RNA, 32 nt, Human
ucgagaggccgaggcagguggaucacgagguc

SEQ ID NO: 503519 - RNA, 32 nt, Human
ucgagaggcugaggcaggagaaucucuugaac

SEQ ID NO: 503520 - RNA, 32 nt, Human
ucgagaggcugaggcaggagaauggcgugaac

SEQ ID NO: 503521 - RNA, 32 nt, Human
ucgagaggcugaggcaggagaauugcuugaac

SEQ ID NO: 503522 - RNA, 32 nt, Human
ucgagaggcugaggcuggagaaucgcuugaac

SEQ ID NO: 503523 - RNA, 32 nt, Human
ucgagaggcugagucaggagaauugcuugaac

SEQ ID NO: 503524 - RNA, 32 nt, Human
ucgagagggagcgaaccaggacuggggugacg

SEQ ID NO: 503525 - RNA, 32 nt, Human
ucgagaguuggguucaguccuggcccguugug

SEQ ID NO: 503526 - RNA, 32 nt, Human
ucgagauacaaguuuccugaaacugcugcucu

SEQ ID NO: 503527 - RNA, 32 nt, Human
ucgagauacagcuuuuugcaguaugguggguu

SEQ ID NO: 503528 - RNA, 32 nt, Human
ucgagauaucaucuguaccucagcacuguugu

SEQ ID NO: 503529 - RNA, 32 nt, Human
ucgagaucagcauggccaacauggugaagccc

SEQ ID NO: 503530 - RNA, 32 nt, Human
ucgagaucagccuaggcaacauggugaaaucc

SEQ ID NO: 503531 - RNA, 32 nt, Human
ucgagaucagccugaccaacaugaugaaaugc

SEQ ID NO: 503532 - RNA, 32 nt, Human
ucgagaucagccugaccaacauggugaaaccc

SEQ ID NO: 503533 - RNA, 32 nt, Human
ucgagaucagccuggacaauacggugagaccc

SEQ ID NO: 503534 - RNA, 23 nt, Human
ucgagaucagccuggccaacaug

SEQ ID NO: 503535 - RNA, 32 nt, Human
ucgagaucagccuggccaacauggcaaaaccc

SEQ ID NO: 503536 - RNA, 32 nt, Human
ucgagaucagccuggccaacauggugaaaccc

SEQ ID NO: 503537 - RNA, 32 nt, Human
ucgagaucagccuggccaacauggugaaaucc

SEQ ID NO: 503538 - RNA, 32 nt, Human
ucgagaucagccuggccaauagggugaaacuc

SEQ ID NO: 503539 - RNA, 32 nt, Human
ucgagaucagcgggaccaacauggugaaaccc

SEQ ID NO: 503540 - RNA, 32 nt, Human
ucgagaucauccuggcuaacacagugaaaccc

SEQ ID NO: 503541 - RNA, 32 nt, Human
ucgagaucauccuggcuaacacggugaaaccc

SEQ ID NO: 503542 - RNA, 32 nt, Human
ucgagaucauugcacuccagccugggcaauaa

SEQ ID NO: 503543 - RNA, 32 nt, Human
ucgagaucuuguuaaaauguagauccugggug

SEQ ID NO: 503544 - RNA, 32 nt, Human
ucgagaugagccuggccaacauggugaaaccc

SEQ ID NO: 503545 - RNA, 32 nt, Human
ucgagaugccucuucucugucuccuuaucaga

SEQ ID NO: 503546 - RNA, 32 nt, Human
ucgagauggaguuucacucuugucgcucaggc

SEQ ID NO: 503547 - RNA, 32 nt, Human
ucgagauggaguuuugcucuuguugcccaggc

SEQ ID NO: 503548 - RNA, 32 nt, Human
ucgagauggcucuguaagccugacuggcaaua

SEQ ID NO: 503549 - RNA, 32 nt, Human
ucgagauuagucuggccaacauggugaaaccc

SEQ ID NO: 503550 - RNA, 32 nt, Human
ucgagcaccagcuggcuccaccagccgccugc

SEQ ID NO: 503551 - RNA, 32 nt, Human
ucgagcacccgcugaacaucagccugggagac

SEQ ID NO: 503552 - RNA, 32 nt, Human
ucgagcacuucacgugucacacaugcugcgga

SEQ ID NO: 503553 - RNA, 32 nt, Human
ucgagcagaaguugaucaacucagggaaacac

SEQ ID NO: 503554 - RNA, 32 nt, Human
ucgagcagagccgguaaccaccacgugccaga

SEQ ID NO: 503555 - RNA, 32 nt, Human
ucgagcauggaggggcacuggggaaggucccc

SEQ ID NO: 503556 - RNA, 25 nt, Human
ucgagccaaaauugcaccacugcac

SEQ ID NO: 503557 - RNA, 32 nt, Human
ucgagccacugcacuccagccugggcaacaga

SEQ ID NO: 503558 - RNA, 32 nt, Human
ucgagccacugcacuccagccugggcagcuga

SEQ ID NO: 503559 - RNA, 32 nt, Human
ucgagccacugcacuccagccugggcgacaga

SEQ ID NO: 503560 - RNA, 32 nt, Human
ucgagccacugcacuccagccugggugacaga

SEQ ID NO: 503561 - RNA, 32 nt, Human
ucgagccacugcacuccagccugggugaugaa

SEQ ID NO: 503562 - RNA, 32 nt, Human
ucgagccacugcacuccugggcaacagagcaa

SEQ ID NO: 503563 - RNA, 32 nt, Human
ucgagccacugcauuccagccugggcgaaaga

SEQ ID NO: 503564 - RNA, 32 nt, Human
ucgagccacuugcuuugcucaguucuguguuu

SEQ ID NO: 503565 - RNA, 32 nt, Human
ucgagccauugcacucaaaccugggggauaag

SEQ ID NO: 503566 - RNA, 32 nt, Human
ucgagccauugcacuccagccuggacagcagg

SEQ ID NO: 503567 - RNA, 32 nt, Human
ucgagccauugcacuccagccugggcaacaag

SEQ ID NO: 503568 - RNA, 32 nt, Human
ucgagcccagaaguucaagaccagccugagca

SEQ ID NO: 503569 - RNA, 32 nt, Human
ucgagcccagacugucgauacugacauagcca

SEQ ID NO: 503570 - RNA, 31 nt, Human
ucgagcccagccucucccugccaaagcccaa

SEQ ID NO: 503571 - RNA, 32 nt, Human
ucgagcccagccugaccaauaugaugaaaccc

SEQ ID NO: 503572 - RNA, 32 nt, Human
ucgagcccagccugaccaauauggugaaaccc

SEQ ID NO: 503573 - RNA, 32 nt, Human
ucgagcccagccuggccaacauggcgaaaccc

SEQ ID NO: 503574 - RNA, 32 nt, Human
ucgagcccagccuggccaacauggugaaaccc

SEQ ID NO: 503575 - RNA, 32 nt, Human
ucgagcccaggaguuugagaccagccugggca

SEQ ID NO: 503576 - RNA, 22 nt, Human
ucgagcccagggacccccgggc

SEQ ID NO: 503577 - RNA, 32 nt, Human
ucgagcccaucaaccuggacagcugucuccgu

SEQ ID NO: 503578 - RNA, 32 nt, Human
ucgagcccucccccaaacagacucgcuagcac

SEQ ID NO: 503579 - RNA, 32 nt, Human
ucgagccgcagccaugucuggggacgagauga

SEQ ID NO: 503580 - RNA, 32 nt, Human
ucgagccgggagcuauuugccucccaggagga

SEQ ID NO: 503581 - RNA, 32 nt, Human
ucgagccucacagaagccagcgcgggucucug

SEQ ID NO: 503582 - RNA, 32 nt, Human
ucgagccugggugacagagugagacuccgucu

SEQ ID NO: 503583 - RNA, 24 nt, Human
ucgagccugggugacagggcaaga

SEQ ID NO: 503584 - RNA, 32 nt, Human
ucgagccugggugacagggcaagacccugucu

SEQ ID NO: 503585 - RNA, 32 nt, Human
ucgagcgagcgccgggcauagcgcggcuggcg

SEQ ID NO: 503586 - RNA, 32 nt, Human
ucgagcgauccucccgccucagccucucgaga

SEQ ID NO: 503587 - RNA, 32 nt, Human
ucgagcgcccgcagcccaccucucgggggcgg

SEQ ID NO: 503588 - RNA, 32 nt, Human
ucgagcucugagccaccacggucccagggccc

SEQ ID NO: 503589 - RNA, 17 nt, Human
ucgagcugccucgggcc

SEQ ID NO: 503590 - RNA, 32 nt, Human
ucgagcugugagauuuuacccucccagcccag

SEQ ID NO: 503591 - RNA, 32 nt, Human
ucgagcuuccuucuggaccagcuccuggggau

SEQ ID NO: 503592 - RNA, 32 nt, Human
ucgaggaagagggagaagccgacaagugcucg

SEQ ID NO: 503593 - RNA, 32 nt, Human
ucgaggaccuggugcugagaagagucuguuca

SEQ ID NO: 503594 - RNA, 32 nt, Human
ucgaggaggaaguggcugauuacugagcgguu

SEQ ID NO: 503595 - RNA, 32 nt, Human
ucgaggaggaggaggaggccgggguggagggg

SEQ ID NO: 503596 - RNA, 32 nt, Human
ucgaggaggagguggauguggcagcugagauc

SEQ ID NO: 503597 - RNA, 32 nt, Human
ucgaggaucugcaggccgccgugaaguggggc

SEQ ID NO: 503598 - RNA, 32 nt, Human
ucgaggauucccaugugggcccuucagcuugg

SEQ ID NO: 503599 - RNA, 32 nt, Human
ucgaggcaggcagaucaccugaggucaggagu

SEQ ID NO: 503600 - RNA, 32 nt, Human
ucgaggcaggcggaucaccugaggucgggagu

SEQ ID NO: 503601 - RNA, 32 nt, Human
ucgaggcaggcggaucacuugaggucaggagu

SEQ ID NO: 503602 - RNA, 32 nt, Human
ucgaggcagguggaucaccugaggucaggagu

SEQ ID NO: 503603 - RNA, 32 nt, Human
ucgaggccagccugaccaacauggugaaacac

SEQ ID NO: 503604 - RNA, 32 nt, Human
ucgaggccagccugaccaacauggugaaaccc

SEQ ID NO: 503605 - RNA, 23 nt, Human
ucgaggccagccugagcaacaug

SEQ ID NO: 503606 - RNA, 32 nt, Human
ucgaggccagccuggccaacaugaugaaaccc

SEQ ID NO: 503607 - RNA, 32 nt, Human
ucgaggccagccuggccaacauggugaaaccc

SEQ ID NO: 503608 - RNA, 32 nt, Human
ucgaggccagguguucgagaccagccugggca

SEQ ID NO: 503609 - RNA, 32 nt, Human
ucgaggcccaccuucuucccacccccggcaaa

SEQ ID NO: 503610 - RNA, 32 nt, Human
ucgaggccucuucuccccagcaccgcuguggu

SEQ ID NO: 503611 - RNA, 32 nt, Human
ucgaggcgagccuggccaacauggugaaaccc

SEQ ID NO: 503612 - RNA, 32 nt, Human
ucgaggcgguuagcaggcuccagcagcucccu

SEQ ID NO: 503613 - RNA, 32 nt, Human
ucgaggcgugagccacagugguuaucuccaag

SEQ ID NO: 503614 - RNA, 32 nt, Human
ucgaggcugcagugagcuaugaucucaccacu

SEQ ID NO: 503615 - RNA, 20 nt, Human
ucgaggcuggaguguagugg

SEQ ID NO: 503616 - RNA, 32 nt, Human
ucgagggacuccgcccucccagccucaacacc

SEQ ID NO: 503617 - RNA, 32 nt, Human
ucgagggacuuaguggaguucucaucccuuca

SEQ ID NO: 503618 - RNA, 32 nt, Human
ucgagggcagaacucugggaaggaaagaaagg

SEQ ID NO: 503619 - RNA, 32 nt, Human
ucgaggggacaguguguuugagcuggagugcu

SEQ ID NO: 503620 - RNA, 32 nt, Human
ucgaggggacuuucagucacaggauuucauaa

SEQ ID NO: 503621 - RNA, 32 nt, Human
ucgaggggccccuucugccagggccuugguug

SEQ ID NO: 503622 - RNA, 32 nt, Human
ucgaggggcgcuggguuaggggagcaccuguu

SEQ ID NO: 503623 - RNA, 32 nt, Human
ucgagggggcucuguuaaaaauaagaacaaaa

SEQ ID NO: 503624 - RNA, 32 nt, Human
ucgagggucagggaggagagugacccggcccu

SEQ ID NO: 503625 - RNA, 32 nt, Human
ucgaggguucucuccccuugccaccaugagcg

SEQ ID NO: 503626 - RNA, 32 nt, Human
ucgagguagguggaucaccugaggucaggagu

SEQ ID NO: 503627 - RNA, 32 nt, Human
ucgagguagguggaucaccugaggucgggagu

SEQ ID NO: 503628 - RNA, 32 nt, Human
ucgaggucaggaguuccagaccagccugacca

SEQ ID NO: 503629 - RNA, 32 nt, Human
ucgaggucgacauuuauaccgucugaggguag

SEQ ID NO: 503630 - RNA, 22 nt, Human
ucgaggucuagggguauccaga

SEQ ID NO: 503631 - RNA, 32 nt, Human
ucgaggugacugugcugugcucggugagggga

SEQ ID NO: 503632 - RNA, 32 nt, Human
ucgaggugcaucuggccuugggggacgaugau

SEQ ID NO: 503633 - RNA, 32 nt, Human
ucgagguggcggcucuggugggaccaagcugc

SEQ ID NO: 503634 - RNA, 32 nt, Human
ucgaggugggcagaucaccugaggucaggagu

SEQ ID NO: 503635 - RNA, 32 nt, Human
ucgaggugggcagaucaccugagguuaggagu

SEQ ID NO: 503636 - RNA, 32 nt, Human
ucgaggugggcggaucaccugaggucaggagu

SEQ ID NO: 503637 - RNA, 32 nt, Human
ucgagguggggagggggaggcgggcuucccuc

SEQ ID NO: 503638 - RNA, 32 nt, Human
ucgagguggguggaucaccugaggucuggagu

SEQ ID NO: 503639 - RNA, 32 nt, Human
ucgagguggguggaugaccugaggucaggagu

SEQ ID NO: 503640 - RNA, 32 nt, Human
ucgagguuucucucagcuuuuugaccuggcuc

SEQ ID NO: 503641 - RNA, 32 nt, Human
ucgaguaaucugccaagcaagaguuuauucaa

SEQ ID NO: 503642 - RNA, 32 nt, Human
ucgagucaucuacaccuagcuucaccuuauuc

SEQ ID NO: 503643 - RNA, 32 nt, Human
ucgaguccagccuggccaacauggugaaaccc

SEQ ID NO: 503644 - RNA, 32 nt, Human
ucgaguccagccuggccaauaugcugaaaccc

SEQ ID NO: 503645 - RNA, 16 nt, Human
ucgagucccaauucuu

SEQ ID NO: 503646 - RNA, 32 nt, Human
ucgagucccgcagccuuaacaggaugggaucg

SEQ ID NO: 503647 - RNA, 32 nt, Human
ucgagucccugcugguuccccuuguccuggga

SEQ ID NO: 503648 - RNA, 32 nt, Human
ucgagucguuccuuccccuccuggauuccggg

SEQ ID NO: 503649 - RNA, 32 nt, Human
ucgagucuguaugaggccagagacguggaagu

SEQ ID NO: 503650 - RNA, 32 nt, Human
ucgagucuuauugcuccaaccuguucgcacuu

SEQ ID NO: 503651 - RNA, 32 nt, Human
ucgagugcaguggcaugaucucagcucacugc

SEQ ID NO: 503652 - RNA, 32 nt, Human
ucgagugcaguggcucgcgccuguaaucccag

SEQ ID NO: 503653 - RNA, 32 nt, Human
ucgaguggaaccuggaagccccggguggcagu

SEQ ID NO: 503654 - RNA, 32 nt, Human
ucgaguggaggaagacagcaggguggggguga

SEQ ID NO: 503655 - RNA, 32 nt, Human
ucgaguggcuuccuggccauggagaggagauc

SEQ ID NO: 503656 - RNA, 32 nt, Human
ucgagugggcugggccacgcugaccacccugg

SEQ ID NO: 503657 - RNA, 32 nt, Human
ucgagugugccuuuuuauucaucuacuuuauu

SEQ ID NO: 503658 - RNA, 32 nt, Human
ucgaguguggucaaaggagagagucuuuguca

SEQ ID NO: 503659 - RNA, 32 nt, Human
ucgaguuacugcacuccagccugggugacaag

SEQ ID NO: 503660 - RNA, 32 nt, Human
ucgaguuaggaggacgagagaccuccagcccc

SEQ ID NO: 503661 - RNA, 32 nt, Human
ucgaguucccgcucuucaccccuucccucacc

SEQ ID NO: 503662 - RNA, 32 nt, Human
ucgaguucgccggcgacguccaugaccgcuac

SEQ ID NO: 503663 - RNA, 32 nt, Human
ucgauaaacgagcucccuucuuugcacacaua

SEQ ID NO: 503664 - RNA, 32 nt, Human
ucgauaaguccccaaggcugcauguauuagca

SEQ ID NO: 503665 - RNA, 32 nt, Human
ucgauaccagccugaccaacauggcgaaaccc

SEQ ID NO: 503666 - RNA, 32 nt, Human
ucgauaccagccuggccaacauggugaaaccc

SEQ ID NO: 503667 - RNA, 32 nt, Human
ucgauaccagccugggcaacauagugggaucc

SEQ ID NO: 503668 - RNA, 32 nt, Human
ucgauaguguuacugauaacaaaccuacuuaa

SEQ ID NO: 503669 - RNA, 32 nt, Human
ucgauaguuacccaaaguucagucuagauggc

SEQ ID NO: 503670 - RNA, 32 nt, Human
ucgauauuugguggccccaagcgaaugaagca

SEQ ID NO: 503671 - RNA, 32 nt, Human
ucgauccacccuccucccuucucaugggacuu

SEQ ID NO: 503672 - RNA, 26 nt, Human
ucgauccguucccccagggaccaucc

SEQ ID NO: 503673 - RNA, 32 nt, Human
ucgauccuggggcccucagcuccuggggaccc

SEQ ID NO: 503674 - RNA, 32 nt, Human
ucgaucgcaggcucggcguccuuggcagccau

SEQ ID NO: 503675 - RNA, 32 nt, Human
ucgaucgcuugagccugggagguggaggcuac

SEQ ID NO: 503676 - RNA, 32 nt, Human
ucgaucuccucugagccucuucugcccccugu

SEQ ID NO: 503677 - RNA, 32 nt, Human
ucgaucugaaucugccggggccccagcccacu

SEQ ID NO: 503678 - RNA, 32 nt, Human
ucgaucugcaagccuuucaccaaccaaauagu

SEQ ID NO: 503679 - RNA, 32 nt, Human
ucgaugaacugaucuucaugcugagcgacagc

SEQ ID NO: 503680 - RNA, 32 nt, Human
ucgaugaagcaguuccagaaggaccauucuca

SEQ ID NO: 503681 - RNA, 32 nt, Human
ucgaugaaggaagggcccaugguucugccacu

SEQ ID NO: 503682 - RNA, 32 nt, Human
ucgaugagaggcaggcucccaccugcagggug

SEQ ID NO: 503683 - RNA, 32 nt, Human
ucgaugagguauuaaaggaaaccacuggucuu

SEQ ID NO: 503684 - RNA, 24 nt, Human
ucgaugccaagccagacccucuca

SEQ ID NO: 503685 - RNA, 32 nt, Human
ucgaugccccacugucgugucucccucccucc

SEQ ID NO: 503686 - RNA, 31 nt, Human
ucgaugcucaauaaauguguguugacugcaa

SEQ ID NO: 503687 - RNA, 32 nt, Human
ucgaugcugcuggccucccuccgucccucugu

SEQ ID NO: 503688 - RNA, 32 nt, Human
ucgaugcuuccuuguccuacucucacaucugc

SEQ ID NO: 503689 - RNA, 31 nt, Human
ucgaugcuuggguuccguaugccaagauucu

SEQ ID NO: 503690 - RNA, 32 nt, Human
ucgauggagaugcuucuagccucccaguagga

SEQ ID NO: 503691 - RNA, 32 nt, Human
ucgauggccugagacacaccccuugagaagaa

SEQ ID NO: 503692 - RNA, 32 nt, Human
ucgauguagagacucuauuuucucccaaagac

SEQ ID NO: 503693 - RNA, 32 nt, Human
ucgaugucaggaguuugagaccagccuggcca

SEQ ID NO: 503694 - RNA, 32 nt, Human
ucgauguccacauccuagugggagccugugac

SEQ ID NO: 503695 - RNA, 32 nt, Human
ucgaugucugcuucuucccagccugggauccu

SEQ ID NO: 503696 - RNA, 19 nt, Human
ucgauguuaccuugcuggu

SEQ ID NO: 503697 - RNA, 23 nt, Human
ucgauguuccaggcacuguccua

SEQ ID NO: 503698 - RNA, 32 nt, Human
ucgauuagcuguucuucuacaucacauuguua

SEQ ID NO: 503699 - RNA, 32 nt, Human
ucgauuguaccacugcacuccagccugggcga

SEQ ID NO: 503700 - RNA, 32 nt, Human
ucgauuguaucgcugcuacaucagacucuaga

SEQ ID NO: 503701 - RNA, 32 nt, Human
ucgauuguucccagauccucccugccuggccu

SEQ ID NO: 503702 - RNA, 32 nt, Human
ucgauuucauuucccuuccccgcaccccuuga

SEQ ID NO: 503703 - RNA, 32 nt, Human
ucgauuuccuccgcuucucucuuugccgagcu

SEQ ID NO: 503704 - RNA, 32 nt, Human
ucgcaaaaccccacagauacagugccaaugac

SEQ ID NO: 503705 - RNA, 32 nt, Human
ucgcaacacuacacuccagccugggcgacaga

SEQ ID NO: 503706 - RNA, 32 nt, Human
ucgcaacacugcacuccagccugggcgacaga

SEQ ID NO: 503707 - RNA, 32 nt, Human
ucgcaacacugcacuccagccugggugacaga

SEQ ID NO: 503708 - RNA, 32 nt, Human
ucgcaacacugcccuccagccugggcaacaga

SEQ ID NO: 503709 - RNA, 32 nt, Human
ucgcaacauugcacuccaggcugggcagcaag

SEQ ID NO: 503710 - RNA, 32 nt, Human
ucgcaaccagccuggccaauauggugagaccc

SEQ ID NO: 503711 - RNA, 32 nt, Human
ucgcaaccauccuggcuaacacggugaaaccc

SEQ ID NO: 503712 - RNA, 32 nt, Human
ucgcaacccugcaaagucggagcugcugagaa

SEQ ID NO: 503713 - RNA, 32 nt, Human
ucgcaagcacacacccugcgggccuucaaguc

SEQ ID NO: 503714 - RNA, 32 nt, Human
ucgcaagcacagaaccaguuguacugagcuuu

SEQ ID NO: 503715 - RNA, 32 nt, Human
ucgcaaggcugagccacugggcugugggggaa

SEQ ID NO: 503716 - RNA, 32 nt, Human
ucgcaaggcugaggcaggagaaucgcuugaac

SEQ ID NO: 503717 - RNA, 22 nt, Human
ucgcaaguagcugggacuacag

SEQ ID NO: 503718 - RNA, 23 nt, Human
ucgcaaguagcugggauuacagg

SEQ ID NO: 503719 - RNA, 32 nt, Human
ucgcaaguaugaccagaagccaggacaaagcu

SEQ ID NO: 503720 - RNA, 24 nt, Human
ucgcacaaccaugacgcacugcuc

SEQ ID NO: 503721 - RNA, 24 nt, Human
ucgcacaacgaugacgcacugcuc

SEQ ID NO: 503722 - RNA, 32 nt, Human
ucgcacacaugagccugugcucagccugcaca

SEQ ID NO: 503723 - RNA, 32 nt, Human
ucgcacaccauccugcgggugcagcccaaaac

SEQ ID NO: 503724 - RNA, 32 nt, Human
ucgcacagccuccccauccuuccuucccagcc

SEQ ID NO: 503725 - RNA, 22 nt, Human
ucgcacaggcuuggagugcagu

SEQ ID NO: 503726 - RNA, 32 nt, Human
ucgcaccacagcacuccagcccaggcggcagu

SEQ ID NO: 503727 - RNA, 32 nt, Human
ucgcaccacagcgcuccagccuggucgacaga

SEQ ID NO: 503728 - RNA, 32 nt, Human
ucgcaccaccacacuccagccugggugacaga

SEQ ID NO: 503729 - RNA, 32 nt, Human
ucgcaccacggcacuccagccuggcgacagag

SEQ ID NO: 503730 - RNA, 32 nt, Human
ucgcaccacugaacuccagccugggcgacaag

SEQ ID NO: 503731 - RNA, 32 nt, Human
ucgcaccacugcacccaaaccuggggagagag

SEQ ID NO: 503732 - RNA, 32 nt, Human
ucgcaccacugcaccccagccugggcaacaag

SEQ ID NO: 503733 - RNA, 32 nt, Human
ucgcaccacugcaccccagcgugggcaacaga

SEQ ID NO: 503734 - RNA, 32 nt, Human
ucgcaccacugcacgcacuccagccuggguga

SEQ ID NO: 503735 - RNA, 32 nt, Human
ucgcaccacugcacuacagccugggcgacaga

SEQ ID NO: 503736 - RNA, 32 nt, Human
ucgcaccacugcacucaagccugggcgacaga

SEQ ID NO: 503737 - RNA, 32 nt, Human
ucgcaccacugcacuccaaccugggcaacaga

SEQ ID NO: 503738 - RNA, 32 nt, Human
ucgcaccacugcacuccaaccugggugacgag

SEQ ID NO: 503739 - RNA, 32 nt, Human
ucgcaccacugcacuccaaucugggcaagaga

SEQ ID NO: 503740 - RNA, 32 nt, Human
ucgcaccacugcacuccagcacuccagccugg

SEQ ID NO: 503741 - RNA, 32 nt, Human
ucgcaccacugcacuccagcaugagugacaga

SEQ ID NO: 503742 - RNA, 32 nt, Human
ucgcaccacugcacuccagccuaggcgacggg

SEQ ID NO: 503743 - RNA, 32 nt, Human
ucgcaccacugcacuccagccuggaagaccaa

SEQ ID NO: 503744 - RNA, 32 nt, Human
ucgcaccacugcacuccagccuggacaacaga

SEQ ID NO: 503745 - RNA, 32 nt, Human
ucgcaccacugcacuccagccugggagacaga

SEQ ID NO: 503746 - RNA, 32 nt, Human
ucgcaccacugcacuccagccugggagauaca

SEQ ID NO: 503747 - RNA, 32 nt, Human
ucgcaccacugcacuccagccugggcaacaag

SEQ ID NO: 503748 - RNA, 32 nt, Human
ucgcaccacugcacuccagccugggcaacaca

SEQ ID NO: 503749 - RNA, 32 nt, Human
ucgcaccacugcacuccagccugggcaacaga

SEQ ID NO: 503750 - RNA, 32 nt, Human
ucgcaccacugcacuccagccugggcaacaua

SEQ ID NO: 503751 - RNA, 32 nt, Human
ucgcaccacugcacuccagccugggcgaaagg

SEQ ID NO: 503752 - RNA, 32 nt, Human
ucgcaccacugcacuccagccugggcgacaaa

SEQ ID NO: 503753 - RNA, 32 nt, Human
ucgcaccacugcacuccagccugggcgacaga

SEQ ID NO: 503754 - RNA, 32 nt, Human
ucgcaccacugcacuccagccugggcggcaga

SEQ ID NO: 503755 - RNA, 32 nt, Human
ucgcaccacugcacuccagccugggcuacaga

SEQ ID NO: 503756 - RNA, 32 nt, Human
ucgcaccacugcacuccagccugggugacaag

SEQ ID NO: 503757 - RNA, 32 nt, Human
ucgcaccacugcacuccagccugggugacaga

SEQ ID NO: 503758 - RNA, 32 nt, Human
ucgcaccacugcacuccagccugggugauaga

SEQ ID NO: 503759 - RNA, 32 nt, Human
ucgcaccacugcacuccagccugggugaugga

SEQ ID NO: 503760 - RNA, 32 nt, Human
ucgcaccacugcacuccagccuggguuacaga

SEQ ID NO: 503761 - RNA, 32 nt, Human
ucgcaccacugcacuccagccuggucgacagc

SEQ ID NO: 503762 - RNA, 32 nt, Human
ucgcaccacugcacuccagccuggugacagag

SEQ ID NO: 503763 - RNA, 32 nt, Human
ucgcaccacugcacuccagccugguuacagag

SEQ ID NO: 503764 - RNA, 32 nt, Human
ucgcaccacugcacuccagcucgggugacaag

SEQ ID NO: 503765 - RNA, 32 nt, Human
ucgcaccacugcacuccagcuuggaggaaaga

SEQ ID NO: 503766 - RNA, 32 nt, Human
ucgcaccacugcacuccagcuugguucaugga

SEQ ID NO: 503767 - RNA, 32 nt, Human
ucgcaccacugcacuccagucuggcaacagag

SEQ ID NO: 503768 - RNA, 32 nt, Human
ucgcaccacugcacuccagucuggguaacaga

SEQ ID NO: 503769 - RNA, 32 nt, Human
ucgcaccacugcacucccgcuuggcaauagag

SEQ ID NO: 503770 - RNA, 32 nt, Human
ucgcaccacugcacucuagccugggugaaaga

SEQ ID NO: 503771 - RNA, 32 nt, Human
ucgcaccacugcacucuagccugggugaccga

SEQ ID NO: 503772 - RNA, 32 nt, Human
ucgcaccacugcacucuagccuuggcaacagu

SEQ ID NO: 503773 - RNA, 32 nt, Human
ucgcaccacugcacucuagcuugggcaacaga

SEQ ID NO: 503774 - RNA, 32 nt, Human
ucgcaccacugcacugcagccuggcaacaaga

SEQ ID NO: 503775 - RNA, 32 nt, Human
ucgcaccacugcacugcagccugggugacaga

SEQ ID NO: 503776 - RNA, 32 nt, Human
ucgcaccacugcacuucagccugggugacaga

SEQ ID NO: 503777 - RNA, 32 nt, Human
ucgcaccacugcauucagccugagcaacagau

SEQ ID NO: 503778 - RNA, 32 nt, Human
ucgcaccacugcauuccagccuaagcaauaga

SEQ ID NO: 503779 - RNA, 32 nt, Human
ucgcaccacugcauuccagccugggcaacaga

SEQ ID NO: 503780 - RNA, 32 nt, Human
ucgcaccacugcauuccagccugggugacaga

SEQ ID NO: 503781 - RNA, 32 nt, Human
ucgcaccacugcauucuagccuuagugauaca

SEQ ID NO: 503782 - RNA, 32 nt, Human
ucgcaccacugcauugcagccuggugacagag

SEQ ID NO: 503783 - RNA, 32 nt, Human
ucgcaccacugcccuccagccuaggugacaga

SEQ ID NO: 503784 - RNA, 32 nt, Human
ucgcaccacugcucuccagccuggcgacagag

SEQ ID NO: 503785 - RNA, 32 nt, Human
ucgcaccacuguacuccagccugggcaacaga

SEQ ID NO: 503786 - RNA, 32 nt, Human
ucgcaccacuguacuccagccugggcgacgga

SEQ ID NO: 503787 - RNA, 32 nt, Human
ucgcaccacuguacuccagccugggugacaga

SEQ ID NO: 503788 - RNA, 32 nt, Human
ucgcaccacuguacuccagccugggugacuga

SEQ ID NO: 503789 - RNA, 32 nt, Human
ucgcaccacuguauuccagccuggaugacaaa

SEQ ID NO: 503790 - RNA, 32 nt, Human
ucgcaccaggguggagccuccuagaagggcag

SEQ ID NO: 503791 - RNA, 32 nt, Human
ucgcaccagugcacuccagccuuggugacaau

SEQ ID NO: 503792 - RNA, 32 nt, Human
ucgcaccauuacacuccagccugggcaacaga

SEQ ID NO: 503793 - RNA, 32 nt, Human
ucgcaccauugcaaccccaccugggcaacaag

SEQ ID NO: 503794 - RNA, 32 nt, Human
ucgcaccauugcacaccaaccugggugacaga

SEQ ID NO: 503795 - RNA, 32 nt, Human
ucgcaccauugcacccgagccuaggcaacaag

SEQ ID NO: 503796 - RNA, 32 nt, Human
ucgcaccauugcacuccagcccgggcaacaac

SEQ ID NO: 503797 - RNA, 32 nt, Human
ucgcaccauugcacuccagccuaggcaaaaag

SEQ ID NO: 503798 - RNA, 32 nt, Human
ucgcaccauugcacuccagccugagugacaga

SEQ ID NO: 503799 - RNA, 32 nt, Human
ucgcaccauugcacuccagccuggaugauaga

SEQ ID NO: 503800 - RNA, 32 nt, Human
ucgcaccauugcacuccagccuggcgaccgag

SEQ ID NO: 503801 - RNA, 32 nt, Human
ucgcaccauugcacuccagccugggcaacaag

SEQ ID NO: 503802 - RNA, 32 nt, Human
ucgcaccauugcacuccagccugggcaacaga

SEQ ID NO: 503803 - RNA, 32 nt, Human
ucgcaccauugcacuccagccugggcaacagc

SEQ ID NO: 503804 - RNA, 32 nt, Human
ucgcaccauugcacuccagccugggcaacgag

SEQ ID NO: 503805 - RNA, 32 nt, Human
ucgcaccauugcacuccagccugugcaacaag

SEQ ID NO: 503806 - RNA, 32 nt, Human
ucgcaccauugcacuccagcugggagacacag

SEQ ID NO: 503807 - RNA, 32 nt, Human
ucgcaccauugcacuccugccugggcaacaag

SEQ ID NO: 503808 - RNA, 32 nt, Human
ucgcaccauugcacucuagccugggcaacgag

SEQ ID NO: 503809 - RNA, 32 nt, Human
ucgcaccauugcacuucagccugggcaacaag

SEQ ID NO: 503810 - RNA, 32 nt, Human
ucgcaccauugcauuccagccugggcaacaag

SEQ ID NO: 503811 - RNA, 32 nt, Human
ucgcaccauugcccuccagccugggcaacaag

SEQ ID NO: 503812 - RNA, 32 nt, Human
ucgcaccauuguacuccagccugggcaacaag

SEQ ID NO: 503813 - RNA, 32 nt, Human
ucgcaccauuguacuccagccugugugacaga

SEQ ID NO: 503814 - RNA, 32 nt, Human
ucgcaccccugcacuccagccugggcaacaga

SEQ ID NO: 503815 - RNA, 32 nt, Human
ucgcacccuuacacuucagccugggcgaccga

SEQ ID NO: 503816 - RNA, 32 nt, Human
ucgcacccuuacacuuuagccugggcgaccga

SEQ ID NO: 503817 - RNA, 32 nt, Human
ucgcaccgccccgcucuccagccaagguuccg

SEQ ID NO: 503818 - RNA, 32 nt, Human
ucgcaccgcuacacuccagccugggugacaga

SEQ ID NO: 503819 - RNA, 32 nt, Human
ucgcaccgcugcacuccagccuggcaacagag

SEQ ID NO: 503820 - RNA, 32 nt, Human
ucgcaccgcugcacuccagccugggcaacaga

SEQ ID NO: 503821 - RNA, 32 nt, Human
ucgcaccgcugcacuccagccugggcaagaga

SEQ ID NO: 503822 - RNA, 32 nt, Human
ucgcaccgcugcacuccagccugggugacaga

SEQ ID NO: 503823 - RNA, 32 nt, Human
ucgcaccgcugcccuccagccugggcaacaag

SEQ ID NO: 503824 - RNA, 32 nt, Human
ucgcaccggaggaggagaggaggcagcgcccg

SEQ ID NO: 503825 - RNA, 32 nt, Human
ucgcaccguuguacuccagccuggugauagaa

SEQ ID NO: 503826 - RNA, 32 nt, Human
ucgcaccuaccaucagggacaggaugaccugg

SEQ ID NO: 503827 - RNA, 32 nt, Human
ucgcaccuccugggugcuguagucuguguugg

SEQ ID NO: 503828 - RNA, 32 nt, Human
ucgcaccugagguggucaugugggggcgcauu

SEQ ID NO: 503829 - RNA, 32 nt, Human
ucgcaccuguaaucccagcacucuaggaggcc

SEQ ID NO: 503830 - RNA, 24 nt, Human
ucgcaccuguaaucccagcacuuu

SEQ ID NO: 503831 - RNA, 32 nt, Human
ucgcaccuguaaucccagcacuuugggaggcu

SEQ ID NO: 503832 - RNA, 32 nt, Human
ucgcaccuguaaucccagcacuuugggauuac

SEQ ID NO: 503833 - RNA, 24 nt, Human
ucgcaccuguaaucccagcauuuu

SEQ ID NO: 503834 - RNA, 32 nt, Human
ucgcaccuguaaucccagcauuuugggaggcu

SEQ ID NO: 503835 - RNA, 32 nt, Human
ucgcaccuguaaucccagggacucaggaugcu

SEQ ID NO: 503836 - RNA, 32 nt, Human
ucgcaccuguaaucccagucacugggaagccg

SEQ ID NO: 503837 - RNA, 32 nt, Human
ucgcaccuucgcucccccuccccugccagcca

SEQ ID NO: 503838 - RNA, 20 nt, Human
ucgcacgcugcuccggacua

SEQ ID NO: 503839 - RNA, 32 nt, Human
ucgcacgucuaggaagaagggaagagguggaa

SEQ ID NO: 503840 - RNA, 32 nt, Human
ucgcacuacugcacuccagccugggugacaga

SEQ ID NO: 503841 - RNA, 32 nt, Human
ucgcacuauugcacucaagccugggcgacaaa

SEQ ID NO: 503842 - RNA, 32 nt, Human
ucgcacucagucagagagcccugcacuggaac

SEQ ID NO: 503843 - RNA, 32 nt, Human
ucgcacuccagacuacagccugggugacagag

SEQ ID NO: 503844 - RNA, 32 nt, Human
ucgcacuccagccuggacaacagagcgagacu

SEQ ID NO: 503845 - RNA, 32 nt, Human
ucgcacuccagccugggugacagagugagauu

SEQ ID NO: 503846 - RNA, 32 nt, Human
ucgcacugcuguacccagccugggccacagug

SEQ ID NO: 503847 - RNA, 32 nt, Human
ucgcacuugucacccaggcuggagugcaaugg

SEQ ID NO: 503848 - RNA, 32 nt, Human
ucgcacuuguugcccaggcuggagugcaaugg

SEQ ID NO: 503849 - RNA, 32 nt, Human
ucgcacuuucaguuccuccauuuggaauucaa

SEQ ID NO: 503850 - RNA, 32 nt, Human
ucgcagacagucaggcuucaggcugucugaca

SEQ ID NO: 503851 - RNA, 32 nt, Human
ucgcagaccagagcugucugaacucacguguc

SEQ ID NO: 503852 - RNA, 32 nt, Human
ucgcagacggcagcgcagucacacucaggaag

SEQ ID NO: 503853 - RNA, 32 nt, Human
ucgcagacgugccuucugccaugauugugaag

SEQ ID NO: 503854 - RNA, 32 nt, Human
ucgcagagagauucggaggagcccgggcgggg

SEQ ID NO: 503855 - RNA, 32 nt, Human
ucgcagagagugacggugucuccuugcauccc

SEQ ID NO: 503856 - RNA, 32 nt, Human
ucgcagaggacggacgucagguacggagggac

SEQ ID NO: 503857 - RNA, 32 nt, Human
ucgcagaguucgcagagagaauguuaucuuug

SEQ ID NO: 503858 - RNA, 32 nt, Human
ucgcagauggggaggaccacgccugcaaccac

SEQ ID NO: 503859 - RNA, 32 nt, Human
ucgcagcaaauggcuucagccugggacgccag

SEQ ID NO: 503860 - RNA, 32 nt, Human
ucgcagcaccagaccagccucugcagcugcac

SEQ ID NO: 503861 - RNA, 32 nt, Human
ucgcagcacuguacuccagccugggcgaugga

SEQ ID NO: 503862 - RNA, 32 nt, Human
ucgcagcagccugaguguucucacuagggguc

SEQ ID NO: 503863 - RNA, 32 nt, Human
ucgcagcagcugcucccggcuccgcggccgca

SEQ ID NO: 503864 - RNA, 32 nt, Human
ucgcagcaggcgugauuacacaugcacaccaa

SEQ ID NO: 503865 - RNA, 32 nt, Human
ucgcagcagggagcucagcgaggcagagggug

SEQ ID NO: 503866 - RNA, 32 nt, Human
ucgcagccaccacaugucucagggcuaccuuc

SEQ ID NO: 503867 - RNA, 18 nt, Human
ucgcagcccgccucggcc

SEQ ID NO: 503868 - RNA, 32 nt, Human
ucgcagccgccgcugacuugugaaugggaccg

SEQ ID NO: 503869 - RNA, 19 nt, Human
ucgcagccgcgcucgggcc

SEQ ID NO: 503870 - RNA, 18 nt, Human
ucgcagccggccugagcc

SEQ ID NO: 503871 - RNA, 32 nt, Human
ucgcagccgggagccggccggggaagaggaga

SEQ ID NO: 503872 - RNA, 32 nt, Human
ucgcagccugaagccuggauuccagcagugaa

SEQ ID NO: 503873 - RNA, 32 nt, Human
ucgcagcggggagggggcggccggaggaugcg

SEQ ID NO: 503874 - RNA, 32 nt, Human
ucgcagcucacucgaggccuggggaaggggac

SEQ ID NO: 503875 - RNA, 32 nt, Human
ucgcagcucacugcaaucucugccuccugggu

SEQ ID NO: 503876 - RNA, 32 nt, Human
ucgcagcucacuguagccucuaucuccugggc

SEQ ID NO: 503877 - RNA, 32 nt, Human
ucgcagcucacuguagcuuugaccucucaggc

SEQ ID NO: 503878 - RNA, 21 nt, Human
ucgcagcugcguucccgggcu

SEQ ID NO: 503879 - RNA, 32 nt, Human
ucgcagcugcugguggucaucaugaucugcgu

SEQ ID NO: 503880 - RNA, 32 nt, Human
ucgcaggacugaaugaaggcaaacuucccaac

SEQ ID NO: 503881 - RNA, 32 nt, Human
ucgcaggaggugccgucugccucccaggugcg

SEQ ID NO: 503882 - RNA, 32 nt, Human
ucgcaggaucugacaagaguccagguucucag

SEQ ID NO: 503883 - RNA, 32 nt, Human
ucgcaggcgcgcaucccuccugacugggacgu

SEQ ID NO: 503884 - RNA, 32 nt, Human
ucgcaggcuuacaccuguaccagggagcuuac

SEQ ID NO: 503885 - RNA, 32 nt, Human
ucgcaggcuucucugcuggugcuucugugccu

SEQ ID NO: 503886 - RNA, 32 nt, Human
ucgcagggaacaggugggcacuauccucugug

SEQ ID NO: 503887 - RNA, 32 nt, Human
ucgcagggaacaguuggguggcuuccagcuua

SEQ ID NO: 503888 - RNA, 32 nt, Human
ucgcagggccuggagugaccuaagccgagagg

SEQ ID NO: 503889 - RNA, 32 nt, Human
ucgcagggggcuguggggaggcauaagcugau

SEQ ID NO: 503890 - RNA, 32 nt, Human
ucgcaggggugaggggaaggauagagaaucua

SEQ ID NO: 503891 - RNA, 32 nt, Human
ucgcagguucaagugauccucaugucucagcc

SEQ ID NO: 503892 - RNA, 32 nt, Human
ucgcagugcaagcucccgccucccuugggucg

SEQ ID NO: 503893 - RNA, 32 nt, Human
ucgcaguguagcugaaauacugucuaucucua

SEQ ID NO: 503894 - RNA, 32 nt, Human
ucgcaguguaggagaugaagagacuguggagu

SEQ ID NO: 503895 - RNA, 32 nt, Human
ucgcaguguaggagauggagagacuguggagu

SEQ ID NO: 503896 - RNA, 32 nt, Human
ucgcaguuagagacugccucccuuauucacgc

SEQ ID NO: 503897 - RNA, 32 nt, Human
ucgcaguuugccuggugcaguggcucacaccu

SEQ ID NO: 503898 - RNA, 32 nt, Human
ucgcauacacaaauggucuuuuuggggacuuu

SEQ ID NO: 503899 - RNA, 32 nt, Human
ucgcauagucacguagcucccaccccacccuc

SEQ ID NO: 503900 - RNA, 32 nt, Human
ucgcaucacugcaguccagccuggaugacaga

SEQ ID NO: 503901 - RNA, 20 nt, Human
ucgcauccgccucugagcca

SEQ ID NO: 503902 - RNA, 32 nt, Human
ucgcaucuguagucccagcuacucaggaggcu

SEQ ID NO: 503903 - RNA, 32 nt, Human
ucgcaucuuggacucggaaagccagacuccac

SEQ ID NO: 503904 - RNA, 32 nt, Human
ucgcaugagaggggagggacagcagugaccuc

SEQ ID NO: 503905 - RNA, 32 nt, Human
ucgcaugcaaacauuuggugauuaagcgaggc

SEQ ID NO: 503906 - RNA, 32 nt, Human
ucgcaugcagcucucagcacugggugggaggg

SEQ ID NO: 503907 - RNA, 32 nt, Human
ucgcaugccacugcacuccagccugggcgaca

SEQ ID NO: 503908 - RNA, 32 nt, Human
ucgcaugcccagagaugauguggaagcucuau

SEQ ID NO: 503909 - RNA, 32 nt, Human
ucgcaugccugcccgcccgccagccugccggg

SEQ ID NO: 503910 - RNA, 32 nt, Human
ucgcaugcgcagugaguaaacaugagccucug

SEQ ID NO: 503911 - RNA, 32 nt, Human
ucgcaugcuacugcacuccagccugggagaca

SEQ ID NO: 503912 - RNA, 32 nt, Human
ucgcaugcugggaucaucgggggaggguagug

SEQ ID NO: 503913 - RNA, 32 nt, Human
ucgcauggaggccuggggcggcccagaggagc

SEQ ID NO: 503914 - RNA, 32 nt, Human
ucgcauguaaagacauccaaaugccgacuucu

SEQ ID NO: 503915 - RNA, 32 nt, Human
ucgcauuacugcacuccagccuggguaacaga

SEQ ID NO: 503916 - RNA, 32 nt, Human
ucgcauucauuuucugcugaacgacuuuuaac

SEQ ID NO: 503917 - RNA, 32 nt, Human
ucgcauugaagccacagguggggcaaggucau

SEQ ID NO: 503918 - RNA, 32 nt, Human
ucgcauuuucccugccuaccucacagagcugu

SEQ ID NO: 503919 - RNA, 32 nt, Human
ucgccaaaguuggagugcaguggcgcggucuc

SEQ ID NO: 503920 - RNA, 21 nt, Human
ucgccaacacugaggacccca

SEQ ID NO: 503921 - RNA, 32 nt, Human
ucgccaacauggcgaaaccccaucucuacuaa

SEQ ID NO: 503922 - RNA, 32 nt, Human
ucgccaacauggugaaaccccaucucuacuaa

SEQ ID NO: 503923 - RNA, 32 nt, Human
ucgccaaccgcaucugcucaucugauauucaa

SEQ ID NO: 503924 - RNA, 21 nt, Human
ucgccaaggcuggagugcagu

SEQ ID NO: 503925 - RNA, 22 nt, Human
ucgccaaggcuggagugcagug

SEQ ID NO: 503926 - RNA, 32 nt, Human
ucgccaaggcuggagugcaguggugcgaucuc

SEQ ID NO: 503927 - RNA, 32 nt, Human
ucgccaaggcuggagugcaguggugugaucuc

SEQ ID NO: 503928 - RNA, 32 nt, Human
ucgccaaguguggcagccugugcaguguuggg

SEQ ID NO: 503929 - RNA, 32 nt, Human
ucgccaaguuggagcuugcagugagccgagau

SEQ ID NO: 503930 - RNA, 21 nt, Human
ucgccaaguuggagugcaaug

SEQ ID NO: 503931 - RNA, 32 nt, Human
ucgccacagugggcagucacacaaagcuaccc

SEQ ID NO: 503932 - RNA, 32 nt, Human
ucgccaccaagacucgcucccaaccuggcucc

SEQ ID NO: 503933 - RNA, 32 nt, Human
ucgccaccauuuuggaagaggaacauccaguc

SEQ ID NO: 503934 - RNA, 32 nt, Human
ucgccacccuccacccuucuccccagcgugcu

SEQ ID NO: 503935 - RNA, 32 nt, Human
ucgccacugcacuccagccugggaaauagagu

SEQ ID NO: 503936 - RNA, 32 nt, Human
ucgccacugcacuccagccugggugacagagc

SEQ ID NO: 503937 - RNA, 32 nt, Human
ucgccacugcacuccaggcugggcgacagagu

SEQ ID NO: 503938 - RNA, 19 nt, Human
ucgccacugcccuggggca

SEQ ID NO: 503939 - RNA, 32 nt, Human
ucgccacugcgcuccagccugggcaacagagu

SEQ ID NO: 503940 - RNA, 32 nt, Human
ucgccacuggccacuccucuguucucauugcu

SEQ ID NO: 503941 - RNA, 32 nt, Human
ucgccacugugcuccagccugggcaacagagu

SEQ ID NO: 503942 - RNA, 32 nt, Human
ucgccacuuaccaggaugggaaagcacagugu

SEQ ID NO: 503943 - RNA, 32 nt, Human
ucgccagcagcugggcuggggugcaggucauc

SEQ ID NO: 503944 - RNA, 32 nt, Human
ucgccagcccuccacguccucccaggcuggcu

SEQ ID NO: 503945 - RNA, 32 nt, Human
ucgccagcccugcuggaguuugcugugggcac

SEQ ID NO: 503946 - RNA, 32 nt, Human
ucgccagccgcaccccuccacccccacccugc

SEQ ID NO: 503947 - RNA, 30 nt, Human
ucgccagccgcauccaugcuucuggcgcgg

SEQ ID NO: 503948 - RNA, 32 nt, Human
ucgccagccguugcuuuguuacugaacgugcc

SEQ ID NO: 503949 - RNA, 32 nt, Human
ucgccaggcugcagccucaggcacuggcaggg

SEQ ID NO: 503950 - RNA, 32 nt, Human
ucgccaggcuggaaugcagugcagugagccaa

SEQ ID NO: 503951 - RNA, 20 nt, Human
ucgccaggcuggaguguagu

SEQ ID NO: 503952 - RNA, 21 nt, Human
ucgccaggcuggaguguagug

SEQ ID NO: 503953 - RNA, 22 nt, Human
ucgccaggcuggaguguagugg

SEQ ID NO: 503954 - RNA, 32 nt, Human
ucgccaggcuggucucuaacuccugggcucag

SEQ ID NO: 503955 - RNA, 21 nt, Human
ucgccagguuggagugcagug

SEQ ID NO: 503956 - RNA, 23 nt, Human
ucgccagugcccgcuucgagcca

SEQ ID NO: 503957 - RNA, 32 nt, Human
ucgccagugggcggacgccaggagcucacgga

SEQ ID NO: 503958 - RNA, 24 nt, Human
ucgccaucaucaucaccaccauca

SEQ ID NO: 503959 - RNA, 32 nt, Human
ucgccaucaucugucugaggucuuauuacuua

SEQ ID NO: 503960 - RNA, 30 nt, Human
ucgccaugcugcuccugggccugcugcugc

SEQ ID NO: 503961 - RNA, 32 nt, Human
ucgccauggacugggaauuaacauguauuuaa

SEQ ID NO: 503962 - RNA, 32 nt, Human
ucgccaugguuggagugcaguggugcgaucua

SEQ ID NO: 503963 - RNA, 32 nt, Human
ucgccaugugggccucuccauagggccgcuug

SEQ ID NO: 503964 - RNA, 32 nt, Human
ucgccauucuguagucuucagggucagcuguu

SEQ ID NO: 503965 - RNA, 32 nt, Human
ucgccauugcacuccauucugggcaacaagag

SEQ ID NO: 503966 - RNA, 32 nt, Human
ucgccauuuuguccagacuagucucgaacucu

SEQ ID NO: 503967 - RNA, 20 nt, Human
ucgcccaagcuagagugcag

SEQ ID NO: 503968 - RNA, 32 nt, Human
ucgcccaagcugaagugcaguggugcgaucuc

SEQ ID NO: 503969 - RNA, 22 nt, Human
ucgcccaagcugccaccgagcc

SEQ ID NO: 503970 - RNA, 32 nt, Human
ucgcccaagcuggagcgcaauggugugaucuu

SEQ ID NO: 503971 - RNA, 32 nt, Human
ucgcccaagcuggaguacaguggugcaaucuc

SEQ ID NO: 503972 - RNA, 22 nt, Human
ucgcccaagcuggagugcagug

SEQ ID NO: 503973 - RNA, 32 nt, Human
ucgcccaagcuggagugcaguggcacaaucau

SEQ ID NO: 503974 - RNA, 32 nt, Human
ucgcccaccagcccugggagagcucagaugcc

SEQ ID NO: 503975 - RNA, 32 nt, Human
ucgcccaccaggcuucuuucugaccccucaug

SEQ ID NO: 503976 - RNA, 32 nt, Human
ucgcccaccaucucccuaccauggacccccgc

SEQ ID NO: 503977 - RNA, 32 nt, Human
ucgcccacccaccucccuccaccccgugccac

SEQ ID NO: 503978 - RNA, 25 nt, Human
ucgcccacccaggcuggaguacagu

SEQ ID NO: 503979 - RNA, 32 nt, Human
ucgcccacccauuccuccuguaccagcaccuc

SEQ ID NO: 503980 - RNA, 22 nt, Human
ucgcccacgcgugcuccgagcu

SEQ ID NO: 503981 - RNA, 32 nt, Human
ucgcccacuccucccuccucuggcuauccuac

SEQ ID NO: 503982 - RNA, 32 nt, Human
ucgcccacucuuccagcccuugcuuggucaca

SEQ ID NO: 503983 - RNA, 32 nt, Human
ucgcccacugcacuccagguugggcuacagag

SEQ ID NO: 503984 - RNA, 32 nt, Human
ucgcccagacuagaaugcaguggugcaaucuc

SEQ ID NO: 503985 - RNA, 32 nt, Human
ucgcccagacuggagugcaauggugcggucac

SEQ ID NO: 503986 - RNA, 22 nt, Human
ucgcccagacuggagugcagug

SEQ ID NO: 503987 - RNA, 32 nt, Human
ucgcccagacuggagugcaguggugggaucgc

SEQ ID NO: 503988 - RNA, 32 nt, Human
ucgcccagagauaccuggccuucauccaaagg

SEQ ID NO: 503989 - RNA, 32 nt, Human
ucgcccagauaaaggaggaaaagggaaaggca

SEQ ID NO: 503990 - RNA, 22 nt, Human
ucgcccagccuggagugcagug

SEQ ID NO: 503991 - RNA, 21 nt, Human
ucgcccaggauggagugcagu

SEQ ID NO: 503992 - RNA, 23 nt, Human
ucgcccaggauggagugcagugg

SEQ ID NO: 503993 - RNA, 32 nt, Human
ucgcccaggauggagugcaguggcgcgaucuu

SEQ ID NO: 503994 - RNA, 32 nt, Human
ucgcccaggauggagugcaguggcucaaucuc

SEQ ID NO: 503995 - RNA, 32 nt, Human
ucgcccaggauggagugcaguggugcgaucuc

SEQ ID NO: 503996 - RNA, 32 nt, Human
ucgcccaggccaggcuguggcagaugagccgu

SEQ ID NO: 503997 - RNA, 32 nt, Human
ucgcccaggccggacugcaguggcgcaaucuu

SEQ ID NO: 503998 - RNA, 32 nt, Human
ucgcccaggccggagugcaguggugcgaucuc

SEQ ID NO: 503999 - RNA, 23 nt, Human
ucgcccaggccugggaugcagug

SEQ ID NO: 504000 - RNA, 32 nt, Human
ucgcccaggcgggaaugcaguggcgcaaucuu

SEQ ID NO: 504001 - RNA, 32 nt, Human
ucgcccaggcuagagugcaauggcgugaucuc

SEQ ID NO: 504002 - RNA, 22 nt, Human
ucgcccaggcuagagugcagug

SEQ ID NO: 504003 - RNA, 32 nt, Human
ucgcccaggcuagagugcaguggcacaaucuc

SEQ ID NO: 504004 - RNA, 32 nt, Human
ucgcccaggcuagagugcaguggcgcgauuuu

SEQ ID NO: 504005 - RNA, 22 nt, Human
ucgcccaggcugaguacagugg

SEQ ID NO: 504006 - RNA, 21 nt, Human
ucgcccaggcugcagugcagu

SEQ ID NO: 504007 - RNA, 22 nt, Human
ucgcccaggcugcagugcagug

SEQ ID NO: 504008 - RNA, 32 nt, Human
ucgcccaggcugcagugcgguggugcgaucuu

SEQ ID NO: 504009 - RNA, 22 nt, Human
ucgcccaggcuggaaugcagug

SEQ ID NO: 504010 - RNA, 32 nt, Human
ucgcccaggcuggaaugcaguggcgcgaucuc

SEQ ID NO: 504011 - RNA, 32 nt, Human
ucgcccaggcuggaaugcaguggcgugaucuc

SEQ ID NO: 504012 - RNA, 32 nt, Human
ucgcccaggcuggaaugcaguggugcaaacau

SEQ ID NO: 504013 - RNA, 32 nt, Human
ucgcccaggcuggaaugcaguggugcgaucuc

SEQ ID NO: 504014 - RNA, 32 nt, Human
ucgcccaggcuggaaugcaguggugcgaucuu

SEQ ID NO: 504015 - RNA, 32 nt, Human
ucgcccaggcuggaaugcuguagcaagauuuc

SEQ ID NO: 504016 - RNA, 32 nt, Human
ucgcccaggcuggacugcaguggugcgaucuc

SEQ ID NO: 504017 - RNA, 32 nt, Human
ucgcccaggcuggagagcgguggcgcgaucuc

SEQ ID NO: 504018 - RNA, 22 nt, Human
ucgcccaggcuggagcgcaaug

SEQ ID NO: 504019 - RNA, 32 nt, Human
ucgcccaggcuggagcgcaauggcgcgaaauc

SEQ ID NO: 504020 - RNA, 32 nt, Human
ucgcccaggcuggagcgcagucccgcaauguc

SEQ ID NO: 504021 - RNA, 22 nt, Human
ucgcccaggcuggagcgcagug

SEQ ID NO: 504022 - RNA, 32 nt, Human
ucgcccaggcuggagggcaguggcgugaucuc

SEQ ID NO: 504023 - RNA, 22 nt, Human
ucgcccaggcuggaguacaaug

SEQ ID NO: 504024 - RNA, 32 nt, Human
ucgcccaggcuggaguacaauggugcgaacuc

SEQ ID NO: 504025 - RNA, 21 nt, Human
ucgcccaggcuggaguacagu

SEQ ID NO: 504026 - RNA, 22 nt, Human
ucgcccaggcuggaguacagug

SEQ ID NO: 504027 - RNA, 23 nt, Human
ucgcccaggcuggaguacaguga

SEQ ID NO: 504028 - RNA, 32 nt, Human
ucgcccaggcuggaguacagugaugcaaucuc

SEQ ID NO: 504029 - RNA, 23 nt, Human
ucgcccaggcuggaguacagugg

SEQ ID NO: 504030 - RNA, 32 nt, Human
ucgcccaggcuggaguacaguggugcgaucuu

SEQ ID NO: 504031 - RNA, 32 nt, Human
ucgcccaggcuggaguacaguggugugauccc

SEQ ID NO: 504032 - RNA, 32 nt, Human
ucgcccaggcuggagugagugcaguggcgcaa

SEQ ID NO: 504033 - RNA, 32 nt, Human
ucgcccaggcuggagugaugaggcgcgaucau

SEQ ID NO: 504034 - RNA, 19 nt, Human
ucgcccaggcuggagugca

SEQ ID NO: 504035 - RNA, 20 nt, Human
ucgcccaggcuggagugcaa

SEQ ID NO: 504036 - RNA, 23 nt, Human
ucgcccaggcuggagugcaacgg

SEQ ID NO: 504037 - RNA, 32 nt, Human
ucgcccaggcuggagugcaacgguacgaucuu

SEQ ID NO: 504038 - RNA, 32 nt, Human
ucgcccaggcuggagugcaaguggcaugaucu

SEQ ID NO: 504039 - RNA, 21 nt, Human
ucgcccaggcuggagugcaau

SEQ ID NO: 504040 - RNA, 32 nt, Human
ucgcccaggcuggagugcaauacugcaaucac

SEQ ID NO: 504041 - RNA, 22 nt, Human
ucgcccaggcuggagugcaaug

SEQ ID NO: 504042 - RNA, 32 nt, Human
ucgcccaggcuggagugcaaugcacgaucuca

SEQ ID NO: 504043 - RNA, 32 nt, Human
ucgcccaggcuggagugcaaugccgugaucuc

SEQ ID NO: 504044 - RNA, 23 nt, Human
ucgcccaggcuggagugcaaugg

SEQ ID NO: 504045 - RNA, 32 nt, Human
ucgcccaggcuggagugcaauggcacaaucuc

SEQ ID NO: 504046 - RNA, 32 nt, Human
ucgcccaggcuggagugcaauggcacaauuuu

SEQ ID NO: 504047 - RNA, 32 nt, Human
ucgcccaggcuggagugcaauggcacgaucuc

SEQ ID NO: 504048 - RNA, 32 nt, Human
ucgcccaggcuggagugcaauggcgcaaucuc

SEQ ID NO: 504049 - RNA, 32 nt, Human
ucgcccaggcuggagugcaauggcgcgaucuc

SEQ ID NO: 504050 - RNA, 32 nt, Human
ucgcccaggcuggagugcaauggcgugaucuc

SEQ ID NO: 504051 - RNA, 32 nt, Human
ucgcccaggcuggagugcaauggugugaucuc

SEQ ID NO: 504052 - RNA, 22 nt, Human
ucgcccaggcuggagugcacug

SEQ ID NO: 504053 - RNA, 32 nt, Human
ucgcccaggcuggagugcacuggcgcaaucuc

SEQ ID NO: 504054 - RNA, 32 nt, Human
ucgcccaggcuggagugcacuggcgcgaucuc

SEQ ID NO: 504055 - RNA, 20 nt, Human
ucgcccaggcuggagugcag

SEQ ID NO: 504056 - RNA, 32 nt, Human
ucgcccaggcuggagugcagaggugcgaucuc

SEQ ID NO: 504057 - RNA, 32 nt, Human
ucgcccaggcuggagugcagcagcacagucuc

SEQ ID NO: 504058 - RNA, 32 nt, Human
ucgcccaggcuggagugcaggggcauuagcuc

SEQ ID NO: 504059 - RNA, 32 nt, Human
ucgcccaggcuggagugcaggggcgcaaucuc

SEQ ID NO: 504060 - RNA, 21 nt, Human
ucgcccaggcuggagugcagu

SEQ ID NO: 504061 - RNA, 32 nt, Human
ucgcccaggcuggagugcaguagcacgaucuu

SEQ ID NO: 504062 - RNA, 32 nt, Human
ucgcccaggcuggagugcaguagcgcgaucuc

SEQ ID NO: 504063 - RNA, 32 nt, Human
ucgcccaggcuggagugcaguagcgugaucuc

SEQ ID NO: 504064 - RNA, 32 nt, Human
ucgcccaggcuggagugcagucgugccaucuc

SEQ ID NO: 504065 - RNA, 22 nt, Human
ucgcccaggcuggagugcagug

SEQ ID NO: 504066 - RNA, 32 nt, Human
ucgcccaggcuggagugcagugagcugagauc

SEQ ID NO: 504067 - RNA, 32 nt, Human
ucgcccaggcuggagugcagugaugcaaucac

SEQ ID NO: 504068 - RNA, 32 nt, Human
ucgcccaggcuggagugcagugaugcaaucuc

SEQ ID NO: 504069 - RNA, 32 nt, Human
ucgcccaggcuggagugcagugccgcgaucuc

SEQ ID NO: 504070 - RNA, 23 nt, Human
ucgcccaggcuggagugcagugg

SEQ ID NO: 504071 - RNA, 32 nt, Human
ucgcccaggcuggagugcaguggagcgaucuc

SEQ ID NO: 504072 - RNA, 32 nt, Human
ucgcccaggcuggagugcaguggcacaaucuc

SEQ ID NO: 504073 - RNA, 32 nt, Human
ucgcccaggcuggagugcaguggcgcaaucuc

SEQ ID NO: 504074 - RNA, 32 nt, Human
ucgcccaggcuggagugcaguggcgcaauuuu

SEQ ID NO: 504075 - RNA, 32 nt, Human
ucgcccaggcuggagugcaguggcgcauucua

SEQ ID NO: 504076 - RNA, 32 nt, Human
ucgcccaggcuggagugcaguggcgccaucuc

SEQ ID NO: 504077 - RNA, 32 nt, Human
ucgcccaggcuggagugcaguggcgcgaucuc

SEQ ID NO: 504078 - RNA, 32 nt, Human
ucgcccaggcuggagugcaguggcgcggucuu

SEQ ID NO: 504079 - RNA, 32 nt, Human
ucgcccaggcuggagugcaguggcgugaucuc

SEQ ID NO: 504080 - RNA, 32 nt, Human
ucgcccaggcuggagugcaguggcgugaucuu

SEQ ID NO: 504081 - RNA, 32 nt, Human
ucgcccaggcuggagugcagugggugggguga

SEQ ID NO: 504082 - RNA, 32 nt, Human
ucgcccaggcuggagugcagugguacgaucuu

SEQ ID NO: 504083 - RNA, 32 nt, Human
ucgcccaggcuggagugcagugguagaucagg

SEQ ID NO: 504084 - RNA, 32 nt, Human
ucgcccaggcuggagugcagugguaugaucuc

SEQ ID NO: 504085 - RNA, 32 nt, Human
ucgcccaggcuggagugcaguggugagaucuc

SEQ ID NO: 504086 - RNA, 32 nt, Human
ucgcccaggcuggagugcaguggugcaaucac

SEQ ID NO: 504087 - RNA, 32 nt, Human
ucgcccaggcuggagugcaguggugcagucuc

SEQ ID NO: 504088 - RNA, 32 nt, Human
ucgcccaggcuggagugcaguggugcaguggc

SEQ ID NO: 504089 - RNA, 32 nt, Human
ucgcccaggcuggagugcaguggugccaucuc

SEQ ID NO: 504090 - RNA, 32 nt, Human
ucgcccaggcuggagugcaguggugccgucuc

SEQ ID NO: 504091 - RNA, 32 nt, Human
ucgcccaggcuggagugcaguggugcgaccuc

SEQ ID NO: 504092 - RNA, 32 nt, Human
ucgcccaggcuggagugcaguggugcgaccuu

SEQ ID NO: 504093 - RNA, 32 nt, Human
ucgcccaggcuggagugcaguggugcgaucuc

SEQ ID NO: 504094 - RNA, 32 nt, Human
ucgcccaggcuggagugcagugguggcgaucu

SEQ ID NO: 504095 - RNA, 32 nt, Human
ucgcccaggcuggagugcaguggugucaucau

SEQ ID NO: 504096 - RNA, 32 nt, Human
ucgcccaggcuggagugcaguggugugaucuc

SEQ ID NO: 504097 - RNA, 22 nt, Human
ucgcccaggcuggagugcauug

SEQ ID NO: 504098 - RNA, 32 nt, Human
ucgcccaggcuggagugccauggcgcgaucuc

SEQ ID NO: 504099 - RNA, 22 nt, Human
ucgcccaggcuggagugcgaug

SEQ ID NO: 504100 - RNA, 32 nt, Human
ucgcccaggcuggagugcgguggcgcaaccuc

SEQ ID NO: 504101 - RNA, 32 nt, Human
ucgcccaggcuggagugcgguggcgcgaucuc

SEQ ID NO: 504102 - RNA, 32 nt, Human
ucgcccaggcuggagugcgguggugcaaucuc

SEQ ID NO: 504103 - RNA, 32 nt, Human
ucgcccaggcuggaguguagugacgcgaucuc

SEQ ID NO: 504104 - RNA, 32 nt, Human
ucgcccaggcuggaguucaguggcgcgaucuu

SEQ ID NO: 504105 - RNA, 32 nt, Human
ucgcccaggcuggcgugaaguggcgcaaccag

SEQ ID NO: 504106 - RNA, 23 nt, Human
ucgcccaggcuggcgugcagugg

SEQ ID NO: 504107 - RNA, 32 nt, Human
ucgcccaggcuggcgugcaguggcacagucuc

SEQ ID NO: 504108 - RNA, 32 nt, Human
ucgcccaggcuggcgugcaguggcgcgaucuc

SEQ ID NO: 504109 - RNA, 32 nt, Human
ucgcccaggcuggggugcaauggcgcaaccuu

SEQ ID NO: 504110 - RNA, 20 nt, Human
ucgcccaggcuggggugcag

SEQ ID NO: 504111 - RNA, 32 nt, Human
ucgcccaggcuggggugcaguggcgccaucuc

SEQ ID NO: 504112 - RNA, 32 nt, Human
ucgcccaggcuggggugcaguggcgcgauccc

SEQ ID NO: 504113 - RNA, 32 nt, Human
ucgcccaggcuggucucaaauuuguggccuca

SEQ ID NO: 504114 - RNA, 32 nt, Human
ucgcccaggcuggucucgaacuccugagcuca

SEQ ID NO: 504115 - RNA, 22 nt, Human
ucgcccaggcuguagugcaaug

SEQ ID NO: 504116 - RNA, 32 nt, Human
ucgcccaggcuguagugcaauggcgcaaucuc

SEQ ID NO: 504117 - RNA, 32 nt, Human
ucgcccaggcuguagugcagugguacagucuc

SEQ ID NO: 504118 - RNA, 23 nt, Human
ucgcccagggcuggagugcagug

SEQ ID NO: 504119 - RNA, 32 nt, Human
ucgcccagggcugggugcaguggcucacgccu

SEQ ID NO: 504120 - RNA, 32 nt, Human
ucgcccaggguggagugcaguggcgugaucuc

SEQ ID NO: 504121 - RNA, 32 nt, Human
ucgcccaggguggagugcaguggugugaucuc

SEQ ID NO: 504122 - RNA, 32 nt, Human
ucgcccagguuggagugcaguggcgcaaucuc

SEQ ID NO: 504123 - RNA, 32 nt, Human
ucgcccagguuggagugcaguggcgcgaucuc

SEQ ID NO: 504124 - RNA, 32 nt, Human
ucgcccagguuggagugcaguggcgugaucuc

SEQ ID NO: 504125 - RNA, 32 nt, Human
ucgcccagguuggagugcaguggugcaaucuc

SEQ ID NO: 504126 - RNA, 32 nt, Human
ucgcccagguuguaaugcaguggcgcaaucuc

SEQ ID NO: 504127 - RNA, 32 nt, Human
ucgcccagguuugagugcaauggcacaaucuc

SEQ ID NO: 504128 - RNA, 32 nt, Human
ucgcccauccugcagggauugcccaccgucuu

SEQ ID NO: 504129 - RNA, 22 nt, Human
ucgcccaugcuggagugcagug

SEQ ID NO: 504130 - RNA, 32 nt, Human
ucgcccaugcuggagugcaguggcgcgaucuc

SEQ ID NO: 504131 - RNA, 32 nt, Human
ucgccccaacacuguccuucccugccacuuca

SEQ ID NO: 504132 - RNA, 32 nt, Human
ucgccccaacuaagcccuuuacaggccaggac

SEQ ID NO: 504133 - RNA, 32 nt, Human
ucgccccaccguucuucucugcugcauuugga

SEQ ID NO: 504134 - RNA, 32 nt, Human
ucgccccacuacacuccagccuggucaacaga

SEQ ID NO: 504135 - RNA, 32 nt, Human
ucgccccacugcacuccagccuggcaauagac

SEQ ID NO: 504136 - RNA, 32 nt, Human
ucgccccacugcacuccagccugggcgacaga

SEQ ID NO: 504137 - RNA, 32 nt, Human
ucgccccacugcacuccagccuggugacuccg

SEQ ID NO: 504138 - RNA, 32 nt, Human
ucgccccacugcuuuucaaccugggugacaga

SEQ ID NO: 504139 - RNA, 32 nt, Human
ucgccccagacccuugaggaaggugcucccuu

SEQ ID NO: 504140 - RNA, 32 nt, Human
ucgccccagaugggcaggaggacacccgccca

SEQ ID NO: 504141 - RNA, 32 nt, Human
ucgccccagccaggcuuggcacugccuccuuu

SEQ ID NO: 504142 - RNA, 20 nt, Human
ucgccccagcugccccgguc

SEQ ID NO: 504143 - RNA, 32 nt, Human
ucgccccagggagggaggacgagggagggcca

SEQ ID NO: 504144 - RNA, 32 nt, Human
ucgccccaguuagcaggguggcugcauuccag

SEQ ID NO: 504145 - RNA, 32 nt, Human
ucgccccaucccugcgcgcccagccugccaag

SEQ ID NO: 504146 - RNA, 32 nt, Human
ucgccccaucuucuccguggaugggccaugcg

SEQ ID NO: 504147 - RNA, 32 nt, Human
ucgccccauuguacuccagccuggggaacaag

SEQ ID NO: 504148 - RNA, 32 nt, Human
ucgcccccgccccgaccuccccggcugacgcg

SEQ ID NO: 504149 - RNA, 32 nt, Human
ucgcccccgccucccccugccucagcggcugc

SEQ ID NO: 504150 - RNA, 32 nt, Human
ucgcccccuaguaguuagucucugccugguuu

SEQ ID NO: 504151 - RNA, 20 nt, Human
ucgcccccuccccucgggcc

SEQ ID NO: 504152 - RNA, 32 nt, Human
ucgcccccugcacagcacuggccuuucggaag

SEQ ID NO: 504153 - RNA, 32 nt, Human
ucgcccccugcacgacccacacaaagcccuga

SEQ ID NO: 504154 - RNA, 32 nt, Human
ucgccccgcgcuuggacauggaaggggccgcc

SEQ ID NO: 504155 - RNA, 32 nt, Human
ucgccccggcgccgggggcuguagcccugguc

SEQ ID NO: 504156 - RNA, 32 nt, Human
ucgccccuagccucagcuuuucagcccugaga

SEQ ID NO: 504157 - RNA, 23 nt, Human
ucgccccucagugcccuggggca

SEQ ID NO: 504158 - RNA, 32 nt, Human
ucgccccucuacuccuccacgccccggcccuu

SEQ ID NO: 504159 - RNA, 32 nt, Human
ucgccccucugccuucgccccugucccgggag

SEQ ID NO: 504160 - RNA, 32 nt, Human
ucgccccugccucccuugccccuaccccggcg

SEQ ID NO: 504161 - RNA, 32 nt, Human
ucgccccugccuggcacugcucaccgcccaag

SEQ ID NO: 504162 - RNA, 32 nt, Human
ucgccccuucccucucucccugccucacuccu

SEQ ID NO: 504163 - RNA, 32 nt, Human
ucgccccuucggcuuggcuccuacaaggccca

SEQ ID NO: 504164 - RNA, 19 nt, Human
ucgccccuugucucgggcc

SEQ ID NO: 504165 - RNA, 32 nt, Human
ucgcccgacagcuuuuucuccguaguaugcga

SEQ ID NO: 504166 - RNA, 32 nt, Human
ucgcccgaucaguguuuugagggggaaggugg

SEQ ID NO: 504167 - RNA, 21 nt, Human
ucgcccgcagccucugcaccu

SEQ ID NO: 504168 - RNA, 21 nt, Human
ucgcccgcgccgucucgagcc

SEQ ID NO: 504169 - RNA, 32 nt, Human
ucgcccgcuacaccacuccucuagaacucggu

SEQ ID NO: 504170 - RNA, 32 nt, Human
ucgcccgggcaggagugcaguggcucaaucuu

SEQ ID NO: 504171 - RNA, 32 nt, Human
ucgcccgggcuggaaugcaauggcacaaucuc

SEQ ID NO: 504172 - RNA, 32 nt, Human
ucgcccucauggcucaucagugcugaguuuca

SEQ ID NO: 504173 - RNA, 32 nt, Human
ucgcccuccagccccaacccccggcccggcgc

SEQ ID NO: 504174 - RNA, 32 nt, Human
ucgcccucccagagugcugggacuacaggcau

SEQ ID NO: 504175 - RNA, 32 nt, Human
ucgcccucccagagugcugggauuacaggcgu

SEQ ID NO: 504176 - RNA, 32 nt, Human
ucgcccuccuccuccccagagcgagagugggg

SEQ ID NO: 504177 - RNA, 32 nt, Human
ucgcccucucaaagugcugggauuaggcauga

SEQ ID NO: 504178 - RNA, 21 nt, Human
ucgcccugcccccuacccacc

SEQ ID NO: 504179 - RNA, 18 nt, Human
ucgcccugcgccccggcc

SEQ ID NO: 504180 - RNA, 32 nt, Human
ucgcccugcugcacuccagccugggcaacaga

SEQ ID NO: 504181 - RNA, 32 nt, Human
ucgcccugcugcacuccagccugggugacaga

SEQ ID NO: 504182 - RNA, 32 nt, Human
ucgcccugcuggcugccggcaccgcccuccug

SEQ ID NO: 504183 - RNA, 20 nt, Human
ucgcccuggcugcccugacc

SEQ ID NO: 504184 - RNA, 22 nt, Human
ucgcccuggcuggagugcaaug

SEQ ID NO: 504185 - RNA, 32 nt, Human
ucgcccuggcuggagugcaauggugugaucuc

SEQ ID NO: 504186 - RNA, 22 nt, Human
ucgcccuggcuggaguggaaug

SEQ ID NO: 504187 - RNA, 21 nt, Human
ucgcccugggcugccccgacu

SEQ ID NO: 504188 - RNA, 32 nt, Human
ucgcccuggucguugcacuccagccugucgcu

SEQ ID NO: 504189 - RNA, 32 nt, Human
ucgcccugucgccaggcuggaguguaguggca

SEQ ID NO: 504190 - RNA, 32 nt, Human
ucgcccuguggccugcuagccuggucgagaga

SEQ ID NO: 504191 - RNA, 32 nt, Human
ucgcccuucccccaccuccuugucuuuccccg

SEQ ID NO: 504192 - RNA, 32 nt, Human
ucgcccuuccuggguucauccugcugcaggug

SEQ ID NO: 504193 - RNA, 32 nt, Human
ucgcccuucuccuggaccucagggaggaauga

SEQ ID NO: 504194 - RNA, 32 nt, Human
ucgcccuugacagcugccuuguggaucuucug

SEQ ID NO: 504195 - RNA, 21 nt, Human
ucgcccuuggcccugcugccu

SEQ ID NO: 504196 - RNA, 32 nt, Human
ucgcccuugucacccaggcuguagugcggugg

SEQ ID NO: 504197 - RNA, 32 nt, Human
ucgcccuuuacaagggacuuuugaaggaggaa

SEQ ID NO: 504198 - RNA, 17 nt, Human
ucgccgagccccgggcc

SEQ ID NO: 504199 - RNA, 22 nt, Human
ucgccgaguccuucugcugccu

SEQ ID NO: 504200 - RNA, 21 nt, Human
ucgccgcagcccuuccgagcc

SEQ ID NO: 504201 - RNA, 20 nt, Human
ucgccgccaccgccucggcc

SEQ ID NO: 504202 - RNA, 32 nt, Human
ucgccgccagcgucugugccgcgucccuugcu

SEQ ID NO: 504203 - RNA, 32 nt, Human
ucgccgccaucugucaccuccacuccggcauc

SEQ ID NO: 504204 - RNA, 19 nt, Human
ucgccgcccgcccgggguc

SEQ ID NO: 504205 - RNA, 18 nt, Human
ucgccgcccgcccggguc

SEQ ID NO: 504206 - RNA, 19 nt, Human
ucgccgcccgcuccgagcc

SEQ ID NO: 504207 - RNA, 32 nt, Human
ucgccgcccuguuucugcaggcauuuugucuc

SEQ ID NO: 504208 - RNA, 32 nt, Human
ucgccgccgcagucuucgccaccaugccgccc

SEQ ID NO: 504209 - RNA, 18 nt, Human
ucgccgccgccgccgccg

SEQ ID NO: 504210 - RNA, 32 nt, Human
ucgccgccgggugggagccgggccgggcagcc

SEQ ID NO: 504211 - RNA, 32 nt, Human
ucgccgccuauacacacgcacacacgcacaca

SEQ ID NO: 504212 - RNA, 17 nt, Human
ucgccgccucccgggcu

SEQ ID NO: 504213 - RNA, 20 nt, Human
ucgccgccucgcucagagcc

SEQ ID NO: 504214 - RNA, 18 nt, Human
ucgccgcggaccugagcc

SEQ ID NO: 504215 - RNA, 19 nt, Human
ucgccgcggagcucgagcc

SEQ ID NO: 504216 - RNA, 32 nt, Human
ucgccgcggaggcuccagcgguaggugcgccc

SEQ ID NO: 504217 - RNA, 18 nt, Human
ucgccgcuccaugcagcc

SEQ ID NO: 504218 - RNA, 17 nt, Human
ucgccgcucgcaagcua

SEQ ID NO: 504219 - RNA, 20 nt, Human
ucgccgcucgccccgcgggc

SEQ ID NO: 504220 - RNA, 21 nt, Human
ucgccgcucgccgcugcaguu

SEQ ID NO: 504221 - RNA, 17 nt, Human
ucgccgcucgcugcagc

SEQ ID NO: 504222 - RNA, 32 nt, Human
ucgccgcucggggccgcagccuggugagcuca

SEQ ID NO: 504223 - RNA, 18 nt, Human
ucgccgcucugcgaggcc

SEQ ID NO: 504224 - RNA, 20 nt, Human
ucgccgcucuucuugaauca

SEQ ID NO: 504225 - RNA, 32 nt, Human
ucgccgcugcacgacgucuggccggcgcugga

SEQ ID NO: 504226 - RNA, 19 nt, Human
ucgccgcugcaguugagcu

SEQ ID NO: 504227 - RNA, 32 nt, Human
ucgccgcugccaccuccgcagcccgggccucc

SEQ ID NO: 504228 - RNA, 32 nt, Human
ucgccgcugccgccuccgcccgcggccgggac

SEQ ID NO: 504229 - RNA, 19 nt, Human
ucgccgcugccucgggcua

SEQ ID NO: 504230 - RNA, 19 nt, Human
ucgccgcugcgccucagcc

SEQ ID NO: 504231 - RNA, 19 nt, Human
ucgccgcugcguugggacc

SEQ ID NO: 504232 - RNA, 20 nt, Human
ucgccgcuggagcccggguc

SEQ ID NO: 504233 - RNA, 19 nt, Human
ucgccgcuggcuuccaguc

SEQ ID NO: 504234 - RNA, 19 nt, Human
ucgccgcugucccuuagcu

SEQ ID NO: 504235 - RNA, 32 nt, Human
ucgccgcugucgggcucguccugcugcugcug

SEQ ID NO: 504236 - RNA, 21 nt, Human
ucgccgcuuccgccuugacca

SEQ ID NO: 504237 - RNA, 32 nt, Human
ucgccggaguagcuugggaggucggggagguc

SEQ ID NO: 504238 - RNA, 32 nt, Human
ucgccggcaggacacugccuggaacgccugga

SEQ ID NO: 504239 - RNA, 20 nt, Human
ucgccggccgcgcccgggcu

SEQ ID NO: 504240 - RNA, 18 nt, Human
ucgccggcgcccgagcca

SEQ ID NO: 504241 - RNA, 32 nt, Human
ucgccggcgggaccaugaagaaguucucucgg

SEQ ID NO: 504242 - RNA, 32 nt, Human
ucgccggggauguuggcaggaugugauucaga

SEQ ID NO: 504243 - RNA, 32 nt, Human
ucgccgggggcugagcgcgcggcugggcccug

SEQ ID NO: 504244 - RNA, 32 nt, Human
ucgccgggggcugcucccugcuuaccucccuc

SEQ ID NO: 504245 - RNA, 32 nt, Human
ucgccggguccucgucccgcagccucuucucg

SEQ ID NO: 504246 - RNA, 32 nt, Human
ucgccgggugucccagugucaccaacacucgg

SEQ ID NO: 504247 - RNA, 19 nt, Human
ucgccggucccccggguca

SEQ ID NO: 504248 - RNA, 32 nt, Human
ucgccguaaagaugcagcauuggccgagugca

SEQ ID NO: 504249 - RNA, 32 nt, Human
ucgccguccagccugcagcaugagcgccccca

SEQ ID NO: 504250 - RNA, 19 nt, Human
ucgccgucuccuuugggcu

SEQ ID NO: 504251 - RNA, 20 nt, Human
ucgccgucugugaauuggac

SEQ ID NO: 504252 - RNA, 32 nt, Human
ucgccgugcuguccuccgugagcaccauccgg

SEQ ID NO: 504253 - RNA, 17 nt, Human
ucgccguggccccgguc

SEQ ID NO: 504254 - RNA, 22 nt, Human
ucgccguucgcggagcgcagcc

SEQ ID NO: 504255 - RNA, 17 nt, Human
ucgccguugcccaggcu

SEQ ID NO: 504256 - RNA, 32 nt, Human
ucgccguugcccaggcuggagugcgguggcau

SEQ ID NO: 504257 - RNA, 18 nt, Human
ucgccguuggcccggguu

SEQ ID NO: 504258 - RNA, 32 nt, Human
ucgccguuuucagucccagaucuugcucugcc

SEQ ID NO: 504259 - RNA, 32 nt, Human
  misc_feature (6)..(6): n is a, c, g, or u
ucgccnggcugaggcaggagaaucacuugaac

SEQ ID NO: 504260 - RNA, 32 nt, Human
ucgccuacauccgccucacccaguacaucgac

SEQ ID NO: 504261 - RNA, 22 nt, Human
ucgccuacgcuggagugcagug

SEQ ID NO: 504262 - RNA, 31 nt, Human
ucgccuagcacucugccuugccagagauugg

SEQ ID NO: 504263 - RNA, 23 nt, Human
ucgccuaggcugaagcacagugg

SEQ ID NO: 504264 - RNA, 32 nt, Human
ucgccuaggcugaagcacaguggugcgaucac

SEQ ID NO: 504265 - RNA, 20 nt, Human
ucgccuaggcuggagugcaa

SEQ ID NO: 504266 - RNA, 32 nt, Human
ucgccuaggcuggagugcaacagugugaucuu

SEQ ID NO: 504267 - RNA, 32 nt, Human
ucgccuaggcuggagugcaaugaugcgauccu

SEQ ID NO: 504268 - RNA, 21 nt, Human
ucgccuaggcuggagugcagu

SEQ ID NO: 504269 - RNA, 22 nt, Human
ucgccuaggcuggagugcagug

SEQ ID NO: 504270 - RNA, 32 nt, Human
ucgccuaggcuggagugcaguggcgugaucuu

SEQ ID NO: 504271 - RNA, 32 nt, Human
ucgccuaggcuggagugcaguggugcagucac

SEQ ID NO: 504272 - RNA, 32 nt, Human
ucgccuagggaaauagaucuauucugcuggga

SEQ ID NO: 504273 - RNA, 32 nt, Human
ucgccuagggucagcggugacaucccaaaggg

SEQ ID NO: 504274 - RNA, 32 nt, Human
ucgccuauucucacaccucuucucggucccau

SEQ ID NO: 504275 - RNA, 32 nt, Human
ucgccucacugaggccuccccaguccaaagcu

SEQ ID NO: 504276 - RNA, 32 nt, Human
ucgccucacugcaaccuccgccucccagguuc

SEQ ID NO: 504277 - RNA, 32 nt, Human
ucgccucacugcaaccuucaccuaccgaguuc

SEQ ID NO: 504278 - RNA, 32 nt, Human
ucgccucacugcaacuugcgccucccggguuc

SEQ ID NO: 504279 - RNA, 32 nt, Human
ucgccucacugcagccuccccaguccaaagcu

SEQ ID NO: 504280 - RNA, 32 nt, Human
ucgccucacugcagccucccgaguccaaagcu

SEQ ID NO: 504281 - RNA, 32 nt, Human
ucgccucagaauagagcagggccaggcuuugg

SEQ ID NO: 504282 - RNA, 32 nt, Human
ucgccucaucugaggcccagauaauggugaga

SEQ ID NO: 504283 - RNA, 32 nt, Human
ucgccuccaguggaggcugagcugacccuggg

SEQ ID NO: 504284 - RNA, 32 nt, Human
ucgccuccccuccuguagcccacacccuucuu

SEQ ID NO: 504285 - RNA, 32 nt, Human
ucgccuccccuucauccaccucucucucaccg

SEQ ID NO: 504286 - RNA, 21 nt, Human
ucgccucccggccgccgccgu

SEQ ID NO: 504287 - RNA, 21 nt, Human
ucgccucccuccaggacucca

SEQ ID NO: 504288 - RNA, 32 nt, Human
ucgccuccgagaggaggaagggacagaccaaa

SEQ ID NO: 504289 - RNA, 32 nt, Human
ucgccuccucucacuuucaucucuucccucca

SEQ ID NO: 504290 - RNA, 32 nt, Human
ucgccuccuuucucucccaggugcuggaccag

SEQ ID NO: 504291 - RNA, 32 nt, Human
ucgccucgacuccaaaugguugaaaacagaua

SEQ ID NO: 504292 - RNA, 32 nt, Human
ucgccucgccuccccucaccuugccucaccuc

SEQ ID NO: 504293 - RNA, 32 nt, Human
ucgccucgccucgagucucuggcuccgaccuc

SEQ ID NO: 504294 - RNA, 22 nt, Human
ucgccucgccucgccucgaguc

SEQ ID NO: 504295 - RNA, 32 nt, Human
ucgccucgcgccgguaguuuugggccuacacc

SEQ ID NO: 504296 - RNA, 32 nt, Human
ucgccucgcucauuaccagaaggagguuuuac

SEQ ID NO: 504297 - RNA, 32 nt, Human
ucgccucucaaggagagcuuugauccucagug

SEQ ID NO: 504298 - RNA, 32 nt, Human
ucgccucucuagaccagaucuagccccacccu

SEQ ID NO: 504299 - RNA, 18 nt, Human
ucgccucugcccuggguc

SEQ ID NO: 504300 - RNA, 32 nt, Human
ucgccugaacccaggaggcggagcuugcagug

SEQ ID NO: 504301 - RNA, 32 nt, Human
ucgccugaacccaggaggcggagguugcaggg

SEQ ID NO: 504302 - RNA, 32 nt, Human
ucgccugaagccagccucucugccaagucacu

SEQ ID NO: 504303 - RNA, 32 nt, Human
ucgccugacaguuaaagcagaggacuacacuu

SEQ ID NO: 504304 - RNA, 32 nt, Human
ucgccugaccaggaguucgaggcugcagugag

SEQ ID NO: 504305 - RNA, 32 nt, Human
ucgccugagcccaggagguggagguugcagug

SEQ ID NO: 504306 - RNA, 32 nt, Human
ucgccugcagccgccgccgccgcggggcgggc

SEQ ID NO: 504307 - RNA, 32 nt, Human
ucgccugccucggggccaguacauaccggccu

SEQ ID NO: 504308 - RNA, 32 nt, Human
ucgccugccugugucucuccccaaaccccuuu

SEQ ID NO: 504309 - RNA, 24 nt, Human
ucgccugcucgcuuccccuuccca

SEQ ID NO: 504310 - RNA, 32 nt, Human
ucgccugcucgcuuccccuucccaggcccgug

SEQ ID NO: 504311 - RNA, 32 nt, Human
ucgccuggaagucugggggccauuccaugugg

SEQ ID NO: 504312 - RNA, 32 nt, Human
ucgccuggagugaaccagguugaaacugagaa

SEQ ID NO: 504313 - RNA, 18 nt, Human
ucgccuggcccccgaguc

SEQ ID NO: 504314 - RNA, 21 nt, Human
ucgccuggcuggagugcagug

SEQ ID NO: 504315 - RNA, 32 nt, Human
ucgccugggaagagaaaguguccaguagggcg

SEQ ID NO: 504316 - RNA, 32 nt, Human
ucgccugggagcugccgccagggccaggaggg

SEQ ID NO: 504317 - RNA, 32 nt, Human
ucgccugggaggugaggugugugugacccacu

SEQ ID NO: 504318 - RNA, 32 nt, Human
ucgccugggcuggaguacaguggugcgaucuc

SEQ ID NO: 504319 - RNA, 32 nt, Human
ucgccugucaacggcuagagugcaguagcgug

SEQ ID NO: 504320 - RNA, 32 nt, Human
ucgccugucuggcuggcagggaaggaaaauag

SEQ ID NO: 504321 - RNA, 32 nt, Human
ucgccuguuggggcuuaagaccagguugauaa

SEQ ID NO: 504322 - RNA, 32 nt, Human
ucgccuguuggugcuggcccuuggggagcugg

SEQ ID NO: 504323 - RNA, 32 nt, Human
ucgccuguuugcgguuuagaccccaaagauuc

SEQ ID NO: 504324 - RNA, 32 nt, Human
ucgccuucccucucuucugucccggccaggau

SEQ ID NO: 504325 - RNA, 32 nt, Human
ucgccuuccucuuuuuaagcuguuuuaugaaa

SEQ ID NO: 504326 - RNA, 32 nt, Human
ucgccuucuccccuccauccagccuggcgucc

SEQ ID NO: 504327 - RNA, 22 nt, Human
ucgccuucuccgcccccgggcc

SEQ ID NO: 504328 - RNA, 32 nt, Human
ucgccuucugcucccagcuuggagccccgcgc

SEQ ID NO: 504329 - RNA, 32 nt, Human
ucgccuucugggcucccagccugccgggucgc

SEQ ID NO: 504330 - RNA, 32 nt, Human
ucgccuugacuccaaaugguugaaaacagaua

SEQ ID NO: 504331 - RNA, 32 nt, Human
ucgccuugcaaccgacaggccauucccacccc

SEQ ID NO: 504332 - RNA, 32 nt, Human
ucgccuuggaaccugcaggaaauggaacagca

SEQ ID NO: 504333 - RNA, 32 nt, Human
ucgccuuuagaacgugcagccucuccaugucu

SEQ ID NO: 504334 - RNA, 32 nt, Human
ucgccuuucacaguccccuccugccugcuccu

SEQ ID NO: 504335 - RNA, 32 nt, Human
ucgccuuugcugaaaauacaaaauuagccagg

SEQ ID NO: 504336 - RNA, 32 nt, Human
ucgccuuuggcagcuccuggagagcuguggac

SEQ ID NO: 504337 - RNA, 32 nt, Human
ucgccuuugucuuucagugagcucuuucaccu

SEQ ID NO: 504338 - RNA, 32 nt, Human
ucgcgacacugcacuccagccugggcaacaga

SEQ ID NO: 504339 - RNA, 32 nt, Human
ucgcgacacugcacuccagccugggugacggu

SEQ ID NO: 504340 - RNA, 32 nt, Human
ucgcgacacugcgcuccagccugggcaacaag

SEQ ID NO: 504341 - RNA, 32 nt, Human
ucgcgaccagccuacccaacauggugaaaccc

SEQ ID NO: 504342 - RNA, 32 nt, Human
ucgcgaccagccugaccaacauggaaaaaccc

SEQ ID NO: 504343 - RNA, 32 nt, Human
ucgcgaccauccuggcuaacagugaaacccug

SEQ ID NO: 504344 - RNA, 25 nt, Human
ucgcgagcagcugggacuacaggug

SEQ ID NO: 504345 - RNA, 32 nt, Human
ucgcgaggguauacgcaugcacuaacggcugu

SEQ ID NO: 504346 - RNA, 32 nt, Human
ucgcgagguugaggcaggagaauugcuugaac

SEQ ID NO: 504347 - RNA, 23 nt, Human
ucgcgaguagcuaggacuacagg

SEQ ID NO: 504348 - RNA, 32 nt, Human
ucgcgaguucacgccagucuccugccucagcc

SEQ ID NO: 504349 - RNA, 30 nt, Human
ucgcgaugguccaucagcucucugccaucc

SEQ ID NO: 504350 - RNA, 32 nt, Human
ucgcgcaauugcgcuccagccugggcgacaag

SEQ ID NO: 504351 - RNA, 32 nt, Human
ucgcgcacacacugguucuccucuuuugggug

SEQ ID NO: 504352 - RNA, 32 nt, Human
ucgcgcacuggagcuguggccucggcagcugu

SEQ ID NO: 504353 - RNA, 32 nt, Human
ucgcgcagcugcacuccagccugggcaacaga

SEQ ID NO: 504354 - RNA, 18 nt, Human
ucgcgcaucccucgagcc

SEQ ID NO: 504355 - RNA, 32 nt, Human
ucgcgccaaugcacuccagccugggcgacaga

SEQ ID NO: 504356 - RNA, 32 nt, Human
ucgcgccaccacacuccagccugagcgacaga

SEQ ID NO: 504357 - RNA, 32 nt, Human
ucgcgccacccacuccagcccgggugacagag

SEQ ID NO: 504358 - RNA, 32 nt, Human
ucgcgccaccgcacuccagccucgccgacaaa

SEQ ID NO: 504359 - RNA, 32 nt, Human
ucgcgccaccgcauuccagccugggcgacaga

SEQ ID NO: 504360 - RNA, 32 nt, Human
ucgcgccaccgcccuccagccugggcgacaga

SEQ ID NO: 504361 - RNA, 32 nt, Human
ucgcgccacggcacuccagccugggagacaga

SEQ ID NO: 504362 - RNA, 32 nt, Human
ucgcgccacuacacuccagccugagcaacaga

SEQ ID NO: 504363 - RNA, 32 nt, Human
ucgcgccacuauacuccagccugggcaacaga

SEQ ID NO: 504364 - RNA, 32 nt, Human
ucgcgccacugcaacccagccugggugacaga

SEQ ID NO: 504365 - RNA, 32 nt, Human
ucgcgccacugcacagccagggcgacggugca

SEQ ID NO: 504366 - RNA, 32 nt, Human
ucgcgccacugcacucaagccugggcaacacc

SEQ ID NO: 504367 - RNA, 32 nt, Human
ucgcgccacugcacuccaaccugggugacaga

SEQ ID NO: 504368 - RNA, 32 nt, Human
ucgcgccacugcacuccacccuggguaacgga

SEQ ID NO: 504369 - RNA, 32 nt, Human
ucgcgccacugcacuccagcagucugggcgac

SEQ ID NO: 504370 - RNA, 32 nt, Human
ucgcgccacugcacuccagcccgggugacaga

SEQ ID NO: 504371 - RNA, 32 nt, Human
ucgcgccacugcacuccagccuagacgacaga

SEQ ID NO: 504372 - RNA, 32 nt, Human
ucgcgccacugcacuccagccuaggggacagu

SEQ ID NO: 504373 - RNA, 32 nt, Human
ucgcgccacugcacuccagccuaggugacaga

SEQ ID NO: 504374 - RNA, 32 nt, Human
ucgcgccacugcacuccagccucagcaauaga

SEQ ID NO: 504375 - RNA, 32 nt, Human
ucgcgccacugcacuccagccucggcaacaga

SEQ ID NO: 504376 - RNA, 32 nt, Human
ucgcgccacugcacuccagccucggugacaga

SEQ ID NO: 504377 - RNA, 32 nt, Human
ucgcgccacugcacuccagccuggacgacaga

SEQ ID NO: 504378 - RNA, 32 nt, Human
ucgcgccacugcacuccagccuggcaacagag

SEQ ID NO: 504379 - RNA, 32 nt, Human
ucgcgccacugcacuccagccuggcgacaaag

SEQ ID NO: 504380 - RNA, 32 nt, Human
ucgcgccacugcacuccagccuggcgacagag

SEQ ID NO: 504381 - RNA, 32 nt, Human
ucgcgccacugcacuccagccugggagaaaga

SEQ ID NO: 504382 - RNA, 32 nt, Human
ucgcgccacugcacuccagccugggcaacaag

SEQ ID NO: 504383 - RNA, 32 nt, Human
ucgcgccacugcacuccagccugggcaacaga

SEQ ID NO: 504384 - RNA, 32 nt, Human
ucgcgccacugcacuccagccugggcaacagg

SEQ ID NO: 504385 - RNA, 32 nt, Human
ucgcgccacugcacuccagccugggcagcaag

SEQ ID NO: 504386 - RNA, 32 nt, Human
ucgcgccacugcacuccagccugggcgacaca

SEQ ID NO: 504387 - RNA, 32 nt, Human
ucgcgccacugcacuccagccugggcgacaga

SEQ ID NO: 504388 - RNA, 32 nt, Human
ucgcgccacugcacuccagccugggcgacagc

SEQ ID NO: 504389 - RNA, 32 nt, Human
ucgcgccacugcacuccagccugggcgacagg

SEQ ID NO: 504390 - RNA, 32 nt, Human
ucgcgccacugcacuccagccugggcgacgga

SEQ ID NO: 504391 - RNA, 32 nt, Human
ucgcgccacugcacuccagccugggcgagaga

SEQ ID NO: 504392 - RNA, 32 nt, Human
ucgcgccacugcacuccagccugggcgauaga

SEQ ID NO: 504393 - RNA, 32 nt, Human
ucgcgccacugcacuccagccuggguaacaga

SEQ ID NO: 504394 - RNA, 32 nt, Human
ucgcgccacugcacuccagccugggugacaca

SEQ ID NO: 504395 - RNA, 32 nt, Human
ucgcgccacugcacuccagccugggugacaga

SEQ ID NO: 504396 - RNA, 32 nt, Human
ucgcgccacugcacuccagccugggugauaga

SEQ ID NO: 504397 - RNA, 32 nt, Human
ucgcgccacugcacuccagccuggugacagag

SEQ ID NO: 504398 - RNA, 32 nt, Human
ucgcgccacugcacuccagcuugggcaacaga

SEQ ID NO: 504399 - RNA, 32 nt, Human
ucgcgccacugcacuccaggccugggugacag

SEQ ID NO: 504400 - RNA, 32 nt, Human
ucgcgccacugcacuccaggcugggcaacgga

SEQ ID NO: 504401 - RNA, 32 nt, Human
ucgcgccacugcacuccaggcugggcgacaga

SEQ ID NO: 504402 - RNA, 32 nt, Human
ucgcgccacugcacuccagucugggcaacaga

SEQ ID NO: 504403 - RNA, 32 nt, Human
ucgcgccacugcacuccaguuugggcaacaga

SEQ ID NO: 504404 - RNA, 32 nt, Human
ucgcgccacugcacuccggccugaugacagag

SEQ ID NO: 504405 - RNA, 32 nt, Human
ucgcgccacugcacuccugccugggacacaau

SEQ ID NO: 504406 - RNA, 32 nt, Human
ucgcgccacugcacuccugccugggcaacuga

SEQ ID NO: 504407 - RNA, 32 nt, Human
ucgcgccacugcacucuagccggagugacaga

SEQ ID NO: 504408 - RNA, 32 nt, Human
ucgcgccacugcacucuagccugagugacaga

SEQ ID NO: 504409 - RNA, 32 nt, Human
ucgcgccacugcacucuagccugggccauaga

SEQ ID NO: 504410 - RNA, 32 nt, Human
ucgcgccacugcacucuagccugggugacaga

SEQ ID NO: 504411 - RNA, 32 nt, Human
ucgcgccacugcacuucagccuggacaacaga

SEQ ID NO: 504412 - RNA, 32 nt, Human
ucgcgccacugcacuucagccugggugacaga

SEQ ID NO: 504413 - RNA, 32 nt, Human
ucgcgccacugcaguccagccugggcaacaag

SEQ ID NO: 504414 - RNA, 32 nt, Human
ucgcgccacugcauuccagccuggacgacaga

SEQ ID NO: 504415 - RNA, 32 nt, Human
ucgcgccacugcccuccagccugggcgacaga

SEQ ID NO: 504416 - RNA, 32 nt, Human
ucgcgccacugcgcuccagccuggacaacaca

SEQ ID NO: 504417 - RNA, 32 nt, Human
ucgcgccacugcgcuucagccugggagacaga

SEQ ID NO: 504418 - RNA, 32 nt, Human
ucgcgccacugcucuccagccuggguggcaga

SEQ ID NO: 504419 - RNA, 32 nt, Human
ucgcgccacuggacuccagccuggacaacaga

SEQ ID NO: 504420 - RNA, 32 nt, Human
ucgcgccacugggcuccagccugggcgacaga

SEQ ID NO: 504421 - RNA, 32 nt, Human
ucgcgccacuguacuccagccuggacaacagc

SEQ ID NO: 504422 - RNA, 32 nt, Human
ucgcgccacuguacuccagccugggcaacaga

SEQ ID NO: 504423 - RNA, 32 nt, Human
ucgcgccacuguacuccagccugggugacaga

SEQ ID NO: 504424 - RNA, 32 nt, Human
ucgcgccacuguacuccauccugggugaugga

SEQ ID NO: 504425 - RNA, 32 nt, Human
ucgcgccacugugcuccagccugggcaacaga

SEQ ID NO: 504426 - RNA, 32 nt, Human
ucgcgccagcaaccccagcucuccccagagag

SEQ ID NO: 504427 - RNA, 32 nt, Human
ucgcgccaguacacuccagccuggguaacaga

SEQ ID NO: 504428 - RNA, 32 nt, Human
ucgcgccagugcacuccagccugggcaagaag

SEQ ID NO: 504429 - RNA, 32 nt, Human
ucgcgccauagcacuccagccuuagccugggc

SEQ ID NO: 504430 - RNA, 32 nt, Human
ucgcgccaucacacuccagccuaggcgacaga

SEQ ID NO: 504431 - RNA, 32 nt, Human
ucgcgccaucgcacuccagccugggcaacaag

SEQ ID NO: 504432 - RNA, 32 nt, Human
ucgcgccaucgcacuccagccugggugacaag

SEQ ID NO: 504433 - RNA, 32 nt, Human
ucgcgccauggcacucacuccagccugggcaa

SEQ ID NO: 504434 - RNA, 32 nt, Human
ucgcgccauuacacuucagccugggcaacaag

SEQ ID NO: 504435 - RNA, 32 nt, Human
ucgcgccauucuacuccagccugggccacaag

SEQ ID NO: 504436 - RNA, 32 nt, Human
ucgcgccauugcacuccaaccuaggugacaaa

SEQ ID NO: 504437 - RNA, 32 nt, Human
ucgcgccauugcacuccaaccuggacgacaga

SEQ ID NO: 504438 - RNA, 32 nt, Human
ucgcgccauugcacuccagccuggacaacaag

SEQ ID NO: 504439 - RNA, 32 nt, Human
ucgcgccauugcacuccagccuggccuauaag

SEQ ID NO: 504440 - RNA, 32 nt, Human
ucgcgccauugcacuccagccuggcugacaga

SEQ ID NO: 504441 - RNA, 32 nt, Human
ucgcgccauugcacuccagccugggcaacaac

SEQ ID NO: 504442 - RNA, 32 nt, Human
ucgcgccauugcacuccagccugggcaacaag

SEQ ID NO: 504443 - RNA, 32 nt, Human
ucgcgccauugcacuccagccugggcaacgaa

SEQ ID NO: 504444 - RNA, 32 nt, Human
ucgcgccauugcacuccagccugggcaacucc

SEQ ID NO: 504445 - RNA, 32 nt, Human
ucgcgccauugcacuccagccugggcgacaag

SEQ ID NO: 504446 - RNA, 32 nt, Human
ucgcgccauugcacuccagccugggcgacaga

SEQ ID NO: 504447 - RNA, 32 nt, Human
ucgcgccauugcacuccagccugggcggcaga

SEQ ID NO: 504448 - RNA, 32 nt, Human
ucgcgccauugcacuccagccugggggacaag

SEQ ID NO: 504449 - RNA, 32 nt, Human
ucgcgccauugcacuccagccuggguaacaag

SEQ ID NO: 504450 - RNA, 32 nt, Human
ucgcgccauugcacuccagccugggugacaga

SEQ ID NO: 504451 - RNA, 32 nt, Human
ucgcgccauugcacuccagccugggugacgag

SEQ ID NO: 504452 - RNA, 32 nt, Human
ucgcgccauugcacuccagccuuggaacaaga

SEQ ID NO: 504453 - RNA, 32 nt, Human
ucgcgccauugcacuccauccuggacaacagg

SEQ ID NO: 504454 - RNA, 32 nt, Human
ucgcgccauugcacucccgccugggcgacucc

SEQ ID NO: 504455 - RNA, 32 nt, Human
ucgcgccauugcacuccggccuggggacaaga

SEQ ID NO: 504456 - RNA, 32 nt, Human
ucgcgccauugcacucuagccuaggugacaga

SEQ ID NO: 504457 - RNA, 32 nt, Human
ucgcgccauugcacucuagccugggcaacaag

SEQ ID NO: 504458 - RNA, 32 nt, Human
ucgcgccauugcauuccaaccugggggacaac

SEQ ID NO: 504459 - RNA, 32 nt, Human
ucgcgccauuguacuccagccugggcgaugag

SEQ ID NO: 504460 - RNA, 32 nt, Human
ucgcgccccagaggccucauggagucccgccu

SEQ ID NO: 504461 - RNA, 21 nt, Human
ucgcgcccccuauccuggcca

SEQ ID NO: 504462 - RNA, 32 nt, Human
ucgcgccccugcacuccagccugggugacaga

SEQ ID NO: 504463 - RNA, 23 nt, Human
ucgcgcccgcgcggaucccguca

SEQ ID NO: 504464 - RNA, 18 nt, Human
ucgcgcccgcucugggcc

SEQ ID NO: 504465 - RNA, 32 nt, Human
ucgcgccgcugcacuccagccugggccacaca

SEQ ID NO: 504466 - RNA, 32 nt, Human
ucgcgccgcugcacuccagccugggcgacaga

SEQ ID NO: 504467 - RNA, 32 nt, Human
ucgcgccgcugcacuccagccugggcggcaga

SEQ ID NO: 504468 - RNA, 32 nt, Human
ucgcgccgcugcacuccagccugggugacaga

SEQ ID NO: 504469 - RNA, 32 nt, Human
ucgcgccgcugcauuccagccugggugacaga

SEQ ID NO: 504470 - RNA, 32 nt, Human
ucgcgccggcccucccccuccccggucuccgg

SEQ ID NO: 504471 - RNA, 32 nt, Human
ucgcgccguugcacuccagccugggcaacaag

SEQ ID NO: 504472 - RNA, 20 nt, Human
ucgcgccucccgucccgucg

SEQ ID NO: 504473 - RNA, 32 nt, Human
ucgcgccucugccuucucaaaccccuccacca

SEQ ID NO: 504474 - RNA, 32 nt, Human
ucgcgccucugccuucucaucccugcgcacca

SEQ ID NO: 504475 - RNA, 32 nt, Human
ucgcgccugcagcucauauggaagucuuugcc

SEQ ID NO: 504476 - RNA, 24 nt, Human
ucgcgccuguaaucccagcacuuu

SEQ ID NO: 504477 - RNA, 32 nt, Human
ucgcgccuguaaucccagcacuuugggaggcc

SEQ ID NO: 504478 - RNA, 32 nt, Human
ucgcgccuuugcacuccagccuggaagacaaa

SEQ ID NO: 504479 - RNA, 32 nt, Human
ucgcgcggaggcggaggcuugggugcguucaa

SEQ ID NO: 504480 - RNA, 32 nt, Human
ucgcgcggcacagaagaggaccagccuggacg

SEQ ID NO: 504481 - RNA, 32 nt, Human
ucgcgcggcgccgccuccugggcucaguuacc

SEQ ID NO: 504482 - RNA, 18 nt, Human
ucgcgcgggcaucgagga

SEQ ID NO: 504483 - RNA, 32 nt, Human
ucgcgcuacugcacuccagccugggcgacaga

SEQ ID NO: 504484 - RNA, 32 nt, Human
ucgcgcuacugcacuccagccugggugacagu

SEQ ID NO: 504485 - RNA, 32 nt, Human
ucgcgcuacugcauuccagccugggcgccgag

SEQ ID NO: 504486 - RNA, 32 nt, Human
ucgcgcuauugcacuccagccugggugacaga

SEQ ID NO: 504487 - RNA, 32 nt, Human
ucgcgcuccuccaggcugggccuguggccgcg

SEQ ID NO: 504488 - RNA, 32 nt, Human
ucgcgcucucggcuucugcuccggggcuucuu

SEQ ID NO: 504489 - RNA, 32 nt, Human
ucgcgcucugaccagcccgcagagccagcccc

SEQ ID NO: 504490 - RNA, 32 nt, Human
ucgcgcugcgcgccccggccuccagggacucc

SEQ ID NO: 504491 - RNA, 32 nt, Human
ucgcgcugcugcacuccagccugggugacaga

SEQ ID NO: 504492 - RNA, 32 nt, Human
ucgcgcugcugcaggccaugguggaggaggug

SEQ ID NO: 504493 - RNA, 32 nt, Human
ucgcgcugcugcugcccguguacgcgcugggc

SEQ ID NO: 504494 - RNA, 32 nt, Human
ucgcgcuggguuuuauacaagacacugacugc

SEQ ID NO: 504495 - RNA, 32 nt, Human
ucgcgcuucucagcggagugacccagggacgg

SEQ ID NO: 504496 - RNA, 32 nt, Human
ucgcgcuugugaucccagcacuuugggagacu

SEQ ID NO: 504497 - RNA, 32 nt, Human
ucgcgcuuguugcccaggcuggaaugcaaugg

SEQ ID NO: 504498 - RNA, 32 nt, Human
ucgcggacucuccccgcgaugaugccgaugau

SEQ ID NO: 504499 - RNA, 32 nt, Human
ucgcggcagggugagaggucggguggccaucu

SEQ ID NO: 504500 - RNA, 32 nt, Human
ucgcggcauugcacuucagccugggcgauaga

SEQ ID NO: 504501 - RNA, 17 nt, Human
ucgcggccgcccgagcc

SEQ ID NO: 504502 - RNA, 32 nt, Human
ucgcggccgggccggccugggcugcaaucaau

SEQ ID NO: 504503 - RNA, 32 nt, Human
ucgcggccugccucugccaagagaccagcauc

SEQ ID NO: 504504 - RNA, 32 nt, Human
ucgcggcgcugcacucuagccugggugacaga

SEQ ID NO: 504505 - RNA, 32 nt, Human
ucgcggcggaggcagaggaagagggagcggga

SEQ ID NO: 504506 - RNA, 18 nt, Human
ucgcggcggccccgggcu

SEQ ID NO: 504507 - RNA, 32 nt, Human
ucgcggcucaccgcaaccuccgccuccugggu

SEQ ID NO: 504508 - RNA, 32 nt, Human
ucgcggcucacugcaaccuccaccucccaggu

SEQ ID NO: 504509 - RNA, 32 nt, Human
ucgcggcucacugcaaccuccaccucccgggc

SEQ ID NO: 504510 - RNA, 32 nt, Human
ucgcggcucacugcaaccuggaacuccugggc

SEQ ID NO: 504511 - RNA, 32 nt, Human
ucgcggcucacugcagccuccauccucugggu

SEQ ID NO: 504512 - RNA, 32 nt, Human
ucgcgggaggcugccgccucgggacaccccac

SEQ ID NO: 504513 - RNA, 32 nt, Human
ucgcgggccuggagacccagagcgagacggcc

SEQ ID NO: 504514 - RNA, 32 nt, Human
ucgcgggcgggaggggaggaggcccgagagag

SEQ ID NO: 504515 - RNA, 32 nt, Human
ucgcggggaccaacgcccugagcucuugugcc

SEQ ID NO: 504516 - RNA, 32 nt, Human
ucgcggggcagagggucccccuuugccccucc

SEQ ID NO: 504517 - RNA, 32 nt, Human
ucgcggggcuaggaugggaugucguggcugcc

SEQ ID NO: 504518 - RNA, 32 nt, Human
ucgcgggugugagacaaggaagagugaucauu

SEQ ID NO: 504519 - RNA, 32 nt, Human
ucgcggugcccgcuauuucuaccucuugucca

SEQ ID NO: 504520 - RNA, 32 nt, Human
ucgcgguggaugucugucauguagaagugagg

SEQ ID NO: 504521 - RNA, 32 nt, Human
ucgcguaccacacuccagccugggugacagag

SEQ ID NO: 504522 - RNA, 32 nt, Human
ucgcgucacugcacuccagccugagugacaga

SEQ ID NO: 504523 - RNA, 32 nt, Human
ucgcgucacugcacuccagccuggacaacaga

SEQ ID NO: 504524 - RNA, 32 nt, Human
ucgcgucacugcacuccagccugggagacaga

SEQ ID NO: 504525 - RNA, 32 nt, Human
ucgcgucacugcacuccagccugggcgacaga

SEQ ID NO: 504526 - RNA, 32 nt, Human
ucgcgucacugcacuccagcgugggcgacaga

SEQ ID NO: 504527 - RNA, 32 nt, Human
ucgcgucacugcacuccagucuagcaacagag

SEQ ID NO: 504528 - RNA, 32 nt, Human
ucgcgucaguacacuccagccugggcaacaau

SEQ ID NO: 504529 - RNA, 32 nt, Human
ucgcgucauugcacuccagccugggcaacaag

SEQ ID NO: 504530 - RNA, 32 nt, Human
ucgcguccccugcuugaguuuugcacuuggaa

SEQ ID NO: 504531 - RNA, 32 nt, Human
ucgcgucgcuggacuccagcccgggcgacaga

SEQ ID NO: 504532 - RNA, 32 nt, Human
ucgcgugaacccaggaggcggaggcugcagug

SEQ ID NO: 504533 - RNA, 32 nt, Human
ucgcgugaacccaggaggcggcgguugcagug

SEQ ID NO: 504534 - RNA, 32 nt, Human
ucgcgugacucugcaggcuguuucuguauuau

SEQ ID NO: 504535 - RNA, 32 nt, Human
ucgcgugagaacuucaugguuccaaugucaga

SEQ ID NO: 504536 - RNA, 32 nt, Human
ucgcgugagcccaggaguuccagaccaggcug

SEQ ID NO: 504537 - RNA, 32 nt, Human
ucgcgugcuggugaggguggucgcauguccau

SEQ ID NO: 504538 - RNA, 32 nt, Human
ucgcgugucccuagggugugggagacuccgcc

SEQ ID NO: 504539 - RNA, 29 nt, Human
ucgcguuggcugcugcgaucggccggcgg

SEQ ID NO: 504540 - RNA, 32 nt, Human
ucgcguuucuucuccccuucgcuuaaauaugu

SEQ ID NO: 504541 - RNA, 32 nt, Human
ucgcguuuucaagcgugucuguucugcaggua

SEQ ID NO: 504542 - RNA, 32 nt, Human
ucgcuaaccagauccaggcagccuucugggac

SEQ ID NO: 504543 - RNA, 32 nt, Human
ucgcuaagaggcccugaucccagcucauucag

SEQ ID NO: 504544 - RNA, 32 nt, Human
ucgcuaaguuccacucuccauccucugccgcg

SEQ ID NO: 504545 - RNA, 32 nt, Human
ucgcuaccccuuggcccuucgcucuugcugcc

SEQ ID NO: 504546 - RNA, 25 nt, Human
ucgcuacucuguguccucugcuccu

SEQ ID NO: 504547 - RNA, 32 nt, Human
ucgcuagaccucaguagcaccucccagucaua

SEQ ID NO: 504548 - RNA, 32 nt, Human
ucgcuagaggaaugugcaaggacagaagggaa

SEQ ID NO: 504549 - RNA, 20 nt, Human
ucgcuaggcuuguuggguca

SEQ ID NO: 504550 - RNA, 22 nt, Human
ucgcuaugugccucugccaucu

SEQ ID NO: 504551 - RNA, 32 nt, Human
ucgcuauugcggcauucucccucggcuccgga

SEQ ID NO: 504552 - RNA, 32 nt, Human
ucgcucacccaccccucccucucuuccaagga

SEQ ID NO: 504553 - RNA, 32 nt, Human
ucgcucacccgcucccgaggaagggcaguggg

SEQ ID NO: 504554 - RNA, 32 nt, Human
ucgcucacgccuguaaucccagcacuuuggga

SEQ ID NO: 504555 - RNA, 32 nt, Human
ucgcucacugcaaccuccaccucccagguuca

SEQ ID NO: 504556 - RNA, 32 nt, Human
ucgcucacugcaaccuccgccucccggguuca

SEQ ID NO: 504557 - RNA, 32 nt, Human
ucgcucacuucaaccucugccuucuggguucg

SEQ ID NO: 504558 - RNA, 32 nt, Human
ucgcucagccuggagugcagugagcugagauu

SEQ ID NO: 504559 - RNA, 24 nt, Human
ucgcucagcucuugcucccugcca

SEQ ID NO: 504560 - RNA, 32 nt, Human
ucgcucaggagcagccauuaaaaugucgcccg

SEQ ID NO: 504561 - RNA, 32 nt, Human
ucgcucaggcuggagagcgguggugcagucag

SEQ ID NO: 504562 - RNA, 21 nt, Human
ucgcucaggcuggagugcaau

SEQ ID NO: 504563 - RNA, 22 nt, Human
ucgcucaggcuggagugcaaug

SEQ ID NO: 504564 - RNA, 32 nt, Human
ucgcucaggcuggagugcaaugguggggucuc

SEQ ID NO: 504565 - RNA, 22 nt, Human
ucgcucaggcuggagugcagug

SEQ ID NO: 504566 - RNA, 32 nt, Human
ucgcucaggcuggagugcagugaugcaaucuu

SEQ ID NO: 504567 - RNA, 32 nt, Human
ucgcucaggcuggagugcaguggcgcgaucau

SEQ ID NO: 504568 - RNA, 32 nt, Human
ucgcucaggcuggagugcaguggcgcgauuuc

SEQ ID NO: 504569 - RNA, 32 nt, Human
ucgcucaggcuggagugcaguggcgugaucuc

SEQ ID NO: 504570 - RNA, 32 nt, Human
ucgcucaggcuggagugccauggcgcgaucuu

SEQ ID NO: 504571 - RNA, 32 nt, Human
ucgcucaggcuugaucccacugccuuucccuc

SEQ ID NO: 504572 - RNA, 32 nt, Human
ucgcucaugccuguggucccagcacuuuggga

SEQ ID NO: 504573 - RNA, 19 nt, Human
ucgcuccacaggcgagcag

SEQ ID NO: 504574 - RNA, 32 nt, Human
ucgcuccacugcacuccagcccaggugacagu

SEQ ID NO: 504575 - RNA, 32 nt, Human
ucgcuccacugcacuccagccugggugacaga

SEQ ID NO: 504576 - RNA, 32 nt, Human
ucgcuccagccgcggcucuacagcagcgggcg

SEQ ID NO: 504577 - RNA, 32 nt, Human
ucgcuccagcuugguggugaaugcugaggaga

SEQ ID NO: 504578 - RNA, 32 nt, Human
ucgcuccauugcacuccagccugggcaacaag

SEQ ID NO: 504579 - RNA, 32 nt, Human
ucgcuccauugcacuccagccugggugacagu

SEQ ID NO: 504580 - RNA, 32 nt, Human
ucgcucccacugcacuccagccugggcgacag

SEQ ID NO: 504581 - RNA, 32 nt, Human
ucgcuccccgucccuccuccccucucuccgcc

SEQ ID NO: 504582 - RNA, 32 nt, Human
ucgcucccucaagcccucaaguagguguugga

SEQ ID NO: 504583 - RNA, 32 nt, Human
ucgcucccuccccgcucgcuuccucccccacc

SEQ ID NO: 504584 - RNA, 32 nt, Human
ucgcucccuccuggcccucugguccagccccu

SEQ ID NO: 504585 - RNA, 18 nt, Human
ucgcucccugaccugggg

SEQ ID NO: 504586 - RNA, 32 nt, Human
ucgcuccuaccuccccacaccucucucucagu

SEQ ID NO: 504587 - RNA, 32 nt, Human
ucgcuccugcagcagagccaacaugcccauca

SEQ ID NO: 504588 - RNA, 32 nt, Human
ucgcuccuguaaucccagcacuuugggaggcu

SEQ ID NO: 504589 - RNA, 32 nt, Human
ucgcuccuguucuguuaguaccaaaguuacau

SEQ ID NO: 504590 - RNA, 32 nt, Human
ucgcuccuguuguuaagaagcgucccugucag

SEQ ID NO: 504591 - RNA, 32 nt, Human
ucgcuccuugcucucccaggaucaauuguauc

SEQ ID NO: 504592 - RNA, 32 nt, Human
ucgcucgaaaaagaaacgauggagucucgcuc

SEQ ID NO: 504593 - RNA, 32 nt, Human
ucgcucgaacccaggagguggagguugcagug

SEQ ID NO: 504594 - RNA, 32 nt, Human
ucgcucgagcccagaaguucaagaccagccug

SEQ ID NO: 504595 - RNA, 32 nt, Human
ucgcucgcaacccuaccuaccucucucccgaa

SEQ ID NO: 504596 - RNA, 32 nt, Human
ucgcucgcccucuuugagaaccacggcuuccg

SEQ ID NO: 504597 - RNA, 32 nt, Human
ucgcucgcgcuuucucuuucuccuuuccucug

SEQ ID NO: 504598 - RNA, 32 nt, Human
ucgcucgcuccuccuucgcuucgccucgccgc

SEQ ID NO: 504599 - RNA, 32 nt, Human
ucgcucgcucucggcgccuccucugccugggc

SEQ ID NO: 504600 - RNA, 32 nt, Human
ucgcucgcucuuggcgccuccucugccugggc

SEQ ID NO: 504601 - RNA, 20 nt, Human
ucgcucggugcuuugagcua

SEQ ID NO: 504602 - RNA, 32 nt, Human
ucgcucgucucagcccagcccuggaagacuga

SEQ ID NO: 504603 - RNA, 32 nt, Human
ucgcucguuacccaggguggagugcaguggua

SEQ ID NO: 504604 - RNA, 32 nt, Human
ucgcucuacccaggcgguggugucgaucuacg

SEQ ID NO: 504605 - RNA, 32 nt, Human
ucgcucucaccucccuccuccugagucggugu

SEQ ID NO: 504606 - RNA, 32 nt, Human
ucgcucucacugcuacugcuuccugggaggug

SEQ ID NO: 504607 - RNA, 32 nt, Human
ucgcucuccaggccgcccuccgcgggccugcc

SEQ ID NO: 504608 - RNA, 32 nt, Human
ucgcucuccuucuggacugggagaagggaggc

SEQ ID NO: 504609 - RNA, 32 nt, Human
ucgcucucuggccugggcuggguuucaucagc

SEQ ID NO: 504610 - RNA, 32 nt, Human
ucgcucucuuccuccugcuccaaccaugugga

SEQ ID NO: 504611 - RNA, 32 nt, Human
ucgcucugaaggaggagcaggugaaacaggug

SEQ ID NO: 504612 - RNA, 32 nt, Human
ucgcucugacaccccaaggaagccgacgaucc

SEQ ID NO: 504613 - RNA, 32 nt, Human
ucgcucugaggcucgggguccccagcuccgcg

SEQ ID NO: 504614 - RNA, 32 nt, Human
ucgcucugcaacaaaucuccagccuggguugc

SEQ ID NO: 504615 - RNA, 32 nt, Human
ucgcucugcacuccagccuaggugacagagug

SEQ ID NO: 504616 - RNA, 32 nt, Human
ucgcucugcacuccagccuggcgacugaguga

SEQ ID NO: 504617 - RNA, 32 nt, Human
ucgcucugcaugcucucugucauacagacagg

SEQ ID NO: 504618 - RNA, 18 nt, Human
ucgcucugcucgcaguca

SEQ ID NO: 504619 - RNA, 21 nt, Human
ucgcucuggccgccugagcca

SEQ ID NO: 504620 - RNA, 19 nt, Human
ucgcucuggccuucgagcc

SEQ ID NO: 504621 - RNA, 32 nt, Human
ucgcucugucaccaggcuggagggcaguggug

SEQ ID NO: 504622 - RNA, 32 nt, Human
ucgcucugucaccaggcuggaguacagugaug

SEQ ID NO: 504623 - RNA, 32 nt, Human
ucgcucugucaccaggcuggagugcagugaca

SEQ ID NO: 504624 - RNA, 32 nt, Human
ucgcucugucaccaggcuggagugcaguggcg

SEQ ID NO: 504625 - RNA, 32 nt, Human
ucgcucugucaccaggcuggagugcaguggug

SEQ ID NO: 504626 - RNA, 32 nt, Human
ucgcucuguccucagggugggcagagccacua

SEQ ID NO: 504627 - RNA, 32 nt, Human
ucgcucugucgccaggcugaagugcaguggcg

SEQ ID NO: 504628 - RNA, 32 nt, Human
ucgcucugucgccaggcuggaguacaguggug

SEQ ID NO: 504629 - RNA, 32 nt, Human
ucgcucugucgccaggcuggagugcaauggcg

SEQ ID NO: 504630 - RNA, 32 nt, Human
ucgcucugucgccaggcuggagugcaguggcg

SEQ ID NO: 504631 - RNA, 32 nt, Human
ucgcucugucgccaggcuggagugcaguggug

SEQ ID NO: 504632 - RNA, 32 nt, Human
ucgcucugucgccagguuggagugcaguggcg

SEQ ID NO: 504633 - RNA, 32 nt, Human
ucgcucugucgcccagccuggagugcaguggc

SEQ ID NO: 504634 - RNA, 32 nt, Human
ucgcucugucgccuggcuggagugcaguggug

SEQ ID NO: 504635 - RNA, 32 nt, Human
ucgcucuguugccaggcuggagggcaguggca

SEQ ID NO: 504636 - RNA, 32 nt, Human
ucgcucuguugccaggcuggagugcacugggg

SEQ ID NO: 504637 - RNA, 32 nt, Human
ucgcucuguugccaggcuggagugcaguggug

SEQ ID NO: 504638 - RNA, 32 nt, Human
ucgcucuuauugcccaggcuggagugcaaugg

SEQ ID NO: 504639 - RNA, 32 nt, Human
ucgcucuuauugcccaggcuggagugcaguga

SEQ ID NO: 504640 - RNA, 32 nt, Human
ucgcucuugacagaugucugggaaagcagagu

SEQ ID NO: 504641 - RNA, 32 nt, Human
ucgcucuuggugcccaggcuagagugcaaugg

SEQ ID NO: 504642 - RNA, 32 nt, Human
ucgcucuugucacccaggcaggagugcagugg

SEQ ID NO: 504643 - RNA, 32 nt, Human
ucgcucuugucacccaggcuggaguacaauga

SEQ ID NO: 504644 - RNA, 32 nt, Human
ucgcucuugucacccaggcuggagugcagugg

SEQ ID NO: 504645 - RNA, 32 nt, Human
ucgcucuuguccaggcuggaguauaauggugc

SEQ ID NO: 504646 - RNA, 32 nt, Human
ucgcucuugucgcccaggcuggagugcaacgg

SEQ ID NO: 504647 - RNA, 32 nt, Human
ucgcucuugucgcccaggcuggagugcagugg

SEQ ID NO: 504648 - RNA, 32 nt, Human
ucgcucuugucgcccaggcuguagugcagugg

SEQ ID NO: 504649 - RNA, 32 nt, Human
ucgcucuuguugcccaggcuagagugcaaugg

SEQ ID NO: 504650 - RNA, 32 nt, Human
ucgcucuuguugcccaggcuggaguacagugg

SEQ ID NO: 504651 - RNA, 32 nt, Human
ucgcucuuguugcccaggcuggagugcaacgg

SEQ ID NO: 504652 - RNA, 32 nt, Human
ucgcucuuguugcccaggcuggagugcaaugg

SEQ ID NO: 504653 - RNA, 32 nt, Human
ucgcucuuguugcccaggcugggagggcaaug

SEQ ID NO: 504654 - RNA, 32 nt, Human
ucgcucuuguugcccaggcuugagugcaguga

SEQ ID NO: 504655 - RNA, 32 nt, Human
ucgcugacccccaggcuguggugagggucuga

SEQ ID NO: 504656 - RNA, 17 nt, Human
ucgcugacucgcgggcu

SEQ ID NO: 504657 - RNA, 32 nt, Human
ucgcugacuuggaggcuagggcuggucugcac

SEQ ID NO: 504658 - RNA, 32 nt, Human
ucgcugagacucugccugcuucucacccagcu

SEQ ID NO: 504659 - RNA, 32 nt, Human
ucgcugaucauccucuuccucaucuguaaaug

SEQ ID NO: 504660 - RNA, 32 nt, Human
ucgcugaugaacuaguaggagacucugugccg

SEQ ID NO: 504661 - RNA, 23 nt, Human
ucgcugauguccuccagccgccu

SEQ ID NO: 504662 - RNA, 32 nt, Human
ucgcugcagcaaggagaccaggucaggcuuca

SEQ ID NO: 504663 - RNA, 32 nt, Human
ucgcugcagccugcugugcgcugcacggccug

SEQ ID NO: 504664 - RNA, 22 nt, Human
ucgcugcaguguuccccgagcc

SEQ ID NO: 504665 - RNA, 32 nt, Human
ucgcugcauaaacuguuguaugccuggugcuu

SEQ ID NO: 504666 - RNA, 32 nt, Human
ucgcugccaagguggagagcagugagcaaggg

SEQ ID NO: 504667 - RNA, 17 nt, Human
ucgcugccacccgggcc

SEQ ID NO: 504668 - RNA, 32 nt, Human
ucgcugccaccugagcuccagccgcccacaaa

SEQ ID NO: 504669 - RNA, 31 nt, Human
ucgcugccauucucugggcuggaaugugaag

SEQ ID NO: 504670 - RNA, 32 nt, Human
ucgcugcccagcuccggucccagaucucugac

SEQ ID NO: 504671 - RNA, 31 nt, Human
ucgcugccccucucugggccuguugcuccau

SEQ ID NO: 504672 - RNA, 32 nt, Human
ucgcugcccucgcuccccuucggggcccccgc

SEQ ID NO: 504673 - RNA, 32 nt, Human
ucgcugcccucggggccuccagcgccggcucu

SEQ ID NO: 504674 - RNA, 32 nt, Human
ucgcugccggugggaggaagcgagagggaagc

SEQ ID NO: 504675 - RNA, 32 nt, Human
ucgcugcgcgucugcuccuccuucucgcgcuu

SEQ ID NO: 504676 - RNA, 20 nt, Human
ucgcugcgcucccuguugcc

SEQ ID NO: 504677 - RNA, 18 nt, Human
ucgcugcgggcccgggcc

SEQ ID NO: 504678 - RNA, 32 nt, Human
ucgcugcuaaauuauucuucacuugagugaag

SEQ ID NO: 504679 - RNA, 31 nt, Human
ucgcugcuacuuuucugcagggauaaaacuu

SEQ ID NO: 504680 - RNA, 32 nt, Human
ucgcugcucaccgcaaccuccgccuuccaggu

SEQ ID NO: 504681 - RNA, 21 nt, Human
ucgcugcucaugcccacagcc

SEQ ID NO: 504682 - RNA, 32 nt, Human
ucgcugcucauggagaagaccugggcuuagca

SEQ ID NO: 504683 - RNA, 17 nt, Human
ucgcugcucccgcggcc

SEQ ID NO: 504684 - RNA, 20 nt, Human
ucgcugcuccgcuugccgcc

SEQ ID NO: 504685 - RNA, 22 nt, Human
ucgcugcuccucacgcaauccu

SEQ ID NO: 504686 - RNA, 23 nt, Human
ucgcugcuccugcuucucgggcu

SEQ ID NO: 504687 - RNA, 19 nt, Human
ucgcugcugagaagagcca

SEQ ID NO: 504688 - RNA, 20 nt, Human
ucgcugcugagccgauguca

SEQ ID NO: 504689 - RNA, 32 nt, Human
ucgcugcugcacagcaaggcccugccacccac

SEQ ID NO: 504690 - RNA, 32 nt, Human
ucgcugcugcagcucucgggaaagcugcccag

SEQ ID NO: 504691 - RNA, 23 nt, Human
ucgcugcugcaucccgcacgccu

SEQ ID NO: 504692 - RNA, 32 nt, Human
ucgcugcugccgccgcuaagggagaggagcau

SEQ ID NO: 504693 - RNA, 20 nt, Human
ucgcugcugcgcccugggcu

SEQ ID NO: 504694 - RNA, 32 nt, Human
ucgcugcuggcacuucaggcucugccucuccc

SEQ ID NO: 504695 - RNA, 18 nt, Human
ucgcugcugucaccugca

SEQ ID NO: 504696 - RNA, 32 nt, Human
ucgcugcuuccacacauuaauggcaugauuuu

SEQ ID NO: 504697 - RNA, 19 nt, Human
ucgcugcuuguugggguua

SEQ ID NO: 504698 - RNA, 32 nt, Human
ucgcuggaacccagaagguggagguugcagug

SEQ ID NO: 504699 - RNA, 32 nt, Human
ucgcuggaacccaggaggcaaagguugcagug

SEQ ID NO: 504700 - RNA, 32 nt, Human
ucgcuggacuaggaugggggaugggccuguga

SEQ ID NO: 504701 - RNA, 32 nt, Human
ucgcuggagagggagacgcaggaagcgaugaa

SEQ ID NO: 504702 - RNA, 32 nt, Human
ucgcuggagcccaguaggucaagaccagccag

SEQ ID NO: 504703 - RNA, 32 nt, Human
ucgcuggcacugcaggaaggaggccccucuga

SEQ ID NO: 504704 - RNA, 32 nt, Human
ucgcuggccagagguggaaggaaggaggaaag

SEQ ID NO: 504705 - RNA, 32 nt, Human
ucgcuggccccaggacccccuccugauuuugg

SEQ ID NO: 504706 - RNA, 32 nt, Human
ucgcuggcccgaguuagaggccagcugagaag

SEQ ID NO: 504707 - RNA, 32 nt, Human
ucgcuggcucaggagaaaagcuguggaccuuc

SEQ ID NO: 504708 - RNA, 32 nt, Human
ucgcuggcuuccccaccucucucaggaugaaa

SEQ ID NO: 504709 - RNA, 32 nt, Human
ucgcuggcuuggagaggacuguggcaggugag

SEQ ID NO: 504710 - RNA, 32 nt, Human
ucgcugggaacgcacuuccugggacgcugaga

SEQ ID NO: 504711 - RNA, 32 nt, Human
ucgcugggacucccugggagaugaggccgcga

SEQ ID NO: 504712 - RNA, 23 nt, Human
ucgcugggagcugccucgggaca

SEQ ID NO: 504713 - RNA, 18 nt, Human
ucgcugggcgcccuggcc

SEQ ID NO: 504714 - RNA, 32 nt, Human
ucgcugggcgcugugcagaggaaaggcgggag

SEQ ID NO: 504715 - RNA, 24 nt, Human
ucgcugggcucauggcccugguca

SEQ ID NO: 504716 - RNA, 32 nt, Human
ucgcugggcugcacucagcaggcugcuugagu

SEQ ID NO: 504717 - RNA, 32 nt, Human
ucgcuggggagcaggcgucucuccucagucgg

SEQ ID NO: 504718 - RNA, 32 nt, Human
ucgcuggggaggcagaguccucgcguggucuc

SEQ ID NO: 504719 - RNA, 32 nt, Human
ucgcuggggcaggggcacccagcaucagcccu

SEQ ID NO: 504720 - RNA, 32 nt, Human
ucgcugggguuacugccuuuguuuggcaaacu

SEQ ID NO: 504721 - RNA, 32 nt, Human
ucgcugguacucugaauaaauaagcaugguca

SEQ ID NO: 504722 - RNA, 32 nt, Human
ucgcuggugaagccccaccuucaacccagggg

SEQ ID NO: 504723 - RNA, 32 nt, Human
ucgcuguacagaaacugucaagggaauaaagu

SEQ ID NO: 504724 - RNA, 32 nt, Human
ucgcugucuccuccgcaaagcauuuuaacucg

SEQ ID NO: 504725 - RNA, 19 nt, Human
ucgcugucucucuccgagc

SEQ ID NO: 504726 - RNA, 18 nt, Human
ucgcugugcaccgaguua

SEQ ID NO: 504727 - RNA, 19 nt, Human
ucgcugugcccccggguua

SEQ ID NO: 504728 - RNA, 32 nt, Human
ucgcugugcccgcugugccugcugugcccgcg

SEQ ID NO: 504729 - RNA, 32 nt, Human
ucgcuguggcucaucgucggcaccaauuaacg

SEQ ID NO: 504730 - RNA, 32 nt, Human
ucgcuguuacccaggcuggagugcaauggcgc

SEQ ID NO: 504731 - RNA, 20 nt, Human
ucgcuguucgcucugcgagu

SEQ ID NO: 504732 - RNA, 18 nt, Human
ucgcuguugcccaggcua

SEQ ID NO: 504733 - RNA, 32 nt, Human
ucgcuguugcccaggcuagagcgcaggggcac

SEQ ID NO: 504734 - RNA, 32 nt, Human
ucgcuguugcccaggcuguagugcaguggugc

SEQ ID NO: 504735 - RNA, 21 nt, Human
ucgcuguugccgccgccgccu

SEQ ID NO: 504736 - RNA, 32 nt, Human
ucgcuguugggaaggcagagcaguugcaaccc

SEQ ID NO: 504737 - RNA, 32 nt, Human
ucgcuguugucacccaggcuggagugcagugg

SEQ ID NO: 504738 - RNA, 32 nt, Human
ucgcuguuguugcccaggcuggagugcaauag

SEQ ID NO: 504739 - RNA, 32 nt, Human
ucgcuguuguugcccaggcuggagugcaaugg

SEQ ID NO: 504740 - RNA, 32 nt, Human
ucgcuguuuccaauaaauauugcugaagacag

SEQ ID NO: 504741 - RNA, 32 nt, Human
ucgcuguuuuaccgaugaggguuggauuagag

SEQ ID NO: 504742 - RNA, 32 nt, Human
ucgcuuaaacccaggaggcggagguugcagug

SEQ ID NO: 504743 - RNA, 32 nt, Human
ucgcuuaaacccaggagguggagguugaaaug

SEQ ID NO: 504744 - RNA, 32 nt, Human
ucgcuuaaacccaggagguggagguugcagug

SEQ ID NO: 504745 - RNA, 32 nt, Human
ucgcuuaauugcucugagcuuguuuccucauc

SEQ ID NO: 504746 - RNA, 32 nt, Human
ucgcuuagccugcaccuccuguccugaagccc

SEQ ID NO: 504747 - RNA, 22 nt, Human
ucgcuuaguucugccuugaguc

SEQ ID NO: 504748 - RNA, 32 nt, Human
ucgcuuaguucugccuugaguccugccagugu

SEQ ID NO: 504749 - RNA, 32 nt, Human
ucgcuuccacguccaaaccccuuuaagaagga

SEQ ID NO: 504750 - RNA, 32 nt, Human
ucgcuuccacugcacaggcccaggaaggagaa

SEQ ID NO: 504751 - RNA, 32 nt, Human
ucgcuucccaggaagacuuguugcagguaggu

SEQ ID NO: 504752 - RNA, 32 nt, Human
ucgcuucccuucacugaauucccuucaaagcc

SEQ ID NO: 504753 - RNA, 18 nt, Human
ucgcuucgccuccggcca

SEQ ID NO: 504754 - RNA, 32 nt, Human
ucgcuucugccuccaaaccaaucccuugcuuc

SEQ ID NO: 504755 - RNA, 32 nt, Human
ucgcuucugcuccucuuuuugugcacucucuu

SEQ ID NO: 504756 - RNA, 32 nt, Human
ucgcuugaaaacaggagguggagguugcagug

SEQ ID NO: 504757 - RNA, 32 nt, Human
ucgcuugaacagcuucuccugaguccuccuua

SEQ ID NO: 504758 - RNA, 32 nt, Human
ucgcuugaacccaagaggcggagguugcagug

SEQ ID NO: 504759 - RNA, 32 nt, Human
ucgcuugaacccaagagguggagguugcggug

SEQ ID NO: 504760 - RNA, 32 nt, Human
ucgcuugaacccagaaggcggaaguugcagug

SEQ ID NO: 504761 - RNA, 32 nt, Human
ucgcuugaacccaggaaguagagguugcagug

SEQ ID NO: 504762 - RNA, 32 nt, Human
ucgcuugaacccaggaaguggagacugcagug

SEQ ID NO: 504763 - RNA, 32 nt, Human
ucgcuugaacccaggaaguggagguugcagug

SEQ ID NO: 504764 - RNA, 32 nt, Human
ucgcuugaacccaggagacagggguugcagug

SEQ ID NO: 504765 - RNA, 32 nt, Human
ucgcuugaacccaggagacgagguugcaguga

SEQ ID NO: 504766 - RNA, 32 nt, Human
ucgcuugaacccaggagacggugguugcagug

SEQ ID NO: 504767 - RNA, 32 nt, Human
ucgcuugaacccaggagauggagauugcagua

SEQ ID NO: 504768 - RNA, 32 nt, Human
ucgcuugaacccaggagauugagguuguagug

SEQ ID NO: 504769 - RNA, 32 nt, Human
ucgcuugaacccaggaggcagaaguugcagug

SEQ ID NO: 504770 - RNA, 32 nt, Human
ucgcuugaacccaggaggcagagguugcagua

SEQ ID NO: 504771 - RNA, 32 nt, Human
ucgcuugaacccaggaggcagagguugcagug

SEQ ID NO: 504772 - RNA, 32 nt, Human
ucgcuugaacccaggaggcagagguugcguug

SEQ ID NO: 504773 - RNA, 32 nt, Human
ucgcuugaacccaggaggcagugauugcagug

SEQ ID NO: 504774 - RNA, 32 nt, Human
ucgcuugaacccaggaggcgaagauugccgug

SEQ ID NO: 504775 - RNA, 32 nt, Human
ucgcuugaacccaggaggcggagauugcagug

SEQ ID NO: 504776 - RNA, 32 nt, Human
ucgcuugaacccaggaggcggagcuugcagug

SEQ ID NO: 504777 - RNA, 32 nt, Human
ucgcuugaacccaggaggcggaggcugcagug

SEQ ID NO: 504778 - RNA, 32 nt, Human
ucgcuugaacccaggaggcggagguuacagug

SEQ ID NO: 504779 - RNA, 32 nt, Human
ucgcuugaacccaggaggcggagguugcagua

SEQ ID NO: 504780 - RNA, 32 nt, Human
ucgcuugaacccaggaggcggagguugcagug

SEQ ID NO: 504781 - RNA, 32 nt, Human
ucgcuugaacccaggaggcggagguugcggug

SEQ ID NO: 504782 - RNA, 32 nt, Human
ucgcuugaacccaggagguagaagcugcagug

SEQ ID NO: 504783 - RNA, 32 nt, Human
ucgcuugaacccaggagguagaggcugcagug

SEQ ID NO: 504784 - RNA, 32 nt, Human
ucgcuugaacccaggagguagagguugcagug

SEQ ID NO: 504785 - RNA, 32 nt, Human
ucgcuugaacccaggaggugaagguugcagug

SEQ ID NO: 504786 - RNA, 32 nt, Human
ucgcuugaacccaggaggugcagguugcagug

SEQ ID NO: 504787 - RNA, 32 nt, Human
ucgcuugaacccaggagguggaaguugcuuug

SEQ ID NO: 504788 - RNA, 32 nt, Human
ucgcuugaacccaggagguggagguagcagug

SEQ ID NO: 504789 - RNA, 32 nt, Human
ucgcuugaacccaggagguggagguuacagug

SEQ ID NO: 504790 - RNA, 32 nt, Human
ucgcuugaacccaggagguggagguuccagug

SEQ ID NO: 504791 - RNA, 32 nt, Human
ucgcuugaacccaggagguggagguugcaagu

SEQ ID NO: 504792 - RNA, 32 nt, Human
ucgcuugaacccaggagguggagguugcagua

SEQ ID NO: 504793 - RNA, 32 nt, Human
ucgcuugaacccaggagguggagguugcagug

SEQ ID NO: 504794 - RNA, 32 nt, Human
ucgcuugaacccaggagguggagguugcaguu

SEQ ID NO: 504795 - RNA, 32 nt, Human
ucgcuugaacccaggagguggagguuguggug

SEQ ID NO: 504796 - RNA, 32 nt, Human
ucgcuugaacccaggagguggggguugcaccg

SEQ ID NO: 504797 - RNA, 32 nt, Human
ucgcuugaacccaggagucggagguugcagug

SEQ ID NO: 504798 - RNA, 32 nt, Human
ucgcuugaacccaggaguucaagucugcagug

SEQ ID NO: 504799 - RNA, 32 nt, Human
ucgcuugaacccagggggcggagcuuggagua

SEQ ID NO: 504800 - RNA, 32 nt, Human
ucgcuugaacccagguuguggagguuguagug

SEQ ID NO: 504801 - RNA, 32 nt, Human
ucgcuugaaccccagaggcagagguugcggug

SEQ ID NO: 504802 - RNA, 32 nt, Human
ucgcuugaacccgggagguguagguugcagug

SEQ ID NO: 504803 - RNA, 32 nt, Human
ucgcuugaaccuaggagguggagguugcauuc

SEQ ID NO: 504804 - RNA, 32 nt, Human
ucgcuugaacucaggagguggagguugcggug

SEQ ID NO: 504805 - RNA, 32 nt, Human
ucgcuugaacugaggcagaggcuacagugagu

SEQ ID NO: 504806 - RNA, 32 nt, Human
ucgcuugaauccaggaggaggagguugcagug

SEQ ID NO: 504807 - RNA, 32 nt, Human
ucgcuugaauccaggaggcggagguugcagug

SEQ ID NO: 504808 - RNA, 32 nt, Human
ucgcuugacgggaagcggagguugcagugagc

SEQ ID NO: 504809 - RNA, 32 nt, Human
ucgcuugagcaggaguuccaggcugcagcgcg

SEQ ID NO: 504810 - RNA, 32 nt, Human
ucgcuugagcccagaaguuugagaccagccua

SEQ ID NO: 504811 - RNA, 32 nt, Human
ucgcuugagcccagagguucgagaucaaccug

SEQ ID NO: 504812 - RNA, 32 nt, Human
ucgcuugagcccagcgguuuaagaucagucug

SEQ ID NO: 504813 - RNA, 32 nt, Human
ucgcuugagcccaggaggcggagauugcagug

SEQ ID NO: 504814 - RNA, 32 nt, Human
ucgcuugagcccaggaggcggagguugcagug

SEQ ID NO: 504815 - RNA, 32 nt, Human
ucgcuugagcccaggaggcugaggcugcagug

SEQ ID NO: 504816 - RNA, 32 nt, Human
ucgcuugagcccaggaggucaaggguacagug

SEQ ID NO: 504817 - RNA, 32 nt, Human
ucgcuugagcccaggaggucagggcugcagug

SEQ ID NO: 504818 - RNA, 32 nt, Human
ucgcuugagcccaggaggucgaagcugcagug

SEQ ID NO: 504819 - RNA, 32 nt, Human
ucgcuugagcccaggagguggagguugcagug

SEQ ID NO: 504820 - RNA, 32 nt, Human
ucgcuugagcccaggaguucaagaacagccug

SEQ ID NO: 504821 - RNA, 32 nt, Human
ucgcuugagcccaggaguucaagaccaaccug

SEQ ID NO: 504822 - RNA, 32 nt, Human
ucgcuugagcccaggaguucaagaccagccug

SEQ ID NO: 504823 - RNA, 32 nt, Human
ucgcuugagcccaggaguucaagaccagucug

SEQ ID NO: 504824 - RNA, 32 nt, Human
ucgcuugagcccaggaguuuaagaccagccug

SEQ ID NO: 504825 - RNA, 32 nt, Human
ucgcuugagcccaggcaguuggagaccagucu

SEQ ID NO: 504826 - RNA, 32 nt, Human
ucgcuugagcccagggguucaagaccaaucug

SEQ ID NO: 504827 - RNA, 32 nt, Human
ucgcuugagcucaggaguuccauaccagccug

SEQ ID NO: 504828 - RNA, 32 nt, Human
ucgcuugagcuggagugcaguggugcaaucau

SEQ ID NO: 504829 - RNA, 32 nt, Human
ucgcuugaucucaggagguugaggcugcagug

SEQ ID NO: 504830 - RNA, 32 nt, Human
ucgcuugcacccaggagguggagguugcagug

SEQ ID NO: 504831 - RNA, 18 nt, Human
ucgcuugcgccccgggcc

SEQ ID NO: 504832 - RNA, 32 nt, Human
ucgcuuggaggagcaaggugccucccagcccg

SEQ ID NO: 504833 - RNA, 32 nt, Human
ucgcuugggcccaggagguggagguugcagug

SEQ ID NO: 504834 - RNA, 32 nt, Human
ucgcuuguacccaggaggcggagguuguagug

SEQ ID NO: 504835 - RNA, 18 nt, Human
ucgcuugugaaacuggaa

SEQ ID NO: 504836 - RNA, 32 nt, Human
ucgcuuguugcccaggcuggagugcaauggcg

SEQ ID NO: 504837 - RNA, 32 nt, Human
ucgcuuuacuccaggaaaugcacguuacacau

SEQ ID NO: 504838 - RNA, 32 nt, Human
ucgcuuuaguaaauaaagggucuccaagaaua

SEQ ID NO: 504839 - RNA, 32 nt, Human
ucgcuuucaacuucgucacaggaaaaaggagc

SEQ ID NO: 504840 - RNA, 32 nt, Human
ucgcuuucuccggcuuccucuggcccaggcgc

SEQ ID NO: 504841 - RNA, 32 nt, Human
ucgcuuucuggaggaggaggggacccgcugcg

SEQ ID NO: 504842 - RNA, 32 nt, Human
ucgcuuugucaccaggcuggagugcaguggug

SEQ ID NO: 504843 - RNA, 32 nt, Human
ucgcuuuucucaggaaccaaaggcuuaugaug

SEQ ID NO: 504844 - RNA, 32 nt, Human
ucgcuuuuguugcccaggcuggagugcaaugg

SEQ ID NO: 504845 - RNA, 32 nt, Human
ucgcuuuuuccuccuccuccucucccggcccc

SEQ ID NO: 504846 - RNA, 32 nt, Human
ucgcuuuuuccuccuucuuccuccuggaggaa

SEQ ID NO: 504847 - RNA, 32 nt, Human
ucgcuuuuucuuucccugucuucuuucagauu

SEQ ID NO: 504848 - RNA, 32 nt, Human
ucggaaagggagggaaagcaagccuggcagag

SEQ ID NO: 504849 - RNA, 32 nt, Human
ucggaaauacugcuucucccaccccaucccua

SEQ ID NO: 504850 - RNA, 32 nt, Human
ucggaacagcagagacacagagggcagucaug

SEQ ID NO: 504851 - RNA, 32 nt, Human
ucggaaccaggguuucccuucaucucagugac

SEQ ID NO: 504852 - RNA, 32 nt, Human
ucggaaccuccucccuaauucucccuuccuuc

SEQ ID NO: 504853 - RNA, 20 nt, Human
ucggaagaccccugggccca

SEQ ID NO: 504854 - RNA, 32 nt, Human
ucggaagcgucaguguuuccauguuauggauc

SEQ ID NO: 504855 - RNA, 32 nt, Human
ucggaaggcugaagcaggagaaugguaugaau

SEQ ID NO: 504856 - RNA, 32 nt, Human
ucggaaggcugaagcaggggaauggcgugaac

SEQ ID NO: 504857 - RNA, 32 nt, Human
ucggaaggcugaggcaggagaaucacuugaac

SEQ ID NO: 504858 - RNA, 32 nt, Human
ucggaaggcugaggcaggagaauggcgugaac

SEQ ID NO: 504859 - RNA, 32 nt, Human
ucggaaggcugaggcaggagaauugcuugaac

SEQ ID NO: 504860 - RNA, 32 nt, Human
ucggaaggcugaggcaggaggaucacuugagc

SEQ ID NO: 504861 - RNA, 32 nt, Human
ucggaaggcugaggcaggaggaucauuugagc

SEQ ID NO: 504862 - RNA, 32 nt, Human
ucggaagggaaaacagucgaucaagggaugua

SEQ ID NO: 504863 - RNA, 25 nt, Human
ucggaagggaggcgggguauccaga

SEQ ID NO: 504864 - RNA, 32 nt, Human
ucggaaucacugagagaggagggggcagcgcc

SEQ ID NO: 504865 - RNA, 32 nt, Human
ucggaauuucuuguuaucaccauuccacguug

SEQ ID NO: 504866 - RNA, 32 nt, Human
ucggaauuuugaaaaacaauauauuuucagga

SEQ ID NO: 504867 - RNA, 32 nt, Human
ucggacagagucucacugugcaguggcaugau

SEQ ID NO: 504868 - RNA, 32 nt, Human
ucggacaugguggugcaugccuguaaucccag

SEQ ID NO: 504869 - RNA, 32 nt, Human
ucggaccaaacagugcucaugcuucaggaccu

SEQ ID NO: 504870 - RNA, 32 nt, Human
ucggaccacugcaagggccgaggcagggccag

SEQ ID NO: 504871 - RNA, 21 nt, Human
ucggaccauguggaaguuucu

SEQ ID NO: 504872 - RNA, 19 nt, Human
ucggacccacauccuggca

SEQ ID NO: 504873 - RNA, 32 nt, Human
ucggacccaggagcccagccccggcugugcca

SEQ ID NO: 504874 - RNA, 32 nt, Human
ucggacccugccuuccucccacuccagacccc

SEQ ID NO: 504875 - RNA, 32 nt, Human
ucggacccuuuuagcugggguugggggacggg

SEQ ID NO: 504876 - RNA, 24 nt, Human
ucuagccugggugaccgagggagg

SEQ ID NO: 504877 - RNA, 32 nt, Human
ucuagccugggugaccgagggaggcucugucu

SEQ ID NO: 504878 - RNA, 24 nt, Human
ucuagccugggugaguacggaggg

SEQ ID NO: 504879 - RNA, 32 nt, Human
ucuagccuguaccaguuaguucaucaaaggaa

SEQ ID NO: 504880 - RNA, 24 nt, Human
ucuagccugugugacagagcaaga

SEQ ID NO: 504881 - RNA, 32 nt, Human
ucuagccugugugacagagcaagacccugucu

SEQ ID NO: 504882 - RNA, 24 nt, Human
ucuagccuuagugauacagugaga

SEQ ID NO: 504883 - RNA, 24 nt, Human
ucuagccuuccaccagcagcgagg

SEQ ID NO: 504884 - RNA, 32 nt, Human
ucuagccuuccaggaaggggcuggccucugcu

SEQ ID NO: 504885 - RNA, 32 nt, Human
ucuagccuucuccugcccuccugugucucagg

SEQ ID NO: 504886 - RNA, 32 nt, Human
ucuagccuuuacaaacauccucaggcuucucu

SEQ ID NO: 504887 - RNA, 32 nt, Human
ucuagccuuuccgguccuuccugggcaaaucu

SEQ ID NO: 504888 - RNA, 32 nt, Human
ucuagcuaagaacuuugaaacaaagucaaagc

SEQ ID NO: 504889 - RNA, 32 nt, Human
ucuagcuagaccugcacuguccaguacaguag

SEQ ID NO: 504890 - RNA, 32 nt, Human
ucuagcuagagcccucagucacaggcaaaggc

SEQ ID NO: 504891 - RNA, 22 nt, Human
ucuagcuagcauuucagcauga

SEQ ID NO: 504892 - RNA, 32 nt, Human
ucuagcucacaaguaaguggcuucagguggga

SEQ ID NO: 504893 - RNA, 32 nt, Human
ucuagcuccagccucucgccugcgccccacuc

SEQ ID NO: 504894 - RNA, 32 nt, Human
ucuagcuccaggacagugucuggcacauagua

SEQ ID NO: 504895 - RNA, 32 nt, Human
ucuagcucuaguucaaauuauuuggaaguguu

SEQ ID NO: 504896 - RNA, 32 nt, Human
ucuagcucugcagcuguggcuguuguuagacg

SEQ ID NO: 504897 - RNA, 32 nt, Human
ucuagcugaacucaggaaaaagaagggggaaa

SEQ ID NO: 504898 - RNA, 32 nt, Human
ucuagcugaaucugaaauauuaccccuugucu

SEQ ID NO: 504899 - RNA, 32 nt, Human
ucuagcugagccuuuuagggcaugaggauguu

SEQ ID NO: 504900 - RNA, 32 nt, Human
ucuagcugccaccagagaguucauugagaugu

SEQ ID NO: 504901 - RNA, 21 nt, Human
ucuagcugccaguucuguguu

SEQ ID NO: 504902 - RNA, 32 nt, Human
ucuagcuggcuuucccugucuauugccuuuuc

SEQ ID NO: 504903 - RNA, 21 nt, Human
ucuagcuuagaaccucccuca

SEQ ID NO: 504904 - RNA, 32 nt, Human
ucuagcuucaggcugggcacgguggcucacag

SEQ ID NO: 504905 - RNA, 32 nt, Human
ucuagcuuccucccucuccucugcuuccagca

SEQ ID NO: 504906 - RNA, 24 nt, Human
ucuagcuugggagacagagcgaga

SEQ ID NO: 504907 - RNA, 32 nt, Human
ucuagcuugggagacagagcgagacuccgucu

SEQ ID NO: 504908 - RNA, 32 nt, Human
ucuagcuugggcaacagagcaagacucugucu

SEQ ID NO: 504909 - RNA, 24 nt, Human
ucuagcuugggcaauagagcaagg

SEQ ID NO: 504910 - RNA, 24 nt, Human
ucuagcuugggugacagagcaaga

SEQ ID NO: 504911 - RNA, 32 nt, Human
ucuagcuuuccuuuccuucuggcuccaaggug

SEQ ID NO: 504912 - RNA, 32 nt, Human
ucuagcuuucugcuuuuaccuuuacccuaauc

SEQ ID NO: 504913 - RNA, 32 nt, Human
ucuagcuuugauacacuugcccuuucauaugu

SEQ ID NO: 504914 - RNA, 32 nt, Human
ucuagcuuugucugaaguuucuuuggaaacuc

SEQ ID NO: 504915 - RNA, 32 nt, Human
ucuaggaaaagcugcacugggguggggagacc

SEQ ID NO: 504916 - RNA, 32 nt, Human
ucuaggaaaugaugccagugaaugcguagucc

SEQ ID NO: 504917 - RNA, 32 nt, Human
ucuaggaaccagaguacagaugagaacagcuu

SEQ ID NO: 504918 - RNA, 32 nt, Human
ucuaggaacugacccugcuccaucacacacac

SEQ ID NO: 504919 - RNA, 32 nt, Human
ucuaggaagauggaaaguacuuaaauaaugug

SEQ ID NO: 504920 - RNA, 32 nt, Human
ucuaggacaaggcgcagccagauggaagggag

SEQ ID NO: 504921 - RNA, 32 nt, Human
ucuaggacagcuuugccaugugcagugaaccc

SEQ ID NO: 504922 - RNA, 32 nt, Human
ucuaggacaugcagacucacugugagcgagag

SEQ ID NO: 504923 - RNA, 32 nt, Human
ucuaggaccagccuggacaacauggugagacc

SEQ ID NO: 504924 - RNA, 32 nt, Human
ucuaggacccgaaguucucuccccagcagaga

SEQ ID NO: 504925 - RNA, 32 nt, Human
ucuaggacgagcucugugucccccacaccaca

SEQ ID NO: 504926 - RNA, 32 nt, Human
ucuaggacgcagcagccucuccccagcacuga

SEQ ID NO: 504927 - RNA, 32 nt, Human
ucuaggacgugagacccacacgccgcccucag

SEQ ID NO: 504928 - RNA, 32 nt, Human
ucuaggagaccacccacugccacuucagaaaa

SEQ ID NO: 504929 - RNA, 32 nt, Human
ucuaggagaccguguucaugcaacacagcauu

SEQ ID NO: 504930 - RNA, 23 nt, Human
ucuaggagagggacagaguggga

SEQ ID NO: 504931 - RNA, 32 nt, Human
ucuaggagaugcuuuggcaaugugcugcugau

SEQ ID NO: 504932 - RNA, 32 nt, Human
ucuaggagcucgaagguggugcugggccucuc

SEQ ID NO: 504933 - RNA, 32 nt, Human
ucuaggagcucuggagccuuaggaccauggac

SEQ ID NO: 504934 - RNA, 32 nt, Human
ucuaggaggaggaggagguagggugugaaaca

SEQ ID NO: 504935 - RNA, 32 nt, Human
ucuaggaggcugagaagcaggagauccaagcu

SEQ ID NO: 504936 - RNA, 32 nt, Human
ucuaggagggaugaccccacucagcuccaggc

SEQ ID NO: 504937 - RNA, 32 nt, Human
ucuaggaggucgaggcuucagugagcggugau

SEQ ID NO: 504938 - RNA, 32 nt, Human
ucuaggaguucucggugagaucaaugguuuuu

SEQ ID NO: 504939 - RNA, 32 nt, Human
ucuaggaugaucaguaguucagcacuuaaaaa

SEQ ID NO: 504940 - RNA, 32 nt, Human
ucuaggcacacgcgcacuuccaccucugcccc

SEQ ID NO: 504941 - RNA, 32 nt, Human
ucuaggcaccuuggucccagugucuuccuuuu

SEQ ID NO: 504942 - RNA, 32 nt, Human
ucuaggcacuuccuccagccucaggcagccac

SEQ ID NO: 504943 - RNA, 32 nt, Human
ucuaggcagaacacaggaaggaagagaggugc

SEQ ID NO: 504944 - RNA, 32 nt, Human
ucuaggcagaggcuggaaugcaaugaugcgau

SEQ ID NO: 504945 - RNA, 32 nt, Human
ucuaggcagcagagucaaaacaaggacagcuu

SEQ ID NO: 504946 - RNA, 32 nt, Human
ucuaggcaggcagggugcuccuggugucugcc

SEQ ID NO: 504947 - RNA, 32 nt, Human
ucuaggcagggugcugccgugggaagagagca

SEQ ID NO: 504948 - RNA, 32 nt, Human
ucuaggcccucaccucaaaccuugccauuggu

SEQ ID NO: 504949 - RNA, 32 nt, Human
ucuaggccgcgaggggcgggugcaauggcgga

SEQ ID NO: 504950 - RNA, 32 nt, Human
ucuaggccugcucugcccuugccguggggaag

SEQ ID NO: 504951 - RNA, 32 nt, Human
ucuaggcggacacacccugggcccugagcauc

SEQ ID NO: 504952 - RNA, 26 nt, Human
ucuaggcucacacuguccuugucaag

SEQ ID NO: 504953 - RNA, 32 nt, Human
ucuaggcucacugcaaccuccaccucccaggu

SEQ ID NO: 504954 - RNA, 32 nt, Human
ucuaggcucacugcaaccuccuucucccaggu

SEQ ID NO: 504955 - RNA, 32 nt, Human
ucuaggcucacugcaaccucugucuccagggu

SEQ ID NO: 504956 - RNA, 32 nt, Human
ucuaggcucacugcaaccuucaccgcccaggu

SEQ ID NO: 504957 - RNA, 32 nt, Human
ucuaggcucacugcaacuuccgccucccgggu

SEQ ID NO: 504958 - RNA, 32 nt, Human
ucuaggcucacugcaacuucugccucccaugc

SEQ ID NO: 504959 - RNA, 32 nt, Human
ucuaggcuccuugggcuucaagcaggaccuga

SEQ ID NO: 504960 - RNA, 32 nt, Human
ucuaggcucugaaauagccacuuuaagaauca

SEQ ID NO: 504961 - RNA, 32 nt, Human
ucuaggcucuggaguauggaagugacagcucc

SEQ ID NO: 504962 - RNA, 32 nt, Human
ucuaggcugaauccuaggguaagguggaucaa

SEQ ID NO: 504963 - RNA, 32 nt, Human
ucuaggcugacagagcagggcuguuucucaua

SEQ ID NO: 504964 - RNA, 32 nt, Human
ucuaggcugaggguccuugaacagacgucauc

SEQ ID NO: 504965 - RNA, 32 nt, Human
ucuaggcugagugcauggaaacuguuacgcuu

SEQ ID NO: 504966 - RNA, 19 nt, Human
ucuaggcuggagugcaaug

SEQ ID NO: 504967 - RNA, 20 nt, Human
ucuaggcuggagugcaaugg

SEQ ID NO: 504968 - RNA, 19 nt, Human
ucuaggcuggagugcagug

SEQ ID NO: 504969 - RNA, 20 nt, Human
ucuaggcuggagugcagugg

SEQ ID NO: 504970 - RNA, 20 nt, Human
ucuaggcuggagugccgugg

SEQ ID NO: 504971 - RNA, 32 nt, Human
ucuaggcugggaggggagaaccagccccuccc

SEQ ID NO: 504972 - RNA, 22 nt, Human
ucuaggcuuuguuucucugugu

SEQ ID NO: 504973 - RNA, 32 nt, Human
ucuagggaacaacacaauucgauucaccguau

SEQ ID NO: 504974 - RNA, 32 nt, Human
ucuagggaacacaagaggcggagccagguggc

SEQ ID NO: 504975 - RNA, 32 nt, Human
ucuagggaaggccacagaccucagcuguacga

SEQ ID NO: 504976 - RNA, 32 nt, Human
ucuagggacaccacugcccugucuuuaggaaa

SEQ ID NO: 504977 - RNA, 32 nt, Human
ucuagggacagguaaugucggcuuccaaguga

SEQ ID NO: 504978 - RNA, 21 nt, Human
ucuagggaccuuuauguccua

SEQ ID NO: 504979 - RNA, 32 nt, Human
ucuagggagggcagcucccaucaccuuccacg

SEQ ID NO: 504980 - RNA, 32 nt, Human
ucuagggagggcccuaagaacacgagcuccuc

SEQ ID NO: 504981 - RNA, 32 nt, Human
ucuagggcaagggcaaaaugccuccaaucuuu

SEQ ID NO: 504982 - RNA, 32 nt, Human
ucuagggcagggacaugucgcauuuccucugc

SEQ ID NO: 504983 - RNA, 32 nt, Human
ucuagggccccucaugccccaggcuggagcag

SEQ ID NO: 504984 - RNA, 32 nt, Human
ucuagggccucagucuggagugggauaggagc

SEQ ID NO: 504985 - RNA, 32 nt, Human
ucuagggcuaguagaacuggaucccaacacca

SEQ ID NO: 504986 - RNA, 32 nt, Human
ucuagggcugaugcugaccaugugguuuccac

SEQ ID NO: 504987 - RNA, 32 nt, Human
ucuagggcugggaccugucagucaaggaagag

SEQ ID NO: 504988 - RNA, 32 nt, Human
ucuaggggacaguaaugagcuuugaauauuua

SEQ ID NO: 504989 - RNA, 32 nt, Human
ucuaggggaggcgggugggggagggagggauc

SEQ ID NO: 504990 - RNA, 32 nt, Human
ucuaggggcccaggccggcggcggcgauggcc

SEQ ID NO: 504991 - RNA, 32 nt, Human
ucuaggggccuuuggucugcccuaccuuaacc

SEQ ID NO: 504992 - RNA, 24 nt, Human
ucuaggguacaggugcacaacgug

SEQ ID NO: 504993 - RNA, 32 nt, Human
ucuaggguaugugggaaggucagggcuguggu

SEQ ID NO: 504994 - RNA, 32 nt, Human
ucuaggguccugggucucuugcauuuauaugu

SEQ ID NO: 504995 - RNA, 32 nt, Human
ucuagggucuagacauguucagcuuuguggac

SEQ ID NO: 504996 - RNA, 32 nt, Human
ucuagggucugcaaaauagaggccaaauccag

SEQ ID NO: 504997 - RNA, 32 nt, Human
ucuagggugaagccugggugaugaggcugcug

SEQ ID NO: 504998 - RNA, 32 nt, Human
ucuagggugagcucugcccggcugcagggaug

SEQ ID NO: 504999 - RNA, 20 nt, Human
ucuaggguuaagccaaaaga

SEQ ID NO: 505000 - RNA, 32 nt, Human
ucuaggguuggcgaggcuggagggcaggguga

SEQ ID NO: 505001 - RNA, 32 nt, Human
ucuagguagucacacuucacuaaagcgucauc

SEQ ID NO: 505002 - RNA, 32 nt, Human
ucuaggucaccacauuuuccaucuccaaauag

SEQ ID NO: 505003 - RNA, 32 nt, Human
ucuaggucaccacucccaauccuggggauugg

SEQ ID NO: 505004 - RNA, 32 nt, Human
ucuaggucacuucucacaaugucccuucagca

SEQ ID NO: 505005 - RNA, 32 nt, Human
ucuaggucaggaaaagaaacaguguguucguu

SEQ ID NO: 505006 - RNA, 18 nt, Human
ucuaggucggcugugcug

SEQ ID NO: 505007 - RNA, 32 nt, Human
ucuaggucugggcagccaugaccugcagggcc

SEQ ID NO: 505008 - RNA, 32 nt, Human
ucuaggugccaucacuggauaauguggaguga

SEQ ID NO: 505009 - RNA, 32 nt, Human
ucuaggugcuagauaugggccaggaagagccc

SEQ ID NO: 505010 - RNA, 32 nt, Human
ucuagguggugaggacaagagugauggcuguu

SEQ ID NO: 505011 - RNA, 32 nt, Human
ucuagguguuucuuguguuugagaaccaugac

SEQ ID NO: 505012 - RNA, 32 nt, Human
ucuagguuaaggagggaggaggguugaucuuu

SEQ ID NO: 505013 - RNA, 32 nt, Human
ucuaguaaaaauacaaaaauuagccaggcaug

SEQ ID NO: 505014 - RNA, 32 nt, Human
ucuaguaaaaauacaaaaauuagcucagcaug

SEQ ID NO: 505015 - RNA, 32 nt, Human
ucuaguaaagggaaugaggaaagggaacccuu

SEQ ID NO: 505016 - RNA, 32 nt, Human
ucuaguaacacaaagcugucccagggaaaagc

SEQ ID NO: 505017 - RNA, 32 nt, Human
ucuaguacagaaauuauagaaauaucagccac

SEQ ID NO: 505018 - RNA, 32 nt, Human
ucuaguacagauuccaggugcugcuacuucaa

SEQ ID NO: 505019 - RNA, 22 nt, Human
ucuaguaccucuucucuucucu

SEQ ID NO: 505020 - RNA, 32 nt, Human
ucuaguacuagucccagaauuuagaauaugcu

SEQ ID NO: 505021 - RNA, 32 nt, Human
ucuaguacucagcucaguuugaucuagauauu

SEQ ID NO: 505022 - RNA, 32 nt, Human
ucuaguacugccucuguggacuuagguuccag

SEQ ID NO: 505023 - RNA, 32 nt, Human
ucuaguagccucaguucuuccucuccuuuguu

SEQ ID NO: 505024 - RNA, 21 nt, Human
ucuaguagcuggaacugcagg

SEQ ID NO: 505025 - RNA, 32 nt, Human
ucuaguaggcaggccagguuagugaggaagga

SEQ ID NO: 505026 - RNA, 32 nt, Human
ucuaguagugccugugccccugggcagauugg

SEQ ID NO: 505027 - RNA, 32 nt, Human
ucuaguauaauccagucucucuucucacuucu

SEQ ID NO: 505028 - RNA, 32 nt, Human
ucuaguauuuauccuuuguauuacaagcaacc

SEQ ID NO: 505029 - RNA, 32 nt, Human
ucuagucacuguggugaugcagagauaauacg

SEQ ID NO: 505030 - RNA, 32 nt, Human
ucuagucagcaaauggccuggccacuuggcuc

SEQ ID NO: 505031 - RNA, 32 nt, Human
ucuagucaguuauauugcuauuguaaauucuu

SEQ ID NO: 505032 - RNA, 32 nt, Human
ucuagucauccaccgccauccugggccccacg

SEQ ID NO: 505033 - RNA, 32 nt, Human
ucuaguccgcucgcggugccaugccauuccuc

SEQ ID NO: 505034 - RNA, 31 nt, Human
ucuaguccuuccaaggaggggagagaagugu

SEQ ID NO: 505035 - RNA, 32 nt, Human
ucuaguccuuucugugguucucagccaagaca

SEQ ID NO: 505036 - RNA, 32 nt, Human
ucuagucgccuccugccaucugaucucccucc

SEQ ID NO: 505037 - RNA, 32 nt, Human
ucuagucucuucuuuaugucuaccuccuccau

SEQ ID NO: 505038 - RNA, 32 nt, Human
ucuagucugccuggcuaccaugcuucucacuc

SEQ ID NO: 505039 - RNA, 32 nt, Human
ucuagucugggugacaagagcaaaacccuguc

SEQ ID NO: 505040 - RNA, 24 nt, Human
ucuagucugggugacagagcaaga

SEQ ID NO: 505041 - RNA, 32 nt, Human
ucuagucugggugacagagcaagacccuguuu

SEQ ID NO: 505042 - RNA, 32 nt, Human
ucuagucuguccuuuaauagcucucuuaaaua

SEQ ID NO: 505043 - RNA, 32 nt, Human
ucuagugaaaauacaaaaauuagccaggugug

SEQ ID NO: 505044 - RNA, 23 nt, Human
ucuagugaaaauaucuguuuuca

SEQ ID NO: 505045 - RNA, 32 nt, Human
ucuagugaacuagacaguuuguaccaugaggg

SEQ ID NO: 505046 - RNA, 32 nt, Human
ucuagugauuucccuguauuggguuugaaaua

SEQ ID NO: 505047 - RNA, 32 nt, Human
ucuagugcaauggcacgaucucugcucacugu

SEQ ID NO: 505048 - RNA, 32 nt, Human
ucuagugcacucccuccagccuacccacaaac

SEQ ID NO: 505049 - RNA, 32 nt, Human
ucuagugcagaugguggcggaggcagaaucga

SEQ ID NO: 505050 - RNA, 32 nt, Human
ucuagugcauggaccuccuuguugacugcugu

SEQ ID NO: 505051 - RNA, 32 nt, Human
ucuagugcccucaagcucccaggauuuaggua

SEQ ID NO: 505052 - RNA, 24 nt, Human
ucuagugcuggguguggagugagg

SEQ ID NO: 505053 - RNA, 32 nt, Human
ucuagugggaacaggccccagcucagccuccg

SEQ ID NO: 505054 - RNA, 32 nt, Human
ucuagugggugaggcugaacaccaagagccuu

SEQ ID NO: 505055 - RNA, 32 nt, Human
ucuagugggugagugcagagagagaagaacuc

SEQ ID NO: 505056 - RNA, 32 nt, Human
ucuagugguuaaugcacuugacauguacagua

SEQ ID NO: 505057 - RNA, 32 nt, Human
ucuagugguucaauaaaggugcugaauggguu

SEQ ID NO: 505058 - RNA, 29 nt, Human
ucuaguguucaguguccucaucuuuaaaa

SEQ ID NO: 505059 - RNA, 32 nt, Human
ucuaguguuuuuauguuucucaaauccccuuu

SEQ ID NO: 505060 - RNA, 31 nt, Human
ucuaguuaggagagagaaaauaauugcaaau

SEQ ID NO: 505061 - RNA, 32 nt, Human
ucuaguuaggagagagaaaauaauugcaaaua

SEQ ID NO: 505062 - RNA, 32 nt, Human
ucuaguuagguagaacagggacuuaccagcuu

SEQ ID NO: 505063 - RNA, 32 nt, Human
ucuaguuaguacaguaggcuccugauuuacag

SEQ ID NO: 505064 - RNA, 32 nt, Human
ucuaguuauucagaggaguaagauggugaugu

SEQ ID NO: 505065 - RNA, 32 nt, Human
ucuaguucaguccugugaaccauguccugagg

SEQ ID NO: 505066 - RNA, 32 nt, Human
ucuaguuccucuccauccgccaccuccccucc

SEQ ID NO: 505067 - RNA, 32 nt, Human
ucuaguuccuuuauguccuguacaucauucuc

SEQ ID NO: 505068 - RNA, 32 nt, Human
ucuaguucuagucuguugaucugccuuuuguu

SEQ ID NO: 505069 - RNA, 32 nt, Human
ucuaguucucaaccucuccaaguucaugagcc

SEQ ID NO: 505070 - RNA, 32 nt, Human
ucuaguucuccaaggaccuagaagacagaugg

SEQ ID NO: 505071 - RNA, 32 nt, Human
ucuaguucuuccagucguuauccucugcuguc

SEQ ID NO: 505072 - RNA, 32 nt, Human
ucuaguugcccacacuagagugcaauggcgca

SEQ ID NO: 505073 - RNA, 32 nt, Human
ucuaguugcuuucauccuccuuuuguucugca

SEQ ID NO: 505074 - RNA, 32 nt, Human
ucuaguuggaaagagguauauacagguggauu

SEQ ID NO: 505075 - RNA, 32 nt, Human
ucuaguuguuggauuuaucguacucugcggcu

SEQ ID NO: 505076 - RNA, 32 nt, Human
ucuaguuuaagauuuuuguuuaaucaucaugg

SEQ ID NO: 505077 - RNA, 32 nt, Human
ucuaguuuagagacauccuucauuugacauuu

SEQ ID NO: 505078 - RNA, 32 nt, Human
ucuaguuuagaguuagcagacuacccaaaucu

SEQ ID NO: 505079 - RNA, 32 nt, Human
ucuaguuuagauagcauugugaugcaauuucc

SEQ ID NO: 505080 - RNA, 32 nt, Human
ucuaguuuauagcaccuuaacuuuaacuguuc

SEQ ID NO: 505081 - RNA, 26 nt, Human
ucuaguuucucagggauggagcgaga

SEQ ID NO: 505082 - RNA, 32 nt, Human
ucuaguuuugcaugcccuuuacugcagaacca

SEQ ID NO: 505083 - RNA, 32 nt, Human
ucuauaaaaauuuuuaaaauuagccagguaug

SEQ ID NO: 505084 - RNA, 32 nt, Human
ucuauaaacuuugauccaaagcagaaucaaug

SEQ ID NO: 505085 - RNA, 32 nt, Human
ucuauaaagugggaucuaucaugaccagccua

SEQ ID NO: 505086 - RNA, 32 nt, Human
ucuauaacaggcaaucaacaaacguuucuuga

SEQ ID NO: 505087 - RNA, 32 nt, Human
ucuauaacaugcugcgacggcaggaggagcug

SEQ ID NO: 505088 - RNA, 32 nt, Human
ucuauaaccagccuuuguuaacaaagggaacu

SEQ ID NO: 505089 - RNA, 32 nt, Human
ucuauaagaauucagaccucauuagaaaucaa

SEQ ID NO: 505090 - RNA, 32 nt, Human
ucuauaaggguauagaacugcuuuucucauag

SEQ ID NO: 505091 - RNA, 32 nt, Human
ucuauaaucaguguguuucucucaccuaaaac

SEQ ID NO: 505092 - RNA, 32 nt, Human
ucuauaauccacccuucugcaggcccugaaau

SEQ ID NO: 505093 - RNA, 32 nt, Human
ucuauaaugugggaaauggcuuggggaggaug

SEQ ID NO: 505094 - RNA, 32 nt, Human
ucuauaauuccagcuacucaggaggcugagac

SEQ ID NO: 505095 - RNA, 32 nt, Human
ucuauaauuccagcuacucaggaggcugaggc

SEQ ID NO: 505096 - RNA, 32 nt, Human
ucuauaauugaauaucaaauaagacaaauuac

SEQ ID NO: 505097 - RNA, 32 nt, Human
ucuauacacacauguguguuguguauaugcau

SEQ ID NO: 505098 - RNA, 32 nt, Human
ucuauacacugggugcccaacaacagccccuu

SEQ ID NO: 505099 - RNA, 24 nt, Human
ucuauacauuccuacguucucuca

SEQ ID NO: 505100 - RNA, 32 nt, Human
ucuauaccaaccaaaccaauucaccaacacag

SEQ ID NO: 505101 - RNA, 32 nt, Human
ucuauacccugguaggcuuccucuucagcaug

SEQ ID NO: 505102 - RNA, 32 nt, Human
ucuauaccucagcugaggacauggacacuucc

SEQ ID NO: 505103 - RNA, 32 nt, Human
ucuauacgcaaaccacacaccugccaaggagc

SEQ ID NO: 505104 - RNA, 32 nt, Human
ucuauacuuccucugcagcagaaaagaguauc

SEQ ID NO: 505105 - RNA, 32 nt, Human
ucuauagaaaugaaaaugcagcaugaaguuga

SEQ ID NO: 505106 - RNA, 32 nt, Human
ucuauagacaaggaggucagacuggagugaau

SEQ ID NO: 505107 - RNA, 32 nt, Human
ucuauagcagaguccuuauucuucucauaaau

SEQ ID NO: 505108 - RNA, 32 nt, Human
ucuauagcauccuccugugcucuuaccuaagg

SEQ ID NO: 505109 - RNA, 32 nt, Human
ucuauagcauuuccugacacuuccgcuacuuu

SEQ ID NO: 505110 - RNA, 32 nt, Human
ucuauagccaugagacuccuuguggccucaag

SEQ ID NO: 505111 - RNA, 32 nt, Human
ucuauagccuccagaacugugagaaauaaaca

SEQ ID NO: 505112 - RNA, 32 nt, Human
ucuauagccugaggugggagaaucacuuaagc

SEQ ID NO: 505113 - RNA, 21 nt, Human
ucuauagcucuaaagguuucu

SEQ ID NO: 505114 - RNA, 24 nt, Human
ucuauagcuucugcucacugggca

SEQ ID NO: 505115 - RNA, 30 nt, Human
ucuauaggaagccagguuuacaauagguaa

SEQ ID NO: 505116 - RNA, 32 nt, Human
ucuauaggcccaggugcugaaucgcaaugguc

SEQ ID NO: 505117 - RNA, 32 nt, Human
ucuauagggugaggaugcccagcucugcaaga

SEQ ID NO: 505118 - RNA, 32 nt, Human
ucuauauaauuuuauaaacacaaauucaugau

SEQ ID NO: 505119 - RNA, 19 nt, Human
ucuauauauggcauccacg

SEQ ID NO: 505120 - RNA, 21 nt, Human
ucuauauccccaagcccucaa

SEQ ID NO: 505121 - RNA, 22 nt, Human
ucuauaucuauaaagguuucuu

SEQ ID NO: 505122 - RNA, 32 nt, Human
ucuauaugacagcaaccauugugagaaacuag

SEQ ID NO: 505123 - RNA, 32 nt, Human
ucuauauguagcaaggaaaaggugcuuuuuaa

SEQ ID NO: 505124 - RNA, 32 nt, Human
ucuauauucauuggaucauugccuccuuccua

SEQ ID NO: 505125 - RNA, 32 nt, Human
ucuauauuggcucauaaaacuaaccugaaaaa

SEQ ID NO: 505126 - RNA, 32 nt, Human
ucuauauuugagaaggagucucgcgcugucgc

SEQ ID NO: 505127 - RNA, 32 nt, Human
ucuauauuuuugaacugauacuuguuuuauac

SEQ ID NO: 505128 - RNA, 32 nt, Human
ucuaucaaaauguaaaaugccacucacuucua

SEQ ID NO: 505129 - RNA, 32 nt, Human
ucuaucaaggucaacuggcaguuuuauuaccu

SEQ ID NO: 505130 - RNA, 32 nt, Human
ucuaucacaccacugugcucuagccuggguga

SEQ ID NO: 505131 - RNA, 32 nt, Human
ucuaucacauccagcauugucccagugcuuug

SEQ ID NO: 505132 - RNA, 32 nt, Human
ucuaucaccaggugggagugcaguggcacaau

SEQ ID NO: 505133 - RNA, 32 nt, Human
ucuaucacccaggcuggagugcaguggugcaa

SEQ ID NO: 505134 - RNA, 24 nt, Human
ucuaucacccaggcuggaguggag

SEQ ID NO: 505135 - RNA, 24 nt, Human
ucuaucaccuaggcuggagugcag

SEQ ID NO: 505136 - RNA, 32 nt, Human
ucuaucaccuuuccucacauagguaccuuuuu

SEQ ID NO: 505137 - RNA, 32 nt, Human
ucuaucacuggcaaaguagauguaggaggaca

SEQ ID NO: 505138 - RNA, 32 nt, Human
ucuaucacuuccucuaguacaagccagcugcc

SEQ ID NO: 505139 - RNA, 32 nt, Human
ucuaucagccuucuaugguaccuuuuugucag

SEQ ID NO: 505140 - RNA, 32 nt, Human
ucuaucaggagcaguggagcagugagcugccu

SEQ ID NO: 505141 - RNA, 32 nt, Human
ucuaucaggccugguggcuguuggguggggcu

SEQ ID NO: 505142 - RNA, 32 nt, Human
ucuaucagggcuggaguggugcagccccuggc

SEQ ID NO: 505143 - RNA, 32 nt, Human
ucuaucaggugagagaaaaaugucagacucaa

SEQ ID NO: 505144 - RNA, 32 nt, Human
ucuaucaguucugacauucuaggcuucauaua

SEQ ID NO: 505145 - RNA, 32 nt, Human
ucuaucauacauguacauacucacacacacca

SEQ ID NO: 505146 - RNA, 32 nt, Human
ucuaucauuuuugagcaacucccucucagcua

SEQ ID NO: 505147 - RNA, 32 nt, Human
ucuauccaaacagacguucacugccacuugua

SEQ ID NO: 505148 - RNA, 32 nt, Human
ucuauccagccaaugccuguuuacacagacac

SEQ ID NO: 505149 - RNA, 32 nt, Human
ucuauccaugcuguguccaggaggugaccuug

SEQ ID NO: 505150 - RNA, 32 nt, Human
ucuaucccagaacgugcuggagauuugacacu

SEQ ID NO: 505151 - RNA, 32 nt, Human
ucuaucccauacuacuaaaccccaccagcuau

SEQ ID NO: 505152 - RNA, 32 nt, Human
ucuauccccaaagugucugcuuucaagcacca

SEQ ID NO: 505153 - RNA, 32 nt, Human
ucuauccccaggaauagaacuuaagggguggg

SEQ ID NO: 505154 - RNA, 22 nt, Human
ucuauccccaggcuggagugca

SEQ ID NO: 505155 - RNA, 32 nt, Human
ucuaucccuccucccauccacacacacaggca

SEQ ID NO: 505156 - RNA, 32 nt, Human
ucuauccggcacuaggaacagccccgggggcg

SEQ ID NO: 505157 - RNA, 32 nt, Human
ucuauccuccacuuuuaccauauucuguaaag

SEQ ID NO: 505158 - RNA, 31 nt, Human
ucuauccuccccuccugcccuguguccaucc

SEQ ID NO: 505159 - RNA, 21 nt, Human
ucuauccucuuccuugccaga

SEQ ID NO: 505160 - RNA, 32 nt, Human
ucuauccugaacucuagguuccuugaagccag

SEQ ID NO: 505161 - RNA, 32 nt, Human
ucuauccuugauacaacagcugaccucauuuc

SEQ ID NO: 505162 - RNA, 32 nt, Human
ucuauccuuuucuccccuucaaucuugccaaa

SEQ ID NO: 505163 - RNA, 32 nt, Human
ucuaucgccagaaaaguauuuccuuuguucca

SEQ ID NO: 505164 - RNA, 32 nt, Human
ucuaucgccaggcuggaguguaguggcaugau

SEQ ID NO: 505165 - RNA, 24 nt, Human
ucuaucgcccaggauggagugcag

SEQ ID NO: 505166 - RNA, 32 nt, Human
ucuaucgcccaggauggagugcaguggcucaa

SEQ ID NO: 505167 - RNA, 23 nt, Human
ucuaucgcccaggcuggagugca

SEQ ID NO: 505168 - RNA, 24 nt, Human
ucuaucgcccaggcuggagugcag

SEQ ID NO: 505169 - RNA, 32 nt, Human
ucuaucgcccaggcuggagugcaguggcgcau

SEQ ID NO: 505170 - RNA, 21 nt, Human
ucuaucgccuaggcugaagca

SEQ ID NO: 505171 - RNA, 32 nt, Human
ucuaucgcugcucucuucuugucauccuuaaa

SEQ ID NO: 505172 - RNA, 24 nt, Human
ucuaucggccaggcuggagugcag

SEQ ID NO: 505173 - RNA, 32 nt, Human
ucuaucggccaggcuggagugcaguggugcaa

SEQ ID NO: 505174 - RNA, 32 nt, Human
ucuaucuauaugcacauacauacauauauaca

SEQ ID NO: 505175 - RNA, 32 nt, Human
ucuaucuaucuauaucuucaucccaucaacuc

SEQ ID NO: 505176 - RNA, 32 nt, Human
ucuaucucaagaaacaagaugauuguaacaug

SEQ ID NO: 505177 - RNA, 32 nt, Human
ucuaucucagugaacacacuguauuuacuuga

SEQ ID NO: 505178 - RNA, 28 nt, Human
ucuaucucauuugcugccuuuucacuaa

SEQ ID NO: 505179 - RNA, 32 nt, Human
ucuaucucccucucacacaucaaugcuuaugc

SEQ ID NO: 505180 - RNA, 32 nt, Human
ucuaucucugcaguucugucugacuuagcuga

SEQ ID NO: 505181 - RNA, 32 nt, Human
ucuaucugcagguccccagccuggguaaagau

SEQ ID NO: 505182 - RNA, 32 nt, Human
ucuaucuggucugccuugcccguuugccuguu

SEQ ID NO: 505183 - RNA, 32 nt, Human
ucuaucugucugucugucggucugugucuugg

SEQ ID NO: 505184 - RNA, 32 nt, Human
ucuaucugucugucugucugucugucugucug

SEQ ID NO: 505185 - RNA, 32 nt, Human
ucuaucuucccuuccaacgaauuccugcucag

SEQ ID NO: 505186 - RNA, 32 nt, Human
ucuaucuuccgacuuuguuggaggguccacug

SEQ ID NO: 505187 - RNA, 32 nt, Human
ucuaucuuguucauuuuagggauaaugaagaa

SEQ ID NO: 505188 - RNA, 32 nt, Human
ucuaugaaaauguguuuugaccaaacuuagua

SEQ ID NO: 505189 - RNA, 32 nt, Human
ucuaugaacucaucauuccagccugggcaaca

SEQ ID NO: 505190 - RNA, 32 nt, Human
ucuaugaaggaucuucugcaagaggcugccuc

SEQ ID NO: 505191 - RNA, 32 nt, Human
ucuaugaauagagguggacacaacagcagucu

SEQ ID NO: 505192 - RNA, 32 nt, Human
ucuaugaauggaugauuuccaggcucagggug

SEQ ID NO: 505193 - RNA, 32 nt, Human
ucuaugaauuccggguagguuucuugaaaaua

SEQ ID NO: 505194 - RNA, 32 nt, Human
ucuaugacucuugucuccuccuccaggaggac

SEQ ID NO: 505195 - RNA, 32 nt, Human
ucuaugagagauuuccucugauagcucugcuu

SEQ ID NO: 505196 - RNA, 32 nt, Human
ucuaugagugagggaugcagagccagggaagg

SEQ ID NO: 505197 - RNA, 32 nt, Human
ucuaugaguuggacuucagucuugccuaggcg

SEQ ID NO: 505198 - RNA, 32 nt, Human
ucuaugaucccagcuacuggagaggcugaggc

SEQ ID NO: 505199 - RNA, 32 nt, Human
ucuaugaugucccccuucucugaggccuggac

SEQ ID NO: 505200 - RNA, 32 nt, Human
ucuaugcagcaagcccugcccagucagugacc

SEQ ID NO: 505201 - RNA, 32 nt, Human
ucuaugccacucuggccauccacuauccaggg

SEQ ID NO: 505202 - RNA, 32 nt, Human
ucuaugcccugagaccccacugcugucauugu

SEQ ID NO: 505203 - RNA, 32 nt, Human
ucuaugccggcugagcgagaaaaagaggaaua

SEQ ID NO: 505204 - RNA, 32 nt, Human
ucuaugccuuucuugccauugugugcccuuuc

SEQ ID NO: 505205 - RNA, 32 nt, Human
ucuaugcucacuguagccuugaccuucugggu

SEQ ID NO: 505206 - RNA, 32 nt, Human
ucuaugcugcuuuaggaauucugcaaggguuc

SEQ ID NO: 505207 - RNA, 32 nt, Human
ucuaugcugggaaccagggaccaagaguaaau

SEQ ID NO: 505208 - RNA, 32 nt, Human
ucuaugcuuucaggacuggcuuucugcaccug

SEQ ID NO: 505209 - RNA, 32 nt, Human
ucuauggacucagaggaaugauguuuuaguuu

SEQ ID NO: 505210 - RNA, 32 nt, Human
ucuauggagcuuaaaguucacagccauucugu

SEQ ID NO: 505211 - RNA, 32 nt, Human
ucuauggauacuuggguugugggggcucucuu

SEQ ID NO: 505212 - RNA, 32 nt, Human
ucuauggcagcaccuuugccuuccaugggucc

SEQ ID NO: 505213 - RNA, 32 nt, Human
ucuauggcagccaagagagaggcccuucagag

SEQ ID NO: 505214 - RNA, 23 nt, Human
ucuauggcccugcaaaaauauaa

SEQ ID NO: 505215 - RNA, 32 nt, Human
ucuauggccuugugucaaggugccucuuaaag

SEQ ID NO: 505216 - RNA, 32 nt, Human
ucuauggcuauugugucaggucacuguggaua

SEQ ID NO: 505217 - RNA, 32 nt, Human
ucuaugggguacugcauugcuuuuuauaaagu

SEQ ID NO: 505218 - RNA, 32 nt, Human
ucuaugguguguggaugugugugcaugaaucu

SEQ ID NO: 505219 - RNA, 24 nt, Human
ucuaugucccaggcuagagugcag

SEQ ID NO: 505220 - RNA, 32 nt, Human
ucuaugucuccucucguuggauugugacaccg

SEQ ID NO: 505221 - RNA, 22 nt, Human
ucuaugucuggaccuguguuag

SEQ ID NO: 505222 - RNA, 32 nt, Human
ucuaugugcaaggugauauauaaucauaucca

SEQ ID NO: 505223 - RNA, 32 nt, Human
ucuaugugcacacacccccaucacauggaaug

SEQ ID NO: 505224 - RNA, 32 nt, Human
ucuaugugguggggauggcagguuguauuaac

SEQ ID NO: 505225 - RNA, 28 nt, Human
ucuauguguguaugugccauacauaugu

SEQ ID NO: 505226 - RNA, 32 nt, Human
ucuaugugugugcguguguauguaugugagca

SEQ ID NO: 505227 - RNA, 32 nt, Human
ucuauguucauggagcuuauuugaggcuagaa

SEQ ID NO: 505228 - RNA, 24 nt, Human
ucuauguuccucuucucuuauccu

SEQ ID NO: 505229 - RNA, 32 nt, Human
ucuauguuccuguuccuuccucugcuccuccu

SEQ ID NO: 505230 - RNA, 32 nt, Human
ucuauguugcccaggcuggucucaggcuccug

SEQ ID NO: 505231 - RNA, 32 nt, Human
ucuauguuuuggaaguuggggguuuaauaaua

SEQ ID NO: 505232 - RNA, 32 nt, Human
ucuauuaaaaacacaaaaauuagccagaugug

SEQ ID NO: 505233 - RNA, 32 nt, Human
ucuauuaaaaauacaaaaauuagccaggcaua

SEQ ID NO: 505234 - RNA, 32 nt, Human
ucuauuaaaaauacaaaaauuagccaggcaug

SEQ ID NO: 505235 - RNA, 32 nt, Human
ucuauuaaaaauacaaaaauuagccggaugug

SEQ ID NO: 505236 - RNA, 32 nt, Human
ucuauuaaaaauacaaaaauuagccgggagug

SEQ ID NO: 505237 - RNA, 32 nt, Human
ucuauuaaaaauacaaaaauuagccgggugug

SEQ ID NO: 505238 - RNA, 32 nt, Human
ucuauuaaaaauacaaaauuagccgggcaugg

SEQ ID NO: 505239 - RNA, 32 nt, Human
ucuauuaaaagacaaaaauuagcugggcgugg

SEQ ID NO: 505240 - RNA, 32 nt, Human
ucuauuaaagauacaaaauuagccaggcaugg

SEQ ID NO: 505241 - RNA, 32 nt, Human
ucuauuaagagcacauuuauuuacauuuguau

SEQ ID NO: 505242 - RNA, 32 nt, Human
ucuauuacuaaucaagccgagaggaggcccac

SEQ ID NO: 505243 - RNA, 32 nt, Human
ucuauuacuuuugucugcucagcucuucuccu

SEQ ID NO: 505244 - RNA, 32 nt, Human
ucuauuagcaugccaccaugccccuccuccga

SEQ ID NO: 505245 - RNA, 32 nt, Human
ucuauuauacuagauaaaauguuguuacaaag

SEQ ID NO: 505246 - RNA, 32 nt, Human
ucuauucagcaaacacucagugagacaaccau

SEQ ID NO: 505247 - RNA, 32 nt, Human
ucuauucauucaccuucucucugacugcacuu

SEQ ID NO: 505248 - RNA, 32 nt, Human
ucuauucauucugugaccucaggggucacaua

SEQ ID NO: 505249 - RNA, 32 nt, Human
ucuauucccagcccugggaggaagggggaguc

SEQ ID NO: 505250 - RNA, 32 nt, Human
ucuauuccuucuggccuuuccucucuccuguu

SEQ ID NO: 505251 - RNA, 32 nt, Human
ucuauucggagcggcugaggaggcucauguca

SEQ ID NO: 505252 - RNA, 32 nt, Human
ucuauucugcauucccaagaguuuauguuuau

SEQ ID NO: 505253 - RNA, 32 nt, Human
ucuauucugcguuauuuuuguugcauaaccag

SEQ ID NO: 505254 - RNA, 32 nt, Human
ucuauugacaugcccacaaaacagguuuauuu

SEQ ID NO: 505255 - RNA, 32 nt, Human
ucuauugagaaguuauacaacauacaggcuuc

SEQ ID NO: 505256 - RNA, 32 nt, Human
ucuauugcauaguacaugaaucuauugucacu

SEQ ID NO: 505257 - RNA, 24 nt, Human
ucuauugcccaggcuggagugcag

SEQ ID NO: 505258 - RNA, 32 nt, Human
ucuauugcccaggcuggagugcaguggcucag

SEQ ID NO: 505259 - RNA, 32 nt, Human
ucuauugcccaggcuggagugcagugguacag

SEQ ID NO: 505260 - RNA, 32 nt, Human
ucuauugcccaggcuggagugcaguggugcga

SEQ ID NO: 505261 - RNA, 32 nt, Human
ucuauugcccaggcuggagugcagugguguaa

SEQ ID NO: 505262 - RNA, 32 nt, Human
ucuauugcccagucuggagugcaguggcauga

SEQ ID NO: 505263 - RNA, 32 nt, Human
ucuauugcgucaguagcaacacugcccagagg

SEQ ID NO: 505264 - RNA, 24 nt, Human
ucuauugcucaggcuggagugcag

SEQ ID NO: 505265 - RNA, 32 nt, Human
ucuauugcugagaagcaaaccgcccugcagca

SEQ ID NO: 505266 - RNA, 32 nt, Human
ucuauugcuggcaaagacagaagccucacugc

SEQ ID NO: 505267 - RNA, 32 nt, Human
ucuauugcuguggcugaugauuuccagagugu

SEQ ID NO: 505268 - RNA, 32 nt, Human
ucuauuggaaggagguguaacggcagaauagc

SEQ ID NO: 505269 - RNA, 32 nt, Human
ucuauuggauuuuuccaagagaaaguuuguaa

SEQ ID NO: 505270 - RNA, 32 nt, Human
ucuauuggccaggcuggaguguaguggcacca

SEQ ID NO: 505271 - RNA, 32 nt, Human
ucuauugggaggccgaggcgggaggaucacaa

SEQ ID NO: 505272 - RNA, 32 nt, Human
ucuauugucccagggagauauuagaccucucu

SEQ ID NO: 505273 - RNA, 20 nt, Human
ucuauuguguuuuucuucug

SEQ ID NO: 505274 - RNA, 24 nt, Human
ucuauuguucagacuggagugcag

SEQ ID NO: 505275 - RNA, 32 nt, Human
ucuauuguugcuuuucuggucuuuggaaagag

SEQ ID NO: 505276 - RNA, 32 nt, Human
ucuauuuagagcuucugucccuuccuucccau

SEQ ID NO: 505277 - RNA, 32 nt, Human
ucuauuuagccucacagaugacuuuagaaucu

SEQ ID NO: 505278 - RNA, 32 nt, Human
ucuauuuauauguauauuuauuuuuauguaug

SEQ ID NO: 505279 - RNA, 32 nt, Human
ucuauuuccagaaaguucagagccagauuuga

SEQ ID NO: 505280 - RNA, 32 nt, Human
ucuauuuccuucccuaauaccccacacccaac

SEQ ID NO: 505281 - RNA, 32 nt, Human
ucuauuucucauacauacauaacuucguuuuu

SEQ ID NO: 505282 - RNA, 32 nt, Human
ucuauuucucauuccuaagccuuaccaugagu

SEQ ID NO: 505283 - RNA, 32 nt, Human
ucuauuucucucuagagcacucaagacuuuac

SEQ ID NO: 505284 - RNA, 32 nt, Human
ucuauuucuuggaauacguucuccucugaccu

SEQ ID NO: 505285 - RNA, 32 nt, Human
ucuauuucuuugcaggagccugggugaguucu

SEQ ID NO: 505286 - RNA, 32 nt, Human
ucuauuugaagugaaguuauaaaagggcaaau

SEQ ID NO: 505287 - RNA, 26 nt, Human
ucuauuugacaaagucuuucuguguu

SEQ ID NO: 505288 - RNA, 32 nt, Human
ucuauuuggccacccuuccgcacuggggagaa

SEQ ID NO: 505289 - RNA, 32 nt, Human
ucuauuugggcucccaacacuauuucuccauc

SEQ ID NO: 505290 - RNA, 32 nt, Human
ucuauuuggucuucaguguuuuagccucauua

SEQ ID NO: 505291 - RNA, 32 nt, Human
ucuauuuguuacuccuuuuuacuggacaugau

SEQ ID NO: 505292 - RNA, 32 nt, Human
ucuauuuucagccugugccaccugucuaggca

SEQ ID NO: 505293 - RNA, 32 nt, Human
ucuauuuucagccugugcuucucacucaccau

SEQ ID NO: 505294 - RNA, 32 nt, Human
ucuauuuuccugggcagguuuauguugauguu

SEQ ID NO: 505295 - RNA, 32 nt, Human
ucuauuuucucuaaauauuuugcuuucaguaa

SEQ ID NO: 505296 - RNA, 32 nt, Human
ucuauuuugccaggcuggugcaaaguaauuaa

SEQ ID NO: 505297 - RNA, 32 nt, Human
ucuauuuuguuuccuuugguuuccuuccuccc

SEQ ID NO: 505298 - RNA, 32 nt, Human
ucuauuuuugacuguagccacagcugcuguuc

SEQ ID NO: 505299 - RNA, 32 nt, Human
ucucaaaaaguggccaaggauguggagugggc

SEQ ID NO: 505300 - RNA, 32 nt, Human
ucucaaaaccagaacaucaacagugcuguuuc

SEQ ID NO: 505301 - RNA, 32 nt, Human
ucucaaaacccauggagggaggcugcuggugu

SEQ ID NO: 505302 - RNA, 32 nt, Human
ucucaaaacguugagauucuguuguuuuguuu

SEQ ID NO: 505303 - RNA, 23 nt, Human
ucucaaaacucugauauuuguca

SEQ ID NO: 505304 - RNA, 32 nt, Human
ucucaaaagagugucccuucuucacaccuacu

SEQ ID NO: 505305 - RNA, 32 nt, Human
ucucaaaagccccacaccacccuccugccaac

SEQ ID NO: 505306 - RNA, 32 nt, Human
ucucaaaaggccaugguaucgugccccugagg

SEQ ID NO: 505307 - RNA, 32 nt, Human
ucucaaaaguugugaccguguuaaauuguacu

SEQ ID NO: 505308 - RNA, 32 nt, Human
ucucaaacacacacaaaugcccaaccagcucu

SEQ ID NO: 505309 - RNA, 32 nt, Human
ucucaaacagggacuugugaguacuuggcaag

SEQ ID NO: 505310 - RNA, 32 nt, Human
ucucaaaccaucuucugccucuucccuugaga

SEQ ID NO: 505311 - RNA, 32 nt, Human
ucucaaaccuccauuagaccucaggacuccaa

SEQ ID NO: 505312 - RNA, 32 nt, Human
ucucaaaccugccggcuccucuucccacggcc

SEQ ID NO: 505313 - RNA, 22 nt, Human
ucucaaacuccugaccucguga

SEQ ID NO: 505314 - RNA, 32 nt, Human
ucucaaacuuuaaaaugccucagcaucacuug

SEQ ID NO: 505315 - RNA, 32 nt, Human
ucucaaagaaaacugcugcagauggaaaaagg

SEQ ID NO: 505316 - RNA, 32 nt, Human
ucucaaagaaagaaagaaagaaaagaaagaaa

SEQ ID NO: 505317 - RNA, 32 nt, Human
ucucaaagaccaccauguccaaggucugacag

SEQ ID NO: 505318 - RNA, 32 nt, Human
ucucaaagaccuggggcugcugugaagcugga

SEQ ID NO: 505319 - RNA, 21 nt, Human
ucucaaagauucacacaugcc

SEQ ID NO: 505320 - RNA, 23 nt, Human
ucucaaagccauguacuuuguua

SEQ ID NO: 505321 - RNA, 32 nt, Human
ucucaaaggaugacacuucugugguguguagu

SEQ ID NO: 505322 - RNA, 22 nt, Human
ucucaaagggcugauacuguca

SEQ ID NO: 505323 - RNA, 32 nt, Human
ucucaaaguguggccaacucccauuuacuuag

SEQ ID NO: 505324 - RNA, 32 nt, Human
ucucaaauuaucaucccugguauuccagagua

SEQ ID NO: 505325 - RNA, 32 nt, Human
ucucaacacacaaagugccaccaccuucccug

SEQ ID NO: 505326 - RNA, 22 nt, Human
ucucaacaccauccaucccucu

SEQ ID NO: 505327 - RNA, 32 nt, Human
ucucaacaccauugaugccugccagugccauu

SEQ ID NO: 505328 - RNA, 32 nt, Human
ucucaacauuuugcacuguccaguauuuaaua

SEQ ID NO: 505329 - RNA, 32 nt, Human
ucucaaccaaaagguguuccucuuuaagggcu

SEQ ID NO: 505330 - RNA, 32 nt, Human
ucucaaccaagggagaaaaagacugagaugug

SEQ ID NO: 505331 - RNA, 32 nt, Human
ucucaacccaucucccuaaccccacaugcuug

SEQ ID NO: 505332 - RNA, 32 nt, Human
ucucaaccucauucccaccucuggggccccuu

SEQ ID NO: 505333 - RNA, 32 nt, Human
ucucaaccucgugauccacccaccucggucuc

SEQ ID NO: 505334 - RNA, 28 nt, Human
ucucaacgacuguuggccucaucaagag

SEQ ID NO: 505335 - RNA, 32 nt, Human
ucucaacguuuuacuuucuuuuuaucaggagg

SEQ ID NO: 505336 - RNA, 31 nt, Human
ucucaacuaauacuuugcuguugaaauguug

SEQ ID NO: 505337 - RNA, 20 nt, Human
ucucaacuacauuugaaaua

SEQ ID NO: 505338 - RNA, 32 nt, Human
ucucaacucaccgcaaccuccgccucccgggu

SEQ ID NO: 505339 - RNA, 32 nt, Human
ucucaacucaccgcaaccuccuccucuugggu

SEQ ID NO: 505340 - RNA, 25 nt, Human
ucucaacucacguuuuaauaauaca

SEQ ID NO: 505341 - RNA, 32 nt, Human
ucucaacucacucuagccugggugacagagcg

SEQ ID NO: 505342 - RNA, 32 nt, Human
ucucaacucacugcaaccuccacccgccgggu

SEQ ID NO: 505343 - RNA, 32 nt, Human
ucucaacucacugcaaccucugcccuucaggu

SEQ ID NO: 505344 - RNA, 32 nt, Human
ucucaacucacugcaagcuccgccuccugggu

SEQ ID NO: 505345 - RNA, 32 nt, Human
ucucaacucauugcaaccuccaccugccgggu

SEQ ID NO: 505346 - RNA, 32 nt, Human
ucucaacucugucacccagacuggagugcagu

SEQ ID NO: 505347 - RNA, 32 nt, Human
ucucaacucuguccccaggaaguugugugacc

SEQ ID NO: 505348 - RNA, 32 nt, Human
ucucaacugcaaccgagcacucuacagacuua

SEQ ID NO: 505349 - RNA, 32 nt, Human
ucucaacugguagcuugcuugcucugcgucuu

SEQ ID NO: 505350 - RNA, 31 nt, Human
ucucaacuuacuucuuuaaucaacauuuaau

SEQ ID NO: 505351 - RNA, 32 nt, Human
ucucaacuugaauucucccagaauuccaaugu

SEQ ID NO: 505352 - RNA, 32 nt, Human
ucucaacuuuaagauagaggcggccauaagag

SEQ ID NO: 505353 - RNA, 17 nt, Human
ucucaacuuuucuuccu

SEQ ID NO: 505354 - RNA, 19 nt, Human
ucucaagaaacaaaugcua

SEQ ID NO: 505355 - RNA, 16 nt, Human
ucucaagaauuugcca

SEQ ID NO: 505356 - RNA, 32 nt, Human
ucucaagaccuccagccagaagucccuuccaa

SEQ ID NO: 505357 - RNA, 32 nt, Human
ucucaagacugaauggugaggccagguacagu

SEQ ID NO: 505358 - RNA, 32 nt, Human
ucucaagagcaucugugcugaagaacuuggaa

SEQ ID NO: 505359 - RNA, 32 nt, Human
ucucaagaggccaaaaguuaugaccaaacuuc

SEQ ID NO: 505360 - RNA, 32 nt, Human
ucucaagauauuauggggucccagggagaugc

SEQ ID NO: 505361 - RNA, 32 nt, Human
ucucaagccaaacuugaaaccauucugaacca

SEQ ID NO: 505362 - RNA, 32 nt, Human
ucucaagccuauaaucccagcacuuugggagg

SEQ ID NO: 505363 - RNA, 32 nt, Human
ucucaagccuguaauccuagcacuuugggagg

SEQ ID NO: 505364 - RNA, 32 nt, Human
ucucaagcgugccgauuaaaacuguuacaccc

SEQ ID NO: 505365 - RNA, 32 nt, Human
ucucaagcucacugcaaccucugugcagguuc

SEQ ID NO: 505366 - RNA, 32 nt, Human
ucucaagcuccaggagcaacuuaaggcucccg

SEQ ID NO: 505367 - RNA, 20 nt, Human
ucucaagcuccuuucuguca

SEQ ID NO: 505368 - RNA, 32 nt, Human
ucucaagcugccccaacuucuucaaguccacc

SEQ ID NO: 505369 - RNA, 32 nt, Human
ucucaagcuuugaagaccuaccuguucuucca

SEQ ID NO: 505370 - RNA, 22 nt, Human
ucucaaggaaaaggacucagug

SEQ ID NO: 505371 - RNA, 20 nt, Human
ucucaaggaaauggguguca

SEQ ID NO: 505372 - RNA, 32 nt, Human
ucucaaggaaugaguugugaccuguuuacugu

SEQ ID NO: 505373 - RNA, 16 nt, Human
ucucaaggacuacugc

SEQ ID NO: 505374 - RNA, 22 nt, Human
ucucaaggacucauguauacca

SEQ ID NO: 505375 - RNA, 19 nt, Human
ucucaaggagaugcugcca

SEQ ID NO: 505376 - RNA, 32 nt, Human
ucucaaggagguuucugagauagguagaaguc

SEQ ID NO: 505377 - RNA, 16 nt, Human
ucucaaggaucuucca

SEQ ID NO: 505378 - RNA, 32 nt, Human
ucucaaggcagacauaugaaguauuuacugcu

SEQ ID NO: 505379 - RNA, 32 nt, Human
ucucaaggccaucaauuauugggggagggagg

SEQ ID NO: 505380 - RNA, 32 nt, Human
ucucaaggccguaaucucaucagguugggaca

SEQ ID NO: 505381 - RNA, 32 nt, Human
ucucaagggagaagagcugccaggagaagcaa

SEQ ID NO: 505382 - RNA, 20 nt, Human
ucucaagggcuuccauguca

SEQ ID NO: 505383 - RNA, 32 nt, Human
ucucaagggugaggcuaggaguuggcuagugu

SEQ ID NO: 505384 - RNA, 32 nt, Human
ucucaaguaagcuuaaacuacaacuugucaca

SEQ ID NO: 505385 - RNA, 32 nt, Human
ucucaaguccugcugcccaggcccaggugaga

SEQ ID NO: 505386 - RNA, 32 nt, Human
ucucaagucugaagaccgcgcauccuaacuag

SEQ ID NO: 505387 - RNA, 32 nt, Human
ucucaagugacagcaaccagacagagacuacu

SEQ ID NO: 505388 - RNA, 32 nt, Human
ucucaaguguuaggaauaaucccugcggcaug

SEQ ID NO: 505389 - RNA, 32 nt, Human
ucucaaguugcauacauuccuaccucauuuuc

SEQ ID NO: 505390 - RNA, 32 nt, Human
ucucaauaaaccugcauuaguuggcauugcaa

SEQ ID NO: 505391 - RNA, 22 nt, Human
ucucaauaaccaggucaucagg

SEQ ID NO: 505392 - RNA, 32 nt, Human
ucucaauaaucuuaauuuugauauuugaauaa

SEQ ID NO: 505393 - RNA, 32 nt, Human
ucucaauacagccugcccuugcagucccuauu

SEQ ID NO: 505394 - RNA, 31 nt, Human
ucucaauacauaaauaccuuaguagagagua

SEQ ID NO: 505395 - RNA, 32 nt, Human
ucucaauaccagucuccucacucuccacacaa

SEQ ID NO: 505396 - RNA, 18 nt, Human
ucucaauacccacugcca

SEQ ID NO: 505397 - RNA, 32 nt, Human
ucucaauagcgagucccuggcgaccacagucu

SEQ ID NO: 505398 - RNA, 32 nt, Human
ucucaauagguggcaguuuuagggaagauuuc

SEQ ID NO: 505399 - RNA, 32 nt, Human
ucucaaucauugucagagauguuuucaaguug

SEQ ID NO: 505400 - RNA, 22 nt, Human
ucucaaucuccugaccucguga

SEQ ID NO: 505401 - RNA, 32 nt, Human
ucucaaugaggagcagcucuccccaugagcaa

SEQ ID NO: 505402 - RNA, 32 nt, Human
ucucaaugccucccccucccccauucucucca

SEQ ID NO: 505403 - RNA, 32 nt, Human
ucucaaugguaaaaguuggaaccacaauauua

SEQ ID NO: 505404 - RNA, 32 nt, Human
ucucaauuaaagaaauacauugugaacuauca

SEQ ID NO: 505405 - RNA, 32 nt, Human
ucucaauuccaaggcauuggaaaaagagagga

SEQ ID NO: 505406 - RNA, 32 nt, Human
ucucaauucuugacuucugugcaccugcaggc

SEQ ID NO: 505407 - RNA, 32 nt, Human
ucucaauugacugcaaccucugcuucccaggc

SEQ ID NO: 505408 - RNA, 32 nt, Human
ucucaauuucuuccucuguauaaaggggacaa

SEQ ID NO: 505409 - RNA, 21 nt, Human
ucucaauuugucccucccucu

SEQ ID NO: 505410 - RNA, 32 nt, Human
ucucacaaaguucagaaaacagcuggacuuac

SEQ ID NO: 505411 - RNA, 32 nt, Human
ucucacaaauacaagcauaaguagaagauuug

SEQ ID NO: 505412 - RNA, 32 nt, Human
ucucacaacagugucaagagccuggacgccag

SEQ ID NO: 505413 - RNA, 21 nt, Human
ucucacaagcuccaucccuuu

SEQ ID NO: 505414 - RNA, 31 nt, Human
ucucacacacguguaugcacagcagagagac

SEQ ID NO: 505415 - RNA, 32 nt, Human
ucucacacagaaguguuugagggccugcuggg

SEQ ID NO: 505416 - RNA, 32 nt, Human
ucucacacagcaguacccugaccugcugugca

SEQ ID NO: 505417 - RNA, 32 nt, Human
ucucacacagggcagggugcagaggaaaacau

SEQ ID NO: 505418 - RNA, 32 nt, Human
ucucacaccaacagcacacaccccuuuuuccc

SEQ ID NO: 505419 - RNA, 32 nt, Human
ucucacaccagcugcacucccguggcugccag

SEQ ID NO: 505420 - RNA, 32 nt, Human
ucucacacccaccaacgcucaaucccuccagu

SEQ ID NO: 505421 - RNA, 32 nt, Human
ucucacacccucagugcugaugccaugccaac

SEQ ID NO: 505422 - RNA, 32 nt, Human
ucucacaccuccuucccacccuucuccagauu

SEQ ID NO: 505423 - RNA, 32 nt, Human
ucucacaccuguaaucccagcacuuugagagg

SEQ ID NO: 505424 - RNA, 32 nt, Human
ucucacaccuguaaucccagcacuuugggagg

SEQ ID NO: 505425 - RNA, 32 nt, Human
ucucacaccuguaaucccagcacuuugggugg

SEQ ID NO: 505426 - RNA, 32 nt, Human
ucucacacucaggccagacuccccugggcaga

SEQ ID NO: 505427 - RNA, 32 nt, Human
ucucacacugcaagcucccuggcaugggcaaa

SEQ ID NO: 505428 - RNA, 32 nt, Human
ucucacagagguggcucacagagaaggauggc

SEQ ID NO: 505429 - RNA, 32 nt, Human
ucucacagcacagcuauccacagggagacugg

SEQ ID NO: 505430 - RNA, 32 nt, Human
ucucacagcacaugcuggccagccuggggccu

SEQ ID NO: 505431 - RNA, 32 nt, Human
ucucacagcagcuggggaucacagaaccugca

SEQ ID NO: 505432 - RNA, 32 nt, Human
ucucacagcauuuagugcuuccugccuggugu

SEQ ID NO: 505433 - RNA, 32 nt, Human
ucucacagcucugggcccugggccagauuacu

SEQ ID NO: 505434 - RNA, 21 nt, Human
ucucacagggcucuccagaca

SEQ ID NO: 505435 - RNA, 32 nt, Human
ucucacaguuuuuccccaggaagucuggagaa

SEQ ID NO: 505436 - RNA, 32 nt, Human
ucucacaucccaccccuccugcccuccaaccc

SEQ ID NO: 505437 - RNA, 32 nt, Human
ucucacaucugucuuugggcacccaugcuggc

SEQ ID NO: 505438 - RNA, 32 nt, Human
ucucacauuuacaaagugcuugaucucuucau

SEQ ID NO: 505439 - RNA, 32 nt, Human
ucucaccaaacaggugaagccugcaguccaag

SEQ ID NO: 505440 - RNA, 32 nt, Human
ucucaccaaacaguuugaguaucuuuauuaag

SEQ ID NO: 505441 - RNA, 32 nt, Human
ucucaccaacaagccaacugcucacagaugac

SEQ ID NO: 505442 - RNA, 32 nt, Human
ucucaccaacuugccccacugucccaacuccu

SEQ ID NO: 505443 - RNA, 32 nt, Human
ucucaccaacuuucuuauguguguucuuuuua

SEQ ID NO: 505444 - RNA, 32 nt, Human
ucucaccaagaucuaugggcucaccuuuggcc

SEQ ID NO: 505445 - RNA, 26 nt, Human
ucucaccaauagacaccuucccgaca

SEQ ID NO: 505446 - RNA, 32 nt, Human
ucucaccacaaaaugauaagugugugagguga

SEQ ID NO: 505447 - RNA, 32 nt, Human
ucucaccacaccacagcacaccucaccacaca

SEQ ID NO: 505448 - RNA, 32 nt, Human
ucucaccacuacacuccagccugggugacagc

SEQ ID NO: 505449 - RNA, 32 nt, Human
ucucaccacuccgauucaacauaguacuggaa

SEQ ID NO: 505450 - RNA, 32 nt, Human
ucucaccacugaacuccagccugggcgacaga

SEQ ID NO: 505451 - RNA, 32 nt, Human
ucucaccacugcacuccagccugggcagcaga

SEQ ID NO: 505452 - RNA, 32 nt, Human
ucucaccacuguacuccagccugggugacaga

SEQ ID NO: 505453 - RNA, 32 nt, Human
ucucaccagccuggcccugcagaaggucgugc

SEQ ID NO: 505454 - RNA, 32 nt, Human
ucucaccaggcagacagucugccuaggaccca

SEQ ID NO: 505455 - RNA, 32 nt, Human
ucucaccaggugggacgguuuguccugcucga

SEQ ID NO: 505456 - RNA, 32 nt, Human
ucucaccaugcacuccagccuagacaacaggg

SEQ ID NO: 505457 - RNA, 32 nt, Human
ucucaccauguuagccaggauggucuugaucu

SEQ ID NO: 505458 - RNA, 32 nt, Human
ucucaccauuacacuccagccugggcgacaag

SEQ ID NO: 505459 - RNA, 27 nt, Human
ucucaccauuaugacauccaucccccu

SEQ ID NO: 505460 - RNA, 32 nt, Human
ucucaccauugcacuccagccugggcgacuga

SEQ ID NO: 505461 - RNA, 32 nt, Human
ucucacccacagaugucuguagucggucggug

SEQ ID NO: 505462 - RNA, 32 nt, Human
ucucacccagcaccuggggagaucggugcuac

SEQ ID NO: 505463 - RNA, 32 nt, Human
ucucacccaguuccucucuccuucccugaccc

SEQ ID NO: 505464 - RNA, 20 nt, Human
ucucacccaucccaccccuc

SEQ ID NO: 505465 - RNA, 21 nt, Human
ucucacccaucccuacugcca

SEQ ID NO: 505466 - RNA, 24 nt, Human
ucucaccccacagauaacccaaga

SEQ ID NO: 505467 - RNA, 32 nt, Human
ucucaccccacauucauaucccuaaauuugac

SEQ ID NO: 505468 - RNA, 32 nt, Human
ucucaccccagaggcaacuggauggugccuuu

SEQ ID NO: 505469 - RNA, 19 nt, Human
ucucaccccaggcucugca

SEQ ID NO: 505470 - RNA, 32 nt, Human
ucucacccccacccucuccccugccaggcugg

SEQ ID NO: 505471 - RNA, 20 nt, Human
ucucacccccauuaucccuc

SEQ ID NO: 505472 - RNA, 21 nt, Human
ucucaccccccaaugccucga

SEQ ID NO: 505473 - RNA, 21 nt, Human
ucucaccccccugucacccuc

SEQ ID NO: 505474 - RNA, 32 nt, Human
ucucaccccugcacuccagccugggcaacaga

SEQ ID NO: 505475 - RNA, 32 nt, Human
ucucaccccugcccugguuccugucugccguu

SEQ ID NO: 505476 - RNA, 32 nt, Human
ucucacccgaacaccagugaucaggacuggag

SEQ ID NO: 505477 - RNA, 21 nt, Human
ucucacccggaucccuccuca

SEQ ID NO: 505478 - RNA, 21 nt, Human
ucucacccgguucccacccuc

SEQ ID NO: 505479 - RNA, 32 nt, Human
ucucacccucaaggggcucacauggaggacaa

SEQ ID NO: 505480 - RNA, 22 nt, Human
ucucacccucccuucucucccu

SEQ ID NO: 505481 - RNA, 21 nt, Human
ucucacccuccucccuccccu

SEQ ID NO: 505482 - RNA, 20 nt, Human
ucucacccucuguccuuccc

SEQ ID NO: 505483 - RNA, 21 nt, Human
ucucacccugcacaucccgcu

SEQ ID NO: 505484 - RNA, 32 nt, Human
ucucacccugucuuaccagcauccacucuccc

SEQ ID NO: 505485 - RNA, 20 nt, Human
ucucacccuugcccucuguc

SEQ ID NO: 505486 - RNA, 32 nt, Human
ucucaccgcaaccuccgucuccuggguucaag

SEQ ID NO: 505487 - RNA, 32 nt, Human
ucucaccguucccgcuccugucuccuggaacc

SEQ ID NO: 505488 - RNA, 32 nt, Human
ucucaccucacaggcacaucaggcugcagaau

SEQ ID NO: 505489 - RNA, 32 nt, Human
ucucaccucacugcaaccuccaccuccuaggu

SEQ ID NO: 505490 - RNA, 32 nt, Human
ucucaccucacugcaaccuccgccuccugggu

SEQ ID NO: 505491 - RNA, 32 nt, Human
ucucaccucacugcaaccucugccucccgggu

SEQ ID NO: 505492 - RNA, 32 nt, Human
ucucaccucacugcaagcucugccucccgggc

SEQ ID NO: 505493 - RNA, 32 nt, Human
ucucaccucacugcggccuccccaguccaaag

SEQ ID NO: 505494 - RNA, 22 nt, Human
ucucaccucagccugcugagua

SEQ ID NO: 505495 - RNA, 32 nt, Human
ucucaccucauugcaaccuccgccucccgggu

SEQ ID NO: 505496 - RNA, 20 nt, Human
ucucaccuccaccaccccuc

SEQ ID NO: 505497 - RNA, 32 nt, Human
ucucaccuccaccccauccauauccucuuuau

SEQ ID NO: 505498 - RNA, 32 nt, Human
ucucaccuccgacccauaccuucuccccacag

SEQ ID NO: 505499 - RNA, 32 nt, Human
ucucaccuccgaggccuccucugccuggaaga

SEQ ID NO: 505500 - RNA, 32 nt, Human
ucucaccucuaggauaugauggaagaagugcu

SEQ ID NO: 505501 - RNA, 32 nt, Human
ucucaccucuaggccucaguguccucaucuau

SEQ ID NO: 505502 - RNA, 32 nt, Human
ucucaccucucugaccucagcuuccucaacug

SEQ ID NO: 505503 - RNA, 32 nt, Human
ucucaccugcacucccagcuacucgggaggcu

SEQ ID NO: 505504 - RNA, 32 nt, Human
ucucaccugccuggggccucaccugcuggagu

SEQ ID NO: 505505 - RNA, 23 nt, Human
ucucaccugcuuccuuccagaca

SEQ ID NO: 505506 - RNA, 32 nt, Human
ucucaccuggaggcaagagggaggggacagag

SEQ ID NO: 505507 - RNA, 32 nt, Human
ucucaccuggucuugcggcuguggccaccgcc

SEQ ID NO: 505508 - RNA, 32 nt, Human
ucucaccuguacucuuccgaaaaauccucuuc

SEQ ID NO: 505509 - RNA, 32 nt, Human
ucucaccugucgcuggagugcaguggugugau

SEQ ID NO: 505510 - RNA, 32 nt, Human
ucucaccuuacugcaaccaccacuuccugggu

SEQ ID NO: 505511 - RNA, 32 nt, Human
ucucaccuugcaccuucuucaggauuuuauau

SEQ ID NO: 505512 - RNA, 19 nt, Human
ucucaccuuguucauuuca

SEQ ID NO: 505513 - RNA, 32 nt, Human
ucucaccuuguucauuucacauagugguuuau

SEQ ID NO: 505514 - RNA, 32 nt, Human
ucucaccuuguucucugccuccagaggaucau

SEQ ID NO: 505515 - RNA, 21 nt, Human
ucucaccuuucccaccucucu

SEQ ID NO: 505516 - RNA, 32 nt, Human
ucucacgacucuaccauguccaguggaguuca

SEQ ID NO: 505517 - RNA, 32 nt, Human
ucucacgccuguaaucccagcacuuugggagg

SEQ ID NO: 505518 - RNA, 32 nt, Human
ucucacgccuguagucccagcacuuugggagc

SEQ ID NO: 505519 - RNA, 32 nt, Human
ucucacgccugugaucccagcacuuugggagg

SEQ ID NO: 505520 - RNA, 32 nt, Human
ucucacggaaccacuggcaucagauggugaag

SEQ ID NO: 505521 - RNA, 32 nt, Human
ucucacggcaggcaaaucagugagaaaaaugu

SEQ ID NO: 505522 - RNA, 22 nt, Human
ucucacggccaugcuucagggu

SEQ ID NO: 505523 - RNA, 32 nt, Human
ucucacgggacagacuuuacugagauguacca

SEQ ID NO: 505524 - RNA, 32 nt, Human
ucucacuaauugagucugcuuccacguccucu

SEQ ID NO: 505525 - RNA, 32 nt, Human
ucucacuacuaaaaauacaaaauuagccacgc

SEQ ID NO: 505526 - RNA, 32 nt, Human
ucucacuacugcacuugacuagucuuaaaaca

SEQ ID NO: 505527 - RNA, 32 nt, Human
ucucacuauguugcccaggcaggucuugaacu

SEQ ID NO: 505528 - RNA, 32 nt, Human
ucucacuauguugcccaggccggucuuaaacu

SEQ ID NO: 505529 - RNA, 32 nt, Human
ucucacuauguugcccaggcugaucuugaacu

SEQ ID NO: 505530 - RNA, 24 nt, Human
ucucacuauguugcccaggcugcu

SEQ ID NO: 505531 - RNA, 32 nt, Human
ucucacuauguugucuggagugcuguggugga

SEQ ID NO: 505532 - RNA, 32 nt, Human
ucucacuauuaaauuuauuuaaauuagcaagc

SEQ ID NO: 505533 - RNA, 32 nt, Human
ucucacucaccuucugauuuugcaauguaaga

SEQ ID NO: 505534 - RNA, 32 nt, Human
ucucacucacugcaauugcuucuacucugggc

SEQ ID NO: 505535 - RNA, 32 nt, Human
ucucacucagccugaauuugcauuaaguguuc

SEQ ID NO: 505536 - RNA, 32 nt, Human
ucucacucauaagugagagcuaagcuaugagg

SEQ ID NO: 505537 - RNA, 32 nt, Human
ucucacucaugcauacaaagcagcuaaaaaug

SEQ ID NO: 505538 - RNA, 32 nt, Human
ucucacucauuucccuucccugaauccaaacu

SEQ ID NO: 505539 - RNA, 32 nt, Human
ucucacuccaagcccaguuacagcagaaaguu

SEQ ID NO: 505540 - RNA, 32 nt, Human
ucucacuccaccaucacuucuuugccaaaugc

SEQ ID NO: 505541 - RNA, 32 nt, Human
ucucacuccagccugggcaacagaaugagacc

SEQ ID NO: 505542 - RNA, 32 nt, Human
ucucacucccaaaugacuccuccccuucguug

SEQ ID NO: 505543 - RNA, 21 nt, Human
ucucacuccccacaccccucu

SEQ ID NO: 505544 - RNA, 32 nt, Human
ucucacuccuagaaaacaggaaaaagaagguc

SEQ ID NO: 505545 - RNA, 32 nt, Human
ucucacuccuguaauaccagcacuuugggagg

SEQ ID NO: 505546 - RNA, 32 nt, Human
ucucacuccugugaacuuucaggcuggacuua

SEQ ID NO: 505547 - RNA, 20 nt, Human
ucucacuccuuuuccugucc

SEQ ID NO: 505548 - RNA, 19 nt, Human
ucucacucggugccgcugc

SEQ ID NO: 505549 - RNA, 21 nt, Human
ucucacucuccccaguccuca

SEQ ID NO: 505550 - RNA, 32 nt, Human
ucucacucuccuccgcucaaacucagcucacu

SEQ ID NO: 505551 - RNA, 32 nt, Human
ucucacucucucucccccaaccccuccuuuuc

SEQ ID NO: 505552 - RNA, 32 nt, Human
ucucacucucucugucccuugugccucuguag

SEQ ID NO: 505553 - RNA, 32 nt, Human
ucucacucugcagggauccuccugccucuccu

SEQ ID NO: 505554 - RNA, 32 nt, Human
ucucacucuggcgcucuggagugcaguggugu

SEQ ID NO: 505555 - RNA, 32 nt, Human
ucucacucugggacauagaccaauugugcuuc

SEQ ID NO: 505556 - RNA, 32 nt, Human
ucucacucugucauuguuaaucuaagaauaaa

SEQ ID NO: 505557 - RNA, 32 nt, Human
ucucacucugugugcuccucuggaaggccaag

SEQ ID NO: 505558 - RNA, 19 nt, Human
ucucacugacagcaugcca

SEQ ID NO: 505559 - RNA, 32 nt, Human
ucucacugagucugauaguguguuggaagguu

SEQ ID NO: 505560 - RNA, 32 nt, Human
ucucacugcaaccuccaccucccagguucaag

SEQ ID NO: 505561 - RNA, 32 nt, Human
ucucacugcaaccucugccuccuggguucagg

SEQ ID NO: 505562 - RNA, 32 nt, Human
ucucacugcaagcuccacuuccuggguucaug

SEQ ID NO: 505563 - RNA, 32 nt, Human
ucucacugcaccuggauggcaacgugcuggac

SEQ ID NO: 505564 - RNA, 32 nt, Human
ucucacugcacucaggcuggagugcaguggua

SEQ ID NO: 505565 - RNA, 32 nt, Human
ucucacugcagccucaaccuccuggguucaag

SEQ ID NO: 505566 - RNA, 24 nt, Human
ucucacugccaaacugccuguccu

SEQ ID NO: 505567 - RNA, 23 nt, Human
ucucacugccacgccuuccuuuc

SEQ ID NO: 505568 - RNA, 31 nt, Human
ucucacugccucucggugaccuccguccucu

SEQ ID NO: 505569 - RNA, 32 nt, Human
ucucacugcucugcacaugugcacugacguga

SEQ ID NO: 505570 - RNA, 32 nt, Human
ucucacugggcccucugguggccaggugcaug

SEQ ID NO: 505571 - RNA, 32 nt, Human
ucucacugucaccaggcuggagugcaguggug

SEQ ID NO: 505572 - RNA, 32 nt, Human
ucucacuguccaccccuucgcuguccagaauu

SEQ ID NO: 505573 - RNA, 20 nt, Human
ucucacugucccucucuguc

SEQ ID NO: 505574 - RNA, 32 nt, Human
ucucacuguggaagaguucugcuaacagaagc

SEQ ID NO: 505575 - RNA, 32 nt, Human
ucucacuguggcuuguggcuccgggaaaugga

SEQ ID NO: 505576 - RNA, 32 nt, Human
ucucacuguguugcccagccugggugucaaua

SEQ ID NO: 505577 - RNA, 32 nt, Human
ucucacuguugccaggcuggagugcaguggca

SEQ ID NO: 505578 - RNA, 32 nt, Human
ucucacuguugccuggcuggagcacuuugguu

SEQ ID NO: 505579 - RNA, 32 nt, Human
ucucacuguugccuugaacuccugggcucaag

SEQ ID NO: 505580 - RNA, 32 nt, Human
ucucacuguuguucaaacuggucucaaacucc

SEQ ID NO: 505581 - RNA, 32 nt, Human
ucucacuuacuugcuuuuucucucugcaggag

SEQ ID NO: 505582 - RNA, 32 nt, Human
ucucacuuauaaggagaguuauaggcuauuca

SEQ ID NO: 505583 - RNA, 32 nt, Human
ucucacuucccuucccuucacagacaggcuuu

SEQ ID NO: 505584 - RNA, 21 nt, Human
ucucacuucugccuccuauca

SEQ ID NO: 505585 - RNA, 32 nt, Human
ucucacuugcugagaggauuuggggaauuauc

SEQ ID NO: 505586 - RNA, 32 nt, Human
ucucacuugcuuauacuauucucuccauugau

SEQ ID NO: 505587 - RNA, 32 nt, Human
ucucacuuucccacccuauccuuccuccccac

SEQ ID NO: 505588 - RNA, 23 nt, Human
ucucacuuuccuguggguugcug

SEQ ID NO: 505589 - RNA, 32 nt, Human
ucucacuuuguugcccaggcuggucuugaacu

SEQ ID NO: 505590 - RNA, 32 nt, Human
ucucacuuuuaaaacuaauacagacuuaucuc

SEQ ID NO: 505591 - RNA, 32 nt, Human
ucucagaaacugaugagguacaauucugaacc

SEQ ID NO: 505592 - RNA, 21 nt, Human
ucucagaaacuucucucauua

SEQ ID NO: 505593 - RNA, 32 nt, Human
ucucagaaagccuuucugacugaucucagcau

SEQ ID NO: 505594 - RNA, 32 nt, Human
ucucagaacaaagacagcaaccaaugagccag

SEQ ID NO: 505595 - RNA, 32 nt, Human
ucucagaacacaaaggaggcuugaggacugag

SEQ ID NO: 505596 - RNA, 32 nt, Human
ucucagaacuuaaacucuuaccaaaaucugua

SEQ ID NO: 505597 - RNA, 32 nt, Human
ucucagaaggagccaauggacacugguguaga

SEQ ID NO: 505598 - RNA, 21 nt, Human
ucucagaauauguccaucaca

SEQ ID NO: 505599 - RNA, 32 nt, Human
ucucagaaugaauauuuaauacauuuguuaca

SEQ ID NO: 505600 - RNA, 32 nt, Human
ucucagaauuuuacucuguuacugcaaaaucu

SEQ ID NO: 505601 - RNA, 21 nt, Human
ucucagacaagcguggcacag

SEQ ID NO: 505602 - RNA, 22 nt, Human
ucucagacagcaagaaaggcug

SEQ ID NO: 505603 - RNA, 32 nt, Human
ucucagacaggcugggacucagaguuauuucc

SEQ ID NO: 505604 - RNA, 32 nt, Human
ucucagacaguccugugggucuuuggauucgu

SEQ ID NO: 505605 - RNA, 32 nt, Human
ucucagaccaauguaggcucucacugcagggg

SEQ ID NO: 505606 - RNA, 32 nt, Human
ucucagaccacuggaaugcaaguccuucuucc

SEQ ID NO: 505607 - RNA, 32 nt, Human
ucucagaccugccaccccacagccagagguuu

SEQ ID NO: 505608 - RNA, 32 nt, Human
ucucagaccuucccaucucccuggcuuuccau

SEQ ID NO: 505609 - RNA, 32 nt, Human
ucucagacuccaccaccucuuaauggcucagu

SEQ ID NO: 505610 - RNA, 32 nt, Human
ucucagacuccccugaggguggaggagcugug

SEQ ID NO: 505611 - RNA, 20 nt, Human
ucucagagaagagccaugaa

SEQ ID NO: 505612 - RNA, 32 nt, Human
ucucagagaaggaggugaguucuuccugccug

SEQ ID NO: 505613 - RNA, 32 nt, Human
ucucagagaucauuuucugguaaagaaaaagg

SEQ ID NO: 505614 - RNA, 32 nt, Human
ucucagagaugugaagccagauccucauggca

SEQ ID NO: 505615 - RNA, 32 nt, Human
ucucagagcaggagccucucucccuugcccag

SEQ ID NO: 505616 - RNA, 32 nt, Human
ucucagagcuaggcacaugggcacaggucccc

SEQ ID NO: 505617 - RNA, 23 nt, Human
ucucagaggagcauugcccguca

SEQ ID NO: 505618 - RNA, 21 nt, Human
ucucagaggagcugaggaaca

SEQ ID NO: 505619 - RNA, 32 nt, Human
ucucagaggaggaggagcuggagacaggaggg

SEQ ID NO: 505620 - RNA, 22 nt, Human
ucucagaggauuauaauuguca

SEQ ID NO: 505621 - RNA, 32 nt, Human
ucucagaggcuggagagcagagcaccaagauc

SEQ ID NO: 505622 - RNA, 23 nt, Human
ucucagaguaguaguguuuguca

SEQ ID NO: 505623 - RNA, 32 nt, Human
ucucagaguggaaugacuccuuuuccuuccug

SEQ ID NO: 505624 - RNA, 32 nt, Human
ucucagaguuuccaagcagggaaacauuacug

SEQ ID NO: 505625 - RNA, 32 nt, Human
ucucagauacccuuuagauuuucccccauuga

SEQ ID NO: 505626 - RNA, 32 nt, Human
ucucagaucacugcaaccuccaccucccaggu

SEQ ID NO: 505627 - RNA, 32 nt, Human
ucucagaucacugcaaccuccgccuccugggu

SEQ ID NO: 505628 - RNA, 32 nt, Human
ucucagaucacugcaaccucugccucccgggu

SEQ ID NO: 505629 - RNA, 32 nt, Human
ucucagaucacugcaaccucugccuccugggu

SEQ ID NO: 505630 - RNA, 32 nt, Human
ucucagaucugccaggucucagaagagugcgg

SEQ ID NO: 505631 - RNA, 32 nt, Human
ucucagaugcugcugcuugacaauccacacaa

SEQ ID NO: 505632 - RNA, 32 nt, Human
ucucagaugggacauugugggaaaggcuuugg

SEQ ID NO: 505633 - RNA, 32 nt, Human
ucucagauguggccauguuacaguagagggua

SEQ ID NO: 505634 - RNA, 32 nt, Human
ucucagcaaaacaauaaaaauuaacugagugu

SEQ ID NO: 505635 - RNA, 32 nt, Human
ucucagcaccacccucucccucugugccaugg

SEQ ID NO: 505636 - RNA, 32 nt, Human
ucucagcaccaccuaacgcaccaccuugcccu

SEQ ID NO: 505637 - RNA, 32 nt, Human
ucucagcacuucaggaguacggagcaggugga

SEQ ID NO: 505638 - RNA, 32 nt, Human
ucucagcagauauuucuuugguacuaccaugu

SEQ ID NO: 505639 - RNA, 32 nt, Human
ucucagcagaugggggagcugguaggcagaug

SEQ ID NO: 505640 - RNA, 32 nt, Human
ucucagcagccagcuccugguagcugaugagg

SEQ ID NO: 505641 - RNA, 32 nt, Human
ucucagcagccccugagucaccugcacaaggu

SEQ ID NO: 505642 - RNA, 25 nt, Human
ucucagcagccgcccacacgcuccu

SEQ ID NO: 505643 - RNA, 32 nt, Human
ucucagcaggccaaggccagacaugugaggaa

SEQ ID NO: 505644 - RNA, 32 nt, Human
ucucagcaggguggggaaugccagccagggag

SEQ ID NO: 505645 - RNA, 32 nt, Human
ucucagcagucaggcuucugguugugaaauca

SEQ ID NO: 505646 - RNA, 32 nt, Human
ucucagcaucagaaugagaaagccugagaaga

SEQ ID NO: 505647 - RNA, 32 nt, Human
ucucagcaugauacuauuauuugcuuccuaau

SEQ ID NO: 505648 - RNA, 32 nt, Human
ucucagcauuguacauggcaauaagcuuguuc

SEQ ID NO: 505649 - RNA, 32 nt, Human
ucucagcauuuauuuuccugucucuuccacca

SEQ ID NO: 505650 - RNA, 32 nt, Human
ucucagccacugcucccuggagagaaaugaaa

SEQ ID NO: 505651 - RNA, 32 nt, Human
ucucagccagcccugcucucucccucuucccu

SEQ ID NO: 505652 - RNA, 31 nt, Human
ucucagccauuucagcagccccgucaaccgc

SEQ ID NO: 505653 - RNA, 32 nt, Human
ucucagccccaccucagcaggucuccaggaug

SEQ ID NO: 505654 - RNA, 32 nt, Human
ucucagccccagaacacagcuguguccuagag

SEQ ID NO: 505655 - RNA, 32 nt, Human
ucucagccccugccuuccccagucucuggguc

SEQ ID NO: 505656 - RNA, 32 nt, Human
ucucagcccugagacacaggccucaguuagga

SEQ ID NO: 505657 - RNA, 32 nt, Human
ucucagcccugccuugccccuaccucagcguc

SEQ ID NO: 505658 - RNA, 32 nt, Human
ucucagcccugccuuucucuggagcauucuga

SEQ ID NO: 505659 - RNA, 32 nt, Human
ucucagcccuggcccucugccugcuccucacu

SEQ ID NO: 505660 - RNA, 32 nt, Human
ucucagccguggcagccgaggcugcagcccgg

SEQ ID NO: 505661 - RNA, 32 nt, Human
ucucagccucaagccauuuuccugccuuugcc

SEQ ID NO: 505662 - RNA, 32 nt, Human
ucucagccucacaccccuuccucccagucugg

SEQ ID NO: 505663 - RNA, 32 nt, Human
ucucagccuccgccuggucucuggguuggcug

SEQ ID NO: 505664 - RNA, 32 nt, Human
ucucagccucuccccucuccuuucucucccug

SEQ ID NO: 505665 - RNA, 32 nt, Human
ucucagccucuccuggugucuugggcacccuu

SEQ ID NO: 505666 - RNA, 32 nt, Human
ucucagccucuggccaacacagucccacccau

SEQ ID NO: 505667 - RNA, 32 nt, Human
ucucagccucuucucugccuccagagaggugg

SEQ ID NO: 505668 - RNA, 32 nt, Human
ucucagccuuucucccucccccgucucauucc

SEQ ID NO: 505669 - RNA, 32 nt, Human
ucucagccuuucugugucuccuuuccuccgcc

SEQ ID NO: 505670 - RNA, 32 nt, Human
ucucagccuuugccaucuccucaucccugagc

SEQ ID NO: 505671 - RNA, 32 nt, Human
ucucagcgcucccaugaucgcccggugccuuu

SEQ ID NO: 505672 - RNA, 32 nt, Human
ucucagcgucagagccccuagcucuucucuag

SEQ ID NO: 505673 - RNA, 32 nt, Human
ucucagcguguaggcaagaaauucgaaagaga

SEQ ID NO: 505674 - RNA, 32 nt, Human
ucucagcuagccucauuaucccuucucaguau

SEQ ID NO: 505675 - RNA, 32 nt, Human
ucucagcuauaauucuguuauaugaggggcag

SEQ ID NO: 505676 - RNA, 32 nt, Human
ucucagcucacagcaaccuccgccucccaggu

SEQ ID NO: 505677 - RNA, 32 nt, Human
ucucagcucacagcaaccuccgccucccgggu

SEQ ID NO: 505678 - RNA, 32 nt, Human
ucucagcucacagcaaccucugccuccugggu

SEQ ID NO: 505679 - RNA, 32 nt, Human
ucucagcucaccaaaucucugccucccaggcu

SEQ ID NO: 505680 - RNA, 32 nt, Human
ucucagcucaccacaaccuccaccuccugggu

SEQ ID NO: 505681 - RNA, 32 nt, Human
ucucagcucaccacaaccuccgccucccaggu

SEQ ID NO: 505682 - RNA, 32 nt, Human
ucucagcucaccgaaaccuccaccuacuaggc

SEQ ID NO: 505683 - RNA, 32 nt, Human
ucucagcucaccgcaaccuccaccuccagggu

SEQ ID NO: 505684 - RNA, 32 nt, Human
ucucagcucaccgcaaccuccaccuccugggu

SEQ ID NO: 505685 - RNA, 32 nt, Human
ucucagcucaccgcaaccuccacucgcagguu

SEQ ID NO: 505686 - RNA, 32 nt, Human
ucucagcucaccgcaaccuccgccucccgggu

SEQ ID NO: 505687 - RNA, 32 nt, Human
ucucagcucaccgcaaccucugccucccagau

SEQ ID NO: 505688 - RNA, 32 nt, Human
ucucagcucaccgcauccuccaccucccaggu

SEQ ID NO: 505689 - RNA, 32 nt, Human
ucucagcucaccucaaccuccgccucccgggu

SEQ ID NO: 505690 - RNA, 32 nt, Human
ucucagcucacggcaaccuccgccucccgggu

SEQ ID NO: 505691 - RNA, 32 nt, Human
ucucagcucacuacaaccuccgccucccaugu

SEQ ID NO: 505692 - RNA, 32 nt, Human
ucucagcucacuacaaccucugccuucugguu

SEQ ID NO: 505693 - RNA, 32 nt, Human
ucucagcucacugaagccucgaccuccagaac

SEQ ID NO: 505694 - RNA, 32 nt, Human
ucucagcucacugcaaacuccaccucccaggu

SEQ ID NO: 505695 - RNA, 32 nt, Human
ucucagcucacugcaaacucugccucccgaau

SEQ ID NO: 505696 - RNA, 32 nt, Human
ucucagcucacugcaacaccgccucccggguu

SEQ ID NO: 505697 - RNA, 32 nt, Human
ucucagcucacugcaacauccaccuccugggu

SEQ ID NO: 505698 - RNA, 32 nt, Human
ucucagcucacugcaacauccgccucuggggu

SEQ ID NO: 505699 - RNA, 32 nt, Human
ucucagcucacugcaaccacugccucccaggc

SEQ ID NO: 505700 - RNA, 32 nt, Human
ucucagcucacugcaacccccgccuccugggu

SEQ ID NO: 505701 - RNA, 32 nt, Human
ucucagcucacugcaaccuacgccuucugggu

SEQ ID NO: 505702 - RNA, 21 nt, Human
ucucagcucacugcaaccucc

SEQ ID NO: 505703 - RNA, 32 nt, Human
ucucagcucacugcaaccuccaccucccagac

SEQ ID NO: 505704 - RNA, 32 nt, Human
ucucagcucacugcaaccuccaccucccagga

SEQ ID NO: 505705 - RNA, 32 nt, Human
ucucagcucacugcaaccuccaccucccaggc

SEQ ID NO: 505706 - RNA, 32 nt, Human
ucucagcucacugcaaccuccaccucccaggu

SEQ ID NO: 505707 - RNA, 32 nt, Human
ucucagcucacugcaaccuccaccucccgggu

SEQ ID NO: 505708 - RNA, 32 nt, Human
ucucagcucacugcaaccuccaccucccuggu

SEQ ID NO: 505709 - RNA, 32 nt, Human
ucucagcucacugcaaccuccaccuccggguu

SEQ ID NO: 505710 - RNA, 32 nt, Human
ucucagcucacugcaaccuccaccuccugggu

SEQ ID NO: 505711 - RNA, 32 nt, Human
ucucagcucacugcaaccuccaccucgcaggu

SEQ ID NO: 505712 - RNA, 32 nt, Human
ucucagcucacugcaaccuccaccucucaggu

SEQ ID NO: 505713 - RNA, 32 nt, Human
ucucagcucacugcaaccuccaccucuuaugu

SEQ ID NO: 505714 - RNA, 32 nt, Human
ucucagcucacugcaaccuccaccuugcgugu

SEQ ID NO: 505715 - RNA, 32 nt, Human
ucucagcucacugcaaccuccaucuccagguu

SEQ ID NO: 505716 - RNA, 32 nt, Human
ucucagcucacugcaaccuccaucucccggau

SEQ ID NO: 505717 - RNA, 32 nt, Human
ucucagcucacugcaaccuccaucuccuggau

SEQ ID NO: 505718 - RNA, 32 nt, Human
ucucagcucacugcaaccucccccuccugggu

SEQ ID NO: 505719 - RNA, 23 nt, Human
ucucagcucacugcaaccuccgc

SEQ ID NO: 505720 - RNA, 32 nt, Human
ucucagcucacugcaaccuccgcaucccgggu

SEQ ID NO: 505721 - RNA, 32 nt, Human
ucucagcucacugcaaccuccgcccccugggu

SEQ ID NO: 505722 - RNA, 32 nt, Human
ucucagcucacugcaaccuccgccucccaagu

SEQ ID NO: 505723 - RNA, 32 nt, Human
ucucagcucacugcaaccuccgccucccaggu

SEQ ID NO: 505724 - RNA, 32 nt, Human
ucucagcucacugcaaccuccgccucccgggu

SEQ ID NO: 505725 - RNA, 32 nt, Human
ucucagcucacugcaaccuccgccuccugagg

SEQ ID NO: 505726 - RNA, 32 nt, Human
ucucagcucacugcaaccuccgccuccuggga

SEQ ID NO: 505727 - RNA, 32 nt, Human
ucucagcucacugcaaccuccgccuccugggu

SEQ ID NO: 505728 - RNA, 32 nt, Human
ucucagcucacugcaaccuccgccucuugggu

SEQ ID NO: 505729 - RNA, 32 nt, Human
ucucagcucacugcaaccuccgccugcugggu

SEQ ID NO: 505730 - RNA, 32 nt, Human
ucucagcucacugcaaccuccgccuucugggu

SEQ ID NO: 505731 - RNA, 32 nt, Human
ucucagcucacugcaaccuccgguucccgggc

SEQ ID NO: 505732 - RNA, 32 nt, Human
ucucagcucacugcaaccuccgucuccagggu

SEQ ID NO: 505733 - RNA, 32 nt, Human
ucucagcucacugcaaccuccguuuccugggu

SEQ ID NO: 505734 - RNA, 32 nt, Human
ucucagcucacugcaaccuccuccucccgggu

SEQ ID NO: 505735 - RNA, 32 nt, Human
ucucagcucacugcaaccuccuccuucugggu

SEQ ID NO: 505736 - RNA, 32 nt, Human
ucucagcucacugcaaccucgaccucuugggu

SEQ ID NO: 505737 - RNA, 32 nt, Human
ucucagcucacugcaaccucuaccuccugggu

SEQ ID NO: 505738 - RNA, 32 nt, Human
ucucagcucacugcaaccucucucucccgggu

SEQ ID NO: 505739 - RNA, 32 nt, Human
ucucagcucacugcaaccucugccuccagagu

SEQ ID NO: 505740 - RNA, 32 nt, Human
ucucagcucacugcaaccucugccucccaggu

SEQ ID NO: 505741 - RNA, 32 nt, Human
ucucagcucacugcaaccucugccucccaguu

SEQ ID NO: 505742 - RNA, 32 nt, Human
ucucagcucacugcaaccucugccucccggau

SEQ ID NO: 505743 - RNA, 32 nt, Human
ucucagcucacugcaaccucugccucccgggu

SEQ ID NO: 505744 - RNA, 32 nt, Human
ucucagcucacugcaaccucugccucccuggu

SEQ ID NO: 505745 - RNA, 32 nt, Human
ucucagcucacugcaaccucugccuccugagu

SEQ ID NO: 505746 - RNA, 32 nt, Human
ucucagcucacugcaaccucugccuccuggau

SEQ ID NO: 505747 - RNA, 32 nt, Human
ucucagcucacugcaaccucugccuccugggc

SEQ ID NO: 505748 - RNA, 32 nt, Human
ucucagcucacugcaaccucugccuccugggu

SEQ ID NO: 505749 - RNA, 32 nt, Human
ucucagcucacugcaaccucugccuccugguu

SEQ ID NO: 505750 - RNA, 32 nt, Human
ucucagcucacugcaaccucugccuucuggau

SEQ ID NO: 505751 - RNA, 32 nt, Human
ucucagcucacugcaaccucugcuucccgggu

SEQ ID NO: 505752 - RNA, 32 nt, Human
ucucagcucacugcaaccucugucucccgggu

SEQ ID NO: 505753 - RNA, 32 nt, Human
ucucagcucacugcaaccucugucuccugggu

SEQ ID NO: 505754 - RNA, 32 nt, Human
ucucagcucacugcaaccugugccucccggcu

SEQ ID NO: 505755 - RNA, 32 nt, Human
ucucagcucacugcaaccuucaccucccaggu

SEQ ID NO: 505756 - RNA, 32 nt, Human
ucucagcucacugcaaccuuggccucccgugu

SEQ ID NO: 505757 - RNA, 32 nt, Human
ucucagcucacugcaaccuuugucucccgggc

SEQ ID NO: 505758 - RNA, 32 nt, Human
ucucagcucacugcaacguccaccuccugggu

SEQ ID NO: 505759 - RNA, 32 nt, Human
ucucagcucacugcaacguccaccucuugagu

SEQ ID NO: 505760 - RNA, 32 nt, Human
ucucagcucacugcaacgucugccucccgggu

SEQ ID NO: 505761 - RNA, 32 nt, Human
ucucagcucacugcaacuuccaccucccaggu

SEQ ID NO: 505762 - RNA, 32 nt, Human
ucucagcucacugcaacuuccgcaucccaggu

SEQ ID NO: 505763 - RNA, 32 nt, Human
ucucagcucacugcaacuucugccucccaggu

SEQ ID NO: 505764 - RNA, 32 nt, Human
ucucagcucacugcaacuucugccuccugggu

SEQ ID NO: 505765 - RNA, 32 nt, Human
ucucagcucacugcaacuucugccuccuggua

SEQ ID NO: 505766 - RNA, 32 nt, Human
ucucagcucacugcaagcuccaacucccgggu

SEQ ID NO: 505767 - RNA, 32 nt, Human
ucucagcucacugcaagcuccaccucccgggu

SEQ ID NO: 505768 - RNA, 32 nt, Human
ucucagcucacugcaagcuccaccuuccgggu

SEQ ID NO: 505769 - RNA, 32 nt, Human
ucucagcucacugcaagcuccgccucccaggu

SEQ ID NO: 505770 - RNA, 32 nt, Human
ucucagcucacugcaagcuccgccucccgggu

SEQ ID NO: 505771 - RNA, 32 nt, Human
ucucagcucacugcaagcuccgccuccucccg

SEQ ID NO: 505772 - RNA, 32 nt, Human
ucucagcucacugcaagcuccgccuccugggu

SEQ ID NO: 505773 - RNA, 32 nt, Human
ucucagcucacugcaagcucuaccucuugguu

SEQ ID NO: 505774 - RNA, 32 nt, Human
ucucagcucacugcaagcucugccucccgggu

SEQ ID NO: 505775 - RNA, 32 nt, Human
ucucagcucacugcaagcucugccucccgugu

SEQ ID NO: 505776 - RNA, 32 nt, Human
ucucagcucacugcaagcucugccucucaggu

SEQ ID NO: 505777 - RNA, 32 nt, Human
ucucagcucacugcaaucuccaccuccugggu

SEQ ID NO: 505778 - RNA, 32 nt, Human
ucucagcucacugcaaucuucaccuccuaggc

SEQ ID NO: 505779 - RNA, 32 nt, Human
ucucagcucacugcacccuccgccucucgggu

SEQ ID NO: 505780 - RNA, 32 nt, Human
ucucagcucacugcacccuugaccucccauac

SEQ ID NO: 505781 - RNA, 32 nt, Human
ucucagcucacugcagccacugccucccaggu

SEQ ID NO: 505782 - RNA, 32 nt, Human
ucucagcucacugcagcccccgccucccaggu

SEQ ID NO: 505783 - RNA, 32 nt, Human
ucucagcucacugcagccucaacugccccagg

SEQ ID NO: 505784 - RNA, 32 nt, Human
ucucagcucacugcagccuccaacucucuggu

SEQ ID NO: 505785 - RNA, 32 nt, Human
ucucagcucacugcagccuccaccucccaggu

SEQ ID NO: 505786 - RNA, 32 nt, Human
ucucagcucacugcagccuccacuuccugggu

SEQ ID NO: 505787 - RNA, 32 nt, Human
ucucagcucacugcagccuccgucucccaggu

SEQ ID NO: 505788 - RNA, 32 nt, Human
ucucagcucacugcagccucugccacccagau

SEQ ID NO: 505789 - RNA, 32 nt, Human
ucucagcucacugcagccucugccucccgggu

SEQ ID NO: 505790 - RNA, 32 nt, Human
ucucagcucacugcagccucugccuccugagu

SEQ ID NO: 505791 - RNA, 32 nt, Human
ucucagcucacugcagccucugucucccgggc

SEQ ID NO: 505792 - RNA, 32 nt, Human
ucucagcucacugcagccuugaccuccugggu

SEQ ID NO: 505793 - RNA, 32 nt, Human
ucucagcucacugcaggcucugccuccugggu

SEQ ID NO: 505794 - RNA, 32 nt, Human
ucucagcucacugcagucucugccucccgggu

SEQ ID NO: 505795 - RNA, 32 nt, Human
ucucagcucacugcauccucugccucccgggu

SEQ ID NO: 505796 - RNA, 32 nt, Human
ucucagcucacugccaccucugccucccaggu

SEQ ID NO: 505797 - RNA, 32 nt, Human
ucucagcucacugccaccuuugccuccugggu

SEQ ID NO: 505798 - RNA, 32 nt, Human
ucucagcucacugcgaccuccaccucccaugu

SEQ ID NO: 505799 - RNA, 32 nt, Human
ucucagcucacugcgaccugcaccuccugggu

SEQ ID NO: 505800 - RNA, 32 nt, Human
ucucagcucacugcggccuugaacuccugggc

SEQ ID NO: 505801 - RNA, 32 nt, Human
ucucagcucacuggagccucugccuuccaggu

SEQ ID NO: 505802 - RNA, 32 nt, Human
ucucagcucacuggcaacaucugccucccggg

SEQ ID NO: 505803 - RNA, 32 nt, Human
ucucagcucacuguaaccuccaccucccggau

SEQ ID NO: 505804 - RNA, 32 nt, Human
ucucagcucacuguaaccucugccucccugcu

SEQ ID NO: 505805 - RNA, 32 nt, Human
ucucagcucacuguacuccagcccggguucaa

SEQ ID NO: 505806 - RNA, 32 nt, Human
ucucagcucacuguaggcucuaccucaugggu

SEQ ID NO: 505807 - RNA, 32 nt, Human
ucucagcucacugugaccuccgccuccugggu

SEQ ID NO: 505808 - RNA, 32 nt, Human
ucucagcucagugcaaccuccgccacccgggu

SEQ ID NO: 505809 - RNA, 32 nt, Human
ucucagcucagugcaaccuccgcccccuggga

SEQ ID NO: 505810 - RNA, 32 nt, Human
ucucagcucagugcaaccuccgccucccgagu

SEQ ID NO: 505811 - RNA, 32 nt, Human
ucucagcucauugcaaccucggcucacuguaa

SEQ ID NO: 505812 - RNA, 32 nt, Human
ucucagcucauugcaaccucugucucccaggu

SEQ ID NO: 505813 - RNA, 32 nt, Human
ucucagcucauugcaacuuccaccuccugggu

SEQ ID NO: 505814 - RNA, 32 nt, Human
ucucagcuccaauuuuauugucauuuucauca

SEQ ID NO: 505815 - RNA, 32 nt, Human
ucucagcuccaugcaaccucugccuccugggu

SEQ ID NO: 505816 - RNA, 32 nt, Human
ucucagcucccauuucuacucucccauggcuu

SEQ ID NO: 505817 - RNA, 32 nt, Human
ucucagcuccccugccacccagccucugaggc

SEQ ID NO: 505818 - RNA, 19 nt, Human
ucucagcucccuccuuccc

SEQ ID NO: 505819 - RNA, 32 nt, Human
ucucagcucccugcaaccuccaccuccugggu

SEQ ID NO: 505820 - RNA, 32 nt, Human
ucucagcucccugcaaccuccgccucccgggu

SEQ ID NO: 505821 - RNA, 32 nt, Human
ucucagcucccuuuaaccuccagcuccugggu

SEQ ID NO: 505822 - RNA, 32 nt, Human
ucucagcucgccgcaaccuccgccucccaggu

SEQ ID NO: 505823 - RNA, 32 nt, Human
ucucagcucgcugcaacccccaccucccaggu

SEQ ID NO: 505824 - RNA, 32 nt, Human
ucucagcucgcugcaaccuccaccuccugggc

SEQ ID NO: 505825 - RNA, 32 nt, Human
ucucagcucgcugcaaccuccaccuccugggu

SEQ ID NO: 505826 - RNA, 32 nt, Human
ucucagcucgcugcaaccuccaccuuccgggu

SEQ ID NO: 505827 - RNA, 32 nt, Human
ucucagcucucugcaaccuccaccuccugggu

SEQ ID NO: 505828 - RNA, 32 nt, Human
ucucagcucugccuccccuggccagguugucc

SEQ ID NO: 505829 - RNA, 32 nt, Human
ucucagcugaacacccuccuuucacucccaaa

SEQ ID NO: 505830 - RNA, 32 nt, Human
ucucagcugaacacugucaucugccagagcuu

SEQ ID NO: 505831 - RNA, 23 nt, Human
ucucagcugccaagugagcuuca

SEQ ID NO: 505832 - RNA, 16 nt, Human
ucucagcugccugcca

SEQ ID NO: 505833 - RNA, 32 nt, Human
ucucagcugggaagagaggaugcaagaccaga

SEQ ID NO: 505834 - RNA, 32 nt, Human
ucucagcugguuuugcccacuucccuuugacu

SEQ ID NO: 505835 - RNA, 20 nt, Human
ucucagcuguccaaaguuca

SEQ ID NO: 505836 - RNA, 19 nt, Human
ucucagcuguccagauuca

SEQ ID NO: 505837 - RNA, 23 nt, Human
ucucagcuguucugaugccuuca

SEQ ID NO: 505838 - RNA, 32 nt, Human
ucucagcuuaaugcaaccucuaccucccaggu

SEQ ID NO: 505839 - RNA, 32 nt, Human
ucucagcuuacucaaccucugccucuuggguu

SEQ ID NO: 505840 - RNA, 32 nt, Human
ucucagcuuacugcaaccucugccucccgggu

SEQ ID NO: 505841 - RNA, 32 nt, Human
ucucagcuuacugcaaccucugucucccgggu

SEQ ID NO: 505842 - RNA, 32 nt, Human
ucucagcuuauugcagucuccaccuccugagu

SEQ ID NO: 505843 - RNA, 32 nt, Human
ucucagcuucugguaccaccuccaugggcccc

SEQ ID NO: 505844 - RNA, 32 nt, Human
ucucagcuuucuuagagaauucccuagaacua

SEQ ID NO: 505845 - RNA, 15 nt, Human
ucucaggaaagcugu

SEQ ID NO: 505846 - RNA, 32 nt, Human
ucucaggaaaguuguccaggguuuagggauau

SEQ ID NO: 505847 - RNA, 27 nt, Human
ucucaggaaggacugagccucugucuu

SEQ ID NO: 505848 - RNA, 32 nt, Human
ucucaggaauauuuggagcugugcaaauguua

SEQ ID NO: 505849 - RNA, 32 nt, Human
ucucaggacaagagaaugcaggcaggcaaaug

SEQ ID NO: 505850 - RNA, 20 nt, Human
ucucaggaccaaagcuuuca

SEQ ID NO: 505851 - RNA, 32 nt, Human
ucucaggaccuccugagggcuaugucaugagc

SEQ ID NO: 505852 - RNA, 32 nt, Human
ucucaggacucccuucccucugggcagaggcc

SEQ ID NO: 505853 - RNA, 32 nt, Human
ucucaggagacaauaacuccagugauguuuuu

SEQ ID NO: 505854 - RNA, 32 nt, Human
ucucaggagacagugaggcugccccuccuacc

SEQ ID NO: 505855 - RNA, 32 nt, Human
ucucaggagaccaaaucucacagaaaaauagg

SEQ ID NO: 505856 - RNA, 22 nt, Human
ucucaggagcaggaagacucag

SEQ ID NO: 505857 - RNA, 32 nt, Human
ucucaggaggcuggggugggaagaucacuuga

SEQ ID NO: 505858 - RNA, 32 nt, Human
ucucaggaguccaggacccaggagagggaaga

SEQ ID NO: 505859 - RNA, 32 nt, Human
ucucaggaguuucucuugaugaucuaccuuuu

SEQ ID NO: 505860 - RNA, 32 nt, Human
ucucaggauagaaaauauguuuuggcauuuga

SEQ ID NO: 505861 - RNA, 32 nt, Human
ucucaggauaggggcugcccuuuuugucugau

SEQ ID NO: 505862 - RNA, 32 nt, Human
ucucaggauggagugaagaccuggagaggagg

SEQ ID NO: 505863 - RNA, 32 nt, Human
ucucaggcaagacucaggacugcucuggacau

SEQ ID NO: 505864 - RNA, 32 nt, Human
ucucaggcagagcagggugguccgggcacacu

SEQ ID NO: 505865 - RNA, 32 nt, Human
ucucaggcaggcaguucugcuucagcuuagag

SEQ ID NO: 505866 - RNA, 31 nt, Human
ucucaggcagguugucccacagcagagacaa

SEQ ID NO: 505867 - RNA, 32 nt, Human
ucucaggccacugcauuuagccugggcgacag

SEQ ID NO: 505868 - RNA, 32 nt, Human
ucucaggcccagccucagagcagaucuuggca

SEQ ID NO: 505869 - RNA, 32 nt, Human
ucucaggccuauaaucucagcacuaugggagg

SEQ ID NO: 505870 - RNA, 32 nt, Human
ucucaggccugcuucacggcagccugcccagu

SEQ ID NO: 505871 - RNA, 32 nt, Human
ucucaggcucaagcaaaccucucaccucagcc

SEQ ID NO: 505872 - RNA, 32 nt, Human
ucucaggcucaagcaauccucccgccucagcc

SEQ ID NO: 505873 - RNA, 32 nt, Human
ucucaggcucaagcgauccucccaucucagcc

SEQ ID NO: 505874 - RNA, 32 nt, Human
ucucaggcucaagcgauucucccaccucagcc

SEQ ID NO: 505875 - RNA, 32 nt, Human
ucucaggcucaagugauccucuuaccuuagcc

SEQ ID NO: 505876 - RNA, 32 nt, Human
ucucaggcucacugagugcaaugucugccugc

SEQ ID NO: 505877 - RNA, 32 nt, Human
ucucaggcucaggugauccucccaucucagcc

SEQ ID NO: 505878 - RNA, 32 nt, Human
ucucaggcuccagccauccucucaccucagcc

SEQ ID NO: 505879 - RNA, 32 nt, Human
ucucaggcucugauguuugaaaaagaagggaa

SEQ ID NO: 505880 - RNA, 32 nt, Human
ucucaggcugagccacaucucacuuuuucgcu

SEQ ID NO: 505881 - RNA, 21 nt, Human
ucucaggcuggaguacagugg

SEQ ID NO: 505882 - RNA, 21 nt, Human
ucucaggcuggagugcagugg

SEQ ID NO: 505883 - RNA, 32 nt, Human
ucucaggcuggcugacuuucccugcauguacg

SEQ ID NO: 505884 - RNA, 32 nt, Human
ucucaggcugggcagaggucacacagugagua

SEQ ID NO: 505885 - RNA, 32 nt, Human
ucucaggcuguggcuggaacaggacaggauga

SEQ ID NO: 505886 - RNA, 19 nt, Human
ucucagggacaagaccagu

SEQ ID NO: 505887 - RNA, 19 nt, Human
ucucagggacagaggccag

SEQ ID NO: 505888 - RNA, 32 nt, Human
ucucagggacagaggccagcagaggagccagc

SEQ ID NO: 505889 - RNA, 32 nt, Human
ucucagggacucucagggcagcuccugccacu

SEQ ID NO: 505890 - RNA, 20 nt, Human
ucucagggagaaccucugcu

SEQ ID NO: 505891 - RNA, 32 nt, Human
ucucagggaggaaaccggcuugccagcaagua

SEQ ID NO: 505892 - RNA, 31 nt, Human
ucucagggcaaaggaaccuggcucauuugaa

SEQ ID NO: 505893 - RNA, 32 nt, Human
ucucagggcacggaggcagaacugaaugcccg

SEQ ID NO: 505894 - RNA, 32 nt, Human
ucucagggccaggcaugggaccugccaucgag

SEQ ID NO: 505895 - RNA, 32 nt, Human
ucucagggcccugcuguucccucugccuggaa

SEQ ID NO: 505896 - RNA, 32 nt, Human
ucucagggcuccugccuucuguccugguguca

SEQ ID NO: 505897 - RNA, 32 nt, Human
ucucaggggcuggggcucuaccuccccuggcc

SEQ ID NO: 505898 - RNA, 32 nt, Human
ucucagggguuggggacagggccagguagccu

SEQ ID NO: 505899 - RNA, 20 nt, Human
ucucaggguacuuucuggga

SEQ ID NO: 505900 - RNA, 32 nt, Human
ucucagggucuccccagcccaguccccuugcu

SEQ ID NO: 505901 - RNA, 32 nt, Human
ucucaggucacugcaaccucugccucccaggu

SEQ ID NO: 505902 - RNA, 32 nt, Human
ucucaggucacugcaaccucugccuccugggu

SEQ ID NO: 505903 - RNA, 32 nt, Human
ucucaggucucauuccagaccuggugagccag

SEQ ID NO: 505904 - RNA, 32 nt, Human
ucucaggugaacgcaucacuugccaaacuguu

SEQ ID NO: 505905 - RNA, 31 nt, Human
ucucaggugaugucuccauguggcuaagucu

SEQ ID NO: 505906 - RNA, 32 nt, Human
ucucaggugggacuccagaauucccgcaucug

SEQ ID NO: 505907 - RNA, 32 nt, Human
ucucagguggguggagcaguggugggagaaga

SEQ ID NO: 505908 - RNA, 32 nt, Human
ucucagguucaagcgauuuuucugccucagcc

SEQ ID NO: 505909 - RNA, 32 nt, Human
ucucagguucaagugauucuccugccucagcc

SEQ ID NO: 505910 - RNA, 32 nt, Human
ucucagguucaagugauucuccugccucugcc

SEQ ID NO: 505911 - RNA, 32 nt, Human
ucucagguugucuaaguguuuuuauguaaaac

SEQ ID NO: 505912 - RNA, 32 nt, Human
ucucagguuucugcucaaaagucaccuuucgg

SEQ ID NO: 505913 - RNA, 32 nt, Human
ucucaguacaagggcccugggauggagccaac

SEQ ID NO: 505914 - RNA, 32 nt, Human
ucucagucaagcaaagugugguauccacagac

SEQ ID NO: 505915 - RNA, 32 nt, Human
ucucagucacacaugucuagccuccaggcgcu

SEQ ID NO: 505916 - RNA, 32 nt, Human
ucucagucacuucaguaucuuugcuacacaga

SEQ ID NO: 505917 - RNA, 32 nt, Human
ucucaguccaacaacaucacucaaacaacccu

SEQ ID NO: 505918 - RNA, 18 nt, Human
ucucaguccaccagcuca

SEQ ID NO: 505919 - RNA, 32 nt, Human
ucucaguccacugcaaccucugcccucccggg

SEQ ID NO: 505920 - RNA, 32 nt, Human
ucucagucccuggccuugccccuggcucuggc

SEQ ID NO: 505921 - RNA, 32 nt, Human
ucucaguccugggucugugggagcccucaugc

SEQ ID NO: 505922 - RNA, 32 nt, Human
ucucagucgcccaggcuggagugcagcagcac

SEQ ID NO: 505923 - RNA, 32 nt, Human
ucucagucuaccuccucuuuucugccucugaa

SEQ ID NO: 505924 - RNA, 32 nt, Human
ucucagucucuuccucuuccggcugggauugg

SEQ ID NO: 505925 - RNA, 32 nt, Human
ucucagucugaacaagaaaacuccuucuggag

SEQ ID NO: 505926 - RNA, 32 nt, Human
ucucagucugccuuaaaggaacugugaaggcu

SEQ ID NO: 505927 - RNA, 32 nt, Human
ucucagucuuuccugaggacuugggaacugcc

SEQ ID NO: 505928 - RNA, 32 nt, Human
ucucagugaccccagggcagagcccagagaag

SEQ ID NO: 505929 - RNA, 26 nt, Human
ucucagugagcaccagcugccuccca

SEQ ID NO: 505930 - RNA, 32 nt, Human
ucucagugaggagcugcugcugugcuguuuaa

SEQ ID NO: 505931 - RNA, 32 nt, Human
ucucagugccccggaucggaggccguccaucg

SEQ ID NO: 505932 - RNA, 32 nt, Human
ucucagugccuucucucagcucccaggccaac

SEQ ID NO: 505933 - RNA, 32 nt, Human
ucucagugggaaauccacccagcaaccuaaua

SEQ ID NO: 505934 - RNA, 32 nt, Human
ucucaguggggagggggcaacagauggggcgg

SEQ ID NO: 505935 - RNA, 31 nt, Human
ucucaguggguggagugccagggaggaggag

SEQ ID NO: 505936 - RNA, 32 nt, Human
ucucaguguagaaaucaugucuucuuaauugc

SEQ ID NO: 505937 - RNA, 32 nt, Human
ucucaguuaggccuguauguguguacaugucc

SEQ ID NO: 505938 - RNA, 32 nt, Human
ucucaguucacugcaaccuccacccugcaggu

SEQ ID NO: 505939 - RNA, 32 nt, Human
ucucaguucacugcaaccuccacuuccuaggu

SEQ ID NO: 505940 - RNA, 32 nt, Human
ucucaguucacugcaaccucugccucccacgu

SEQ ID NO: 505941 - RNA, 32 nt, Human
ucucaguucacugcaaccucugccucccgggu

SEQ ID NO: 505942 - RNA, 32 nt, Human
ucucaguucacugcaaccucugccuccuaagu

SEQ ID NO: 505943 - RNA, 32 nt, Human
ucucaguucacugcaaccucugccuccugggu

SEQ ID NO: 505944 - RNA, 32 nt, Human
ucucaguucacugcaacuucugccucccgagu

SEQ ID NO: 505945 - RNA, 32 nt, Human
ucucaguucacugcaagcuccgccuccucguu

SEQ ID NO: 505946 - RNA, 32 nt, Human
ucucaguucacugcagccuccgcccuccaggu

SEQ ID NO: 505947 - RNA, 32 nt, Human
ucucaguucacugcagucucugccuccuuggu

SEQ ID NO: 505948 - RNA, 32 nt, Human
ucucaguucagcugguucuggcugaggccucc

SEQ ID NO: 505949 - RNA, 32 nt, Human
ucucaguucauuuccugagguggauuuacuga

SEQ ID NO: 505950 - RNA, 22 nt, Human
ucucaguucccccuucagcuga

SEQ ID NO: 505951 - RNA, 32 nt, Human
ucucaguucucucccuuccucucuccuuauag

SEQ ID NO: 505952 - RNA, 32 nt, Human
ucucaguucugcugcugauguaccaugaucuu

SEQ ID NO: 505953 - RNA, 32 nt, Human
ucucaguugcagcccugcugcugccugccugg

SEQ ID NO: 505954 - RNA, 32 nt, Human
ucucaguuguguauuuguucaucuucauaugc

SEQ ID NO: 505955 - RNA, 32 nt, Human
ucucaguuuccagaaauggagggacucaugcu

SEQ ID NO: 505956 - RNA, 32 nt, Human
ucucaguuuccgcaauggcaagauggggugga

SEQ ID NO: 505957 - RNA, 32 nt, Human
ucucauaacauauaugagguauacaaaauuuu

SEQ ID NO: 505958 - RNA, 32 nt, Human
ucucauacagaagagcuaagauuggcagaaau

SEQ ID NO: 505959 - RNA, 32 nt, Human
ucucauaccucuggggacaggaaagguagagg

SEQ ID NO: 505960 - RNA, 31 nt, Human
ucucauacucucaaggagggagagugcauuu

SEQ ID NO: 505961 - RNA, 32 nt, Human
ucucauagcaaugccccacuacccucaguacc

SEQ ID NO: 505962 - RNA, 31 nt, Human
ucucauaggaaacauccucauugauccucuu

SEQ ID NO: 505963 - RNA, 32 nt, Human
ucucauagguugagcaauuucccccuaaacca

SEQ ID NO: 505964 - RNA, 32 nt, Human
ucucauaguguuuuauacucaguaccuguuuu

SEQ ID NO: 505965 - RNA, 23 nt, Human
ucucauauaucucgucuuuccuc

SEQ ID NO: 505966 - RNA, 32 nt, Human
ucucauaugccaccccaugugccuuuagucca

SEQ ID NO: 505967 - RNA, 32 nt, Human
ucucauauuucccuaauaaacuccucaacuuu

SEQ ID NO: 505968 - RNA, 32 nt, Human
ucucaucaagacagagaaaggacuaucaaaag

SEQ ID NO: 505969 - RNA, 32 nt, Human
ucucaucaauccaucaagccugcuagaacucu

SEQ ID NO: 505970 - RNA, 32 nt, Human
ucucaucacagacauagccagcucuucaguuc

SEQ ID NO: 505971 - RNA, 32 nt, Human
ucucaucacccaggcuagagugcaguggcaca

SEQ ID NO: 505972 - RNA, 32 nt, Human
ucucaucaccuauccuggaacugaugcaauua

SEQ ID NO: 505973 - RNA, 32 nt, Human
ucucaucaggcggcaacuucacccucacaugc

SEQ ID NO: 505974 - RNA, 32 nt, Human
ucucaucaguaguucacauacaaaucauccau

SEQ ID NO: 505975 - RNA, 32 nt, Human
ucucaucaucccucuagggacagcagggcagg

SEQ ID NO: 505976 - RNA, 32 nt, Human
ucucauccacugguggcucagagccauaaggu

SEQ ID NO: 505977 - RNA, 32 nt, Human
ucucauccagaagcaagaaaagggcaugucuu

SEQ ID NO: 505978 - RNA, 32 nt, Human
ucucauccauccccuucucugucuuugccucu

SEQ ID NO: 505979 - RNA, 32 nt, Human
ucucaucccauucugcgucaugcuuguguuau

SEQ ID NO: 505980 - RNA, 32 nt, Human
ucucaucccucggcaccucuuguuuuccuuuu

SEQ ID NO: 505981 - RNA, 32 nt, Human
ucucauccuccccauuccucguccacacucca

SEQ ID NO: 505982 - RNA, 32 nt, Human
ucucauccugcaggugggacucucagcugaca

SEQ ID NO: 505983 - RNA, 32 nt, Human
ucucauccugggcagagguugccuaguuggua

SEQ ID NO: 505984 - RNA, 32 nt, Human
ucucauccuuucuccucccucuccuuuuccug

SEQ ID NO: 505985 - RNA, 32 nt, Human
ucucaucguggacaccacugcccacaccucca

SEQ ID NO: 505986 - RNA, 21 nt, Human
ucucaucguucagggauggac

SEQ ID NO: 505987 - RNA, 32 nt, Human
ucucaucucacugcaaccuccaccucccaggu

SEQ ID NO: 505988 - RNA, 22 nt, Human
ucucaucucagcccuaucuuca

SEQ ID NO: 505989 - RNA, 32 nt, Human
ucucaucucagugcaaccuccaccucucacgu

SEQ ID NO: 505990 - RNA, 32 nt, Human
ucucaucucccacaaucucuggccuccaggau

SEQ ID NO: 505991 - RNA, 32 nt, Human
ucucaucucccugcaaccuccgccuccugggu

SEQ ID NO: 505992 - RNA, 32 nt, Human
ucucaucugacacgucuuuuucccaggguucg

SEQ ID NO: 505993 - RNA, 32 nt, Human
ucucaucugaggcauccagcagucucugccuu

SEQ ID NO: 505994 - RNA, 21 nt, Human
ucucaucugcuccagcccccu

SEQ ID NO: 505995 - RNA, 32 nt, Human
ucucaucuggggaacugucauugccagcagag

SEQ ID NO: 505996 - RNA, 32 nt, Human
ucucaucugucacccaggcuggagugcaaugg

SEQ ID NO: 505997 - RNA, 32 nt, Human
ucucaugaacccaggaggcagagguugcagug

SEQ ID NO: 505998 - RNA, 18 nt, Human
ucucaugacaacucagug

SEQ ID NO: 505999 - RNA, 32 nt, Human
ucucaugccagccuguccuucuggcuuccucu

SEQ ID NO: 506000 - RNA, 32 nt, Human
ucucaugccuauaaucccagcacuuugggagg

SEQ ID NO: 506001 - RNA, 32 nt, Human
ucucaugccucuaaucccagcacuuuggaaga

SEQ ID NO: 506002 - RNA, 32 nt, Human
ucucaugccuguaaucccagcacuuugggagg

SEQ ID NO: 506003 - RNA, 32 nt, Human
ucucaugccuugcguaugcagcaggaacugug

SEQ ID NO: 506004 - RNA, 24 nt, Human
ucucaugccuuuuuguccuguccu

SEQ ID NO: 506005 - RNA, 32 nt, Human
ucucaugcucguuucuuuccuccuuuugacua

SEQ ID NO: 506006 - RNA, 32 nt, Human
ucucaugcuguggccccuccccagaccgccag

SEQ ID NO: 506007 - RNA, 32 nt, Human
ucucaugcuguugcugcuacugucuuacuauu

SEQ ID NO: 506008 - RNA, 32 nt, Human
ucucauggacaucucuuccucucccaggaagc

SEQ ID NO: 506009 - RNA, 32 nt, Human
ucucauggacccugauguugugcuccacauug

SEQ ID NO: 506010 - RNA, 32 nt, Human
ucucauggcaggcaccuguaaucccaucuacu

SEQ ID NO: 506011 - RNA, 32 nt, Human
ucucauggcuccuugcugggccaagcccucca

SEQ ID NO: 506012 - RNA, 32 nt, Human
ucucaugggaaggaguucuuacacaggugagg

SEQ ID NO: 506013 - RNA, 32 nt, Human
ucucaugggucuucauuuucucuuauuuuguu

SEQ ID NO: 506014 - RNA, 24 nt, Human
ucucauguaccccauaaauauaua

SEQ ID NO: 506015 - RNA, 32 nt, Human
ucucaugucacggcaaccuccgccucccaggu

SEQ ID NO: 506016 - RNA, 32 nt, Human
ucucaugucucauuagagugcaagggggagga

SEQ ID NO: 506017 - RNA, 32 nt, Human
ucucaugugaacccagcaggcuuggaaccagc

SEQ ID NO: 506018 - RNA, 32 nt, Human
ucucauguucauuccgggucaccaagagguuc

SEQ ID NO: 506019 - RNA, 32 nt, Human
ucucauguuccccucacccaucaugccagcca

SEQ ID NO: 506020 - RNA, 32 nt, Human
ucucauguucucugcucccacaccuaagccaa

SEQ ID NO: 506021 - RNA, 32 nt, Human
ucucauguuuggaacaauaaaguugaaauuuu

SEQ ID NO: 506022 - RNA, 32 nt, Human
ucucauuacaucuuuaauuucauauccaagua

SEQ ID NO: 506023 - RNA, 32 nt, Human
ucucauuaccagugacuaauuuugccacaggg

SEQ ID NO: 506024 - RNA, 32 nt, Human
ucucauuacuauuuuuagcauucuccaggcuu

SEQ ID NO: 506025 - RNA, 32 nt, Human
ucucauuaguaggaacaugugagaugaagcac

SEQ ID NO: 506026 - RNA, 32 nt, Human
ucucauuaguaggaacaugugagaugaagcau

SEQ ID NO: 506027 - RNA, 32 nt, Human
ucucauuagugucucccgggccuguccccaac

SEQ ID NO: 506028 - RNA, 32 nt, Human
ucucauucaaauacuguauuuuauauaggcau

SEQ ID NO: 506029 - RNA, 32 nt, Human
ucucauucacugggaaguauucuauugcaguc

SEQ ID NO: 506030 - RNA, 28 nt, Human
ucucauuccuaaguugccucauuaauuu

SEQ ID NO: 506031 - RNA, 32 nt, Human
ucucauuccucuuucccuucuuuuagcaauaa

SEQ ID NO: 506032 - RNA, 31 nt, Human
ucucauuccugcucugggccauuuguguuuu

SEQ ID NO: 506033 - RNA, 32 nt, Human
ucucauuccuuugacucugccggacuuuguca

SEQ ID NO: 506034 - RNA, 32 nt, Human
ucucauucuaccugcaguuuaauuggaaagau

SEQ ID NO: 506035 - RNA, 32 nt, Human
ucucauucucagacuguucaauauggugcccg

SEQ ID NO: 506036 - RNA, 32 nt, Human
ucucauucuguuauccaguucauuccagcaau

SEQ ID NO: 506037 - RNA, 32 nt, Human
ucucauucuuccaagcugagagucuagcacuc

SEQ ID NO: 506038 - RNA, 32 nt, Human
ucucauucuugucacccagacuggagugcgau

SEQ ID NO: 506039 - RNA, 32 nt, Human
ucucauucuuucaaaauaaaacuuuuugaaau

SEQ ID NO: 506040 - RNA, 18 nt, Human
ucucauugagcuggcaga

SEQ ID NO: 506041 - RNA, 32 nt, Human
ucucauugcaaauacaaaauaaaaauuaguug

SEQ ID NO: 506042 - RNA, 32 nt, Human
ucucauugccaagugccagcuguuacacaugg

SEQ ID NO: 506043 - RNA, 18 nt, Human
ucucauugccacauguca

SEQ ID NO: 506044 - RNA, 32 nt, Human
ucucauugcccaggcuggagugcagugagcua

SEQ ID NO: 506045 - RNA, 32 nt, Human
ucucauuggcugcagcacaucacaguggaccu

SEQ ID NO: 506046 - RNA, 32 nt, Human
ucucauugggccacugcagucgagccugggcg

SEQ ID NO: 506047 - RNA, 32 nt, Human
ucucauuggggugagaggaggcccaggaggag

SEQ ID NO: 506048 - RNA, 31 nt, Human
ucucauuggguggauggaugggugaggaggg

SEQ ID NO: 506049 - RNA, 32 nt, Human
ucucauuguucaauucccaccuaggagugaga

SEQ ID NO: 506050 - RNA, 32 nt, Human
ucucauuuaagcaauuuacuuccucauucugg

SEQ ID NO: 506051 - RNA, 32 nt, Human
ucucauuuauucaacaugauucuuaagcacua

SEQ ID NO: 506052 - RNA, 32 nt, Human
ucucauuuauucucacaccaccaccacagcgu

SEQ ID NO: 506053 - RNA, 32 nt, Human
ucucauuuccaaaccaucagcugcuuuuaaaa

SEQ ID NO: 506054 - RNA, 32 nt, Human
ucucauuucccaaaggguuuguauucugcuaa

SEQ ID NO: 506055 - RNA, 32 nt, Human
ucucauuucccucccucccucugacaccuuuc

SEQ ID NO: 506056 - RNA, 32 nt, Human
ucucauuucucccacaccuccuccccauaccu

SEQ ID NO: 506057 - RNA, 32 nt, Human
ucucauuucuuucaugcaguuacucugggaua

SEQ ID NO: 506058 - RNA, 32 nt, Human
ucucauuugaccccuuugcuuccagagaugaa

SEQ ID NO: 506059 - RNA, 32 nt, Human
ucucauuugaucucaaaacagcuugacagagc

SEQ ID NO: 506060 - RNA, 32 nt, Human
ucucauuugcagaagucuaagaauguaccuuu

SEQ ID NO: 506061 - RNA, 32 nt, Human
ucucauuuucacuuguuuucucuaauaaaaau

SEQ ID NO: 506062 - RNA, 32 nt, Human
ucucauuuuccuguuuacacuggggauuugga

SEQ ID NO: 506063 - RNA, 32 nt, Human
ucucauuuugaacccagaucugaacagaauua

SEQ ID NO: 506064 - RNA, 19 nt, Human
ucucauuuugacagcauga

SEQ ID NO: 506065 - RNA, 32 nt, Human
ucucauuuuggguuuucucuucuccugcuuuc

SEQ ID NO: 506066 - RNA, 32 nt, Human
ucuccaaaacguucuucccagacugcgaggac

SEQ ID NO: 506067 - RNA, 32 nt, Human
ucuccaaaagugcugggauuacaggcaugagu

SEQ ID NO: 506068 - RNA, 32 nt, Human
ucuccaaaaguggucaguuuggcugggcaaua

SEQ ID NO: 506069 - RNA, 32 nt, Human
ucuccaaaaugagagcauguuccugggagcca

SEQ ID NO: 506070 - RNA, 32 nt, Human
ucuccaaacagccuugugccucaccuaccccc

SEQ ID NO: 506071 - RNA, 32 nt, Human
ucuccaaacauguaggaggaaaugaggaaauc

SEQ ID NO: 506072 - RNA, 32 nt, Human
ucuccaaacgugcugggauuacaggcaugagc

SEQ ID NO: 506073 - RNA, 32 nt, Human
ucuccaaacuauauuguuucuuugcuaagucc

SEQ ID NO: 506074 - RNA, 32 nt, Human
ucuccaaacugaagcagccucuccccaggucc

SEQ ID NO: 506075 - RNA, 32 nt, Human
ucuccaaacugauuucaccaaggaaccccuuu

SEQ ID NO: 506076 - RNA, 20 nt, Human
ucuccaaagaaccuucccuc

SEQ ID NO: 506077 - RNA, 32 nt, Human
ucuccaaagaagcuguacaggugagguggcuc

SEQ ID NO: 506078 - RNA, 32 nt, Human
ucuccaaauguucacugguacucugccacuuu

SEQ ID NO: 506079 - RNA, 32 nt, Human
ucuccaaauguugggguagggaagggagggga

SEQ ID NO: 506080 - RNA, 32 nt, Human
ucuccaaauugauuuccacaguggcugaacua

SEQ ID NO: 506081 - RNA, 32 nt, Human
ucuccaacaucucuccccaccucaugauuguc

SEQ ID NO: 506082 - RNA, 25 nt, Human
ucuccaacauuuuucccggucugug

SEQ ID NO: 506083 - RNA, 21 nt, Human
ucuccaaccacucaucccucu

SEQ ID NO: 506084 - RNA, 32 nt, Human
ucuccaaccagcucccagugcugcuguccucu

SEQ ID NO: 506085 - RNA, 31 nt, Human
ucuccaaccagggcagaaaggagggaggauu

SEQ ID NO: 506086 - RNA, 23 nt, Human
ucuccaacccugugggcuguaag

SEQ ID NO: 506087 - RNA, 32 nt, Human
ucuccaaccuccgccagcagcaaccgaacuug

SEQ ID NO: 506088 - RNA, 32 nt, Human
ucuccaaccugguuuucaccuacugagggcgc

SEQ ID NO: 506089 - RNA, 18 nt, Human
ucuccaacucagcugggc

SEQ ID NO: 506090 - RNA, 32 nt, Human
ucuccaacucugcagcaguggcagcagcaguc

SEQ ID NO: 506091 - RNA, 32 nt, Human
ucuccaagaagcucuggcuccuuuccuagaac

SEQ ID NO: 506092 - RNA, 32 nt, Human
ucuccaagcucagggcaaucccuucccuccug

SEQ ID NO: 506093 - RNA, 32 nt, Human
ucuccaagcugcacaccagaggcugcacagag

SEQ ID NO: 506094 - RNA, 31 nt, Human
ucuccaaggcacuuucggccuuccuucuucu

SEQ ID NO: 506095 - RNA, 32 nt, Human
ucuccaaggcccaugaggauaugacugcccug

SEQ ID NO: 506096 - RNA, 24 nt, Human
ucuccaaggcccucuccuggucuc

SEQ ID NO: 506097 - RNA, 32 nt, Human
ucuccaagggccaucagugucuugccuagcuu

SEQ ID NO: 506098 - RNA, 31 nt, Human
ucuccaagguagcauccaaugccaagguggc

SEQ ID NO: 506099 - RNA, 32 nt, Human
ucuccaaucaggccuccuucuucugagaaaau

SEQ ID NO: 506100 - RNA, 32 nt, Human
ucuccaaucccugagucucagauguuucauuu

SEQ ID NO: 506101 - RNA, 21 nt, Human
ucuccaaugaaaguuuucuca

SEQ ID NO: 506102 - RNA, 32 nt, Human
ucuccaaugagacucaauggcugggccguggu

SEQ ID NO: 506103 - RNA, 21 nt, Human
ucuccaauggaaagcuuuuca

SEQ ID NO: 506104 - RNA, 31 nt, Human
ucuccaauggccacgagaaccuuaaaccuuu

SEQ ID NO: 506105 - RNA, 32 nt, Human
ucuccaaugucagcacaaaggaggcuuuuucu

SEQ ID NO: 506106 - RNA, 32 nt, Human
ucuccaauuguaagagaaagggggcagggaag

SEQ ID NO: 506107 - RNA, 22 nt, Human
ucuccacaaaauuuaaaaauua

SEQ ID NO: 506108 - RNA, 32 nt, Human
ucuccacaaaauuuaaaaauuagcggccgggc

SEQ ID NO: 506109 - RNA, 20 nt, Human
ucuccacaaaguguuaccag

SEQ ID NO: 506110 - RNA, 32 nt, Human
ucuccacaaugccaagacggagaccacagccu

SEQ ID NO: 506111 - RNA, 19 nt, Human
ucuccacacacagcuccag

SEQ ID NO: 506112 - RNA, 32 nt, Human
ucuccacacagaaaaucuucuugauucuauag

SEQ ID NO: 506113 - RNA, 32 nt, Human
ucuccacacagugcucaaggccagcuuauagu

SEQ ID NO: 506114 - RNA, 32 nt, Human
ucuccacaccauugacuugcagaugcuucugu

SEQ ID NO: 506115 - RNA, 23 nt, Human
ucuccacaccccuccuguuccag

SEQ ID NO: 506116 - RNA, 32 nt, Human
ucuccacaccgccucugccugccccuguggac

SEQ ID NO: 506117 - RNA, 32 nt, Human
ucuccacacucuucgcuccugggaagucaacu

SEQ ID NO: 506118 - RNA, 20 nt, Human
ucuccacagaagaagcccag

SEQ ID NO: 506119 - RNA, 32 nt, Human
ucuccacagcaaccccaggcugaagcagguuc

SEQ ID NO: 506120 - RNA, 32 nt, Human
ucuccacagcaacucuggagggaagcugaaga

SEQ ID NO: 506121 - RNA, 20 nt, Human
ucuccacagcaagcguccag

SEQ ID NO: 506122 - RNA, 21 nt, Human
ucuccacagcccucagucccc

SEQ ID NO: 506123 - RNA, 32 nt, Human
ucuccacagccuucuccagccugugugauaca

SEQ ID NO: 506124 - RNA, 32 nt, Human
ucuccacaggacagcacugcuuccaugcuuca

SEQ ID NO: 506125 - RNA, 32 nt, Human
ucuccacaggaggcuguggcagcuguggcauc

SEQ ID NO: 506126 - RNA, 20 nt, Human
ucuccacaggggcagcccca

SEQ ID NO: 506127 - RNA, 32 nt, Human
ucuccacaucccagauccccaguggguuucuc

SEQ ID NO: 506128 - RNA, 20 nt, Human
ucuccacaucgcggcuccgg

SEQ ID NO: 506129 - RNA, 32 nt, Human
ucuccacaucuuccuucucugaaguccaggua

SEQ ID NO: 506130 - RNA, 32 nt, Human
ucuccacaugagaccacaggcccagccagagc

SEQ ID NO: 506131 - RNA, 23 nt, Human
ucuccacauguuccagcucccag

SEQ ID NO: 506132 - RNA, 32 nt, Human
ucuccacauguuggguguccauccuggggcag

SEQ ID NO: 506133 - RNA, 19 nt, Human
ucuccacauugcaguucca

SEQ ID NO: 506134 - RNA, 32 nt, Human
ucuccaccaaaaagaggaagugccuccagcuu

SEQ ID NO: 506135 - RNA, 23 nt, Human
ucuccaccacaacaccaacaucu

SEQ ID NO: 506136 - RNA, 32 nt, Human
ucuccaccagcacaucacuaugcaucuguucc

SEQ ID NO: 506137 - RNA, 32 nt, Human
ucuccaccagggucgcuccaucacccaaacaa

SEQ ID NO: 506138 - RNA, 18 nt, Human
ucuccaccaugggcugca

SEQ ID NO: 506139 - RNA, 32 nt, Human
ucuccacccuaccccuuacucugggugucagg

SEQ ID NO: 506140 - RNA, 32 nt, Human
ucuccacccuaucccagccucccccacaagcc

SEQ ID NO: 506141 - RNA, 32 nt, Human
ucuccacccuccuugcaccagacuaaaucugu

SEQ ID NO: 506142 - RNA, 32 nt, Human
ucuccacccugaguuuccaucuucuaucagau

SEQ ID NO: 506143 - RNA, 32 nt, Human
ucuccacccuuuccccuucuuucguccucacc

SEQ ID NO: 506144 - RNA, 32 nt, Human
ucuccaccgcuuuggagaccucaggacuugga

SEQ ID NO: 506145 - RNA, 32 nt, Human
ucuccaccuccccuccccaccucuucucuccc

SEQ ID NO: 506146 - RNA, 32 nt, Human
ucuccaccuccuuuucccagccuucagaaggc

SEQ ID NO: 506147 - RNA, 21 nt, Human
ucuccaccucuacccggaaca

SEQ ID NO: 506148 - RNA, 32 nt, Human
ucuccaccucuuaccaaccauauggccuggac

SEQ ID NO: 506149 - RNA, 32 nt, Human
ucuccaccugcacuugcuuaccgcuggagggc

SEQ ID NO: 506150 - RNA, 32 nt, Human
ucuccaccugcaggaugagccggagcucuugu

SEQ ID NO: 506151 - RNA, 22 nt, Human
ucuccaccugcccaccgggaca

SEQ ID NO: 506152 - RNA, 32 nt, Human
ucuccaccuucuccccgccaggcacaggagcc

SEQ ID NO: 506153 - RNA, 32 nt, Human
ucuccacggucacagcagccucgugaugaaga

SEQ ID NO: 506154 - RNA, 32 nt, Human
ucuccacuaaaaauacaaaauuagcugggcgu

SEQ ID NO: 506155 - RNA, 32 nt, Human
ucuccacuaaaaauacaaaauuagcugggugu

SEQ ID NO: 506156 - RNA, 32 nt, Human
ucuccacuaaaauacaaaauuagcugggugug

SEQ ID NO: 506157 - RNA, 21 nt, Human
ucuccacucacagcaaccucu

SEQ ID NO: 506158 - RNA, 32 nt, Human
ucuccacucaccacaaccuccgccuccugggu

SEQ ID NO: 506159 - RNA, 32 nt, Human
ucuccacucacugcaacuuccgccuccugggg

SEQ ID NO: 506160 - RNA, 32 nt, Human
ucuccacucacugcagccuccgccucuggggu

SEQ ID NO: 506161 - RNA, 32 nt, Human
ucuccacucacugcaggcuccgccucccgggu

SEQ ID NO: 506162 - RNA, 32 nt, Human
ucuccacucagcccuggugggugcgggaacca

SEQ ID NO: 506163 - RNA, 32 nt, Human
ucuccacuccacuuuauuucucugggaaaaau

SEQ ID NO: 506164 - RNA, 32 nt, Human
ucuccacuccucuccaggagcuagccugugcc

SEQ ID NO: 506165 - RNA, 32 nt, Human
ucuccacuccuucauggcugggacaguuacug

SEQ ID NO: 506166 - RNA, 32 nt, Human
ucuccacucuuguggucaucauggccagcacg

SEQ ID NO: 506167 - RNA, 32 nt, Human
ucuccacugacccagcagcacacccaugugca

SEQ ID NO: 506168 - RNA, 32 nt, Human
ucuccacugauggcugggaagggaguugggga

SEQ ID NO: 506169 - RNA, 32 nt, Human
ucuccacugccaucugggacggggacugagcc

SEQ ID NO: 506170 - RNA, 32 nt, Human
ucuccacugccuccuccaccccuguauuucac

SEQ ID NO: 506171 - RNA, 32 nt, Human
ucuccacugcucagcacgccuccuauuaggug

SEQ ID NO: 506172 - RNA, 21 nt, Human
ucuccacuggccgccagccuc

SEQ ID NO: 506173 - RNA, 32 nt, Human
ucuccacugggacucaagagaggaaccugggg

SEQ ID NO: 506174 - RNA, 32 nt, Human
ucuccacugugguugugccugugccccucguu

SEQ ID NO: 506175 - RNA, 32 nt, Human
ucuccacuucacuccagcaucaacaagugggg

SEQ ID NO: 506176 - RNA, 32 nt, Human
ucuccacuugccuccccucuggauguaucugg

SEQ ID NO: 506177 - RNA, 22 nt, Human
ucuccacuuugcacgccggaac

SEQ ID NO: 506178 - RNA, 21 nt, Human
ucuccacuuuuuagagcggcg

SEQ ID NO: 506179 - RNA, 32 nt, Human
ucuccagaaagacauccugagaggacuuggca

SEQ ID NO: 506180 - RNA, 32 nt, Human
ucuccagaaccugaaaccaugcuaucucagau

SEQ ID NO: 506181 - RNA, 18 nt, Human
ucuccagaagcucacccu

SEQ ID NO: 506182 - RNA, 32 nt, Human
ucuccagaaguccauuggaauauuaagcccag

SEQ ID NO: 506183 - RNA, 32 nt, Human
ucuccagacaugucugaggugaagagccggaa

SEQ ID NO: 506184 - RNA, 32 nt, Human
ucuccagacccucccucacacgcccagagccu

SEQ ID NO: 506185 - RNA, 32 nt, Human
ucuccagaccuccaaucugggcucugacccca

SEQ ID NO: 506186 - RNA, 32 nt, Human
ucuccagagacagccccuccugugucuacaga

SEQ ID NO: 506187 - RNA, 20 nt, Human
ucuccagagacugcaugugc

SEQ ID NO: 506188 - RNA, 32 nt, Human
ucuccagagcaucauuccuuucuaucugcugc

SEQ ID NO: 506189 - RNA, 32 nt, Human
ucuccagauagugccuuugauugaaaauaagg

SEQ ID NO: 506190 - RNA, 32 nt, Human
ucuccagcaacccugcacuggggaaggcugug

SEQ ID NO: 506191 - RNA, 32 nt, Human
ucuccagcagccagagucucccagaaaacaac

SEQ ID NO: 506192 - RNA, 32 nt, Human
ucuccagcagccgccaucucacacgccucccu

SEQ ID NO: 506193 - RNA, 32 nt, Human
ucuccagcaggggaggcaacagagguagcaac

SEQ ID NO: 506194 - RNA, 32 nt, Human
ucuccagcaguuucgccuccugacucucacca

SEQ ID NO: 506195 - RNA, 20 nt, Human
ucuccagcauccaaugagug

SEQ ID NO: 506196 - RNA, 18 nt, Human
ucuccagcauucuugcca

SEQ ID NO: 506197 - RNA, 32 nt, Human
ucuccagcauuuccucucaccuccgagcucuc

SEQ ID NO: 506198 - RNA, 32 nt, Human
ucuccagcauuuccucucaccuccguguucuc

SEQ ID NO: 506199 - RNA, 32 nt, Human
ucuccagcauuuccucucaccucuguguucuc

SEQ ID NO: 506200 - RNA, 20 nt, Human
ucuccagccacugccgcgag

SEQ ID NO: 506201 - RNA, 32 nt, Human
ucuccagcccacaaguggcucuagugagacga

SEQ ID NO: 506202 - RNA, 18 nt, Human
ucuccagccccucucaag

SEQ ID NO: 506203 - RNA, 22 nt, Human
ucuccagccccugggcuggaag

SEQ ID NO: 506204 - RNA, 32 nt, Human
ucuccagcccgucuuggcuuauccacuuugac

SEQ ID NO: 506205 - RNA, 21 nt, Human
ucuccagcccuguccagcaag

SEQ ID NO: 506206 - RNA, 20 nt, Human
ucuccagccgaagcugcagg

SEQ ID NO: 506207 - RNA, 17 nt, Human
ucuccagccuccuugua

SEQ ID NO: 506208 - RNA, 21 nt, Human
ucuccagccugagcaacagag

SEQ ID NO: 506209 - RNA, 32 nt, Human
ucuccagccugggaaaaguucuccuuauuugu

SEQ ID NO: 506210 - RNA, 32 nt, Human
ucuccagccugggaacuauaacuccucugcga

SEQ ID NO: 506211 - RNA, 22 nt, Human
ucuccagccugggcaacagagu

SEQ ID NO: 506212 - RNA, 20 nt, Human
ucuccagccugggcgacaag

SEQ ID NO: 506213 - RNA, 22 nt, Human
ucuccagccugggcgacagagu

SEQ ID NO: 506214 - RNA, 32 nt, Human
ucuccagcuacacacuccaucucccgggagca

SEQ ID NO: 506215 - RNA, 32 nt, Human
ucuccagcuacauacucugccucagggccuuc

SEQ ID NO: 506216 - RNA, 18 nt, Human
ucuccagcuauucagaca

SEQ ID NO: 506217 - RNA, 32 nt, Human
ucuccagcucacugaaaacagccuccccugau

SEQ ID NO: 506218 - RNA, 18 nt, Human
ucuccagcucagcuucaa

SEQ ID NO: 506219 - RNA, 32 nt, Human
ucuccagcugugaacccaggaggucaaguggg

SEQ ID NO: 506220 - RNA, 32 nt, Human
ucuccagcuguggaaggguugcagccauuacc

SEQ ID NO: 506221 - RNA, 32 nt, Human
ucuccagcuguggugagcaaguuuccugaagu

SEQ ID NO: 506222 - RNA, 32 nt, Human
ucuccagcuuugacaaaucggugcucaccuua

SEQ ID NO: 506223 - RNA, 19 nt, Human
ucuccaggaagccuggcug

SEQ ID NO: 506224 - RNA, 32 nt, Human
ucuccaggaaggcagugaggggcugugacauu

SEQ ID NO: 506225 - RNA, 32 nt, Human
ucuccaggaagguggcgcugggcuacccaccc

SEQ ID NO: 506226 - RNA, 32 nt, Human
ucuccaggaagucugagccaccucuggcuaca

SEQ ID NO: 506227 - RNA, 21 nt, Human
ucuccaggaccuccacaccau

SEQ ID NO: 506228 - RNA, 32 nt, Human
ucuccaggacucagugguuucggagaaacucg

SEQ ID NO: 506229 - RNA, 32 nt, Human
ucuccaggacuccaccuaaggucaguuucucg

SEQ ID NO: 506230 - RNA, 32 nt, Human
ucuccaggacugucuucucacccuuccccacu

SEQ ID NO: 506231 - RNA, 32 nt, Human
ucuccaggagaaacuugaacggcuccagggau

SEQ ID NO: 506232 - RNA, 22 nt, Human
ucuccaggaggagcccagggcc

SEQ ID NO: 506233 - RNA, 16 nt, Human
ucuccaggaggccagg

SEQ ID NO: 506234 - RNA, 32 nt, Human
ucuccaggcaaguccccguccaaaaagaagaa

SEQ ID NO: 506235 - RNA, 19 nt, Human
ucuccaggcccagccucug

SEQ ID NO: 506236 - RNA, 32 nt, Human
ucuccaggcccagcuccggccucccagcggcc

SEQ ID NO: 506237 - RNA, 17 nt, Human
ucuccaggcccaucucu

SEQ ID NO: 506238 - RNA, 18 nt, Human
ucuccaggcccggaucuc

SEQ ID NO: 506239 - RNA, 32 nt, Human
ucuccaggccuaugguccugcccagcacgcca

SEQ ID NO: 506240 - RNA, 32 nt, Human
ucuccaggccuugcccacugagccuucagagg

SEQ ID NO: 506241 - RNA, 32 nt, Human
ucuccaggcgcugaguccgugccuccuuuuuc

SEQ ID NO: 506242 - RNA, 32 nt, Human
ucuccaggcugcugggcagcugggcagagcuc

SEQ ID NO: 506243 - RNA, 21 nt, Human
ucuccaggcuggagugcagug

SEQ ID NO: 506244 - RNA, 22 nt, Human
ucuccaggcuggagugcagugg

SEQ ID NO: 506245 - RNA, 32 nt, Human
ucuccaggcuugagugacagagcaagacugua

SEQ ID NO: 506246 - RNA, 22 nt, Human
ucuccaggcuuuucuccugccu

SEQ ID NO: 506247 - RNA, 32 nt, Human
ucuccagggaaaccacauuggggacuccgggg

SEQ ID NO: 506248 - RNA, 32 nt, Human
ucuccagggaaagugucagugaaaccucagcu

SEQ ID NO: 506249 - RNA, 32 nt, Human
ucuccagggaagaacccagagggagagcggga

SEQ ID NO: 506250 - RNA, 18 nt, Human
ucuccagggagcaggacc

SEQ ID NO: 506251 - RNA, 21 nt, Human
ucuccagggaguccaggaccu

SEQ ID NO: 506252 - RNA, 22 nt, Human
ucuccagggcagcacagggacc

SEQ ID NO: 506253 - RNA, 32 nt, Human
ucuccagggcucaguuugucuaucuccaaaau

SEQ ID NO: 506254 - RNA, 32 nt, Human
ucuccaggguaggccagcuugaggaaucuuau

SEQ ID NO: 506255 - RNA, 20 nt, Human
ucuccaggucaccaauggcu

SEQ ID NO: 506256 - RNA, 32 nt, Human
ucuccaggugccucucccucaccagcucugca

SEQ ID NO: 506257 - RNA, 32 nt, Human
ucuccagguucugucucucccauucugauucu

SEQ ID NO: 506258 - RNA, 32 nt, Human
ucuccaguagaaagcauaacaaaaagaugacc

SEQ ID NO: 506259 - RNA, 32 nt, Human
ucuccagucauuaaaucagugcugcugcauga

SEQ ID NO: 506260 - RNA, 32 nt, Human
ucuccaguccucuuuccugucacugcaucagg

SEQ ID NO: 506261 - RNA, 32 nt, Human
ucuccagucuccccagucuguuggugucuuua

SEQ ID NO: 506262 - RNA, 32 nt, Human
ucuccagugaugacucugcuucuaugagguca

SEQ ID NO: 506263 - RNA, 32 nt, Human
ucuccagugcagcccgccgccacuggagugcc

SEQ ID NO: 506264 - RNA, 24 nt, Human
ucuccagugcccuauagcugcaag

SEQ ID NO: 506265 - RNA, 32 nt, Human
ucuccagugccuaugaggucagcuggccaaac

SEQ ID NO: 506266 - RNA, 32 nt, Human
ucuccagugccuggauccccucugucuacaaa

SEQ ID NO: 506267 - RNA, 32 nt, Human
ucuccagugcuuccuugggcagccaguaauuc

SEQ ID NO: 506268 - RNA, 32 nt, Human
ucuccagugucuccuauuacaaagaagcuggc

SEQ ID NO: 506269 - RNA, 32 nt, Human
ucuccaguguguacccugccccucucugucau

SEQ ID NO: 506270 - RNA, 32 nt, Human
ucuccaguuuuggucccaucuuccugcuaccc

SEQ ID NO: 506271 - RNA, 32 nt, Human
ucuccaucaagcaauauuuccacuucaacuuc

SEQ ID NO: 506272 - RNA, 32 nt, Human
ucuccaucaaguuucaccaaaucauuuuaaca

SEQ ID NO: 506273 - RNA, 32 nt, Human
ucuccaucauugggggaguggaagggagcucc

SEQ ID NO: 506274 - RNA, 25 nt, Human
ucuccauccauacagguggcuccag

SEQ ID NO: 506275 - RNA, 32 nt, Human
ucuccauccccucccugccugcuccuuggcac

SEQ ID NO: 506276 - RNA, 32 nt, Human
ucuccauccccucuccccgcguggacuccuga

SEQ ID NO: 506277 - RNA, 32 nt, Human
ucuccauccucugcugaugccugcugucuuua

SEQ ID NO: 506278 - RNA, 32 nt, Human
ucuccauccuguuuucucccagacacaccaca

SEQ ID NO: 506279 - RNA, 32 nt, Human
ucuccauccuuccacccuccaguuaagcagca

SEQ ID NO: 506280 - RNA, 32 nt, Human
ucuccauccuucccucucccaaaagacauuuc

SEQ ID NO: 506281 - RNA, 32 nt, Human
ucuccaucuaccuuccagucaggaugacggua

SEQ ID NO: 506282 - RNA, 32 nt, Human
ucuccaucucaaagucagccuccagggagccc

SEQ ID NO: 506283 - RNA, 32 nt, Human
ucuccaucucccaaagugcugggaugacaggc

SEQ ID NO: 506284 - RNA, 32 nt, Human
ucuccaugaaaaugcauacguuaaugaacuaa

SEQ ID NO: 506285 - RNA, 32 nt, Human
ucuccaugagauacuuacuaauuucaaagggg

SEQ ID NO: 506286 - RNA, 32 nt, Human
ucuccauggagccagagguaguaugaagaguu

SEQ ID NO: 506287 - RNA, 32 nt, Human
ucuccauggcaggcaucccugccuugggcugc

SEQ ID NO: 506288 - RNA, 32 nt, Human
ucuccauggccaggcugccugugugcauguuc

SEQ ID NO: 506289 - RNA, 32 nt, Human
ucuccauguaacuugcucacaugccuaucuug

SEQ ID NO: 506290 - RNA, 32 nt, Human
ucuccaugugacacaugggcucagggcugcca

SEQ ID NO: 506291 - RNA, 20 nt, Human
ucuccaugugcugguugcag

SEQ ID NO: 506292 - RNA, 32 nt, Human
ucuccauguguaaacuucacccccaggaccca

SEQ ID NO: 506293 - RNA, 32 nt, Human
ucuccauguuaguaauggcagagcagucuaaa

SEQ ID NO: 506294 - RNA, 31 nt, Human
ucuccauucagcuagaaggaccaaagcaugu

SEQ ID NO: 506295 - RNA, 32 nt, Human
ucuccauucucccaaccucuugggccuggaag

SEQ ID NO: 506296 - RNA, 32 nt, Human
ucuccauuucacuugaccccugcccaccucuc

SEQ ID NO: 506297 - RNA, 32 nt, Human
ucuccauuucuacuucugucacaaaccacauu

SEQ ID NO: 506298 - RNA, 32 nt, Human
ucuccauuuucacuccuuccagccucuguccc

SEQ ID NO: 506299 - RNA, 32 nt, Human
ucuccauuuuuaacaaacucucuuaaguaauu

SEQ ID NO: 506300 - RNA, 32 nt, Human
ucuccauuuuucucuuucuccuccuggccugg

SEQ ID NO: 506301 - RNA, 32 nt, Human
ucucccaaaauguacaguaauuccauuuguuu

SEQ ID NO: 506302 - RNA, 32 nt, Human
ucucccaaagagcugggauuacaggcgugaga

SEQ ID NO: 506303 - RNA, 24 nt, Human
ucucccaaagaugcuaaaaacaca

SEQ ID NO: 506304 - RNA, 32 nt, Human
ucucccaaaguacugggauuacaggcgugagc

SEQ ID NO: 506305 - RNA, 32 nt, Human
ucucccaaagugcugagauuacaggcaugagu

SEQ ID NO: 506306 - RNA, 32 nt, Human
ucucccaaagugcugggaauacaggcaugagc

SEQ ID NO: 506307 - RNA, 32 nt, Human
ucucccaaagugcugggauuacagacaugagc

SEQ ID NO: 506308 - RNA, 32 nt, Human
ucucccaaagugcugggauuacaggcaugagc

SEQ ID NO: 506309 - RNA, 32 nt, Human
ucucccaaagugcugggauuacaggcgugagc

SEQ ID NO: 506310 - RNA, 32 nt, Human
ucucccaaagugcugggauuacaggcuugagc

SEQ ID NO: 506311 - RNA, 32 nt, Human
ucucccaaagugcugggauuacaggugugagc

SEQ ID NO: 506312 - RNA, 32 nt, Human
ucucccaaagugcugggauuauaggcaugagc

SEQ ID NO: 506313 - RNA, 32 nt, Human
ucucccaaagugcugggauuauaggcguaagc

SEQ ID NO: 506314 - RNA, 32 nt, Human
ucucccaaaguguugggauuacaggcaugagc

SEQ ID NO: 506315 - RNA, 32 nt, Human
ucucccaaaugagaagucauuaacuggaaauc

SEQ ID NO: 506316 - RNA, 32 nt, Human
ucucccaacauuuacuaacauccacuggucaa

SEQ ID NO: 506317 - RNA, 32 nt, Human
ucucccaaccagccaaggaauaaaagcugauc

SEQ ID NO: 506318 - RNA, 32 nt, Human
ucucccaaccucuugggccuggaagucagaca

SEQ ID NO: 506319 - RNA, 32 nt, Human
ucucccaacgugcugggauuacaggcaugagc

SEQ ID NO: 506320 - RNA, 32 nt, Human
ucucccaagaggagaaggaaugcgaaagagga

SEQ ID NO: 506321 - RNA, 32 nt, Human
ucucccaagaggagaggggcaggcaggaaaga

SEQ ID NO: 506322 - RNA, 32 nt, Human
ucucccaagaggagcagagaaaacuggaagaa

SEQ ID NO: 506323 - RNA, 32 nt, Human
ucucccaagcagcugggauuguagguacacac

SEQ ID NO: 506324 - RNA, 18 nt, Human
ucucccaaggagggcacc

SEQ ID NO: 506325 - RNA, 32 nt, Human
ucucccaaggggaucacuuagcuucucacuga

SEQ ID NO: 506326 - RNA, 19 nt, Human
ucucccaaggggugagugg

SEQ ID NO: 506327 - RNA, 32 nt, Human
ucucccaaguagcagggauuacaggcaugcac

SEQ ID NO: 506328 - RNA, 32 nt, Human
ucucccaaguagcuggaacuacaggcaugcac

SEQ ID NO: 506329 - RNA, 32 nt, Human
ucucccaaguagcugggacuacaagcaugcac

SEQ ID NO: 506330 - RNA, 32 nt, Human
ucucccaaguagcugggacuacaggcaggugc

SEQ ID NO: 506331 - RNA, 32 nt, Human
ucucccaaguagcugggacuacagguacgugc

SEQ ID NO: 506332 - RNA, 32 nt, Human
ucucccaaguagcugggacuauaggcacgugc

SEQ ID NO: 506333 - RNA, 32 nt, Human
ucucccaaguagcugggauuacaggugugcac

SEQ ID NO: 506334 - RNA, 32 nt, Human
ucucccaaguagcugggauuacaggugugugc

SEQ ID NO: 506335 - RNA, 32 nt, Human
ucucccaaguagcugggauuauaggcauccac

SEQ ID NO: 506336 - RNA, 32 nt, Human
ucucccaaguagcugggguuacaggugcacgc

SEQ ID NO: 506337 - RNA, 32 nt, Human
ucucccaaguggccacauacagcaacccacuc

SEQ ID NO: 506338 - RNA, 32 nt, Human
ucucccaauggaggggagguugcaggggagag

SEQ ID NO: 506339 - RNA, 32 nt, Human
ucucccaaugggguggcuuugcucugggcucc

SEQ ID NO: 506340 - RNA, 32 nt, Human
ucucccacacccccuccuacccucucuccugu

SEQ ID NO: 506341 - RNA, 32 nt, Human
ucucccacacucguuucccuuugcucaugacu

SEQ ID NO: 506342 - RNA, 32 nt, Human
ucucccacagcccagccagagacaagggaccu

SEQ ID NO: 506343 - RNA, 23 nt, Human
ucucccacagcuguggcugcagg

SEQ ID NO: 506344 - RNA, 32 nt, Human
ucucccaccacguccccagaucucaagaacgc

SEQ ID NO: 506345 - RNA, 32 nt, Human
ucucccaccaugcaugcaggucacugugugug

SEQ ID NO: 506346 - RNA, 22 nt, Human
ucucccaccaugugcagucuca

SEQ ID NO: 506347 - RNA, 32 nt, Human
ucucccacccacaacguguauuuuaaaccauu

SEQ ID NO: 506348 - RNA, 22 nt, Human
ucucccacccagccccaacccc

SEQ ID NO: 506349 - RNA, 21 nt, Human
ucucccacgacggcucacccu

SEQ ID NO: 506350 - RNA, 23 nt, Human
ucucccacuacagaccugccagg

SEQ ID NO: 506351 - RNA, 32 nt, Human
ucucccacuaugaaccucugauggccuuuucu

SEQ ID NO: 506352 - RNA, 32 nt, Human
ucucccacuccagccccaggacaggaaacaga

SEQ ID NO: 506353 - RNA, 32 nt, Human
ucucccacugcacacagggugguggcacauua

SEQ ID NO: 506354 - RNA, 32 nt, Human
ucucccacuguccuuggcucagcucuugucac

SEQ ID NO: 506355 - RNA, 32 nt, Human
ucucccacuuaccugcucuugugcaauguuuc

SEQ ID NO: 506356 - RNA, 32 nt, Human
ucucccagacacaccacaccuaccuuggggga

SEQ ID NO: 506357 - RNA, 32 nt, Human
ucucccagacuggacugcaguggcacaaucau

SEQ ID NO: 506358 - RNA, 32 nt, Human
ucucccagacuggagugaguggugugaucucg

SEQ ID NO: 506359 - RNA, 16 nt, Human
ucucccagaggccagg

SEQ ID NO: 506360 - RNA, 32 nt, Human
ucucccagaguguuaggauuacaggcgugagc

SEQ ID NO: 506361 - RNA, 32 nt, Human
ucucccagcacugacucacuccugccugggag

SEQ ID NO: 506362 - RNA, 21 nt, Human
ucucccagccaccuccuccca

SEQ ID NO: 506363 - RNA, 32 nt, Human
ucucccagccacuuucccuccuggcacugcca

SEQ ID NO: 506364 - RNA, 32 nt, Human
ucucccagccaucucugggguuacuaggaggc

SEQ ID NO: 506365 - RNA, 32 nt, Human
ucucccagccaucuuguucucucuccugaauu

SEQ ID NO: 506366 - RNA, 32 nt, Human
ucucccagcccaccucaagcagucuccccacc

SEQ ID NO: 506367 - RNA, 32 nt, Human
ucucccagccuccgcccugcccucacccagcc

SEQ ID NO: 506368 - RNA, 32 nt, Human
ucucccagcuccagccuuucuaguuucgaggc

SEQ ID NO: 506369 - RNA, 32 nt, Human
ucucccagcugguuucugcugcuucagaaaag

SEQ ID NO: 506370 - RNA, 30 nt, Human
ucucccagcuugcagguggacauccuagcc

SEQ ID NO: 506371 - RNA, 20 nt, Human
ucucccaggaagccagcucc

SEQ ID NO: 506372 - RNA, 32 nt, Human
ucucccaggacuuggggguggggugaaaagcg

SEQ ID NO: 506373 - RNA, 32 nt, Human
ucucccaggcaaggaccagcugcccauucuga

SEQ ID NO: 506374 - RNA, 18 nt, Human
ucucccaggcacgcaugg

SEQ ID NO: 506375 - RNA, 19 nt, Human
ucucccaggcaggccaugg

SEQ ID NO: 506376 - RNA, 32 nt, Human
ucucccaggccagagugcaguggcgcaauuac

SEQ ID NO: 506377 - RNA, 22 nt, Human
ucucccaggccggagugcagug

SEQ ID NO: 506378 - RNA, 32 nt, Human
ucucccaggccuggguggccucuguagcuggu

SEQ ID NO: 506379 - RNA, 22 nt, Human
ucucccaggcuagagugcaaug

SEQ ID NO: 506380 - RNA, 32 nt, Human
ucucccaggcuagagugcaauggcacaaccuc

SEQ ID NO: 506381 - RNA, 32 nt, Human
ucucccaggcuagagugcaguggugcaaucuc

SEQ ID NO: 506382 - RNA, 22 nt, Human
ucucccaggcugaagugcagug

SEQ ID NO: 506383 - RNA, 32 nt, Human
ucucccaggcugaagugcagugagucaagauu

SEQ ID NO: 506384 - RNA, 32 nt, Human
ucucccaggcugcuggagugcaguggcacaau

SEQ ID NO: 506385 - RNA, 32 nt, Human
ucucccaggcuggaauguagggugugcucaua

SEQ ID NO: 506386 - RNA, 32 nt, Human
ucucccaggcuggacugcagcagcgcagucuc

SEQ ID NO: 506387 - RNA, 32 nt, Human
ucucccaggcuggacugcaguggugcgauucu

SEQ ID NO: 506388 - RNA, 32 nt, Human
ucucccaggcuggagcguaguaaugcaaucau

SEQ ID NO: 506389 - RNA, 32 nt, Human
ucucccaggcuggaggucaguggcacaaaucu

SEQ ID NO: 506390 - RNA, 22 nt, Human
ucucccaggcuggaguacagug

SEQ ID NO: 506391 - RNA, 21 nt, Human
ucucccaggcuggagugcaau

SEQ ID NO: 506392 - RNA, 32 nt, Human
ucucccaggcuggagugcaaucgcgcaaucuc

SEQ ID NO: 506393 - RNA, 22 nt, Human
ucucccaggcuggagugcaaug

SEQ ID NO: 506394 - RNA, 32 nt, Human
ucucccaggcuggagugcaauggugcaaucuu

SEQ ID NO: 506395 - RNA, 22 nt, Human
ucucccaggcuggagugcacug

SEQ ID NO: 506396 - RNA, 32 nt, Human
ucucccaggcuggagugcaggcuuggaguuuu

SEQ ID NO: 506397 - RNA, 22 nt, Human
ucucccaggcuggagugcagug

SEQ ID NO: 506398 - RNA, 23 nt, Human
ucucccaggcuggagugcagugg

SEQ ID NO: 506399 - RNA, 32 nt, Human
ucucccaggcuggagugcaguggagugaucuc

SEQ ID NO: 506400 - RNA, 32 nt, Human
ucucccaggcuggagugcaguggcacaaucaa

SEQ ID NO: 506401 - RNA, 32 nt, Human
ucucccaggcuggagugcaguggcacaaucau

SEQ ID NO: 506402 - RNA, 32 nt, Human
ucucccaggcuggagugcaguggcacagucuu

SEQ ID NO: 506403 - RNA, 32 nt, Human
ucucccaggcuggagugcaguggcacaucucg

SEQ ID NO: 506404 - RNA, 32 nt, Human
ucucccaggcuggagugcaguggcguaaucuc

SEQ ID NO: 506405 - RNA, 32 nt, Human
ucucccaggcuggagugcaguggcgugaucuu

SEQ ID NO: 506406 - RNA, 32 nt, Human
ucucccaggcuggagugcaguggugcaaucuc

SEQ ID NO: 506407 - RNA, 32 nt, Human
ucucccaggcuggagugcagugguguaaucac

SEQ ID NO: 506408 - RNA, 32 nt, Human
ucucccaggcuggagugcgguggcacaaucuc

SEQ ID NO: 506409 - RNA, 32 nt, Human
ucucccaggcuggagugcuauggugcaauuuu

SEQ ID NO: 506410 - RNA, 32 nt, Human
ucucccaggcuggagugugauggcgugaucuc

SEQ ID NO: 506411 - RNA, 32 nt, Human
ucucccaggcuggaguugcaguggugcaauga

SEQ ID NO: 506412 - RNA, 22 nt, Human
ucucccaggcuggcagcauugg

SEQ ID NO: 506413 - RNA, 32 nt, Human
ucucccagggccugggugugcuucguguggcc

SEQ ID NO: 506414 - RNA, 32 nt, Human
ucucccagggucaugcagggaucugcucccuc

SEQ ID NO: 506415 - RNA, 32 nt, Human
ucucccagguagcugggauuacaggcaugugc

SEQ ID NO: 506416 - RNA, 32 nt, Human
ucucccaggucaucugccugcccacacgcucc

SEQ ID NO: 506417 - RNA, 32 nt, Human
ucucccaggugaggauucacaucccaaaauaa

SEQ ID NO: 506418 - RNA, 32 nt, Human
ucucccaguccucaucuuccacccuaaaacua

SEQ ID NO: 506419 - RNA, 22 nt, Human
ucucccaguggagcucugcagg

SEQ ID NO: 506420 - RNA, 32 nt, Human
ucucccaguggaggaaggugugcaguguacuu

SEQ ID NO: 506421 - RNA, 21 nt, Human
ucucccauaacugccccagca

SEQ ID NO: 506422 - RNA, 32 nt, Human
ucucccauacauaggaguggccucaaggccac

SEQ ID NO: 506423 - RNA, 32 nt, Human
ucucccaucaaaggaccugcacagccuuauga

SEQ ID NO: 506424 - RNA, 32 nt, Human
ucucccaucaaaggacgugcacagccuuauga

SEQ ID NO: 506425 - RNA, 19 nt, Human
ucucccaucagugcugugg

SEQ ID NO: 506426 - RNA, 32 nt, Human
ucucccaucccccugcccucguggccagcccg

SEQ ID NO: 506427 - RNA, 32 nt, Human
ucucccauccuuuuuccuucccaaaccucuau

SEQ ID NO: 506428 - RNA, 32 nt, Human
ucuccccaaaacccuucuugcaugcaggaugu

SEQ ID NO: 506429 - RNA, 23 nt, Human
ucuccccaaaacucuguguggug

SEQ ID NO: 506430 - RNA, 21 nt, Human
ucuccccaaagcagccccaca

SEQ ID NO: 506431 - RNA, 24 nt, Human
ucuccccaaaucagugagcaccuu

SEQ ID NO: 506432 - RNA, 32 nt, Human
ucuccccaacccccaagaaccccacuacugcu

SEQ ID NO: 506433 - RNA, 32 nt, Human
ucuccccaacugcccugcucuccucauacuca

SEQ ID NO: 506434 - RNA, 32 nt, Human
ucuccccaaggcaggccauagaaacuaaaagu

SEQ ID NO: 506435 - RNA, 32 nt, Human
ucuccccaagggccaagaacugcucagggaca

SEQ ID NO: 506436 - RNA, 21 nt, Human
ucuccccaaggggagcagccc

SEQ ID NO: 506437 - RNA, 23 nt, Human
ucuccccaaggucuguggcuccu

SEQ ID NO: 506438 - RNA, 20 nt, Human
ucuccccaagugcaacaccu

SEQ ID NO: 506439 - RNA, 32 nt, Human
ucuccccacacccuggaguggcaugguccugu

SEQ ID NO: 506440 - RNA, 32 nt, Human
ucuccccacagccucugcugaugcacagagcu

SEQ ID NO: 506441 - RNA, 32 nt, Human
ucuccccacaucucccuuuccacuugccagug

SEQ ID NO: 506442 - RNA, 21 nt, Human
ucuccccaccaccagcagccu

SEQ ID NO: 506443 - RNA, 32 nt, Human
ucuccccaccacgucugugcccugcacugucc

SEQ ID NO: 506444 - RNA, 32 nt, Human
ucuccccacccccaccuuguucaucaggggcc

SEQ ID NO: 506445 - RNA, 20 nt, Human
ucuccccacccucagcuccu

SEQ ID NO: 506446 - RNA, 21 nt, Human
ucuccccacuccagccaccuu

SEQ ID NO: 506447 - RNA, 32 nt, Human
ucuccccacuccccacucucagccugggagac

SEQ ID NO: 506448 - RNA, 19 nt, Human
ucuccccacucugaucccc

SEQ ID NO: 506449 - RNA, 32 nt, Human
ucuccccacuggagguggagggugggaagaga

SEQ ID NO: 506450 - RNA, 32 nt, Human
ucuccccagagcugucuggacagccuuuccug

SEQ ID NO: 506451 - RNA, 32 nt, Human
ucuccccagcccugcuugccugccucggagag

SEQ ID NO: 506452 - RNA, 32 nt, Human
ucuccccagccuccccgugccaaaaaucuuuu

SEQ ID NO: 506453 - RNA, 21 nt, Human
ucuccccagccucgccuucag

SEQ ID NO: 506454 - RNA, 32 nt, Human
ucuccccagccuguuuucucuuuucuaaaaga

SEQ ID NO: 506455 - RNA, 32 nt, Human
ucuccccaggagccccagccccagagugguuu

SEQ ID NO: 506456 - RNA, 32 nt, Human
ucuccccaggagggaggucguggugcaggcga

SEQ ID NO: 506457 - RNA, 32 nt, Human
ucuccccagggguuuucccugcagugaggcuu

SEQ ID NO: 506458 - RNA, 20 nt, Human
ucuccccaggguucagcccu

SEQ ID NO: 506459 - RNA, 32 nt, Human
ucuccccaguaccugggauuacagguagacac

SEQ ID NO: 506460 - RNA, 32 nt, Human
ucuccccaguagcugggauuacaggugcccgc

SEQ ID NO: 506461 - RNA, 24 nt, Human
ucuccccaguccccaguucacccu

SEQ ID NO: 506462 - RNA, 31 nt, Human
ucuccccaguuucauuccuugguccuuacuc

SEQ ID NO: 506463 - RNA, 19 nt, Human
ucuccccaucccaggagga

SEQ ID NO: 506464 - RNA, 21 nt, Human
ucuccccaucccuauagcuca

SEQ ID NO: 506465 - RNA, 24 nt, Human
ucuccccaucuauuuuaggggcug

SEQ ID NO: 506466 - RNA, 32 nt, Human
ucuccccaucuccagccccucccucuggguuc

SEQ ID NO: 506467 - RNA, 32 nt, Human
ucuccccauuuccaaaccaugauaugaauggg

SEQ ID NO: 506468 - RNA, 22 nt, Human
ucucccccaaaagaccugggug

SEQ ID NO: 506469 - RNA, 32 nt, Human
ucucccccaacaaaacccauaccuaucaagcu

SEQ ID NO: 506470 - RNA, 32 nt, Human
ucucccccaagugagcugcaagaggccccugu

SEQ ID NO: 506471 - RNA, 32 nt, Human
ucucccccaaucuccucagccaccucaaauca

SEQ ID NO: 506472 - RNA, 32 nt, Human
ucucccccaccaggacuuagugcaaggaggua

SEQ ID NO: 506473 - RNA, 22 nt, Human
ucucccccaccucagggugcug

SEQ ID NO: 506474 - RNA, 24 nt, Human
ucucccccagccucccaggcugga

SEQ ID NO: 506475 - RNA, 32 nt, Human
ucucccccagcuugcucaacaggugaccuuac

SEQ ID NO: 506476 - RNA, 32 nt, Human
ucucccccagggagcaucaggaagggacaugg

SEQ ID NO: 506477 - RNA, 32 nt, Human
ucucccccaucaaugcuccaucuugucggucu

SEQ ID NO: 506478 - RNA, 26 nt, Human
ucuccccccgcaccauccguguccug

SEQ ID NO: 506479 - RNA, 32 nt, Human
ucucccccgcccacgaguuccccucugguggc

SEQ ID NO: 506480 - RNA, 32 nt, Human
ucucccccuaguuugugagaaacaucucaaua

SEQ ID NO: 506481 - RNA, 32 nt, Human
ucucccccucaccaaucucuuucuucccuccu

SEQ ID NO: 506482 - RNA, 32 nt, Human
ucucccccucaccuucuaaggucagcucuagc

SEQ ID NO: 506483 - RNA, 32 nt, Human
ucucccccucaggacagggagucuguccaucc

SEQ ID NO: 506484 - RNA, 32 nt, Human
ucucccccucauuucucuuccuccucaccucc

SEQ ID NO: 506485 - RNA, 32 nt, Human
ucucccccuccacccccucccccaccccggag

SEQ ID NO: 506486 - RNA, 32 nt, Human
ucucccccuccagcuuccucggacaaccuggc

SEQ ID NO: 506487 - RNA, 32 nt, Human
ucucccccuccaguaguagcugggugagaccu

SEQ ID NO: 506488 - RNA, 32 nt, Human
ucucccccuccccaguguccucuccucucagg

SEQ ID NO: 506489 - RNA, 32 nt, Human
ucucccccucccccaucuccagucuccuaggu

SEQ ID NO: 506490 - RNA, 32 nt, Human
ucucccccucccccucccccacucccccuccc

SEQ ID NO: 506491 - RNA, 32 nt, Human
ucucccccuccccuccccucccucgcgcuguc

SEQ ID NO: 506492 - RNA, 32 nt, Human
ucucccccuccccuuucucuuucuuuccaaca

SEQ ID NO: 506493 - RNA, 20 nt, Human
ucucccccucccucaggaug

SEQ ID NO: 506494 - RNA, 32 nt, Human
ucucccccuucagcuccugaguagcugggccu

SEQ ID NO: 506495 - RNA, 32 nt, Human
ucucccccuuccccuagacuuuucuuacgaaa

SEQ ID NO: 506496 - RNA, 32 nt, Human
ucucccccuucucuccccuucuuccucgguuu

SEQ ID NO: 506497 - RNA, 32 nt, Human
ucucccccuuucucucuucucuuggcucacuc

SEQ ID NO: 506498 - RNA, 32 nt, Human
ucuccccgagugccuggauuacaggcaugagc

SEQ ID NO: 506499 - RNA, 24 nt, Human
ucuccccgccacccgcucgucccc

SEQ ID NO: 506500 - RNA, 24 nt, Human
ucuccccgcccagccagcagccuu

SEQ ID NO: 506501 - RNA, 23 nt, Human
ucuccccgccucauucccacccc

SEQ ID NO: 506502 - RNA, 32 nt, Human
ucuccccgcugagcugcugccuggugaagagg

SEQ ID NO: 506503 - RNA, 32 nt, Human
ucuccccgcugcaaccauuccaccagucuguu

SEQ ID NO: 506504 - RNA, 21 nt, Human
ucuccccggaggcucagcccc

SEQ ID NO: 506505 - RNA, 24 nt, Human
ucuccccggagugcacagcuccac

SEQ ID NO: 506506 - RNA, 21 nt, Human
ucuccccggccaugugugcug

SEQ ID NO: 506507 - RNA, 32 nt, Human
ucuccccggccccagcucuggacgcucacccc

SEQ ID NO: 506508 - RNA, 32 nt, Human
ucuccccguccugguccagggcuggggucuuu

SEQ ID NO: 506509 - RNA, 32 nt, Human
ucuccccucacacuuugccauuugcuuguacu

SEQ ID NO: 506510 - RNA, 32 nt, Human
ucuccccuccaggccaccugucucuguaaagg

SEQ ID NO: 506511 - RNA, 32 nt, Human
ucuccccucccucccaccuuuuucuuuccuuc

SEQ ID NO: 506512 - RNA, 32 nt, Human
ucuccccuccuccaaacuucaacuccuccaug

SEQ ID NO: 506513 - RNA, 32 nt, Human
ucuccccuccugcccuucgcuccuggguuggu

SEQ ID NO: 506514 - RNA, 18 nt, Human
ucuccccuccugcugcug

SEQ ID NO: 506515 - RNA, 32 nt, Human
ucuccccucgaauucccugauggugguggggu

SEQ ID NO: 506516 - RNA, 32 nt, Human
ucuccccucuacuucucauucccuacucucug

SEQ ID NO: 506517 - RNA, 32 nt, Human
ucuccccucugccuccugcuuugcuguugccg

SEQ ID NO: 506518 - RNA, 32 nt, Human
ucuccccucuuuccuucugccgguccuuuugg

SEQ ID NO: 506519 - RNA, 32 nt, Human
ucuccccugcagcuuccucugcuucuggaaug

SEQ ID NO: 506520 - RNA, 32 nt, Human
ucuccccugcgcaggcccuccgcgggggacag

SEQ ID NO: 506521 - RNA, 32 nt, Human
ucuccccugcucaugggugcuccuccucaggg

SEQ ID NO: 506522 - RNA, 32 nt, Human
ucuccccugcucucccaccucuaccuccaccc

SEQ ID NO: 506523 - RNA, 32 nt, Human
ucuccccugcugcuugagaugccagagcugug

SEQ ID NO: 506524 - RNA, 32 nt, Human
ucuccccuguuccccucucccuucccuccucc

SEQ ID NO: 506525 - RNA, 32 nt, Human
ucuccccuuccaaccccauuuccccagcccau

SEQ ID NO: 506526 - RNA, 32 nt, Human
ucuccccuuccaggagugcacagucugcgggu

SEQ ID NO: 506527 - RNA, 32 nt, Human
ucuccccuuccggugcucacacgcccacgccg

SEQ ID NO: 506528 - RNA, 32 nt, Human
ucuccccuuccuuucucucucuuccagaaguc

SEQ ID NO: 506529 - RNA, 32 nt, Human
ucuccccuucuggcuuuccacccggccugcug

SEQ ID NO: 506530 - RNA, 32 nt, Human
ucuccccuugggacaguaguguuugggugaau

SEQ ID NO: 506531 - RNA, 32 nt, Human
ucuccccuuuccacagccuccaccccugaccc

SEQ ID NO: 506532 - RNA, 32 nt, Human
ucuccccuuuccccauccucuaucuaucccug

SEQ ID NO: 506533 - RNA, 32 nt, Human
ucuccccuuucccuccccagcccggccccugg

SEQ ID NO: 506534 - RNA, 32 nt, Human
ucuccccuuuugcuugagcaggguucccagga

SEQ ID NO: 506535 - RNA, 32 nt, Human
ucucccgaaaauacaaaauuagccaggcgugg

SEQ ID NO: 506536 - RNA, 32 nt, Human
ucucccgaagugcugggauuacaggugugagc

SEQ ID NO: 506537 - RNA, 32 nt, Human
ucucccgacuagcugggacuacaggcgcccgc

SEQ ID NO: 506538 - RNA, 32 nt, Human
ucucccgaguagcuaggauuacagaugugcau

SEQ ID NO: 506539 - RNA, 32 nt, Human
ucucccgaguagcugggacuacaggcaccugc

SEQ ID NO: 506540 - RNA, 32 nt, Human
ucucccgaguagcugggauuacaggcacuugc

SEQ ID NO: 506541 - RNA, 32 nt, Human
ucucccgaguagcugggauuacaggcgugcgc

SEQ ID NO: 506542 - RNA, 32 nt, Human
ucucccgaguagcugggauuauaggcgcccgc

SEQ ID NO: 506543 - RNA, 32 nt, Human
ucucccgaguaguggaaauuacaggugugugc

SEQ ID NO: 506544 - RNA, 32 nt, Human
ucucccgaguaguuggaauuacaggugcaugc

SEQ ID NO: 506545 - RNA, 32 nt, Human
ucucccgaguggcugggauuauaggcgugcac

SEQ ID NO: 506546 - RNA, 32 nt, Human
ucucccgcaggacccccuaaucuucagggcag

SEQ ID NO: 506547 - RNA, 32 nt, Human
ucucccgccccaggcccugcucuuccugcuug

SEQ ID NO: 506548 - RNA, 32 nt, Human
ucucccgccgccuccccggccuggugacacca

SEQ ID NO: 506549 - RNA, 32 nt, Human
ucucccgccucaguagcugggauuacaggugc

SEQ ID NO: 506550 - RNA, 32 nt, Human
ucucccgcugggacacacacaggggccgggga

SEQ ID NO: 506551 - RNA, 32 nt, Human
ucucccggaagccuggggucccuccacaccuu

SEQ ID NO: 506552 - RNA, 32 nt, Human
ucucccggacagacgccuugcccagggugugu

SEQ ID NO: 506553 - RNA, 32 nt, Human
ucucccggaggcaggggucccugggacuggcg

SEQ ID NO: 506554 - RNA, 32 nt, Human
ucucccggccaucuuguugcucucuccugaau

SEQ ID NO: 506555 - RNA, 32 nt, Human
ucucccggccgagccuagcugcggcuggacac

SEQ ID NO: 506556 - RNA, 32 nt, Human
ucucccggcgugccuggcagugugguggccuc

SEQ ID NO: 506557 - RNA, 23 nt, Human
ucucccggcuggguugucaguca

SEQ ID NO: 506558 - RNA, 32 nt, Human
ucucccgggcuggagugcaguggcgcgaucuc

SEQ ID NO: 506559 - RNA, 32 nt, Human
ucucccgggcuguacccugccugcuucuccca

SEQ ID NO: 506560 - RNA, 32 nt, Human
ucucccggggacugcagcggaggcagagccag

SEQ ID NO: 506561 - RNA, 32 nt, Human
ucucccgguggggcagaggacccggugccugc

SEQ ID NO: 506562 - RNA, 32 nt, Human
ucucccgucaccacaucuccccucacccucac

SEQ ID NO: 506563 - RNA, 20 nt, Human
ucucccguccagagcccugc

SEQ ID NO: 506564 - RNA, 32 nt, Human
ucucccguccagcccuggcugcagccucccag

SEQ ID NO: 506565 - RNA, 28 nt, Human
ucucccgugacugcugccucaucgauac

SEQ ID NO: 506566 - RNA, 23 nt, Human
ucucccguuccuuuaggcugccg

SEQ ID NO: 506567 - RNA, 32 nt, Human
ucucccguuggcuccacuguaccgggggcuga

SEQ ID NO: 506568 - RNA, 32 nt, Human
ucucccuaaaauuucuauguugaagucuuaac

SEQ ID NO: 506569 - RNA, 32 nt, Human
ucucccuaauaaaaauuggagcucuuuuccac

SEQ ID NO: 506570 - RNA, 32 nt, Human
ucucccuaauagccucagucucugccuucagu

SEQ ID NO: 506571 - RNA, 32 nt, Human
ucucccuaguagguggaacuacaggcauguac

SEQ ID NO: 506572 - RNA, 32 nt, Human
ucucccuauguugcccaggcagaucucagacu

SEQ ID NO: 506573 - RNA, 32 nt, Human
ucucccucacaccucccuucaucccaggguau

SEQ ID NO: 506574 - RNA, 31 nt, Human
ucucccucagauccuccccacagcucagcgu

SEQ ID NO: 506575 - RNA, 32 nt, Human
ucucccucagccaaguccuuccuuacaaugaa

SEQ ID NO: 506576 - RNA, 32 nt, Human
ucucccuccaaagaagagcaugggagaggugg

SEQ ID NO: 506577 - RNA, 32 nt, Human
ucucccuccacacugcagccgggagccucugc

SEQ ID NO: 506578 - RNA, 32 nt, Human
ucucccuccagccugggcuacucuccuccugg

SEQ ID NO: 506579 - RNA, 32 nt, Human
ucucccuccauggcaggaaggcgggggauuuc

SEQ ID NO: 506580 - RNA, 32 nt, Human
ucucccuccauuguucagcucuguacuuggau

SEQ ID NO: 506581 - RNA, 32 nt, Human
ucucccuccauuucgucccuugccugccuucc

SEQ ID NO: 506582 - RNA, 32 nt, Human
ucucccuccccucaucccacaucucaaagcag

SEQ ID NO: 506583 - RNA, 21 nt, Human
ucucccuccccuuuccuuucc

SEQ ID NO: 506584 - RNA, 32 nt, Human
ucucccucccguuucaggggaaaggucugagu

SEQ ID NO: 506585 - RNA, 32 nt, Human
ucucccucccuccuucacucccucucucuccc

SEQ ID NO: 506586 - RNA, 32 nt, Human
ucucccucccucucucaugaggcacagccaag

SEQ ID NO: 506587 - RNA, 32 nt, Human
ucucccuccggaccuaccucagggagcugagc

SEQ ID NO: 506588 - RNA, 32 nt, Human
ucucccuccuccagaucccugccuccuagugc

SEQ ID NO: 506589 - RNA, 32 nt, Human
ucucccuccucccucgcucucucccccuucuc

SEQ ID NO: 506590 - RNA, 32 nt, Human
ucucccuccuccuccuccuccgagcugcuagc

SEQ ID NO: 506591 - RNA, 32 nt, Human
ucucccuccucuccuuuccucuuccaguaucu

SEQ ID NO: 506592 - RNA, 32 nt, Human
ucucccuccugccucaacuggggcugcuggaa

SEQ ID NO: 506593 - RNA, 32 nt, Human
ucucccuccuucccagcccacccgggcagcag

SEQ ID NO: 506594 - RNA, 32 nt, Human
ucucccuccuuccuugggccugccucaguucc

SEQ ID NO: 506595 - RNA, 32 nt, Human
ucucccuccuuuccuuucucccuucccccacc

SEQ ID NO: 506596 - RNA, 21 nt, Human
ucucccuccuuucuccuuccc

SEQ ID NO: 506597 - RNA, 32 nt, Human
ucucccucgcagcugcuucuugcuuuucuuuc

SEQ ID NO: 506598 - RNA, 32 nt, Human
ucucccucgcuccacgcccuccagggggccgc

SEQ ID NO: 506599 - RNA, 32 nt, Human
ucucccucgggacccaaggccacaaaggagag

SEQ ID NO: 506600 - RNA, 32 nt, Human
ucucccucucaggcagagagguugccgaguga

SEQ ID NO: 506601 - RNA, 32 nt, Human
ucucccucucagggguagcagagacaggguug

SEQ ID NO: 506602 - RNA, 32 nt, Human
ucucccucuccaagcaucuguaaguugcacuc

SEQ ID NO: 506603 - RNA, 32 nt, Human
ucucccucuccccaagcucagaggugcucaga

SEQ ID NO: 506604 - RNA, 32 nt, Human
ucucccucuccucucucccucucccucucccu

SEQ ID NO: 506605 - RNA, 32 nt, Human
ucucccucucucucaucuuacauuucucaccc

SEQ ID NO: 506606 - RNA, 32 nt, Human
ucucccucucugagaggagcagcagaugcuca

SEQ ID NO: 506607 - RNA, 32 nt, Human
ucucccucugaacuucucuucauaaagucauu

SEQ ID NO: 506608 - RNA, 24 nt, Human
ucucccucugccacgcuuaggcug

SEQ ID NO: 506609 - RNA, 23 nt, Human
ucucccucugccuuuccgcggcc

SEQ ID NO: 506610 - RNA, 32 nt, Human
ucucccucugcucuccaguucccuggaccccc

SEQ ID NO: 506611 - RNA, 32 nt, Human
ucucccucuggacacugcgggccagguguaca

SEQ ID NO: 506612 - RNA, 22 nt, Human
ucucccucugucccccaggcug

SEQ ID NO: 506613 - RNA, 32 nt, Human
ucucccucuguggcuucuuggagccgcauaga

SEQ ID NO: 506614 - RNA, 22 nt, Human
ucucccucuguuuuuugcugcc

SEQ ID NO: 506615 - RNA, 32 nt, Human
ucucccucuucuuccucuaauugugaccguuu

SEQ ID NO: 506616 - RNA, 32 nt, Human
ucucccucuuucucaguuccucuuucuuuucu

SEQ ID NO: 506617 - RNA, 22 nt, Human
ucucccugaauccagagcgcug

SEQ ID NO: 506618 - RNA, 32 nt, Human
ucucccugacugccgcucacacugccgugaga

SEQ ID NO: 506619 - RNA, 32 nt, Human
ucucccugagugagacuugccugcuucucugg

SEQ ID NO: 506620 - RNA, 32 nt, Human
ucucccugcaaccuccgccuccuggguugaag

SEQ ID NO: 506621 - RNA, 32 nt, Human
ucucccugcacauaaagcagguuguagaacgu

SEQ ID NO: 506622 - RNA, 32 nt, Human
ucucccugcagccccuggcuucccagccuucc

SEQ ID NO: 506623 - RNA, 32 nt, Human
ucucccugcauccugaaugaugcuuagucaga

SEQ ID NO: 506624 - RNA, 32 nt, Human
ucucccugcauccuuguccuugcaggugcuuu

SEQ ID NO: 506625 - RNA, 32 nt, Human
ucucccugcaucuuccucuccuuucccaaggc

SEQ ID NO: 506626 - RNA, 32 nt, Human
ucucccugcaugacagucccccagaaacuuag

SEQ ID NO: 506627 - RNA, 32 nt, Human
ucucccugccaaagcccaacucccagggcucu

SEQ ID NO: 506628 - RNA, 32 nt, Human
ucucccugccacagggacccagaagacccgcu

SEQ ID NO: 506629 - RNA, 32 nt, Human
ucucccugccacccuuccccaguucaccaaac

SEQ ID NO: 506630 - RNA, 22 nt, Human
ucucccugccagcggagugcug

SEQ ID NO: 506631 - RNA, 32 nt, Human
ucucccugcccuaaggagggugugaugccagc

SEQ ID NO: 506632 - RNA, 32 nt, Human
ucucccugccgccucugccugggcucccacuu

SEQ ID NO: 506633 - RNA, 32 nt, Human
ucucccugccucacuccucuaggcaggggagu

SEQ ID NO: 506634 - RNA, 32 nt, Human
ucucccugcuaccuccugcugggcugcuccug

SEQ ID NO: 506635 - RNA, 32 nt, Human
ucucccugcucacccucugcugggccaggcac

SEQ ID NO: 506636 - RNA, 22 nt, Human
ucucccugcuccccucaacccc

SEQ ID NO: 506637 - RNA, 20 nt, Human
ucucccugcuccuggugccu

SEQ ID NO: 506638 - RNA, 32 nt, Human
ucucccugcucuggauagcagauccgcuggcu

SEQ ID NO: 506639 - RNA, 27 nt, Human
ucucccugcugccucucugggguucug

SEQ ID NO: 506640 - RNA, 32 nt, Human
ucucccugcuucuccccuuugucaucucugau

SEQ ID NO: 506641 - RNA, 32 nt, Human
ucucccuggaacgggagggacagggaauuuuu

SEQ ID NO: 506642 - RNA, 21 nt, Human
ucucccuggacccugccuuca

SEQ ID NO: 506643 - RNA, 32 nt, Human
ucucccuggauggcaggaaggaagcagguggg

SEQ ID NO: 506644 - RNA, 32 nt, Human
ucucccuggcuagggugugguggugugaucuu

SEQ ID NO: 506645 - RNA, 19 nt, Human
ucucccuggcuggagcagg

SEQ ID NO: 506646 - RNA, 32 nt, Human
ucucccugggaggcgggcgcacugccucucac

SEQ ID NO: 506647 - RNA, 19 nt, Human
ucucccugggaggcucagg

SEQ ID NO: 506648 - RNA, 21 nt, Human
ucucccugggcacccugcagg

SEQ ID NO: 506649 - RNA, 32 nt, Human
ucucccuggggagcccgggugggcaggaacaa

SEQ ID NO: 506650 - RNA, 16 nt, Human
ucucccuggggccagg

SEQ ID NO: 506651 - RNA, 32 nt, Human
ucucccuguaggaaggcaaucugggccguaau

SEQ ID NO: 506652 - RNA, 32 nt, Human
ucucccugucagguugcacagaugcauguaga

SEQ ID NO: 506653 - RNA, 32 nt, Human
ucucccuguccacccuucccuucguggacaga

SEQ ID NO: 506654 - RNA, 32 nt, Human
ucucccugucucucccccgcugccauuuugau

SEQ ID NO: 506655 - RNA, 32 nt, Human
ucucccuguguccccuuccugcuuugagcuag

SEQ ID NO: 506656 - RNA, 32 nt, Human
ucucccuguguucugggcuggggccaccuuug

SEQ ID NO: 506657 - RNA, 18 nt, Human
ucucccuuaagcaguguu

SEQ ID NO: 506658 - RNA, 32 nt, Human
ucucccuucaggcggagguugcagugagccga

SEQ ID NO: 506659 - RNA, 32 nt, Human
ucucccuucauaucuuuucaccuauuuccagu

SEQ ID NO: 506660 - RNA, 24 nt, Human
ucucccuuccaagcuagagggcug

SEQ ID NO: 506661 - RNA, 21 nt, Human
ucucccuuccagcaauaagug

SEQ ID NO: 506662 - RNA, 23 nt, Human
ucucccuucccccaccaaccucu

SEQ ID NO: 506663 - RNA, 32 nt, Human
ucucccuucuaucuuucuuuuugagguggugg

SEQ ID NO: 506664 - RNA, 25 nt, Human
ucucccuucucaacuuagggcggcg

SEQ ID NO: 506665 - RNA, 18 nt, Human
ucucccuucuccaaugag

SEQ ID NO: 506666 - RNA, 32 nt, Human
ucucccuucucccacuagaaugaggacucgau

SEQ ID NO: 506667 - RNA, 32 nt, Human
ucucccuucucccacuugccuacccucaaugc

SEQ ID NO: 506668 - RNA, 32 nt, Human
ucucccuucucccuugucaucagacacauugu

SEQ ID NO: 506669 - RNA, 32 nt, Human
ucucccuucuccuucccggccccaccaacacu

SEQ ID NO: 506670 - RNA, 19 nt, Human
ucucccuucucuggggcgc

SEQ ID NO: 506671 - RNA, 32 nt, Human
ucucccuucucuuucucgcauaacuccccacc

SEQ ID NO: 506672 - RNA, 20 nt, Human
ucucccuucugaaaugagug

SEQ ID NO: 506673 - RNA, 32 nt, Human
ucucccuugccagccagcacucugccuucugu

SEQ ID NO: 506674 - RNA, 32 nt, Human
ucucccuugcccaauccugcuucuuuccuuuc

SEQ ID NO: 506675 - RNA, 25 nt, Human
ucucccuuggguuuuaugggcgcug

SEQ ID NO: 506676 - RNA, 22 nt, Human
ucucccuuucccccgaugaaug

SEQ ID NO: 506677 - RNA, 23 nt, Human
ucucccuuucguuccccuucacu

SEQ ID NO: 506678 - RNA, 32 nt, Human
ucucccuuucucccccucucucucugccuuag

SEQ ID NO: 506679 - RNA, 32 nt, Human
ucucccuuucucccucgcuccccaccaacucu

SEQ ID NO: 506680 - RNA, 22 nt, Human
ucucccuuucugaucugucucc

SEQ ID NO: 506681 - RNA, 32 nt, Human
ucucccuuucugcuugcucuucuguuugcggu

SEQ ID NO: 506682 - RNA, 32 nt, Human
ucucccuuugugaaaaggagagcaggugucag

SEQ ID NO: 506683 - RNA, 21 nt, Human
ucucccuuuguuccagcgccg

SEQ ID NO: 506684 - RNA, 22 nt, Human
ucucccuuuuaucccaauaagu

SEQ ID NO: 506685 - RNA, 32 nt, Human
ucucccuuuuucucccucauucccucucucuu

SEQ ID NO: 506686 - RNA, 20 nt, Human
ucuccgacuccagagaccug

SEQ ID NO: 506687 - RNA, 32 nt, Human
ucuccgacugcccagauaucuacuggggccug

SEQ ID NO: 506688 - RNA, 32 nt, Human
ucuccgagagccucuggcagccgucuaccaag

SEQ ID NO: 506689 - RNA, 32 nt, Human
ucuccgagagcugagaaggaaaagaggagcuu

SEQ ID NO: 506690 - RNA, 22 nt, Human
ucuccgaggaaccugcccccuc

SEQ ID NO: 506691 - RNA, 32 nt, Human
ucuccgaggccugcuugcuagguggggcgacu

SEQ ID NO: 506692 - RNA, 32 nt, Human
ucuccgaggcuggaauacgguggugcgaucaa

SEQ ID NO: 506693 - RNA, 32 nt, Human
ucuccgaggcuggagugcaauguugcaaucag

SEQ ID NO: 506694 - RNA, 26 nt, Human
ucuccgaguacaacaucuuccaguuc

SEQ ID NO: 506695 - RNA, 32 nt, Human
ucuccgaguaccccagugaccagagugagaga

SEQ ID NO: 506696 - RNA, 32 nt, Human
ucuccgaguucugcgagaagucggacggcgcg

SEQ ID NO: 506697 - RNA, 32 nt, Human
ucuccgaugcccuucagugagguggggacgcc

SEQ ID NO: 506698 - RNA, 21 nt, Human
ucuccgauuccaccuccuccu

SEQ ID NO: 506699 - RNA, 32 nt, Human
ucuccgauugagcuuugaagauuaggaggaga

SEQ ID NO: 506700 - RNA, 32 nt, Human
ucuccgcaacagaaccaucucaagugggucua

SEQ ID NO: 506701 - RNA, 32 nt, Human
ucuccgcacaccucuggcugucuuuuuguacu

SEQ ID NO: 506702 - RNA, 32 nt, Human
ucuccgcacaucugcaugccugucaaacccag

SEQ ID NO: 506703 - RNA, 32 nt, Human
ucuccgcaggaggcuguggcagcuguggcauc

SEQ ID NO: 506704 - RNA, 32 nt, Human
ucuccgcaggcccacuguccuuggguuuaaug

SEQ ID NO: 506705 - RNA, 32 nt, Human
ucuccgccacugcccucaaggcugcuugaggc

SEQ ID NO: 506706 - RNA, 32 nt, Human
ucuccgccccgugguuccuauggaugcuguuu

SEQ ID NO: 506707 - RNA, 32 nt, Human
ucuccgccccuuucucuuucccacucaguuuu

SEQ ID NO: 506708 - RNA, 32 nt, Human
ucuccgccuccaccuaucuuccuacagaccuc

SEQ ID NO: 506709 - RNA, 32 nt, Human
ucuccgccucucucccugccucccucucucuc

SEQ ID NO: 506710 - RNA, 32 nt, Human
ucuccgccugggaccccuccgccccgacccgg

SEQ ID NO: 506711 - RNA, 32 nt, Human
ucuccgcgcuguuccucgucauggcggcccuc

SEQ ID NO: 506712 - RNA, 32 nt, Human
ucuccgcggaggagguggaggaggcggcggcg

SEQ ID NO: 506713 - RNA, 32 nt, Human
ucuccgcggccuuccuccucccugcuccagaa

SEQ ID NO: 506714 - RNA, 32 nt, Human
ucuccgcgucugccagccuggcuggcaguccg

SEQ ID NO: 506715 - RNA, 32 nt, Human
ucuccgcguggguacuuggggguggggccaca

SEQ ID NO: 506716 - RNA, 32 nt, Human
ucuccgcucacugcaacauccgccucccggac

SEQ ID NO: 506717 - RNA, 32 nt, Human
ucuccgcucacugcaaccuccaccuccuggcu

SEQ ID NO: 506718 - RNA, 32 nt, Human
ucuccgcucacugcaaccucugccucccgguu

SEQ ID NO: 506719 - RNA, 32 nt, Human
ucuccgcucacugcaagcuccgccucccgggu

SEQ ID NO: 506720 - RNA, 32 nt, Human
ucuccgcucacugcaagcuccgccucgcgagu

SEQ ID NO: 506721 - RNA, 32 nt, Human
ucuccgcucacugcaagcucugccuccugggc

SEQ ID NO: 506722 - RNA, 32 nt, Human
ucuccgcucacugcagccuccgccuccugggu

SEQ ID NO: 506723 - RNA, 32 nt, Human
ucuccgcucacugccaccuccgccucucuagu

SEQ ID NO: 506724 - RNA, 32 nt, Human
ucuccgcucgcagcaaccucugccucccaggu

SEQ ID NO: 506725 - RNA, 32 nt, Human
ucuccgcucgcuacaaccuccaccucccagcu

SEQ ID NO: 506726 - RNA, 32 nt, Human
ucuccgcucgcugcaaccaccaucuccugggu

SEQ ID NO: 506727 - RNA, 32 nt, Human
ucuccgcucuuagguaaaugaacaagcuaccc

SEQ ID NO: 506728 - RNA, 32 nt, Human
ucuccgcugcaggagguggggugaggacauug

SEQ ID NO: 506729 - RNA, 32 nt, Human
ucuccgcugccccggucaaccagcggagagug

SEQ ID NO: 506730 - RNA, 32 nt, Human
ucuccgcugcuaguucuuggcucugggaggcc

SEQ ID NO: 506731 - RNA, 32 nt, Human
ucuccgcuucccccagcacacacacauacaac

SEQ ID NO: 506732 - RNA, 32 nt, Human
ucuccggacucugcgucggguuuccucacccu

SEQ ID NO: 506733 - RNA, 32 nt, Human
ucuccggaggcagaaguuguggaucggccggc

SEQ ID NO: 506734 - RNA, 32 nt, Human
ucuccggaucucccucggucccucucuccucc

SEQ ID NO: 506735 - RNA, 32 nt, Human
ucuccggcaagccagggccggggcuucacugc

SEQ ID NO: 506736 - RNA, 18 nt, Human
ucuccggcagucagcacc

SEQ ID NO: 506737 - RNA, 32 nt, Human
ucuccggccguccaugcacagagcgccuuccc

SEQ ID NO: 506738 - RNA, 32 nt, Human
ucuccggccuccugguucccacaacauauaag

SEQ ID NO: 506739 - RNA, 32 nt, Human
ucuccggcgggcgggagccaggcgcugacggg

SEQ ID NO: 506740 - RNA, 25 nt, Human
ucuccggcucugcugcccgggauuu

SEQ ID NO: 506741 - RNA, 23 nt, Human
ucuccggcugaucgcgggaccug

SEQ ID NO: 506742 - RNA, 32 nt, Human
ucuccggcuuugggccuggcaggcuggcacau

SEQ ID NO: 506743 - RNA, 32 nt, Human
ucuccgggacugcccucucgacugucaguggg

SEQ ID NO: 506744 - RNA, 32 nt, Human
ucuccgggcagccaccaccuccucggucugcc

SEQ ID NO: 506745 - RNA, 32 nt, Human
ucuccgggcccagcucuuccucccggcugcgu

SEQ ID NO: 506746 - RNA, 32 nt, Human
ucuccgggccuuucucuggcuuccuuggcuug

SEQ ID NO: 506747 - RNA, 32 nt, Human
ucuccggggaggcagggguccugcagguccug

SEQ ID NO: 506748 - RNA, 19 nt, Human
ucuccggggcccucgcccc

SEQ ID NO: 506749 - RNA, 32 nt, Human
ucuccggucccuuuauggaccccacacaagau

SEQ ID NO: 506750 - RNA, 32 nt, Human
ucuccgucaucccuaucuccccugggcuuaca

SEQ ID NO: 506751 - RNA, 32 nt, Human
ucuccgucucccaggccagagugcaguggcgc

SEQ ID NO: 506752 - RNA, 32 nt, Human
ucuccgucuuugugucugucucugugucuguc

SEQ ID NO: 506753 - RNA, 32 nt, Human
ucuccguucacugcaaucucugccuccugggu

SEQ ID NO: 506754 - RNA, 32 nt, Human
ucuccguucacugcagccuccaccuccccggu

SEQ ID NO: 506755 - RNA, 32 nt, Human
ucuccguucuuccaccuccuccucuuccucag

SEQ ID NO: 506756 - RNA, 32 nt, Human
ucuccguugucuucuugggucuuugggguuga

SEQ ID NO: 506757 - RNA, 32 nt, Human
ucuccuaaaaauacaaaaauuagccagaugug

SEQ ID NO: 506758 - RNA, 32 nt, Human
ucuccuaaaaauacaaaaauuagccgggcaug

SEQ ID NO: 506759 - RNA, 32 nt, Human
ucuccuaaaaauacaaaauuagccgggcgugg

SEQ ID NO: 506760 - RNA, 32 nt, Human
ucuccuaaaaauacagaaaauuagccuggcau

SEQ ID NO: 506761 - RNA, 32 nt, Human
ucuccuaaaauauacaaaaauuagccgggcau

SEQ ID NO: 506762 - RNA, 32 nt, Human
ucuccuaaaguacugggauuacaggcgugagc

SEQ ID NO: 506763 - RNA, 32 nt, Human
ucuccuaagauggaaucugugguuugggaaug

SEQ ID NO: 506764 - RNA, 18 nt, Human
ucuccuaaucccaucacu

SEQ ID NO: 506765 - RNA, 32 nt, Human
ucuccuaaugcuaucccuccccuugcccccaa

SEQ ID NO: 506766 - RNA, 32 nt, Human
ucuccuacaaaacagacagcugccucucagau

SEQ ID NO: 506767 - RNA, 21 nt, Human
ucuccuacagcacgccccagg

SEQ ID NO: 506768 - RNA, 32 nt, Human
ucuccuacagccgccaggccugggguccugaa

SEQ ID NO: 506769 - RNA, 19 nt, Human
ucuccuacagcucccugca

SEQ ID NO: 506770 - RNA, 32 nt, Human
ucuccuacaugccagggaucccaccaggaggc

SEQ ID NO: 506771 - RNA, 20 nt, Human
ucuccuaccggcacccgcag

SEQ ID NO: 506772 - RNA, 32 nt, Human
ucuccuaccugccugacauccuggugacuggc

SEQ ID NO: 506773 - RNA, 32 nt, Human
ucuccuacuccauccaguccugaggagccuua

SEQ ID NO: 506774 - RNA, 32 nt, Human
ucuccuacuccugcccacuccaccuucuuagc

SEQ ID NO: 506775 - RNA, 32 nt, Human
ucuccuagaagcagccggcacaggagggaagg

SEQ ID NO: 506776 - RNA, 22 nt, Human
ucuccuagcucuggaggugcug

SEQ ID NO: 506777 - RNA, 32 nt, Human
ucuccuagcugacugacuccuuccuuaguuca

SEQ ID NO: 506778 - RNA, 25 nt, Human
ucuccuagcugcuacccaggaccuc

SEQ ID NO: 506779 - RNA, 21 nt, Human
ucuccuaggagguggcuccag

SEQ ID NO: 506780 - RNA, 32 nt, Human
ucuccuaggcuggagcgcaguggugcaaucac

SEQ ID NO: 506781 - RNA, 32 nt, Human
ucuccuaggcuggagugcaguggugugaucau

SEQ ID NO: 506782 - RNA, 32 nt, Human
ucuccuaggucaguccccuccuggacccaccc

SEQ ID NO: 506783 - RNA, 32 nt, Human
ucuccuagguuagagagggguggccuggggug

SEQ ID NO: 506784 - RNA, 32 nt, Human
ucuccuaguuccagauuuuaauuuggggaaca

SEQ ID NO: 506785 - RNA, 32 nt, Human
ucuccuaucuguguauuacacauuccccucuc

SEQ ID NO: 506786 - RNA, 32 nt, Human
ucuccuaucuguguccucauacauacugccgc

SEQ ID NO: 506787 - RNA, 32 nt, Human
ucuccuaugccuauuccuacauacuugcugag

SEQ ID NO: 506788 - RNA, 32 nt, Human
ucuccuauuaugcaaacccacaccauggaucc

SEQ ID NO: 506789 - RNA, 32 nt, Human
ucuccuauucuuucucuuucuucucuccacau

SEQ ID NO: 506790 - RNA, 32 nt, Human
ucuccuauugccugcaggggagcaguuggcau

SEQ ID NO: 506791 - RNA, 32 nt, Human
ucuccucaaaccaaaguguugcagugaaggac

SEQ ID NO: 506792 - RNA, 22 nt, Human
ucuccucaaaugcugugugcug

SEQ ID NO: 506793 - RNA, 32 nt, Human
ucuccucaaggccucuggagcaaccagcaccu

SEQ ID NO: 506794 - RNA, 32 nt, Human
ucuccucaccacagugcuguguggucuauacc

SEQ ID NO: 506795 - RNA, 32 nt, Human
ucuccucaccugucucuccauauuuaggucac

SEQ ID NO: 506796 - RNA, 26 nt, Human
ucuccucacucaaagucccuucgcca

SEQ ID NO: 506797 - RNA, 32 nt, Human
ucuccucacuggccuuucuuuccgucuagccu

SEQ ID NO: 506798 - RNA, 32 nt, Human
ucuccucacuguccugacaggcugaggcggcu

SEQ ID NO: 506799 - RNA, 32 nt, Human
ucuccucagccccuggcaaccaccauccuacu

SEQ ID NO: 506800 - RNA, 32 nt, Human
ucuccucagcuauguggaacugugaaucaauu

SEQ ID NO: 506801 - RNA, 32 nt, Human
ucuccucagcucccccuucaccccuccuugcc

SEQ ID NO: 506802 - RNA, 32 nt, Human
ucuccucagggaccaggacaaggugcugcugc

SEQ ID NO: 506803 - RNA, 32 nt, Human
ucuccucaggguggccacuggaggaugggugg

SEQ ID NO: 506804 - RNA, 32 nt, Human
ucuccucagguggagucugcagaguggaccca

SEQ ID NO: 506805 - RNA, 32 nt, Human
ucuccucauacacuccuucccugcugagccag

SEQ ID NO: 506806 - RNA, 32 nt, Human
ucuccucauaguuguuauuaagcucuuuuuaa

SEQ ID NO: 506807 - RNA, 19 nt, Human
ucuccucaucccugagcca

SEQ ID NO: 506808 - RNA, 32 nt, Human
ucuccucauccugcuucacaggcuccgcggcc

SEQ ID NO: 506809 - RNA, 20 nt, Human
ucuccucaucucuugcuugu

SEQ ID NO: 506810 - RNA, 21 nt, Human
ucuccucaucuguaacuuuca

SEQ ID NO: 506811 - RNA, 18 nt, Human
ucuccucauggggccagg

SEQ ID NO: 506812 - RNA, 32 nt, Human
ucuccucauuccuacaccuauuuucugcugca

SEQ ID NO: 506813 - RNA, 32 nt, Human
ucuccucauucucugaacccacuguggugaga

SEQ ID NO: 506814 - RNA, 32 nt, Human
ucuccuccaccacucucuaaccugagagccug

SEQ ID NO: 506815 - RNA, 32 nt, Human
ucuccuccacugcccccgccucccaccaccau

SEQ ID NO: 506816 - RNA, 32 nt, Human
ucuccuccacuuccucccuucccucauccugc

SEQ ID NO: 506817 - RNA, 24 nt, Human
ucuccuccagcauuccugugucug

SEQ ID NO: 506818 - RNA, 32 nt, Human
ucuccuccaugguggucacugccccuggcagg

SEQ ID NO: 506819 - RNA, 21 nt, Human
ucuccuccauucuccaucacu

SEQ ID NO: 506820 - RNA, 32 nt, Human
ucuccuccauuuuuccuccccaagaauagcug

SEQ ID NO: 506821 - RNA, 24 nt, Human
ucuccucccaaucuccauaggcug

SEQ ID NO: 506822 - RNA, 22 nt, Human
ucuccucccacaccuuccugcu

SEQ ID NO: 506823 - RNA, 32 nt, Human
ucuccucccacagggucccccuugccccagcc

SEQ ID NO: 506824 - RNA, 32 nt, Human
ucuccucccagccucugccugucccacagaua

SEQ ID NO: 506825 - RNA, 18 nt, Human
ucuccucccagcgugugu

SEQ ID NO: 506826 - RNA, 32 nt, Human
ucuccuccccagcagccauucuccccuuuccc

SEQ ID NO: 506827 - RNA, 32 nt, Human
ucuccucccccaacccccaccccacaauuuua

SEQ ID NO: 506828 - RNA, 32 nt, Human
ucuccuccccguggauucccccaaacccauaa

SEQ ID NO: 506829 - RNA, 32 nt, Human
ucuccuccccuccccucccucaguccucccuc

SEQ ID NO: 506830 - RNA, 32 nt, Human
ucuccuccccuccccucccuucucauuccuuu

SEQ ID NO: 506831 - RNA, 32 nt, Human
ucuccuccccucccucagagacaccaaacugc

SEQ ID NO: 506832 - RNA, 32 nt, Human
ucuccuccccucucccuucuuuaaacgagcuu

SEQ ID NO: 506833 - RNA, 32 nt, Human
ucuccuccccucuuuuccuuccuuccuacccc

SEQ ID NO: 506834 - RNA, 32 nt, Human
ucuccuccccuuggacucuagauuucuggcca

SEQ ID NO: 506835 - RNA, 24 nt, Human
ucuccucccgaugcucugccgcug

SEQ ID NO: 506836 - RNA, 32 nt, Human
ucuccucccgucccucuccaggggccccgcau

SEQ ID NO: 506837 - RNA, 32 nt, Human
ucuccucccucccucccuccuccugggguggg

SEQ ID NO: 506838 - RNA, 22 nt, Human
ucuccucccugagcaccugcug

SEQ ID NO: 506839 - RNA, 32 nt, Human
ucuccucccugccuccugccuccugcggcugu

SEQ ID NO: 506840 - RNA, 32 nt, Human
ucuccucccuuacccuccucugcugggaaccu

SEQ ID NO: 506841 - RNA, 32 nt, Human
ucuccuccuacugaaaaugcugcccaggggaa

SEQ ID NO: 506842 - RNA, 32 nt, Human
ucuccuccuaugccuucccaugagucagucau

SEQ ID NO: 506843 - RNA, 32 nt, Human
ucuccuccucacccucucgcuccuuccugugu

SEQ ID NO: 506844 - RNA, 32 nt, Human
ucuccuccucaccuuuuguugcuaucggcagc

SEQ ID NO: 506845 - RNA, 32 nt, Human
ucuccuccucagggccuccuguucucagggcc

SEQ ID NO: 506846 - RNA, 23 nt, Human
ucuccuccucaguucugugccug

SEQ ID NO: 506847 - RNA, 32 nt, Human
ucuccuccuccaccaccucaucccgcccaccu

SEQ ID NO: 506848 - RNA, 32 nt, Human
ucuccuccuccaccuccuccuccgccuccucc

SEQ ID NO: 506849 - RNA, 32 nt, Human
ucuccuccuccccuccucuucccuuagccucu

SEQ ID NO: 506850 - RNA, 32 nt, Human
ucuccuccuccccuucccaguuaccaaagagu

SEQ ID NO: 506851 - RNA, 32 nt, Human
ucuccuccucccuucccgcuccuuccucuccc

SEQ ID NO: 506852 - RNA, 32 nt, Human
ucuccuccuccuccuccccuacaauuccuuuu

SEQ ID NO: 506853 - RNA, 32 nt, Human
ucuccuccuccuccuccgccgccggacacgca

SEQ ID NO: 506854 - RNA, 32 nt, Human
ucuccuccuccuccugcuuccccugcucagag

SEQ ID NO: 506855 - RNA, 32 nt, Human
ucuccuccucuaaauuaaacaggauuuaaaua

SEQ ID NO: 506856 - RNA, 32 nt, Human
ucuccuccucuuccucucucuggacgcccggc

SEQ ID NO: 506857 - RNA, 32 nt, Human
ucuccuccugcagggcccacccuaagaaugua

SEQ ID NO: 506858 - RNA, 32 nt, Human
ucuccuccugcagguucaagcuccucaguccc

SEQ ID NO: 506859 - RNA, 32 nt, Human
ucuccuccuuccugaugucugccauuagcauu

SEQ ID NO: 506860 - RNA, 32 nt, Human
ucuccuccuucugcuuaauuuaccuuccuacc

SEQ ID NO: 506861 - RNA, 32 nt, Human
ucuccuccuuucucccacguccuaucugccuc

SEQ ID NO: 506862 - RNA, 32 nt, Human
ucuccuccuuucucucccucuuucccuccauc

SEQ ID NO: 506863 - RNA, 32 nt, Human
ucuccucgccacuccaagguugcagacgaagc

SEQ ID NO: 506864 - RNA, 32 nt, Human
ucuccucggaugaccugccuccuaauuuccug

SEQ ID NO: 506865 - RNA, 32 nt, Human
ucuccucggcguccucacaacucuuaauuggg

SEQ ID NO: 506866 - RNA, 32 nt, Human
ucuccucuagacuguuccaggcugccugcgga

SEQ ID NO: 506867 - RNA, 19 nt, Human
ucuccucucagagaaaggc

SEQ ID NO: 506868 - RNA, 32 nt, Human
ucuccucuccacccuaucccagccucccccac

SEQ ID NO: 506869 - RNA, 22 nt, Human
ucuccucuccaucucugccuuu

SEQ ID NO: 506870 - RNA, 23 nt, Human
ucuccucuccccucaaccucuua

SEQ ID NO: 506871 - RNA, 32 nt, Human
ucuccucuccccucacccuccugccccuggcc

SEQ ID NO: 506872 - RNA, 32 nt, Human
ucuccucuccccucuaaggccgaagaaggguc

SEQ ID NO: 506873 - RNA, 32 nt, Human
ucuccucuccgcccacucuuugcucacugccc

SEQ ID NO: 506874 - RNA, 32 nt, Human
ucuccucuccucaaaucucugaucaucuucuc

SEQ ID NO: 506875 - RNA, 32 nt, Human
ucuccucuccuccuccagcccccagccuacuc

SEQ ID NO: 506876 - RNA, 32 nt, Human
ucuccucuccucucuucuuguuugaacauggu

SEQ ID NO: 506877 - RNA, 32 nt, Human
ucuccucuccugcccuggccccggccccuccu

SEQ ID NO: 506878 - RNA, 23 nt, Human
ucuccucuccugugggacucucu

SEQ ID NO: 506879 - RNA, 32 nt, Human
ucuccucuccuucccuuccucucccccgccca

SEQ ID NO: 506880 - RNA, 32 nt, Human
ucuccucucgcccaggcuggagugcaguggug

SEQ ID NO: 506881 - RNA, 32 nt, Human
ucuccucucucccucucccucucccucucugu

SEQ ID NO: 506882 - RNA, 21 nt, Human
ucuccucucucucugugucug

SEQ ID NO: 506883 - RNA, 32 nt, Human
ucuccucucucuucccuuccugucucucuucc

SEQ ID NO: 506884 - RNA, 32 nt, Human
ucuccucucugccugccuccucccucaccgaa

SEQ ID NO: 506885 - RNA, 21 nt, Human
ucuccucucugggacaggcug

SEQ ID NO: 506886 - RNA, 20 nt, Human
ucuccucucuuccaaaccuc

SEQ ID NO: 506887 - RNA, 23 nt, Human
ucuccucucuugaguuaaccccu

SEQ ID NO: 506888 - RNA, 32 nt, Human
ucuccucucuugcucccaccucccucucuucc

SEQ ID NO: 506889 - RNA, 22 nt, Human
ucuccucugccaaaucuacuua

SEQ ID NO: 506890 - RNA, 32 nt, Human
ucuccucugccauccagaaccguccagaacug

SEQ ID NO: 506891 - RNA, 17 nt, Human
ucuccucugcccaucac

SEQ ID NO: 506892 - RNA, 32 nt, Human
ucuccucugcuccccaucccacuuucucaucu

SEQ ID NO: 506893 - RNA, 32 nt, Human
ucuccucugcuuggagaguuugcccuugucug

SEQ ID NO: 506894 - RNA, 24 nt, Human
ucuccucugggaccugccaugcug

SEQ ID NO: 506895 - RNA, 32 nt, Human
ucuccucugucucuccucggucucagcucugg

SEQ ID NO: 506896 - RNA, 32 nt, Human
ucuccucuguggugugcauaugugguuucuaa

SEQ ID NO: 506897 - RNA, 32 nt, Human
ucuccucuucaccucuuccugcuggccacgag

SEQ ID NO: 506898 - RNA, 26 nt, Human
ucuccucuucacuacucuguguccug

SEQ ID NO: 506899 - RNA, 32 nt, Human
ucuccucuucccaccuccuccuggcuauguuc

SEQ ID NO: 506900 - RNA, 32 nt, Human
ucuccucuucccuccagcucuugagccuaccc

SEQ ID NO: 506901 - RNA, 32 nt, Human
ucuccucuuccuucuccuuucucccauucuuc

SEQ ID NO: 506902 - RNA, 32 nt, Human
ucuccucuucucgagcaggagugauaguuacc

SEQ ID NO: 506903 - RNA, 32 nt, Human
ucuccugaaagcugggaugacaggcacaugcc

SEQ ID NO: 506904 - RNA, 32 nt, Human
ucuccugaaauguuugugcauggaagaacugc

SEQ ID NO: 506905 - RNA, 32 nt, Human
ucuccugaagaggaacugggccuguugcccuu

SEQ ID NO: 506906 - RNA, 32 nt, Human
ucuccugacauuaagacacaccucuggauccc

SEQ ID NO: 506907 - RNA, 32 nt, Human
ucuccugaccucaaguccaacaacagugucca

SEQ ID NO: 506908 - RNA, 32 nt, Human
ucuccugaccucaugauccucccgccucagcc

SEQ ID NO: 506909 - RNA, 32 nt, Human
ucuccugaccucaugauccucccgccucggcc

SEQ ID NO: 506910 - RNA, 32 nt, Human
ucuccugacuagcugggacuacaggugcaugc

SEQ ID NO: 506911 - RNA, 32 nt, Human
ucuccugacuccaaauccgagaauccuuucac

SEQ ID NO: 506912 - RNA, 32 nt, Human
ucuccugagaugucaggaaggagggggccacc

SEQ ID NO: 506913 - RNA, 32 nt, Human
ucuccugagcagcugggauuacaggcaaacgc

SEQ ID NO: 506914 - RNA, 32 nt, Human
ucuccugagccaccaucaccuccuggggugcc

SEQ ID NO: 506915 - RNA, 32 nt, Human
ucuccugagccugucucucccuacccucuucu

SEQ ID NO: 506916 - RNA, 32 nt, Human
ucuccugaggguguuuaguugcauggcuguuc

SEQ ID NO: 506917 - RNA, 32 nt, Human
ucuccugaggguguuuauuuguaugucuguuc

SEQ ID NO: 506918 - RNA, 32 nt, Human
ucuccugaggucccugccaucugugggucaua

SEQ ID NO: 506919 - RNA, 32 nt, Human
ucuccugaguagccgggacuacaggcaugcac

SEQ ID NO: 506920 - RNA, 32 nt, Human
ucuccugaguagcuaggacuacaggcacacac

SEQ ID NO: 506921 - RNA, 32 nt, Human
ucuccugaguagcugagacuacagcugugcgc

SEQ ID NO: 506922 - RNA, 32 nt, Human
ucuccugaguagcugagacuacaggcacgcac

SEQ ID NO: 506923 - RNA, 32 nt, Human
ucuccugaguagcuggaacuacaggugugcgc

SEQ ID NO: 506924 - RNA, 32 nt, Human
ucuccugaguagcugggacuacaggugcaugc

SEQ ID NO: 506925 - RNA, 32 nt, Human
ucuccugaguagcugggacuacaggugcgugc

SEQ ID NO: 506926 - RNA, 32 nt, Human
ucuccugaguagcugggacugcaggcaugcgc

SEQ ID NO: 506927 - RNA, 32 nt, Human
ucuccugaguagcugggaucacaggcaugcac

SEQ ID NO: 506928 - RNA, 32 nt, Human
ucuccugaguagcugggaucacagggaccauu

SEQ ID NO: 506929 - RNA, 32 nt, Human
ucuccugaguagcugggaugacaggcacgccc

SEQ ID NO: 506930 - RNA, 32 nt, Human
ucuccugaguagcugggauuacaggcacccac

SEQ ID NO: 506931 - RNA, 32 nt, Human
ucuccugaguagcugggauuacaggugcccgc

SEQ ID NO: 506932 - RNA, 32 nt, Human
ucuccugaguagcugggauuacgggugcgugc

SEQ ID NO: 506933 - RNA, 32 nt, Human
ucuccugaguagcugggauugcuggugcacag

SEQ ID NO: 506934 - RNA, 32 nt, Human
ucuccugaucaacgucugucucuugggaguag

SEQ ID NO: 506935 - RNA, 32 nt, Human
ucuccugauuucucugaacagaaaacaaaaga

SEQ ID NO: 506936 - RNA, 32 nt, Human
ucuccugcaccucccuggcccugccggccacu

SEQ ID NO: 506937 - RNA, 32 nt, Human
ucuccugcagcucagcagcugccuucaccaug

SEQ ID NO: 506938 - RNA, 32 nt, Human
ucuccugcauauccagccuccugcgacucccc

SEQ ID NO: 506939 - RNA, 23 nt, Human
ucuccugcccucuccccuguccu

SEQ ID NO: 506940 - RNA, 31 nt, Human
ucuccugcccucucugagccuugucacuuga

SEQ ID NO: 506941 - RNA, 32 nt, Human
ucuccugcccugcuugccggcaugaucuuggc

SEQ ID NO: 506942 - RNA, 32 nt, Human
ucuccugcccuucugcaagcucucccuagcuu

SEQ ID NO: 506943 - RNA, 32 nt, Human
ucuccugcccuuggacaucagagcugcaggcu

SEQ ID NO: 506944 - RNA, 32 nt, Human
ucuccugccuacaguggaaauggcuacaauau

SEQ ID NO: 506945 - RNA, 32 nt, Human
ucuccugccuacuugccccuccuuccaggccg

SEQ ID NO: 506946 - RNA, 32 nt, Human
ucuccugccucacccuccugaguagaugggac

SEQ ID NO: 506947 - RNA, 32 nt, Human
ucuccugccucagccuccugaguagaugggac

SEQ ID NO: 506948 - RNA, 20 nt, Human
ucuccugccucagccuucca

SEQ ID NO: 506949 - RNA, 32 nt, Human
ucuccugccucagcuacucaagaggcugaggc

SEQ ID NO: 506950 - RNA, 32 nt, Human
ucuccugccucagcuacucaggaggcugaggu

SEQ ID NO: 506951 - RNA, 32 nt, Human
ucuccugccucagcuacucgggaggcugaggc

SEQ ID NO: 506952 - RNA, 32 nt, Human
ucuccugccucagcuccugaguagcugggauu

SEQ ID NO: 506953 - RNA, 21 nt, Human
ucuccugccuccaucacauca

SEQ ID NO: 506954 - RNA, 32 nt, Human
ucuccugccucccugccucagccugggaccug

SEQ ID NO: 506955 - RNA, 32 nt, Human
ucuccugccuccgccuuccacccugggcccag

SEQ ID NO: 506956 - RNA, 32 nt, Human
ucuccugccucucuguuucuccaucuccucgu

SEQ ID NO: 506957 - RNA, 32 nt, Human
ucuccugccucugccaggagagagcuuguucc

SEQ ID NO: 506958 - RNA, 32 nt, Human
ucuccugccugcugggaccuauggaaggggcu

SEQ ID NO: 506959 - RNA, 32 nt, Human
ucuccugccuggguucaaacucugcauccuuc

SEQ ID NO: 506960 - RNA, 32 nt, Human
ucuccugccuggguucgguuucagcucccagc

SEQ ID NO: 506961 - RNA, 32 nt, Human
ucuccugccuguaaucccaucacuuugggagg

SEQ ID NO: 506962 - RNA, 32 nt, Human
ucuccugcguuucuucacccuauguucuacag

SEQ ID NO: 506963 - RNA, 32 nt, Human
ucuccugcuagcaauaugugccacaacaugac

SEQ ID NO: 506964 - RNA, 32 nt, Human
ucuccugcucauucuucuugacagaacaacca

SEQ ID NO: 506965 - RNA, 32 nt, Human
ucuccugcucguggacuuagaguaagaguguc

SEQ ID NO: 506966 - RNA, 32 nt, Human
ucuccugcucuccuugggaugauggcuggcua

SEQ ID NO: 506967 - RNA, 22 nt, Human
ucuccugcucuucuggagccug

SEQ ID NO: 506968 - RNA, 32 nt, Human
ucuccugcugaggcggagacugcagugagcug

SEQ ID NO: 506969 - RNA, 32 nt, Human
ucuccugcugagguggagacugcagugagcug

SEQ ID NO: 506970 - RNA, 32 nt, Human
ucuccugcugagguggagauugcagugaacua

SEQ ID NO: 506971 - RNA, 32 nt, Human
ucuccugcugcucuccugcugcuggccucgcu

SEQ ID NO: 506972 - RNA, 20 nt, Human
ucuccugcuucagccuccca

SEQ ID NO: 506973 - RNA, 32 nt, Human
ucuccuggacgcagaggugacagugggagcug

SEQ ID NO: 506974 - RNA, 32 nt, Human
ucuccuggaggcugccaagggcauuuucucau

SEQ ID NO: 506975 - RNA, 32 nt, Human
ucuccuggagugagggggcugaagucagacca

SEQ ID NO: 506976 - RNA, 32 nt, Human
ucuccuggaucuucgcacccagcuucggguag

SEQ ID NO: 506977 - RNA, 32 nt, Human
ucuccuggauugcaaaugccucuucaguuugg

SEQ ID NO: 506978 - RNA, 32 nt, Human
ucuccuggcaaaaauucacugccacagacaaa

SEQ ID NO: 506979 - RNA, 32 nt, Human
ucuccuggcaaaagcugcuaugaaaagccuca

SEQ ID NO: 506980 - RNA, 32 nt, Human
ucuccuggcccaggccuggcgggcacugcuuc

SEQ ID NO: 506981 - RNA, 21 nt, Human
ucuccuggccccugccugcug

SEQ ID NO: 506982 - RNA, 32 nt, Human
ucuccuggcccuacagcuucucaccccugcug

SEQ ID NO: 506983 - RNA, 32 nt, Human
ucuccuggcccucucucugaucaugccagguu

SEQ ID NO: 506984 - RNA, 32 nt, Human
ucuccuggcccugcucuggcccuucccgggcc

SEQ ID NO: 506985 - RNA, 32 nt, Human
ucuccuggcccuggcccaucugccuccuggcc

SEQ ID NO: 506986 - RNA, 32 nt, Human
ucuccuggccgggcacgguggaucaugccugu

SEQ ID NO: 506987 - RNA, 32 nt, Human
ucuccuggcuacaccugcuuaacuucaguucc

SEQ ID NO: 506988 - RNA, 32 nt, Human
ucuccuggcuucccgucuggucauggcgagau

SEQ ID NO: 506989 - RNA, 32 nt, Human
ucuccuggcuuuaaccccuccuuggccaaggc

SEQ ID NO: 506990 - RNA, 32 nt, Human
ucuccugggaagcccagucucagucccucccc

SEQ ID NO: 506991 - RNA, 32 nt, Human
ucuccugggacagugggcucugcauguucucc

SEQ ID NO: 506992 - RNA, 32 nt, Human
ucuccugggaggaucgcagucagcagagcagg

SEQ ID NO: 506993 - RNA, 32 nt, Human
ucuccugggggcugggcuggggguuagggcug

SEQ ID NO: 506994 - RNA, 32 nt, Human
ucuccugggucucuggaggagcccaggaagga

SEQ ID NO: 506995 - RNA, 32 nt, Human
ucuccugggucuuggagggaugugggaaugaa

SEQ ID NO: 506996 - RNA, 32 nt, Human
ucuccuggguguaguggaugccagucuuguug

SEQ ID NO: 506997 - RNA, 32 nt, Human
ucuccugguagcugggauuacaggcaugcacc

SEQ ID NO: 506998 - RNA, 32 nt, Human
ucuccugguccccaggagagaugcuuugagga

SEQ ID NO: 506999 - RNA, 32 nt, Human
ucuccugguguaguguggaugcgaggccacgg

SEQ ID NO: 507000 - RNA, 32 nt, Human
ucuccugguucgaucuaggaaaaaggaaagga

SEQ ID NO: 507001 - RNA, 32 nt, Human
ucuccuguacagaaccugccuggggugggugg

SEQ ID NO: 507002 - RNA, 32 nt, Human
ucuccuguaccugggcauccagaaaaauggug

SEQ ID NO: 507003 - RNA, 32 nt, Human
ucuccugucaccugggaaguccaagggauuua

SEQ ID NO: 507004 - RNA, 17 nt, Human
ucuccuguccacagcca

SEQ ID NO: 507005 - RNA, 32 nt, Human
ucuccugucccccagccaugucauucuagcug

SEQ ID NO: 507006 - RNA, 32 nt, Human
ucuccugucucagccuccugaguagaugggac

SEQ ID NO: 507007 - RNA, 32 nt, Human
ucuccugucuuugucugcucuuccugcaaggc

SEQ ID NO: 507008 - RNA, 32 nt, Human
ucuccugugaagccaaaagggaccaggaaccg

SEQ ID NO: 507009 - RNA, 32 nt, Human
ucuccugugcagaaggagaggaaggggcauua

SEQ ID NO: 507010 - RNA, 32 nt, Human
ucuccugugccaagcugcucccugaaauggac

SEQ ID NO: 507011 - RNA, 32 nt, Human
ucuccugugcccacccgucuucaaucucuguu

SEQ ID NO: 507012 - RNA, 32 nt, Human
ucuccugugcggccagcaucagagccauggcg

SEQ ID NO: 507013 - RNA, 32 nt, Human
ucuccugugcggccagcgucagagccauggcg

SEQ ID NO: 507014 - RNA, 32 nt, Human
ucuccugugcucugaugcuacuucugccuagc

SEQ ID NO: 507015 - RNA, 32 nt, Human
ucuccuguggccacagaacacaggcgugcuug

SEQ ID NO: 507016 - RNA, 21 nt, Human
ucuccuguggccuaacuuuca

SEQ ID NO: 507017 - RNA, 32 nt, Human
ucuccuguggcucugccaucagcuccaauauc

SEQ ID NO: 507018 - RNA, 32 nt, Human
ucuccuguuccauucgccuuuccucuucuuuc

SEQ ID NO: 507019 - RNA, 32 nt, Human
ucuccuguuccccuucccaguuaaacagguua

SEQ ID NO: 507020 - RNA, 32 nt, Human
ucuccuguugggggaugguguugggaaggaaa

SEQ ID NO: 507021 - RNA, 32 nt, Human
ucuccuuaaguagcaaccucagggacuggggg

SEQ ID NO: 507022 - RNA, 18 nt, Human
ucuccuuagcccgucacu

SEQ ID NO: 507023 - RNA, 32 nt, Human
ucuccuuaggaguggaggagauguguguucug

SEQ ID NO: 507024 - RNA, 32 nt, Human
ucuccuuaggauugcaagacaguaguucccug

SEQ ID NO: 507025 - RNA, 32 nt, Human
ucuccuuauucuaugugugaacagcuagucug

SEQ ID NO: 507026 - RNA, 32 nt, Human
ucuccuucaacaguucggccaagcagaacugc

SEQ ID NO: 507027 - RNA, 32 nt, Human
ucuccuucagcaacuacaggagauaugaugcc

SEQ ID NO: 507028 - RNA, 32 nt, Human
ucuccuucaguggcauguaguuaucuaaucaa

SEQ ID NO: 507029 - RNA, 32 nt, Human
ucuccuucauuuccuaggucacugccccuuug

SEQ ID NO: 507030 - RNA, 32 nt, Human
ucuccuucauuucucagucaccuuugucucuu

SEQ ID NO: 507031 - RNA, 32 nt, Human
ucuccuucccagagcaauuuauacuuuacccu

SEQ ID NO: 507032 - RNA, 32 nt, Human
ucuccuucccaggaauccuugaucucaugacu

SEQ ID NO: 507033 - RNA, 32 nt, Human
ucuccuucccuccccuccccucccuuccccuc

SEQ ID NO: 507034 - RNA, 32 nt, Human
ucuccuucccucccucuuccucccucucucuc

SEQ ID NO: 507035 - RNA, 32 nt, Human
ucuccuuccuccugcuacugauaccaggcgag

SEQ ID NO: 507036 - RNA, 32 nt, Human
ucuccuuccucggggguaaggaggggacagug

SEQ ID NO: 507037 - RNA, 32 nt, Human
ucuccuuccuuacccaaacuguucaagaaaua

SEQ ID NO: 507038 - RNA, 32 nt, Human
ucuccuuccuucagaaucuaccaccccucccc

SEQ ID NO: 507039 - RNA, 32 nt, Human
ucuccuuccuucuuccucugcucaggagaaaa

SEQ ID NO: 507040 - RNA, 32 nt, Human
ucuccuuccuuuccuuccuuuuucucuaccag

SEQ ID NO: 507041 - RNA, 32 nt, Human
ucuccuucuacucccaauucccucuuggcucc

SEQ ID NO: 507042 - RNA, 32 nt, Human
ucuccuucucccaagcugcaguacuggggaag

SEQ ID NO: 507043 - RNA, 32 nt, Human
ucuccuucuccccuccuucuuuuucagacuga

SEQ ID NO: 507044 - RNA, 32 nt, Human
ucuccuucuccucucugccugccuccucccuc

SEQ ID NO: 507045 - RNA, 32 nt, Human
ucuccuucuccuuccuccuucugcuggcugaa

SEQ ID NO: 507046 - RNA, 32 nt, Human
ucuccuucucuccuccucucuccucuccucuc

SEQ ID NO: 507047 - RNA, 23 nt, Human
ucuccuucugccauaguaugucg

SEQ ID NO: 507048 - RNA, 25 nt, Human
ucuccuucuggacugggagaaggga

SEQ ID NO: 507049 - RNA, 32 nt, Human
ucuccuucuggcccaucugccugcugcccuga

SEQ ID NO: 507050 - RNA, 32 nt, Human
ucuccuucugucccacugcccucuccccgucu

SEQ ID NO: 507051 - RNA, 19 nt, Human
ucuccuucuuccccauuac

SEQ ID NO: 507052 - RNA, 32 nt, Human
ucuccuucuuucucccucuugaguccuucuga

SEQ ID NO: 507053 - RNA, 32 nt, Human
ucuccuugacaauggaaaggcagcagucuuca

SEQ ID NO: 507054 - RNA, 32 nt, Human
ucuccuugacacagacagaagaggggucccuu

SEQ ID NO: 507055 - RNA, 22 nt, Human
ucuccuugagcagugcuacuua

SEQ ID NO: 507056 - RNA, 32 nt, Human
ucuccuugcacacaugggcacacacaaucucc

SEQ ID NO: 507057 - RNA, 32 nt, Human
ucuccuugccacccaaaccaaagaaggccagc

SEQ ID NO: 507058 - RNA, 32 nt, Human
ucuccuugcccgccgccgccucccggagcagc

SEQ ID NO: 507059 - RNA, 32 nt, Human
ucuccuugcccuuuaagguauuuuaacccucg

SEQ ID NO: 507060 - RNA, 31 nt, Human
ucuccuugccucuccuggaaggugucuucuc

SEQ ID NO: 507061 - RNA, 24 nt, Human
ucuccuugccugcuccugaugcuu

SEQ ID NO: 507062 - RNA, 22 nt, Human
ucuccuugccuugcgggugcug

SEQ ID NO: 507063 - RNA, 32 nt, Human
ucuccuugcgagucccaguuugcccauucucc

SEQ ID NO: 507064 - RNA, 32 nt, Human
ucuccuugcuacccagaaaucaucuaaauacc

SEQ ID NO: 507065 - RNA, 32 nt, Human
ucuccuugcugcuuuuucuucuguauuucuag

SEQ ID NO: 507066 - RNA, 32 nt, Human
ucuccuuggaggcaguggugugaaucuucuuc

SEQ ID NO: 507067 - RNA, 32 nt, Human
ucuccuugggcccuuuuucccuucccuccuuu

SEQ ID NO: 507068 - RNA, 32 nt, Human
ucuccuugucuggagugugguggcacagucuc

SEQ ID NO: 507069 - RNA, 32 nt, Human
ucuccuugugugacuuuggagccaugagaccc

SEQ ID NO: 507070 - RNA, 22 nt, Human
ucuccuuuacccuagagcggcg

SEQ ID NO: 507071 - RNA, 31 nt, Human
ucuccuuucaauaaauuaaaugguugagaac

SEQ ID NO: 507072 - RNA, 32 nt, Human
ucuccuuucaccacccccuccuucccuguguc

SEQ ID NO: 507073 - RNA, 32 nt, Human
ucuccuuucaccgcccccuccuucccuguguc

SEQ ID NO: 507074 - RNA, 32 nt, Human
ucuccuuuccaaaggcagagcuuacugucaug

SEQ ID NO: 507075 - RNA, 32 nt, Human
ucuccuuucccaaagagucaucuuuucugcug

SEQ ID NO: 507076 - RNA, 32 nt, Human
ucuccuuucccaaguucucccgccugcgucgg

SEQ ID NO: 507077 - RNA, 32 nt, Human
ucuccuuuccuguucuugccccaggguuaggc

SEQ ID NO: 507078 - RNA, 32 nt, Human
ucuccuuucuauucggagcggcugaggaggcu

SEQ ID NO: 507079 - RNA, 32 nt, Human
ucuccuuucucccauucuucccugccucuucc

SEQ ID NO: 507080 - RNA, 19 nt, Human
ucuccuuucuccccauccu

SEQ ID NO: 507081 - RNA, 32 nt, Human
ucuccuuucuccccauccuguguucugggaga

SEQ ID NO: 507082 - RNA, 32 nt, Human
ucuccuuucucucuucucuuccuuccucuccu

SEQ ID NO: 507083 - RNA, 32 nt, Human
ucuccuuucucuucuugcuucaauugcuuacc

SEQ ID NO: 507084 - RNA, 32 nt, Human
ucuccuuucuuuccucaccccaaccuuuacuc

SEQ ID NO: 507085 - RNA, 32 nt, Human
ucuccuuugaagcacagccuauuucugagcca

SEQ ID NO: 507086 - RNA, 32 nt, Human
ucuccuuugaagcccagacaucuuucuccagc

SEQ ID NO: 507087 - RNA, 32 nt, Human
ucuccuuugcagaaugaugcagguucaggucc

SEQ ID NO: 507088 - RNA, 32 nt, Human
ucuccuuugcugaggccuccagcuucaggcag

SEQ ID NO: 507089 - RNA, 32 nt, Human
ucuccuuugcuugaagccagaggucaguggcc

SEQ ID NO: 507090 - RNA, 32 nt, Human
ucuccuuuguguucaacuuuugugugcuuuua

SEQ ID NO: 507091 - RNA, 32 nt, Human
ucuccuuuuauaucacagcagcuccugugcug

SEQ ID NO: 507092 - RNA, 32 nt, Human
ucuccuuuucccucucccuuucccuaagaguu

SEQ ID NO: 507093 - RNA, 32 nt, Human
ucuccuuuuccuuccuuccuggcagugguuaa

SEQ ID NO: 507094 - RNA, 32 nt, Human
ucuccuuuucuucuccuuucugcugaccagaa

SEQ ID NO: 507095 - RNA, 32 nt, Human
ucuccuuuugccacccccuccuucccugccuc

SEQ ID NO: 507096 - RNA, 32 nt, Human
ucuccuuuugccagucaccaccagccugaccu

SEQ ID NO: 507097 - RNA, 32 nt, Human
ucuccuuuugccgcccccuccuucccuguguc

SEQ ID NO: 507098 - RNA, 32 nt, Human
ucuccuuuuuccuccucuuccuccuuccuccu

SEQ ID NO: 507099 - RNA, 32 nt, Human
ucuccuuuuucucuucacaucucccccauagc

SEQ ID NO: 507100 - RNA, 32 nt, Human
ucucgaaccaucuaccugcuuuuccucucucu

SEQ ID NO: 507101 - RNA, 32 nt, Human
ucucgaaccaugucgcugaccaacacaaagac

SEQ ID NO: 507102 - RNA, 32 nt, Human
ucucgaacccgcauggcuuucccaggccuggu

SEQ ID NO: 507103 - RNA, 22 nt, Human
ucucgaacuccugaccucauga

SEQ ID NO: 507104 - RNA, 22 nt, Human
ucucgaacuccugaccucguga

SEQ ID NO: 507105 - RNA, 22 nt, Human
ucucgaacuccugaccuuguga

SEQ ID NO: 507106 - RNA, 32 nt, Human
ucucgaagaccugccuguagcagaacucaccc

SEQ ID NO: 507107 - RNA, 32 nt, Human
ucucgaaggugcuuggcggucuugccuucccc

SEQ ID NO: 507108 - RNA, 30 nt, Human
ucucgaagugccuucuugcuccugucuguu

SEQ ID NO: 507109 - RNA, 32 nt, Human
ucucgaauacuuugaauguuguguaacaguua

SEQ ID NO: 507110 - RNA, 32 nt, Human
ucucgacaaaaaggaauugaaagcccuaaaua

SEQ ID NO: 507111 - RNA, 32 nt, Human
ucucgacauaggguccuuacagagguaguuaa

SEQ ID NO: 507112 - RNA, 32 nt, Human
ucucgaccagaggaggccauucccaguccuaa

SEQ ID NO: 507113 - RNA, 32 nt, Human
ucucgaccucgugauccgcccaccucggccuc

SEQ ID NO: 507114 - RNA, 32 nt, Human
ucucgacucacugcaaaaucugccucccgggu

SEQ ID NO: 507115 - RNA, 32 nt, Human
ucucgacucacugcaaccuccaccucccaggu

SEQ ID NO: 507116 - RNA, 32 nt, Human
ucucgacucacugcaaccuccgccucccgagu

SEQ ID NO: 507117 - RNA, 32 nt, Human
ucucgacucacugcaaccuucgccucccagga

SEQ ID NO: 507118 - RNA, 32 nt, Human
ucucgacucacugcaaccuucgccucccaggu

SEQ ID NO: 507119 - RNA, 32 nt, Human
ucucgacucacugcaacuuccaccuccuggag

SEQ ID NO: 507120 - RNA, 32 nt, Human
ucucgacucacugcaagcuccgccucccgggu

SEQ ID NO: 507121 - RNA, 32 nt, Human
ucucgacucacugcagccuccgccuccugggu

SEQ ID NO: 507122 - RNA, 32 nt, Human
ucucgacucacugcagccuugaccucccgggc

SEQ ID NO: 507123 - RNA, 32 nt, Human
ucucgacucacugcagcuaucucucgccucag

SEQ ID NO: 507124 - RNA, 32 nt, Human
ucucgacuuccacccggauucucccucggccc

SEQ ID NO: 507125 - RNA, 32 nt, Human
ucucgagacuggcggccagggagccuggaacc

SEQ ID NO: 507126 - RNA, 32 nt, Human
ucucgaggccucuucugaccucaagggucaca

SEQ ID NO: 507127 - RNA, 32 nt, Human
ucucgaggcgaguuggcggagcugugcgcgcg

SEQ ID NO: 507128 - RNA, 32 nt, Human
ucucgaggcgguggugggaagggagacauacu

SEQ ID NO: 507129 - RNA, 32 nt, Human
ucucgagucacugcagccugugucuccugggu

SEQ ID NO: 507130 - RNA, 32 nt, Human
ucucgaguggcuaccuguugggcuugugggca

SEQ ID NO: 507131 - RNA, 24 nt, Human
ucucgaguggugcuguacuuguua

SEQ ID NO: 507132 - RNA, 32 nt, Human
ucucgaguucccacucacuggaaucuccagcc

SEQ ID NO: 507133 - RNA, 22 nt, Human
ucucgaucuccugaccccauga

SEQ ID NO: 507134 - RNA, 22 nt, Human
ucucgaucuccugaccucauga

SEQ ID NO: 507135 - RNA, 22 nt, Human
ucucgaucuccugaccucguga

SEQ ID NO: 507136 - RNA, 22 nt, Human
ucucgaucucuugaucucguga

SEQ ID NO: 507137 - RNA, 32 nt, Human
ucucgaugguucucuccugggcucaggcgcuu

SEQ ID NO: 507138 - RNA, 22 nt, Human
ucucgauuuucugaccucguga

SEQ ID NO: 507139 - RNA, 32 nt, Human
ucucgcacaggcuuggagugcaguggugcgau

SEQ ID NO: 507140 - RNA, 32 nt, Human
ucucgcacccacccacccccucacccccuucu

SEQ ID NO: 507141 - RNA, 32 nt, Human
ucucgcagcaccagaccagccucugcagcugc

SEQ ID NO: 507142 - RNA, 32 nt, Human
ucucgcaggccagagugcaguggugugaucau

SEQ ID NO: 507143 - RNA, 32 nt, Human
ucucgcaugcuuuuccccugcaccacggaucg

SEQ ID NO: 507144 - RNA, 32 nt, Human
ucucgcauggaagaagucgauuagaguucaua

SEQ ID NO: 507145 - RNA, 32 nt, Human
ucucgcauggaagaagucgauuaguuaggagu

SEQ ID NO: 507146 - RNA, 32 nt, Human
ucucgcaugguguggagggcgccaucuauggu

SEQ ID NO: 507147 - RNA, 19 nt, Human
ucucgccaccccugcccaa

SEQ ID NO: 507148 - RNA, 32 nt, Human
ucucgccacugcacuccaggcugggcgacaga

SEQ ID NO: 507149 - RNA, 32 nt, Human
ucucgccacugcagcucggguccagaaaggca

SEQ ID NO: 507150 - RNA, 32 nt, Human
ucucgccacugcgcuccagccugggcaacaga

SEQ ID NO: 507151 - RNA, 32 nt, Human
ucucgccacugugcuccagccugggcaacaga

SEQ ID NO: 507152 - RNA, 32 nt, Human
ucucgccauccgggggcaaccaugccgaguac

SEQ ID NO: 507153 - RNA, 32 nt, Human
ucucgccaugaucagacauacagcugccuacc

SEQ ID NO: 507154 - RNA, 31 nt, Human
ucucgccaugcuucuuuacuuuaacauauuu

SEQ ID NO: 507155 - RNA, 32 nt, Human
ucucgccaugucuucucacaagacuuucacca

SEQ ID NO: 507156 - RNA, 32 nt, Human
ucucgccauugcacuccauucugggcaacaag

SEQ ID NO: 507157 - RNA, 32 nt, Human
ucucgcccagcccaguucuggaagggauaaaa

SEQ ID NO: 507158 - RNA, 32 nt, Human
ucucgccccggggccacggaaguggcucgccg

SEQ ID NO: 507159 - RNA, 32 nt, Human
ucucgccccuccuacccgcagcuccuggcgcu

SEQ ID NO: 507160 - RNA, 32 nt, Human
ucucgccccugccgccugccccagcuuccccg

SEQ ID NO: 507161 - RNA, 22 nt, Human
ucucgcccgcugccccgcgagc

SEQ ID NO: 507162 - RNA, 32 nt, Human
ucucgcccguggcugcuuccuccauccuggua

SEQ ID NO: 507163 - RNA, 32 nt, Human
ucucgcccuucccaccaugccagaaugggaag

SEQ ID NO: 507164 - RNA, 32 nt, Human
ucucgccuacuuccuggugucgaucgccggcc

SEQ ID NO: 507165 - RNA, 32 nt, Human
ucucgccucacugcaaccuccgccucccaggu

SEQ ID NO: 507166 - RNA, 32 nt, Human
ucucgccucacugcaaccuucaccuaccgagu

SEQ ID NO: 507167 - RNA, 32 nt, Human
ucucgccucacugcaacuugcgccucccgggu

SEQ ID NO: 507168 - RNA, 32 nt, Human
ucucgccucacugcagccuccccaguccaaag

SEQ ID NO: 507169 - RNA, 32 nt, Human
ucucgccucacugcagccucccgaguccaaag

SEQ ID NO: 507170 - RNA, 32 nt, Human
ucucgccucacugcggccuccccaguccaaag

SEQ ID NO: 507171 - RNA, 32 nt, Human
ucucgccucacugcggccuccccaguccacag

SEQ ID NO: 507172 - RNA, 32 nt, Human
ucucgccucacugcggccucccccguccaaag

SEQ ID NO: 507173 - RNA, 32 nt, Human
ucucgccucacugcggccucccgaguccaaag

SEQ ID NO: 507174 - RNA, 32 nt, Human
ucucgccucacugcggccuccggaguccaaaa

SEQ ID NO: 507175 - RNA, 32 nt, Human
ucucgccucacugcggcuucccgaguccaaag

SEQ ID NO: 507176 - RNA, 32 nt, Human
ucucgccucacugcggucuccccaguccaaag

SEQ ID NO: 507177 - RNA, 17 nt, Human
ucucgccugaggccagg

SEQ ID NO: 507178 - RNA, 32 nt, Human
ucucgccugcagcuccgccauggcuccuaaag

SEQ ID NO: 507179 - RNA, 32 nt, Human
ucucgccugccugugucugcugccgagaagcc

SEQ ID NO: 507180 - RNA, 32 nt, Human
ucucgccuguaaucccagcacuuugggaggcc

SEQ ID NO: 507181 - RNA, 32 nt, Human
ucucgccuguaaucccagcacuuugggaggcu

SEQ ID NO: 507182 - RNA, 32 nt, Human
ucucgccuguaaucucagcacuuugggaggcc

SEQ ID NO: 507183 - RNA, 32 nt, Human
ucucgccuuccgcccucgcucucccuccgcgc

SEQ ID NO: 507184 - RNA, 32 nt, Human
ucucgccuuuguucuuguugaagggucucuuc

SEQ ID NO: 507185 - RNA, 25 nt, Human
ucucgcgcacccgcacgcucaccga

SEQ ID NO: 507186 - RNA, 22 nt, Human
ucucgcgcgcacugcgcacaga

SEQ ID NO: 507187 - RNA, 32 nt, Human
ucucgcgucugggaacggccgggcccccagcg

SEQ ID NO: 507188 - RNA, 32 nt, Human
ucucgcuagugauguuuuuaugauaucccuga

SEQ ID NO: 507189 - RNA, 32 nt, Human
ucucgcucacugcaaccuccaccucccagguu

SEQ ID NO: 507190 - RNA, 32 nt, Human
ucucgcucacugcaaccuccgccucccggguu

SEQ ID NO: 507191 - RNA, 32 nt, Human
ucucgcucacugcgcucgaggccggcaccuac

SEQ ID NO: 507192 - RNA, 32 nt, Human
ucucgcucagauggggcaaccgagacacaggc

SEQ ID NO: 507193 - RNA, 32 nt, Human
ucucgcuccauuccucccuuucucucuguuuc

SEQ ID NO: 507194 - RNA, 22 nt, Human
ucucgcucgcccucagcgcggc

SEQ ID NO: 507195 - RNA, 32 nt, Human
ucucgcucuccucuugcuugaacagcugccaa

SEQ ID NO: 507196 - RNA, 32 nt, Human
ucucgcucucucucgcugcguccucauuuccc

SEQ ID NO: 507197 - RNA, 32 nt, Human
ucucgcucucuggagugcaauggcgcaaucuu

SEQ ID NO: 507198 - RNA, 32 nt, Human
ucucgcucugcacuccagccuaggugacagag

SEQ ID NO: 507199 - RNA, 32 nt, Human
ucucgcucugcacuccagccuggcgacugagu

SEQ ID NO: 507200 - RNA, 32 nt, Human
ucucgcucugucaccaggcuugagugcagugg

SEQ ID NO: 507201 - RNA, 32 nt, Human
ucucgcugagccagacccacucuguuccuugg

SEQ ID NO: 507202 - RNA, 32 nt, Human
ucucgcugggccuuagcugccuucccucaggg

SEQ ID NO: 507203 - RNA, 32 nt, Human
ucucgcugucccugugcugcugguauuucauu

SEQ ID NO: 507204 - RNA, 21 nt, Human
ucucgcuucuagcccgcgugc

SEQ ID NO: 507205 - RNA, 32 nt, Human
ucucgcuucugccuccaaaccaaucccuugcu

SEQ ID NO: 507206 - RNA, 32 nt, Human
ucucgcuugcaggucgggagguuuccgggcgg

SEQ ID NO: 507207 - RNA, 21 nt, Human
ucucgcuuugcccgccgccgc

SEQ ID NO: 507208 - RNA, 32 nt, Human
ucucgcuuuguugcccaggcuggucuugaacu

SEQ ID NO: 507209 - RNA, 32 nt, Human
ucucgcuuuguugcccaggcuggucuugaauu

SEQ ID NO: 507210 - RNA, 32 nt, Human
ucucggaagaggaggaggacgaggaggaagag

SEQ ID NO: 507211 - RNA, 32 nt, Human
ucucggaaggcugaggcaggaggaucauuuga

SEQ ID NO: 507212 - RNA, 18 nt, Human
ucucggacaagacugguu

SEQ ID NO: 507213 - RNA, 31 nt, Human
ucucggaccaugucucccgccccaagacccc

SEQ ID NO: 507214 - RNA, 32 nt, Human
ucucggacucguuccuccuggaccagcccaac

SEQ ID NO: 507215 - RNA, 32 nt, Human
ucucggauacuguguucuguccuugaaacggu

SEQ ID NO: 507216 - RNA, 32 nt, Human
ucucggaucacugcaaccuccaccuccuaggu

SEQ ID NO: 507217 - RNA, 32 nt, Human
ucucggaugcagggccagagugacacagccga

SEQ ID NO: 507218 - RNA, 32 nt, Human
ucucggcacacugcaaccuucgccucccagau

SEQ ID NO: 507219 - RNA, 32 nt, Human
ucucggcacccacuugcagucacugccgccug

SEQ ID NO: 507220 - RNA, 32 nt, Human
ucucggcagcaucucagccaggagggcucccu

SEQ ID NO: 507221 - RNA, 32 nt, Human
ucucggcagggaacaggaaguaggaaucccag

SEQ ID NO: 507222 - RNA, 32 nt, Human
ucucggccaccgucgaguuccgucgaguuccg

SEQ ID NO: 507223 - RNA, 32 nt, Human
ucucggccaggcaugcacagcacacagacuga

SEQ ID NO: 507224 - RNA, 21 nt, Human
ucucggcccacugaaaccucc

SEQ ID NO: 507225 - RNA, 32 nt, Human
ucucggcccacugaaaccuccaccucccgggu

SEQ ID NO: 507226 - RNA, 32 nt, Human
ucucggcccacugcaaccucugccuccugggu

SEQ ID NO: 507227 - RNA, 32 nt, Human
ucucggcccugaggacucagaacucacaaguc

SEQ ID NO: 507228 - RNA, 32 nt, Human
ucucggcccugggcccagucucucaggccucc

SEQ ID NO: 507229 - RNA, 32 nt, Human
ucucggccucuggccaacacagucccacccau

SEQ ID NO: 507230 - RNA, 32 nt, Human
ucucggccuucccacuugcugugccucccacc

SEQ ID NO: 507231 - RNA, 32 nt, Human
ucucggccuuucucuccugccuuccacagccu

SEQ ID NO: 507232 - RNA, 32 nt, Human
ucucggcggccguguccuccuccuggcguggc

SEQ ID NO: 507233 - RNA, 32 nt, Human
ucucggcggcggcgagggcugagcgcgggagc

SEQ ID NO: 507234 - RNA, 32 nt, Human
ucucggcggcggcgggcaguugcaguggugca

SEQ ID NO: 507235 - RNA, 32 nt, Human
ucucggcuacuuccuggagcuucugccgccuc

SEQ ID NO: 507236 - RNA, 32 nt, Human
ucucggcucacagcaaccucucugccuccaga

SEQ ID NO: 507237 - RNA, 32 nt, Human
ucucggcucacagcaaccucugccucccggau

SEQ ID NO: 507238 - RNA, 32 nt, Human
ucucggcucaccacaaccuccaccucccaggu

SEQ ID NO: 507239 - RNA, 32 nt, Human
ucucggcucaccacaaccuccgccgcccaagu

SEQ ID NO: 507240 - RNA, 32 nt, Human
ucucggcucaccacaaccuccgccuccugggu

SEQ ID NO: 507241 - RNA, 32 nt, Human
ucucggcucaccacaaccuccuccucuugggu

SEQ ID NO: 507242 - RNA, 32 nt, Human
ucucggcucaccccaaccuccgccuccugggu

SEQ ID NO: 507243 - RNA, 21 nt, Human
ucucggcucaccgcaaccucc

SEQ ID NO: 507244 - RNA, 32 nt, Human
ucucggcucaccgcaaccuccaccuuccuggu

SEQ ID NO: 507245 - RNA, 32 nt, Human
ucucggcucaccgcaaccuccgcccccugggu

SEQ ID NO: 507246 - RNA, 32 nt, Human
ucucggcucaccgcaaccuccgccucccaggu

SEQ ID NO: 507247 - RNA, 32 nt, Human
ucucggcucaccgcaaccuccgccucccggau

SEQ ID NO: 507248 - RNA, 32 nt, Human
ucucggcucaccgcaaccuccgccucccgggu

SEQ ID NO: 507249 - RNA, 32 nt, Human
ucucggcucaccgcaaccuccucuucuggguu

SEQ ID NO: 507250 - RNA, 32 nt, Human
ucucggcucaccgcaaccucugccucccaggu

SEQ ID NO: 507251 - RNA, 32 nt, Human
ucucggcucaccgcaaccucugccucccgggu

SEQ ID NO: 507252 - RNA, 32 nt, Human
ucucggcucaccgcaaccucugccuccugggu

SEQ ID NO: 507253 - RNA, 32 nt, Human
ucucggcucaccgcaaccucugcuuccuggcu

SEQ ID NO: 507254 - RNA, 32 nt, Human
ucucggcucacggcaaccuccaccucccgggu

SEQ ID NO: 507255 - RNA, 32 nt, Human
ucucggcucacuacaaccuccaccuccugggu

SEQ ID NO: 507256 - RNA, 32 nt, Human
ucucggcucacuacaaccuccgccucccaggu

SEQ ID NO: 507257 - RNA, 32 nt, Human
ucucggcucacuauaaccuccaccucccaggu

SEQ ID NO: 507258 - RNA, 32 nt, Human
ucucggcucacuccaaccuccaccuacuaggu

SEQ ID NO: 507259 - RNA, 32 nt, Human
ucucggcucacuccaaucuccaccucccggau

SEQ ID NO: 507260 - RNA, 32 nt, Human
ucucggcucacugaaaccucugccucccgggu

SEQ ID NO: 507261 - RNA, 32 nt, Human
ucucggcucacugaaaccucugccuuccaggu

SEQ ID NO: 507262 - RNA, 32 nt, Human
ucucggcucacugaaaccugugccuccccggu

SEQ ID NO: 507263 - RNA, 32 nt, Human
ucucggcucacugaaacuucugccucccgggu

SEQ ID NO: 507264 - RNA, 32 nt, Human
ucucggcucacugaaccuccgccucccagguu

SEQ ID NO: 507265 - RNA, 22 nt, Human
ucucggcucacugcaaaccgcc

SEQ ID NO: 507266 - RNA, 32 nt, Human
ucucggcucacugcaaaccgccucccggguuc

SEQ ID NO: 507267 - RNA, 21 nt, Human
ucucggcucacugcaaacucc

SEQ ID NO: 507268 - RNA, 32 nt, Human
ucucggcucacugcaaacuccgccucccaggu

SEQ ID NO: 507269 - RNA, 32 nt, Human
ucucggcucacugcaaacuccgccucccgggu

SEQ ID NO: 507270 - RNA, 32 nt, Human
ucucggcucacugcaaacuccgccuuccaggu

SEQ ID NO: 507271 - RNA, 32 nt, Human
ucucggcucacugcaaacucugccucccaggu

SEQ ID NO: 507272 - RNA, 32 nt, Human
ucucggcucacugcaaacucugccucccgggu

SEQ ID NO: 507273 - RNA, 32 nt, Human
ucucggcucacugcaaacucugccuccuggau

SEQ ID NO: 507274 - RNA, 22 nt, Human
ucucggcucacugcaaaucucc

SEQ ID NO: 507275 - RNA, 32 nt, Human
ucucggcucacugcaaaucuccgccucccagg

SEQ ID NO: 507276 - RNA, 32 nt, Human
ucucggcucacugcaacauccaccuccugggu

SEQ ID NO: 507277 - RNA, 32 nt, Human
ucucggcucacugcaacauccagcuccugggu

SEQ ID NO: 507278 - RNA, 32 nt, Human
ucucggcucacugcaaccaccaucucccagga

SEQ ID NO: 507279 - RNA, 32 nt, Human
ucucggcucacugcaaccacugccucccaggu

SEQ ID NO: 507280 - RNA, 32 nt, Human
ucucggcucacugcaacccccacaucccgggu

SEQ ID NO: 507281 - RNA, 32 nt, Human
ucucggcucacugcaacccccaucucccaggu

SEQ ID NO: 507282 - RNA, 32 nt, Human
ucucggcucacugcaaccucaccucccggguu

SEQ ID NO: 507283 - RNA, 21 nt, Human
ucucggcucacugcaaccucc

SEQ ID NO: 507284 - RNA, 32 nt, Human
ucucggcucacugcaaccuccaacucccaggu

SEQ ID NO: 507285 - RNA, 32 nt, Human
ucucggcucacugcaaccuccaacucccuggu

SEQ ID NO: 507286 - RNA, 32 nt, Human
ucucggcucacugcaaccuccacaucccaugu

SEQ ID NO: 507287 - RNA, 32 nt, Human
ucucggcucacugcaaccuccacccccgggga

SEQ ID NO: 507288 - RNA, 32 nt, Human
ucucggcucacugcaaccuccaccucacaggu

SEQ ID NO: 507289 - RNA, 32 nt, Human
ucucggcucacugcaaccuccaccucccagaa

SEQ ID NO: 507290 - RNA, 32 nt, Human
ucucggcucacugcaaccuccaccucccagau

SEQ ID NO: 507291 - RNA, 32 nt, Human
ucucggcucacugcaaccuccaccucccaggu

SEQ ID NO: 507292 - RNA, 32 nt, Human
ucucggcucacugcaaccuccaccuccccagu

SEQ ID NO: 507293 - RNA, 32 nt, Human
ucucggcucacugcaaccuccaccuccccggg

SEQ ID NO: 507294 - RNA, 32 nt, Human
ucucggcucacugcaaccuccaccucccgagu

SEQ ID NO: 507295 - RNA, 32 nt, Human
ucucggcucacugcaaccuccaccucccggau

SEQ ID NO: 507296 - RNA, 32 nt, Human
ucucggcucacugcaaccuccaccucccgggu

SEQ ID NO: 507297 - RNA, 32 nt, Human
ucucggcucacugcaaccuccaccuccuaggu

SEQ ID NO: 507298 - RNA, 32 nt, Human
ucucggcucacugcaaccuccaccuccuggau

SEQ ID NO: 507299 - RNA, 32 nt, Human
ucucggcucacugcaaccuccaccuccuggcu

SEQ ID NO: 507300 - RNA, 32 nt, Human
ucucggcucacugcaaccuccaccuccugggc

SEQ ID NO: 507301 - RNA, 32 nt, Human
ucucggcucacugcaaccuccaccuccugggu

SEQ ID NO: 507302 - RNA, 32 nt, Human
ucucggcucacugcaaccuccaccuccugguu

SEQ ID NO: 507303 - RNA, 32 nt, Human
ucucggcucacugcaaccuccaccucucggcu

SEQ ID NO: 507304 - RNA, 32 nt, Human
ucucggcucacugcaaccuccaccuucagggu

SEQ ID NO: 507305 - RNA, 32 nt, Human
ucucggcucacugcaaccuccacuucuugggu

SEQ ID NO: 507306 - RNA, 32 nt, Human
ucucggcucacugcaaccuccagcucccaggu

SEQ ID NO: 507307 - RNA, 32 nt, Human
ucucggcucacugcaaccucccugccugauuc

SEQ ID NO: 507308 - RNA, 32 nt, Human
ucucggcucacugcaaccuccgacuccugggu

SEQ ID NO: 507309 - RNA, 23 nt, Human
ucucggcucacugcaaccuccgc

SEQ ID NO: 507310 - RNA, 32 nt, Human
ucucggcucacugcaaccuccgcaucccgggu

SEQ ID NO: 507311 - RNA, 32 nt, Human
ucucggcucacugcaaccuccgcccccugggu

SEQ ID NO: 507312 - RNA, 32 nt, Human
ucucggcucacugcaaccuccgccuaccgggu

SEQ ID NO: 507313 - RNA, 32 nt, Human
ucucggcucacugcaaccuccgccucccaagu

SEQ ID NO: 507314 - RNA, 32 nt, Human
ucucggcucacugcaaccuccgccucccaggu

SEQ ID NO: 507315 - RNA, 32 nt, Human
ucucggcucacugcaaccuccgccucccaguu

SEQ ID NO: 507316 - RNA, 32 nt, Human
ucucggcucacugcaaccuccgccucccggcu

SEQ ID NO: 507317 - RNA, 32 nt, Human
ucucggcucacugcaaccuccgccucccgggc

SEQ ID NO: 507318 - RNA, 32 nt, Human
ucucggcucacugcaaccuccgccucccgggu

SEQ ID NO: 507319 - RNA, 32 nt, Human
ucucggcucacugcaaccuccgccucccgguu

SEQ ID NO: 507320 - RNA, 32 nt, Human
ucucggcucacugcaaccuccgccuccugagu

SEQ ID NO: 507321 - RNA, 32 nt, Human
ucucggcucacugcaaccuccgccuccugggc

SEQ ID NO: 507322 - RNA, 32 nt, Human
ucucggcucacugcaaccuccgccuccugggu

SEQ ID NO: 507323 - RNA, 32 nt, Human
ucucggcucacugcaaccuccgccuccuuggu

SEQ ID NO: 507324 - RNA, 32 nt, Human
ucucggcucacugcaaccuccgccuuccugag

SEQ ID NO: 507325 - RNA, 32 nt, Human
ucucggcucacugcaaccuccgccuugcuggu

SEQ ID NO: 507326 - RNA, 32 nt, Human
ucucggcucacugcaaccuccgccuuuccacc

SEQ ID NO: 507327 - RNA, 32 nt, Human
ucucggcucacugcaaccuccgcucccugggu

SEQ ID NO: 507328 - RNA, 32 nt, Human
ucucggcucacugcaaccuccgucucccaggu

SEQ ID NO: 507329 - RNA, 32 nt, Human
ucucggcucacugcaaccuccuccucccgggu

SEQ ID NO: 507330 - RNA, 32 nt, Human
ucucggcucacugcaaccucgccucccugguu

SEQ ID NO: 507331 - RNA, 32 nt, Human
ucucggcucacugcaaccucuaccucccaggu

SEQ ID NO: 507332 - RNA, 32 nt, Human
ucucggcucacugcaaccucuaccuccuggau

SEQ ID NO: 507333 - RNA, 32 nt, Human
ucucggcucacugcaaccucuaccuccugggu

SEQ ID NO: 507334 - RNA, 32 nt, Human
ucucggcucacugcaaccucugccaucaggau

SEQ ID NO: 507335 - RNA, 32 nt, Human
ucucggcucacugcaaccucugccucacgggu

SEQ ID NO: 507336 - RNA, 32 nt, Human
ucucggcucacugcaaccucugccucccaggu

SEQ ID NO: 507337 - RNA, 32 nt, Human
ucucggcucacugcaaccucugccucccgagu

SEQ ID NO: 507338 - RNA, 32 nt, Human
ucucggcucacugcaaccucugccucccgcau

SEQ ID NO: 507339 - RNA, 32 nt, Human
ucucggcucacugcaaccucugccucccggau

SEQ ID NO: 507340 - RNA, 32 nt, Human
ucucggcucacugcaaccucugccucccgggu

SEQ ID NO: 507341 - RNA, 32 nt, Human
ucucggcucacugcaaccucugccucccgugu

SEQ ID NO: 507342 - RNA, 32 nt, Human
ucucggcucacugcaaccucugccuccuaggu

SEQ ID NO: 507343 - RNA, 32 nt, Human
ucucggcucacugcaaccucugccuccugagc

SEQ ID NO: 507344 - RNA, 32 nt, Human
ucucggcucacugcaaccucugccuccugagu

SEQ ID NO: 507345 - RNA, 32 nt, Human
ucucggcucacugcaaccucugccuccuggau

SEQ ID NO: 507346 - RNA, 32 nt, Human
ucucggcucacugcaaccucugccuccugggc

SEQ ID NO: 507347 - RNA, 32 nt, Human
ucucggcucacugcaaccucugccuccugggg

SEQ ID NO: 507348 - RNA, 32 nt, Human
ucucggcucacugcaaccucugccuccugggu

SEQ ID NO: 507349 - RNA, 32 nt, Human
ucucggcucacugcaaccucugccucuugggu

SEQ ID NO: 507350 - RNA, 32 nt, Human
ucucggcucacugcaaccucugcuucccgggu

SEQ ID NO: 507351 - RNA, 32 nt, Human
ucucggcucacugcaaccucugucuccugagu

SEQ ID NO: 507352 - RNA, 32 nt, Human
ucucggcucacugcaaccucuugccucccagg

SEQ ID NO: 507353 - RNA, 32 nt, Human
ucucggcucacugcaaccuucgccucuggguu

SEQ ID NO: 507354 - RNA, 32 nt, Human
ucucggcucacugcaacguccgccucccgggu

SEQ ID NO: 507355 - RNA, 32 nt, Human
ucucggcucacugcaacuaccaccuccugggu

SEQ ID NO: 507356 - RNA, 32 nt, Human
ucucggcucacugcaacuccaccucccggguu

SEQ ID NO: 507357 - RNA, 32 nt, Human
ucucggcucacugcaacucugccucccggguu

SEQ ID NO: 507358 - RNA, 32 nt, Human
ucucggcucacugcaacuuccaccucccgggu

SEQ ID NO: 507359 - RNA, 32 nt, Human
ucucggcucacugcaacuuccgccucccgguu

SEQ ID NO: 507360 - RNA, 32 nt, Human
ucucggcucacugcaacuuccgccuccuggga

SEQ ID NO: 507361 - RNA, 32 nt, Human
ucucggcucacugcaacuucuaccaccuaggu

SEQ ID NO: 507362 - RNA, 32 nt, Human
ucucggcucacugcaacuucugccucccgggu

SEQ ID NO: 507363 - RNA, 32 nt, Human
ucucggcucacugcaacuucugccuccuaggu

SEQ ID NO: 507364 - RNA, 32 nt, Human
ucucggcucacugcaagauccgccucccgggu

SEQ ID NO: 507365 - RNA, 32 nt, Human
ucucggcucacugcaagccccaccucccaagu

SEQ ID NO: 507366 - RNA, 32 nt, Human
ucucggcucacugcaagccccaccuucugagu

SEQ ID NO: 507367 - RNA, 32 nt, Human
ucucggcucacugcaagcccugccuccugggu

SEQ ID NO: 507368 - RNA, 32 nt, Human
ucucggcucacugcaagcucagccuccccgau

SEQ ID NO: 507369 - RNA, 32 nt, Human
ucucggcucacugcaagcuccaccucccaggu

SEQ ID NO: 507370 - RNA, 32 nt, Human
ucucggcucacugcaagcuccaccucccgggu

SEQ ID NO: 507371 - RNA, 32 nt, Human
ucucggcucacugcaagcuccaccuccugggu

SEQ ID NO: 507372 - RNA, 32 nt, Human
ucucggcucacugcaagcuccaucucccaggu

SEQ ID NO: 507373 - RNA, 23 nt, Human
ucucggcucacugcaagcuccgc

SEQ ID NO: 507374 - RNA, 32 nt, Human
ucucggcucacugcaagcuccgccucccagau

SEQ ID NO: 507375 - RNA, 32 nt, Human
ucucggcucacugcaagcuccgccucccagga

SEQ ID NO: 507376 - RNA, 32 nt, Human
ucucggcucacugcaagcuccgccucccaggu

SEQ ID NO: 507377 - RNA, 32 nt, Human
ucucggcucacugcaagcuccgccucccggau

SEQ ID NO: 507378 - RNA, 32 nt, Human
ucucggcucacugcaagcuccgccucccgggu

SEQ ID NO: 507379 - RNA, 32 nt, Human
ucugcugggaauuggggcagccccaggcgucc

SEQ ID NO: 507380 - RNA, 32 nt, Human
ucugcugggaggaauggccaaguagauuauaa

SEQ ID NO: 507381 - RNA, 20 nt, Human
ucugcugggagggcgcgcag

SEQ ID NO: 507382 - RNA, 32 nt, Human
ucugcugggcaggcaaccugggguccagcuca

SEQ ID NO: 507383 - RNA, 32 nt, Human
ucugcugggcaggccucggggaggaccccuca

SEQ ID NO: 507384 - RNA, 32 nt, Human
ucugcugggcugcagaagcggcggcggcggca

SEQ ID NO: 507385 - RNA, 32 nt, Human
ucugcugggcugugaaggagaauaaagaguua

SEQ ID NO: 507386 - RNA, 32 nt, Human
ucugcuggggcugaaguuucuggggucacaug

SEQ ID NO: 507387 - RNA, 32 nt, Human
ucugcugggggcccugguaaccccaccucucu

SEQ ID NO: 507388 - RNA, 32 nt, Human
ucugcuggguauguuuuggaagugagugucac

SEQ ID NO: 507389 - RNA, 32 nt, Human
ucugcugggugaggggcacccagcuccagagg

SEQ ID NO: 507390 - RNA, 32 nt, Human
ucugcugguaagugaggcauggaguugguggg

SEQ ID NO: 507391 - RNA, 32 nt, Human
ucugcugguauguguuaaacagcagaccggcc

SEQ ID NO: 507392 - RNA, 32 nt, Human
ucugcuggugcuggugcaaggacuucuguucc

SEQ ID NO: 507393 - RNA, 32 nt, Human
ucugcuggugcuucugugccugugggucugga

SEQ ID NO: 507394 - RNA, 32 nt, Human
ucugcugguguuuuguucaaucuggaagaaug

SEQ ID NO: 507395 - RNA, 18 nt, Human
ucugcugguugcagcuga

SEQ ID NO: 507396 - RNA, 32 nt, Human
ucugcuguacaucuuauuuauuuucuccagag

SEQ ID NO: 507397 - RNA, 32 nt, Human
ucugcuguccuuuauuuaugggagaaacauag

SEQ ID NO: 507398 - RNA, 32 nt, Human
ucugcugucucucauggagauggugggcauca

SEQ ID NO: 507399 - RNA, 32 nt, Human
ucugcugucugugucuucuauuuggcaaacag

SEQ ID NO: 507400 - RNA, 32 nt, Human
ucugcugugccagggcugcacugaguucaaau

SEQ ID NO: 507401 - RNA, 32 nt, Human
ucugcugugcucuccagcacugcgagcuucug

SEQ ID NO: 507402 - RNA, 32 nt, Human
ucugcugugugaauaaauaauuccugaagaau

SEQ ID NO: 507403 - RNA, 32 nt, Human
ucugcuguuaacugcaaccuuguuuauuaaau

SEQ ID NO: 507404 - RNA, 32 nt, Human
ucugcuguuauccugccccaagggccugggcc

SEQ ID NO: 507405 - RNA, 32 nt, Human
ucugcuguuccuucgaggguuccaggcugugu

SEQ ID NO: 507406 - RNA, 32 nt, Human
ucugcuguuuguuccaggcucaccuuuagaac

SEQ ID NO: 507407 - RNA, 32 nt, Human
ucugcuguuuuagccuagaaggaaaagaagca

SEQ ID NO: 507408 - RNA, 32 nt, Human
ucugcuguuuuagccuagcaggaaaagaagca

SEQ ID NO: 507409 - RNA, 32 nt, Human
ucugcuuagccgcggucaugagccggcacagc

SEQ ID NO: 507410 - RNA, 32 nt, Human
ucugcuuagcuggugggcaggggagagaggga

SEQ ID NO: 507411 - RNA, 32 nt, Human
ucugcuuaggucgcagcucacgcauugaaugc

SEQ ID NO: 507412 - RNA, 32 nt, Human
ucugcuuauaaauaaacuuaacaaauacacua

SEQ ID NO: 507413 - RNA, 32 nt, Human
ucugcuuauuagacaaauauauacucauuuua

SEQ ID NO: 507414 - RNA, 32 nt, Human
ucugcuucacuguccagccuuggaacuaccac

SEQ ID NO: 507415 - RNA, 32 nt, Human
ucugcuucagccccaaguaggugggacuccag

SEQ ID NO: 507416 - RNA, 32 nt, Human
ucugcuucagcuaccuaagagggaagggcccc

SEQ ID NO: 507417 - RNA, 32 nt, Human
ucugcuucauccguggaacuugaggcucagau

SEQ ID NO: 507418 - RNA, 32 nt, Human
ucugcuucauucucucuuugacuccagcuguc

SEQ ID NO: 507419 - RNA, 32 nt, Human
ucugcuucauucugagcguucuugccuccccu

SEQ ID NO: 507420 - RNA, 32 nt, Human
ucugcuuccaaggcuccgcuucagaggcggcu

SEQ ID NO: 507421 - RNA, 32 nt, Human
ucugcuuccagcugcagccuccuuccugccug

SEQ ID NO: 507422 - RNA, 32 nt, Human
ucugcuucccaccugcccuccccacccccugc

SEQ ID NO: 507423 - RNA, 32 nt, Human
ucugcuucccagagagggucuggccuugccca

SEQ ID NO: 507424 - RNA, 19 nt, Human
ucugcuucccgucagccuc

SEQ ID NO: 507425 - RNA, 21 nt, Human
ucugcuucccucccaggccuc

SEQ ID NO: 507426 - RNA, 21 nt, Human
ucugcuucccucuauuuucuc

SEQ ID NO: 507427 - RNA, 21 nt, Human
ucugcuucccuguuucauauc

SEQ ID NO: 507428 - RNA, 32 nt, Human
ucugcuuccuauagcugggaugauauggggga

SEQ ID NO: 507429 - RNA, 32 nt, Human
ucugcuuccugcagccucuccccgaccucaga

SEQ ID NO: 507430 - RNA, 32 nt, Human
ucugcuucuacugaacuaugcguacugcauag

SEQ ID NO: 507431 - RNA, 32 nt, Human
ucugcuucuaguucuccaccuccagguuggga

SEQ ID NO: 507432 - RNA, 32 nt, Human
ucugcuucucagacccaaucacuguggccagg

SEQ ID NO: 507433 - RNA, 32 nt, Human
ucugcuucuccucuguggguacgagggccgcu

SEQ ID NO: 507434 - RNA, 32 nt, Human
ucugcuucuccuguggcucugccaucagcucc

SEQ ID NO: 507435 - RNA, 32 nt, Human
ucugcuucucucuuccucaucucccaauaccu

SEQ ID NO: 507436 - RNA, 32 nt, Human
ucugcuucucucuugcauagauacaaucaaga

SEQ ID NO: 507437 - RNA, 32 nt, Human
ucugcuucugcugcugaucaaggcagcucagc

SEQ ID NO: 507438 - RNA, 32 nt, Human
ucugcuucuguagcccacggcaccccaaacuu

SEQ ID NO: 507439 - RNA, 32 nt, Human
ucugcuucuguuucccugucuugggauccuua

SEQ ID NO: 507440 - RNA, 32 nt, Human
ucugcuugcagcugcccaagucugccugggcc

SEQ ID NO: 507441 - RNA, 23 nt, Human
ucugcuugcccuuagugugauga

SEQ ID NO: 507442 - RNA, 32 nt, Human
ucugcuugccuuuccugaaaguuucuggggcu

SEQ ID NO: 507443 - RNA, 32 nt, Human
ucugcuugcucucugcuuagacaggcuuuaag

SEQ ID NO: 507444 - RNA, 32 nt, Human
ucugcuugcugccgccgcgcuccugggugauc

SEQ ID NO: 507445 - RNA, 32 nt, Human
ucugcuugcuugcugcuuuuccuugcuuucuc

SEQ ID NO: 507446 - RNA, 32 nt, Human
ucugcuuggaguuuacauaucaaaguucuggg

SEQ ID NO: 507447 - RNA, 32 nt, Human
ucugcuuggauggugucuuccucuccucagcc

SEQ ID NO: 507448 - RNA, 32 nt, Human
ucugcuugggccgcgagggaaggugaggucgg

SEQ ID NO: 507449 - RNA, 23 nt, Human
ucugcuugguccccgagaugggg

SEQ ID NO: 507450 - RNA, 32 nt, Human
ucugcuugucuuuauguugcuggaacauuucu

SEQ ID NO: 507451 - RNA, 32 nt, Human
ucugcuuuaagaauuaacgaaagcagugucaa

SEQ ID NO: 507452 - RNA, 21 nt, Human
ucugcuuucccggcaaggcag

SEQ ID NO: 507453 - RNA, 32 nt, Human
ucugcuuuccgacauuuugccucucucacugg

SEQ ID NO: 507454 - RNA, 32 nt, Human
ucugcuuuccugucuguagugccugcuguuug

SEQ ID NO: 507455 - RNA, 32 nt, Human
ucugcuuucuuccauuuuuccuucccauuauu

SEQ ID NO: 507456 - RNA, 32 nt, Human
ucugcuuugagacuggaguuucugcuauucuc

SEQ ID NO: 507457 - RNA, 32 nt, Human
ucugcuuugcucucacaggaccucagcccguc

SEQ ID NO: 507458 - RNA, 32 nt, Human
ucugcuuuggguuguucucugccccuuccuuc

SEQ ID NO: 507459 - RNA, 32 nt, Human
ucugcuuuuaauuguucuucaagucugggaaa

SEQ ID NO: 507460 - RNA, 32 nt, Human
ucugcuuuucacucuugccuugucucccaauu

SEQ ID NO: 507461 - RNA, 32 nt, Human
ucugcuuuuccacuucuaccugcguguggguu

SEQ ID NO: 507462 - RNA, 32 nt, Human
ucugcuuuuccauucuggguguuuucagaaag

SEQ ID NO: 507463 - RNA, 32 nt, Human
ucugcuuuucuccaaucucaguuuuuccauca

SEQ ID NO: 507464 - RNA, 32 nt, Human
ucugcuuuucugucagagauggcaagggcuuu

SEQ ID NO: 507465 - RNA, 32 nt, Human
ucugcuuuuucagcuucuccaucgccugccuu

SEQ ID NO: 507466 - RNA, 32 nt, Human
ucugcuuuuugacuugcaucugagaguuucuu

SEQ ID NO: 507467 - RNA, 22 nt, Human
ucuggaaaaccaacaacuugaa

SEQ ID NO: 507468 - RNA, 21 nt, Human
ucuggaaaacccuucccugaa

SEQ ID NO: 507469 - RNA, 32 nt, Human
ucuggaaaacccuucccugaagagagagaacg

SEQ ID NO: 507470 - RNA, 22 nt, Human
ucuggaaaaccuccggcucucu

SEQ ID NO: 507471 - RNA, 20 nt, Human
ucuggaaacacccuuccgga

SEQ ID NO: 507472 - RNA, 32 nt, Human
ucuggaaacaucaaagcuggauuuaaacaucu

SEQ ID NO: 507473 - RNA, 20 nt, Human
ucuggaaacccauuucuguu

SEQ ID NO: 507474 - RNA, 32 nt, Human
ucuggaaaggaaauaaaugggagaaaaauaaa

SEQ ID NO: 507475 - RNA, 32 nt, Human
ucuggaaagggcccucaacagaacccgaccau

SEQ ID NO: 507476 - RNA, 32 nt, Human
ucuggaaaguaucugucacaugauauuuuaaa

SEQ ID NO: 507477 - RNA, 32 nt, Human
ucuggaaauaaauuguuauggaggggcuguuu

SEQ ID NO: 507478 - RNA, 32 nt, Human
ucuggaaauaggaagacagagaagguagagua

SEQ ID NO: 507479 - RNA, 32 nt, Human
ucuggaaaugcacccagaagucuggagaaggu

SEQ ID NO: 507480 - RNA, 32 nt, Human
ucuggaaaugccucugggcugcugugcaaaag

SEQ ID NO: 507481 - RNA, 32 nt, Human
ucuggaaauggaaaccgcuccuguauauucug

SEQ ID NO: 507482 - RNA, 32 nt, Human
ucuggaaauggcuguaggugguguugagaaag

SEQ ID NO: 507483 - RNA, 32 nt, Human
ucuggaacaaaccucucaccucaggccagaag

SEQ ID NO: 507484 - RNA, 32 nt, Human
ucuggaacacgcugcuccccugggcagcuguu

SEQ ID NO: 507485 - RNA, 32 nt, Human
ucuggaaccagccugugugccagcgcuguguc

SEQ ID NO: 507486 - RNA, 22 nt, Human
ucuggaaccucccaucccugcc

SEQ ID NO: 507487 - RNA, 32 nt, Human
ucuggaacucacuguucucuugcuuccuucca

SEQ ID NO: 507488 - RNA, 32 nt, Human
ucuggaagaaaaugacuaaaacuguuugcauc

SEQ ID NO: 507489 - RNA, 32 nt, Human
ucuggaagaagaggaagaggaaagaaaaggag

SEQ ID NO: 507490 - RNA, 22 nt, Human
ucuggaagaauuacuaugcuga

SEQ ID NO: 507491 - RNA, 32 nt, Human
ucuggaagacaaguucauuucaucuugagauc

SEQ ID NO: 507492 - RNA, 32 nt, Human
ucuggaagacuccgugccacuccuuucuagug

SEQ ID NO: 507493 - RNA, 32 nt, Human
ucuggaagccugucccaagugaaugaaugcuc

SEQ ID NO: 507494 - RNA, 32 nt, Human
ucuggaagccuucugccauguuccuccacagc

SEQ ID NO: 507495 - RNA, 32 nt, Human
ucuggaagcuaaauugccuccugccagagaug

SEQ ID NO: 507496 - RNA, 32 nt, Human
ucuggaagcugaagcagcaagaucacuugagc

SEQ ID NO: 507497 - RNA, 32 nt, Human
ucuggaagcugaggcaggagaaucgcuugaac

SEQ ID NO: 507498 - RNA, 32 nt, Human
ucuggaaggaaauuaaaagugcuacuuuaaug

SEQ ID NO: 507499 - RNA, 32 nt, Human
ucuggaaggagaaaauacaacaugucauuuau

SEQ ID NO: 507500 - RNA, 32 nt, Human
ucuggaaggagcuggccccucagucccuuccu

SEQ ID NO: 507501 - RNA, 23 nt, Human
ucuggaaggauagggcugugugg

SEQ ID NO: 507502 - RNA, 32 nt, Human
ucuggaaggauuuugucgucugccucccaguu

SEQ ID NO: 507503 - RNA, 24 nt, Human
ucuggaaggcagagguugcaguga

SEQ ID NO: 507504 - RNA, 20 nt, Human
ucuggaaggccuucgccagg

SEQ ID NO: 507505 - RNA, 32 nt, Human
ucuggaagggcugucuguggcuguccugagac

SEQ ID NO: 507506 - RNA, 32 nt, Human
ucuggaaggugcugaaugcccugcugacuggg

SEQ ID NO: 507507 - RNA, 32 nt, Human
ucuggaaguaccaccuggacucacagaggagc

SEQ ID NO: 507508 - RNA, 32 nt, Human
ucuggaaguagugagagaagcugguaauucug

SEQ ID NO: 507509 - RNA, 32 nt, Human
ucuggaaguauuaggcucauuuuauauuugug

SEQ ID NO: 507510 - RNA, 32 nt, Human
ucuggaagucgugcuggucucccaggugaggc

SEQ ID NO: 507511 - RNA, 32 nt, Human
ucuggaaguggacaucgcggcucuguguuuuu

SEQ ID NO: 507512 - RNA, 32 nt, Human
ucuggaaguggagcuaggaugggaggcguagc

SEQ ID NO: 507513 - RNA, 32 nt, Human
ucuggaaguggugggaggcagcuguggugcag

SEQ ID NO: 507514 - RNA, 32 nt, Human
ucuggaaguuucuagucucacaaaaaggaaga

SEQ ID NO: 507515 - RNA, 32 nt, Human
ucuggaauaaugaagcaggcgaggacggagcc

SEQ ID NO: 507516 - RNA, 32 nt, Human
ucuggaauccuagcuacucaggaggcuguggc

SEQ ID NO: 507517 - RNA, 25 nt, Human
ucuggaaucucuguuuuaugcuaaa

SEQ ID NO: 507518 - RNA, 32 nt, Human
ucuggaaucugccugggcuuggaagaaagagg

SEQ ID NO: 507519 - RNA, 23 nt, Human
ucuggaaucuuccaguucugcca

SEQ ID NO: 507520 - RNA, 32 nt, Human
ucuggaaugccacaucuccucccaccagccac

SEQ ID NO: 507521 - RNA, 32 nt, Human
ucuggaaugccuuuguaaacagguguguugaa

SEQ ID NO: 507522 - RNA, 30 nt, Human
ucuggaauggucucugggcuccuguuucug

SEQ ID NO: 507523 - RNA, 32 nt, Human
ucuggaauggucuggaguggucuggaaagcag

SEQ ID NO: 507524 - RNA, 32 nt, Human
ucuggaaugucacucaagaccaagcggucaga

SEQ ID NO: 507525 - RNA, 32 nt, Human
ucuggaauuuguuguauuuucucccaguaaag

SEQ ID NO: 507526 - RNA, 21 nt, Human
ucuggacaaaucuuguccaag

SEQ ID NO: 507527 - RNA, 32 nt, Human
ucuggacaaauuccuuucucuuuaguucagcg

SEQ ID NO: 507528 - RNA, 32 nt, Human
ucuggacaacagagcaagacucugucucaaaa

SEQ ID NO: 507529 - RNA, 21 nt, Human
ucuggacaccuccuaucugcu

SEQ ID NO: 507530 - RNA, 24 nt, Human
ucuggacacguaaccuaugucaga

SEQ ID NO: 507531 - RNA, 24 nt, Human
ucuggacacuccauccuugccaaa

SEQ ID NO: 507532 - RNA, 24 nt, Human
ucuggacacucuucuccuguuaga

SEQ ID NO: 507533 - RNA, 32 nt, Human
ucuggacacuggcugaauccuuccucuccccu

SEQ ID NO: 507534 - RNA, 32 nt, Human
ucuggacagagaggaaggaaggauuggaaaag

SEQ ID NO: 507535 - RNA, 32 nt, Human
ucuggacagagccacagacaagucuggggaua

SEQ ID NO: 507536 - RNA, 32 nt, Human
ucuggacaggaaaauugcaaaguacaauuaac

SEQ ID NO: 507537 - RNA, 32 nt, Human
ucuggacaguuuacagaagcuaugcacuugau

SEQ ID NO: 507538 - RNA, 32 nt, Human
ucuggacaugaggagcaaaggaagggggcaau

SEQ ID NO: 507539 - RNA, 23 nt, Human
ucuggacauuucauuaugugaga

SEQ ID NO: 507540 - RNA, 32 nt, Human
ucuggaccaaaccacuggacaccuuacaugua

SEQ ID NO: 507541 - RNA, 32 nt, Human
ucuggaccagcacugcagcccagccagugguu

SEQ ID NO: 507542 - RNA, 32 nt, Human
ucuggacccacucugucagcauggacauccuu

SEQ ID NO: 507543 - RNA, 32 nt, Human
ucuggacccagccuggucugcacugcaaccuc

SEQ ID NO: 507544 - RNA, 20 nt, Human
ucuggaccccuuguccugcu

SEQ ID NO: 507545 - RNA, 32 nt, Human
ucuggacccuucuaggacgacauggccgugac

SEQ ID NO: 507546 - RNA, 32 nt, Human
ucuggaccucaaaauuaugggaacauuuacuu

SEQ ID NO: 507547 - RNA, 32 nt, Human
ucuggaccucaaagucccucuggaggaccaca

SEQ ID NO: 507548 - RNA, 32 nt, Human
ucuggaccucagcuuugcuaucuauaaaauga

SEQ ID NO: 507549 - RNA, 32 nt, Human
ucuggaccucagguuuccaucuguaaaaugag

SEQ ID NO: 507550 - RNA, 32 nt, Human
ucuggaccuuaguuuacuagucuccaauacac

SEQ ID NO: 507551 - RNA, 32 nt, Human
ucuggaccuuucuaccaguuguggaccaugag

SEQ ID NO: 507552 - RNA, 24 nt, Human
ucuggacgagcaguggagagggaa

SEQ ID NO: 507553 - RNA, 23 nt, Human
ucuggacgcugccuuuucccaaa

SEQ ID NO: 507554 - RNA, 32 nt, Human
ucuggacggaagugguggcuguggaaggcgua

SEQ ID NO: 507555 - RNA, 21 nt, Human
ucuggacgucccuuccugcua

SEQ ID NO: 507556 - RNA, 32 nt, Human
ucuggacgugaagacguggcuggagcaggaga

SEQ ID NO: 507557 - RNA, 32 nt, Human
ucuggacuagagagaagagggagaggacugga

SEQ ID NO: 507558 - RNA, 32 nt, Human
ucuggacucugauguguguggagggaugggga

SEQ ID NO: 507559 - RNA, 18 nt, Human
ucuggacucugugcccau

SEQ ID NO: 507560 - RNA, 32 nt, Human
ucuggacucuuccuugcccuguucuguaaaga

SEQ ID NO: 507561 - RNA, 32 nt, Human
ucuggacugaggccuuugcugugaacugcagu

SEQ ID NO: 507562 - RNA, 21 nt, Human
ucuggacugaguuuugccaaa

SEQ ID NO: 507563 - RNA, 32 nt, Human
ucuggacugcaaaucugcacacacaacgaaca

SEQ ID NO: 507564 - RNA, 32 nt, Human
ucuggacugcacacagcacccacaaccagccc

SEQ ID NO: 507565 - RNA, 32 nt, Human
ucuggacugcuggaaugggaauccaagagcga

SEQ ID NO: 507566 - RNA, 32 nt, Human
ucuggacugggagcucagugaggauucugacc

SEQ ID NO: 507567 - RNA, 32 nt, Human
ucuggacugggcuguaaaaaucugugaacacu

SEQ ID NO: 507568 - RNA, 32 nt, Human
ucuggacuguuuaguaugcagaaggaccagcc

SEQ ID NO: 507569 - RNA, 28 nt, Human
ucuggacuguuucuuccuguugcuguca

SEQ ID NO: 507570 - RNA, 32 nt, Human
ucuggacuucccaucggcccucagggacguaa

SEQ ID NO: 507571 - RNA, 32 nt, Human
ucuggacuucuuuuauggggcuccuggcggug

SEQ ID NO: 507572 - RNA, 32 nt, Human
ucuggacuugcagaguacaugauagcaaaaua

SEQ ID NO: 507573 - RNA, 32 nt, Human
ucuggagaaaugcugaggcgagauuagugcag

SEQ ID NO: 507574 - RNA, 32 nt, Human
ucuggagaacacagcaacaaggugccaucuug

SEQ ID NO: 507575 - RNA, 24 nt, Human
ucuggagaaccucauccagcuccc

SEQ ID NO: 507576 - RNA, 24 nt, Human
ucuggagaacgccaucagcucgcu

SEQ ID NO: 507577 - RNA, 22 nt, Human
ucuggagaacucugggaccccu

SEQ ID NO: 507578 - RNA, 32 nt, Human
ucuggagaaggcccugaaaucacauugauaua

SEQ ID NO: 507579 - RNA, 32 nt, Human
ucuggagaauccacccccaccagauuccuccg

SEQ ID NO: 507580 - RNA, 32 nt, Human
ucuggagaauggggcagcuuccacacugccca

SEQ ID NO: 507581 - RNA, 21 nt, Human
ucuggagaauuaucacaaccu

SEQ ID NO: 507582 - RNA, 32 nt, Human
ucuggagaccaucuuguuccagccucugaaga

SEQ ID NO: 507583 - RNA, 32 nt, Human
ucuggagacugaggugggagaaucgcuugaga

SEQ ID NO: 507584 - RNA, 21 nt, Human
ucuggagacugcaggcucccu

SEQ ID NO: 507585 - RNA, 32 nt, Human
ucuggagacugcuguguguugagggaagauac

SEQ ID NO: 507586 - RNA, 32 nt, Human
ucuggagagcaucuaccuucaggacagccuuc

SEQ ID NO: 507587 - RNA, 32 nt, Human
ucuggagaggagagagucggcaaagagggcag

SEQ ID NO: 507588 - RNA, 18 nt, Human
ucuggagagggaagggaa

SEQ ID NO: 507589 - RNA, 32 nt, Human
ucuggagagguuauaggucacuccuggggccu

SEQ ID NO: 507590 - RNA, 21 nt, Human
ucuggagagugacgucucccu

SEQ ID NO: 507591 - RNA, 22 nt, Human
ucuggagauagaugggcucccu

SEQ ID NO: 507592 - RNA, 32 nt, Human
ucuggagauuccugcaaccucaagagacuucc

SEQ ID NO: 507593 - RNA, 32 nt, Human
ucuggagcacuuguuuuaaaaugcagauucau

SEQ ID NO: 507594 - RNA, 32 nt, Human
ucuggagcagccuggugaacccugccacaggc

SEQ ID NO: 507595 - RNA, 32 nt, Human
ucuggagcaugaggcuggaugcagugguggug

SEQ ID NO: 507596 - RNA, 32 nt, Human
ucuggagcaugcagcaacaacauaccaucuug

SEQ ID NO: 507597 - RNA, 32 nt, Human
ucuggagcauuguguauagaacuggauuuuca

SEQ ID NO: 507598 - RNA, 32 nt, Human
ucuggagccagccgagcaggaggccuaggagg

SEQ ID NO: 507599 - RNA, 20 nt, Human
ucuggagcccagcccaaaag

SEQ ID NO: 507600 - RNA, 32 nt, Human
ucuggagcccaggaguucgaggcugcaaugag

SEQ ID NO: 507601 - RNA, 32 nt, Human
ucuggagcccaggggcuugugggugggcagcu

SEQ ID NO: 507602 - RNA, 32 nt, Human
ucuggagcccccagaggagauaagacagagac

SEQ ID NO: 507603 - RNA, 21 nt, Human
ucuggagcccgguggagaaga

SEQ ID NO: 507604 - RNA, 32 nt, Human
ucuggagccgagaaggagaacaccucuguccu

SEQ ID NO: 507605 - RNA, 32 nt, Human
ucuggagccuccagggaucuaggggagccugg

SEQ ID NO: 507606 - RNA, 32 nt, Human
ucuggagccugcaggcaggugggggcugcguc

SEQ ID NO: 507607 - RNA, 32 nt, Human
ucuggagcgggcagagcgggggcaguugauag

SEQ ID NO: 507608 - RNA, 32 nt, Human
ucuggagcucaggccuuccugaggagcaauca

SEQ ID NO: 507609 - RNA, 32 nt, Human
ucuggagcugagcuaccuggggugggggccaa

SEQ ID NO: 507610 - RNA, 32 nt, Human
ucuggagcugcagcuuccucccuggcuguggg

SEQ ID NO: 507611 - RNA, 31 nt, Human
ucuggagcugccaaggagggaggagacucgg

SEQ ID NO: 507612 - RNA, 32 nt, Human
ucuggagcuguggagcuuguaaagucacacuc

SEQ ID NO: 507613 - RNA, 32 nt, Human
ucuggagcuugucaccauuggacagucucccu

SEQ ID NO: 507614 - RNA, 32 nt, Human
ucuggagcuuugagaucuaaaacuucuguugc

SEQ ID NO: 507615 - RNA, 32 nt, Human
ucuggaggaagaagacacauuccuaguucccc

SEQ ID NO: 507616 - RNA, 32 nt, Human
ucuggaggaagucgaaaaagauaagaauggca

SEQ ID NO: 507617 - RNA, 32 nt, Human
ucuggaggaauccugcagccagccuugcccag

SEQ ID NO: 507618 - RNA, 32 nt, Human
ucuggaggagcagcuggcucugcucugagaaa

SEQ ID NO: 507619 - RNA, 32 nt, Human
ucuggaggagccauggcccagagcagcugugg

SEQ ID NO: 507620 - RNA, 32 nt, Human
ucuggaggagcccgcccaggagaaggccccaa

SEQ ID NO: 507621 - RNA, 32 nt, Human
ucuggaggaggaggaaaaagauacacgcccuu

SEQ ID NO: 507622 - RNA, 32 nt, Human
ucuggaggauucaagaguggaagaggaauuua

SEQ ID NO: 507623 - RNA, 32 nt, Human
ucuggaggcaggucagaacaagaggcaugugu

SEQ ID NO: 507624 - RNA, 32 nt, Human
ucuggaggccagaaagaaaagccuucuuuuuc

SEQ ID NO: 507625 - RNA, 32 nt, Human
ucuggaggcccaggaguguggcugcaagagaa

SEQ ID NO: 507626 - RNA, 32 nt, Human
ucuggaggccucauuaugucucuggcuugcuc

SEQ ID NO: 507627 - RNA, 32 nt, Human
ucuggaggcuaaggcaggagaauugcuugaac

SEQ ID NO: 507628 - RNA, 32 nt, Human
ucuggaggcugaaaugggaggaucacuugagc

SEQ ID NO: 507629 - RNA, 32 nt, Human
ucuggaggcugaagcaggagaauggcaugaac

SEQ ID NO: 507630 - RNA, 32 nt, Human
ucuggaggcugaaguuggaggauggcuugagc

SEQ ID NO: 507631 - RNA, 32 nt, Human
ucuggaggcugagacaggagaaucgcuugaac

SEQ ID NO: 507632 - RNA, 32 nt, Human
ucuggaggcugaggcagaagaaucacuugaac

SEQ ID NO: 507633 - RNA, 32 nt, Human
ucuggaggcugaggcaggaagaucacuggagc

SEQ ID NO: 507634 - RNA, 32 nt, Human
ucuggaggcugaggcaggagaaacaccugagc

SEQ ID NO: 507635 - RNA, 32 nt, Human
ucuggaggcugaggcaggagaaucaauugaac

SEQ ID NO: 507636 - RNA, 32 nt, Human
ucuggaggcugaggcaggagaaucacuugaac

SEQ ID NO: 507637 - RNA, 32 nt, Human
ucuggaggcugaggcaggagaaucgcuugaac

SEQ ID NO: 507638 - RNA, 32 nt, Human
ucuggaggcugaggcaggagaaucucuugaac

SEQ ID NO: 507639 - RNA, 32 nt, Human
ucuggaggcugaggcaggagaauggcaugagc

SEQ ID NO: 507640 - RNA, 32 nt, Human
ucuggaggcugaggcaggagaauggcgugaac

SEQ ID NO: 507641 - RNA, 32 nt, Human
ucuggaggcugaggcaggagaauggcgugagc

SEQ ID NO: 507642 - RNA, 32 nt, Human
ucuggaggcugaggcaggagaauggcuugaac

SEQ ID NO: 507643 - RNA, 32 nt, Human
ucuggaggcugaggcaggagaauugcuugaac

SEQ ID NO: 507644 - RNA, 32 nt, Human
ucuggaggcugaggcaggagaguagcgugaac

SEQ ID NO: 507645 - RNA, 32 nt, Human
ucuggaggcugaggcaggaggaucacuugagc

SEQ ID NO: 507646 - RNA, 32 nt, Human
ucuggaggcugaggcaggaggauggugugaac

SEQ ID NO: 507647 - RNA, 32 nt, Human
ucuggaggcugaggcgggagaaucgcuugaac

SEQ ID NO: 507648 - RNA, 32 nt, Human
ucuggaggcugagguaggagaauugcuugaac

SEQ ID NO: 507649 - RNA, 32 nt, Human
ucuggaggcugcaggccugagcaggugggcgu

SEQ ID NO: 507650 - RNA, 32 nt, Human
ucuggaggcuggggcaggagaauugcuugaac

SEQ ID NO: 507651 - RNA, 32 nt, Human
ucuggaggcuggucagucuacgcacaacugaa

SEQ ID NO: 507652 - RNA, 32 nt, Human
ucuggaggcuuaggcgggagaaucacuugaac

SEQ ID NO: 507653 - RNA, 32 nt, Human
ucuggagggccauggagaagaggcugggaguc

SEQ ID NO: 507654 - RNA, 21 nt, Human
ucuggagggcucuguccuucc

SEQ ID NO: 507655 - RNA, 24 nt, Human
ucuggaggggaacccacugccgga

SEQ ID NO: 507656 - RNA, 32 nt, Human
ucuggagggugaggcaggagaaucacuugaac

SEQ ID NO: 507657 - RNA, 32 nt, Human
ucuggagguacaggauuuccacaggccucuuu

SEQ ID NO: 507658 - RNA, 21 nt, Human
ucuggagguccuauuucucua

SEQ ID NO: 507659 - RNA, 26 nt, Human
ucuggagguguccugcuguuccuguu

SEQ ID NO: 507660 - RNA, 32 nt, Human
ucuggagguucugcaaagucuucccagaggug

SEQ ID NO: 507661 - RNA, 32 nt, Human
ucuggaguaccgucugccccagacaaguggga

SEQ ID NO: 507662 - RNA, 32 nt, Human
ucuggaguauaagugggaaagcuugauuuaaa

SEQ ID NO: 507663 - RNA, 26 nt, Human
ucuggaguccucuucccguuccucca

SEQ ID NO: 507664 - RNA, 32 nt, Human
ucuggagucuacuccccaggagccaggacagg

SEQ ID NO: 507665 - RNA, 32 nt, Human
ucuggagucuaguugaaggccuccaguuccca

SEQ ID NO: 507666 - RNA, 32 nt, Human
ucuggagugcugugguggaguggaguggcuau

SEQ ID NO: 507667 - RNA, 20 nt, Human
ucuggaguggggggcggcgg

SEQ ID NO: 507668 - RNA, 32 nt, Human
ucuggaguuugagaccagccugggcaacagag

SEQ ID NO: 507669 - RNA, 32 nt, Human
ucuggaguuuguuccuucugauguucggacgu

SEQ ID NO: 507670 - RNA, 32 nt, Human
ucuggaguuuuuggucuccucagagagcucca

SEQ ID NO: 507671 - RNA, 32 nt, Human
ucuggauaaucaggauaacgacccucaacagc

SEQ ID NO: 507672 - RNA, 32 nt, Human
ucuggauacacauacacauacaaaacagaaaa

SEQ ID NO: 507673 - RNA, 32 nt, Human
ucuggauacagaaccccuucuuuuccaaauua

SEQ ID NO: 507674 - RNA, 32 nt, Human
ucuggauaggggaugagguugcugugaaagca

SEQ ID NO: 507675 - RNA, 32 nt, Human
ucuggauauaacauacacagcugcauaaaaac

SEQ ID NO: 507676 - RNA, 24 nt, Human
ucuggauauuaacuccuuaccaaa

SEQ ID NO: 507677 - RNA, 24 nt, Human
ucuggauauuagcccuuugucaga

SEQ ID NO: 507678 - RNA, 32 nt, Human
ucuggaucaguaaaauuauacugugugugagu

SEQ ID NO: 507679 - RNA, 17 nt, Human
ucuggauccacugcuua

SEQ ID NO: 507680 - RNA, 23 nt, Human
ucuggauccagccauuucuggca

SEQ ID NO: 507681 - RNA, 32 nt, Human
ucuggaucccagcaucuucuccacuucagcgc

SEQ ID NO: 507682 - RNA, 32 nt, Human
ucuggauccugauucuccuuuuaagcuaaaau

SEQ ID NO: 507683 - RNA, 32 nt, Human
ucuggauccuucuggccugccucaugaagaua

SEQ ID NO: 507684 - RNA, 32 nt, Human
ucuggaucugucucuguauuccucacucccuu

SEQ ID NO: 507685 - RNA, 32 nt, Human
ucuggaucuuaaggagcuuccauuucuccagc

SEQ ID NO: 507686 - RNA, 32 nt, Human
ucuggaucuuuccuuuguauguuugugucucu

SEQ ID NO: 507687 - RNA, 23 nt, Human
ucuggaugaauacucugugcuga

SEQ ID NO: 507688 - RNA, 32 nt, Human
ucuggaugcaauuagaggaaaccagccaaaaa

SEQ ID NO: 507689 - RNA, 32 nt, Human
ucuggaugcaccguaacaucugagaagcacuc

SEQ ID NO: 507690 - RNA, 21 nt, Human
ucuggaugcaucauuuuugcc

SEQ ID NO: 507691 - RNA, 21 nt, Human
ucuggaugccucauuauguca

SEQ ID NO: 507692 - RNA, 19 nt, Human
ucuggaugccucucggccc

SEQ ID NO: 507693 - RNA, 24 nt, Human
ucuggaugccucucggcccaccca

SEQ ID NO: 507694 - RNA, 21 nt, Human
ucuggaugccuuccugcugcc

SEQ ID NO: 507695 - RNA, 27 nt, Human
ucuggaugcuccacugugcuugccaag

SEQ ID NO: 507696 - RNA, 32 nt, Human
ucuggauggaaccugagcugggucucugacuc

SEQ ID NO: 507697 - RNA, 32 nt, Human
ucuggauggaaccugggcuguggcucucuguc

SEQ ID NO: 507698 - RNA, 32 nt, Human
ucuggauggcuuuuagaaguggacacaguuua

SEQ ID NO: 507699 - RNA, 23 nt, Human
ucuggauguacuaccagagaguu

SEQ ID NO: 507700 - RNA, 24 nt, Human
ucuggaugucagucuuugcuguca

SEQ ID NO: 507701 - RNA, 21 nt, Human
ucuggaugucucccuuuuugu

SEQ ID NO: 507702 - RNA, 26 nt, Human
ucuggaugucuuggauuuucuuccca

SEQ ID NO: 507703 - RNA, 26 nt, Human
ucuggaugucuuuggggguuuugcua

SEQ ID NO: 507704 - RNA, 24 nt, Human
ucuggaugucuuuuauucaaagcu

SEQ ID NO: 507705 - RNA, 21 nt, Human
ucuggauguuguuugcugcca

SEQ ID NO: 507706 - RNA, 32 nt, Human
ucuggauuacccuggggcuggcccaggucuuc

SEQ ID NO: 507707 - RNA, 32 nt, Human
ucuggauucauugucucucacagaugugacug

SEQ ID NO: 507708 - RNA, 32 nt, Human
ucuggauuccaaggugggauggugaucccuuu

SEQ ID NO: 507709 - RNA, 32 nt, Human
ucuggauucugcauggcuggcaugucagacug

SEQ ID NO: 507710 - RNA, 32 nt, Human
ucuggauucugccucuugccaaagcagagggg

SEQ ID NO: 507711 - RNA, 32 nt, Human
ucuggauuuaacucugaugaaagacuggaggc

SEQ ID NO: 507712 - RNA, 32 nt, Human
ucuggauuuauuucucuaguuuacuuauuuuc

SEQ ID NO: 507713 - RNA, 32 nt, Human
ucuggauuugugggaauggcuuugcgugagaa

SEQ ID NO: 507714 - RNA, 32 nt, Human
ucuggauuuugaaagacaucuuuucaucaugg

SEQ ID NO: 507715 - RNA, 18 nt, Human
ucuggcaaaagggcgcgg

SEQ ID NO: 507716 - RNA, 18 nt, Human
ucuggcaaauggggugca

SEQ ID NO: 507717 - RNA, 32 nt, Human
ucuggcaacaaaagccagaguguugugggcca

SEQ ID NO: 507718 - RNA, 32 nt, Human
ucuggcaagacuuggccaagcuugccuggagu

SEQ ID NO: 507719 - RNA, 22 nt, Human
ucuggcaauucuuuuugccaag

SEQ ID NO: 507720 - RNA, 32 nt, Human
ucuggcacaaaaccuccuccucccaggcacuc

SEQ ID NO: 507721 - RNA, 22 nt, Human
ucuggcacaaccagcuuccugg

SEQ ID NO: 507722 - RNA, 32 nt, Human
ucuggcacagaaccugcccugcaggcuguagg

SEQ ID NO: 507723 - RNA, 32 nt, Human
ucuggcacagaaguccucccaccuugaagaga

SEQ ID NO: 507724 - RNA, 20 nt, Human
ucuggcacagggugugucug

SEQ ID NO: 507725 - RNA, 32 nt, Human
ucuggcacaguguggcuggauucucugcucag

SEQ ID NO: 507726 - RNA, 32 nt, Human
ucuggcacccuccugaauggaaccccagagua

SEQ ID NO: 507727 - RNA, 20 nt, Human
ucuggcaccuggcugcucug

SEQ ID NO: 507728 - RNA, 20 nt, Human
ucuggcaccugugggcuguc

SEQ ID NO: 507729 - RNA, 32 nt, Human
ucuggcacggccccgucuucugccuccuccuc

SEQ ID NO: 507730 - RNA, 32 nt, Human
ucuggcacucacugcagacuuccucuuucaag

SEQ ID NO: 507731 - RNA, 32 nt, Human
ucuggcacugugcaagucucagguccuagagu

SEQ ID NO: 507732 - RNA, 32 nt, Human
ucuggcacuucaaaaaugaauguuaaauagaa

SEQ ID NO: 507733 - RNA, 19 nt, Human
ucuggcagaggcgggucgg

SEQ ID NO: 507734 - RNA, 22 nt, Human
ucuggcagaguggggggcgugg

SEQ ID NO: 507735 - RNA, 32 nt, Human
ucuggcagcacuaguguuagaacaccaaggag

SEQ ID NO: 507736 - RNA, 32 nt, Human
ucuggcagcagcuucacuaaggugggauggau

SEQ ID NO: 507737 - RNA, 19 nt, Human
ucuggcagcaggcgggcgc

SEQ ID NO: 507738 - RNA, 32 nt, Human
ucuggcagcauguggagcaggcuguaggcaau

SEQ ID NO: 507739 - RNA, 20 nt, Human
ucuggcagccaggggcgggg

SEQ ID NO: 507740 - RNA, 32 nt, Human
ucuggcagccgucugcccucauggccuuugca

SEQ ID NO: 507741 - RNA, 32 nt, Human
ucuggcagccuggagcccagggagggacaggg

SEQ ID NO: 507742 - RNA, 32 nt, Human
ucuggcagccuguggggucaggagaagcaccc

SEQ ID NO: 507743 - RNA, 32 nt, Human
ucuggcagccuuaaccuguccucugcuaggac

SEQ ID NO: 507744 - RNA, 32 nt, Human
ucuggcagcggcagcuacauccagcuucuggg

SEQ ID NO: 507745 - RNA, 20 nt, Human
ucuggcagcgggggguguag

SEQ ID NO: 507746 - RNA, 18 nt, Human
ucuggcaggaaaagccag

SEQ ID NO: 507747 - RNA, 21 nt, Human
ucuggcaggaaggaggggcag

SEQ ID NO: 507748 - RNA, 19 nt, Human
ucuggcaggaccugccuag

SEQ ID NO: 507749 - RNA, 18 nt, Human
ucuggcaggagagugugg

SEQ ID NO: 507750 - RNA, 18 nt, Human
ucuggcaggagccggcgc

SEQ ID NO: 507751 - RNA, 19 nt, Human
ucuggcaggagcugcgugg

SEQ ID NO: 507752 - RNA, 32 nt, Human
ucuggcaggagugggagcaggagccagggcag

SEQ ID NO: 507753 - RNA, 19 nt, Human
ucuggcaggaucugcucgg

SEQ ID NO: 507754 - RNA, 20 nt, Human
ucuggcaggaugaaucgcag

SEQ ID NO: 507755 - RNA, 18 nt, Human
ucuggcaggauuugucag

SEQ ID NO: 507756 - RNA, 20 nt, Human
ucuggcaggcaggggggcag

SEQ ID NO: 507757 - RNA, 32 nt, Human
ucuggcagggaucucagaugaccguggccucc

SEQ ID NO: 507758 - RNA, 20 nt, Human
ucuggcaggggagaugugca

SEQ ID NO: 507759 - RNA, 19 nt, Human
ucuggcaggggcugcucag

SEQ ID NO: 507760 - RNA, 18 nt, Human
ucuggcagggggacgugg

SEQ ID NO: 507761 - RNA, 20 nt, Human
ucuggcagggggucuggugc

SEQ ID NO: 507762 - RNA, 19 nt, Human
ucuggcagggucugcgcag

SEQ ID NO: 507763 - RNA, 18 nt, Human
ucuggcagguaugugcag

SEQ ID NO: 507764 - RNA, 18 nt, Human
ucuggcaggugugugcag

SEQ ID NO: 507765 - RNA, 32 nt, Human
ucuggcagucucaaagcaaucauuucagcuuc

SEQ ID NO: 507766 - RNA, 32 nt, Human
ucuggcaguggcaccuccgcugagcuuuuaaa

SEQ ID NO: 507767 - RNA, 32 nt, Human
ucuggcaguucuggaauggaaggguucuggcu

SEQ ID NO: 507768 - RNA, 32 nt, Human
ucuggcauaaaccugcagguuugcauggcugu

SEQ ID NO: 507769 - RNA, 32 nt, Human
ucuggcaucaaguuucuugcagcugcucugag

SEQ ID NO: 507770 - RNA, 32 nt, Human
ucuggcaucagaggccagaguucaaaugugac

SEQ ID NO: 507771 - RNA, 32 nt, Human
ucuggcaucugacauuccaccgauucacaaac

SEQ ID NO: 507772 - RNA, 32 nt, Human
ucuggcaucugccucccuagaccuccuucccu

SEQ ID NO: 507773 - RNA, 32 nt, Human
ucuggcauggguuggguaggggauggagguga

SEQ ID NO: 507774 - RNA, 32 nt, Human
ucuggcauugucugcccagcugcuccaagcca

SEQ ID NO: 507775 - RNA, 23 nt, Human
ucuggcauuuaucacccccaccu

SEQ ID NO: 507776 - RNA, 32 nt, Human
ucuggccaaaccaccuucccagccuuuaugca

SEQ ID NO: 507777 - RNA, 26 nt, Human
ucuggccaaaucuuccuguucugcca

SEQ ID NO: 507778 - RNA, 32 nt, Human
ucuggccaacaaacaugagccacuuuucccag

SEQ ID NO: 507779 - RNA, 19 nt, Human
ucuggccaacauggugaaa

SEQ ID NO: 507780 - RNA, 32 nt, Human
ucuggccacccuggcccgccccucgcugcugc

SEQ ID NO: 507781 - RNA, 21 nt, Human
ucuggccacugggaggcgcug

SEQ ID NO: 507782 - RNA, 32 nt, Human
ucuggccacugggcguccuguggugaggccag

SEQ ID NO: 507783 - RNA, 32 nt, Human
ucuggccagaggacucuggaaaacuugcguuu

SEQ ID NO: 507784 - RNA, 32 nt, Human
ucuggccagaguuguagccaggccuugcacua

SEQ ID NO: 507785 - RNA, 32 nt, Human
ucuggccagauggcagagggcagcguucccuu

SEQ ID NO: 507786 - RNA, 23 nt, Human
ucuggccagcacgccuguccucc

SEQ ID NO: 507787 - RNA, 32 nt, Human
ucuggccagcacuggcagcuuccgggccuugu

SEQ ID NO: 507788 - RNA, 32 nt, Human
ucuggccagccucucccugccuccacuugcuc

SEQ ID NO: 507789 - RNA, 32 nt, Human
ucuggccaggagcuggaggagcaggcaguggg

SEQ ID NO: 507790 - RNA, 32 nt, Human
ucuggccauaagggaugggagaggagggauuu

SEQ ID NO: 507791 - RNA, 32 nt, Human
ucuggccaucgacccucaccucccgggacuuc

SEQ ID NO: 507792 - RNA, 32 nt, Human
ucuggccauugcacuccagcgugggcaacaga

SEQ ID NO: 507793 - RNA, 32 nt, Human
ucuggcccaaguggggaagcugggcagagagc

SEQ ID NO: 507794 - RNA, 32 nt, Human
ucuggcccagaaaaagagaugcagugauuuua

SEQ ID NO: 507795 - RNA, 32 nt, Human
ucuggcccaggaggagggucccccaggacccc

SEQ ID NO: 507796 - RNA, 32 nt, Human
ucuggcccagggaauccagccaugacccccac

SEQ ID NO: 507797 - RNA, 32 nt, Human
ucuggcccauugacagaugagaggucugaagc

SEQ ID NO: 507798 - RNA, 32 nt, Human
ucuggcccauuguuuccagucuguuccugucc

SEQ ID NO: 507799 - RNA, 32 nt, Human
ucuggccccagccucugcacuugggcuccccu

SEQ ID NO: 507800 - RNA, 32 nt, Human
ucuggccccagccucugugggcuuaaccacua

SEQ ID NO: 507801 - RNA, 18 nt, Human
ucuggccccagcugugaa

SEQ ID NO: 507802 - RNA, 19 nt, Human
ucuggcccccaccccauua

SEQ ID NO: 507803 - RNA, 32 nt, Human
ucuggcccccugucugucuuccucuccgcggu

SEQ ID NO: 507804 - RNA, 32 nt, Human
ucuggcccccuuccucaccucuuccaccccuc

SEQ ID NO: 507805 - RNA, 28 nt, Human
ucuggccccggugcugccugcaugccaa

SEQ ID NO: 507806 - RNA, 32 nt, Human
ucuggccccucugcucccucaggaagcagucc

SEQ ID NO: 507807 - RNA, 32 nt, Human
ucuggcccucagcugcuugacaggacggacug

SEQ ID NO: 507808 - RNA, 32 nt, Human
ucuggcccucuccacaugcacacccugagaac

SEQ ID NO: 507809 - RNA, 32 nt, Human
ucuggcccugcucuccugcagggagguggcug

SEQ ID NO: 507810 - RNA, 32 nt, Human
ucuggcccugcugcccccacacccaacuccga

SEQ ID NO: 507811 - RNA, 32 nt, Human
ucuggccgaaauuuuuaugagauaucucucac

SEQ ID NO: 507812 - RNA, 32 nt, Human
ucuggccgaggcugggcucuucccuggaugag

SEQ ID NO: 507813 - RNA, 32 nt, Human
ucuggccgcgcuugaggagcccuucagcccgc

SEQ ID NO: 507814 - RNA, 24 nt, Human
ucuggccgcugggcaggacauugg

SEQ ID NO: 507815 - RNA, 32 nt, Human
ucuggccggagcugccuggucccagaguggcu

SEQ ID NO: 507816 - RNA, 22 nt, Human
ucuggccucagguggggcgcag

SEQ ID NO: 507817 - RNA, 32 nt, Human
ucuggccuccaccccaccaccaggcccaauga

SEQ ID NO: 507818 - RNA, 32 nt, Human
ucuggccuccgugcucugcuucaccucuucug

SEQ ID NO: 507819 - RNA, 32 nt, Human
ucuggccuccuuggccucauucucugcauagc

SEQ ID NO: 507820 - RNA, 32 nt, Human
ucuggccucuacucucuccucccucuggcucu

SEQ ID NO: 507821 - RNA, 26 nt, Human
ucuggccucuccccagagcugucugg

SEQ ID NO: 507822 - RNA, 32 nt, Human
ucuggccucuucacacccuucuccccuccuuc

SEQ ID NO: 507823 - RNA, 32 nt, Human
ucuggccucuucucccuucacucccguccagu

SEQ ID NO: 507824 - RNA, 19 nt, Human
ucuggccugagcacaagga

SEQ ID NO: 507825 - RNA, 32 nt, Human
ucuggccugcagcugaccuggcaaccauucag

SEQ ID NO: 507826 - RNA, 32 nt, Human
ucuggccugcaggcccagccuggacaaacaau

SEQ ID NO: 507827 - RNA, 32 nt, Human
ucuggccugccugcaccagcugccugggcccc

SEQ ID NO: 507828 - RNA, 32 nt, Human
ucuggccugccugguccucugcguuguagugc

SEQ ID NO: 507829 - RNA, 32 nt, Human
ucuggccugcucccuuccuccuuggcucccug

SEQ ID NO: 507830 - RNA, 19 nt, Human
ucuggccuggcacacaggg

SEQ ID NO: 507831 - RNA, 32 nt, Human
ucuggccugggagcucucacacccugcacgau

SEQ ID NO: 507832 - RNA, 32 nt, Human
ucuggccugggcaacagagcaagacucggucu

SEQ ID NO: 507833 - RNA, 24 nt, Human
ucuggccugggcgacagagcgaga

SEQ ID NO: 507834 - RNA, 32 nt, Human
ucuggccugggcgacagagcgagacuccgucu

SEQ ID NO: 507835 - RNA, 32 nt, Human
ucuggccugggcgacagagcgagacucugucu

SEQ ID NO: 507836 - RNA, 24 nt, Human
ucuggccugggggccagggcagga

SEQ ID NO: 507837 - RNA, 32 nt, Human
ucuggccugggugacagaguuagacugugucu

SEQ ID NO: 507838 - RNA, 20 nt, Human
ucuggccugggugagcuaga

SEQ ID NO: 507839 - RNA, 32 nt, Human
ucuggccugguggugauucuccagaaacucca

SEQ ID NO: 507840 - RNA, 23 nt, Human
ucuggccuguggcagggccggga

SEQ ID NO: 507841 - RNA, 32 nt, Human
ucuggccuucagcaauccucccaccucaaccu

SEQ ID NO: 507842 - RNA, 32 nt, Human
ucuggccuucccuggggucagugagagaaaug

SEQ ID NO: 507843 - RNA, 32 nt, Human
ucuggccuuuaacuggcuucugaggcuacaga

SEQ ID NO: 507844 - RNA, 32 nt, Human
ucuggccuuuggcuauuuuagcauuucaaagu

SEQ ID NO: 507845 - RNA, 32 nt, Human
ucuggcgagggagggggcaaggugcauccacu

SEQ ID NO: 507846 - RNA, 32 nt, Human
ucuggcgaguuaaguccagcagguucugcgug

SEQ ID NO: 507847 - RNA, 24 nt, Human
ucuggcgcccaggcuggaguacag

SEQ ID NO: 507848 - RNA, 24 nt, Human
ucuggcgcccaggcuggagugcag

SEQ ID NO: 507849 - RNA, 32 nt, Human
ucuggcggccucaucaucucaggaugagcucu

SEQ ID NO: 507850 - RNA, 32 nt, Human
ucuggcggcggcugccgugagcugacugacgu

SEQ ID NO: 507851 - RNA, 21 nt, Human
ucuggcggcugcggggcgcag

SEQ ID NO: 507852 - RNA, 18 nt, Human
ucuggcgggaaggagcag

SEQ ID NO: 507853 - RNA, 18 nt, Human
ucuggcgggauaaugcag

SEQ ID NO: 507854 - RNA, 20 nt, Human
ucuggcggggcuggcagcgg

SEQ ID NO: 507855 - RNA, 19 nt, Human
ucuggcgggggugagcgca

SEQ ID NO: 507856 - RNA, 32 nt, Human
ucuggcggggugcagaacugagcccaggccac

SEQ ID NO: 507857 - RNA, 32 nt, Human
ucuggcgggugagggcggagcugaagugacag

SEQ ID NO: 507858 - RNA, 32 nt, Human
ucuggcguccacauucagacugguuuagagga

SEQ ID NO: 507859 - RNA, 32 nt, Human
ucuggcgucucucaccuccuucauccccuacc

SEQ ID NO: 507860 - RNA, 32 nt, Human
ucuggcgugccuggcgggcacagccauacacg

SEQ ID NO: 507861 - RNA, 32 nt, Human
ucuggcguggagaaggaugagcccacaaaacc

SEQ ID NO: 507862 - RNA, 21 nt, Human
ucuggcuacagcaagaccagc

SEQ ID NO: 507863 - RNA, 32 nt, Human
ucuggcuacugaggcuagagcccacagcagaa

SEQ ID NO: 507864 - RNA, 32 nt, Human
ucuggcuacugcacucuccacugggaccugac

SEQ ID NO: 507865 - RNA, 32 nt, Human
ucuggcuagagccaccauuagacucagacaga

SEQ ID NO: 507866 - RNA, 32 nt, Human
ucuggcuagcuuggcagugauagugaucauga

SEQ ID NO: 507867 - RNA, 32 nt, Human
ucuggcuaggacucccuucuuccuuccuuccc

SEQ ID NO: 507868 - RNA, 32 nt, Human
ucuggcuagugggaaggagggggugaacuaau

SEQ ID NO: 507869 - RNA, 23 nt, Human
ucuggcuauaugguggggcgcgg

SEQ ID NO: 507870 - RNA, 32 nt, Human
ucuggcuaucucuguccugugagaagcuucug

SEQ ID NO: 507871 - RNA, 32 nt, Human
ucuggcucaagaguugaaggugccaucgcagg

SEQ ID NO: 507872 - RNA, 32 nt, Human
ucuggcucaagcaauccucucacuucagccuc

SEQ ID NO: 507873 - RNA, 32 nt, Human
ucuggcucacugcagccucaaacuccugaguc

SEQ ID NO: 507874 - RNA, 32 nt, Human
ucuggcucacugcagccuccgccucccggguu

SEQ ID NO: 507875 - RNA, 32 nt, Human
ucuggcucacugcauccucaacuuccugggcu

SEQ ID NO: 507876 - RNA, 32 nt, Human
ucuggcucagccagaguuguuucucuccacuc

SEQ ID NO: 507877 - RNA, 32 nt, Human
ucuggcucagcugcagcaacaucugugagccc

SEQ ID NO: 507878 - RNA, 32 nt, Human
ucuggcuccagccccgcauccggcgccggccc

SEQ ID NO: 507879 - RNA, 32 nt, Human
ucuggcuccccuaggcuggguguaguggcgcg

SEQ ID NO: 507880 - RNA, 22 nt, Human
ucuggcuccccuuccccuuccc

SEQ ID NO: 507881 - RNA, 32 nt, Human
ucuggcucccuaacaccugaaucccagaugau

SEQ ID NO: 507882 - RNA, 32 nt, Human
ucuggcucgcuucccucccucguuuccagcuc

SEQ ID NO: 507883 - RNA, 32 nt, Human
ucuggcucggcccaaagggacucccccucugc

SEQ ID NO: 507884 - RNA, 32 nt, Human
ucuggcucuaggccauggcgaggcucugccgg

SEQ ID NO: 507885 - RNA, 19 nt, Human
ucuggcucuaggggugcag

SEQ ID NO: 507886 - RNA, 32 nt, Human
ucuggcucucuaauaggacaaaagccagucca

SEQ ID NO: 507887 - RNA, 31 nt, Human
ucuggcucucucaaggagcuggagggugaca

SEQ ID NO: 507888 - RNA, 32 nt, Human
ucuggcucuugccuucccagcaugcccuuuac

SEQ ID NO: 507889 - RNA, 32 nt, Human
ucuggcucuuucacuuccuccccaccugccaa

SEQ ID NO: 507890 - RNA, 21 nt, Human
ucuggcucuuucuccccuccc

SEQ ID NO: 507891 - RNA, 32 nt, Human
ucuggcucuuucuccccucccuccccacccaa

SEQ ID NO: 507892 - RNA, 32 nt, Human
ucuggcugagaggaugggggcagauggggaaa

SEQ ID NO: 507893 - RNA, 32 nt, Human
ucuggcugagguucugagggcaccgagacaga

SEQ ID NO: 507894 - RNA, 32 nt, Human
ucuggcugcaccuggcaugacuguuuguuucu

SEQ ID NO: 507895 - RNA, 32 nt, Human
ucuggcugcacuucucaaugccuggaaggauu

SEQ ID NO: 507896 - RNA, 32 nt, Human
ucuggcugcagagccgucuucucagguugccu

SEQ ID NO: 507897 - RNA, 31 nt, Human
ucuggcugcagcuagaggacaggcaagccag

SEQ ID NO: 507898 - RNA, 32 nt, Human
ucuggcugccauaaggucauguagcuccuggg

SEQ ID NO: 507899 - RNA, 32 nt, Human
ucuggcugccuucugcauuuauuugccuuuuu

SEQ ID NO: 507900 - RNA, 32 nt, Human
ucuggcugcugccuccgcagcucccuccuccu

SEQ ID NO: 507901 - RNA, 32 nt, Human
ucuggcugcugcuccaacucuggcagacacgc

SEQ ID NO: 507902 - RNA, 20 nt, Human
ucuggcugcugguguauaaa

SEQ ID NO: 507903 - RNA, 32 nt, Human
ucuggcuggaaagcagagccuccugggaacac

SEQ ID NO: 507904 - RNA, 22 nt, Human
ucuggcuggcauucugcauguu

SEQ ID NO: 507905 - RNA, 32 nt, Human
ucuggcugggaaaucauuuguuccuaagaaag

SEQ ID NO: 507906 - RNA, 32 nt, Human
ucuggcugggcgggguggcucacaccuguaau

SEQ ID NO: 507907 - RNA, 29 nt, Human
ucuggcuggguguguguggguggggacua

SEQ ID NO: 507908 - RNA, 32 nt, Human
ucuggcuggucaacuauaugaaaccuuguuca

SEQ ID NO: 507909 - RNA, 32 nt, Human
ucuggcugucaccaagcaugacccaggucaac

SEQ ID NO: 507910 - RNA, 32 nt, Human
ucuggcugugcugccaaaccucuccucugcug

SEQ ID NO: 507911 - RNA, 32 nt, Human
ucuggcuguuugagauucucaaaggagcgagc

SEQ ID NO: 507912 - RNA, 32 nt, Human
ucuggcuucccucccagccuuccuugguuugg

SEQ ID NO: 507913 - RNA, 32 nt, Human
ucuggcuuccucugugcauccugugagucugu

SEQ ID NO: 507914 - RNA, 32 nt, Human
ucuggcuugcccaggcuggagugcgguggcua

SEQ ID NO: 507915 - RNA, 32 nt, Human
ucuggcuugccuuccccagcugccucaacucu

SEQ ID NO: 507916 - RNA, 17 nt, Human
ucuggcuuggcugcaaa

SEQ ID NO: 507917 - RNA, 21 nt, Human
ucuggcuuggggagaguggga

SEQ ID NO: 507918 - RNA, 32 nt, Human
ucuggcuuggugguagcauuuaaucuauugca

SEQ ID NO: 507919 - RNA, 32 nt, Human
ucuggcuugguuuuaauuauguucuuaaauuu

SEQ ID NO: 507920 - RNA, 32 nt, Human
ucuggcuuguguuccugggagcuucgcagcgu

SEQ ID NO: 507921 - RNA, 32 nt, Human
ucugggaaaaacaacgaaacuuucccuugugg

SEQ ID NO: 507922 - RNA, 20 nt, Human
ucugggaaaagucucuacuu

SEQ ID NO: 507923 - RNA, 23 nt, Human
ucugggaaaaucuauuccugcca

SEQ ID NO: 507924 - RNA, 25 nt, Human
ucugggaaagcagagguugcaguga

SEQ ID NO: 507925 - RNA, 32 nt, Human
ucugggaacaauauuugggcucagaggguggg

SEQ ID NO: 507926 - RNA, 32 nt, Human
ucugggaacaugccgccuucucuccagccucu

SEQ ID NO: 507927 - RNA, 32 nt, Human
ucugggaacccccguauucuucccccucaccc

SEQ ID NO: 507928 - RNA, 32 nt, Human
ucugggaacugcccgaaaggaggggaaggcgc

SEQ ID NO: 507929 - RNA, 32 nt, Human
ucugggaagagaacuguccacauugcuaaaua

SEQ ID NO: 507930 - RNA, 32 nt, Human
ucugggaagauggaggugcagggcuuggguaa

SEQ ID NO: 507931 - RNA, 20 nt, Human
ucugggaagcaccagggugu

SEQ ID NO: 507932 - RNA, 32 nt, Human
ucugggaagcaggguugguuaguaaagacagg

SEQ ID NO: 507933 - RNA, 24 nt, Human
ucugggaagcggagguugcaguga

SEQ ID NO: 507934 - RNA, 32 nt, Human
ucugggaagcggagguugcagugagcugagau

SEQ ID NO: 507935 - RNA, 32 nt, Human
ucugggaaggaugagaggcagggccugcuugu

SEQ ID NO: 507936 - RNA, 21 nt, Human
ucugggaagggaagggcuacu

SEQ ID NO: 507937 - RNA, 32 nt, Human
ucugggaagggccugacacagccccagcacag

SEQ ID NO: 507938 - RNA, 24 nt, Human
ucugggacacacuucuguccuucc

SEQ ID NO: 507939 - RNA, 21 nt, Human
ucugggaccagguccaggugg

SEQ ID NO: 507940 - RNA, 32 nt, Human
ucugggaccccaggccucacaccagaacuguc

SEQ ID NO: 507941 - RNA, 25 nt, Human
ucugggacccugugccccuccuucc

SEQ ID NO: 507942 - RNA, 20 nt, Human
ucugggacccuuuccuuccu

SEQ ID NO: 507943 - RNA, 32 nt, Human
ucugggaccuugcucccagcugugcugucgcc

SEQ ID NO: 507944 - RNA, 32 nt, Human
ucugggacgaggauggggaaagaggcagcaug

SEQ ID NO: 507945 - RNA, 17 nt, Human
ucugggacucugcugcu

SEQ ID NO: 507946 - RNA, 32 nt, Human
ucugggacugcuuucuuggcagaguugaauag

SEQ ID NO: 507947 - RNA, 32 nt, Human
ucugggacuggguguugaugggggagggcaaa

SEQ ID NO: 507948 - RNA, 32 nt, Human
ucugggacugugagacaaggaagcagggccag

SEQ ID NO: 507949 - RNA, 32 nt, Human
ucugggagacagauaaggaggccaggugcaag

SEQ ID NO: 507950 - RNA, 32 nt, Human
ucugggagacgggagucaagauggcuugguuu

SEQ ID NO: 507951 - RNA, 32 nt, Human
ucugggagagcacagaaaacagucuucuauca

SEQ ID NO: 507952 - RNA, 32 nt, Human
ucugggagaguaauucuaucuccucuucugau

SEQ ID NO: 507953 - RNA, 32 nt, Human
ucugggagauccuguuaaaaugcagguucuga

SEQ ID NO: 507954 - RNA, 32 nt, Human
ucugggagaugagacgggauccuucaugagaa

SEQ ID NO: 507955 - RNA, 32 nt, Human
ucugggagauucugcagggucagcuuuccagg

SEQ ID NO: 507956 - RNA, 32 nt, Human
ucugggagcaagaagaaaaccuaugcauguac

SEQ ID NO: 507957 - RNA, 31 nt, Human
ucugggagccagucugccaugccaggaguca

SEQ ID NO: 507958 - RNA, 32 nt, Human
ucugggagccaugaacugggcucuacauuguu

SEQ ID NO: 507959 - RNA, 32 nt, Human
ucugggagccucuucccuuucucacucaccug

SEQ ID NO: 507960 - RNA, 32 nt, Human
ucugggaggaagcacagcucaccagggccccu

SEQ ID NO: 507961 - RNA, 32 nt, Human
ucugggaggagaggguggagaaagcacuugcu

SEQ ID NO: 507962 - RNA, 32 nt, Human
ucugggaggagcaggaguuuugucuagggaac

SEQ ID NO: 507963 - RNA, 24 nt, Human
ucugggaggaggaccccugggaug

SEQ ID NO: 507964 - RNA, 32 nt, Human
ucugggaggaggcagcucacuggagagccuac

SEQ ID NO: 507965 - RNA, 24 nt, Human
ucugggaggcagagguugcaguga

SEQ ID NO: 507966 - RNA, 32 nt, Human
ucugggaggcagagguugcagugagccgagau

SEQ ID NO: 507967 - RNA, 32 nt, Human
ucugggaggcagagguugcagugagcugagau

SEQ ID NO: 507968 - RNA, 24 nt, Human
ucugggaggcagagguugcuguga

SEQ ID NO: 507969 - RNA, 22 nt, Human
ucugggaggccaaugcaugugg

SEQ ID NO: 507970 - RNA, 32 nt, Human
ucugggaggcccagguggcucugcagcagccu

SEQ ID NO: 507971 - RNA, 32 nt, Human
ucugggaggcccugagacagggauugugcuuc

SEQ ID NO: 507972 - RNA, 24 nt, Human
ucugggaggcggagauugcaguga

SEQ ID NO: 507973 - RNA, 32 nt, Human
ucugggaggcggagauugcagugagccgagau

SEQ ID NO: 507974 - RNA, 32 nt, Human
ucugggaggcggaggcgguggaucacuugagc

SEQ ID NO: 507975 - RNA, 32 nt, Human
ucugggaggcggagguugcagugagccaggau

SEQ ID NO: 507976 - RNA, 32 nt, Human
ucugggaggcggagguugcagugagcugagau

SEQ ID NO: 507977 - RNA, 32 nt, Human
ucugggaggcucggcggcuggagcagcaggca

SEQ ID NO: 507978 - RNA, 32 nt, Human
ucugggagggaaguggagguugcuguacagga

SEQ ID NO: 507979 - RNA, 32 nt, Human
ucugggaggggcucgagagggcugguccuuau

SEQ ID NO: 507980 - RNA, 32 nt, Human
ucugggaggugcugggcugggccacagccagg

SEQ ID NO: 507981 - RNA, 25 nt, Human
ucugggagguggaagcauggggugg

SEQ ID NO: 507982 - RNA, 32 nt, Human
ucugggagguggaaguugcagugagccgagau

SEQ ID NO: 507983 - RNA, 24 nt, Human
ucugggagguggaggcugcaguga

SEQ ID NO: 507984 - RNA, 32 nt, Human
ucugggagguggaggcugcagugagccgugau

SEQ ID NO: 507985 - RNA, 32 nt, Human
ucugggagguggagguugcagugagccaagau

SEQ ID NO: 507986 - RNA, 32 nt, Human
ucugggagguguggcggaccagcugggcccag

SEQ ID NO: 507987 - RNA, 32 nt, Human
ucugggagguugaggcugcagugagcugugau

SEQ ID NO: 507988 - RNA, 25 nt, Human
ucugggagucggaagagcugucugg

SEQ ID NO: 507989 - RNA, 32 nt, Human
ucugggagugacaggacauuuucugcacugcc

SEQ ID NO: 507990 - RNA, 32 nt, Human
ucugggaguguaccuucccuggggaucuuuga

SEQ ID NO: 507991 - RNA, 32 nt, Human
ucugggaguucugauuuccucaguccuuuagg

SEQ ID NO: 507992 - RNA, 22 nt, Human
ucugggauagucuaucuguguu

SEQ ID NO: 507993 - RNA, 32 nt, Human
ucugggaucucagcccugcuccugggagcugg

SEQ ID NO: 507994 - RNA, 32 nt, Human
ucugggaugaaggcuugucagcacuuccaguu

SEQ ID NO: 507995 - RNA, 32 nt, Human
ucugggaugcagcggccagcuucucauguucu

SEQ ID NO: 507996 - RNA, 32 nt, Human
ucugggaugcaucuuaaggagggcuccuaaca

SEQ ID NO: 507997 - RNA, 20 nt, Human
ucugggauggggcuucugcu

SEQ ID NO: 507998 - RNA, 23 nt, Human
ucugggauuacaggcauaagcca

SEQ ID NO: 507999 - RNA, 23 nt, Human
ucugggauuacaggcaugagcca

SEQ ID NO: 508000 - RNA, 23 nt, Human
ucugggauuacaggcgugagcca

SEQ ID NO: 508001 - RNA, 23 nt, Human
ucugggauuacaggcuugagcca

SEQ ID NO: 508002 - RNA, 32 nt, Human
ucugggauuguugggaauucucucccuaauuc

SEQ ID NO: 508003 - RNA, 20 nt, Human
ucugggcaaagccccucaca

SEQ ID NO: 508004 - RNA, 32 nt, Human
ucugggcaaauaguuucucugcucugagcccc

SEQ ID NO: 508005 - RNA, 32 nt, Human
ucugggcaacacagcaagacccugucucuuua

SEQ ID NO: 508006 - RNA, 32 nt, Human
ucugggcaacagagcaagacccugccucaaaa

SEQ ID NO: 508007 - RNA, 31 nt, Human
ucugggcaacagagcaagacccugucuauuu

SEQ ID NO: 508008 - RNA, 32 nt, Human
ucugggcaacagagcaagacucugucucgggg

SEQ ID NO: 508009 - RNA, 28 nt, Human
ucugggcaacagagcaagacucuguguc

SEQ ID NO: 508010 - RNA, 32 nt, Human
ucugggcaacagagugagacccugucucaaaa

SEQ ID NO: 508011 - RNA, 32 nt, Human
ucugggcaacagagugagacccugucucaaua

SEQ ID NO: 508012 - RNA, 30 nt, Human
ucugggcaacagugcaagacccugucacuu

SEQ ID NO: 508013 - RNA, 31 nt, Human
ucugggcaacauagcaaaacccugccucuac

SEQ ID NO: 508014 - RNA, 32 nt, Human
ucugggcaacauagcaagacucugccucuaca

SEQ ID NO: 508015 - RNA, 25 nt, Human
ucugggcaagcggagguugcaguga

SEQ ID NO: 508016 - RNA, 25 nt, Human
ucugggcacaggcauuucugccaag

SEQ ID NO: 508017 - RNA, 32 nt, Human
ucugggcacauggggcccccugggcagugcag

SEQ ID NO: 508018 - RNA, 32 nt, Human
ucugggcaccacugcauucccugauacccaca

SEQ ID NO: 508019 - RNA, 32 nt, Human
ucugggcaccuacagccccagcacagcuucaa

SEQ ID NO: 508020 - RNA, 32 nt, Human
ucugggcacugcacuucagcguggcccaccug

SEQ ID NO: 508021 - RNA, 32 nt, Human
ucugggcacuggcuccgaguuccccuccuggg

SEQ ID NO: 508022 - RNA, 32 nt, Human
ucugggcacuguacauaccugcccccucaucc

SEQ ID NO: 508023 - RNA, 32 nt, Human
ucugggcacuguacuuuagccugggcgacaga

SEQ ID NO: 508024 - RNA, 32 nt, Human
ucugggcagacucccuccccucuuccauaaag

SEQ ID NO: 508025 - RNA, 32 nt, Human
ucugggcagaguuuccccaguuggugguguag

SEQ ID NO: 508026 - RNA, 32 nt, Human
ucugggcagaugggguggagggaguaccccuu

SEQ ID NO: 508027 - RNA, 32 nt, Human
ucugggcagcagcauugcaggaagaggaaagg

SEQ ID NO: 508028 - RNA, 32 nt, Human
ucugggcagcagugggaggcaggccccgugug

SEQ ID NO: 508029 - RNA, 32 nt, Human
ucugggcagccagggaccugcccauucacucc

SEQ ID NO: 508030 - RNA, 32 nt, Human
ucugggcagccugcuuuggccuuuccuuguau

SEQ ID NO: 508031 - RNA, 32 nt, Human
ucugggcaggagagagagugagagacaagaga

SEQ ID NO: 508032 - RNA, 32 nt, Human
ucugggcaggcaggccauggggcauggaggag

SEQ ID NO: 508033 - RNA, 32 nt, Human
ucugggcaggccaguccucaaagcagcuccug

SEQ ID NO: 508034 - RNA, 32 nt, Human
ucugggcagggcccucgggacaucuccacccg

SEQ ID NO: 508035 - RNA, 32 nt, Human
ucugggcagggugagaggucgguggaggaucu

SEQ ID NO: 508036 - RNA, 32 nt, Human
ucugggcagggugugcgggccgggcccggcug

SEQ ID NO: 508037 - RNA, 32 nt, Human
ucugggcaguguuaacagaaucccggaggccg

SEQ ID NO: 508038 - RNA, 32 nt, Human
ucugggcaguuagauagugcucugugccuaag

SEQ ID NO: 508039 - RNA, 31 nt, Human
ucugggcaguuucaccuuugugccuuaaaug

SEQ ID NO: 508040 - RNA, 32 nt, Human
ucugggcauggugcacacgccuguaaucccag

SEQ ID NO: 508041 - RNA, 22 nt, Human
ucugggcauuccagccaccgaa

SEQ ID NO: 508042 - RNA, 32 nt, Human
ucugggcauuggcagugccugccaccacagcc

SEQ ID NO: 508043 - RNA, 32 nt, Human
ucugggcauuuuccuccucugccuacagccag

SEQ ID NO: 508044 - RNA, 32 nt, Human
ucugggccaaccacaccacucaaggccacauc

SEQ ID NO: 508045 - RNA, 32 nt, Human
ucugggccaccaggaucagccaggagggcguu

SEQ ID NO: 508046 - RNA, 32 nt, Human
ucugggccacuucccuccuuccagucaugagu

SEQ ID NO: 508047 - RNA, 22 nt, Human
ucugggccagccuagggcuacu

SEQ ID NO: 508048 - RNA, 32 nt, Human
ucugggccagcuuugaggauaagcugcugaug

SEQ ID NO: 508049 - RNA, 32 nt, Human
ucugggccauauccugccccagcuggggaaag

SEQ ID NO: 508050 - RNA, 32 nt, Human
ucugggcccaacccccauuucccuucaggaga

SEQ ID NO: 508051 - RNA, 32 nt, Human
ucugggcccaggaagaggcuguggcucccacc

SEQ ID NO: 508052 - RNA, 32 nt, Human
ucugggcccaggcugugaguuccaggucugug

SEQ ID NO: 508053 - RNA, 32 nt, Human
ucugggcccaguuucccuaucuguaaauuggg

SEQ ID NO: 508054 - RNA, 32 nt, Human
ucugggccccaucugggauuccugggcccuuu

SEQ ID NO: 508055 - RNA, 25 nt, Human
ucugggccccgucuucuuugccaag

SEQ ID NO: 508056 - RNA, 32 nt, Human
ucugggccccuggcugagaaggggaggauccu

SEQ ID NO: 508057 - RNA, 32 nt, Human
ucugggcccuggacgccgggaaaggccuccgu

SEQ ID NO: 508058 - RNA, 32 nt, Human
ucugggcccuggagcucaagcagugggaggag

SEQ ID NO: 508059 - RNA, 32 nt, Human
ucugggcccugggguagggagggagacucagg

SEQ ID NO: 508060 - RNA, 32 nt, Human
ucugggcccugucgccccuccuuuuggccugg

SEQ ID NO: 508061 - RNA, 19 nt, Human
ucugggccgcagcgggcac

SEQ ID NO: 508062 - RNA, 32 nt, Human
ucugggccggaccccuccuccuuggggagcgu

SEQ ID NO: 508063 - RNA, 32 nt, Human
ucugggccggaggaacuggggccuccaccgac

SEQ ID NO: 508064 - RNA, 32 nt, Human
ucugggccuaugcuuccuucuggaccaccaug

SEQ ID NO: 508065 - RNA, 32 nt, Human
ucugggccuccggggccaggggcaggggaaug

SEQ ID NO: 508066 - RNA, 32 nt, Human
ucugggccucuccugugaugggccagcugcag

SEQ ID NO: 508067 - RNA, 32 nt, Human
ucugggccugcccccucuaucuccugaugggu

SEQ ID NO: 508068 - RNA, 32 nt, Human
ucugggccuggaacuucugccuccuuccuccg

SEQ ID NO: 508069 - RNA, 32 nt, Human
ucugggccugggacccucuccacagaggggau

SEQ ID NO: 508070 - RNA, 32 nt, Human
ucugggccugggaggcgagagcagugcccagg

SEQ ID NO: 508071 - RNA, 23 nt, Human
ucugggccuggugugggggcuac

SEQ ID NO: 508072 - RNA, 32 nt, Human
ucugggccuguaaucccaguuuggauggcacg

SEQ ID NO: 508073 - RNA, 32 nt, Human
ucugggccuuucucccuccgauguuggacugc

SEQ ID NO: 508074 - RNA, 32 nt, Human
ucugggccuuucucuuccucuugguccagggg

SEQ ID NO: 508075 - RNA, 32 nt, Human
ucugggccuuucugaccuacuccugagcuagg

SEQ ID NO: 508076 - RNA, 28 nt, Human
ucugggcgacagagcaagacccucucuc

SEQ ID NO: 508077 - RNA, 32 nt, Human
ucugggcgacagagcaagacucugacucaaaa

SEQ ID NO: 508078 - RNA, 32 nt, Human
ucugggcgccacugcauucccugauacacaca

SEQ ID NO: 508079 - RNA, 18 nt, Human
ucugggcgcggggugcag

SEQ ID NO: 508080 - RNA, 32 nt, Human
ucugggcgcuguucuugcaaggauccucuguu

SEQ ID NO: 508081 - RNA, 32 nt, Human
ucugggcggcgggcaggagcuggcgggggcgc

SEQ ID NO: 508082 - RNA, 32 nt, Human
ucugggcgucagggcgcggggagcugccccgg

SEQ ID NO: 508083 - RNA, 32 nt, Human
ucugggcgucugcaccuggggccuagggaacu

SEQ ID NO: 508084 - RNA, 23 nt, Human
ucugggcuaaccuguuccagcca

SEQ ID NO: 508085 - RNA, 32 nt, Human
ucugggcucacaccagcccugguggccaagcc

SEQ ID NO: 508086 - RNA, 32 nt, Human
ucugggcucacagacagagagggugagggguu

SEQ ID NO: 508087 - RNA, 32 nt, Human
ucugggcucacugcaaccuccgccucccuggu

SEQ ID NO: 508088 - RNA, 32 nt, Human
ucugggcucacugcaaccuccuccuccuggau

SEQ ID NO: 508089 - RNA, 32 nt, Human
ucugggcucacugcaaccucugccucccgggu

SEQ ID NO: 508090 - RNA, 32 nt, Human
ucugggcucacugcaaccuucaccuccagguu

SEQ ID NO: 508091 - RNA, 32 nt, Human
ucugggcucauugcaaccuccgccucccggcu

SEQ ID NO: 508092 - RNA, 32 nt, Human
ucugggcucauugcaaccucugccucccgggu

SEQ ID NO: 508093 - RNA, 26 nt, Human
ucugggcuccagccaucuuuguggaa

SEQ ID NO: 508094 - RNA, 32 nt, Human
ucugggcucccaggaccuguggugaccucaag

SEQ ID NO: 508095 - RNA, 32 nt, Human
ucugggcucuggaaggagccagaugcccccag

SEQ ID NO: 508096 - RNA, 32 nt, Human
ucugggcugccgcaggcacacaggccagagcu

SEQ ID NO: 508097 - RNA, 32 nt, Human
ucugggcugcugucucucuuuccuucaggugg

SEQ ID NO: 508098 - RNA, 32 nt, Human
ucugggcugcuucucacauccugggcuggaug

SEQ ID NO: 508099 - RNA, 20 nt, Human
ucugggcugcuucucugugu

SEQ ID NO: 508100 - RNA, 32 nt, Human
ucugggcuggacugugggaucuguuacagacg

SEQ ID NO: 508101 - RNA, 32 nt, Human
ucugggcugggcagacaccugugggagccgga

SEQ ID NO: 508102 - RNA, 32 nt, Human
ucugggcuguugguggagguuguacuguggua

SEQ ID NO: 508103 - RNA, 32 nt, Human
ucugggcuucuuucugucucuuucugucuuuc

SEQ ID NO: 508104 - RNA, 32 nt, Human
ucugggcuuggucauuuccucccaagcaaacc

SEQ ID NO: 508105 - RNA, 22 nt, Human
ucugggcuuuccccuucuugcc

SEQ ID NO: 508106 - RNA, 32 nt, Human
ucugggcuuugcacuuacuaguugugucaccg

SEQ ID NO: 508107 - RNA, 32 nt, Human
ucuggggaaaaaggagaaaggagaggagaguu

SEQ ID NO: 508108 - RNA, 32 nt, Human
ucuggggaacauaugagaccccugccaucuca

SEQ ID NO: 508109 - RNA, 32 nt, Human
ucuggggaacugcucaccuuuccggagcaggg

SEQ ID NO: 508110 - RNA, 32 nt, Human
ucuggggaauggcaaauauauuaagaagagua

SEQ ID NO: 508111 - RNA, 32 nt, Human
ucuggggacagacaguuauggguucugguccc

SEQ ID NO: 508112 - RNA, 32 nt, Human
ucuggggacaugcggagugggggucuuauccc

SEQ ID NO: 508113 - RNA, 32 nt, Human
ucuggggaccugaagcccuggggcuuacguuc

SEQ ID NO: 508114 - RNA, 32 nt, Human
ucuggggaccuggcacugggaggcagggcucu

SEQ ID NO: 508115 - RNA, 32 nt, Human
ucuggggacuuagcuugaggcucucugaucug

SEQ ID NO: 508116 - RNA, 32 nt, Human
ucuggggagaaauguagacuguccuuagacuc

SEQ ID NO: 508117 - RNA, 32 nt, Human
ucuggggagaggccuggggaggcgugguaugg

SEQ ID NO: 508118 - RNA, 21 nt, Human
ucuggggagccccauccugcu

SEQ ID NO: 508119 - RNA, 32 nt, Human
ucuggggaggaagggccaggagagagaucuag

SEQ ID NO: 508120 - RNA, 25 nt, Human
ucuggggaggaaucuauuccuguca

SEQ ID NO: 508121 - RNA, 32 nt, Human
ucuggggaggcagagaggcagggacuuugggg

SEQ ID NO: 508122 - RNA, 32 nt, Human
ucuggggaggcagaggugacagugagcugaga

SEQ ID NO: 508123 - RNA, 32 nt, Human
ucuggggaggcagcgcuggcggcggggcuggg

SEQ ID NO: 508124 - RNA, 32 nt, Human
ucuggggaggcugaggugugaggugacagcag

SEQ ID NO: 508125 - RNA, 32 nt, Human
ucuggggaggcuggugaaggagggcaggguuc

SEQ ID NO: 508126 - RNA, 32 nt, Human
ucuggggaggcugugggccuggagagggaaaa

SEQ ID NO: 508127 - RNA, 32 nt, Human
ucuggggaggcugugggcuccaccucugcaga

SEQ ID NO: 508128 - RNA, 32 nt, Human
ucuggggaggggaacauccuugccagggaguu

SEQ ID NO: 508129 - RNA, 17 nt, Human
ucuggggagggggugca

SEQ ID NO: 508130 - RNA, 32 nt, Human
ucuggggauacauagauaagccuggcaugacu

SEQ ID NO: 508131 - RNA, 32 nt, Human
ucuggggaugaggaaauuaauaaagguacagu

SEQ ID NO: 508132 - RNA, 32 nt, Human
ucuggggauucuggcaaggugaagagcugguc

SEQ ID NO: 508133 - RNA, 20 nt, Human
ucuggggcaccuauuccucu

SEQ ID NO: 508134 - RNA, 32 nt, Human
ucuggggcagaaggaucaggugaccuucgcaa

SEQ ID NO: 508135 - RNA, 32 nt, Human
ucuggggcagccacaguuuucaugaucacauc

SEQ ID NO: 508136 - RNA, 32 nt, Human
ucuggggcagcucccagccucuucccaugcug

SEQ ID NO: 508137 - RNA, 31 nt, Human
ucuggggcaggaagcuugucacuggaagauc

SEQ ID NO: 508138 - RNA, 24 nt, Human
ucuggggcauuuauucuugacaaa

SEQ ID NO: 508139 - RNA, 22 nt, Human
ucuggggccacucaccagaaga

SEQ ID NO: 508140 - RNA, 32 nt, Human
ucuggggcccaagaggccggugguggaaagag

SEQ ID NO: 508141 - RNA, 32 nt, Human
ucuggggcccaaggcagguugcaggagaucca

SEQ ID NO: 508142 - RNA, 23 nt, Human
ucuggggcccggcgccccccggg

SEQ ID NO: 508143 - RNA, 32 nt, Human
ucuggggccgaggggccagggugugagguuuc

SEQ ID NO: 508144 - RNA, 32 nt, Human
ucuggggccucaauccagucuugauaacagcg

SEQ ID NO: 508145 - RNA, 32 nt, Human
ucuggggcggcugugggcucuggcgcuccucu

SEQ ID NO: 508146 - RNA, 32 nt, Human
ucuggggcuacagcuucugccuccucaccugg

SEQ ID NO: 508147 - RNA, 32 nt, Human
ucuggggcuccuggaccuugggccauaauuuc

SEQ ID NO: 508148 - RNA, 32 nt, Human
ucuggggcugagguugggggaggggugggcgg

SEQ ID NO: 508149 - RNA, 20 nt, Human
ucuggggcuggggggcgggg

SEQ ID NO: 508150 - RNA, 32 nt, Human
ucugggggaacuuugugucucaguccuagaau

SEQ ID NO: 508151 - RNA, 24 nt, Human
ucugggggaucccccagcugaagg

SEQ ID NO: 508152 - RNA, 32 nt, Human
ucugggggcagggagaggcuagaggggcagga

SEQ ID NO: 508153 - RNA, 20 nt, Human
ucugggggcagggggcucag

SEQ ID NO: 508154 - RNA, 22 nt, Human
ucugggggcaucgcggcguccc

SEQ ID NO: 508155 - RNA, 32 nt, Human
ucugggggccaaggcaggagaauugcuugagc

SEQ ID NO: 508156 - RNA, 32 nt, Human
ucugggggccuccucagagccagggcucuuuc

SEQ ID NO: 508157 - RNA, 31 nt, Human
ucugggggccucucugggccuuugugugccg

SEQ ID NO: 508158 - RNA, 32 nt, Human
ucugggggcucugccaguugugagcucugccc

SEQ ID NO: 508159 - RNA, 32 nt, Human
ucugggggcuuccucugcaggaggaaauuagu

SEQ ID NO: 508160 - RNA, 23 nt, Human
ucugggggguggggggugaggga

SEQ ID NO: 508161 - RNA, 32 nt, Human
ucuggggguaccccagggguguuaaggcucag

SEQ ID NO: 508162 - RNA, 32 nt, Human
ucuggggguccccaccacacaaguguuuguaa

SEQ ID NO: 508163 - RNA, 32 nt, Human
ucugggggucugcaggucacugcagaggagcg

SEQ ID NO: 508164 - RNA, 32 nt, Human
ucugggggugcuggaggccaugcucccuccag

SEQ ID NO: 508165 - RNA, 24 nt, Human
ucuggggguugccacacaacaccu

SEQ ID NO: 508166 - RNA, 32 nt, Human
ucugggguaaggguggggguugaaaguuguua

SEQ ID NO: 508167 - RNA, 32 nt, Human
ucugggguauuuuuguuuguucucucuguuuu

SEQ ID NO: 508168 - RNA, 22 nt, Human
ucuggggucacccucuccagca

SEQ ID NO: 508169 - RNA, 32 nt, Human
ucuggggucagagucuguccccgcuccugcag

SEQ ID NO: 508170 - RNA, 32 nt, Human
ucugggguccacccucuuuggcacugucccuc

SEQ ID NO: 508171 - RNA, 32 nt, Human
ucuggggucccaggucauccaggcuggaugug

SEQ ID NO: 508172 - RNA, 32 nt, Human
ucuggggucgugcuuugaggcccguccgguuc

SEQ ID NO: 508173 - RNA, 32 nt, Human
ucuggggucuuacuccuccucaaggagucugu

SEQ ID NO: 508174 - RNA, 32 nt, Human
ucuggggugcagcccugccagcaucaagagga

SEQ ID NO: 508175 - RNA, 32 nt, Human
ucuggggugccuguagucccagcuacucggga

SEQ ID NO: 508176 - RNA, 32 nt, Human
ucugggguggagaagagcagcaagaagaagac

SEQ ID NO: 508177 - RNA, 20 nt, Human
ucugggguggggaggggggu

SEQ ID NO: 508178 - RNA, 18 nt, Human
ucuggggugggggugggg

SEQ ID NO: 508179 - RNA, 32 nt, Human
ucugggguggggugggguggggugggggaggg

SEQ ID NO: 508180 - RNA, 32 nt, Human
ucugggguucaagugauucuccugucucagcc

SEQ ID NO: 508181 - RNA, 32 nt, Human
ucugggguugcuggacuuggugcguggguggu

SEQ ID NO: 508182 - RNA, 32 nt, Human
ucuggguaccagacuacugagcacuuucugac

SEQ ID NO: 508183 - RNA, 32 nt, Human
ucuggguaucucuguguugguguaucugugcc

SEQ ID NO: 508184 - RNA, 32 nt, Human
ucuggguaugggugaguggcagagggguaagg

SEQ ID NO: 508185 - RNA, 32 nt, Human
ucuggguauguuucguuucccauugcuguagc

SEQ ID NO: 508186 - RNA, 32 nt, Human
ucuggguauucauuuuucaucacugagcauug

SEQ ID NO: 508187 - RNA, 31 nt, Human
ucugggucacgcuagaaucagaucugcucuc

SEQ ID NO: 508188 - RNA, 32 nt, Human
ucugggucagaccugagguuggggaaggcgac

SEQ ID NO: 508189 - RNA, 32 nt, Human
ucuggguccagccaccaccaggcugagcagug

SEQ ID NO: 508190 - RNA, 32 nt, Human
ucuggguccagccugcagcccuaggguccagu

SEQ ID NO: 508191 - RNA, 32 nt, Human
ucuggguccauucaagacucugaugacacccc

SEQ ID NO: 508192 - RNA, 32 nt, Human
ucuggguccccagaacucuggagcuacaggcc

SEQ ID NO: 508193 - RNA, 18 nt, Human
ucugggucccccugagca

SEQ ID NO: 508194 - RNA, 32 nt, Human
ucugggucccugcuccccuuugggggugugug

SEQ ID NO: 508195 - RNA, 32 nt, Human
ucugggucccugguugaagcagcagcuuaccu

SEQ ID NO: 508196 - RNA, 32 nt, Human
ucuggguccuuggucccaucuaccuccucuuc

SEQ ID NO: 508197 - RNA, 32 nt, Human
ucugggucuccucuggagcacucugcccuccu

SEQ ID NO: 508198 - RNA, 32 nt, Human
ucugggucucugaaagaagaugaauuuggcug

SEQ ID NO: 508199 - RNA, 32 nt, Human
ucugggucuggccccacuccccaaaacugacc

SEQ ID NO: 508200 - RNA, 26 nt, Human
ucugggucuugcuuuucuuucuguua

SEQ ID NO: 508201 - RNA, 32 nt, Human
ucugggugaagccagagguggcucugggacuu

SEQ ID NO: 508202 - RNA, 19 nt, Human
ucugggugacagagcaaga

SEQ ID NO: 508203 - RNA, 20 nt, Human
ucugggugacccugcagaug

SEQ ID NO: 508204 - RNA, 23 nt, Human
ucugggugaccucaaacaucuga

SEQ ID NO: 508205 - RNA, 32 nt, Human
ucugggugaccucaaacaucugaaaagaaaga

SEQ ID NO: 508206 - RNA, 32 nt, Human
ucugggugcauguccacaguacgguggcuaaa

SEQ ID NO: 508207 - RNA, 22 nt, Human
ucugggugccucuuugcugcca

SEQ ID NO: 508208 - RNA, 19 nt, Human
ucugggugccugcugaaca

SEQ ID NO: 508209 - RNA, 19 nt, Human
ucugggugcgaguuccucc

SEQ ID NO: 508210 - RNA, 32 nt, Human
ucugggugggagaaccagguggugccugccga

SEQ ID NO: 508211 - RNA, 32 nt, Human
ucugggugggggccugggcgcccagccagcac

SEQ ID NO: 508212 - RNA, 32 nt, Human
ucugggugguaacugccagccuuggaggaucg

SEQ ID NO: 508213 - RNA, 21 nt, Human
ucugggugucucccacauguc

SEQ ID NO: 508214 - RNA, 18 nt, Human
ucugggugucuccugcuu

SEQ ID NO: 508215 - RNA, 22 nt, Human
ucugggugucucuugagcccca

SEQ ID NO: 508216 - RNA, 32 nt, Human
ucugggugucuggaaugggggagcuguuaagu

SEQ ID NO: 508217 - RNA, 32 nt, Human
ucugggugugagccacugucaugccuggccuc

SEQ ID NO: 508218 - RNA, 32 nt, Human
ucugggugugagucugucuaggaacaggaggg

SEQ ID NO: 508219 - RNA, 22 nt, Human
ucuggguguuccaauucuucca

SEQ ID NO: 508220 - RNA, 24 nt, Human
ucuggguguuccaauucuuccaag

SEQ ID NO: 508221 - RNA, 22 nt, Human
ucuggguguuuguucccugcca

SEQ ID NO: 508222 - RNA, 32 nt, Human
ucuggguuaacgcuuuucagggccaagcacua

SEQ ID NO: 508223 - RNA, 32 nt, Human
ucuggguuaugucacuuuccuuagcuccccau

SEQ ID NO: 508224 - RNA, 32 nt, Human
ucuggguucaagcaauucucugccucagccuc

SEQ ID NO: 508225 - RNA, 32 nt, Human
ucuggguucacugcaaccuccgccucuugggu

SEQ ID NO: 508226 - RNA, 32 nt, Human
ucuggguucacugcaaccucugccuccagguu

SEQ ID NO: 508227 - RNA, 32 nt, Human
ucuggguucacugcaaccucugccuccugggc

SEQ ID NO: 508228 - RNA, 32 nt, Human
ucuggguuccagggcugcugucuccuggcuaa

SEQ ID NO: 508229 - RNA, 32 nt, Human
ucuggguuccagggcugcuuucuccuggcuaa

SEQ ID NO: 508230 - RNA, 32 nt, Human
ucuggguuccuaggaauguccagccucggaga

SEQ ID NO: 508231 - RNA, 32 nt, Human
ucuggguucucccagccccuuguccuuccuuc

SEQ ID NO: 508232 - RNA, 22 nt, Human
ucuggguucucugugcugggca

SEQ ID NO: 508233 - RNA, 32 nt, Human
ucuggguucugaagucugguauucugguauuc

SEQ ID NO: 508234 - RNA, 32 nt, Human
ucuggguugaagggcaguguucccuggggcuu

SEQ ID NO: 508235 - RNA, 23 nt, Human
ucuggguugcauugagggcuucu

SEQ ID NO: 508236 - RNA, 21 nt, Human
ucuggguuggagcagucucuc

SEQ ID NO: 508237 - RNA, 20 nt, Human
ucuggguuggcgggcuggca

SEQ ID NO: 508238 - RNA, 21 nt, Human
ucuggguuguuuuuucugcca

SEQ ID NO: 508239 - RNA, 26 nt, Human
ucuggguuuaaaucccaguucuguca

SEQ ID NO: 508240 - RNA, 32 nt, Human
ucuggguuuggaaggugugcuugcugugguac

SEQ ID NO: 508241 - RNA, 32 nt, Human
ucuggguuuggguuuauguucuugccuuuucu

SEQ ID NO: 508242 - RNA, 22 nt, Human
ucugguaaaucucuuugucaaa

SEQ ID NO: 508243 - RNA, 32 nt, Human
ucugguaacauuuguuaguaggauuugaguua

SEQ ID NO: 508244 - RNA, 32 nt, Human
ucugguaaccauccuucgucuaucuccacgag

SEQ ID NO: 508245 - RNA, 32 nt, Human
ucugguaacugaacucccucuggaggcaggcu

SEQ ID NO: 508246 - RNA, 32 nt, Human
ucugguaagguuuuuaugcucuguaaaacaaa

SEQ ID NO: 508247 - RNA, 32 nt, Human
ucugguacccaccauucucuucucuacuucuc

SEQ ID NO: 508248 - RNA, 19 nt, Human
ucugguaccucucuuuccc

SEQ ID NO: 508249 - RNA, 32 nt, Human
ucugguaccugcagagacuguccagccauaaa

SEQ ID NO: 508250 - RNA, 32 nt, Human
ucugguacucaggcuggagugcggugguguga

SEQ ID NO: 508251 - RNA, 21 nt, Human
ucugguacugugcaaagggaa

SEQ ID NO: 508252 - RNA, 20 nt, Human
ucugguagccaggguucccu

SEQ ID NO: 508253 - RNA, 30 nt, Human
ucugguagccucucugcuuccuguaauucu

SEQ ID NO: 508254 - RNA, 20 nt, Human
ucugguaggacagggcucag

SEQ ID NO: 508255 - RNA, 19 nt, Human
ucugguaggaugggcacag

SEQ ID NO: 508256 - RNA, 32 nt, Human
ucugguaggucgcccagacaauggagacaucc

SEQ ID NO: 508257 - RNA, 18 nt, Human
ucugguagguugcagcag

SEQ ID NO: 508258 - RNA, 32 nt, Human
ucugguagucauaggcaggauugagugacggu

SEQ ID NO: 508259 - RNA, 32 nt, Human
ucugguagugccugaucacagcccaugauguc

SEQ ID NO: 508260 - RNA, 21 nt, Human
ucugguaugcuuguuccugcu

SEQ ID NO: 508261 - RNA, 22 nt, Human
ucuggucacacacagguguuga

SEQ ID NO: 508262 - RNA, 23 nt, Human
ucuggucaccucugggcgccugg

SEQ ID NO: 508263 - RNA, 22 nt, Human
ucuggucacucccuggcccuga

SEQ ID NO: 508264 - RNA, 32 nt, Human
ucuggucacuccucacuguccccucagcuccc

SEQ ID NO: 508265 - RNA, 22 nt, Human
ucuggucacuucuagcaucuga

SEQ ID NO: 508266 - RNA, 32 nt, Human
ucuggucagcuguguaugaucaguuaucuacc

SEQ ID NO: 508267 - RNA, 22 nt, Human
ucuggucaggaugggggugcag

SEQ ID NO: 508268 - RNA, 32 nt, Human
ucuggucaggcagaaggagaaggaaauguaaa

SEQ ID NO: 508269 - RNA, 32 nt, Human
ucuggucaggcgagguucacugugcauauggc

SEQ ID NO: 508270 - RNA, 32 nt, Human
ucuggucauagagagagaaggaccuuugacuu

SEQ ID NO: 508271 - RNA, 32 nt, Human
ucuggucauaggagucauguccagaggccuag

SEQ ID NO: 508272 - RNA, 32 nt, Human
ucuggucaucccuccccacccucucuccaagg

SEQ ID NO: 508273 - RNA, 32 nt, Human
ucuggucauguggaggugggguuuauugggau

SEQ ID NO: 508274 - RNA, 32 nt, Human
ucuggucauugcugggggugaccccagaugag

SEQ ID NO: 508275 - RNA, 26 nt, Human
ucugguccaccaaccagacccuugga

SEQ ID NO: 508276 - RNA, 32 nt, Human
ucugguccauagagagcaaaacgcugugcugc

SEQ ID NO: 508277 - RNA, 22 nt, Human
ucugguccauagugcccuugga

SEQ ID NO: 508278 - RNA, 21 nt, Human
ucuggucccaaaacccuugag

SEQ ID NO: 508279 - RNA, 32 nt, Human
ucuggucccaauuaucugccccggcuagcccc

SEQ ID NO: 508280 - RNA, 32 nt, Human
ucugguccccauccgcggcugguccggcccug

SEQ ID NO: 508281 - RNA, 23 nt, Human
ucuggucccuacuguucuugcca

SEQ ID NO: 508282 - RNA, 32 nt, Human
ucuggucccuggcaggacagagcgggaugcca

SEQ ID NO: 508283 - RNA, 18 nt, Human
ucuggucccuuuccuucc

SEQ ID NO: 508284 - RNA, 32 nt, Human
ucuggucccuuuccuuugcucagcccccucug

SEQ ID NO: 508285 - RNA, 23 nt, Human
ucugguccucccauccacugcca

SEQ ID NO: 508286 - RNA, 32 nt, Human
ucugguccugcagauguguagcacuuuguagu

SEQ ID NO: 508287 - RNA, 22 nt, Human
ucugguccuggguggagcagga

SEQ ID NO: 508288 - RNA, 32 nt, Human
ucugguccuguccuccccauccuguacugcuu

SEQ ID NO: 508289 - RNA, 32 nt, Human
ucugguccuguucaucucucaggcucugagac

SEQ ID NO: 508290 - RNA, 23 nt, Human
ucuggucgccucauuuccugcua

SEQ ID NO: 508291 - RNA, 32 nt, Human
ucuggucuaaagugccugggcuugguggccau

SEQ ID NO: 508292 - RNA, 32 nt, Human
ucuggucucacugcaaccucuaccucccaggu

SEQ ID NO: 508293 - RNA, 32 nt, Human
ucuggucucagaaauggaccagcuggaugcag

SEQ ID NO: 508294 - RNA, 32 nt, Human
ucuggucuccucagccuccucaucugggggag

SEQ ID NO: 508295 - RNA, 32 nt, Human
ucuggucuccuccagcuccuucuuucugcaac

SEQ ID NO: 508296 - RNA, 32 nt, Human
ucuggucuccuugccuagugcuuuucaaaacu

SEQ ID NO: 508297 - RNA, 32 nt, Human
ucuggucucucuauuaccacugaagauagaag

SEQ ID NO: 508298 - RNA, 32 nt, Human
ucuggucucuucuucuuucugguuguuuuugu

SEQ ID NO: 508299 - RNA, 32 nt, Human
ucuggucuguccucccuguugauuggucuggc

SEQ ID NO: 508300 - RNA, 32 nt, Human
ucuggucugucuggggguucccauucccacac

SEQ ID NO: 508301 - RNA, 32 nt, Human
ucuggucugugucugugugugccuguaagugu

SEQ ID NO: 508302 - RNA, 32 nt, Human
ucuggucuguucugaaacugugccaacugaaa

SEQ ID NO: 508303 - RNA, 31 nt, Human
ucuggucuugagaccuuuucacuguggucug

SEQ ID NO: 508304 - RNA, 32 nt, Human
ucuggucuuuaaggaacacaacuuuaaaacug

SEQ ID NO: 508305 - RNA, 21 nt, Human
ucuggucuuuaaugcaugcua

SEQ ID NO: 508306 - RNA, 32 nt, Human
ucuggucuuuccagucacaucuggaaauaaag

SEQ ID NO: 508307 - RNA, 32 nt, Human
ucuggucuuugcccugcugugugugccucugu

SEQ ID NO: 508308 - RNA, 32 nt, Human
ucuggugacaccagccuuucucccaggccagg

SEQ ID NO: 508309 - RNA, 21 nt, Human
ucuggugaccaggcugcuuca

SEQ ID NO: 508310 - RNA, 32 nt, Human
ucuggugacuccaggccugaaugaccuagugu

SEQ ID NO: 508311 - RNA, 21 nt, Human
ucuggugacucgugccugcuu

SEQ ID NO: 508312 - RNA, 32 nt, Human
ucuggugagggcgacugggugggugaagcacc

SEQ ID NO: 508313 - RNA, 32 nt, Human
ucuggugaggguggcugggauauaccugaccc

SEQ ID NO: 508314 - RNA, 32 nt, Human
ucuggugaucacugaaaucuugccuugggucc

SEQ ID NO: 508315 - RNA, 32 nt, Human
ucuggugcaacugcugcaggaugccuguagua

SEQ ID NO: 508316 - RNA, 32 nt, Human
ucuggugcaccagcugcuggaagcgcugcuuu

SEQ ID NO: 508317 - RNA, 31 nt, Human
ucuggugcacuucuccgugucugaguugccu

SEQ ID NO: 508318 - RNA, 32 nt, Human
ucuggugccaguggauuugcacuugcucgugu

SEQ ID NO: 508319 - RNA, 32 nt, Human
ucuggugccuccucaaacccagucucagacac

SEQ ID NO: 508320 - RNA, 23 nt, Human
ucuggugcgagaagggggugcag

SEQ ID NO: 508321 - RNA, 32 nt, Human
ucuggugcguucucccuguggccccaagaggu

SEQ ID NO: 508322 - RNA, 32 nt, Human
ucuggugcugauguucuugugggaagagggag

SEQ ID NO: 508323 - RNA, 32 nt, Human
ucuggugcuucuucugugcugugguuuacccc

SEQ ID NO: 508324 - RNA, 32 nt, Human
ucugguggaagaugaggcucagugugauugga

SEQ ID NO: 508325 - RNA, 32 nt, Human
ucugguggagagaagugagaauaggcagcccc

SEQ ID NO: 508326 - RNA, 32 nt, Human
ucugguggagcggacccacuccccucacauuc

SEQ ID NO: 508327 - RNA, 32 nt, Human
ucugguggagggaagagagaagagguaggaag

SEQ ID NO: 508328 - RNA, 19 nt, Human
ucugguggaggggcggcgg

SEQ ID NO: 508329 - RNA, 32 nt, Human
ucugguggccagcuugccaguaccugagccgg

SEQ ID NO: 508330 - RNA, 21 nt, Human
ucugguggcccccagucccca

SEQ ID NO: 508331 - RNA, 21 nt, Human
ucugguggccgagcccugagg

SEQ ID NO: 508332 - RNA, 18 nt, Human
ucugguggccuccugcuu

SEQ ID NO: 508333 - RNA, 18 nt, Human
ucugguggcgggcagcag

SEQ ID NO: 508334 - RNA, 32 nt, Human
ucugguggcucaugccuguaaucccagcacuu

SEQ ID NO: 508335 - RNA, 32 nt, Human
ucuggugggagagggagacagauggaggcagu

SEQ ID NO: 508336 - RNA, 20 nt, Human
ucuggugggaggacggugca

SEQ ID NO: 508337 - RNA, 20 nt, Human
ucuggugggaggaggccgca

SEQ ID NO: 508338 - RNA, 32 nt, Human
ucuggugggccucagaaauugucucuuuucug

SEQ ID NO: 508339 - RNA, 18 nt, Human
ucuggugggcggggccag

SEQ ID NO: 508340 - RNA, 32 nt, Human
ucugguggggcugagcgcucugccgcgggggc

SEQ ID NO: 508341 - RNA, 32 nt, Human
ucugguggucagcucagggcuuccucugccca

SEQ ID NO: 508342 - RNA, 32 nt, Human
ucugguggugggaacccagaagucagaacaca

SEQ ID NO: 508343 - RNA, 32 nt, Human
ucugguggugggcaccuguaaucccagcuacu

SEQ ID NO: 508344 - RNA, 32 nt, Human
ucugguguagggggugcuccugccuuaggucu

SEQ ID NO: 508345 - RNA, 32 nt, Human
ucugguguccagcauggaugaaaccuuugagu

SEQ ID NO: 508346 - RNA, 24 nt, Human
ucugguguccaggcuggagugcag

SEQ ID NO: 508347 - RNA, 32 nt, Human
ucugguguccccucaccuucuaguguccccuc

SEQ ID NO: 508348 - RNA, 32 nt, Human
ucugguguccccucaucaccuucugauguccc

SEQ ID NO: 508349 - RNA, 32 nt, Human
ucuggugucugaccacgacugcagccucaugg

SEQ ID NO: 508350 - RNA, 32 nt, Human
ucuggugucugcuuucuccauuguaaaccaca

SEQ ID NO: 508351 - RNA, 19 nt, Human
ucuggugugauuucucugu

SEQ ID NO: 508352 - RNA, 31 nt, Human
ucuggugugggaagaagauggggaguuacuu

SEQ ID NO: 508353 - RNA, 32 nt, Human
ucuggugugguggcucacaccuguaauccuaa

SEQ ID NO: 508354 - RNA, 32 nt, Human
ucuggugugugcucccgccuccuggguauaca

SEQ ID NO: 508355 - RNA, 32 nt, Human
ucugguguucuugcuaacuuugcccuucacug

SEQ ID NO: 508356 - RNA, 31 nt, Human
ucugguuaagugucccauggaaggggaaagc

SEQ ID NO: 508357 - RNA, 32 nt, Human
ucugguuaccauuuucuuuuugucauuggcuu

SEQ ID NO: 508358 - RNA, 32 nt, Human
ucugguuacuguucuaaggcugugccaucagc

SEQ ID NO: 508359 - RNA, 32 nt, Human
ucugguuaugcuguuuuaaaggugacuuguca

SEQ ID NO: 508360 - RNA, 32 nt, Human
ucugguuauugggcacuaagggccagacugga

SEQ ID NO: 508361 - RNA, 32 nt, Human
ucugguucaccauucagcaccagcugaagaua

SEQ ID NO: 508362 - RNA, 32 nt, Human
ucugguucagcccuggauaugccuccacugug

SEQ ID NO: 508363 - RNA, 32 nt, Human
ucugguuccauggaugauggcgguugagcaga

SEQ ID NO: 508364 - RNA, 22 nt, Human
ucugguuccugcuggauccuga

SEQ ID NO: 508365 - RNA, 32 nt, Human
ucugguuccuuucaucucucuaccuccacccu

SEQ ID NO: 508366 - RNA, 32 nt, Human
ucugguuccuuuggagagggcuggguuaccug

SEQ ID NO: 508367 - RNA, 32 nt, Human
ucugguucgcagcuccagaggauugcguuccu

SEQ ID NO: 508368 - RNA, 32 nt, Human
ucugguucggagaagcagcggcuggcgugggc

SEQ ID NO: 508369 - RNA, 32 nt, Human
ucugguucuccgucagcaacaggcuggcauaa

SEQ ID NO: 508370 - RNA, 32 nt, Human
ucugguucugguugaagaguccugucaaggcc

SEQ ID NO: 508371 - RNA, 32 nt, Human
ucugguucuuggaucguguccucucccccucg

SEQ ID NO: 508372 - RNA, 32 nt, Human
ucugguugccaucuuuuucuguggaacuccuc

SEQ ID NO: 508373 - RNA, 32 nt, Human
ucugguugcccaggcuggagugcaguggugcc

SEQ ID NO: 508374 - RNA, 32 nt, Human
ucugguugcccaggcugggguacaguggugga

SEQ ID NO: 508375 - RNA, 32 nt, Human
ucugguugccucccccgccuccagucauggua

SEQ ID NO: 508376 - RNA, 31 nt, Human
ucugguugccucucuaugcuauuguguucag

SEQ ID NO: 508377 - RNA, 32 nt, Human
ucugguuggaaaccaagagaauggcugauguc

SEQ ID NO: 508378 - RNA, 32 nt, Human
ucugguuguuaauauuuguauuguaaguguaa

SEQ ID NO: 508379 - RNA, 32 nt, Human
ucugguuuagaauuauaaauuguuaaaaccuu

SEQ ID NO: 508380 - RNA, 32 nt, Human
ucugguuuauguuugaccccucccucugagcu

SEQ ID NO: 508381 - RNA, 25 nt, Human
ucugguuucagaaacaucagagagg

SEQ ID NO: 508382 - RNA, 32 nt, Human
ucugguuucgucugcuugguucaucugugugc

SEQ ID NO: 508383 - RNA, 32 nt, Human
ucugguuucuaggagcuugaaauuccuggaaa

SEQ ID NO: 508384 - RNA, 32 nt, Human
ucugguuugagaucgugcuggggaggaacaug

SEQ ID NO: 508385 - RNA, 32 nt, Human
ucugguuugcccacuucaucucauucucucuc

SEQ ID NO: 508386 - RNA, 32 nt, Human
ucugguuugggaaauaccaaagaggcuuugau

SEQ ID NO: 508387 - RNA, 32 nt, Human
ucugguuuuccuaggcagaguguuuguguccc

SEQ ID NO: 508388 - RNA, 32 nt, Human
ucugguuuuccucugcuccucugccuguccuc

SEQ ID NO: 508389 - RNA, 22 nt, Human
ucugguuuucucauucaugcca

SEQ ID NO: 508390 - RNA, 32 nt, Human
ucugguuuucugacaguucccagugagagaaa

SEQ ID NO: 508391 - RNA, 32 nt, Human
ucugguuuuggcccucuugcagaaagaagcau

SEQ ID NO: 508392 - RNA, 32 nt, Human
ucugguuuuuaucugguacccacacacacaua

SEQ ID NO: 508393 - RNA, 32 nt, Human
ucugguuuuuauuggauuuuuguauuuuaaau

SEQ ID NO: 508394 - RNA, 32 nt, Human
ucuguaaaaaggcagaccagggauguaauguu

SEQ ID NO: 508395 - RNA, 32 nt, Human
ucuguaaaaauggcaagccacaugcuuuucuc

SEQ ID NO: 508396 - RNA, 32 nt, Human
ucuguaaaacaagggggugggccaggcgaugu

SEQ ID NO: 508397 - RNA, 32 nt, Human
ucuguaaaaugagagcauuggauuagaggcuc

SEQ ID NO: 508398 - RNA, 32 nt, Human
ucuguaaacauacaaccuaucaagauuauaug

SEQ ID NO: 508399 - RNA, 32 nt, Human
ucuguaaacauguugcacaagcuuagccuuuu

SEQ ID NO: 508400 - RNA, 32 nt, Human
ucuguaaagauugccuacagcgcuccuuuaag

SEQ ID NO: 508401 - RNA, 32 nt, Human
ucuguaaagcuaggcagaugagcccagaagaa

SEQ ID NO: 508402 - RNA, 32 nt, Human
ucuguaaaggaggcaggagugucagagugacg

SEQ ID NO: 508403 - RNA, 32 nt, Human
ucuguaaaguggggagaauuuccaucaagauu

SEQ ID NO: 508404 - RNA, 32 nt, Human
ucuguaaauuuggacuguuuuccuucaaccac

SEQ ID NO: 508405 - RNA, 22 nt, Human
ucuguaacaauuguauaucuua

SEQ ID NO: 508406 - RNA, 23 nt, Human
ucuguaacagaggacuauccuca

SEQ ID NO: 508407 - RNA, 32 nt, Human
ucuguaaccccagcacuuugggaggcugagau

SEQ ID NO: 508408 - RNA, 32 nt, Human
ucuguaacucuccaucugugauuugcaacagg

SEQ ID NO: 508409 - RNA, 32 nt, Human
ucuguaacuguaucuuaaucuacaaugagcuu

SEQ ID NO: 508410 - RNA, 23 nt, Human
ucuguaagaaaaacaguuucuca

SEQ ID NO: 508411 - RNA, 32 nt, Human
ucuguaagaacucugucuaagccggucagaag

SEQ ID NO: 508412 - RNA, 21 nt, Human
ucuguaagaaggcccuggugg

SEQ ID NO: 508413 - RNA, 32 nt, Human
ucuguaagaggagccagcuggauaagaugauu

SEQ ID NO: 508414 - RNA, 32 nt, Human
ucuguaagcugcagugucugugauucugugug

SEQ ID NO: 508415 - RNA, 32 nt, Human
ucuguaaguaaguuugguuucaucaugaggga

SEQ ID NO: 508416 - RNA, 32 nt, Human
ucuguaagucacucugccccaggaggccagag

SEQ ID NO: 508417 - RNA, 32 nt, Human
ucuguaagugaagauugucguauuccaagucu

SEQ ID NO: 508418 - RNA, 22 nt, Human
ucuguaauaaaauucuacuuca

SEQ ID NO: 508419 - RNA, 19 nt, Human
ucuguaaucccagcacuuu

SEQ ID NO: 508420 - RNA, 32 nt, Human
ucuguaaucccagcuacccgggaggcugaggc

SEQ ID NO: 508421 - RNA, 22 nt, Human
ucuguaaucccagcuacucagg

SEQ ID NO: 508422 - RNA, 32 nt, Human
ucuguaaucccagcuacucaggaggcugaagc

SEQ ID NO: 508423 - RNA, 32 nt, Human
ucuguaaucccagcuacucaggaggcugaggc

SEQ ID NO: 508424 - RNA, 32 nt, Human
ucuguaaucccagcuacuccagaggcugaggc

SEQ ID NO: 508425 - RNA, 32 nt, Human
ucuguaaucccagcuacucgggaggcugaagc

SEQ ID NO: 508426 - RNA, 32 nt, Human
ucuguaaucccagcuacucgggaggcugagga

SEQ ID NO: 508427 - RNA, 32 nt, Human
ucuguaaucccagcuacucgggaggcugaggc

SEQ ID NO: 508428 - RNA, 32 nt, Human
ucuguaaucccagcuacucuggagacugaggu

SEQ ID NO: 508429 - RNA, 32 nt, Human
ucuguaaucccagcuacuggggaagcugaggc

SEQ ID NO: 508430 - RNA, 32 nt, Human
ucuguaaucccagcuacuggggaggcugaggc

SEQ ID NO: 508431 - RNA, 22 nt, Human
ucuguaaucccagcuacuuggg

SEQ ID NO: 508432 - RNA, 32 nt, Human
ucuguaaucccagcuacuugggagacugaggc

SEQ ID NO: 508433 - RNA, 32 nt, Human
ucuguaaucccagcuacuugggaggcugaggc

SEQ ID NO: 508434 - RNA, 32 nt, Human
ucuguaaucccagcuauucaggaggcugaggc

SEQ ID NO: 508435 - RNA, 19 nt, Human
ucuguaauccuagcacuuu

SEQ ID NO: 508436 - RNA, 32 nt, Human
ucuguaaucucagcuucucaggaggcugagac

SEQ ID NO: 508437 - RNA, 32 nt, Human
ucuguaaugaaggagguucaagaggcugugcu

SEQ ID NO: 508438 - RNA, 32 nt, Human
ucuguaauggcagauaggaggagaugaaaagu

SEQ ID NO: 508439 - RNA, 32 nt, Human
ucuguaauguccccuucuuucuaggcucuguu

SEQ ID NO: 508440 - RNA, 32 nt, Human
ucuguaauuacauauuugacucuuucaaagaa

SEQ ID NO: 508441 - RNA, 32 nt, Human
ucuguaauuauccauuuuccauucaugcauuc

SEQ ID NO: 508442 - RNA, 32 nt, Human
ucuguaauuccagcuacuugggaggcugaggc

SEQ ID NO: 508443 - RNA, 27 nt, Human
ucuguaauuguuagaauuuauuuuuua

SEQ ID NO: 508444 - RNA, 32 nt, Human
ucuguaauuuaaaauauuuugcugcuaguuaa

SEQ ID NO: 508445 - RNA, 32 nt, Human
ucuguacaaucuccuguuucuuugccauagug

SEQ ID NO: 508446 - RNA, 32 nt, Human
ucuguacacuucccugacaccuucccaggugu

SEQ ID NO: 508447 - RNA, 32 nt, Human
ucuguacagacagcugagucacccagucuacu

SEQ ID NO: 508448 - RNA, 31 nt, Human
ucuguacaggcccagccucuaccucacagcg

SEQ ID NO: 508449 - RNA, 32 nt, Human
ucuguacaguuccauacaacaaggaggugaaa

SEQ ID NO: 508450 - RNA, 24 nt, Human
ucuguacauucauuucuccuuccu

SEQ ID NO: 508451 - RNA, 32 nt, Human
ucuguaccaggucacccagcuaugcugcaaag

SEQ ID NO: 508452 - RNA, 32 nt, Human
ucuguacccacacccacccacucacuuguaag

SEQ ID NO: 508453 - RNA, 22 nt, Human
ucuguaccccgccugucccucc

SEQ ID NO: 508454 - RNA, 32 nt, Human
ucuguaccucaaggcacugaagcuggaggacu

SEQ ID NO: 508455 - RNA, 22 nt, Human
ucuguaccucugccuccuuucc

SEQ ID NO: 508456 - RNA, 32 nt, Human
ucuguaccugcagcucugcucucgggauggug

SEQ ID NO: 508457 - RNA, 32 nt, Human
ucuguaccuugcagccaugaccaguucuggcc

SEQ ID NO: 508458 - RNA, 32 nt, Human
ucuguaccuuggaacagucuucccugacaagc

SEQ ID NO: 508459 - RNA, 32 nt, Human
ucuguacuaaaaacacaaaauuagcugggugu

SEQ ID NO: 508460 - RNA, 21 nt, Human
ucuguacuaaaaauacaaaau

SEQ ID NO: 508461 - RNA, 32 nt, Human
ucuguacuaaaaauacaaaauuagcuggguuu

SEQ ID NO: 508462 - RNA, 32 nt, Human
ucuguacuacaccagaggguuggggcugugga

SEQ ID NO: 508463 - RNA, 22 nt, Human
ucuguacuccccucauccuccu

SEQ ID NO: 508464 - RNA, 32 nt, Human
ucuguacuccuuggauuugcauuuuuguauuu

SEQ ID NO: 508465 - RNA, 32 nt, Human
ucuguacucgccguccuccuguccucgcggug

SEQ ID NO: 508466 - RNA, 32 nt, Human
ucuguacucuagucuccugccuccucaguucu

SEQ ID NO: 508467 - RNA, 32 nt, Human
ucuguacugcucauauuacacuccauccucuc

SEQ ID NO: 508468 - RNA, 32 nt, Human
ucuguacuggaaaggcuguggccaugucugcu

SEQ ID NO: 508469 - RNA, 32 nt, Human
ucuguacugugccugccucaacuuccccuaac

SEQ ID NO: 508470 - RNA, 32 nt, Human
ucuguacuguguguagugcuguuuacauagau

SEQ ID NO: 508471 - RNA, 32 nt, Human
ucuguacuucuauuuaaccaguuuucaaaaua

SEQ ID NO: 508472 - RNA, 32 nt, Human
ucuguagaaaugugcaguuugcagauagaaca

SEQ ID NO: 508473 - RNA, 32 nt, Human
ucuguagaaccagcugcacggcagcuguccac

SEQ ID NO: 508474 - RNA, 32 nt, Human
ucuguagaaguaugaguucuuccuuuaauuau

SEQ ID NO: 508475 - RNA, 21 nt, Human
ucuguagaagucugucuuucu

SEQ ID NO: 508476 - RNA, 32 nt, Human
ucuguagaagugaauacugcaacacugucuca

SEQ ID NO: 508477 - RNA, 32 nt, Human
ucuguagacucugccuggguuuuacuggguca

SEQ ID NO: 508478 - RNA, 32 nt, Human
ucuguagagacaggguuucaccauguuggcca

SEQ ID NO: 508479 - RNA, 32 nt, Human
ucuguagagagggagucaggaugcugucuucc

SEQ ID NO: 508480 - RNA, 32 nt, Human
ucuguagaugaugcaguguucuaucauaagua

SEQ ID NO: 508481 - RNA, 32 nt, Human
ucuguagauuuucaaagauaacugacagcugc

SEQ ID NO: 508482 - RNA, 21 nt, Human
ucuguagcaauguuagccuca

SEQ ID NO: 508483 - RNA, 32 nt, Human
ucuguagcagagguucccaaccuacaggccau

SEQ ID NO: 508484 - RNA, 32 nt, Human
ucuguagccacccauccuuugccuuaucuaac

SEQ ID NO: 508485 - RNA, 32 nt, Human
ucuguagccaggcuggagggcaauuguacaau

SEQ ID NO: 508486 - RNA, 24 nt, Human
ucuguagcccaggccagagugcag

SEQ ID NO: 508487 - RNA, 32 nt, Human
ucuguagcccaggcuggagugcaguguggcac

SEQ ID NO: 508488 - RNA, 32 nt, Human
ucuguagcccagucuggagugcagugguacaa

SEQ ID NO: 508489 - RNA, 32 nt, Human
ucuguagcccagucuggagugcagugguguga

SEQ ID NO: 508490 - RNA, 32 nt, Human
ucuguagccucagcuacucaggggguugaggu

SEQ ID NO: 508491 - RNA, 32 nt, Human
ucuguagcuccaaaggcuaucucuucauauug

SEQ ID NO: 508492 - RNA, 32 nt, Human
ucuguagcucuuggggugaucacucaucccag

SEQ ID NO: 508493 - RNA, 31 nt, Human
ucuguagcugagagagacagagcuggacauc

SEQ ID NO: 508494 - RNA, 32 nt, Human
ucuguagcugagagagacagagcuggacaucc

SEQ ID NO: 508495 - RNA, 32 nt, Human
ucuguagcuuguucccugucuuguccaugugg

SEQ ID NO: 508496 - RNA, 23 nt, Human
ucuguaggaagccucggccuucc

SEQ ID NO: 508497 - RNA, 32 nt, Human
ucuguaggauuuauaagucagccaugacaauu

SEQ ID NO: 508498 - RNA, 32 nt, Human
ucuguaggcucacaccuuaaucucaggccccu

SEQ ID NO: 508499 - RNA, 32 nt, Human
ucuguagggcuggaccuauguccuaaggacac

SEQ ID NO: 508500 - RNA, 32 nt, Human
ucuguaggggaaggagccaauuaagaaaaagu

SEQ ID NO: 508501 - RNA, 32 nt, Human
ucuguaggguuauacagaugucagagagcuaa

SEQ ID NO: 508502 - RNA, 32 nt, Human
ucuguagucccaccuauucaggagauuaaggc

SEQ ID NO: 508503 - RNA, 32 nt, Human
ucuguagucccagcuacucagcaggcugagau

SEQ ID NO: 508504 - RNA, 22 nt, Human
ucuguagucccagcuacucagg

SEQ ID NO: 508505 - RNA, 32 nt, Human
ucuguagucccagcuacucaggaggcugaggc

SEQ ID NO: 508506 - RNA, 32 nt, Human
ucuguagucccagcuacucgggaggcugaggc

SEQ ID NO: 508507 - RNA, 32 nt, Human
ucuguagucccagcuacucuggaggcugagac

SEQ ID NO: 508508 - RNA, 22 nt, Human
ucuguagucccagcuacuuggg

SEQ ID NO: 508509 - RNA, 23 nt, Human
ucuguagucccagcuacuuggga

SEQ ID NO: 508510 - RNA, 32 nt, Human
ucuguagucccagcuacuugggaagcugaagu

SEQ ID NO: 508511 - RNA, 32 nt, Human
ucuguagucccagcuacuugggaggcugaggc

SEQ ID NO: 508512 - RNA, 32 nt, Human
ucuguagucccagcuacuugggaggcugaggu

SEQ ID NO: 508513 - RNA, 32 nt, Human
ucuguagucccagcuaugugggaggcuaaggu

SEQ ID NO: 508514 - RNA, 32 nt, Human
ucuguaguccuaacugcucaggaggcugaggu

SEQ ID NO: 508515 - RNA, 32 nt, Human
ucuguaguccuagcuacucaggaggcugaggc

SEQ ID NO: 508516 - RNA, 32 nt, Human
ucuguagucucugcacuugucucccauuaagg

SEQ ID NO: 508517 - RNA, 32 nt, Human
ucuguagugaugacuuccuguccucugcucug

SEQ ID NO: 508518 - RNA, 32 nt, Human
ucuguaguuccagcaacucaggaggcugagau

SEQ ID NO: 508519 - RNA, 32 nt, Human
ucuguaguuccuuuuuguuucauuuucuucug

SEQ ID NO: 508520 - RNA, 32 nt, Human
ucuguaguucuucuuaccuugccuguaaaaca

SEQ ID NO: 508521 - RNA, 32 nt, Human
ucuguaguuucaucaucugucauaaccaugcc

SEQ ID NO: 508522 - RNA, 32 nt, Human
ucuguaguuucucaagugaacacucucaggau

SEQ ID NO: 508523 - RNA, 22 nt, Human
ucuguauaauccccacucucaa

SEQ ID NO: 508524 - RNA, 32 nt, Human
ucuguauauaaauaugugaaauauuauuaucu

SEQ ID NO: 508525 - RNA, 32 nt, Human
ucuguauauguuuuuaaucauauugauguaua

SEQ ID NO: 508526 - RNA, 31 nt, Human
ucuguaucaucucaggagguuucaggggccu

SEQ ID NO: 508527 - RNA, 32 nt, Human
ucuguaucauuuguuucccagaauggcucucc

SEQ ID NO: 508528 - RNA, 32 nt, Human
ucuguauccauugccggcaccuggugagauuc

SEQ ID NO: 508529 - RNA, 32 nt, Human
ucuguaucucucuccuccuuugaaccuaucuu

SEQ ID NO: 508530 - RNA, 32 nt, Human
ucuguaugaacugcucucaaaccaacaaauag

SEQ ID NO: 508531 - RNA, 32 nt, Human
ucuguaugcagggagccagggugagggcagag

SEQ ID NO: 508532 - RNA, 32 nt, Human
ucuguaugcccagggugagaagccgaguggcu

SEQ ID NO: 508533 - RNA, 32 nt, Human
ucuguaugggguccccaagccaggcuaaaccc

SEQ ID NO: 508534 - RNA, 32 nt, Human
ucuguaugguggcugucuucuauggcagaagg

SEQ ID NO: 508535 - RNA, 29 nt, Human
ucuguaugucugugucucccuagaauuca

SEQ ID NO: 508536 - RNA, 32 nt, Human
ucuguaugucuuagggggagagcguacaaaua

SEQ ID NO: 508537 - RNA, 32 nt, Human
ucuguauguggguggaaugaaggaaauugcuc

SEQ ID NO: 508538 - RNA, 32 nt, Human
ucuguaugugugugcuguuaccucaccugcag

SEQ ID NO: 508539 - RNA, 32 nt, Human
ucuguauuccucacucccuuccccaucccaac

SEQ ID NO: 508540 - RNA, 32 nt, Human
ucuguauugcucuaauuggccugcugcccaag

SEQ ID NO: 508541 - RNA, 32 nt, Human
ucuguauugguaagcacagaagauccucagau

SEQ ID NO: 508542 - RNA, 32 nt, Human
ucuguauuugucucccaugucuugcucuucuc

SEQ ID NO: 508543 - RNA, 32 nt, Human
ucuguauuuugauucaugugguguuuucacag

SEQ ID NO: 508544 - RNA, 32 nt, Human
ucugucaaccaggcuggagugcagugacucuu

SEQ ID NO: 508545 - RNA, 32 nt, Human
ucugucaacgcagacuggagugcaguggcacg

SEQ ID NO: 508546 - RNA, 32 nt, Human
ucugucaacggcaggggcaggccuaguuugac

SEQ ID NO: 508547 - RNA, 32 nt, Human
ucugucaaggggcgcugagcaggugugucugu

SEQ ID NO: 508548 - RNA, 32 nt, Human
ucugucaccaaggcuggagugcaggggcacaa

SEQ ID NO: 508549 - RNA, 32 nt, Human
ucugucaccagacuggagugcaguggcgccau

SEQ ID NO: 508550 - RNA, 32 nt, Human
ucugucaccaggccggagugcaguggugucau

SEQ ID NO: 508551 - RNA, 23 nt, Human
ucugucaccaggcuagagugcag

SEQ ID NO: 508552 - RNA, 23 nt, Human
ucugucaccaggcuggaaugcag

SEQ ID NO: 508553 - RNA, 32 nt, Human
ucugucaccaggcuggagggcaguggcgccau

SEQ ID NO: 508554 - RNA, 32 nt, Human
ucugucaccaggcuggagggcaguggugcgau

SEQ ID NO: 508555 - RNA, 23 nt, Human
ucugucaccaggcuggaguacag

SEQ ID NO: 508556 - RNA, 23 nt, Human
ucugucaccaggcuggagugcag

SEQ ID NO: 508557 - RNA, 32 nt, Human
ucugucaccaggcuggagugcagcggcgcaau

SEQ ID NO: 508558 - RNA, 32 nt, Human
ucugucaccaggcuggagugcagugccgcaau

SEQ ID NO: 508559 - RNA, 32 nt, Human
ucugucaccaggcuggagugcaguggaggcau

SEQ ID NO: 508560 - RNA, 32 nt, Human
ucugucaccaggcuggagugcaguggcaugau

SEQ ID NO: 508561 - RNA, 32 nt, Human
ucugucaccaggcuggagugcaguggcgcaau

SEQ ID NO: 508562 - RNA, 32 nt, Human
ucugucaccaggcuggagugcaguggcgcgau

SEQ ID NO: 508563 - RNA, 32 nt, Human
ucugucaccaggcuggagugcaguggugcaau

SEQ ID NO: 508564 - RNA, 32 nt, Human
ucugucaccaggcuggagugcaguggugcgau

SEQ ID NO: 508565 - RNA, 32 nt, Human
ucugucaccaggcuggagugcaguggugugau

SEQ ID NO: 508566 - RNA, 32 nt, Human
ucugucaccaggcuggagugcgguggcauaau

SEQ ID NO: 508567 - RNA, 32 nt, Human
ucugucaccaggcuguacagugccguggccug

SEQ ID NO: 508568 - RNA, 32 nt, Human
ucugucacccaagauggagugcaauggcacga

SEQ ID NO: 508569 - RNA, 32 nt, Human
ucugucacccaagcaggauugcagugagccaa

SEQ ID NO: 508570 - RNA, 32 nt, Human
ucugucacccaaggcggagugcagugacgaca

SEQ ID NO: 508571 - RNA, 32 nt, Human
ucugucacccaggauggagugcaguguuguga

SEQ ID NO: 508572 - RNA, 24 nt, Human
ucugucacccaggcuagaaugcag

SEQ ID NO: 508573 - RNA, 24 nt, Human
ucugucacccaggcuagaguacag

SEQ ID NO: 508574 - RNA, 23 nt, Human
ucugucacccaggcuagagugca

SEQ ID NO: 508575 - RNA, 24 nt, Human
ucugucacccaggcuagagugcag

SEQ ID NO: 508576 - RNA, 32 nt, Human
ucugucacccaggcuggagugcagugacauga

SEQ ID NO: 508577 - RNA, 32 nt, Human
ucugucacccaggcuggagugcagugacucag

SEQ ID NO: 508578 - RNA, 32 nt, Human
ucugucacccagguggcuggaguacaguggcc

SEQ ID NO: 508579 - RNA, 32 nt, Human
ucugucacccagucuggagugcaguggcaaaa

SEQ ID NO: 508580 - RNA, 32 nt, Human
ucugucacccagucuggagugcagugguguga

SEQ ID NO: 508581 - RNA, 32 nt, Human
ucugucacccaguuuggagugcaguggugcag

SEQ ID NO: 508582 - RNA, 32 nt, Human
ucugucacccccaggccagagugcaguggugc

SEQ ID NO: 508583 - RNA, 24 nt, Human
ucugucaccccgccgccacugccu

SEQ ID NO: 508584 - RNA, 32 nt, Human
ucugucacccgggcuggagugcaguggcgcca

SEQ ID NO: 508585 - RNA, 32 nt, Human
ucugucacccgggcuggagugcaguggcgcga

SEQ ID NO: 508586 - RNA, 32 nt, Human
ucugucacccgggcuggagugcaguggcguga

SEQ ID NO: 508587 - RNA, 32 nt, Human
ucugucacccgggcuggagugcaguggugcga

SEQ ID NO: 508588 - RNA, 32 nt, Human
ucugucacccugcagcuccuuuacaguucaau

SEQ ID NO: 508589 - RNA, 32 nt, Human
ucugucaccgaggcuggagugcaguggcgcga

SEQ ID NO: 508590 - RNA, 32 nt, Human
ucugucaccgagguuggagugcagugguauga

SEQ ID NO: 508591 - RNA, 32 nt, Human
ucugucaccuaggcuggagugcaguggcacaa

SEQ ID NO: 508592 - RNA, 32 nt, Human
ucugucaccuaggcuggagugcaguggcacag

SEQ ID NO: 508593 - RNA, 32 nt, Human
ucugucaccuaggcuggagugcaguggcacga

SEQ ID NO: 508594 - RNA, 32 nt, Human
ucugucaccuaggcuggagugcaguggcauga

SEQ ID NO: 508595 - RNA, 32 nt, Human
ucugucaccuaggcuggagugcaguggcgcaa

SEQ ID NO: 508596 - RNA, 32 nt, Human
ucugucaccuaggcuggagugcaguggggcaa

SEQ ID NO: 508597 - RNA, 32 nt, Human
ucugucaccuaggcuggagugcaguggugcaa

SEQ ID NO: 508598 - RNA, 32 nt, Human
ucugucaccuaggcuggaguugcagugguuug

SEQ ID NO: 508599 - RNA, 32 nt, Human
ucugucaccuaggguggagugcaguggcacaa

SEQ ID NO: 508600 - RNA, 32 nt, Human
ucugucaccuuuucuccuccucccucuucuuu

SEQ ID NO: 508601 - RNA, 32 nt, Human
ucugucacgaggcuggagugcaguggccccau

SEQ ID NO: 508602 - RNA, 32 nt, Human
ucugucacucuuccuucuccagccucucuuuc

SEQ ID NO: 508603 - RNA, 32 nt, Human
ucugucacucuuguuacauuguguacauucaa

SEQ ID NO: 508604 - RNA, 32 nt, Human
ucugucacugaggcuggagugcaguggcgcaa

SEQ ID NO: 508605 - RNA, 32 nt, Human
ucugucacugcaacucugugaagcaggguauc

SEQ ID NO: 508606 - RNA, 32 nt, Human
ucugucacugucagaauguuacagaaguggaa

SEQ ID NO: 508607 - RNA, 32 nt, Human
ucugucacuguggacuccagucauucaaggag

SEQ ID NO: 508608 - RNA, 32 nt, Human
ucugucacuuaggcuggagugcaguggcgugg

SEQ ID NO: 508609 - RNA, 32 nt, Human
ucugucacuuggguuggagugcaguugcagga

SEQ ID NO: 508610 - RNA, 22 nt, Human
ucugucagacaccuguccuucc

SEQ ID NO: 508611 - RNA, 32 nt, Human
ucugucagacauuggaaggccauguuccuaaa

SEQ ID NO: 508612 - RNA, 32 nt, Human
ucugucagaccugaaacugaagcuucauuagc

SEQ ID NO: 508613 - RNA, 32 nt, Human
ucugucagacggaugacucugccccucagagc

SEQ ID NO: 508614 - RNA, 32 nt, Human
ucugucagaggccugcaggcugugaguuauau

SEQ ID NO: 508615 - RNA, 31 nt, Human
ucugucagccucucugggcacuugcagccgc

SEQ ID NO: 508616 - RNA, 32 nt, Human
ucugucagcugguccacauuugaaguucaaaa

SEQ ID NO: 508617 - RNA, 32 nt, Human
ucugucaggagcuucagccuagcugaugaaua

SEQ ID NO: 508618 - RNA, 32 nt, Human
ucugucaggcugucccuggccgggguucugua

SEQ ID NO: 508619 - RNA, 32 nt, Human
ucugucagggguccagaggagcggaguccugg

SEQ ID NO: 508620 - RNA, 32 nt, Human
ucugucagguuugaucuggcacuggacccagg

SEQ ID NO: 508621 - RNA, 32 nt, Human
ucugucagucaguucacccucugugauucucc

SEQ ID NO: 508622 - RNA, 32 nt, Human
ucugucagugccuugucacgccuggcauagag

SEQ ID NO: 508623 - RNA, 32 nt, Human
ucugucaguucugccagcucugggccaugauc

SEQ ID NO: 508624 - RNA, 32 nt, Human
ucugucaguucugcuguuuuagccuagaagga

SEQ ID NO: 508625 - RNA, 32 nt, Human
ucugucaguucugcuguuuuagccuagcagga

SEQ ID NO: 508626 - RNA, 23 nt, Human
ucugucaucaggcuggagugcag

SEQ ID NO: 508627 - RNA, 32 nt, Human
ucugucaucaggcuggagugcaguggcgcaau

SEQ ID NO: 508628 - RNA, 32 nt, Human
ucugucaucaggcuggagugcaguggcucacu

SEQ ID NO: 508629 - RNA, 32 nt, Human
ucugucauccaggcuggagugcagugaugcga

SEQ ID NO: 508630 - RNA, 32 nt, Human
ucugucauccucagaucccacaggcauugcga

SEQ ID NO: 508631 - RNA, 32 nt, Human
ucugucaucuaggcuggagugcagugguguga

SEQ ID NO: 508632 - RNA, 32 nt, Human
ucugucaucugggcugcagugcagugguguaa

SEQ ID NO: 508633 - RNA, 32 nt, Human
ucugucaucuuccuuuuucuccagugaggguu

SEQ ID NO: 508634 - RNA, 32 nt, Human
ucugucauuaucucccuuucuccacuugauua

SEQ ID NO: 508635 - RNA, 32 nt, Human
ucugucauucuuacuguuaccauuuuccuggc

SEQ ID NO: 508636 - RNA, 32 nt, Human
ucugucauugcugcuacucuaacacugagcaa

SEQ ID NO: 508637 - RNA, 32 nt, Human
ucugucauuuaucucugugacuucgggcuaga

SEQ ID NO: 508638 - RNA, 32 nt, Human
ucugucauuugcaaaagcuuucagagggcauu

SEQ ID NO: 508639 - RNA, 32 nt, Human
ucugucauuuucucucuuucuucgucuuucuc

SEQ ID NO: 508640 - RNA, 32 nt, Human
ucuguccaacaaacacacacggguagauugcu

SEQ ID NO: 508641 - RNA, 32 nt, Human
ucuguccaagcagauucguggucuuuuccucg

SEQ ID NO: 508642 - RNA, 22 nt, Human
ucuguccacugcaaccuccaca

SEQ ID NO: 508643 - RNA, 32 nt, Human
ucuguccacugcaaccuccacauccuggguuc

SEQ ID NO: 508644 - RNA, 32 nt, Human
ucuguccacugcaugcuugcauaggcagcaag

SEQ ID NO: 508645 - RNA, 32 nt, Human
ucuguccacugccucccagccucagagcagcu

SEQ ID NO: 508646 - RNA, 32 nt, Human
ucuguccagaaccugcucccaccucaggccca

SEQ ID NO: 508647 - RNA, 21 nt, Human
ucuguccagagccccuccaca

SEQ ID NO: 508648 - RNA, 32 nt, Human
ucuguccagccccucaguauuaccaugucucc

SEQ ID NO: 508649 - RNA, 32 nt, Human
ucuguccagcuuuccccagggugacauacaga

SEQ ID NO: 508650 - RNA, 32 nt, Human
ucuguccaggaggcugggcggaggugggcagg

SEQ ID NO: 508651 - RNA, 32 nt, Human
ucuguccaggcaccucuucauuguacacaagu

SEQ ID NO: 508652 - RNA, 32 nt, Human
ucuguccagguugaggaaugggcugaacgugu

SEQ ID NO: 508653 - RNA, 21 nt, Human
ucuguccagucucacccagca

SEQ ID NO: 508654 - RNA, 24 nt, Human
ucuguccauccuccucuccaugca

SEQ ID NO: 508655 - RNA, 32 nt, Human
ucuguccaucuaugguccugucccgccaucaa

SEQ ID NO: 508656 - RNA, 22 nt, Human
ucugucccacaggccugucugg

SEQ ID NO: 508657 - RNA, 32 nt, Human
ucugucccagcuuuugcuaucauugcugacuu

SEQ ID NO: 508658 - RNA, 32 nt, Human
ucugucccaggcucccccuccugcgucucaac

SEQ ID NO: 508659 - RNA, 32 nt, Human
ucuguccccaagacaaugacagcaucuagggc

SEQ ID NO: 508660 - RNA, 32 nt, Human
ucuguccccaaggcuggagugcaguggugcaa

SEQ ID NO: 508661 - RNA, 32 nt, Human
ucuguccccaaguuggacauucacaaaggccg

SEQ ID NO: 508662 - RNA, 32 nt, Human
ucuguccccacuguccucaacccuguccugaa

SEQ ID NO: 508663 - RNA, 32 nt, Human
ucuguccccaucucugaaauccuuccuucucu

SEQ ID NO: 508664 - RNA, 20 nt, Human
ucugucccccaggugugagg

SEQ ID NO: 508665 - RNA, 32 nt, Human
ucugucccccugcucccacuccagaagaacug

SEQ ID NO: 508666 - RNA, 32 nt, Human
ucuguccccucaggucauggucccaagugaaa

SEQ ID NO: 508667 - RNA, 32 nt, Human
ucuguccccucccuccgguauaccuuuauccc

SEQ ID NO: 508668 - RNA, 32 nt, Human
ucuguccccugggcuggagugcaauggugcga

SEQ ID NO: 508669 - RNA, 32 nt, Human
ucuguccccuucacuuucaggccuuggggagu

SEQ ID NO: 508670 - RNA, 32 nt, Human
ucugucccgcugcguguuuuccucuugaucgg

SEQ ID NO: 508671 - RNA, 32 nt, Human
ucugucccuagagguuuauuacuagaggcugg

SEQ ID NO: 508672 - RNA, 32 nt, Human
ucugucccuauuauuugcccuaggcuuucucc

SEQ ID NO: 508673 - RNA, 32 nt, Human
ucugucccucacagcacuaguauuucauguug

SEQ ID NO: 508674 - RNA, 32 nt, Human
ucugucccuccuguucuuguccggcgcugcuu

SEQ ID NO: 508675 - RNA, 32 nt, Human
ucugucccugcagguuguccuauucuggauac

SEQ ID NO: 508676 - RNA, 32 nt, Human
ucugucccugggaggugggugcuggagcaggg

SEQ ID NO: 508677 - RNA, 32 nt, Human
ucugucccuucccaagcaagacauuugugagg

SEQ ID NO: 508678 - RNA, 32 nt, Human
ucugucccuucccaaucaguguccuuuucugu

SEQ ID NO: 508679 - RNA, 32 nt, Human
ucugucccuuggcaaauggacaccaggggcuu

SEQ ID NO: 508680 - RNA, 32 nt, Human
ucugucccuuucuccccacuucuucuggcucc

SEQ ID NO: 508681 - RNA, 32 nt, Human
ucuguccgaucugugcauguuauuuuucuuuu

SEQ ID NO: 508682 - RNA, 32 nt, Human
ucuguccgcccaggcugggugcagucacggcu

SEQ ID NO: 508683 - RNA, 32 nt, Human
ucuguccgccuccagccgcucuccucugacgg

SEQ ID NO: 508684 - RNA, 32 nt, Human
ucuguccgcugcccacagccuagcagucggga

SEQ ID NO: 508685 - RNA, 32 nt, Human
ucuguccguggucagaaguggggucagugugu

SEQ ID NO: 508686 - RNA, 32 nt, Human
ucuguccguuucucuaguaagggagacuuguu

SEQ ID NO: 508687 - RNA, 32 nt, Human
ucuguccuaccaguuuucuuuuacagauucuc

SEQ ID NO: 508688 - RNA, 32 nt, Human
ucuguccuauggagccucugcagacucguucu

SEQ ID NO: 508689 - RNA, 32 nt, Human
ucuguccucaaguacucaaauauuucugauac

SEQ ID NO: 508690 - RNA, 32 nt, Human
ucuguccucacugccaucgccacuaccauccu

SEQ ID NO: 508691 - RNA, 21 nt, Human
ucuguccucagccuugccaga

SEQ ID NO: 508692 - RNA, 32 nt, Human
ucuguccucauuuuguuuccuaugaucauccu

SEQ ID NO: 508693 - RNA, 32 nt, Human
ucuguccuccuuggcuuggcuuugcugcugcu

SEQ ID NO: 508694 - RNA, 32 nt, Human
ucuguccuccuugugaucaguuauuugcacag

SEQ ID NO: 508695 - RNA, 22 nt, Human
ucuguccucguucucuccugca

SEQ ID NO: 508696 - RNA, 32 nt, Human
ucuguccucuacuccacucaugcccaucucug

SEQ ID NO: 508697 - RNA, 32 nt, Human
ucuguccucugaaccacuuuugcucagagugc

SEQ ID NO: 508698 - RNA, 21 nt, Human
ucuguccucuuccuugccaga

SEQ ID NO: 508699 - RNA, 32 nt, Human
ucuguccucuucuccccucucucagauuggcc

SEQ ID NO: 508700 - RNA, 32 nt, Human
ucuguccugaggcuucugcucucauucauuua

SEQ ID NO: 508701 - RNA, 32 nt, Human
ucuguccugggaggcugagauuuaugggucuu

SEQ ID NO: 508702 - RNA, 32 nt, Human
ucuguccugguggcagcgauucagugguaaca

SEQ ID NO: 508703 - RNA, 32 nt, Human
ucuguccuuagaguacugaaggcaguucaaua

SEQ ID NO: 508704 - RNA, 32 nt, Human
ucuguccuuagguuguagcagaaaggaaaaga

SEQ ID NO: 508705 - RNA, 22 nt, Human
ucuguccuuccuccuccuuccc

SEQ ID NO: 508706 - RNA, 32 nt, Human
ucuguccuucuuccugucacuuguagagugga

SEQ ID NO: 508707 - RNA, 32 nt, Human
ucuguccuugguucuguccuccuuagcauuau

SEQ ID NO: 508708 - RNA, 32 nt, Human
ucuguccuuguccuggaccucagguucccagc

SEQ ID NO: 508709 - RNA, 23 nt, Human
ucugucgccaagccagagugcag

SEQ ID NO: 508710 - RNA, 32 nt, Human
ucugucgccaaggcuggagugcagugguguga

SEQ ID NO: 508711 - RNA, 32 nt, Human
ucugucgccaaguuggagcuugcagugagccg

SEQ ID NO: 508712 - RNA, 32 nt, Human
ucugucgccaaguuggagugcaauggugcgau

SEQ ID NO: 508713 - RNA, 23 nt, Human
ucugucgccagacuggagugcag

SEQ ID NO: 508714 - RNA, 32 nt, Human
ucugucgccagacuggagugcaguggcgcaau

SEQ ID NO: 508715 - RNA, 32 nt, Human
ucugucgccaggacuggagugcagugacacga

SEQ ID NO: 508716 - RNA, 23 nt, Human
ucugucgccaggcuagagugcgg

SEQ ID NO: 508717 - RNA, 23 nt, Human
ucugucgccaggcugaagugcag

SEQ ID NO: 508718 - RNA, 32 nt, Human
ucugucgccaggcugaagugcaguggcgcaau

SEQ ID NO: 508719 - RNA, 23 nt, Human
ucugucgccaggcuggaaugcag

SEQ ID NO: 508720 - RNA, 32 nt, Human
ucugucgccaggcuggaaugcaguagggcaau

SEQ ID NO: 508721 - RNA, 32 nt, Human
ucugucgccaggcuggaaugcagugcagugag

SEQ ID NO: 508722 - RNA, 32 nt, Human
ucugucgccaggcuggaguacaguggugugca

SEQ ID NO: 508723 - RNA, 22 nt, Human
ucugucgccaggcuggagugca

SEQ ID NO: 508724 - RNA, 32 nt, Human
ucugucgccaggcuggagugcaauggcgcgau

SEQ ID NO: 508725 - RNA, 32 nt, Human
ucugucgccaggcuggagugcaauggcgugau

SEQ ID NO: 508726 - RNA, 23 nt, Human
ucugucgccaggcuggagugcag

SEQ ID NO: 508727 - RNA, 32 nt, Human
ucugucgccaggcuggagugcaguggcgcagu

SEQ ID NO: 508728 - RNA, 32 nt, Human
ucugucgccaggcuggagugcaguggcgcgau

SEQ ID NO: 508729 - RNA, 32 nt, Human
ucugucgccaggcuggagugcaguggcgugau

SEQ ID NO: 508730 - RNA, 32 nt, Human
ucugucgccaggcuggagugcaguggugcgac

SEQ ID NO: 508731 - RNA, 32 nt, Human
ucugucgccaggcuggagugcaguggugcgau

SEQ ID NO: 508732 - RNA, 32 nt, Human
ucugucgccaggcuggagugcaguggugugau

SEQ ID NO: 508733 - RNA, 32 nt, Human
ucugucgccagguuggagugcaguggcgugau

SEQ ID NO: 508734 - RNA, 23 nt, Human
ucugucgcccaagcuggagcgca

SEQ ID NO: 508735 - RNA, 24 nt, Human
ucugucgcccaagcuggaguacag

SEQ ID NO: 508736 - RNA, 24 nt, Human
ucugucgcccaagcuggagugcag

SEQ ID NO: 508737 - RNA, 24 nt, Human
ucugucgcccagacuagaaugcag

SEQ ID NO: 508738 - RNA, 23 nt, Human
ucugucgcccagacuagagugca

SEQ ID NO: 508739 - RNA, 32 nt, Human
ucugucgcccaggauggagugcaguggcgcga

SEQ ID NO: 508740 - RNA, 24 nt, Human
ucugucgcccaggcuagagugcag

SEQ ID NO: 508741 - RNA, 32 nt, Human
ucugucgcccaggcuggagugcagugacauga

SEQ ID NO: 508742 - RNA, 32 nt, Human
ucugucgcccaggcuggagugcagugaugcaa

SEQ ID NO: 508743 - RNA, 32 nt, Human
ucugucgcccagggcuggagugcaguggcgcg

SEQ ID NO: 508744 - RNA, 32 nt, Human
ucugucgcccaggguggagugcaguggcguga

SEQ ID NO: 508745 - RNA, 32 nt, Human
ucugucgcccgggcuggaaugcagugacauca

SEQ ID NO: 508746 - RNA, 32 nt, Human
ucugucgccuaggcuggagugcaguggugcag

SEQ ID NO: 508747 - RNA, 32 nt, Human
ucugucgccuggcuggagugcaguggugugau

SEQ ID NO: 508748 - RNA, 32 nt, Human
ucugucgccugggcuggaguacaguggugcga

SEQ ID NO: 508749 - RNA, 22 nt, Human
ucugucgcgaggaggggcgcag

SEQ ID NO: 508750 - RNA, 32 nt, Human
ucugucgcucaggcuggagugcagugaugcaa

SEQ ID NO: 508751 - RNA, 32 nt, Human
ucugucgcucuuuucagccccuccugguauuc

SEQ ID NO: 508752 - RNA, 32 nt, Human
ucugucgcugcugccgccuccacccagccucc

SEQ ID NO: 508753 - RNA, 32 nt, Human
ucugucgcuuagcuggagugcgguggcgugau

SEQ ID NO: 508754 - RNA, 32 nt, Human
ucugucggaccagccaggggugaugcggaccc

SEQ ID NO: 508755 - RNA, 32 nt, Human
ucugucggccaggcuggagugcaguggcauga

SEQ ID NO: 508756 - RNA, 32 nt, Human
ucugucggccagguuggagugcaguggugcaa

SEQ ID NO: 508757 - RNA, 32 nt, Human
ucugucggcggcguggggcagcuguagcagcg

SEQ ID NO: 508758 - RNA, 32 nt, Human
ucugucgggaggcgcagcgguuagguggaccg

SEQ ID NO: 508759 - RNA, 32 nt, Human
ucugucgguuuccccucuuuacccuuccccgu

SEQ ID NO: 508760 - RNA, 32 nt, Human
ucugucguccaggcuggagugcagugacucau

SEQ ID NO: 508761 - RNA, 32 nt, Human
ucugucgucgaggcuggaguguaguggugcga

SEQ ID NO: 508762 - RNA, 32 nt, Human
ucugucuaaaagucuggagaaaucccaaagac

SEQ ID NO: 508763 - RNA, 32 nt, Human
ucugucuaacagaacaaaaagaugcucugugu

SEQ ID NO: 508764 - RNA, 32 nt, Human
ucugucuacccacacucugcgaacuuugccuu

SEQ ID NO: 508765 - RNA, 32 nt, Human
ucugucuacccuaguguccaucaugcccugga

SEQ ID NO: 508766 - RNA, 21 nt, Human
ucugucuagccagguccaggu

SEQ ID NO: 508767 - RNA, 32 nt, Human
ucugucuagcuuaaaccuacuaccucaagcug

SEQ ID NO: 508768 - RNA, 32 nt, Human
ucugucuaggcccauuuggggcucccugugag

SEQ ID NO: 508769 - RNA, 32 nt, Human
ucugucuagguuaaagcuaaacugaaucuaug

SEQ ID NO: 508770 - RNA, 32 nt, Human
ucugucuaguuguccuuaagucugacugacuu

SEQ ID NO: 508771 - RNA, 32 nt, Human
ucugucucaaaaacaaaacaaaacagaacaga

SEQ ID NO: 508772 - RNA, 32 nt, Human
ucugucucaaauaauuauuucacagaggauag

SEQ ID NO: 508773 - RNA, 32 nt, Human
ucugucucaucaguucuucacagugagaaaag

SEQ ID NO: 508774 - RNA, 32 nt, Human
ucugucucauugcauaugucauggcucugcaa

SEQ ID NO: 508775 - RNA, 32 nt, Human
ucugucuccaaaacaaaacaaacaaacaaaaa

SEQ ID NO: 508776 - RNA, 21 nt, Human
ucugucuccaaccuggggucc

SEQ ID NO: 508777 - RNA, 23 nt, Human
ucugucuccaaccuggggucccu

SEQ ID NO: 508778 - RNA, 32 nt, Human
ucugucuccacucaagaggcugaugggcaggu

SEQ ID NO: 508779 - RNA, 32 nt, Human
ucugucuccagccacccucugcuugggcuucu

SEQ ID NO: 508780 - RNA, 23 nt, Human
ucugucuccagcccugucuuucu

SEQ ID NO: 508781 - RNA, 32 nt, Human
ucugucuccaggcuggagaggcaggagcccug

SEQ ID NO: 508782 - RNA, 32 nt, Human
ucugucuccaggcuggaguacaguggugcgau

SEQ ID NO: 508783 - RNA, 32 nt, Human
ucugucuccaggcuggagugcaguggcgucau

SEQ ID NO: 508784 - RNA, 32 nt, Human
ucugucuccauagcucugguuucccugggccu

SEQ ID NO: 508785 - RNA, 18 nt, Human
ucugucuccauccuuccc

SEQ ID NO: 508786 - RNA, 32 nt, Human
ucugucucccaaagagcugggauuacaggcgu

SEQ ID NO: 508787 - RNA, 32 nt, Human
ucugucucccacccucacugaucacgccugcc

SEQ ID NO: 508788 - RNA, 32 nt, Human
ucugucucccaggcugaagugcagugagucaa

SEQ ID NO: 508789 - RNA, 32 nt, Human
ucugucucccaggcugcuggagugcaguggca

SEQ ID NO: 508790 - RNA, 32 nt, Human
ucugucucccaggcuggagugcagugacacaa

SEQ ID NO: 508791 - RNA, 32 nt, Human
ucugucucccaggcuggaguugcaguggugca

SEQ ID NO: 508792 - RNA, 32 nt, Human
ucugucuccccauguccucuggaacagcuggg

SEQ ID NO: 508793 - RNA, 32 nt, Human
ucugucucccgggcuggagugcaguggcgcga

SEQ ID NO: 508794 - RNA, 21 nt, Human
ucugucuccucccguccuucc

SEQ ID NO: 508795 - RNA, 32 nt, Human
ucugucuccucuucuuccuccucuguguccuu

SEQ ID NO: 508796 - RNA, 32 nt, Human
ucugucuccugcuccuucaggcugcuggcaga

SEQ ID NO: 508797 - RNA, 32 nt, Human
ucugucuccuggaaugcucccaccucaagugg

SEQ ID NO: 508798 - RNA, 32 nt, Human
ucugucucuccaccaugugcuccaccucgugc

SEQ ID NO: 508799 - RNA, 32 nt, Human
ucugucucucccuuccccuccugggaccauuc

SEQ ID NO: 508800 - RNA, 32 nt, Human
ucugucucucuaggaauagggucuguuucaca

SEQ ID NO: 508801 - RNA, 32 nt, Human
ucugucucucuccucuccucaggcucaauaau

SEQ ID NO: 508802 - RNA, 32 nt, Human
ucugucucuggacccaggcugccugcugaagu

SEQ ID NO: 508803 - RNA, 32 nt, Human
ucugucucuugcauaagccucaggccuggccc

SEQ ID NO: 508804 - RNA, 32 nt, Human
ucugucucuuggaaagauacagcuccaggguu

SEQ ID NO: 508805 - RNA, 27 nt, Human
ucugucucuuuauuucaccuugccaag

SEQ ID NO: 508806 - RNA, 32 nt, Human
ucugucucuuucuuuagagccuaaaacuguag

SEQ ID NO: 508807 - RNA, 32 nt, Human
ucugucugaugcccucuccauagcccagcugg

SEQ ID NO: 508808 - RNA, 32 nt, Human
ucugucugcacugggagccucaggagggcucu

SEQ ID NO: 508809 - RNA, 32 nt, Human
ucugucugccuggcugagaugcaugugggcag

SEQ ID NO: 508810 - RNA, 32 nt, Human
ucugucugcuccugccuccuccaggcaaugag

SEQ ID NO: 508811 - RNA, 32 nt, Human
ucugucugcuucagaccaccucaggcucugcg

SEQ ID NO: 508812 - RNA, 32 nt, Human
ucugucuggaagauggggaccagcagccccac

SEQ ID NO: 508813 - RNA, 32 nt, Human
ucugucuggagugacagaccacaucuuuaucu

SEQ ID NO: 508814 - RNA, 32 nt, Human
ucugucuggccaccccucuguccuggccccgg

SEQ ID NO: 508815 - RNA, 32 nt, Human
ucugucugggcugugaugacgaauauuaugaa

SEQ ID NO: 508816 - RNA, 32 nt, Human
ucugucuggguauuugaauggugugagacaaa

SEQ ID NO: 508817 - RNA, 32 nt, Human
ucugucugggugcaacuucuucagcugucugg

SEQ ID NO: 508818 - RNA, 32 nt, Human
ucugucugguauaggcuaauuuugaagaacuc

SEQ ID NO: 508819 - RNA, 32 nt, Human
ucugucuguagucccaccuauucgggaggcug

SEQ ID NO: 508820 - RNA, 19 nt, Human
ucugucuguccuccuuucc

SEQ ID NO: 508821 - RNA, 32 nt, Human
ucugucuguccuccuuuccucucccuccccga

SEQ ID NO: 508822 - RNA, 32 nt, Human
ucugucugucucucagccuuuaucucuggguu

SEQ ID NO: 508823 - RNA, 32 nt, Human
ucugucugucucucccccucugucuucucuau

SEQ ID NO: 508824 - RNA, 32 nt, Human
ucugucugucugucugucugucuaucuaucua

SEQ ID NO: 508825 - RNA, 32 nt, Human
ucugucugucugucugucugucugucuaucua

SEQ ID NO: 508826 - RNA, 32 nt, Human
ucugucugucugucugucugucugucugucua

SEQ ID NO: 508827 - RNA, 32 nt, Human
ucugucugucugucugucugucugucugucug

SEQ ID NO: 508828 - RNA, 32 nt, Human
ucugucugucugucuguggugguuucuguuuc

SEQ ID NO: 508829 - RNA, 32 nt, Human
ucugucugucugugggcuucagcacuuuaaag

SEQ ID NO: 508830 - RNA, 32 nt, Human
ucugucuguggguggucacaggagggugugag

SEQ ID NO: 508831 - RNA, 32 nt, Human
ucugucugugugucugugacagucagggaagg

SEQ ID NO: 508832 - RNA, 32 nt, Human
ucugucuuaugcugguuauuucacugcuucac

SEQ ID NO: 508833 - RNA, 32 nt, Human
ucugucuucagcagccaacuccuggagcugcc

SEQ ID NO: 508834 - RNA, 32 nt, Human
ucugucuucaucucugaaauucacaggucugg

SEQ ID NO: 508835 - RNA, 32 nt, Human
ucugucuucccaaacccagucuccucuccauu

SEQ ID NO: 508836 - RNA, 32 nt, Human
ucugucuucccuccucuacucuuggugcuuuc

SEQ ID NO: 508837 - RNA, 32 nt, Human
ucugucuucuacgaaaagcucuccccaccuuc

SEQ ID NO: 508838 - RNA, 32 nt, Human
ucugucuugaaaggagguugggccggcgaagu

SEQ ID NO: 508839 - RNA, 32 nt, Human
ucugucuugcucuccccuccccuggcuuuccu

SEQ ID NO: 508840 - RNA, 20 nt, Human
ucugucuugggaguggugua

SEQ ID NO: 508841 - RNA, 32 nt, Human
ucugucuuucucaguugacuucccaaguaagc

SEQ ID NO: 508842 - RNA, 32 nt, Human
ucugucuuuggcugugaacaaauaacaaauaa

SEQ ID NO: 508843 - RNA, 32 nt, Human
ucugucuuugguggaugggaugguggcaaagc

SEQ ID NO: 508844 - RNA, 32 nt, Human
ucugucuuuucaccccuccuuggcugaugacc

SEQ ID NO: 508845 - RNA, 31 nt, Human
ucugucuuuucuccuccgccuguguccaucu

SEQ ID NO: 508846 - RNA, 21 nt, Human
ucugugaaaugaaaggaucag

SEQ ID NO: 508847 - RNA, 32 nt, Human
ucugugaaaugagaucuccugauauuugauug

SEQ ID NO: 508848 - RNA, 32 nt, Human
ucugugaaaugcuggcauuugcaccuaccuca

SEQ ID NO: 508849 - RNA, 32 nt, Human
ucugugaacugaaugcagccuggacacuggcc

SEQ ID NO: 508850 - RNA, 31 nt, Human
ucugugaagagacccaguuucgugggaccac

SEQ ID NO: 508851 - RNA, 32 nt, Human
ucugugaagcaacuuagcugauguggaggaau

SEQ ID NO: 508852 - RNA, 32 nt, Human
ucugugaauccaccccuggcuacccccacccu

SEQ ID NO: 508853 - RNA, 32 nt, Human
ucugugaauuucacuggcaguuuugaacuucc

SEQ ID NO: 508854 - RNA, 32 nt, Human
ucugugacacccaagggaggggccgugcugac

SEQ ID NO: 508855 - RNA, 32 nt, Human
ucugugacaggaaacaucucuguccaugccag

SEQ ID NO: 508856 - RNA, 32 nt, Human
ucugugacaguggauauagcugcuggaccauu

SEQ ID NO: 508857 - RNA, 32 nt, Human
ucugugacccacucaccauguaaagaauuaac

SEQ ID NO: 508858 - RNA, 32 nt, Human
ucugugaccggcagccccagaccugccugccu

SEQ ID NO: 508859 - RNA, 22 nt, Human
ucugugacuacuaaggaaaccu

SEQ ID NO: 508860 - RNA, 24 nt, Human
ucugugacuacuuccaccacaccu

SEQ ID NO: 508861 - RNA, 19 nt, Human
ucugugacuacuuuaucca

SEQ ID NO: 508862 - RNA, 32 nt, Human
ucugugacucaggagcagggaucucaggcagc

SEQ ID NO: 508863 - RNA, 32 nt, Human
ucugugacucaucagaguguggggguugugaa

SEQ ID NO: 508864 - RNA, 32 nt, Human
ucugugacucccaguguucaccaccuuccuga

SEQ ID NO: 508865 - RNA, 32 nt, Human
ucugugacucccuagauucuguccugacccca

SEQ ID NO: 508866 - RNA, 32 nt, Human
ucugugacucuugccaaauaauuuugacuuca

SEQ ID NO: 508867 - RNA, 32 nt, Human
ucugugacucuugggccucugcucugguggga

SEQ ID NO: 508868 - RNA, 22 nt, Human
ucugugacugaaggcccggugg

SEQ ID NO: 508869 - RNA, 32 nt, Human
ucugugacugcauuguaagugcagugggggua

SEQ ID NO: 508870 - RNA, 32 nt, Human
ucugugacuucugcucccucccuagcuuuucc

SEQ ID NO: 508871 - RNA, 32 nt, Human
ucugugacuugaaugagcagcacuuugcaacu

SEQ ID NO: 508872 - RNA, 32 nt, Human
ucugugagaacauucugguucauuuuaaacuc

SEQ ID NO: 508873 - RNA, 32 nt, Human
ucugugagacauggcucgcuguggggaaggca

SEQ ID NO: 508874 - RNA, 32 nt, Human
ucugugagcuuagaccugcuuccacuuucaau

SEQ ID NO: 508875 - RNA, 32 nt, Human
ucugugagcuugaauguucaaaccugagacuu

SEQ ID NO: 508876 - RNA, 32 nt, Human
ucugugaggaaggagcccuucuuaacuccauu

SEQ ID NO: 508877 - RNA, 32 nt, Human
ucugugaggaaggggcccugccacucucccca

SEQ ID NO: 508878 - RNA, 32 nt, Human
ucugugaggaggcaagguucucaggggacagg

SEQ ID NO: 508879 - RNA, 32 nt, Human
ucugugaggauucagggagcaggaggagagag

SEQ ID NO: 508880 - RNA, 32 nt, Human
ucugugagggaacuguucagucucacagcaag

SEQ ID NO: 508881 - RNA, 19 nt, Human
ucugugagggaggcugcuu

SEQ ID NO: 508882 - RNA, 32 nt, Human
ucugugaggggucccaccagcccagggcugau

SEQ ID NO: 508883 - RNA, 32 nt, Human
ucugugaggucuucuugucaugugaguguggu

SEQ ID NO: 508884 - RNA, 20 nt, Human
ucugugagugcuggggccag

SEQ ID NO: 508885 - RNA, 32 nt, Human
ucugugagugggggacagggaguggggcaggc

SEQ ID NO: 508886 - RNA, 21 nt, Human
ucugugauaauuuucuguguu

SEQ ID NO: 508887 - RNA, 32 nt, Human
ucugugauacuggccuugcugaaacgcaucuc

SEQ ID NO: 508888 - RNA, 32 nt, Human
ucugugaucccaagccgccuccuccaccgacu

SEQ ID NO: 508889 - RNA, 23 nt, Human
ucugugaugacagaaauguucua

SEQ ID NO: 508890 - RNA, 18 nt, Human
ucugugaugggggcgcgg

SEQ ID NO: 508891 - RNA, 32 nt, Human
ucugugauugcucucccuuugugucuacugcc

SEQ ID NO: 508892 - RNA, 32 nt, Human
ucugugcagacaccuccucacccaccacccca

SEQ ID NO: 508893 - RNA, 32 nt, Human
ucugugcagagaggcuuugagggaugguggag

SEQ ID NO: 508894 - RNA, 32 nt, Human
ucugugcagagauaaagucccccaaauauagu

SEQ ID NO: 508895 - RNA, 32 nt, Human
ucugugcagagcuguugugcggaccgggagac

SEQ ID NO: 508896 - RNA, 32 nt, Human
ucugugcagcuuucgagcgguagacucacccu

SEQ ID NO: 508897 - RNA, 32 nt, Human
ucugugcaggaccuuggccacucugagggaca

SEQ ID NO: 508898 - RNA, 32 nt, Human
ucugugcaggagcagagccaggugggcccugg

SEQ ID NO: 508899 - RNA, 32 nt, Human
ucugugcaggccagcagggccccaucucuagu

SEQ ID NO: 508900 - RNA, 32 nt, Human
ucugugcagugucucauuucaccucagagaaa

SEQ ID NO: 508901 - RNA, 32 nt, Human
ucugugcauauguuaccauacauguccaaaga

SEQ ID NO: 508902 - RNA, 32 nt, Human
ucugugcaucuucuuguccauucaucugccca

SEQ ID NO: 508903 - RNA, 32 nt, Human
ucugugcaugccacuccugggucagacgguga

SEQ ID NO: 508904 - RNA, 32 nt, Human
ucugugcauuauucacucagacauauuuuuag

SEQ ID NO: 508905 - RNA, 32 nt, Human
ucugugccaagcauugucucuaccucaguuug

SEQ ID NO: 508906 - RNA, 32 nt, Human
ucugugccacauccucuucauuuuagaaucca

SEQ ID NO: 508907 - RNA, 32 nt, Human
ucugugccaccucucacacuggcuccagacac

SEQ ID NO: 508908 - RNA, 32 nt, Human
ucugugccauuucucagggaaguaagauguaa

SEQ ID NO: 508909 - RNA, 32 nt, Human
ucugugcccaugcagagugagcagggagaggc

SEQ ID NO: 508910 - RNA, 32 nt, Human
ucugugccccaugccuguccagccugggcagc

SEQ ID NO: 508911 - RNA, 31 nt, Human
ucugugccccugccucucccugugucccuuc

SEQ ID NO: 508912 - RNA, 32 nt, Human
ucugugcccgggcuauuuugaacccaggaauc

SEQ ID NO: 508913 - RNA, 32 nt, Human
ucugugcccugagcauggcucugcccccaggu

SEQ ID NO: 508914 - RNA, 32 nt, Human
ucugugccucaguuuacucuguaguuuaccau

SEQ ID NO: 508915 - RNA, 32 nt, Human
ucugugccucguugucugccuccuggggcugu

SEQ ID NO: 508916 - RNA, 32 nt, Human
ucugugccucuuuuaugugggaaagggcaggc

SEQ ID NO: 508917 - RNA, 32 nt, Human
ucugugccugggaucaguggggccccaaagcc

SEQ ID NO: 508918 - RNA, 32 nt, Human
ucugugccuucggaggucuuucugccugccug

SEQ ID NO: 508919 - RNA, 32 nt, Human
ucugugccuugagcuuugugcacuuugcaacu

SEQ ID NO: 508920 - RNA, 32 nt, Human
ucugugccuuggaacccaguggcuguacuuca

SEQ ID NO: 508921 - RNA, 23 nt, Human
ucugugccuuugccuguccuuuc

SEQ ID NO: 508922 - RNA, 32 nt, Human
ucugugcgcaccucucugggcuugcugggaga

SEQ ID NO: 508923 - RNA, 32 nt, Human
ucugugcuaugcacauuuucuacuuucucuaa

SEQ ID NO: 508924 - RNA, 32 nt, Human
ucugugcucagcugcaaccacagccucgucgu

SEQ ID NO: 508925 - RNA, 32 nt, Human
ucugugcucagugggagccaggaagccucagg

SEQ ID NO: 508926 - RNA, 32 nt, Human
ucugugcucccacaugcuuccggaacagugac

SEQ ID NO: 508927 - RNA, 32 nt, Human
ucugugcucccuucccucuccuggggcggggg

SEQ ID NO: 508928 - RNA, 32 nt, Human
ucugugcuccuccaaaacauccuuuagaugca

SEQ ID NO: 508929 - RNA, 32 nt, Human
ucugugcucgugcgcuuuuuccuugccaaccu

SEQ ID NO: 508930 - RNA, 32 nt, Human
ucugugcucugacucugcaggguaggaccacg

SEQ ID NO: 508931 - RNA, 32 nt, Human
ucugugcugacauggcucuggacucuaaagac

SEQ ID NO: 508932 - RNA, 20 nt, Human
ucugugcugaccaggccugg

SEQ ID NO: 508933 - RNA, 32 nt, Human
ucugugcugagaugcaaugauguguaaacuga

SEQ ID NO: 508934 - RNA, 32 nt, Human
ucugugcugaggaggauuaguaaaagaggaag

SEQ ID NO: 508935 - RNA, 32 nt, Human
ucugugcugaggaggauuagugaaagaggaag

SEQ ID NO: 508936 - RNA, 22 nt, Human
ucugugcugccagguccuggug

SEQ ID NO: 508937 - RNA, 32 nt, Human
ucugugcugccuucugccugggucugguaucc

SEQ ID NO: 508938 - RNA, 32 nt, Human
ucugugcugcugcuucuccuccaucuugcuag

SEQ ID NO: 508939 - RNA, 32 nt, Human
ucugugcuggcauccugagcacugccaggcac

SEQ ID NO: 508940 - RNA, 32 nt, Human
ucugugcugggaaccugcucugugccaggcac

SEQ ID NO: 508941 - RNA, 32 nt, Human
ucugugcugguugccacccaagagagaacagu

SEQ ID NO: 508942 - RNA, 21 nt, Human
ucugugcugugggccccgggg

SEQ ID NO: 508943 - RNA, 32 nt, Human
ucugugcuucaaggagcuucagagagauugcc

SEQ ID NO: 508944 - RNA, 32 nt, Human
ucugugcuucagggaucuaugagggucaacac

SEQ ID NO: 508945 - RNA, 32 nt, Human
ucugugcuugcaggaaaguccauuuguuuuuc

SEQ ID NO: 508946 - RNA, 32 nt, Human
ucugugcuuggcuaugacucuaccuccagguu

SEQ ID NO: 508947 - RNA, 32 nt, Human
ucugugcuuguacggccuacugggcuuccucc

SEQ ID NO: 508948 - RNA, 32 nt, Human
ucuguggaacuuggaacgugccaggaccaccu

SEQ ID NO: 508949 - RNA, 32 nt, Human
ucuguggaagugagguuuuggagcagccucca

SEQ ID NO: 508950 - RNA, 32 nt, Human
ucuguggagagggacagagagcaugagcaggc

SEQ ID NO: 508951 - RNA, 32 nt, Human
ucuguggagauggacucaggauccagugacau

SEQ ID NO: 508952 - RNA, 32 nt, Human
ucuguggagcacaggcauaucagcaacugcca

SEQ ID NO: 508953 - RNA, 32 nt, Human
ucuguggagcgcccgccgucugcuccggggug

SEQ ID NO: 508954 - RNA, 32 nt, Human
ucuguggaggccaaaccaacucuuugccagca

SEQ ID NO: 508955 - RNA, 32 nt, Human
ucuguggaguuuucccuuugcugagcaagcau

SEQ ID NO: 508956 - RNA, 32 nt, Human
ucuguggcaaaaagagucagacauuucuuugg

SEQ ID NO: 508957 - RNA, 32 nt, Human
ucuguggcaaagcucuuagaauucuuugcagu

SEQ ID NO: 508958 - RNA, 32 nt, Human
ucuguggcaacuguaaucacagagccagaagc

SEQ ID NO: 508959 - RNA, 32 nt, Human
ucuguggcaauaaaugagaucucagugguggu

SEQ ID NO: 508960 - RNA, 32 nt, Human
ucuguggcacagcugcuugccauugccugccu

SEQ ID NO: 508961 - RNA, 32 nt, Human
ucuguggcagacaagacaucugaaaagcucuc

SEQ ID NO: 508962 - RNA, 32 nt, Human
ucuguggcagagggugaaugccugcagaugag

SEQ ID NO: 508963 - RNA, 32 nt, Human
ucuguggcaggagucccugaggacgggagcug

SEQ ID NO: 508964 - RNA, 32 nt, Human
ucuguggcauguuggacuugaucuggcaaaaa

SEQ ID NO: 508965 - RNA, 32 nt, Human
ucuguggcauugaaaugagcaccuccauuaaa

SEQ ID NO: 508966 - RNA, 32 nt, Human
ucuguggcauugucccucccacucuuauuuuu

SEQ ID NO: 508967 - RNA, 32 nt, Human
ucuguggcauuuuaaaugggagaaucuugguu

SEQ ID NO: 508968 - RNA, 32 nt, Human
ucuguggccagccuggcaucaguuuaggccuu

SEQ ID NO: 508969 - RNA, 32 nt, Human
ucuguggccagcugcaucugucugaauggugc

SEQ ID NO: 508970 - RNA, 24 nt, Human
ucuguggcccaggcugaagugcag

SEQ ID NO: 508971 - RNA, 24 nt, Human
ucuguggcccaggcuggagugcag

SEQ ID NO: 508972 - RNA, 32 nt, Human
ucuguggcccaggcuggagugcaguggcacaa

SEQ ID NO: 508973 - RNA, 32 nt, Human
ucuguggcccaggcuggagugcaguggcacga

SEQ ID NO: 508974 - RNA, 32 nt, Human
ucuguggcccaggcuggagugcaguggcauga

SEQ ID NO: 508975 - RNA, 32 nt, Human
ucuguggcccaggcuggagugcaguggcgcaa

SEQ ID NO: 508976 - RNA, 32 nt, Human
ucuguggcccaggcuggagugcaguggcgcgg

SEQ ID NO: 508977 - RNA, 32 nt, Human
ucuguggcccaggcuggagugcaguggcuguu

SEQ ID NO: 508978 - RNA, 32 nt, Human
ucuguggcccaggcuggagugcaguggugcga

SEQ ID NO: 508979 - RNA, 32 nt, Human
ucuguggcccaggcuggaguguaguggcgugg

SEQ ID NO: 508980 - RNA, 32 nt, Human
ucuguggcccucucuuaaugccacggcagcca

SEQ ID NO: 508981 - RNA, 32 nt, Human
ucuguggcccuggcuggaguucagugguguga

SEQ ID NO: 508982 - RNA, 32 nt, Human
ucuguggccucgggggcucaaggcacagagcu

SEQ ID NO: 508983 - RNA, 32 nt, Human
ucuguggcuaucugacaaccagucccagcccc

SEQ ID NO: 508984 - RNA, 32 nt, Human
ucuguggcucuagaaagaguucugagagguga

SEQ ID NO: 508985 - RNA, 32 nt, Human
ucuguggcucugcaccuaagcuggggaccaac

SEQ ID NO: 508986 - RNA, 32 nt, Human
ucuguggcugggaacaccuuccaccaugacca

SEQ ID NO: 508987 - RNA, 32 nt, Human
ucuguggcugguagacaccaagcugcugugac

SEQ ID NO: 508988 - RNA, 32 nt, Human
ucuguggcugugcaguacuuugaaguuuuaau

SEQ ID NO: 508989 - RNA, 32 nt, Human
ucuguggcuuaggaagugugaagauaugaucc

SEQ ID NO: 508990 - RNA, 32 nt, Human
ucuguggcuucaguauacaguaacugaauaaa

SEQ ID NO: 508991 - RNA, 32 nt, Human
ucuguggcuugcuggagaaugccuccgggaac

SEQ ID NO: 508992 - RNA, 32 nt, Human
ucugugggaagagagagccaccuagcaugucc

SEQ ID NO: 508993 - RNA, 31 nt, Human
ucugugggacugucugggccuguuacucauc

SEQ ID NO: 508994 - RNA, 32 nt, Human
ucugugggagcccggccgcgcccagcccccgc

SEQ ID NO: 508995 - RNA, 32 nt, Human
ucugugggcaggaagugaagagaucguucugu

SEQ ID NO: 508996 - RNA, 21 nt, Human
ucugugggcgcccaaggccag

SEQ ID NO: 508997 - RNA, 19 nt, Human
ucugugggcucacaagaca

SEQ ID NO: 508998 - RNA, 32 nt, Human
ucugugggcugcugugggcugcauuuggauag

SEQ ID NO: 508999 - RNA, 32 nt, Human
ucuguggggagauguggaaagcuguucaagug

SEQ ID NO: 509000 - RNA, 32 nt, Human
ucuguggggagguuuuauggcuuuugucagau

SEQ ID NO: 509001 - RNA, 32 nt, Human
ucuguggggcccuguguccccugcucgggagu

SEQ ID NO: 509002 - RNA, 32 nt, Human
ucuguggggccugcuggggccugggagccccc

SEQ ID NO: 509003 - RNA, 32 nt, Human
ucuguggggcugggcaccguguccuccucuga

SEQ ID NO: 509004 - RNA, 32 nt, Human
ucuguggggcuggguuccucucuuuucuuucc

SEQ ID NO: 509005 - RNA, 32 nt, Human
ucugugggggaaaaggaagaggagggucuugu

SEQ ID NO: 509006 - RNA, 32 nt, Human
ucugugggggcacagcccugcccaccccugga

SEQ ID NO: 509007 - RNA, 32 nt, Human
ucuguggggugaggcagugcauggccaaggaa

SEQ ID NO: 509008 - RNA, 32 nt, Human
ucuguggguccucugguguugaguggucggcu

SEQ ID NO: 509009 - RNA, 32 nt, Human
ucugugggugugggggcccugggugaaugcug

SEQ ID NO: 509010 - RNA, 32 nt, Human
ucugugguacuuccucucuggcugauuuagca

SEQ ID NO: 509011 - RNA, 20 nt, Human
ucugugguagaaauguucua

SEQ ID NO: 509012 - RNA, 32 nt, Human
ucugugguagagaacucucuuccuucuuucca

SEQ ID NO: 509013 - RNA, 32 nt, Human
ucugugguaucagaauaaaaggacuugauaua

SEQ ID NO: 509014 - RNA, 32 nt, Human
ucuguggucauugucccucugcagaauaaaga

SEQ ID NO: 509015 - RNA, 32 nt, Human
ucugugguccacguccugccucucccuggggu

SEQ ID NO: 509016 - RNA, 32 nt, Human
ucuguggucccagcuacucgggagacucaugc

SEQ ID NO: 509017 - RNA, 32 nt, Human
ucuguggucccagcuacuggggaggcugaggu

SEQ ID NO: 509018 - RNA, 32 nt, Human
ucuguggucccagcuacuugagaggcugagcc

SEQ ID NO: 509019 - RNA, 32 nt, Human
ucugugguccguggcccuguuucugugcgccu

SEQ ID NO: 509020 - RNA, 32 nt, Human
ucugugguccuccccuccugacccaggccucu

SEQ ID NO: 509021 - RNA, 32 nt, Human
ucugugguccuccuccccagaacucagaaccc

SEQ ID NO: 509022 - RNA, 32 nt, Human
ucuguggugaaauagugggaaggauucaugua

SEQ ID NO: 509023 - RNA, 32 nt, Human
ucuguggugcugcucggggauggacuccaugc

SEQ ID NO: 509024 - RNA, 32 nt, Human
ucugugguggggaaagcggagaggggaguggg

SEQ ID NO: 509025 - RNA, 32 nt, Human
ucugugguuggaggaaagaugagugaagggau

SEQ ID NO: 509026 - RNA, 32 nt, Human
ucuguguacaaaccauggagguuauucauuca

SEQ ID NO: 509027 - RNA, 32 nt, Human
ucuguguacaauauuuuauuuuccuaaauuau

SEQ ID NO: 509028 - RNA, 32 nt, Human
ucuguguagggaggggaggcuuauucaauucu

SEQ ID NO: 509029 - RNA, 32 nt, Human
ucuguguaguaacugccgacaaaucucuccug

SEQ ID NO: 509030 - RNA, 32 nt, Human
ucuguguaguucuucacuaucuguuccagggc

SEQ ID NO: 509031 - RNA, 32 nt, Human
ucuguguauaccaaaugauucuguuaucuaaa

SEQ ID NO: 509032 - RNA, 32 nt, Human
ucuguguauauuuuauaagauguccuucuuag

SEQ ID NO: 509033 - RNA, 32 nt, Human
ucuguguauguauguauauaguguaauacgua

SEQ ID NO: 509034 - RNA, 32 nt, Human
ucuguguaugugucugugugucugcguccgug

SEQ ID NO: 509035 - RNA, 32 nt, Human
ucugugucacccacuccugggugcgugcagac

SEQ ID NO: 509036 - RNA, 32 nt, Human
ucugugucagaagaaagcagcaguaacagcaa

SEQ ID NO: 509037 - RNA, 32 nt, Human
ucugugucagggcagggccaggaggaaaccac

SEQ ID NO: 509038 - RNA, 32 nt, Human
ucugugucccaaauaaauguagacuuucgugc

SEQ ID NO: 509039 - RNA, 32 nt, Human
ucuguguccuccagguuuauaugggaaucgaa

SEQ ID NO: 509040 - RNA, 32 nt, Human
ucuguguccugccucggcgcucucgcaaauga

SEQ ID NO: 509041 - RNA, 32 nt, Human
ucugugucucugguuccuuuucugucacuugg

SEQ ID NO: 509042 - RNA, 32 nt, Human
ucugugucuggacuucagagcaccugcuucuc

SEQ ID NO: 509043 - RNA, 32 nt, Human
ucugugucugggaacuaccugcccagcuguuu

SEQ ID NO: 509044 - RNA, 32 nt, Human
ucugugucugucucccccucagaggagcucuc

SEQ ID NO: 509045 - RNA, 32 nt, Human
ucugugucugugcuccuccuucccucucagac

SEQ ID NO: 509046 - RNA, 32 nt, Human
ucugugucuugcgucuguggccuuccuauugu

SEQ ID NO: 509047 - RNA, 32 nt, Human
ucugugugauaccaaggagaccauuuggauuu

SEQ ID NO: 509048 - RNA, 32 nt, Human
ucugugugaugauacggcaacauuguuuguaa

SEQ ID NO: 509049 - RNA, 32 nt, Human
ucugugugcacacccaugcacacucaugcaca

SEQ ID NO: 509050 - RNA, 32 nt, Human
ucugugugccacaugcugcucucuaccagauu

SEQ ID NO: 509051 - RNA, 32 nt, Human
ucugugugcguuguggggugggggaggggguc

SEQ ID NO: 509052 - RNA, 32 nt, Human
ucugugugcugaagcuaacucaagauggaaag

SEQ ID NO: 509053 - RNA, 29 nt, Human
ucuguguggcuguguguuugggacagggg

SEQ ID NO: 509054 - RNA, 32 nt, Human
ucuguguggggaaaauaaugcauugacugcca

SEQ ID NO: 509055 - RNA, 32 nt, Human
ucugugugggugugugcaugugcacaguuagu

SEQ ID NO: 509056 - RNA, 32 nt, Human
ucuguguguaucaucaauaaaguugugugcuu

SEQ ID NO: 509057 - RNA, 32 nt, Human
ucuguguguauguacaguuuacaugauguucc

SEQ ID NO: 509058 - RNA, 32 nt, Human
ucuguguguauguacauaguagacaugugugu

SEQ ID NO: 509059 - RNA, 29 nt, Human
ucuguguguaugugugugggggugggcag

SEQ ID NO: 509060 - RNA, 29 nt, Human
ucugugugucugugacagucagggaagga

SEQ ID NO: 509061 - RNA, 32 nt, Human
ucugugugugacaccaccacugugucccagug

SEQ ID NO: 509062 - RNA, 32 nt, Human
ucugugugugcccuguaaccugacugguuaac

SEQ ID NO: 509063 - RNA, 32 nt, Human
ucuguguguguauguguguguuuauaugugua

SEQ ID NO: 509064 - RNA, 32 nt, Human
ucuguguuaaagcucaaaugaaccagcccacg

SEQ ID NO: 509065 - RNA, 32 nt, Human
ucuguguuacccaguaacucaucugucaccaa

SEQ ID NO: 509066 - RNA, 32 nt, Human
ucuguguuagggacagaggaaaacuuggugug

SEQ ID NO: 509067 - RNA, 32 nt, Human
ucuguguucauggagcuuauuugaggcuagaa

SEQ ID NO: 509068 - RNA, 32 nt, Human
ucuguguuccauccuccguccacuugagcucu

SEQ ID NO: 509069 - RNA, 32 nt, Human
ucuguguuccguccuggccaugggcuuguugc

SEQ ID NO: 509070 - RNA, 32 nt, Human
ucuguguucuacggcaguuacacacacgcagu

SEQ ID NO: 509071 - RNA, 32 nt, Human
ucuguguucucuuccuuucauuuuaucccuua

SEQ ID NO: 509072 - RNA, 32 nt, Human
ucuguguugcagccccagcucuugaaagugac

SEQ ID NO: 509073 - RNA, 32 nt, Human
ucuguguuguguggcuguaggggagggcugca

SEQ ID NO: 509074 - RNA, 32 nt, Human
ucuguguuucccacccucucccugacccaagu

SEQ ID NO: 509075 - RNA, 32 nt, Human
ucuguguuuggaggcuggaugggauaugauca

SEQ ID NO: 509076 - RNA, 32 nt, Human
ucuguguuuguaguguggaaguuggugacugu

SEQ ID NO: 509077 - RNA, 32 nt, Human
ucuguguuugugugugcauaguucugugguuu

SEQ ID NO: 509078 - RNA, 32 nt, Human
ucuguguuuucagccacccagucugugguauc

SEQ ID NO: 509079 - RNA, 32 nt, Human
ucuguuaaaaauaagaacaaaaauccagagug

SEQ ID NO: 509080 - RNA, 32 nt, Human
ucuguuaaaaauacaaaauuagccaggcgugg

SEQ ID NO: 509081 - RNA, 32 nt, Human
ucuguuaaacaguucuucaccuaacagcauau

SEQ ID NO: 509082 - RNA, 32 nt, Human
ucuguuaaaggcacaugagcugugcuggcuuc

SEQ ID NO: 509083 - RNA, 32 nt, Human
ucuguuaacaucacucuugucuggcaaaagaa

SEQ ID NO: 509084 - RNA, 32 nt, Human
ucuguuaacccugacagucucucuucauugag

SEQ ID NO: 509085 - RNA, 32 nt, Human
ucuguuaccagccuuuuggugugucuuuaugu

SEQ ID NO: 509086 - RNA, 24 nt, Human
ucuguuacccaggcuagaguguag

SEQ ID NO: 509087 - RNA, 24 nt, Human
ucuguuacccaggcuggaaugcag

SEQ ID NO: 509088 - RNA, 23 nt, Human
ucuguuacccaggcuggagugca

SEQ ID NO: 509089 - RNA, 24 nt, Human
ucuguuacccaggcuggagugcag

SEQ ID NO: 509090 - RNA, 32 nt, Human
ucuguuacccaggcuggagugcagugacacaa

SEQ ID NO: 509091 - RNA, 32 nt, Human
ucuguuaccgagcacugcucccagggggcgcu

SEQ ID NO: 509092 - RNA, 32 nt, Human
ucuguuacgugccugugguucuuggaaagagc

SEQ ID NO: 509093 - RNA, 32 nt, Human
ucuguuacuccucaccccauagggcagcccgg

SEQ ID NO: 509094 - RNA, 23 nt, Human
ucuguuacucuaucuuggccaga

SEQ ID NO: 509095 - RNA, 32 nt, Human
ucuguuaggaggcucuacaggagaaucauuuc

SEQ ID NO: 509096 - RNA, 32 nt, Human
ucuguuaggcagcauugcuuugaugcaauuuc

SEQ ID NO: 509097 - RNA, 32 nt, Human
ucuguuagggcugccuuucaguaacucauuua

SEQ ID NO: 509098 - RNA, 32 nt, Human
ucuguuagggggccaauaaaauguaucugcau

SEQ ID NO: 509099 - RNA, 32 nt, Human
ucuguuaucccaguuaggaggcugaggcaaga

SEQ ID NO: 509100 - RNA, 32 nt, Human
ucuguuaucgggggcagaaagacugaagcaca

SEQ ID NO: 509101 - RNA, 32 nt, Human
ucuguuaucuacagugcacacgcacacacaca

SEQ ID NO: 509102 - RNA, 32 nt, Human
ucuguuaugaacacguugguuggcuggauuca

SEQ ID NO: 509103 - RNA, 22 nt, Human
ucuguuaugagauaauguucua

SEQ ID NO: 509104 - RNA, 32 nt, Human
ucuguucacucugcaguucucuugccuacugc

SEQ ID NO: 509105 - RNA, 32 nt, Human
ucuguucacugcaaccgccucccgugcucaag

SEQ ID NO: 509106 - RNA, 32 nt, Human
ucuguucacuggcucucuacauuugccaggau

SEQ ID NO: 509107 - RNA, 32 nt, Human
ucuguucagggugggacuccaggugaauuacu

SEQ ID NO: 509108 - RNA, 32 nt, Human
ucuguucaugcgggagauggcaggggcuggca

SEQ ID NO: 509109 - RNA, 32 nt, Human
ucuguuccaagcagugugagaacauggcuggu

SEQ ID NO: 509110 - RNA, 32 nt, Human
ucuguuccagggcuagucggaggaucauaagc

SEQ ID NO: 509111 - RNA, 32 nt, Human
ucuguuccauggugugcaggucugcuucuuaa

SEQ ID NO: 509112 - RNA, 32 nt, Human
ucuguuccauuuucuuuggauucccuauucac

SEQ ID NO: 509113 - RNA, 32 nt, Human
ucuguucccaagcaguucaugauacagccuca

SEQ ID NO: 509114 - RNA, 32 nt, Human
ucuguucccacacuugggccucugccucugua

SEQ ID NO: 509115 - RNA, 32 nt, Human
ucuguuccccuugaaccuguguggaccugauc

SEQ ID NO: 509116 - RNA, 32 nt, Human
ucuguuccuccuccucucucucuuuccucugc

SEQ ID NO: 509117 - RNA, 32 nt, Human
ucuguuccucuccccuccccuuccuaccgcac

SEQ ID NO: 509118 - RNA, 32 nt, Human
ucuguuccugcaguuuugggguucauuaaaag

SEQ ID NO: 509119 - RNA, 32 nt, Human
ucuguuccugcuccuuccucuggcuagauugc

SEQ ID NO: 509120 - RNA, 32 nt, Human
ucuguuccuucacauccuguguuucuagggaa

SEQ ID NO: 509121 - RNA, 32 nt, Human
ucuguuccuuggcuuguccuuccuucccggga

SEQ ID NO: 509122 - RNA, 31 nt, Human
ucuguuccuuucucugggcuuaggguccugu

SEQ ID NO: 509123 - RNA, 32 nt, Human
ucuguucuaaaauggaggcaguagggagcaaa

SEQ ID NO: 509124 - RNA, 32 nt, Human
ucuguucucacaaagucuccccaaugcucuac

SEQ ID NO: 509125 - RNA, 32 nt, Human
ucuguucucagauuccuaaucauuccagaagu

SEQ ID NO: 509126 - RNA, 32 nt, Human
ucuguucuccuggaaguccagggaagaaggag

SEQ ID NO: 509127 - RNA, 22 nt, Human
ucuguucucucaguaaacagaa

SEQ ID NO: 509128 - RNA, 32 nt, Human
ucuguucucucuuuccccguccuuccucucuc

SEQ ID NO: 509129 - RNA, 32 nt, Human
ucuguucucugccuugucucucuuugucuuaa

SEQ ID NO: 509130 - RNA, 32 nt, Human
ucuguucugcaacuccauccuccugugucacu

SEQ ID NO: 509131 - RNA, 32 nt, Human
ucuguucugggccaggucccagcuugagcugc

SEQ ID NO: 509132 - RNA, 32 nt, Human
ucuguucuuaagaugaggagaguaucuguguu

SEQ ID NO: 509133 - RNA, 32 nt, Human
ucuguugaacugucuuccaaccugccauggca

SEQ ID NO: 509134 - RNA, 32 nt, Human
ucuguugaaguuggccuguggagaugaugugc

SEQ ID NO: 509135 - RNA, 27 nt, Human
ucuguugacaggguuuguuuuauuuua

SEQ ID NO: 509136 - RNA, 24 nt, Human
ucuguugaccaggcuggagugcag

SEQ ID NO: 509137 - RNA, 32 nt, Human
ucuguugaguacuucauacaugccuagucuga

SEQ ID NO: 509138 - RNA, 31 nt, Human
ucuguugaguagagagaaauaggaauugucu

SEQ ID NO: 509139 - RNA, 32 nt, Human
ucuguugaguuucuuuguugaagaagccagca

SEQ ID NO: 509140 - RNA, 32 nt, Human
ucuguugcaaccucaauaaacagcacaaucuc

SEQ ID NO: 509141 - RNA, 32 nt, Human
ucuguugcacacagcucacucguauguccugc

SEQ ID NO: 509142 - RNA, 32 nt, Human
ucuguugcaguagagaaaagcagggcugggga

SEQ ID NO: 509143 - RNA, 21 nt, Human
ucuguugcauacuuaguuuuu

SEQ ID NO: 509144 - RNA, 32 nt, Human
ucuguugccaacagaucuccccuaacaguguc

SEQ ID NO: 509145 - RNA, 21 nt, Human
ucuguugccaaggcuagagca

SEQ ID NO: 509146 - RNA, 32 nt, Human
ucuguugccaaggcuggagugcaguggaacga

SEQ ID NO: 509147 - RNA, 32 nt, Human
ucuguugccacaucuccugccuaguggagaag

SEQ ID NO: 509148 - RNA, 32 nt, Human
ucuguugccacugcacucuggccugggcaaca

SEQ ID NO: 509149 - RNA, 32 nt, Human
ucuguugccagaagcuggaugacuucgggccu

SEQ ID NO: 509150 - RNA, 23 nt, Human
ucuguugccaggccagagugcag

SEQ ID NO: 509151 - RNA, 23 nt, Human
ucuguugccaggcuagagugcag

SEQ ID NO: 509152 - RNA, 23 nt, Human
ucuguugccaggcuggaaugcag

SEQ ID NO: 509153 - RNA, 32 nt, Human
ucuguugccaggcuggaaugcaguggcgucau

SEQ ID NO: 509154 - RNA, 32 nt, Human
ucuguugccaggcuggaaugccguggcgcaau

SEQ ID NO: 509155 - RNA, 32 nt, Human
ucuguugccaggcuggagggcaguggcacgau

SEQ ID NO: 509156 - RNA, 32 nt, Human
ucuguugccaggcuggagugcacuggggcuug

SEQ ID NO: 509157 - RNA, 23 nt, Human
ucuguugccaggcuggagugcag

SEQ ID NO: 509158 - RNA, 32 nt, Human
ucuguugccaggcuggagugcaguggcgcaau

SEQ ID NO: 509159 - RNA, 32 nt, Human
ucuguugccaggcuggagugcaguggcgcgau

SEQ ID NO: 509160 - RNA, 32 nt, Human
ucuguugccaggcuggagugcaguggugcgau

SEQ ID NO: 509161 - RNA, 23 nt, Human
ucuguugccaggcuggggugcag

SEQ ID NO: 509162 - RNA, 32 nt, Human
ucuguugccaguuaaagguuccuuggagauga

SEQ ID NO: 509163 - RNA, 24 nt, Human
ucuguugcccaagcuggaguacag

SEQ ID NO: 509164 - RNA, 24 nt, Human
ucuguugcccaagcuggagugcag

SEQ ID NO: 509165 - RNA, 32 nt, Human
ucuguugcccacaaccuguuuucacccguuuc

SEQ ID NO: 509166 - RNA, 32 nt, Human
ucuguugcccacuuuccuugggccauaccuuc

SEQ ID NO: 509167 - RNA, 23 nt, Human
ucuguugcccagacuagaguaca

SEQ ID NO: 509168 - RNA, 24 nt, Human
ucuguugcccagacuagagugcag

SEQ ID NO: 509169 - RNA, 17 nt, Human
ucuguugcccagacugg

SEQ ID NO: 509170 - RNA, 24 nt, Human
ucuguugcccagacuggagugcag

SEQ ID NO: 509171 - RNA, 32 nt, Human
ucuguugcccagcuggagugcaguggcgugau

SEQ ID NO: 509172 - RNA, 32 nt, Human
ucuguugcccagcuggagugcaguggugugau

SEQ ID NO: 509173 - RNA, 24 nt, Human
ucuguugcccaggagggagugcag

SEQ ID NO: 509174 - RNA, 32 nt, Human
ucuguugcccaggagggagugcaguggugcaa

SEQ ID NO: 509175 - RNA, 32 nt, Human
ucuguugcccaggauggagugcaguggugaga

SEQ ID NO: 509176 - RNA, 24 nt, Human
ucuguugcccaggcaagagugcag

SEQ ID NO: 509177 - RNA, 23 nt, Human
ucuguugcccaggcuagagugca

SEQ ID NO: 509178 - RNA, 24 nt, Human
ucuguugcccaggcuagagugcag

SEQ ID NO: 509179 - RNA, 24 nt, Human
ucuguugcccaggcugaagugcag

SEQ ID NO: 509180 - RNA, 20 nt, Human
ucuguugcccaggcugcugg

SEQ ID NO: 509181 - RNA, 24 nt, Human
ucuguugcccaggcuggaaugcag

SEQ ID NO: 509182 - RNA, 23 nt, Human
ucuguugcccaggcuggaguaca

SEQ ID NO: 509183 - RNA, 24 nt, Human
ucuguugcccaggcuggaguacag

SEQ ID NO: 509184 - RNA, 23 nt, Human
ucuguugcccaggcuggagugca

SEQ ID NO: 509185 - RNA, 24 nt, Human
ucuguugcccaggcuggagugcag

SEQ ID NO: 509186 - RNA, 32 nt, Human
ucuguugcccaggcuggagugcagugacguga

SEQ ID NO: 509187 - RNA, 32 nt, Human
ucuguugcccaggcuggagugcagugauguga

SEQ ID NO: 509188 - RNA, 32 nt, Human
ucuguugcccaggguggagugcaguggcauga

SEQ ID NO: 509189 - RNA, 32 nt, Human
ucuguugcccagucuggagugcaguggcgcag

SEQ ID NO: 509190 - RNA, 32 nt, Human
ucuguugcccaugccccugccugaaaguguag

SEQ ID NO: 509191 - RNA, 32 nt, Human
ucuguugccccaggcuggagugcaguggcgug

SEQ ID NO: 509192 - RNA, 32 nt, Human
ucuguugccccaggcuggagugcaguggugug

SEQ ID NO: 509193 - RNA, 32 nt, Human
ucuguugcccgggcuggagugcagugguguga

SEQ ID NO: 509194 - RNA, 23 nt, Human
ucuguugccgcucguuuuuguca

SEQ ID NO: 509195 - RNA, 24 nt, Human
ucuguugccuaggccagagugcag

SEQ ID NO: 509196 - RNA, 32 nt, Human
ucuguugccuaggcuggagugcagugaggcaa

SEQ ID NO: 509197 - RNA, 32 nt, Human
ucuguugccuaggcuggagugcaguggcgcaa

SEQ ID NO: 509198 - RNA, 32 nt, Human
ucuguugccuaggcuggagugcaguggcgcga

SEQ ID NO: 509199 - RNA, 32 nt, Human
ucuguugccuccucucucccugccucacaucu

SEQ ID NO: 509200 - RNA, 32 nt, Human
ucuguugccugggcuggagugcagugccacga

SEQ ID NO: 509201 - RNA, 32 nt, Human
ucuguugccugggcuggagugcaguggcauga

SEQ ID NO: 509202 - RNA, 32 nt, Human
ucuguugccugggcuggagugcaguggcccaa

SEQ ID NO: 509203 - RNA, 32 nt, Human
ucuguugccugggcuggagugcaguggcguga

SEQ ID NO: 509204 - RNA, 22 nt, Human
ucuguugccuuucuuuccugcu

SEQ ID NO: 509205 - RNA, 32 nt, Human
ucuguugcuaggcuggagugcaguggcacaau

SEQ ID NO: 509206 - RNA, 32 nt, Human
ucuguugcuaggcuggagugcaguggugcgau

SEQ ID NO: 509207 - RNA, 32 nt, Human
ucuguugcuaucuaagaacugcauacccuccu

SEQ ID NO: 509208 - RNA, 32 nt, Human
ucuguugcucaccucugucccuccagaacucg

SEQ ID NO: 509209 - RNA, 32 nt, Human
ucuguugcucaggcuggauugcaguggcguga

SEQ ID NO: 509210 - RNA, 32 nt, Human
ucuguugcucagucuagggugcagugacguga

SEQ ID NO: 509211 - RNA, 32 nt, Human
ucuguugcucugggauccugccagucuuccgc

SEQ ID NO: 509212 - RNA, 32 nt, Human
ucuguugcugaggcuggagugcagugauguga

SEQ ID NO: 509213 - RNA, 32 nt, Human
ucuguugcuugggcugcaaugcagugaugcaa

SEQ ID NO: 509214 - RNA, 32 nt, Human
ucuguugcuuucucccuguggcucgcgccguc

SEQ ID NO: 509215 - RNA, 32 nt, Human
ucuguuggaggacaucccagauuugcuuauac

SEQ ID NO: 509216 - RNA, 32 nt, Human
ucuguuggaggcacaguuuuagaauaaggagg

SEQ ID NO: 509217 - RNA, 32 nt, Human
ucuguuggcaaggacagguuacagaauaggaa

SEQ ID NO: 509218 - RNA, 32 nt, Human
ucuguuggcagacuggagugcaaucauggcuc

SEQ ID NO: 509219 - RNA, 24 nt, Human
ucuguuggccaggcuggaaugcag

SEQ ID NO: 509220 - RNA, 32 nt, Human
ucuguuggccaggcuggaaugcaguggcacaa

SEQ ID NO: 509221 - RNA, 24 nt, Human
ucuguuggccaggcuggagugcag

SEQ ID NO: 509222 - RNA, 32 nt, Human
ucuguuggcugcagaaagaagucagaauagag

SEQ ID NO: 509223 - RNA, 32 nt, Human
ucuguugggacccuuaucuuaacucaccacuu

SEQ ID NO: 509224 - RNA, 32 nt, Human
ucuguugggcugggaaaugucucuuucauauu

SEQ ID NO: 509225 - RNA, 32 nt, Human
ucuguugggucaguggagaugggugaggagca

SEQ ID NO: 509226 - RNA, 32 nt, Human
ucuguugggucuuaggccuccuucccuccuca

SEQ ID NO: 509227 - RNA, 32 nt, Human
ucuguugggugggaugggaggggguagaggga

SEQ ID NO: 509228 - RNA, 22 nt, Human
ucuguuguauucugauuuuuua

SEQ ID NO: 509229 - RNA, 32 nt, Human
ucuguugucaacugcuguacccagaaaucuag

SEQ ID NO: 509230 - RNA, 32 nt, Human
ucuguuguccaagcuagagugcagugauacca

SEQ ID NO: 509231 - RNA, 32 nt, Human
ucuguuguccaaggcuggaguguaguagugcu

SEQ ID NO: 509232 - RNA, 32 nt, Human
ucuguuguccaggauggagugcagugguugau

SEQ ID NO: 509233 - RNA, 24 nt, Human
ucuguuguccaggcuagagugcag

SEQ ID NO: 509234 - RNA, 23 nt, Human
ucuguuguccaggcuggagugca

SEQ ID NO: 509235 - RNA, 24 nt, Human
ucuguuguccaggcuggagugcag

SEQ ID NO: 509236 - RNA, 32 nt, Human
ucuguuguccccacuaccaucucccucucuca

SEQ ID NO: 509237 - RNA, 32 nt, Human
ucuguuguccgagggagauuuggggaaaaaga

SEQ ID NO: 509238 - RNA, 32 nt, Human
ucuguugugugaagacaggagcugaaugcuca

SEQ ID NO: 509239 - RNA, 32 nt, Human
ucuguuguuguuguuuuagaugggcucauuac

SEQ ID NO: 509240 - RNA, 32 nt, Human
ucuguuuaaaugguaauguagcauuuauuuug

SEQ ID NO: 509241 - RNA, 32 nt, Human
ucuguuuaauugauuggugcugugaggaguuc

SEQ ID NO: 509242 - RNA, 32 nt, Human
ucuguuuaauuuuucaguccaaagagaggaaa

SEQ ID NO: 509243 - RNA, 32 nt, Human
ucuguuuacauccugauuuguauacuauuuua

SEQ ID NO: 509244 - RNA, 32 nt, Human
ucuguuuacuuccucuggggaaggcagacuga

SEQ ID NO: 509245 - RNA, 32 nt, Human
ucuguuuaggucccaauaaggaaggucugucc

SEQ ID NO: 509246 - RNA, 23 nt, Human
ucuguuuauguucuguauauguu

SEQ ID NO: 509247 - RNA, 32 nt, Human
ucuguuuauuugggaagucacacucuguauuc

SEQ ID NO: 509248 - RNA, 32 nt, Human
ucuguuucaauuacacaugccugucagcaaaa

SEQ ID NO: 509249 - RNA, 32 nt, Human
ucuguuucacuggguagucuaaaacuagcuua

SEQ ID NO: 509250 - RNA, 32 nt, Human
ucuguuucaggugcccuuggugcaguauaaau

SEQ ID NO: 509251 - RNA, 32 nt, Human
ucuguuucaugcaguggaugaggagggugagu

SEQ ID NO: 509252 - RNA, 32 nt, Human
ucuguuucauuaaggccucuacucuggcucag

SEQ ID NO: 509253 - RNA, 32 nt, Human
ucuguuucccccagacuccuggaguucuaguc

SEQ ID NO: 509254 - RNA, 32 nt, Human
ucuguuuccucuacuccuggcucagaaacagc

SEQ ID NO: 509255 - RNA, 32 nt, Human
ucuguuuccucuuccccuuucuccucguaugu

SEQ ID NO: 509256 - RNA, 32 nt, Human
ucuguuuccucuuccccuuucuccugguaugu

SEQ ID NO: 509257 - RNA, 32 nt, Human
ucuguuuccuggcaaguguuuccugcuacuuu

SEQ ID NO: 509258 - RNA, 32 nt, Human
ucuguuuccuucucuucucuuuccucccucuc

SEQ ID NO: 509259 - RNA, 32 nt, Human
ucuguuucuccucucuucucuccugccagucu

SEQ ID NO: 509260 - RNA, 32 nt, Human
ucuguuucugagucuccuauggaccaucuguc

SEQ ID NO: 509261 - RNA, 31 nt, Human
ucuguuucuuucucuggguaguguccccacu

SEQ ID NO: 509262 - RNA, 32 nt, Human
ucuguuucuuugccugagauccuuccugagga

SEQ ID NO: 509263 - RNA, 32 nt, Human
ucuguuugauaugccacugccuccaugccccu

SEQ ID NO: 509264 - RNA, 16 nt, Human
ucuguuugccuggaga

SEQ ID NO: 509265 - RNA, 20 nt, Human
ucuguuugccuucaguuuuu

SEQ ID NO: 509266 - RNA, 32 nt, Human
ucuguuugcgcccccguguccccagcugcaag

SEQ ID NO: 509267 - RNA, 32 nt, Human
ucuguuugcggcuaguuuuucuuucuguuucc

SEQ ID NO: 509268 - RNA, 32 nt, Human
ucuguuugcuuuugccccgcucuggcuuacca

SEQ ID NO: 509269 - RNA, 32 nt, Human
ucuguuuggaaauguuugccuucagggguacg

SEQ ID NO: 509270 - RNA, 32 nt, Human
ucuguuuggaagaucaguuagaaggcuaguuu

SEQ ID NO: 509271 - RNA, 25 nt, Human
ucuguuuggacuauguuuucuuuuc

SEQ ID NO: 509272 - RNA, 32 nt, Human
ucuguuuggccaccugguguggaugucacugu

SEQ ID NO: 509273 - RNA, 32 nt, Human
ucuguuuggccuagagguguggagugagagaa

SEQ ID NO: 509274 - RNA, 32 nt, Human
ucuguuugggaagacguggaggaaaaggugac

SEQ ID NO: 509275 - RNA, 32 nt, Human
ucuguuugggggucuaucucuccaucccucug

SEQ ID NO: 509276 - RNA, 32 nt, Human
ucuguuuggguguuggaagcugggcgauuccc

SEQ ID NO: 509277 - RNA, 32 nt, Human
ucuguuuguaaucauuaucucacuuuguaaau

SEQ ID NO: 509278 - RNA, 19 nt, Human
ucuguuugugccuuucaaa

SEQ ID NO: 509279 - RNA, 32 nt, Human
ucuguuugugguccuagcugagcccagccuug

SEQ ID NO: 509280 - RNA, 32 nt, Human
ucuguuuguguacgcacauacacacaugcacg

SEQ ID NO: 509281 - RNA, 31 nt, Human
ucuguuuuccucucuggaccucagucuucuc

SEQ ID NO: 509282 - RNA, 32 nt, Human
ucuguuuuccucucuggaccucagucuucucc

SEQ ID NO: 509283 - RNA, 32 nt, Human
ucuguuuugaaacuugaucuacaaucaguaaa

SEQ ID NO: 509284 - RNA, 32 nt, Human
ucuguuuugagucuuuacaaaauagccaguua

SEQ ID NO: 509285 - RNA, 19 nt, Human
ucuguuuugccuccugccu

SEQ ID NO: 509286 - RNA, 32 nt, Human
ucuguuuuguguccugguagcagcuguugagu

SEQ ID NO: 509287 - RNA, 32 nt, Human
ucuguuuuuaucuccccucucaggaccaguca

SEQ ID NO: 509288 - RNA, 32 nt, Human
ucuguuuuugagagggagucucgcucuguccc

SEQ ID NO: 509289 - RNA, 32 nt, Human
ucuguuuuugcuuuugugcuuaggcaagugca

SEQ ID NO: 509290 - RNA, 32 nt, Human
ucuguuuuugggcugagucaccaccuuugccu

SEQ ID NO: 509291 - RNA, 32 nt, Human
ucuuaaaaaggacaaugcugauggaagaccag

SEQ ID NO: 509292 - RNA, 32 nt, Human
ucuuaaaaaugagaaccaguggggaaauuguu

SEQ ID NO: 509293 - RNA, 22 nt, Human
ucuuaaaacucuuguauguguu

SEQ ID NO: 509294 - RNA, 32 nt, Human
ucuuaaaacugauguucugcauuuguuucuca

SEQ ID NO: 509295 - RNA, 32 nt, Human
ucuuaaaacugcauuguacagcucccucccug

SEQ ID NO: 509296 - RNA, 32 nt, Human
ucuuaaaagaggcauuaguucagaauacuuuu

SEQ ID NO: 509297 - RNA, 32 nt, Human
ucuuaaaagcaucagucuguaacuagaacaaa

SEQ ID NO: 509298 - RNA, 32 nt, Human
ucuuaaaaggagagaggaaaaacacaggcacc

SEQ ID NO: 509299 - RNA, 32 nt, Human
ucuuaaaaguaaaauauacuucaugcuguuua

SEQ ID NO: 509300 - RNA, 32 nt, Human
ucuuaaaauaguaauuucuccuacuuuucuuu

SEQ ID NO: 509301 - RNA, 32 nt, Human
ucuuaaaaugcaagauucucacuuugaagguu

SEQ ID NO: 509302 - RNA, 32 nt, Human
ucuuaaaaugugcuacauuugagaauagcuca

SEQ ID NO: 509303 - RNA, 32 nt, Human
ucuuaaaccaggaaggcagagauugcagugag

SEQ ID NO: 509304 - RNA, 32 nt, Human
ucuuaaacuacucuugguugucuuccuaaggg

SEQ ID NO: 509305 - RNA, 32 nt, Human
ucuuaaagaguuuaguuuuccucuccagaggg

SEQ ID NO: 509306 - RNA, 32 nt, Human
ucuuaaagcuaaauuagcuuuucauugcacac

SEQ ID NO: 509307 - RNA, 32 nt, Human
ucuuaaagcuccaaaaugaucuccuuugacuc

SEQ ID NO: 509308 - RNA, 32 nt, Human
ucuuaaaggccugagcuagcuggagaagaggg

SEQ ID NO: 509309 - RNA, 32 nt, Human
ucuuaaagggagcugaugcuggcaaugggauc

SEQ ID NO: 509310 - RNA, 32 nt, Human
ucuuaaagucuguuuuuagacuucauggucau

SEQ ID NO: 509311 - RNA, 32 nt, Human
ucuuaaaugaaugaaucaaagacauucaacag

SEQ ID NO: 509312 - RNA, 22 nt, Human
ucuuaaaugcaaucucuucucu

SEQ ID NO: 509313 - RNA, 32 nt, Human
ucuuaaauggcagcaggcaagaaagugugugc

SEQ ID NO: 509314 - RNA, 32 nt, Human
ucuuaaauggcaguaagagcuauagagaaaaa

SEQ ID NO: 509315 - RNA, 32 nt, Human
ucuuaaauguucuugguaggggaguuggcauu

SEQ ID NO: 509316 - RNA, 31 nt, Human
ucuuaacaagugucuaaagacaguaggcugu

SEQ ID NO: 509317 - RNA, 32 nt, Human
ucuuaacacacauacacauacacgcgcauaca

SEQ ID NO: 509318 - RNA, 32 nt, Human
ucuuaacacaguuucuugacagcagcucugga

SEQ ID NO: 509319 - RNA, 32 nt, Human
ucuuaacaccuguguuuccuuuucagaucuua

SEQ ID NO: 509320 - RNA, 32 nt, Human
ucuuaacacugguagcuccugucccauuccaa

SEQ ID NO: 509321 - RNA, 22 nt, Human
ucuuaacagaagccaaacaaga

SEQ ID NO: 509322 - RNA, 32 nt, Human
ucuuaacagauggggaagugagugcuacagag

SEQ ID NO: 509323 - RNA, 32 nt, Human
ucuuaacaggcaggcaaggggugcggggacca

SEQ ID NO: 509324 - RNA, 26 nt, Human
ucuuaacaugaagaucauuggacaag

SEQ ID NO: 509325 - RNA, 32 nt, Human
ucuuaacauggcagccauucugccuuugccgu

SEQ ID NO: 509326 - RNA, 32 nt, Human
ucuuaacauuugcaguccuugugucacugucu

SEQ ID NO: 509327 - RNA, 32 nt, Human
ucuuaaccaaccagccuuaccaaacaacacaa

SEQ ID NO: 509328 - RNA, 32 nt, Human
ucuuaaccacuauagaugucucuaaugcuucg

SEQ ID NO: 509329 - RNA, 32 nt, Human
ucuuaaccagcaguucuugucuggggagcuca

SEQ ID NO: 509330 - RNA, 24 nt, Human
ucuuaacgugaagaucaaacaaga

SEQ ID NO: 509331 - RNA, 32 nt, Human
ucuuaacucacugcaaccuccgcuucccaggu

SEQ ID NO: 509332 - RNA, 32 nt, Human
ucuuaacucgaugacuuggggcucccugcucu

SEQ ID NO: 509333 - RNA, 32 nt, Human
ucuuaacugcaaucuguuaacacugcugucuc

SEQ ID NO: 509334 - RNA, 32 nt, Human
ucuuaacuguguauacuaauucguuuugucuu

SEQ ID NO: 509335 - RNA, 32 nt, Human
ucuuaagaaaugcaagcuuguucagggggcug

SEQ ID NO: 509336 - RNA, 32 nt, Human
ucuuaagaaauguaucugcaugaacuccgugg

SEQ ID NO: 509337 - RNA, 32 nt, Human
ucuuaagaacacccuugucucagucccacuca

SEQ ID NO: 509338 - RNA, 32 nt, Human
ucuuaagagaugccucauuuuagaaccaccaa

SEQ ID NO: 509339 - RNA, 32 nt, Human
ucuuaagaggagauguagaaaaauguguacaa

SEQ ID NO: 509340 - RNA, 32 nt, Human
ucuuaagaggagcugugaaguuguguggaagc

SEQ ID NO: 509341 - RNA, 32 nt, Human
ucuuaagaggcugcgaugucuagguugggcuu

SEQ ID NO: 509342 - RNA, 32 nt, Human
ucuuaagauaauauuuaaaauaguuccagaua

SEQ ID NO: 509343 - RNA, 32 nt, Human
ucuuaagcaucagcgugacgugaccucucugu

SEQ ID NO: 509344 - RNA, 32 nt, Human
ucuuaagccccagaaagccaaaaagaacaugu

SEQ ID NO: 509345 - RNA, 32 nt, Human
ucuuaagccuucacuguugccuugccagaaug

SEQ ID NO: 509346 - RNA, 32 nt, Human
ucuuaaggguaguggcaugagaucuuuggaag

SEQ ID NO: 509347 - RNA, 32 nt, Human
ucuuaaggugcuuucgagauuaaauuauuaau

SEQ ID NO: 509348 - RNA, 32 nt, Human
ucuuaaguauguauguugaggccaucugagcu

SEQ ID NO: 509349 - RNA, 32 nt, Human
ucuuaagugcaauuauuuuaauaaaaggggca

SEQ ID NO: 509350 - RNA, 32 nt, Human
ucuuaaguugguagcugaggguaucaggcauc

SEQ ID NO: 509351 - RNA, 32 nt, Human
ucuuaauaacagauucuucugaagacagaauu

SEQ ID NO: 509352 - RNA, 32 nt, Human
ucuuaauauucuaugugcuauguaccagauaa

SEQ ID NO: 509353 - RNA, 32 nt, Human
ucuuaauccacuuucuaaauggagguuuagga

SEQ ID NO: 509354 - RNA, 32 nt, Human
ucuuaaugaaccuaugagaguguugugaaguu

SEQ ID NO: 509355 - RNA, 32 nt, Human
ucuuaaugaaguuugaauguuaaauaaauugu

SEQ ID NO: 509356 - RNA, 32 nt, Human
ucuuaaugagagacaagugagguggagggccu

SEQ ID NO: 509357 - RNA, 32 nt, Human
ucuuaaugcauauggggaaacugaggcccaga

SEQ ID NO: 509358 - RNA, 32 nt, Human
ucuuaaugguauagccuccugagauuaaaugu

SEQ ID NO: 509359 - RNA, 32 nt, Human
ucuuaauguagaaagaaaaauggagacuugua

SEQ ID NO: 509360 - RNA, 32 nt, Human
ucuuaauguaucuggcauuugggugaacugug

SEQ ID NO: 509361 - RNA, 32 nt, Human
ucuuaauguguguguuuuuacuugcauaucug

SEQ ID NO: 509362 - RNA, 24 nt, Human
ucuuaauucaguucuguauguguu

SEQ ID NO: 509363 - RNA, 23 nt, Human
ucuuaauucauuuucauauuguu

SEQ ID NO: 509364 - RNA, 26 nt, Human
ucuuaauuccuauuucaauauguguu

SEQ ID NO: 509365 - RNA, 32 nt, Human
ucuuaauucugaguugcucuuggaucucuaca

SEQ ID NO: 509366 - RNA, 20 nt, Human
ucuuaauugaguuguauugu

SEQ ID NO: 509367 - RNA, 32 nt, Human
ucuuaauuguuggcugggcacaguggcucacg

SEQ ID NO: 509368 - RNA, 32 nt, Human
ucuuacaacucauguacccauugcuaguuuuu

SEQ ID NO: 509369 - RNA, 22 nt, Human
ucuuacaacucccccaccgccc

SEQ ID NO: 509370 - RNA, 32 nt, Human
ucuuacaacuggcucuuccuccccucacuaag

SEQ ID NO: 509371 - RNA, 32 nt, Human
ucuuacaagagguugcaucucaguacacagug

SEQ ID NO: 509372 - RNA, 32 nt, Human
ucuuacaaugcauuccuuuaacuugucccugg

SEQ ID NO: 509373 - RNA, 32 nt, Human
ucuuacacaugugacccccacccagacagagg

SEQ ID NO: 509374 - RNA, 32 nt, Human
ucuuacaccauugcuuuccauucuccagaacu

SEQ ID NO: 509375 - RNA, 23 nt, Human
ucuuacacucuauccuuccuaga

SEQ ID NO: 509376 - RNA, 32 nt, Human
ucuuacagaaucucccagacauaugguguuaa

SEQ ID NO: 509377 - RNA, 32 nt, Human
ucuuacaggaaggaggaggggaagcaguggau

SEQ ID NO: 509378 - RNA, 32 nt, Human
ucuuacaggacuaauuucagugguguaaauaa

SEQ ID NO: 509379 - RNA, 32 nt, Human
ucuuacagggagagagauugggugcaauuugc

SEQ ID NO: 509380 - RNA, 32 nt, Human
ucuuacagguauaguuccgugauuaugauagc

SEQ ID NO: 509381 - RNA, 24 nt, Human
ucuuacagugauggaaaugcucua

SEQ ID NO: 509382 - RNA, 32 nt, Human
ucuuacauacaugaaagccaucaaagacaaag

SEQ ID NO: 509383 - RNA, 32 nt, Human
ucuuacaucuaauuuguagaaacaguauaagu

SEQ ID NO: 509384 - RNA, 32 nt, Human
ucuuacauggaugucaggagagcugcugcccu

SEQ ID NO: 509385 - RNA, 32 nt, Human
ucuuacauguagagauuugagugcaguuggua

SEQ ID NO: 509386 - RNA, 32 nt, Human
ucuuacauuccaguagaaaacucucucugcaa

SEQ ID NO: 509387 - RNA, 32 nt, Human
ucuuacauuccuuuucaucauuuccuuuguaa

SEQ ID NO: 509388 - RNA, 32 nt, Human
ucuuacauuuccauuugcaaagugacuagaga

SEQ ID NO: 509389 - RNA, 32 nt, Human
ucuuaccaaaguuuagagucugaguuuuucgu

SEQ ID NO: 509390 - RNA, 32 nt, Human
ucuuaccaagagugggcuuuguggaaacagcu

SEQ ID NO: 509391 - RNA, 32 nt, Human
ucuuaccagcauuucuucugggcuugugaugu

SEQ ID NO: 509392 - RNA, 32 nt, Human
ucuuaccaggagacaggguuugagagcagaca

SEQ ID NO: 509393 - RNA, 32 nt, Human
ucuuacccagcccuggucaagaaucugugagg

SEQ ID NO: 509394 - RNA, 32 nt, Human
ucuuaccccaagcugggccuugcaguaccugu

SEQ ID NO: 509395 - RNA, 32 nt, Human
ucuuaccccuuuccuauacuuucuuguuaucc

SEQ ID NO: 509396 - RNA, 21 nt, Human
ucuuacccucccucccuuccu

SEQ ID NO: 509397 - RNA, 32 nt, Human
ucuuacccugcacaaucucccccuccagcuuc

SEQ ID NO: 509398 - RNA, 32 nt, Human
ucuuaccgaucugugucugugacuugacuccu

SEQ ID NO: 509399 - RNA, 32 nt, Human
ucuuaccgcauaccacuucacacuuguuuuau

SEQ ID NO: 509400 - RNA, 32 nt, Human
ucuuaccucauuaagaguaguaaugaaaaaca

SEQ ID NO: 509401 - RNA, 32 nt, Human
ucuuaccuccacccuccuccugccacccuugu

SEQ ID NO: 509402 - RNA, 32 nt, Human
ucuuaccuccccuggcccuccuuucuggcuca

SEQ ID NO: 509403 - RNA, 32 nt, Human
ucuuaccucuugugguucucaauaaaacagaa

SEQ ID NO: 509404 - RNA, 32 nt, Human
ucuuaccuguaauccuagcacuuugagaccac

SEQ ID NO: 509405 - RNA, 32 nt, Human
ucuuaccugugcgggagcgaaaaagcugggcu

SEQ ID NO: 509406 - RNA, 32 nt, Human
ucuuacgccaugguuaugagcagguugaugag

SEQ ID NO: 509407 - RNA, 32 nt, Human
ucuuacgccucagccuccugaguagauggaac

SEQ ID NO: 509408 - RNA, 32 nt, Human
ucuuacggcuuccauaauggcuaguugauauu

SEQ ID NO: 509409 - RNA, 32 nt, Human
ucuuacguucuuucagcaugcuccuuaaaacc

SEQ ID NO: 509410 - RNA, 24 nt, Human
ucuuacuagacagauauccacuua

SEQ ID NO: 509411 - RNA, 32 nt, Human
ucuuacuaugucccuugcuucaggcccuggcc

SEQ ID NO: 509412 - RNA, 32 nt, Human
ucuuacuccugccuccccauuccuugccuguc

SEQ ID NO: 509413 - RNA, 32 nt, Human
ucuuacucuccccucaugguguuccccucuua

SEQ ID NO: 509414 - RNA, 32 nt, Human
ucuuacucuugucaccugggcugcaguuggag

SEQ ID NO: 509415 - RNA, 32 nt, Human
ucuuacugaagugccugaaacccaaagcuaga

SEQ ID NO: 509416 - RNA, 32 nt, Human
ucuuacugagauacccucucaccccaaaugug

SEQ ID NO: 509417 - RNA, 32 nt, Human
ucuuacugaggacuuuugauccugguuuuuga

SEQ ID NO: 509418 - RNA, 22 nt, Human
ucuuacugcucucacaauucua

SEQ ID NO: 509419 - RNA, 32 nt, Human
ucuuacuggcuucucaauuuucuuccuucucu

SEQ ID NO: 509420 - RNA, 32 nt, Human
ucuuacuguuccaggguggccccaggcagcag

SEQ ID NO: 509421 - RNA, 31 nt, Human
ucuuacuguuucucuggguuguuugucagau

SEQ ID NO: 509422 - RNA, 32 nt, Human
ucuuacuucuaauauccaucccuggacuuuuu

SEQ ID NO: 509423 - RNA, 32 nt, Human
ucuuacuuuauccuuuuuccuuaaguauuggu

SEQ ID NO: 509424 - RNA, 32 nt, Human
ucuuacuuuccucugccugccucaguuuaauu

SEQ ID NO: 509425 - RNA, 32 nt, Human
ucuuacuuugucccugcuguguccucuagcau

SEQ ID NO: 509426 - RNA, 32 nt, Human
ucuuagaaaaaccaccaccaucaccagacagg

SEQ ID NO: 509427 - RNA, 32 nt, Human
ucuuagaaccaccacuaacugcuugacugcca

SEQ ID NO: 509428 - RNA, 21 nt, Human
ucuuagaagaaaccccaugaa

SEQ ID NO: 509429 - RNA, 32 nt, Human
ucuuagaagccuccccugacuucacugugcuu

SEQ ID NO: 509430 - RNA, 32 nt, Human
ucuuagaaugucccucucuugggacuugcuua

SEQ ID NO: 509431 - RNA, 32 nt, Human
ucuuagaccagaacauguagguccccuugugu

SEQ ID NO: 509432 - RNA, 32 nt, Human
ucuuagaccauggcgacccaggcgaagcgucc

SEQ ID NO: 509433 - RNA, 32 nt, Human
ucuuagacugaguaaaguguuaauaccauacc

SEQ ID NO: 509434 - RNA, 32 nt, Human
ucuuagagacauggucuaaccauguugucuag

SEQ ID NO: 509435 - RNA, 32 nt, Human
ucuuagagacugcuucucccaaacauaacgcg

SEQ ID NO: 509436 - RNA, 32 nt, Human
ucuuagagauagauugcaugagggccaugagg

SEQ ID NO: 509437 - RNA, 32 nt, Human
ucuuagagccagagcccacagagcugggggug

SEQ ID NO: 509438 - RNA, 21 nt, Human
ucuuagagccccccucccccu

SEQ ID NO: 509439 - RNA, 22 nt, Human
ucuuagaggaagagaagaaaca

SEQ ID NO: 509440 - RNA, 32 nt, Human
ucuuagaggaagagaagaaacauggcaagcag

SEQ ID NO: 509441 - RNA, 32 nt, Human
ucuuagaucaaauuuaugccaauuauaugaaa

SEQ ID NO: 509442 - RNA, 32 nt, Human
ucuuagaugcaguucugaagaagaugguacca

SEQ ID NO: 509443 - RNA, 32 nt, Human
ucuuagauguugguggugcagccccaggacca

SEQ ID NO: 509444 - RNA, 32 nt, Human
ucuuagcaaaguaaaaaggacagugauaacag

SEQ ID NO: 509445 - RNA, 32 nt, Human
ucuuagcacauccucuguucucuaccugucau

SEQ ID NO: 509446 - RNA, 32 nt, Human
ucuuagcacuuagcacugccuaccucaucaug

SEQ ID NO: 509447 - RNA, 31 nt, Human
ucuuagcaggagagagagcgaggaguuguca

SEQ ID NO: 509448 - RNA, 31 nt, Human
ucuuagcaggagagagagugaggaguuguca

SEQ ID NO: 509449 - RNA, 32 nt, Human
ucuuagccaaaaaccuaggguucauuuucagg

SEQ ID NO: 509450 - RNA, 32 nt, Human
ucuuagccaagaaaagcuaaccaaacaagcug

SEQ ID NO: 509451 - RNA, 32 nt, Human
ucuuagccaagcucuguaaaaccauuuaccug

SEQ ID NO: 509452 - RNA, 32 nt, Human
ucuuagccaaguuugaaaccagccuaauuuac

SEQ ID NO: 509453 - RNA, 32 nt, Human
ucuuagccacaugcuaaccaguugcuucucag

SEQ ID NO: 509454 - RNA, 32 nt, Human
ucuuagccagugacugcagagcagggauacca

SEQ ID NO: 509455 - RNA, 32 nt, Human
ucuuagccaguggacaggcuguccugaaugaa

SEQ ID NO: 509456 - RNA, 32 nt, Human
ucuuagccauggggaggaaggagcuggacugu

SEQ ID NO: 509457 - RNA, 32 nt, Human
ucuuagccccuucacugcccuucuccaucucu

SEQ ID NO: 509458 - RNA, 32 nt, Human
ucuuagccccuucaucaugucaucucccuuau

SEQ ID NO: 509459 - RNA, 32 nt, Human
ucuuagcccgggcuaaucucuuuuccuugaug

SEQ ID NO: 509460 - RNA, 32 nt, Human
ucuuagcccuaguggggugcucagaucucuca

SEQ ID NO: 509461 - RNA, 32 nt, Human
ucuuagcccugagguuuccuccuucccaucuu

SEQ ID NO: 509462 - RNA, 32 nt, Human
ucuuagcccuuguaauccuagcacuuugggag

SEQ ID NO: 509463 - RNA, 32 nt, Human
ucuuagccuacguuaccaggagcccugacaug

SEQ ID NO: 509464 - RNA, 32 nt, Human
ucuuagccuucucucugacuuuacaggacaaa

SEQ ID NO: 509465 - RNA, 32 nt, Human
ucuuagcucacugcaacccccgccucccgggu

SEQ ID NO: 509466 - RNA, 32 nt, Human
ucuuagcucacugcaaccuccaccucccaggu

SEQ ID NO: 509467 - RNA, 32 nt, Human
ucuuagcucacugcaaccuccaccucccgggu

SEQ ID NO: 509468 - RNA, 32 nt, Human
ucuuagcucacugcaaccuccgccuccugggu

SEQ ID NO: 509469 - RNA, 32 nt, Human
ucuuagcucacugcaaccucugcuuccugggu

SEQ ID NO: 509470 - RNA, 32 nt, Human
ucuuagcucacugcaagcuccgccucccaggu

SEQ ID NO: 509471 - RNA, 32 nt, Human
ucuuagcucacugcagccuccaccucccaggc

SEQ ID NO: 509472 - RNA, 32 nt, Human
ucuuagcucucugcaaccucugccucccaggu

SEQ ID NO: 509473 - RNA, 32 nt, Human
ucuuagcugagaacuaagagaugagggaggca

SEQ ID NO: 509474 - RNA, 21 nt, Human
ucuuagcugauagguggcagg

SEQ ID NO: 509475 - RNA, 32 nt, Human
ucuuagcugucuguuccugcucacacugccag

SEQ ID NO: 509476 - RNA, 32 nt, Human
ucuuagcuuuaguuuaucucucugccugaaga

SEQ ID NO: 509477 - RNA, 32 nt, Human
ucuuaggaagcugaauguuguguuaucacuaa

SEQ ID NO: 509478 - RNA, 32 nt, Human
ucuuaggacaugcaucuuuaagcuuuaucauu

SEQ ID NO: 509479 - RNA, 32 nt, Human
ucuuaggagccuagggugucuccucugcuucu

SEQ ID NO: 509480 - RNA, 32 nt, Human
ucuuaggagugacugggggagggaagauuauu

SEQ ID NO: 509481 - RNA, 32 nt, Human
ucuuaggauguguaugcucucaaagaguuugc

SEQ ID NO: 509482 - RNA, 32 nt, Human
ucuuaggauuaaggguccaaaaaugcugaucu

SEQ ID NO: 509483 - RNA, 32 nt, Human
ucuuaggauuagugaaaauuuaugcuuuauua

SEQ ID NO: 509484 - RNA, 32 nt, Human
ucuuaggcacagcauuacucaccaucucacag

SEQ ID NO: 509485 - RNA, 26 nt, Human
ucuuaggcauucuaucuuugcucaaa

SEQ ID NO: 509486 - RNA, 32 nt, Human
ucuuaggcgauuuguggggugcagugaaugaa

SEQ ID NO: 509487 - RNA, 21 nt, Human
ucuuaggcuggagugcagugg

SEQ ID NO: 509488 - RNA, 32 nt, Human
ucuuaggcugugagacaggagcaggggaacca

SEQ ID NO: 509489 - RNA, 20 nt, Human
ucuuaggcuuccagccucua

SEQ ID NO: 509490 - RNA, 32 nt, Human
ucuuagggaggcagaggcaggaggauagcuug

SEQ ID NO: 509491 - RNA, 32 nt, Human
ucuuagggcaccaagccagggaagggagaagu

SEQ ID NO: 509492 - RNA, 32 nt, Human
ucuuagggcuuuuguguaugucugacuuguuu

SEQ ID NO: 509493 - RNA, 32 nt, Human
ucuuaggguaaugagauggaugguggcccagg

SEQ ID NO: 509494 - RNA, 32 nt, Human
ucuuaggucccuuuggaggauauugauggggg

SEQ ID NO: 509495 - RNA, 32 nt, Human
ucuuagguuuaacuuaauucuggucauugucu

SEQ ID NO: 509496 - RNA, 32 nt, Human
ucuuaguaaaaauacaaaauuggccuggcgug

SEQ ID NO: 509497 - RNA, 32 nt, Human
ucuuaguaagauuucugucuucucccaggucu

SEQ ID NO: 509498 - RNA, 32 nt, Human
ucuuaguaugagaaacagaagacugaagaaua

SEQ ID NO: 509499 - RNA, 32 nt, Human
ucuuagucacccagacuagaggucaguggcag

SEQ ID NO: 509500 - RNA, 32 nt, Human
ucuuaguccaucuguucccucuccucuccuca

SEQ ID NO: 509501 - RNA, 32 nt, Human
ucuuagucccacccucaccauaaacauccaag

SEQ ID NO: 509502 - RNA, 21 nt, Human
ucuuagucccuuuccuauccc

SEQ ID NO: 509503 - RNA, 32 nt, Human
ucuuaguccuugcccugccucaguuuaccugc

SEQ ID NO: 509504 - RNA, 31 nt, Human
ucuuaguggguggaugggcauggauagaaau

SEQ ID NO: 509505 - RNA, 22 nt, Human
ucuuagugguggaucaucaggu

SEQ ID NO: 509506 - RNA, 32 nt, Human
ucuuagugugcccaggagucugaucugcuggg

SEQ ID NO: 509507 - RNA, 32 nt, Human
ucuuaguguucaccaguuguacugcaauauag

SEQ ID NO: 509508 - RNA, 32 nt, Human
ucuuaguguuuagugggccacuucucugaugu

SEQ ID NO: 509509 - RNA, 32 nt, Human
ucuuaguuauucacagcucagcccgauaggca

SEQ ID NO: 509510 - RNA, 32 nt, Human
ucuuaguucugacuucucaguuuaauguggga

SEQ ID NO: 509511 - RNA, 32 nt, Human
ucuuauaaagggacagucaguugugucaacac

SEQ ID NO: 509512 - RNA, 32 nt, Human
ucuuauaaaugagaggauuguggaaacuugua

SEQ ID NO: 509513 - RNA, 32 nt, Human
ucuuauaagaaaacaaaaauucccucaggcua

SEQ ID NO: 509514 - RNA, 32 nt, Human
ucuuauaagaaagcucugagaaugggcauuuu

SEQ ID NO: 509515 - RNA, 32 nt, Human
ucuuauaagagggaggcaggaggguuagagug

SEQ ID NO: 509516 - RNA, 32 nt, Human
ucuuauacaaaugaagaaguugcaaagaauac

SEQ ID NO: 509517 - RNA, 21 nt, Human
ucuuauacaucuccuccaucu

SEQ ID NO: 509518 - RNA, 32 nt, Human
ucuuauacauguauccuaaaaagagaagcuca

SEQ ID NO: 509519 - RNA, 32 nt, Human
ucuuauaccucaaacccaccucacaggaacua

SEQ ID NO: 509520 - RNA, 32 nt, Human
ucuuauacugcaacugugucuccuaggggaca

SEQ ID NO: 509521 - RNA, 32 nt, Human
ucuuauacuuucaguagcaucuuuccacagca

SEQ ID NO: 509522 - RNA, 32 nt, Human
ucuuauacuuuuucaguugcugucuuauucuc

SEQ ID NO: 509523 - RNA, 32 nt, Human
ucuuauagagucuccuagaauauuucauuggc

SEQ ID NO: 509524 - RNA, 32 nt, Human
ucuuauagcacuggaggaggaaaacaaauucu

SEQ ID NO: 509525 - RNA, 32 nt, Human
ucuuauauccauuggcagugugcaguguuggc

SEQ ID NO: 509526 - RNA, 32 nt, Human
ucuuaucacaggcuacaacauagaugaaccuu

SEQ ID NO: 509527 - RNA, 32 nt, Human
ucuuaucacccagcucccuggggaauggguag

SEQ ID NO: 509528 - RNA, 32 nt, Human
ucuuaucagcuggugcugcuuccugagccaua

SEQ ID NO: 509529 - RNA, 32 nt, Human
ucuuaucagucugacaaucucugccuuuugau

SEQ ID NO: 509530 - RNA, 32 nt, Human
ucuuaucaguguccuugacaagcauucauauu

SEQ ID NO: 509531 - RNA, 32 nt, Human
ucuuauccaacuuuuucauaguaagugcgaag

SEQ ID NO: 509532 - RNA, 32 nt, Human
ucuuauccuaguuugcuauccuuauuauuugu

SEQ ID NO: 509533 - RNA, 32 nt, Human
ucuuauccucauugcauuucuaugcauauaca

SEQ ID NO: 509534 - RNA, 32 nt, Human
ucuuauccucauugcauuucuaugcauaugcg

SEQ ID NO: 509535 - RNA, 32 nt, Human
ucuuauccuccaccgucuuucuuuuauacuga

SEQ ID NO: 509536 - RNA, 32 nt, Human
ucuuauccuccagaauagagaccuaaggacac

SEQ ID NO: 509537 - RNA, 32 nt, Human
ucuuauccuuaacaagacagcacuccagauag

SEQ ID NO: 509538 - RNA, 32 nt, Human
ucuuaucgccauggacugggaauuaacaugua

SEQ ID NO: 509539 - RNA, 32 nt, Human
ucuuaucgcccaggcuggggugcaauggcgca

SEQ ID NO: 509540 - RNA, 22 nt, Human
ucuuaucggagcuuguaugugu

SEQ ID NO: 509541 - RNA, 32 nt, Human
ucuuaucuaauuuaucucuucuggacccaugu

SEQ ID NO: 509542 - RNA, 32 nt, Human
ucuuaucuacuugcacuguucacccuucacau

SEQ ID NO: 509543 - RNA, 32 nt, Human
ucuuaucuauauuuuaaccugggagacuguug

SEQ ID NO: 509544 - RNA, 32 nt, Human
ucuuaucuccguccucccuguccuucaaggcc

SEQ ID NO: 509545 - RNA, 32 nt, Human
ucuuaucugaguaguugggaggaggggaauac

SEQ ID NO: 509546 - RNA, 32 nt, Human
ucuuaucuucauuuuccuuuguuuauaaugaa

SEQ ID NO: 509547 - RNA, 32 nt, Human
ucuuaucuucugucuguucucuuuucucuccc

SEQ ID NO: 509548 - RNA, 32 nt, Human
ucuuaucuuggcugggaucucacacaugucua

SEQ ID NO: 509549 - RNA, 32 nt, Human
ucuuaugaacgaaaaagagguagcacuacaaa

SEQ ID NO: 509550 - RNA, 32 nt, Human
ucuuaugagcuggcuggauuuggcuuguggac

SEQ ID NO: 509551 - RNA, 32 nt, Human
ucuuaugagcuugugggcuccaucuaccaacc

SEQ ID NO: 509552 - RNA, 32 nt, Human
ucuuaugcaaaaaggaaaacacacacaaccaa

SEQ ID NO: 509553 - RNA, 32 nt, Human
ucuuaugcaaaggcugacuugccugaacgcua

SEQ ID NO: 509554 - RNA, 29 nt, Human
ucuuaugcacacucaugaacaagcugcag

SEQ ID NO: 509555 - RNA, 24 nt, Human
ucuuaugcccaauuucugcuucca

SEQ ID NO: 509556 - RNA, 21 nt, Human
ucuuaugccccauuccuguca

SEQ ID NO: 509557 - RNA, 32 nt, Human
ucuuauggauguccccagcagagagguuugca

SEQ ID NO: 509558 - RNA, 32 nt, Human
ucuuauggcaaugaccccugacggcagaaugc

SEQ ID NO: 509559 - RNA, 21 nt, Human
ucuuauggcuucucuuguccu

SEQ ID NO: 509560 - RNA, 32 nt, Human
ucuuaugggaaagagugagaggaaagaagguu

SEQ ID NO: 509561 - RNA, 32 nt, Human
ucuuaugggguucuccaccugccccagagcuu

SEQ ID NO: 509562 - RNA, 32 nt, Human
ucuuaugguggagcagcugaggagggcaggaa

SEQ ID NO: 509563 - RNA, 32 nt, Human
ucuuauguucccccacaugcaggugguuuuuc

SEQ ID NO: 509564 - RNA, 31 nt, Human
ucuuauguuuugaaauaccugugaauuguug

SEQ ID NO: 509565 - RNA, 32 nt, Human
ucuuauuagcaaggagauugggguuuugagug

SEQ ID NO: 509566 - RNA, 32 nt, Human
ucuuauuaucuagauucacguuuucugugcac

SEQ ID NO: 509567 - RNA, 32 nt, Human
ucuuauucccccaagagaaugggaugauguuc

SEQ ID NO: 509568 - RNA, 32 nt, Human
ucuuauuccucuucuguccuuucuccucuccu

SEQ ID NO: 509569 - RNA, 32 nt, Human
ucuuauucuagcccaaacuuuccuuuucacca

SEQ ID NO: 509570 - RNA, 32 nt, Human
ucuuauugcaccauacuccuugcuuccugaug

SEQ ID NO: 509571 - RNA, 32 nt, Human
ucuuauugcccagacuagagugcgauggugcg

SEQ ID NO: 509572 - RNA, 32 nt, Human
ucuuauugcccaggcuagagugcaauggugcg

SEQ ID NO: 509573 - RNA, 32 nt, Human
ucuuauugcccaggcuggagugcaauggcacg

SEQ ID NO: 509574 - RNA, 32 nt, Human
ucuuauugcccaggcuggagugcaauggugca

SEQ ID NO: 509575 - RNA, 32 nt, Human
ucuuauugcccaggcuggagugcagugacgag

SEQ ID NO: 509576 - RNA, 32 nt, Human
ucuuauugcccaggcuggagugcaguggcaca

SEQ ID NO: 509577 - RNA, 32 nt, Human
ucuuauugcccaggcuggagugcaguggcgug

SEQ ID NO: 509578 - RNA, 32 nt, Human
ucuuauugcccaggcuugagugcaaugaccug

SEQ ID NO: 509579 - RNA, 32 nt, Human
ucuuauugcccuuauuccuccaccccacuucu

SEQ ID NO: 509580 - RNA, 32 nt, Human
ucuuauuggcucugccuccugugcuuauauca

SEQ ID NO: 509581 - RNA, 32 nt, Human
ucuuauuguaaauuugagugcuuguuguuuuu

SEQ ID NO: 509582 - RNA, 32 nt, Human
ucuuauuguaguucaaguacagaugaguaagu

SEQ ID NO: 509583 - RNA, 32 nt, Human
ucuuauuguauuggagggugccacccugggga

SEQ ID NO: 509584 - RNA, 32 nt, Human
ucuuauuguccuccuccuccuggcucggccuc

SEQ ID NO: 509585 - RNA, 32 nt, Human
ucuuauuguuuucauguaaaauaguauagagu

SEQ ID NO: 509586 - RNA, 32 nt, Human
ucuuauuuaugcauuacuugcuuccuugcaug

SEQ ID NO: 509587 - RNA, 32 nt, Human
ucuuauuucauuuucaaugauuuccuagauca

SEQ ID NO: 509588 - RNA, 32 nt, Human
ucuuauuuccagauuacucuggaccuaauuuu

SEQ ID NO: 509589 - RNA, 32 nt, Human
ucuuauuucccauuccuuacgguuauaaucag

SEQ ID NO: 509590 - RNA, 32 nt, Human
ucuuauuucucaguaggaacuuggaagggaag

SEQ ID NO: 509591 - RNA, 32 nt, Human
ucuuauuucucaguugagugagcaaggauacg

SEQ ID NO: 509592 - RNA, 32 nt, Human
ucuuauuucucaucuuuaaacaugucgaccag

SEQ ID NO: 509593 - RNA, 32 nt, Human
ucuuauuucucuauuuuauguugugacuuaac

SEQ ID NO: 509594 - RNA, 32 nt, Human
ucuuauuucugaggcccuucagucuccuuuau

SEQ ID NO: 509595 - RNA, 32 nt, Human
ucuuauuuguauccuaaaaauacguacuauaa

SEQ ID NO: 509596 - RNA, 32 nt, Human
ucuuauuuucaaauuugacauuaucauccuug

SEQ ID NO: 509597 - RNA, 21 nt, Human
ucuuauuuuucccccaccccc

SEQ ID NO: 509598 - RNA, 32 nt, Human
ucuucaaaaguggcugcaaaggcuggcaaacc

SEQ ID NO: 509599 - RNA, 32 nt, Human
ucuucaaaccagguucuugaauacuuaaguua

SEQ ID NO: 509600 - RNA, 32 nt, Human
ucuucaaacccccaccuuccaguucccucacc

SEQ ID NO: 509601 - RNA, 32 nt, Human
ucuucaaagacaacaugcuuuggaaacauaug

SEQ ID NO: 509602 - RNA, 32 nt, Human
ucuucaaagccccagcccuuuuggagguuaca

SEQ ID NO: 509603 - RNA, 32 nt, Human
ucuucaaaggugaugagaaugccuugacaaga

SEQ ID NO: 509604 - RNA, 32 nt, Human
ucuucaaauaagagcaguuggaauaacaaagc

SEQ ID NO: 509605 - RNA, 32 nt, Human
ucuucaacagacucugcaggaaguggcugacu

SEQ ID NO: 509606 - RNA, 32 nt, Human
ucuucaaccagcugcugauucacgcggccuua

SEQ ID NO: 509607 - RNA, 32 nt, Human
ucuucaaccauuguuuuagacucugaacacca

SEQ ID NO: 509608 - RNA, 22 nt, Human
ucuucaacccaaccuccucuca

SEQ ID NO: 509609 - RNA, 32 nt, Human
ucuucaacccuugccuuccucccuucuuccuc

SEQ ID NO: 509610 - RNA, 32 nt, Human
ucuucaaccugucuguguucuugagaacguuc

SEQ ID NO: 509611 - RNA, 32 nt, Human
ucuucaacugauuuuuaaauguuguugcuugg

SEQ ID NO: 509612 - RNA, 32 nt, Human
ucuucaagcccaaaccaauucuguuccuucaa

SEQ ID NO: 509613 - RNA, 21 nt, Human
ucuucaagcugggugcagugg

SEQ ID NO: 509614 - RNA, 32 nt, Human
ucuucaaggagaagauucucccgggaaaucug

SEQ ID NO: 509615 - RNA, 32 nt, Human
ucuucaaggauaaaaacugccaccccaacacc

SEQ ID NO: 509616 - RNA, 32 nt, Human
ucuucaaggauaagcagaguugauccaucuga

SEQ ID NO: 509617 - RNA, 32 nt, Human
ucuucaagugcccuguguuggccaagguuccc

SEQ ID NO: 509618 - RNA, 23 nt, Human
ucuucaauaaaaugcuuuuguca

SEQ ID NO: 509619 - RNA, 32 nt, Human
ucuucaauacugcugcugcuuacgcgccggga

SEQ ID NO: 509620 - RNA, 32 nt, Human
ucuucaaucuuaaaacaaauucauuauucuuu

SEQ ID NO: 509621 - RNA, 32 nt, Human
ucuucaauuccaagccugcucaccaaauuuca

SEQ ID NO: 509622 - RNA, 32 nt, Human
ucuucaauuuccagcuucuccuuggagccuuu

SEQ ID NO: 509623 - RNA, 32 nt, Human
ucuucaauuugguuauagagaaauggccauuc

SEQ ID NO: 509624 - RNA, 31 nt, Human
ucuucacaaguguguaaagcacagauuucaa

SEQ ID NO: 509625 - RNA, 21 nt, Human
ucuucacaccccugaugcucu

SEQ ID NO: 509626 - RNA, 32 nt, Human
ucuucacaccugccaccucauguucacaccua

SEQ ID NO: 509627 - RNA, 32 nt, Human
ucuucacaggaaccuauccucccugcuggugc

SEQ ID NO: 509628 - RNA, 32 nt, Human
ucuucacaggcaggaaccucaugcucugagga

SEQ ID NO: 509629 - RNA, 32 nt, Human
ucuucacaugcugucuucacgugaucuucccu

SEQ ID NO: 509630 - RNA, 32 nt, Human
ucuucacaugugcacacauguaaaacaaaaau

SEQ ID NO: 509631 - RNA, 32 nt, Human
ucuucaccauuguccggcauccugcggaggcu

SEQ ID NO: 509632 - RNA, 17 nt, Human
ucuucacccccaccuca

SEQ ID NO: 509633 - RNA, 18 nt, Human
ucuucaccccugcuccuc

SEQ ID NO: 509634 - RNA, 32 nt, Human
ucuucacccuccccuuuguucuucuauuaauc

SEQ ID NO: 509635 - RNA, 32 nt, Human
ucuucaccuccugccagcaaccccaaacccaa

SEQ ID NO: 509636 - RNA, 32 nt, Human
ucuucaccuuagaucccucuugcccagcacaa

SEQ ID NO: 509637 - RNA, 32 nt, Human
ucuucaccuugccucuggccuuguauuucaca

SEQ ID NO: 509638 - RNA, 32 nt, Human
ucuucaccuuggacuuuccagcaaagacuaga

SEQ ID NO: 509639 - RNA, 32 nt, Human
ucuucacgacgcucugcaugucaguggagcua

SEQ ID NO: 509640 - RNA, 32 nt, Human
ucuucacgcccagccucugccucacaguggac

SEQ ID NO: 509641 - RNA, 32 nt, Human
ucuucacgcccaucuucugccucauagugguc

SEQ ID NO: 509642 - RNA, 32 nt, Human
ucuucacggauuagcugugcuguuauguuguc

SEQ ID NO: 509643 - RNA, 32 nt, Human
ucuucacuccaaaaagaaaaguguuuuguuuu

SEQ ID NO: 509644 - RNA, 32 nt, Human
ucuucacucuaacuuggggaagaaggaagauc

SEQ ID NO: 509645 - RNA, 32 nt, Human
ucuucacucugcucacagcagagcuguauuuu

SEQ ID NO: 509646 - RNA, 32 nt, Human
ucuucagaaagaaaaacuugaagaauacuaau

SEQ ID NO: 509647 - RNA, 31 nt, Human
ucuucagaacaauccugcagucuugacagaa

SEQ ID NO: 509648 - RNA, 32 nt, Human
ucuucagaaggugaguggguugagggaggcag

SEQ ID NO: 509649 - RNA, 32 nt, Human
ucuucagaaugagaggccuguggcuggggcau

SEQ ID NO: 509650 - RNA, 32 nt, Human
ucuucagacuucucacauuuaguauagugcau

SEQ ID NO: 509651 - RNA, 32 nt, Human
ucuucagagaaagagugugagcugaugacaca

SEQ ID NO: 509652 - RNA, 32 nt, Human
ucuucagagccacagaccucaggguggaguga

SEQ ID NO: 509653 - RNA, 32 nt, Human
ucuucagagcugacacaggaugaaggcaaugc

SEQ ID NO: 509654 - RNA, 32 nt, Human
ucuucagagcuuguaagagugccugagaggcc

SEQ ID NO: 509655 - RNA, 32 nt, Human
ucuucagaguauaagauguuuaccucaucuuu

SEQ ID NO: 509656 - RNA, 32 nt, Human
ucuucagagugcuggaaacacacuccugcaga

SEQ ID NO: 509657 - RNA, 32 nt, Human
ucuucagauccaguggcccauucuuuuaucuu

SEQ ID NO: 509658 - RNA, 32 nt, Human
ucuucagcacaucuuauaguaugagaaggaag

SEQ ID NO: 509659 - RNA, 32 nt, Human
ucuucagcagcaucuacucuaggcauauugau

SEQ ID NO: 509660 - RNA, 23 nt, Human
ucuucagcagugauugucagcca

SEQ ID NO: 509661 - RNA, 32 nt, Human
ucuucagcaucaguccagucugugguguccug

SEQ ID NO: 509662 - RNA, 32 nt, Human
ucuucagcauuuuguaccaucugcuccccaau

SEQ ID NO: 509663 - RNA, 32 nt, Human
ucuucagccaugagaagcagugaugacuaucc

SEQ ID NO: 509664 - RNA, 32 nt, Human
ucuucagcccacacccugccagccccacagau

SEQ ID NO: 509665 - RNA, 21 nt, Human
ucuucagccccgagucaugug

SEQ ID NO: 509666 - RNA, 32 nt, Human
ucuucagcccugaugcacaggcugccagcccc

SEQ ID NO: 509667 - RNA, 32 nt, Human
ucuucagccuccaucccuggccuccuccccuc

SEQ ID NO: 509668 - RNA, 32 nt, Human
ucuucagcgauguggaccugguccccauggau

SEQ ID NO: 509669 - RNA, 32 nt, Human
ucuucagcguagcucuccaccucuacccggaa

SEQ ID NO: 509670 - RNA, 32 nt, Human
ucuucagcucacugcuguucucugggcuuguu

SEQ ID NO: 509671 - RNA, 32 nt, Human
ucuucagcucauuuugucucucucacauuaag

SEQ ID NO: 509672 - RNA, 21 nt, Human
ucuucagcucccugcaaguga

SEQ ID NO: 509673 - RNA, 32 nt, Human
ucuucagcuccgccuuucuugcucugaaaauu

SEQ ID NO: 509674 - RNA, 32 nt, Human
ucuucagcuccgucucccuugcucuccgcucu

SEQ ID NO: 509675 - RNA, 32 nt, Human
ucuucagcucuaucugggacaccaucuugacc

SEQ ID NO: 509676 - RNA, 32 nt, Human
ucuucagcucuggcgccuucaucccccugccu

SEQ ID NO: 509677 - RNA, 32 nt, Human
ucuucagcuucucugcugccauguucuuugcu

SEQ ID NO: 509678 - RNA, 32 nt, Human
ucuucagcuugauccuggaggucuuuucuagu

SEQ ID NO: 509679 - RNA, 32 nt, Human
ucuucagcuugucuuguccucuccacaggugg

SEQ ID NO: 509680 - RNA, 32 nt, Human
ucuucagcuuuaacuauacuugagugcaauaa

SEQ ID NO: 509681 - RNA, 32 nt, Human
ucuucagcuuuaggcagaugcaaaagaauaca

SEQ ID NO: 509682 - RNA, 32 nt, Human
ucuucagcuuugaaaaggguuacccugggcac

SEQ ID NO: 509683 - RNA, 32 nt, Human
ucuucaggaauugguccacaggguaaauuuca

SEQ ID NO: 509684 - RNA, 32 nt, Human
ucuucaggacagcacugccagagaugccuggg

SEQ ID NO: 509685 - RNA, 32 nt, Human
ucuucaggaucucuugggguggccguauucug

SEQ ID NO: 509686 - RNA, 31 nt, Human
ucuucaggaugccugcagcacuuguggagaa

SEQ ID NO: 509687 - RNA, 21 nt, Human
ucuucaggcagaagccucugc

SEQ ID NO: 509688 - RNA, 32 nt, Human
ucuucaggcccaggguccuagggcggaacaag

SEQ ID NO: 509689 - RNA, 32 nt, Human
ucuucaggcccaguggagcaggcagcaaguaa

SEQ ID NO: 509690 - RNA, 32 nt, Human
ucuucaggcuagugggauugguugcauuacag

SEQ ID NO: 509691 - RNA, 32 nt, Human
ucuucagggacccggcccugcccugccgcccg

SEQ ID NO: 509692 - RNA, 32 nt, Human
ucuucaggucggcagacccagagcacuugaua

SEQ ID NO: 509693 - RNA, 32 nt, Human
ucuucagguuauuuucuuacuguugcuucaga

SEQ ID NO: 509694 - RNA, 32 nt, Human
ucuucagucauccuuacagaaagauacccucu

SEQ ID NO: 509695 - RNA, 32 nt, Human
ucuucaguccacccugccccacccuuacauga

SEQ ID NO: 509696 - RNA, 32 nt, Human
ucuucaguccucugaguacaucugguggugug

SEQ ID NO: 509697 - RNA, 32 nt, Human
ucuucagucuucaugcuuugucacuguaaaaa

SEQ ID NO: 509698 - RNA, 32 nt, Human
ucuucagugauaauauuucaucuacugauaua

SEQ ID NO: 509699 - RNA, 32 nt, Human
ucuucaguggaugccagcuucccugccccaau

SEQ ID NO: 509700 - RNA, 32 nt, Human
ucuucagugguccugcucugugccucagacuu

SEQ ID NO: 509701 - RNA, 32 nt, Human
ucuucaguguccaaaucucuucugucuccuuu

SEQ ID NO: 509702 - RNA, 32 nt, Human
ucuucaguguguauccaccacauuuaacuuau

SEQ ID NO: 509703 - RNA, 32 nt, Human
ucuucaguuacuagaggcggauuucccugacu

SEQ ID NO: 509704 - RNA, 32 nt, Human
ucuucaguuuuggcugggcaugauggugagcg

SEQ ID NO: 509705 - RNA, 32 nt, Human
ucuucauaaagaugaguaaagucucaguuuuc

SEQ ID NO: 509706 - RNA, 25 nt, Human
ucuucauagauccccugggugcucu

SEQ ID NO: 509707 - RNA, 32 nt, Human
ucuucauagguagaaacaaauacuugacucag

SEQ ID NO: 509708 - RNA, 32 nt, Human
ucuucauauaaaugcuacagaaaaaccuuugu

SEQ ID NO: 509709 - RNA, 32 nt, Human
ucuucauauccccuuccuuuccaucuguagcu

SEQ ID NO: 509710 - RNA, 32 nt, Human
ucuucauaucuauuagggggaaaggaaaaaug

SEQ ID NO: 509711 - RNA, 32 nt, Human
ucuucauauuucuagaguuucucuccaguaua

SEQ ID NO: 509712 - RNA, 32 nt, Human
ucuucaucaagcucugauucuuccagcaauuc

SEQ ID NO: 509713 - RNA, 32 nt, Human
ucuucaucaagcucugauucuuccagcaguuc

SEQ ID NO: 509714 - RNA, 24 nt, Human
ucuucaucaccaccaucaucauca

SEQ ID NO: 509715 - RNA, 32 nt, Human
ucuucaucaccagcaaacgccaggacuuggcu

SEQ ID NO: 509716 - RNA, 32 nt, Human
ucuucaucauuggcauuugaacaaaagacuua

SEQ ID NO: 509717 - RNA, 32 nt, Human
ucuucauccacaucaucuaaagccugaacccg

SEQ ID NO: 509718 - RNA, 32 nt, Human
ucuucauccaugacgacauucccaccaugggg

SEQ ID NO: 509719 - RNA, 32 nt, Human
ucuucauccucauccuccuccuccuccacuug

SEQ ID NO: 509720 - RNA, 32 nt, Human
ucuucauccuggaagugggaacuggaguccca

SEQ ID NO: 509721 - RNA, 32 nt, Human
ucuucauccuguaagcccccaggggcaguccc

SEQ ID NO: 509722 - RNA, 32 nt, Human
ucuucaucggcacaggggccacugagacguuu

SEQ ID NO: 509723 - RNA, 32 nt, Human
ucuucaucuccaccuuccucggcuaccaaaac

SEQ ID NO: 509724 - RNA, 32 nt, Human
ucuucaucugaggccaccucagccuggacuuu

SEQ ID NO: 509725 - RNA, 32 nt, Human
ucuucaucugcagcacguuucuuccuccugca

SEQ ID NO: 509726 - RNA, 32 nt, Human
ucuucaucugggugaagaccucagggucucag

SEQ ID NO: 509727 - RNA, 32 nt, Human
ucuucaucugugaaauggggauaaaaauacuu

SEQ ID NO: 509728 - RNA, 32 nt, Human
ucuucaugaacccagaggauguccgggaagca

SEQ ID NO: 509729 - RNA, 32 nt, Human
ucuucaugaagaggcaacaucucuagugcccu

SEQ ID NO: 509730 - RNA, 32 nt, Human
ucuucaugaauggaggcuucagauuuuucuga

SEQ ID NO: 509731 - RNA, 32 nt, Human
ucuucaugacauacauuaucaguuuuucuguu

SEQ ID NO: 509732 - RNA, 32 nt, Human
ucuucaugccgagagcaucggaaauguuuuug

SEQ ID NO: 509733 - RNA, 32 nt, Human
ucuucauggcauccuucuuuuucuuuuuccau

SEQ ID NO: 509734 - RNA, 30 nt, Human
ucuucaugggcuuugcuuccuaccuccuuc

SEQ ID NO: 509735 - RNA, 32 nt, Human
ucuucaugggcuuugcuuccuaccuccuucac

SEQ ID NO: 509736 - RNA, 24 nt, Human
ucuucauggggguaagaaaagcug

SEQ ID NO: 509737 - RNA, 24 nt, Human
ucuucauggugauggggagcccuu

SEQ ID NO: 509738 - RNA, 32 nt, Human
ucuucaugguuuaaccuccauuucuuauugca

SEQ ID NO: 509739 - RNA, 32 nt, Human
ucuucauguguuaaccacugccuuccuggacc

SEQ ID NO: 509740 - RNA, 32 nt, Human
ucuucauuccuccugguuauugguuuguuugu

SEQ ID NO: 509741 - RNA, 32 nt, Human
ucuucauucuuucucacuuugccaucaugugg

SEQ ID NO: 509742 - RNA, 32 nt, Human
ucuucauugacgguugcuuucaagauguaccu

SEQ ID NO: 509743 - RNA, 32 nt, Human
ucuucauugcagcugcuuucugcucccucuau

SEQ ID NO: 509744 - RNA, 32 nt, Human
ucuucauugcucaugguaugucaaaccuuugg

SEQ ID NO: 509745 - RNA, 32 nt, Human
ucuucauuggcucucuaaaauguggccaagaa

SEQ ID NO: 509746 - RNA, 32 nt, Human
ucuucauuguuuccucaccacuuuucccuuaa

SEQ ID NO: 509747 - RNA, 32 nt, Human
ucuucauuucuggagauggggcagcagguggc

SEQ ID NO: 509748 - RNA, 32 nt, Human
ucuucauuugcuacccucagaagcccaguccg

SEQ ID NO: 509749 - RNA, 32 nt, Human
ucuucauuuugcagaggugagguaagacuuca

SEQ ID NO: 509750 - RNA, 32 nt, Human
ucuucauuuuggaggcagggcugggaagggag

SEQ ID NO: 509751 - RNA, 32 nt, Human
ucuuccaaaguacugggacuacaggcaugaga

SEQ ID NO: 509752 - RNA, 32 nt, Human
ucuuccaaagugcugggauuacaggugugagu

SEQ ID NO: 509753 - RNA, 32 nt, Human
ucuuccaaccaccaccaccugacaacccugca

SEQ ID NO: 509754 - RNA, 31 nt, Human
ucuuccaagacuuugccacucacuuaucuca

SEQ ID NO: 509755 - RNA, 32 nt, Human
ucuuccaagcagcugggacuacagguacccca

SEQ ID NO: 509756 - RNA, 32 nt, Human
ucuuccaauccaagcccacugcagccuugugg

SEQ ID NO: 509757 - RNA, 32 nt, Human
ucuuccaaugcugggcccagacuucuugccug

SEQ ID NO: 509758 - RNA, 23 nt, Human
ucuuccacagcccugaggucuua

SEQ ID NO: 509759 - RNA, 32 nt, Human
ucuuccacagccuucucuuggacagcgacaua

SEQ ID NO: 509760 - RNA, 32 nt, Human
ucuuccacaggcugagaucauccuuggcgucu

SEQ ID NO: 509761 - RNA, 32 nt, Human
ucuuccacagucucucuggggcuguguccuac

SEQ ID NO: 509762 - RNA, 24 nt, Human
ucuuccacaucagauugcaucuca

SEQ ID NO: 509763 - RNA, 32 nt, Human
ucuuccacauuccuccuucuuauaagagcaca

SEQ ID NO: 509764 - RNA, 32 nt, Human
ucuuccacauuucucucuacaucucucaagag

SEQ ID NO: 509765 - RNA, 32 nt, Human
ucuuccacccacccauuccuucaccuggcuga

SEQ ID NO: 509766 - RNA, 32 nt, Human
ucuuccacccucccucucccccucugccccac

SEQ ID NO: 509767 - RNA, 32 nt, Human
ucuuccaccucagcaaccaugaccugaaaccu

SEQ ID NO: 509768 - RNA, 32 nt, Human
ucuuccacugacuugcugugugaccuuaggaa

SEQ ID NO: 509769 - RNA, 32 nt, Human
ucuuccagaaccuccugcucuuccugugggcc

SEQ ID NO: 509770 - RNA, 30 nt, Human
ucuuccagaagccacauccgcacaauuuuc

SEQ ID NO: 509771 - RNA, 32 nt, Human
ucuuccagacuggcugugccugccugugccca

SEQ ID NO: 509772 - RNA, 32 nt, Human
ucuuccagaggaagaggaggaggcggcgaagc

SEQ ID NO: 509773 - RNA, 32 nt, Human
ucuuccagaucuucagcagcaggaugacgaug

SEQ ID NO: 509774 - RNA, 32 nt, Human
ucuuccagcaucucacaguuuauuaugccaga

SEQ ID NO: 509775 - RNA, 32 nt, Human
ucuuccagccaagaagagcucacaggagucca

SEQ ID NO: 509776 - RNA, 20 nt, Human
ucuuccagcccagcauccag

SEQ ID NO: 509777 - RNA, 20 nt, Human
ucuuccagcuucaaucagua

SEQ ID NO: 509778 - RNA, 31 nt, Human
ucuuccaggaaacugacacagggagcucagc

SEQ ID NO: 509779 - RNA, 32 nt, Human
ucuuccaggagguaggaguugguaugggcccu

SEQ ID NO: 509780 - RNA, 32 nt, Human
ucuuccagggccugggaggauagggcuaaucc

SEQ ID NO: 509781 - RNA, 32 nt, Human
ucuuccaggguggcuggagagcacagacgcgc

SEQ ID NO: 509782 - RNA, 32 nt, Human
ucuuccaguucugaggagaggaggucuucagu

SEQ ID NO: 509783 - RNA, 32 nt, Human
ucuuccaguucugccagaauuggccuuuccca

SEQ ID NO: 509784 - RNA, 32 nt, Human
ucuuccaguuuauuuuccuuccccaugcuguu

SEQ ID NO: 509785 - RNA, 32 nt, Human
ucuuccauaaaggcugcaggagaccuguagcu

SEQ ID NO: 509786 - RNA, 32 nt, Human
ucuuccauccacugcccaugacccuguucccu

SEQ ID NO: 509787 - RNA, 32 nt, Human
ucuuccauccuccccucuccccaaaaccacaa

SEQ ID NO: 509788 - RNA, 32 nt, Human
ucuuccaugcuagguauaccuacagcagcuac

SEQ ID NO: 509789 - RNA, 32 nt, Human
ucuuccaugguggacacgucuguucuguaugu

SEQ ID NO: 509790 - RNA, 32 nt, Human
ucuuccauguuguaaaggaacagccccagugc

SEQ ID NO: 509791 - RNA, 32 nt, Human
ucuuccauuucucccaccuuuuuaaugccagu

SEQ ID NO: 509792 - RNA, 32 nt, Human
ucuuccauuuugcacagggagugcaggaggug

SEQ ID NO: 509793 - RNA, 32 nt, Human
ucuucccaaugucauauccaccaggaccuggc

SEQ ID NO: 509794 - RNA, 32 nt, Human
ucuucccacagcaaacagacucuccccagggc

SEQ ID NO: 509795 - RNA, 32 nt, Human
ucuucccacagcuucagaacuuggaguuucag

SEQ ID NO: 509796 - RNA, 32 nt, Human
ucuucccacaguugagcucgggcagcucuuuc

SEQ ID NO: 509797 - RNA, 32 nt, Human
ucuucccacauuuuagcaacauguucauggag

SEQ ID NO: 509798 - RNA, 32 nt, Human
ucuucccaccaacucucucugcccccaaaagu

SEQ ID NO: 509799 - RNA, 32 nt, Human
ucuucccacccccuugcccucucccucucccu

SEQ ID NO: 509800 - RNA, 32 nt, Human
ucuucccacuccacuuguugucccaugaagga

SEQ ID NO: 509801 - RNA, 32 nt, Human
ucuucccacugcacuccagccuggccaauaag

SEQ ID NO: 509802 - RNA, 32 nt, Human
ucuucccacugcacuguggugcuucaguggcc

SEQ ID NO: 509803 - RNA, 32 nt, Human
ucuucccacuugcugacccuuugcuaccuaug

SEQ ID NO: 509804 - RNA, 32 nt, Human
ucuucccagcacaaaccuaaucaaucagugua

SEQ ID NO: 509805 - RNA, 32 nt, Human
ucuucccagccagccucacacacaggagcuga

SEQ ID NO: 509806 - RNA, 32 nt, Human
ucuucccagccaguaugccacaggugaacuuu

SEQ ID NO: 509807 - RNA, 32 nt, Human
ucuucccagccuggcccuggcaaggggcgggu

SEQ ID NO: 509808 - RNA, 32 nt, Human
ucuucccagcuggcugggacugucuuggguuu

SEQ ID NO: 509809 - RNA, 32 nt, Human
ucuucccaggacauuaaauaaggaaacuguau

SEQ ID NO: 509810 - RNA, 32 nt, Human
ucuucccaggcucccagcugguggugacucaa

SEQ ID NO: 509811 - RNA, 32 nt, Human
ucuucccagucugguuccuguacagucugcuc

SEQ ID NO: 509812 - RNA, 32 nt, Human
ucuucccauagcuuccagccugguggggaaua

SEQ ID NO: 509813 - RNA, 32 nt, Human
ucuucccaucuccaaaaauccagagacauuac

SEQ ID NO: 509814 - RNA, 32 nt, Human
ucuucccauggcccagucuguggcuguugggu

SEQ ID NO: 509815 - RNA, 32 nt, Human
ucuucccauuaaacuugaacuguggcuauauu

SEQ ID NO: 509816 - RNA, 32 nt, Human
ucuuccccaacaacagauagcucaccuuggac

SEQ ID NO: 509817 - RNA, 32 nt, Human
ucuuccccaacacuaaccccacucccaugaag

SEQ ID NO: 509818 - RNA, 32 nt, Human
ucuuccccaaggcugagugucccaguuuuauc

SEQ ID NO: 509819 - RNA, 28 nt, Human
ucuuccccaagugcugacaauuaauacc

SEQ ID NO: 509820 - RNA, 32 nt, Human
ucuuccccaaguggaaccucagugcaugcaaa

SEQ ID NO: 509821 - RNA, 32 nt, Human
ucuuccccaaugcuccaucccaaccaggcacc

SEQ ID NO: 509822 - RNA, 32 nt, Human
ucuuccccacagacuuccuuugcuucucuuuu

SEQ ID NO: 509823 - RNA, 32 nt, Human
ucuuccccaccguccucuccccacgcccucuu

SEQ ID NO: 509824 - RNA, 18 nt, Human
ucuuccccagaagcuuca

SEQ ID NO: 509825 - RNA, 32 nt, Human
ucuuccccagcagaaucuggaugaauggcaca

SEQ ID NO: 509826 - RNA, 32 nt, Human
ucuuccccaggcugcuguuccugcugccccgu

SEQ ID NO: 509827 - RNA, 32 nt, Human
ucuuccccauauucacuccucacuuuuacaau

SEQ ID NO: 509828 - RNA, 32 nt, Human
ucuuccccaucucucccccgggccugcugguu

SEQ ID NO: 509829 - RNA, 32 nt, Human
ucuuccccaucuucuucucucggucccgggag

SEQ ID NO: 509830 - RNA, 32 nt, Human
ucuucccccaacagaacuauuucuugcugcuc

SEQ ID NO: 509831 - RNA, 32 nt, Human
ucuucccccuucucaaaaaccuaagauggcuu

SEQ ID NO: 509832 - RNA, 32 nt, Human
ucuuccccuccuuccuugccccuggcugcucu

SEQ ID NO: 509833 - RNA, 32 nt, Human
ucuuccccugcagggaucacacugccagucug

SEQ ID NO: 509834 - RNA, 32 nt, Human
ucuuccccugcccaacaccacgcccucuggca

SEQ ID NO: 509835 - RNA, 32 nt, Human
ucuuccccuguaaaaaccacugccucaaucuc

SEQ ID NO: 509836 - RNA, 32 nt, Human
ucuuccccuguugccaaggucuaacucaugga

SEQ ID NO: 509837 - RNA, 32 nt, Human
ucuuccccuuaccgauccuuuuuaacacucuc

SEQ ID NO: 509838 - RNA, 32 nt, Human
ucuuccccuucccugccuaguuuccuuuuguu

SEQ ID NO: 509839 - RNA, 32 nt, Human
ucuuccccuucuggccaagauuugccagaggc

SEQ ID NO: 509840 - RNA, 32 nt, Human
ucuuccccuuucucugcccgccuuucccaucc

SEQ ID NO: 509841 - RNA, 32 nt, Human
ucuucccgaggcccuggagugccgugcgugug

SEQ ID NO: 509842 - RNA, 19 nt, Human
ucuucccgcuuccuggugc

SEQ ID NO: 509843 - RNA, 32 nt, Human
ucuucccuaauuugaaaguagcuuguuauuuu

SEQ ID NO: 509844 - RNA, 32 nt, Human
ucuucccuacacccuucucugccuuuauuuuu

SEQ ID NO: 509845 - RNA, 32 nt, Human
ucuucccuagcccuuccagucuggaccagcac

SEQ ID NO: 509846 - RNA, 32 nt, Human
ucuucccuauuccauccuuugauggguggccu

SEQ ID NO: 509847 - RNA, 32 nt, Human
ucuucccucaagcugcucguggcaugcccuuc

SEQ ID NO: 509848 - RNA, 32 nt, Human
ucuucccucauuccuuucucucuccuucuggc

SEQ ID NO: 509849 - RNA, 32 nt, Human
ucuucccuccacccucacuccaaccaccccaa

SEQ ID NO: 509850 - RNA, 32 nt, Human
ucuucccucccccagucucucuucucaauccc

SEQ ID NO: 509851 - RNA, 32 nt, Human
ucuucccuccugggaaugguuugguguuugau

SEQ ID NO: 509852 - RNA, 32 nt, Human
ucuucccucucguuuaguuugccuggagcuug

SEQ ID NO: 509853 - RNA, 32 nt, Human
ucuucccucugaguuugauugugaacaacuga

SEQ ID NO: 509854 - RNA, 32 nt, Human
ucuucccucuguguuugaugagagaagucagu

SEQ ID NO: 509855 - RNA, 32 nt, Human
ucuucccucuucccucucccugcccagcccuc

SEQ ID NO: 509856 - RNA, 32 nt, Human
ucuucccucuuugaacaguccuuuguauucug

SEQ ID NO: 509857 - RNA, 32 nt, Human
ucuucccugaaccacuccuccuccugauuucc

SEQ ID NO: 509858 - RNA, 32 nt, Human
ucuucccugaagccccaucucagucaccauug

SEQ ID NO: 509859 - RNA, 32 nt, Human
ucuucccugacccccauacccucacccuuaaa

SEQ ID NO: 509860 - RNA, 32 nt, Human
ucuucccugaucaguccucccagacugcacug

SEQ ID NO: 509861 - RNA, 32 nt, Human
ucuucccugcagccauguaagaccugccuuuc

SEQ ID NO: 509862 - RNA, 32 nt, Human
ucuucccugcagcuuccaagggcugcaucaag

SEQ ID NO: 509863 - RNA, 32 nt, Human
ucuucccuggacaucacugccucuccagggca

SEQ ID NO: 509864 - RNA, 32 nt, Human
ucuucccuggcagcugugauguguugugcggu

SEQ ID NO: 509865 - RNA, 32 nt, Human
ucuucccugggccacauuggaagaagaaaaau

SEQ ID NO: 509866 - RNA, 32 nt, Human
ucuucccuguaaaaugcagauuacagguauua

SEQ ID NO: 509867 - RNA, 32 nt, Human
ucuucccuguauuuucuuucucuacuuugagg

SEQ ID NO: 509868 - RNA, 28 nt, Human
ucuucccugucugcugccucuccagucc

SEQ ID NO: 509869 - RNA, 32 nt, Human
ucuucccuguguucccagcuggagggacauga

SEQ ID NO: 509870 - RNA, 32 nt, Human
ucuucccuucuuucugguuggugcugcugggc

SEQ ID NO: 509871 - RNA, 32 nt, Human
ucuucccuuguccuauaccgggaacuccccuc

SEQ ID NO: 509872 - RNA, 32 nt, Human
ucuuccgaguagcugggauuacaggcgugugc

SEQ ID NO: 509873 - RNA, 32 nt, Human
ucuuccgcacacaccagagcagcugcucugac

SEQ ID NO: 509874 - RNA, 32 nt, Human
ucuuccgccucccggguucaagcgauucuccu

SEQ ID NO: 509875 - RNA, 32 nt, Human
ucuuccgccugccucugcuuccccgucaugca

SEQ ID NO: 509876 - RNA, 32 nt, Human
ucuuccgcucacugcaaccucugcuucccggg

SEQ ID NO: 509877 - RNA, 32 nt, Human
ucuuccggagccaaggugggggcgcagagggc

SEQ ID NO: 509878 - RNA, 32 nt, Human
ucuuccggagucaggcaggaaggagaagcaca

SEQ ID NO: 509879 - RNA, 32 nt, Human
ucuuccggaguguggcuggcggagcugggaug

SEQ ID NO: 509880 - RNA, 32 nt, Human
ucuuccgggaggacgacgguggagccgaucug

SEQ ID NO: 509881 - RNA, 32 nt, Human
ucuuccggguagcugggacuacaggugugcac

SEQ ID NO: 509882 - RNA, 18 nt, Human
ucuuccggugcuuuccca

SEQ ID NO: 509883 - RNA, 32 nt, Human
ucuuccggugcuuucccauccugggccacugu

SEQ ID NO: 509884 - RNA, 32 nt, Human
ucuuccgugacgucacuggaccacugggcaau

SEQ ID NO: 509885 - RNA, 32 nt, Human
ucuuccgugcaggcaggcucuccuggggaccu

SEQ ID NO: 509886 - RNA, 32 nt, Human
ucuuccguggagggcuuagagaggggaagcca

SEQ ID NO: 509887 - RNA, 32 nt, Human
ucuuccgugguggugcagcaccccaggaacuu

SEQ ID NO: 509888 - RNA, 32 nt, Human
ugaaauuaacugccauacuaccucucaguaug

SEQ ID NO: 509889 - RNA, 32 nt, Human
ugaaauuaagagaagagagggagugaagggug

SEQ ID NO: 509890 - RNA, 32 nt, Human
ugaaauuaagguauggggcaugguggccucag

SEQ ID NO: 509891 - RNA, 32 nt, Human
ugaaauuaagugacauuuggauuuuuauuugg

SEQ ID NO: 509892 - RNA, 32 nt, Human
ugaaauuaauacuagcauauuaaguguacaaa

SEQ ID NO: 509893 - RNA, 20 nt, Human
ugaaauuacaggcaugagcc

SEQ ID NO: 509894 - RNA, 23 nt, Human
ugaaauuagugccuguuuucuug

SEQ ID NO: 509895 - RNA, 32 nt, Human
ugaaauuaugcuuccuaaaaucucaagccaaa

SEQ ID NO: 509896 - RNA, 32 nt, Human
ugaaauuauggucacacuauauacuauagcau

SEQ ID NO: 509897 - RNA, 32 nt, Human
ugaaauuauuuauuuuccuuucuauggauuau

SEQ ID NO: 509898 - RNA, 32 nt, Human
ugaaauucaaaucacauuucuccuucacucua

SEQ ID NO: 509899 - RNA, 32 nt, Human
ugaaauucacacucucaaccaccuacugggcg

SEQ ID NO: 509900 - RNA, 32 nt, Human
ugaaauucagccuguggauuccagaaauuugg

SEQ ID NO: 509901 - RNA, 32 nt, Human
ugaaauucaggaugcugugauacacugaaagg

SEQ ID NO: 509902 - RNA, 20 nt, Human
ugaaauucggggccagggaa

SEQ ID NO: 509903 - RNA, 32 nt, Human
ugaaauucuacccuccucaguuuucuguuuuu

SEQ ID NO: 509904 - RNA, 32 nt, Human
ugaaauucucagaacagcuaaccucuaauggg

SEQ ID NO: 509905 - RNA, 32 nt, Human
ugaaauucuccaucuuuucauuuccuuuauau

SEQ ID NO: 509906 - RNA, 32 nt, Human
ugaaauucuccuccuucuucccuuuccagcaa

SEQ ID NO: 509907 - RNA, 32 nt, Human
ugaaauucugacaucugccacuccucaucccc

SEQ ID NO: 509908 - RNA, 32 nt, Human
ugaaauucugaccuuugaaauaaugucaacag

SEQ ID NO: 509909 - RNA, 32 nt, Human
ugaaauugaagaugaggaaaguagcuguacac

SEQ ID NO: 509910 - RNA, 32 nt, Human
ugaaauugacccagcuccaccauacuccuuga

SEQ ID NO: 509911 - RNA, 32 nt, Human
ugaaauugccagaguuuugccugcugcuuucc

SEQ ID NO: 509912 - RNA, 32 nt, Human
ugaaauuggaaagcagagguugcagugagcug

SEQ ID NO: 509913 - RNA, 32 nt, Human
ugaaauuggaaccugggccuccugacuuuggc

SEQ ID NO: 509914 - RNA, 19 nt, Human
ugaaauugggaacucggaa

SEQ ID NO: 509915 - RNA, 32 nt, Human
ugaaauuguacuuccaggcuuggauguaauuu

SEQ ID NO: 509916 - RNA, 32 nt, Human
ugaaauugugccacugcacuccagacugggug

SEQ ID NO: 509917 - RNA, 32 nt, Human
ugaaauugugccacugcacuuuucagccuggg

SEQ ID NO: 509918 - RNA, 32 nt, Human
ugaaauugugcuauugcacuccagccugggug

SEQ ID NO: 509919 - RNA, 32 nt, Human
ugaaauuucauagcuuauuucaguuuaauuuu

SEQ ID NO: 509920 - RNA, 32 nt, Human
ugaaauuuccauauugagagaagccaaacauu

SEQ ID NO: 509921 - RNA, 32 nt, Human
ugaaauuuccauccauaggaaaauggauagac

SEQ ID NO: 509922 - RNA, 32 nt, Human
ugaaauuugagaacugcuggaccagagccuuu

SEQ ID NO: 509923 - RNA, 32 nt, Human
ugaaauuugaggcgcccaggccccagaaguca

SEQ ID NO: 509924 - RNA, 32 nt, Human
ugaaauuugcuuguagagaugggaucucacuc

SEQ ID NO: 509925 - RNA, 32 nt, Human
ugaaauuugggaacaggcagggugugguggcu

SEQ ID NO: 509926 - RNA, 32 nt, Human
ugaaauuuucacaagaauguuugcugacccuc

SEQ ID NO: 509927 - RNA, 32 nt, Human
ugaaauuuugugagacuuuuccugcacuggac

SEQ ID NO: 509928 - RNA, 32 nt, Human
ugaaauuuuuggaacuugcuggacagggugau

SEQ ID NO: 509929 - RNA, 32 nt, Human
ugaacaaaaauuaaggaaggaaaacacgguuu

SEQ ID NO: 509930 - RNA, 32 nt, Human
ugaacaaaagaugcucuucuguggaccacugc

SEQ ID NO: 509931 - RNA, 32 nt, Human
ugaacaaaaugagaugaaagccgagcuggacc

SEQ ID NO: 509932 - RNA, 23 nt, Human
ugaacaaagacaucuaaauaucu

SEQ ID NO: 509933 - RNA, 32 nt, Human
ugaacaaagccucuggggaggccaggcacggu

SEQ ID NO: 509934 - RNA, 32 nt, Human
ugaacaaaggaugcugauggauucaagccagc

SEQ ID NO: 509935 - RNA, 32 nt, Human
ugaacaaaggcuucacuuguccucauccuuua

SEQ ID NO: 509936 - RNA, 32 nt, Human
ugaacaaaggucucuggucuucccaggcagag

SEQ ID NO: 509937 - RNA, 32 nt, Human
ugaacaaaguagaagaaagaaugaaagaauug

SEQ ID NO: 509938 - RNA, 32 nt, Human
ugaacaaaguuggagguuggggugggugugug

SEQ ID NO: 509939 - RNA, 32 nt, Human
ugaacaaauccucugaccucaggccggcugug

SEQ ID NO: 509940 - RNA, 32 nt, Human
ugaacaacaggagggagggaaagagcccaggu

SEQ ID NO: 509941 - RNA, 32 nt, Human
ugaacaacauggcaaaacccugucucugcaaa

SEQ ID NO: 509942 - RNA, 32 nt, Human
ugaacaaccagaccucuucauuccacaucuaa

SEQ ID NO: 509943 - RNA, 32 nt, Human
ugaacaaccugagcuccugggccgggguggaa

SEQ ID NO: 509944 - RNA, 22 nt, Human
ugaacaaccugcuccugaauga

SEQ ID NO: 509945 - RNA, 32 nt, Human
ugaacaacgcagguucaaacugugcaggucca

SEQ ID NO: 509946 - RNA, 25 nt, Human
ugaacaacguccugguggagagacu

SEQ ID NO: 509947 - RNA, 19 nt, Human
ugaacaacuccucugugaa

SEQ ID NO: 509948 - RNA, 32 nt, Human
ugaacaacuguaaucacaacacuuugggaggc

SEQ ID NO: 509949 - RNA, 32 nt, Human
ugaacaagaccacuuggcucccuggcuucagu

SEQ ID NO: 509950 - RNA, 32 nt, Human
ugaacaagagccaggagacccaggagggagcu

SEQ ID NO: 509951 - RNA, 31 nt, Human
ugaacaaggaaacuugucacaaguguuugua

SEQ ID NO: 509952 - RNA, 32 nt, Human
ugaacaaggaagcagcgcggcaccaagaaaag

SEQ ID NO: 509953 - RNA, 32 nt, Human
ugaacaaggggaagcucacaacaggaacucac

SEQ ID NO: 509954 - RNA, 32 nt, Human
ugaacaagguaggcagagguugcagugagcca

SEQ ID NO: 509955 - RNA, 32 nt, Human
ugaacaagguucagaaaacauuguuuacuaag

SEQ ID NO: 509956 - RNA, 32 nt, Human
ugaacaagucacaaccucccaggcuccucauu

SEQ ID NO: 509957 - RNA, 32 nt, Human
ugaacaauacagaugccuucccuuguagcagu

SEQ ID NO: 509958 - RNA, 21 nt, Human
ugaacaauagcuaagugucuu

SEQ ID NO: 509959 - RNA, 32 nt, Human
ugaacaaucugaaacaucccuauucuaaggcu

SEQ ID NO: 509960 - RNA, 32 nt, Human
ugaacaauuguggucucucuuaacuugagguu

SEQ ID NO: 509961 - RNA, 32 nt, Human
ugaacacaccucagagggaggauccuuguugu

SEQ ID NO: 509962 - RNA, 32 nt, Human
ugaacacagaagguggagguugcagugagcca

SEQ ID NO: 509963 - RNA, 32 nt, Human
ugaacacagaauaguaccuuacauuugcuaaa

SEQ ID NO: 509964 - RNA, 32 nt, Human
ugaacacagaugucucagcuggaaucuaaaca

SEQ ID NO: 509965 - RNA, 32 nt, Human
ugaacacagaugugaggggauuugaaccaucu

SEQ ID NO: 509966 - RNA, 32 nt, Human
ugaacacagcaguucugcagaggacgggaggc

SEQ ID NO: 509967 - RNA, 32 nt, Human
ugaacacaggaggcagagguugcagcgagcug

SEQ ID NO: 509968 - RNA, 32 nt, Human
ugaacacaggaggcagagguugcagugagccg

SEQ ID NO: 509969 - RNA, 32 nt, Human
ugaacacaggggaggcaggggaagaggcagga

SEQ ID NO: 509970 - RNA, 32 nt, Human
ugaacacagugcauggugccuccuggggcugc

SEQ ID NO: 509971 - RNA, 32 nt, Human
ugaacacauaugccauauacauauauaccaac

SEQ ID NO: 509972 - RNA, 32 nt, Human
ugaacacauauguaccuacauacauacauaaa

SEQ ID NO: 509973 - RNA, 32 nt, Human
ugaacaccaccaggagcggagggagccuggug

SEQ ID NO: 509974 - RNA, 32 nt, Human
ugaacaccacugcacuccaccuguccacuugu

SEQ ID NO: 509975 - RNA, 32 nt, Human
ugaacacccaaaacgccauugccuuccgcaga

SEQ ID NO: 509976 - RNA, 32 nt, Human
ugaacacccauacauacacauauccacacaug

SEQ ID NO: 509977 - RNA, 32 nt, Human
ugaacaccccaggccugcugaggucccuccuu

SEQ ID NO: 509978 - RNA, 32 nt, Human
ugaacacccuccuuucacucccaaaugcaaac

SEQ ID NO: 509979 - RNA, 32 nt, Human
ugaacaccugaggccuuccuguggcccaccag

SEQ ID NO: 509980 - RNA, 32 nt, Human
ugaacaccuguaaucccagcuacuuggaaggc

SEQ ID NO: 509981 - RNA, 32 nt, Human
ugaacacgcugacugugaaccugcccuguauc

SEQ ID NO: 509982 - RNA, 32 nt, Human
ugaacacgggaggcagagguugcagugagcag

SEQ ID NO: 509983 - RNA, 32 nt, Human
ugaacacgggcuuugaacucuccuacuccugu

SEQ ID NO: 509984 - RNA, 32 nt, Human
ugaacacguaaacaacacagacuucaagcaau

SEQ ID NO: 509985 - RNA, 32 nt, Human
ugaacacuaaacauugcuagaaacccacccac

SEQ ID NO: 509986 - RNA, 32 nt, Human
ugaacacuacugggguauauucaggcucaucc

SEQ ID NO: 509987 - RNA, 32 nt, Human
ugaacacuagaacuguuaaucaccuuuaaaaa

SEQ ID NO: 509988 - RNA, 32 nt, Human
ugaacacuaucaaauccagucucagggacagu

SEQ ID NO: 509989 - RNA, 32 nt, Human
ugaacacugacugcacuuaccagucugauuuu

SEQ ID NO: 509990 - RNA, 32 nt, Human
ugaacacuggcugugugccuggcacuguuagg

SEQ ID NO: 509991 - RNA, 32 nt, Human
ugaacacuuucugcuuuccuuccuccaaagaa

SEQ ID NO: 509992 - RNA, 32 nt, Human
ugaacagaacaaaacccccgcacuccaggaag

SEQ ID NO: 509993 - RNA, 32 nt, Human
ugaacagaacaggaaucugaugaacaagcugg

SEQ ID NO: 509994 - RNA, 32 nt, Human
ugaacagaccacugcaucucacugggccagca

SEQ ID NO: 509995 - RNA, 32 nt, Human
ugaacagagaauuucuggagaaagagugccac

SEQ ID NO: 509996 - RNA, 32 nt, Human
ugaacagagccugggcggaugcagcccgcgac

SEQ ID NO: 509997 - RNA, 32 nt, Human
ugaacagagcuagaggccaugucuccugcaua

SEQ ID NO: 509998 - RNA, 32 nt, Human
ugaacagauaagagguggaggaggugacaggg

SEQ ID NO: 509999 - RNA, 32 nt, Human
ugaacagccauaaaagcacacuaccuuguagu

SEQ ID NO: 510000 - RNA, 32 nt, Human
ugaacagcuccauuucugugcacauguuggug

SEQ ID NO: 510001 - RNA, 23 nt, Human
ugaacagcugaggcagccccucc

SEQ ID NO: 510002 - RNA, 32 nt, Human
ugaacagcuguggaagucggagucucgggagc

SEQ ID NO: 510003 - RNA, 23 nt, Human
ugaacagcuguggcagccccucc

SEQ ID NO: 510004 - RNA, 32 nt, Human
ugaacagcuuuucaaguauuuggggaguuuau

SEQ ID NO: 510005 - RNA, 32 nt, Human
ugaacaggagaaaaggaacuaauggaccugug

SEQ ID NO: 510006 - RNA, 22 nt, Human
ugaacaggagaaucgcuugaac

SEQ ID NO: 510007 - RNA, 32 nt, Human
ugaacaggcacagcccucccaucuucccaaug

SEQ ID NO: 510008 - RNA, 32 nt, Human
ugaacagggaagcagagguugcggugaaccgg

SEQ ID NO: 510009 - RNA, 32 nt, Human
ugaacagggaggcagagguugcagugagccga

SEQ ID NO: 510010 - RNA, 32 nt, Human
ugaacaggggagauggagguugcagugagcug

SEQ ID NO: 510011 - RNA, 32 nt, Human
ugaacagguuucuucucuacugugccuucauc

SEQ ID NO: 510012 - RNA, 32 nt, Human
ugaacaguggccuggcuggcguggcagggcca

SEQ ID NO: 510013 - RNA, 32 nt, Human
ugaacagugguggcugggcucacagcuccauc

SEQ ID NO: 510014 - RNA, 32 nt, Human
ugaacaguguaugacucaaacagcugccuuac

SEQ ID NO: 510015 - RNA, 32 nt, Human
ugaacaguguguggggauuugcuuguauguau

SEQ ID NO: 510016 - RNA, 32 nt, Human
ugaacaguuaaauuaugcaaaacaacugaaag

SEQ ID NO: 510017 - RNA, 32 nt, Human
ugaacaguucuuuuguuuucucuccuuuuacu

SEQ ID NO: 510018 - RNA, 32 nt, Human
ugaacauagaagcgugaaggaaagggaggggc

SEQ ID NO: 510019 - RNA, 32 nt, Human
ugaacauaguaaaacuauugaauuucucuuaa

SEQ ID NO: 510020 - RNA, 25 nt, Human
ugaacauaugguaugguuauugcuu

SEQ ID NO: 510021 - RNA, 32 nt, Human
ugaacaucaagccuguuaauucuucaaagaau

SEQ ID NO: 510022 - RNA, 32 nt, Human
ugaacaucaccuaggagggccaugcaugugaa

SEQ ID NO: 510023 - RNA, 32 nt, Human
ugaacaucccuucucugcuccacaggaguguc

SEQ ID NO: 510024 - RNA, 32 nt, Human
ugaacaucguucuuucagaagugcugaaaaug

SEQ ID NO: 510025 - RNA, 32 nt, Human
ugaacaucuccuccccuucaugcccuagccug

SEQ ID NO: 510026 - RNA, 32 nt, Human
ugaacaucugcacuaggcccaagccuuggagu

SEQ ID NO: 510027 - RNA, 20 nt, Human
ugaacaugccugcgauccca

SEQ ID NO: 510028 - RNA, 32 nt, Human
ugaacaugcugagcaguugagcacuuuuccau

SEQ ID NO: 510029 - RNA, 30 nt, Human
ugaacauggcggcggugguagcugcuacgg

SEQ ID NO: 510030 - RNA, 32 nt, Human
ugaacaugggcaguuccccuggcuuguuugac

SEQ ID NO: 510031 - RNA, 32 nt, Human
ugaacaugggggccagagagcagauggacuga

SEQ ID NO: 510032 - RNA, 32 nt, Human
ugaacaugguagacagagguugcagugagcca

SEQ ID NO: 510033 - RNA, 32 nt, Human
ugaacauguuacagugcugcagagauuuuauu

SEQ ID NO: 510034 - RNA, 32 nt, Human
ugaacauguuacagugcugcagagauuuuguu

SEQ ID NO: 510035 - RNA, 32 nt, Human
ugaacauucaacuaccauaugacccagcaauu

SEQ ID NO: 510036 - RNA, 32 nt, Human
ugaacauuccuggagaaaacagugauguggau

SEQ ID NO: 510037 - RNA, 32 nt, Human
ugaacauuuauugaucuucuacauacaagacu

SEQ ID NO: 510038 - RNA, 32 nt, Human
ugaacauuuccuuccaggaaugaaagagaacc

SEQ ID NO: 510039 - RNA, 32 nt, Human
ugaaccaaacaaaaacaauaacuacaacaacu

SEQ ID NO: 510040 - RNA, 32 nt, Human
ugaaccaaagagaccuccuuguuucagcuggg

SEQ ID NO: 510041 - RNA, 32 nt, Human
ugaaccaacagaccucugcuggcaucugcgau

SEQ ID NO: 510042 - RNA, 32 nt, Human
ugaaccaacccccaucucccuagcccaccccc

SEQ ID NO: 510043 - RNA, 32 nt, Human
ugaaccaaggaggcagagguuguaguaagcug

SEQ ID NO: 510044 - RNA, 32 nt, Human
ugaaccaaggagguggagguugcagugagccg

SEQ ID NO: 510045 - RNA, 32 nt, Human
ugaaccaaggaguucaaguuuagccugggcag

SEQ ID NO: 510046 - RNA, 32 nt, Human
ugaaccaagggaggagucaggaagagacaccc

SEQ ID NO: 510047 - RNA, 32 nt, Human
ugaaccaagggaggggucaggaagagacaccc

SEQ ID NO: 510048 - RNA, 32 nt, Human
ugaaccaagguggcagagguugcaguaagcca

SEQ ID NO: 510049 - RNA, 32 nt, Human
ugaaccaaguaguauucauguuguuauuauau

SEQ ID NO: 510050 - RNA, 32 nt, Human
ugaaccacaacaaacacgcuuucuccuugaau

SEQ ID NO: 510051 - RNA, 32 nt, Human
ugaaccacaggagaggauggcccagggugagg

SEQ ID NO: 510052 - RNA, 32 nt, Human
ugaaccacauccuguccuaucucccccaaacc

SEQ ID NO: 510053 - RNA, 32 nt, Human
ugaaccacucacugcugcgccuggaccucgac

SEQ ID NO: 510054 - RNA, 32 nt, Human
ugaaccacugaauucaggggaugggggugggg

SEQ ID NO: 510055 - RNA, 32 nt, Human
ugaaccacugcacccagccaauggguguaauu

SEQ ID NO: 510056 - RNA, 32 nt, Human
ugaaccacugcacccagccuaucuuuugcauu

SEQ ID NO: 510057 - RNA, 32 nt, Human
ugaaccacugcacccagccugcugauccuuuc

SEQ ID NO: 510058 - RNA, 32 nt, Human
ugaaccacugcaccuggcccuggauugcauuu

SEQ ID NO: 510059 - RNA, 32 nt, Human
ugaaccagaaguagcugggcauuggagucaug

SEQ ID NO: 510060 - RNA, 32 nt, Human
ugaaccagagagguggagguugcagugaaccg

SEQ ID NO: 510061 - RNA, 32 nt, Human
ugaaccagagugugcccugccccucaugcuca

SEQ ID NO: 510062 - RNA, 32 nt, Human
ugaaccagcggugaggcaggagcccagacccu

SEQ ID NO: 510063 - RNA, 32 nt, Human
ugaaccaggaaaaucaguaaagugauuguaaa

SEQ ID NO: 510064 - RNA, 32 nt, Human
ugaaccaggaaggcagagguugcacugagcug

SEQ ID NO: 510065 - RNA, 32 nt, Human
ugaaccaggagacggagguugcagugagcuga

SEQ ID NO: 510066 - RNA, 32 nt, Human
ugaaccaggagacggagguuucagugaaugaa

SEQ ID NO: 510067 - RNA, 32 nt, Human
ugaaccaggagguggacguugcagugauccca

SEQ ID NO: 510068 - RNA, 32 nt, Human
ugaaccaggauggggagguugcagugagccga

SEQ ID NO: 510069 - RNA, 32 nt, Human
ugaaccaggcugucgaagcauuggugcccuca

SEQ ID NO: 510070 - RNA, 32 nt, Human
ugaaccagggaagcggagguugcagugagccg

SEQ ID NO: 510071 - RNA, 32 nt, Human
ugaaccagggaaugggggcagccucuagaggc

SEQ ID NO: 510072 - RNA, 32 nt, Human
ugaaccagggaggaggagcuugcagugagccg

SEQ ID NO: 510073 - RNA, 32 nt, Human
ugaaccagggaggcagagauugcagugagccg

SEQ ID NO: 510074 - RNA, 32 nt, Human
ugaaccagggaggcagaggcugcggugagccg

SEQ ID NO: 510075 - RNA, 32 nt, Human
ugaaccagggaggcagagguugcagugagccc

SEQ ID NO: 510076 - RNA, 32 nt, Human
ugaaccagggaggcagagguuguggugagccg

SEQ ID NO: 510077 - RNA, 32 nt, Human
ugaaccagggaggcagaguuugcagugaaugg

SEQ ID NO: 510078 - RNA, 32 nt, Human
ugaaccagggaggcggagguugcagcaagcca

SEQ ID NO: 510079 - RNA, 32 nt, Human
ugaaccagggaggcggagguugcagugagccg

SEQ ID NO: 510080 - RNA, 32 nt, Human
ugaaccagggaggcggcgguuguggugagcug

SEQ ID NO: 510081 - RNA, 32 nt, Human
ugaaccagggagguggagggugccuguaaucc

SEQ ID NO: 510082 - RNA, 32 nt, Human
ugaaccagggagguggagguugcagugagcca

SEQ ID NO: 510083 - RNA, 32 nt, Human
ugaaccagggagguggagguugcagugagccg

SEQ ID NO: 510084 - RNA, 32 nt, Human
ugaaccagggagguggagguugcagugagcug

SEQ ID NO: 510085 - RNA, 32 nt, Human
ugaaccagggagucagagguuucagugagcca

SEQ ID NO: 510086 - RNA, 32 nt, Human
ugaaccagggagucggagauugcagugagcug

SEQ ID NO: 510087 - RNA, 32 nt, Human
ugaaccaguggcucagccaucugugccaagga

SEQ ID NO: 510088 - RNA, 32 nt, Human
ugaaccaguguggccgagguugcagugagugu

SEQ ID NO: 510089 - RNA, 32 nt, Human
ugaaccaguucugcaagugacuguguuuugua

SEQ ID NO: 510090 - RNA, 32 nt, Human
ugaaccauaagaaauugccaguguacaauuuc

SEQ ID NO: 510091 - RNA, 18 nt, Human
ugaaccaucuaucuccag

SEQ ID NO: 510092 - RNA, 32 nt, Human
ugaaccaucugagaagcuuggaagaggacccc

SEQ ID NO: 510093 - RNA, 32 nt, Human
ugaaccaugauugcacuccaaccugggcgaca

SEQ ID NO: 510094 - RNA, 32 nt, Human
ugaaccaugccagaugccaggaaaggugggag

SEQ ID NO: 510095 - RNA, 32 nt, Human
ugaacccaaaaggcagacauugcagugagcca

SEQ ID NO: 510096 - RNA, 32 nt, Human
ugaacccaagaggcagaggaugcaaugagcca

SEQ ID NO: 510097 - RNA, 32 nt, Human
ugaacccaagaggcagagguugcagugaacug

SEQ ID NO: 510098 - RNA, 32 nt, Human
ugaacccaagaggcagaguuugcagugagcug

SEQ ID NO: 510099 - RNA, 32 nt, Human
ugaacccaagaggcggagguugcagugagcca

SEQ ID NO: 510100 - RNA, 32 nt, Human
ugaacccaagaggcggagguuguggugagccg

SEQ ID NO: 510101 - RNA, 32 nt, Human
ugaacccaagagguccaaggcugcagugagcc

SEQ ID NO: 510102 - RNA, 32 nt, Human
ugaacccaagagguggaggcugaagugagcca

SEQ ID NO: 510103 - RNA, 32 nt, Human
ugaacccaagagguggagguugcggugagcca

SEQ ID NO: 510104 - RNA, 32 nt, Human
ugaacccaaucuuaaaggagguucucaugccc

SEQ ID NO: 510105 - RNA, 32 nt, Human
ugaacccacagggcagaggucacagugagcca

SEQ ID NO: 510106 - RNA, 32 nt, Human
ugaacccacaugcucccuacagccagcggccg

SEQ ID NO: 510107 - RNA, 32 nt, Human
ugaacccagaaagcggagguugcagugaccug

SEQ ID NO: 510108 - RNA, 32 nt, Human
ugaacccagaagacagguugcagugagccaag

SEQ ID NO: 510109 - RNA, 32 nt, Human
ugaacccagaagcggagguugcagugagcuga

SEQ ID NO: 510110 - RNA, 32 nt, Human
ugaacccagaaggcagagguugcagugagcug

SEQ ID NO: 510111 - RNA, 32 nt, Human
ugaacccagaaggcagagguugcaugaugcaa

SEQ ID NO: 510112 - RNA, 32 nt, Human
ugaacccagaaggcggaaguugcagugagccg

SEQ ID NO: 510113 - RNA, 32 nt, Human
ugaacccagaaggcggaaguugcagugagcug

SEQ ID NO: 510114 - RNA, 32 nt, Human
ugaacccagaagguagagguugcagccaagau

SEQ ID NO: 510115 - RNA, 32 nt, Human
ugaacccagaaggugcagguugcagugagcug

SEQ ID NO: 510116 - RNA, 32 nt, Human
ugaacccagaagguggagguagcagugagccg

SEQ ID NO: 510117 - RNA, 32 nt, Human
ugaacccagaggcggagguuguagugagccga

SEQ ID NO: 510118 - RNA, 32 nt, Human
ugaacccagauagcagagguugcagugagcug

SEQ ID NO: 510119 - RNA, 32 nt, Human
ugaacccagauugcccacugcacuccagccug

SEQ ID NO: 510120 - RNA, 32 nt, Human
ugaacccagcagauggagguugcagugagcca

SEQ ID NO: 510121 - RNA, 32 nt, Human
ugaacccagcaggcagagguugcagugagcca

SEQ ID NO: 510122 - RNA, 32 nt, Human
ugaacccagcaggcggagguugcggugagucg

SEQ ID NO: 510123 - RNA, 32 nt, Human
ugaacccagccggcuccaucucagcuucuggu

SEQ ID NO: 510124 - RNA, 32 nt, Human
ugaacccagcgggaagagguugcagugagcca

SEQ ID NO: 510125 - RNA, 32 nt, Human
ugaacccaggaagaggagguugcagugagccg

SEQ ID NO: 510126 - RNA, 32 nt, Human
ugaacccaggaagcagagguugcaguaagcug

SEQ ID NO: 510127 - RNA, 32 nt, Human
ugaacccaggaagcagagguugcagugagcag

SEQ ID NO: 510128 - RNA, 32 nt, Human
ugaacccaggaagcagagguugcagugagcug

SEQ ID NO: 510129 - RNA, 32 nt, Human
ugaacccaggaagcggagguugcagugagccg

SEQ ID NO: 510130 - RNA, 32 nt, Human
ugaacccaggaagcggagguuguggugagcca

SEQ ID NO: 510131 - RNA, 32 nt, Human
ugaacccaggaagcgggguugcagugagccaa

SEQ ID NO: 510132 - RNA, 32 nt, Human
ugaacccaggaaguagagguugcagugagccg

SEQ ID NO: 510133 - RNA, 32 nt, Human
ugaacccaggaaguggagguugcagugagccg

SEQ ID NO: 510134 - RNA, 32 nt, Human
ugaacccaggaaguggagguugcagugagcua

SEQ ID NO: 510135 - RNA, 32 nt, Human
ugaacccaggaaguggagguugcagugagcug

SEQ ID NO: 510136 - RNA, 32 nt, Human
ugaacccaggaaguggcaguugcagugagccg

SEQ ID NO: 510137 - RNA, 32 nt, Human
ugaacccaggacacggagauugcagugagcca

SEQ ID NO: 510138 - RNA, 32 nt, Human
ugaacccaggacgcagagguugcggugagcca

SEQ ID NO: 510139 - RNA, 32 nt, Human
ugaacccaggagacagagguugcagugagcca

SEQ ID NO: 510140 - RNA, 32 nt, Human
ugaacccaggagacagagguuguagugagcug

SEQ ID NO: 510141 - RNA, 32 nt, Human
ugaacccaggagacagagguugugguggggca

SEQ ID NO: 510142 - RNA, 32 nt, Human
ugaacccaggagacagggguugcagugagcca

SEQ ID NO: 510143 - RNA, 32 nt, Human
ugaacccaggagacagguugcagugagccgag

SEQ ID NO: 510144 - RNA, 32 nt, Human
ugaacccaggagacauggguugcagugagccg

SEQ ID NO: 510145 - RNA, 32 nt, Human
ugaacccaggagacgagguugcagugagccga

SEQ ID NO: 510146 - RNA, 32 nt, Human
ugaacccaggagacggaaguugcagugagcug

SEQ ID NO: 510147 - RNA, 32 nt, Human
ugaacccaggagacggagcuugcagugagccg

SEQ ID NO: 510148 - RNA, 32 nt, Human
ugaacccaggagacggagguugcagugagccg

SEQ ID NO: 510149 - RNA, 32 nt, Human
ugaacccaggagacggagguugcggugaguug

SEQ ID NO: 510150 - RNA, 32 nt, Human
ugaacccaggagacggugguugcagugagcca

SEQ ID NO: 510151 - RNA, 32 nt, Human
ugaacccaggagacggugguugcagugagcga

SEQ ID NO: 510152 - RNA, 32 nt, Human
ugaacccaggagaggaagguugcaguaagcug

SEQ ID NO: 510153 - RNA, 32 nt, Human
ugaacccaggagauagagguugcaaugagcca

SEQ ID NO: 510154 - RNA, 32 nt, Human
ugaacccaggagauggaaguugcagugagcug

SEQ ID NO: 510155 - RNA, 32 nt, Human
ugaacccaggagauggagauugcaguaggcca

SEQ ID NO: 510156 - RNA, 32 nt, Human
ugaacccaggagauggagguugcagugagcca

SEQ ID NO: 510157 - RNA, 32 nt, Human
ugaacccaggagauggagguugcagugagcug

SEQ ID NO: 510158 - RNA, 32 nt, Human
ugaacccaggagauggagguugcggugagcug

SEQ ID NO: 510159 - RNA, 32 nt, Human
ugaacccaggagauugagguuguagugagcug

SEQ ID NO: 510160 - RNA, 32 nt, Human
ugaacccaggaggaagagguugcagugagcca

SEQ ID NO: 510161 - RNA, 32 nt, Human
ugaacccaggaggaggagcuugcagugagccg

SEQ ID NO: 510162 - RNA, 32 nt, Human
ugaacccaggaggagguggagaucgcagugag

SEQ ID NO: 510163 - RNA, 32 nt, Human
ugaacccaggaggcacagauugcagugagcca

SEQ ID NO: 510164 - RNA, 32 nt, Human
ugaacccaggaggcacagcuugcagugagcga

SEQ ID NO: 510165 - RNA, 32 nt, Human
ugaacccaggaggcacagguugcagugagcca

SEQ ID NO: 510166 - RNA, 32 nt, Human
ugaacccaggaggcagaaguugcagugagcag

SEQ ID NO: 510167 - RNA, 32 nt, Human
ugaacccaggaggcagaaguugcagugagccg

SEQ ID NO: 510168 - RNA, 32 nt, Human
ugaacccaggaggcagaaguugcagugagcug

SEQ ID NO: 510169 - RNA, 32 nt, Human
ugaacccaggaggcagagaucgcagugaguug

SEQ ID NO: 510170 - RNA, 32 nt, Human
ugaacccaggaggcagagauugcagugagcca

SEQ ID NO: 510171 - RNA, 32 nt, Human
ugaacccaggaggcagagauugcagugagcug

SEQ ID NO: 510172 - RNA, 32 nt, Human
ugaacccaggaggcagagauugcggugagcca

SEQ ID NO: 510173 - RNA, 32 nt, Human
ugaacccaggaggcagagauugcggugagccg

SEQ ID NO: 510174 - RNA, 32 nt, Human
ugaacccaggaggcagagcuugcagugagcca

SEQ ID NO: 510175 - RNA, 32 nt, Human
ugaacccaggaggcagagcuugcagugagccg

SEQ ID NO: 510176 - RNA, 32 nt, Human
ugaacccaggaggcagagcuugcagugagccu

SEQ ID NO: 510177 - RNA, 32 nt, Human
ugaacccaggaggcagagcuugcagugagcug

SEQ ID NO: 510178 - RNA, 32 nt, Human
ugaacccaggaggcagagcuuguagugagccu

SEQ ID NO: 510179 - RNA, 32 nt, Human
ugaacccaggaggcagaggguugcagugagcc

SEQ ID NO: 510180 - RNA, 32 nt, Human
ugaacccaggaggcagagguuacaguaaaccg

SEQ ID NO: 510181 - RNA, 32 nt, Human
ugaacccaggaggcagagguuacagugagcag

SEQ ID NO: 510182 - RNA, 32 nt, Human
ugaacccaggaggcagagguugcaaugagcca

SEQ ID NO: 510183 - RNA, 32 nt, Human
ugaacccaggaggcagagguugcagcgagcug

SEQ ID NO: 510184 - RNA, 32 nt, Human
ugaacccaggaggcagagguugcaguaagcca

SEQ ID NO: 510185 - RNA, 32 nt, Human
ugaacccaggaggcagagguugcaguaagccu

SEQ ID NO: 510186 - RNA, 32 nt, Human
ugaacccaggaggcagagguugcagucagcca

SEQ ID NO: 510187 - RNA, 32 nt, Human
ugaacccaggaggcagagguugcagugagcca

SEQ ID NO: 510188 - RNA, 32 nt, Human
ugaacccaggaggcagagguugcagugagccg

SEQ ID NO: 510189 - RNA, 32 nt, Human
ugaacccaggaggcagagguugcagugagcua

SEQ ID NO: 510190 - RNA, 32 nt, Human
ugaacccaggaggcagagguugcagugagcug

SEQ ID NO: 510191 - RNA, 32 nt, Human
ugaacccaggaggcagagguugcagugaguca

SEQ ID NO: 510192 - RNA, 32 nt, Human
ugaacccaggaggcagagguugcagugcacca

SEQ ID NO: 510193 - RNA, 32 nt, Human
ugaacccaggaggcagagguugcagugcgcug

SEQ ID NO: 510194 - RNA, 32 nt, Human
ugaacccaggaggcagagguugcagugggcca

SEQ ID NO: 510195 - RNA, 32 nt, Human
ugaacccaggaggcagagguugcggugagccg

SEQ ID NO: 510196 - RNA, 32 nt, Human
ugaacccaggaggcagagguugcggugagucg

SEQ ID NO: 510197 - RNA, 32 nt, Human
ugaacccaggaggcagagguugcguugagcca

SEQ ID NO: 510198 - RNA, 32 nt, Human
ugaacccaggaggcagagguuggggugagcug

SEQ ID NO: 510199 - RNA, 32 nt, Human
ugaacccaggaggcagagguuguagugagcca

SEQ ID NO: 510200 - RNA, 32 nt, Human
ugaacccaggaggcagaguuugcagucagcca

SEQ ID NO: 510201 - RNA, 32 nt, Human
ugaacccaggaggcagaguuugcagugagcca

SEQ ID NO: 510202 - RNA, 32 nt, Human
ugaacccaggaggcagaguuugcagugagcug

SEQ ID NO: 510203 - RNA, 32 nt, Human
ugaacccaggaggcagcuguugcagugagcca

SEQ ID NO: 510204 - RNA, 32 nt, Human
ugaacccaggaggcagugauugcagugagcug

SEQ ID NO: 510205 - RNA, 32 nt, Human
ugaacccaggaggcagugguugcaaugagccg

SEQ ID NO: 510206 - RNA, 32 nt, Human
ugaacccaggaggccgagguugcagugagcca

SEQ ID NO: 510207 - RNA, 32 nt, Human
ugaacccaggaggcgaagauugccgugagccg

SEQ ID NO: 510208 - RNA, 32 nt, Human
ugaacccaggaggcgaagguugcaguaaacca

SEQ ID NO: 510209 - RNA, 32 nt, Human
ugaacccaggaggcggaaguugcagugagcug

SEQ ID NO: 510210 - RNA, 32 nt, Human
ugaacccaggaggcggaccuuguagugagccg

SEQ ID NO: 510211 - RNA, 32 nt, Human
ugaacccaggaggcggagauugcagugagccg

SEQ ID NO: 510212 - RNA, 32 nt, Human
ugaacccaggaggcggagauugcagugagcug

SEQ ID NO: 510213 - RNA, 32 nt, Human
ugaacccaggaggcggagcuggcagugagcug

SEQ ID NO: 510214 - RNA, 32 nt, Human
ugaacccaggaggcggagcuugcagugagcag

SEQ ID NO: 510215 - RNA, 32 nt, Human
ugaacccaggaggcggagcuugcagugagcca

SEQ ID NO: 510216 - RNA, 32 nt, Human
ugaacccaggaggcggagcuugcagugagccg

SEQ ID NO: 510217 - RNA, 32 nt, Human
ugaacccaggaggcggagcuugcagugagcug

SEQ ID NO: 510218 - RNA, 32 nt, Human
ugaacccaggaggcggaggcagaggcugcagu

SEQ ID NO: 510219 - RNA, 32 nt, Human
ugaacccaggaggcggaggcugcagugagccc

SEQ ID NO: 510220 - RNA, 32 nt, Human
ugaacccaggaggcggaggcugcagugagcug

SEQ ID NO: 510221 - RNA, 32 nt, Human
ugaacccaggaggcggagguagcagugagcca

SEQ ID NO: 510222 - RNA, 32 nt, Human
ugaacccaggaggcggagguaguggugagcaa

SEQ ID NO: 510223 - RNA, 32 nt, Human
ugaacccaggaggcggagguuacagugagcca

SEQ ID NO: 510224 - RNA, 32 nt, Human
ugaacccaggaggcggagguugcacugagccg

SEQ ID NO: 510225 - RNA, 32 nt, Human
ugaacccaggaggcggagguugcagggaggga

SEQ ID NO: 510226 - RNA, 32 nt, Human
ugaacccaggaggcggagguugcaguaagcca

SEQ ID NO: 510227 - RNA, 32 nt, Human
ugaacccaggaggcggagguugcagugaaccg

SEQ ID NO: 510228 - RNA, 32 nt, Human
ugaacccaggaggcggagguugcagugacccg

SEQ ID NO: 510229 - RNA, 32 nt, Human
ugaacccaggaggcggagguugcagugagacg

SEQ ID NO: 510230 - RNA, 32 nt, Human
ugaacccaggaggcggagguugcagugagcag

SEQ ID NO: 510231 - RNA, 32 nt, Human
ugaacccaggaggcggagguugcagugagcca

SEQ ID NO: 510232 - RNA, 32 nt, Human
ugaacccaggaggcggagguugcagugagccg

SEQ ID NO: 510233 - RNA, 32 nt, Human
ugaacccaggaggcggagguugcagugagcuc

SEQ ID NO: 510234 - RNA, 32 nt, Human
ugaacccaggaggcggagguugcagugagcug

SEQ ID NO: 510235 - RNA, 32 nt, Human
ugaacccaggaggcggagguugcagugaucca

SEQ ID NO: 510236 - RNA, 32 nt, Human
ugaacccaggaggcggagguugccgugagcca

SEQ ID NO: 510237 - RNA, 32 nt, Human
ugaacccaggaggcggagguugcggugagcca

SEQ ID NO: 510238 - RNA, 32 nt, Human
ugaacccaggaggcggagguugcggugagccg

SEQ ID NO: 510239 - RNA, 32 nt, Human
ugaacccaggaggcggagguugcggugagcug

SEQ ID NO: 510240 - RNA, 32 nt, Human
ugaacccaggaggcggagguugcggugaguug

SEQ ID NO: 510241 - RNA, 32 nt, Human
ugaacccaggaggcggagguuguagugagcca

SEQ ID NO: 510242 - RNA, 32 nt, Human
ugaacccaggaggcggagguuguauaggcuga

SEQ ID NO: 510243 - RNA, 32 nt, Human
ugaacccaggaggcggagguuguggugagcca

SEQ ID NO: 510244 - RNA, 32 nt, Human
ugaacccaggaggcggaguuugcagugagcug

SEQ ID NO: 510245 - RNA, 32 nt, Human
ugaacccaggaggcggcgguugcagugagcca

SEQ ID NO: 510246 - RNA, 32 nt, Human
ugaacccaggaggcggggguugcagugagucg

SEQ ID NO: 510247 - RNA, 32 nt, Human
ugaacccaggaggcguagcuagcagugagcca

SEQ ID NO: 510248 - RNA, 32 nt, Human
ugaacccaggaggcugagguugcagugagcca

SEQ ID NO: 510249 - RNA, 32 nt, Human
ugaacccaggaggcugagguugcagugagccc

SEQ ID NO: 510250 - RNA, 32 nt, Human
ugaacccaggagguagaagcugcagugagcag

SEQ ID NO: 510251 - RNA, 32 nt, Human
ugaacccaggagguagaaguugcagugagccg

SEQ ID NO: 510252 - RNA, 32 nt, Human
ugaacccaggagguagaggcugcagugagcag

SEQ ID NO: 510253 - RNA, 32 nt, Human
ugaacccaggagguagaggcugcagugagccg

SEQ ID NO: 510254 - RNA, 32 nt, Human
ugaacccaggagguagaggcugcagugagcug

SEQ ID NO: 510255 - RNA, 32 nt, Human
ugaacccaggagguagagguugcagugagcca

SEQ ID NO: 510256 - RNA, 32 nt, Human
ugaacccaggagguagagguugcagugagccg

SEQ ID NO: 510257 - RNA, 32 nt, Human
ugaacccaggaggugaagguugcagugaccgg

SEQ ID NO: 510258 - RNA, 32 nt, Human
ugaacccaggaggugcagguugcagugagccg

SEQ ID NO: 510259 - RNA, 32 nt, Human
ugaacccaggagguggaaguugcuuugagccg

SEQ ID NO: 510260 - RNA, 32 nt, Human
ugaacccaggagguggacauuacagugagccc

SEQ ID NO: 510261 - RNA, 32 nt, Human
ugaacccaggagguggagauugcagugagcug

SEQ ID NO: 510262 - RNA, 32 nt, Human
ugaacccaggagguggagcuugcaaugagccg

SEQ ID NO: 510263 - RNA, 32 nt, Human
ugaacccaggagguggagcuugcagugagccg

SEQ ID NO: 510264 - RNA, 32 nt, Human
ugaacccaggagguggaggaugcagugaacug

SEQ ID NO: 510265 - RNA, 32 nt, Human
ugaacccaggagguggaggcugcagugagcug

SEQ ID NO: 510266 - RNA, 32 nt, Human
ugaacccaggagguggaggcugcggugagccg

SEQ ID NO: 510267 - RNA, 32 nt, Human
ugaacccaggagguggagguagcagugagccg

SEQ ID NO: 510268 - RNA, 32 nt, Human
ugaacccaggagguggagguuacagugagcca

SEQ ID NO: 510269 - RNA, 32 nt, Human
ugaacccaggagguggagguuacagugagcug

SEQ ID NO: 510270 - RNA, 32 nt, Human
ugaacccaggagguggagguuccagugagcca

SEQ ID NO: 510271 - RNA, 32 nt, Human
ugaacccaggagguggagguugcaagugagcu

SEQ ID NO: 510272 - RNA, 32 nt, Human
ugaacccaggagguggagguugcagcaagcag

SEQ ID NO: 510273 - RNA, 32 nt, Human
ugaacccaggagguggagguugcaguaagcca

SEQ ID NO: 510274 - RNA, 32 nt, Human
ugaacccaggagguggagguugcaguaagcug

SEQ ID NO: 510275 - RNA, 32 nt, Human
ugaacccaggagguggagguugcagugaacug

SEQ ID NO: 510276 - RNA, 32 nt, Human
ugaacccaggagguggagguugcagugagcag

SEQ ID NO: 510277 - RNA, 32 nt, Human
ugaacccaggagguggagguugcagugagcca

SEQ ID NO: 510278 - RNA, 32 nt, Human
ugaacccaggagguggagguugcagugagccg

SEQ ID NO: 510279 - RNA, 32 nt, Human
ugaacccaggagguggagguugcagugagcug

SEQ ID NO: 510280 - RNA, 32 nt, Human
ugaacccaggagguggagguugcagugaggca

SEQ ID NO: 510281 - RNA, 32 nt, Human
ugaacccaggagguggagguugcagugaguca

SEQ ID NO: 510282 - RNA, 32 nt, Human
ugaacccaggagguggagguugcagugagucg

SEQ ID NO: 510283 - RNA, 32 nt, Human
ugaacccaggagguggagguugcagugggccg

SEQ ID NO: 510284 - RNA, 32 nt, Human
ugaacccaggagguggagguugcaguuagcug

SEQ ID NO: 510285 - RNA, 32 nt, Human
ugaacccaggagguggagguugcggugagcug

SEQ ID NO: 510286 - RNA, 32 nt, Human
ugaacccaggagguggagguugcugugagcca

SEQ ID NO: 510287 - RNA, 32 nt, Human
ugaacccaggagguggagguuguagugagaca

SEQ ID NO: 510288 - RNA, 32 nt, Human
ugaacccaggagguggagguuguggugagcca

SEQ ID NO: 510289 - RNA, 32 nt, Human
ugaacccaggagguggagguuguggugagccg

SEQ ID NO: 510290 - RNA, 32 nt, Human
ugaacccaggagguggagguuguggugagcug

SEQ ID NO: 510291 - RNA, 32 nt, Human
ugaacccaggagguggaguuugcagugagcug

SEQ ID NO: 510292 - RNA, 32 nt, Human
ugaacccaggaggugggcauugcagugagccg

SEQ ID NO: 510293 - RNA, 32 nt, Human
ugaacccaggagguggggguugcaccgagcag

SEQ ID NO: 510294 - RNA, 32 nt, Human
ugaacccaggagguggugguugcagugagccu

SEQ ID NO: 510295 - RNA, 32 nt, Human
ugaacccaggagguguugcagugaaccaagau

SEQ ID NO: 510296 - RNA, 32 nt, Human
ugaacccaggagguugaagcugcggugggcca

SEQ ID NO: 510297 - RNA, 32 nt, Human
ugaacccaggagguugaggcugcagugaguca

SEQ ID NO: 510298 - RNA, 32 nt, Human
ugaacccaggagucagagguuucagugagccg

SEQ ID NO: 510299 - RNA, 32 nt, Human
ugaacccaggagucggagguugcagugaguug

SEQ ID NO: 510300 - RNA, 32 nt, Human
ugaacccaggaguucaagaauagccugggcaa

SEQ ID NO: 510301 - RNA, 32 nt, Human
ugaacccaggaguucaagaccagccuggacaa

SEQ ID NO: 510302 - RNA, 32 nt, Human
ugaacccaggaguucaagaccagccugggcag

SEQ ID NO: 510303 - RNA, 32 nt, Human
ugaacccaggaguucaagaucagccugggcaa

SEQ ID NO: 510304 - RNA, 32 nt, Human
ugaacccaggaguuggagcuugcagugagccg

SEQ ID NO: 510305 - RNA, 32 nt, Human
ugaacccaggaugcggagguugcagugagccg

SEQ ID NO: 510306 - RNA, 32 nt, Human
ugaacccaggcaguggagguugcagugagcca

SEQ ID NO: 510307 - RNA, 32 nt, Human
ugaacccaggcggcagagguugcagugagucg

SEQ ID NO: 510308 - RNA, 32 nt, Human
ugaacccagggggcagagguugcagugagccg

SEQ ID NO: 510309 - RNA, 32 nt, Human
ugaacccaggggguggagguugcacugagccg

SEQ ID NO: 510310 - RNA, 32 nt, Human
ugaacccaggugucccggaaaggggcugcagg

SEQ ID NO: 510311 - RNA, 32 nt, Human
ugaacccagguuguggagguuguagugagccg

SEQ ID NO: 510312 - RNA, 32 nt, Human
ugaacccaguagaggaagguugcaguaagcug

SEQ ID NO: 510313 - RNA, 32 nt, Human
ugaacccaguaggcggaaguugcagugagcug

SEQ ID NO: 510314 - RNA, 32 nt, Human
ugaacccagugagccgagaucgugccacugca

SEQ ID NO: 510315 - RNA, 32 nt, Human
ugaacccaguggcggaggcugcagugagccga

SEQ ID NO: 510316 - RNA, 32 nt, Human
ugaacccaguguaggagaguucagcugaaauc

SEQ ID NO: 510317 - RNA, 32 nt, Human
ugaacccauaaggcagagguugcagugagcug

SEQ ID NO: 510318 - RNA, 32 nt, Human
ugaacccaucaucucuuggaauuaaguguccu

SEQ ID NO: 510319 - RNA, 32 nt, Human
ugaacccaugaggcggagguugcagugagccg

SEQ ID NO: 510320 - RNA, 32 nt, Human
ugaacccaugagguggagguugcggugagcca

SEQ ID NO: 510321 - RNA, 28 nt, Human
ugaaccccaaguguguaccucauucuuc

SEQ ID NO: 510322 - RNA, 32 nt, Human
ugaaccccacaguccgccuggccagaccuccu

SEQ ID NO: 510323 - RNA, 32 nt, Human
ugaaccccagaggcagaggcugaagugagcca

SEQ ID NO: 510324 - RNA, 32 nt, Human
ugaaccccagaggcagagguugcagugagcug

SEQ ID NO: 510325 - RNA, 32 nt, Human
ugaaccccagaggcagagguugcggugagccg

SEQ ID NO: 510326 - RNA, 32 nt, Human
ugaaccccagaggcggagguugcagugagccg

SEQ ID NO: 510327 - RNA, 32 nt, Human
ugaaccccagaggcuuccccagcccuggggau

SEQ ID NO: 510328 - RNA, 32 nt, Human
ugaaccccagaggucaagacugcagugagcug

SEQ ID NO: 510329 - RNA, 32 nt, Human
ugaaccccagagguggagguugcagugagccg

SEQ ID NO: 510330 - RNA, 32 nt, Human
ugaaccccagggugggaccccagcacagaggc

SEQ ID NO: 510331 - RNA, 32 nt, Human
ugaacccccaaagcaucuuucucuccacaaag

SEQ ID NO: 510332 - RNA, 32 nt, Human
ugaacccccaaggcggagcuugcagugagccg

SEQ ID NO: 510333 - RNA, 22 nt, Human
ugaacccccacccuacccccua

SEQ ID NO: 510334 - RNA, 32 nt, Human
ugaacccccaggcuggaguacaguggcaggau

SEQ ID NO: 510335 - RNA, 32 nt, Human
ugaacccccuccuggggagccaggcucacagg

SEQ ID NO: 510336 - RNA, 32 nt, Human
ugaacccccugccuuucuugcagccuacaacg

SEQ ID NO: 510337 - RNA, 32 nt, Human
ugaaccccggagauggagguugcagugagcca

SEQ ID NO: 510338 - RNA, 32 nt, Human
ugaaccccggaggcagagguuucagugagccg

SEQ ID NO: 510339 - RNA, 32 nt, Human
ugaaccccggaggcggagcuugcagugagccg

SEQ ID NO: 510340 - RNA, 32 nt, Human
ugaaccccggaggcggagguugcagugagcug

SEQ ID NO: 510341 - RNA, 32 nt, Human
ugaaccccggagguagagguugcagugagccg

SEQ ID NO: 510342 - RNA, 32 nt, Human
ugaaccccuccccaugaacacaaggguuuuau

SEQ ID NO: 510343 - RNA, 32 nt, Human
ugaaccccugcagugacugucaccagccaucg

SEQ ID NO: 510344 - RNA, 32 nt, Human
ugaaccccugcucugucccaggcucccccucc

SEQ ID NO: 510345 - RNA, 32 nt, Human
ugaaccccuuuugguugcacacaugcucccca

SEQ ID NO: 510346 - RNA, 32 nt, Human
ugaacccgaccugggcaauuccaccucugagg

SEQ ID NO: 510347 - RNA, 32 nt, Human
ugaacccgagagacggagguugcagugagcug

SEQ ID NO: 510348 - RNA, 32 nt, Human
ugaacccgagaggcggaaguugcagugagccg

SEQ ID NO: 510349 - RNA, 32 nt, Human
ugaacccgagaggcggagcuugcagugagcca

SEQ ID NO: 510350 - RNA, 32 nt, Human
ugaacccgagaggcggagcuugcagugagcug

SEQ ID NO: 510351 - RNA, 32 nt, Human
ugaacccgagaggcggagguugcagugagccc

SEQ ID NO: 510352 - RNA, 32 nt, Human
ugaacccgagaggcggagguugcagugagccg

SEQ ID NO: 510353 - RNA, 32 nt, Human
ugaacccgagagguagagcuugcaguaagcag

SEQ ID NO: 510354 - RNA, 32 nt, Human
ugaacccgagagguggagguugaagugagcca

SEQ ID NO: 510355 - RNA, 32 nt, Human
ugaacccgagagguggagguugcagugaacca

SEQ ID NO: 510356 - RNA, 32 nt, Human
ugaacccgagagguggagguugcagugagcca

SEQ ID NO: 510357 - RNA, 32 nt, Human
ugaacccgcgaggcggagacugcagugagccg

SEQ ID NO: 510358 - RNA, 32 nt, Human
ugaacccggaagcgaagguugcagugagccaa

SEQ ID NO: 510359 - RNA, 32 nt, Human
ugaacccggaaggcagagcuugcagugagccg

SEQ ID NO: 510360 - RNA, 32 nt, Human
ugaacccggaaggcagagguugcagugagccg

SEQ ID NO: 510361 - RNA, 32 nt, Human
ugaacccggaaggcggagcuugcagugagccg

SEQ ID NO: 510362 - RNA, 32 nt, Human
ugaacccggaaggcggagguugcagugagcca

SEQ ID NO: 510363 - RNA, 32 nt, Human
ugaacccggaagguggagguuguugcggugag

SEQ ID NO: 510364 - RNA, 32 nt, Human
ugaacccggaggcagagguugcagugagccga

SEQ ID NO: 510365 - RNA, 32 nt, Human
ugaacccggaggcggagguugcgguaagccga

SEQ ID NO: 510366 - RNA, 32 nt, Human
ugaacccggcaggaagagguugcauugagcug

SEQ ID NO: 510367 - RNA, 32 nt, Human
ugaacccggcaggcagagcuugcagugagccg

SEQ ID NO: 510368 - RNA, 32 nt, Human
ugaacccggcaggcagagguugcagugagccg

SEQ ID NO: 510369 - RNA, 32 nt, Human
ugaacccggcaggcggagguugcagugagcgg

SEQ ID NO: 510370 - RNA, 32 nt, Human
ugaacccggcgggaagagguugcagugagcca

SEQ ID NO: 510371 - RNA, 32 nt, Human
ugaacccggcgggcagagguugcaguaagcag

SEQ ID NO: 510372 - RNA, 32 nt, Human
ugaacccgggaagcagagguugcagugacaga

SEQ ID NO: 510373 - RNA, 32 nt, Human
ugaacccgggaagcagagguugcagugagcug

SEQ ID NO: 510374 - RNA, 32 nt, Human
ugaacccgggaagcagagguugcggugagccg

SEQ ID NO: 510375 - RNA, 32 nt, Human
ugaacccgggaagcagagguugcggugagcug

SEQ ID NO: 510376 - RNA, 32 nt, Human
ugaacccgggaagcggagcuugcagugagccg

SEQ ID NO: 510377 - RNA, 32 nt, Human
ugaacccgggaagcggagguugcagugagcca

SEQ ID NO: 510378 - RNA, 32 nt, Human
ugaacccgggaagcggagguugcagugagccg

SEQ ID NO: 510379 - RNA, 32 nt, Human
ugaacccgggaaguggagguugccgugagucg

SEQ ID NO: 510380 - RNA, 32 nt, Human
ugaacccgggacgcagagguuacagugaaccg

SEQ ID NO: 510381 - RNA, 32 nt, Human
ugaacccgggacgcagggguugcagugagcgg

SEQ ID NO: 510382 - RNA, 32 nt, Human
ugaacccgggagacggagcuugcaguaagccg

SEQ ID NO: 510383 - RNA, 32 nt, Human
ugaacccgggagacggagguugcagugagcug

SEQ ID NO: 510384 - RNA, 32 nt, Human
ugaacccgggagacggcgcuugcagugagccg

SEQ ID NO: 510385 - RNA, 32 nt, Human
ugaacccgggagaugaagguugcagugagcug

SEQ ID NO: 510386 - RNA, 32 nt, Human
ugaacccgggagauggcgcuugcagugagcug

SEQ ID NO: 510387 - RNA, 32 nt, Human
ugaacccgggagcggagguugcagugagcuga

SEQ ID NO: 510388 - RNA, 32 nt, Human
ugaacccgggaggaagagcuugcagugagccg

SEQ ID NO: 510389 - RNA, 32 nt, Human
ugaacccgggaggaggagcuugcagugagccg

SEQ ID NO: 510390 - RNA, 32 nt, Human
ugaacccgggaggaggagguugcacugagccg

SEQ ID NO: 510391 - RNA, 32 nt, Human
ugaacccgggaggcaaagguugcagugagcug

SEQ ID NO: 510392 - RNA, 32 nt, Human
ugaacccgggaggcaaagguugcgguaagcug

SEQ ID NO: 510393 - RNA, 32 nt, Human
ugaacccgggaggcagaaguugcagugaacug

SEQ ID NO: 510394 - RNA, 32 nt, Human
ugaacccgggaggcagaccuugcagugagcca

SEQ ID NO: 510395 - RNA, 32 nt, Human
ugaacccgggaggcagacuuugcagugagcug

SEQ ID NO: 510396 - RNA, 32 nt, Human
ugaacccgggaggcagagauagcagugaacug

SEQ ID NO: 510397 - RNA, 32 nt, Human
ugaacccgggaggcagagauugcaguaagcug

SEQ ID NO: 510398 - RNA, 32 nt, Human
ugaacccgggaggcagagcuugcaguaagccg

SEQ ID NO: 510399 - RNA, 32 nt, Human
ugaacccgggaggcagagcuugcagugagcag

SEQ ID NO: 510400 - RNA, 32 nt, Human
ugaacccgggaggcagagcuugcagugagcca

SEQ ID NO: 510401 - RNA, 32 nt, Human
ugaacccgggaggcagagcuugcagugagccg

SEQ ID NO: 510402 - RNA, 32 nt, Human
ugaacccgggaggcagagcuugcagugagcug

SEQ ID NO: 510403 - RNA, 32 nt, Human
ugaacccgggaggcagagcuugcagugagucg

SEQ ID NO: 510404 - RNA, 32 nt, Human
ugaacccgggaggcagagcuugcggugagccg

SEQ ID NO: 510405 - RNA, 32 nt, Human
ugaacccgggaggcagagcuuguggugagccg

SEQ ID NO: 510406 - RNA, 32 nt, Human
ugaacccgggaggcagaggcugcagugagccg

SEQ ID NO: 510407 - RNA, 32 nt, Human
ugaacccgggaggcagaggcugcagugagcug

SEQ ID NO: 510408 - RNA, 32 nt, Human
ugaacccgggaggcagaggcuguagugagcca

SEQ ID NO: 510409 - RNA, 32 nt, Human
ugaacccgggaggcagagggugcaguaagccg

SEQ ID NO: 510410 - RNA, 32 nt, Human
ugaacccgggaggcagagguaguagugagcug

SEQ ID NO: 510411 - RNA, 32 nt, Human
ugaacccgggaggcagagguggcugugagccg

SEQ ID NO: 510412 - RNA, 32 nt, Human
ugaacccgggaggcagagguuacagugagcca

SEQ ID NO: 510413 - RNA, 32 nt, Human
ugaacccgggaggcagagguuaucgugagcug

SEQ ID NO: 510414 - RNA, 32 nt, Human
ugaacccgggaggcagagguugaagugagcug

SEQ ID NO: 510415 - RNA, 32 nt, Human
ugaacccgggaggcagagguugcacugagcug

SEQ ID NO: 510416 - RNA, 32 nt, Human
ugaacccgggaggcagagguugcagccggcug

SEQ ID NO: 510417 - RNA, 32 nt, Human
ugaacccgggaggcagagguugcaguaagcag

SEQ ID NO: 510418 - RNA, 32 nt, Human
ugaacccgggaggcagagguugcagugaaccc

SEQ ID NO: 510419 - RNA, 32 nt, Human
ugaacccgggaggcagagguugcagugagcca

SEQ ID NO: 510420 - RNA, 32 nt, Human
ugaacccgggaggcagagguugcagugagccg

SEQ ID NO: 510421 - RNA, 32 nt, Human
ugaacccgggaggcagagguugcagugagcug

SEQ ID NO: 510422 - RNA, 32 nt, Human
ugaacccgggaggcagagguugcagugaggug

SEQ ID NO: 510423 - RNA, 32 nt, Human
ugaacccgggaggcagagguugcagugagucg

SEQ ID NO: 510424 - RNA, 32 nt, Human
ugaacccgggaggcagagguugcagugagugg

SEQ ID NO: 510425 - RNA, 32 nt, Human
ugaacccgggaggcagagguugcaguguggug

SEQ ID NO: 510426 - RNA, 32 nt, Human
ugaacccgggaggcagagguugcauugagccg

SEQ ID NO: 510427 - RNA, 32 nt, Human
ugaacccgggaggcagagguugcggugagcca

SEQ ID NO: 510428 - RNA, 32 nt, Human
ugaacccgggaggcagagguugcggugagccg

SEQ ID NO: 510429 - RNA, 32 nt, Human
ugaacccgggaggcagagguugcuguaagcug

SEQ ID NO: 510430 - RNA, 32 nt, Human
ugaacccgggaggcagagguuguagugagccc

SEQ ID NO: 510431 - RNA, 32 nt, Human
ugaacccgggaggcagagguugugagcugaga

SEQ ID NO: 510432 - RNA, 32 nt, Human
ugaacccgggaggcagagguuguguugagcca

SEQ ID NO: 510433 - RNA, 32 nt, Human
ugaacccgggaggcagcaguugcagugagcug

SEQ ID NO: 510434 - RNA, 32 nt, Human
ugaacccgggaggcauagcuugcagugagccg

SEQ ID NO: 510435 - RNA, 32 nt, Human
ugaacccgggaggcgagcuugcagugagccga

SEQ ID NO: 510436 - RNA, 32 nt, Human
ugaacccgggaggcggaacuugcagugagcca

SEQ ID NO: 510437 - RNA, 32 nt, Human
ugaacccgggaggcggaacuugcggugagccg

SEQ ID NO: 510438 - RNA, 32 nt, Human
ugaacccgggaggcggaaguuucagcgagccg

SEQ ID NO: 510439 - RNA, 32 nt, Human
ugaacccgggaggcggagauugcagugagcug

SEQ ID NO: 510440 - RNA, 32 nt, Human
ugaacccgggaggcggagauugcggugagccg

SEQ ID NO: 510441 - RNA, 32 nt, Human
ugaacccgggaggcggagcuuacagugagcug

SEQ ID NO: 510442 - RNA, 32 nt, Human
ugaacccgggaggcggagcuugcagugaaccg

SEQ ID NO: 510443 - RNA, 32 nt, Human
ugaacccgggaggcggagcuugcagugagcca

SEQ ID NO: 510444 - RNA, 32 nt, Human
ugaacccgggaggcggagcuugcagugagccg

SEQ ID NO: 510445 - RNA, 32 nt, Human
ugaacccgggaggcggagcuugcagugagccu

SEQ ID NO: 510446 - RNA, 32 nt, Human
ugaacccgggaggcggagcuugcagugagcgg

SEQ ID NO: 510447 - RNA, 32 nt, Human
ugaacccgggaggcggagcuugcagugagcug

SEQ ID NO: 510448 - RNA, 32 nt, Human
ugaacccgggaggcggagcuuguagugagccg

SEQ ID NO: 510449 - RNA, 32 nt, Human
ugaacccgggaggcggaggcugcagugagccg

SEQ ID NO: 510450 - RNA, 32 nt, Human
ugaacccgggaggcggaggcugcagugagucg

SEQ ID NO: 510451 - RNA, 32 nt, Human
ugaacccgggaggcggaggcugcagugggccg

SEQ ID NO: 510452 - RNA, 32 nt, Human
ugaacccgggaggcggagguuacagugagccg

SEQ ID NO: 510453 - RNA, 32 nt, Human
ugaacccgggaggcggagguuacagugagccu

SEQ ID NO: 510454 - RNA, 32 nt, Human
ugaacccgggaggcggagguuacagugagcug

SEQ ID NO: 510455 - RNA, 32 nt, Human
ugaacccgggaggcggagguuccagugagccg

SEQ ID NO: 510456 - RNA, 32 nt, Human
ugaacccgggaggcggagguugagcaacuaca

SEQ ID NO: 510457 - RNA, 32 nt, Human
ugaacccgggaggcggagguugcaguaagccg

SEQ ID NO: 510458 - RNA, 32 nt, Human
ugaacccgggaggcggagguugcagucagccg

SEQ ID NO: 510459 - RNA, 32 nt, Human
ugaacccgggaggcggagguugcagugagcca

SEQ ID NO: 510460 - RNA, 32 nt, Human
ugaacccgggaggcggagguugcagugagccg

SEQ ID NO: 510461 - RNA, 32 nt, Human
ugaacccgggaggcggagguugcagugagccu

SEQ ID NO: 510462 - RNA, 32 nt, Human
ugaacccgggaggcggagguugcagugagcua

SEQ ID NO: 510463 - RNA, 32 nt, Human
ugaacccgggaggcggagguugcagugagcug

SEQ ID NO: 510464 - RNA, 32 nt, Human
ugaacccgggaggcggagguugcagugaggua

SEQ ID NO: 510465 - RNA, 32 nt, Human
ugaacccgggaggcggagguugcagugaguca

SEQ ID NO: 510466 - RNA, 32 nt, Human
ugaacccgggaggcggagguugcaguuagcca

SEQ ID NO: 510467 - RNA, 32 nt, Human
ugaacccgggaggcggagguugcaugagcuga

SEQ ID NO: 510468 - RNA, 32 nt, Human
ugaacccgggaggcggagguugcggugagcca

SEQ ID NO: 510469 - RNA, 32 nt, Human
ugaacccgggaggcggagguugcggugagccg

SEQ ID NO: 510470 - RNA, 32 nt, Human
ugaacccgggaggcggagguuguagugagccg

SEQ ID NO: 510471 - RNA, 32 nt, Human
ugaacccgggaggcggagguuguggugagcca

SEQ ID NO: 510472 - RNA, 32 nt, Human
ugaacccgggaggcggagguuguggugagccg

SEQ ID NO: 510473 - RNA, 32 nt, Human
ugaacccgggaggcggagguuguggugagcug

SEQ ID NO: 510474 - RNA, 32 nt, Human
ugaacccgggaggcggagguuucagugagccg

SEQ ID NO: 510475 - RNA, 32 nt, Human
ugaacccgggaggcggaguugcggugagccga

SEQ ID NO: 510476 - RNA, 32 nt, Human
ugaacccgggaggcggaguuugcagugagcca

SEQ ID NO: 510477 - RNA, 32 nt, Human
ugaacccgggaggcggaucuugcagugagcgg

SEQ ID NO: 510478 - RNA, 32 nt, Human
ugaacccgggaggcggaucuugcauugagcca

SEQ ID NO: 510479 - RNA, 32 nt, Human
ugaacccgggaggcuaagguugcagugagccg

SEQ ID NO: 510480 - RNA, 32 nt, Human
ugaacccgggagggagagguugcagugagcca

SEQ ID NO: 510481 - RNA, 32 nt, Human
ugaacccgggagguagagcuugcagugaaccg

SEQ ID NO: 510482 - RNA, 32 nt, Human
ugaacccgggagguagagguugcagugagccg

SEQ ID NO: 510483 - RNA, 32 nt, Human
ugaacccgggaggugcagguugcagugagcca

SEQ ID NO: 510484 - RNA, 32 nt, Human
ugaacccgggagguggaacuugcagugagccg

SEQ ID NO: 510485 - RNA, 32 nt, Human
ugaacccgggagguggagauugcagugagccc

SEQ ID NO: 510486 - RNA, 32 nt, Human
ugaacccgggagguggagauugcagugagcug

SEQ ID NO: 510487 - RNA, 32 nt, Human
ugaacccgggagguggagccuacagugaguca

SEQ ID NO: 510488 - RNA, 32 nt, Human
ugaacccgggagguggagcuuccagugagccg

SEQ ID NO: 510489 - RNA, 32 nt, Human
ugaacccgggagguggagcuugcagugagcca

SEQ ID NO: 510490 - RNA, 32 nt, Human
ugaacccgggagguggagcuugcagugagccg

SEQ ID NO: 510491 - RNA, 32 nt, Human
ugaacccgggagguggagcuugcagugagcgg

SEQ ID NO: 510492 - RNA, 32 nt, Human
ugaacccgggagguggagcuugcagugagcug

SEQ ID NO: 510493 - RNA, 32 nt, Human
ugaacccgggagguggagcuugcagugggugg

SEQ ID NO: 510494 - RNA, 32 nt, Human
ugaacccgggagguggagcuuguagugaggcg

SEQ ID NO: 510495 - RNA, 32 nt, Human
ugaacccgggagguggaggcugcaaugagcug

SEQ ID NO: 510496 - RNA, 32 nt, Human
ugaacccgggagguggaggcugcagcgagcca

SEQ ID NO: 510497 - RNA, 32 nt, Human
ugaacccgggagguggaggcugcagugagccg

SEQ ID NO: 510498 - RNA, 32 nt, Human
ugaacccgggagguggaggcugcagugaguua

SEQ ID NO: 510499 - RNA, 32 nt, Human
ugaacccgggagguggaggcugcggugagcca

SEQ ID NO: 510500 - RNA, 32 nt, Human
ugaacccgggagguggaggucgcggugagccg

SEQ ID NO: 510501 - RNA, 32 nt, Human
ugaacccgggagguggagguggcagugagccg

SEQ ID NO: 510502 - RNA, 32 nt, Human
ugaacccgggagguggagguuacagugagccg

SEQ ID NO: 510503 - RNA, 32 nt, Human
ugaacccgggagguggagguuacagugagcug

SEQ ID NO: 510504 - RNA, 32 nt, Human
ugaacccgggagguggagguucuagugagccg

SEQ ID NO: 510505 - RNA, 32 nt, Human
ugaacccgggagguggagguugcaaugagcca

SEQ ID NO: 510506 - RNA, 32 nt, Human
ugaacccgggagguggagguugcagcaagccg

SEQ ID NO: 510507 - RNA, 32 nt, Human
ugaacccgggagguggagguugcagggagccg

SEQ ID NO: 510508 - RNA, 32 nt, Human
ugaacccgggagguggagguugcaguaagccg

SEQ ID NO: 510509 - RNA, 32 nt, Human
ugaacccgggagguggagguugcagugaacca

SEQ ID NO: 510510 - RNA, 32 nt, Human
ugaacccgggagguggagguugcagugagcca

SEQ ID NO: 510511 - RNA, 32 nt, Human
ugaacccgggagguggagguugcagugagccg

SEQ ID NO: 510512 - RNA, 32 nt, Human
ugaacccgggagguggagguugcagugagcua

SEQ ID NO: 510513 - RNA, 32 nt, Human
ugaacccgggagguggagguugcagugagcug

SEQ ID NO: 510514 - RNA, 32 nt, Human
ugaacccgggagguggagguugcagugaggug

SEQ ID NO: 510515 - RNA, 32 nt, Human
ugaacccgggagguggagguugccgugagcca

SEQ ID NO: 510516 - RNA, 32 nt, Human
ugaacccgggagguggagguugccgugagcug

SEQ ID NO: 510517 - RNA, 32 nt, Human
ugaacccgggagguggagguugccgugaguug

SEQ ID NO: 510518 - RNA, 32 nt, Human
ugaacccgggagguggagguugcgaugagcug

SEQ ID NO: 510519 - RNA, 32 nt, Human
ugaacccgggagguggagguugcggugagcca

SEQ ID NO: 510520 - RNA, 32 nt, Human
ugaacccgggagguggagguugcggugagcug

SEQ ID NO: 510521 - RNA, 32 nt, Human
ugaacccgggagguggagguuguagcgagcug

SEQ ID NO: 510522 - RNA, 32 nt, Human
ugaacccgggagguggagguuguagugagcug

SEQ ID NO: 510523 - RNA, 32 nt, Human
ugaacccgggagguggcaguugcagggagcua

SEQ ID NO: 510524 - RNA, 32 nt, Human
ugaacccgggaggugggaguuguagugagccg

SEQ ID NO: 510525 - RNA, 32 nt, Human
ugaacccgggagguguagguugcagugagccg

SEQ ID NO: 510526 - RNA, 32 nt, Human
ugaacccgggaguggagcuugcaaugagccaa

SEQ ID NO: 510527 - RNA, 32 nt, Human
ugaacccgggaguuaaagguugcagugagccg

SEQ ID NO: 510528 - RNA, 32 nt, Human
ugaacccgggaguuggagguugcagugagcca

SEQ ID NO: 510529 - RNA, 32 nt, Human
ugaacccgggaugcagagguugcagugagcug

SEQ ID NO: 510530 - RNA, 32 nt, Human
ugaacccgggcagcggagguugcagugagccg

SEQ ID NO: 510531 - RNA, 32 nt, Human
ugaacccgggcccgguggaggcugcagugaga

SEQ ID NO: 510532 - RNA, 32 nt, Human
ugaacccgggcggcggaaguugcagugagccg

SEQ ID NO: 510533 - RNA, 32 nt, Human
ugaacccgggcggcggagauugcagugagccg

SEQ ID NO: 510534 - RNA, 32 nt, Human
ugaacccgggcgguggagcuugcagugagccg

SEQ ID NO: 510535 - RNA, 32 nt, Human
ugaacccgggcgguggagguuguagugagcca

SEQ ID NO: 510536 - RNA, 32 nt, Human
ugaacccggggacggagguugcagugaaccga

SEQ ID NO: 510537 - RNA, 32 nt, Human
ugaacccgggggcagaggcugcagugagccga

SEQ ID NO: 510538 - RNA, 32 nt, Human
ugaacccggguggcagagguugcagugagccg

SEQ ID NO: 510539 - RNA, 32 nt, Human
ugaacccggguggcagagguugcagugagcug

SEQ ID NO: 510540 - RNA, 32 nt, Human
ugaacccggguggcggcgcuugcagugagcug

SEQ ID NO: 510541 - RNA, 32 nt, Human
ugaacccgguagaggcggagguugcagugagc

SEQ ID NO: 510542 - RNA, 32 nt, Human
ugaacccgguaggcagagguugcagugagccg

SEQ ID NO: 510543 - RNA, 32 nt, Human
ugaacccgguaggcggagcuugcagugagcug

SEQ ID NO: 510544 - RNA, 32 nt, Human
ugaacccgguaggggagcuugcagugagccca

SEQ ID NO: 510545 - RNA, 32 nt, Human
ugaacccgguagguggagguugcagugagccg

SEQ ID NO: 510546 - RNA, 32 nt, Human
ugaacccguccaggugccccaagaggcucgug

SEQ ID NO: 510547 - RNA, 32 nt, Human
ugaacccgugaggcagagguugcagugaaccg

SEQ ID NO: 510548 - RNA, 32 nt, Human
ugaacccgugaggcagagguugcagugagccg

SEQ ID NO: 510549 - RNA, 32 nt, Human
ugaacccgugaggcggagguuguagugagcca

SEQ ID NO: 510550 - RNA, 32 nt, Human
ugaacccguguggcagagguugcggugagugu

SEQ ID NO: 510551 - RNA, 32 nt, Human
ugaacccuaaaggcagagguugcagugagccg

SEQ ID NO: 510552 - RNA, 32 nt, Human
ugaacccuagaggcggaguuugcagugagccg

SEQ ID NO: 510553 - RNA, 32 nt, Human
ugaacccuagccccagcuuugggaggauguuc

SEQ ID NO: 510554 - RNA, 32 nt, Human
ugaacccucaacuauugacugcugcagacagc

SEQ ID NO: 510555 - RNA, 32 nt, Human
ugaacccucacacaaaggcuacuacugugguc

SEQ ID NO: 510556 - RNA, 17 nt, Human
ugaacccuccagggccu

SEQ ID NO: 510557 - RNA, 32 nt, Human
ugaacccugcacugcguggcugcccagccagc

SEQ ID NO: 510558 - RNA, 32 nt, Human
ugaacccugcagcucacccauucauucaccca

SEQ ID NO: 510559 - RNA, 32 nt, Human
ugaacccuggaaguggagguugcagugagccu

SEQ ID NO: 510560 - RNA, 32 nt, Human
ugaacccuggaggcagaggugguagugagccg

SEQ ID NO: 510561 - RNA, 32 nt, Human
ugaacccuggaggcagagguugcaaugagccg

SEQ ID NO: 510562 - RNA, 32 nt, Human
ugaacccuggaggcagagguuguagugagucg

SEQ ID NO: 510563 - RNA, 32 nt, Human
ugaacccuggaggcagagguuguggugagcug

SEQ ID NO: 510564 - RNA, 32 nt, Human
ugaacccuggaggcagagguuguggugagucg

SEQ ID NO: 510565 - RNA, 32 nt, Human
ugaacccuggaggcggaaguugcagugagccg

SEQ ID NO: 510566 - RNA, 32 nt, Human
ugaacccuggaggcggagauugaagugagcug

SEQ ID NO: 510567 - RNA, 32 nt, Human
ugaacccuggaggcggagguuacaguuauccg

SEQ ID NO: 510568 - RNA, 32 nt, Human
ugaacccuggaggcggagguuccagugagcug

SEQ ID NO: 510569 - RNA, 32 nt, Human
ugaacccuggaggcggagguugcagugagccg

SEQ ID NO: 510570 - RNA, 32 nt, Human
ugaacccuggaggcggagguugcagugagugg

SEQ ID NO: 510571 - RNA, 32 nt, Human
ugaacccuggaggcggagguugccgugagcca

SEQ ID NO: 510572 - RNA, 32 nt, Human
ugaacccuggagguagaaguugcagugagcca

SEQ ID NO: 510573 - RNA, 32 nt, Human
ugaacccuggagguggagguugcagugagccg

SEQ ID NO: 510574 - RNA, 32 nt, Human
ugaacccuggagguggagguugcagugagcug

SEQ ID NO: 510575 - RNA, 32 nt, Human
ugaacccuggagguggcgguugcagugagcac

SEQ ID NO: 510576 - RNA, 32 nt, Human
ugaacccugggagccccuuguggagucugcug

SEQ ID NO: 510577 - RNA, 32 nt, Human
ugaacccugggagcggagauugcagugagcug

SEQ ID NO: 510578 - RNA, 32 nt, Human
ugaaccgaaaaaugaacaguaguuuggcaucu

SEQ ID NO: 510579 - RNA, 32 nt, Human
ugaaccgaggaggcagagcuugcagugagcca

SEQ ID NO: 510580 - RNA, 32 nt, Human
ugaaccgaggaggcgaagguugcagugagccg

SEQ ID NO: 510581 - RNA, 32 nt, Human
ugaaccgcuggcugcuguugugccucaucucu

SEQ ID NO: 510582 - RNA, 32 nt, Human
ugaaccgggaggcagaaguugcagugagccga

SEQ ID NO: 510583 - RNA, 32 nt, Human
ugaaccgggaggcggagguugcagugagccga

SEQ ID NO: 510584 - RNA, 32 nt, Human
ugaaccggggagacggagguugcagugagccg

SEQ ID NO: 510585 - RNA, 32 nt, Human
ugaaccggggaggcagagguugcagugagcug

SEQ ID NO: 510586 - RNA, 32 nt, Human
ugaaccggggaggcagagguugcaguuaagcc

SEQ ID NO: 510587 - RNA, 32 nt, Human
ugaaccggggaggcggagcuugcagugagcca

SEQ ID NO: 510588 - RNA, 32 nt, Human
ugaaccggggaggcggaggguguggugagccg

SEQ ID NO: 510589 - RNA, 32 nt, Human
ugaaccggggaggcggagguuacagugagccg

SEQ ID NO: 510590 - RNA, 32 nt, Human
ugaaccggggagguggaggcugcagugagccg

SEQ ID NO: 510591 - RNA, 32 nt, Human
ugaaccggggagguggagguugcagugagcug

SEQ ID NO: 510592 - RNA, 32 nt, Human
ugaaccggggaguuggagguugcagugagccg

SEQ ID NO: 510593 - RNA, 32 nt, Human
ugaaccguccugaggauggaguggggucccau

SEQ ID NO: 510594 - RNA, 32 nt, Human
ugaaccgugaaagagaaaaagaagaggcuccg

SEQ ID NO: 510595 - RNA, 32 nt, Human
ugaaccuaaguggcagagguugcagugagcug

SEQ ID NO: 510596 - RNA, 32 nt, Human
ugaaccuagaagcagagacucugugagauaau

SEQ ID NO: 510597 - RNA, 32 nt, Human
ugaaccuagaagguggagguugcagugagcgg

SEQ ID NO: 510598 - RNA, 32 nt, Human
ugaaccuaggaggcagaaguugcagugagcag

SEQ ID NO: 510599 - RNA, 32 nt, Human
ugaaccuaggaggcagagguugcagugaaccg

SEQ ID NO: 510600 - RNA, 32 nt, Human
ugaaccuaggaggcagagguugcagugagcca

SEQ ID NO: 510601 - RNA, 32 nt, Human
ugaaccuaggaggcggagguugcagugagcca

SEQ ID NO: 510602 - RNA, 32 nt, Human
ugaaccuaggaggcggagguugcagugaguca

SEQ ID NO: 510603 - RNA, 32 nt, Human
ugaaccuaggaggcugagauugcagugagccg

SEQ ID NO: 510604 - RNA, 32 nt, Human
ugaaccuaggaggggaagguugcagugagccg

SEQ ID NO: 510605 - RNA, 32 nt, Human
ugaaccuaggagguggaggcugcagcgagcug

SEQ ID NO: 510606 - RNA, 32 nt, Human
ugaaccuaggagguggagguugcagugagccg

SEQ ID NO: 510607 - RNA, 32 nt, Human
ugaaccuaggagguggagguugcagugagcug

SEQ ID NO: 510608 - RNA, 32 nt, Human
ugaaccuaggagguggagguugcauucaacug

SEQ ID NO: 510609 - RNA, 32 nt, Human
ugaaccuaggagguggcgguugcugugagcca

SEQ ID NO: 510610 - RNA, 32 nt, Human
ugaaccuaggaguuggagaccaaccugggcaa

SEQ ID NO: 510611 - RNA, 32 nt, Human
ugaaccuaguaacaggcuuuauuuucaccuug

SEQ ID NO: 510612 - RNA, 32 nt, Human
ugaaccuauguuauaugauacaugcauaacuu

SEQ ID NO: 510613 - RNA, 32 nt, Human
ugaaccucagaggcagagguugcaaugaagcg

SEQ ID NO: 510614 - RNA, 32 nt, Human
ugaaccucagauccacugaguguguauccaga

SEQ ID NO: 510615 - RNA, 32 nt, Human
ugaaccucagcggcggagguugcagugagucg

SEQ ID NO: 510616 - RNA, 32 nt, Human
ugaaccucauucuuccuuguuucucugguaga

SEQ ID NO: 510617 - RNA, 32 nt, Human
ugaaccuccaggacuucagcccuucuaggaga

SEQ ID NO: 510618 - RNA, 32 nt, Human
ugaaccucccaaguagcugggauuacagaaag

SEQ ID NO: 510619 - RNA, 32 nt, Human
ugaaccucggaggcggagguugcagugagcca

SEQ ID NO: 510620 - RNA, 32 nt, Human
ugaaccucggaggcugaaguugcagugagcca

SEQ ID NO: 510621 - RNA, 32 nt, Human
ugaaccucucccgcugcugggauugacgccug

SEQ ID NO: 510622 - RNA, 32 nt, Human
ugaaccugagaaguggagguuguggugagcug

SEQ ID NO: 510623 - RNA, 32 nt, Human
ugaaccugagagauggagguugaugugagcug

SEQ ID NO: 510624 - RNA, 32 nt, Human
ugaaccugagaggcagagguuacagugagcug

SEQ ID NO: 510625 - RNA, 32 nt, Human
ugaaccugagaggcagagguugcagugagcca

SEQ ID NO: 510626 - RNA, 32 nt, Human
ugaaccugagaggcagagguugcagugagccg

SEQ ID NO: 510627 - RNA, 32 nt, Human
ugaaccugagaggcggagguugcagugagcca

SEQ ID NO: 510628 - RNA, 32 nt, Human
ugaaccugagaggcggagguugcagugagccg

SEQ ID NO: 510629 - RNA, 32 nt, Human
ugaaccugagaggugaagguuguagugagcca

SEQ ID NO: 510630 - RNA, 32 nt, Human
ugaaccugagaggugagguugcagugagccga

SEQ ID NO: 510631 - RNA, 32 nt, Human
ugaaccugagagguggagguugcagugagccg

SEQ ID NO: 510632 - RNA, 32 nt, Human
ugaaccugagagguggagguuucagugagccg

SEQ ID NO: 510633 - RNA, 32 nt, Human
ugaaccugaugcugcauuuucacugugccaca

SEQ ID NO: 510634 - RNA, 32 nt, Human
ugaaccugauucuauaggcaguuacucugugu

SEQ ID NO: 510635 - RNA, 32 nt, Human
ugaaccugcaggaauaccagagcaagaaacug

SEQ ID NO: 510636 - RNA, 31 nt, Human
ugaaccugccucuugcugggccuuuguuccu

SEQ ID NO: 510637 - RNA, 32 nt, Human
ugaaccugccucuugcugggccuuuguuccuu

SEQ ID NO: 510638 - RNA, 32 nt, Human
ugaaccugcgaggcagagauugcagugagcca

SEQ ID NO: 510639 - RNA, 32 nt, Human
ugaaccuggaacgcggagguugcaaugagccg

SEQ ID NO: 510640 - RNA, 32 nt, Human
ugaaccuggaaggaagagguugcagugagcca

SEQ ID NO: 510641 - RNA, 32 nt, Human
ugaaccuggaaggcagaaguugcagugagcug

SEQ ID NO: 510642 - RNA, 32 nt, Human
ugaaccuggaaggcagagauugcagugagcug

SEQ ID NO: 510643 - RNA, 32 nt, Human
ugaaccuggaaggcagggguugcagugaccug

SEQ ID NO: 510644 - RNA, 32 nt, Human
ugaaccuggaaggcggagcuugcagugagcug

SEQ ID NO: 510645 - RNA, 32 nt, Human
ugaaccuggaaggcggagguugcagugagcag

SEQ ID NO: 510646 - RNA, 32 nt, Human
ugaaccuggaaggcggagguugcagugagcca

SEQ ID NO: 510647 - RNA, 32 nt, Human
ugaaccuggaaggcggagguugcagugagccg

SEQ ID NO: 510648 - RNA, 32 nt, Human
ugaaccuggaagguggagcuugcagugagcug

SEQ ID NO: 510649 - RNA, 32 nt, Human
ugaaccuggaauacagagguuucagugagcug

SEQ ID NO: 510650 - RNA, 32 nt, Human
ugaaccuggacucuugcccucuugccuugcac

SEQ ID NO: 510651 - RNA, 32 nt, Human
ugaaccuggagacagagguugcagugagcuga

SEQ ID NO: 510652 - RNA, 32 nt, Human
ugaaccuggaggcagagauugcagugagccga

SEQ ID NO: 510653 - RNA, 32 nt, Human
ugaaccuggaggcagagguugcagugagucga

SEQ ID NO: 510654 - RNA, 32 nt, Human
ugaaccuggaggguggaaguuguagugagccg

SEQ ID NO: 510655 - RNA, 32 nt, Human
ugaaccuggagguggagguugcagugagccga

SEQ ID NO: 510656 - RNA, 32 nt, Human
ugaaccuggcaaguguagguugcagugagcug

SEQ ID NO: 510657 - RNA, 32 nt, Human
ugaaccuggcaggcagagguugcagugagcca

SEQ ID NO: 510658 - RNA, 32 nt, Human
ugaaccuggcaggcagaguuugcagugaacca

SEQ ID NO: 510659 - RNA, 32 nt, Human
ugaaccuggcaggcggagguugcagugagccg

SEQ ID NO: 510660 - RNA, 32 nt, Human
ugaaccuggcagguggagguuacagugagcca

SEQ ID NO: 510661 - RNA, 32 nt, Human
ugaaccuggcagguggagguugcagugagugg

SEQ ID NO: 510662 - RNA, 32 nt, Human
ugaaccugggaagcagagguugcagugagccg

SEQ ID NO: 510663 - RNA, 32 nt, Human
ugaaccugggaagcagaguuugcagugagcca

SEQ ID NO: 510664 - RNA, 32 nt, Human
ugaaccugggaagugcagguugcagugagcca

SEQ ID NO: 510665 - RNA, 32 nt, Human
ugaaccugggagacagaaguuugcagugaucc

SEQ ID NO: 510666 - RNA, 32 nt, Human
ugaaccugggagacagagguugcaaugaaccg

SEQ ID NO: 510667 - RNA, 32 nt, Human
ugaaccugggagacagagguugcagugagcca

SEQ ID NO: 510668 - RNA, 32 nt, Human
ugaaccugggagacagaugaggagacuggcuc

SEQ ID NO: 510669 - RNA, 32 nt, Human
ugaaccugggagacggagcuugcagugagcug

SEQ ID NO: 510670 - RNA, 32 nt, Human
ugaaccugggagacggagguugcagugagcca

SEQ ID NO: 510671 - RNA, 32 nt, Human
ugaaccugggagauggaaguugcagugaacca

SEQ ID NO: 510672 - RNA, 32 nt, Human
ugaaccugggagauggagauugcagugagcag

SEQ ID NO: 510673 - RNA, 32 nt, Human
ugaaccugggagauggaggcugcaguaagcca

SEQ ID NO: 510674 - RNA, 32 nt, Human
ugaaccugggagauggagguugcagagagcca

SEQ ID NO: 510675 - RNA, 32 nt, Human
ugaaccugggagauggggguuguagugagcca

SEQ ID NO: 510676 - RNA, 32 nt, Human
ugaaccugggagcaggagguugcagugagccg

SEQ ID NO: 510677 - RNA, 32 nt, Human
ugaaccugggagccugagguugcagugagcca

SEQ ID NO: 510678 - RNA, 32 nt, Human
ugaaccugggaggagaagguugcagugagcug

SEQ ID NO: 510679 - RNA, 32 nt, Human
ugaaccugggaggaggagguugcagugagcug

SEQ ID NO: 510680 - RNA, 32 nt, Human
ugaaccugggaggcaaagguugcagugagcug

SEQ ID NO: 510681 - RNA, 32 nt, Human
ugaaccugggaggcaaagguugcggugaacug

SEQ ID NO: 510682 - RNA, 32 nt, Human
ugaaccugggaggcagaaguugcagugaaaca

SEQ ID NO: 510683 - RNA, 32 nt, Human
ugaaccugggaggcagaaguugcagugagccg

SEQ ID NO: 510684 - RNA, 32 nt, Human
ugaaccugggaggcagaaguugcagugagcug

SEQ ID NO: 510685 - RNA, 32 nt, Human
ugaaccugggaggcagaaguuguggugagccg

SEQ ID NO: 510686 - RNA, 32 nt, Human
ugaaccugggaggcagagauuacacugaccug

SEQ ID NO: 510687 - RNA, 32 nt, Human
ugaaccugggaggcagagauugcagugagcca

SEQ ID NO: 510688 - RNA, 32 nt, Human
ugaaccugggaggcagagauugcagugagccg

SEQ ID NO: 510689 - RNA, 32 nt, Human
ugaaccugggaggcagagauugcagugagcug

SEQ ID NO: 510690 - RNA, 32 nt, Human
ugaaccugggaggcagagcuugcaguaagccg

SEQ ID NO: 510691 - RNA, 32 nt, Human
ugaaccugggaggcagagcuugcagugagcca

SEQ ID NO: 510692 - RNA, 32 nt, Human
ugaaccugggaggcagagcuugcagugagccg

SEQ ID NO: 510693 - RNA, 32 nt, Human
ugaaccugggaggcagagcuugcagugagccu

SEQ ID NO: 510694 - RNA, 32 nt, Human
ugaaccugggaggcagagcuugcagugagcug

SEQ ID NO: 510695 - RNA, 32 nt, Human
ugaaccugggaggcagagcuugcagugagugg

SEQ ID NO: 510696 - RNA, 32 nt, Human
ugaaccugggaggcagagcuugcagugauugg

SEQ ID NO: 510697 - RNA, 32 nt, Human
ugaaccugggaggcagagggugcaguaagcug

SEQ ID NO: 510698 - RNA, 32 nt, Human
ugaaccugggaggcagagguuacaaugagccg

SEQ ID NO: 510699 - RNA, 32 nt, Human
ugaaccugggaggcagagguuacagugagccg

SEQ ID NO: 510700 - RNA, 32 nt, Human
ugaaccugggaggcagagguugcaaugagcca

SEQ ID NO: 510701 - RNA, 32 nt, Human
ugaaccugggaggcagagguugcaaugagcug

SEQ ID NO: 510702 - RNA, 32 nt, Human
ugaaccugggaggcagagguugcagggaaccu

SEQ ID NO: 510703 - RNA, 32 nt, Human
ugaaccugggaggcagagguugcaguaagcca

SEQ ID NO: 510704 - RNA, 32 nt, Human
ugaaccugggaggcagagguugcaguaagcua

SEQ ID NO: 510705 - RNA, 32 nt, Human
ugaaccugggaggcagagguugcagugaacag

SEQ ID NO: 510706 - RNA, 32 nt, Human
ugaaccugggaggcagagguugcagugaacca

SEQ ID NO: 510707 - RNA, 32 nt, Human
ugaaccugggaggcagagguugcagugaaccu

SEQ ID NO: 510708 - RNA, 32 nt, Human
ugaaccugggaggcagagguugcagugaacug

SEQ ID NO: 510709 - RNA, 32 nt, Human
ugaaccugggaggcagagguugcagugagcca

SEQ ID NO: 510710 - RNA, 32 nt, Human
ugaaccugggaggcagagguugcagugagccg

SEQ ID NO: 510711 - RNA, 32 nt, Human
ugaaccugggaggcagagguugcagugagcua

SEQ ID NO: 510712 - RNA, 32 nt, Human
ugaaccugggaggcagagguugcagugagcuc

SEQ ID NO: 510713 - RNA, 32 nt, Human
ugaaccugggaggcagagguugcagugagcug

SEQ ID NO: 510714 - RNA, 32 nt, Human
ugaaccugggaggcagagguugcagugaggug

SEQ ID NO: 510715 - RNA, 32 nt, Human
ugaaccugggaggcagagguugcagugaucca

SEQ ID NO: 510716 - RNA, 32 nt, Human
ugaaccugggaggcagagguugcagugauccg

SEQ ID NO: 510717 - RNA, 32 nt, Human
ugaaccugggaggcagagguugccgugagcug

SEQ ID NO: 510718 - RNA, 32 nt, Human
ugaaccugggaggcagagguugcgguaagccg

SEQ ID NO: 510719 - RNA, 32 nt, Human
ugaaccugggaggcagagguuguagcgagcca

SEQ ID NO: 510720 - RNA, 32 nt, Human
ugaaccugggaggcagagguuguagugagcug

SEQ ID NO: 510721 - RNA, 32 nt, Human
ugaaccugggaggcagagguuguggugagcca

SEQ ID NO: 510722 - RNA, 32 nt, Human
ugaaccugggaggcagagguuguggugagcua

SEQ ID NO: 510723 - RNA, 32 nt, Human
ugaaccugggaggcagagguuguggugagcug

SEQ ID NO: 510724 - RNA, 32 nt, Human
ugaaccugggaggcagagguuucagugagcca

SEQ ID NO: 510725 - RNA, 32 nt, Human
ugaaccugggaggcagagucugcagugagccg

SEQ ID NO: 510726 - RNA, 32 nt, Human
ugaaccugggaggcagaguuuacagugagccg

SEQ ID NO: 510727 - RNA, 32 nt, Human
ugaaccugggaggcagaguuugcagugagccg

SEQ ID NO: 510728 - RNA, 32 nt, Human
ugaaccugggaggcagaguuugcagugagcgg

SEQ ID NO: 510729 - RNA, 32 nt, Human
ugaaccugggaggcagauguugcagugagccg

SEQ ID NO: 510730 - RNA, 32 nt, Human
ugaaccugggaggcagauguuguggugagccg

SEQ ID NO: 510731 - RNA, 32 nt, Human
ugaaccugggaggcagcgguugcaguaagcca

SEQ ID NO: 510732 - RNA, 32 nt, Human
ugaaccugggaggcagggguugcagugagcug

SEQ ID NO: 510733 - RNA, 32 nt, Human
ugaaccugggaggcaguuugcagugagcugag

SEQ ID NO: 510734 - RNA, 32 nt, Human
ugaaccugggaggccaagguugcagugagccg

SEQ ID NO: 510735 - RNA, 32 nt, Human
ugaaccugggaggcgaagguugcagugagcca

SEQ ID NO: 510736 - RNA, 32 nt, Human
ugaaccugggaggcgaagguugcagugagcug

SEQ ID NO: 510737 - RNA, 32 nt, Human
ugaaccugggaggcgcagguugcagggaggcg

SEQ ID NO: 510738 - RNA, 32 nt, Human
ugaaccugggaggcggaaguugcagugagcca

SEQ ID NO: 510739 - RNA, 32 nt, Human
ugaaccugggaggcggaaguugcagugagccg

SEQ ID NO: 510740 - RNA, 32 nt, Human
ugaaccugggaggcggaaguugcagugagcug

SEQ ID NO: 510741 - RNA, 32 nt, Human
ugaaccugggaggcggagauugcagugaacca

SEQ ID NO: 510742 - RNA, 32 nt, Human
ugaaccugggaggcggagcuugcaaugaacug

SEQ ID NO: 510743 - RNA, 32 nt, Human
ugaaccugggaggcggagcuugcaguaagccg

SEQ ID NO: 510744 - RNA, 32 nt, Human
ugaaccugggaggcggagcuugcagugagccc

SEQ ID NO: 510745 - RNA, 32 nt, Human
ugaaccugggaggcggagcuugcagugagccg

SEQ ID NO: 510746 - RNA, 32 nt, Human
ugaaccugggaggcggagcuugcagugagcug

SEQ ID NO: 510747 - RNA, 32 nt, Human
ugaaccugggaggcggaggagguugcagugaa

SEQ ID NO: 510748 - RNA, 32 nt, Human
ugaaccugggaggcggaggcugcagugagccg

SEQ ID NO: 510749 - RNA, 32 nt, Human
ugaaccugggaggcggaggcugcagugagcug

SEQ ID NO: 510750 - RNA, 32 nt, Human
ugaaccugggaggcggagguugcaaugagccg

SEQ ID NO: 510751 - RNA, 32 nt, Human
ugaaccugggaggcggagguugcagggagcug

SEQ ID NO: 510752 - RNA, 32 nt, Human
ugaaccugggaggcggagguugcaguaagccc

SEQ ID NO: 510753 - RNA, 32 nt, Human
ugaaccugggaggcggagguugcagugagcca

SEQ ID NO: 510754 - RNA, 32 nt, Human
ugaaccugggaggcggagguugcagugagccg

SEQ ID NO: 510755 - RNA, 32 nt, Human
ugaaccugggaggcggagguugcagugagcga

SEQ ID NO: 510756 - RNA, 32 nt, Human
ugaaccugggaggcggagguugcagugagcgg

SEQ ID NO: 510757 - RNA, 32 nt, Human
ugaaccugggaggcggagguugcagugagcua

SEQ ID NO: 510758 - RNA, 32 nt, Human
ugaaccugggaggcggagguugcagugagcug

SEQ ID NO: 510759 - RNA, 32 nt, Human
ugaaccugggaggcggagguugcagugagucg

SEQ ID NO: 510760 - RNA, 32 nt, Human
ugaaccugggaggcggagguugcagugaguug

SEQ ID NO: 510761 - RNA, 32 nt, Human
ugaaccugggaggcggagguugccgugagccg

SEQ ID NO: 510762 - RNA, 32 nt, Human
ugaaccugggaggcggagguugcggucagcug

SEQ ID NO: 510763 - RNA, 32 nt, Human
ugaaccugggaggcggagguugcggugagcug

SEQ ID NO: 510764 - RNA, 32 nt, Human
ugaaccugggaggcggagguugcugugagcug

SEQ ID NO: 510765 - RNA, 32 nt, Human
ugaaccugggaggcggagguuguagugagcca

SEQ ID NO: 510766 - RNA, 32 nt, Human
ugaaccugggaggcggagguuguagugagccg

SEQ ID NO: 510767 - RNA, 32 nt, Human
ugaaccugggaggcggagguugugaugagcca

SEQ ID NO: 510768 - RNA, 32 nt, Human
ugaaccugggaggcggagguuguggugagcca

SEQ ID NO: 510769 - RNA, 32 nt, Human
ugaaccugggaggcggagguuguggugagccg

SEQ ID NO: 510770 - RNA, 32 nt, Human
ugaaccugggaggcggauguugaagugagcug

SEQ ID NO: 510771 - RNA, 32 nt, Human
ugaaccugggaggcggggguuguggugagccg

SEQ ID NO: 510772 - RNA, 32 nt, Human
ugaaccugggaggcugaaguugcagugagccg

SEQ ID NO: 510773 - RNA, 32 nt, Human
ugaaccugggaggcugagcuugcagugagcug

SEQ ID NO: 510774 - RNA, 32 nt, Human
ugaaccugggagggcggagguugcagugagcc

SEQ ID NO: 510775 - RNA, 32 nt, Human
ugaaccugggagggggagguugccgugagcug

SEQ ID NO: 510776 - RNA, 32 nt, Human
ugaaccugggagguacagguugcagugagccc

SEQ ID NO: 510777 - RNA, 32 nt, Human
ugaaccugggagguagaaguugcagugagcca

SEQ ID NO: 510778 - RNA, 32 nt, Human
ugaaccugggagguagagguugcacugagccg

SEQ ID NO: 510779 - RNA, 32 nt, Human
ugaaccugggagguagagguugcagugagcca

SEQ ID NO: 510780 - RNA, 32 nt, Human
ugaaccugggagguagagguugcagugagccg

SEQ ID NO: 510781 - RNA, 32 nt, Human
ugaaccugggaggucaaagcggcagugagcua

SEQ ID NO: 510782 - RNA, 32 nt, Human
ugaaccugggaggucaagauugcagugagcua

SEQ ID NO: 510783 - RNA, 32 nt, Human
ugaaccugggaggucaaggcuccagugaacca

SEQ ID NO: 510784 - RNA, 32 nt, Human
ugaaccugggaggugaagguugcugugggcca

SEQ ID NO: 510785 - RNA, 32 nt, Human
ugaaccugggagguggaagcugcagugagcca

SEQ ID NO: 510786 - RNA, 32 nt, Human
ugaaccugggagguggaaguugcagugagcca

SEQ ID NO: 510787 - RNA, 32 nt, Human
ugaaccugggagguggaaguugcagugagccg

SEQ ID NO: 510788 - RNA, 32 nt, Human
ugaaccugggagguggaaguugcagugagcug

SEQ ID NO: 510789 - RNA, 32 nt, Human
ugaaccugggagguggagacugcagugagccg

SEQ ID NO: 510790 - RNA, 32 nt, Human
ugaaccugggagguggagauugcagugagccc

SEQ ID NO: 510791 - RNA, 32 nt, Human
ugaaccugggagguggagauugcagugaguca

SEQ ID NO: 510792 - RNA, 32 nt, Human
ugaaccugggagguggagcuugcagugaaccg

SEQ ID NO: 510793 - RNA, 32 nt, Human
ugaaccugggagguggagcuugcagugagccg

SEQ ID NO: 510794 - RNA, 32 nt, Human
ugaaccugggagguggagcuugcagugagcgg

SEQ ID NO: 510795 - RNA, 32 nt, Human
ugaaccugggagguggagcuugcagugagcug

SEQ ID NO: 510796 - RNA, 32 nt, Human
  misc_feature (25)..(25): n is a, c, g, or u
ugaaccugggagguggagcuugcanugagcca

SEQ ID NO: 510797 - RNA, 32 nt, Human
ugaaccugggagguggaggcagugagcugaga

SEQ ID NO: 510798 - RNA, 32 nt, Human
ugaaccugggagguggaggcuacagugagcug

SEQ ID NO: 510799 - RNA, 32 nt, Human
ugaaccugggagguggaggggaggcugcagug

SEQ ID NO: 510800 - RNA, 32 nt, Human
ugaaccugggagguggagguuacagugagccg

SEQ ID NO: 510801 - RNA, 32 nt, Human
ugaaccugggagguggagguuauagugagccu

SEQ ID NO: 510802 - RNA, 32 nt, Human
ugaaccugggagguggagguugaggugagcuc

SEQ ID NO: 510803 - RNA, 32 nt, Human
ugaaccugggagguggagguugcagcgagcca

SEQ ID NO: 510804 - RNA, 32 nt, Human
ugaaccugggagguggagguugcaguaagcca

SEQ ID NO: 510805 - RNA, 32 nt, Human
ugaaccugggagguggagguugcaguaagcug

SEQ ID NO: 510806 - RNA, 32 nt, Human
ugaaccugggagguggagguugcagugagcag

SEQ ID NO: 510807 - RNA, 32 nt, Human
ugaaccugggagguggagguugcagugagcca

SEQ ID NO: 510808 - RNA, 32 nt, Human
ugaaccugggagguggagguugcagugagccg

SEQ ID NO: 510809 - RNA, 32 nt, Human
ugaaccugggagguggagguugcagugagcug

SEQ ID NO: 510810 - RNA, 32 nt, Human
ugaaccugggagguggagguugcagugagucg

SEQ ID NO: 510811 - RNA, 32 nt, Human
ugaaccugggagguggagguugcagugaguug

SEQ ID NO: 510812 - RNA, 32 nt, Human
ugaaccugggagguggagguugcagugggcca

SEQ ID NO: 510813 - RNA, 32 nt, Human
ugaaccugggagguggagguugcagugggcua

SEQ ID NO: 510814 - RNA, 32 nt, Human
ugaaccugggagguggagguugcagugggcug

SEQ ID NO: 510815 - RNA, 32 nt, Human
ugaaccugggagguggagguugcauugagcca

SEQ ID NO: 510816 - RNA, 32 nt, Human
ugaaccugggagguggagguugcauugagcug

SEQ ID NO: 510817 - RNA, 32 nt, Human
ugaaccugggagguggagguugcggugagcca

SEQ ID NO: 510818 - RNA, 32 nt, Human
ugaaccugggagguggagguugcggugagccg

SEQ ID NO: 510819 - RNA, 32 nt, Human
ugaaccugggagguggagguugcggugagcug

SEQ ID NO: 510820 - RNA, 32 nt, Human
ugaaccugggagguggagguugcugugagcug

SEQ ID NO: 510821 - RNA, 32 nt, Human
ugaaccugggagguggagguuguggugagcca

SEQ ID NO: 510822 - RNA, 32 nt, Human
ugaaccugggagguggagguuguggugaggcg

SEQ ID NO: 510823 - RNA, 32 nt, Human
ugaaccugggagguggagguuucagugagcca

SEQ ID NO: 510824 - RNA, 32 nt, Human
ugaaccugggagguggaguugcagugagccga

SEQ ID NO: 510825 - RNA, 32 nt, Human
ugaaccugggagguggauguugcagugagcug

SEQ ID NO: 510826 - RNA, 32 nt, Human
ugaaccugggagguggggguuucagugagcug

SEQ ID NO: 510827 - RNA, 32 nt, Human
ugaaccugggagguggugguugcagugagcug

SEQ ID NO: 510828 - RNA, 32 nt, Human
ugaaccugggaguuagagguugcagugagcug

SEQ ID NO: 510829 - RNA, 32 nt, Human
ugaaccugggaguuggagguugcagugaaacg

SEQ ID NO: 510830 - RNA, 32 nt, Human
ugaaccugggcggcagagguugcagugaguca

SEQ ID NO: 510831 - RNA, 32 nt, Human
ugaaccugguaggcagagguugcagugagccg

SEQ ID NO: 510832 - RNA, 32 nt, Human
ugaaccugguaggcagagguuguagugagccg

SEQ ID NO: 510833 - RNA, 32 nt, Human
ugaaccugguagguggagguuucauugagcca

SEQ ID NO: 510834 - RNA, 32 nt, Human
ugaaccugguucugcauuccccaccaccuccc

SEQ ID NO: 510835 - RNA, 32 nt, Human
ugaaccuguaaggcggagguugcagugagccg

SEQ ID NO: 510836 - RNA, 32 nt, Human
ugaaccugucaggaggaguccuggaggcuggu

SEQ ID NO: 510837 - RNA, 32 nt, Human
ugaaccugugaggaagagguugcagugagcug

SEQ ID NO: 510838 - RNA, 32 nt, Human
ugaaccugugaggcagagguugcagugagcca

SEQ ID NO: 510839 - RNA, 32 nt, Human
ugaaccugugagguggagcuugcagugagcca

SEQ ID NO: 510840 - RNA, 32 nt, Human
ugaaccugugggucagagguugcagugaacca

SEQ ID NO: 510841 - RNA, 32 nt, Human
ugaaccuucagauaugcacagcaagagccaag

SEQ ID NO: 510842 - RNA, 32 nt, Human
ugaaccuuggaggcagagguugcagugagcug

SEQ ID NO: 510843 - RNA, 32 nt, Human
ugaaccuuggugcccuaauuguggacccacug

SEQ ID NO: 510844 - RNA, 32 nt, Human
ugaaccuugguguccauguccuggagacgggg

SEQ ID NO: 510845 - RNA, 32 nt, Human
ugaaccuuguguuagcauucucucucuaucuc

SEQ ID NO: 510846 - RNA, 32 nt, Human
ugaacgaaaaagagguagcacuacaaacacaa

SEQ ID NO: 510847 - RNA, 32 nt, Human
ugaacgacacuaugacauguucccucuuacuu

SEQ ID NO: 510848 - RNA, 32 nt, Human
ugaacgacccugcuguccuuuuuaaccugugu

SEQ ID NO: 510849 - RNA, 32 nt, Human
ugaacgacgugagaggcaucucccagccccuc

SEQ ID NO: 510850 - RNA, 32 nt, Human
ugaacgagcucccuccugauuuucacacagac

SEQ ID NO: 510851 - RNA, 32 nt, Human
ugaacgaggagagcacugcugaucagacuagg

SEQ ID NO: 510852 - RNA, 32 nt, Human
ugaacgaguacuggaggagagaauguacguuu

SEQ ID NO: 510853 - RNA, 32 nt, Human
ugaacgauucccuuugcuaaugccuagugcau

SEQ ID NO: 510854 - RNA, 32 nt, Human
ugaacgcaagaggcagcaucuauggugggaaa

SEQ ID NO: 510855 - RNA, 32 nt, Human
ugaacgcaggaggcugaggcugcagugaguug

SEQ ID NO: 510856 - RNA, 32 nt, Human
ugaacgcccggcccccgcgccugcugcggggc

SEQ ID NO: 510857 - RNA, 32 nt, Human
ugaacgcgggaggcagagacugcagugagccg

SEQ ID NO: 510858 - RNA, 32 nt, Human
ugaacgcgggagguggaggauacaaugaaccc

SEQ ID NO: 510859 - RNA, 32 nt, Human
ugaacgcucaccacccugacccuccuuccaga

SEQ ID NO: 510860 - RNA, 32 nt, Human
ugaacggcagccucccaaccacacaacacauc

SEQ ID NO: 510861 - RNA, 32 nt, Human
ugaacggccagagacuuccuggucaauacucc

SEQ ID NO: 510862 - RNA, 32 nt, Human
ugaacggcgagugcucggagaacaagcacgcc

SEQ ID NO: 510863 - RNA, 32 nt, Human
ugaacggcuggccugugguggaugggugcucu

SEQ ID NO: 510864 - RNA, 19 nt, Human
ugaacgggaaggagcccca

SEQ ID NO: 510865 - RNA, 32 nt, Human
ugaacgggagcacgggugcgccagggccccca

SEQ ID NO: 510866 - RNA, 32 nt, Human
ugaacggggcggcaggcuucucgagcuccggg

SEQ ID NO: 510867 - RNA, 32 nt, Human
ugaacgucacccagagacuguaauuuguguag

SEQ ID NO: 510868 - RNA, 32 nt, Human
ugaacgucuuggugugugcacacauuugguca

SEQ ID NO: 510869 - RNA, 32 nt, Human
ugaacguggaccuaucgaaagccagcuucagg

SEQ ID NO: 510870 - RNA, 32 nt, Human
ugaacguggaccuggugugcaaagggaaguuu

SEQ ID NO: 510871 - RNA, 32 nt, Human
ugaacgugggaggcagaaguugcagugagcca

SEQ ID NO: 510872 - RNA, 32 nt, Human
ugaacgugggaggcagagguugcagugagccg

SEQ ID NO: 510873 - RNA, 32 nt, Human
ugaacgugggaggcagagguugcagugagugg

SEQ ID NO: 510874 - RNA, 32 nt, Human
ugaacgugggaggcggagguugcagcgagcug

SEQ ID NO: 510875 - RNA, 32 nt, Human
ugaacgugggaggcggagguugcagugagcug

SEQ ID NO: 510876 - RNA, 32 nt, Human
ugaacgugggaggcggagguuguagugagcca

SEQ ID NO: 510877 - RNA, 32 nt, Human
ugaacguguguauguaaauguauguguguaua

SEQ ID NO: 510878 - RNA, 32 nt, Human
ugaacguucuuuucccuccuggguuguucauc

SEQ ID NO: 510879 - RNA, 32 nt, Human
ugaacguuuacagggcugcacuggcccaagcc

SEQ ID NO: 510880 - RNA, 32 nt, Human
ugaacuaaaggcagacuuucaguaccaagagu

SEQ ID NO: 510881 - RNA, 32 nt, Human
ugaacuaaauguugaagacaaguuugagaucu

SEQ ID NO: 510882 - RNA, 32 nt, Human
ugaacuacuugaauauauguaauguuuauuuc

SEQ ID NO: 510883 - RNA, 32 nt, Human
ugaacuaggaggcagagguugcagugagccga

SEQ ID NO: 510884 - RNA, 21 nt, Human
ugaacuaggaguccugggaga

SEQ ID NO: 510885 - RNA, 21 nt, Human
ugaacuauaaauggugcuucu

SEQ ID NO: 510886 - RNA, 32 nt, Human
ugaacuaucaaauuauaggcaaccacugacua

SEQ ID NO: 510887 - RNA, 32 nt, Human
ugaacuaugcuuggagagagcccugaauccuu

SEQ ID NO: 510888 - RNA, 32 nt, Human
ugaacuauggcuuacaaguauuggacagugcc

SEQ ID NO: 510889 - RNA, 32 nt, Human
ugaacuauucuaccacccuuaaaguuggagcu

SEQ ID NO: 510890 - RNA, 32 nt, Human
ugaacucacugcgcagaagcccccagggaggg

SEQ ID NO: 510891 - RNA, 32 nt, Human
ugaacucagaaggcagagguugcaguggaaaa

SEQ ID NO: 510892 - RNA, 32 nt, Human
ugaacucagaaggcggaggcugcagugagccg

SEQ ID NO: 510893 - RNA, 32 nt, Human
ugaacucagaaggcggagguuccagugagcca

SEQ ID NO: 510894 - RNA, 32 nt, Human
ugaacucagaagguggagguugcagugaggcg

SEQ ID NO: 510895 - RNA, 32 nt, Human
ugaacucagaaguucaagaccagucugggcaa

SEQ ID NO: 510896 - RNA, 32 nt, Human
ugaacucagcugucaucugcagccucugccuc

SEQ ID NO: 510897 - RNA, 32 nt, Human
ugaacucagcuucaagaccccacgcugcugca

SEQ ID NO: 510898 - RNA, 32 nt, Human
ugaacucagcuuggggcugugaagggacagcc

SEQ ID NO: 510899 - RNA, 32 nt, Human
ugaacucaggagacggagguuacagugagucg

SEQ ID NO: 510900 - RNA, 32 nt, Human
ugaacucaggagauggagguuucagugagcca

SEQ ID NO: 510901 - RNA, 32 nt, Human
ugaacucaggaggcagaaguugcgguuagccg

SEQ ID NO: 510902 - RNA, 32 nt, Human
ugaacucaggaggcagagguugcaaugagcca

SEQ ID NO: 510903 - RNA, 32 nt, Human
ugaacucaggaggcggaaguugcggugagcca

SEQ ID NO: 510904 - RNA, 32 nt, Human
ugaacucaggaggcggagcuugcagugagccg

SEQ ID NO: 510905 - RNA, 32 nt, Human
ugaacucaggaggcggagguugcggugagccg

SEQ ID NO: 510906 - RNA, 32 nt, Human
ugaacucaggaggcggagguugcggugagcug

SEQ ID NO: 510907 - RNA, 32 nt, Human
ugaacucaggagguggagguugcagugagcug

SEQ ID NO: 510908 - RNA, 32 nt, Human
ugaacucaggagguggagguugcggugagcca

SEQ ID NO: 510909 - RNA, 32 nt, Human
ugaacucaggaguucaagaccagccugggaaa

SEQ ID NO: 510910 - RNA, 32 nt, Human
ugaacucaggaguucaagaccagccugggcaa

SEQ ID NO: 510911 - RNA, 32 nt, Human
ugaacucaggcagcccuucaguggcuucuuca

SEQ ID NO: 510912 - RNA, 20 nt, Human
ugaacucaggcagccuagua

SEQ ID NO: 510913 - RNA, 32 nt, Human
ugaacucaggcagccuaguagaggcaguggug

SEQ ID NO: 510914 - RNA, 32 nt, Human
ugaacucagguggcagagguugcagugagccg

SEQ ID NO: 510915 - RNA, 32 nt, Human
ugaacucaucauuccagccugggcaacaagag

SEQ ID NO: 510916 - RNA, 32 nt, Human
ugaacucauugaacuccuccugacacccuggc

SEQ ID NO: 510917 - RNA, 32 nt, Human
ugaacuccaaccugcacuccagccugggcaac

SEQ ID NO: 510918 - RNA, 32 nt, Human
ugaacuccagccugggcaacagagugagauuc

SEQ ID NO: 510919 - RNA, 32 nt, Human
ugaacuccagccugggcaacaggugagauucu

SEQ ID NO: 510920 - RNA, 32 nt, Human
ugaacuccagccugggccacauagcaagaccc

SEQ ID NO: 510921 - RNA, 32 nt, Human
ugaacuccagccugggugacagagugagacuc

SEQ ID NO: 510922 - RNA, 32 nt, Human
ugaacuccauugaagggaucauccuaaguuuu

SEQ ID NO: 510923 - RNA, 32 nt, Human
ugaacucccaaaggaagccucaaaacuaugca

SEQ ID NO: 510924 - RNA, 23 nt, Human
ugaacuccgaggcuugguugccu

SEQ ID NO: 510925 - RNA, 22 nt, Human
ugaacuccuagacucaagugau

SEQ ID NO: 510926 - RNA, 22 nt, Human
ugaacuccuaggcucaagugau

SEQ ID NO: 510927 - RNA, 22 nt, Human
ugaacuccugaacucaagugau

SEQ ID NO: 510928 - RNA, 22 nt, Human
ugaacuccugaccucaagugau

SEQ ID NO: 510929 - RNA, 23 nt, Human
ugaacuccugaccucaagugauu

SEQ ID NO: 510930 - RNA, 32 nt, Human
ugaacuccugaccucacacaauccuccugccu

SEQ ID NO: 510931 - RNA, 22 nt, Human
ugaacuccugagcucaagugau

SEQ ID NO: 510932 - RNA, 32 nt, Human
ugaacuccugaguucaagcgauccaccugccu

SEQ ID NO: 510933 - RNA, 22 nt, Human
ugaacuccugaucucaagugau

SEQ ID NO: 510934 - RNA, 32 nt, Human
ugaacuccugcacucuccagaagugacugguc

SEQ ID NO: 510935 - RNA, 22 nt, Human
ugaacuccuggacucuagugau

SEQ ID NO: 510936 - RNA, 32 nt, Human
ugaacuccuggacuuuuccugcuacugauucu

SEQ ID NO: 510937 - RNA, 22 nt, Human
ugaacuccuggccucaaaugau

SEQ ID NO: 510938 - RNA, 22 nt, Human
ugaacuccuggccucaagcgau

SEQ ID NO: 510939 - RNA, 21 nt, Human
ugaacuccuggccucaaguga

SEQ ID NO: 510940 - RNA, 22 nt, Human
ugaacuccuggccucaagugau

SEQ ID NO: 510941 - RNA, 23 nt, Human
ugaacuccuggccucaagugauu

SEQ ID NO: 510942 - RNA, 22 nt, Human
ugaacuccugggcacaagugau

SEQ ID NO: 510943 - RNA, 22 nt, Human
ugaacuccugggcucaagcgau

SEQ ID NO: 510944 - RNA, 19 nt, Human
ugaacuccugggcucaagu

SEQ ID NO: 510945 - RNA, 22 nt, Human
ugaacuccugggcucaagugau

SEQ ID NO: 510946 - RNA, 23 nt, Human
ugaacuccugggcucaagugauu

SEQ ID NO: 510947 - RNA, 22 nt, Human
ugaacuccugggcucgaaugau

SEQ ID NO: 510948 - RNA, 22 nt, Human
ugaacuccuggucucaagugau

SEQ ID NO: 510949 - RNA, 32 nt, Human
ugaacuccuuuuuguaaaacagccuccauaau

SEQ ID NO: 510950 - RNA, 32 nt, Human
ugaacucgaagcccacaauccucgucugaauc

SEQ ID NO: 510951 - RNA, 32 nt, Human
ugaacucgccucccccgugacucugccucggg

SEQ ID NO: 510952 - RNA, 32 nt, Human
ugaacucgggaggaagagguugcagugagcug

SEQ ID NO: 510953 - RNA, 32 nt, Human
ugaacucgggaggcagagguugcagugagcug

SEQ ID NO: 510954 - RNA, 32 nt, Human
ugaacucgggaggcagagguugucaugagcug

SEQ ID NO: 510955 - RNA, 32 nt, Human
ugaacucgggaggcgaagguugcagugagccg

SEQ ID NO: 510956 - RNA, 32 nt, Human
ugaacucgggaggcggagguugcagugagccg

SEQ ID NO: 510957 - RNA, 32 nt, Human
ugaacucgggaggcggauguugcagugagcca

SEQ ID NO: 510958 - RNA, 32 nt, Human
ugaacucgggaggugaaaguugcagugagccg

SEQ ID NO: 510959 - RNA, 32 nt, Human
ugaacucgggagguggagauugcaguaagccg

SEQ ID NO: 510960 - RNA, 32 nt, Human
ugaacucgggagguggagguggcagugagccg

SEQ ID NO: 510961 - RNA, 32 nt, Human
ugaacucgggagguggagguugcagucagcca

SEQ ID NO: 510962 - RNA, 32 nt, Human
ugaacucgggagguggagguugcagugagcug

SEQ ID NO: 510963 - RNA, 32 nt, Human
ugaacucgggagguggagguugugaugugcug

SEQ ID NO: 510964 - RNA, 32 nt, Human
ugaacucgggugggggagguugcaaugagccg

SEQ ID NO: 510965 - RNA, 21 nt, Human
ugaacucuacuguaacuguuu

SEQ ID NO: 510966 - RNA, 32 nt, Human
ugaacucucagguugugagugcugcuauugga

SEQ ID NO: 510967 - RNA, 32 nt, Human
ugaacucucuaccaugaacaugguucucggcu

SEQ ID NO: 510968 - RNA, 32 nt, Human
ugaacucucucuuccuucuccuuuucuuuccu

SEQ ID NO: 510969 - RNA, 32 nt, Human
ugaacucugagcugcaaggacaagaacgccac

SEQ ID NO: 510970 - RNA, 32 nt, Human
ugaacucuggccccucagguuucaaggggacg

SEQ ID NO: 510971 - RNA, 32 nt, Human
ugaacucugggaguugugugcgcagucuuggg

SEQ ID NO: 510972 - RNA, 21 nt, Human
ugaacucugucugaccaaaac

SEQ ID NO: 510973 - RNA, 32 nt, Human
ugaacucuuaaagcuucaugagcagcugcuug

SEQ ID NO: 510974 - RNA, 32 nt, Human
ugaacucuucuccaucuccaagcagacaaccu

SEQ ID NO: 510975 - RNA, 32 nt, Human
ugaacucuucugccauuuuccuccuucacucg

SEQ ID NO: 510976 - RNA, 32 nt, Human
ugaacucuucuuucuuaccugcuuugcggugc

SEQ ID NO: 510977 - RNA, 32 nt, Human
ugaacucuuggccucuaucucagcuccagccc

SEQ ID NO: 510978 - RNA, 22 nt, Human
ugaacucuugggcucaagcgau

SEQ ID NO: 510979 - RNA, 22 nt, Human
ugaacucuugggcucaagugau

SEQ ID NO: 510980 - RNA, 32 nt, Human
ugaacucuuuagccacaacccucaccuucccu

SEQ ID NO: 510981 - RNA, 32 nt, Human
ugaacucuuucugagagacugcagcacaccua

SEQ ID NO: 510982 - RNA, 32 nt, Human
ugaacugacaugcuccuaccaugaccaggcuc

SEQ ID NO: 510983 - RNA, 32 nt, Human
ugaacugaccaacacuggaugaauuugaccau

SEQ ID NO: 510984 - RNA, 32 nt, Human
ugaacugacucuacagcuucuggcaggccgug

SEQ ID NO: 510985 - RNA, 32 nt, Human
ugaacugagccaaaccuucagugccuuccaga

SEQ ID NO: 510986 - RNA, 32 nt, Human
ugaacugaggaaggugcuuagauggugagggc

SEQ ID NO: 510987 - RNA, 32 nt, Human
ugaacugaggagaugaagguuacagugagcca

SEQ ID NO: 510988 - RNA, 32 nt, Human
ugaacugaggagguggagguugcagugagccg

SEQ ID NO: 510989 - RNA, 32 nt, Human
ugaacugaggcagaggcuacagugaguggaga

SEQ ID NO: 510990 - RNA, 32 nt, Human
ugaacugaggcccgaaggcuugagucaaacug

SEQ ID NO: 510991 - RNA, 32 nt, Human
ugaacugaggggaguagagggagagggcaggu

SEQ ID NO: 510992 - RNA, 32 nt, Human
ugaacugaguucuucaacuacagguugaagga

SEQ ID NO: 510993 - RNA, 32 nt, Human
ugaacugcaagcuccccucagcccaucuugcu

SEQ ID NO: 510994 - RNA, 32 nt, Human
ugaacugccucaggaccccacuggagagcaca

SEQ ID NO: 510995 - RNA, 32 nt, Human
ugaacugccuugucuuugucauggaagccaca

SEQ ID NO: 510996 - RNA, 32 nt, Human
ugaacugcuacgggcagcgcugggcggcgggc

SEQ ID NO: 510997 - RNA, 32 nt, Human
ugaacugcuugccugcacuuuuaucuuagacu

SEQ ID NO: 510998 - RNA, 32 nt, Human
ugaacuggagcaucaagacaucucauggaagu

SEQ ID NO: 510999 - RNA, 32 nt, Human
ugaacuggagccaugggcacaaagggcccaga

SEQ ID NO: 511000 - RNA, 32 nt, Human
ugaacuggagcuggcggagaccaaaugcgccu

SEQ ID NO: 511001 - RNA, 32 nt, Human
ugaacuggauauuucuuaacuuuuggaguaca

SEQ ID NO: 511002 - RNA, 32 nt, Human
ugaacuggaugaagacacagacuaaaaggaac

SEQ ID NO: 511003 - RNA, 32 nt, Human
ugaacuggaugccacagaaagaggaguggucu

SEQ ID NO: 511004 - RNA, 32 nt, Human
ugaacuggcuacggauaaaagacugaagauac

SEQ ID NO: 511005 - RNA, 32 nt, Human
ugaacuggcugauuccugcuguggcaggugca

SEQ ID NO: 511006 - RNA, 32 nt, Human
ugaacuggggaagcagagguuguagugagccg

SEQ ID NO: 511007 - RNA, 32 nt, Human
ugaacuggggaggagaagguugcagugagccg

SEQ ID NO: 511008 - RNA, 32 nt, Human
ugaacuggggaggcagagguugcagugagaca

SEQ ID NO: 511009 - RNA, 32 nt, Human
ugaacuggggaggcagagguugcaguggcccg

SEQ ID NO: 511010 - RNA, 32 nt, Human
ugaacuggggaggcagagguugcggugagccc

SEQ ID NO: 511011 - RNA, 32 nt, Human
ugaacuggggcccuggcuuuggccauuaugua

SEQ ID NO: 511012 - RNA, 31 nt, Human
ugaacuggguuuuucugacaugccuagacuc

SEQ ID NO: 511013 - RNA, 32 nt, Human
ugaacugguuuaucacaaaucugauggaucag

SEQ ID NO: 511014 - RNA, 32 nt, Human
ugaacuguaguaccuuucucuaugucaaguuu

SEQ ID NO: 511015 - RNA, 32 nt, Human
ugaacuguauuuuuacaaugaucgccgcauga

SEQ ID NO: 511016 - RNA, 24 nt, Human
ugaacugucaaguguguguugucu

SEQ ID NO: 511017 - RNA, 32 nt, Human
ugaacugucaucauuccuacuguguuugauag

SEQ ID NO: 511018 - RNA, 32 nt, Human
ugaacugugacagaagcaacuaccacaggggc

SEQ ID NO: 511019 - RNA, 32 nt, Human
ugaacuguggguggauggguggauugccuggg

SEQ ID NO: 511020 - RNA, 32 nt, Human
ugaacuguguagugcucuucuuugccauuugc

SEQ ID NO: 511021 - RNA, 32 nt, Human
ugaacuguguauuuaacuuaagcuauugcucu

SEQ ID NO: 511022 - RNA, 32 nt, Human
ugaacugugugugguuccuucuacuuggggau

SEQ ID NO: 511023 - RNA, 32 nt, Human
ugaacugugugugguuuauuguuguacauuca

SEQ ID NO: 511024 - RNA, 32 nt, Human
ugaacuguguuuuucccaucaugacggaagaa

SEQ ID NO: 511025 - RNA, 32 nt, Human
ugaacuguuaacuauuugaucuuuggauguaa

SEQ ID NO: 511026 - RNA, 32 nt, Human
ugaacuguuacgacccaggacaauuagaaaaa

SEQ ID NO: 511027 - RNA, 32 nt, Human
ugaacuguuugguagagccacccggcccuucc

SEQ ID NO: 511028 - RNA, 32 nt, Human
ugaacuuaaucaagagagacugugauaugugc

SEQ ID NO: 511029 - RNA, 32 nt, Human
ugaacuuacauacuaggugccuuuuguuuuug

SEQ ID NO: 511030 - RNA, 22 nt, Human
ugaacuuaccaccagcccuggc

SEQ ID NO: 511031 - RNA, 32 nt, Human
ugaacuuagagauuuucuucucauuucuaauu

SEQ ID NO: 511032 - RNA, 32 nt, Human
ugaacuuaguuaauggaagacugagagcagaa

SEQ ID NO: 511033 - RNA, 32 nt, Human
ugaacuucagacggaccucaggguagguucuc

SEQ ID NO: 511034 - RNA, 21 nt, Human
ugaacuucagagggugcuccu

SEQ ID NO: 511035 - RNA, 32 nt, Human
ugaacuucagcacccgagucagucccagcuca

SEQ ID NO: 511036 - RNA, 22 nt, Human
ugaacuucagcaugagcugccu

SEQ ID NO: 511037 - RNA, 32 nt, Human
ugaacuucagggaggguggucauugccuagag

SEQ ID NO: 511038 - RNA, 32 nt, Human
ugaacuucauuucuguaucaccugaccucugg

SEQ ID NO: 511039 - RNA, 32 nt, Human
ugaacuuccagccucagagaccgccgcccuug

SEQ ID NO: 511040 - RNA, 32 nt, Human
ugaacuuccucucuuuuuagaagaauggauuu

SEQ ID NO: 511041 - RNA, 32 nt, Human
ugaacuuccugagccaccagacaggaaagggu

SEQ ID NO: 511042 - RNA, 23 nt, Human
ugaacuuccuguuggugcugguu

SEQ ID NO: 511043 - RNA, 22 nt, Human
ugaacuucugggcucaagugau

SEQ ID NO: 511044 - RNA, 32 nt, Human
ugaacuugagucuaaagaugcagugccuggcc

SEQ ID NO: 511045 - RNA, 32 nt, Human
ugaacuugcaaucauggacagcaacaauuucu

SEQ ID NO: 511046 - RNA, 32 nt, Human
ugaacuugcagccuuggauggggaagggccag

SEQ ID NO: 511047 - RNA, 32 nt, Human
ugaacuuggauucaagacugucuuuucuauag

SEQ ID NO: 511048 - RNA, 32 nt, Human
ugaacuuggccccagcccugcugggcccagaa

SEQ ID NO: 511049 - RNA, 32 nt, Human
ugaacuugggagcagaggugagcugagugcag

SEQ ID NO: 511050 - RNA, 32 nt, Human
ugaacuugggaggcagagguuguggugagccg

SEQ ID NO: 511051 - RNA, 32 nt, Human
ugaacuugggaggcagagguuucagugagccg

SEQ ID NO: 511052 - RNA, 32 nt, Human
ugaacuugggaggcggagcuugcggugagcca

SEQ ID NO: 511053 - RNA, 32 nt, Human
ugaacuugggaggcggagguugcagugagcua

SEQ ID NO: 511054 - RNA, 32 nt, Human
ugaacuugggagggagagguugcagugagccc

SEQ ID NO: 511055 - RNA, 32 nt, Human
ugaacuugggagggguagguugcagugagcug

SEQ ID NO: 511056 - RNA, 32 nt, Human
ugaacuugggagguggagcuuacagugagccg

SEQ ID NO: 511057 - RNA, 32 nt, Human
ugaacuugggagguggagguugcagugagcca

SEQ ID NO: 511058 - RNA, 32 nt, Human
ugaacuugggagguggagguugcagugggccg

SEQ ID NO: 511059 - RNA, 32 nt, Human
ugaacuuguaucucuaaucugauguccauuuu

SEQ ID NO: 511060 - RNA, 32 nt, Human
ugaacuugugggguggagguugcagugagcug

SEQ ID NO: 511061 - RNA, 32 nt, Human
ugaacuuguuuucaaaauaucaucucaucaac

SEQ ID NO: 511062 - RNA, 24 nt, Human
ugaacuuuaaauaagguaaugccu

SEQ ID NO: 511063 - RNA, 32 nt, Human
ugaacuuuaaaucaaucagugcugcuggcaca

SEQ ID NO: 511064 - RNA, 32 nt, Human
ugaacuuuagagaguucuugcauuggaacugg

SEQ ID NO: 511065 - RNA, 32 nt, Human
ugaacuuucuacuuggacaacuaacacccaca

SEQ ID NO: 511066 - RNA, 32 nt, Human
ugaacuuucuguacucuuuaaggauuauuuua

SEQ ID NO: 511067 - RNA, 22 nt, Human
ugaacuuugaguucugcugucu

SEQ ID NO: 511068 - RNA, 32 nt, Human
ugaacuuuggugccaucaucugcaaaagggag

SEQ ID NO: 511069 - RNA, 21 nt, Human
ugaacuuugucaguguugccu

SEQ ID NO: 511070 - RNA, 21 nt, Human
ugaacuuuuaagauacugucu

SEQ ID NO: 511071 - RNA, 32 nt, Human
ugaacuuuugagagagaugaaaggauggucuc

SEQ ID NO: 511072 - RNA, 22 nt, Human
ugaacuuuuuuguuuuguuuug

SEQ ID NO: 511073 - RNA, 32 nt, Human
ugaagaaaagaaugacagaugcaaggaagaaa

SEQ ID NO: 511074 - RNA, 32 nt, Human
ugaagaaacuaaaauugauuugcucagacagc

SEQ ID NO: 511075 - RNA, 18 nt, Human
ugaagaaacuaucaugag

SEQ ID NO: 511076 - RNA, 32 nt, Human
ugaagaaacucaugcaccaaacucgaacuggu

SEQ ID NO: 511077 - RNA, 32 nt, Human
ugaagaaacugaggccacagagcuaaagugac

SEQ ID NO: 511078 - RNA, 32 nt, Human
ugaagaaagaagaaaagugaagagugguuacc

SEQ ID NO: 511079 - RNA, 21 nt, Human
ugaagaaagagaagcagaacu

SEQ ID NO: 511080 - RNA, 32 nt, Human
ugaagaaagaggacuuggcagagcaggaaugc

SEQ ID NO: 511081 - RNA, 32 nt, Human
ugaagaaaggcaaaggagacaccuguuccuuc

SEQ ID NO: 511082 - RNA, 19 nt, Human
ugaagaaauuaauagcaga

SEQ ID NO: 511083 - RNA, 32 nt, Human
ugaagaacaaauucuuguuaagcaaauagucc

SEQ ID NO: 511084 - RNA, 32 nt, Human
ugaagaacacccuggccuccuccaucaugucg

SEQ ID NO: 511085 - RNA, 32 nt, Human
ugaagaacagagaccugucuggaaaaucgauc

SEQ ID NO: 511086 - RNA, 32 nt, Human
ugaagaacagagccucucaaucagacgggugu

SEQ ID NO: 511087 - RNA, 20 nt, Human
ugaagaacauacacuauuaa

SEQ ID NO: 511088 - RNA, 32 nt, Human
ugaagaacauagugcaacuguacagguaguca

SEQ ID NO: 511089 - RNA, 32 nt, Human
ugaagaacauagugucuuuccucuauugugga

SEQ ID NO: 511090 - RNA, 32 nt, Human
ugaagaacccaagcuccugucaaaguugugaa

SEQ ID NO: 511091 - RNA, 32 nt, Human
ugaagaacugcaggagggcccucagcugugag

SEQ ID NO: 511092 - RNA, 32 nt, Human
ugaagaacugucucccaacaaaggauacaugc

SEQ ID NO: 511093 - RNA, 32 nt, Human
ugaagaagaccagccuuuacugagucgguuca

SEQ ID NO: 511094 - RNA, 32 nt, Human
ugaagaagagaaagaggagauuggcugaggcu

SEQ ID NO: 511095 - RNA, 32 nt, Human
ugaagaagccacuaccuccaccaccaccagca

SEQ ID NO: 511096 - RNA, 32 nt, Human
ugaagaagcccaucaguauuucuugaauacca

SEQ ID NO: 511097 - RNA, 32 nt, Human
ugaagaagccgcacuacuucaccuggccaccc

SEQ ID NO: 511098 - RNA, 21 nt, Human
ugaagaagccugcaaagccuu

SEQ ID NO: 511099 - RNA, 23 nt, Human
ugaagaagcgauuugggggccag

SEQ ID NO: 511100 - RNA, 32 nt, Human
ugaagaagcugacagaagaguuugggccucac

SEQ ID NO: 511101 - RNA, 32 nt, Human
ugaagaagcugcaauucugccugggugccuug

SEQ ID NO: 511102 - RNA, 32 nt, Human
ugaagaaggaagaggauuccaggcugagagca

SEQ ID NO: 511103 - RNA, 32 nt, Human
ugaagaaggggugcgggggugugcggugcccu

SEQ ID NO: 511104 - RNA, 32 nt, Human
ugaagaaguggcugccccuugcuggaccugaa

SEQ ID NO: 511105 - RNA, 32 nt, Human
ugaagaaguucagaaauuuaaaagcagagcau

SEQ ID NO: 511106 - RNA, 32 nt, Human
ugaagaauaaagccucauauccaggaaaaagu

SEQ ID NO: 511107 - RNA, 32 nt, Human
ugaagaauacccacuugguugcagaggccaac

SEQ ID NO: 511108 - RNA, 32 nt, Human
ugaagaauacugggggagggugugguggguuc

SEQ ID NO: 511109 - RNA, 32 nt, Human
ugaagaaucagaggaggaagaggaagaggagg

SEQ ID NO: 511110 - RNA, 32 nt, Human
ugaagaaucaguuuaaaagauccaaggaguac

SEQ ID NO: 511111 - RNA, 32 nt, Human
ugaagaaucccagugaguucugcauuuguauc

SEQ ID NO: 511112 - RNA, 32 nt, Human
ugaagaaucucuucaggaaaccagagcuuccc

SEQ ID NO: 511113 - RNA, 32 nt, Human
ugaagaaugcucugcauuuccuugauuucuau

SEQ ID NO: 511114 - RNA, 32 nt, Human
ugaagaauggagggaggagcaggcuaggaaga

SEQ ID NO: 511115 - RNA, 31 nt, Human
ugaagaauggcagaugaacggaaagacgaag

SEQ ID NO: 511116 - RNA, 32 nt, Human
ugaagaaugggaacacugaaaaguaggggcau

SEQ ID NO: 511117 - RNA, 27 nt, Human
ugaagaaugucucuagaagagaaugaa

SEQ ID NO: 511118 - RNA, 32 nt, Human
ugaagaaugucuuccagaagaaaguagauacc

SEQ ID NO: 511119 - RNA, 32 nt, Human
ugaagaauuaagacaggggcucagggaaucuc

SEQ ID NO: 511120 - RNA, 32 nt, Human
ugaagaauucuagcaucaggaacaagagaaga

SEQ ID NO: 511121 - RNA, 32 nt, Human
ugaagacaacaucacucugaaguguuaucagc

SEQ ID NO: 511122 - RNA, 32 nt, Human
ugaagacaacuugcuuugauucaaccuaaaaa

SEQ ID NO: 511123 - RNA, 32 nt, Human
ugaagacaagaaugcacccuucaagcagugua

SEQ ID NO: 511124 - RNA, 32 nt, Human
ugaagacaauaugcaacaugguauguccauua

SEQ ID NO: 511125 - RNA, 32 nt, Human
ugaagacaaucagaaugauuaccuuucuaccu

SEQ ID NO: 511126 - RNA, 32 nt, Human
ugaagacaaucagggaaaagacccuucuaaaa

SEQ ID NO: 511127 - RNA, 32 nt, Human
ugaagacacacguucacacccaguccaucaug

SEQ ID NO: 511128 - RNA, 32 nt, Human
ugaagacacagagagaagagggccgaggagag

SEQ ID NO: 511129 - RNA, 32 nt, Human
ugaagacacgcagagaugcccacccacguggg

SEQ ID NO: 511130 - RNA, 32 nt, Human
ugaagacacgcccgacucucuccaucagaagg

SEQ ID NO: 511131 - RNA, 32 nt, Human
ugaagacagaaaggaaaggggagaaaccugca

SEQ ID NO: 511132 - RNA, 21 nt, Human
ugaagacagacagucaggcug

SEQ ID NO: 511133 - RNA, 32 nt, Human
ugaagacagaggcagagauuggagugacgcau

SEQ ID NO: 511134 - RNA, 32 nt, Human
ugaagacagcacagcagccauaccccucacca

SEQ ID NO: 511135 - RNA, 32 nt, Human
ugaagacagcccgauccuccccuggacucccg

SEQ ID NO: 511136 - RNA, 32 nt, Human
ugaagacauaaagaaguggaaggagagauacg

SEQ ID NO: 511137 - RNA, 32 nt, Human
ugaagacauaauagcucaaccucuaggauuuu

SEQ ID NO: 511138 - RNA, 32 nt, Human
ugaagacauccggaagaaggugagucugggag

SEQ ID NO: 511139 - RNA, 32 nt, Human
ugaagacauggggaacacagaggcagaaacag

SEQ ID NO: 511140 - RNA, 32 nt, Human
ugaagaccaagaagaagugggaggugacuggc

SEQ ID NO: 511141 - RNA, 32 nt, Human
ugaagaccacuaaaacacuucauugagagagu

SEQ ID NO: 511142 - RNA, 32 nt, Human
ugaagaccacuaacggcuuuuguuuccucugg

SEQ ID NO: 511143 - RNA, 32 nt, Human
ugaagaccagccugagaaauaaggugaaaccc

SEQ ID NO: 511144 - RNA, 32 nt, Human
ugaagaccagccuggccaacauggcaaaaacc

SEQ ID NO: 511145 - RNA, 32 nt, Human
ugaagaccagccuggccaacauggugaaaccc

SEQ ID NO: 511146 - RNA, 32 nt, Human
ugaagaccagccugggcaacacagugagacuu

SEQ ID NO: 511147 - RNA, 32 nt, Human
ugaagaccagccugggcaacauagugagaaaa

SEQ ID NO: 511148 - RNA, 32 nt, Human
ugaagaccaggagaagguugagcugcuaaagc

SEQ ID NO: 511149 - RNA, 32 nt, Human
ugaagaccauuuucaagagggacgguauuuau

SEQ ID NO: 511150 - RNA, 32 nt, Human
ugaagaccauuuucugguucuguguccucugc

SEQ ID NO: 511151 - RNA, 32 nt, Human
ugaagacccagccugcugagacuccuccugca

SEQ ID NO: 511152 - RNA, 32 nt, Human
ugaagaccugaugcccuggagcccacugcagu

SEQ ID NO: 511153 - RNA, 32 nt, Human
ugaagaccuugauuccugccugggcaguucua

SEQ ID NO: 511154 - RNA, 32 nt, Human
ugaagacgcauuccuuuccugccaaccucuuu

SEQ ID NO: 511155 - RNA, 32 nt, Human
ugaagacucacucuuuggaauguccucuugcu

SEQ ID NO: 511156 - RNA, 32 nt, Human
ugaagacucuuuuuaccagagguuuccucuua

SEQ ID NO: 511157 - RNA, 32 nt, Human
ugaagacugccaaggagcagauuuucucccug

SEQ ID NO: 511158 - RNA, 32 nt, Human
ugaagacugccucuggccugcagcugaccugg

SEQ ID NO: 511159 - RNA, 32 nt, Human
ugaagacuggggcucccugaggacagggcugu

SEQ ID NO: 511160 - RNA, 20 nt, Human
ugaagacugucucccgggga

SEQ ID NO: 511161 - RNA, 32 nt, Human
ugaagacuguuuccagccuggcugugagccaa

SEQ ID NO: 511162 - RNA, 32 nt, Human
ugaagacuucuuuaacaaucuuguuuggguuu

SEQ ID NO: 511163 - RNA, 32 nt, Human
ugaagacuuucucuuucccugccuguauuaca

SEQ ID NO: 511164 - RNA, 24 nt, Human
ugaagagaagacuuccuuuccucu

SEQ ID NO: 511165 - RNA, 32 nt, Human
ugaagagaagcagcagucuuuacuuuuccagc

SEQ ID NO: 511166 - RNA, 32 nt, Human
ugaagagaaguuagaaguuuccagauauggag

SEQ ID NO: 511167 - RNA, 32 nt, Human
ugaagagacagagacaaguaauuucaguguaa

SEQ ID NO: 511168 - RNA, 32 nt, Human
ugaagagacaguguccagaagaagcaucuucc

SEQ ID NO: 511169 - RNA, 32 nt, Human
ugaagagacauagccaugcggggccugaaucu

SEQ ID NO: 511170 - RNA, 32 nt, Human
ugaagagagaccucuggauccccaacuuacca

SEQ ID NO: 511171 - RNA, 32 nt, Human
ugaagagagagagggucuccuauguuuccuag

SEQ ID NO: 511172 - RNA, 32 nt, Human
ugaagagagagggaaacacagcagcaucucuc

SEQ ID NO: 511173 - RNA, 19 nt, Human
ugaagagagaucuuacaaa

SEQ ID NO: 511174 - RNA, 32 nt, Human
ugaagagagguaucauccaucccuaucagagu

SEQ ID NO: 511175 - RNA, 32 nt, Human
ugaagagagguaucauugcuguggaaaaaucu

SEQ ID NO: 511176 - RNA, 32 nt, Human
ugaagagaugguuuugcugcucuccuugagga

SEQ ID NO: 511177 - RNA, 32 nt, Human
ugaagagcaaacagccaaauaucaggagacag

SEQ ID NO: 511178 - RNA, 32 nt, Human
ugaagagcaagguuucguggcagcacggcccg

SEQ ID NO: 511179 - RNA, 32 nt, Human
ugaagagcaggaaggccagggcacaggcggua

SEQ ID NO: 511180 - RNA, 32 nt, Human
ugaagagcaugaacuccaggaggagagagcca

SEQ ID NO: 511181 - RNA, 32 nt, Human
ugaagagcauggcaaagcccuuucucucccaa

SEQ ID NO: 511182 - RNA, 32 nt, Human
ugaagagccccaagcucuccauggcccacagc

SEQ ID NO: 511183 - RNA, 32 nt, Human
ugaagagcccuuucagcacuuucucaucugug

SEQ ID NO: 511184 - RNA, 32 nt, Human
ugaagagccgccaggaccuggagcugcacggu

SEQ ID NO: 511185 - RNA, 32 nt, Human
ugaagagcgggucaggaagaugagcacagcac

SEQ ID NO: 511186 - RNA, 32 nt, Human
ugaagagcucaggcccucaggaagugucugcu

SEQ ID NO: 511187 - RNA, 32 nt, Human
ugaagagcugaaaaagaaaacauagucucuua

SEQ ID NO: 511188 - RNA, 32 nt, Human
ugaagaggaaauguuuaauuaaugcuuuuuag

SEQ ID NO: 511189 - RNA, 32 nt, Human
ugaagaggaaccucacgccacugccuggagcu

SEQ ID NO: 511190 - RNA, 32 nt, Human
ugaagaggaagagaugaggaguggggguccuu

SEQ ID NO: 511191 - RNA, 32 nt, Human
ugaagaggaagaggaggacagugaugaagauu

SEQ ID NO: 511192 - RNA, 32 nt, Human
ugaagaggaggaagaagagguguggacacugc

SEQ ID NO: 511193 - RNA, 32 nt, Human
ugaagaggaggaagagggagaagggagagugg

SEQ ID NO: 511194 - RNA, 32 nt, Human
ugaagaggaggaagagugggagaauggugcug

SEQ ID NO: 511195 - RNA, 32 nt, Human
ugaagaggagggagguuucuuuggucuucuau

SEQ ID NO: 511196 - RNA, 32 nt, Human
ugaagaggcaccucuggggagcaaagaggugg

SEQ ID NO: 511197 - RNA, 32 nt, Human
ugaagaggcagccgggaccauuggcaaugcca

SEQ ID NO: 511198 - RNA, 22 nt, Human
ugaagaggcaggucugggccag

SEQ ID NO: 511199 - RNA, 32 nt, Human
ugaagaggcuucauccaggaacuaggugaggg

SEQ ID NO: 511200 - RNA, 32 nt, Human
ugaagaggggaggcaggaagauucaggcgcgc

SEQ ID NO: 511201 - RNA, 32 nt, Human
ugaagagguacccgggggacacacugccucua

SEQ ID NO: 511202 - RNA, 28 nt, Human
ugaagaggucaacagcaggcauggggag

SEQ ID NO: 511203 - RNA, 22 nt, Human
ugaagagguggcuggacaugug

SEQ ID NO: 511204 - RNA, 31 nt, Human
ugaagaggugggagagaaaggaggggaguuc

SEQ ID NO: 511205 - RNA, 32 nt, Human
ugaagagguuugagcuuuagagugcaguugca

SEQ ID NO: 511206 - RNA, 32 nt, Human
ugaagaguauuuuuaaggagaugguaucuccc

SEQ ID NO: 511207 - RNA, 32 nt, Human
ugaagagucaaaggaaucugugucuaauaucc

SEQ ID NO: 511208 - RNA, 32 nt, Human
ugaagagucacaaugucaguucugugucccaa

SEQ ID NO: 511209 - RNA, 32 nt, Human
ugaagaguccaagaagccagcaccaccccauc

SEQ ID NO: 511210 - RNA, 32 nt, Human
ugaagaguggaaauggggaacucccccagagg

SEQ ID NO: 511211 - RNA, 21 nt, Human
ugaagaguuuuguuuuguuuu

SEQ ID NO: 511212 - RNA, 32 nt, Human
ugaagauaaucauagguugugugagccuauga

SEQ ID NO: 511213 - RNA, 32 nt, Human
ugaagauacuggaggggaaaugcugagugauc

SEQ ID NO: 511214 - RNA, 21 nt, Human
ugaagauagaggggccaugug

SEQ ID NO: 511215 - RNA, 20 nt, Human
ugaagauagucacgaaugua

SEQ ID NO: 511216 - RNA, 32 nt, Human
ugaagauaugacaaaguugaugaaaagguuga

SEQ ID NO: 511217 - RNA, 32 nt, Human
ugaagauauuccauggaucagaauauaaagca

SEQ ID NO: 511218 - RNA, 32 nt, Human
ugaagaucagaacauucagcucuggagaacag

SEQ ID NO: 511219 - RNA, 32 nt, Human
ugaagaucaucccgcaaggcaggcuggaggug

SEQ ID NO: 511220 - RNA, 32 nt, Human
ugaagauccccaacugcuccagccucugccgc

SEQ ID NO: 511221 - RNA, 32 nt, Human
ugaagaucccccagccaggauguggccccaga

SEQ ID NO: 511222 - RNA, 32 nt, Human
ugaagaucgaagccuguguaaaaugcuaccaa

SEQ ID NO: 511223 - RNA, 32 nt, Human
ugaagaucuauguaaagcccuuagaacagugu

SEQ ID NO: 511224 - RNA, 32 nt, Human
ugaagaucugcagcuauucuuuuacuuaacau

SEQ ID NO: 511225 - RNA, 32 nt, Human
ugaagaucuggcacaagauagaaugguaaaaa

SEQ ID NO: 511226 - RNA, 20 nt, Human
ugaagaucugggggcacagu

SEQ ID NO: 511227 - RNA, 32 nt, Human
ugaagaucuucugccaacuauucuccauucau

SEQ ID NO: 511228 - RNA, 32 nt, Human
ugaagaugaagcucaacucaggaagagauuua

SEQ ID NO: 511229 - RNA, 32 nt, Human
ugaagaugagacagaccggccaucauuggaau

SEQ ID NO: 511230 - RNA, 32 nt, Human
ugaagaugaguacaaaaaucccaggagaaacc

SEQ ID NO: 511231 - RNA, 32 nt, Human
ugaagaugcugccgccagcacaaugaccccga

SEQ ID NO: 511232 - RNA, 31 nt, Human
ugaagauggaaaagaucucagaugcugugac

SEQ ID NO: 511233 - RNA, 32 nt, Human
ugaagauggacucuaaacuuugguuuaccucc

SEQ ID NO: 511234 - RNA, 30 nt, Human
ugaagauggcggcagugguggagguggagg

SEQ ID NO: 511235 - RNA, 32 nt, Human
ugaagauggcugaagaaagaugacagaaagca

SEQ ID NO: 511236 - RNA, 32 nt, Human
ugaagaugggaagcacagauugcagugaaccg

SEQ ID NO: 511237 - RNA, 32 nt, Human
ugaagauguagagaaacaaggaagaaauugac

SEQ ID NO: 511238 - RNA, 32 nt, Human
ugaagauguagagagaacaagagacagaggca

SEQ ID NO: 511239 - RNA, 30 nt, Human
ugaagaugucugcaguggggaucagagagc

SEQ ID NO: 511240 - RNA, 32 nt, Human
ugaagaugugcaaagucacagaauguaaugga

SEQ ID NO: 511241 - RNA, 32 nt, Human
ugaagaugugggagaggagcagcccccaguau

SEQ ID NO: 511242 - RNA, 32 nt, Human
ugaagauguuguuccuuuaauagaugguuaaa

SEQ ID NO: 511243 - RNA, 32 nt, Human
ugaagauuaggaggagaaaaagaggagcuuug

SEQ ID NO: 511244 - RNA, 32 nt, Human
ugaagauucucuagggucucuacuucugcuca

SEQ ID NO: 511245 - RNA, 32 nt, Human
ugaagauuuagggcaucuuccuggguuuuggg

SEQ ID NO: 511246 - RNA, 23 nt, Human
ugaagauuucuucugaacgugug

SEQ ID NO: 511247 - RNA, 32 nt, Human
ugaagauuuucagcauuuaucucccaugacag

SEQ ID NO: 511248 - RNA, 32 nt, Human
ugaagcaaaaccaggagcccuggcugaagcaa

SEQ ID NO: 511249 - RNA, 32 nt, Human
ugaagcaaaagacaggaguucucuuugaaaca

SEQ ID NO: 511250 - RNA, 32 nt, Human
ugaagcaaagaauuccaggaaacccaagaggc

SEQ ID NO: 511251 - RNA, 32 nt, Human
ugaagcaaagacaucuuccuggccacguguug

SEQ ID NO: 511252 - RNA, 32 nt, Human
ugaagcaacauuucaaaugucucuccacaaac

SEQ ID NO: 511253 - RNA, 32 nt, Human
ugaagcaacuccaaggacacaguucacagaaa

SEQ ID NO: 511254 - RNA, 32 nt, Human
ugaagcaagggacagguaccagcugggauguu

SEQ ID NO: 511255 - RNA, 32 nt, Human
ugaagcaaguggagugguugggauggaagccu

SEQ ID NO: 511256 - RNA, 32 nt, Human
ugaagcaaguuggugaccuuccucuuugcucu

SEQ ID NO: 511257 - RNA, 32 nt, Human
ugaagcaaucuuucugccuccaccucccgagu

SEQ ID NO: 511258 - RNA, 32 nt, Human
ugaagcacaaagugcugggauuacaggcauga

SEQ ID NO: 511259 - RNA, 32 nt, Human
ugaagcacaacucccuuaaggucuccaaacca

SEQ ID NO: 511260 - RNA, 32 nt, Human
ugaagcacagaauuacucagucuuccauauug

SEQ ID NO: 511261 - RNA, 32 nt, Human
ugaagcacaggcaagcuccugagcugugguuu

SEQ ID NO: 511262 - RNA, 32 nt, Human
ugaagcaccacugcccuguagaccugggauaa

SEQ ID NO: 511263 - RNA, 32 nt, Human
ugaagcaccaggaaaaucaacagaucaugcuc

SEQ ID NO: 511264 - RNA, 32 nt, Human
ugaagcacuggaucuaccucuccuacagcauu

SEQ ID NO: 511265 - RNA, 32 nt, Human
ugaagcacuggcuccagccuuagggaagguuu

SEQ ID NO: 511266 - RNA, 32 nt, Human
ugaagcacuguggcugggaaacuucgaagcgg

SEQ ID NO: 511267 - RNA, 32 nt, Human
ugaagcagaaaguacagagaggugugggaugu

SEQ ID NO: 511268 - RNA, 32 nt, Human
ugaagcagaagguugacagcuucaguaagauc

SEQ ID NO: 511269 - RNA, 21 nt, Human
ugaagcagacagagaugcuga

SEQ ID NO: 511270 - RNA, 32 nt, Human
ugaagcagagaaacauucacacacaaaaagca

SEQ ID NO: 511271 - RNA, 32 nt, Human
ugaagcagagaggcacgugccugucucauucg

SEQ ID NO: 511272 - RNA, 22 nt, Human
ugaagcagagucacagagccga

SEQ ID NO: 511273 - RNA, 32 nt, Human
ugaagcagcacacacauuuacuacacacacag

SEQ ID NO: 511274 - RNA, 20 nt, Human
ugaagcagcauuaugcaagg

SEQ ID NO: 511275 - RNA, 32 nt, Human
ugaagcagccacugcccagggggugcaaagaa

SEQ ID NO: 511276 - RNA, 32 nt, Human
ugaagcagccaucucuuucuuggaucucaaga

SEQ ID NO: 511277 - RNA, 32 nt, Human
ugaagcagcugcauacuucagaguaaacuauu

SEQ ID NO: 511278 - RNA, 32 nt, Human
ugaagcaggagaagggaggccccuccuaucua

SEQ ID NO: 511279 - RNA, 32 nt, Human
ugaagcaggagaaucacuugaacucaggaggc

SEQ ID NO: 511280 - RNA, 32 nt, Human
ugaagcaggaggacugcuugagcugaguccaa

SEQ ID NO: 511281 - RNA, 32 nt, Human
ugaagcaggaggaucacuugagcccaggaguu

SEQ ID NO: 511282 - RNA, 32 nt, Human
ugaagcaggaggaucacuugagccugaguuca

SEQ ID NO: 511283 - RNA, 32 nt, Human
ugaagcaggaggaucacuugagcuugggaguu

SEQ ID NO: 511284 - RNA, 32 nt, Human
ugaagcaggaggaucacuugaggccaggaguu

SEQ ID NO: 511285 - RNA, 32 nt, Human
ugaagcaggagguggcauuugaaaugaaauac

SEQ ID NO: 511286 - RNA, 21 nt, Human
ugaagcaggcagaucaccuga

SEQ ID NO: 511287 - RNA, 24 nt, Human
ugaagcaggcagaucaccugaggu

SEQ ID NO: 511288 - RNA, 32 nt, Human
ugaagcaggcggaucacuugagcccaggaguu

SEQ ID NO: 511289 - RNA, 32 nt, Human
ugaagcagggggaaaaaugacaucacaccauu

SEQ ID NO: 511290 - RNA, 32 nt, Human
ugaagcaggguguccugggugccuguguguca

SEQ ID NO: 511291 - RNA, 32 nt, Human
ugaagcagguaucagagucacuccucuguacc

SEQ ID NO: 511292 - RNA, 32 nt, Human
ugaagcaggugugaaugccaggagagguggga

SEQ ID NO: 511293 - RNA, 32 nt, Human
ugaagcagucuaggagcuugcagccacccugu

SEQ ID NO: 511294 - RNA, 32 nt, Human
ugaagcagucucggagcuugcagccaccccgu

SEQ ID NO: 511295 - RNA, 19 nt, Human
ugaagcagucuugcucugu

SEQ ID NO: 511296 - RNA, 32 nt, Human
ugaagcaguugcucaaacuuuguucaacauca

SEQ ID NO: 511297 - RNA, 32 nt, Human
ugaagcaguugcucaaacuuuguucaauauca

SEQ ID NO: 511298 - RNA, 32 nt, Human
ugaagcaguuucacaucagucucuccagauag

SEQ ID NO: 511299 - RNA, 32 nt, Human
ugaagcaucuauuacuucaaggccaauaucuu

SEQ ID NO: 511300 - RNA, 32 nt, Human
ugaagcaugaguugucggaggucugggagaaa

SEQ ID NO: 511301 - RNA, 32 nt, Human
ugaagcauggcagaggcuguuguggacaauca

SEQ ID NO: 511302 - RNA, 32 nt, Human
ugaagcaugucccaccucccacuuuccaucau

SEQ ID NO: 511303 - RNA, 32 nt, Human
ugaagcauuuugcgaggagucuggacucaggu

SEQ ID NO: 511304 - RNA, 32 nt, Human
ugaagcauuuugugccuucugugagaaaacau

SEQ ID NO: 511305 - RNA, 32 nt, Human
ugaagcauuuuugucugugcucccugaucuuc

SEQ ID NO: 511306 - RNA, 32 nt, Human
ugaagccaaaaaugugauagcuguccuugaag

SEQ ID NO: 511307 - RNA, 32 nt, Human
ugaagccaaagccccgugguugcccaugagaa

SEQ ID NO: 511308 - RNA, 32 nt, Human
ugaagccaaaucugaacccauguccucacuuc

SEQ ID NO: 511309 - RNA, 32 nt, Human
ugaagccaaggugggaggaucaccagagccug

SEQ ID NO: 511310 - RNA, 32 nt, Human
ugaagccaaggugggaggcagcugacaacacc

SEQ ID NO: 511311 - RNA, 32 nt, Human
ugaagccaauaaucccagcacuuugagaggcc

SEQ ID NO: 511312 - RNA, 32 nt, Human
ugaagccacccuuccucuucuggacccagccu

SEQ ID NO: 511313 - RNA, 32 nt, Human
ugaagccacgauguucauccaggccaaagcag

SEQ ID NO: 511314 - RNA, 32 nt, Human
ugaagccagaaguucaagaccagccugcacau

SEQ ID NO: 511315 - RNA, 32 nt, Human
ugaagccagaggcagagguugcaaugagccgg

SEQ ID NO: 511316 - RNA, 32 nt, Human
ugaagccagagggugugcagggccaggagcua

SEQ ID NO: 511317 - RNA, 32 nt, Human
ugaagccagcacugguuaacauggugauuagu

SEQ ID NO: 511318 - RNA, 32 nt, Human
ugaagccagcuggucuucugggucgggugggg

SEQ ID NO: 511319 - RNA, 32 nt, Human
ugaagccaggaauucaagacgaaccugggcaa

SEQ ID NO: 511320 - RNA, 32 nt, Human
ugaagccaggacuucaagaccagcuuggccaa

SEQ ID NO: 511321 - RNA, 32 nt, Human
ugaagccaggaggagagaugcagucuuaggag

SEQ ID NO: 511322 - RNA, 32 nt, Human
ugaagccaggaggcagagguugcaguuagccc

SEQ ID NO: 511323 - RNA, 32 nt, Human
ugaagccaggaggcggagguugcagugagccg

SEQ ID NO: 511324 - RNA, 32 nt, Human
ugaagccaggaguucaagaccagccuggccaa

SEQ ID NO: 511325 - RNA, 19 nt, Human
ugaagccaggaguucgaga

SEQ ID NO: 511326 - RNA, 32 nt, Human
ugaagccagggagggagacaggagggcaggag

SEQ ID NO: 511327 - RNA, 32 nt, Human
ugaagccaggggacauccgccaugcuccaaac

SEQ ID NO: 511328 - RNA, 32 nt, Human
ugaagccaggggucaucagccaugcuccagac

SEQ ID NO: 511329 - RNA, 32 nt, Human
ugaagccagggugccgggaggaagggacaucu

SEQ ID NO: 511330 - RNA, 32 nt, Human
ugaagccaguaguucaagaccagccugggcaa

SEQ ID NO: 511331 - RNA, 32 nt, Human
ugaagccagugcacgccagccugggcgacaga

SEQ ID NO: 511332 - RNA, 32 nt, Human
ugaagccaguucaguaaucacacacauuccaa

SEQ ID NO: 511333 - RNA, 32 nt, Human
ugaagccaguuugcuuauuuucaauugccuag

SEQ ID NO: 511334 - RNA, 32 nt, Human
ugaagccauccauccauuugauagguuuugca

SEQ ID NO: 511335 - RNA, 32 nt, Human
ugaagccaucccccaucuucccuagacacagc

SEQ ID NO: 511336 - RNA, 32 nt, Human
ugaagccaugggagagggugagagccaccauc

SEQ ID NO: 511337 - RNA, 32 nt, Human
ugaagccaugguucaucaggugcucuaccggg

SEQ ID NO: 511338 - RNA, 32 nt, Human
ugaagccauuggagagcugucuuccuguguac

SEQ ID NO: 511339 - RNA, 32 nt, Human
ugaagccauuugggggucaaaguuuccuuacu

SEQ ID NO: 511340 - RNA, 32 nt, Human
ugaagcccaaagacuuauuuuugagcucgcug

SEQ ID NO: 511341 - RNA, 32 nt, Human
ugaagcccaagccaggccugguugagggugau

SEQ ID NO: 511342 - RNA, 21 nt, Human
ugaagcccaccagagcccccu

SEQ ID NO: 511343 - RNA, 32 nt, Human
ugaagcccaggaggaggaagaggaggcugguu

SEQ ID NO: 511344 - RNA, 32 nt, Human
ugaagcccccaggauacauggagcagagaagc

SEQ ID NO: 511345 - RNA, 32 nt, Human
ugaagccccgggaggagaggaaggcagcggcg

SEQ ID NO: 511346 - RNA, 32 nt, Human
ugaagccccugagaauauuuuguugagaacac

SEQ ID NO: 511347 - RNA, 32 nt, Human
ugaagccccugaggggaaaagacugggcuucc

SEQ ID NO: 511348 - RNA, 32 nt, Human
ugaagcccgaagagcaggaggccaggcacucg

SEQ ID NO: 511349 - RNA, 32 nt, Human
ugaagcccguuggucucagccuggcuugagcc

SEQ ID NO: 511350 - RNA, 32 nt, Human
ugaagcccuuaccugcuugcugucugcaaggg

SEQ ID NO: 511351 - RNA, 32 nt, Human
ugaagccgagcaacucuguccaaaaagguuua

SEQ ID NO: 511352 - RNA, 32 nt, Human
ugaagccgcagcccugcccuguccuguccugu

SEQ ID NO: 511353 - RNA, 32 nt, Human
ugaagccggccccugcccucuuccugcccguc

SEQ ID NO: 511354 - RNA, 32 nt, Human
ugaagccgggaggcggaaguuguggugagccg

SEQ ID NO: 511355 - RNA, 32 nt, Human
ugaagccgggagguggggguugcagugagccg

SEQ ID NO: 511356 - RNA, 32 nt, Human
ugaagccuauuuuucuguuccagcaacuguuu

SEQ ID NO: 511357 - RNA, 32 nt, Human
ugaagccucaaaggaguaaagucuacaggaua

SEQ ID NO: 511358 - RNA, 32 nt, Human
ugaagccucucuccuucucugccuacaaagac

SEQ ID NO: 511359 - RNA, 18 nt, Human
ugaagccucuuccucgca

SEQ ID NO: 511360 - RNA, 32 nt, Human
ugaagccugccuggccuguggugcuuuccagu

SEQ ID NO: 511361 - RNA, 32 nt, Human
ugaagccuggaggcggaggcugcacugagcug

SEQ ID NO: 511362 - RNA, 32 nt, Human
ugaagccuggcuuggguugaaaaguguucccg

SEQ ID NO: 511363 - RNA, 32 nt, Human
ugaagccugugaucccagcauguugggaggcc

SEQ ID NO: 511364 - RNA, 32 nt, Human
ugaagccuucaggucacaaacugucuuuugua

SEQ ID NO: 511365 - RNA, 32 nt, Human
ugaagcgaggcugaaaucuuagaaucaacccc

SEQ ID NO: 511366 - RNA, 32 nt, Human
ugaagcgagggaggaaguuuccuccgaucagu

SEQ ID NO: 511367 - RNA, 32 nt, Human
ugaagcgauggagagucgggggccaguagcca

SEQ ID NO: 511368 - RNA, 22 nt, Human
ugaagcgcaugcgcagcgggug

SEQ ID NO: 511369 - RNA, 32 nt, Human
ugaagcgcgugucugcugucugugccagugcu

SEQ ID NO: 511370 - RNA, 32 nt, Human
ugaagcgcuaccugcucuaccaguggcccugu

SEQ ID NO: 511371 - RNA, 32 nt, Human
ugaagcgcucugagagaggcggcagcggcaac

SEQ ID NO: 511372 - RNA, 32 nt, Human
ugaagcgggaggaucgcuugagaccaggaguu

SEQ ID NO: 511373 - RNA, 32 nt, Human
ugaagcgggcagaucacuugaggucaggaguu

SEQ ID NO: 511374 - RNA, 32 nt, Human
ugaagcgggguaauuccucuccugcaauuacu

SEQ ID NO: 511375 - RNA, 24 nt, Human
ugaagcggguggaucacccgaggu

SEQ ID NO: 511376 - RNA, 24 nt, Human
ugaagcggguggaucaccugaggu

SEQ ID NO: 511377 - RNA, 32 nt, Human
ugaagcgguuauagccauugacauuguggcca

SEQ ID NO: 511378 - RNA, 32 nt, Human
ugaagcuaggacuuauuuggaaaaggagauag

SEQ ID NO: 511379 - RNA, 32 nt, Human
ugaagcuaggggaggaaggaaggaaggaaggg

SEQ ID NO: 511380 - RNA, 32 nt, Human
ugaagcuaggucucaggggucuccaguccucc

SEQ ID NO: 511381 - RNA, 32 nt, Human
ugaagcuaguucaguaaucacacacauuccaa

SEQ ID NO: 511382 - RNA, 32 nt, Human
ugaagcucaagugaggagggggaggcuggguu

SEQ ID NO: 511383 - RNA, 32 nt, Human
ugaagcucaccacuguccuuuguuuuggagau

SEQ ID NO: 511384 - RNA, 32 nt, Human
ugaagcucacuccgccuccucacucucacugc

SEQ ID NO: 511385 - RNA, 32 nt, Human
ugaagcucaguuauagugcacugaugaacuga

SEQ ID NO: 511386 - RNA, 32 nt, Human
ugaagcucauuuuaaggaaauggaguccauug

SEQ ID NO: 511387 - RNA, 32 nt, Human
ugaagcuccguguauacccugaggucaccacc

SEQ ID NO: 511388 - RNA, 32 nt, Human
ugaagcuccugccuuucugcagccucuacagg

SEQ ID NO: 511389 - RNA, 32 nt, Human
ugaagcucgagaacaaccugaccaacauggag

SEQ ID NO: 511390 - RNA, 32 nt, Human
ugaagcucuaacugccuggacuucuugggaaa

SEQ ID NO: 511391 - RNA, 32 nt, Human
ugaagcucuccucuuugagguccuggcaggcu

SEQ ID NO: 511392 - RNA, 32 nt, Human
ugaagcucucuuugcucuuccugcuuucauuu

SEQ ID NO: 511393 - RNA, 32 nt, Human
ugaagcucugaaaugcgaugugaucuguacca

SEQ ID NO: 511394 - RNA, 32 nt, Human
ugaagcucuggagcucugcauccuguggccug

SEQ ID NO: 511395 - RNA, 32 nt, Human
ugaagcugaaaccuuuggccuaagaagaaaau

SEQ ID NO: 511396 - RNA, 32 nt, Human
ugaagcugaacccagggccuggcuguggucuu

SEQ ID NO: 511397 - RNA, 32 nt, Human
ugaagcugaagcucugucccuauucccccagc

SEQ ID NO: 511398 - RNA, 32 nt, Human
ugaagcugaaggaucacuugagcucaggaguu

SEQ ID NO: 511399 - RNA, 32 nt, Human
ugaagcugagaguucaagaccaaccugggcaa

SEQ ID NO: 511400 - RNA, 32 nt, Human
ugaagcugaggcugcugccaggcccggcauga

SEQ ID NO: 511401 - RNA, 32 nt, Human
ugaagcugcagcccugacugagacauagggcu

SEQ ID NO: 511402 - RNA, 32 nt, Human
ugaagcugcagcuguaagaagcugagugaaag

SEQ ID NO: 511403 - RNA, 32 nt, Human
ugaagcugccaggcccugagguucagacccug

SEQ ID NO: 511404 - RNA, 32 nt, Human
ugaagcugcccucguugguggaggggagggag

SEQ ID NO: 511405 - RNA, 32 nt, Human
ugaagcugcucacugcucacacgcugccuccu

SEQ ID NO: 511406 - RNA, 32 nt, Human
ugaagcugcugacuauuuaggcauuuuacacu

SEQ ID NO: 511407 - RNA, 20 nt, Human
ugaagcugcugcagcucccu

SEQ ID NO: 511408 - RNA, 32 nt, Human
ugaagcuggaggacucuguccaugcccguguc

SEQ ID NO: 511409 - RNA, 32 nt, Human
ugaagcuggaggagucucucuucugcucucca

SEQ ID NO: 511410 - RNA, 32 nt, Human
ugaagcuggaggcagagauuggagugauacau

SEQ ID NO: 511411 - RNA, 32 nt, Human
ugaagcuggccuggccucugcuccugcucuca

SEQ ID NO: 511412 - RNA, 32 nt, Human
ugaagcugggagaaccaaaaagaggcuaugug

SEQ ID NO: 511413 - RNA, 32 nt, Human
ugaagcugggaggcagaguuuucagugagcca

SEQ ID NO: 511414 - RNA, 32 nt, Human
ugaagcugggaggcggagguugcagugagcca

SEQ ID NO: 511415 - RNA, 32 nt, Human
ugaagcugggagugaaacugggucagcuguaa

SEQ ID NO: 511416 - RNA, 32 nt, Human
ugaagcugguccugggcuccgggggugacagu

SEQ ID NO: 511417 - RNA, 32 nt, Human
ugaagcuguggggccaguugauaccugcuggc

SEQ ID NO: 511418 - RNA, 32 nt, Human
ugaagcuuaaugaugugaggcuucuaguggga

SEQ ID NO: 511419 - RNA, 32 nt, Human
ugaagcuuaguaaccagcgccaaaaaguagau

SEQ ID NO: 511420 - RNA, 32 nt, Human
ugaagcuucccaagcaucagucuacaccaaca

SEQ ID NO: 511421 - RNA, 17 nt, Human
ugaagcuucuuggcaua

SEQ ID NO: 511422 - RNA, 22 nt, Human
ugaagcuuggagaaaacucugc

SEQ ID NO: 511423 - RNA, 32 nt, Human
ugaagcuuguauaucagcaccggauuguagaa

SEQ ID NO: 511424 - RNA, 32 nt, Human
ugaagcuuguguccuguugggaggacagacag

SEQ ID NO: 511425 - RNA, 32 nt, Human
ugaaggaaaagcugggaucacagguuccuucu

SEQ ID NO: 511426 - RNA, 19 nt, Human
ugaaggaaagcugcuuccu

SEQ ID NO: 511427 - RNA, 32 nt, Human
ugaaggaaaggagugaaagggaaguaggacca

SEQ ID NO: 511428 - RNA, 32 nt, Human
ugaaggaaauauggucagcauuuuauaacacc

SEQ ID NO: 511429 - RNA, 32 nt, Human
ugaaggaagaauucuauggaaauuacaaaucc

SEQ ID NO: 511430 - RNA, 32 nt, Human
ugaaggaagacccaggaaagguguggcuggaa

SEQ ID NO: 511431 - RNA, 32 nt, Human
ugaaggaagccccucccugggcauuuucugcc

SEQ ID NO: 511432 - RNA, 32 nt, Human
ugaaggaaugcucacacuagauguagcacagc

SEQ ID NO: 511433 - RNA, 32 nt, Human
ugaaggacaacauauggugauggggaaaucag

SEQ ID NO: 511434 - RNA, 32 nt, Human
ugaaggacaacggccgagaacgcccaggaugg

SEQ ID NO: 511435 - RNA, 32 nt, Human
ugaaggacaccaagcuggaacuacccaucuag

SEQ ID NO: 511436 - RNA, 32 nt, Human
ugaaggacagaagaggaaggaagcaggcuuug

SEQ ID NO: 511437 - RNA, 32 nt, Human
ugaaggacagaauuuuuggcagaggaaagauc

SEQ ID NO: 511438 - RNA, 32 nt, Human
ugaaggacagucaggugaaggacuguaagccc

SEQ ID NO: 511439 - RNA, 18 nt, Human
ugaaggacuaaaaccgca

SEQ ID NO: 511440 - RNA, 32 nt, Human
ugaaggacuggguguuacuggagggaacacac

SEQ ID NO: 511441 - RNA, 23 nt, Human
ugaaggagaccgcgcgggcgcug

SEQ ID NO: 511442 - RNA, 32 nt, Human
ugaaggagagcagcaaaaauguaucagggguu

SEQ ID NO: 511443 - RNA, 32 nt, Human
ugaaggagaguuucuugcauuggacaggccca

SEQ ID NO: 511444 - RNA, 32 nt, Human
ugaaggagcaccuuauccucccccuuuguuua

SEQ ID NO: 511445 - RNA, 32 nt, Human
ugaaggagcaggaaggggaaggaggccuggga

SEQ ID NO: 511446 - RNA, 32 nt, Human
ugaaggagccagcagaaccuucccacaugcug

SEQ ID NO: 511447 - RNA, 22 nt, Human
ugaaggagcuguccagcgacua

SEQ ID NO: 511448 - RNA, 21 nt, Human
ugaaggagcuucuuuuccucu

SEQ ID NO: 511449 - RNA, 32 nt, Human
ugaaggaggacugaaccaaggacucugugagg

SEQ ID NO: 511450 - RNA, 32 nt, Human
ugaaggaggagagagguggagggcugguauuu

SEQ ID NO: 511451 - RNA, 32 nt, Human
ugaaggaggaggacuggcugccuccauuuugc

SEQ ID NO: 511452 - RNA, 32 nt, Human
ugaaggaggcagagaagggguuggugauacgg

SEQ ID NO: 511453 - RNA, 32 nt, Human
ugaaggaggcagggguugggacaagugcuaag

SEQ ID NO: 511454 - RNA, 32 nt, Human
ugaaggaggcaugggagcuaaaaauccuguga

SEQ ID NO: 511455 - RNA, 32 nt, Human
ugaaggaggccaccgugugagcacagggccug

SEQ ID NO: 511456 - RNA, 32 nt, Human
ugaaggagggaaggagcaggagagcaggaagg

SEQ ID NO: 511457 - RNA, 32 nt, Human
ugaaggaggggugggaaggugcagagagggca

SEQ ID NO: 511458 - RNA, 18 nt, Human
ugaaggaguggggaggug

SEQ ID NO: 511459 - RNA, 32 nt, Human
ugaaggauagacuaugggugggcagagagaac

SEQ ID NO: 511460 - RNA, 32 nt, Human
ugaaggaugacauggcccugccugagcccggg

SEQ ID NO: 511461 - RNA, 32 nt, Human
ugaaggaugcgguaauggcaggaauagcagaa

SEQ ID NO: 511462 - RNA, 32 nt, Human
ugaaggaugggugagaggugagaagggagaaa

SEQ ID NO: 511463 - RNA, 32 nt, Human
ugaaggaugguauguagacuccuguacagaca

SEQ ID NO: 511464 - RNA, 32 nt, Human
ugaaggauuacucgcccccaccuguggacucu

SEQ ID NO: 511465 - RNA, 32 nt, Human
ugaaggauucacgaaucaggcagcccccagaa

SEQ ID NO: 511466 - RNA, 32 nt, Human
ugaaggcaaacuucauaaugaggggaagaguc

SEQ ID NO: 511467 - RNA, 22 nt, Human
ugaaggcaagauucccaaggga

SEQ ID NO: 511468 - RNA, 32 nt, Human
ugaaggcaaucaguaccucugcuuuucaaagg

SEQ ID NO: 511469 - RNA, 32 nt, Human
ugaaggcaaugccauccucaaacacugcaggc

SEQ ID NO: 511470 - RNA, 32 nt, Human
ugaaggcagcacucacggucaucaagccagcc

SEQ ID NO: 511471 - RNA, 32 nt, Human
ugaaggcagcccaaggucucccagaggcucgg

SEQ ID NO: 511472 - RNA, 32 nt, Human
ugaaggcagcgaaggggguugcaguaggggcg

SEQ ID NO: 511473 - RNA, 32 nt, Human
ugaaggcaggagacccagaaagcagugcagug

SEQ ID NO: 511474 - RNA, 32 nt, Human
ugaaggcaggagcugaagaugcuguacaggaa

SEQ ID NO: 511475 - RNA, 32 nt, Human
ugaaggcaggaguucaagaccagcuugggcau

SEQ ID NO: 511476 - RNA, 32 nt, Human
ugaaggcaggguggcagccuccccacggacuc

SEQ ID NO: 511477 - RNA, 32 nt, Human
ugaaggcagguaaaggagcaaagggaaugggg

SEQ ID NO: 511478 - RNA, 18 nt, Human
ugaaggcaguggcagggg

SEQ ID NO: 511479 - RNA, 31 nt, Human
ugaaggcaguuucagaucgccaccuuuugag

SEQ ID NO: 511480 - RNA, 32 nt, Human
ugaaggcaucugagugugagacccuguucuaa

SEQ ID NO: 511481 - RNA, 32 nt, Human
ugaaggcauuguuugagguugaucucagcacu

SEQ ID NO: 511482 - RNA, 32 nt, Human
ugaaggcauuucugcugaucuguuccaagaca

SEQ ID NO: 511483 - RNA, 32 nt, Human
ugaaggcauuugcaggaugagccugaacuggu

SEQ ID NO: 511484 - RNA, 32 nt, Human
ugaaggccacaucaacuuuauguagcaaaggg

SEQ ID NO: 511485 - RNA, 32 nt, Human
ugaaggccacgguccugaugcggcagccuggg

SEQ ID NO: 511486 - RNA, 32 nt, Human
ugaaggccagugcugugcuggcaggaaaauag

SEQ ID NO: 511487 - RNA, 32 nt, Human
ugaaggccauugacucagagguguaggaaugg

SEQ ID NO: 511488 - RNA, 32 nt, Human
ugaaggccccaccacccagccuguggaugucu

SEQ ID NO: 511489 - RNA, 32 nt, Human
ugaaggccgagaaccucuggccucaggaagcg

SEQ ID NO: 511490 - RNA, 32 nt, Human
ugaaggccgcuagaaaguacagaaggaacuuu

SEQ ID NO: 511491 - RNA, 32 nt, Human
ugaaggccucaguuccucgcuggcuguuggcu

SEQ ID NO: 511492 - RNA, 32 nt, Human
ugaaggccugauggggaggaggacccggcaug

SEQ ID NO: 511493 - RNA, 32 nt, Human
ugaaggcgauugagaggggcugagggaauugu

SEQ ID NO: 511494 - RNA, 32 nt, Human
ugaaggcgccguggcccugccugacgccccgg

SEQ ID NO: 511495 - RNA, 20 nt, Human
ugaaggcgggugcuaggcug

SEQ ID NO: 511496 - RNA, 32 nt, Human
ugaaggcuauggcuuggcacagcugcucugga

SEQ ID NO: 511497 - RNA, 32 nt, Human
ugaaggcugccuuaggucucuccagugccaug

SEQ ID NO: 511498 - RNA, 32 nt, Human
ugaaggcuggaaggcagcaggcauuugcuaag

SEQ ID NO: 511499 - RNA, 32 nt, Human
ugaaggcugggagcucuuggggcugggcuggu

SEQ ID NO: 511500 - RNA, 32 nt, Human
ugaaggcuguaagaguccagaugguggagcca

SEQ ID NO: 511501 - RNA, 32 nt, Human
ugaaggcuguggaagagguuggagugggcgca

SEQ ID NO: 511502 - RNA, 32 nt, Human
ugaaggcuuaggccccugucauucccacccuc

SEQ ID NO: 511503 - RNA, 32 nt, Human
ugaaggcuuccacacccucuacuccaggacag

SEQ ID NO: 511504 - RNA, 32 nt, Human
ugaaggcuuccaggcagaacagcugcagagag

SEQ ID NO: 511505 - RNA, 32 nt, Human
ugaaggcuuuaguucugcuuucugccucuccu

SEQ ID NO: 511506 - RNA, 32 nt, Human
ugaaggcuuucccacauucuuuacauuuguag

SEQ ID NO: 511507 - RNA, 32 nt, Human
ugaagggaacaucuuaccaucuggccauucac

SEQ ID NO: 511508 - RNA, 32 nt, Human
ugaagggaagcccuucagaacauggcucccaa

SEQ ID NO: 511509 - RNA, 32 nt, Human
ugaagggaagucagaguuuucucccugccuau

SEQ ID NO: 511510 - RNA, 32 nt, Human
ugaagggaauacugugcauaagccauuaugau

SEQ ID NO: 511511 - RNA, 22 nt, Human
ugaagggacccgcucccagcuc

SEQ ID NO: 511512 - RNA, 32 nt, Human
ugaagggacccuggggaaggcagggagggcag

SEQ ID NO: 511513 - RNA, 17 nt, Human
ugaagggacgaguacca

SEQ ID NO: 511514 - RNA, 32 nt, Human
ugaagggagaaagccugugcucuggcuggcug

SEQ ID NO: 511515 - RNA, 32 nt, Human
ugaagggagcaguucaguuacagcauucucuc

SEQ ID NO: 511516 - RNA, 32 nt, Human
ugaagggagcuuuguuaguuuaaucacuggaa

SEQ ID NO: 511517 - RNA, 32 nt, Human
ugaagggaggcaguggcggcggcggcgaacau

SEQ ID NO: 511518 - RNA, 32 nt, Human
ugaagggaguggaucagagcacugccugagag

SEQ ID NO: 511519 - RNA, 32 nt, Human
ugaagggauuaaaaauguacguaaaauuagua

SEQ ID NO: 511520 - RNA, 31 nt, Human
ugaagggcacuuuucagauugugggcuggaa

SEQ ID NO: 511521 - RNA, 32 nt, Human
ugaagggcagagccuaugccagccugggccug

SEQ ID NO: 511522 - RNA, 32 nt, Human
ugaagggcaugcaggcccucagcccgggcugu

SEQ ID NO: 511523 - RNA, 32 nt, Human
ugaagggcuaucucuguuuaauucaccaucuu

SEQ ID NO: 511524 - RNA, 32 nt, Human
ugaagggcucugacccuggaagugguucuaag

SEQ ID NO: 511525 - RNA, 32 nt, Human
ugaagggcuucaggcugggggcaguggacagg

SEQ ID NO: 511526 - RNA, 32 nt, Human
ugaaggggacggagacacugacugggcgaugg

SEQ ID NO: 511527 - RNA, 31 nt, Human
ugaaggggcucagggguccuguugaacugcu

SEQ ID NO: 511528 - RNA, 32 nt, Human
ugaaggggcugguggagauguaggaaccgauc

SEQ ID NO: 511529 - RNA, 32 nt, Human
ugaaggggugauagggugaggggccagaggga

SEQ ID NO: 511530 - RNA, 32 nt, Human
ugaaggggugccugggcuagggcugcaggcug

SEQ ID NO: 511531 - RNA, 32 nt, Human
ugaagggguggaggggcuggaggagcaggaau

SEQ ID NO: 511532 - RNA, 32 nt, Human
ugaagggguuuaccuggcaucuucucaggcag

SEQ ID NO: 511533 - RNA, 32 nt, Human
ugaaggguacuuuuugcuuuugcucaccucau

SEQ ID NO: 511534 - RNA, 32 nt, Human
ugaagggucaccaagggucagcucagggcuag

SEQ ID NO: 511535 - RNA, 32 nt, Human
ugaaggguguguaacuucagcucugcaggauu

SEQ ID NO: 511536 - RNA, 32 nt, Human
ugaaggguucggcuuguccuccucuggcgcuc

SEQ ID NO: 511537 - RNA, 32 nt, Human
ugaaggucaauaaauuauuagagauuuucucu

SEQ ID NO: 511538 - RNA, 32 nt, Human
ugaaggucauacaauucuggggacucucuuua

SEQ ID NO: 511539 - RNA, 32 nt, Human
ugaaggucaucuuuacucagucuacccauuca

SEQ ID NO: 511540 - RNA, 32 nt, Human
ugaagguccuggggaagcaggucucaauucug

SEQ ID NO: 511541 - RNA, 32 nt, Human
ugaaggucucagaaggcuucagugacagucau

SEQ ID NO: 511542 - RNA, 32 nt, Human
ugaaggucucuuugcauuucuccaugcaaaga

SEQ ID NO: 511543 - RNA, 32 nt, Human
ugaaggucugcagcuucacuccugaagccagc

SEQ ID NO: 511544 - RNA, 32 nt, Human
ugaaggucugcagcuucacuccuggagucagc

SEQ ID NO: 511545 - RNA, 32 nt, Human
ugaaggucugcagcuucguucuuaaagccagc

SEQ ID NO: 511546 - RNA, 32 nt, Human
ugaaggucuugccugaauccaucaggacuugg

SEQ ID NO: 511547 - RNA, 24 nt, Human
ugaaggugcagcaagucacugaga

SEQ ID NO: 511548 - RNA, 32 nt, Human
ugaaggugccaaggaggaaggcugagaggggg

SEQ ID NO: 511549 - RNA, 32 nt, Human
ugaaggugcccaccugggccaccagaagguga

SEQ ID NO: 511550 - RNA, 32 nt, Human
ugaaggugcccaggagcggcgaugcacucgca

SEQ ID NO: 511551 - RNA, 32 nt, Human
ugaaggugcugacggccagggagaagcuccuc

SEQ ID NO: 511552 - RNA, 21 nt, Human
ugaagguggacucggacugug

SEQ ID NO: 511553 - RNA, 32 nt, Human
ugaagguggggaggggaauauacacauugcuu

SEQ ID NO: 511554 - RNA, 32 nt, Human
ugaaggugucgcaugaagagcuugcuucacac

SEQ ID NO: 511555 - RNA, 32 nt, Human
ugaaggugucugcagcacacacagugagaauu

SEQ ID NO: 511556 - RNA, 32 nt, Human
ugaaggugugagugccugucuugaacuugcac

SEQ ID NO: 511557 - RNA, 32 nt, Human
ugaagguucagggugugaauucccagugccac

SEQ ID NO: 511558 - RNA, 32 nt, Human
ugaagguuccccaccauucagugagagcagaa

SEQ ID NO: 511559 - RNA, 32 nt, Human
ugaagguuuucauuugccauucauguccugua

SEQ ID NO: 511560 - RNA, 32 nt, Human
ugaaguaaacauaccuguaacuaccauucaag

SEQ ID NO: 511561 - RNA, 32 nt, Human
ugaaguaaaguauauuuuuguaccaaaccaca

SEQ ID NO: 511562 - RNA, 32 nt, Human
ugaaguaaauagaagaucaagccuucaaaucu

SEQ ID NO: 511563 - RNA, 32 nt, Human
ugaaguaacauuguauucguguuugcauuauu

SEQ ID NO: 511564 - RNA, 32 nt, Human
ugaaguacagagggagguuggggugggucaga

SEQ ID NO: 511565 - RNA, 32 nt, Human
ugaaguaccaguuuccauuccugggcugagau

SEQ ID NO: 511566 - RNA, 32 nt, Human
ugaaguaccuugagguuccugaugugcgggcg

SEQ ID NO: 511567 - RNA, 32 nt, Human
ugaaguacuggcagauuugcaggcugggaagg

SEQ ID NO: 511568 - RNA, 32 nt, Human
ugaaguacuggcucuuuccugcucuggacaag

SEQ ID NO: 511569 - RNA, 22 nt, Human
ugaaguacuggggccuccucca

SEQ ID NO: 511570 - RNA, 32 nt, Human
ugaaguacuguacaggguuguacaaugagaac

SEQ ID NO: 511571 - RNA, 32 nt, Human
ugaaguagagcagagggccugggugucuguca

SEQ ID NO: 511572 - RNA, 32 nt, Human
ugaaguagagcagugggcuuugccuucugaca

SEQ ID NO: 511573 - RNA, 32 nt, Human
ugaaguagaucaggaaggggcugccucaggaa

SEQ ID NO: 511574 - RNA, 32 nt, Human
ugaaguagauggugacagaacaugagagccag

SEQ ID NO: 511575 - RNA, 32 nt, Human
ugaaguaggaagaaaguauuucaaggagagug

SEQ ID NO: 511576 - RNA, 32 nt, Human
ugaaguaggaggaucgucuugagcccaggagu

SEQ ID NO: 511577 - RNA, 32 nt, Human
ugaaguagggaggaggagguugcagugagcug

SEQ ID NO: 511578 - RNA, 32 nt, Human
ugaaguagucucauuacggaaaaagagagugu

SEQ ID NO: 511579 - RNA, 32 nt, Human
ugaaguauacauuuaguuaacacacauauauc

SEQ ID NO: 511580 - RNA, 32 nt, Human
ugaaguauaucugagggaaaaauaaaugaaaa

SEQ ID NO: 511581 - RNA, 32 nt, Human
ugaaguaucaucucucaaguauauagacacua

SEQ ID NO: 511582 - RNA, 32 nt, Human
ugaaguaucuauccuugacuugcccuucacug

SEQ ID NO: 511583 - RNA, 32 nt, Human
ugaagucaaaggggacuuuacacagaucucga

SEQ ID NO: 511584 - RNA, 32 nt, Human
ugaagucaacaguucaggagaagagaaggaau

SEQ ID NO: 511585 - RNA, 32 nt, Human
ugaagucaagaguuugagaucagccuggagaa

SEQ ID NO: 511586 - RNA, 32 nt, Human
ugaagucacagaaauacgcagagcaaguaucu

SEQ ID NO: 511587 - RNA, 32 nt, Human
ugaagucacauccugaaugugcaugccagaca

SEQ ID NO: 511588 - RNA, 32 nt, Human
ugaagucaccuggccuggaguguguugggcag

SEQ ID NO: 511589 - RNA, 32 nt, Human
ugaagucacugaaaauccaacuccaggagcua

SEQ ID NO: 511590 - RNA, 32 nt, Human
ugaagucacugcacccuccacuaccucuacug

SEQ ID NO: 511591 - RNA, 32 nt, Human
ugaagucacugcaguccaagcucugaguguca

SEQ ID NO: 511592 - RNA, 32 nt, Human
ugaagucaggagaucaagaccauccuggccaa

SEQ ID NO: 511593 - RNA, 32 nt, Human
ugaagucaggaguucaagaccaaccugggcaa

SEQ ID NO: 511594 - RNA, 32 nt, Human
ugaagucaggaguucaagaccagccuggccaa

SEQ ID NO: 511595 - RNA, 32 nt, Human
ugaagucaggaguucaagaccauccuggccaa

SEQ ID NO: 511596 - RNA, 32 nt, Human
ugaagucaggaguucaagccuagccuggccaa

SEQ ID NO: 511597 - RNA, 32 nt, Human
ugaagucaggaguuccagaccaaccuggccaa

SEQ ID NO: 511598 - RNA, 31 nt, Human
ugaagucagugcaaggaggaaugagaggugg

SEQ ID NO: 511599 - RNA, 32 nt, Human
ugaagucauauguacacagaagugagucacca

SEQ ID NO: 511600 - RNA, 32 nt, Human
ugaagucaugccacugcacucaaaccuggcgg

SEQ ID NO: 511601 - RNA, 32 nt, Human
ugaaguccaagaguucgagaccggccugcgag

SEQ ID NO: 511602 - RNA, 32 nt, Human
ugaaguccagcugaguucagugaggacgaugg

SEQ ID NO: 511603 - RNA, 32 nt, Human
ugaaguccaggcuccccaggaagccuggggug

SEQ ID NO: 511604 - RNA, 32 nt, Human
ugaaguccaucuggucucucaguggccugaga

SEQ ID NO: 511605 - RNA, 32 nt, Human
ugaagucccaggcugggggugucaauggacgu

SEQ ID NO: 511606 - RNA, 32 nt, Human
ugaagucccgccacugcacuccagccugggca

SEQ ID NO: 511607 - RNA, 32 nt, Human
ugaagucccgggcugcucucagcacuucuccu

SEQ ID NO: 511608 - RNA, 32 nt, Human
ugaagucccucucacucccucuaccucccucu

SEQ ID NO: 511609 - RNA, 32 nt, Human
ugaaguccgcccuccccuccagccauaucugc

SEQ ID NO: 511610 - RNA, 32 nt, Human
ugaaguccuaucuguaccaacaagcaaggcca

SEQ ID NO: 511611 - RNA, 32 nt, Human
ugaaguccugcaaaggugauggugguccagac

SEQ ID NO: 511612 - RNA, 32 nt, Human
ugaaguccuguggcuaguggcagagaaguugg

SEQ ID NO: 511613 - RNA, 32 nt, Human
ugaaguccuuugucacuucucuugccuuagug

SEQ ID NO: 511614 - RNA, 32 nt, Human
ugaagucuaccauuaccagcugggucaccuug

SEQ ID NO: 511615 - RNA, 32 nt, Human
ugaagucuagcaugugggaggcugaggaugga

SEQ ID NO: 511616 - RNA, 32 nt, Human
ugaagucucacaccccuuccauuuguugccua

SEQ ID NO: 511617 - RNA, 32 nt, Human
ugaagucucacugcugagccuucagcuuuuau

SEQ ID NO: 511618 - RNA, 32 nt, Human
ugaagucucacuguguugcccagccugggugu

SEQ ID NO: 511619 - RNA, 32 nt, Human
ugaagucucaggagucucugguagccugcaga

SEQ ID NO: 511620 - RNA, 32 nt, Human
ugaagucuccgcaggaggcuucagagauauac

SEQ ID NO: 511621 - RNA, 32 nt, Human
ugaagucuccuucccuccuuuagaacucauuu

SEQ ID NO: 511622 - RNA, 32 nt, Human
ugaagucugaagaugucgccauugaacggaca

SEQ ID NO: 511623 - RNA, 32 nt, Human
ugaagucuguaauccuagcacuuugggaggcc

SEQ ID NO: 511624 - RNA, 32 nt, Human
ugaagucuguucugcaguaucuguugcugaau

SEQ ID NO: 511625 - RNA, 32 nt, Human
ugaagucuuaacccuugguaccacagaauauc

SEQ ID NO: 511626 - RNA, 32 nt, Human
ugaagucuucaaguccccagcaaccaaguugg

SEQ ID NO: 511627 - RNA, 22 nt, Human
ugaagugaagauugucagcaaa

SEQ ID NO: 511628 - RNA, 32 nt, Human
ugaagugaaggcugcucaucuggguucauuuu

SEQ ID NO: 511629 - RNA, 32 nt, Human
ugaagugaaugagacacuccaguuuuccuucu

SEQ ID NO: 511630 - RNA, 32 nt, Human
ugaagugaccaagcccuugaucagcuuuaaaa

SEQ ID NO: 511631 - RNA, 32 nt, Human
ugaagugacccccauuccccaaagcaaucaaa

SEQ ID NO: 511632 - RNA, 32 nt, Human
ugaagugacgggccgccuucugcuccagcugc

SEQ ID NO: 511633 - RNA, 19 nt, Human
ugaagugacugagaaucua

SEQ ID NO: 511634 - RNA, 32 nt, Human
ugaagugauaggggucacaauggggaaaugga

SEQ ID NO: 511635 - RNA, 32 nt, Human
ugaagugauaggggucacaauggggaaauuga

SEQ ID NO: 511636 - RNA, 32 nt, Human
ugaagugcaauguugugaucucggcucacugc

SEQ ID NO: 511637 - RNA, 32 nt, Human
ugaagugcagcggcaugaucucagcucacugc

SEQ ID NO: 511638 - RNA, 32 nt, Human
ugaagugcagugagucaagauugagccacugc

SEQ ID NO: 511639 - RNA, 32 nt, Human
ugaagugcaguggcacaaucauagcucgcugc

SEQ ID NO: 511640 - RNA, 32 nt, Human
ugaagugcaguggcacgaucauagguggucac

SEQ ID NO: 511641 - RNA, 32 nt, Human
ugaagugcaguggcaugaacucagcucacugc

SEQ ID NO: 511642 - RNA, 32 nt, Human
ugaagugcaguggcaugaucucagcuuacugc

SEQ ID NO: 511643 - RNA, 32 nt, Human
ugaagugcaguggcaugauucuggcucacugc

SEQ ID NO: 511644 - RNA, 32 nt, Human
ugaagugcagugguacgaucauagcucacugc

SEQ ID NO: 511645 - RNA, 32 nt, Human
ugaagugcaguggugugaucuuggcucacugc

SEQ ID NO: 511646 - RNA, 32 nt, Human
ugaagugcaguggugugauuacagcucaugua

SEQ ID NO: 511647 - RNA, 32 nt, Human
ugaagugccacugggucaccgcagggcagcug

SEQ ID NO: 511648 - RNA, 32 nt, Human
ugaagugcccagcgcuggagugcagcgugcca

SEQ ID NO: 511649 - RNA, 32 nt, Human
ugaaguggagagaagggaaaguaguuaagaaa

SEQ ID NO: 511650 - RNA, 32 nt, Human
ugaaguggagagaucgccugagcccaggaggu

SEQ ID NO: 511651 - RNA, 32 nt, Human
ugaaguggcaaagucccugaggacucacugga

SEQ ID NO: 511652 - RNA, 32 nt, Human
ugaaguggcucacaccuguaaucccagcacug

SEQ ID NO: 511653 - RNA, 32 nt, Human
ugaaguggcucacgccuguaauccccgcacuu

SEQ ID NO: 511654 - RNA, 32 nt, Human
ugaaguggcuguguucacccuggguggacacg

SEQ ID NO: 511655 - RNA, 32 nt, Human
ugaagugggaagaucacuugagcccaggaguu

SEQ ID NO: 511656 - RNA, 32 nt, Human
ugaagugggagccacagcuaggaguggcucau

SEQ ID NO: 511657 - RNA, 32 nt, Human
ugaagugggaggacugcuugagccugggaagu

SEQ ID NO: 511658 - RNA, 32 nt, Human
ugaagugggaggacugcuugggcccaggaauu

SEQ ID NO: 511659 - RNA, 32 nt, Human
ugaagugggaggaguguuugagcccaggaguu

SEQ ID NO: 511660 - RNA, 32 nt, Human
ugaagugggaggaucaccugagcucuggaggu

SEQ ID NO: 511661 - RNA, 32 nt, Human
ugaagugggaggaucauuugugcccagguuga

SEQ ID NO: 511662 - RNA, 32 nt, Human
ugaagugggaggaucccuugagcccagaacuu

SEQ ID NO: 511663 - RNA, 32 nt, Human
ugaagugggaggaucccuugagcucaggaguu

SEQ ID NO: 511664 - RNA, 32 nt, Human
ugaagugggaggaucgcuugagcccaggaguu

SEQ ID NO: 511665 - RNA, 32 nt, Human
ugaagugggaggaucgcuugagccugggaguu

SEQ ID NO: 511666 - RNA, 32 nt, Human
ugaagugggaggaucucucgggccagggaggu

SEQ ID NO: 511667 - RNA, 32 nt, Human
ugaagugggaggauggccugagcucaaggaga

SEQ ID NO: 511668 - RNA, 32 nt, Human
ugaagugggaggauugcuugagccggggaggu

SEQ ID NO: 511669 - RNA, 31 nt, Human
ugaagugggucaaaagaauuagauguacagu

SEQ ID NO: 511670 - RNA, 32 nt, Human
ugaagugggugaaucacuugaggucaggaguu

SEQ ID NO: 511671 - RNA, 32 nt, Human
ugaagugggugagggagacgcuucaguuuuag

SEQ ID NO: 511672 - RNA, 24 nt, Human
ugaaguggguggaucaccugaggu

SEQ ID NO: 511673 - RNA, 32 nt, Human
ugaagugguggaagguugaucucaggauauga

SEQ ID NO: 511674 - RNA, 32 nt, Human
ugaagugguggagaaggaaggcaggcuuaaag

SEQ ID NO: 511675 - RNA, 32 nt, Human
ugaagugguucacccuugaggaccaggagccu

SEQ ID NO: 511676 - RNA, 32 nt, Human
ugaaguguaaacuugugucugaauguuuuauu

SEQ ID NO: 511677 - RNA, 32 nt, Human
ugaaguguaguggcauccauuucuaauguaug

SEQ ID NO: 511678 - RNA, 32 nt, Human
ugaaguguauagcacuugccuuuacuagauau

SEQ ID NO: 511679 - RNA, 19 nt, Human
ugaaguguccugggccuuc

SEQ ID NO: 511680 - RNA, 32 nt, Human
ugaagugucucuucugugaaaggguucagagc

SEQ ID NO: 511681 - RNA, 32 nt, Human
ugaagugucugugagaccucacagaagagcac

SEQ ID NO: 511682 - RNA, 32 nt, Human
ugaaguguggagcgggaaaggagcaguuucug

SEQ ID NO: 511683 - RNA, 32 nt, Human
ugaagugugggacacaguugagcucaguaauc

SEQ ID NO: 511684 - RNA, 32 nt, Human
ugaagugugguguugggcagccccugggcgua

SEQ ID NO: 511685 - RNA, 32 nt, Human
ugaagugugugaagcucugugcuugcaugagg

SEQ ID NO: 511686 - RNA, 32 nt, Human
ugaaguguguguuuugccuccuuucccagugu

SEQ ID NO: 511687 - RNA, 32 nt, Human
ugaaguguguuuuauggacuaggaagcauuuu

SEQ ID NO: 511688 - RNA, 32 nt, Human
ugaaguguuuaggugaaggacaaguagguaag

SEQ ID NO: 511689 - RNA, 32 nt, Human
ugaaguuagccaagguugcuuuuguguuauaa

SEQ ID NO: 511690 - RNA, 32 nt, Human
ugaaguuagggaugacugugauuuucagaaca

SEQ ID NO: 511691 - RNA, 32 nt, Human
ugaaguucaaaccaaggaaacacugccaucuu

SEQ ID NO: 511692 - RNA, 32 nt, Human
ugaaguucaccaaaucagcgcagcuuauuaag

SEQ ID NO: 511693 - RNA, 32 nt, Human
ugaaguucagcacgugcugucguguagucagc

SEQ ID NO: 511694 - RNA, 32 nt, Human
ugaaguucauuuguuuacagggucgggaaugu

SEQ ID NO: 511695 - RNA, 32 nt, Human
ugaaguucgagaccagccuggccaacauggug

SEQ ID NO: 511696 - RNA, 32 nt, Human
ugaaguugaagauacaaccugacagcacagcc

SEQ ID NO: 511697 - RNA, 32 nt, Human
ugaaguugaugaagcaaauaaauauucuggcu

SEQ ID NO: 511698 - RNA, 32 nt, Human
ugaaguugcuaaaaauuuaauuaguugauaga

SEQ ID NO: 511699 - RNA, 32 nt, Human
ugaaguuggagggaggggcagggccuugcagg

SEQ ID NO: 511700 - RNA, 32 nt, Human
ugaaguuggcugacacagcuuagcuugguuuu

SEQ ID NO: 511701 - RNA, 32 nt, Human
ugaaguuggucucuggaccucuccuuacuuau

SEQ ID NO: 511702 - RNA, 32 nt, Human
ugaaguugucaguggcucuuucuguccuucag

SEQ ID NO: 511703 - RNA, 21 nt, Human
ugaaguugugaggcugcucca

SEQ ID NO: 511704 - RNA, 32 nt, Human
ugaaguugugggugcauuggccuaggcugagc

SEQ ID NO: 511705 - RNA, 32 nt, Human
ugaaguuuagagaauccugguauuucagugga

SEQ ID NO: 511706 - RNA, 32 nt, Human
ugaaguuuaguuauaucuucaucuucagauga

SEQ ID NO: 511707 - RNA, 32 nt, Human
ugaaguuucacagcuuggcuucagccuaucag

SEQ ID NO: 511708 - RNA, 32 nt, Human
ugaaguuucuggcauagaguccuggcuucccg

SEQ ID NO: 511709 - RNA, 32 nt, Human
ugaaguuuguacuugagggcagcugggaaauu

SEQ ID NO: 511710 - RNA, 32 nt, Human
ugaaguuuugcagaaauugacugugaaauguc

SEQ ID NO: 511711 - RNA, 32 nt, Human
ugaaguuuuuaaaagcugcuaaagacucggag

SEQ ID NO: 511712 - RNA, 32 nt, Human
ugaauaaaacaacauccaacccaggucauuga

SEQ ID NO: 511713 - RNA, 32 nt, Human
ugaauaaaacauuaaaacaucauauggagaag

SEQ ID NO: 511714 - RNA, 32 nt, Human
ugaauaaaagguggaagugaaaaagaacaaca

SEQ ID NO: 511715 - RNA, 32 nt, Human
ugaauaaaccaguucuacagacugcuucuucc

SEQ ID NO: 511716 - RNA, 32 nt, Human
ugaauaaagauaagaagcaucacugagauaau

SEQ ID NO: 511717 - RNA, 32 nt, Human
ugaauaaauagggaauaauagaauauguuuau

SEQ ID NO: 511718 - RNA, 32 nt, Human
ugaauaaauauugucagccagaaaagguuggu

SEQ ID NO: 511719 - RNA, 27 nt, Human
ugaauaaauuccauauuuuaccuauga

SEQ ID NO: 511720 - RNA, 32 nt, Human
ugaauaacacaaaaucucauucuaccugcagu

SEQ ID NO: 511721 - RNA, 32 nt, Human
ugaauaaccaugggaagugaccaagcaaagac

SEQ ID NO: 511722 - RNA, 32 nt, Human
ugaauaacuaccuguggcauuguugguucuga

SEQ ID NO: 511723 - RNA, 32 nt, Human
ugaauaacugauuugcacagcugaaucaggag

SEQ ID NO: 511724 - RNA, 32 nt, Human
ugaauaacugcacuccagccugggcaacauag

SEQ ID NO: 511725 - RNA, 32 nt, Human
ugaauaagaaucaucagagagcuguauccaug

SEQ ID NO: 511726 - RNA, 32 nt, Human
ugaauaagagauacaaggucucaccuucaucu

SEQ ID NO: 511727 - RNA, 32 nt, Human
ugaauaagaguuccuguagcuccucacccuca

SEQ ID NO: 511728 - RNA, 32 nt, Human
ugaauaagauggcaguguucuccucuggggcc

SEQ ID NO: 511729 - RNA, 32 nt, Human
ugaauaaggugaagaauuucacacaacauaca

SEQ ID NO: 511730 - RNA, 32 nt, Human
ugaauaauauugcagugugucuugucagcugu

SEQ ID NO: 511731 - RNA, 32 nt, Human
ugaauaauccacccuuuguuuagcauauaaac

SEQ ID NO: 511732 - RNA, 32 nt, Human
ugaauaauguggcaauacuuuaaaccaauccu

SEQ ID NO: 511733 - RNA, 32 nt, Human
ugaauacaggcauggaacaaaugaguaugugc

SEQ ID NO: 511734 - RNA, 32 nt, Human
ugaauacaggcuguauggacacuugcuuccau

SEQ ID NO: 511735 - RNA, 31 nt, Human
ugaauacauacuugccauuugaauuaauaac

SEQ ID NO: 511736 - RNA, 32 nt, Human
ugaauacauucugcuuucaucuuggucacaua

SEQ ID NO: 511737 - RNA, 32 nt, Human
ugaauaccaaguguguugggaauugcaugcca

SEQ ID NO: 511738 - RNA, 32 nt, Human
ugaauaccacaguagcauggagugugaccuca

SEQ ID NO: 511739 - RNA, 32 nt, Human
ugaauaccagcaccuauuagguuucauuuugc

SEQ ID NO: 511740 - RNA, 32 nt, Human
ugaauaccauacuaugcccaauacuguuuaaa

SEQ ID NO: 511741 - RNA, 32 nt, Human
ugaauaccugaggcugaguaauuuguaaagaa

SEQ ID NO: 511742 - RNA, 32 nt, Human
ugaauaccuuucaugccacugcagccacugga

SEQ ID NO: 511743 - RNA, 32 nt, Human
ugaauacuccuccccucuucucuuuugccccc

SEQ ID NO: 511744 - RNA, 32 nt, Human
ugaauacugcaacacugucucaaagguuucuu

SEQ ID NO: 511745 - RNA, 32 nt, Human
ugaauacugcugcucacccacagacacaaucu

SEQ ID NO: 511746 - RNA, 32 nt, Human
ugaauagaaugaauaccuuucaugccacugca

SEQ ID NO: 511747 - RNA, 32 nt, Human
ugaauagaguaucaccuuuuucaacaagauuu

SEQ ID NO: 511748 - RNA, 32 nt, Human
ugaauagaugauguuggaagucauggguccuc

SEQ ID NO: 511749 - RNA, 32 nt, Human
ugaauagauuucccuuucuuccugaccccaag

SEQ ID NO: 511750 - RNA, 32 nt, Human
ugaauagcaaacugaggcugaguagggaacag

SEQ ID NO: 511751 - RNA, 32 nt, Human
ugaauagcaauagcaaccauugagcuaaaauu

SEQ ID NO: 511752 - RNA, 32 nt, Human
ugaauagcagaggcaaaggcccucaccccucc

SEQ ID NO: 511753 - RNA, 32 nt, Human
ugaauagcagugagaaauggaugcugucagug

SEQ ID NO: 511754 - RNA, 32 nt, Human
ugaauagcauuuuucuccugccucaucaguca

SEQ ID NO: 511755 - RNA, 32 nt, Human
ugaauagccacugcacuccagccugggcaaca

SEQ ID NO: 511756 - RNA, 32 nt, Human
ugaauagccacugcacuccaucuugggcaaca

SEQ ID NO: 511757 - RNA, 32 nt, Human
ugaauagccacugcacucuagucuggggaaca

SEQ ID NO: 511758 - RNA, 32 nt, Human
ugaauagccacugcacuucagccugggcaaca

SEQ ID NO: 511759 - RNA, 32 nt, Human
ugaauagccacugcacuugagccucuugggaa

SEQ ID NO: 511760 - RNA, 32 nt, Human
ugaauagcucugcuuggacaaugggguugggg

SEQ ID NO: 511761 - RNA, 32 nt, Human
ugaauagcuuccaccuccuuuuuggcccucuu

SEQ ID NO: 511762 - RNA, 32 nt, Human
ugaauagcuuuuccccuuuuugcugacaaaaa

SEQ ID NO: 511763 - RNA, 32 nt, Human
ugaauaggcuucagccucccacugucaguacu

SEQ ID NO: 511764 - RNA, 32 nt, Human
ugaauagggagggagagcacaauucaguccau

SEQ ID NO: 511765 - RNA, 32 nt, Human
ugaauagggggaaacauuggccuuugguucuu

SEQ ID NO: 511766 - RNA, 32 nt, Human
ugaauaguccuaggcuggacagcaaugggcug

SEQ ID NO: 511767 - RNA, 32 nt, Human
ugaauagugcugcagugaacauacacaugcuu

SEQ ID NO: 511768 - RNA, 32 nt, Human
ugaauagugguuuuucucuagcuuuuugccag

SEQ ID NO: 511769 - RNA, 32 nt, Human
ugaauaguugggaauuggaaccccuccagggg

SEQ ID NO: 511770 - RNA, 32 nt, Human
ugaauauaaagucacuuauaaucagaaagcaa

SEQ ID NO: 511771 - RNA, 32 nt, Human
ugaauauacuuccugaaggggagggagaaggg

SEQ ID NO: 511772 - RNA, 32 nt, Human
ugaauauagagccgccagccagaagcucacag

SEQ ID NO: 511773 - RNA, 32 nt, Human
ugaauauaggaggcagagguugcagugagccg

SEQ ID NO: 511774 - RNA, 32 nt, Human
ugaauauaguccagcacagagcuguucaaauu

SEQ ID NO: 511775 - RNA, 32 nt, Human
ugaauauauaaauauuaaguauccucuagcgg

SEQ ID NO: 511776 - RNA, 32 nt, Human
ugaauauauacacacacauacagacacucaua

SEQ ID NO: 511777 - RNA, 32 nt, Human
ugaauaucuaaaaggccagcuaccugccuagg

SEQ ID NO: 511778 - RNA, 32 nt, Human
ugaauaucucuuuugugucuccuuccuaagcc

SEQ ID NO: 511779 - RNA, 32 nt, Human
ugaauaucuguucacuuuucaaucccaauucu

SEQ ID NO: 511780 - RNA, 32 nt, Human
ugaauaugauacaaaugagguuauaguuuaac

SEQ ID NO: 511781 - RNA, 32 nt, Human
ugaauaugccaaaucguacuuauuucagauga

SEQ ID NO: 511782 - RNA, 32 nt, Human
ugaauauggaaaggccagaggcagagugaaau

SEQ ID NO: 511783 - RNA, 32 nt, Human
ugaauauggaacuuaguuacaggacucaauaa

SEQ ID NO: 511784 - RNA, 22 nt, Human
ugaauauggcucguuuuguuuu

SEQ ID NO: 511785 - RNA, 32 nt, Human
ugaauaugggucauuuuagcuuccucaaguaa

SEQ ID NO: 511786 - RNA, 32 nt, Human
ugaauauguuacugaaccuauaguccaguuuu

SEQ ID NO: 511787 - RNA, 32 nt, Human
ugaauauuacuauggaaugauguaauagauuu

SEQ ID NO: 511788 - RNA, 32 nt, Human
ugaauauucaagaucuuucacauugcuuuuga

SEQ ID NO: 511789 - RNA, 32 nt, Human
ugaauauuuuaagagcuucuuucgaaaguuuc

SEQ ID NO: 511790 - RNA, 32 nt, Human
ugaauauuuucccuucaucuaacauugauuga

SEQ ID NO: 511791 - RNA, 32 nt, Human
ugaaucaaaacaaauucaagaaugcaguaucc

SEQ ID NO: 511792 - RNA, 32 nt, Human
ugaaucaaacuaaggguauuggacuuuugaaa

SEQ ID NO: 511793 - RNA, 32 nt, Human
ugaaucaaagaaugagugggcaaguguugauc

SEQ ID NO: 511794 - RNA, 32 nt, Human
ugaaucaacauuucuuccuuaaagcuacacac

SEQ ID NO: 511795 - RNA, 32 nt, Human
ugaaucaagcagcagaauuguacuugauucaa

SEQ ID NO: 511796 - RNA, 32 nt, Human
ugaaucacaacagugcucguuguggacuguaa

SEQ ID NO: 511797 - RNA, 32 nt, Human
ugaaucacacaccaagccccacaaagccccua

SEQ ID NO: 511798 - RNA, 21 nt, Human
ugaaucacaccuguaauccca

SEQ ID NO: 511799 - RNA, 32 nt, Human
ugaaucacaccuguaaucccagcacuuuggga

SEQ ID NO: 511800 - RNA, 32 nt, Human
ugaaucacaguuuuuaaccuguguuugucugc

SEQ ID NO: 511801 - RNA, 32 nt, Human
ugaaucacauaaaagagugccuggcacauagu

SEQ ID NO: 511802 - RNA, 32 nt, Human
ugaaucacauggucuuccgggcagcaggaaca

SEQ ID NO: 511803 - RNA, 32 nt, Human
ugaaucacgguuuuuaaccuguguuugucugc

SEQ ID NO: 511804 - RNA, 32 nt, Human
ugaaucacuuagugugaaagacuugccuugug

SEQ ID NO: 511805 - RNA, 32 nt, Human
ugaaucagaaaccaagaaacacuacuauuaaa

SEQ ID NO: 511806 - RNA, 32 nt, Human
ugaaucagaaaugcuguuuccauaaaggggca

SEQ ID NO: 511807 - RNA, 32 nt, Human
ugaaucagacugccuuuccuuuugucuucauu

SEQ ID NO: 511808 - RNA, 32 nt, Human
ugaaucagccuccccacucuccuuggucauuc

SEQ ID NO: 511809 - RNA, 30 nt, Human
ugaaucagcuucuccauggccugggcacca

SEQ ID NO: 511810 - RNA, 32 nt, Human
ugaaucaggacugaaugugaaagggaaguauu

SEQ ID NO: 511811 - RNA, 32 nt, Human
ugaaucagggaggcggagguuguggugagccg

SEQ ID NO: 511812 - RNA, 32 nt, Human
ugaaucagggcccugcccugcccaccaacucu

SEQ ID NO: 511813 - RNA, 32 nt, Human
ugaaucagggcugcccuuagugacuugcugau

SEQ ID NO: 511814 - RNA, 32 nt, Human
ugaaucaucuccucuguggucuugcccaguac

SEQ ID NO: 511815 - RNA, 24 nt, Human
ugaaucaugguuuuguuuuguuuu

SEQ ID NO: 511816 - RNA, 32 nt, Human
ugaaucaugugacgguggcuugaggaggaacc

SEQ ID NO: 511817 - RNA, 32 nt, Human
ugaaucauuguuaacacagcuguggcucguuu

SEQ ID NO: 511818 - RNA, 32 nt, Human
ugaauccaaacaguauagcuuuuaaauuuuaa

SEQ ID NO: 511819 - RNA, 32 nt, Human
ugaauccaaaccugugucaugccugugugcau

SEQ ID NO: 511820 - RNA, 32 nt, Human
ugaauccacauccugaagggaggcuacaacug

SEQ ID NO: 511821 - RNA, 32 nt, Human
ugaauccacugaguggugaguuccccacagcc

SEQ ID NO: 511822 - RNA, 32 nt, Human
ugaauccagaacuugguguuaagaauggcauc

SEQ ID NO: 511823 - RNA, 32 nt, Human
ugaauccagaaggcggagguugcagugagcug

SEQ ID NO: 511824 - RNA, 32 nt, Human
ugaauccaggaagcagagguugcggugagccg

SEQ ID NO: 511825 - RNA, 32 nt, Human
ugaauccaggagaccccaaccgcugugaugga

SEQ ID NO: 511826 - RNA, 32 nt, Human
ugaauccaggaggaggagguugcagugagccg

SEQ ID NO: 511827 - RNA, 32 nt, Human
ugaauccaggaggcagagcuugcagugagcug

SEQ ID NO: 511828 - RNA, 32 nt, Human
ugaauccaggaggcagaggcuguggugagcca

SEQ ID NO: 511829 - RNA, 32 nt, Human
ugaauccaggaggcagagguugcaaugagcca

SEQ ID NO: 511830 - RNA, 32 nt, Human
ugaauccaggaggcagagguugcagugagugg

SEQ ID NO: 511831 - RNA, 32 nt, Human
ugaauccaggaggcgaagguugcagugagcug

SEQ ID NO: 511832 - RNA, 32 nt, Human
ugaauccaggaggcggagguugcagugaacca

SEQ ID NO: 511833 - RNA, 32 nt, Human
ugaauccaggaggcggagguugcagugagccg

SEQ ID NO: 511834 - RNA, 32 nt, Human
ugaauccaggaggcggaguuuguggugaguug

SEQ ID NO: 511835 - RNA, 32 nt, Human
ugaauccaggagguaaagaugcugugagccga

SEQ ID NO: 511836 - RNA, 32 nt, Human
ugaauccaggagguggagccugcagugagcca

SEQ ID NO: 511837 - RNA, 32 nt, Human
ugaauccaggagguggagcuugcagugagccg

SEQ ID NO: 511838 - RNA, 32 nt, Human
ugaauccaggagguggagguugcagcgagcca

SEQ ID NO: 511839 - RNA, 32 nt, Human
ugaauccaggagguggagguugcagugagcug

SEQ ID NO: 511840 - RNA, 32 nt, Human
ugaauccaggaguucaagaccagcauggggaa

SEQ ID NO: 511841 - RNA, 32 nt, Human
ugaauccagguggcggagguugcagugagccg

SEQ ID NO: 511842 - RNA, 32 nt, Human
ugaauccagugguggagguugcagugagccaa

SEQ ID NO: 511843 - RNA, 32 nt, Human
ugaauccauacaguuucuuaaaagacaauaaa

SEQ ID NO: 511844 - RNA, 32 nt, Human
ugaauccauggauguggaacccauggauguga

SEQ ID NO: 511845 - RNA, 32 nt, Human
ugaauccauucccaucaguccauuccaguugg

SEQ ID NO: 511846 - RNA, 32 nt, Human
ugaauccauugaaacuaggggucuccagugcu

SEQ ID NO: 511847 - RNA, 32 nt, Human
ugaaucccagaacugguaagauugggaaucug

SEQ ID NO: 511848 - RNA, 32 nt, Human
ugaaucccaggagacagagguugcagugagcc

SEQ ID NO: 511849 - RNA, 32 nt, Human
ugaauccccgaggcggagguugcacugagccg

SEQ ID NO: 511850 - RNA, 32 nt, Human
ugaaucccugaacagagaauaucucuuguaaa

SEQ ID NO: 511851 - RNA, 32 nt, Human
ugaaucccugagaagagagagcauggggcgug

SEQ ID NO: 511852 - RNA, 32 nt, Human
ugaaucccugaggcagagguugcagugagcug

SEQ ID NO: 511853 - RNA, 32 nt, Human
ugaaucccugggagcgccugacccuggugggc

SEQ ID NO: 511854 - RNA, 32 nt, Human
ugaauccgggaagcagagguuguagugagcca

SEQ ID NO: 511855 - RNA, 32 nt, Human
ugaauccgggaggcagagauugcagugggccu

SEQ ID NO: 511856 - RNA, 32 nt, Human
ugaauccgggaggcagagguugcaggagcuga

SEQ ID NO: 511857 - RNA, 32 nt, Human
ugaauccgggaggcggagcuugcagcgagccg

SEQ ID NO: 511858 - RNA, 32 nt, Human
ugaauccgggaggcggagguugcagugaaccg

SEQ ID NO: 511859 - RNA, 32 nt, Human
ugaauccgggaggcggagguugcggugagcca

SEQ ID NO: 511860 - RNA, 32 nt, Human
ugaauccgggaggcgggucuugcagugagcag

SEQ ID NO: 511861 - RNA, 32 nt, Human
ugaauccgggagguggagguugcagugagcca

SEQ ID NO: 511862 - RNA, 32 nt, Human
ugaauccgugagguggagguuguagugaguca

SEQ ID NO: 511863 - RNA, 32 nt, Human
ugaauccucauuuuacuccuuguuaucccaga

SEQ ID NO: 511864 - RNA, 32 nt, Human
ugaauccugccccucugguguggugcggccuc

SEQ ID NO: 511865 - RNA, 32 nt, Human
ugaauccuggaggcagagguugcagugagcug

SEQ ID NO: 511866 - RNA, 32 nt, Human
ugaauccugguaaacuuaaccaggacuccaau

SEQ ID NO: 511867 - RNA, 32 nt, Human
ugaauccuuagcagcgaucuccaagggcacca

SEQ ID NO: 511868 - RNA, 32 nt, Human
ugaauccuuccucuccccuccucccaucccuc

SEQ ID NO: 511869 - RNA, 32 nt, Human
ugaauccuuccucuccccuccucccauccuuc

SEQ ID NO: 511870 - RNA, 32 nt, Human
ugaaucgggcucucugcucucuccuuagggag

SEQ ID NO: 511871 - RNA, 32 nt, Human
ugaaucgucaaagguacgggccagcuugugcc

SEQ ID NO: 511872 - RNA, 32 nt, Human
ugaaucguguuugguuucucguucuacuccag

SEQ ID NO: 511873 - RNA, 32 nt, Human
ugaaucuaagaagcagagguugcagugagcug

SEQ ID NO: 511874 - RNA, 32 nt, Human
ugaaucuaggaggcagagguugcagugaacug

SEQ ID NO: 511875 - RNA, 32 nt, Human
ugaaucucagcaguuccgccaucuugaagaau

SEQ ID NO: 511876 - RNA, 32 nt, Human
ugaaucucauucucuuagcugggcgugcaaca

SEQ ID NO: 511877 - RNA, 32 nt, Human
ugaaucuccaaccuuaaauccugaaacagugg

SEQ ID NO: 511878 - RNA, 32 nt, Human
ugaaucucccuccaacccuucuugccuacucc

SEQ ID NO: 511879 - RNA, 21 nt, Human
ugaaucuccucuuggagcauu

SEQ ID NO: 511880 - RNA, 32 nt, Human
ugaaucuccugggaauaauucugcucucugga

SEQ ID NO: 511881 - RNA, 32 nt, Human
ugaaucucuaccagcugcucccagaaucacag

SEQ ID NO: 511882 - RNA, 32 nt, Human
ugaaucucucagacuugaccuguccaaacugc

SEQ ID NO: 511883 - RNA, 32 nt, Human
ugaaucucuccucuccuccuugucuggcucug

SEQ ID NO: 511884 - RNA, 32 nt, Human
ugaaucucuguuuuagggguuggggcuagugu

SEQ ID NO: 511885 - RNA, 32 nt, Human
ugaaucucuuucuggauugcucuuggguacaa

SEQ ID NO: 511886 - RNA, 32 nt, Human
ugaaucugaacaucucuccaucuagagcccaa

SEQ ID NO: 511887 - RNA, 32 nt, Human
ugaaucugagaucuaugaggcaggagcuaagg

SEQ ID NO: 511888 - RNA, 32 nt, Human
ugaaucugagaucuaugaggcaggagcugagg

SEQ ID NO: 511889 - RNA, 32 nt, Human
ugaaucugcccuuuaauaaagcauuauugaga

SEQ ID NO: 511890 - RNA, 32 nt, Human
ugaaucugccucucucugccucuuuucuccug

SEQ ID NO: 511891 - RNA, 32 nt, Human
ugaaucuggaaagaggagaaggacaugaauug

SEQ ID NO: 511892 - RNA, 32 nt, Human
ugaaucuggaagcaagaggaccugagccagau

SEQ ID NO: 511893 - RNA, 32 nt, Human
ugaaucuggagaagaaaagggagauuugaaac

SEQ ID NO: 511894 - RNA, 32 nt, Human
ugaaucugggaagcggagguugcagugagcug

SEQ ID NO: 511895 - RNA, 32 nt, Human
ugaaucugggaggcagagguugcagugagccg

SEQ ID NO: 511896 - RNA, 32 nt, Human
ugaaucugggaggcagagguugcagugagcug

SEQ ID NO: 511897 - RNA, 32 nt, Human
ugaaucugggaggcagagguugcugugagccg

SEQ ID NO: 511898 - RNA, 32 nt, Human
ugaaucugggaggcggagauugcagugagccg

SEQ ID NO: 511899 - RNA, 32 nt, Human
ugaaucugggaggcggagguugcagugagcca

SEQ ID NO: 511900 - RNA, 32 nt, Human
ugaaucugggagggaaguggagguugcuguac

SEQ ID NO: 511901 - RNA, 32 nt, Human
ugaaucugggagguggagguugcagugagcca

SEQ ID NO: 511902 - RNA, 32 nt, Human
ugaaucugucaagcuucaagaauaccagagaa

SEQ ID NO: 511903 - RNA, 32 nt, Human
ugaaucugucccucgugacaauuauaggagga

SEQ ID NO: 511904 - RNA, 32 nt, Human
ugaaucuuaaaagaaaaggauauuuauuagau

SEQ ID NO: 511905 - RNA, 32 nt, Human
ugaaucuuauagaacuagagaacuagagcaaa

SEQ ID NO: 511906 - RNA, 32 nt, Human
ugaaucuuauucccucacccuucccugauucu

SEQ ID NO: 511907 - RNA, 32 nt, Human
ugaaucuuccaaauugaagccauuauucucaa

SEQ ID NO: 511908 - RNA, 32 nt, Human
ugaaucuuccugccccuccucacugcuuaacc

SEQ ID NO: 511909 - RNA, 32 nt, Human
ugaaucuucucccuuguccugcuugggguuca

SEQ ID NO: 511910 - RNA, 32 nt, Human
ugaaucuugagagagaggagauccuccaaguu

SEQ ID NO: 511911 - RNA, 32 nt, Human
ugaaucuugcugcugcucacucuuugggucca

SEQ ID NO: 511912 - RNA, 32 nt, Human
ugaaucuugugagcacuuacgcuaggagaaau

SEQ ID NO: 511913 - RNA, 32 nt, Human
ugaaucuuuccaagcaccacuucggacacacc

SEQ ID NO: 511914 - RNA, 32 nt, Human
ugaaugaaaccaggccauagcugucauaaauc

SEQ ID NO: 511915 - RNA, 32 nt, Human
ugaaugaaacuauaguuccauuuggaagccca

SEQ ID NO: 511916 - RNA, 32 nt, Human
ugaaugaaagaaugguuuacuuuagaaguccc

SEQ ID NO: 511917 - RNA, 32 nt, Human
ugaaugaaccuugcugaauuaaucugaauagc

SEQ ID NO: 511918 - RNA, 32 nt, Human
ugaaugaagaauuuuuagcugugcagauaggu

SEQ ID NO: 511919 - RNA, 32 nt, Human
ugaaugaagaggaguaggaaggaaaauggaau

SEQ ID NO: 511920 - RNA, 32 nt, Human
ugaaugaagggccacagaaaaugaagcuggcg

SEQ ID NO: 511921 - RNA, 32 nt, Human
ugaaugaaggggcagcuggaggauguggugga

SEQ ID NO: 511922 - RNA, 32 nt, Human
ugaaugaaguggagagaagggaaaguaguuaa

SEQ ID NO: 511923 - RNA, 32 nt, Human
ugaaugaauaagaggauguggcacugagcgcc

SEQ ID NO: 511924 - RNA, 32 nt, Human
ugaaugaauagaaguggugagagcagccaccc

SEQ ID NO: 511925 - RNA, 32 nt, Human
ugaaugacacagauuugccagaugacauguag

SEQ ID NO: 511926 - RNA, 32 nt, Human
ugaaugacaugcaacaggugaagguuuauacg

SEQ ID NO: 511927 - RNA, 32 nt, Human
ugaaugacccacccuuccugauuuuaaguaua

SEQ ID NO: 511928 - RNA, 32 nt, Human
ugaaugacccuccaacagccccacauggguug

SEQ ID NO: 511929 - RNA, 32 nt, Human
ugaaugagaacugcaggaguuucuccucuggg

SEQ ID NO: 511930 - RNA, 32 nt, Human
ugaaugagaugguuccugcugaagacauuuac

SEQ ID NO: 511931 - RNA, 32 nt, Human
ugaaugagcagaagaaaauuauuacuggagau

SEQ ID NO: 511932 - RNA, 32 nt, Human
ugaaugagcccuggagcccccuccaguccagu

SEQ ID NO: 511933 - RNA, 32 nt, Human
ugaaugaggaauguguuugugaaugccucaug

SEQ ID NO: 511934 - RNA, 32 nt, Human
ugaaugaggcacagccguagagcuguggcuaa

SEQ ID NO: 511935 - RNA, 32 nt, Human
ugaaugaguuuagugccacagcauuaaaugua

SEQ ID NO: 511936 - RNA, 32 nt, Human
ugaaugauacagugugcauucucuccagcugc

SEQ ID NO: 511937 - RNA, 32 nt, Human
ugaaugaucaguggaggacuugcccacgugag

SEQ ID NO: 511938 - RNA, 32 nt, Human
ugaaugaugucggacauguuacugaacuucca

SEQ ID NO: 511939 - RNA, 32 nt, Human
ugaaugauucacgaaucaggcagcccccagaa

SEQ ID NO: 511940 - RNA, 32 nt, Human
ugaaugcaagaaguggggcagcagcaguggag

SEQ ID NO: 511941 - RNA, 32 nt, Human
ugaaugcacacaugcagaaaugcagagucaau

SEQ ID NO: 511942 - RNA, 32 nt, Human
ugaaugcaccaccaccauuuaaccacccugcc

SEQ ID NO: 511943 - RNA, 32 nt, Human
ugaaugcacuuuuuaugacaaugauucaguaa

SEQ ID NO: 511944 - RNA, 32 nt, Human
ugaaugcagaaaacagggucugggacauuagu

SEQ ID NO: 511945 - RNA, 32 nt, Human
ugaaugcagaagcagagccacugugaaguaag

SEQ ID NO: 511946 - RNA, 32 nt, Human
ugaaugcagccaucugagcaagggcugaggga

SEQ ID NO: 511947 - RNA, 32 nt, Human
ugaaugcagcuuugccaguggcauaucuguca

SEQ ID NO: 511948 - RNA, 32 nt, Human
ugaaugcagguugcugcagcucugccuucucc

SEQ ID NO: 511949 - RNA, 32 nt, Human
ugaaugcauaaauauguauaaugugagaauau

SEQ ID NO: 511950 - RNA, 32 nt, Human
ugaaugccaggcacuggcaugcugggucaugg

SEQ ID NO: 511951 - RNA, 32 nt, Human
ugaaugccaggcuaggaaggaggcggcucucg

SEQ ID NO: 511952 - RNA, 32 nt, Human
ugaaugccccacugcacuccagccugggcgac

SEQ ID NO: 511953 - RNA, 32 nt, Human
ugaaugccggcguggggagcugcacugcacca

SEQ ID NO: 511954 - RNA, 32 nt, Human
ugaaugccuaucuuccuuuugugccucggaac

SEQ ID NO: 511955 - RNA, 32 nt, Human
ugaaugccuuaaaugucccagguauugagaau

SEQ ID NO: 511956 - RNA, 32 nt, Human
ugaaugccuuggagggaucccaggaagcccca

SEQ ID NO: 511957 - RNA, 32 nt, Human
ugaaugcguucugcagcauguagcaugcccac

SEQ ID NO: 511958 - RNA, 21 nt, Human
ugaaugcugaaaagcuacuag

SEQ ID NO: 511959 - RNA, 32 nt, Human
ugaaugcugagcagaggcucucagcagagggg

SEQ ID NO: 511960 - RNA, 32 nt, Human
ugaaugcugagugagcgaguaagggaggaggg

SEQ ID NO: 511961 - RNA, 32 nt, Human
ugaaugcuggaaauggcuucauagugaagugc

SEQ ID NO: 511962 - RNA, 32 nt, Human
ugaaugcugucuugacaucucuugccuugucc

SEQ ID NO: 511963 - RNA, 32 nt, Human
ugaaugcuuaaaguaagaucuauucaugaaac

SEQ ID NO: 511964 - RNA, 32 nt, Human
ugaauggaaaccccggucccuggcagaaguau

SEQ ID NO: 511965 - RNA, 32 nt, Human
ugaauggaaaguugauuuugucuguauuugaa

SEQ ID NO: 511966 - RNA, 32 nt, Human
ugaauggagacaggguuucaacauguuggcca

SEQ ID NO: 511967 - RNA, 32 nt, Human
ugaauggagagauugagagggaugucgggcag

SEQ ID NO: 511968 - RNA, 32 nt, Human
ugaauggagaggacaaaggcagcuucugacac

SEQ ID NO: 511969 - RNA, 32 nt, Human
ugaauggagaggaggaagaaaaugaagaagga

SEQ ID NO: 511970 - RNA, 32 nt, Human
ugaauggagccucuacccucuggaugccuuuc

SEQ ID NO: 511971 - RNA, 32 nt, Human
ugaauggagcuuauuacuggggugagggacag

SEQ ID NO: 511972 - RNA, 32 nt, Human
ugaauggagugagaagacagcccaguggaaug

SEQ ID NO: 511973 - RNA, 32 nt, Human
ugaauggaugaaaccauugcauucuuguacac

SEQ ID NO: 511974 - RNA, 31 nt, Human
ugaauggcagaaaggcgccuaccucaaggac

SEQ ID NO: 511975 - RNA, 32 nt, Human
ugaauggcauugaaugguucaucuuaaauggg

SEQ ID NO: 511976 - RNA, 32 nt, Human
ugaauggccaaaacauuugacuccagugaggg

SEQ ID NO: 511977 - RNA, 32 nt, Human
ugaauggccaauccuuccaucuggaggccugg

SEQ ID NO: 511978 - RNA, 32 nt, Human
ugaauggccccagacugguugcagcugggcuu

SEQ ID NO: 511979 - RNA, 32 nt, Human
ugaauggcuccaccccucccccagcccugcuu

SEQ ID NO: 511980 - RNA, 32 nt, Human
ugaauggcugcucuaucuugggcuguaucaag

SEQ ID NO: 511981 - RNA, 32 nt, Human
ugaauggcuggcaguccuccagcauguggucu

SEQ ID NO: 511982 - RNA, 32 nt, Human
ugaauggcuggccugugguggaugggugcucu

SEQ ID NO: 511983 - RNA, 32 nt, Human
ugaauggcuuuguauagaaccucuuugucuac

SEQ ID NO: 511984 - RNA, 32 nt, Human
ugaaugggaagagcccauaacagaaugaccua

SEQ ID NO: 511985 - RNA, 32 nt, Human
ugaaugggaaggggaaggaauuaauguggaau

SEQ ID NO: 511986 - RNA, 19 nt, Human
ugaaugggacugaguccca

SEQ ID NO: 511987 - RNA, 32 nt, Human
ugaaugggagguggaggaggguugcagcuccc

SEQ ID NO: 511988 - RNA, 32 nt, Human
ugaaugggccuuuuuaucuucccacuguauca

SEQ ID NO: 511989 - RNA, 32 nt, Human
ugaauggggagguauaaaaagcaaagauuauu

SEQ ID NO: 511990 - RNA, 32 nt, Human
ugaauggggagguggaacuugauuggaccugu

SEQ ID NO: 511991 - RNA, 32 nt, Human
ugaauggggcagcguggagaaauccuaagaga

SEQ ID NO: 511992 - RNA, 32 nt, Human
ugaauggguagaaaaugaauuugcuagaacac

SEQ ID NO: 511993 - RNA, 32 nt, Human
ugaaugggucucaaagacuuggugaccccagc

SEQ ID NO: 511994 - RNA, 32 nt, Human
ugaauggguggccuguggugaauggcuggccu

SEQ ID NO: 511995 - RNA, 23 nt, Human
ugaauggguuguuaaaggcaaug

SEQ ID NO: 511996 - RNA, 32 nt, Human
ugaaugguacuguaccgguucaucuggacugc

SEQ ID NO: 511997 - RNA, 32 nt, Human
ugaaugguccagggaugagcagugaugccuca

SEQ ID NO: 511998 - RNA, 32 nt, Human
ugaauggucucuuugccuucaggcuggaugag

SEQ ID NO: 511999 - RNA, 32 nt, Human
ugaaugguggauugcacaucugaaaaggcuag

SEQ ID NO: 512000 - RNA, 32 nt, Human
ugaaugguggucuuugcaaagagcauuuauau

SEQ ID NO: 512001 - RNA, 32 nt, Human
ugaauggugugcuccccucugugucuccaugg

SEQ ID NO: 512002 - RNA, 32 nt, Human
ugaaugguuagccuggugugguggugcacacc

SEQ ID NO: 512003 - RNA, 32 nt, Human
ugaaugguugacugaauuaagcugacacaaag

SEQ ID NO: 512004 - RNA, 32 nt, Human
ugaauguaaaguuacacuguucacaaagguuu

SEQ ID NO: 512005 - RNA, 32 nt, Human
ugaauguaaugcuggggacaggcaugcugccg

SEQ ID NO: 512006 - RNA, 32 nt, Human
ugaauguaccuacuagggcaccauaauacugc

SEQ ID NO: 512007 - RNA, 32 nt, Human
ugaauguagagaaauucaccagagcucacugc

SEQ ID NO: 512008 - RNA, 32 nt, Human
ugaauguagagacccgugggcacuuuuccuuu

SEQ ID NO: 512009 - RNA, 32 nt, Human
ugaauguagccccugacacauacaggccagag

SEQ ID NO: 512010 - RNA, 32 nt, Human
ugaauguauccgccucgguucccaccacugcc

SEQ ID NO: 512011 - RNA, 32 nt, Human
ugaaugucaccaggagaggugggggagggaaa

SEQ ID NO: 512012 - RNA, 31 nt, Human
ugaaugucagaaaauaccuuuuggaggguua

SEQ ID NO: 512013 - RNA, 32 nt, Human
ugaaugucaggaggaagucacagggaguuuug

SEQ ID NO: 512014 - RNA, 32 nt, Human
ugaaugucagugugacugaucucucgugauug

SEQ ID NO: 512015 - RNA, 32 nt, Human
ugaaugucauaauugcagugacaggacauugc

SEQ ID NO: 512016 - RNA, 32 nt, Human
ugaaugucauggagcccagcugaaauggacug

SEQ ID NO: 512017 - RNA, 32 nt, Human
ugaaugucccuggauauggaagagaggaaaug

SEQ ID NO: 512018 - RNA, 32 nt, Human
ugaaugucuaaggucacacaguauuaagugac

SEQ ID NO: 512019 - RNA, 32 nt, Human
ugaaugucucaaaaccuuacacccugggaaua

SEQ ID NO: 512020 - RNA, 32 nt, Human
ugaaugucucacuacaaaaugacuugagucca

SEQ ID NO: 512021 - RNA, 32 nt, Human
ugaaugucuguagccaaaacuuguuuccacau

SEQ ID NO: 512022 - RNA, 32 nt, Human
ugaaugucuuuccaauggcuggaaaggucccu

SEQ ID NO: 512023 - RNA, 32 nt, Human
ugaaugugagccacuuuccuauauaccacacc

SEQ ID NO: 512024 - RNA, 32 nt, Human
ugaaugugaggugcccaaagagguuauaguga

SEQ ID NO: 512025 - RNA, 32 nt, Human
ugaaugugaugguucucccacagcucgcucug

SEQ ID NO: 512026 - RNA, 32 nt, Human
ugaaugugaugguucuuggaauugggaccuuu

SEQ ID NO: 512027 - RNA, 32 nt, Human
ugaaugugccaugcccucucccucucuggaug

SEQ ID NO: 512028 - RNA, 31 nt, Human
ugaaugugccucucuuucagucucugucucu

SEQ ID NO: 512029 - RNA, 32 nt, Human
ugaaugugcugguuccucccaccaucaagcag

SEQ ID NO: 512030 - RNA, 32 nt, Human
ugaaugugcuuaagcagaucucuugcggcgug

SEQ ID NO: 512031 - RNA, 32 nt, Human
ugaaugugggaaagcuuucccugagaauucac

SEQ ID NO: 512032 - RNA, 32 nt, Human
ugaaugugggaaguccuucagcagcaauucaa

SEQ ID NO: 512033 - RNA, 32 nt, Human
ugaaugugggaggcggagguugcagugaguca

SEQ ID NO: 512034 - RNA, 32 nt, Human
ugaauguguccccuuccccacccucuagugua

SEQ ID NO: 512035 - RNA, 32 nt, Human
ugaauguguggaggggacucugaagcaggugu

SEQ ID NO: 512036 - RNA, 32 nt, Human
ugaauguucuauuauuuuauacauacacauua

SEQ ID NO: 512037 - RNA, 32 nt, Human
ugaauguuuaccaucagcauuauuuuaucauu

SEQ ID NO: 512038 - RNA, 32 nt, Human
ugaauguuuacugugcgucaagcacaguuaau

SEQ ID NO: 512039 - RNA, 32 nt, Human
ugaauguuugaugcuaugaaaagcuuuccaua

SEQ ID NO: 512040 - RNA, 23 nt, Human
ugaauguuuugaugaaaugaaug

SEQ ID NO: 512041 - RNA, 32 nt, Human
ugaauguuuugcaaauguauuggucccugugu

SEQ ID NO: 512042 - RNA, 32 nt, Human
ugaauguuuuucuguaccaucuaugugcaauu

SEQ ID NO: 512043 - RNA, 32 nt, Human
ugaauuaaaaugccugugaacugcaaacuugc

SEQ ID NO: 512044 - RNA, 32 nt, Human
ugaauuaagacaugaaguguguucuguccaua

SEQ ID NO: 512045 - RNA, 32 nt, Human
ugaauuaaugagcagaaagagaggauugguaa

SEQ ID NO: 512046 - RNA, 32 nt, Human
ugaauuacaaggggcuacugaauggcuauuac

SEQ ID NO: 512047 - RNA, 32 nt, Human
ugaauuacacccuuggaaucagcccugaugau

SEQ ID NO: 512048 - RNA, 32 nt, Human
ugaauuacaggcagcuguucaaacucuucagg

SEQ ID NO: 512049 - RNA, 32 nt, Human
ugaauuaccucuuguuucuuucaccuuugaaa

SEQ ID NO: 512050 - RNA, 32 nt, Human
ugaauuacucaaggcugccucucugcaaaguu

SEQ ID NO: 512051 - RNA, 32 nt, Human
ugaauuacugugugaaguucucaccgacaaug

SEQ ID NO: 512052 - RNA, 32 nt, Human
ugaauuacuuucucuucucucuucucaauuuu

SEQ ID NO: 512053 - RNA, 32 nt, Human
ugaauuagaaggcuuuugccuuccauauccau

SEQ ID NO: 512054 - RNA, 32 nt, Human
ugaauuagagcugcuccuacuagauaacugag

SEQ ID NO: 512055 - RNA, 32 nt, Human
ugaauuagcaaacugaauaaacuacagaaauu

SEQ ID NO: 512056 - RNA, 32 nt, Human
ugaauuagcagucccgcaguaacagcagcaga

SEQ ID NO: 512057 - RNA, 31 nt, Human
ugaauuaggcuuucugcuugccaaggccugu

SEQ ID NO: 512058 - RNA, 32 nt, Human
ugaauuagucauucugacauucuuuggaccau

SEQ ID NO: 512059 - RNA, 32 nt, Human
ugaauuaguucagaaauaugggccaaaaagau

SEQ ID NO: 512060 - RNA, 32 nt, Human
ugaauuaguugcugcacuccagccuaggcaac

SEQ ID NO: 512061 - RNA, 32 nt, Human
ugaauuauaccacuggcuuuccugguucucca

SEQ ID NO: 512062 - RNA, 32 nt, Human
ugaauuaucaggagugaacccagaggcacgua

SEQ ID NO: 512063 - RNA, 32 nt, Human
ugaauuaucaggugugaacccacaggcaagua

SEQ ID NO: 512064 - RNA, 32 nt, Human
ugaauuaucugugaauguugggaagaggaaug

SEQ ID NO: 512065 - RNA, 32 nt, Human
ugaauuaugauggucugcauuagucucaugug

SEQ ID NO: 512066 - RNA, 32 nt, Human
ugaauuauggcagaaaggaaaaauaaaacaua

SEQ ID NO: 512067 - RNA, 32 nt, Human
ugaauuaugugcugugucacuguggcuugaag

SEQ ID NO: 512068 - RNA, 32 nt, Human
ugaauucacaccauggcagcuuuuaacuugag

SEQ ID NO: 512069 - RNA, 32 nt, Human
ugaauucacggggcccucugggcacauucauc

SEQ ID NO: 512070 - RNA, 32 nt, Human
ugaauucacuccucagcccuguucagaccagc

SEQ ID NO: 512071 - RNA, 32 nt, Human
ugaauucagaaacuaucccagaucucagcuag

SEQ ID NO: 512072 - RNA, 32 nt, Human
ugaauucagacuccugggcuuaagggauccuu

SEQ ID NO: 512073 - RNA, 32 nt, Human
ugaauucaggaggcggagguugcagugagcca

SEQ ID NO: 512074 - RNA, 32 nt, Human
ugaauucaggagguggagguugcagugagccg

SEQ ID NO: 512075 - RNA, 32 nt, Human
ugaauucagugaacacugguugaggagugccu

SEQ ID NO: 512076 - RNA, 32 nt, Human
ugaauucauucuacucauacuacacacccagu

SEQ ID NO: 512077 - RNA, 32 nt, Human
ugaauuccaagugcuccauuggaucagcuucc

SEQ ID NO: 512078 - RNA, 32 nt, Human
ugaauuccacauuaaauuuucuggcaaaguau

SEQ ID NO: 512079 - RNA, 28 nt, Human
ugaauuccagaguccuuuuggaaaacug

SEQ ID NO: 512080 - RNA, 32 nt, Human
ugaauuccaggugucaagaagccuaggaucug

SEQ ID NO: 512081 - RNA, 32 nt, Human
ugaauuccaggugucaagaagccuagggucug

SEQ ID NO: 512082 - RNA, 32 nt, Human
ugaauuccguacgaugacucugguuuugguca

SEQ ID NO: 512083 - RNA, 32 nt, Human
ugaauuccuucauugacuagcuauuucucuuc

SEQ ID NO: 512084 - RNA, 22 nt, Human
ugaauuccuugcugguacuguc

SEQ ID NO: 512085 - RNA, 32 nt, Human
ugaauucgcgaggcagagguugcagcgaaccc

SEQ ID NO: 512086 - RNA, 32 nt, Human
ugaauucgggagguggagguugcagugagccg

SEQ ID NO: 512087 - RNA, 32 nt, Human
ugaauucuaagacuugaaacaaccugaucauu

SEQ ID NO: 512088 - RNA, 32 nt, Human
ugaauucucacaguggcuuagacaauggagac

SEQ ID NO: 512089 - RNA, 20 nt, Human
ugaauucuccaggugcugcu

SEQ ID NO: 512090 - RNA, 32 nt, Human
ugaauucucuagaccaccaguucuaaccuuca

SEQ ID NO: 512091 - RNA, 32 nt, Human
ugaauucucuagaccagaggugcucugaggau

SEQ ID NO: 512092 - RNA, 32 nt, Human
ugaauucugaagauacagaugacagugacgaa

SEQ ID NO: 512093 - RNA, 32 nt, Human
ugaauucugcagccugcggccauguccagguc

SEQ ID NO: 512094 - RNA, 32 nt, Human
ugaauucugcuccucucucaucaauccaggac

SEQ ID NO: 512095 - RNA, 32 nt, Human
ugaauucuggaaggagggugccugggaggugg

SEQ ID NO: 512096 - RNA, 32 nt, Human
ugaauucuucccaauuuagccuaucuccuuaa

SEQ ID NO: 512097 - RNA, 32 nt, Human
ugaauucuucuagcuccuccaaucccauuuua

SEQ ID NO: 512098 - RNA, 32 nt, Human
ugaauucuuggcccaauuucucucacuucugc

SEQ ID NO: 512099 - RNA, 32 nt, Human
ugaauucuuuugcagaacuacugugugucugu

SEQ ID NO: 512100 - RNA, 32 nt, Human
ugaauugaaaggauuucuucugaaagcuaauu

SEQ ID NO: 512101 - RNA, 32 nt, Human
ugaauugagugacaugagcaggauguggggcc

SEQ ID NO: 512102 - RNA, 32 nt, Human
ugaauugauccaggccacacagcugguaagcg

SEQ ID NO: 512103 - RNA, 32 nt, Human
ugaauugcagcaggaggcagauuuauuccugg

SEQ ID NO: 512104 - RNA, 20 nt, Human
ugaauugccuguucauaaaa

SEQ ID NO: 512105 - RNA, 32 nt, Human
ugaauugcucuucauccauauauagcaauugu

SEQ ID NO: 512106 - RNA, 32 nt, Human
ugaauuggaacuccauaaggaggggccaaauu

SEQ ID NO: 512107 - RNA, 32 nt, Human
ugaauuggaagagggcccagggccgcacaagc

SEQ ID NO: 512108 - RNA, 32 nt, Human
ugaauuggaugcuauggaauaccauacaauga

SEQ ID NO: 512109 - RNA, 32 nt, Human
ugaauuggccacugauuucaauucugcaguau

SEQ ID NO: 512110 - RNA, 32 nt, Human
ugaauuggccagaguuuauccuagauuauuuu

SEQ ID NO: 512111 - RNA, 32 nt, Human
ugaauuggcugccaagaguccaagccaucugg

SEQ ID NO: 512112 - RNA, 32 nt, Human
ugaauuggcuuagucaaugccucacaagcuag

SEQ ID NO: 512113 - RNA, 32 nt, Human
ugaauuggcuuccuugacgcgagaggcucuga

SEQ ID NO: 512114 - RNA, 32 nt, Human
ugaauugggagagagaggccugaaccuguuga

SEQ ID NO: 512115 - RNA, 32 nt, Human
ugaauuggggaggcggagguugcagugagcug

SEQ ID NO: 512116 - RNA, 32 nt, Human
ugaauugggguuccaccaugucacccucaugg

SEQ ID NO: 512117 - RNA, 32 nt, Human
ugaauuggguccuugucauuucuguccaauug

SEQ ID NO: 512118 - RNA, 29 nt, Human
ugaauuggguugugugugcacuggaguca

SEQ ID NO: 512119 - RNA, 32 nt, Human
ugaauuggucacugcaucuuguaucgauuaug

SEQ ID NO: 512120 - RNA, 32 nt, Human
ugaauuggucccagcugcucccagaagaacgg

SEQ ID NO: 512121 - RNA, 32 nt, Human
ugaauuguaauccccaaugcuggagguagggc

SEQ ID NO: 512122 - RNA, 23 nt, Human
ugaauugugauucacugauuuua

SEQ ID NO: 512123 - RNA, 32 nt, Human
ugaauuguguguaugaccucagaacugaaauu

SEQ ID NO: 512124 - RNA, 32 nt, Human
ugaauuguuccacucaauguuccucuuacuua

SEQ ID NO: 512125 - RNA, 32 nt, Human
ugaauuguucucugugcuaggccuuaucuaaa

SEQ ID NO: 512126 - RNA, 32 nt, Human
ugaauuguugcuuggauggaaaaagggcugcc

SEQ ID NO: 512127 - RNA, 32 nt, Human
ugaauuguuggagaauguaaaccgccuccacg

SEQ ID NO: 512128 - RNA, 21 nt, Human
ugaauuguuuuguuuuguuuu

SEQ ID NO: 512129 - RNA, 31 nt, Human
ugaauuuaauucaaggaggaggagaauguuu

SEQ ID NO: 512130 - RNA, 32 nt, Human
ugaauuuacuaucaguuuugccacaaucagug

SEQ ID NO: 512131 - RNA, 32 nt, Human
ugaauuuagagaaacaacaugguuccaagaag

SEQ ID NO: 512132 - RNA, 32 nt, Human
ugaauuuaggcugggugcaguggcucacgccu

SEQ ID NO: 512133 - RNA, 32 nt, Human
ugaauuuauaaaugucauuugcaaccaaauga

SEQ ID NO: 512134 - RNA, 32 nt, Human
ugaauuucacaguuuuugcaccaaaauaaacu

SEQ ID NO: 512135 - RNA, 32 nt, Human
ugaauuucaccucuuacauguaaaggguauaa

SEQ ID NO: 512136 - RNA, 32 nt, Human
ugaauuucagcaggaauaaguuuauuuuaccu

SEQ ID NO: 512137 - RNA, 24 nt, Human
ugaauuucaggauggggacugucu

SEQ ID NO: 512138 - RNA, 32 nt, Human
ugaauuucaggcugggagggagcaauauaacu

SEQ ID NO: 512139 - RNA, 32 nt, Human
ugaauuucaggggcauacaacauucaaaucac

SEQ ID NO: 512140 - RNA, 20 nt, Human
ugaauuucagucugcugcuu

SEQ ID NO: 512141 - RNA, 24 nt, Human
ugaauuuccaguguggucuuguuu

SEQ ID NO: 512142 - RNA, 32 nt, Human
ugaauuuccaugaguuacacuggaugaaaaug

SEQ ID NO: 512143 - RNA, 22 nt, Human
ugaauuucguuuucaaauaucu

SEQ ID NO: 512144 - RNA, 32 nt, Human
ugaauuucuaacaaugcccagugacugucgca

SEQ ID NO: 512145 - RNA, 32 nt, Human
ugaauuucuucccucugcuuccuggacacaga

SEQ ID NO: 512146 - RNA, 32 nt, Human
ugaauuugaacagcucaccacugugccuacau

SEQ ID NO: 512147 - RNA, 32 nt, Human
ugaauuugaacucuggaguuacuguucuacag

SEQ ID NO: 512148 - RNA, 32 nt, Human
ugaauuugagauacaaacauguuccugggauc

SEQ ID NO: 512149 - RNA, 32 nt, Human
ugaauuugauccucugugauugugaugaguuc

SEQ ID NO: 512150 - RNA, 32 nt, Human
ugaauuugcaguugcuccagacuggacugaua

SEQ ID NO: 512151 - RNA, 32 nt, Human
ugaauuugcccagguaggcgugagaguguggg

SEQ ID NO: 512152 - RNA, 32 nt, Human
ugaauuugcuccccuuggaguggggugaggcu

SEQ ID NO: 512153 - RNA, 32 nt, Human
ugaauuuggaaacccauguuggcugucccaaa

SEQ ID NO: 512154 - RNA, 32 nt, Human
ugaauuuggaaagagaacuauccagaaagaua

SEQ ID NO: 512155 - RNA, 32 nt, Human
ugaauuuggaaauuggaggggacgcuggugga

SEQ ID NO: 512156 - RNA, 32 nt, Human
ugaauuuggcaaguguguugcccagugugugc

SEQ ID NO: 512157 - RNA, 32 nt, Human
ugaauuuggguaugaacagauugccugcuuuc

SEQ ID NO: 512158 - RNA, 32 nt, Human
ugaauuuguacaagccacaggaagcuagauug

SEQ ID NO: 512159 - RNA, 32 nt, Human
ugaauuuuaaccccuucuuucacugcauggcc

SEQ ID NO: 512160 - RNA, 21 nt, Human
ugaauuuuacaugguacucuu

SEQ ID NO: 512161 - RNA, 32 nt, Human
ugaauuuucacucauuaccuagaguaaacuua

SEQ ID NO: 512162 - RNA, 32 nt, Human
ugaauuuucuucuuccucuggccuccuucugu

SEQ ID NO: 512163 - RNA, 32 nt, Human
ugaauuuucuucuuggacaccuaauacccaca

SEQ ID NO: 512164 - RNA, 32 nt, Human
ugaauuuugaauucuuaaaauucucacugaca

SEQ ID NO: 512165 - RNA, 32 nt, Human
ugaauuuugagaauuuuauaugaauuuugaga

SEQ ID NO: 512166 - RNA, 32 nt, Human
ugaauuuugaugaguaugccuuaaacaaagaa

SEQ ID NO: 512167 - RNA, 32 nt, Human
ugaauuuuguuuaggcugcaauguuuagcuuu

SEQ ID NO: 512168 - RNA, 32 nt, Human
ugaauuuuuauucuagcaacagccgauaauuu

SEQ ID NO: 512169 - RNA, 32 nt, Human
ugaauuuuuccuuuuuguauuuucuuagcaga

SEQ ID NO: 512170 - RNA, 32 nt, Human
ugaauuuuucuuccucuccacuucuuagaggc

SEQ ID NO: 512171 - RNA, 32 nt, Human
ugacaaaaacucaaugaacuagacauaugaga

SEQ ID NO: 512172 - RNA, 32 nt, Human
ugacaaaaauaacacuguuggcacuuauaggu

SEQ ID NO: 512173 - RNA, 32 nt, Human
ugacaaaacagcacuccacugcuggugaaucc

SEQ ID NO: 512174 - RNA, 32 nt, Human
ugacaaaaggagaccugaauuuuuggaagagc

SEQ ID NO: 512175 - RNA, 32 nt, Human
ugacaaaaggucccaguuuggccaggggugag

SEQ ID NO: 512176 - RNA, 32 nt, Human
ugacaaacaccuggcaugacagaauggaauuc

SEQ ID NO: 512177 - RNA, 32 nt, Human
ugacaaacauggagaaaccccaucucuacuaa

SEQ ID NO: 512178 - RNA, 32 nt, Human
ugacaaacucguugaaaugucauuucauuuug

SEQ ID NO: 512179 - RNA, 32 nt, Human
ugacaaacugugaaccugcagauuucaccuau

SEQ ID NO: 512180 - RNA, 32 nt, Human
ugacaaagaagcccagggaggggaagagggug

SEQ ID NO: 512181 - RNA, 32 nt, Human
ugacaaagauucauauaauccaagagagaagu

SEQ ID NO: 512182 - RNA, 32 nt, Human
ugacaaagcagaguaaaaauaugcuguuuaca

SEQ ID NO: 512183 - RNA, 32 nt, Human
ugacaaagcccuaggguuccagccugguccug

SEQ ID NO: 512184 - RNA, 32 nt, Human
ugacaaaggcacugaggcccagggaggugacc

SEQ ID NO: 512185 - RNA, 32 nt, Human
ugacaaagucuaaaugagcacauguaucccag

SEQ ID NO: 512186 - RNA, 32 nt, Human
ugacaaauccugcaguguuuccaggcauccuu

SEQ ID NO: 512187 - RNA, 32 nt, Human
ugacaaaugacaguccaucagacagaucuggc

SEQ ID NO: 512188 - RNA, 32 nt, Human
ugacaaauguauuuaagccuuuggauuuaaag

SEQ ID NO: 512189 - RNA, 20 nt, Human
ugacaaauguuucuaaggua

SEQ ID NO: 512190 - RNA, 24 nt, Human
ugacaacaaauuagguuuuguaca

SEQ ID NO: 512191 - RNA, 21 nt, Human
ugacaacaaauuuauugcaca

SEQ ID NO: 512192 - RNA, 32 nt, Human
ugacaacagcagaggguacaccagggacaaca

SEQ ID NO: 512193 - RNA, 32 nt, Human
ugacaacaggcaggaugguggggacagcaggg

SEQ ID NO: 512194 - RNA, 32 nt, Human
ugacaacauauguggcacucaaaaugcuggua

SEQ ID NO: 512195 - RNA, 22 nt, Human
ugacaacauccuccagauucca

SEQ ID NO: 512196 - RNA, 32 nt, Human
ugacaacaucugaguggacagcuaauugaccu

SEQ ID NO: 512197 - RNA, 32 nt, Human
ugacaacauggugaaaccccaucucugguaga

SEQ ID NO: 512198 - RNA, 32 nt, Human
ugacaacauugagcccacacugcaguuuugaa

SEQ ID NO: 512199 - RNA, 32 nt, Human
ugacaaccaaaccaaucucgguggaaacuccu

SEQ ID NO: 512200 - RNA, 32 nt, Human
ugacaaccagaagacaugagcuaaggguaagg

SEQ ID NO: 512201 - RNA, 17 nt, Human
ugacaacccuggccuca

SEQ ID NO: 512202 - RNA, 32 nt, Human
ugacaaccucucugcugauccuguugugucac

SEQ ID NO: 512203 - RNA, 32 nt, Human
ugacaacgcagcugccaugaugccuugggaug

SEQ ID NO: 512204 - RNA, 32 nt, Human
ugacaacgcugaggccacgagcuccuggguag

SEQ ID NO: 512205 - RNA, 32 nt, Human
ugacaacuaaauagcugagaagaaggacaucu

SEQ ID NO: 512206 - RNA, 23 nt, Human
ugacaacuauucacccuaccuca

SEQ ID NO: 512207 - RNA, 32 nt, Human
ugacaacucuagaccugccugcuuuaucuaau

SEQ ID NO: 512208 - RNA, 32 nt, Human
ugacaacuggaaggccaaggcuauggguuacc

SEQ ID NO: 512209 - RNA, 32 nt, Human
ugacaacuguccuaccuucuugcugaauugau

SEQ ID NO: 512210 - RNA, 32 nt, Human
ugacaagaaagccuggagcgaggaaggaaagc

SEQ ID NO: 512211 - RNA, 16 nt, Human
ugacaagacuuguguu

SEQ ID NO: 512212 - RNA, 32 nt, Human
ugacaagaggagagauaugcacugugauauua

SEQ ID NO: 512213 - RNA, 32 nt, Human
ugacaagauucacuuucuugagagccaucagc

SEQ ID NO: 512214 - RNA, 32 nt, Human
ugacaagauuuggaagaaagaaaauaacagac

SEQ ID NO: 512215 - RNA, 32 nt, Human
ugacaagcagagguugaaagacuugaagccaa

SEQ ID NO: 512216 - RNA, 32 nt, Human
ugacaagcauguccucacccuccccaccacau

SEQ ID NO: 512217 - RNA, 23 nt, Human
ugacaagccauuugaaauucuga

SEQ ID NO: 512218 - RNA, 18 nt, Human
ugacaagcgucccggaga

SEQ ID NO: 512219 - RNA, 32 nt, Human
ugacaagcuaaaggaagcagagucuuuaauga

SEQ ID NO: 512220 - RNA, 32 nt, Human
ugacaagcuccuggucuugagaugucuucucg

SEQ ID NO: 512221 - RNA, 32 nt, Human
ugacaagcucuuuguuucaguuggaguguuug

SEQ ID NO: 512222 - RNA, 24 nt, Human
ugacaagcuuauccucccauggua

SEQ ID NO: 512223 - RNA, 32 nt, Human
ugacaaggaagagcggaagggaagggagaagu

SEQ ID NO: 512224 - RNA, 32 nt, Human
ugacaaggaggcagaggccugagcgaggcgga

SEQ ID NO: 512225 - RNA, 32 nt, Human
ugacaaggaggccgauuugagguggacucucc

SEQ ID NO: 512226 - RNA, 32 nt, Human
ugacaaggaggcggggccugcagcaggcuugg

SEQ ID NO: 512227 - RNA, 32 nt, Human
ugacaaggccuugggcuaccagcugcuccgcc

SEQ ID NO: 512228 - RNA, 32 nt, Human
ugacaaggcugaaaggagggggacuggaggcu

SEQ ID NO: 512229 - RNA, 32 nt, Human
ugacaaggggaagggucuaaaggguggagggc

SEQ ID NO: 512230 - RNA, 20 nt, Human
ugacaaggucccccugggga

SEQ ID NO: 512231 - RNA, 32 nt, Human
ugacaaguagcucauugauucuugccucauuc

SEQ ID NO: 512232 - RNA, 32 nt, Human
ugacaaguauuaacaucagugccagacuugaa

SEQ ID NO: 512233 - RNA, 32 nt, Human
ugacaaguguucacaggagguggggacgccuc

SEQ ID NO: 512234 - RNA, 32 nt, Human
ugacaaguuugacaccugucuacccagagcca

SEQ ID NO: 512235 - RNA, 32 nt, Human
ugacaaguuuuuaaaacuucagugcuuccuaa

SEQ ID NO: 512236 - RNA, 22 nt, Human
ugacaauaaauugugcuguaca

SEQ ID NO: 512237 - RNA, 23 nt, Human
ugacaauaauuucagguuuugua

SEQ ID NO: 512238 - RNA, 24 nt, Human
ugacaauagccccaaguuuacuca

SEQ ID NO: 512239 - RNA, 32 nt, Human
ugacaauaggagagagaaaggggcauugacug

SEQ ID NO: 512240 - RNA, 23 nt, Human
ugacaauaugcccuuucugggga

SEQ ID NO: 512241 - RNA, 23 nt, Human
ugacaauauuuauaaauguaugg

SEQ ID NO: 512242 - RNA, 32 nt, Human
ugacaaucaaauucaugcuauggugugaaaga

SEQ ID NO: 512243 - RNA, 32 nt, Human
ugacaaucaggauaucucaggagguccaaggu

SEQ ID NO: 512244 - RNA, 32 nt, Human
ugacaaucuccaggagaaccuacagauuggaa

SEQ ID NO: 512245 - RNA, 32 nt, Human
ugacaaucugcaaggcugaacaacagccccug

SEQ ID NO: 512246 - RNA, 21 nt, Human
ugacaaugaauugguuauaca

SEQ ID NO: 512247 - RNA, 31 nt, Human
ugacaaugacuucugcccuuuugccaaggga

SEQ ID NO: 512248 - RNA, 32 nt, Human
ugacaaugcaggaaagagaagaagacucaaga

SEQ ID NO: 512249 - RNA, 23 nt, Human
ugacaaugcauggucuuugugca

SEQ ID NO: 512250 - RNA, 32 nt, Human
ugacaauggcagcuagacuggagugaggcuuc

SEQ ID NO: 512251 - RNA, 32 nt, Human
ugacaauggugccuccuucacaugcuuggugu

SEQ ID NO: 512252 - RNA, 31 nt, Human
ugacaaugugaaaccaucacagcugggaaga

SEQ ID NO: 512253 - RNA, 32 nt, Human
ugacaauguguauauguaaauaauauguguuu

SEQ ID NO: 512254 - RNA, 32 nt, Human
ugacaauguugcugggaccucugccuccccac

SEQ ID NO: 512255 - RNA, 32 nt, Human
ugacaauucugaagacauuucuaguuuuauuu

SEQ ID NO: 512256 - RNA, 32 nt, Human
ugacaauugcagcaugacuuucccagggcccu

SEQ ID NO: 512257 - RNA, 32 nt, Human
ugacaauugucagguuggaguguaagugcuuc

SEQ ID NO: 512258 - RNA, 32 nt, Human
ugacacaaaggaugagauuacaccuacaguga

SEQ ID NO: 512259 - RNA, 32 nt, Human
ugacacaaaguagaacugggaccacacucagg

SEQ ID NO: 512260 - RNA, 32 nt, Human
ugacacaacuagucaacuaacaagguuccuga

SEQ ID NO: 512261 - RNA, 32 nt, Human
ugacacaacugcacuccagcuugggcaacagg

SEQ ID NO: 512262 - RNA, 32 nt, Human
ugacacaagcaaugccugugaagugccugcag

SEQ ID NO: 512263 - RNA, 24 nt, Human
ugacacaaucauagcucacugcag

SEQ ID NO: 512264 - RNA, 32 nt, Human
ugacacaaucauagcucacugcagccuuuaac

SEQ ID NO: 512265 - RNA, 24 nt, Human
ugacacaaucauggcucacugcag

SEQ ID NO: 512266 - RNA, 23 nt, Human
ugacacaaucucagcucacugca

SEQ ID NO: 512267 - RNA, 23 nt, Human
ugacacaaucucggcucacugca

SEQ ID NO: 512268 - RNA, 32 nt, Human
ugacacacacaucacacacacaucacaaugac

SEQ ID NO: 512269 - RNA, 19 nt, Human
ugacacacaccaauuucca

SEQ ID NO: 512270 - RNA, 21 nt, Human
ugacacacaccuguaaucuca

SEQ ID NO: 512271 - RNA, 32 nt, Human
ugacacaccacugugcugagugcuugaggacg

SEQ ID NO: 512272 - RNA, 32 nt, Human
ugacacaccuggggugacaggcgaugagacaa

SEQ ID NO: 512273 - RNA, 21 nt, Human
ugacacacgcccguaauccca

SEQ ID NO: 512274 - RNA, 21 nt, Human
ugacacacgccuauaauccca

SEQ ID NO: 512275 - RNA, 21 nt, Human
ugacacacgccuguaauccca

SEQ ID NO: 512276 - RNA, 21 nt, Human
ugacacacuccuauaauccua

SEQ ID NO: 512277 - RNA, 32 nt, Human
ugacacacugauuuuaaucuucgaaucaugac

SEQ ID NO: 512278 - RNA, 32 nt, Human
ugacacacugggugaagaauggaaggguuaug

SEQ ID NO: 512279 - RNA, 32 nt, Human
ugacacagaaaugcacaguguuguuaugaagg

SEQ ID NO: 512280 - RNA, 32 nt, Human
ugacacagaccacccacuccacugugaaacag

SEQ ID NO: 512281 - RNA, 32 nt, Human
ugacacagacccacuucaguguguacagcaaa

SEQ ID NO: 512282 - RNA, 21 nt, Human
ugacacagagucucgcucugu

SEQ ID NO: 512283 - RNA, 32 nt, Human
ugacacagagucucgcucugucgcccaggcug

SEQ ID NO: 512284 - RNA, 32 nt, Human
ugacacagagucuugcucuguugcccaggcug

SEQ ID NO: 512285 - RNA, 32 nt, Human
ugacacagaguuaaaaccugucacucaaaggc

SEQ ID NO: 512286 - RNA, 32 nt, Human
ugacacagcaagaagaaggaugcuaagucaua

SEQ ID NO: 512287 - RNA, 21 nt, Human
ugacacagccugggcaacaca

SEQ ID NO: 512288 - RNA, 32 nt, Human
ugacacagcugagaccaagcugagggacuggg

SEQ ID NO: 512289 - RNA, 32 nt, Human
ugacacagcugcuagagaaagagaaguagaag

SEQ ID NO: 512290 - RNA, 32 nt, Human
ugacacaggggcccuggccaggguuccacccu

SEQ ID NO: 512291 - RNA, 32 nt, Human
ugacacagggucagguccagcaggaaagaaug

SEQ ID NO: 512292 - RNA, 32 nt, Human
ugacacaguagcacugauucugucuuuuccuc

SEQ ID NO: 512293 - RNA, 24 nt, Human
ugacacagucucagcucacugcag

SEQ ID NO: 512294 - RNA, 23 nt, Human
ugacacagucuuggcucacugca

SEQ ID NO: 512295 - RNA, 32 nt, Human
ugacacagugaugaugaucucuucuguccucc

SEQ ID NO: 512296 - RNA, 24 nt, Human
ugacacaguugcagcucacugcag

SEQ ID NO: 512297 - RNA, 32 nt, Human
ugacacaucacaaucccuuucucaguuccuag

SEQ ID NO: 512298 - RNA, 32 nt, Human
ugacacaucugugucaucacgcacugaagaca

SEQ ID NO: 512299 - RNA, 31 nt, Human
ugacacaugcaacccccuggcccgagagauc

SEQ ID NO: 512300 - RNA, 32 nt, Human
ugacacaugccuguaaucccagcaacucagga

SEQ ID NO: 512301 - RNA, 21 nt, Human
ugacacaugccuguaguccca

SEQ ID NO: 512302 - RNA, 32 nt, Human
ugacacaugccuguagucccagcuacucagga

SEQ ID NO: 512303 - RNA, 32 nt, Human
ugacacaugccuguaguccuagcuacuuggga

SEQ ID NO: 512304 - RNA, 20 nt, Human
ugacacaugcugaacaucac

SEQ ID NO: 512305 - RNA, 32 nt, Human
ugacacauggggcagaggagcuccaggcacag

SEQ ID NO: 512306 - RNA, 32 nt, Human
ugacaccaccacugugucccagugucuggccc

SEQ ID NO: 512307 - RNA, 32 nt, Human
ugacaccacgccacugcacuccagccugggug

SEQ ID NO: 512308 - RNA, 32 nt, Human
ugacaccacugcacuccaaccuagguaacaga

SEQ ID NO: 512309 - RNA, 32 nt, Human
ugacaccagcaggcagaugaccagagagccug

SEQ ID NO: 512310 - RNA, 32 nt, Human
ugacaccaugaagccugugcugccucuccagu

SEQ ID NO: 512311 - RNA, 20 nt, Human
ugacaccauuuguuguguua

SEQ ID NO: 512312 - RNA, 32 nt, Human
ugacacccaaaauacagaaacuucuuaaucga

SEQ ID NO: 512313 - RNA, 32 nt, Human
ugacacccaagagaagagauggaagggcaugg

SEQ ID NO: 512314 - RNA, 19 nt, Human
ugacacccacuccugggga

SEQ ID NO: 512315 - RNA, 24 nt, Human
ugacacccaggcuggagugcagug

SEQ ID NO: 512316 - RNA, 24 nt, Human
ugacacccaggcuggcgugcagug

SEQ ID NO: 512317 - RNA, 32 nt, Human
ugacacccagggccauggaagaguugguccag

SEQ ID NO: 512318 - RNA, 32 nt, Human
ugacacccauauuaggaaaaggccugccacca

SEQ ID NO: 512319 - RNA, 32 nt, Human
ugacacccauuucagacuucugaccuccacaa

SEQ ID NO: 512320 - RNA, 22 nt, Human
ugacaccccucccccuaauucu

SEQ ID NO: 512321 - RNA, 22 nt, Human
ugacaccccucccuuggacucu

SEQ ID NO: 512322 - RNA, 32 nt, Human
ugacaccccugccccugccccugcccagaacc

SEQ ID NO: 512323 - RNA, 32 nt, Human
ugacacccgcuaccaguauuguacccaugaug

SEQ ID NO: 512324 - RNA, 32 nt, Human
ugacacccucuccuggagagaggcucacagcg

SEQ ID NO: 512325 - RNA, 32 nt, Human
ugacacccugauccagacucugucuuuauccc

SEQ ID NO: 512326 - RNA, 31 nt, Human
ugacacccugugacugagccuguguccuguc

SEQ ID NO: 512327 - RNA, 32 nt, Human
ugacacccuuaaauuuuaagucuuccagucuu

SEQ ID NO: 512328 - RNA, 32 nt, Human
ugacacccuugggcucccuccugccuccucuc

SEQ ID NO: 512329 - RNA, 32 nt, Human
ugacaccgcaggcagagguugcucggggccuu

SEQ ID NO: 512330 - RNA, 32 nt, Human
ugacaccgcuucuccucacaccccaguccgca

SEQ ID NO: 512331 - RNA, 32 nt, Human
ugacaccgucgaccaggaaagccacacggaga

SEQ ID NO: 512332 - RNA, 32 nt, Human
ugacaccguucccuccaaaagcagaccucgga

SEQ ID NO: 512333 - RNA, 32 nt, Human
ugacaccucugcacucccuugggcagagaugg

SEQ ID NO: 512334 - RNA, 32 nt, Human
ugacaccugacugcaaaaauguuuauaagcaa

SEQ ID NO: 512335 - RNA, 32 nt, Human
ugacaccugcaaucccaacauuuugggaggcc

SEQ ID NO: 512336 - RNA, 32 nt, Human
ugacaccugcagcccucacuccugucauccca

SEQ ID NO: 512337 - RNA, 32 nt, Human
ugacaccuggccugcccuuucucagcugccuc

SEQ ID NO: 512338 - RNA, 32 nt, Human
ugacaccuguaaucccagcacauugggaggcc

SEQ ID NO: 512339 - RNA, 32 nt, Human
ugacaccuguaaucccagcacuuugggaggcc

SEQ ID NO: 512340 - RNA, 32 nt, Human
ugacaccuguaaucccagcauuuugggagacc

SEQ ID NO: 512341 - RNA, 32 nt, Human
ugacaccuguguccugagugagccgcaggagu

SEQ ID NO: 512342 - RNA, 32 nt, Human
ugacaccuucuuuggggcucugcaguuccugc

SEQ ID NO: 512343 - RNA, 31 nt, Human
ugacaccuugugcucaggccuguguugguuc

SEQ ID NO: 512344 - RNA, 24 nt, Human
ugacacgaccucggcucacugcag

SEQ ID NO: 512345 - RNA, 23 nt, Human
ugacacgaucucagcucacugca

SEQ ID NO: 512346 - RNA, 32 nt, Human
ugagagggcagcggccgcguggagaggaggug

SEQ ID NO: 512347 - RNA, 32 nt, Human
ugagagggcgguggagguggugaggaggaucu

SEQ ID NO: 512348 - RNA, 32 nt, Human
ugagaggggaaaagcugaaaugugagugggaa

SEQ ID NO: 512349 - RNA, 32 nt, Human
ugagaggggagagagacuggagcuggcaagga

SEQ ID NO: 512350 - RNA, 32 nt, Human
ugagaggggagggagacucugcggccacacac

SEQ ID NO: 512351 - RNA, 32 nt, Human
ugagaggggagggagaguuugcggccacacac

SEQ ID NO: 512352 - RNA, 32 nt, Human
ugagaggggagggauggguaggugcuuuccaa

SEQ ID NO: 512353 - RNA, 32 nt, Human
ugagaggggagguggaguuggaaaugugggug

SEQ ID NO: 512354 - RNA, 32 nt, Human
ugagaggggaguggaaagaggaaggggugaag

SEQ ID NO: 512355 - RNA, 32 nt, Human
ugagaggggcggcccuggaggagacggaggcc

SEQ ID NO: 512356 - RNA, 32 nt, Human
ugagaggggcugagggaauuguccucugugga

SEQ ID NO: 512357 - RNA, 32 nt, Human
ugagaggggcuguuagcauugcgcagcaucuu

SEQ ID NO: 512358 - RNA, 26 nt, Human
ugagaggggugauccauucugccuca

SEQ ID NO: 512359 - RNA, 32 nt, Human
ugagagggguggcggaggguagagagagaaag

SEQ ID NO: 512360 - RNA, 32 nt, Human
ugagaggguccugcaggcagagcuggaaucaa

SEQ ID NO: 512361 - RNA, 32 nt, Human
ugagagguaggguugaggaacacaggguugaa

SEQ ID NO: 512362 - RNA, 32 nt, Human
ugagagguagucuugcucugucacccaggcug

SEQ ID NO: 512363 - RNA, 32 nt, Human
ugagaggucccagaacucugcaaagugagucc

SEQ ID NO: 512364 - RNA, 32 nt, Human
ugagaggucccagaacucugcgaagugagucc

SEQ ID NO: 512365 - RNA, 32 nt, Human
ugagaggugagguugcagugagccgagaucga

SEQ ID NO: 512366 - RNA, 32 nt, Human
ugagaggugcuugggaaacugcauuuauccgu

SEQ ID NO: 512367 - RNA, 32 nt, Human
ugagagguggagguucucucucuuuuaggcuu

SEQ ID NO: 512368 - RNA, 32 nt, Human
ugagagguuuucuuuuucuuaucaguguccuu

SEQ ID NO: 512369 - RNA, 32 nt, Human
ugagaguaccucauagggcuccugccugaucu

SEQ ID NO: 512370 - RNA, 32 nt, Human
ugagaguagccaugggcucuggaggagacagc

SEQ ID NO: 512371 - RNA, 32 nt, Human
ugagaguagcucagagggacuugcuguggggg

SEQ ID NO: 512372 - RNA, 32 nt, Human
ugagaguagcugguaaagaggggcgaacuaaa

SEQ ID NO: 512373 - RNA, 32 nt, Human
ugagaguaguucaggacagcugugauugaaau

SEQ ID NO: 512374 - RNA, 32 nt, Human
ugagaguccacucaugaagcaagaagucaagc

SEQ ID NO: 512375 - RNA, 32 nt, Human
ugagaguccccaggguccucccccacugggca

SEQ ID NO: 512376 - RNA, 32 nt, Human
ugagagucccugcggccucccaccucccugcc

SEQ ID NO: 512377 - RNA, 32 nt, Human
ugagagucgaaugcuacaguaucugcagucgc

SEQ ID NO: 512378 - RNA, 21 nt, Human
ugagagucuagcacucauuuu

SEQ ID NO: 512379 - RNA, 32 nt, Human
ugagagucugggggagagggcagagaauggau

SEQ ID NO: 512380 - RNA, 32 nt, Human
ugagagugcacuccaguuuucacagcagcaau

SEQ ID NO: 512381 - RNA, 32 nt, Human
ugagagugcaugccauggagacugguuuagac

SEQ ID NO: 512382 - RNA, 32 nt, Human
ugagagugccccacugcacuccagccugggug

SEQ ID NO: 512383 - RNA, 32 nt, Human
ugagagugcccuagacaguaacuucuaagguc

SEQ ID NO: 512384 - RNA, 32 nt, Human
ugagagugcuacccuucucuuguaaccuugca

SEQ ID NO: 512385 - RNA, 32 nt, Human
ugagaguggacugucuucucucccuucacaaa

SEQ ID NO: 512386 - RNA, 32 nt, Human
ugagaguggagcugaguggggucugggcucug

SEQ ID NO: 512387 - RNA, 32 nt, Human
ugagaguggaggaggaagaggaggaggaagag

SEQ ID NO: 512388 - RNA, 32 nt, Human
ugagaguggggagggggcauuggccuuugcag

SEQ ID NO: 512389 - RNA, 32 nt, Human
ugagagugugggagguggaugcgggagggugc

SEQ ID NO: 512390 - RNA, 32 nt, Human
ugagaguguguguccuacaaagggccucacua

SEQ ID NO: 512391 - RNA, 32 nt, Human
ugagaguucagaguuccaggaauauuguuauu

SEQ ID NO: 512392 - RNA, 32 nt, Human
ugagaguucuuucacaccuuugguggucauag

SEQ ID NO: 512393 - RNA, 32 nt, Human
ugagaguugcugaauaucaucacaaagcaaua

SEQ ID NO: 512394 - RNA, 32 nt, Human
ugagauaaaacagaucaaaugguuuagguuaa

SEQ ID NO: 512395 - RNA, 32 nt, Human
ugagauaaaagcuuccaugggagccuuccuuc

SEQ ID NO: 512396 - RNA, 32 nt, Human
ugagauaagaaagaguuccuggaaccaggaau

SEQ ID NO: 512397 - RNA, 32 nt, Human
ugagauaagagccuggcaaccagcaagagcug

SEQ ID NO: 512398 - RNA, 32 nt, Human
ugagauaaggucuugcuguguggcccaggcug

SEQ ID NO: 512399 - RNA, 32 nt, Human
ugagauaaucucugucacccccaggccagagu

SEQ ID NO: 512400 - RNA, 32 nt, Human
ugagauacaaguccuuugucaguuuugugauu

SEQ ID NO: 512401 - RNA, 32 nt, Human
ugagauacccagaaugucagacuuguaaggga

SEQ ID NO: 512402 - RNA, 32 nt, Human
ugagauacccaggaagggaggcugucuggcca

SEQ ID NO: 512403 - RNA, 32 nt, Human
ugagauacuaccuacacggagcaggauggcug

SEQ ID NO: 512404 - RNA, 21 nt, Human
ugagauagaaucucacuaugu

SEQ ID NO: 512405 - RNA, 21 nt, Human
ugagauagagccuugcucugu

SEQ ID NO: 512406 - RNA, 32 nt, Human
ugagauagagccuugcucugucaccaggccgg

SEQ ID NO: 512407 - RNA, 32 nt, Human
ugagauagagucuugcuaguguugcccaggcu

SEQ ID NO: 512408 - RNA, 21 nt, Human
ugagauagagucuugcucugu

SEQ ID NO: 512409 - RNA, 32 nt, Human
ugagauagagucuugcucugucgcucaggcug

SEQ ID NO: 512410 - RNA, 32 nt, Human
ugagauagcaccacugcaugcaagccugggca

SEQ ID NO: 512411 - RNA, 32 nt, Human
ugagauagcgccauugcacuccagccugagcg

SEQ ID NO: 512412 - RNA, 32 nt, Human
ugagauagcgccauugcacuccagccugggca

SEQ ID NO: 512413 - RNA, 32 nt, Human
ugagauagcgucuugcuguguugcccaggcug

SEQ ID NO: 512414 - RNA, 32 nt, Human
ugagauaggaggucggcacaagauacagauca

SEQ ID NO: 512415 - RNA, 32 nt, Human
ugagauaggaggucggcacaagauacagguca

SEQ ID NO: 512416 - RNA, 32 nt, Human
ugagauaggaguucucuaggaaccuggaauga

SEQ ID NO: 512417 - RNA, 32 nt, Human
ugagauaggggcccugggccuccgcccuggcc

SEQ ID NO: 512418 - RNA, 32 nt, Human
ugagauaggguauugcucugucgcccaggcug

SEQ ID NO: 512419 - RNA, 21 nt, Human
ugagauagggucucacuuugu

SEQ ID NO: 512420 - RNA, 21 nt, Human
ugagauagggucuuacucugu

SEQ ID NO: 512421 - RNA, 32 nt, Human
ugagauagggucuuacucugucacccaggcug

SEQ ID NO: 512422 - RNA, 19 nt, Human
ugagauagggucuugcucu

SEQ ID NO: 512423 - RNA, 32 nt, Human
ugagauagggucuugcucuaucaccuaggcug

SEQ ID NO: 512424 - RNA, 32 nt, Human
ugagauagucucaauguggccaaccaaaagga

SEQ ID NO: 512425 - RNA, 21 nt, Human
ugagauagugucuugcucugu

SEQ ID NO: 512426 - RNA, 32 nt, Human
ugagauagugucuugcucugucacccaggcug

SEQ ID NO: 512427 - RNA, 32 nt, Human
ugagauauccucagguuuucucagccagagag

SEQ ID NO: 512428 - RNA, 32 nt, Human
ugagauaugagaaacugaguuggcucugacaa

SEQ ID NO: 512429 - RNA, 32 nt, Human
ugagauauggcuauuuggaagacacugcauuu

SEQ ID NO: 512430 - RNA, 32 nt, Human
ugagauauuuuaaaauuccgcccuccaggcag

SEQ ID NO: 512431 - RNA, 32 nt, Human
ugagaucaaagcacucuuccacuuuacgugau

SEQ ID NO: 512432 - RNA, 32 nt, Human
ugagaucaagaguucaagaccagccuggccaa

SEQ ID NO: 512433 - RNA, 32 nt, Human
ugagaucacacagcauugagucaucaggaaaa

SEQ ID NO: 512434 - RNA, 32 nt, Human
ugagaucacaccacuacacuccagccugggcg

SEQ ID NO: 512435 - RNA, 32 nt, Human
ugagaucacaccacugcaauccagccugggcg

SEQ ID NO: 512436 - RNA, 32 nt, Human
ugagaucacaccacugcacuccagccuggcga

SEQ ID NO: 512437 - RNA, 32 nt, Human
ugagaucacaccacugcacuccagccugggag

SEQ ID NO: 512438 - RNA, 32 nt, Human
ugagaucacaccacugcacuccagccugggca

SEQ ID NO: 512439 - RNA, 32 nt, Human
ugagaucacaccacugcacuccagccugggcg

SEQ ID NO: 512440 - RNA, 32 nt, Human
ugagaucacaccacugcacuccagccuggggu

SEQ ID NO: 512441 - RNA, 32 nt, Human
ugagaucacaccacugcacuccagccugggug

SEQ ID NO: 512442 - RNA, 32 nt, Human
ugagaucacaccacugcacuccagccugguca

SEQ ID NO: 512443 - RNA, 32 nt, Human
ugagaucacaccacugcacuccagccugguga

SEQ ID NO: 512444 - RNA, 32 nt, Human
ugagaucacaccacugcacuccagccugugcg

SEQ ID NO: 512445 - RNA, 32 nt, Human
ugagaucacaccacugcacuccagccuuggug

SEQ ID NO: 512446 - RNA, 32 nt, Human
ugagaucacaccacugcacuccggccugggcg

SEQ ID NO: 512447 - RNA, 32 nt, Human
ugagaucacaccacugcacuucauccuaggca

SEQ ID NO: 512448 - RNA, 32 nt, Human
ugagaucacaccacuguacuccagccugagug

SEQ ID NO: 512449 - RNA, 32 nt, Human
ugagaucacaccacuguacuccagccuggaug

SEQ ID NO: 512450 - RNA, 32 nt, Human
ugagaucacaccacuguacuccagccugggug

SEQ ID NO: 512451 - RNA, 32 nt, Human
ugagaucacaccacuguauuccagccugggug

SEQ ID NO: 512452 - RNA, 32 nt, Human
ugagaucacaccaucgcacuccagccuaggca

SEQ ID NO: 512453 - RNA, 32 nt, Human
ugagaucacaccauugcacuccagccugggca

SEQ ID NO: 512454 - RNA, 32 nt, Human
ugagaucacaccauugcccuccagccugggug

SEQ ID NO: 512455 - RNA, 32 nt, Human
ugagaucacaccauugcgcuucagccugggca

SEQ ID NO: 512456 - RNA, 32 nt, Human
ugagaucacacuacugcacuccugcaugggcg

SEQ ID NO: 512457 - RNA, 32 nt, Human
ugagaucacaucacugcacuccauccugggug

SEQ ID NO: 512458 - RNA, 32 nt, Human
ugagaucaccccauugcacuccagccuggaca

SEQ ID NO: 512459 - RNA, 32 nt, Human
ugagaucacgccacuacacuccaaccugggug

SEQ ID NO: 512460 - RNA, 32 nt, Human
ugagaucacgccacugcacuccaaccugggug

SEQ ID NO: 512461 - RNA, 32 nt, Human
ugagaucacgccacugcacuccaccugggcaa

SEQ ID NO: 512462 - RNA, 32 nt, Human
ugagaucacgccacugcacuccagcccgggcg

SEQ ID NO: 512463 - RNA, 32 nt, Human
ugagaucacgccacugcacuccagccuaggcg

SEQ ID NO: 512464 - RNA, 32 nt, Human
ugagaucacgccacugcacuccagccugggcg

SEQ ID NO: 512465 - RNA, 32 nt, Human
ugagaucacgccacugcacuccagccugggug

SEQ ID NO: 512466 - RNA, 32 nt, Human
ugagaucacgccacugcacuccagucugggug

SEQ ID NO: 512467 - RNA, 32 nt, Human
ugagaucacgccacugcacucuagccuaggcg

SEQ ID NO: 512468 - RNA, 32 nt, Human
ugagaucacgccacugcacucuagccugggau

SEQ ID NO: 512469 - RNA, 32 nt, Human
ugagaucacgccacugcauuccagccugggcg

SEQ ID NO: 512470 - RNA, 32 nt, Human
ugagaucacgccacugcauuccagccugugcg

SEQ ID NO: 512471 - RNA, 32 nt, Human
ugagaucacgccauugcacuacagccugggug

SEQ ID NO: 512472 - RNA, 32 nt, Human
ugagaucacgccauugcacucaagccuggcga

SEQ ID NO: 512473 - RNA, 32 nt, Human
ugagaucacgccauugcacuccaaccugggug

SEQ ID NO: 512474 - RNA, 32 nt, Human
ugagaucacgccauugcacuccagccuaggcg

SEQ ID NO: 512475 - RNA, 32 nt, Human
ugagaucacgccauugcacuccagccugggca

SEQ ID NO: 512476 - RNA, 32 nt, Human
ugagaucacgccauugcacuccagccugggcg

SEQ ID NO: 512477 - RNA, 32 nt, Human
ugagaucacgccauugcacuccagucugagca

SEQ ID NO: 512478 - RNA, 32 nt, Human
ugagaucacgccauugcacuccagucugguug

SEQ ID NO: 512479 - RNA, 32 nt, Human
ugagaucacgccguugcacuccagccugggca

SEQ ID NO: 512480 - RNA, 32 nt, Human
ugagaucacgucauugcacuccauccugagcc

SEQ ID NO: 512481 - RNA, 32 nt, Human
ugagaucagagugccagcauggucaaccucua

SEQ ID NO: 512482 - RNA, 32 nt, Human
ugagaucagcuagaccugcuuucuuuucuccu

SEQ ID NO: 512483 - RNA, 32 nt, Human
ugagaucaggaguucaagacaaggcugaccaa

SEQ ID NO: 512484 - RNA, 32 nt, Human
ugagaucaggaguucaagaccagccuggccaa

SEQ ID NO: 512485 - RNA, 32 nt, Human
ugagaucaggaguucaagacuagccugaccaa

SEQ ID NO: 512486 - RNA, 32 nt, Human
ugagaucaggaguucaagacuagccuggccaa

SEQ ID NO: 512487 - RNA, 32 nt, Human
ugagaucaggaguucaagaucagucuggacaa

SEQ ID NO: 512488 - RNA, 19 nt, Human
ugagaucaggaguucgaga

SEQ ID NO: 512489 - RNA, 32 nt, Human
ugagaucaggaguuugagaccaaccuggccaa

SEQ ID NO: 512490 - RNA, 32 nt, Human
ugagaucaggauuuugagaccaaccuggccaa

SEQ ID NO: 512491 - RNA, 32 nt, Human
ugagaucaggcacuucagccugggcgacagag

SEQ ID NO: 512492 - RNA, 32 nt, Human
ugagaucaggccacugcacuccagccugggca

SEQ ID NO: 512493 - RNA, 32 nt, Human
ugagaucaugcaguguuugucuuucugugccu

SEQ ID NO: 512494 - RNA, 32 nt, Human
ugagaucaugccaccgcacuccagccugggca

SEQ ID NO: 512495 - RNA, 32 nt, Human
ugagaucaugccacuacacuccagccuggcga

SEQ ID NO: 512496 - RNA, 32 nt, Human
ugagaucaugccacugaacuccagccugggca

SEQ ID NO: 512497 - RNA, 32 nt, Human
ugagaucaugccacugcaaucuagccugggug

SEQ ID NO: 512498 - RNA, 32 nt, Human
ugagaucaugccacugcacccuagcuugggug

SEQ ID NO: 512499 - RNA, 32 nt, Human
ugagaucaugccacugcacuccagcccaggug

SEQ ID NO: 512500 - RNA, 32 nt, Human
ugagaucaugccacugcacuccagccugagug

SEQ ID NO: 512501 - RNA, 32 nt, Human
ugagaucaugccacugcacuccagccugggca

SEQ ID NO: 512502 - RNA, 32 nt, Human
ugagaucaugccacugcacuccggccuaggug

SEQ ID NO: 512503 - RNA, 32 nt, Human
ugagaucaugccacugcacuccugccugggug

SEQ ID NO: 512504 - RNA, 32 nt, Human
ugagaucaugccacugcacuuuagccugggug

SEQ ID NO: 512505 - RNA, 32 nt, Human
ugagaucaugccacugcaugccagccugggca

SEQ ID NO: 512506 - RNA, 32 nt, Human
ugagaucaugccauuacacuccagccugggcg

SEQ ID NO: 512507 - RNA, 32 nt, Human
ugagaucaugccauugcacuccaaccugggug

SEQ ID NO: 512508 - RNA, 32 nt, Human
ugagaucaugccauugcacuccagcccaggua

SEQ ID NO: 512509 - RNA, 32 nt, Human
ugagaucaugccauugcacuccagccuaggca

SEQ ID NO: 512510 - RNA, 32 nt, Human
ugagaucaugccauugcacuccagccuggaca

SEQ ID NO: 512511 - RNA, 32 nt, Human
ugagaucaugccauugcacuccagccugggca

SEQ ID NO: 512512 - RNA, 32 nt, Human
ugagaucaugccauugcacuccagcuugggug

SEQ ID NO: 512513 - RNA, 32 nt, Human
ugagaucaugccauugcacuccagucugggcg

SEQ ID NO: 512514 - RNA, 32 nt, Human
ugagaucauucccaggggcccagcagacagug

SEQ ID NO: 512515 - RNA, 32 nt, Human
ugagauccacggucccucaucguccagcccug

SEQ ID NO: 512516 - RNA, 32 nt, Human
ugagauccagccacagcacuccagccugggug

SEQ ID NO: 512517 - RNA, 32 nt, Human
ugagaucccaccacugcacuccagccugggcg

SEQ ID NO: 512518 - RNA, 32 nt, Human
ugagaucccaccauugcacuccagccugggca

SEQ ID NO: 512519 - RNA, 32 nt, Human
ugagaucccccagccguguccuccagcccagc

SEQ ID NO: 512520 - RNA, 32 nt, Human
ugagaucccuguauucaaaaacaaaugacagg

SEQ ID NO: 512521 - RNA, 32 nt, Human
ugagauccugccacugcacuccagccugggca

SEQ ID NO: 512522 - RNA, 32 nt, Human
ugagaucgagaguucaagaccagccuggccaa

SEQ ID NO: 512523 - RNA, 32 nt, Human
ugagaucgagauuacagugagcuauggaucgg

SEQ ID NO: 512524 - RNA, 32 nt, Human
ugagaucgagccacugcacuccagccugggcg

SEQ ID NO: 512525 - RNA, 32 nt, Human
ugagaucgagccacugcacuccagccugggug

SEQ ID NO: 512526 - RNA, 21 nt, Human
ugagaucgagucucgcucugu

SEQ ID NO: 512527 - RNA, 32 nt, Human
ugagaucgagucucgcucugucaccaggcugg

SEQ ID NO: 512528 - RNA, 32 nt, Human
ugagaucgcaacacugcacuccagccugggcg

SEQ ID NO: 512529 - RNA, 32 nt, Human
ugagaucgcaacacugcacuccagccugggug

SEQ ID NO: 512530 - RNA, 32 nt, Human
ugagaucgcaccaccacacuccagccugggug

SEQ ID NO: 512531 - RNA, 32 nt, Human
ugagaucgcaccacugcacucaagccugggcg

SEQ ID NO: 512532 - RNA, 32 nt, Human
ugagaucgcaccacugcacuccaaccugggug

SEQ ID NO: 512533 - RNA, 32 nt, Human
ugagaucgcaccacugcacuccagcacuccag

SEQ ID NO: 512534 - RNA, 32 nt, Human
ugagaucgcaccacugcacuccagccugggag

SEQ ID NO: 512535 - RNA, 32 nt, Human
ugagaucgcaccacugcacuccagccugggca

SEQ ID NO: 512536 - RNA, 32 nt, Human
ugagaucgcaccacugcacuccagccugggcg

SEQ ID NO: 512537 - RNA, 32 nt, Human
ugagaucgcaccacugcacuccagccugggug

SEQ ID NO: 512538 - RNA, 32 nt, Human
ugagaucgcaccacugcacuccagccugguua

SEQ ID NO: 512539 - RNA, 32 nt, Human
ugagaucgcaccacugcacuccagcuuggagg

SEQ ID NO: 512540 - RNA, 32 nt, Human
ugagaucgcaccacugcacucuagccuuggca

SEQ ID NO: 512541 - RNA, 32 nt, Human
ugagaucgcaccacugcacucuagcuugggca

SEQ ID NO: 512542 - RNA, 32 nt, Human
ugagaucgcaccacugcauugcagccugguga

SEQ ID NO: 512543 - RNA, 32 nt, Human
ugagaucgcaccacuguacuccagccugggug

SEQ ID NO: 512544 - RNA, 32 nt, Human
ugagaucgcaccauugcacuccagccuggcga

SEQ ID NO: 512545 - RNA, 32 nt, Human
ugagaucgcaccauugcacuccagccugggca

SEQ ID NO: 512546 - RNA, 32 nt, Human
ugagaucgcaccauugcacuucagccugggca

SEQ ID NO: 512547 - RNA, 32 nt, Human
ugagaucgcaccauugcccuccagccugggca

SEQ ID NO: 512548 - RNA, 32 nt, Human
ugagaucgcaccgcugcacuccagccugggca

SEQ ID NO: 512549 - RNA, 32 nt, Human
ugagaucgcacuauugcacucaagccugggcg

SEQ ID NO: 512550 - RNA, 32 nt, Human
ugagaucgcacuccagccugggugacagagug

SEQ ID NO: 512551 - RNA, 32 nt, Human
ugagaucgcaucauugcacugcagucugagug

SEQ ID NO: 512552 - RNA, 32 nt, Human
ugagaucgccacugcacuccagccugggaaau

SEQ ID NO: 512553 - RNA, 32 nt, Human
ugagaucgccucccucccagcaugcuugguga

SEQ ID NO: 512554 - RNA, 32 nt, Human
ugagaucgcgccacugcacucaagccugggca

SEQ ID NO: 512555 - RNA, 32 nt, Human
ugagaucgcgccacugcacuccagccuggacg

SEQ ID NO: 512556 - RNA, 32 nt, Human
ugagaucgcgccacugcacuccagccugggca

SEQ ID NO: 512557 - RNA, 32 nt, Human
ugagaucgcgccacugcacuccagccugggcg

SEQ ID NO: 512558 - RNA, 32 nt, Human
ugagaucgcgccacugcacuccagccugggua

SEQ ID NO: 512559 - RNA, 32 nt, Human
ugagaucgcgccacugcacuccagccugggug

SEQ ID NO: 512560 - RNA, 32 nt, Human
ugagaucgcgccacugcacuccagccugguga

SEQ ID NO: 512561 - RNA, 32 nt, Human
ugagaucgcgccauugcacuccagccuggccu

SEQ ID NO: 512562 - RNA, 32 nt, Human
ugagaucgcgccauugcacuccagccugggca

SEQ ID NO: 512563 - RNA, 32 nt, Human
ugagaucgcgccauugcacuccagccugggcg

SEQ ID NO: 512564 - RNA, 32 nt, Human
ugagaucgcgccauugcacuccagccugggug

SEQ ID NO: 512565 - RNA, 32 nt, Human
ugagaucgcgccauugcacucccgccugggcg

SEQ ID NO: 512566 - RNA, 32 nt, Human
ugagaucgcgccauugcacugcagcccccggc

SEQ ID NO: 512567 - RNA, 32 nt, Human
ugagaucgcgccauugcauuccaaccuggggg

SEQ ID NO: 512568 - RNA, 32 nt, Human
ugagaucgcgccgcugcacuccagccugggug

SEQ ID NO: 512569 - RNA, 32 nt, Human
ugagaucgcgcugcugcacuccagccugggug

SEQ ID NO: 512570 - RNA, 32 nt, Human
ugagaucgcgucauugcacuccagccugggca

SEQ ID NO: 512571 - RNA, 32 nt, Human
ugagaucgcugcacuccagccugggcgacaag

SEQ ID NO: 512572 - RNA, 32 nt, Human
ugagaucggcugaagagagcgggcccaggcuc

SEQ ID NO: 512573 - RNA, 32 nt, Human
ugagaucgggccacacuugagcugagucacca

SEQ ID NO: 512574 - RNA, 32 nt, Human
ugagaucgugccacugcaccacuccagccugg

SEQ ID NO: 512575 - RNA, 32 nt, Human
ugagaucgugccacugcacucaagccugggug

SEQ ID NO: 512576 - RNA, 32 nt, Human
ugagaucgugccacugcacucaagccugguga

SEQ ID NO: 512577 - RNA, 32 nt, Human
ugagaucgugccacugcacuccagagccuggg

SEQ ID NO: 512578 - RNA, 32 nt, Human
ugagaucgugccacugcacuccagccugcggg

SEQ ID NO: 512579 - RNA, 32 nt, Human
ugagaucgugccacugcacuccagccugggag

SEQ ID NO: 512580 - RNA, 32 nt, Human
ugagaucgugccacugcacuccagccugggca

SEQ ID NO: 512581 - RNA, 32 nt, Human
ugagaucgugccacugcacuccagccugggcg

SEQ ID NO: 512582 - RNA, 32 nt, Human
ugagaucgugccacugcacuccagccugggug

SEQ ID NO: 512583 - RNA, 32 nt, Human
ugagaucgugccacugcacuccagccugguga

SEQ ID NO: 512584 - RNA, 32 nt, Human
ugagaucgugccacugcacuccaggcugggug

SEQ ID NO: 512585 - RNA, 32 nt, Human
ugagaucgugccacugcacuccauccuggacg

SEQ ID NO: 512586 - RNA, 32 nt, Human
ugagaucgugccacugcacucccagccugggc

SEQ ID NO: 512587 - RNA, 32 nt, Human
ugagaucgugccauugcacuccagccuggcca

SEQ ID NO: 512588 - RNA, 32 nt, Human
ugagaucgugccauugcacuccagccuggcga

SEQ ID NO: 512589 - RNA, 32 nt, Human
ugagaucgugccauugcacuccagucugggua

SEQ ID NO: 512590 - RNA, 32 nt, Human
ugagaucgugccauugcacuccggccugggca

SEQ ID NO: 512591 - RNA, 32 nt, Human
ugagaucgugccauugcacucuagccugggca

SEQ ID NO: 512592 - RNA, 32 nt, Human
ugagaucgugccguugcacuccagccugggcg

SEQ ID NO: 512593 - RNA, 32 nt, Human
ugagaucgugcuacugcacuccagccuggggg

SEQ ID NO: 512594 - RNA, 32 nt, Human
ugagaucgugcuauugcacuccagccugggcg

SEQ ID NO: 512595 - RNA, 22 nt, Human
ugagaucgugggucacaggccc

SEQ ID NO: 512596 - RNA, 32 nt, Human
ugagaucgugucacuacacuccaggcugggug

SEQ ID NO: 512597 - RNA, 32 nt, Human
ugagaucguucccaggcuggcgucucuggggu

SEQ ID NO: 512598 - RNA, 32 nt, Human
ugagaucucaagagugacauuugugagaccag

SEQ ID NO: 512599 - RNA, 32 nt, Human
ugagaucucaccacugcacuccagccugggca

SEQ ID NO: 512600 - RNA, 32 nt, Human
ugagaucucgccacugcgcuccagccugggca

SEQ ID NO: 512601 - RNA, 32 nt, Human
ugagaucucuccucagcuggaaugaggaaugu

SEQ ID NO: 512602 - RNA, 32 nt, Human
ugagaucugaggacagacacucacauagacgc

SEQ ID NO: 512603 - RNA, 32 nt, Human
ugagaucugcuguccuguuucugucaagcugg

SEQ ID NO: 512604 - RNA, 32 nt, Human
ugagaucuggaggauccaaggauucuguagcu

SEQ ID NO: 512605 - RNA, 32 nt, Human
ugagaucuuguggagcugggaucauguuugaa

SEQ ID NO: 512606 - RNA, 29 nt, Human
ugagaugaacacagugcugggcuccugcu

SEQ ID NO: 512607 - RNA, 32 nt, Human
ugagaugaagcagggaaugcaggccuggguua

SEQ ID NO: 512608 - RNA, 32 nt, Human
ugagaugaaguucuuagcuccagguuuugggg

SEQ ID NO: 512609 - RNA, 21 nt, Human
ugagaugacaggcaugagcca

SEQ ID NO: 512610 - RNA, 23 nt, Human
ugagaugagaaaguggacauuua

SEQ ID NO: 512611 - RNA, 32 nt, Human
ugagaugagaagaucacuugaggccaggaguu

SEQ ID NO: 512612 - RNA, 32 nt, Human
ugagaugagaggaucacuugagccugaggagg

SEQ ID NO: 512613 - RNA, 32 nt, Human
ugagaugagaggaucacuugagccuggggagg

SEQ ID NO: 512614 - RNA, 32 nt, Human
ugagaugagccccacguggagcucgggacgga

SEQ ID NO: 512615 - RNA, 32 nt, Human
ugagaugagccucaucccuggagggcagcaau

SEQ ID NO: 512616 - RNA, 32 nt, Human
ugagaugagcugccgagccucugccuccacuc

SEQ ID NO: 512617 - RNA, 32 nt, Human
ugagaugagugcugggagugguggacauuccu

SEQ ID NO: 512618 - RNA, 32 nt, Human
ugagaugauggaaauguucuaccucugcacuc

SEQ ID NO: 512619 - RNA, 32 nt, Human
ugagaugauggagagcagguucuuuuaacuca

SEQ ID NO: 512620 - RNA, 32 nt, Human
ugagaugauucugcuacuuuccagacuuuucu

SEQ ID NO: 512621 - RNA, 32 nt, Human
ugagaugcacacuggaaaaccggaacgcucaa

SEQ ID NO: 512622 - RNA, 32 nt, Human
ugagaugcagaaccuccaggagcacccaggcu

SEQ ID NO: 512623 - RNA, 32 nt, Human
ugagaugcagagucuagagugcaguggugcaa

SEQ ID NO: 512624 - RNA, 22 nt, Human
ugagaugcaggcccaggcugcu

SEQ ID NO: 512625 - RNA, 32 nt, Human
ugagaugcaugugggcagcaggaagcccaagu

SEQ ID NO: 512626 - RNA, 32 nt, Human
ugagaugcccaggaggaggagcccuagggaag

SEQ ID NO: 512627 - RNA, 32 nt, Human
ugagaugccucacccaggucucccucugucac

SEQ ID NO: 512628 - RNA, 32 nt, Human
ugagaugccugaugccauuguauuuucccuuc

SEQ ID NO: 512629 - RNA, 32 nt, Human
ugagaugccuggugagcauuacaggcaagggg

SEQ ID NO: 512630 - RNA, 32 nt, Human
ugagaugccuuacauggauucccaccacugca

SEQ ID NO: 512631 - RNA, 21 nt, Human
ugagaugcggucuugcucugu

SEQ ID NO: 512632 - RNA, 32 nt, Human
ugagaugcggucuugcucuguugcugaggcug

SEQ ID NO: 512633 - RNA, 29 nt, Human
ugagaugcuguugccgcugcugcugcugc

SEQ ID NO: 512634 - RNA, 32 nt, Human
ugagauggaaacagcaacuuguacaguggcug

SEQ ID NO: 512635 - RNA, 32 nt, Human
ugagauggaaccuggccucaguuuaggaacag

SEQ ID NO: 512636 - RNA, 32 nt, Human
ugagauggaagacaucguccaagaagauggag

SEQ ID NO: 512637 - RNA, 32 nt, Human
ugagauggaagaggaggaggaggaggagcugg

SEQ ID NO: 512638 - RNA, 21 nt, Human
ugagauggaaucccacucugu

SEQ ID NO: 512639 - RNA, 21 nt, Human
ugagauggaaucuagcucugu

SEQ ID NO: 512640 - RNA, 21 nt, Human
ugagauggaaucucacucugu

SEQ ID NO: 512641 - RNA, 32 nt, Human
ugagauggaaucucacucuguugcccaggcug

SEQ ID NO: 512642 - RNA, 21 nt, Human
ugagauggaaucucgcucugu

SEQ ID NO: 512643 - RNA, 21 nt, Human
ugagauggaaucucucucugu

SEQ ID NO: 512644 - RNA, 21 nt, Human
ugagauggacucuagcucugu

SEQ ID NO: 512645 - RNA, 21 nt, Human
ugagauggacucucacucugu

SEQ ID NO: 512646 - RNA, 21 nt, Human
ugagauggagacucacucugu

SEQ ID NO: 512647 - RNA, 32 nt, Human
ugagauggagacucacucuguugcccaggcug

SEQ ID NO: 512648 - RNA, 32 nt, Human
ugagauggagagaagaaugaagaggugguggu

SEQ ID NO: 512649 - RNA, 32 nt, Human
ugagauggagagaagaaugaaggggugguggu

SEQ ID NO: 512650 - RNA, 32 nt, Human
ugagauggagagacacgugaaccaccauugcu

SEQ ID NO: 512651 - RNA, 32 nt, Human
ugagauggagccuugcucugucacucaugcug

SEQ ID NO: 512652 - RNA, 32 nt, Human
ugagauggaggcuugcucugucacccaggcug

SEQ ID NO: 512653 - RNA, 32 nt, Human
ugagauggagucaugcucugucgcccaggcug

SEQ ID NO: 512654 - RNA, 21 nt, Human
ugagauggagucuagcucugu

SEQ ID NO: 512655 - RNA, 21 nt, Human
ugagauggagucucacgcugu

SEQ ID NO: 512656 - RNA, 21 nt, Human
ugagauggagucucacuccgu

SEQ ID NO: 512657 - RNA, 19 nt, Human
ugagauggagucucacucu

SEQ ID NO: 512658 - RNA, 21 nt, Human
ugagauggagucucacucugu

SEQ ID NO: 512659 - RNA, 32 nt, Human
ugagauggagucucacucuguugcccaggcug

SEQ ID NO: 512660 - RNA, 32 nt, Human
ugagauggagucucacucuguugcccagucug

SEQ ID NO: 512661 - RNA, 21 nt, Human
ugagauggagucucacuuugu

SEQ ID NO: 512662 - RNA, 21 nt, Human
ugagauggagucucccucugu

SEQ ID NO: 512663 - RNA, 21 nt, Human
ugagauggagucucgcacugu

SEQ ID NO: 512664 - RNA, 21 nt, Human
ugagauggagucucgcccugu

SEQ ID NO: 512665 - RNA, 19 nt, Human
ugagauggagucucgcucu

SEQ ID NO: 512666 - RNA, 20 nt, Human
ugagauggagucucgcucug

SEQ ID NO: 512667 - RNA, 21 nt, Human
ugagauggagucucgcucugu

SEQ ID NO: 512668 - RNA, 32 nt, Human
ugagauggagucucgcucugucaccaggcugg

SEQ ID NO: 512669 - RNA, 32 nt, Human
ugagauggagucucgcucugucacccagacug

SEQ ID NO: 512670 - RNA, 32 nt, Human
ugagauggagucucgcucugucacccaggcug

SEQ ID NO: 512671 - RNA, 32 nt, Human
ugagauggagucucgcucugucacccagucug

SEQ ID NO: 512672 - RNA, 32 nt, Human
ugagauggagucucgcucugucgccaaggcug

SEQ ID NO: 512673 - RNA, 32 nt, Human
ugagauggagucucgcucugucgccaggacug

SEQ ID NO: 512674 - RNA, 32 nt, Human
ugagauggagucucgcucugucgccaggcugg

SEQ ID NO: 512675 - RNA, 32 nt, Human
ugagauggagucucgcucugucgcccaggcug

SEQ ID NO: 512676 - RNA, 32 nt, Human
ugagauggagucucgcucugucgcccagguug

SEQ ID NO: 512677 - RNA, 32 nt, Human
ugagauggagucucgcucuguugcccaggcug

SEQ ID NO: 512678 - RNA, 32 nt, Human
ugagauggagucucgcucuguugcccagggug

SEQ ID NO: 512679 - RNA, 32 nt, Human
ugagauggagucucgcucuguugcccagguug

SEQ ID NO: 512680 - RNA, 21 nt, Human
ugagauggagucucgcuuugu

SEQ ID NO: 512681 - RNA, 32 nt, Human
ugagauggagucucgcuuuguugcccagacug

SEQ ID NO: 512682 - RNA, 32 nt, Human
ugagauggagucucgcuuuguugcccaggcug

SEQ ID NO: 512683 - RNA, 21 nt, Human
ugagauggagucucucucugu

SEQ ID NO: 512684 - RNA, 21 nt, Human
ugagauggagucuggcucugu

SEQ ID NO: 512685 - RNA, 21 nt, Human
ugagauggagucuuacucugu

SEQ ID NO: 512686 - RNA, 32 nt, Human
ugagauggagucuuacucugucacccaggcug

SEQ ID NO: 512687 - RNA, 21 nt, Human
ugagauggagucuugcccugu

SEQ ID NO: 512688 - RNA, 32 nt, Human
ugagauggagucuugcccuguugcccaggcug

SEQ ID NO: 512689 - RNA, 32 nt, Human
ugagauggagucuugcuccugucgcccaggcu

SEQ ID NO: 512690 - RNA, 32 nt, Human
ugagauggagucuugcuccuguugugcaggcu

SEQ ID NO: 512691 - RNA, 19 nt, Human
ugagauggagucuugcucu

SEQ ID NO: 512692 - RNA, 32 nt, Human
ugagauggagucuugcucuauugcccaggcug

SEQ ID NO: 512693 - RNA, 21 nt, Human
ugagauggagucuugcucugu

SEQ ID NO: 512694 - RNA, 32 nt, Human
ugagauggagucuugcucugucacccaaauug

SEQ ID NO: 512695 - RNA, 32 nt, Human
ugagauggagucuugcucugucacccaggcug

SEQ ID NO: 512696 - RNA, 32 nt, Human
ugagauggagucuugcucugucacccagguug

SEQ ID NO: 512697 - RNA, 32 nt, Human
ugagauggagucuugcucugucccccaugcug

SEQ ID NO: 512698 - RNA, 32 nt, Human
ugagauggagucuugcucugucgccagacugg

SEQ ID NO: 512699 - RNA, 32 nt, Human
ugagauggagucuugcucugucgcccaggcua

SEQ ID NO: 512700 - RNA, 32 nt, Human
ugagauggagucuugcucugucgcccaggcuc

SEQ ID NO: 512701 - RNA, 32 nt, Human
ugagauggagucuugcucugucgcccaggcug

SEQ ID NO: 512702 - RNA, 32 nt, Human
ugagauggagucuugcucugucgcccagguug

SEQ ID NO: 512703 - RNA, 32 nt, Human
ugagauggagucuugcucugucgcccaugcug

SEQ ID NO: 512704 - RNA, 32 nt, Human
ugagauggagucuugcucugucucccaggcua

SEQ ID NO: 512705 - RNA, 32 nt, Human
ugagauggagucuugcucugucucucaggcua

SEQ ID NO: 512706 - RNA, 32 nt, Human
ugagauggagucuugcucuguugcccagacug

SEQ ID NO: 512707 - RNA, 32 nt, Human
ugagauggagucuugcucuguugcccagcugg

SEQ ID NO: 512708 - RNA, 32 nt, Human
ugagauggagucuugcucuguugcccaggcug

SEQ ID NO: 512709 - RNA, 32 nt, Human
ugagauggagucuugcucuguugcccagguug

SEQ ID NO: 512710 - RNA, 32 nt, Human
ugagauggagucuugcucuguugcccaugcug

SEQ ID NO: 512711 - RNA, 32 nt, Human
ugagauggagucuugcucuguugccccagcuu

SEQ ID NO: 512712 - RNA, 32 nt, Human
ugagauggagucuugcucuguugccccaggcu

SEQ ID NO: 512713 - RNA, 32 nt, Human
ugagauggagucuugcucuguuguccaggcug

SEQ ID NO: 512714 - RNA, 32 nt, Human
ugagauggagucuugcucuugucgcccaggcu

SEQ ID NO: 512715 - RNA, 32 nt, Human
ugagauggagucuugcugugucaccaggaugg

SEQ ID NO: 512716 - RNA, 32 nt, Human
ugagauggagucuugcugugucgccuaggcug

SEQ ID NO: 512717 - RNA, 32 nt, Human
ugagauggagucuugcuguugucgccuaggcu

SEQ ID NO: 512718 - RNA, 32 nt, Human
ugagauggagucuugcuuugucgcccaggcug

SEQ ID NO: 512719 - RNA, 32 nt, Human
ugagauggagucuuguucugucacccaggcug

SEQ ID NO: 512720 - RNA, 32 nt, Human
ugagauggagucuuucucugucacccaggcug

SEQ ID NO: 512721 - RNA, 32 nt, Human
ugagauggagugagcugagacagauaagagaa

SEQ ID NO: 512722 - RNA, 32 nt, Human
ugagauggaguguugcccuguugccaggcugg

SEQ ID NO: 512723 - RNA, 32 nt, Human
ugagauggaguuucacccuuguugcccaggcu

SEQ ID NO: 512724 - RNA, 21 nt, Human
ugagauggaguuucacucugu

SEQ ID NO: 512725 - RNA, 21 nt, Human
ugagauggaguuucgcucugu

SEQ ID NO: 512726 - RNA, 32 nt, Human
ugagauggaguuucgcucuguugcccaggcug

SEQ ID NO: 512727 - RNA, 29 nt, Human
ugagauggaguuuucgcucuuguugccca

SEQ ID NO: 512728 - RNA, 32 nt, Human
ugagauggaguuuugcucugucacccaggcug

SEQ ID NO: 512729 - RNA, 29 nt, Human
ugagauggauggagaggccacagugaagc

SEQ ID NO: 512730 - RNA, 32 nt, Human
ugagauggauggcaaaccccauuuuuaaguua

SEQ ID NO: 512731 - RNA, 21 nt, Human
ugagauggauucucgcucugu

SEQ ID NO: 512732 - RNA, 21 nt, Human
ugagauggauucuugcucugu

SEQ ID NO: 512733 - RNA, 32 nt, Human
ugagauggauucuugcucugucaccaggcugg

SEQ ID NO: 512734 - RNA, 32 nt, Human
ugagauggcaacauuacacucuagccugagca

SEQ ID NO: 512735 - RNA, 32 nt, Human
ugagauggcaccacugcacuccagccugggag

SEQ ID NO: 512736 - RNA, 32 nt, Human
ugagauggcaccacugcacuccagccugggug

SEQ ID NO: 512737 - RNA, 32 nt, Human
ugagauggcaccacugcacuccagcuugggug

SEQ ID NO: 512738 - RNA, 32 nt, Human
ugagauggcaccacugcacuccggccuaggca

SEQ ID NO: 512739 - RNA, 32 nt, Human
ugagauggcagacaggagagaugggccccagg

SEQ ID NO: 512740 - RNA, 21 nt, Human
ugagauggcaucuugcucugu

SEQ ID NO: 512741 - RNA, 32 nt, Human
ugagauggcaucuugcucugucgcccaggaug

SEQ ID NO: 512742 - RNA, 31 nt, Human
ugagauggccguuucugacuuguagagaaau

SEQ ID NO: 512743 - RNA, 32 nt, Human
ugagauggcgccacugcacuccagccuaggca

SEQ ID NO: 512744 - RNA, 32 nt, Human
ugagauggcgccacugcacuccagccugggcg

SEQ ID NO: 512745 - RNA, 32 nt, Human
ugagauggcgccaucacacuccagccugcucu

SEQ ID NO: 512746 - RNA, 32 nt, Human
ugagauggcucacgccugcaaucccagcgcuu

SEQ ID NO: 512747 - RNA, 32 nt, Human
ugagaugggaacacuuuuuaguauaaacgcaa

SEQ ID NO: 512748 - RNA, 32 nt, Human
ugagaugggaagaucacuugagccccggaggu

SEQ ID NO: 512749 - RNA, 32 nt, Human
ugagaugggaaggucacuugagcccaggaccc

SEQ ID NO: 512750 - RNA, 32 nt, Human
ugagaugggagacaggagagaugagccccagg

SEQ ID NO: 512751 - RNA, 32 nt, Human
ugagaugggaggaccauuugagccugggagau

SEQ ID NO: 512752 - RNA, 32 nt, Human
ugagaugggaggagcacuugagccuaggaggu

SEQ ID NO: 512753 - RNA, 32 nt, Human
ugagaugggaggaucacuugaacccaggaggu

SEQ ID NO: 512754 - RNA, 32 nt, Human
ugagaugggaggaucacuugaagccaggaguu

SEQ ID NO: 512755 - RNA, 32 nt, Human
ugagaugggaggaucacuugaggccaagaguu

SEQ ID NO: 512756 - RNA, 32 nt, Human
ugagaugggaggaucaucugagccugggaggg

SEQ ID NO: 512757 - RNA, 32 nt, Human
ugagaugggaggaucgcuugagaccagccugg

SEQ ID NO: 512758 - RNA, 32 nt, Human
ugagaugggaggaucgcuugagcccaggaauu

SEQ ID NO: 512759 - RNA, 32 nt, Human
ugagaugggaggaucucuugagaccagguguu

SEQ ID NO: 512760 - RNA, 32 nt, Human
ugagaugggaggaugagggaggucggggcugc

SEQ ID NO: 512761 - RNA, 32 nt, Human
ugagaugggaggauggcuugagcccaggaguu

SEQ ID NO: 512762 - RNA, 32 nt, Human
ugagaugggaggauggcuugaggccagagguu

SEQ ID NO: 512763 - RNA, 32 nt, Human
ugagaugggaggauugccugagcccagggaug

SEQ ID NO: 512764 - RNA, 32 nt, Human
ugagaugggaggauugcuugagcccaggaggu

SEQ ID NO: 512765 - RNA, 32 nt, Human
ugagaugggaggguuaaggcucagggauuuua

SEQ ID NO: 512766 - RNA, 22 nt, Human
ugagaugggagucuugcucugu

SEQ ID NO: 512767 - RNA, 32 nt, Human
ugagaugggauccuauguguuuggaaaacgug

SEQ ID NO: 512768 - RNA, 32 nt, Human
ugagaugggcagaucacuugaggucaggaguu

SEQ ID NO: 512769 - RNA, 32 nt, Human
ugagaugggccccacaccaggacuggacuggg

SEQ ID NO: 512770 - RNA, 20 nt, Human
ugagaugggccuuacucugu

SEQ ID NO: 512771 - RNA, 29 nt, Human
ugagauggggacucacucuguugcccagg

SEQ ID NO: 512772 - RNA, 32 nt, Human
ugagauggggccacugcacugcagccugugug

SEQ ID NO: 512773 - RNA, 22 nt, Human
ugagaugggggucuugcucugu

SEQ ID NO: 512774 - RNA, 21 nt, Human
ugagauggggucucgcacugu

SEQ ID NO: 512775 - RNA, 32 nt, Human
ugagauggggucucgcacugucccccaggcug

SEQ ID NO: 512776 - RNA, 21 nt, Human
ugagauggggucucgcuaugu

SEQ ID NO: 512777 - RNA, 32 nt, Human
ugagauggggucucgcuauguugaccaggcug

SEQ ID NO: 512778 - RNA, 21 nt, Human
ugagauggggucucgcucugu

SEQ ID NO: 512779 - RNA, 32 nt, Human
ugagauggggucucgcucugucaccaggcugg

SEQ ID NO: 512780 - RNA, 32 nt, Human
ugagauggggucucgcucugucgcccaggcug

SEQ ID NO: 512781 - RNA, 32 nt, Human
ugagauggggucuuccucuguugcccaggcug

SEQ ID NO: 512782 - RNA, 32 nt, Human
ugagauggggucuugcuauguugcccaggcug

SEQ ID NO: 512783 - RNA, 21 nt, Human
ugagauggggucuugcucugu

SEQ ID NO: 512784 - RNA, 32 nt, Human
ugagauggggucuugcucugucgcccaggcug

SEQ ID NO: 512785 - RNA, 32 nt, Human
ugagaugggguuucaccacguuggccaggcug

SEQ ID NO: 512786 - RNA, 32 nt, Human
ugagaugggguuucaccaugguagccaggcug

SEQ ID NO: 512787 - RNA, 32 nt, Human
ugagaugggguuuuaccauguuacccaggcug

SEQ ID NO: 512788 - RNA, 32 nt, Human
ugagaugggguuuugccguguuacccaggcua

SEQ ID NO: 512789 - RNA, 32 nt, Human
ugagaugggguuuuuccacguuggucaggcug

SEQ ID NO: 512790 - RNA, 32 nt, Human
ugagauggguggaucaccugagcucaggaguu

SEQ ID NO: 512791 - RNA, 32 nt, Human
ugagauggguggauugcuugagcccaggaguu

SEQ ID NO: 512792 - RNA, 32 nt, Human
ugagauggguucucacuauauuguccaggcua

SEQ ID NO: 512793 - RNA, 32 nt, Human
ugagaugguacagugugcacagacagguacug

SEQ ID NO: 512794 - RNA, 32 nt, Human
ugagaugguaccacugcacuccagccugggug

SEQ ID NO: 512795 - RNA, 18 nt, Human
ugagaugguccacucugu

SEQ ID NO: 512796 - RNA, 32 nt, Human
ugagauggugacaggcuggccugcagucagca

SEQ ID NO: 512797 - RNA, 32 nt, Human
ugagauggugccacugcacuccagccuggcga

SEQ ID NO: 512798 - RNA, 32 nt, Human
ugagauggugccacugcacuccagccugggca

SEQ ID NO: 512799 - RNA, 32 nt, Human
ugagauggugccacugcacuccagccugggcg

SEQ ID NO: 512800 - RNA, 32 nt, Human
ugagauggugccacugcacuccagccuggggg

SEQ ID NO: 512801 - RNA, 32 nt, Human
ugagauggugccacugcacuccagcuuaggug

SEQ ID NO: 512802 - RNA, 32 nt, Human
ugagauggugccacugcacucuaaccugggcg

SEQ ID NO: 512803 - RNA, 32 nt, Human
ugagauggugucuugcucugucacccaggcug

SEQ ID NO: 512804 - RNA, 32 nt, Human
ugagauggugucuugcucuuuugcccagacug

SEQ ID NO: 512805 - RNA, 32 nt, Human
ugagaugguuaaguguuugagcagacugugac

SEQ ID NO: 512806 - RNA, 32 nt, Human
ugagauguaccaugaacuaacaauucuuugaa

SEQ ID NO: 512807 - RNA, 32 nt, Human
ugagauguaguuuucccaucuccugggaaggg

SEQ ID NO: 512808 - RNA, 32 nt, Human
ugagaugucuuccauaucuauaccuuugugca

SEQ ID NO: 512809 - RNA, 32 nt, Human
ugagaugugaagacuacuugagcucagaaguu

SEQ ID NO: 512810 - RNA, 32 nt, Human
ugagaugugagaauugcuugagcccaggaguu

SEQ ID NO: 512811 - RNA, 32 nt, Human
ugagaugugagccuugugcaugugggggagga

SEQ ID NO: 512812 - RNA, 32 nt, Human
ugagaugugaggaggaggaggaagaaaaugag

SEQ ID NO: 512813 - RNA, 32 nt, Human
ugagaugugagugaggaaggcuuugagauggu

SEQ ID NO: 512814 - RNA, 32 nt, Human
ugagaugugccuggauguucccuaaagagcuu

SEQ ID NO: 512815 - RNA, 32 nt, Human
ugagauguugaaugaugccuuuacagacuuca

SEQ ID NO: 512816 - RNA, 32 nt, Human
ugagauuaaagagguaaagcccaugacgugcu

SEQ ID NO: 512817 - RNA, 32 nt, Human
ugagauuaaaggaggcagggaggugagaggaa

SEQ ID NO: 512818 - RNA, 32 nt, Human
ugagauuaacaccccauccccgggagaacucu

SEQ ID NO: 512819 - RNA, 21 nt, Human
ugagauuacaggcaugagcca

SEQ ID NO: 512820 - RNA, 21 nt, Human
ugagauuacaggcaugaguca

SEQ ID NO: 512821 - RNA, 21 nt, Human
ugagauuacaggcaugcgcca

SEQ ID NO: 512822 - RNA, 21 nt, Human
ugagauuacaggcaugggcca

SEQ ID NO: 512823 - RNA, 22 nt, Human
ugagauuacagucucgcucugu

SEQ ID NO: 512824 - RNA, 32 nt, Human
ugagauuaccugggucuagagugcggagcugc

SEQ ID NO: 512825 - RNA, 32 nt, Human
ugagauuaccuuucuguuccuugcaguucacc

SEQ ID NO: 512826 - RNA, 32 nt, Human
ugagauuacgccacugcacuccagccugggca

SEQ ID NO: 512827 - RNA, 32 nt, Human
ugagauuacgcugccuuaauguaacacagucu

SEQ ID NO: 512828 - RNA, 32 nt, Human
ugagauuacugaugcuucacuugcacucuaag

SEQ ID NO: 512829 - RNA, 32 nt, Human
ugagauuaguguugacagggaggggaggauug

SEQ ID NO: 512830 - RNA, 21 nt, Human
ugagauuauaggcacgagcca

SEQ ID NO: 512831 - RNA, 21 nt, Human
ugagauuauaggcaugagcca

SEQ ID NO: 512832 - RNA, 32 nt, Human
ugagauuauaggccuaccaccaugcccagcca

SEQ ID NO: 512833 - RNA, 32 nt, Human
ugagauuauccauuuuguugcauauguaagua

SEQ ID NO: 512834 - RNA, 32 nt, Human
ugagauuaugccacuguacuccagccugggug

SEQ ID NO: 512835 - RNA, 32 nt, Human
ugagauucaaaggaaucucacuguuccuaaau

SEQ ID NO: 512836 - RNA, 23 nt, Human
ugagauucagcauccccuggagg

SEQ ID NO: 512837 - RNA, 32 nt, Human
ugagauucagcccuguggagguggccaaggcu

SEQ ID NO: 512838 - RNA, 32 nt, Human
ugagauucccaggugcacgcaugcauggacac

SEQ ID NO: 512839 - RNA, 32 nt, Human
ugagauucuccucuauuggaagcuaauuagcc

SEQ ID NO: 512840 - RNA, 32 nt, Human
ugagauucugucucaaaauaaauacauacaua

SEQ ID NO: 512841 - RNA, 32 nt, Human
ugagauucuuuauacucucugccuucagcaau

SEQ ID NO: 512842 - RNA, 32 nt, Human
ugagauugaaacgugaaguauuuggaaaacaa

SEQ ID NO: 512843 - RNA, 32 nt, Human
ugagauugagcagaagaucaaggaguacaaug

SEQ ID NO: 512844 - RNA, 32 nt, Human
ugagauugcaccacggcacuccagccugggug

SEQ ID NO: 512845 - RNA, 32 nt, Human
ugagauugcaccacuacacuccagccuggaug

SEQ ID NO: 512846 - RNA, 32 nt, Human
ugagauugcaccacuacacuccagccugggug

SEQ ID NO: 512847 - RNA, 32 nt, Human
ugagauugcaccacugcacuccagcccaggca

SEQ ID NO: 512848 - RNA, 32 nt, Human
ugagauugcaccacugcacuccagccugggca

SEQ ID NO: 512849 - RNA, 32 nt, Human
ugagauugcaccacugcacuccagccugggcg

SEQ ID NO: 512850 - RNA, 32 nt, Human
ugagauugcaccacugcacuccagccugggga

SEQ ID NO: 512851 - RNA, 32 nt, Human
ugagauugcaccacugcacuccagccugggug

SEQ ID NO: 512852 - RNA, 32 nt, Human
ugagauugcaccacugcacuccagccugguga

SEQ ID NO: 512853 - RNA, 32 nt, Human
ugagauugcaccacugcacuccagucugggug

SEQ ID NO: 512854 - RNA, 32 nt, Human
ugagauugcaccacugcauuccagccuggaug

SEQ ID NO: 512855 - RNA, 32 nt, Human
ugagauugcaccacuguacuccaaccugggcg

SEQ ID NO: 512856 - RNA, 32 nt, Human
ugagauugcaccacuguacuccagcacucuag

SEQ ID NO: 512857 - RNA, 32 nt, Human
ugagauugcaccauugcacuccagccugggca

SEQ ID NO: 512858 - RNA, 32 nt, Human
ugagauugcaccauugcacuccagccugggcg

SEQ ID NO: 512859 - RNA, 32 nt, Human
ugagauugcaccauugcacuccagccugugca

SEQ ID NO: 512860 - RNA, 32 nt, Human
ugagauugcaccauugcauuccagccugggca

SEQ ID NO: 512861 - RNA, 32 nt, Human
ugagauugcaccauuucauuccagccugggca

SEQ ID NO: 512862 - RNA, 32 nt, Human
ugagauugcacuauugcacuccagccugggca

SEQ ID NO: 512863 - RNA, 32 nt, Human
ugagauugcacuccagccugggcgacaggcuc

SEQ ID NO: 512864 - RNA, 32 nt, Human
ugagauugcaucauugcacuccagccugggca

SEQ ID NO: 512865 - RNA, 32 nt, Human
ugagauugcgaaggguggcagauggagguuac

SEQ ID NO: 512866 - RNA, 32 nt, Human
ugagauugcgccaccgcacuccagccugggca

SEQ ID NO: 512867 - RNA, 32 nt, Human
ugagauugcgccaccgcacuccagccugggcg

SEQ ID NO: 512868 - RNA, 32 nt, Human
ugagauugcgccacugcaccccagcaugagcg

SEQ ID NO: 512869 - RNA, 32 nt, Human
ugagauugcgccacugcaccccagccugggug

SEQ ID NO: 512870 - RNA, 32 nt, Human
ugagauugcgccacugcacuccagcccuggcg

SEQ ID NO: 512871 - RNA, 32 nt, Human
ugagauugcgccacugcacuccagccuggcga

SEQ ID NO: 512872 - RNA, 32 nt, Human
ugagauugcgccacugcacuccagccugggca

SEQ ID NO: 512873 - RNA, 32 nt, Human
ugagauugcgccacugcacuccagccugggcg

SEQ ID NO: 512874 - RNA, 32 nt, Human
ugagauugcgccacugcacuccagccugggcu

SEQ ID NO: 512875 - RNA, 32 nt, Human
ugagauugcgccacugcacuccagccugggug

SEQ ID NO: 512876 - RNA, 32 nt, Human
ugagauugcgccacugcacuccagucuggucg

SEQ ID NO: 512877 - RNA, 32 nt, Human
ugagauugcgccauugcacuccagccugggca

SEQ ID NO: 512878 - RNA, 32 nt, Human
ugagauugcgccauugcacuccagccugggga

SEQ ID NO: 512879 - RNA, 32 nt, Human
ugagauugcgccauugcauuccagccugggug

SEQ ID NO: 512880 - RNA, 32 nt, Human
ugagauugcgcugcugcacuccaaccugggcg

SEQ ID NO: 512881 - RNA, 32 nt, Human
ugagauuggaccacugcucuccagccugggca

SEQ ID NO: 512882 - RNA, 32 nt, Human
ugagauuggcccccucccucgacggggcgggu

SEQ ID NO: 512883 - RNA, 32 nt, Human
ugagauuggcuuucacugcacugagccacaau

SEQ ID NO: 512884 - RNA, 32 nt, Human
ugagauugggccacugcacuccacccugggcg

SEQ ID NO: 512885 - RNA, 32 nt, Human
ugagauuguacauuucuuacuacucuucuacu

SEQ ID NO: 512886 - RNA, 32 nt, Human
ugagauuguaccacugcacuccagucugggca

SEQ ID NO: 512887 - RNA, 32 nt, Human
ugagauuguaccacugcgcuccaaacugggug

SEQ ID NO: 512888 - RNA, 32 nt, Human
ugagauuguaccaugcacuccagccuggguaa

SEQ ID NO: 512889 - RNA, 32 nt, Human
ugagauuguaccauugcacuccagccugggca

SEQ ID NO: 512890 - RNA, 32 nt, Human
ugagauugugccacuacacuccagccugggca

SEQ ID NO: 512891 - RNA, 32 nt, Human
ugagauugugccacugcacaccagccuggaca

SEQ ID NO: 512892 - RNA, 32 nt, Human
ugagauugugccacugcacgcacuccagccug

SEQ ID NO: 512893 - RNA, 32 nt, Human
ugagauugugccacugcacuccagccugggag

SEQ ID NO: 512894 - RNA, 32 nt, Human
ugagauugugccacugcacuccagccugggca

SEQ ID NO: 512895 - RNA, 32 nt, Human
ugagauugugccacugcacuccagccugggcc

SEQ ID NO: 512896 - RNA, 32 nt, Human
ugagauugugccacugcacuccagccugggcg

SEQ ID NO: 512897 - RNA, 32 nt, Human
ugagauugugccacugcacuccagccugggug

SEQ ID NO: 512898 - RNA, 32 nt, Human
ugagauugugccacugcacucuagccugggug

SEQ ID NO: 512899 - RNA, 32 nt, Human
ugagauugugccacugcacuucagccugggcg

SEQ ID NO: 512900 - RNA, 32 nt, Human
ugagauugugccacugcacuucagcuugggug

SEQ ID NO: 512901 - RNA, 32 nt, Human
ugagauugugccacuguacugcagccugggug

SEQ ID NO: 512902 - RNA, 32 nt, Human
ugagauugugccacuucacuccagccugggug

SEQ ID NO: 512903 - RNA, 32 nt, Human
ugagauugugccauugcacuccagccugggca

SEQ ID NO: 512904 - RNA, 32 nt, Human
ugagauugugccauugcacuccagccugggcg

SEQ ID NO: 512905 - RNA, 32 nt, Human
ugagauugugccauugcacuccagccugggcu

SEQ ID NO: 512906 - RNA, 32 nt, Human
ugagauugugccauugcacuccagccugggug

SEQ ID NO: 512907 - RNA, 32 nt, Human
ugagauugugccgcugcacuccagccuggcga

SEQ ID NO: 512908 - RNA, 32 nt, Human
ugagauugugcugcugcacuccagccugggag

SEQ ID NO: 512909 - RNA, 32 nt, Human
ugagauuguggcacugcacuccagucugggug

SEQ ID NO: 512910 - RNA, 32 nt, Human
ugagauuguggcucccccucuggaggaggugg

SEQ ID NO: 512911 - RNA, 32 nt, Human
ugagauugugucauugcacuccagccugggca

SEQ ID NO: 512912 - RNA, 23 nt, Human
ugagauuuacaagugacugugau

SEQ ID NO: 512913 - RNA, 21 nt, Human
ugagauuuauucacuaucaca

SEQ ID NO: 512914 - RNA, 32 nt, Human
ugagauuucacugcauuuccccacucugccca

SEQ ID NO: 512915 - RNA, 32 nt, Human
ugagauuuccaucauucagaacagaggcuuuu

SEQ ID NO: 512916 - RNA, 32 nt, Human
ugagauuucuuccuuuuccuuucggauucccc

SEQ ID NO: 512917 - RNA, 32 nt, Human
ugagauuuggguggggacagagccaaaccaua

SEQ ID NO: 512918 - RNA, 32 nt, Human
ugagauuuguucauguuguucucccccuccuu

SEQ ID NO: 512919 - RNA, 32 nt, Human
ugagauuuugcaacugcacuccagccugggcu

SEQ ID NO: 512920 - RNA, 32 nt, Human
ugagauuuugcagguaaaccugggcggugugg

SEQ ID NO: 512921 - RNA, 32 nt, Human
ugagauuuugguauuacacuguauuuguaucu

SEQ ID NO: 512922 - RNA, 32 nt, Human
ugagauuuuugaaaagaguauuuucaguaaua

SEQ ID NO: 512923 - RNA, 32 nt, Human
ugagcaaaaagaccagccuucccaacaugccu

SEQ ID NO: 512924 - RNA, 32 nt, Human
ugagcaaacagccccuucucucgcuuuggguc

SEQ ID NO: 512925 - RNA, 32 nt, Human
ugagcaaacuauuugcgacucacccacaauuc

SEQ ID NO: 512926 - RNA, 32 nt, Human
ugagcaaagauggaucaggaaggugggggaga

SEQ ID NO: 512927 - RNA, 32 nt, Human
ugagcaaaugaauuuaaaaauagacagcaguu

SEQ ID NO: 512928 - RNA, 32 nt, Human
ugagcaaaugggcaguuguggagcucaagccu

SEQ ID NO: 512929 - RNA, 32 nt, Human
ugagcaaauuaaaagcucaucaauuucauaag

SEQ ID NO: 512930 - RNA, 32 nt, Human
ugagcaacaaagcaagaccccaucucuauaaa

SEQ ID NO: 512931 - RNA, 32 nt, Human
ugagcaacaaagcgagaucccaucucuacaaa

SEQ ID NO: 512932 - RNA, 32 nt, Human
ugagcaacacccgucgaacacagccauccacc

SEQ ID NO: 512933 - RNA, 32 nt, Human
ugagcaacagagcaaaaccccgucucuaaaau

SEQ ID NO: 512934 - RNA, 32 nt, Human
ugagcaacaguuacacuagguagaaaaguauu

SEQ ID NO: 512935 - RNA, 32 nt, Human
ugagcaacauaucaaaaccccaucucuacaaa

SEQ ID NO: 512936 - RNA, 32 nt, Human
ugagcaacauaucaaaaccccgucucuacaaa

SEQ ID NO: 512937 - RNA, 32 nt, Human
ugagcaacaugaugagaccccaucucuacaaa

SEQ ID NO: 512938 - RNA, 32 nt, Human
ugagcaacauggcgaaaccccgucucuacuaa

SEQ ID NO: 512939 - RNA, 32 nt, Human
ugagcaacauggcgaaaccccgucuguaauaa

SEQ ID NO: 512940 - RNA, 32 nt, Human
ugagcaacaugguaaaaccccaucucuaccaa

SEQ ID NO: 512941 - RNA, 32 nt, Human
ugagcaacauuaggcuagaggggucuuguuca

SEQ ID NO: 512942 - RNA, 32 nt, Human
ugagcaaccuggacuucugcuuacuggccaga

SEQ ID NO: 512943 - RNA, 32 nt, Human
ugagcaacugcacccagccuaguugaguauac

SEQ ID NO: 512944 - RNA, 32 nt, Human
ugagcaacuguacuccagcuuggcgacagagc

SEQ ID NO: 512945 - RNA, 32 nt, Human
ugagcaacugugcaaggccugguguuucuuga

SEQ ID NO: 512946 - RNA, 32 nt, Human
ugagcaagaccacuuggcucccuggcuucagu

SEQ ID NO: 512947 - RNA, 32 nt, Human
ugagcaagauuugggucucuccagaccucugg

SEQ ID NO: 512948 - RNA, 21 nt, Human
ugagcaagcagcucagggucu

SEQ ID NO: 512949 - RNA, 32 nt, Human
ugagcaagcguaucacaucugcccucccugca

SEQ ID NO: 512950 - RNA, 32 nt, Human
ugagcaaggccuucacugcagccccaucuccu

SEQ ID NO: 512951 - RNA, 32 nt, Human
ugagcaagggcugucugcagaaacccccauca

SEQ ID NO: 512952 - RNA, 32 nt, Human
ugagcaaucuguccuuccuagugaccauccag

SEQ ID NO: 512953 - RNA, 32 nt, Human
ugagcaaugaggaggaguggaaaacaaaaccc

SEQ ID NO: 512954 - RNA, 32 nt, Human
ugagcaaugcaaccuaaugacacccggagcuc

SEQ ID NO: 512955 - RNA, 23 nt, Human
ugagcaaugcuugauugauucua

SEQ ID NO: 512956 - RNA, 32 nt, Human
ugagcaauguggugaaaccccaucucuacuaa

SEQ ID NO: 512957 - RNA, 32 nt, Human
ugagcaauguuaacuguuaacacugcccaagg

SEQ ID NO: 512958 - RNA, 32 nt, Human
ugagcaauuugaaugacuuaacacagugucau

SEQ ID NO: 512959 - RNA, 21 nt, Human
ugagcacaaagcccgcucugu

SEQ ID NO: 512960 - RNA, 32 nt, Human
ugagcacaacuuuauggcuuacacaggguagu

SEQ ID NO: 512961 - RNA, 32 nt, Human
ugagcacaaugccaaccuuaguguuucuccag

SEQ ID NO: 512962 - RNA, 32 nt, Human
ugagcacaaugccaucacuuaacuauaacucu

SEQ ID NO: 512963 - RNA, 32 nt, Human
ugagcacacaauuaugcaaauauuuuaauguu

SEQ ID NO: 512964 - RNA, 32 nt, Human
ugagcacacagcaaugguaucaccuagagaag

SEQ ID NO: 512965 - RNA, 32 nt, Human
ugagcacacccagcaaaguccacccaggaaaa

SEQ ID NO: 512966 - RNA, 32 nt, Human
ugagcacagaugaucaacagaaaauccaagca

SEQ ID NO: 512967 - RNA, 32 nt, Human
ugagcacagcacagugccuggcacacagcaaa

SEQ ID NO: 512968 - RNA, 32 nt, Human
ugagcacaggagacggagguugcugugagcug

SEQ ID NO: 512969 - RNA, 32 nt, Human
ugagcacaggaguucaagaccagcgugggcaa

SEQ ID NO: 512970 - RNA, 32 nt, Human
ugagcacauaagcagaggcugcaggaacuugu

SEQ ID NO: 512971 - RNA, 32 nt, Human
ugagcacaugagauuuggaggggccaggggcg

SEQ ID NO: 512972 - RNA, 32 nt, Human
ugagcaccacugcacuaagccagugcggagcu

SEQ ID NO: 512973 - RNA, 32 nt, Human
ugagcaccagcacuuccagcgcuucacuuaac

SEQ ID NO: 512974 - RNA, 32 nt, Human
ugagcaccagggcauccucuaggcgccaggac

SEQ ID NO: 512975 - RNA, 32 nt, Human
ugagcacccaggagucugggcccaggggccag

SEQ ID NO: 512976 - RNA, 32 nt, Human
ugagcacccugcagcccccacccaagauggcc

SEQ ID NO: 512977 - RNA, 32 nt, Human
ugagcaccgugcagucggccucccaggccaug

SEQ ID NO: 512978 - RNA, 32 nt, Human
ugagcaccuccaggagccucaguuucgccuuu

SEQ ID NO: 512979 - RNA, 32 nt, Human
ugagcaccucccagguuccaagcccugggcca

SEQ ID NO: 512980 - RNA, 32 nt, Human
ugagcaccuccccucugagcacuucccuugug

SEQ ID NO: 512981 - RNA, 32 nt, Human
ugagcaccuggggaucccaggaacccugguca

SEQ ID NO: 512982 - RNA, 18 nt, Human
ugagcaccuguaauccca

SEQ ID NO: 512983 - RNA, 32 nt, Human
ugagcaccuguaaucccagcuacucuggaggc

SEQ ID NO: 512984 - RNA, 18 nt, Human
ugagcaccuguaauccua

SEQ ID NO: 512985 - RNA, 32 nt, Human
ugagcaccuguaauccuagcuacuugggaggc

SEQ ID NO: 512986 - RNA, 32 nt, Human
ugagcaccuuucuccccuccccucuuuccuca

SEQ ID NO: 512987 - RNA, 32 nt, Human
ugagcacgucuucuccaaccuggagccugcca

SEQ ID NO: 512988 - RNA, 32 nt, Human
ugagcacuauuaaaauacaugcauuggcucaa

SEQ ID NO: 512989 - RNA, 32 nt, Human
ugagcacucccagguccucagcacucccaggu

SEQ ID NO: 512990 - RNA, 32 nt, Human
ugagcacucuacuggcugucccugagccucua

SEQ ID NO: 512991 - RNA, 32 nt, Human
ugagcacugaguagcagguucuggagacuacc

SEQ ID NO: 512992 - RNA, 32 nt, Human
ugagcacugcucauguguggaugccccugcaa

SEQ ID NO: 512993 - RNA, 22 nt, Human
ugagcacugcucccagcucugu

SEQ ID NO: 512994 - RNA, 32 nt, Human
ugagcacugcucccagcucuguuuuuguuuuu

SEQ ID NO: 512995 - RNA, 32 nt, Human
ugagcacuguaaccaguccaguugcuucugga

SEQ ID NO: 512996 - RNA, 32 nt, Human
ugagcacuguaggcaagagggaagaaagagaa

SEQ ID NO: 512997 - RNA, 32 nt, Human
ugagcacuuagggcaucaggaacagugcuacu

SEQ ID NO: 512998 - RNA, 32 nt, Human
ugagcacuuccguggacugaaggaaccguagg

SEQ ID NO: 512999 - RNA, 32 nt, Human
ugagcacuugaaauugaguuauugagcacuga

SEQ ID NO: 513000 - RNA, 32 nt, Human
ugagcacuuuaaaaucugaacuuucaaagcuu

SEQ ID NO: 513001 - RNA, 32 nt, Human
ugagcagaaaagagcacugagagcacuuggga

SEQ ID NO: 513002 - RNA, 32 nt, Human
ugagcagaaaggcccuguucaaagcacacagc

SEQ ID NO: 513003 - RNA, 32 nt, Human
ugagcagaacuccuaugcagccugagagaagu

SEQ ID NO: 513004 - RNA, 32 nt, Human
ugagcagaagacggcugugccacccacguaug

SEQ ID NO: 513005 - RNA, 32 nt, Human
ugagcagaagcauaacaaaugcaaaugaagag

SEQ ID NO: 513006 - RNA, 31 nt, Human
ugagcagaaguagagaagaaagacuguaugu

SEQ ID NO: 513007 - RNA, 32 nt, Human
ugagcagacccaccuccuccagcuuggguggc

SEQ ID NO: 513008 - RNA, 32 nt, Human
ugagcagaccuggcucaccacaggguccuacu

SEQ ID NO: 513009 - RNA, 32 nt, Human
ugagcagacucuccagcagacucuccagcccu

SEQ ID NO: 513010 - RNA, 32 nt, Human
ugagcagagaacacagcaaauuuguccagacu

SEQ ID NO: 513011 - RNA, 32 nt, Human
ugagcagagacuccacagacacccuaaaaagg

SEQ ID NO: 513012 - RNA, 32 nt, Human
ugagcagagcccauccaggacacuccacacug

SEQ ID NO: 513013 - RNA, 32 nt, Human
ugagcagaggagaaaaucagaaagauggcuua

SEQ ID NO: 513014 - RNA, 23 nt, Human
ugagcagauacaggaguggggag

SEQ ID NO: 513015 - RNA, 32 nt, Human
ugagcagauagaaaucugcaguguuggcagau

SEQ ID NO: 513016 - RNA, 32 nt, Human
ugagcagaucucuguggguguggagcuuguug

SEQ ID NO: 513017 - RNA, 32 nt, Human
ugagcagaugcuggagaacuagccagggagau

SEQ ID NO: 513018 - RNA, 32 nt, Human
ugagcagcaccaucccagcccuggggccugcu

SEQ ID NO: 513019 - RNA, 32 nt, Human
ugagcagcagagggccggccacaagcgagugu

SEQ ID NO: 513020 - RNA, 32 nt, Human
ugagcagcagauagagacacaggccugugguc

SEQ ID NO: 513021 - RNA, 32 nt, Human
ugagcagcagcagcaagcaucacuuugggcuu

SEQ ID NO: 513022 - RNA, 32 nt, Human
ugagcagcagggagagacagagacuggacaug

SEQ ID NO: 513023 - RNA, 32 nt, Human
ugagcagcauuuucauagggaccgacuucagu

SEQ ID NO: 513024 - RNA, 32 nt, Human
ugagcagccacacucgcaccuccugggugcug

SEQ ID NO: 513025 - RNA, 32 nt, Human
ugagcagccucgugccugucuccuuugcuaca

SEQ ID NO: 513026 - RNA, 32 nt, Human
ugagcagccugacuguagcccagaaucaccau

SEQ ID NO: 513027 - RNA, 32 nt, Human
ugagcagccuggugguacuggccacgccccuc

SEQ ID NO: 513028 - RNA, 32 nt, Human
ugagcagcugugguaauguacuuccaaagccc

SEQ ID NO: 513029 - RNA, 32 nt, Human
ugagcagcuucucaacaugaacuacagccucc

SEQ ID NO: 513030 - RNA, 32 nt, Human
ugagcagcuucuuuuaaauagcaacaccgagg

SEQ ID NO: 513031 - RNA, 32 nt, Human
ugagcagcuugaugguuucuccuugccccauu

SEQ ID NO: 513032 - RNA, 32 nt, Human
ugagcaggaagcucauguauguuugcauuuca

SEQ ID NO: 513033 - RNA, 32 nt, Human
ugagcaggacagccagcagcaggaugggcuga

SEQ ID NO: 513034 - RNA, 22 nt, Human
ugagcaggagaaccgcuggaac

SEQ ID NO: 513035 - RNA, 32 nt, Human
ugagcaggagauuuugcucuuguguugagacc

SEQ ID NO: 513036 - RNA, 32 nt, Human
ugagcaggaggaagaggaggaggcccguuggc

SEQ ID NO: 513037 - RNA, 32 nt, Human
ugagcaggagggagaggaaggggguccuguag

SEQ ID NO: 513038 - RNA, 31 nt, Human
ugagcaggcagcucugggcaugugucugguc

SEQ ID NO: 513039 - RNA, 32 nt, Human
ugagcaggcaugcucacagauccucaagguuu

SEQ ID NO: 513040 - RNA, 32 nt, Human
ugagcaggccacacuucaaacuacuuugcugc

SEQ ID NO: 513041 - RNA, 32 nt, Human
ugagcaggcccucacugucacuuuaagaaggg

SEQ ID NO: 513042 - RNA, 32 nt, Human
ugagcaggcggcagaggaaaagaaagaaaucu

SEQ ID NO: 513043 - RNA, 32 nt, Human
ugagcaggcucauuuuaaagggacuugcaaau

SEQ ID NO: 513044 - RNA, 32 nt, Human
ugagcagggaaaggacuuggaaaggaauaauu

SEQ ID NO: 513045 - RNA, 32 nt, Human
ugagcagggcccugcagccuggcuggcuggcg

SEQ ID NO: 513046 - RNA, 32 nt, Human
ugagcagggccuccucuuccuccugguguuug

SEQ ID NO: 513047 - RNA, 32 nt, Human
ugagcaggggacgguggcaggagcgccccagc

SEQ ID NO: 513048 - RNA, 32 nt, Human
ugagcaggggagcaacugagcaggaagaggau

SEQ ID NO: 513049 - RNA, 32 nt, Human
ugagcaggggcuuccaggcugcaugaggcuca

SEQ ID NO: 513050 - RNA, 32 nt, Human
ugagcagggugaggagcagcugccagccccgg

SEQ ID NO: 513051 - RNA, 32 nt, Human
ugagcaggguucccaggagggagaaagagaag

SEQ ID NO: 513052 - RNA, 32 nt, Human
ugagcaggguuccugugguuucccuggucccu

SEQ ID NO: 513053 - RNA, 32 nt, Human
ugagcaggugagcccccgcuuccuccgagccu

SEQ ID NO: 513054 - RNA, 32 nt, Human
ugagcaggugggcguggauguggauacugccu

SEQ ID NO: 513055 - RNA, 32 nt, Human
ugagcagucacuuuggagagaagcccugugaa

SEQ ID NO: 513056 - RNA, 32 nt, Human
ugagcagucuagccuggaugacauauuuuucg

SEQ ID NO: 513057 - RNA, 32 nt, Human
ugagcagugaaugauucaguguuaaaugugau

SEQ ID NO: 513058 - RNA, 32 nt, Human
ugagcagugacagcuccaccacugcacccagg

SEQ ID NO: 513059 - RNA, 31 nt, Human
ugagcagugaggagagaaaguuucugccugg

SEQ ID NO: 513060 - RNA, 32 nt, Human
ugagcagugcaggagcagggcgagaggaacag

SEQ ID NO: 513061 - RNA, 32 nt, Human
ugagcaguggcugaagcgaugcagccuugaga

SEQ ID NO: 513062 - RNA, 32 nt, Human
ugagcaguuauauuuuaaugcauuucaguguu

SEQ ID NO: 513063 - RNA, 32 nt, Human
ugagcauaagaacugggauugcaggcgugagc

SEQ ID NO: 513064 - RNA, 32 nt, Human
ugagcauaccugucucagcuguuuggccaaug

SEQ ID NO: 513065 - RNA, 32 nt, Human
ugagcauagggaagcaacucucaguauuuugg

SEQ ID NO: 513066 - RNA, 32 nt, Human
ugagcaucaacaacaaaaacauuuguaugaua

SEQ ID NO: 513067 - RNA, 32 nt, Human
ugagcaucaaguccucacccagacccccugcu

SEQ ID NO: 513068 - RNA, 23 nt, Human
ugagcaucacuagugacaagucu

SEQ ID NO: 513069 - RNA, 32 nt, Human
ugagcaucagagaguguacaucauguuauuuu

SEQ ID NO: 513070 - RNA, 32 nt, Human
ugagcauccuggcugggccccacccaggaaga

SEQ ID NO: 513071 - RNA, 32 nt, Human
ugagcauccuguuugcugacaucgagggcuga

SEQ ID NO: 513072 - RNA, 32 nt, Human
ugagcaucgcaucaccaaacacugccuuuauu

SEQ ID NO: 513073 - RNA, 32 nt, Human
ugagcaucuccucuucuugaaggccaaccugg

SEQ ID NO: 513074 - RNA, 19 nt, Human
ugagcaucugaacaugcac

SEQ ID NO: 513075 - RNA, 32 nt, Human
ugagcaucuuagcuuagcaccaaccaacacag

SEQ ID NO: 513076 - RNA, 32 nt, Human
ugagcaugccuaaauccauguucucuagaaug

SEQ ID NO: 513077 - RNA, 32 nt, Human
ugagcauggaaccugagcaaagggaauaggug

SEQ ID NO: 513078 - RNA, 30 nt, Human
ugagcauggcccucccagcccugggccugg

SEQ ID NO: 513079 - RNA, 32 nt, Human
ugagcauggcuggcaggggcagcugcuguggc

SEQ ID NO: 513080 - RNA, 32 nt, Human
ugagcaugggaccauugggagcagagcugaua

SEQ ID NO: 513081 - RNA, 32 nt, Human
ugagcaugggaggcagagguugcagugagcca

SEQ ID NO: 513082 - RNA, 32 nt, Human
ugagcauggggugcaggagccuuucuggauuu

SEQ ID NO: 513083 - RNA, 32 nt, Human
ugagcauguagugcuuugcacgccacagaagc

SEQ ID NO: 513084 - RNA, 32 nt, Human
ugagcauguggagcgagagggaggcaggugga

SEQ ID NO: 513085 - RNA, 32 nt, Human
ugagcaugugugugucaaccugugagcaugca

SEQ ID NO: 513086 - RNA, 32 nt, Human
ugagcaugugugugugcauguaccggggaaug

SEQ ID NO: 513087 - RNA, 16 nt, Human
ugagcauuacuuucau

SEQ ID NO: 513088 - RNA, 23 nt, Human
ugagcauugugguaguuguucuu

SEQ ID NO: 513089 - RNA, 32 nt, Human
ugagcauuuaaaacaugaaaacacucuuguuu

SEQ ID NO: 513090 - RNA, 32 nt, Human
ugagcauuuucucaacucgacucucauuucuu

SEQ ID NO: 513091 - RNA, 32 nt, Human
ugagccaaaaucauaacacugcacuccaggcu

SEQ ID NO: 513092 - RNA, 32 nt, Human
ugagccaaagcccaggcucccuuugggaauca

SEQ ID NO: 513093 - RNA, 32 nt, Human
ugagccaaauagaaaugaggccaagagugcuu

SEQ ID NO: 513094 - RNA, 32 nt, Human
ugagccaacagcuguaaggguccaggucugca

SEQ ID NO: 513095 - RNA, 32 nt, Human
ugagccaacuccugaguuuugcuauacuuaag

SEQ ID NO: 513096 - RNA, 32 nt, Human
ugagccaagaucacgacacugcacuccagccu

SEQ ID NO: 513097 - RNA, 32 nt, Human
ugagccaagaucgcgccacugcaguccagccu

SEQ ID NO: 513098 - RNA, 32 nt, Human
ugagccaagaucgugacacugcacuccagccu

SEQ ID NO: 513099 - RNA, 32 nt, Human
ugagccaagauugugacacugcacuccagccu

SEQ ID NO: 513100 - RNA, 32 nt, Human
ugagccaagccugaggggacagugagucucca

SEQ ID NO: 513101 - RNA, 32 nt, Human
ugagccaagccuugcuuuugcaccggccgggc

SEQ ID NO: 513102 - RNA, 21 nt, Human
ugagccaaggagcuggcccau

SEQ ID NO: 513103 - RNA, 32 nt, Human
ugagccaaggaguucaagaccaacuugggcaa

SEQ ID NO: 513104 - RNA, 32 nt, Human
ugagccaaggaguucaagaccagccugggcaa

SEQ ID NO: 513105 - RNA, 32 nt, Human
ugagccaagggaagagagacaggcuaggaguu

SEQ ID NO: 513106 - RNA, 32 nt, Human
ugagccaaucccaccauaaugugaauaugcca

SEQ ID NO: 513107 - RNA, 32 nt, Human
ugagccacagaagcgggacuguggcagcaccg

SEQ ID NO: 513108 - RNA, 32 nt, Human
ugagccacaggucccugaagaguccgcagagg

SEQ ID NO: 513109 - RNA, 21 nt, Human
ugagccaccaacacccugccu

SEQ ID NO: 513110 - RNA, 19 nt, Human
ugagccaccacacccugcc

SEQ ID NO: 513111 - RNA, 32 nt, Human
ugagccaccacacuccaaccuaggugacagag

SEQ ID NO: 513112 - RNA, 24 nt, Human
ugagccaccaugccuggccaaaac

SEQ ID NO: 513113 - RNA, 24 nt, Human
ugagccaccaugccuggccccaug

SEQ ID NO: 513114 - RNA, 32 nt, Human
ugagccaccgcaccuggccagaagccacuaac

SEQ ID NO: 513115 - RNA, 32 nt, Human
ugagccaccgcaccuggccauuaugccacuaa

SEQ ID NO: 513116 - RNA, 24 nt, Human
ugagccaccgcgccuggccaaaac

SEQ ID NO: 513117 - RNA, 32 nt, Human
ugagccaccgggccuggccugcauuuucuuaa

SEQ ID NO: 513118 - RNA, 32 nt, Human
ugagccaccgugcccagccaaauguuuauuuu

SEQ ID NO: 513119 - RNA, 32 nt, Human
ugagccaccgugccugccccagaaugguuuuu

SEQ ID NO: 513120 - RNA, 32 nt, Human
ugagccaccucuccgccaggcccgugcgagcg

SEQ ID NO: 513121 - RNA, 32 nt, Human
ugagccaccucuuccuccacgggaaccgccug

SEQ ID NO: 513122 - RNA, 32 nt, Human
ugagccacgcagccccgccucuggggccgccu

SEQ ID NO: 513123 - RNA, 32 nt, Human
ugagccacggcaccuggccagaacucaguagu

SEQ ID NO: 513124 - RNA, 32 nt, Human
ugagccacggcaccuggccugaauuuuccuca

SEQ ID NO: 513125 - RNA, 32 nt, Human
ugagccacggcacuccacccugggcaacagag

SEQ ID NO: 513126 - RNA, 32 nt, Human
ugagccacucacccuucugcuggccuuggaga

SEQ ID NO: 513127 - RNA, 32 nt, Human
ugagccacugcacccacccaagacaagugauu

SEQ ID NO: 513128 - RNA, 32 nt, Human
ugagccacugcacccacccacgccuggcugau

SEQ ID NO: 513129 - RNA, 32 nt, Human
ugagccacugcacccagcaaugaguagucuua

SEQ ID NO: 513130 - RNA, 32 nt, Human
ugagccacugcacccagccaagugaucauuuu

SEQ ID NO: 513131 - RNA, 32 nt, Human
ugagccacugcacccagcccucuuagccauuu

SEQ ID NO: 513132 - RNA, 32 nt, Human
ugagccacugcacccagccgagugagaauuuu

SEQ ID NO: 513133 - RNA, 32 nt, Human
ugagccacugcacccagccgauaggaaguuua

SEQ ID NO: 513134 - RNA, 32 nt, Human
ugagccacugcacccagccuauucuaugcauu

SEQ ID NO: 513135 - RNA, 32 nt, Human
ugagccacugcacccagccucauguugacccu

SEQ ID NO: 513136 - RNA, 32 nt, Human
ugagccacugcacccagccugggagagggguu

SEQ ID NO: 513137 - RNA, 32 nt, Human
ugagccacugcacccagccuguaaaauauuuu

SEQ ID NO: 513138 - RNA, 32 nt, Human
ugagccacugcacccagccugugauguuucug

SEQ ID NO: 513139 - RNA, 32 nt, Human
ugagccacugcacccagccuuggcgggcaucu

SEQ ID NO: 513140 - RNA, 32 nt, Human
ugagccacugcacccagcugagagugcuucuu

SEQ ID NO: 513141 - RNA, 32 nt, Human
ugagccacugcacccggccgguggaaagcauu

SEQ ID NO: 513142 - RNA, 32 nt, Human
ugagccacugcacccggccgugaccaacauuc

SEQ ID NO: 513143 - RNA, 32 nt, Human
ugagccacugcacccggccuccaagccagcau

SEQ ID NO: 513144 - RNA, 32 nt, Human
ugagccacugcaccugaccuaagaggaagcag

SEQ ID NO: 513145 - RNA, 32 nt, Human
ugagccacugcaccugaccugcugaauuguuu

SEQ ID NO: 513146 - RNA, 32 nt, Human
ugagccacugcaccugcccagcuccccaacuc

SEQ ID NO: 513147 - RNA, 32 nt, Human
ugagccacugcaccuggcagugaugucauucc

SEQ ID NO: 513148 - RNA, 32 nt, Human
ugagccacugcaccuggccaugguuaguuguu

SEQ ID NO: 513149 - RNA, 32 nt, Human
ugagccacugcaccuggccuaggacugguguc

SEQ ID NO: 513150 - RNA, 32 nt, Human
ugagccacugcaccuggccucuguugcagucu

SEQ ID NO: 513151 - RNA, 32 nt, Human
ugagccacugcaccuggccuggagcucaguuc

SEQ ID NO: 513152 - RNA, 32 nt, Human
ugagccacugcaccuggccuguguauuguuug

SEQ ID NO: 513153 - RNA, 32 nt, Human
ugagccacugcacuccaaucugggugacagaa

SEQ ID NO: 513154 - RNA, 32 nt, Human
ugagccacugcacuccagccucggccacagug

SEQ ID NO: 513155 - RNA, 32 nt, Human
ugagccacugcacuccagccugaugacagagc

SEQ ID NO: 513156 - RNA, 32 nt, Human
ugagccacugcacuccagccugggcaauagag

SEQ ID NO: 513157 - RNA, 32 nt, Human
ugagccacugcacuccagccugggugacagcg

SEQ ID NO: 513158 - RNA, 32 nt, Human
ugagccacugcacuccagccugggugacugag

SEQ ID NO: 513159 - RNA, 32 nt, Human
ugagccacugcgcccagucuacacacuaauuc

SEQ ID NO: 513160 - RNA, 32 nt, Human
ugagccacugcgccuggccaaaugcucuacuu

SEQ ID NO: 513161 - RNA, 32 nt, Human
ugagccacugguuuguggguaugucauuucca

SEQ ID NO: 513162 - RNA, 32 nt, Human
ugagccacugugcccagccucacagcugcauc

SEQ ID NO: 513163 - RNA, 32 nt, Human
ugagccacugugcccaggcugugggcaccagg

SEQ ID NO: 513164 - RNA, 32 nt, Human
ugagccacugugcuuggccacacacauauaca

SEQ ID NO: 513165 - RNA, 32 nt, Human
ugagccacuguguccagccuguaacuauuauu

SEQ ID NO: 513166 - RNA, 32 nt, Human
ugagccagaaccaggcaccaugguggagaagg

SEQ ID NO: 513167 - RNA, 32 nt, Human
ugagccagaauacuuggaggaacuuccuacaa

SEQ ID NO: 513168 - RNA, 32 nt, Human
ugagccagacuggauuaggaugccucgcgacu

SEQ ID NO: 513169 - RNA, 32 nt, Human
ugagccagacuggggcuaagucagccaggcag

SEQ ID NO: 513170 - RNA, 32 nt, Human
ugagccagagcacugucucagcauuugaaccg

SEQ ID NO: 513171 - RNA, 32 nt, Human
ugagccagauuauggaggauucugugacucuu

SEQ ID NO: 513172 - RNA, 19 nt, Human
ugagccagccuccucccag

SEQ ID NO: 513173 - RNA, 32 nt, Human
ugagccaggaagguugagguugcagugagcua

SEQ ID NO: 513174 - RNA, 32 nt, Human
ugagccaggacugugacacugcacuccagccu

SEQ ID NO: 513175 - RNA, 32 nt, Human
ugagccaggaggaggagguugcagugagccga

SEQ ID NO: 513176 - RNA, 32 nt, Human
ugagccaggaggaucgcuugagcccaggaggc

SEQ ID NO: 513177 - RNA, 32 nt, Human
ugagccaggagguugagguugcagugagcuga

SEQ ID NO: 513178 - RNA, 32 nt, Human
ugagccaggaucccucuuugcacagcaugagg

SEQ ID NO: 513179 - RNA, 32 nt, Human
ugagccaggcagcagagcacucgcugcugugu

SEQ ID NO: 513180 - RNA, 32 nt, Human
ugagccaggcagggucugggauccucagggcu

SEQ ID NO: 513181 - RNA, 32 nt, Human
ugagccaggcccugggcugggccuccacuuca

SEQ ID NO: 513182 - RNA, 32 nt, Human
ugagccaggcccugggcugggugcagggacac

SEQ ID NO: 513183 - RNA, 32 nt, Human
ugagccaggcggauagcuugagcucagggggc

SEQ ID NO: 513184 - RNA, 32 nt, Human
ugagccaggcuggggacaguggggcugagggu

SEQ ID NO: 513185 - RNA, 32 nt, Human
ugagccaggcuggugccggggagcagaugcgu

SEQ ID NO: 513186 - RNA, 32 nt, Human
ugagccaggcuggugccggggagcagaugugg

SEQ ID NO: 513187 - RNA, 32 nt, Human
ugagccagggagguggaggcuacagugagcca

SEQ ID NO: 513188 - RNA, 32 nt, Human
ugagccagggccagcggagaaacacuaaagaa

SEQ ID NO: 513189 - RNA, 32 nt, Human
ugagccaggggaggggagggagcgaggggcuc

SEQ ID NO: 513190 - RNA, 32 nt, Human
ugagccagggucuugcuauguggcucaggcuc

SEQ ID NO: 513191 - RNA, 32 nt, Human
ugagccaggugauuugggagacccccuccuuc

SEQ ID NO: 513192 - RNA, 32 nt, Human
ugagccagguggagccacuugaggucaggugu

SEQ ID NO: 513193 - RNA, 32 nt, Human
ugagccagucagggaaaguggaguucugcagc

SEQ ID NO: 513194 - RNA, 32 nt, Human
ugagccauaaucgugccacugcaguccagccu

SEQ ID NO: 513195 - RNA, 32 nt, Human
ugagccaucccccaggaugacgccaccucuga

SEQ ID NO: 513196 - RNA, 32 nt, Human
ugagccaucucagcuucucaaccuugccuguu

SEQ ID NO: 513197 - RNA, 32 nt, Human
ugagccaugauauugccagccugggugacaga

SEQ ID NO: 513198 - RNA, 32 nt, Human
ugagccaugccaaugcacuccagucugggcaa

SEQ ID NO: 513199 - RNA, 32 nt, Human
ugagccaugccuugcccuuuucugaggcucag

SEQ ID NO: 513200 - RNA, 32 nt, Human
ugagccaugucccccagccuggcauggcugca

SEQ ID NO: 513201 - RNA, 32 nt, Human
ugagccauguucaugacacugcacuccagccu

SEQ ID NO: 513202 - RNA, 32 nt, Human
ugagccauuaauaccagcaaguagaagcuggg

SEQ ID NO: 513203 - RNA, 32 nt, Human
ugagccauucaaggcaagcaccaccuuugcua

SEQ ID NO: 513204 - RNA, 32 nt, Human
ugagccauucacacaucuucacccucaguuuc

SEQ ID NO: 513205 - RNA, 32 nt, Human
ugagccauugcucuccagccugggugacacag

SEQ ID NO: 513206 - RNA, 32 nt, Human
ugagcccaagaggcagagguugcagggucaag

SEQ ID NO: 513207 - RNA, 32 nt, Human
ugagcccaagagguagagguugcagugagcca

SEQ ID NO: 513208 - RNA, 32 nt, Human
ugagcccaagagguggagguuacagugagcag

SEQ ID NO: 513209 - RNA, 32 nt, Human
ugagcccaagagucggagaccagccugggcaa

SEQ ID NO: 513210 - RNA, 32 nt, Human
ugagcccaagaguucaagaccagccugggaaa

SEQ ID NO: 513211 - RNA, 32 nt, Human
ugagcccaagaguucaagaucagccugggcag

SEQ ID NO: 513212 - RNA, 32 nt, Human
ugagcccaagaguucagagcagccuggccacc

SEQ ID NO: 513213 - RNA, 32 nt, Human
ugagcccaagaguucauaucuagccuggucaa

SEQ ID NO: 513214 - RNA, 32 nt, Human
ugagcccaagaguuccagaccagccuggccac

SEQ ID NO: 513215 - RNA, 32 nt, Human
ugagcccaagaguucgagaccagccugggcaa

SEQ ID NO: 513216 - RNA, 32 nt, Human
ugagcccaagaguuggagaccagccugggcaa

SEQ ID NO: 513217 - RNA, 32 nt, Human
ugagcccaagaguuugagaccagccuagguga

SEQ ID NO: 513218 - RNA, 32 nt, Human
ugagcccaagaguuuuagaccagccugggcaa

SEQ ID NO: 513219 - RNA, 32 nt, Human
ugagcccacaaggacauuccugccuggggagc

SEQ ID NO: 513220 - RNA, 32 nt, Human
ugagcccaccagccccagcacugaccuccaag

SEQ ID NO: 513221 - RNA, 32 nt, Human
ugagcccacgagauggaaguugcagugaacug

SEQ ID NO: 513222 - RNA, 32 nt, Human
ugagcccacuuguugaaaccuccuucugcugg

SEQ ID NO: 513223 - RNA, 32 nt, Human
ugagcccagaagcucaaggcugcagugagcca

SEQ ID NO: 513224 - RNA, 32 nt, Human
ugagcccagaagcuggaaguugcaaugaacua

SEQ ID NO: 513225 - RNA, 32 nt, Human
ugagcccagaagcuugaagcugcagugagcua

SEQ ID NO: 513226 - RNA, 32 nt, Human
ugagcccagaaguucaagacuagccugggcaa

SEQ ID NO: 513227 - RNA, 32 nt, Human
ugagcccagaaguucaagggugcagugagcua

SEQ ID NO: 513228 - RNA, 32 nt, Human
ugagcccagaaguucgagguugcagugagcca

SEQ ID NO: 513229 - RNA, 32 nt, Human
ugagcccagaggcggagguugcagugagccga

SEQ ID NO: 513230 - RNA, 32 nt, Human
ugagcccagagguagaggcugcagugagccau

SEQ ID NO: 513231 - RNA, 32 nt, Human
ugagcccagagguucaagacuagccugggcaa

SEQ ID NO: 513232 - RNA, 32 nt, Human
ugagcccagcacugcggccaagucgaagacuu

SEQ ID NO: 513233 - RNA, 32 nt, Human
ugagcccagcaggcagagguugcagugagcug

SEQ ID NO: 513234 - RNA, 32 nt, Human
ugagcccagcaguucaagaccagccugggcaa

SEQ ID NO: 513235 - RNA, 32 nt, Human
ugagcccagcaguucaagacuagccuggacaa

SEQ ID NO: 513236 - RNA, 32 nt, Human
ugagcccagcaguucaaggcuacugugagcua

SEQ ID NO: 513237 - RNA, 32 nt, Human
ugagcccagccccagcccgggguccauugccc

SEQ ID NO: 513238 - RNA, 32 nt, Human
ugagcccaggaagcagagguugcagugagccu

SEQ ID NO: 513239 - RNA, 32 nt, Human
ugagcccaggaagcggagguuacagugagcug

SEQ ID NO: 513240 - RNA, 32 nt, Human
ugagcccaggaagcggagguugcaaugagccg

SEQ ID NO: 513241 - RNA, 32 nt, Human
ugagcccaggaaguggagguugcagugagcag

SEQ ID NO: 513242 - RNA, 32 nt, Human
ugagcccaggaauucaagaccagccugggcaa

SEQ ID NO: 513243 - RNA, 32 nt, Human
ugagcccaggaauucaagacuagccugcacaa

SEQ ID NO: 513244 - RNA, 32 nt, Human
ugagcccaggacuucaagaccagccuaggcaa

SEQ ID NO: 513245 - RNA, 32 nt, Human
ugagcccaggagaugcaggcuugcagugagcc

SEQ ID NO: 513246 - RNA, 32 nt, Human
ugagcccaggagauugaggcugcagugagcau

SEQ ID NO: 513247 - RNA, 32 nt, Human
ugagcccaggagauugaggcugcagugagcca

SEQ ID NO: 513248 - RNA, 32 nt, Human
ugagcccaggagcucaagaccagccuggacaa

SEQ ID NO: 513249 - RNA, 32 nt, Human
ugagcccaggagcucaagauugcagugagcua

SEQ ID NO: 513250 - RNA, 32 nt, Human
ugagcccaggagcuggaggcugcagugaacua

SEQ ID NO: 513251 - RNA, 32 nt, Human
ugagcccaggaggaagagaaagcauuguccag

SEQ ID NO: 513252 - RNA, 32 nt, Human
ugagcccaggaggaggaggcugcagugagcua

SEQ ID NO: 513253 - RNA, 32 nt, Human
ugagcccaggaggcagaauuugcagugagcug

SEQ ID NO: 513254 - RNA, 32 nt, Human
ugagcccaggaggcagaggcugcagugagcca

SEQ ID NO: 513255 - RNA, 32 nt, Human
ugagcccaggaggcagaggcugcagugagccg

SEQ ID NO: 513256 - RNA, 32 nt, Human
ugagcccaggaggcagagguugcaguaagccg

SEQ ID NO: 513257 - RNA, 32 nt, Human
ugagcccaggaggcagagguugcagugagcca

SEQ ID NO: 513258 - RNA, 32 nt, Human
ugagcccaggaggccaagguugcagugggccc

SEQ ID NO: 513259 - RNA, 32 nt, Human
ugagcccaggaggcggagauugcagugagccg

SEQ ID NO: 513260 - RNA, 32 nt, Human
ugagcccaggaggcggagcuugcagugagucg

SEQ ID NO: 513261 - RNA, 32 nt, Human
ugagcccaggaggcggaggcugcagugagcug

SEQ ID NO: 513262 - RNA, 32 nt, Human
ugagcccaggaggcggagguugcagugagcug

SEQ ID NO: 513263 - RNA, 32 nt, Human
ugagcccaggaggcugaggcugcaaugacuga

SEQ ID NO: 513264 - RNA, 32 nt, Human
ugagcccaggaggcugaggcugcagugcaucg

SEQ ID NO: 513265 - RNA, 32 nt, Human
ugagcccaggaggucaagacugcagugagcua

SEQ ID NO: 513266 - RNA, 32 nt, Human
ugagcccaggaggucaaggcuacagugagccg

SEQ ID NO: 513267 - RNA, 32 nt, Human
ugagcccaggaggucaaggcuauggugagccg

SEQ ID NO: 513268 - RNA, 32 nt, Human
ugagcccaggaggucaaggcugaagugagcug

SEQ ID NO: 513269 - RNA, 32 nt, Human
ugagcccaggaggucaaggcugcagugagccg

SEQ ID NO: 513270 - RNA, 32 nt, Human
ugagcccaggaggucaaggcugcagugagcug

SEQ ID NO: 513271 - RNA, 32 nt, Human
ugagcccaggaggucaaggcugcagugagcuu

SEQ ID NO: 513272 - RNA, 32 nt, Human
ugagcccaggaggucaaggguacagugagccg

SEQ ID NO: 513273 - RNA, 32 nt, Human
ugagcccaggaggucagggcugcagugagccg

SEQ ID NO: 513274 - RNA, 32 nt, Human
ugagcccaggaggucgaagcugcagugaggua

SEQ ID NO: 513275 - RNA, 32 nt, Human
ugagcccaggaggucgaggcugcagugagcca

SEQ ID NO: 513276 - RNA, 32 nt, Human
ugagcccaggaggucgaggcugcagugagccc

SEQ ID NO: 513277 - RNA, 32 nt, Human
ugagcccaggaggucgaggcugcagugagcua

SEQ ID NO: 513278 - RNA, 32 nt, Human
ugagcccaggaggucgaggcugcagugagcug

SEQ ID NO: 513279 - RNA, 32 nt, Human
ugagcccaggaggucgaggcugcagugggcca

SEQ ID NO: 513280 - RNA, 32 nt, Human
ugagcccaggaggucgaggcugcagugugcug

SEQ ID NO: 513281 - RNA, 32 nt, Human
ugagcccaggaggucgagguugcagugagcag

SEQ ID NO: 513282 - RNA, 32 nt, Human
ugagcccaggaggucuaggcugcagugagcuu

SEQ ID NO: 513283 - RNA, 32 nt, Human
ugagcccaggagguggaaacugcagagaguca

SEQ ID NO: 513284 - RNA, 32 nt, Human
ugagcccaggagguggaggcugcaaugagcug

SEQ ID NO: 513285 - RNA, 32 nt, Human
ugagcccaggagguggaggcugcagugagcca

SEQ ID NO: 513286 - RNA, 32 nt, Human
ugagcccaggagguggagguugcaaugagccg

SEQ ID NO: 513287 - RNA, 32 nt, Human
ugagcccaggagguggagguugcacugagcgg

SEQ ID NO: 513288 - RNA, 32 nt, Human
ugagcccaggagguggagguugcagugagcag

SEQ ID NO: 513289 - RNA, 32 nt, Human
ugagcccaggagguggagguugcagugagcca

SEQ ID NO: 513290 - RNA, 32 nt, Human
ugagcccaggagguggagguugcagugagccg

SEQ ID NO: 513291 - RNA, 32 nt, Human
ugagcccaggagguggagguugcagugagcgg

SEQ ID NO: 513292 - RNA, 32 nt, Human
ugagcccaggagguggagguugcagugagcug

SEQ ID NO: 513293 - RNA, 32 nt, Human
ugagcccaggagguggagguuucagcgagcug

SEQ ID NO: 513294 - RNA, 32 nt, Human
ugagcccaggagguugaggcugcagugaacua

SEQ ID NO: 513295 - RNA, 32 nt, Human
ugagcccaggagguugaggcugcagugagcag

SEQ ID NO: 513296 - RNA, 32 nt, Human
ugagcccaggagguugaggcugcagugagcca

SEQ ID NO: 513297 - RNA, 32 nt, Human
ugagcccaggagguugaggcugcagugagcua

SEQ ID NO: 513298 - RNA, 32 nt, Human
ugagcccaggagguugaggcugcagugaggua

SEQ ID NO: 513299 - RNA, 32 nt, Human
ugagcccaggagguugaggcugcagugaggug

SEQ ID NO: 513300 - RNA, 32 nt, Human
ugagcccaggagguugaggcugcagugaguuc

SEQ ID NO: 513301 - RNA, 32 nt, Human
ugagcccaggagguugaggucacagugagcug

SEQ ID NO: 513302 - RNA, 32 nt, Human
ugagcccaggagguuguggcugcagugagcug

SEQ ID NO: 513303 - RNA, 32 nt, Human
ugagcccaggagucuugagaccagccugggca

SEQ ID NO: 513304 - RNA, 32 nt, Human
ugagcccaggaguuaagaggcugcagugaccg

SEQ ID NO: 513305 - RNA, 32 nt, Human
ugagcccaggaguucaaaaccagccugggcaa

SEQ ID NO: 513306 - RNA, 32 nt, Human
ugagcccaggaguucaacaccagccugagcaa

SEQ ID NO: 513307 - RNA, 32 nt, Human
ugagcccaggaguucaacaccagcuugggcaa

SEQ ID NO: 513308 - RNA, 32 nt, Human
ugagcccaggaguucaagaacagccuggguaa

SEQ ID NO: 513309 - RNA, 32 nt, Human
ugagcccaggaguucaagaccaacaugggcaa

SEQ ID NO: 513310 - RNA, 32 nt, Human
ugagcccaggaguucaagaccaaccuggugaa

SEQ ID NO: 513311 - RNA, 32 nt, Human
ugagcccaggaguucaagaccacccugggcaa

SEQ ID NO: 513312 - RNA, 32 nt, Human
ugagcccaggaguucaagaccagccugagcaa

SEQ ID NO: 513313 - RNA, 32 nt, Human
ugagcccaggaguucaagaccagccuggacaa

SEQ ID NO: 513314 - RNA, 32 nt, Human
ugagcccaggaguucaagaccagccuggacag

SEQ ID NO: 513315 - RNA, 32 nt, Human
ugagcccaggaguucaagaccagccugggaac

SEQ ID NO: 513316 - RNA, 32 nt, Human
ugagcccaggaguucaagaccagccugggcaa

SEQ ID NO: 513317 - RNA, 32 nt, Human
ugagcccaggaguucaagaccagccugggcua

SEQ ID NO: 513318 - RNA, 32 nt, Human
ugagcccaggaguucaagaccagcuugggcaa

SEQ ID NO: 513319 - RNA, 32 nt, Human
ugagcccaggaguucaagaccagcuugugcaa

SEQ ID NO: 513320 - RNA, 32 nt, Human
ugagcccaggaguucaagaccagucugggcaa

SEQ ID NO: 513321 - RNA, 32 nt, Human
ugagcccaggaguucaagaccggccugagcaa

SEQ ID NO: 513322 - RNA, 32 nt, Human
ugagcccaggaguucaagacuagccuaggcaa

SEQ ID NO: 513323 - RNA, 32 nt, Human
ugagcccaggaguucaagagcagccugggcaa

SEQ ID NO: 513324 - RNA, 32 nt, Human
ugagcccaggaguucaaggccagccugggcaa

SEQ ID NO: 513325 - RNA, 32 nt, Human
ugagcccaggaguucaaggcugcaaugagcug

SEQ ID NO: 513326 - RNA, 32 nt, Human
ugagcccaggaguucaauaccugucugggaaa

SEQ ID NO: 513327 - RNA, 32 nt, Human
ugagcccaggaguucgacaccaaccugagcaa

SEQ ID NO: 513328 - RNA, 19 nt, Human
ugagcccaggaguucgaga

SEQ ID NO: 513329 - RNA, 32 nt, Human
ugagcccaggaguucgagaccaaccugggcaa

SEQ ID NO: 513330 - RNA, 32 nt, Human
ugagcccaggaguucgagaccaacuugggcaa

SEQ ID NO: 513331 - RNA, 32 nt, Human
ugagcccaggaguuugagguugcagugagcug

SEQ ID NO: 513332 - RNA, 32 nt, Human
ugagcccaggaguuugagguugcagugcacua

SEQ ID NO: 513333 - RNA, 32 nt, Human
ugagcccaggaguuuggaccagccugggcaac

SEQ ID NO: 513334 - RNA, 32 nt, Human
ugagcccaggaugcagagguugaagugagcca

SEQ ID NO: 513335 - RNA, 32 nt, Human
ugagcccaggcguucaagaccagccugggcaa

SEQ ID NO: 513336 - RNA, 32 nt, Human
ugagcccagggaggucaaggcugcagugagca

SEQ ID NO: 513337 - RNA, 32 nt, Human
ugagcccagggguucaagaccaaucugggcaa

SEQ ID NO: 513338 - RNA, 32 nt, Human
ugagcccagguauucaagaccagccugggaaa

SEQ ID NO: 513339 - RNA, 32 nt, Human
ugagcccaucuuggcagggcucagggggcagc

SEQ ID NO: 513340 - RNA, 32 nt, Human
ugagcccaugaagucaggcugcagugagcugu

SEQ ID NO: 513341 - RNA, 32 nt, Human
ugagccccagaaguuaucuccaaaaagggaua

SEQ ID NO: 513342 - RNA, 32 nt, Human
ugagccccagaggcagagguuguggugagccg

SEQ ID NO: 513343 - RNA, 32 nt, Human
ugagccccagaggucaaggcugcagugagcug

SEQ ID NO: 513344 - RNA, 32 nt, Human
ugagccccagaguucaagaccagccugggcaa

SEQ ID NO: 513345 - RNA, 32 nt, Human
ugagccccagcacccgugagcucaccagugua

SEQ ID NO: 513346 - RNA, 32 nt, Human
ugagccccagcagacgccuggguggugucucc

SEQ ID NO: 513347 - RNA, 32 nt, Human
ugagccccagccccaauccagagaagcgcugu

SEQ ID NO: 513348 - RNA, 32 nt, Human
ugagccccaggccaggaggcuguuccaggagu

SEQ ID NO: 513349 - RNA, 32 nt, Human
ugagccccagggguggaggcugcaaugaacug

SEQ ID NO: 513350 - RNA, 32 nt, Human
ugagccccaggucaguccccagcccucugggu

SEQ ID NO: 513351 - RNA, 32 nt, Human
ugagcccccaacagagcucuucaucuuaccgg

SEQ ID NO: 513352 - RNA, 32 nt, Human
ugagcccccaaccaccuccaccuuucucucug

SEQ ID NO: 513353 - RNA, 21 nt, Human
ugagcccccacacccacccua

SEQ ID NO: 513354 - RNA, 32 nt, Human
ugagcccccagccccuggaauaugcagcccgg

SEQ ID NO: 513355 - RNA, 32 nt, Human
ugagcccccucccccugaccucagcuuccugc

SEQ ID NO: 513356 - RNA, 32 nt, Human
ugagcccccugccuuggcuccagguugguaga

SEQ ID NO: 513357 - RNA, 32 nt, Human
ugagccccgcuguuaccagccgagucugcaca

SEQ ID NO: 513358 - RNA, 32 nt, Human
ugagccccgggggcugagguugcugugagccg

SEQ ID NO: 513359 - RNA, 32 nt, Human
ugagccccuaacccugauccagggaucguuga

SEQ ID NO: 513360 - RNA, 32 nt, Human
ugagccccucaauccuaucacagucuacugac

SEQ ID NO: 513361 - RNA, 32 nt, Human
ugagccccugcacuucugugucgcaggagcug

SEQ ID NO: 513362 - RNA, 32 nt, Human
ugagccccugcagaggcugagcagggagaggg

SEQ ID NO: 513363 - RNA, 32 nt, Human
ugagccccugcagccuccucagccugugcagu

SEQ ID NO: 513364 - RNA, 18 nt, Human
ugagccccuguaauccca

SEQ ID NO: 513365 - RNA, 21 nt, Human
ugagccccuguaaucccagcu

SEQ ID NO: 513366 - RNA, 32 nt, Human
ugagccccuguaaucccagcuacuugggaggc

SEQ ID NO: 513367 - RNA, 32 nt, Human
ugagccccuugcuggaggguucuggggagugg

SEQ ID NO: 513368 - RNA, 32 nt, Human
ugagcccgagagacagagguugcagugagccg

SEQ ID NO: 513369 - RNA, 32 nt, Human
ugagcccgagagguggagacugcaguaagcca

SEQ ID NO: 513370 - RNA, 32 nt, Human
ugagcccgagagguggaggcuggagugaacag

SEQ ID NO: 513371 - RNA, 32 nt, Human
ugagcccggaaggcagagguugcagugagcug

SEQ ID NO: 513372 - RNA, 32 nt, Human
ugagcccggaaggcggagguugcagugagcug

SEQ ID NO: 513373 - RNA, 32 nt, Human
ugagcccggaaggugguccugacagcgagggg

SEQ ID NO: 513374 - RNA, 32 nt, Human
ugagcccggagucuggagcagagcaggccacc

SEQ ID NO: 513375 - RNA, 32 nt, Human
ugagcccggcagaggcagagacacacgcggag

SEQ ID NO: 513376 - RNA, 32 nt, Human
ugagcccggcgccgggaggaguggucuaaacu

SEQ ID NO: 513377 - RNA, 32 nt, Human
ugagcccgggaagcagagguugcagugaacug

SEQ ID NO: 513378 - RNA, 32 nt, Human
ugagcccgggaaguggagguugcacugagcug

SEQ ID NO: 513379 - RNA, 32 nt, Human
ugagcccgggaggcagaggcugcagugaacca

SEQ ID NO: 513380 - RNA, 32 nt, Human
ugagcccgggaggcagagguugcagugagcca

SEQ ID NO: 513381 - RNA, 32 nt, Human
ugagcccgggaggcagagguugcagugagccg

SEQ ID NO: 513382 - RNA, 32 nt, Human
ugagcccgggaggcggagauugcggugagcca

SEQ ID NO: 513383 - RNA, 32 nt, Human
ugagcccgggaggcggagcuuacagugagcug

SEQ ID NO: 513384 - RNA, 32 nt, Human
ugagcccgggaggcggagcuugcagugagcug

SEQ ID NO: 513385 - RNA, 32 nt, Human
ugagcccgggaggcggagcuugcggugggccg

SEQ ID NO: 513386 - RNA, 32 nt, Human
ugagcccgggaggcggagguugcagugagcug

SEQ ID NO: 513387 - RNA, 32 nt, Human
ugagcccgggaggucaagguugcagugaguca

SEQ ID NO: 513388 - RNA, 31 nt, Human
ugagcccgucucucugggcuguaucuccuca

SEQ ID NO: 513389 - RNA, 23 nt, Human
ugagcccucaccagaaucacccu

SEQ ID NO: 513390 - RNA, 32 nt, Human
ugagcccuccccuccacccccugaagccacuc

SEQ ID NO: 513391 - RNA, 32 nt, Human
ugagcccucccucuucccagcacaggcagggg

SEQ ID NO: 513392 - RNA, 32 nt, Human
ugagcccucggggccuccuccugggccucagc

SEQ ID NO: 513393 - RNA, 32 nt, Human
ugagcccugaaagucgagguugcagugagccu

SEQ ID NO: 513394 - RNA, 32 nt, Human
ugagcccugaguggaagccuuucugugccuug

SEQ ID NO: 513395 - RNA, 32 nt, Human
ugagcccugaugcuguaaggauucacaucaga

SEQ ID NO: 513396 - RNA, 32 nt, Human
ugagcccugcagcugccauccugccuggcagg

SEQ ID NO: 513397 - RNA, 32 nt, Human
ugagcccugcaggaguucgagaccaggcuggg

SEQ ID NO: 513398 - RNA, 32 nt, Human
ugagcccugccaccaucccgugaaccaccgaa

SEQ ID NO: 513399 - RNA, 32 nt, Human
ugagcccugccugggcuccacacccagagagu

SEQ ID NO: 513400 - RNA, 32 nt, Human
ugagcccugcucccucugccacuguggacaca

SEQ ID NO: 513401 - RNA, 32 nt, Human
ugagcccugcuguauuugucuguguugacaac

SEQ ID NO: 513402 - RNA, 32 nt, Human
ugagcccuggaaaauuacuuaguggaaaggca

SEQ ID NO: 513403 - RNA, 32 nt, Human
ugagcccuggaaccuccgcucagagaagauga

SEQ ID NO: 513404 - RNA, 32 nt, Human
ugagcccuggaguuggagguugcagugagcag

SEQ ID NO: 513405 - RNA, 32 nt, Human
ugagcccuggcggcagagguugcagugagcca

SEQ ID NO: 513406 - RNA, 32 nt, Human
ugagcccugggagggcccaggagccagaccuc

SEQ ID NO: 513407 - RNA, 32 nt, Human
ugagcccugggcaggggugguggguaccagag

SEQ ID NO: 513408 - RNA, 32 nt, Human
ugagcccuggggaacaggaaagcguggcuggc

SEQ ID NO: 513409 - RNA, 32 nt, Human
ugagcccuggggacccuuggagaaauuaggug

SEQ ID NO: 513410 - RNA, 32 nt, Human
ugagcccuguaaccuggcucuagggcacaggc

SEQ ID NO: 513411 - RNA, 32 nt, Human
ugagccgaaguguauggaagaguugccugagu

SEQ ID NO: 513412 - RNA, 32 nt, Human
ugagccgaaguuaauuucucggggaguucucg

SEQ ID NO: 513413 - RNA, 32 nt, Human
ugagccgacagccucagcucccugccaggcca

SEQ ID NO: 513414 - RNA, 32 nt, Human
ugagccgagacugugcuccagccugggcgaca

SEQ ID NO: 513415 - RNA, 32 nt, Human
ugagccgagaucaugacacugcacuccagccu

SEQ ID NO: 513416 - RNA, 32 nt, Human
ugagccgagaucaugccauuacuccagccugg

SEQ ID NO: 513417 - RNA, 32 nt, Human
ugagccgagauggugccacugcaccaucugga

SEQ ID NO: 513418 - RNA, 32 nt, Human
ugagccgagauggugccacugcacuccagccu

SEQ ID NO: 513419 - RNA, 32 nt, Human
ugagccgagauggugccacugcauuccagccu

SEQ ID NO: 513420 - RNA, 32 nt, Human
ugagccgagauggugccguugcacuccagccg

SEQ ID NO: 513421 - RNA, 32 nt, Human
ugagccgagauuacuccagccuaggcaacaga

SEQ ID NO: 513422 - RNA, 32 nt, Human
ugagccgagauuggccauugcacuccagccug

SEQ ID NO: 513423 - RNA, 32 nt, Human
ugagccgaggaguucaagaccagccuggguau

SEQ ID NO: 513424 - RNA, 32 nt, Human
ugagccgaggcauuccagccugggcaacagag

SEQ ID NO: 513425 - RNA, 32 nt, Human
ugagccgaggggguggggguugcagugagcca

SEQ ID NO: 513426 - RNA, 32 nt, Human
ugagccgcacuuccggugugagccgcacuucc

SEQ ID NO: 513427 - RNA, 32 nt, Human
ugagccgcaucuucuccaucuggcaggguggg

SEQ ID NO: 513428 - RNA, 32 nt, Human
ugagccgcccccuuccuccaccaacucacgcc

SEQ ID NO: 513429 - RNA, 32 nt, Human
ugagccgcccgccugcaccgccacccggcgac

SEQ ID NO: 513430 - RNA, 32 nt, Human
ugagccgcccgcuccgugccccucucugcagc

SEQ ID NO: 513431 - RNA, 32 nt, Human
ugagccgccggccuccggccuccugggccccu

SEQ ID NO: 513432 - RNA, 32 nt, Human
ugagccgcgaggaagagaggcgagcgagagug

SEQ ID NO: 513433 - RNA, 32 nt, Human
ugagccgcuagugauggagagcagagggagag

SEQ ID NO: 513434 - RNA, 32 nt, Human
ugagccggagccagggcaguaugagguggggc

SEQ ID NO: 513435 - RNA, 32 nt, Human
ugagccggccgcagagccauggcgggcgggga

SEQ ID NO: 513436 - RNA, 32 nt, Human
ugagccggcuucuguuccuggccgcagagucg

SEQ ID NO: 513437 - RNA, 32 nt, Human
ugagccggggacacuccucugcccagcaagga

SEQ ID NO: 513438 - RNA, 32 nt, Human
ugagccggggaggaggggguugcagugagccg

SEQ ID NO: 513439 - RNA, 32 nt, Human
ugagccggggaggcagagguugcagugagccg

SEQ ID NO: 513440 - RNA, 32 nt, Human
ugagccggggagguggaggcugcagugaacug

SEQ ID NO: 513441 - RNA, 18 nt, Human
ugagccgggucagggaga

SEQ ID NO: 513442 - RNA, 32 nt, Human
ugagccgugauugagccacugcacuccagccu

SEQ ID NO: 513443 - RNA, 32 nt, Human
ugagccguugugcuccagccugggcgacagaa

SEQ ID NO: 513444 - RNA, 32 nt, Human
ugagccuacaucuucuugucuguaaaauggag

SEQ ID NO: 513445 - RNA, 32 nt, Human
ugagccuaccucugauccuacaguuccaagag

SEQ ID NO: 513446 - RNA, 32 nt, Human
ugagccuagaaguucaagaccagccugggcaa

SEQ ID NO: 513447 - RNA, 32 nt, Human
ugagccuagagcaccaugucccuucccuguag

SEQ ID NO: 513448 - RNA, 23 nt, Human
ugagccuagagggcccucugaug

SEQ ID NO: 513449 - RNA, 32 nt, Human
ugagccuaggaauucaagaccagccuagguaa

SEQ ID NO: 513450 - RNA, 32 nt, Human
ugagccuaggagaaaaugccacugugugcauc

SEQ ID NO: 513451 - RNA, 32 nt, Human
ugagccuaggaguucaagaucagccugggcaa

SEQ ID NO: 513452 - RNA, 32 nt, Human
ugagccuaggaguuuaaaccagccugggcacc

SEQ ID NO: 513453 - RNA, 32 nt, Human
ugagccuagguggccaaggcuuccugcauugc

SEQ ID NO: 513454 - RNA, 32 nt, Human
ugagccuaugaguucaagaccagccuaggcaa

SEQ ID NO: 513455 - RNA, 23 nt, Human
ugagccucacgaccgcugaccca

SEQ ID NO: 513456 - RNA, 32 nt, Human
ugagccucaggagguugaggcugcagugagcu

SEQ ID NO: 513457 - RNA, 24 nt, Human
ugagccucaggauucucaucugua

SEQ ID NO: 513458 - RNA, 32 nt, Human
ugagccucagggugccaaggaggcagggcuga

SEQ ID NO: 513459 - RNA, 32 nt, Human
ugagccuccagacccugcuaaccacaaaaggg

SEQ ID NO: 513460 - RNA, 32 nt, Human
ugagccuccagcgcgugccagccugggccgcu

SEQ ID NO: 513461 - RNA, 32 nt, Human
ugagccuccauuccuuccccagccccuggccc

SEQ ID NO: 513462 - RNA, 32 nt, Human
ugagccucccaaagugcuaggauuacaggcau

SEQ ID NO: 513463 - RNA, 32 nt, Human
ugagccucccaaagugcugggauuacaggcau

SEQ ID NO: 513464 - RNA, 32 nt, Human
ugagccucccaaagugcugggauugcaggugu

SEQ ID NO: 513465 - RNA, 32 nt, Human
ugagccucccaaguaccugggauuacaggagc

SEQ ID NO: 513466 - RNA, 32 nt, Human
ugagccucccaccccgcugccugggcccugug

SEQ ID NO: 513467 - RNA, 32 nt, Human
ugagccucccgaguagcugggauuacaggugc

SEQ ID NO: 513468 - RNA, 21 nt, Human
ugagccuccucucugcucugu

SEQ ID NO: 513469 - RNA, 32 nt, Human
ugagccuccucugccccugucuugcucuuccc

SEQ ID NO: 513470 - RNA, 32 nt, Human
ugagccuccugcaaccaccauuuuugaaauaa

SEQ ID NO: 513471 - RNA, 32 nt, Human
ugagccucggaggcggagguugcagugagcug

SEQ ID NO: 513472 - RNA, 32 nt, Human
ugagccucuccccaucuagaauguuggaacug

SEQ ID NO: 513473 - RNA, 32 nt, Human
ugagccucuggcccggccuuuccuuuuuccuc

SEQ ID NO: 513474 - RNA, 19 nt, Human
ugagccugacccaggggga

SEQ ID NO: 513475 - RNA, 32 nt, Human
ugagccugacucugaagcuguucccagcucuu

SEQ ID NO: 513476 - RNA, 32 nt, Human
ugagccugagagaugaagguugcagugagccg

SEQ ID NO: 513477 - RNA, 32 nt, Human
ugagccugagcaacauaaugagacccugucuc

SEQ ID NO: 513478 - RNA, 32 nt, Human
ugagccugaggaccaaaaugaaaccuuuuucu

SEQ ID NO: 513479 - RNA, 32 nt, Human
ugagccugcaagauggagguugcagugagcuc

SEQ ID NO: 513480 - RNA, 32 nt, Human
ugagccugcacagagccaggugcaaugggcag

SEQ ID NO: 513481 - RNA, 32 nt, Human
ugagccugcaccuggacagguguacgucugca

SEQ ID NO: 513482 - RNA, 32 nt, Human
ugagccuggaagacauagguugcaguguaaug

SEQ ID NO: 513483 - RNA, 32 nt, Human
ugagccuggagauguagaggcugcaaugagcu

SEQ ID NO: 513484 - RNA, 32 nt, Human
ugagccuggagauguagaggcugcagugagcu

SEQ ID NO: 513485 - RNA, 32 nt, Human
ugagccuggcacauagcacccagccugcaucu

SEQ ID NO: 513486 - RNA, 29 nt, Human
ugagccuggcugcucagcgucuccuggcc

SEQ ID NO: 513487 - RNA, 32 nt, Human
ugagccuggcuuggaccuuggcauuccguuug

SEQ ID NO: 513488 - RNA, 32 nt, Human
ugagccugggaaguggaaguugcagugagcca

SEQ ID NO: 513489 - RNA, 32 nt, Human
ugagccugggaaguggagguugcaguaggcug

SEQ ID NO: 513490 - RNA, 32 nt, Human
ugagccugggagaucgaggcugcagugagcca

SEQ ID NO: 513491 - RNA, 32 nt, Human
ugagccugggagauggagguugcagugagcug

SEQ ID NO: 513492 - RNA, 32 nt, Human
ugagccugggagcaaggguugcagugagcuga

SEQ ID NO: 513493 - RNA, 32 nt, Human
ugagccugggagcgcagguugcaaugagccaa

SEQ ID NO: 513494 - RNA, 32 nt, Human
ugagccugggaggaagagguugcagugagccg

SEQ ID NO: 513495 - RNA, 32 nt, Human
ugagccugggaggcagagauugcacugagccg

SEQ ID NO: 513496 - RNA, 32 nt, Human
ugagccugggaggcagaggcugcagugagccg

SEQ ID NO: 513497 - RNA, 32 nt, Human
ugagccugggaggcagagguugcagugagcca

SEQ ID NO: 513498 - RNA, 32 nt, Human
ugagccugggaggcagagguugcagugagccg

SEQ ID NO: 513499 - RNA, 32 nt, Human
ugagccugggaggcagagguugcagugagcug

SEQ ID NO: 513500 - RNA, 32 nt, Human
ugagccugggaggcagagguugcugugagccg

SEQ ID NO: 513501 - RNA, 32 nt, Human
ugagccugggaggcggagguugcagugagccg

SEQ ID NO: 513502 - RNA, 32 nt, Human
ugagccugggaggcggggguuguggugagccg

SEQ ID NO: 513503 - RNA, 32 nt, Human
ugagccugggagggugaggaugcaugagccau

SEQ ID NO: 513504 - RNA, 32 nt, Human
ugagccugggaggucaaggcaucagugagcga

SEQ ID NO: 513505 - RNA, 32 nt, Human
ugagccugggaggucaaggcugcagugaacca

SEQ ID NO: 513506 - RNA, 32 nt, Human
ugagccugggaggucaaggcugcagugagcca

SEQ ID NO: 513507 - RNA, 32 nt, Human
ugagccugggaggucaaggcugcagugagccg

SEQ ID NO: 513508 - RNA, 32 nt, Human
ugagccugggaggucaaggcugcagugagcug

SEQ ID NO: 513509 - RNA, 32 nt, Human
ugagccugggaggucgaggcugcagcgagccg

SEQ ID NO: 513510 - RNA, 32 nt, Human
ugagccugggaggucgaggcugcagugagcug

SEQ ID NO: 513511 - RNA, 32 nt, Human
ugagccugggaggucgaggcuguagugagccc

SEQ ID NO: 513512 - RNA, 32 nt, Human
ugagccugggaggucgaggcuguagugagcua

SEQ ID NO: 513513 - RNA, 32 nt, Human
ugagccugggagguggaggcuacugugagcca

SEQ ID NO: 513514 - RNA, 32 nt, Human
ugagccugggagguggagguugcacugaguag

SEQ ID NO: 513515 - RNA, 32 nt, Human
ugagccugggagguggagguugcagugagcua

SEQ ID NO: 513516 - RNA, 32 nt, Human
ugagccugggagguggagguugcagugagugg

SEQ ID NO: 513517 - RNA, 32 nt, Human
ugagccugggagguggagguugccagugaguc

SEQ ID NO: 513518 - RNA, 32 nt, Human
ugagccugggagguggagguuucagugagcug

SEQ ID NO: 513519 - RNA, 32 nt, Human
ugagccugggagguggaguuugcagugagcua

SEQ ID NO: 513520 - RNA, 32 nt, Human
ugagccugggagguugaggcugcagugagcca

SEQ ID NO: 513521 - RNA, 32 nt, Human
ugagccugggagguugugguugcagugagcua

SEQ ID NO: 513522 - RNA, 32 nt, Human
ugagccugggaguucaagaccagccugggcaa

SEQ ID NO: 513523 - RNA, 32 nt, Human
ugagccugggccggguggagguguccugcaug

SEQ ID NO: 513524 - RNA, 32 nt, Human
ugagccugggcugugccacacaagcacuucau

SEQ ID NO: 513525 - RNA, 32 nt, Human
ugagccuggggucacagggggugucgggcgga

SEQ ID NO: 513526 - RNA, 32 nt, Human
ugagccugguggagaugcuacaagagaacuac

SEQ ID NO: 513527 - RNA, 32 nt, Human
ugagccuguaccacuguuguaacaugggaaga

SEQ ID NO: 513528 - RNA, 32 nt, Human
ugagccuguagucccagcuacucgagaggcug

SEQ ID NO: 513529 - RNA, 32 nt, Human
ugagccuguccucagaggauggcgaggcagcc

SEQ ID NO: 513530 - RNA, 32 nt, Human
ugagccugugcaagugacaugaccucucuaaa

SEQ ID NO: 513531 - RNA, 32 nt, Human
ugagccuguguccugucugccugcccagccau

SEQ ID NO: 513532 - RNA, 32 nt, Human
ugagccuuaaaccuucaucucucagguguuga

SEQ ID NO: 513533 - RNA, 32 nt, Human
ugagccuucucuccaccaccauagacaggugu

SEQ ID NO: 513534 - RNA, 32 nt, Human
ugagccuucugaugagacugcagccccagcug

SEQ ID NO: 513535 - RNA, 32 nt, Human
ugagccuucugaugagacugcagccccggcug

SEQ ID NO: 513536 - RNA, 32 nt, Human
ugagccuucuuucugcccuccagauccacggu

SEQ ID NO: 513537 - RNA, 32 nt, Human
ugagccuugcagagaaaaggagggacaaccug

SEQ ID NO: 513538 - RNA, 32 nt, Human
ugagccuuggaggcggagguugcagugagcug

SEQ ID NO: 513539 - RNA, 32 nt, Human
ugagccuuggcuguuggcagugagugagccug

SEQ ID NO: 513540 - RNA, 32 nt, Human
ugagccuugugagguuuccaggcaggcugauu

SEQ ID NO: 513541 - RNA, 32 nt, Human
ugagccuugugucuuuccaguuacaggcgaug

SEQ ID NO: 513542 - RNA, 32 nt, Human
ugagccuuugacucagacauuuuugccaagga

SEQ ID NO: 513543 - RNA, 32 nt, Human
ugagccuuugccuagucuggggccagaccccu

SEQ ID NO: 513544 - RNA, 32 nt, Human
ugagcgaauagagagagaaucagcuauugaaa

SEQ ID NO: 513545 - RNA, 32 nt, Human
ugagcgaccaggacuacauuucccaagaggcu

SEQ ID NO: 513546 - RNA, 32 nt, Human
ugagcgagguauucccagucuuccugcuaagc

SEQ ID NO: 513547 - RNA, 32 nt, Human
ugagcgaguccagcagaaagcugcagugaccc

SEQ ID NO: 513548 - RNA, 32 nt, Human
ugagcgcacagaaguugagaacugaguuuugg

SEQ ID NO: 513549 - RNA, 32 nt, Human
ugagcgcagagcugcgaaggggaacuguuugc

SEQ ID NO: 513550 - RNA, 32 nt, Human
ugagcgcagguccucucucucccuucacccuu

SEQ ID NO: 513551 - RNA, 32 nt, Human
ugagcgcagugcuguguggcagcagagcuccu

SEQ ID NO: 513552 - RNA, 32 nt, Human
ugagcgcagugcuguguggcagcagagguccu

SEQ ID NO: 513553 - RNA, 32 nt, Human
ugagcgcaugugugugcaccagugcacaagug

SEQ ID NO: 513554 - RNA, 32 nt, Human
ugagcgcauuggcuugucugccgcaggcacag

SEQ ID NO: 513555 - RNA, 32 nt, Human
ugagcgccaguucagcuuucaaaaagagugcu

SEQ ID NO: 513556 - RNA, 32 nt, Human
ugagcgcggcgugggagccuugggagccgccg

SEQ ID NO: 513557 - RNA, 32 nt, Human
ugagcgcucacagcuucauuuggcccagguug

SEQ ID NO: 513558 - RNA, 32 nt, Human
ugagcgcuggcaagaccucaaugugaucaaca

SEQ ID NO: 513559 - RNA, 32 nt, Human
ugagcgcugugagauggauguauuuguagcca

SEQ ID NO: 513560 - RNA, 32 nt, Human
ugagcgcuuccaacagcuucucgaggcugcac

SEQ ID NO: 513561 - RNA, 32 nt, Human
ugagcgcuuccaggcuucaggcucagaaggcg

SEQ ID NO: 513562 - RNA, 32 nt, Human
ugagcggaagaaugugcuacaguugaaacucc

SEQ ID NO: 513563 - RNA, 32 nt, Human
ugagcggagcgguggagagggagaggcuggag

SEQ ID NO: 513564 - RNA, 32 nt, Human
ugagcggagucugaggucgcuguggacugccc

SEQ ID NO: 513565 - RNA, 30 nt, Human
ugagcggaguguuccagggcacaguggucu

SEQ ID NO: 513566 - RNA, 32 nt, Human
ugagcggcgcagagcccuccaggccugcaggg

SEQ ID NO: 513567 - RNA, 24 nt, Human
ugagcggcggccaggccgcucugc

SEQ ID NO: 513568 - RNA, 31 nt, Human
ugagcggcucccaugggcccugugucugcag

SEQ ID NO: 513569 - RNA, 32 nt, Human
ugagcggcuucauggcagacagcagcgagcca

SEQ ID NO: 513570 - RNA, 32 nt, Human
ugagcgggaaggacuccucucugccugcaguu

SEQ ID NO: 513571 - RNA, 32 nt, Human
ugagcgggagcugaggcugaggagaggggagc

SEQ ID NO: 513572 - RNA, 32 nt, Human
ugagcgggaggaacagcgggcccuggcagccc

SEQ ID NO: 513573 - RNA, 31 nt, Human
ugagcgggauccuaggacugaucuguagccc

SEQ ID NO: 513574 - RNA, 32 nt, Human
ugagcgggggcuuggcccagaggagccaagcc

SEQ ID NO: 513575 - RNA, 32 nt, Human
ugagcggguggcagcgacagagccaaaaucag

SEQ ID NO: 513576 - RNA, 32 nt, Human
ugagcguacagcggcuucccucgguggggacc

SEQ ID NO: 513577 - RNA, 21 nt, Human
ugagcguacuguaacuggaga

SEQ ID NO: 513578 - RNA, 22 nt, Human
ugagcguagccugggcaacaca

SEQ ID NO: 513579 - RNA, 32 nt, Human
ugagcguccaggcugcgcgauggcacacacua

SEQ ID NO: 513580 - RNA, 23 nt, Human
ugagcgugaagauggugcugccu

SEQ ID NO: 513581 - RNA, 32 nt, Human
ugagcgugacugugcuaaccuggguggggcag

SEQ ID NO: 513582 - RNA, 32 nt, Human
ugagcgugagccagaagcagcuguguauuuaa

SEQ ID NO: 513583 - RNA, 32 nt, Human
ugagcgugcgucugugugugccugugugcgag

SEQ ID NO: 513584 - RNA, 32 nt, Human
ugagcgugcguucugggcagggccuguaaugg

SEQ ID NO: 513585 - RNA, 32 nt, Human
ugagcguggaagggggaggagucaggggcucu

SEQ ID NO: 513586 - RNA, 32 nt, Human
ugagcguggcaugcaggugucuuugcuguguu

SEQ ID NO: 513587 - RNA, 32 nt, Human
ugagcguggcugcuuccugccgcucgacgccg

SEQ ID NO: 513588 - RNA, 32 nt, Human
ugagcgugucagcauccucugguuccaucucc

SEQ ID NO: 513589 - RNA, 29 nt, Human
ugagcgugucugugugcgaguggacgguc

SEQ ID NO: 513590 - RNA, 32 nt, Human
ugagcguugcccacaccccaucucccgucacc

SEQ ID NO: 513591 - RNA, 32 nt, Human
ugagcguugguguuuggcacgcgccacccucu

SEQ ID NO: 513592 - RNA, 32 nt, Human
ugagcuaaaagcuuccaugaaggggcugggaa

SEQ ID NO: 513593 - RNA, 32 nt, Human
ugagcuaaccuugcccagccucugggaacacu

SEQ ID NO: 513594 - RNA, 32 nt, Human
ugagcuaaucaaaagaaaacacugccuaugug

SEQ ID NO: 513595 - RNA, 21 nt, Human
ugagcuaauccagaagaucca

SEQ ID NO: 513596 - RNA, 32 nt, Human
ugagcuaauucugcaauuuucuaccaaacaga

SEQ ID NO: 513597 - RNA, 32 nt, Human
ugagcuacacacugaguaguauguauuucaug

SEQ ID NO: 513598 - RNA, 22 nt, Human
ugagcuaccauaugugcugucu

SEQ ID NO: 513599 - RNA, 32 nt, Human
ugagcuacgagccuggcagcaggugugcgccg

SEQ ID NO: 513600 - RNA, 31 nt, Human
ugagcuacgggaaugucuaugccaagcacgu

SEQ ID NO: 513601 - RNA, 32 nt, Human
ugagcuacuaacugcaggagcugaggagcugc

SEQ ID NO: 513602 - RNA, 32 nt, Human
ugagcuagcuggagaagaggggaggguccaua

SEQ ID NO: 513603 - RNA, 32 nt, Human
ugagcuaggccguuuccgggaggcggagcuca

SEQ ID NO: 513604 - RNA, 32 nt, Human
ugagcuaggggcaggaggcaugggcgggacag

SEQ ID NO: 513605 - RNA, 32 nt, Human
ugagcuauagcuacagcucuagcuauccagca

SEQ ID NO: 513606 - RNA, 32 nt, Human
ugagcuaugaaugccguacagagcagaggcug

SEQ ID NO: 513607 - RNA, 32 nt, Human
ugagcuauguucaugacacugcacuccagccu

SEQ ID NO: 513608 - RNA, 32 nt, Human
ugagcuauuaaaacucagccugggacaguuua

SEQ ID NO: 513609 - RNA, 32 nt, Human
ugagcucaaccagcagagacauuccaucccaa

SEQ ID NO: 513610 - RNA, 32 nt, Human
ugagcucaagaggccgagguugcagugagccg

SEQ ID NO: 513611 - RNA, 32 nt, Human
ugagcucaagaguucaagaccagccugggaaa

SEQ ID NO: 513612 - RNA, 32 nt, Human
ugagcucaagcaacccucccuccucagccuuc

SEQ ID NO: 513613 - RNA, 32 nt, Human
ugagcucaagcaauccucccaccucagccucc

SEQ ID NO: 513614 - RNA, 32 nt, Human
ugagcucaagcaauccucccaccucagccuuu

SEQ ID NO: 513615 - RNA, 32 nt, Human
ugagcucaaggagaugcaggcugcagugggcu

SEQ ID NO: 513616 - RNA, 32 nt, Human
ugagcucacauugucaaaaacagacuugccug

SEQ ID NO: 513617 - RNA, 32 nt, Human
ugagcucaccuccaugcaaagacuucaguuuu

SEQ ID NO: 513618 - RNA, 32 nt, Human
ugagcucaccugucucucugacugccuuggag

SEQ ID NO: 513619 - RNA, 32 nt, Human
ugagcucacugcaaccucugacucccagacuc

SEQ ID NO: 513620 - RNA, 32 nt, Human
ugagcucacugcaaccucugccucccaaguuc

SEQ ID NO: 513621 - RNA, 32 nt, Human
ugagcucagaaguuccacugcacuccagccug

SEQ ID NO: 513622 - RNA, 32 nt, Human
ugagcucagauggugccacugcacuccagccu

SEQ ID NO: 513623 - RNA, 32 nt, Human
ugagcucagccaaggaaacucuugcacaaaug

SEQ ID NO: 513624 - RNA, 32 nt, Human
ugagcucagccaccgauggagggucguggggc

SEQ ID NO: 513625 - RNA, 32 nt, Human
ugagcucagcuggcagaguuugcaaguggcgg

SEQ ID NO: 513626 - RNA, 32 nt, Human
ugagcucagcuguccccucucagagcgccaca

SEQ ID NO: 513627 - RNA, 32 nt, Human
ugagcucaggagcugcacggaaugguggcagu

SEQ ID NO: 513628 - RNA, 32 nt, Human
ugagcucaggaggcagagguugcagugagcca

SEQ ID NO: 513629 - RNA, 32 nt, Human
ugagcucaggaggcagagguugcagugagcug

SEQ ID NO: 513630 - RNA, 32 nt, Human
ugagcucaggagguugggucugcagugagcua

SEQ ID NO: 513631 - RNA, 32 nt, Human
ugagcucaggaguccaagaccagccugggcaa

SEQ ID NO: 513632 - RNA, 32 nt, Human
ugagcucaggaguucaaaaccagcuugggcag

SEQ ID NO: 513633 - RNA, 19 nt, Human
ugagcucaggaguucaaga

SEQ ID NO: 513634 - RNA, 32 nt, Human
ugagcucaggaguucaagaccagccuaggcaa

SEQ ID NO: 513635 - RNA, 32 nt, Human
ugagcucaggaguucaagaccagccuaggcca

SEQ ID NO: 513636 - RNA, 32 nt, Human
ugagcucaggaguucaagaccagccuggacaa

SEQ ID NO: 513637 - RNA, 32 nt, Human
ugagcucaggaguucaagaccagccugggcaa

SEQ ID NO: 513638 - RNA, 32 nt, Human
ugagcucaggaguucaagaccagccugggcag

SEQ ID NO: 513639 - RNA, 32 nt, Human
ugagcucaggaguucaagaccagcuugggaaa

SEQ ID NO: 513640 - RNA, 32 nt, Human
ugagcucaggaguucaagacgagccugggcaa

SEQ ID NO: 513641 - RNA, 32 nt, Human
ugagcucaggaguucaagagcaaccugaccaa

SEQ ID NO: 513642 - RNA, 32 nt, Human
ugagcucaggaguucaagaucagucugggcaa

SEQ ID NO: 513643 - RNA, 19 nt, Human
ugagcucaggaguuccaga

SEQ ID NO: 513644 - RNA, 19 nt, Human
ugagcucaggaguucgaga

SEQ ID NO: 513645 - RNA, 32 nt, Human
ugagcucaggaguuggagaccaacccuggcaa

SEQ ID NO: 513646 - RNA, 19 nt, Human
ugagcucaggaguuugaga

SEQ ID NO: 513647 - RNA, 32 nt, Human
ugagcucaggaguuugagaccaaccuggccaa

SEQ ID NO: 513648 - RNA, 29 nt, Human
ugagcucaggaguuugagaccaaccuggg

SEQ ID NO: 513649 - RNA, 32 nt, Human
ugagcucaggaguuugagaccaacuuggccaa

SEQ ID NO: 513650 - RNA, 32 nt, Human
ugagcucaggaguuuggaccagccugggcaac

SEQ ID NO: 513651 - RNA, 32 nt, Human
ugagcucaggaucugugugaggugugggaggu

SEQ ID NO: 513652 - RNA, 32 nt, Human
ugagcucaggcagaucacuugaggucaggagu

SEQ ID NO: 513653 - RNA, 26 nt, Human
ugagcucaggugauccacccgccuca

SEQ ID NO: 513654 - RNA, 25 nt, Human
ugagcucaggugauccaccugccuc

SEQ ID NO: 513655 - RNA, 25 nt, Human
ugagcucaggugaucugcccaccuc

SEQ ID NO: 513656 - RNA, 32 nt, Human
ugagcucaguaguucaagaccagccuaggcaa

SEQ ID NO: 513657 - RNA, 32 nt, Human
ugagcucaugagggcccaggaggucaaggcuu

SEQ ID NO: 513658 - RNA, 32 nt, Human
ugagcucaugaguucaagaccagucugggcaa

SEQ ID NO: 513659 - RNA, 32 nt, Human
ugagcucaugcgacugcacuccagccugggug

SEQ ID NO: 513660 - RNA, 19 nt, Human
ugagcuccaagaguagcuu

SEQ ID NO: 513661 - RNA, 32 nt, Human
ugagcuccaagugcuaaauaacagcaucucau

SEQ ID NO: 513662 - RNA, 32 nt, Human
ugagcuccaauucuucucaaacuggagaacug

SEQ ID NO: 513663 - RNA, 32 nt, Human
ugagcuccagaaggagcuuucugggccagcuu

SEQ ID NO: 513664 - RNA, 32 nt, Human
ugagcuccagagccgcaccaucugccacaaac

SEQ ID NO: 513665 - RNA, 32 nt, Human
ugagcuccagccuggcuaucucuuucaagaaa

SEQ ID NO: 513666 - RNA, 23 nt, Human
ugagcuccaggggucagcagcuu

SEQ ID NO: 513667 - RNA, 32 nt, Human
ugagcuccaugugccuuuuggaucuuugcaac

SEQ ID NO: 513668 - RNA, 32 nt, Human
ugagcucccaccacugcacuccagccugggcg

SEQ ID NO: 513669 - RNA, 22 nt, Human
ugagcuccccauggcacuguuu

SEQ ID NO: 513670 - RNA, 32 nt, Human
ugagcucccucgggagccuuucacgaggucag

SEQ ID NO: 513671 - RNA, 32 nt, Human
ugagcucccugucacuggccuggaccuggaga

SEQ ID NO: 513672 - RNA, 24 nt, Human
ugagcuccgccccugcugcugccu

SEQ ID NO: 513673 - RNA, 32 nt, Human
ugagcuccgccccugcugcugccuguagccag

SEQ ID NO: 513674 - RNA, 32 nt, Human
ugagcuccgugcagaagcuggugacggaugag

SEQ ID NO: 513675 - RNA, 32 nt, Human
ugagcuccuggccuagacuccaaaggguuggg

SEQ ID NO: 513676 - RNA, 32 nt, Human
ugagcuccuuucuccucuccuucagccaauca

SEQ ID NO: 513677 - RNA, 32 nt, Human
ugagcucgcugagacuuccuggaccccgcacc

SEQ ID NO: 513678 - RNA, 32 nt, Human
ugagcucgcugaguccagccucguggucuucu

SEQ ID NO: 513679 - RNA, 32 nt, Human
ugagcucggaagauggaggcugcagugagcca

SEQ ID NO: 513680 - RNA, 32 nt, Human
ugagcucgggcacgcagggccugagaucuggc

SEQ ID NO: 513681 - RNA, 23 nt, Human
ugagcucgugaucugcccgccuc

SEQ ID NO: 513682 - RNA, 22 nt, Human
ugagcucuaagaguuucugccu

SEQ ID NO: 513683 - RNA, 32 nt, Human
ugagcucuacaaaaacacacugcuucacuuug

SEQ ID NO: 513684 - RNA, 32 nt, Human
ugagcucuaggcugccuggagggaaggaacag

SEQ ID NO: 513685 - RNA, 32 nt, Human
ugagcucuauagaccaucccucucugcaauca

SEQ ID NO: 513686 - RNA, 32 nt, Human
ugagcucuauuucuacccaggcugcugucguc

SEQ ID NO: 513687 - RNA, 32 nt, Human
ugagcucuccacugccgaaauacaacucugug

SEQ ID NO: 513688 - RNA, 32 nt, Human
ugagcucuccauccucucugggaauuuaccga

SEQ ID NO: 513689 - RNA, 32 nt, Human
ugagcucucggcuccuccuccgucuucagggc

SEQ ID NO: 513690 - RNA, 32 nt, Human
ugagcucucgguggaugaggcugcaguccaug

SEQ ID NO: 513691 - RNA, 32 nt, Human
ugagcucugauggcgcacaccuguaaucagga

SEQ ID NO: 513692 - RNA, 32 nt, Human
ugagcucugauuccucuucugucuggcugauu

SEQ ID NO: 513693 - RNA, 32 nt, Human
ugagcucugcaagcugugaucugucuggguuc

SEQ ID NO: 513694 - RNA, 32 nt, Human
ugagcucuggaaacauugggauggacuguuca

SEQ ID NO: 513695 - RNA, 32 nt, Human
ugagcucuggaaaucuugaggugugaccagau

SEQ ID NO: 513696 - RNA, 32 nt, Human
ugagcucuggagguggaggcugccaugagcca

SEQ ID NO: 513697 - RNA, 32 nt, Human
ugagcucuguguccuccguucauuccauggcu

SEQ ID NO: 513698 - RNA, 32 nt, Human
ugagcucuucaccaucucugugaauggcgucc

SEQ ID NO: 513699 - RNA, 32 nt, Human
ugagcugaacaagacccuacugcugucuuauu

SEQ ID NO: 513700 - RNA, 32 nt, Human
ugagcugaacuauccuggaguguuuuguugca

SEQ ID NO: 513701 - RNA, 32 nt, Human
ugagcugaauccuucaaaggcacagcaggcag

SEQ ID NO: 513702 - RNA, 32 nt, Human
ugagcugacucccuuagagcaaaggagagaca

SEQ ID NO: 513703 - RNA, 32 nt, Human
ugagcugacugccuuggccucccagagugcug

SEQ ID NO: 513704 - RNA, 32 nt, Human
ugagcugagacugugccacugcaguccagccu

SEQ ID NO: 513705 - RNA, 32 nt, Human
ugagcugagacuucggggcuguggagaccagc

SEQ ID NO: 513706 - RNA, 32 nt, Human
ugagcugagaucgugacacugcacuucagccu

SEQ ID NO: 513707 - RNA, 32 nt, Human
ugagcugagaucgugcuacugcaguccagccu

SEQ ID NO: 513708 - RNA, 32 nt, Human
ugagcugagauggcaccacugcacuccagccu

SEQ ID NO: 513709 - RNA, 32 nt, Human
ugagcugagauggcaccacugcacuccagcuu

SEQ ID NO: 513710 - RNA, 32 nt, Human
ugagcugagauggcaccacugcacuccggccu

SEQ ID NO: 513711 - RNA, 32 nt, Human
ugagcugagauggcgccacugcacuccagccu

SEQ ID NO: 513712 - RNA, 32 nt, Human
ugagcugagaugguaccacugcacuccagccu

SEQ ID NO: 513713 - RNA, 32 nt, Human
ugagcugagauggugccacugcacuccagaug

SEQ ID NO: 513714 - RNA, 32 nt, Human
ugagcugagauggugccacugcacuccagccu

SEQ ID NO: 513715 - RNA, 32 nt, Human
ugagcugagauggugccacugcacuccagcuu

SEQ ID NO: 513716 - RNA, 32 nt, Human
ugagcugagauggugccacugcacucuaaccu

SEQ ID NO: 513717 - RNA, 32 nt, Human
ugagcugagauggugccacugcacuucagccu

SEQ ID NO: 513718 - RNA, 32 nt, Human
ugagcugagauggugccacugcauuucugccu

SEQ ID NO: 513719 - RNA, 32 nt, Human
ugagcugagauggugccacuguacuccagccu

SEQ ID NO: 513720 - RNA, 32 nt, Human
ugagcugagauggugccauugcacuucagccc

SEQ ID NO: 513721 - RNA, 32 nt, Human
ugagcugagauggugccauugcccuccagccu

SEQ ID NO: 513722 - RNA, 32 nt, Human
ugagcugagauugcacuccagccugggcgaca

SEQ ID NO: 513723 - RNA, 32 nt, Human
ugagcugagauuguaccaugcacuccagccug

SEQ ID NO: 513724 - RNA, 32 nt, Human
ugagcugaggaguucaagaccagccugggcaa

SEQ ID NO: 513725 - RNA, 32 nt, Human
ugagcugaggccgcugaagcuguaggaagcgc

SEQ ID NO: 513726 - RNA, 32 nt, Human
ugagcugaguccaagguuacagugagccguga

SEQ ID NO: 513727 - RNA, 32 nt, Human
ugagcugaucaaggaagucucucuaggcugca

SEQ ID NO: 513728 - RNA, 32 nt, Human
ugagcugaugagccguccccugggcuugaaau

SEQ ID NO: 513729 - RNA, 32 nt, Human
ugagcugauggugcagggagaauuguugagaa

SEQ ID NO: 513730 - RNA, 32 nt, Human
ugagcugcaaacuucuucuauaccuuucuuac

SEQ ID NO: 513731 - RNA, 32 nt, Human
ugagcugcacacaucccacaaugccugcccca

SEQ ID NO: 513732 - RNA, 32 nt, Human
ugagcugcacacucaagggugugauaaccagc

SEQ ID NO: 513733 - RNA, 32 nt, Human
ugagcugcacuagccccagucuggcccggcac

SEQ ID NO: 513734 - RNA, 32 nt, Human
ugagcugcacugcauuccagccugggugacag

SEQ ID NO: 513735 - RNA, 31 nt, Human
ugagcugcacuuuuuggggugggaaagguga

SEQ ID NO: 513736 - RNA, 32 nt, Human
ugagcugcagaaagugcaagacaugccaauuu

SEQ ID NO: 513737 - RNA, 32 nt, Human
ugagcugcagagcugacgucugggugacagug

SEQ ID NO: 513738 - RNA, 32 nt, Human
ugagcugcagcaguuguacccuuucuugauga

SEQ ID NO: 513739 - RNA, 32 nt, Human
ugagcugcagccacuacacaggccuggaauuc

SEQ ID NO: 513740 - RNA, 32 nt, Human
ugagcugcaugugaauccacacaugccauucc

SEQ ID NO: 513741 - RNA, 32 nt, Human
ugagcugccccuggcuuccuuuaaggaggcug

SEQ ID NO: 513742 - RNA, 22 nt, Human
ugagcugcguggagaaagccau

SEQ ID NO: 513743 - RNA, 32 nt, Human
ugagcugcucagcugcccucugcuccauaccc

SEQ ID NO: 513744 - RNA, 32 nt, Human
ugagcugcucucagaaccucagucuggggacc

SEQ ID NO: 513745 - RNA, 32 nt, Human
ugagcugcugccacuccagcaagggaaauaau

SEQ ID NO: 513746 - RNA, 32 nt, Human
ugagcugcugcugcugugcuggggcagcuucc

SEQ ID NO: 513747 - RNA, 32 nt, Human
ugagcugcuguugcagucuaacccacuaauca

SEQ ID NO: 513748 - RNA, 32 nt, Human
ugagcugcuugccuuuccaccuccagggcaug

SEQ ID NO: 513749 - RNA, 32 nt, Human
ugagcugcuuuggagacucggcugccagaggg

SEQ ID NO: 513750 - RNA, 23 nt, Human
ugagcuggaaagguauggaggug

SEQ ID NO: 513751 - RNA, 32 nt, Human
ugagcuggaccuuaaacacaucugcaggagcu

SEQ ID NO: 513752 - RNA, 32 nt, Human
ugagcuggacuucucagagaggcugggcauua

SEQ ID NO: 513753 - RNA, 21 nt, Human
ugagcuggagucuuacucugu

SEQ ID NO: 513754 - RNA, 32 nt, Human
ugagcuggccacuccagagcugcagugccacu

SEQ ID NO: 513755 - RNA, 32 nt, Human
ugagcuggccccucugccccagcugagaugga

SEQ ID NO: 513756 - RNA, 32 nt, Human
ugagcuggcuacucggggauaaagacugaagu

SEQ ID NO: 513757 - RNA, 32 nt, Human
ugagcuggcugacagcuggggacggguggcgg

SEQ ID NO: 513758 - RNA, 32 nt, Human
ugagcugggaggaucacucaagcccugggagg

SEQ ID NO: 513759 - RNA, 32 nt, Human
ugagcugggaggaucacuugagcccaggaggu

SEQ ID NO: 513760 - RNA, 32 nt, Human
ugagcugggaggauugcuugagaccagaaguu

SEQ ID NO: 513761 - RNA, 32 nt, Human
ugagcugggaguguccggcacuguggucucag

SEQ ID NO: 513762 - RNA, 32 nt, Human
ugagcugggauguucuggaggaugagguuguc

SEQ ID NO: 513763 - RNA, 32 nt, Human
ugagcugggccaucugacuucuaccucccaug

SEQ ID NO: 513764 - RNA, 32 nt, Human
ugagcugggcccacggcucccuucccaugugu

SEQ ID NO: 513765 - RNA, 32 nt, Human
ugagcugggccccagcccagugacuggcucau

SEQ ID NO: 513766 - RNA, 32 nt, Human
ugagcugggcucucgcuuuguugcccaggcug

SEQ ID NO: 513767 - RNA, 32 nt, Human
ugagcugggcugggaggcuuccuacaggggaa

SEQ ID NO: 513768 - RNA, 32 nt, Human
ugagcugggcuggggcucagggguccuaaccc

SEQ ID NO: 513769 - RNA, 32 nt, Human
ugagcugguggagccagacagagcaggugcgg

SEQ ID NO: 513770 - RNA, 32 nt, Human
ugagcugguuaggaaccacagacugugacaga

SEQ ID NO: 513771 - RNA, 32 nt, Human
ugagcuguaggcagggacggggagggacuguc

SEQ ID NO: 513772 - RNA, 32 nt, Human
ugagcugucugcaggaggugaagcaguguuuu

SEQ ID NO: 513773 - RNA, 32 nt, Human
ugagcugugacccagaggggacgcugaggaag

SEQ ID NO: 513774 - RNA, 32 nt, Human
ugagcugugauugagccacugcacuccaaucu

SEQ ID NO: 513775 - RNA, 32 nt, Human
ugagcugugcagguggggagacugggcugagg

SEQ ID NO: 513776 - RNA, 32 nt, Human
ugagcugugcuucuucaaguagcucaguucuu

SEQ ID NO: 513777 - RNA, 32 nt, Human
ugagcugugggacuuuaggcaaguuaucuaaa

SEQ ID NO: 513778 - RNA, 32 nt, Human
ugagcuguguagaguuucuguguguacagaug

SEQ ID NO: 513779 - RNA, 32 nt, Human
ugagcugugucaccugacugguuuuggagguu

SEQ ID NO: 513780 - RNA, 32 nt, Human
ugagcugugugagcucuucugcccaggcgggc

SEQ ID NO: 513781 - RNA, 32 nt, Human
ugagcuguucccagggcuggagcagguguacc

SEQ ID NO: 513782 - RNA, 32 nt, Human
ugagcuguugccgcagaaugggcugcuggcuc

SEQ ID NO: 513783 - RNA, 32 nt, Human
ugagcuguuguggacuaguggugcaggcaagg

SEQ ID NO: 513784 - RNA, 21 nt, Human
ugagcuuaaguacucauuuug

SEQ ID NO: 513785 - RNA, 32 nt, Human
ugagcuuacugcagucagucacagaggcuguu

SEQ ID NO: 513786 - RNA, 32 nt, Human
ugagcuuaggaaaauguacaagagaacaaauu

SEQ ID NO: 513787 - RNA, 32 nt, Human
ugagcuuaucuguuugaugcuguggcaggguc

SEQ ID NO: 513788 - RNA, 32 nt, Human
ugagcuucacaucucagguaacuggagaaguc

SEQ ID NO: 513789 - RNA, 32 nt, Human
ugagcuucagcccauuucucuccauuuccucc

SEQ ID NO: 513790 - RNA, 32 nt, Human
ugagcuucagugagcacccaugggccugcucu

SEQ ID NO: 513791 - RNA, 32 nt, Human
ugagcuucauuucuucaagaugcucugggugg

SEQ ID NO: 513792 - RNA, 32 nt, Human
ugagcuucauuucuugccaccucuauucuuuc

SEQ ID NO: 513793 - RNA, 21 nt, Human
ugagcuuccacuggugcugcu

SEQ ID NO: 513794 - RNA, 32 nt, Human
ugagcuuccuguacccugacccucuccagccu

SEQ ID NO: 513795 - RNA, 32 nt, Human
ugagcuucuccuccgucggcgcccgggcggac

SEQ ID NO: 513796 - RNA, 32 nt, Human
ugagcuucuccuccucauccucccagccccac

SEQ ID NO: 513797 - RNA, 32 nt, Human
ugagcuucugucauaugcccaguauuaugcuu

SEQ ID NO: 513798 - RNA, 32 nt, Human
ugagcuugcaccauugcacuccagccugggcg

SEQ ID NO: 513799 - RNA, 32 nt, Human
ugagcuugcuuuccacauucucccaggguaug

SEQ ID NO: 513800 - RNA, 32 nt, Human
ugagcuuggaagaagagaggcugagagggucu

SEQ ID NO: 513801 - RNA, 32 nt, Human
ugagcuugggaaaucaagguugcagugagcua

SEQ ID NO: 513802 - RNA, 32 nt, Human
ugagcuugggaguucaagaccagccugagagg

SEQ ID NO: 513803 - RNA, 32 nt, Human
ugagcuuggggugggagauggggaacaggcag

SEQ ID NO: 513804 - RNA, 32 nt, Human
ugagcuuggggugggguggauggggaagacuu

SEQ ID NO: 513805 - RNA, 32 nt, Human
ugagcuugguguggcuugguguggcagaaggc

SEQ ID NO: 513806 - RNA, 32 nt, Human
ugagcuuguuauccaucuccccaaacuuucuc

SEQ ID NO: 513807 - RNA, 32 nt, Human
ugagcuuuauacccagcucugccacaaaugug

SEQ ID NO: 513808 - RNA, 32 nt, Human
ugagcuuuaucucauuuaaucuuggcaguggu

SEQ ID NO: 513809 - RNA, 32 nt, Human
ugagcuuucacucaaccccggcaagcagaggu

SEQ ID NO: 513810 - RNA, 32 nt, Human
ugagcuuucuaggucacauuggguuaaguuug

SEQ ID NO: 513811 - RNA, 32 nt, Human
ugagcuuucuucuuggacaccuaauacccaca

SEQ ID NO: 513812 - RNA, 32 nt, Human
ugagcuuugccugucucuugccuuaucaguuc

SEQ ID NO: 513813 - RNA, 32 nt, Human
ugagcuuuuccgugccucuccuccaccucucc

SEQ ID NO: 513814 - RNA, 22 nt, Human
ugagcuuuuggcuuacuauaua

SEQ ID NO: 513815 - RNA, 32 nt, Human
ugaggaaaaagaacuguaacaguaucugugac

SEQ ID NO: 513816 - RNA, 32 nt, Human
ugaggaaaaguccacaagaacaauucaagaaa

SEQ ID NO: 513817 - RNA, 32 nt, Human
ugaggaaacagccacauguucgucaugauuga

SEQ ID NO: 513818 - RNA, 32 nt, Human
ugaggaaacugcacuguuuuauuuuaauucag

SEQ ID NO: 513819 - RNA, 32 nt, Human
ugaggaaacuggagaguaauuugauggagauc

SEQ ID NO: 513820 - RNA, 32 nt, Human
ugaggaaagagaccuccagcaaguccagccag

SEQ ID NO: 513821 - RNA, 32 nt, Human
ugaggaaagaggagacagugggagaggacaau

SEQ ID NO: 513822 - RNA, 32 nt, Human
ugaggaaagcaaaacaccauuuagggcuacca

SEQ ID NO: 513823 - RNA, 32 nt, Human
ugaggaaaggagagggaggaguaaaggggauu

SEQ ID NO: 513824 - RNA, 32 nt, Human
ugaggaaagugaggacaaggagcaagauaucc

SEQ ID NO: 513825 - RNA, 32 nt, Human
ugaggaaaugacaggaggaagacguggguuug

SEQ ID NO: 513826 - RNA, 32 nt, Human
ugaggaaaugagaucacaucuuugucacugga

SEQ ID NO: 513827 - RNA, 32 nt, Human
ugaggaaauuauuucauccccuugugacaucu

SEQ ID NO: 513828 - RNA, 31 nt, Human
ugaggaacacuuuucugaaauaugucaagaa

SEQ ID NO: 513829 - RNA, 32 nt, Human
ugaggaacagccgcagcgugucacagguguug

SEQ ID NO: 513830 - RNA, 32 nt, Human
ugaggaaccacugucucaauaaggucucagug

SEQ ID NO: 513831 - RNA, 32 nt, Human
ugaggaacccuuacaguaggagcccagcucug

SEQ ID NO: 513832 - RNA, 32 nt, Human
ugaggaacucacauacugacuucagugggacu

SEQ ID NO: 513833 - RNA, 32 nt, Human
ugaggaacucagaaguggagauuucaguucag

SEQ ID NO: 513834 - RNA, 32 nt, Human
ugaggaacuggucuucuggagacucugugugg

SEQ ID NO: 513835 - RNA, 32 nt, Human
ugaggaacuguggcacagcaccucguggccug

SEQ ID NO: 513836 - RNA, 32 nt, Human
ugaggaagaaagaggaggagguuugggagcua

SEQ ID NO: 513837 - RNA, 32 nt, Human
ugaggaagaagaggagcugaagguaagaaacu

SEQ ID NO: 513838 - RNA, 32 nt, Human
ugaggaagaagaggaggaggaggaagaggagg

SEQ ID NO: 513839 - RNA, 32 nt, Human
ugaggaagaccagccaccaguggaagcggggu

SEQ ID NO: 513840 - RNA, 32 nt, Human
ugaggaagacgaggacagggaggaggaaaagg

SEQ ID NO: 513841 - RNA, 32 nt, Human
ugaggaagagggcucagagccugacucugagg

SEQ ID NO: 513842 - RNA, 32 nt, Human
ugaggaagauggaccuggacagacagucagcu

SEQ ID NO: 513843 - RNA, 32 nt, Human
ugaggaagcacagcagcaucuucaaacaugua

SEQ ID NO: 513844 - RNA, 32 nt, Human
ugaggaagcugaagcagagaaguuaacuacuu

SEQ ID NO: 513845 - RNA, 32 nt, Human
ugaggaaggaacuagagagaguggcaggagcg

SEQ ID NO: 513846 - RNA, 32 nt, Human
ugaggaaggaauaguuugaggcuggagagaug

SEQ ID NO: 513847 - RNA, 32 nt, Human
ugaggaaggagaggagaggguggcaaugaugc

SEQ ID NO: 513848 - RNA, 32 nt, Human
ugaggaaggagaguggauaaaguagugaaugc

SEQ ID NO: 513849 - RNA, 32 nt, Human
ugaggaaggaggaucgcuugaggccaggaguu

SEQ ID NO: 513850 - RNA, 32 nt, Human
ugaggaaggggcaucacuugaaccaggaguuc

SEQ ID NO: 513851 - RNA, 32 nt, Human
ugaggaaggguaaggggcagggcugguuucag

SEQ ID NO: 513852 - RNA, 32 nt, Human
ugaggaagugagcucagggaggcugagugucc

SEQ ID NO: 513853 - RNA, 32 nt, Human
ugaggaaucuguguguucuccacacucuucgc

SEQ ID NO: 513854 - RNA, 32 nt, Human
ugaggaaugcagaaaaaccagggcaggacagu

SEQ ID NO: 513855 - RNA, 32 nt, Human
ugaggaaugcgguucagggcuggggugagagu

SEQ ID NO: 513856 - RNA, 32 nt, Human
ugaggaauggcugacuccaaagcauguggugg

SEQ ID NO: 513857 - RNA, 31 nt, Human
ugaggaauuaccaaggaggcaggagguggag

SEQ ID NO: 513858 - RNA, 32 nt, Human
ugaggaauucucuccacaccuaggcaauaauu

SEQ ID NO: 513859 - RNA, 32 nt, Human
ugaggaauugcgagauauugcugaggggaaaa

SEQ ID NO: 513860 - RNA, 32 nt, Human
ugaggaauuuggugagcgagauaaaaguccac

SEQ ID NO: 513861 - RNA, 19 nt, Human
ugaggacaaaaauauggac

SEQ ID NO: 513862 - RNA, 32 nt, Human
ugaggacaaagcagggcaccucucugaacuga

SEQ ID NO: 513863 - RNA, 32 nt, Human
ugaggacacacagagggugggggugagcaggc

SEQ ID NO: 513864 - RNA, 32 nt, Human
ugaggacagaggaucacuugaggucaggaguu

SEQ ID NO: 513865 - RNA, 22 nt, Human
ugaggacagccucgggucacca

SEQ ID NO: 513866 - RNA, 32 nt, Human
ugaggacagcugcagagguggcagugugugga

SEQ ID NO: 513867 - RNA, 32 nt, Human
ugaggacaggaguucaagaccagccugggcaa

SEQ ID NO: 513868 - RNA, 32 nt, Human
ugaggacaggcuggcgccuccacccacccucc

SEQ ID NO: 513869 - RNA, 32 nt, Human
ugaggacagucuccaaaugacagcugcaugcc

SEQ ID NO: 513870 - RNA, 32 nt, Human
ugaggacaguuuguuaauacgcuauauacugu

SEQ ID NO: 513871 - RNA, 32 nt, Human
ugaggacauauguacauauacaaguauagaca

SEQ ID NO: 513872 - RNA, 32 nt, Human
ugaggacaucagggccaccucuggaccccuug

SEQ ID NO: 513873 - RNA, 32 nt, Human
ugaggacauccugugcaugaugccuagagagu

SEQ ID NO: 513874 - RNA, 32 nt, Human
ugaggacaugagauuugggagggaccaggggc

SEQ ID NO: 513875 - RNA, 32 nt, Human
ugaggacaugagcaaccagugccagggagggu

SEQ ID NO: 513876 - RNA, 32 nt, Human
ugaggaccagccuguacauguauagaagaaaa

SEQ ID NO: 513877 - RNA, 32 nt, Human
ugaggacccuucagagccacccuuucuaguuu

SEQ ID NO: 513878 - RNA, 32 nt, Human
ugaggaccgcugcucucugccucuccaggaau

SEQ ID NO: 513879 - RNA, 32 nt, Human
ugaggaccucaaggaccccaucaaguguacac

SEQ ID NO: 513880 - RNA, 32 nt, Human
ugaggaccucgauguccagcugcugucagguc

SEQ ID NO: 513881 - RNA, 32 nt, Human
ugaggaccugccaaauggaagaaggacagaga

SEQ ID NO: 513882 - RNA, 32 nt, Human
ugaggaccuggugcaggaagcuucaucugaag

SEQ ID NO: 513883 - RNA, 32 nt, Human
ugaggaccuucccagucuccccagaguccgug

SEQ ID NO: 513884 - RNA, 32 nt, Human
ugaggacgagacccccauccagccuccagggc

SEQ ID NO: 513885 - RNA, 32 nt, Human
ugaggacgaggaggcagcaggagcagugacgg

SEQ ID NO: 513886 - RNA, 32 nt, Human
ugaggacgggucgcauuauguugcccaggcug

SEQ ID NO: 513887 - RNA, 32 nt, Human
ugaggacggucugccuucccucgucccuuuac

SEQ ID NO: 513888 - RNA, 32 nt, Human
ugaggacgguuccagcccugggccaggcagag

SEQ ID NO: 513889 - RNA, 32 nt, Human
ugaggacgugacuucccauugguucauguauc

SEQ ID NO: 513890 - RNA, 32 nt, Human
ugaggacguggugacuuccugaacaucagcuu

SEQ ID NO: 513891 - RNA, 32 nt, Human
ugaggacguguccauggacuucucccaggagg

SEQ ID NO: 513892 - RNA, 32 nt, Human
ugaggacuaagcucugauuuuucaucuugccc

SEQ ID NO: 513893 - RNA, 32 nt, Human
ugaggacucacugagugcaccuccaucuccaa

SEQ ID NO: 513894 - RNA, 31 nt, Human
ugaggacucagaggaacuggcagcucagcug

SEQ ID NO: 513895 - RNA, 32 nt, Human
ugaggacuccauccuccuguuccauucaucug

SEQ ID NO: 513896 - RNA, 32 nt, Human
ugaggacucccuagaagcagauguugccacgc

SEQ ID NO: 513897 - RNA, 32 nt, Human
ugaggacugcagcuagcauccaugcucugaug

SEQ ID NO: 513898 - RNA, 32 nt, Human
ugaggacuuagagugggaagcuguccuuuaac

SEQ ID NO: 513899 - RNA, 32 nt, Human
ugaggagaaaaaggagaaaagggaaaagcaga

SEQ ID NO: 513900 - RNA, 32 nt, Human
ugaggagaaagaaagagagggagggagagaaa

SEQ ID NO: 513901 - RNA, 32 nt, Human
ugaggagaaagaagaaaauggcugcccauuuc

SEQ ID NO: 513902 - RNA, 32 nt, Human
ugaggagaagaauuuucggagugaagacauca

SEQ ID NO: 513903 - RNA, 22 nt, Human
ugaggagaagaucaucggcaaa

SEQ ID NO: 513904 - RNA, 32 nt, Human
ugaggagaaggggccucagcagaggaagcacg

SEQ ID NO: 513905 - RNA, 32 nt, Human
ugaggagaaugguagagaggagaggagagaga

SEQ ID NO: 513906 - RNA, 32 nt, Human
ugaggagaccugaagaccagaggaaacacagc

SEQ ID NO: 513907 - RNA, 23 nt, Human
ugaggagacguggagaggaggag

SEQ ID NO: 513908 - RNA, 32 nt, Human
ugaggagagagaagaaacggaagaggaaguuu

SEQ ID NO: 513909 - RNA, 32 nt, Human
ugaggagaggagaacagagggauggugagaaa

SEQ ID NO: 513910 - RNA, 21 nt, Human
ugaggagaggcuccagacccg

SEQ ID NO: 513911 - RNA, 32 nt, Human
ugaggagagggugaggcccacucuguuccuac

SEQ ID NO: 513912 - RNA, 32 nt, Human
ugaggagcacacuguagacagcugcaucagug

SEQ ID NO: 513913 - RNA, 22 nt, Human
ugaggagcagaaugugguacua

SEQ ID NO: 513914 - RNA, 21 nt, Human
ugaggagcagcacagagcagc

SEQ ID NO: 513915 - RNA, 32 nt, Human
ugaggagcagcagagucugauacuaggucuag

SEQ ID NO: 513916 - RNA, 32 nt, Human
ugaggagcagucaugucuuacaugguggcagg

SEQ ID NO: 513917 - RNA, 32 nt, Human
ugaggagccagccagggguccagcacagcccu

SEQ ID NO: 513918 - RNA, 32 nt, Human
ugaggagccaugaggagccucaguuuugaaag

SEQ ID NO: 513919 - RNA, 32 nt, Human
ugaggagccgggaggcuggaccagucccgucg

SEQ ID NO: 513920 - RNA, 32 nt, Human
ugaggagccugcggugcuccccagaaaagggg

SEQ ID NO: 513921 - RNA, 32 nt, Human
ugaggagccuugcugcucaucagcauccaggu

SEQ ID NO: 513922 - RNA, 32 nt, Human
ugaggagcgggccaccccacacgccaagucgg

SEQ ID NO: 513923 - RNA, 32 nt, Human
ugaggagcguccauuccucuggagucucuccu

SEQ ID NO: 513924 - RNA, 32 nt, Human
ugaggagcuaugaacugguuuuggucccucua

SEQ ID NO: 513925 - RNA, 32 nt, Human
ugaggagcucaugcccuuccuuccucuuuauu

SEQ ID NO: 513926 - RNA, 32 nt, Human
ugaggagcugaccgcucugagcuguucuguuu

SEQ ID NO: 513927 - RNA, 32 nt, Human
ugaggagcugcagucucugucaagaugauaga

SEQ ID NO: 513928 - RNA, 32 nt, Human
ugaggagcugccugccuucuuccaucugagaa

SEQ ID NO: 513929 - RNA, 32 nt, Human
ugaggagcugccuggagcucaccccgcucuuc

SEQ ID NO: 513930 - RNA, 32 nt, Human
ugaggagcugggacaugcugggcaguugucag

SEQ ID NO: 513931 - RNA, 21 nt, Human
ugaggaggaagaggaggagga

SEQ ID NO: 513932 - RNA, 32 nt, Human
ugaggaggaagaggaggaggaagaggaggaag

SEQ ID NO: 513933 - RNA, 32 nt, Human
ugaggaggaagaggaggcgagggaaucagaaa

SEQ ID NO: 513934 - RNA, 32 nt, Human
ugaggaggaagugggcucugaggcugcagggc

SEQ ID NO: 513935 - RNA, 32 nt, Human
ugaggaggaauguaccacugaggcagagaaga

SEQ ID NO: 513936 - RNA, 32 nt, Human
ugaggaggagccgaggccccagcuucauccag

SEQ ID NO: 513937 - RNA, 32 nt, Human
ugaggaggaggaggagaagcggaugagaucgu

SEQ ID NO: 513938 - RNA, 22 nt, Human
ugaggaggaggaggaggaggag

SEQ ID NO: 513939 - RNA, 32 nt, Human
ugaggaggaggaggaggaggaugugaagaugg

SEQ ID NO: 513940 - RNA, 32 nt, Human
ugaggaggaucucaugguuaaugggguacaug

SEQ ID NO: 513941 - RNA, 24 nt, Human
ugaggaggaugacgaggaugagga

SEQ ID NO: 513942 - RNA, 22 nt, Human
ugaggaggcaggagcuggggag

SEQ ID NO: 513943 - RNA, 21 nt, Human
ugaggaggcauuuuugggggg

SEQ ID NO: 513944 - RNA, 32 nt, Human
ugaggaggccugauugaggcaagucagccucc

SEQ ID NO: 513945 - RNA, 32 nt, Human
ugaggaggcugaggcaggagaaucacuugaac

SEQ ID NO: 513946 - RNA, 32 nt, Human
ugaggaggcugaggcaggagaauugcuugaac

SEQ ID NO: 513947 - RNA, 23 nt, Human
ugaggaggcugcacuguggggag

SEQ ID NO: 513948 - RNA, 32 nt, Human
ugaggaggcuggcacuucugaagauccugaag

SEQ ID NO: 513949 - RNA, 32 nt, Human
ugaggaggcuugagacaggguuauggauuucc

SEQ ID NO: 513950 - RNA, 32 nt, Human
ugaggaggcuuuggaagagaaggugaggagca

SEQ ID NO: 513951 - RNA, 32 nt, Human
ugaggaggcuuugguugcacuucuuuggcugg

SEQ ID NO: 513952 - RNA, 32 nt, Human
ugaggagggaaacaaaggaggcuucugcagga

SEQ ID NO: 513953 - RNA, 32 nt, Human
ugaggagggagaaucacuugaggccaggaauu

SEQ ID NO: 513954 - RNA, 32 nt, Human
ugaggagggaggaucucuugugccuaggaguu

SEQ ID NO: 513955 - RNA, 32 nt, Human
ugaggagggaggauggcuugaacacagguguu

SEQ ID NO: 513956 - RNA, 32 nt, Human
ugaggagggaggauggcuugagcccaggagau

SEQ ID NO: 513957 - RNA, 32 nt, Human
ugaggagggcaaaucacuugagcucaggaguu

SEQ ID NO: 513958 - RNA, 32 nt, Human
ugaggagggcagaucacuugagcccaggaguu

SEQ ID NO: 513959 - RNA, 32 nt, Human
ugaggagggcuggacaagaauccauuccuugg

SEQ ID NO: 513960 - RNA, 32 nt, Human
ugaggagggcugggagcaguggcucacgccug

SEQ ID NO: 513961 - RNA, 32 nt, Human
ugaggaggggagcaaggcugcuaaguggaaga

SEQ ID NO: 513962 - RNA, 32 nt, Human
ugaggaggggcacacuccuaaauugcuggaug

SEQ ID NO: 513963 - RNA, 32 nt, Human
ugaggagggggcacuccucuccagccccuggu

SEQ ID NO: 513964 - RNA, 32 nt, Human
ugaggagggguuucccuuugggccucaguguu

SEQ ID NO: 513965 - RNA, 32 nt, Human
ugaggagggugaggcucaaagagcagaguucc

SEQ ID NO: 513966 - RNA, 32 nt, Human
ugaggagggugaggcucagagagcuaaggaca

SEQ ID NO: 513967 - RNA, 32 nt, Human
ugaggaggguggaucacuuaaggucaggaguu

SEQ ID NO: 513968 - RNA, 32 nt, Human
ugaggaggguggaucacuugaggccaggaauu

SEQ ID NO: 513969 - RNA, 32 nt, Human
ugaggaggguggauuucuugagcccagggguu

SEQ ID NO: 513970 - RNA, 28 nt, Human
ugaggagggugggaguguggauggggag

SEQ ID NO: 513971 - RNA, 22 nt, Human
ugaggagguggauggaagggag

SEQ ID NO: 513972 - RNA, 32 nt, Human
ugaggagguggcauccccugcccaugccuacc

SEQ ID NO: 513973 - RNA, 32 nt, Human
ugaggagguggguggaggcaugcaggggagac

SEQ ID NO: 513974 - RNA, 22 nt, Human
ugaggaggugugugagcaggga

SEQ ID NO: 513975 - RNA, 32 nt, Human
ugaggagugacagggcuggagacugugucugc

SEQ ID NO: 513976 - RNA, 32 nt, Human
ugaggagugagacacaggcaucaacacucuca

SEQ ID NO: 513977 - RNA, 32 nt, Human
ugaggagugggcuccugcuccaugagggacac

SEQ ID NO: 513978 - RNA, 32 nt, Human
ugaggaguggugccuauaaugaagacagcgug

SEQ ID NO: 513979 - RNA, 20 nt, Human
ugaggagugguuccagcaaa

SEQ ID NO: 513980 - RNA, 31 nt, Human
ugaggaguugagagagugcaggcugggguca

SEQ ID NO: 513981 - RNA, 32 nt, Human
ugaggaguugcaggguguuccaccaagacgca

SEQ ID NO: 513982 - RNA, 32 nt, Human
ugaggaguuugagaccagccugggcaacauag

SEQ ID NO: 513983 - RNA, 32 nt, Human
ugaggauaauaauacuucauucaugccuuuuu

SEQ ID NO: 513984 - RNA, 32 nt, Human
ugaggauacauacucuggguuuccauuucacc

SEQ ID NO: 513985 - RNA, 32 nt, Human
ugaggauagaaggacggguggaagagaggcag

SEQ ID NO: 513986 - RNA, 32 nt, Human
ugaggauagaccacaaguggguggugagacca

SEQ ID NO: 513987 - RNA, 32 nt, Human
ugaggauaggaguuugagguugcagucagcua

SEQ ID NO: 513988 - RNA, 32 nt, Human
ugaggauauuggaacucagagagguggcuauu

SEQ ID NO: 513989 - RNA, 32 nt, Human
ugaggaucagaaaguaauuucuucucaaaggg

SEQ ID NO: 513990 - RNA, 32 nt, Human
ugaggaucagccggaagagaaaaugagacccc

SEQ ID NO: 513991 - RNA, 32 nt, Human
ugaggauccagccagugaccacggccacuccc

SEQ ID NO: 513992 - RNA, 32 nt, Human
ugaggaucugaagaaaaugugccauaaagcag

SEQ ID NO: 513993 - RNA, 32 nt, Human
ugaggaucugccgggugcugaggucucucaaa

SEQ ID NO: 513994 - RNA, 32 nt, Human
ugaggaugaauaggacaggacaaggagauggu

SEQ ID NO: 513995 - RNA, 30 nt, Human
ugaggaugagacaagccacauuggagaaug

SEQ ID NO: 513996 - RNA, 32 nt, Human
ugaggaugaggcagggcagacacaggccagug

SEQ ID NO: 513997 - RNA, 21 nt, Human
ugaggaugaugagacaaaaga

SEQ ID NO: 513998 - RNA, 32 nt, Human
ugaggaugcauggcaagcucaaacuuuguggu

SEQ ID NO: 513999 - RNA, 32 nt, Human
ugaggaugccaaggacuucuucaagaggaaga

SEQ ID NO: 514000 - RNA, 21 nt, Human
ugaggaugccaagugcuuuaa

SEQ ID NO: 514001 - RNA, 32 nt, Human
ugaggaugcugcuggcagccuggggaaggagc

SEQ ID NO: 514002 - RNA, 32 nt, Human
ugaggauggaaaaucacuugaggccaggaguu

SEQ ID NO: 514003 - RNA, 32 nt, Human
ugaggauggagacagccagcagaggccuauca

SEQ ID NO: 514004 - RNA, 32 nt, Human
ugaggauggcugcuucaggcugcggaaacuga

SEQ ID NO: 514005 - RNA, 32 nt, Human
ugaggauggggaggggccagugagcucugggc

SEQ ID NO: 514006 - RNA, 32 nt, Human
ugaggauggguccugcuugcagaagcugcccu

SEQ ID NO: 514007 - RNA, 32 nt, Human
ugaggauguaucaguacuucauucuuuuguau

SEQ ID NO: 514008 - RNA, 32 nt, Human
ugaggaugucggcggucggggacuuuaccugc

SEQ ID NO: 514009 - RNA, 32 nt, Human
ugaggaugugcggugcauaaaggggcuggaag

SEQ ID NO: 514010 - RNA, 32 nt, Human
ugaggaugugggguuugaaaggaagcagugca

SEQ ID NO: 514011 - RNA, 30 nt, Human
ugaggauguucaggcuggggcugcugguuu

SEQ ID NO: 514012 - RNA, 32 nt, Human
ugaggauuaguagaagagaguggguccagauu

SEQ ID NO: 514013 - RNA, 32 nt, Human
ugaggauucccugccaagaugccugagggcuu

SEQ ID NO: 514014 - RNA, 23 nt, Human
ugaggauucugcacaaaagaggu

SEQ ID NO: 514015 - RNA, 19 nt, Human
ugaggauucuucccgggga

SEQ ID NO: 514016 - RNA, 32 nt, Human
ugaggauugcaaccgcugccuccaggguccag

SEQ ID NO: 514017 - RNA, 32 nt, Human
ugaggauuuucugacagagugauacccaucaa

SEQ ID NO: 514018 - RNA, 22 nt, Human
ugaggcaaaagaauuugccaua

SEQ ID NO: 514019 - RNA, 32 nt, Human
ugaggcaaaagauaccagucgacagccucccu

SEQ ID NO: 514020 - RNA, 32 nt, Human
ugaggcaaaggccaucuccuauggaccaagga

SEQ ID NO: 514021 - RNA, 32 nt, Human
ugaggcaacuacagucagauuuauagccagcc

SEQ ID NO: 514022 - RNA, 32 nt, Human
ugaggcaagaagaucacuugagccuaggaauu

SEQ ID NO: 514023 - RNA, 32 nt, Human
ugaggcaagagaaucacuugaaccucggaggc

SEQ ID NO: 514024 - RNA, 32 nt, Human
ugaggcaagagaaucucuugagcucaggaggc

SEQ ID NO: 514025 - RNA, 32 nt, Human
ugaggcaagagaauuacuugagcccaggaguu

SEQ ID NO: 514026 - RNA, 32 nt, Human
ugaggcaagaggaucacuugagcccagaaggu

SEQ ID NO: 514027 - RNA, 32 nt, Human
ugaggcaagaggaucacuugaggccaggaguu

SEQ ID NO: 514028 - RNA, 32 nt, Human
ugaggcaagaggauuacuugagcucaggaguu

SEQ ID NO: 514029 - RNA, 32 nt, Human
ugaggcaaggagauugguucacuauggagaag

SEQ ID NO: 514030 - RNA, 32 nt, Human
ugaggcaaggucucgcucuguugcccauucug

SEQ ID NO: 514031 - RNA, 32 nt, Human
ugaggcaaggucuugcucugucaccuaggcua

SEQ ID NO: 514032 - RNA, 32 nt, Human
ugaggcaaguggaucacuugaggucaggaguu

SEQ ID NO: 514033 - RNA, 32 nt, Human
ugaggcaauugcucaaacuuuguucaacauca

SEQ ID NO: 514034 - RNA, 32 nt, Human
ugaggcacaagaaucauuugagcucaggaggc

SEQ ID NO: 514035 - RNA, 32 nt, Human
ugaggcacagaagggcuggaugucagaaccgc

SEQ ID NO: 514036 - RNA, 32 nt, Human
ugaggcacagagccuggcugagcacuaugaca

SEQ ID NO: 514037 - RNA, 32 nt, Human
ugaggcacauggaccacuugaggucaggaguu

SEQ ID NO: 514038 - RNA, 32 nt, Human
ugaggcaccacugcacucuagccugggcaaga

SEQ ID NO: 514039 - RNA, 32 nt, Human
ugaggcacgagaaucacuugaacucaggagau

SEQ ID NO: 514040 - RNA, 32 nt, Human
ugaggcacgagaaucacuugagcccaggaggu

SEQ ID NO: 514041 - RNA, 17 nt, Human
ugaggcacggagcgggc

SEQ ID NO: 514042 - RNA, 32 nt, Human
ugaggcacuggcaagguagggggcagaugggg

SEQ ID NO: 514043 - RNA, 32 nt, Human
ugaggcacuucaugagcucagugagaagggcc

SEQ ID NO: 514044 - RNA, 32 nt, Human
ugaggcagaagaauugaacccaggagguggag

SEQ ID NO: 514045 - RNA, 32 nt, Human
ugaggcagaagcauugcuugagcuugggagau

SEQ ID NO: 514046 - RNA, 19 nt, Human
ugaggcagaagccuugaac

SEQ ID NO: 514047 - RNA, 32 nt, Human
ugaggcagaaggaucaccugaguccaggaauu

SEQ ID NO: 514048 - RNA, 32 nt, Human
ugaggcagaaggaucacuugagcccagaaguu

SEQ ID NO: 514049 - RNA, 32 nt, Human
ugaggcagaaggauugcuggggcccacaaagu

SEQ ID NO: 514050 - RNA, 32 nt, Human
ugaggcagacuggaagagucaucacagcaucc

SEQ ID NO: 514051 - RNA, 32 nt, Human
ugaggcagagcugagagagaagaaaaauuacc

SEQ ID NO: 514052 - RNA, 32 nt, Human
ugaggcagagcugcggcuaaucgaaaagcaag

SEQ ID NO: 514053 - RNA, 21 nt, Human
ugaggcagagucucacucugu

SEQ ID NO: 514054 - RNA, 21 nt, Human
ugaggcagagucucucucugu

SEQ ID NO: 514055 - RNA, 32 nt, Human
ugaggcagagucuucuuugugccugaguggcc

SEQ ID NO: 514056 - RNA, 20 nt, Human
ugaggcagagucuugcucug

SEQ ID NO: 514057 - RNA, 21 nt, Human
ugaggcagagucuugcucugu

SEQ ID NO: 514058 - RNA, 32 nt, Human
ugaggcagagucuugcucugucacccaggcug

SEQ ID NO: 514059 - RNA, 32 nt, Human
ugaggcagagucuugcucuguugcccaggcug

SEQ ID NO: 514060 - RNA, 32 nt, Human
ugaggcagcaaagccccugaaaacgcugguac

SEQ ID NO: 514061 - RNA, 32 nt, Human
ugaggcagcacugagcacgguagggcagccug

SEQ ID NO: 514062 - RNA, 32 nt, Human
ugaggcagcagguaggacagugaccucgguga

SEQ ID NO: 514063 - RNA, 20 nt, Human
ugaggcagccagcgcccccu

SEQ ID NO: 514064 - RNA, 32 nt, Human
ugaggcagccuucgcugcuuuccucugcuguc

SEQ ID NO: 514065 - RNA, 32 nt, Human
ugaggcagcugccagccggccugggcagucuu

SEQ ID NO: 514066 - RNA, 32 nt, Human
ugaggcagcugccuccugauccuggccagccc

SEQ ID NO: 514067 - RNA, 32 nt, Human
ugaggcaggaaaaucacuugaacucgggaggc

SEQ ID NO: 514068 - RNA, 32 nt, Human
ugaggcaggaacaggguucugcccucccagag

SEQ ID NO: 514069 - RNA, 32 nt, Human
ugaggcaggaagagcccuugagcccaggagcu

SEQ ID NO: 514070 - RNA, 32 nt, Human
ugaggcaggaagauagcuugagcucagagagu

SEQ ID NO: 514071 - RNA, 32 nt, Human
ugaggcaggaagcucgcuugagcucaggaguu

SEQ ID NO: 514072 - RNA, 32 nt, Human
ugaggcaggacgauuacuugagcuugggaaau

SEQ ID NO: 514073 - RNA, 32 nt, Human
ugaggcaggacuagcaggagcgccucagaccc

SEQ ID NO: 514074 - RNA, 32 nt, Human
ugaggcaggagaaucacuugaacucaggaggc

SEQ ID NO: 514075 - RNA, 32 nt, Human
ugaggcaggagaaucacuugaacucaggaggu

SEQ ID NO: 514076 - RNA, 32 nt, Human
ugaggcaggagaaucacuugaacucagguggc

SEQ ID NO: 514077 - RNA, 32 nt, Human
ugaggcaggagaaucacuugaacucgggaggc

SEQ ID NO: 514078 - RNA, 32 nt, Human
ugaggcaggagaaucacuugaacucgggaggu

SEQ ID NO: 514079 - RNA, 32 nt, Human
ugaggcaggagaaucacuugaagccaggaggc

SEQ ID NO: 514080 - RNA, 32 nt, Human
ugaggcaggagaaucacuugaagcugggaggc

SEQ ID NO: 514081 - RNA, 32 nt, Human
ugaggcaggagaaucacuugaaucagggaggc

SEQ ID NO: 514082 - RNA, 32 nt, Human
ugaggcaggagaaucacuugaauucaggaggc

SEQ ID NO: 514083 - RNA, 32 nt, Human
ugaggcaggagaaucacuugaauucaggaggu

SEQ ID NO: 514084 - RNA, 32 nt, Human
ugaggcaggagaaucacuugaccucaggaggc

SEQ ID NO: 514085 - RNA, 32 nt, Human
ugaggcaggagaaucacuugagaccaggaagu

SEQ ID NO: 514086 - RNA, 32 nt, Human
ugaggcaggagaaucacuugagcccaggaagu

SEQ ID NO: 514087 - RNA, 32 nt, Human
ugaggcaggagaaucacuugagcccaggaggu

SEQ ID NO: 514088 - RNA, 32 nt, Human
ugaggcaggagaaucacuugagcccgggaagu

SEQ ID NO: 514089 - RNA, 32 nt, Human
ugaggcaggagaaucacuugaggucgggaguu

SEQ ID NO: 514090 - RNA, 32 nt, Human
ugaggcaggagaaucgcgugaacccgggcccg

SEQ ID NO: 514091 - RNA, 23 nt, Human
ugaggcaggagaaucgcuugaac

SEQ ID NO: 514092 - RNA, 32 nt, Human
ugaggcaggagaaucucgggaggcagagguug

SEQ ID NO: 514093 - RNA, 32 nt, Human
ugaggcaggagaauggcguaaaccccuccagc

SEQ ID NO: 514094 - RNA, 23 nt, Human
ugaggcaggagaauugcuugaac

SEQ ID NO: 514095 - RNA, 23 nt, Human
ugaggcaggagaccugcuugaac

SEQ ID NO: 514096 - RNA, 31 nt, Human
ugaggcaggagaccugcuugaaccuggaggu

SEQ ID NO: 514097 - RNA, 32 nt, Human
ugaggcaggagagagagcagcuccccugccca

SEQ ID NO: 514098 - RNA, 32 nt, Human
ugaggcaggagaguggacugagcccaggaguu

SEQ ID NO: 514099 - RNA, 21 nt, Human
ugaggcaggagagugguguga

SEQ ID NO: 514100 - RNA, 32 nt, Human
ugaggcaggaggaccgcuugagcccaggaguu

SEQ ID NO: 514101 - RNA, 32 nt, Human
ugaggcaggaggaucaccugaggucaggaguu

SEQ ID NO: 514102 - RNA, 32 nt, Human
ugaggcaggaggaucacgugagcccaggaauu

SEQ ID NO: 514103 - RNA, 32 nt, Human
ugaggcaggaggaucacucgagcucaagaauu

SEQ ID NO: 514104 - RNA, 32 nt, Human
ugaggcaggaggaucacuuaagcccagaaggc

SEQ ID NO: 514105 - RNA, 32 nt, Human
ugaggcaggaggaucacuuaagccugggaggc

SEQ ID NO: 514106 - RNA, 32 nt, Human
ugaggcaggaggaucacuuaaggccaggaguu

SEQ ID NO: 514107 - RNA, 32 nt, Human
ugaggcaggaggaucacuucagccgaggaagg

SEQ ID NO: 514108 - RNA, 32 nt, Human
ugaggcaggaggaucacuucagccuaggacgu

SEQ ID NO: 514109 - RNA, 32 nt, Human
ugaggcaggaggaucacuugaaccugggaggc

SEQ ID NO: 514110 - RNA, 32 nt, Human
ugaggcaggaggaucacuugaaccugggaggu

SEQ ID NO: 514111 - RNA, 32 nt, Human
ugaggcaggaggaucacuugaacuggggaggu

SEQ ID NO: 514112 - RNA, 32 nt, Human
ugaggcaggaggaucacuugagaccaggaguu

SEQ ID NO: 514113 - RNA, 32 nt, Human
ugaggcaggaggaucacuugagccaaggaguu

SEQ ID NO: 514114 - RNA, 32 nt, Human
ugaggcaggaggaucacuugagcccaggagau

SEQ ID NO: 514115 - RNA, 32 nt, Human
ugaggcaggaggaucacuugagcccaggaggu

SEQ ID NO: 514116 - RNA, 32 nt, Human
ugaggcaggaggaucacuugagcccaggaguu

SEQ ID NO: 514117 - RNA, 32 nt, Human
ugaggcaggaggaucacuugagccuauuaguu

SEQ ID NO: 514118 - RNA, 32 nt, Human
ugaggcaggaggaucacuugagccugggaauu

SEQ ID NO: 514119 - RNA, 32 nt, Human
ugaggcaggaggaucacuugaggccaggaguu

SEQ ID NO: 514120 - RNA, 32 nt, Human
ugaggcaggaggaucacuugaggucaggaguu

SEQ ID NO: 514121 - RNA, 32 nt, Human
ugaggcaggaggaucauuugagcccaggaaac

SEQ ID NO: 514122 - RNA, 32 nt, Human
ugaggcaggaggaucauuugagccugggaauu

SEQ ID NO: 514123 - RNA, 32 nt, Human
ugaggcaggaggaucauuugagcucaugaggg

SEQ ID NO: 514124 - RNA, 32 nt, Human
ugaggcaggaggaucauuugaggucaggaguu

SEQ ID NO: 514125 - RNA, 32 nt, Human
ugaggcaggaggaucccuugagcccagaaggu

SEQ ID NO: 514126 - RNA, 32 nt, Human
ugaggcaggaggaucccuugagcccaggaggu

SEQ ID NO: 514127 - RNA, 32 nt, Human
ugaggcaggaggaucccuugaguccaggaggu

SEQ ID NO: 514128 - RNA, 32 nt, Human
ugaggcaggaggaucccuugaguucaggaguu

SEQ ID NO: 514129 - RNA, 32 nt, Human
ugaggcaggaggaucccuuggguucaggaguu

SEQ ID NO: 514130 - RNA, 32 nt, Human
ugaggcaggaggaucgccugagcccaggaggu

SEQ ID NO: 514131 - RNA, 32 nt, Human
ugaggcaggaggaucgcuuaagcacaggaguu

SEQ ID NO: 514132 - RNA, 32 nt, Human
ugaggcaggaggaucgcuugaacccaggaagc

SEQ ID NO: 514133 - RNA, 32 nt, Human
ugaggcaggaggaucgcuugaacccaggaagu

SEQ ID NO: 514134 - RNA, 32 nt, Human
ugaggcaggaggaucgcuugaacccaggaggu

SEQ ID NO: 514135 - RNA, 32 nt, Human
ugaggcaggaggaucgcuugaaccugagaggc

SEQ ID NO: 514136 - RNA, 32 nt, Human
ugaggcaggaggaucgcuugagcccagaaguu

SEQ ID NO: 514137 - RNA, 32 nt, Human
ugaggcaggaggaucgcuugagcccaggaggc

SEQ ID NO: 514138 - RNA, 32 nt, Human
ugaggcaggaggaucgcuugagcccaggaguc

SEQ ID NO: 514139 - RNA, 32 nt, Human
ugaggcaggaggaucgcuugagcccaggaguu

SEQ ID NO: 514140 - RNA, 32 nt, Human
ugaggcaggaggaucgcuugaggccaggaguu

SEQ ID NO: 514141 - RNA, 32 nt, Human
ugaggcaggaggaucgcuugggccugggaggc

SEQ ID NO: 514142 - RNA, 32 nt, Human
ugaggcaggaggaucguuugagcucaggaggu

SEQ ID NO: 514143 - RNA, 23 nt, Human
ugaggcaggaggaucucuugagc

SEQ ID NO: 514144 - RNA, 32 nt, Human
ugaggcaggaggaucucuugagcccaggaggu

SEQ ID NO: 514145 - RNA, 32 nt, Human
ugaggcaggaggaucucuugagcccaggauuu

SEQ ID NO: 514146 - RNA, 32 nt, Human
ugaggcaggaggauugcuugagcucaggaguu

SEQ ID NO: 514147 - RNA, 32 nt, Human
ugaggcaggagggucacuugacccagggaggu

SEQ ID NO: 514148 - RNA, 32 nt, Human
ugaggcaggagggucucuugagcccaggaguu

SEQ ID NO: 514149 - RNA, 32 nt, Human
ugaggcaggaggugcagcguguggagugagaa

SEQ ID NO: 514150 - RNA, 32 nt, Human
ugaggcaggauaaucacuugagccaggaggag

SEQ ID NO: 514151 - RNA, 32 nt, Human
ugaggcaggcacaccugucggucuuggcuugc

SEQ ID NO: 514152 - RNA, 32 nt, Human
ugaggcaggcagaucacuugaggucaggaguu

SEQ ID NO: 514153 - RNA, 32 nt, Human
ugaggcaggcagaucgcuugagcucaggaguu

SEQ ID NO: 514154 - RNA, 32 nt, Human
ugaggcaggcagauugcuugagcucaggaguu

SEQ ID NO: 514155 - RNA, 32 nt, Human
ugaggcaggcaguucacuugagcccaggagcu

SEQ ID NO: 514156 - RNA, 32 nt, Human
ugaggcaggcggaucacuugaagccaggacuu

SEQ ID NO: 514157 - RNA, 32 nt, Human
ugaggcaggcggaucacuugaggucaggaguu

SEQ ID NO: 514158 - RNA, 32 nt, Human
ugaggcaggcggaucgcuugagcucaggaguu

SEQ ID NO: 514159 - RNA, 32 nt, Human
ugaggcaggcgugucacuugaggccaggaguu

SEQ ID NO: 514160 - RNA, 32 nt, Human
ugaggcaggcugaucacuugaggucaggaguu

SEQ ID NO: 514161 - RNA, 32 nt, Human
ugaggcagggccugagacuggaccugggugag

SEQ ID NO: 514162 - RNA, 32 nt, Human
ugaggcagggcuaggagaagagcccagguucc

SEQ ID NO: 514163 - RNA, 32 nt, Human
ugaggcagggcucugguuuagcuguuuccaua

SEQ ID NO: 514164 - RNA, 32 nt, Human
ugaggcaggggaaucacuugaaccugggaggc

SEQ ID NO: 514165 - RNA, 32 nt, Human
ugaggcaggggagggagccacagaaagcagag

SEQ ID NO: 514166 - RNA, 32 nt, Human
ugaggcagggggaucgcuugagcccaggaauu

SEQ ID NO: 514167 - RNA, 21 nt, Human
ugaggcagggucucacucugu

SEQ ID NO: 514168 - RNA, 21 nt, Human
ugaggcagggucucgcucugu

SEQ ID NO: 514169 - RNA, 32 nt, Human
ugaggcagggucucgcucugucaccgaggcug

SEQ ID NO: 514170 - RNA, 21 nt, Human
ugaggcagggucuugcucugu

SEQ ID NO: 514171 - RNA, 32 nt, Human
ugaggcagggucuugcucugucauccaggcug

SEQ ID NO: 514172 - RNA, 32 nt, Human
ugaggcagggucuugcuuugucacccaugcug

SEQ ID NO: 514173 - RNA, 32 nt, Human
ugaggcagguaagucacuugagcucaggaguu

SEQ ID NO: 514174 - RNA, 32 nt, Human
ugaggcagguagcucaccugagucaggagcuc

SEQ ID NO: 514175 - RNA, 18 nt, Human
ugaggcagguaugagguc

SEQ ID NO: 514176 - RNA, 23 nt, Human
ugaggcagguggaucacaagguc

SEQ ID NO: 514177 - RNA, 32 nt, Human
ugaggcagguggaucacuggaggucaggucuu

SEQ ID NO: 514178 - RNA, 32 nt, Human
ugaggcagguggaucacuugaagucaggaguu

SEQ ID NO: 514179 - RNA, 32 nt, Human
ugaggcagguggaucacuugagcucaggagcu

SEQ ID NO: 514180 - RNA, 32 nt, Human
ugaggcagguggaucacuugagcucaggaguu

SEQ ID NO: 514181 - RNA, 32 nt, Human
ugaggcagguggaucacuugaggucaggagcu

SEQ ID NO: 514182 - RNA, 32 nt, Human
ugaggcagguggaucacuugaggucaggaguu

SEQ ID NO: 514183 - RNA, 32 nt, Human
ugaggcagguggaucacuugagguuaggaguu

SEQ ID NO: 514184 - RNA, 32 nt, Human
ugaggcagguggauugcuugagcucgggaguu

SEQ ID NO: 514185 - RNA, 32 nt, Human
ugaggcagguggcucacuugaggucaggaauu

SEQ ID NO: 514186 - RNA, 32 nt, Human
ugaggcaggugggguuucuguugggagaggga

SEQ ID NO: 514187 - RNA, 32 nt, Human
ugaggcagucaggugaagaugcaggcuaggaa

SEQ ID NO: 514188 - RNA, 32 nt, Human
ugaggcaguggggaagacagagcagaaugagc

SEQ ID NO: 514189 - RNA, 32 nt, Human
ugaggcaguggguggagagagaauggggagac

SEQ ID NO: 514190 - RNA, 21 nt, Human
ugaggcagugucucacucugu

SEQ ID NO: 514191 - RNA, 32 nt, Human
ugaggcauccagcagucucugccuugccuuua

SEQ ID NO: 514192 - RNA, 32 nt, Human
ugaggcaugagaaucacuugaacucgggaggu

SEQ ID NO: 514193 - RNA, 32 nt, Human
ugaggcaugaggauugcuugagcuuggaaggu

SEQ ID NO: 514194 - RNA, 32 nt, Human
ugaggcaugcaagccucugccuuuccuucugc

SEQ ID NO: 514195 - RNA, 32 nt, Human
ugaggcaugcugggccuggugcagugauggcg

SEQ ID NO: 514196 - RNA, 30 nt, Human
ugaggcauggguuuucugcuccugugcagg

SEQ ID NO: 514197 - RNA, 32 nt, Human
ugaggcaugguggcacaugccuguaaucucaa

SEQ ID NO: 514198 - RNA, 32 nt, Human
ugaggcauucccaagcuggagucugguggaag

SEQ ID NO: 514199 - RNA, 32 nt, Human
ugaggccaaaggggcuggggaggcaggccugc

SEQ ID NO: 514200 - RNA, 32 nt, Human
ugaggccaagagaucaagaccagucugggcaa

SEQ ID NO: 514201 - RNA, 32 nt, Human
ugaggccaagaguuaaagaccagccuggucaa

SEQ ID NO: 514202 - RNA, 32 nt, Human
ugaggccaagaguucaagaccaacuuggacaa

SEQ ID NO: 514203 - RNA, 32 nt, Human
ugaggccaagaguucaagaccagccugggcaa

SEQ ID NO: 514204 - RNA, 32 nt, Human
ugaggccaagaguuucagaccagccugggcaa

SEQ ID NO: 514205 - RNA, 32 nt, Human
ugaggccaagaguuugagaccaaccuggguaa

SEQ ID NO: 514206 - RNA, 32 nt, Human
ugaggccaaggcaggagaauugcuugagccug

SEQ ID NO: 514207 - RNA, 32 nt, Human
ugaggccaagguaggaggauugcuugaguccg

SEQ ID NO: 514208 - RNA, 32 nt, Human
ugaggccaccagccccuagucucuauguucuc

SEQ ID NO: 514209 - RNA, 32 nt, Human
ugaggccaccucuuugcucaauccaugccucu

SEQ ID NO: 514210 - RNA, 32 nt, Human
ugaggccacugcacccuuucucggggaagaug

SEQ ID NO: 514211 - RNA, 32 nt, Human
ugaggccagaacucucacacacagcuaucaag

SEQ ID NO: 514212 - RNA, 32 nt, Human
ugaggccagaagugcaagaccagccugcgcaa

SEQ ID NO: 514213 - RNA, 32 nt, Human
ugaggccagaaguucaagaucagccuggccaa

SEQ ID NO: 514214 - RNA, 32 nt, Human
ugaggccagacucauguccagcaaggaacgug

SEQ ID NO: 514215 - RNA, 32 nt, Human
ugaggccagagguucaagaccagccugggcaa

SEQ ID NO: 514216 - RNA, 32 nt, Human
ugaggccagaguuugaaaccagccuagguaac

SEQ ID NO: 514217 - RNA, 32 nt, Human
ugaggccagcagaauaggugcagagaugaagu

SEQ ID NO: 514218 - RNA, 32 nt, Human
ugaggccagcaguucaagaccaaccuaggcaa

SEQ ID NO: 514219 - RNA, 32 nt, Human
ugaggccagcccuagccaacaugguguaaaca

SEQ ID NO: 514220 - RNA, 32 nt, Human
ugaggccaggaauucaagaccaaccuggccaa

SEQ ID NO: 514221 - RNA, 32 nt, Human
ugaggccaggaauucaagaccagccugaguaa

SEQ ID NO: 514222 - RNA, 32 nt, Human
ugaggccaggaauucaagaccagccuggccaa

SEQ ID NO: 514223 - RNA, 32 nt, Human
ugaggccaggaauucgagaccaaccuggucag

SEQ ID NO: 514224 - RNA, 32 nt, Human
ugaggccaggaggcggagcuugcagugagccg

SEQ ID NO: 514225 - RNA, 32 nt, Human
ugaggccaggagguccaggccgcaaugagaug

SEQ ID NO: 514226 - RNA, 32 nt, Human
ugaggccaggagguugaggcugcagugagcug

SEQ ID NO: 514227 - RNA, 32 nt, Human
ugaggccaggaguucaagaaaucacuugaacu

SEQ ID NO: 514228 - RNA, 32 nt, Human
ugaggccaggaguucaagaccagccagggcaa

SEQ ID NO: 514229 - RNA, 32 nt, Human
ugaggccaggaguucaagaccagcccaggcaa

SEQ ID NO: 514230 - RNA, 32 nt, Human
ugaggccaggaguucaagaccagccugaccaa

SEQ ID NO: 514231 - RNA, 32 nt, Human
ugaggccaggaguucaagaccagccuggccaa

SEQ ID NO: 514232 - RNA, 32 nt, Human
ugaggccaggaguucaagaccagccuggcuaa

SEQ ID NO: 514233 - RNA, 32 nt, Human
ugaggccaggaguucaagaccagccugggcaa

SEQ ID NO: 514234 - RNA, 32 nt, Human
ugaggccaggaguucaagaccagcuuggccaa

SEQ ID NO: 514235 - RNA, 32 nt, Human
ugaggccaggaguucaagaccaggcagggcaa

SEQ ID NO: 514236 - RNA, 32 nt, Human
ugaggccaggaguucaagaccagucuggccaa

SEQ ID NO: 514237 - RNA, 32 nt, Human
ugaggccaggaguucaagaccagucugggcaa

SEQ ID NO: 514238 - RNA, 32 nt, Human
ugaggccaggaguucaagaccggccuggccaa

SEQ ID NO: 514239 - RNA, 32 nt, Human
ugaggccaggaguucaagacuagccuggcuga

SEQ ID NO: 514240 - RNA, 32 nt, Human
ugaggccaggaguucaagaucagccuggccaa

SEQ ID NO: 514241 - RNA, 32 nt, Human
ugaggccaggaguucaagaucagccugggcaa

SEQ ID NO: 514242 - RNA, 32 nt, Human
ugaggccaggaguucaaggccagccuggacaa

SEQ ID NO: 514243 - RNA, 32 nt, Human
ugaggccaggaguucaauaucaguuugggcaa

SEQ ID NO: 514244 - RNA, 32 nt, Human
ugaggccaggaguucugagaccagccuggcuu

SEQ ID NO: 514245 - RNA, 32 nt, Human
ugaggccaggaguuugagaccaaccugggcaa

SEQ ID NO: 514246 - RNA, 32 nt, Human
ugaggccaggaguuugagaccaaccugguuaa

SEQ ID NO: 514247 - RNA, 32 nt, Human
ugaggccaggcaggccuggguaggggcagcuu

SEQ ID NO: 514248 - RNA, 32 nt, Human
ugaggccagguguucaagagcagccuggucaa

SEQ ID NO: 514249 - RNA, 32 nt, Human
ugaggccagugccaccagaggguggugccaag

SEQ ID NO: 514250 - RNA, 32 nt, Human
ugaggccauagaugcagggaguagaagcuuug

SEQ ID NO: 514251 - RNA, 32 nt, Human
ugaggccauagcaauuccccuacaucaaaugc

SEQ ID NO: 514252 - RNA, 18 nt, Human
ugaggccaucagggcccu

SEQ ID NO: 514253 - RNA, 32 nt, Human
ugaggccauccaggaaaaccaggagcagggca

SEQ ID NO: 514254 - RNA, 32 nt, Human
ugaggccauggauuguuauggugcuguuguuu

SEQ ID NO: 514255 - RNA, 32 nt, Human
ugaggccauggcauucuuccccuagcccccuc

SEQ ID NO: 514256 - RNA, 32 nt, Human
ugaggccauuaggggaaaaggaaggggugugg

SEQ ID NO: 514257 - RNA, 32 nt, Human
ugaggccauucccaacuuguuuuccgagggga

SEQ ID NO: 514258 - RNA, 32 nt, Human
ugaggccauuccucgucaucuaggaggggucu

SEQ ID NO: 514259 - RNA, 18 nt, Human
ugaggccauugggaaguc

SEQ ID NO: 514260 - RNA, 32 nt, Human
ugaggcccaaggagguggaguggagagugggc

SEQ ID NO: 514261 - RNA, 32 nt, Human
ugaggcccacagacucaaaguuacucuccuuc

SEQ ID NO: 514262 - RNA, 32 nt, Human
ugaggcccaccccucacauuacugucucuuug

SEQ ID NO: 514263 - RNA, 32 nt, Human
ugaggcccagaggcggagggcagucugcucaa

SEQ ID NO: 514264 - RNA, 32 nt, Human
ugaggcccagaguucaugggcugcccuggccc

SEQ ID NO: 514265 - RNA, 32 nt, Human
ugaggcccagccuguccugguacagcaggguc

SEQ ID NO: 514266 - RNA, 32 nt, Human
ugaggcccagggguggagguuagggguggagc

SEQ ID NO: 514267 - RNA, 32 nt, Human
ugaggcccagggugggcaccagccagccaugg

SEQ ID NO: 514268 - RNA, 32 nt, Human
ugaggccccaagcucaucacaccagggggcca

SEQ ID NO: 514269 - RNA, 32 nt, Human
ugaggccccagccuggagccaggcacugggug

SEQ ID NO: 514270 - RNA, 32 nt, Human
ugaggccccaggaggaaaccuuggcuucagac

SEQ ID NO: 514271 - RNA, 32 nt, Human
ugaggccccuccugcugccuggccaagcccca

SEQ ID NO: 514272 - RNA, 32 nt, Human
ugaggccccuucuagaaucuaggauaacaaga

SEQ ID NO: 514273 - RNA, 32 nt, Human
ugaggccccuugacagggcugcucuggguggu

SEQ ID NO: 514274 - RNA, 32 nt, Human
ugaggcccugcaccuuccccaaaggaaccgcc

SEQ ID NO: 514275 - RNA, 32 nt, Human
ugaggcccugcaguuaguuugcgggaacucag

SEQ ID NO: 514276 - RNA, 32 nt, Human
ugaggcccuggaccggcggcagacuggcccug

SEQ ID NO: 514277 - RNA, 32 nt, Human
ugaggcccuggcagaggugaaggacauggagc

SEQ ID NO: 514278 - RNA, 32 nt, Human
ugaggcccuugccuucagcugcuucacggagc

SEQ ID NO: 514279 - RNA, 32 nt, Human
ugaggccgaccaugcccagccugcugcugcug

SEQ ID NO: 514280 - RNA, 32 nt, Human
ugaggccgaggguucaagacuagccugggcaa

SEQ ID NO: 514281 - RNA, 32 nt, Human
ugaggccggaggaucacuugaagccaggagcu

SEQ ID NO: 514282 - RNA, 32 nt, Human
ugaggccggcagaucacuugaggucaggaguu

SEQ ID NO: 514283 - RNA, 32 nt, Human
ugaggccguaggaucccuugagcccaggaguu

SEQ ID NO: 514284 - RNA, 32 nt, Human
ugaggccguguggaaaauuaguggagagcuga

SEQ ID NO: 514285 - RNA, 32 nt, Human
ugaggccuacucuaaagaauucuugaaaaacu

SEQ ID NO: 514286 - RNA, 21 nt, Human
ugaggccuaugcaucugaaca

SEQ ID NO: 514287 - RNA, 32 nt, Human
ugaggccucaguugaggcucagucuggggcug

SEQ ID NO: 514288 - RNA, 32 nt, Human
ugaggccucccaggagggccuugggggugaug

SEQ ID NO: 514289 - RNA, 32 nt, Human
ugaggccuccccagccaugcagagccaugagu

SEQ ID NO: 514290 - RNA, 32 nt, Human
ugaggccuccccagccaugccugcuguauagc

SEQ ID NO: 514291 - RNA, 32 nt, Human
ugaggccucccgcuucccaccugcaucacagg

SEQ ID NO: 514292 - RNA, 32 nt, Human
ugaggccucccuggaggaaggaggguuagggg

SEQ ID NO: 514293 - RNA, 32 nt, Human
ugaggccucgccagccaugcagaacugaauag

SEQ ID NO: 514294 - RNA, 32 nt, Human
ugaggccugaggccucuuccucagcuuuaucu

SEQ ID NO: 514295 - RNA, 32 nt, Human
ugaggccugcggaacucagcuuggauggcagc

SEQ ID NO: 514296 - RNA, 32 nt, Human
ugaggccugcuuccuccacuugcuccagcuga

SEQ ID NO: 514297 - RNA, 32 nt, Human
ugaggccuggaaggcaggccaaccagcaaaau

SEQ ID NO: 514298 - RNA, 32 nt, Human
ugaggccuggacuguccacgcugaggcacagc

SEQ ID NO: 514299 - RNA, 32 nt, Human
ugaggccuggaguucaagaccagccugugcaa

SEQ ID NO: 514300 - RNA, 32 nt, Human
ugaggccugggagucucuugagcuccacgacu

SEQ ID NO: 514301 - RNA, 32 nt, Human
ugaggccugggguggcuccugccccuucugcc

SEQ ID NO: 514302 - RNA, 32 nt, Human
ugaggccuuaucauucauucuuagcucuuaau

SEQ ID NO: 514303 - RNA, 32 nt, Human
ugaggccuuccagaaagcaggagcagcugugc

SEQ ID NO: 514304 - RNA, 31 nt, Human
ugaggccuucucuugaggccugugcucuggg

SEQ ID NO: 514305 - RNA, 32 nt, Human
ugaggcgagagaaucacuugaacuggggaggc

SEQ ID NO: 514306 - RNA, 32 nt, Human
ugaggcgagaggaggaggaggaggaggagaag

SEQ ID NO: 514307 - RNA, 32 nt, Human
ugaggcgagaggaucacuugagcacaggaguu

SEQ ID NO: 514308 - RNA, 32 nt, Human
ugaggcgagaggaucacuugagcgcaggaauu

SEQ ID NO: 514309 - RNA, 32 nt, Human
ugaggcgaggaguucaagaccagccuaggcaa

SEQ ID NO: 514310 - RNA, 18 nt, Human
ugaggcgaggggagggac

SEQ ID NO: 514311 - RNA, 32 nt, Human
ugaggcgaggggcaaggugcuuaguccaucau

SEQ ID NO: 514312 - RNA, 32 nt, Human
ugaggcgaguggaucacuugaggccaggaguu

SEQ ID NO: 514313 - RNA, 32 nt, Human
ugaggcgaguggaucacuugaggucaggaguu

SEQ ID NO: 514314 - RNA, 32 nt, Human
ugaggcgcacugagcaucccacugcaggaaac

SEQ ID NO: 514315 - RNA, 32 nt, Human
ugaggcgccagccuggucaggggaggugacug

SEQ ID NO: 514316 - RNA, 32 nt, Human
ugaggcgccauccccaugugcccuucgggcug

SEQ ID NO: 514317 - RNA, 32 nt, Human
ugaggcggagaaacaguggaggggaugguggc

SEQ ID NO: 514318 - RNA, 32 nt, Human
ugaggcggagucucgcucugucacccaggcug

SEQ ID NO: 514319 - RNA, 32 nt, Human
ugaggcggagucuugcucuauuggccaggcug

SEQ ID NO: 514320 - RNA, 32 nt, Human
ugaggcggauggaucacuugaggucaggggau

SEQ ID NO: 514321 - RNA, 32 nt, Human
ugaggcggcaggaucacuaggaggcagagguu

SEQ ID NO: 514322 - RNA, 32 nt, Human
ugaggcggcaggaucacuugaaccaaggaguu

SEQ ID NO: 514323 - RNA, 32 nt, Human
ugaggcggccacuggcucuguguccuugggga

SEQ ID NO: 514324 - RNA, 32 nt, Human
ugaggcggcucacaccuguaaucccagcacuu

SEQ ID NO: 514325 - RNA, 32 nt, Human
ugaggcgggagaaucacuugaacccaggaggu

SEQ ID NO: 514326 - RNA, 32 nt, Human
ugaggcgggagaaucacuugaaccugggaggc

SEQ ID NO: 514327 - RNA, 32 nt, Human
ugaggcgggaggaucaauugagcccaggagcu

SEQ ID NO: 514328 - RNA, 32 nt, Human
ugaggcgggaggaucacaaggucaggagaucg

SEQ ID NO: 514329 - RNA, 32 nt, Human
ugaggcgggaggaucacaugagcccaggaggu

SEQ ID NO: 514330 - RNA, 32 nt, Human
ugaggcgggaggaucacuugagccaggccuaa

SEQ ID NO: 514331 - RNA, 32 nt, Human
ugaggcgggaggaucacuugagcccagggagg

SEQ ID NO: 514332 - RNA, 32 nt, Human
ugaggcgggaggaucacuugagccuaggaauu

SEQ ID NO: 514333 - RNA, 32 nt, Human
ugaggcgggaggaucaguugagcccaggaguu

SEQ ID NO: 514334 - RNA, 32 nt, Human
ugaggcgggaggaucgcuugaaccugggaggc

SEQ ID NO: 514335 - RNA, 32 nt, Human
ugaggcgggaggaucgcuugagccaaggaguu

SEQ ID NO: 514336 - RNA, 32 nt, Human
ugaggcgggaggaucgcuugagcccaggaguu

SEQ ID NO: 514337 - RNA, 32 nt, Human
ugaggcgggaggaucgcuugagcccagggguu

SEQ ID NO: 514338 - RNA, 32 nt, Human
ugaggcgggaggauuacuugagcccaggagga

SEQ ID NO: 514339 - RNA, 32 nt, Human
ugaggcgggaggauuacuugagcccaggaguu

SEQ ID NO: 514340 - RNA, 32 nt, Human
ugaggcgggaggauugcuugagcccaggaguu

SEQ ID NO: 514341 - RNA, 32 nt, Human
ugaggcgggaggauugcuugagccugggaagu

SEQ ID NO: 514342 - RNA, 32 nt, Human
ugaggcgggaggauugcuugaggccaggaauu

SEQ ID NO: 514343 - RNA, 32 nt, Human
ugaggcgggcagaucacuugagaucaggaguu

SEQ ID NO: 514344 - RNA, 32 nt, Human
ugaggcgggcggaucacuaggucaggagaucg

SEQ ID NO: 514345 - RNA, 32 nt, Human
ugaggcgggcggaucacuugaggccaggaguu

SEQ ID NO: 514346 - RNA, 32 nt, Human
ugaggcgggcggaucgguugagcucaggcguu

SEQ ID NO: 514347 - RNA, 32 nt, Human
ugaggcggggagaagcggcggggagacgccgg

SEQ ID NO: 514348 - RNA, 32 nt, Human
ugaggcggguggaucacuaggucaggaguuca

SEQ ID NO: 514349 - RNA, 32 nt, Human
ugaggcggguggaucacuugaagucgggaguu

SEQ ID NO: 514350 - RNA, 32 nt, Human
ugaggcggguggaucacuugaggccagguguu

SEQ ID NO: 514351 - RNA, 32 nt, Human
ugaggcggguggaucacuugaggucagaaguu

SEQ ID NO: 514352 - RNA, 32 nt, Human
ugaggcggguggaucacuugaggucaggaguu

SEQ ID NO: 514353 - RNA, 32 nt, Human
ugaggcggguggauugcuugagcccagaaguu

SEQ ID NO: 514354 - RNA, 32 nt, Human
ugaggcggguggauugcuugagcccaggaguu

SEQ ID NO: 514355 - RNA, 30 nt, Human
ugaggcgguuuauagucagaaagauuuacg

SEQ ID NO: 514356 - RNA, 32 nt, Human
ugaggcguauguggcaaaauguuacagaaucu

SEQ ID NO: 514357 - RNA, 32 nt, Human
ugaggcgugcgaacugguggcagugagagacu

SEQ ID NO: 514358 - RNA, 32 nt, Human
ugaggcgugggugugagccaggcugcaggagg

SEQ ID NO: 514359 - RNA, 32 nt, Human
ugaggcguuggcuuuuucuccaagaagguaca

SEQ ID NO: 514360 - RNA, 32 nt, Human
ugaggcuaaauuugaacccagcaaucugacuc

SEQ ID NO: 514361 - RNA, 32 nt, Human
ugaggcuaagaguucaagaucaguuugggcaa

SEQ ID NO: 514362 - RNA, 32 nt, Human
ugaggcuaaggcacuguaucccaggccuccca

SEQ ID NO: 514363 - RNA, 32 nt, Human
ugaggcuaggaguucaagaccagccuggccaa

SEQ ID NO: 514364 - RNA, 32 nt, Human
ugaggcuaggaguucaagacuagcguggccaa

SEQ ID NO: 514365 - RNA, 32 nt, Human
ugaggcuagugaagcaccuacaagaaacuuau

SEQ ID NO: 514366 - RNA, 32 nt, Human
ugaggcuaguugagaaauuauaccucaccagu

SEQ ID NO: 514367 - RNA, 20 nt, Human
ugaggcuauggaggguccuc

SEQ ID NO: 514368 - RNA, 32 nt, Human
ugaggcucacacacaggucugucugucacaaa

SEQ ID NO: 514369 - RNA, 23 nt, Human
ugaggcucaccagccacaggccu

SEQ ID NO: 514370 - RNA, 21 nt, Human
ugaggcucagcaacagccccu

SEQ ID NO: 514371 - RNA, 21 nt, Human
ugaggcucagcccuagcccuc

SEQ ID NO: 514372 - RNA, 32 nt, Human
ugaggcucaggaguucaagaccagccuggcca

SEQ ID NO: 514373 - RNA, 18 nt, Human
ugaggcucagggaaguua

SEQ ID NO: 514374 - RNA, 32 nt, Human
ugaggcucagucagaaccuccacccuccccca

SEQ ID NO: 514375 - RNA, 32 nt, Human
ugaggcucagugugguuaaaagaucugaccaa

SEQ ID NO: 514376 - RNA, 32 nt, Human
ugaggcucaguuaccccugggcuuaggcugag

SEQ ID NO: 514377 - RNA, 21 nt, Human
ugaggcucaguugugcccucu

SEQ ID NO: 514378 - RNA, 32 nt, Human
ugaggcuccacaggcugcacagucucugauaa

SEQ ID NO: 514379 - RNA, 32 nt, Human
ugaggcuccagccgagggcuccaggccucuga

SEQ ID NO: 514380 - RNA, 32 nt, Human
ugaggcuccaggcgguggaggugcggcagcug

SEQ ID NO: 514381 - RNA, 32 nt, Human
ugaggcuccagggccuuggccuagggaaacua

SEQ ID NO: 514382 - RNA, 32 nt, Human
ugaggcuccaucucaagaaacagaaaaaggga

SEQ ID NO: 514383 - RNA, 32 nt, Human
ugaggcucccauugucuccaucagagccugca

SEQ ID NO: 514384 - RNA, 32 nt, Human
ugaggcucccugggggaugacacucaguucug

SEQ ID NO: 514385 - RNA, 20 nt, Human
ugaggcuccgucagcccccu

SEQ ID NO: 514386 - RNA, 32 nt, Human
ugaggcuccugugccugauggaauucuuguaa

SEQ ID NO: 514387 - RNA, 32 nt, Human
ugaggcucgcugcuguguagcagagcucaguc

SEQ ID NO: 514388 - RNA, 32 nt, Human
ugaggcucgggagccuuuggcagaagguggcu

SEQ ID NO: 514389 - RNA, 32 nt, Human
ugaggcucuaauucccugggucccauugccau

SEQ ID NO: 514390 - RNA, 32 nt, Human
ugaggcucuaauucccugggucccauugucau

SEQ ID NO: 514391 - RNA, 32 nt, Human
ugaggcucuacaaggagagggucuccagggcc

SEQ ID NO: 514392 - RNA, 32 nt, Human
ugaggcucuccccuccuccccucccccaucau

SEQ ID NO: 514393 - RNA, 18 nt, Human
ugaggcucugaaccuucc

SEQ ID NO: 514394 - RNA, 32 nt, Human
ugaggcucuggccugcagcucgcgccgccaug

SEQ ID NO: 514395 - RNA, 20 nt, Human
ugaggcugaagcaccaggga

SEQ ID NO: 514396 - RNA, 32 nt, Human
ugaggcugaaggaauacuugagcccaggaauu

SEQ ID NO: 514397 - RNA, 19 nt, Human
ugaggcugaccagggcccu

SEQ ID NO: 514398 - RNA, 32 nt, Human
ugaggcugaccuugcuagucugcccacucccu

SEQ ID NO: 514399 - RNA, 32 nt, Human
ugaggcugacuugccgacggucggcagguaau

SEQ ID NO: 514400 - RNA, 32 nt, Human
ugaggcugagaggucaagguugcagugagcca

SEQ ID NO: 514401 - RNA, 32 nt, Human
ugaggcugagaugggaggaugagggaggucgg

SEQ ID NO: 514402 - RNA, 32 nt, Human
ugaggcugaggaguucaagaccagccuggcca

SEQ ID NO: 514403 - RNA, 32 nt, Human
ugaggcugaggcagaagaaucgcuugaaccug

SEQ ID NO: 514404 - RNA, 32 nt, Human
ugaggcugaggcaggagaauugcuugaaccgg

SEQ ID NO: 514405 - RNA, 32 nt, Human
ugaggcugaggcaguagaaucgcuugaacccg

SEQ ID NO: 514406 - RNA, 32 nt, Human
ugaggcugagggaggagaaucgcuugaaccca

SEQ ID NO: 514407 - RNA, 32 nt, Human
ugaggcugaggugggaggaucgcuugagccug

SEQ ID NO: 514408 - RNA, 32 nt, Human
ugaggcugaguuuccagaagaccuguucaacc

SEQ ID NO: 514409 - RNA, 20 nt, Human
ugaggcugcaaucacacuga

SEQ ID NO: 514410 - RNA, 32 nt, Human
ugaggcugcaccugaguaccacauccugaccc

SEQ ID NO: 514411 - RNA, 32 nt, Human
ugaggcugcagcgucggcaucuugagcugccg

SEQ ID NO: 514412 - RNA, 32 nt, Human
ugaggcugcaguggcuaugaucaugccacugc

SEQ ID NO: 514413 - RNA, 32 nt, Human
ugaggcugcccagagaaagcacugcuucugua

SEQ ID NO: 514414 - RNA, 32 nt, Human
ugaggcugcccugcgauggccugggugggaga

SEQ ID NO: 514415 - RNA, 31 nt, Human
ugaggcugccucugggccuguggauccagau

SEQ ID NO: 514416 - RNA, 32 nt, Human
ugaggcugcgcugcacuccucugcccuggggc

SEQ ID NO: 514417 - RNA, 32 nt, Human
ugaggcugcucugguuugugauccagacaggc

SEQ ID NO: 514418 - RNA, 32 nt, Human
ugaggcugcugccccaguuucauggaugcugg

SEQ ID NO: 514419 - RNA, 32 nt, Human
ugaggcugcugcugagagaagcucugggaagu

SEQ ID NO: 514420 - RNA, 32 nt, Human
ugaggcuggaaaccccggaguaaggcucgacc

SEQ ID NO: 514421 - RNA, 32 nt, Human
ugaggcuggagaagacaccagggcugacuuug

SEQ ID NO: 514422 - RNA, 32 nt, Human
ugaggcuggagauggcaggaacaggcaugcag

SEQ ID NO: 514423 - RNA, 32 nt, Human
ugaggcuggaggaucacuugagcccaggaagu

SEQ ID NO: 514424 - RNA, 32 nt, Human
ugaggcuggaggaucgcuugaaccugggaggu

SEQ ID NO: 514425 - RNA, 32 nt, Human
ugaggcuggaggaucgcuugagcccaggaguu

SEQ ID NO: 514426 - RNA, 32 nt, Human
ugaggcuggagugcaguggcaccaucucgucu

SEQ ID NO: 514427 - RNA, 32 nt, Human
ugaggcuggagugcaguggcgcgaucuugacu

SEQ ID NO: 514428 - RNA, 32 nt, Human
ugaggcuggcagaucacuugaggucaggaguu

SEQ ID NO: 514429 - RNA, 32 nt, Human
ugaggcuggcagcugccaauggagcccuccug

SEQ ID NO: 514430 - RNA, 32 nt, Human
ugaggcuggcugcuucuggaggcuacuuugca

SEQ ID NO: 514431 - RNA, 32 nt, Human
ugaggcugggaggcagagguugcagugagcug

SEQ ID NO: 514432 - RNA, 32 nt, Human
ugaggcugggaggcggagguugcagugagcug

SEQ ID NO: 514433 - RNA, 32 nt, Human
ugaggcugggaguucaaaaccagccugggcaa

SEQ ID NO: 514434 - RNA, 32 nt, Human
ugaggcugggauacaguggcccuggagugggg

SEQ ID NO: 514435 - RNA, 32 nt, Human
ugaggcugggcugggagggggagggagauaga

SEQ ID NO: 514436 - RNA, 32 nt, Human
ugaggcugggggccagagaagcuuuuacgcau

SEQ ID NO: 514437 - RNA, 32 nt, Human
ugaggcuggggucucugcaggggaggucacug

SEQ ID NO: 514438 - RNA, 32 nt, Human
ugaggcugguggaucacuugaagccaggaauu

SEQ ID NO: 514439 - RNA, 32 nt, Human
ugaggcuguacggcuacagccugggcaacauc

SEQ ID NO: 514440 - RNA, 32 nt, Human
ugaggcuguauccuuauccuccauccaucuau

SEQ ID NO: 514441 - RNA, 32 nt, Human
ugaggcugugacacccagaggaauuccuguga

SEQ ID NO: 514442 - RNA, 32 nt, Human
ugaggcugugcuucagguaugguacaaucaag

SEQ ID NO: 514443 - RNA, 32 nt, Human
ugaggcuguggagccagauggcugcguucaga

SEQ ID NO: 514444 - RNA, 32 nt, Human
ugaggcuucacugcagcggccuccacccaccu

SEQ ID NO: 514445 - RNA, 32 nt, Human
ugaggcuucacugcucuccugagaguuuucua

SEQ ID NO: 514446 - RNA, 32 nt, Human
ugaggcuucuaaaauuuucacauaacugccaa

SEQ ID NO: 514447 - RNA, 32 nt, Human
ugaggcuugggaacaaggggaagaugcuggac

SEQ ID NO: 514448 - RNA, 32 nt, Human
ugaggcuuuggcagaaauuaagaaggaaauau

SEQ ID NO: 514449 - RNA, 32 nt, Human
ugaggcuuuugaggaauccuugguggccagag

SEQ ID NO: 514450 - RNA, 32 nt, Human
ugagggaaaccaggucaccauccacccucgua

SEQ ID NO: 514451 - RNA, 32 nt, Human
ugagggaaacugcugguucugcuggugccucu

SEQ ID NO: 514452 - RNA, 32 nt, Human
ugagggaaaugugggcaacauacauauuugac

SEQ ID NO: 514453 - RNA, 32 nt, Human
ugagggaaauuauccauauacauaucacuaau

SEQ ID NO: 514454 - RNA, 32 nt, Human
ugagggaacacaguguggaccaucucucaguu

SEQ ID NO: 514455 - RNA, 32 nt, Human
ugagggaacugaaagugaugcagagagccaaa

SEQ ID NO: 514456 - RNA, 32 nt, Human
ugagggaagaagaggaagcgggaggagcuugg

SEQ ID NO: 514457 - RNA, 32 nt, Human
ugagggaagugaaaaucaagaccugggggcug

SEQ ID NO: 514458 - RNA, 32 nt, Human
ugagggacaugcuggaaccagggggcauccga

SEQ ID NO: 514459 - RNA, 20 nt, Human
ugagggaccagccaagaggg

SEQ ID NO: 514460 - RNA, 32 nt, Human
ugagggacccuggacugucacagagauuaaug

SEQ ID NO: 514461 - RNA, 32 nt, Human
ugagggagaaacauuugccugccuuguaauaa

SEQ ID NO: 514462 - RNA, 32 nt, Human
ugagggagaaaucgguaacaguugccgaacca

SEQ ID NO: 514463 - RNA, 32 nt, Human
ugagggagaaggaagcagcuagcuaugucccu

SEQ ID NO: 514464 - RNA, 32 nt, Human
ugagggagagaauugcuucaaccagggaggca

SEQ ID NO: 514465 - RNA, 32 nt, Human
ugagggagagagagugagagacccuaaccuau

SEQ ID NO: 514466 - RNA, 22 nt, Human
ugagggagagggagcccuccaa

SEQ ID NO: 514467 - RNA, 32 nt, Human
ugagggagagguugauucugucacccauccca

SEQ ID NO: 514468 - RNA, 32 nt, Human
ugagggagcagacaaacacacaggcuuccuac

SEQ ID NO: 514469 - RNA, 32 nt, Human
ugagggagcagggagagaaagacuggaguaga

SEQ ID NO: 514470 - RNA, 32 nt, Human
ugagggagccacucgggacgcggaggcccuaa

SEQ ID NO: 514471 - RNA, 32 nt, Human
ugagggagcucaguggaauuguaccgccugua

SEQ ID NO: 514472 - RNA, 32 nt, Human
ugagggagcugccuggcuucucugccuccagc

SEQ ID NO: 514473 - RNA, 32 nt, Human
ugagggaggacaguggaaggagggagagguuc

SEQ ID NO: 514474 - RNA, 32 nt, Human
ugagggaggaccugcuggcugcagugaggagc

SEQ ID NO: 514475 - RNA, 32 nt, Human
ugagggaggacuccaguuggaauggccacuuu

SEQ ID NO: 514476 - RNA, 32 nt, Human
ugagggaggacuucuuggacugcuccaucaug

SEQ ID NO: 514477 - RNA, 32 nt, Human
ugagggaggagaaggaguuagguggaagaaaa

SEQ ID NO: 514478 - RNA, 32 nt, Human
ugagggaggagaaucacuugaccccaggaggc

SEQ ID NO: 514479 - RNA, 32 nt, Human
ugagggaggagacaggcccaaggcggaggccc

SEQ ID NO: 514480 - RNA, 32 nt, Human
ugagggaggagagaugaguggcuauuccagaa

SEQ ID NO: 514481 - RNA, 17 nt, Human
ugagggaggagagggga

SEQ ID NO: 514482 - RNA, 32 nt, Human
ugagggaggaggaggaggaagagguauggcau

SEQ ID NO: 514483 - RNA, 32 nt, Human
ugagggaggaugagcuggcuucugagcagaca

SEQ ID NO: 514484 - RNA, 32 nt, Human
ugagggaggcaggcaauaugcagugaaaaccu

SEQ ID NO: 514485 - RNA, 32 nt, Human
ugagggaggcggaucacuugaggucaggaguu

SEQ ID NO: 514486 - RNA, 32 nt, Human
ugagggaggggcaggagagcagugaggagcug

SEQ ID NO: 514487 - RNA, 32 nt, Human
ugagggaggggcuggcaggaaggguggggucc

SEQ ID NO: 514488 - RNA, 32 nt, Human
ugagggagggggcuuguuucccuucccucccg

SEQ ID NO: 514489 - RNA, 32 nt, Human
ugagggaggucggggcugcagugagccaagau

SEQ ID NO: 514490 - RNA, 32 nt, Human
ugagggaguagggaaaggaaagggggaggcgg

SEQ ID NO: 514491 - RNA, 32 nt, Human
ugagggaguggguggagagcaugggagguaaa

SEQ ID NO: 514492 - RNA, 32 nt, Human
ugagggaucaggcucgccagggccacaggaca

SEQ ID NO: 514493 - RNA, 32 nt, Human
ugagggaugaggacaggcauccuauccccagc

SEQ ID NO: 514494 - RNA, 24 nt, Human
ugagggaugccagcccccaagaga

SEQ ID NO: 514495 - RNA, 32 nt, Human
ugagggcaaagcgugguccacugugugugaug

SEQ ID NO: 514496 - RNA, 32 nt, Human
ugagggcaauucuguccuacuguuuuuacagg

SEQ ID NO: 514497 - RNA, 32 nt, Human
ugagggcacagcuguggguugcaggggagaca

SEQ ID NO: 514498 - RNA, 32 nt, Human
ugagggcacccuccuucucugcacccuuggca

SEQ ID NO: 514499 - RNA, 31 nt, Human
ugagggcagaugucuccagccaggacugccc

SEQ ID NO: 514500 - RNA, 32 nt, Human
ugagggcagcaggccugguugcagcuggcgug

SEQ ID NO: 514501 - RNA, 32 nt, Human
ugagggcaggcagagguagcugaggguagcau

SEQ ID NO: 514502 - RNA, 32 nt, Human
ugagggcaggcaggagguggaguugcagcugu

SEQ ID NO: 514503 - RNA, 32 nt, Human
ugagggcagggcccugccgcuccaccgcagcc

SEQ ID NO: 514504 - RNA, 32 nt, Human
ugagggcauagaaguaaaaacaccuggucccu

SEQ ID NO: 514505 - RNA, 22 nt, Human
ugagggcauccagcaagccccu

SEQ ID NO: 514506 - RNA, 32 nt, Human
ugagggcaugagaggcagagugcacagugguc

SEQ ID NO: 514507 - RNA, 32 nt, Human
ugagggcauggagucauuagucucacaaacac

SEQ ID NO: 514508 - RNA, 32 nt, Human
ugagggccaccacugcaguucugcuaggucug

SEQ ID NO: 514509 - RNA, 32 nt, Human
ugagggcccaggaggccuggcgggccuggggg

SEQ ID NO: 514510 - RNA, 32 nt, Human
ugagggcccaggaggucaaggcuucagugagc

SEQ ID NO: 514511 - RNA, 32 nt, Human
ugagggcccaggugguggaggugggguuggag

SEQ ID NO: 514512 - RNA, 32 nt, Human
ugagggccccaaagccacuugucuccuaggau

SEQ ID NO: 514513 - RNA, 32 nt, Human
ugagggcccgcggggagcucuuaaguugggca

SEQ ID NO: 514514 - RNA, 32 nt, Human
ugagggcccugccucccagucccuccuuguuc

SEQ ID NO: 514515 - RNA, 32 nt, Human
ugagggcccuggaggguccuugggaguaguua

SEQ ID NO: 514516 - RNA, 32 nt, Human
ugagggccgacugcugcucugccuuccuucua

SEQ ID NO: 514517 - RNA, 32 nt, Human
ugagggccucuccugccugauuggucuuucaa

SEQ ID NO: 514518 - RNA, 32 nt, Human
ugagggcgaugauucuagaaggguuauaagcu

SEQ ID NO: 514519 - RNA, 32 nt, Human
ugagggcgccugagggccaggagcagcaggca

SEQ ID NO: 514520 - RNA, 32 nt, Human
ugagggcgggucaugaggaggcuguagccaag

SEQ ID NO: 514521 - RNA, 32 nt, Human
ugagggcuaccuagacucaggugcaauuccuu

SEQ ID NO: 514522 - RNA, 32 nt, Human
ugagggcuagugcagcgcugagcccagacccc

SEQ ID NO: 514523 - RNA, 32 nt, Human
ugagggcuaucguuccagcagagaucaacaca

SEQ ID NO: 514524 - RNA, 32 nt, Human
ugagggcuccacagcucuuccucuuuucucua

SEQ ID NO: 514525 - RNA, 32 nt, Human
ugagggcuccuauaccuuguccuuccugcuug

SEQ ID NO: 514526 - RNA, 32 nt, Human
ugagggcucugaagccuaguucugucuucucu

SEQ ID NO: 514527 - RNA, 32 nt, Human
ugagggcugaaggggaaaaccuuucacacacg

SEQ ID NO: 514528 - RNA, 32 nt, Human
ugagggcugagggagagacugaggugcagcag

SEQ ID NO: 514529 - RNA, 32 nt, Human
ugagggcugauagcucugccuuacccugguaa

SEQ ID NO: 514530 - RNA, 20 nt, Human
ugagggcugccagcagcccc

SEQ ID NO: 514531 - RNA, 32 nt, Human
ugagggcugcugcggcgcagggagaggccugg

SEQ ID NO: 514532 - RNA, 32 nt, Human
ugagggcuggagugcacuggagcaauccuggc

SEQ ID NO: 514533 - RNA, 32 nt, Human
ugagggcuggggguugggggagucagcaugau

SEQ ID NO: 514534 - RNA, 32 nt, Human
ugagggcugguaccacccacuccuggguccug

SEQ ID NO: 514535 - RNA, 32 nt, Human
ugagggcuguggaacccagcaggcaugagaug

SEQ ID NO: 514536 - RNA, 21 nt, Human
ugagggcugugucacgggcca

SEQ ID NO: 514537 - RNA, 32 nt, Human
ugagggcuucauucucacccuguauuucuuua

SEQ ID NO: 514538 - RNA, 20 nt, Human
ugagggcuuccugugccaga

SEQ ID NO: 514539 - RNA, 21 nt, Human
ugagggcuuguaguucuuuaa

SEQ ID NO: 514540 - RNA, 21 nt, Human
ugagggcuuuaagagcuuuga

SEQ ID NO: 514541 - RNA, 32 nt, Human
ugagggcuuuaagagcuuugaaguggggaguc

SEQ ID NO: 514542 - RNA, 20 nt, Human
ugagggcuuuaauccuuuaa

SEQ ID NO: 514543 - RNA, 32 nt, Human
ugagggcuuugcuaugaccucaguccccucac

SEQ ID NO: 514544 - RNA, 32 nt, Human
ugaggggaaacguggagaagaaggaagcuucc

SEQ ID NO: 514545 - RNA, 32 nt, Human
ugaggggaaagccauuaaguggggugcagccc

SEQ ID NO: 514546 - RNA, 32 nt, Human
ugaggggaacagggugcaggagagggaucucu

SEQ ID NO: 514547 - RNA, 32 nt, Human
ugaggggaagagaagagaaagagggggaaagg

SEQ ID NO: 514548 - RNA, 32 nt, Human
ugaggggaagagaggaaggaggggcgggcucc

SEQ ID NO: 514549 - RNA, 32 nt, Human
ugaggggaagaggccuguuucgcugucggguc

SEQ ID NO: 514550 - RNA, 32 nt, Human
ugaggggaagggagggggcgggcaggugcagc

SEQ ID NO: 514551 - RNA, 32 nt, Human
ugaggggaagguucugaugacagcugcagagg

SEQ ID NO: 514552 - RNA, 32 nt, Human
ugaggggaauguuauggguaacagacaugcag

SEQ ID NO: 514553 - RNA, 32 nt, Human
ugaggggacacauucucuuuaggaagcauugg

SEQ ID NO: 514554 - RNA, 32 nt, Human
ugaggggaggcaccuccaggcaggccaggcug

SEQ ID NO: 514555 - RNA, 32 nt, Human
ugaggggagggcacgcuugucuucucagguau

SEQ ID NO: 514556 - RNA, 32 nt, Human
ugaggggagggcagaggaggagagagccuggc

SEQ ID NO: 514557 - RNA, 32 nt, Human
ugaggggagggcuguggggaacuccauucagu

SEQ ID NO: 514558 - RNA, 32 nt, Human
ugaggggaggggaagacucggcuuccaagucc

SEQ ID NO: 514559 - RNA, 32 nt, Human
ugaggggaggggcaagugggacccugccaccu

SEQ ID NO: 514560 - RNA, 18 nt, Human
ugaggggagggggccaga

SEQ ID NO: 514561 - RNA, 32 nt, Human
ugaggggagggugaggagcuggagggaggggc

SEQ ID NO: 514562 - RNA, 32 nt, Human
ugaggggaucaggcuuuucuacuccaggcaaa

SEQ ID NO: 514563 - RNA, 32 nt, Human
ugaggggaugagagguuguacacacauuggua

SEQ ID NO: 514564 - RNA, 21 nt, Human
ugaggggauucucuacugcca

SEQ ID NO: 514565 - RNA, 32 nt, Human
ugaggggcaaguguccagcaggagggagaaac

SEQ ID NO: 514566 - RNA, 20 nt, Human
ugaggggcacacuacagcga

SEQ ID NO: 514567 - RNA, 32 nt, Human
ugaggggcaccacuacuccagcccagaaggaa

SEQ ID NO: 514568 - RNA, 32 nt, Human
ugaggggcagaggagaggauggggaggccaag

SEQ ID NO: 514569 - RNA, 32 nt, Human
ugaggggcagcucuggccagugcucaccaggg

SEQ ID NO: 514570 - RNA, 32 nt, Human
ugaggggcaggcacaggaguccuggcugagcu

SEQ ID NO: 514571 - RNA, 32 nt, Human
ugaggggcaggccaggaggagcuugggcgcag

SEQ ID NO: 514572 - RNA, 20 nt, Human
ugaggggcagggagggccag

SEQ ID NO: 514573 - RNA, 32 nt, Human
ugaggggccaaggucaagaccaaccuccaucu

SEQ ID NO: 514574 - RNA, 32 nt, Human
ugaggggccaggccauggccaaggggccagcu

SEQ ID NO: 514575 - RNA, 32 nt, Human
ugaggggccagggaggaaggaggccacggagc

SEQ ID NO: 514576 - RNA, 32 nt, Human
ugaggggccuggcugggggcccccaggcucca

SEQ ID NO: 514577 - RNA, 32 nt, Human
ugaggggccuugggcuguaggaugacaacacu

SEQ ID NO: 514578 - RNA, 32 nt, Human
ugaggggcgggcagccgcgccgccgcggcacu

SEQ ID NO: 514579 - RNA, 32 nt, Human
ugaggggcuagugcagugguccugaccucucu

SEQ ID NO: 514580 - RNA, 32 nt, Human
ugaggggcucaaccucuucuguccucaaagag

SEQ ID NO: 514581 - RNA, 32 nt, Human
ugaggggcucagagcugaggcagaaucccuuu

SEQ ID NO: 514582 - RNA, 32 nt, Human
ugaggggcugaggaggcugaggggcugagggg

SEQ ID NO: 514583 - RNA, 23 nt, Human
ugaggggcuuccuuucugcagcu

SEQ ID NO: 514584 - RNA, 32 nt, Human
ugaggggcuucggagcugaggagcagcuguuc

SEQ ID NO: 514585 - RNA, 32 nt, Human
ugaggggcuuugacauggguauuucugugacg

SEQ ID NO: 514586 - RNA, 32 nt, Human
ugagggggacacaguggugcucugcugaguug

SEQ ID NO: 514587 - RNA, 32 nt, Human
ugagggggacaguguagguugggggugaggaa

SEQ ID NO: 514588 - RNA, 32 nt, Human
ugagggggacaguuugacuucacuuugagggu

SEQ ID NO: 514589 - RNA, 32 nt, Human
ugagggggagccaagggugacuuggcaggggu

SEQ ID NO: 514590 - RNA, 32 nt, Human
ugagggggaggcgcagggucaggaggggaggg

SEQ ID NO: 514591 - RNA, 32 nt, Human
ugagggggcacaugaagauaagccacaaauga

SEQ ID NO: 514592 - RNA, 32 nt, Human
ugagggggcgucugcgugcacagccaugccug

SEQ ID NO: 514593 - RNA, 32 nt, Human
ugagggggcuccugccguccugacgccacccc

SEQ ID NO: 514594 - RNA, 32 nt, Human
ugagggggcugaggcaugagaaucacuugaac

SEQ ID NO: 514595 - RNA, 20 nt, Human
ugaggggggucucacuaugu

SEQ ID NO: 514596 - RNA, 22 nt, Human
ugagggggucagacacaggccc

SEQ ID NO: 514597 - RNA, 32 nt, Human
ugagggggugcccggcggccucggacaggggc

SEQ ID NO: 514598 - RNA, 32 nt, Human
ugaggggguggagucuggucugcuccacuaac

SEQ ID NO: 514599 - RNA, 32 nt, Human
ugaggggguguguuugggagccuggccuccaa

SEQ ID NO: 514600 - RNA, 32 nt, Human
ugagggguccuugaggccaguggaucuggagu

SEQ ID NO: 514601 - RNA, 32 nt, Human
ugaggggucgcuacguggaggaagggcuaccg

SEQ ID NO: 514602 - RNA, 32 nt, Human
ugaggggugcagcagccaggaggcgggcggaa

SEQ ID NO: 514603 - RNA, 32 nt, Human
ugagggguggagggcagaggagaaacugcguc

SEQ ID NO: 514604 - RNA, 32 nt, Human
ugagggguggcgcgcggccaggagcacgcaug

SEQ ID NO: 514605 - RNA, 32 nt, Human
ugagggguguggaggacagagagauggugaaa

SEQ ID NO: 514606 - RNA, 32 nt, Human
ugagggguuagauuagaggaaaguaauuuagg

SEQ ID NO: 514607 - RNA, 32 nt, Human
ugaggguaacaaggaacucacuuggcagucag

SEQ ID NO: 514608 - RNA, 32 nt, Human
ugaggguaccugcacaguuugauucuuuucca

SEQ ID NO: 514609 - RNA, 32 nt, Human
ugaggguauuagacaucccugaaacucaguua

SEQ ID NO: 514610 - RNA, 32 nt, Human
ugagggucaccacugccagccucaggcaacau

SEQ ID NO: 514611 - RNA, 32 nt, Human
ugagggucagaccuucuaauaaaagagacuuu

SEQ ID NO: 514612 - RNA, 32 nt, Human
ugagggucaggaugaagcagaucugcuguaga

SEQ ID NO: 514613 - RNA, 32 nt, Human
ugagggucccagaagcccccagaggugacagc

SEQ ID NO: 514614 - RNA, 32 nt, Human
ugaggguccucuuccaucuugcugaacuguuc

SEQ ID NO: 514615 - RNA, 32 nt, Human
ugagggucuaacuuuauucuuuuucaugugga

SEQ ID NO: 514616 - RNA, 32 nt, Human
ugagggucucuuagggaggacaguauggacug

SEQ ID NO: 514617 - RNA, 32 nt, Human
ugagggucugcggggccgccaaaggagcccac

SEQ ID NO: 514618 - RNA, 32 nt, Human
ugagggucugggcauugcucccagcaucugac

SEQ ID NO: 514619 - RNA, 32 nt, Human
ugagggucuguagguuacacacuuugguacca

SEQ ID NO: 514620 - RNA, 32 nt, Human
ugagggucuguagguugcacacuuugguacca

SEQ ID NO: 514621 - RNA, 32 nt, Human
ugagggucuguggaacuccagcagcucugcac

SEQ ID NO: 514622 - RNA, 32 nt, Human
ugagggucuuuagcaaagauggaaguuuuggu

SEQ ID NO: 514623 - RNA, 32 nt, Human
ugagggugaaagaagacacagauggagccacc

SEQ ID NO: 514624 - RNA, 32 nt, Human
ugagggugagcggcucauucugcuauuuaacu

SEQ ID NO: 514625 - RNA, 32 nt, Human
ugagggugaggcucucugcacacuccagagug

SEQ ID NO: 514626 - RNA, 32 nt, Human
ugagggugccccuaacccuggagccagcuuua

SEQ ID NO: 514627 - RNA, 32 nt, Human
ugaggguggagaaggaggcgggugaugugcuc

SEQ ID NO: 514628 - RNA, 32 nt, Human
ugaggguggagggagacagugggcggcagcac

SEQ ID NO: 514629 - RNA, 32 nt, Human
ugaggguggcagugagcuggcacuuuggucuc

SEQ ID NO: 514630 - RNA, 32 nt, Human
ugagggugggcgacccaggauucccccucccc

SEQ ID NO: 514631 - RNA, 32 nt, Human
ugaggguggguggagggguuugcaguguggga

SEQ ID NO: 514632 - RNA, 31 nt, Human
ugagggugggugggaagagugagaagauaua

SEQ ID NO: 514633 - RNA, 31 nt, Human
ugaggguggguggguggacccaggcucccuu

SEQ ID NO: 514634 - RNA, 32 nt, Human
ugaggguggucacaccugagccuucagcacug

SEQ ID NO: 514635 - RNA, 32 nt, Human
ugagggugguuggggagaggggaccgaugugc

SEQ ID NO: 514636 - RNA, 18 nt, Human
ugagggugugucuuugua

SEQ ID NO: 514637 - RNA, 32 nt, Human
ugaggguucacaagccucccagaaccagcccu

SEQ ID NO: 514638 - RNA, 32 nt, Human
ugaggguuccaagugugcugaagaggacaguc

SEQ ID NO: 514639 - RNA, 32 nt, Human
ugaggguuccucagggccuuggcauugcuagu

SEQ ID NO: 514640 - RNA, 32 nt, Human
ugaggguugaguggguagguugggaagaacau

SEQ ID NO: 514641 - RNA, 32 nt, Human
ugaggguugcagagcccgcuguggagguaaga

SEQ ID NO: 514642 - RNA, 32 nt, Human
ugagguaaaauaaggcauaaaugcagguaauu

SEQ ID NO: 514643 - RNA, 32 nt, Human
ugagguacagaggaagugauguccuugacaag

SEQ ID NO: 514644 - RNA, 32 nt, Human
ugagguacagccacagaagaugucauguacug

SEQ ID NO: 514645 - RNA, 32 nt, Human
ugagguacaggggaauggacucuccccuacug

SEQ ID NO: 514646 - RNA, 32 nt, Human
ugagguaccacagcuccacuccuggcuggaac

SEQ ID NO: 514647 - RNA, 32 nt, Human
ugagguaccugagagccccucaggggaggagg

SEQ ID NO: 514648 - RNA, 32 nt, Human
ugagguagacuccuagagguuaauuaucaucu

SEQ ID NO: 514649 - RNA, 23 nt, Human
ugagguagcagacucacuugaac

SEQ ID NO: 514650 - RNA, 32 nt, Human
ugagguagcucacaccuguaaucccagcacuu

SEQ ID NO: 514651 - RNA, 32 nt, Human
ugagguaggagaaucacuugaaccucagcggc

SEQ ID NO: 514652 - RNA, 32 nt, Human
ugagguaggaggacugcuugagcucaggaggu

SEQ ID NO: 514653 - RNA, 32 nt, Human
ugagguaggaggaucaccugagccuggagaug

SEQ ID NO: 514654 - RNA, 32 nt, Human
ugagguaggaggaucacgugaggucgggaguu

SEQ ID NO: 514655 - RNA, 32 nt, Human
ugagguaggaggaucacuuaagccugggaagu

SEQ ID NO: 514656 - RNA, 32 nt, Human
ugagguaggaggaucacuugggccaagagguu

SEQ ID NO: 514657 - RNA, 32 nt, Human
ugagguaggaggaucgccugagcaugggaggc

SEQ ID NO: 514658 - RNA, 32 nt, Human
ugagguaggaggaucgcuugaacccaggaagu

SEQ ID NO: 514659 - RNA, 32 nt, Human
ugagguaggaggaucgcuugaacccaggaguu

SEQ ID NO: 514660 - RNA, 32 nt, Human
ugagguaggaggaucgcuugagccuggguaga

SEQ ID NO: 514661 - RNA, 32 nt, Human
ugagguaggaggaucgcuugaggccagaaguu

SEQ ID NO: 514662 - RNA, 32 nt, Human
ugagguaggaggcggaggugggggugggggua

SEQ ID NO: 514663 - RNA, 32 nt, Human
ugagguaggcagaucacuugaggucaggaguu

SEQ ID NO: 514664 - RNA, 32 nt, Human
ugagguaggcggaucacuggggucaggauuuc

SEQ ID NO: 514665 - RNA, 32 nt, Human
ugagguagggggaucacuugaaccuggguggu

SEQ ID NO: 514666 - RNA, 32 nt, Human
ugagguauauaccuuugugauuuucuaaugag

SEQ ID NO: 514667 - RNA, 32 nt, Human
ugaggucaagaguucaagaccagccugaccaa

SEQ ID NO: 514668 - RNA, 32 nt, Human
ugaggucaagaguucaagaccagccugacgaa

SEQ ID NO: 514669 - RNA, 32 nt, Human
ugaggucaagaguucaagaccagccuggccaa

SEQ ID NO: 514670 - RNA, 32 nt, Human
ugaggucaagaguucaagaccggccuggccaa

SEQ ID NO: 514671 - RNA, 32 nt, Human
ugaggucaagaguucaagacuagccuggccaa

SEQ ID NO: 514672 - RNA, 32 nt, Human
ugaggucaagaguuccagaccaggcuggccag

SEQ ID NO: 514673 - RNA, 32 nt, Human
ugaggucaagaguucgagaccagccaggccaa

SEQ ID NO: 514674 - RNA, 32 nt, Human
ugaggucaagaguucgagaccagccuagcuaa

SEQ ID NO: 514675 - RNA, 32 nt, Human
ugaggucaagaguucgagaccagccugaccaa

SEQ ID NO: 514676 - RNA, 32 nt, Human
ugaggucaagaguucgaggccagccuggccaa

SEQ ID NO: 514677 - RNA, 32 nt, Human
ugaggucaagaguuugagaccagccugaccaa

SEQ ID NO: 514678 - RNA, 32 nt, Human
ugaggucaagaguuugagaccagccuggccaa

SEQ ID NO: 514679 - RNA, 32 nt, Human
ugaggucaagcaacccucccaccucggccuga

SEQ ID NO: 514680 - RNA, 32 nt, Human
ugaggucaagccaguccucccauggucaugcc

SEQ ID NO: 514681 - RNA, 32 nt, Human
ugaggucaaggcaggaggauugccugagccug

SEQ ID NO: 514682 - RNA, 32 nt, Human
ugaggucacaaguucaagaccagccuggcaaa

SEQ ID NO: 514683 - RNA, 32 nt, Human
ugaggucacaccgcugcacuccagccugggca

SEQ ID NO: 514684 - RNA, 32 nt, Human
ugaggucacacuagccuccugaggccuggcug

SEQ ID NO: 514685 - RNA, 32 nt, Human
ugaggucacgaauuugagaccaaccuggccaa

SEQ ID NO: 514686 - RNA, 32 nt, Human
ugaggucacgaguucaagaccagccuggccaa

SEQ ID NO: 514687 - RNA, 32 nt, Human
ugaggucacugacuccagcucaaaaggcaucu

SEQ ID NO: 514688 - RNA, 32 nt, Human
ugaggucacugcaaccuccaccucccggguuc

SEQ ID NO: 514689 - RNA, 32 nt, Human
ugaggucagaaguucaagaccagccuagccaa

SEQ ID NO: 514690 - RNA, 32 nt, Human
ugaggucagaaguucaagaccagccugaccaa

SEQ ID NO: 514691 - RNA, 32 nt, Human
ugaggucagaaguucaagaccagccuggccaa

SEQ ID NO: 514692 - RNA, 32 nt, Human
ugaggucagaaguucaagaccagccuggcucu

SEQ ID NO: 514693 - RNA, 32 nt, Human
ugaggucagaaguucaagaccauccuggcuaa

SEQ ID NO: 514694 - RNA, 32 nt, Human
ugaggucagaaguucaagacuagccuggucaa

SEQ ID NO: 514695 - RNA, 32 nt, Human
ugaggucagaaguucaaggccagccuggacga

SEQ ID NO: 514696 - RNA, 32 nt, Human
ugaggucagaaguucgagaccaaccuggccaa

SEQ ID NO: 514697 - RNA, 32 nt, Human
ugaggucagcaacagggaaagagggugggcac

SEQ ID NO: 514698 - RNA, 32 nt, Human
ugaggucagcaguccaagaccacccuggccaa

SEQ ID NO: 514699 - RNA, 32 nt, Human
ugaggucagcaguucaagaccagccugaccaa

SEQ ID NO: 514700 - RNA, 32 nt, Human
ugaggucagcaguucaagacuagccuggccaa

SEQ ID NO: 514701 - RNA, 31 nt, Human
ugaggucagccacugggucacuuguagucaa

SEQ ID NO: 514702 - RNA, 32 nt, Human
ugaggucaggaauucaagaccacccuggccaa

SEQ ID NO: 514703 - RNA, 32 nt, Human
ugaggucaggaauucaagaccagccuggccaa

SEQ ID NO: 514704 - RNA, 32 nt, Human
ugaggucaggaauuugagaccaaccuggccaa

SEQ ID NO: 514705 - RNA, 32 nt, Human
ugaggucaggacuucaagaccagccuggccaa

SEQ ID NO: 514706 - RNA, 32 nt, Human
ugaggucaggagaucaagaccacccuggcuaa

SEQ ID NO: 514707 - RNA, 32 nt, Human
ugaggucaggagaucaagaccagccuggccaa

SEQ ID NO: 514708 - RNA, 32 nt, Human
ugaggucaggagaucaagaccauccuggccaa

SEQ ID NO: 514709 - RNA, 32 nt, Human
ugaggucaggagaucaagaccauccuggcuaa

SEQ ID NO: 514710 - RNA, 32 nt, Human
ugaggucaggagaucaagaccaucuuggcuaa

SEQ ID NO: 514711 - RNA, 32 nt, Human
ugaggucaggagcucaagaccagccugaccaa

SEQ ID NO: 514712 - RNA, 32 nt, Human
ugaggucaggagcucaagaccagccuggcuaa

SEQ ID NO: 514713 - RNA, 32 nt, Human
ugaggucaggagcucaagaccagccuggguaa

SEQ ID NO: 514714 - RNA, 32 nt, Human
ugaggucaggagcucaagaccagccuggucaa

SEQ ID NO: 514715 - RNA, 32 nt, Human
ugaggucaggagcuugaaaccagccuggccaa

SEQ ID NO: 514716 - RNA, 18 nt, Human
ugaggucaggaguacgag

SEQ ID NO: 514717 - RNA, 32 nt, Human
ugaggucaggaguccaagaccagccuggccaa

SEQ ID NO: 514718 - RNA, 32 nt, Human
ugaggucaggaguucaaaaccaaccuggucua

SEQ ID NO: 514719 - RNA, 32 nt, Human
ugaggucaggaguucaaaaccagccuggccaa

SEQ ID NO: 514720 - RNA, 32 nt, Human
ugaggucaggaguucaacaccagcaugaccaa

SEQ ID NO: 514721 - RNA, 32 nt, Human
ugaggucaggaguucaacaccagccuggccaa

SEQ ID NO: 514722 - RNA, 32 nt, Human
ugaggucaggaguucaacaucagccuggccaa

SEQ ID NO: 514723 - RNA, 32 nt, Human
ugaggucaggaguucaagaacagccuagccaa

SEQ ID NO: 514724 - RNA, 32 nt, Human
ugaggucaggaguucaagaacagccugaccaa

SEQ ID NO: 514725 - RNA, 32 nt, Human
ugaggucaggaguucaagaacagccuuaccaa

SEQ ID NO: 514726 - RNA, 32 nt, Human
ugaggucaggaguucaagacaagccuggccaa

SEQ ID NO: 514727 - RNA, 32 nt, Human
ugaggucaggaguucaagacaagccuggccua

SEQ ID NO: 514728 - RNA, 32 nt, Human
ugaggucaggaguucaagaccaaccugacuaa

SEQ ID NO: 514729 - RNA, 32 nt, Human
ugaggucaggaguucaagaccaaucugacuaa

SEQ ID NO: 514730 - RNA, 32 nt, Human
ugaggucaggaguucaagaccaaucuggccaa

SEQ ID NO: 514731 - RNA, 32 nt, Human
ugaggucaggaguucaagaccacccugaccaa

SEQ ID NO: 514732 - RNA, 32 nt, Human
ugaggucaggaguucaagaccagcauggcuua

SEQ ID NO: 514733 - RNA, 32 nt, Human
ugaggucaggaguucaagaccagcaugggaaa

SEQ ID NO: 514734 - RNA, 32 nt, Human
ugaggucaggaguucaagaccagccuagccaa

SEQ ID NO: 514735 - RNA, 32 nt, Human
ugaggucaggaguucaagaccagccucaacau

SEQ ID NO: 514736 - RNA, 32 nt, Human
ugaggucaggaguucaagaccagccugaccaa

SEQ ID NO: 514737 - RNA, 32 nt, Human
ugaggucaggaguucaagaccagccugaccca

SEQ ID NO: 514738 - RNA, 32 nt, Human
ugaggucaggaguucaagaccagccugcccaa

SEQ ID NO: 514739 - RNA, 32 nt, Human
ugaggucaggaguucaagaccagccuggccaa

SEQ ID NO: 514740 - RNA, 32 nt, Human
ugaggucaggaguucaagaccagccuggccga

SEQ ID NO: 514741 - RNA, 32 nt, Human
ugaggucaggaguucaagaccagccuggccgg

SEQ ID NO: 514742 - RNA, 32 nt, Human
ugaggucaggaguucaagaccagccuggcuaa

SEQ ID NO: 514743 - RNA, 32 nt, Human
ugaggucaggaguucaagaccagccuggcuga

SEQ ID NO: 514744 - RNA, 32 nt, Human
ugaggucaggaguucaagaccagccugggcaa

SEQ ID NO: 514745 - RNA, 32 nt, Human
ugaggucaggaguucaagaccagccuggucaa

SEQ ID NO: 514746 - RNA, 32 nt, Human
ugaggucaggaguucaagaccagccuguccaa

SEQ ID NO: 514747 - RNA, 32 nt, Human
ugaggucaggaguucaagaccagccuugccaa

SEQ ID NO: 514748 - RNA, 32 nt, Human
ugaggucaggaguucaagaccagccuuggcaa

SEQ ID NO: 514749 - RNA, 32 nt, Human
ugaggucaggaguucaagaccagcuuggccaa

SEQ ID NO: 514750 - RNA, 32 nt, Human
ugaggucaggaguucaagaccaggcuggccaa

SEQ ID NO: 514751 - RNA, 32 nt, Human
ugaggucaggaguucaagaccaguauggccaa

SEQ ID NO: 514752 - RNA, 32 nt, Human
ugaggucaggaguucaagaccagucuggccaa

SEQ ID NO: 514753 - RNA, 32 nt, Human
ugaggucaggaguucaagaccauccuggccaa

SEQ ID NO: 514754 - RNA, 32 nt, Human
ugaggucaggaguucaagaccugccuggccaa

SEQ ID NO: 514755 - RNA, 32 nt, Human
ugaggucaggaguucaagacuagccuggccaa

SEQ ID NO: 514756 - RNA, 32 nt, Human
ugaggucaggaguucaagacuggccugaucaa

SEQ ID NO: 514757 - RNA, 32 nt, Human
ugaggucaggaguucaagagcagccuggccaa

SEQ ID NO: 514758 - RNA, 32 nt, Human
ugaggucaggaguucaagaucaaccuggccaa

SEQ ID NO: 514759 - RNA, 32 nt, Human
ugaggucaggaguucaagaucagccugaccaa

SEQ ID NO: 514760 - RNA, 32 nt, Human
ugaggucaggaguucaagaucagccugcgcaa

SEQ ID NO: 514761 - RNA, 32 nt, Human
ugaggucaggaguucaagaucagccuggccaa

SEQ ID NO: 514762 - RNA, 32 nt, Human
ugaggucaggaguucaagaucaggaccaacau

SEQ ID NO: 514763 - RNA, 32 nt, Human
ugaggucaggaguucaagauuagccuggccaa

SEQ ID NO: 514764 - RNA, 32 nt, Human
ugaggucaggaguucaaggccagccuggccaa

SEQ ID NO: 514765 - RNA, 32 nt, Human
ugaggucaggaguucaauaccagccuggccaa

SEQ ID NO: 514766 - RNA, 19 nt, Human
ugaggucaggaguucgaga

SEQ ID NO: 514767 - RNA, 32 nt, Human
ugaggucaggaguucgagaccaaccgaccaac

SEQ ID NO: 514768 - RNA, 32 nt, Human
ugaggucaggaguucgagaccaaccuagccaa

SEQ ID NO: 514769 - RNA, 32 nt, Human
ugaggucaggaguucgagaccaaccuccaaca

SEQ ID NO: 514770 - RNA, 32 nt, Human
ugaggucaggaguuugaaacuagccuggccaa

SEQ ID NO: 514771 - RNA, 32 nt, Human
ugaggucaggaguuugagaccaaccuagucaa

SEQ ID NO: 514772 - RNA, 32 nt, Human
ugaggucaggaguuugagaccaaccuggccaa

SEQ ID NO: 514773 - RNA, 32 nt, Human
ugaggucaggaguuugagccagccuggccaac

SEQ ID NO: 514774 - RNA, 32 nt, Human
ugaggucaggaguuuugagaccagccuggcca

SEQ ID NO: 514775 - RNA, 32 nt, Human
ugaggucaggauucaaaaccagccuggccaac

SEQ ID NO: 514776 - RNA, 32 nt, Human
ugaggucaggcguucaagaccagccuggccaa

SEQ ID NO: 514777 - RNA, 32 nt, Human
ugaggucaggggcucaagaccagccuggccaa

SEQ ID NO: 514778 - RNA, 32 nt, Human
ugaggucagggguucaagaccagccuggccaa

SEQ ID NO: 514779 - RNA, 32 nt, Human
ugaggucagggguucaagacuagccuggccaa

SEQ ID NO: 514780 - RNA, 32 nt, Human
ugaggucaguaguucaagaccacccuggccaa

SEQ ID NO: 514781 - RNA, 32 nt, Human
ugaggucaguuguucaagagcagccuggccaa

SEQ ID NO: 514782 - RNA, 32 nt, Human
ugaggucauagcagugcuugauugcguggaau

SEQ ID NO: 514783 - RNA, 32 nt, Human
ugaggucaugaccacagcacaaccuagccuau

SEQ ID NO: 514784 - RNA, 32 nt, Human
ugaggucaugaguucaagaccagccugaccaa

SEQ ID NO: 514785 - RNA, 32 nt, Human
ugaggucaugccauuguacuccagccugggca

SEQ ID NO: 514786 - RNA, 32 nt, Human
ugaggucaugcuguaauagggugggcccccaa

SEQ ID NO: 514787 - RNA, 32 nt, Human
ugaggucauugaaacaugagcccaggagcccu

SEQ ID NO: 514788 - RNA, 32 nt, Human
ugagguccacagcucgcagaagaaggagccgu

SEQ ID NO: 514789 - RNA, 32 nt, Human
ugagguccagcccagaucugagaggaacccug

SEQ ID NO: 514790 - RNA, 32 nt, Human
ugagguccagccuccugcccugccucagguga

SEQ ID NO: 514791 - RNA, 32 nt, Human
ugaggucccaccccucaucucuccuugccaaa

SEQ ID NO: 514792 - RNA, 32 nt, Human
ugaggucccuggggcuaccaccugguugaucu

SEQ ID NO: 514793 - RNA, 32 nt, Human
ugagguccgacugucucugccugcagcaugcc

SEQ ID NO: 514794 - RNA, 32 nt, Human
ugagguccgcgcagcugcuggggaagagccca

SEQ ID NO: 514795 - RNA, 32 nt, Human
ugagguccggauuucaagaccagcaugaccaa

SEQ ID NO: 514796 - RNA, 32 nt, Human
ugagguccucgagggcggucccguuugcugau

SEQ ID NO: 514797 - RNA, 32 nt, Human
ugagguccugggcagagagugaaaaggccucu

SEQ ID NO: 514798 - RNA, 32 nt, Human
ugagguccuucccaccugugaccucaccucaa

SEQ ID NO: 514799 - RNA, 21 nt, Human
ugagguccuuguuuuguuuug

SEQ ID NO: 514800 - RNA, 32 nt, Human
ugaggucgcgccauugcacuccagccugggca

SEQ ID NO: 514801 - RNA, 32 nt, Human
ugaggucggaguuggagaucagccuggcuaac

SEQ ID NO: 514802 - RNA, 32 nt, Human
ugaggucgggaguucaagacaaaccuggccaa

SEQ ID NO: 514803 - RNA, 32 nt, Human
ugaggucgggaguucaagaccagccugaccaa

SEQ ID NO: 514804 - RNA, 32 nt, Human
ugaggucgggaguucaagaccagccugaugaa

SEQ ID NO: 514805 - RNA, 32 nt, Human
ugaggucgggaguucaagaccagccuggccaa

SEQ ID NO: 514806 - RNA, 32 nt, Human
ugaggucgggaguucaagaccagccuggccau

SEQ ID NO: 514807 - RNA, 32 nt, Human
ugaggucgggaguucaagaccagcuuggccaa

SEQ ID NO: 514808 - RNA, 32 nt, Human
ugaggucgggaguucaagacuagccuggccaa

SEQ ID NO: 514809 - RNA, 32 nt, Human
ugaggucgggaguucgagaccaaccugaccaa

SEQ ID NO: 514810 - RNA, 24 nt, Human
ugcaaccuccaccucccaggcuca

SEQ ID NO: 514811 - RNA, 23 nt, Human
ugcaaccuccaccucccagguca

SEQ ID NO: 514812 - RNA, 24 nt, Human
ugcaaccuccaccucccaggucca

SEQ ID NO: 514813 - RNA, 24 nt, Human
ugcaaccuccaccucccagguuca

SEQ ID NO: 514814 - RNA, 23 nt, Human
ugcaaccuccaccucccaguuca

SEQ ID NO: 514815 - RNA, 24 nt, Human
ugcaaccuccaccucccgaguuca

SEQ ID NO: 514816 - RNA, 24 nt, Human
ugcaaccuccaccucccggauuca

SEQ ID NO: 514817 - RNA, 24 nt, Human
ugcaaccuccaccucccgggcuca

SEQ ID NO: 514818 - RNA, 23 nt, Human
ugcaaccuccaccucccggguca

SEQ ID NO: 514819 - RNA, 24 nt, Human
ugcaaccuccaccucccgggugca

SEQ ID NO: 514820 - RNA, 24 nt, Human
ugcaaccuccaccucccggguuca

SEQ ID NO: 514821 - RNA, 24 nt, Human
ugcaaccuccaccucccugguuca

SEQ ID NO: 514822 - RNA, 23 nt, Human
ugcaaccuccaccuccggguuca

SEQ ID NO: 514823 - RNA, 24 nt, Human
ugcaaccuccaccuccuagguuca

SEQ ID NO: 514824 - RNA, 24 nt, Human
ugcaaccuccaccuccugaguuca

SEQ ID NO: 514825 - RNA, 24 nt, Human
ugcaaccuccaccuccuggauuca

SEQ ID NO: 514826 - RNA, 24 nt, Human
ugcaaccuccaccuccuggcuuca

SEQ ID NO: 514827 - RNA, 24 nt, Human
ugcaaccuccaccuccugggcuca

SEQ ID NO: 514828 - RNA, 22 nt, Human
ugcaaccuccaccuccuggguu

SEQ ID NO: 514829 - RNA, 24 nt, Human
ugcaaccuccaccuccuggguuca

SEQ ID NO: 514830 - RNA, 24 nt, Human
ugcaaccuccaccuccuggguuua

SEQ ID NO: 514831 - RNA, 23 nt, Human
ugcaaccuccaccuccugguuca

SEQ ID NO: 514832 - RNA, 24 nt, Human
ugcaaccuccaccucgcagguuca

SEQ ID NO: 514833 - RNA, 24 nt, Human
ugcaaccuccaccucucagauuca

SEQ ID NO: 514834 - RNA, 24 nt, Human
ugcaaccuccaccucucagguuca

SEQ ID NO: 514835 - RNA, 24 nt, Human
ugcaaccuccaccucugggauuca

SEQ ID NO: 514836 - RNA, 24 nt, Human
ugcaaccuccaccuuccugguuca

SEQ ID NO: 514837 - RNA, 24 nt, Human
ugcaaccuccaccuucuggguuca

SEQ ID NO: 514838 - RNA, 25 nt, Human
ugcaaccuccaccuugcgugucuca

SEQ ID NO: 514839 - RNA, 32 nt, Human
ugcaaccuccacuacugcuugacccugccggg

SEQ ID NO: 514840 - RNA, 24 nt, Human
ugcaaccuccacuucccagguuca

SEQ ID NO: 514841 - RNA, 24 nt, Human
ugcaaccuccacuuccuagguuca

SEQ ID NO: 514842 - RNA, 24 nt, Human
ugcaaccuccacuuccuggguuca

SEQ ID NO: 514843 - RNA, 24 nt, Human
ugcaaccuccacuucucagguuca

SEQ ID NO: 514844 - RNA, 24 nt, Human
ugcaaccuccacuucuuggguuca

SEQ ID NO: 514845 - RNA, 24 nt, Human
ugcaaccuccacuuuccggguuca

SEQ ID NO: 514846 - RNA, 24 nt, Human
ugcaaccuccaucucccagguuca

SEQ ID NO: 514847 - RNA, 24 nt, Human
ugcaaccuccaucucccuggcuca

SEQ ID NO: 514848 - RNA, 24 nt, Human
ugcaaccuccaucuccggggcuca

SEQ ID NO: 514849 - RNA, 24 nt, Human
ugcaaccuccaucuccuggauuca

SEQ ID NO: 514850 - RNA, 24 nt, Human
ugcaaccucccccuccuggguuca

SEQ ID NO: 514851 - RNA, 24 nt, Human
ugcaaccuccgacuccuggguuca

SEQ ID NO: 514852 - RNA, 24 nt, Human
ugcaaccuccgcccccuggguuca

SEQ ID NO: 514853 - RNA, 24 nt, Human
ugcaaccuccgccucccaaguuca

SEQ ID NO: 514854 - RNA, 24 nt, Human
ugcaaccuccgccucccagauuca

SEQ ID NO: 514855 - RNA, 24 nt, Human
ugcaaccuccgccucccagguuca

SEQ ID NO: 514856 - RNA, 24 nt, Human
ugcaaccuccgccucccgaguuca

SEQ ID NO: 514857 - RNA, 24 nt, Human
ugcaaccuccgccucccgggccca

SEQ ID NO: 514858 - RNA, 24 nt, Human
ugcaaccuccgccucccggguuca

SEQ ID NO: 514859 - RNA, 24 nt, Human
ugcaaccuccgccuccugaguuca

SEQ ID NO: 514860 - RNA, 24 nt, Human
ugcaaccuccgccuccuggauuca

SEQ ID NO: 514861 - RNA, 24 nt, Human
ugcaaccuccgccuccugggauca

SEQ ID NO: 514862 - RNA, 22 nt, Human
ugcaaccuccgccuccugggcu

SEQ ID NO: 514863 - RNA, 24 nt, Human
ugcaaccuccgccuccugggcuca

SEQ ID NO: 514864 - RNA, 24 nt, Human
ugcaaccuccgccuccuggguuca

SEQ ID NO: 514865 - RNA, 32 nt, Human
ugcaaccuccgccuucccagauucaagcgauu

SEQ ID NO: 514866 - RNA, 32 nt, Human
ugcaaccuccgcuccaccacugaggcccaggc

SEQ ID NO: 514867 - RNA, 24 nt, Human
ugcaaccuccgcuuccuggauuca

SEQ ID NO: 514868 - RNA, 24 nt, Human
ugcaaccuccgcuuccuggguuca

SEQ ID NO: 514869 - RNA, 24 nt, Human
ugcaaccuccgucucccagguuca

SEQ ID NO: 514870 - RNA, 24 nt, Human
ugcaaccuccgucuccuggguuca

SEQ ID NO: 514871 - RNA, 24 nt, Human
ugcaaccuccgucuuccggguuca

SEQ ID NO: 514872 - RNA, 24 nt, Human
ugcaaccuccuccuccuggauuca

SEQ ID NO: 514873 - RNA, 24 nt, Human
ugcaaccuccuccuccuggguuca

SEQ ID NO: 514874 - RNA, 32 nt, Human
ugcaaccuccuuucugugccccuuuccucauu

SEQ ID NO: 514875 - RNA, 24 nt, Human
ugcaaccucgaccuccugggcuca

SEQ ID NO: 514876 - RNA, 32 nt, Human
ugcaaccucgaggacauccacaugagccugga

SEQ ID NO: 514877 - RNA, 32 nt, Human
ugcaaccucgcuggacucucagucucugagca

SEQ ID NO: 514878 - RNA, 24 nt, Human
ugcaaccucggccucccggguuca

SEQ ID NO: 514879 - RNA, 23 nt, Human
ugcaaccucgucucccggguuca

SEQ ID NO: 514880 - RNA, 24 nt, Human
ugcaaccucuaccucccagguuca

SEQ ID NO: 514881 - RNA, 24 nt, Human
ugcaaccucuaccuccuggauuca

SEQ ID NO: 514882 - RNA, 24 nt, Human
ugcaaccucuaccuccuggguuca

SEQ ID NO: 514883 - RNA, 32 nt, Human
ugcaaccucuacucccaggcucaagcaauccu

SEQ ID NO: 514884 - RNA, 24 nt, Human
ugcaaccucugacuccuggguuca

SEQ ID NO: 514885 - RNA, 24 nt, Human
ugcaaccucugccccccggguuca

SEQ ID NO: 514886 - RNA, 24 nt, Human
ugcaaccucugcccccuggguuca

SEQ ID NO: 514887 - RNA, 24 nt, Human
ugcaaccucugccucacaggcuca

SEQ ID NO: 514888 - RNA, 24 nt, Human
ugcaaccucugccucccaaguuca

SEQ ID NO: 514889 - RNA, 24 nt, Human
ugcaaccucugccucccaggauca

SEQ ID NO: 514890 - RNA, 23 nt, Human
ugcaaccucugccucccagguca

SEQ ID NO: 514891 - RNA, 24 nt, Human
ugcaaccucugccucccagguuca

SEQ ID NO: 514892 - RNA, 32 nt, Human
ugcaaccucugccucccagguucaagccuccu

SEQ ID NO: 514893 - RNA, 24 nt, Human
ugcaaccucugccucccgaguuca

SEQ ID NO: 514894 - RNA, 32 nt, Human
ugcaaccucugccucccgcauucaagugauuc

SEQ ID NO: 514895 - RNA, 24 nt, Human
ugcaaccucugccucccggauuca

SEQ ID NO: 514896 - RNA, 32 nt, Human
ugcaaccucugccucccggauucaagugauuc

SEQ ID NO: 514897 - RNA, 32 nt, Human
ugcaaccucugccucccgggcucaagugauuc

SEQ ID NO: 514898 - RNA, 24 nt, Human
ugcaaccucugccucccgggucca

SEQ ID NO: 514899 - RNA, 32 nt, Human
ugcaaccucugccucccggguccaagugauuc

SEQ ID NO: 514900 - RNA, 24 nt, Human
ugcaaccucugccucccggguuca

SEQ ID NO: 514901 - RNA, 24 nt, Human
ugcaaccucugccuccuaaguuca

SEQ ID NO: 514902 - RNA, 24 nt, Human
ugcaaccucugccuccugagcuca

SEQ ID NO: 514903 - RNA, 32 nt, Human
ugcaaccucugccuccugagcucaagugaucc

SEQ ID NO: 514904 - RNA, 24 nt, Human
ugcaaccucugccuccugaguuca

SEQ ID NO: 514905 - RNA, 24 nt, Human
ugcaaccucugccuccuggauuca

SEQ ID NO: 514906 - RNA, 24 nt, Human
ugcaaccucugccuccugggcuca

SEQ ID NO: 514907 - RNA, 24 nt, Human
ugcaaccucugccuccuggguuca

SEQ ID NO: 514908 - RNA, 32 nt, Human
ugcaaccucugccucucagguucaagccauuc

SEQ ID NO: 514909 - RNA, 32 nt, Human
ugcaaccucugccucucggguuccagcaauuc

SEQ ID NO: 514910 - RNA, 24 nt, Human
ugcaaccucugcuucccagguuca

SEQ ID NO: 514911 - RNA, 24 nt, Human
ugcaaccucugcuucccggguuca

SEQ ID NO: 514912 - RNA, 24 nt, Human
ugcaaccucugcuuccuagguuca

SEQ ID NO: 514913 - RNA, 24 nt, Human
ugcaaccucugcuuccugggcuca

SEQ ID NO: 514914 - RNA, 24 nt, Human
ugcaaccucugcuuccuggguuca

SEQ ID NO: 514915 - RNA, 24 nt, Human
ugcaaccucugucucccagguuca

SEQ ID NO: 514916 - RNA, 24 nt, Human
ugcaaccucugucucccggguuca

SEQ ID NO: 514917 - RNA, 24 nt, Human
ugcaaccucugucuccugggcuca

SEQ ID NO: 514918 - RNA, 24 nt, Human
ugcaaccucugucuccuggguuca

SEQ ID NO: 514919 - RNA, 24 nt, Human
ugcaaccucuguguccugggcuca

SEQ ID NO: 514920 - RNA, 25 nt, Human
ugcaaccucuugccucccagguuca

SEQ ID NO: 514921 - RNA, 32 nt, Human
ugcaaccugccugagccccguggccucucagc

SEQ ID NO: 514922 - RNA, 24 nt, Human
ugcaaccugcgccuccuggguuca

SEQ ID NO: 514923 - RNA, 32 nt, Human
ugcaaccugcuugucaaaaugauucaaaaaua

SEQ ID NO: 514924 - RNA, 24 nt, Human
ugcaaccuggaacuccugggcuca

SEQ ID NO: 514925 - RNA, 24 nt, Human
ugcaaccuggaccuccugggcuca

SEQ ID NO: 514926 - RNA, 32 nt, Human
ugcaaccugggugacagagcgagacuccaucu

SEQ ID NO: 514927 - RNA, 32 nt, Human
ugcaaccugguuuugaaaaagacugagcaugu

SEQ ID NO: 514928 - RNA, 32 nt, Human
ugcaaccuucacccuucaccucccaggucgaa

SEQ ID NO: 514929 - RNA, 32 nt, Human
ugcaaccuucccagccacuccugcugcacuaa

SEQ ID NO: 514930 - RNA, 24 nt, Human
ugcaaccuucgccucccagguuca

SEQ ID NO: 514931 - RNA, 24 nt, Human
ugcaaccuucgccucccgaguuca

SEQ ID NO: 514932 - RNA, 24 nt, Human
ugcaaccuucgccucccggguuca

SEQ ID NO: 514933 - RNA, 24 nt, Human
ugcaaccuucgccuccuggguuca

SEQ ID NO: 514934 - RNA, 24 nt, Human
ugcaaccuuggccuccuagguuca

SEQ ID NO: 514935 - RNA, 32 nt, Human
ugcaaccuuuagacuaaugacuguccgaaaca

SEQ ID NO: 514936 - RNA, 32 nt, Human
ugcaaccuuugcacuccacugugcaaugcugg

SEQ ID NO: 514937 - RNA, 24 nt, Human
ugcaaccuuugccuccuagguuca

SEQ ID NO: 514938 - RNA, 24 nt, Human
ugcaaccuuugucucccgggcuca

SEQ ID NO: 514939 - RNA, 32 nt, Human
ugcaacgaaauccuauauccaguuuccuguaa

SEQ ID NO: 514940 - RNA, 22 nt, Human
ugcaacggugugaacucagccu

SEQ ID NO: 514941 - RNA, 32 nt, Human
ugcaacguccucugcggggagcgugggaggag

SEQ ID NO: 514942 - RNA, 24 nt, Human
ugcaacgucugccucccggguuca

SEQ ID NO: 514943 - RNA, 24 nt, Human
ugcaacgucugccuccuggguuca

SEQ ID NO: 514944 - RNA, 24 nt, Human
ugcaacuaccaccuccuggguuca

SEQ ID NO: 514945 - RNA, 32 nt, Human
ugcaacucaaauaggcuauauuucacaauagc

SEQ ID NO: 514946 - RNA, 28 nt, Human
ugcaacucagggguggccucauccuccc

SEQ ID NO: 514947 - RNA, 23 nt, Human
ugcaacuccaccucccggguuca

SEQ ID NO: 514948 - RNA, 32 nt, Human
ugcaacuccugccuccaucccccuugcugggg

SEQ ID NO: 514949 - RNA, 32 nt, Human
ugcaacuccuggacccuuuuguccucagugug

SEQ ID NO: 514950 - RNA, 32 nt, Human
ugcaacucuaauucucuuccuuauuuuaauac

SEQ ID NO: 514951 - RNA, 32 nt, Human
ugcaacucugauuccugguucaauuuuaaguu

SEQ ID NO: 514952 - RNA, 32 nt, Human
ugcaacugcacuccaaccugggcaacagagua

SEQ ID NO: 514953 - RNA, 32 nt, Human
ugcaacugcaguagcaggaacaugucaggugc

SEQ ID NO: 514954 - RNA, 32 nt, Human
ugcaacugcccaagcuccaggucuccaggaca

SEQ ID NO: 514955 - RNA, 32 nt, Human
ugcaacugcuucauugcuauuaauaguuaaau

SEQ ID NO: 514956 - RNA, 32 nt, Human
ugcaacuggagcugcaacaauagcucuacaga

SEQ ID NO: 514957 - RNA, 32 nt, Human
ugcaacuggaucuucagccuccugugggagcu

SEQ ID NO: 514958 - RNA, 32 nt, Human
ugcaacugggaaacuuuuguccuuugaggcua

SEQ ID NO: 514959 - RNA, 32 nt, Human
ugcaacuguacuguaacaccaucucuuuugga

SEQ ID NO: 514960 - RNA, 32 nt, Human
ugcaacugugcacuccucccuugguggcaccc

SEQ ID NO: 514961 - RNA, 32 nt, Human
ugcaacuucaggauuaaccacugggaccugaa

SEQ ID NO: 514962 - RNA, 24 nt, Human
ugcaacuuccaccucccagguuca

SEQ ID NO: 514963 - RNA, 24 nt, Human
ugcaacuuccaccucccggguuca

SEQ ID NO: 514964 - RNA, 24 nt, Human
ugcaacuuccaccuccuggaguca

SEQ ID NO: 514965 - RNA, 24 nt, Human
ugcaacuuccaccuccuggguuca

SEQ ID NO: 514966 - RNA, 24 nt, Human
ugcaacuucugccucccggguuca

SEQ ID NO: 514967 - RNA, 24 nt, Human
ugcaacuucugccuccuagguuca

SEQ ID NO: 514968 - RNA, 24 nt, Human
ugcaacuucugccuccuggguuca

SEQ ID NO: 514969 - RNA, 32 nt, Human
ugcaacuuuaguguaauuccuaccucauuugg

SEQ ID NO: 514970 - RNA, 32 nt, Human
ugcaagaagcucaaggaagcucagggaaaaug

SEQ ID NO: 514971 - RNA, 32 nt, Human
ugcaagaaggagagaugaggcaaacguuuaga

SEQ ID NO: 514972 - RNA, 32 nt, Human
ugcaagaauagcacaaugaacaugcauauacc

SEQ ID NO: 514973 - RNA, 32 nt, Human
ugcaagaauauuuugugcuuucuuuagaaaca

SEQ ID NO: 514974 - RNA, 32 nt, Human
ugcaagacagaagucacugucuauccuguggc

SEQ ID NO: 514975 - RNA, 32 nt, Human
ugcaagacaucucacucuucugacauccugca

SEQ ID NO: 514976 - RNA, 32 nt, Human
ugcaagaccagccugcgcaaacagcaagaccc

SEQ ID NO: 514977 - RNA, 32 nt, Human
ugcaagaccgagacugagggaaagcaugucug

SEQ ID NO: 514978 - RNA, 32 nt, Human
ugcaagaccgagauugagggaaagcaugucug

SEQ ID NO: 514979 - RNA, 32 nt, Human
ugcaagacuggguggacuagaaagggagauua

SEQ ID NO: 514980 - RNA, 32 nt, Human
ugcaagacuguaccucugccccagugugucca

SEQ ID NO: 514981 - RNA, 32 nt, Human
ugcaagagaacaauguuucuucaguggcaaau

SEQ ID NO: 514982 - RNA, 32 nt, Human
ugcaagagaaggagauguaaugacagagaguu

SEQ ID NO: 514983 - RNA, 32 nt, Human
ugcaagagaggcagccagaggccagguaucug

SEQ ID NO: 514984 - RNA, 32 nt, Human
ugcaagagauggagacagguuagguggauagu

SEQ ID NO: 514985 - RNA, 20 nt, Human
ugcaagagccuggcugggaa

SEQ ID NO: 514986 - RNA, 32 nt, Human
ugcaagagcuaaaccaucuucaaaacauaaau

SEQ ID NO: 514987 - RNA, 32 nt, Human
ugcaagaggcaagucugcugaagaaccccuuc

SEQ ID NO: 514988 - RNA, 32 nt, Human
ugcaagauacaaaaucagucaacaugcaaaag

SEQ ID NO: 514989 - RNA, 32 nt, Human
ugcaagaugaagguguuaggacaacuuaaaga

SEQ ID NO: 514990 - RNA, 21 nt, Human
ugcaagcaaagggcggugggg

SEQ ID NO: 514991 - RNA, 32 nt, Human
ugcaagcaagaggcucccugacugccugaucc

SEQ ID NO: 514992 - RNA, 32 nt, Human
ugcaagcaauaugcccaucauccuuccugaga

SEQ ID NO: 514993 - RNA, 32 nt, Human
ugcaagcaaucucuagggcuggagggagagaa

SEQ ID NO: 514994 - RNA, 32 nt, Human
ugcaagcacaucugcauuuucaccccacccuu

SEQ ID NO: 514995 - RNA, 32 nt, Human
ugcaagcagcacaagcuuuauauuaccccagc

SEQ ID NO: 514996 - RNA, 32 nt, Human
ugcaagcagccgcggcgcgcccggcccucccu

SEQ ID NO: 514997 - RNA, 32 nt, Human
ugcaagcaucuaagagagguuaaucacacuau

SEQ ID NO: 514998 - RNA, 32 nt, Human
ugcaagccaaguuuggaaggcauucgggaaua

SEQ ID NO: 514999 - RNA, 32 nt, Human
ugcaagccaccaaauaccagggagugaaggau

SEQ ID NO: 515000 - RNA, 32 nt, Human
ugcaagccagagggaggaagggggagaauacg

SEQ ID NO: 515001 - RNA, 32 nt, Human
ugcaagccagcccagcugaggcgaaguggacu

SEQ ID NO: 515002 - RNA, 32 nt, Human
ugcaagccaguugucaaacacagccauuauaa

SEQ ID NO: 515003 - RNA, 32 nt, Human
ugcaagccccugcccauggcccaauggggagc

SEQ ID NO: 515004 - RNA, 32 nt, Human
ugcaagcccugccucagcuucucccaacacuc

SEQ ID NO: 515005 - RNA, 32 nt, Human
ugcaagccgcugaccuuggauggugaauggag

SEQ ID NO: 515006 - RNA, 32 nt, Human
ugcaagcggggagggggccgagcagccaagga

SEQ ID NO: 515007 - RNA, 23 nt, Human
ugcaagcuagaaucaaagaauua

SEQ ID NO: 515008 - RNA, 32 nt, Human
ugcaagcuccacagccucgggcugccagccug

SEQ ID NO: 515009 - RNA, 24 nt, Human
ugcaagcuccaccucccagguuca

SEQ ID NO: 515010 - RNA, 24 nt, Human
ugcaagcuccaccucccggguuca

SEQ ID NO: 515011 - RNA, 24 nt, Human
ugcaagcuccaccuccuggguuca

SEQ ID NO: 515012 - RNA, 32 nt, Human
ugcaagcuccccucagcccaucuugcucccuc

SEQ ID NO: 515013 - RNA, 32 nt, Human
ugcaagcucccgccucccuugggucgcacgcu

SEQ ID NO: 515014 - RNA, 32 nt, Human
ugcaagcuccugcacacaugcaugcacacaaa

SEQ ID NO: 515015 - RNA, 32 nt, Human
ugcaagcucugccucccgguugcugaaccugu

SEQ ID NO: 515016 - RNA, 32 nt, Human
ugcaagcucugccuuggguucagcccaucugg

SEQ ID NO: 515017 - RNA, 32 nt, Human
ugcaagcucuuguuucucaggcugccugcaga

SEQ ID NO: 515018 - RNA, 32 nt, Human
ugcaagcugacuccagccuuggggucagcagc

SEQ ID NO: 515019 - RNA, 32 nt, Human
ugcaagcugagccugcacuaccuuuugucacg

SEQ ID NO: 515020 - RNA, 32 nt, Human
ugcaagcugcucauuuuugacagcuuuuugca

SEQ ID NO: 515021 - RNA, 32 nt, Human
ugcaagcugggagcacaggcacugcaggagag

SEQ ID NO: 515022 - RNA, 32 nt, Human
ugcaagcugggagcuugcaugggugaaugccg

SEQ ID NO: 515023 - RNA, 32 nt, Human
ugcaagcuucaaggggcuuuuguuugaaagac

SEQ ID NO: 515024 - RNA, 32 nt, Human
ugcaagcuugauucaccuucagggggcugaua

SEQ ID NO: 515025 - RNA, 32 nt, Human
ugcaagcuugggaaacucuggagagaggcugc

SEQ ID NO: 515026 - RNA, 20 nt, Human
ugcaaggaaauggcuguggu

SEQ ID NO: 515027 - RNA, 23 nt, Human
ugcaaggaagaaagacaauggaa

SEQ ID NO: 515028 - RNA, 32 nt, Human
ugcaaggaagcgggcuccaggagcaagcucac

SEQ ID NO: 515029 - RNA, 23 nt, Human
ugcaaggaauauguacacuggaa

SEQ ID NO: 515030 - RNA, 32 nt, Human
ugcaaggagaggcagaggccagugcuugcgcg

SEQ ID NO: 515031 - RNA, 32 nt, Human
ugcaaggagcaaggacggggccaaggucgcuc

SEQ ID NO: 515032 - RNA, 24 nt, Human
ugcaaggagcccuccugccuggga

SEQ ID NO: 515033 - RNA, 32 nt, Human
ugcaaggagcugagggcccaccuggagcuccu

SEQ ID NO: 515034 - RNA, 32 nt, Human
ugcaaggaggcugggcacgggggcucacgccu

SEQ ID NO: 515035 - RNA, 32 nt, Human
ugcaaggcagccuaugcucugugggagggacu

SEQ ID NO: 515036 - RNA, 32 nt, Human
ugcaaggcagggcagagcaggggcuguuaagg

SEQ ID NO: 515037 - RNA, 32 nt, Human
ugcaaggcaguagcucugccaacuggggcucc

SEQ ID NO: 515038 - RNA, 32 nt, Human
ugcaaggcauuccuccugaaugcauccaugaa

SEQ ID NO: 515039 - RNA, 32 nt, Human
ugcaaggccacuugugcuagcagcaugcguca

SEQ ID NO: 515040 - RNA, 32 nt, Human
ugcaaggccagaaacugucacuaaugacgaug

SEQ ID NO: 515041 - RNA, 20 nt, Human
ugcaaggcccgcuucaucca

SEQ ID NO: 515042 - RNA, 20 nt, Human
ugcaaggccgcuguucacca

SEQ ID NO: 515043 - RNA, 32 nt, Human
ugcaaggccugggaagaguuucgaugucucua

SEQ ID NO: 515044 - RNA, 32 nt, Human
ugcaaggccuugcaaaugcauuuauaccugua

SEQ ID NO: 515045 - RNA, 32 nt, Human
ugcaaggcgccgcggcucagcgcgcaccggcg

SEQ ID NO: 515046 - RNA, 32 nt, Human
ugcaaggcgccgcggcucagcgcguaccggcg

SEQ ID NO: 515047 - RNA, 22 nt, Human
ugcaaggcuaaacugucauuca

SEQ ID NO: 515048 - RNA, 32 nt, Human
ugcaaggcuaauuaggacagaucaauguacac

SEQ ID NO: 515049 - RNA, 22 nt, Human
ugcaaggcugaagcugccacca

SEQ ID NO: 515050 - RNA, 32 nt, Human
ugcaaggcugcaaugagccaggaucccaugau

SEQ ID NO: 515051 - RNA, 20 nt, Human
ugcaaggcuggcagccccca

SEQ ID NO: 515052 - RNA, 19 nt, Human
ugcaaggcugggugcagug

SEQ ID NO: 515053 - RNA, 20 nt, Human
ugcaaggcugggugcagugg

SEQ ID NO: 515054 - RNA, 32 nt, Human
ugcaagggagaaggaaaaggccaguaaggccu

SEQ ID NO: 515055 - RNA, 32 nt, Human
ugcaaggggaggugcgcgaggcggcgcgggag

SEQ ID NO: 515056 - RNA, 32 nt, Human
ugcaaggggaugguuguuuucuuucugccuuu

SEQ ID NO: 515057 - RNA, 32 nt, Human
ugcaaggggccugcagaugaaagggaagcccu

SEQ ID NO: 515058 - RNA, 32 nt, Human
ugcaagggucaauuaugcauuccugugaguca

SEQ ID NO: 515059 - RNA, 19 nt, Human
ugcaaggucccaggacugg

SEQ ID NO: 515060 - RNA, 32 nt, Human
ugcaaggucuccuugaccccuugccacaacug

SEQ ID NO: 515061 - RNA, 32 nt, Human
ugcaaggugucugaggcccauucucaggcugg

SEQ ID NO: 515062 - RNA, 32 nt, Human
ugcaaguaacaucuuucuucucuggaaggugu

SEQ ID NO: 515063 - RNA, 32 nt, Human
ugcaaguaccacuccauccagccuugggcaag

SEQ ID NO: 515064 - RNA, 32 nt, Human
ugcaaguagcuggcuuguaaagggugaacaga

SEQ ID NO: 515065 - RNA, 32 nt, Human
ugcaaguauaccacccuuccauuuaguauguu

SEQ ID NO: 515066 - RNA, 32 nt, Human
ugcaaguaugggaagcagaaacuauucugucu

SEQ ID NO: 515067 - RNA, 32 nt, Human
ugcaagucaguagguguuaguaugguugcaaa

SEQ ID NO: 515068 - RNA, 32 nt, Human
ugcaaguccuagggacacugugcucaguuuau

SEQ ID NO: 515069 - RNA, 32 nt, Human
ugcaagucuaacuucaucuucccaacaaauuu

SEQ ID NO: 515070 - RNA, 20 nt, Human
ugcaagugcaaggccagugg

SEQ ID NO: 515071 - RNA, 32 nt, Human
ugcaagugcuaccucgcgcuuguacacugcug

SEQ ID NO: 515072 - RNA, 32 nt, Human
ugcaagugcucacagcucuuguucuccagaaa

SEQ ID NO: 515073 - RNA, 31 nt, Human
ugcaaguggaagagagaauaguugaaaaugu

SEQ ID NO: 515074 - RNA, 32 nt, Human
ugcaaguggccaaccuagagauucacuccuua

SEQ ID NO: 515075 - RNA, 32 nt, Human
ugcaagugguagggacaagcagugagguggug

SEQ ID NO: 515076 - RNA, 29 nt, Human
ugcaagugucuguguuucucugggaggga

SEQ ID NO: 515077 - RNA, 32 nt, Human
ugcaaguguguaugugcgugugugcgagugug

SEQ ID NO: 515078 - RNA, 32 nt, Human
ugcaaguguucuccaagggaaggaggaggaaa

SEQ ID NO: 515079 - RNA, 32 nt, Human
ugcaaguucauuuaagccucagggcugguccc

SEQ ID NO: 515080 - RNA, 32 nt, Human
ugcaaguucuaaaaauagacuaaggaugccuu

SEQ ID NO: 515081 - RNA, 32 nt, Human
ugcaaguuguccagguucuuggcauuuugaac

SEQ ID NO: 515082 - RNA, 32 nt, Human
ugcaaguugugaucccagccucccugaguagc

SEQ ID NO: 515083 - RNA, 32 nt, Human
ugcaaguuucccuccccucugugaccgagacu

SEQ ID NO: 515084 - RNA, 28 nt, Human
ugcaaguuuucaguacaaaucugugcua

SEQ ID NO: 515085 - RNA, 32 nt, Human
ugcaauaaauucaagacucuucuuauugguaa

SEQ ID NO: 515086 - RNA, 32 nt, Human
ugcaauaacaaccuuugauuacugaaucccua

SEQ ID NO: 515087 - RNA, 32 nt, Human
ugcaauaacuucugaccuuuuggugaaagcug

SEQ ID NO: 515088 - RNA, 32 nt, Human
ugcaauaaucucuuuucccuugucaugcaagc

SEQ ID NO: 515089 - RNA, 32 nt, Human
ugcaauaaugcccucaccccuccugagaggag

SEQ ID NO: 515090 - RNA, 32 nt, Human
ugcaauacaagaagcaagaccaaacagauauc

SEQ ID NO: 515091 - RNA, 32 nt, Human
ugcaauacagcuuucuugaaauguguauugaa

SEQ ID NO: 515092 - RNA, 32 nt, Human
ugcaauacaguggauacaauuugucauggcua

SEQ ID NO: 515093 - RNA, 32 nt, Human
ugcaauaccacuguuuauaagugacaaaauua

SEQ ID NO: 515094 - RNA, 32 nt, Human
ugcaauaccacuuucggaccugggcggaccac

SEQ ID NO: 515095 - RNA, 32 nt, Human
ugcaauaccugucaccaugcagccgcugauag

SEQ ID NO: 515096 - RNA, 28 nt, Human
ugcaauacugagugugccucauuaucuu

SEQ ID NO: 515097 - RNA, 22 nt, Human
ugcaauacuggauuuauuuuga

SEQ ID NO: 515098 - RNA, 32 nt, Human
ugcaauagauuuguacuaaccagaccuguucu

SEQ ID NO: 515099 - RNA, 32 nt, Human
ugcaauaguagcaaacuacuaacccagcaaau

SEQ ID NO: 515100 - RNA, 24 nt, Human
ugcaauaguguugggaguuggggc

SEQ ID NO: 515101 - RNA, 32 nt, Human
ugcaauaucacugagccugcgaucuauacacc

SEQ ID NO: 515102 - RNA, 32 nt, Human
ugcaauaucggaagacuuucaaaacucaucuc

SEQ ID NO: 515103 - RNA, 32 nt, Human
ugcaauaucuuuccuuccuuccuugcuaagag

SEQ ID NO: 515104 - RNA, 17 nt, Human
ugcaauaucuuuuccua

SEQ ID NO: 515105 - RNA, 32 nt, Human
ugcaauauuuccagaaaaucacugugggagaa

SEQ ID NO: 515106 - RNA, 32 nt, Human
ugcaaucaaaccugcaauguucugucaugaau

SEQ ID NO: 515107 - RNA, 32 nt, Human
ugcaaucaacccacggaagcuccgggaauggc

SEQ ID NO: 515108 - RNA, 32 nt, Human
ugcaaucacaccaugccauguuuuccuuccug

SEQ ID NO: 515109 - RNA, 32 nt, Human
ugcaaucagcugugggagagcggugacugaga

SEQ ID NO: 515110 - RNA, 32 nt, Human
ugcaauccagccugggcgauagagugagacua

SEQ ID NO: 515111 - RNA, 32 nt, Human
ugcaaucccaggagguagcaaccuaggcuuug

SEQ ID NO: 515112 - RNA, 32 nt, Human
ugcaaucgcagcucacuguagcuuugaccucu

SEQ ID NO: 515113 - RNA, 23 nt, Human
ugcaaucuaugggggaagacuga

SEQ ID NO: 515114 - RNA, 32 nt, Human
ugcaaucucacugcaaccuccgccuuccaguu

SEQ ID NO: 515115 - RNA, 32 nt, Human
ugcaaucucacugcaagcucugccucccaggu

SEQ ID NO: 515116 - RNA, 24 nt, Human
ugcaaucuccaccuccuggguuca

SEQ ID NO: 515117 - RNA, 32 nt, Human
ugcaaucuccaucucccggguucaagcgauuc

SEQ ID NO: 515118 - RNA, 32 nt, Human
ugcaaucucggcuuacugaaaccucugccucc

SEQ ID NO: 515119 - RNA, 32 nt, Human
ugcaaucucugccucccggauucaagugauuc

SEQ ID NO: 515120 - RNA, 32 nt, Human
ugcaaucucugccucucugaccccagggccau

SEQ ID NO: 515121 - RNA, 32 nt, Human
ugcaaucucuugucucacaugcuagcaacaua

SEQ ID NO: 515122 - RNA, 21 nt, Human
ugcaaucucuuuaccaccucc

SEQ ID NO: 515123 - RNA, 32 nt, Human
ugcaaucugaagaggauguaagucaguuugau

SEQ ID NO: 515124 - RNA, 32 nt, Human
ugcaaucugaggagaaaggagagccaguccga

SEQ ID NO: 515125 - RNA, 32 nt, Human
ugcaaucugcacuguccagccuagcaggccgc

SEQ ID NO: 515126 - RNA, 32 nt, Human
ugcaaucuguccguggcucuggcuccaaagcc

SEQ ID NO: 515127 - RNA, 32 nt, Human
ugcaaucuucuuucucuuaauuccagaacugg

SEQ ID NO: 515128 - RNA, 32 nt, Human
ugcaaucuuuaaaucagccuccaguuuuugaa

SEQ ID NO: 515129 - RNA, 32 nt, Human
ugcaaugaacugcucccacguccugcacugca

SEQ ID NO: 515130 - RNA, 32 nt, Human
ugcaaugaagaaaaggccuucuggagauuucu

SEQ ID NO: 515131 - RNA, 32 nt, Human
ugcaaugaagcccugcucccagccuuucagag

SEQ ID NO: 515132 - RNA, 32 nt, Human
ugcaaugaagcggagguugcagugagccgaga

SEQ ID NO: 515133 - RNA, 32 nt, Human
ugcaaugaauacagcaaggccuuuacccacug

SEQ ID NO: 515134 - RNA, 32 nt, Human
ugcaaugacucaugccuguaaucccagcacgu

SEQ ID NO: 515135 - RNA, 32 nt, Human
ugcaaugauacaacaaaaagauuuaauuacag

SEQ ID NO: 515136 - RNA, 32 nt, Human
ugcaaugcagagccuggguagaaagagacucu

SEQ ID NO: 515137 - RNA, 22 nt, Human
ugcaaugccucuccucucccca

SEQ ID NO: 515138 - RNA, 18 nt, Human
ugcaaugcucuuucccca

SEQ ID NO: 515139 - RNA, 29 nt, Human
ugcaauggaaaggacacuugagagaagac

SEQ ID NO: 515140 - RNA, 32 nt, Human
ugcaauggagcacgacuccucggcgugcagga

SEQ ID NO: 515141 - RNA, 32 nt, Human
ugcaauggagccaacacaguggaaagcagagc

SEQ ID NO: 515142 - RNA, 32 nt, Human
ugcaauggcacaaccuccaccuccuggguuca

SEQ ID NO: 515143 - RNA, 31 nt, Human
ugcaauggcacaaucucaacucaccgcaacc

SEQ ID NO: 515144 - RNA, 31 nt, Human
ugcaauggcacaaucucagcucacagcaacc

SEQ ID NO: 515145 - RNA, 31 nt, Human
ugcaauggcacaaucucagcucaccgcaacc

SEQ ID NO: 515146 - RNA, 31 nt, Human
ugcaauggcacaaucucagcucacugcaacc

SEQ ID NO: 515147 - RNA, 31 nt, Human
ugcaauggcacaaucucagcucagugcaacc

SEQ ID NO: 515148 - RNA, 31 nt, Human
ugcaauggcacaaucucggcucacugcaacc

SEQ ID NO: 515149 - RNA, 31 nt, Human
ugcaauggcacaaucucggcucacugcaagc

SEQ ID NO: 515150 - RNA, 31 nt, Human
ugcaauggcacaaucucggcucacugcagcc

SEQ ID NO: 515151 - RNA, 31 nt, Human
ugcaauggcacaaucucggcucacugcaucc

SEQ ID NO: 515152 - RNA, 31 nt, Human
ugcaauggcacaaucucgguucacugcaacc

SEQ ID NO: 515153 - RNA, 31 nt, Human
ugcaauggcaccaucucagcucacugcgacc

SEQ ID NO: 515154 - RNA, 31 nt, Human
ugcaauggcacgaucucagcucaccacaacc

SEQ ID NO: 515155 - RNA, 31 nt, Human
ugcaauggcacgaucucagcucacugcaacc

SEQ ID NO: 515156 - RNA, 31 nt, Human
ugcaauggcacgaucucagcucacugcaacu

SEQ ID NO: 515157 - RNA, 31 nt, Human
ugcaauggcaugaucucagcucacugcaacc

SEQ ID NO: 515158 - RNA, 31 nt, Human
ugcaauggcaugaucucagcucacugcaagc

SEQ ID NO: 515159 - RNA, 31 nt, Human
ugcaauggcaugaucucagcucacugcaauc

SEQ ID NO: 515160 - RNA, 32 nt, Human
ugcaauggcaugaucucgccuccuggguucaa

SEQ ID NO: 515161 - RNA, 31 nt, Human
ugcaauggcgcaaucucagcucacugcaagc

SEQ ID NO: 515162 - RNA, 31 nt, Human
ugcaauggcgcgaucucagcucaccgcaucc

SEQ ID NO: 515163 - RNA, 31 nt, Human
ugcaauggcgcgaucucagcucaccucaacc

SEQ ID NO: 515164 - RNA, 31 nt, Human
ugcaauggcgcgaucucagcucacugcaacc

SEQ ID NO: 515165 - RNA, 31 nt, Human
ugcaauggcgcgaucucagcucacugcagcc

SEQ ID NO: 515166 - RNA, 31 nt, Human
ugcaauggcgugaucucagcucaccgcaacc

SEQ ID NO: 515167 - RNA, 31 nt, Human
ugcaauggcgugaucucagcucacuggcaac

SEQ ID NO: 515168 - RNA, 32 nt, Human
ugcaauggcucacaccuauaaucccagcacuu

SEQ ID NO: 515169 - RNA, 32 nt, Human
ugcaauggcucacaccuguaauuccaacacuu

SEQ ID NO: 515170 - RNA, 32 nt, Human
ugcaauggcucacaccuguuaaucccagcacu

SEQ ID NO: 515171 - RNA, 32 nt, Human
ugcaauggcucacacuuguaaucccaacacuu

SEQ ID NO: 515172 - RNA, 32 nt, Human
ugcaauggcucacgccuguaauccuggcacuu

SEQ ID NO: 515173 - RNA, 32 nt, Human
ugcaauggcucacgucuguaaucccagcacuu

SEQ ID NO: 515174 - RNA, 32 nt, Human
ugcaauggcucagcuucucuuccaaccugucc

SEQ ID NO: 515175 - RNA, 32 nt, Human
ugcaauggcucagguucucuuccagccugucc

SEQ ID NO: 515176 - RNA, 32 nt, Human
ugcaauggcucaugccuauaaucccagcacuu

SEQ ID NO: 515177 - RNA, 32 nt, Human
ugcaauggcucaugccuguaaucccaaaacuu

SEQ ID NO: 515178 - RNA, 32 nt, Human
ugcaauggcucaugccuguaaucccaacacuu

SEQ ID NO: 515179 - RNA, 32 nt, Human
ugcaauggcucaugccuguaaucccagcacuu

SEQ ID NO: 515180 - RNA, 32 nt, Human
ugcaauggcucaugucucuaaucccagcacuu

SEQ ID NO: 515181 - RNA, 32 nt, Human
ugcaauggcucgcaccuguaaucccagcacuu

SEQ ID NO: 515182 - RNA, 21 nt, Human
ugcaauggcuggggcuggggc

SEQ ID NO: 515183 - RNA, 32 nt, Human
ugcaauggcuuacgccuguaaucccagcacuu

SEQ ID NO: 515184 - RNA, 32 nt, Human
ugcaaugggaucgccuggaaagccuggagucc

SEQ ID NO: 515185 - RNA, 32 nt, Human
ugcaaugggugaucucagcucacugcaggcuc

SEQ ID NO: 515186 - RNA, 31 nt, Human
ugcaaugguacaaucucggcucacugcaacc

SEQ ID NO: 515187 - RNA, 31 nt, Human
ugcaauggugcaaucucagcucacugcaacc

SEQ ID NO: 515188 - RNA, 31 nt, Human
ugcaauggugcaaucucagcucacugcaacg

SEQ ID NO: 515189 - RNA, 31 nt, Human
ugcaauggugcaaucucagcucacugcaacu

SEQ ID NO: 515190 - RNA, 31 nt, Human
ugcaauggugcaaucucaguucacugcaguc

SEQ ID NO: 515191 - RNA, 31 nt, Human
ugcaauggugcgaucucagcucacugcaagc

SEQ ID NO: 515192 - RNA, 31 nt, Human
ugcaauggugugaucucagcucacugcaccc

SEQ ID NO: 515193 - RNA, 32 nt, Human
ugcaauguccagcagucugauaaacugacgau

SEQ ID NO: 515194 - RNA, 32 nt, Human
ugcaauguccagcagucugauaaacugaugau

SEQ ID NO: 515195 - RNA, 32 nt, Human
ugcaauguccucaaguccuuucccguccuccu

SEQ ID NO: 515196 - RNA, 18 nt, Human
ugcaaugugcaauccccc

SEQ ID NO: 515197 - RNA, 32 nt, Human
ugcaaugugucuggaggguggggagaggaauu

SEQ ID NO: 515198 - RNA, 19 nt, Human
ugcaauguucaauaccuca

SEQ ID NO: 515199 - RNA, 32 nt, Human
ugcaauguucaaugccacgugcugcugacacc

SEQ ID NO: 515200 - RNA, 32 nt, Human
ugcaauguucucagagugacuuucgaaauaaa

SEQ ID NO: 515201 - RNA, 17 nt, Human
ugcaauguugcucucca

SEQ ID NO: 515202 - RNA, 32 nt, Human
ugcaauuaagggcagaucugggccaguggaau

SEQ ID NO: 515203 - RNA, 32 nt, Human
ugcaauuacugcuguucuagcccccaaagagu

SEQ ID NO: 515204 - RNA, 32 nt, Human
ugcaauuauguguaucauaacaugcucauuua

SEQ ID NO: 515205 - RNA, 32 nt, Human
ugcaauucaaaacuaccgugagacaucacuuc

SEQ ID NO: 515206 - RNA, 32 nt, Human
ugcaauucagaauaugcucagggaaugccagc

SEQ ID NO: 515207 - RNA, 32 nt, Human
ugcaauucagcuuuguuuaaagugauuugaaa

SEQ ID NO: 515208 - RNA, 32 nt, Human
ugcaauuccugcaggccaggggagagaccagg

SEQ ID NO: 515209 - RNA, 32 nt, Human
ugcaauuccuuugggggaugcagauuguaggg

SEQ ID NO: 515210 - RNA, 32 nt, Human
ugcaauugaggagauaugccagaugcuuaaac

SEQ ID NO: 515211 - RNA, 32 nt, Human
ugcaauugauuucuuuucuuccuggcuuuuua

SEQ ID NO: 515212 - RNA, 31 nt, Human
ugcaauugcacaaucucggcucauugcaagc

SEQ ID NO: 515213 - RNA, 32 nt, Human
ugcaauugcacuccagccugggcaacaagaac

SEQ ID NO: 515214 - RNA, 32 nt, Human
ugcaauuggugaaucaugcagcuuuggggaca

SEQ ID NO: 515215 - RNA, 31 nt, Human
ugcaauugugcaaucucagcucacugcaacc

SEQ ID NO: 515216 - RNA, 32 nt, Human
ugcaauuuuuguucagucauugcacaagugcu

SEQ ID NO: 515217 - RNA, 32 nt, Human
ugcacaaaacaugcuuccuuuucaaagaauag

SEQ ID NO: 515218 - RNA, 32 nt, Human
ugcacaaaauuucauuuuuaauaaaaguggua

SEQ ID NO: 515219 - RNA, 32 nt, Human
ugcacaaacaccccaccuuccacucggcucac

SEQ ID NO: 515220 - RNA, 32 nt, Human
ugcacaaacuaaaugcagugguagguggguuu

SEQ ID NO: 515221 - RNA, 32 nt, Human
ugcacaaaggguggggagucaggagaccaucc

SEQ ID NO: 515222 - RNA, 32 nt, Human
ugcacaacacagugagaccucguuucuacaaa

SEQ ID NO: 515223 - RNA, 20 nt, Human
ugcacaacagcucggccgcc

SEQ ID NO: 515224 - RNA, 20 nt, Human
ugcacaacagcuguguggcc

SEQ ID NO: 515225 - RNA, 21 nt, Human
ugcacaacggugaggccgacc

SEQ ID NO: 515226 - RNA, 32 nt, Human
ugcacaacucaagcucuguggccuguggaggu

SEQ ID NO: 515227 - RNA, 22 nt, Human
ugcacaacuugcacaaacggua

SEQ ID NO: 515228 - RNA, 22 nt, Human
ugcacaacuugcacaaauggua

SEQ ID NO: 515229 - RNA, 32 nt, Human
ugcacaagcccucauuuugccugcugccaucu

SEQ ID NO: 515230 - RNA, 32 nt, Human
ugcacaagcggcuccugaccuggucauuuugg

SEQ ID NO: 515231 - RNA, 32 nt, Human
ugcacaaggauagagagaaacuaugugacuca

SEQ ID NO: 515232 - RNA, 32 nt, Human
ugcacaagguauagacaaggcugagcaggguu

SEQ ID NO: 515233 - RNA, 32 nt, Human
ugcacaaggucaagacugaacuguggggcucu

SEQ ID NO: 515234 - RNA, 32 nt, Human
ugcacaaggucuuguauacaaauguucauagc

SEQ ID NO: 515235 - RNA, 25 nt, Human
ugcacaaguaacacauuuggccaca

SEQ ID NO: 515236 - RNA, 32 nt, Human
ugcacaaguuagcucuguagaaguaagaacuu

SEQ ID NO: 515237 - RNA, 32 nt, Human
ugcacaaguugacugagcuaaucuugagaaua

SEQ ID NO: 515238 - RNA, 32 nt, Human
ugcacaaugccacccauccacuccuugccaag

SEQ ID NO: 515239 - RNA, 32 nt, Human
ugcacaauugcacuccagccuggcgacagagc

SEQ ID NO: 515240 - RNA, 32 nt, Human
ugcacaauuuucuaaguuugggaagcagcaua

SEQ ID NO: 515241 - RNA, 32 nt, Human
ugcacacacaaaccuccaggcuaucacuucag

SEQ ID NO: 515242 - RNA, 32 nt, Human
ugcacacacacagaaccccaaaccacuaaaaa

SEQ ID NO: 515243 - RNA, 32 nt, Human
ugcacacacacaugcacacauauaugcacagg

SEQ ID NO: 515244 - RNA, 32 nt, Human
ugcacacacacccucucuggggcacagccugc

SEQ ID NO: 515245 - RNA, 32 nt, Human
ugcacacacacgaauacaaagagccauacgac

SEQ ID NO: 515246 - RNA, 32 nt, Human
ugcacacacauauacacacaugugccacaaac

SEQ ID NO: 515247 - RNA, 32 nt, Human
ugcacacacaugcacacacacauuucagggac

SEQ ID NO: 515248 - RNA, 32 nt, Human
ugcacacacaugcacacauacacgcacaugca

SEQ ID NO: 515249 - RNA, 32 nt, Human
ugcacacacaugcaugcacacacaugcacaca

SEQ ID NO: 515250 - RNA, 32 nt, Human
ugcacacacaugcccacauacucaugcacuca

SEQ ID NO: 515251 - RNA, 32 nt, Human
ugcacacaccugcacacaccugcacacucgcu

SEQ ID NO: 515252 - RNA, 23 nt, Human
ugcacacaccugucuuccccuca

SEQ ID NO: 515253 - RNA, 20 nt, Human
ugcacacacgccaacaggca

SEQ ID NO: 515254 - RNA, 32 nt, Human
ugcacacacgccaacaggcaucugccaugcug

SEQ ID NO: 515255 - RNA, 32 nt, Human
ugcacacacuccucacacugcucaggcuccaa

SEQ ID NO: 515256 - RNA, 32 nt, Human
ugcacacagcacaauucagaaauacccaggag

SEQ ID NO: 515257 - RNA, 22 nt, Human
ugcacacagcacccacaaccag

SEQ ID NO: 515258 - RNA, 22 nt, Human
ugcacacagcaggugcucagca

SEQ ID NO: 515259 - RNA, 23 nt, Human
ugcacacaggacaccagucuuca

SEQ ID NO: 515260 - RNA, 32 nt, Human
ugcacacaggaucacucacauauguacaugua

SEQ ID NO: 515261 - RNA, 20 nt, Human
ugcacacaggcaaacaggca

SEQ ID NO: 515262 - RNA, 32 nt, Human
ugcacacaggguagaucucugaacacagguga

SEQ ID NO: 515263 - RNA, 32 nt, Human
ugcacacauacacaggcauacaugcaugcaca

SEQ ID NO: 515264 - RNA, 32 nt, Human
ugcacacaucacccgugacauggucuugccaa

SEQ ID NO: 515265 - RNA, 32 nt, Human
ugcacacaugggcacacacaaucuccaccauc

SEQ ID NO: 515266 - RNA, 32 nt, Human
ugcacaccaacuccaggaaacucauucugggc

SEQ ID NO: 515267 - RNA, 32 nt, Human
ugcacaccagccagggcguucgggaggagcag

SEQ ID NO: 515268 - RNA, 32 nt, Human
ugcacaccagccugggugacagugugagaccc

SEQ ID NO: 515269 - RNA, 32 nt, Human
ugcacacccaccagaagagcacaaagcaaggc

SEQ ID NO: 515270 - RNA, 32 nt, Human
ugcacacccaugcacacucaugcacacagaua

SEQ ID NO: 515271 - RNA, 32 nt, Human
ugcacaccccugcacacaccugcacaccgucc

SEQ ID NO: 515272 - RNA, 32 nt, Human
ugcacacccguggaauuccucccuuccccagu

SEQ ID NO: 515273 - RNA, 32 nt, Human
ugcacacccucucacguccuccagaggcugaa

SEQ ID NO: 515274 - RNA, 32 nt, Human
ugcacaccggucuccagguuguuuucacccuc

SEQ ID NO: 515275 - RNA, 32 nt, Human
ugcacaccugagccugucuguggugaccauuc

SEQ ID NO: 515276 - RNA, 32 nt, Human
ugcacaccugcucucuccucucucccaggcag

SEQ ID NO: 515277 - RNA, 32 nt, Human
ugcacaccuguaaucccagcuacucuggaggc

SEQ ID NO: 515278 - RNA, 32 nt, Human
ugcacaccuguaaucccagcuacuugggagac

SEQ ID NO: 515279 - RNA, 32 nt, Human
ugcacaccuguaaucccagcuacuugggaggc

SEQ ID NO: 515280 - RNA, 32 nt, Human
ugcacaccuguaaucccagcuauucggcugag

SEQ ID NO: 515281 - RNA, 32 nt, Human
ugcacaccuguuuucucauuugcccuuugagc

SEQ ID NO: 515282 - RNA, 32 nt, Human
ugcacaccuugccaaaugcauaugucuguuga

SEQ ID NO: 515283 - RNA, 32 nt, Human
ugcacacgcaugcacacacacauucaguauuu

SEQ ID NO: 515284 - RNA, 32 nt, Human
ugcacacgcaugcacacacgcacacaugcaca

SEQ ID NO: 515285 - RNA, 32 nt, Human
ugcacacgcaugcacacaugugauguguacau

SEQ ID NO: 515286 - RNA, 32 nt, Human
ugcacacgccuguaaucccagcuacucaggag

SEQ ID NO: 515287 - RNA, 32 nt, Human
ugcacacgccuguaaucccagcugcuugggag

SEQ ID NO: 515288 - RNA, 32 nt, Human
ugcacacgugacucauaacacacacauagacc

SEQ ID NO: 515289 - RNA, 32 nt, Human
ugcacacucaucagaagaaucugaagaaacaa

SEQ ID NO: 515290 - RNA, 32 nt, Human
ugcacacuccucgcacuuccagccuuggagcc

SEQ ID NO: 515291 - RNA, 32 nt, Human
ugcacacucgggaccucagcuccaaggcguga

SEQ ID NO: 515292 - RNA, 21 nt, Human
ugcacacucgugaacaaacug

SEQ ID NO: 515293 - RNA, 32 nt, Human
ugcacacugcacuccagccugggugacuagca

SEQ ID NO: 515294 - RNA, 32 nt, Human
ugcacacugcacuccauccugggcgacagucu

SEQ ID NO: 515295 - RNA, 32 nt, Human
ugcacacuuguaaucacagcacuuugggaggc

SEQ ID NO: 515296 - RNA, 19 nt, Human
ugcacagaagucagccgca

SEQ ID NO: 515297 - RNA, 32 nt, Human
ugcacagaagugcacacaccucauugccagca

SEQ ID NO: 515298 - RNA, 32 nt, Human
ugcacagacacacggguggacaggaggcagag

SEQ ID NO: 515299 - RNA, 32 nt, Human
ugcacagacaccuugugagugauugguauugg

SEQ ID NO: 515300 - RNA, 32 nt, Human
ugcacagacgugaucuaugauccucacgagcc

SEQ ID NO: 515301 - RNA, 32 nt, Human
ugcacagacugucagcaugaugucagaggcca

SEQ ID NO: 515302 - RNA, 32 nt, Human
ugcacagagacacacccacacuagcccagugg

SEQ ID NO: 515303 - RNA, 32 nt, Human
ugcacagagcacacugcacacaugcacacaca

SEQ ID NO: 515304 - RNA, 32 nt, Human
ugcacagagccggaugugccacugugacuacc

SEQ ID NO: 515305 - RNA, 32 nt, Human
ugcacagagcggguagggcuguagggaaagcg

SEQ ID NO: 515306 - RNA, 32 nt, Human
ugcacagagcucuccagcuccaagaccuguug

SEQ ID NO: 515307 - RNA, 32 nt, Human
ugcacagaggagagaagcucugugaauguaag

SEQ ID NO: 515308 - RNA, 32 nt, Human
ugcacagaggggcauugaaaggagccaggauu

SEQ ID NO: 515309 - RNA, 32 nt, Human
ugcacagaguagauuuacaaugcuccaauucc

SEQ ID NO: 515310 - RNA, 32 nt, Human
ugcacagaguaggccugcuucuucccaugaaa

SEQ ID NO: 515311 - RNA, 32 nt, Human
ugcacagauauuuccauuucuuccucacuaug

SEQ ID NO: 515312 - RNA, 20 nt, Human
ugcacagauccugggccaag

SEQ ID NO: 515313 - RNA, 32 nt, Human
ugcacagaucgauaccuuuccccaaauagccu

SEQ ID NO: 515314 - RNA, 32 nt, Human
ugcacagaugaagaaugagccuaguagaauau

SEQ ID NO: 515315 - RNA, 32 nt, Human
ugcacagaugccuauacauacauauacaaaua

SEQ ID NO: 515316 - RNA, 32 nt, Human
ugcacagcaaaagaaacuaucaacugaguaaa

SEQ ID NO: 515317 - RNA, 19 nt, Human
ugcacagcaacccagccuu

SEQ ID NO: 515318 - RNA, 32 nt, Human
ugcacagcacacugacugagcaagaacaaaga

SEQ ID NO: 515319 - RNA, 28 nt, Human
ugcacagcacuguuccucuuguguucuu

SEQ ID NO: 515320 - RNA, 32 nt, Human
ugcacagcagaggcgaugagcgcuuacucuuu

SEQ ID NO: 515321 - RNA, 32 nt, Human
ugcacagcauccuccucuggucccagggaggc

SEQ ID NO: 515322 - RNA, 23 nt, Human
ugcacagccaugccugccucuga

SEQ ID NO: 515323 - RNA, 22 nt, Human
ugcacagccggauggccugugg

SEQ ID NO: 515324 - RNA, 20 nt, Human
ugcacagccuuaugauccca

SEQ ID NO: 515325 - RNA, 32 nt, Human
ugcacagcucuuccgccucuucucgaagcaga

SEQ ID NO: 515326 - RNA, 32 nt, Human
ugcacagcugcacuccagccugugcugagacc

SEQ ID NO: 515327 - RNA, 32 nt, Human
ugcacagcugccaggagugcucugccuggagu

SEQ ID NO: 515328 - RNA, 32 nt, Human
ugcacagcuggaugguggaagcaguucacuua

SEQ ID NO: 515329 - RNA, 22 nt, Human
ugcacagcuuccuucccuccuu

SEQ ID NO: 515330 - RNA, 32 nt, Human
ugcacagcuuggagaugggcuggugagaagaa

SEQ ID NO: 515331 - RNA, 24 nt, Human
ugcacagcuuucugagaaguucuu

SEQ ID NO: 515332 - RNA, 32 nt, Human
ugcacaggagcagcauuauccccaaagauauu

SEQ ID NO: 515333 - RNA, 32 nt, Human
ugcacaggagccaaaugaccgagcccuggaga

SEQ ID NO: 515334 - RNA, 32 nt, Human
ugcacaggagcuugguagacugcgggggaaag

SEQ ID NO: 515335 - RNA, 32 nt, Human
ugcacaggcacacacauguaugcacacacaca

SEQ ID NO: 515336 - RNA, 32 nt, Human
ugcacaggcacacgaugcucugggacauaacu

SEQ ID NO: 515337 - RNA, 32 nt, Human
ugcacaggccaucgagccaguaaaaugaacuu

SEQ ID NO: 515338 - RNA, 32 nt, Human
ugcacaggcccagccucugccucacagcagac

SEQ ID NO: 515339 - RNA, 32 nt, Human
ugcacaggcccagccucugccucacagcggac

SEQ ID NO: 515340 - RNA, 32 nt, Human
ugcacaggccccaggugcaggccaccaccucc

SEQ ID NO: 515341 - RNA, 32 nt, Human
ugcacaggcguccuguccacacccagcucagc

SEQ ID NO: 515342 - RNA, 32 nt, Human
ugcacagggaagggaaagacugggcuuuggac

SEQ ID NO: 515343 - RNA, 32 nt, Human
ugcacagggacccccaagcauccccagcaccc

SEQ ID NO: 515344 - RNA, 32 nt, Human
ugcacagggaggagaggugagaucagauucca

SEQ ID NO: 515345 - RNA, 32 nt, Human
ugcacaggggagaagagggguggcgcagaagg

SEQ ID NO: 515346 - RNA, 32 nt, Human
ugcacaggggcagcagauacacacaacaauga

SEQ ID NO: 515347 - RNA, 32 nt, Human
ugcacagggguccucugagaccaccuggcgug

SEQ ID NO: 515348 - RNA, 24 nt, Human
ugcacagggugccacggggccaag

SEQ ID NO: 515349 - RNA, 19 nt, Human
ugcacaggugcuggacaag

SEQ ID NO: 515350 - RNA, 32 nt, Human
ugcacaguacccagagggugaaggacagaagg

SEQ ID NO: 515351 - RNA, 32 nt, Human
ugcacagucccacuaaccuugugaaagaagaa

SEQ ID NO: 515352 - RNA, 32 nt, Human
ugcacagucuagcugcuucuagucagcaaucu

SEQ ID NO: 515353 - RNA, 32 nt, Human
ugcacagugacugggccuugacucccagccuc

SEQ ID NO: 515354 - RNA, 32 nt, Human
ugcacaguggcucugaccuggcagcccaccuc

SEQ ID NO: 515355 - RNA, 32 nt, Human
ugcacaguggucauucuuuggccucuccuugg

SEQ ID NO: 515356 - RNA, 32 nt, Human
ugcacaguucucucuucuccuuguccuaguca

SEQ ID NO: 515357 - RNA, 32 nt, Human
ugcacaguuuggaagccuccugucuuuauuua

SEQ ID NO: 515358 - RNA, 32 nt, Human
ugcacauacccagaaaccuauuuucucagacc

SEQ ID NO: 515359 - RNA, 20 nt, Human
ugcacauaccuucauggugu

SEQ ID NO: 515360 - RNA, 24 nt, Human
ugcacauaccuucuccaucguguc

SEQ ID NO: 515361 - RNA, 32 nt, Human
ugcacauaggcggccagcuccccagcccggcu

SEQ ID NO: 515362 - RNA, 32 nt, Human
ugcacauauagacacacauaugccaauaucuu

SEQ ID NO: 515363 - RNA, 32 nt, Human
ugcacauauauguguguauauguauguauaua

SEQ ID NO: 515364 - RNA, 32 nt, Human
ugcacaucaagcagaaaaucaaggacuaucua

SEQ ID NO: 515365 - RNA, 32 nt, Human
ugcacaucauggcagucauccugggcaucuuu

SEQ ID NO: 515366 - RNA, 32 nt, Human
ugcacauccucccaaggagacacccagacccu

SEQ ID NO: 515367 - RNA, 32 nt, Human
ugcacaucgcgcccucgggcccugccaugucc

SEQ ID NO: 515368 - RNA, 32 nt, Human
ugcacaucucauggcagcuaagccacauggcu

SEQ ID NO: 515369 - RNA, 32 nt, Human
ugcacaucuguaaucccaguuacuugggaggc

SEQ ID NO: 515370 - RNA, 32 nt, Human
ugcacaucuguuguuucccuugcagggcagug

SEQ ID NO: 515371 - RNA, 32 nt, Human
ugcacaucuuucuuggacuugggauauacagu

SEQ ID NO: 515372 - RNA, 21 nt, Human
ugcacaugacagggcugagcc

SEQ ID NO: 515373 - RNA, 32 nt, Human
ugcacaugaccuuccauccuuaccuguauucc

SEQ ID NO: 515374 - RNA, 32 nt, Human
ugcacaugacucucccccauuucccaggucuc

SEQ ID NO: 515375 - RNA, 32 nt, Human
ugcacaugcccuuuccaaggcucaccaggcug

SEQ ID NO: 515376 - RNA, 32 nt, Human
ugcacaugccuccagccccaccuuccaacccc

SEQ ID NO: 515377 - RNA, 18 nt, Human
ugcacaugcggcugcucc

SEQ ID NO: 515378 - RNA, 32 nt, Human
ugcacauggaugcacacacgugcacaccuaca

SEQ ID NO: 515379 - RNA, 32 nt, Human
ugcacauggcccuccuccccacccucaugacu

SEQ ID NO: 515380 - RNA, 32 nt, Human
ugcacaugggugagcuccgugaguccagacau

SEQ ID NO: 515381 - RNA, 32 nt, Human
ugcacauggugacuuccuuccagagagcacag

SEQ ID NO: 515382 - RNA, 32 nt, Human
ugcacaugguugugcugucgaggaccuggugc

SEQ ID NO: 515383 - RNA, 32 nt, Human
ugcacaugucccaucacaccugagaugucaga

SEQ ID NO: 515384 - RNA, 32 nt, Human
ugcacaugucucucccugcucuuccaggguga

SEQ ID NO: 515385 - RNA, 32 nt, Human
ugcacaugugagccaccgcgccuguccuugau

SEQ ID NO: 515386 - RNA, 32 nt, Human
ugcacauguguauggaugcauaugugagcugu

SEQ ID NO: 515387 - RNA, 32 nt, Human
ugcacauguguguacacaacuguauaugcagc

SEQ ID NO: 515388 - RNA, 32 nt, Human
ugcacauuacguuggugcaaaaguaauugcag

SEQ ID NO: 515389 - RNA, 22 nt, Human
ugcacauuccacccuugccaga

SEQ ID NO: 515390 - RNA, 32 nt, Human
ugcacauuccacccuugccagagccacugcag

SEQ ID NO: 515391 - RNA, 32 nt, Human
ugcacauucccuggccguuucuccccagagcu

SEQ ID NO: 515392 - RNA, 21 nt, Human
ugcacauucuccuaguccuca

SEQ ID NO: 515393 - RNA, 32 nt, Human
ugcacauugaauaccaacaagguugcaacguu

SEQ ID NO: 515394 - RNA, 32 nt, Human
ugcacauugagaacaaaggagggaccugaggu

SEQ ID NO: 515395 - RNA, 32 nt, Human
ugcacauuuaaaacacagauaugaugguccuu

SEQ ID NO: 515396 - RNA, 18 nt, Human
ugcacauuuuucugcucu

SEQ ID NO: 515397 - RNA, 32 nt, Human
ugcaccaaaucaggaagcuccuagucugugcc

SEQ ID NO: 515398 - RNA, 32 nt, Human
ugcaccacagcacucaagccugggugacagag

SEQ ID NO: 515399 - RNA, 32 nt, Human
ugcaccacagcacuccaaccugggugacagag

SEQ ID NO: 515400 - RNA, 32 nt, Human
ugcaccacagcacugcagccuagacaacagag

SEQ ID NO: 515401 - RNA, 32 nt, Human
ugcaccacagcggacacaacaaaaagauggua

SEQ ID NO: 515402 - RNA, 24 nt, Human
ugcaccaccacaccuggcucgagg

SEQ ID NO: 515403 - RNA, 32 nt, Human
ugcaccaccacacuccagccugcgcgacagau

SEQ ID NO: 515404 - RNA, 32 nt, Human
ugcaccaccacacuccagccugggugacaaga

SEQ ID NO: 515405 - RNA, 32 nt, Human
ugcaccaccacacuccagccugggugacagag

SEQ ID NO: 515406 - RNA, 32 nt, Human
ugcaccaccauggcuggcuaauuuuuguauuu

SEQ ID NO: 515407 - RNA, 32 nt, Human
ugcaccacccaccuccagagugcagugcuggg

SEQ ID NO: 515408 - RNA, 32 nt, Human
ugcaccaccgcacuccagccugggugacagag

SEQ ID NO: 515409 - RNA, 32 nt, Human
ugcaccacggcacgcuagccugggugacacag

SEQ ID NO: 515410 - RNA, 32 nt, Human
ugcaccacggcacucaagccugggcaauguag

SEQ ID NO: 515411 - RNA, 32 nt, Human
ugcaccacggcacuccagccugggugacagag

SEQ ID NO: 515412 - RNA, 32 nt, Human
ugcaccacuacacuccagccuggaugacagag

SEQ ID NO: 515413 - RNA, 32 nt, Human
ugcaccacuacacuccagccugggcaacagag

SEQ ID NO: 515414 - RNA, 32 nt, Human
ugcaccacuacacuccagccugggugacaaag

SEQ ID NO: 515415 - RNA, 32 nt, Human
ugcaccacuacacuguagccugggugacaaag

SEQ ID NO: 515416 - RNA, 32 nt, Human
ugcaccacuacucccaagccuagggaugaaga

SEQ ID NO: 515417 - RNA, 32 nt, Human
ugcaccacugaacuccagccugggccacauag

SEQ ID NO: 515418 - RNA, 32 nt, Human
ugcaccacugaguccagccuauauucuuguuu

SEQ ID NO: 515419 - RNA, 32 nt, Human
ugcaccacugcacagucugggcgacagagcaa

SEQ ID NO: 515420 - RNA, 32 nt, Human
ugcaccacugcaccccagccugggcgacggag

SEQ ID NO: 515421 - RNA, 32 nt, Human
ugcaccacugcacgccagccugggugaaagag

SEQ ID NO: 515422 - RNA, 32 nt, Human
ugcaccacugcacuacagcuugggugacagcg

SEQ ID NO: 515423 - RNA, 32 nt, Human
ugcaccacugcacucaagccugggcaacagag

SEQ ID NO: 515424 - RNA, 32 nt, Human
ugcaccacugcacuccaaccugggcaacagag

SEQ ID NO: 515425 - RNA, 32 nt, Human
ugcaccacugcacuccaaccugggugacaaga

SEQ ID NO: 515426 - RNA, 32 nt, Human
ugcaccacugcacuccaaccugggugacagag

SEQ ID NO: 515427 - RNA, 32 nt, Human
ugcaccacugcacuccacagagugagacucca

SEQ ID NO: 515428 - RNA, 32 nt, Human
ugcaccacugcacuccacccugggcagaggug

SEQ ID NO: 515429 - RNA, 32 nt, Human
ugcaccacugcacuccagcaugggcaacacag

SEQ ID NO: 515430 - RNA, 32 nt, Human
ugcaccacugcacuccagcccaggcaacagag

SEQ ID NO: 515431 - RNA, 32 nt, Human
ugcaccacugcacuccagccggggugacagag

SEQ ID NO: 515432 - RNA, 32 nt, Human
ugcaccacugcacuccagccuaggcgacagag

SEQ ID NO: 515433 - RNA, 32 nt, Human
ugcaccacugcacuccagccugagugacagag

SEQ ID NO: 515434 - RNA, 32 nt, Human
ugcaccacugcacuccagccugagugaggaag

SEQ ID NO: 515435 - RNA, 32 nt, Human
ugcaccacugcacuccagccuggaaaacggag

SEQ ID NO: 515436 - RNA, 32 nt, Human
ugcaccacugcacuccagccuggcgacaaagu

SEQ ID NO: 515437 - RNA, 32 nt, Human
ugcaccacugcacuccagccugggaaacagag

SEQ ID NO: 515438 - RNA, 32 nt, Human
ugcaccacugcacuccagccugggagacagag

SEQ ID NO: 515439 - RNA, 32 nt, Human
ugcaccacugcacuccagccugggcaacaaag

SEQ ID NO: 515440 - RNA, 32 nt, Human
ugcaccacugcacuccagccugggcaacaaga

SEQ ID NO: 515441 - RNA, 32 nt, Human
ugcaccacugcacuccagccugggcaacagag

SEQ ID NO: 515442 - RNA, 32 nt, Human
ugcaccacugcacuccagccugggcaauagag

SEQ ID NO: 515443 - RNA, 32 nt, Human
ugcaccacugcacuccagccugggcgacagag

SEQ ID NO: 515444 - RNA, 32 nt, Human
ugcaccacugcacuccagccugggcgacugug

SEQ ID NO: 515445 - RNA, 32 nt, Human
ugcaccacugcacuccagccugggcggcagag

SEQ ID NO: 515446 - RNA, 32 nt, Human
ugcaccacugcacuccagccugggcuacagau

SEQ ID NO: 515447 - RNA, 32 nt, Human
ugcaccacugcacuccagccuggggacagagc

SEQ ID NO: 515448 - RNA, 32 nt, Human
ugcaccacugcacuccagccuggguaacaaga

SEQ ID NO: 515449 - RNA, 32 nt, Human
ugcaccacugcacuccagccugggugacagag

SEQ ID NO: 515450 - RNA, 32 nt, Human
ugcaccacugcacuccagccugggugauagag

SEQ ID NO: 515451 - RNA, 32 nt, Human
ugcaccacugcacuccagccuggguggcagag

SEQ ID NO: 515452 - RNA, 32 nt, Human
ugcaccacugcacuccagccugggugucagag

SEQ ID NO: 515453 - RNA, 32 nt, Human
ugcaccacugcacuccagccuggugacagagc

SEQ ID NO: 515454 - RNA, 32 nt, Human
ugcaccacugcacuccagccuggugacagggc

SEQ ID NO: 515455 - RNA, 31 nt, Human
ugcaccacugcacuccagcgagacucugucu

SEQ ID NO: 515456 - RNA, 32 nt, Human
ugcaccacugcacuccaggcuggguaacagaa

SEQ ID NO: 515457 - RNA, 32 nt, Human
ugcaccacugcacuccagucugggcaacagag

SEQ ID NO: 515458 - RNA, 32 nt, Human
ugcaccacugcacuccagucugggugagagug

SEQ ID NO: 515459 - RNA, 32 nt, Human
ugcaccacugcacuccagucugguugagagag

SEQ ID NO: 515460 - RNA, 32 nt, Human
ugcaccacugcacuccauccugggcaacagag

SEQ ID NO: 515461 - RNA, 32 nt, Human
ugcaccacugcacucccuuccaggugaaagaa

SEQ ID NO: 515462 - RNA, 32 nt, Human
ugcaccacugcacucuaacuugggcaacaaag

SEQ ID NO: 515463 - RNA, 32 nt, Human
ugcaccacugcacucuacucugggugacagaa

SEQ ID NO: 515464 - RNA, 32 nt, Human
ugcaccacugcacucuagccugcgugacacaa

SEQ ID NO: 515465 - RNA, 32 nt, Human
ugcaccacugcacucuagccuggggaacagag

SEQ ID NO: 515466 - RNA, 32 nt, Human
ugcaccacugcacucuagccuggguaacaagc

SEQ ID NO: 515467 - RNA, 32 nt, Human
ugcaccacugcacugcagccugggaaacagag

SEQ ID NO: 515468 - RNA, 32 nt, Human
ugcaccacugcacuucagccugggugacagag

SEQ ID NO: 515469 - RNA, 32 nt, Human
ugcaccacugcacuucagccuggugacagagc

SEQ ID NO: 515470 - RNA, 32 nt, Human
ugcaccacugcacuucagcuugggcaacagag

SEQ ID NO: 515471 - RNA, 32 nt, Human
ugcaccacugcacuuuagucugggugacagag

SEQ ID NO: 515472 - RNA, 32 nt, Human
ugcaccacugcaguccagccuaggcaacagug

SEQ ID NO: 515473 - RNA, 32 nt, Human
ugcaccacugcaguucagccuggaugaugaga

SEQ ID NO: 515474 - RNA, 32 nt, Human
ugcaccacugcauuccaaccugggcggcagag

SEQ ID NO: 515475 - RNA, 32 nt, Human
ugcaccacugcauuccagccuggaugacagag

SEQ ID NO: 515476 - RNA, 32 nt, Human
ugcaccacugcauuccagccuggcgacagagu

SEQ ID NO: 515477 - RNA, 32 nt, Human
ugcaccacugcucuccaagcugggcaauggag

SEQ ID NO: 515478 - RNA, 32 nt, Human
ugcaccacugcucuccagccuggggaacagag

SEQ ID NO: 515479 - RNA, 32 nt, Human
ugcaccacuggacgccagccuaggcaacacua

SEQ ID NO: 515480 - RNA, 32 nt, Human
ugcaccacuguacuccaaccugggcgacagag

SEQ ID NO: 515481 - RNA, 32 nt, Human
ugcaccacuguacuccagcacucuagccuggg

SEQ ID NO: 515482 - RNA, 32 nt, Human
ugcaccacuguacuccagccugggcaacagag

SEQ ID NO: 515483 - RNA, 32 nt, Human
ugcaccacuguacuccagccugggcgauacaa

SEQ ID NO: 515484 - RNA, 32 nt, Human
ugcaccacuguacuccagccugggugacaaag

SEQ ID NO: 515485 - RNA, 32 nt, Human
ugcaccacuguacuccagccugggugacaggg

SEQ ID NO: 515486 - RNA, 32 nt, Human
ugcaccacuuacuccagccugggcaacagagc

SEQ ID NO: 515487 - RNA, 32 nt, Human
ugcaccacuucaagugaccaccaggaagugcc

SEQ ID NO: 515488 - RNA, 32 nt, Human
ugcaccacuucaagugaccaccaggaggugcu

SEQ ID NO: 515489 - RNA, 32 nt, Human
ugcaccacuucacuccagccugggugacggag

SEQ ID NO: 515490 - RNA, 32 nt, Human
ugcaccacuucaucccagccugggagacagag

SEQ ID NO: 515491 - RNA, 32 nt, Human
ugcaccacuuguaacuccagccugggcaacag

SEQ ID NO: 515492 - RNA, 32 nt, Human
ugcaccagaagagggaaaauuaaacaauuaaa

SEQ ID NO: 515493 - RNA, 32 nt, Human
ugcaccagacucagcacuagcacuccaucagc

SEQ ID NO: 515494 - RNA, 32 nt, Human
ugcaccagcacccugagauggagcugagacuu

SEQ ID NO: 515495 - RNA, 32 nt, Human
ugcaccagcccagugggacuucagagaugugg

SEQ ID NO: 515496 - RNA, 32 nt, Human
ugcaccagccucucccuccacacccgaagcag

SEQ ID NO: 515497 - RNA, 32 nt, Human
ugcaccagcgaaucugccugggcugcuccugu

SEQ ID NO: 515498 - RNA, 32 nt, Human
ugcaccaggccacugcccuguuggugaggagg

SEQ ID NO: 515499 - RNA, 32 nt, Human
ugcaccaggcccuaggaggccucugccuacuc

SEQ ID NO: 515500 - RNA, 32 nt, Human
ugcaccaggugaaaacagggccagcagacucc

SEQ ID NO: 515501 - RNA, 32 nt, Human
ugcaccagguguuuuugucaccauacagauga

SEQ ID NO: 515502 - RNA, 32 nt, Human
ugcaccagugcacuccagcugggcgacagagc

SEQ ID NO: 515503 - RNA, 32 nt, Human
ugcaccaguguauccacaguccugucucggaa

SEQ ID NO: 515504 - RNA, 32 nt, Human
ugcaccaguuuuuaccuauuaucaugguagua

SEQ ID NO: 515505 - RNA, 22 nt, Human
ugcaccauccccagggcugacc

SEQ ID NO: 515506 - RNA, 32 nt, Human
ugcaccaugagcucaguuggcugcaggagcag

SEQ ID NO: 515507 - RNA, 32 nt, Human
ugcaccaugccccauugggcucaggcgaguuc

SEQ ID NO: 515508 - RNA, 32 nt, Human
ugcaccauguuaguaauaaacagaucugccuu

SEQ ID NO: 515509 - RNA, 32 nt, Human
ugcaccauguuuugagguugagugcauguucg

SEQ ID NO: 515510 - RNA, 32 nt, Human
ugcaccauugaacuccagccugggcaacaaga

SEQ ID NO: 515511 - RNA, 32 nt, Human
ugcaccauugcacacuaaccugggugacagaa

SEQ ID NO: 515512 - RNA, 32 nt, Human
ugcaccauugcaccuccagccugggcaacaga

SEQ ID NO: 515513 - RNA, 32 nt, Human
ugcaccauugcacuccacccugggcgacagag

SEQ ID NO: 515514 - RNA, 32 nt, Human
ugcaccauugcacuccagccugcgcaacaaga

SEQ ID NO: 515515 - RNA, 32 nt, Human
ugcaccauugcacuccagccuggcgacagagc

SEQ ID NO: 515516 - RNA, 32 nt, Human
ugcaccauugcacuccagccugggcaaaaaga

SEQ ID NO: 515517 - RNA, 32 nt, Human
ugcaccauugcacuccagccugggcaacaaga

SEQ ID NO: 515518 - RNA, 32 nt, Human
ugcaccauugcacuccagccugggcaacagag

SEQ ID NO: 515519 - RNA, 32 nt, Human
ugcaccauugcacuccagccugggcaauaaga

SEQ ID NO: 515520 - RNA, 32 nt, Human
ugcaccauugcacuccagccugggcgacaaga

SEQ ID NO: 515521 - RNA, 32 nt, Human
ugcaccauugcacuccagccugggcgacagag

SEQ ID NO: 515522 - RNA, 32 nt, Human
ugcaccauugcacuccagccugggugacagag

SEQ ID NO: 515523 - RNA, 32 nt, Human
ugcaccauugcacuccagccugugcaacaaga

SEQ ID NO: 515524 - RNA, 32 nt, Human
ugcaccauugcacuccagcuugggugacagag

SEQ ID NO: 515525 - RNA, 32 nt, Human
ugcaccauugcacuccugccugggcaacaaga

SEQ ID NO: 515526 - RNA, 32 nt, Human
ugcaccauugcacucuagccuggcaacagagc

SEQ ID NO: 515527 - RNA, 32 nt, Human
ugcaccauugcauuccagccugggcaacaaga

SEQ ID NO: 515528 - RNA, 32 nt, Human
ugcaccauugcauuccagccugggugacagag

SEQ ID NO: 515529 - RNA, 32 nt, Human
ugcaccauugcccuccagccugagcaacagaa

SEQ ID NO: 515530 - RNA, 32 nt, Human
ugcaccauugcgcucuagccugggcaacaaca

SEQ ID NO: 515531 - RNA, 32 nt, Human
ugcaccauuguacuccagccugggcaacaaga

SEQ ID NO: 515532 - RNA, 32 nt, Human
ugcaccauuguacuccagccugggcaauaaga

SEQ ID NO: 515533 - RNA, 22 nt, Human
ugcaccauuuaaaaacaggcag

SEQ ID NO: 515534 - RNA, 32 nt, Human
ugcaccauuucauuccagccugggcaacauga

SEQ ID NO: 515535 - RNA, 32 nt, Human
ugcacccaaacagacacaucaacgcaccccac

SEQ ID NO: 515536 - RNA, 32 nt, Human
ugcacccaagaagaaaagcuuggaguagagca

SEQ ID NO: 515537 - RNA, 24 nt, Human
ugcacccaccgcucauucuugcuc

SEQ ID NO: 515538 - RNA, 32 nt, Human
ugcacccacugcauuugcagccuugaggucau

SEQ ID NO: 515539 - RNA, 32 nt, Human
ugcacccacugccucuucccuucucgcuuggg

SEQ ID NO: 515540 - RNA, 32 nt, Human
ugcacccacuggcugggaagaucucuuccugc

SEQ ID NO: 515541 - RNA, 22 nt, Human
ugcacccagaagcagagaaaag

SEQ ID NO: 515542 - RNA, 32 nt, Human
ugcacccagaccuggaagagcuuuaucccuuu

SEQ ID NO: 515543 - RNA, 32 nt, Human
ugcacccagagccguggccaggagaaccccuu

SEQ ID NO: 515544 - RNA, 23 nt, Human
ugcacccagaguggauauuccca

SEQ ID NO: 515545 - RNA, 32 nt, Human
ugcacccagccaagugaucauuuuuauagguu

SEQ ID NO: 515546 - RNA, 32 nt, Human
ugcacccaggagguggagguugcagugagccg

SEQ ID NO: 515547 - RNA, 32 nt, Human
ugcacccaggcaggcccaggggaggguggggc

SEQ ID NO: 515548 - RNA, 22 nt, Human
ugcacccagggcuccugacucc

SEQ ID NO: 515549 - RNA, 20 nt, Human
ugcacccaggggacaacucc

SEQ ID NO: 515550 - RNA, 20 nt, Human
ugcacccagggucccagccu

SEQ ID NO: 515551 - RNA, 32 nt, Human
ugcacccauguaggagcaugagggccacacuc

SEQ ID NO: 515552 - RNA, 32 nt, Human
ugcaccccaacauugagauguguuuuuaaugu

SEQ ID NO: 515553 - RNA, 32 nt, Human
ugcaccccaacugucuaccacccucagcuauc

SEQ ID NO: 515554 - RNA, 32 nt, Human
ugcaccccaagaagugguggggagauugcugc

SEQ ID NO: 515555 - RNA, 32 nt, Human
ugcaccccaccccacccucuggcuccccaugg

SEQ ID NO: 515556 - RNA, 32 nt, Human
ugcaccccagccccuguccugccuguaagggg

SEQ ID NO: 515557 - RNA, 32 nt, Human
ugcaccccagccuggacaacagagugagacuc

SEQ ID NO: 515558 - RNA, 32 nt, Human
ugcaccccagccugggcaacaagaguaaaacu

SEQ ID NO: 515559 - RNA, 32 nt, Human
ugcaccccagccugggcaacagaguaagauua

SEQ ID NO: 515560 - RNA, 32 nt, Human
ugcaccccagccugucacgcuaucagcaguuc

SEQ ID NO: 515561 - RNA, 31 nt, Human
ugcaccccagcgucaggccuaccucaaguuc

SEQ ID NO: 515562 - RNA, 32 nt, Human
ugcaccccaguagcacccacccucucugugcu

SEQ ID NO: 515563 - RNA, 25 nt, Human
ugcacccccaacugcaccccagcca

SEQ ID NO: 515564 - RNA, 18 nt, Human
ugcacccccaaucugccc

SEQ ID NO: 515565 - RNA, 32 nt, Human
ugcacccccucgggggccagcccccggccggu

SEQ ID NO: 515566 - RNA, 32 nt, Human
ugcacccccugccuucccauugcuggcucacu

SEQ ID NO: 515567 - RNA, 32 nt, Human
ugcacccccuuuccuccagcucuuccugagac

SEQ ID NO: 515568 - RNA, 32 nt, Human
ugcaccccuccaugggccuggccaagccccca

SEQ ID NO: 515569 - RNA, 32 nt, Human
ugcaccccucccccucucccgugcacagggaa

SEQ ID NO: 515570 - RNA, 32 nt, Human
ugcaccccugcacuccagccugggugacagag

SEQ ID NO: 515571 - RNA, 32 nt, Human
ugcaccccugcacuccaggcugggcaacagua

SEQ ID NO: 515572 - RNA, 23 nt, Human
ugcaccccuggcccucccagcca

SEQ ID NO: 515573 - RNA, 32 nt, Human
ugcacccgcaugggagggucggagggugcugc

SEQ ID NO: 515574 - RNA, 32 nt, Human
ugcacccgggcaggccucagaacggugagggg

SEQ ID NO: 515575 - RNA, 32 nt, Human
ugcacccuccacccugucccccagcucuggug

SEQ ID NO: 515576 - RNA, 32 nt, Human
ugcacccucccagggacacuggaugcgcuggg

SEQ ID NO: 515577 - RNA, 32 nt, Human
ugcacccuccgggaagccauggagucugcugg

SEQ ID NO: 515578 - RNA, 32 nt, Human
ugcacccucugugcccugugggacccgcuuca

SEQ ID NO: 515579 - RNA, 32 nt, Human
ugcacccugcacucuagccugggcaacaagag

SEQ ID NO: 515580 - RNA, 32 nt, Human
ugcacccugcagccaccagcacugccuggcuc

SEQ ID NO: 515581 - RNA, 32 nt, Human
ugcacccugccuaguggcuuucccaagagaaa

SEQ ID NO: 515582 - RNA, 32 nt, Human
ugcacccugccugggacuuggcccucuggcug

SEQ ID NO: 515583 - RNA, 32 nt, Human
ugcacccugccuggucacugcucucccagccc

SEQ ID NO: 515584 - RNA, 23 nt, Human
ugcacccugccuuuuguguuuuu

SEQ ID NO: 515585 - RNA, 32 nt, Human
ugcacccugcuuccuggcccagucccagguug

SEQ ID NO: 515586 - RNA, 32 nt, Human
ugcacccuggaagggcaggucuggcggcucca

SEQ ID NO: 515587 - RNA, 32 nt, Human
ugcacccugggaccaagaggcagcagucaucc

SEQ ID NO: 515588 - RNA, 32 nt, Human
ugcacccugggagcccuuaggucuguuuggag

SEQ ID NO: 515589 - RNA, 32 nt, Human
ugcacccugggaggggaagcugggagaaagga

SEQ ID NO: 515590 - RNA, 21 nt, Human
ugcacccuguagcuccugcuc

SEQ ID NO: 515591 - RNA, 32 nt, Human
ugcacccuucccucuucccucucccucucucu

SEQ ID NO: 515592 - RNA, 32 nt, Human
ugcaccgagggucccuugccuacccuaggcca

SEQ ID NO: 515593 - RNA, 32 nt, Human
ugcaccgccagcugccgccgacugcagcccua

SEQ ID NO: 515594 - RNA, 32 nt, Human
ugcaccgccauccccaugcugguuggugcugc

SEQ ID NO: 515595 - RNA, 32 nt, Human
ugcaccgccugccucucagcaggauggacgug

SEQ ID NO: 515596 - RNA, 32 nt, Human
ugcaccgcugcacuccagccuggcgacagagc

SEQ ID NO: 515597 - RNA, 32 nt, Human
ugcaccgcuguacuccagccugggcaacagag

SEQ ID NO: 515598 - RNA, 32 nt, Human
ugcaccggccacucuuagcccccgaggcguug

SEQ ID NO: 515599 - RNA, 32 nt, Human
ugcaccguaugauguucagcagcauccguggc

SEQ ID NO: 515600 - RNA, 32 nt, Human
ugcaccgugacacuccagccugggcaacagaa

SEQ ID NO: 515601 - RNA, 32 nt, Human
ugcaccuaaggaauacuacacagcauguaaaa

SEQ ID NO: 515602 - RNA, 19 nt, Human
ugcaccuacagauauggug

SEQ ID NO: 515603 - RNA, 18 nt, Human
ugcaccuacuuguuccca

SEQ ID NO: 515604 - RNA, 23 nt, Human
ugcaccuaggagcccaggacccc

SEQ ID NO: 515605 - RNA, 32 nt, Human
ugcaccuauagucccagcuacuugggaggcug

SEQ ID NO: 515606 - RNA, 32 nt, Human
ugcaccuauagucccagcuauucaggaggcug

SEQ ID NO: 515607 - RNA, 32 nt, Human
ugcaccuaucucagccauaggugcaguuugcu

SEQ ID NO: 515608 - RNA, 32 nt, Human
ugcaccuaucucuugcugaauugcuuuaauag

SEQ ID NO: 515609 - RNA, 32 nt, Human
ugcaccucagcagccagggaagcagggcccag

SEQ ID NO: 515610 - RNA, 32 nt, Human
ugcaccuccaccuccagccuccagucaccuca

SEQ ID NO: 515611 - RNA, 32 nt, Human
ugcaccuccaccugccccagccccugccucug

SEQ ID NO: 515612 - RNA, 23 nt, Human
ugcaccuccaccuuccgggcuca

SEQ ID NO: 515613 - RNA, 32 nt, Human
ugcaccuccagccugggcaacagagugagacu

SEQ ID NO: 515614 - RNA, 21 nt, Human
ugcaccucccagcccucggcc

SEQ ID NO: 515615 - RNA, 32 nt, Human
ugcaccucccaguuugcuggguuuauuuuaga

SEQ ID NO: 515616 - RNA, 32 nt, Human
ugcaccuccuuaggcccugccucugggcucag

SEQ ID NO: 515617 - RNA, 32 nt, Human
ugcaccuccuuucccucucuccaucuuccaau

SEQ ID NO: 515618 - RNA, 21 nt, Human
ugcaccucgcccccgcaagcc

SEQ ID NO: 515619 - RNA, 32 nt, Human
ugcaccucuaacaaugcacaccucacugcuug

SEQ ID NO: 515620 - RNA, 32 nt, Human
ugcaccucuagcugcaaacaaagcuaagacag

SEQ ID NO: 515621 - RNA, 32 nt, Human
ugcaccucucagccucugccgccgggcacccc

SEQ ID NO: 515622 - RNA, 32 nt, Human
ugcaccucuccuccccucagccaccuuuuagg

SEQ ID NO: 515623 - RNA, 24 nt, Human
ugcaccucuccuguucgguuuaga

SEQ ID NO: 515624 - RNA, 32 nt, Human
ugcaccucuuaguccagcaccaggaagagugg

SEQ ID NO: 515625 - RNA, 32 nt, Human
ugcaccugauaugaaugagaccaguuuuauuu

SEQ ID NO: 515626 - RNA, 20 nt, Human
ugcaccugcaaucccagcua

SEQ ID NO: 515627 - RNA, 32 nt, Human
ugcaccugcaaucccagcuacucgggaggcug

SEQ ID NO: 515628 - RNA, 18 nt, Human
ugcaccugcaccuguucc

SEQ ID NO: 515629 - RNA, 32 nt, Human
ugcaccugcacucuagugacccugggugccgc

SEQ ID NO: 515630 - RNA, 32 nt, Human
ugcaccugcagucucuuuccacuggcacuucc

SEQ ID NO: 515631 - RNA, 20 nt, Human
ugcaccugcauucccagcua

SEQ ID NO: 515632 - RNA, 32 nt, Human
ugcaccugcauucccagcuacuugggaggcug

SEQ ID NO: 515633 - RNA, 16 nt, Human
ugcaccugcugucuua

SEQ ID NO: 515634 - RNA, 32 nt, Human
ugcaccuggacguaauggacggacaugcacau

SEQ ID NO: 515635 - RNA, 32 nt, Human
ugcaccuggcuacuccugcuguggaccagcua

SEQ ID NO: 515636 - RNA, 32 nt, Human
ugcaccugggaggcaggcaggcaugcaugugg

SEQ ID NO: 515637 - RNA, 32 nt, Human
ugcaccugggcaacaagagugaaacuccgucu

SEQ ID NO: 515638 - RNA, 32 nt, Human
ugcaccugggccccagcaggcccagccaggcg

SEQ ID NO: 515639 - RNA, 32 nt, Human
ugcaccugggcgagaaccugacuggggcaggg

SEQ ID NO: 515640 - RNA, 32 nt, Human
ugcaccuguaaacccagcuacuugggaggcug

SEQ ID NO: 515641 - RNA, 20 nt, Human
ugcaccuguaaucccaccua

SEQ ID NO: 515642 - RNA, 20 nt, Human
ugcaccuguaaucccagcua

SEQ ID NO: 515643 - RNA, 32 nt, Human
ugcaccuguaaucccagcuacuagggaggaug

SEQ ID NO: 515644 - RNA, 32 nt, Human
ugcaccuguaaucccagcuacucgagaggcca

SEQ ID NO: 515645 - RNA, 32 nt, Human
ugcaccuguaaucccagcuacucgggaggcug

SEQ ID NO: 515646 - RNA, 32 nt, Human
ugcaccuguaaucccagcuacucuggaggcua

SEQ ID NO: 515647 - RNA, 32 nt, Human
ugcaccuguaaucccagcuacucuggaggcug

SEQ ID NO: 515648 - RNA, 32 nt, Human
ugcaccuguaaucccagcuacucuggagggug

SEQ ID NO: 515649 - RNA, 32 nt, Human
ugcaccuguaaucccagcuacuugggaggcug

SEQ ID NO: 515650 - RNA, 20 nt, Human
ugcaccuguagucccagcua

SEQ ID NO: 515651 - RNA, 32 nt, Human
ugcaccuguagucccagcuacuagggaggcug

SEQ ID NO: 515652 - RNA, 32 nt, Human
ugcaccuguagucccagcuacucaggaggcca

SEQ ID NO: 515653 - RNA, 32 nt, Human
ugcaccuguagucccagcuacucaggaggcug

SEQ ID NO: 515654 - RNA, 32 nt, Human
ugcaccuguagucccagcuacuccggaggcug

SEQ ID NO: 515655 - RNA, 32 nt, Human
ugcaccuguagucccagcuacucgggaagcug

SEQ ID NO: 515656 - RNA, 32 nt, Human
ugcaccuguagucccagcuacucgggggcuga

SEQ ID NO: 515657 - RNA, 32 nt, Human
ugcaccuguagucccagcuacucuggaggcug

SEQ ID NO: 515658 - RNA, 32 nt, Human
ugcaccuguagucccagcuacuugggaagcug

SEQ ID NO: 515659 - RNA, 32 nt, Human
ugcaccuguagucccagcuacuugggaggcug

SEQ ID NO: 515660 - RNA, 32 nt, Human
ugcaccuguagucccagcuacuuggggugcug

SEQ ID NO: 515661 - RNA, 32 nt, Human
ugcaccuguagucccagcuauaugggaugcug

SEQ ID NO: 515662 - RNA, 32 nt, Human
ugcaccuguagucccagcuauucaggaagcug

SEQ ID NO: 515663 - RNA, 32 nt, Human
ugcaccuguagucccagcuauuugggaggcug

SEQ ID NO: 515664 - RNA, 32 nt, Human
ugcaccuguagucccagcucuucaggaggcug

SEQ ID NO: 515665 - RNA, 32 nt, Human
ugcaccuguagucccagcugcuugggaggcug

SEQ ID NO: 515666 - RNA, 32 nt, Human
ugcaccuguagucccagcuguuugggaagcug

SEQ ID NO: 515667 - RNA, 32 nt, Human
ugcaccuguagucccagcuucuugggaggcug

SEQ ID NO: 515668 - RNA, 32 nt, Human
ugcaccuguagucccaguuaggaggcugaggu

SEQ ID NO: 515669 - RNA, 32 nt, Human
ugcaccuguaguuucagcuauucgggaggcug

SEQ ID NO: 515670 - RNA, 20 nt, Human
ugcaccugucaucccagcua

SEQ ID NO: 515671 - RNA, 32 nt, Human
ugcaccuguggccucucagucaaacaaguugu

SEQ ID NO: 515672 - RNA, 32 nt, Human
ugcaccuguggucccagcuacucuggaggcug

SEQ ID NO: 515673 - RNA, 32 nt, Human
ugcaccuguggucccagcuacuggggaggcug

SEQ ID NO: 515674 - RNA, 32 nt, Human
ugcaccuguguaugaaucuggaagugugugug

SEQ ID NO: 515675 - RNA, 32 nt, Human
ugcaccuuagagaacaguaggagcagcaggug

SEQ ID NO: 515676 - RNA, 32 nt, Human
ugcaccuuccuccgaccuguguagggugugga

SEQ ID NO: 515677 - RNA, 32 nt, Human
ugcaccuucucagugcuguaugcggcugcagc

SEQ ID NO: 515678 - RNA, 32 nt, Human
ugcaccuugcaggugcaguuuccuuggggacc

SEQ ID NO: 515679 - RNA, 32 nt, Human
ugcaccuugugaaggaaaaacaugcuuaaggg

SEQ ID NO: 515680 - RNA, 32 nt, Human
ugcaccuuuaagcucacuccaucccaaaccgg

SEQ ID NO: 515681 - RNA, 32 nt, Human
ugcaccuuuguacuccagccugggcaacgagc

SEQ ID NO: 515682 - RNA, 32 nt, Human
ugcacgaacacuuccuccuuccuugccaccag

SEQ ID NO: 515683 - RNA, 32 nt, Human
ugcacgacugcacuccagccugggcaauggag

SEQ ID NO: 515684 - RNA, 32 nt, Human
ugcacgaugaacacacaccgggcugguugggc

SEQ ID NO: 515685 - RNA, 32 nt, Human
ugcacgauucccucagcucuggguuuaaugua

SEQ ID NO: 515686 - RNA, 32 nt, Human
ugcacgcaagcagggacauuuccuagccagcu

SEQ ID NO: 515687 - RNA, 32 nt, Human
ugcacgcacacacacaugcacacauacacgug

SEQ ID NO: 515688 - RNA, 32 nt, Human
ugcacgcacacgugugcagacacguaguggaa

SEQ ID NO: 515689 - RNA, 32 nt, Human
ugcacgcacugaggccauuguuaaaggagcuc

SEQ ID NO: 515690 - RNA, 23 nt, Human
ugcacgcacuuuucuuguugaca

SEQ ID NO: 515691 - RNA, 32 nt, Human
ugcacgcauaugucuucaagaugaccacaauu

SEQ ID NO: 515692 - RNA, 32 nt, Human
ugcacgccaucaucgagcgcacggccagcuuc

SEQ ID NO: 515693 - RNA, 32 nt, Human
ugcacgcccaacucccuccugucuuccacagu

SEQ ID NO: 515694 - RNA, 32 nt, Human
ugcacgcccaggcugcggagcaccuggaggca

SEQ ID NO: 515695 - RNA, 32 nt, Human
  misc_feature (29)..(29): n is a, c, g, or u
ugcacgccgguccacagacacacucacgnccg

SEQ ID NO: 515696 - RNA, 32 nt, Human
ugcacgccguggagcaucaggccacacacucu

SEQ ID NO: 515697 - RNA, 32 nt, Human
ugcacgccucgggacgaucugccuuccucccc

SEQ ID NO: 515698 - RNA, 32 nt, Human
ugcacgccuguaacccagcuacucaggaggcu

SEQ ID NO: 515699 - RNA, 32 nt, Human
ugcacgccuguaaucucagcuacuugggaggc

SEQ ID NO: 515700 - RNA, 32 nt, Human
ugcacgcgcagggagagauccaucucugcugu

SEQ ID NO: 515701 - RNA, 32 nt, Human
ugcacgcuguugucugugcacucgcucacacu

SEQ ID NO: 515702 - RNA, 32 nt, Human
ugcacgcuuguaaucccagcuacucaggaguc

SEQ ID NO: 515703 - RNA, 32 nt, Human
ugcacgcuuguaaucccagcuacucuggaggc

SEQ ID NO: 515704 - RNA, 32 nt, Human
ugcacggaacucuguuucuaagugccaagcac

SEQ ID NO: 515705 - RNA, 32 nt, Human
ugcacggagagcagugccaagccuguggauca

SEQ ID NO: 515706 - RNA, 32 nt, Human
ugcacggaugcugaauguuugggaaugagagg

SEQ ID NO: 515707 - RNA, 32 nt, Human
ugcacggcaagaacaccuugaaugaugugcug

SEQ ID NO: 515708 - RNA, 32 nt, Human
ugcacgggcagcucuaugcaucaggagcaaug

SEQ ID NO: 515709 - RNA, 17 nt, Human
ugcacggggcugggcca

SEQ ID NO: 515710 - RNA, 31 nt, Human
ugcacgguggagcugccucagggcugucggu

SEQ ID NO: 515711 - RNA, 32 nt, Human
ugcacgucaagggccucaggugacuuucaugc

SEQ ID NO: 515712 - RNA, 32 nt, Human
ugcacgucaggguuggcauccacccagaucca

SEQ ID NO: 515713 - RNA, 32 nt, Human
ugcacgucugccgaaaaauccgaaccuguuga

SEQ ID NO: 515714 - RNA, 32 nt, Human
ugcacgucuguaaucccagcugcucgggaggc

SEQ ID NO: 515715 - RNA, 32 nt, Human
ugcacgucuuccauacuaauguucauuucuaa

SEQ ID NO: 515716 - RNA, 32 nt, Human
ugcacguguguauccaaucugccugugacaug

SEQ ID NO: 515717 - RNA, 32 nt, Human
ugcacguuuuugucccuucaguugccuuaugu

SEQ ID NO: 515718 - RNA, 32 nt, Human
ugcacuaaaauuauaucaaggucucagaugag

SEQ ID NO: 515719 - RNA, 32 nt, Human
ugcacuaauaauacuuaccaacccacuuugug

SEQ ID NO: 515720 - RNA, 21 nt, Human
ugcacuaauacucagccuuua

SEQ ID NO: 515721 - RNA, 32 nt, Human
ugcacuacuacacuccagccuggugacagagu

SEQ ID NO: 515722 - RNA, 32 nt, Human
ugcacuacuccucugcagugccuuggggaauu

SEQ ID NO: 515723 - RNA, 32 nt, Human
ugcacuacugcacuccagacuggugacggagc

SEQ ID NO: 515724 - RNA, 32 nt, Human
ugcacuacugcacuccagccugggugacagag

SEQ ID NO: 515725 - RNA, 32 nt, Human
ugcacuacugcauuccagccugggugacauau

SEQ ID NO: 515726 - RNA, 32 nt, Human
ugcacuacugcgcuucacccugggcaacagag

SEQ ID NO: 515727 - RNA, 32 nt, Human
ugcacuacuguacuccagccagggcaagagag

SEQ ID NO: 515728 - RNA, 32 nt, Human
ugcacuagagaagguaaagagagaaucaguau

SEQ ID NO: 515729 - RNA, 32 nt, Human
ugcacuaggaagaaucaguaaucacuuuucag

SEQ ID NO: 515730 - RNA, 32 nt, Human
ugcacuagucugagguggccacugccuuugau

SEQ ID NO: 515731 - RNA, 32 nt, Human
ugcacuaucacccaggcuggagugcaguggca

SEQ ID NO: 515732 - RNA, 32 nt, Human
ugcacuaugagaagguuucccaacaagagugu

SEQ ID NO: 515733 - RNA, 32 nt, Human
ugcacuauugcacaucauauucuauuguuuac

SEQ ID NO: 515734 - RNA, 32 nt, Human
ugcacuauugcacuccagccugggcaacagga

SEQ ID NO: 515735 - RNA, 32 nt, Human
ugcacucaaugccaacuuuuuguuacagauua

SEQ ID NO: 515736 - RNA, 32 nt, Human
ugcacucacaugcacacaugcaugcacacuca

SEQ ID NO: 515737 - RNA, 32 nt, Human
ugcacucagcaaacacauuggguaucuugugc

SEQ ID NO: 515738 - RNA, 32 nt, Human
ugcacucaggcaagaacuaggcucgggguaga

SEQ ID NO: 515739 - RNA, 32 nt, Human
ugcacucaguuucccuacauagcagggauucu

SEQ ID NO: 515740 - RNA, 23 nt, Human
ugcacucaugcaagcuucugcuc

SEQ ID NO: 515741 - RNA, 32 nt, Human
ugcacuccaaccugggcaacagagccagaccc

SEQ ID NO: 515742 - RNA, 19 nt, Human
ugcacuccaaggcugcgca

SEQ ID NO: 515743 - RNA, 32 nt, Human
ugcacuccacacuccagccugagcaacaagag

SEQ ID NO: 515744 - RNA, 32 nt, Human
ugcacuccagcacuccagccugggugacagag

SEQ ID NO: 515745 - RNA, 32 nt, Human
ugcacuccagcagaggcuagaggaaugccagu

SEQ ID NO: 515746 - RNA, 32 nt, Human
ugcacuccagccagggcaacagugagacucag

SEQ ID NO: 515747 - RNA, 32 nt, Human
ugcacuccagccugaagacagagcaaggcucc

SEQ ID NO: 515748 - RNA, 32 nt, Human
ugcacuccagccugagcaacagagugagacuc

SEQ ID NO: 515749 - RNA, 32 nt, Human
ugcacuccagccugagcaacagagugaguguc

SEQ ID NO: 515750 - RNA, 32 nt, Human
ugcacuccagccugagcacagagcaagacucu

SEQ ID NO: 515751 - RNA, 32 nt, Human
ugcacuccagccugagcgacagagugagacac

SEQ ID NO: 515752 - RNA, 32 nt, Human
ugcacuccagccugagcgacagugagacucug

SEQ ID NO: 515753 - RNA, 32 nt, Human
ugcacuccagccugagugacagagugagaccc

SEQ ID NO: 515754 - RNA, 32 nt, Human
ugcacuccagccugaugacagagcaagacuca

SEQ ID NO: 515755 - RNA, 32 nt, Human
ugcacuccagccugcacaacaagagugaaacu

SEQ ID NO: 515756 - RNA, 32 nt, Human
ugcacuccagccugcgugacaaagugagaccc

SEQ ID NO: 515757 - RNA, 32 nt, Human
ugcacuccagccuggaaaacggagugagagug

SEQ ID NO: 515758 - RNA, 32 nt, Human
ugcacuccagccuggacaacaagagugaaacg

SEQ ID NO: 515759 - RNA, 32 nt, Human
ugcacuccagccuggacaacagaguaaaaccc

SEQ ID NO: 515760 - RNA, 32 nt, Human
ugcacuccagccuggacaacagagugagaacc

SEQ ID NO: 515761 - RNA, 32 nt, Human
ugcacuccagccuggacaacagagugagacuc

SEQ ID NO: 515762 - RNA, 32 nt, Human
ugcacuccagccuggacaacagagugggacuc

SEQ ID NO: 515763 - RNA, 32 nt, Human
ugcacuccagccuggacaacggagugagacuc

SEQ ID NO: 515764 - RNA, 32 nt, Human
ugcacuccagccuggacgacagagugagacgu

SEQ ID NO: 515765 - RNA, 32 nt, Human
ugcacuccagccuggacgacagagugagauuc

SEQ ID NO: 515766 - RNA, 32 nt, Human
ugcacuccagccuggaugacaagagugaaacu

SEQ ID NO: 515767 - RNA, 32 nt, Human
ugcacuccagccuggaugacagagugaaaccc

SEQ ID NO: 515768 - RNA, 32 nt, Human
ugcacuccagccuggaugacagagugagaccu

SEQ ID NO: 515769 - RNA, 32 nt, Human
ugcacuccagccuggaugacagagugagacuc

SEQ ID NO: 515770 - RNA, 32 nt, Human
ugcacuccagccuggaugauagagugagacug

SEQ ID NO: 515771 - RNA, 32 nt, Human
ugcacuccagccuggauuacagaguaaaacug

SEQ ID NO: 515772 - RNA, 32 nt, Human
ugcacuccagccuggcaacagagugagacucu

SEQ ID NO: 515773 - RNA, 32 nt, Human
ugcacuccagccuggccuauaagaguaaaaua

SEQ ID NO: 515774 - RNA, 20 nt, Human
ugcacuccagccuggccugg

SEQ ID NO: 515775 - RNA, 32 nt, Human
ugcacuccagccuggccugggcaacagagcaa

SEQ ID NO: 515776 - RNA, 32 nt, Human
ugcacuccagccuggcgacaaagugagacucc

SEQ ID NO: 515777 - RNA, 32 nt, Human
ugcacuccagccuggcgacacagugagacucu

SEQ ID NO: 515778 - RNA, 32 nt, Human
ugcacuccagccuggcgacagagugagacucc

SEQ ID NO: 515779 - RNA, 32 nt, Human
ugcacuccagccuggcgacagagugagacucu

SEQ ID NO: 515780 - RNA, 32 nt, Human
ugcacuccagccuggcuacagagugagauucc

SEQ ID NO: 515781 - RNA, 32 nt, Human
ugcacuccagccuggcugacagagugagaauc

SEQ ID NO: 515782 - RNA, 32 nt, Human
ugcacuccagccuggcugacagugagacacuc

SEQ ID NO: 515783 - RNA, 32 nt, Human
ugcacuccagccugggaaacaagagugaaauu

SEQ ID NO: 515784 - RNA, 32 nt, Human
ugcacuccagccugggaaacagagugaggcuc

SEQ ID NO: 515785 - RNA, 32 nt, Human
ugcacuccagccugggaaauagagugagcaag

SEQ ID NO: 515786 - RNA, 32 nt, Human
ugcacuccagccugggaagcagagugagaccc

SEQ ID NO: 515787 - RNA, 32 nt, Human
ugcacuccagccugggagacagagugagacuc

SEQ ID NO: 515788 - RNA, 32 nt, Human
ugcacuccagccugggagacagagugagauac

SEQ ID NO: 515789 - RNA, 18 nt, Human
ugcacuccagccugggca

SEQ ID NO: 515790 - RNA, 32 nt, Human
ugcacuccagccugggcaaaaagagugagacu

SEQ ID NO: 515791 - RNA, 32 nt, Human
ugcacuccagccugggcaacaaagugagacuc

SEQ ID NO: 515792 - RNA, 32 nt, Human
ugcacuccagccugggcaacaacagugaaacu

SEQ ID NO: 515793 - RNA, 32 nt, Human
ugcacuccagccugggcaacaagaguaaaacu

SEQ ID NO: 515794 - RNA, 32 nt, Human
ugcacuccagccugggcaacaagaguaagacu

SEQ ID NO: 515795 - RNA, 32 nt, Human
ugcacuccagccugggcaacaagagugaaacu

SEQ ID NO: 515796 - RNA, 32 nt, Human
ugcacuccagccugggcaacaagagugaaccu

SEQ ID NO: 515797 - RNA, 32 nt, Human
ugcacuccagccugggcaacaagagugagacu

SEQ ID NO: 515798 - RNA, 32 nt, Human
ugcacuccagccugggcaacacagcaagaccc

SEQ ID NO: 515799 - RNA, 32 nt, Human
ugcacuccagccugggcaacacagcaagacuc

SEQ ID NO: 515800 - RNA, 32 nt, Human
ugcacuccagccugggcaacacagcaagaucc

SEQ ID NO: 515801 - RNA, 32 nt, Human
ugcacuccagccugggcaacacagugagacuc

SEQ ID NO: 515802 - RNA, 32 nt, Human
ugcacuccagccugggcaacagacagagugag

SEQ ID NO: 515803 - RNA, 32 nt, Human
ugcacuccagccugggcaacagagcgugacuc

SEQ ID NO: 515804 - RNA, 32 nt, Human
ugcacuccagccugggcaacagaguaagaacu

SEQ ID NO: 515805 - RNA, 32 nt, Human
ugcacuccagccugggcaacagaguaagacuc

SEQ ID NO: 515806 - RNA, 32 nt, Human
ugcacuccagccugggcaacagaguaagauuc

SEQ ID NO: 515807 - RNA, 32 nt, Human
ugcacuccagccugggcaacagagugaaacuc

SEQ ID NO: 515808 - RNA, 32 nt, Human
ugcacuccagccugggcaacagagugacacuc

SEQ ID NO: 515809 - RNA, 32 nt, Human
ugcacuccagccugggcaacagagugagaccc

SEQ ID NO: 515810 - RNA, 32 nt, Human
ugcacuccagccugggcaacagagugagacgc

SEQ ID NO: 515811 - RNA, 32 nt, Human
ugcacuccagccugggcaacagagugagacua

SEQ ID NO: 515812 - RNA, 32 nt, Human
ugcacuccagccugggcaacagagugagacuc

SEQ ID NO: 515813 - RNA, 32 nt, Human
ugcacuccagccugggcaacagagugagacug

SEQ ID NO: 515814 - RNA, 32 nt, Human
ugcacuccagccugggcaacagagugagacuu

SEQ ID NO: 515815 - RNA, 32 nt, Human
ugcacuccagccugggcaacagagugagaucc

SEQ ID NO: 515816 - RNA, 32 nt, Human
ugcacuccagccugggcaacagagugaggccc

SEQ ID NO: 515817 - RNA, 32 nt, Human
ugcacuccagccugggcaacagaguggacucc

SEQ ID NO: 515818 - RNA, 32 nt, Human
ugcacuccagccugggcaacagagugggacuc

SEQ ID NO: 515819 - RNA, 32 nt, Human
ugcacuccagccugggcaacagcaagacccug

SEQ ID NO: 515820 - RNA, 32 nt, Human
ugcacuccagccugggcaacagcagcgaaacu

SEQ ID NO: 515821 - RNA, 26 nt, Human
ugcacuccagccugggcaacaggcuc

SEQ ID NO: 515822 - RNA, 32 nt, Human
ugcacuccagccugggcaacagguaagacucu

SEQ ID NO: 515823 - RNA, 32 nt, Human
ugcacuccagccugggcaacagugagacucug

SEQ ID NO: 515824 - RNA, 32 nt, Human
ugcacuccagccugggcaacaguguuaagacu

SEQ ID NO: 515825 - RNA, 32 nt, Human
ugcacuccagccugggcaaccaggugagaccc

SEQ ID NO: 515826 - RNA, 32 nt, Human
ugcacuccagccugggcaacgagagugaaacu

SEQ ID NO: 515827 - RNA, 32 nt, Human
ugcacuccagccugggcaacgagugaaacucc

SEQ ID NO: 515828 - RNA, 32 nt, Human
ugcacuccagccugggcaacguggugagaccc

SEQ ID NO: 515829 - RNA, 32 nt, Human
ugcacuccagccugggcaauaagagugaaacu

SEQ ID NO: 515830 - RNA, 32 nt, Human
ugcacuccagccugggcaauagagcaagacuc

SEQ ID NO: 515831 - RNA, 32 nt, Human
ugcacuccagccugggcaauagagcaagacug

SEQ ID NO: 515832 - RNA, 32 nt, Human
ugcacuccagccugggcaauagaguaagaccc

SEQ ID NO: 515833 - RNA, 32 nt, Human
ugcacuccagccugggcaauagagugagacuc

SEQ ID NO: 515834 - RNA, 32 nt, Human
ugcacuccagccugggcaauagagugagauuc

SEQ ID NO: 515835 - RNA, 32 nt, Human
ugcacuccagccugggcaauagagugagcccu

SEQ ID NO: 515836 - RNA, 32 nt, Human
ugcacuccagccugggcaauauagcaagaccc

SEQ ID NO: 515837 - RNA, 32 nt, Human
ugcacuccagccugggcaauggagugagacuc

SEQ ID NO: 515838 - RNA, 32 nt, Human
ugcacuccagccugggcaccacagcaagacuc

SEQ ID NO: 515839 - RNA, 32 nt, Human
ugcacuccagccugggcagcaagagcaaaaca

SEQ ID NO: 515840 - RNA, 32 nt, Human
ugcacuccagccugggcagcagagugagacuu

SEQ ID NO: 515841 - RNA, 32 nt, Human
ugcacuccagccugggccacacagugagacuc

SEQ ID NO: 515842 - RNA, 32 nt, Human
ugcacuccagccugggccacagagcaagacuc

SEQ ID NO: 515843 - RNA, 32 nt, Human
ugcacuccagccugggccacagagugagauuc

SEQ ID NO: 515844 - RNA, 32 nt, Human
ugcacuccagccugggcgacaaagugagacuc

SEQ ID NO: 515845 - RNA, 32 nt, Human
ugcacuccagccugggcgacaagagugaaacu

SEQ ID NO: 515846 - RNA, 32 nt, Human
ugcacuccagccugggcgacaagagugaaauu

SEQ ID NO: 515847 - RNA, 32 nt, Human
ugcacuccagccugggcgacacagcaagacuc

SEQ ID NO: 515848 - RNA, 32 nt, Human
ugcacuccagccugggcgacagaguaagacug

SEQ ID NO: 515849 - RNA, 32 nt, Human
ugcacuccagccugggcgacagagugacacuu

SEQ ID NO: 515850 - RNA, 32 nt, Human
ugcacuccagccugggcgacagagugacucug

SEQ ID NO: 515851 - RNA, 32 nt, Human
ugcacuccagccugggcgacagagugagaccc

SEQ ID NO: 515852 - RNA, 32 nt, Human
ugcacuccagccugggcgacagagugagacuc

SEQ ID NO: 515853 - RNA, 32 nt, Human
ugcacuccagccugggcgacagagugagacug

SEQ ID NO: 515854 - RNA, 32 nt, Human
ugcacuccagccugggcgacagagugagacuu

SEQ ID NO: 515855 - RNA, 32 nt, Human
ugcacuccagccugggcgacagagugaggcuc

SEQ ID NO: 515856 - RNA, 32 nt, Human
ugcacuccagccugggcgacagagugggacuc

SEQ ID NO: 515857 - RNA, 32 nt, Human
ugcacuccagccugggcgacagcaagacuccg

SEQ ID NO: 515858 - RNA, 32 nt, Human
ugcacuccagccugggcgacagcgugagaucc

SEQ ID NO: 515859 - RNA, 32 nt, Human
ugcacuccagccugggcgacagggugagacug

SEQ ID NO: 515860 - RNA, 32 nt, Human
ugcacuccagccugggcgacagugagacccug

SEQ ID NO: 515861 - RNA, 32 nt, Human
ugcacuccagccugggcgacagugagacugcu

SEQ ID NO: 515862 - RNA, 32 nt, Human
ugcacuccagccugggcgacagugagacuuug

SEQ ID NO: 515863 - RNA, 32 nt, Human
ugcacuccagccugggcgacgagugaaacucc

SEQ ID NO: 515864 - RNA, 32 nt, Human
ugcacuccagccugggcgacggagugagacuc

SEQ ID NO: 515865 - RNA, 32 nt, Human
ugcacuccagccugggcgauagagcaagacuc

SEQ ID NO: 515866 - RNA, 32 nt, Human
ugcacuccagccugggcgauagagugagacuc

SEQ ID NO: 515867 - RNA, 32 nt, Human
ugcacuccagccugggcgauggagugagacuc

SEQ ID NO: 515868 - RNA, 32 nt, Human
ugcacuccagccugggcggcagagugagacuc

SEQ ID NO: 515869 - RNA, 32 nt, Human
ugcacuccagccugggcgucagagugagaacu

SEQ ID NO: 515870 - RNA, 32 nt, Human
ugcacuccagccugggcugcagggugaggucc

SEQ ID NO: 515871 - RNA, 32 nt, Human
ugcacuccagccugggcuucagagcaagacuc

SEQ ID NO: 515872 - RNA, 32 nt, Human
ugcacuccagccugggggacaagagugagacu

SEQ ID NO: 515873 - RNA, 32 nt, Human
ugcacuccagccugggggacagagugagaccc

SEQ ID NO: 515874 - RNA, 32 nt, Human
ugcacuccagccuggguaacagagugagacuc

SEQ ID NO: 515875 - RNA, 32 nt, Human
ugcacuccagccuggguaacagagugagacug

SEQ ID NO: 515876 - RNA, 32 nt, Human
ugcacuccagccuggguaacagugagaggccu

SEQ ID NO: 515877 - RNA, 32 nt, Human
ugcacuccagccugggugacaaagugagacuc

SEQ ID NO: 515878 - RNA, 32 nt, Human
ugcacuccagccugggugacaagagugaaacu

SEQ ID NO: 515879 - RNA, 32 nt, Human
ugcacuccagccugggugacaagagugagacu

SEQ ID NO: 515880 - RNA, 32 nt, Human
ugcacuccagccugggugacacagugagacuc

SEQ ID NO: 515881 - RNA, 32 nt, Human
ugcacuccagccugggugacagagcaagugag

SEQ ID NO: 515882 - RNA, 32 nt, Human
ugcacuccagccugggugacagaguaacacuc

SEQ ID NO: 515883 - RNA, 32 nt, Human
ugcacuccagccugggugacagaguaagaccc

SEQ ID NO: 515884 - RNA, 32 nt, Human
ugcacuccagccugggugacagaguaagacuc

SEQ ID NO: 515885 - RNA, 32 nt, Human
ugcacuccagccugggugacagaguaauacuc

SEQ ID NO: 515886 - RNA, 32 nt, Human
ugcacuccagccugggugacagaguaggaccc

SEQ ID NO: 515887 - RNA, 32 nt, Human
ugcacuccagccugggugacagagugaaaccc

SEQ ID NO: 515888 - RNA, 32 nt, Human
ugcacuccagccugggugacagagugagacac

SEQ ID NO: 515889 - RNA, 32 nt, Human
ugcacuccagccugggugacagagugagaccc

SEQ ID NO: 515890 - RNA, 32 nt, Human
ugcacuccagccugggugacagagugagaccu

SEQ ID NO: 515891 - RNA, 32 nt, Human
ugcacuccagccugggugacagagugagacuc

SEQ ID NO: 515892 - RNA, 32 nt, Human
ugcacuccagccugggugacagagugagacuu

SEQ ID NO: 515893 - RNA, 32 nt, Human
ugcacuccagccugggugacagagugagagac

SEQ ID NO: 515894 - RNA, 32 nt, Human
ugcacuccagccugggugacagagugagaguc

SEQ ID NO: 515895 - RNA, 32 nt, Human
ugcacuccagccugggugacagagugagaucc

SEQ ID NO: 515896 - RNA, 32 nt, Human
ugcacuccagccugggugacagagugagauuc

SEQ ID NO: 515897 - RNA, 32 nt, Human
ugcacuccagccugggugacagagugaggccc

SEQ ID NO: 515898 - RNA, 32 nt, Human
ugcacuccagccugggugacagagugagugag

SEQ ID NO: 515899 - RNA, 32 nt, Human
ugcacuccagccugggugacagugaaacucca

SEQ ID NO: 515900 - RNA, 32 nt, Human
ugcacuccagccugggugacagugagacucug

SEQ ID NO: 515901 - RNA, 32 nt, Human
ugcacuccagccugggugacagugagacuuug

SEQ ID NO: 515902 - RNA, 32 nt, Human
ugcacuccagccugggugacagugagucuuug

SEQ ID NO: 515903 - RNA, 32 nt, Human
ugcacuccagccugggugacagugugaaacuu

SEQ ID NO: 515904 - RNA, 32 nt, Human
ugcacuccagccugggugacgagugaaacucc

SEQ ID NO: 515905 - RNA, 32 nt, Human
ugcacuccagccugggugacggugagacuuug

SEQ ID NO: 515906 - RNA, 32 nt, Human
ugcacuccagccugggugacugagugagaccc

SEQ ID NO: 515907 - RNA, 32 nt, Human
ugcacuccagccugggugauagagugagaacu

SEQ ID NO: 515908 - RNA, 32 nt, Human
ugcacuccagccugggugauagagugagacac

SEQ ID NO: 515909 - RNA, 32 nt, Human
ugcacuccagccugggugauagagugagaccc

SEQ ID NO: 515910 - RNA, 32 nt, Human
ugcacuccagccugggugauagagugagauuc

SEQ ID NO: 515911 - RNA, 32 nt, Human
ugcacuccagccuggguggcagagugagaccc

SEQ ID NO: 515912 - RNA, 32 nt, Human
ugcacuccagccuggguggcagagugagacuc

SEQ ID NO: 515913 - RNA, 32 nt, Human
ugcacuccagccuggguuacagagugagaccc

SEQ ID NO: 515914 - RNA, 32 nt, Human
ugcacuccagccuggucaacaagaguaaaacu

SEQ ID NO: 515915 - RNA, 32 nt, Human
ugcacuccagccuggucaacagagugggacuc

SEQ ID NO: 515916 - RNA, 32 nt, Human
ugcacuccagccuggugacagagugagacucc

SEQ ID NO: 515917 - RNA, 32 nt, Human
ugcacuccagccuggugacagagugagacucu

SEQ ID NO: 515918 - RNA, 32 nt, Human
ugcacuccagccuggugacagggcgagacucc

SEQ ID NO: 515919 - RNA, 32 nt, Human
ugcacuccagccugucgcugugcagaccuggc

SEQ ID NO: 515920 - RNA, 32 nt, Human
ugcacuccagccugugcaacaagagugaaacu

SEQ ID NO: 515921 - RNA, 32 nt, Human
ugcacuccagccugugcgacaagagcgaaacu

SEQ ID NO: 515922 - RNA, 32 nt, Human
ugcacuccaggcgggugacagagcaagacugc

SEQ ID NO: 515923 - RNA, 32 nt, Human
ugcacuccaggcugggcagcaagagcaagacu

SEQ ID NO: 515924 - RNA, 32 nt, Human
ugcacuccaguccgggcuggcggacagagggc

SEQ ID NO: 515925 - RNA, 32 nt, Human
ugcacuccagucugggagacaagagcaagacg

SEQ ID NO: 515926 - RNA, 32 nt, Human
ugcacucccagccugggcaacggagugagacu

SEQ ID NO: 515927 - RNA, 32 nt, Human
ugcacucccauguucacugcaguauuauuugc

SEQ ID NO: 515928 - RNA, 20 nt, Human
ugcacuccccacccugcucc

SEQ ID NO: 515929 - RNA, 32 nt, Human
ugcacuccccugcucuucugagcugcccaguc

SEQ ID NO: 515930 - RNA, 32 nt, Human
ugcacucccuaguccagaccuggggaccacug

SEQ ID NO: 515931 - RNA, 32 nt, Human
ugcacuccggagguagagguuguggugagccg

SEQ ID NO: 515932 - RNA, 32 nt, Human
ugcacuccuaccaaauaaacaggauuuuagua

SEQ ID NO: 515933 - RNA, 21 nt, Human
ugcacuccucaacucugcucc

SEQ ID NO: 515934 - RNA, 32 nt, Human
ugcacuccucaacucugcuccaaagcagccgc

SEQ ID NO: 515935 - RNA, 32 nt, Human
ugcacuccuccaccaucacaaucucacccaaa

SEQ ID NO: 515936 - RNA, 22 nt, Human
ugcacuccucuuuguaauuuca

SEQ ID NO: 515937 - RNA, 32 nt, Human
ugcacuccugucuucuggcuucagucuggaag

SEQ ID NO: 515938 - RNA, 32 nt, Human
ugcacuccuuucucuccaaccagggcagaaag

SEQ ID NO: 515939 - RNA, 32 nt, Human
ugcacucuagccuggcaacagagcaagacucc

SEQ ID NO: 515940 - RNA, 32 nt, Human
ugcacucuagccuggcaacagagcgagauucc

SEQ ID NO: 515941 - RNA, 32 nt, Human
ugcacucucagaaaucagacuugaguggccgg

SEQ ID NO: 515942 - RNA, 32 nt, Human
ugcacucucagguauucccugcucuuacucca

SEQ ID NO: 515943 - RNA, 32 nt, Human
ugcacucuccaaacucagguuccgggaagcuu

SEQ ID NO: 515944 - RNA, 32 nt, Human
ugcacucuccacccuggcugggaucagagcag

SEQ ID NO: 515945 - RNA, 32 nt, Human
ugcacucuccugggcugucuuuuucuccagca

SEQ ID NO: 515946 - RNA, 32 nt, Human
ugcacucucucccacccccuuccagggccucu

SEQ ID NO: 515947 - RNA, 32 nt, Human
ugcacucugaaauaaaauaugcuuuaaaaaug

SEQ ID NO: 515948 - RNA, 32 nt, Human
ugcacucugauuuucuguagguacaguucaaa

SEQ ID NO: 515949 - RNA, 32 nt, Human
ugcacucuggaaccucuggccucaggggaccu

SEQ ID NO: 515950 - RNA, 32 nt, Human
ugcacucuguugcccaggcuggaguacagugg

SEQ ID NO: 515951 - RNA, 32 nt, Human
ugcacugaagagagcauuuggcagagucugaa

SEQ ID NO: 515952 - RNA, 32 nt, Human
ugcacugacccacagccucugccugugcacgg

SEQ ID NO: 515953 - RNA, 32 nt, Human
ugcacugacugggccacaucuugaaaacucgu

SEQ ID NO: 515954 - RNA, 22 nt, Human
ugcacugacugugaaaccuuua

SEQ ID NO: 515955 - RNA, 32 nt, Human
ugcacugacuucuguuucggaaccacaguaag

SEQ ID NO: 515956 - RNA, 32 nt, Human
ugcacugagcagagucuugcuaccucagucag

SEQ ID NO: 515957 - RNA, 32 nt, Human
ugcacugagccuucaucgcccauugcuuuagg

SEQ ID NO: 515958 - RNA, 32 nt, Human
ugcacugagcuguaaucacaccacugcacucc

SEQ ID NO: 515959 - RNA, 32 nt, Human
ugcacugaggguaaccagaugaucucauggga

SEQ ID NO: 515960 - RNA, 32 nt, Human
ugcacugcaacuucuguauccuuccuuccccu

SEQ ID NO: 515961 - RNA, 32 nt, Human
ugcacugcaaguguccccaggaggagcacaug

SEQ ID NO: 515962 - RNA, 32 nt, Human
ugcacugcagauguccuugaugaagagaauga

SEQ ID NO: 515963 - RNA, 32 nt, Human
ugcacugcagccugugugacaaagggagacug

SEQ ID NO: 515964 - RNA, 32 nt, Human
ugcacugcaucaggagucaggagaccuggcuu

SEQ ID NO: 515965 - RNA, 32 nt, Human
ugcacugcauuccagccugggugacagaguga

SEQ ID NO: 515966 - RNA, 32 nt, Human
ugcacugccauccuggacagaaaggcaggagc

SEQ ID NO: 515967 - RNA, 32 nt, Human
ugcacugccccuucucccuccugagagcucug

SEQ ID NO: 515968 - RNA, 32 nt, Human
ugcacugcccucacccucagccgucccaagga

SEQ ID NO: 515969 - RNA, 32 nt, Human
ugcacugcccuuacuuugaagcagaagcuggu

SEQ ID NO: 515970 - RNA, 19 nt, Human
ugcacugcgaggauggaga

SEQ ID NO: 515971 - RNA, 32 nt, Human
ugcacugcuguucacccugggcuacgcccucu

SEQ ID NO: 515972 - RNA, 32 nt, Human
ugcacugcuguugagguuugacucgaagccca

SEQ ID NO: 515973 - RNA, 32 nt, Human
ugcacuggacacugaggaucacaaagccaaaa

SEQ ID NO: 515974 - RNA, 32 nt, Human
ugcacuggagccacaggcaggggugagagcac

SEQ ID NO: 515975 - RNA, 32 nt, Human
ugcacuggaggaacuccugccauuaccagcuc

SEQ ID NO: 515976 - RNA, 32 nt, Human
ugcacuggccagggguuccggcuguauaucca

SEQ ID NO: 515977 - RNA, 32 nt, Human
ugcacuggcccugcggcgggccccagagccca

SEQ ID NO: 515978 - RNA, 30 nt, Human
ugcacuggccucuccugcauucuguuugca

SEQ ID NO: 515979 - RNA, 32 nt, Human
ugcacuggcuacugaugauacagccaugcuga

SEQ ID NO: 515980 - RNA, 32 nt, Human
ugcacuggcuauuuguguuuaaucagaaugaa

SEQ ID NO: 515981 - RNA, 32 nt, Human
ugcacuggcucaagccuguaaucccagcacuu

SEQ ID NO: 515982 - RNA, 32 nt, Human
ugcacugggccccagcccuccugcuccuuagg

SEQ ID NO: 515983 - RNA, 32 nt, Human
ugcacuggggcuguucaugggagcauccacac

SEQ ID NO: 515984 - RNA, 32 nt, Human
ugcacugggggaggggagggagugaggggcag

SEQ ID NO: 515985 - RNA, 32 nt, Human
ugcacuggguuguuuugacaagcuaccacacg

SEQ ID NO: 515986 - RNA, 32 nt, Human
ugcacuguaauacgugcuuaacuuugcuuaaa

SEQ ID NO: 515987 - RNA, 32 nt, Human
ugcacuguagggcugggcgcagcaucccuagg

SEQ ID NO: 515988 - RNA, 32 nt, Human
ugcacugucacccaggcugcuggaguacagug

SEQ ID NO: 515989 - RNA, 32 nt, Human
ugcacugucacccaggcuggagugcaguggcg

SEQ ID NO: 515990 - RNA, 32 nt, Human
ugcacugucauuguaugcaagcauuuugucuu

SEQ ID NO: 515991 - RNA, 32 nt, Human
ugcacugucgcacuccagccuggaugauagag

SEQ ID NO: 515992 - RNA, 32 nt, Human
ugcacugugagcgcugugugaggaugccuggc

SEQ ID NO: 515993 - RNA, 32 nt, Human
ugcacugugagcugugugcugcuguagccacu

SEQ ID NO: 515994 - RNA, 32 nt, Human
ugcacugugaggcggggcgauggggaagggcc

SEQ ID NO: 515995 - RNA, 32 nt, Human
ugcacugugaggcuggaccuguugacucugca

SEQ ID NO: 515996 - RNA, 32 nt, Human
ugcacugugccccuguccacaggucaugugac

SEQ ID NO: 515997 - RNA, 32 nt, Human
ugcacugugcugcucucacagaucggugucug

SEQ ID NO: 515998 - RNA, 32 nt, Human
ugcacuguggaucugccauccauucugcaguc

SEQ ID NO: 515999 - RNA, 32 nt, Human
ugcacuguucacugcagcccauuugcuguaug

SEQ ID NO: 516000 - RNA, 31 nt, Human
ugcacuuaggagagagacucaaagcccuggg

SEQ ID NO: 516001 - RNA, 32 nt, Human
ugcacuucacagauucaccagacuguagcauc

SEQ ID NO: 516002 - RNA, 32 nt, Human
ugcacuucagccuggacaacagagugagaccc

SEQ ID NO: 516003 - RNA, 32 nt, Human
ugcacuucagccuggacaacagagugagacuc

SEQ ID NO: 516004 - RNA, 32 nt, Human
ugcacuucagccuggaugacagagugagaccc

SEQ ID NO: 516005 - RNA, 32 nt, Human
ugcacuucagccugggcaacagagugagacuc

SEQ ID NO: 516006 - RNA, 32 nt, Human
ugcacuucagccugggcaacagagugagacug

SEQ ID NO: 516007 - RNA, 32 nt, Human
ugcacuucagccugggcgacagagugacucug

SEQ ID NO: 516008 - RNA, 32 nt, Human
ugcacuucagccugggugacagagugagacag

SEQ ID NO: 516009 - RNA, 32 nt, Human
ugcacuucagccugggugacagagugagaccc

SEQ ID NO: 516010 - RNA, 32 nt, Human
ugcacuucagccugggugacagagugagacuc

SEQ ID NO: 516011 - RNA, 32 nt, Human
ugcacuucagcugucugucccuugaaugcuuc

SEQ ID NO: 516012 - RNA, 32 nt, Human
ugcacuucaguggauugaagacuugacuuuga

SEQ ID NO: 516013 - RNA, 32 nt, Human
ugcacuucauucuugcccaucuuaacaugcua

SEQ ID NO: 516014 - RNA, 32 nt, Human
ugcacuuccaacaacgggcagcagagggcgcg

SEQ ID NO: 516015 - RNA, 32 nt, Human
ugcacuuccagccucuucuccuuguggcucuc

SEQ ID NO: 516016 - RNA, 32 nt, Human
ugcacuuccagccugggugacacagugagacc

SEQ ID NO: 516017 - RNA, 32 nt, Human
ugcacuuccagccugggugacagagugagacc

SEQ ID NO: 516018 - RNA, 32 nt, Human
ugcacuucccacagacuggaguuuuuggugcu

SEQ ID NO: 516019 - RNA, 32 nt, Human
ugcacuuccuccucauguagucuggaguacuu

SEQ ID NO: 516020 - RNA, 30 nt, Human
ugcacuugccucuccaugugaucugugacg

SEQ ID NO: 516021 - RNA, 32 nt, Human
ugcacuugccuuguugcugaaguuccaauaau

SEQ ID NO: 516022 - RNA, 32 nt, Human
ugcacuuggcaaaaagaaucccaauguuugac

SEQ ID NO: 516023 - RNA, 32 nt, Human
ugcacuuguaaucccagcuacaugggaagcgg

SEQ ID NO: 516024 - RNA, 32 nt, Human
ugcacuuguacucccagcuacuugggaggcug

SEQ ID NO: 516025 - RNA, 32 nt, Human
ugcacuuguccaccccuguuacccccaggauc

SEQ ID NO: 516026 - RNA, 32 nt, Human
ugcacuuguuacuguaccauagugcggacgag

SEQ ID NO: 516027 - RNA, 32 nt, Human
ugcacuuuuccuuaccuccuggccucagauau

SEQ ID NO: 516028 - RNA, 32 nt, Human
ugcacuuuugggccuuugggcucuggaaccug

SEQ ID NO: 516029 - RNA, 32 nt, Human
ugcagaaaaaucaggcaggcagcuacgaguuu

SEQ ID NO: 516030 - RNA, 32 nt, Human
ugcagaaaaccagugaagggaccuacuaccau

SEQ ID NO: 516031 - RNA, 19 nt, Human
ugcagaaaaggccccagaa

SEQ ID NO: 516032 - RNA, 21 nt, Human
ugcagaaacccacccugcucc

SEQ ID NO: 516033 - RNA, 18 nt, Human
ugcagaaacccuucaaag

SEQ ID NO: 516034 - RNA, 32 nt, Human
ugcagaaaccgccucuguggcugcauuugaaa

SEQ ID NO: 516035 - RNA, 32 nt, Human
ugcagaaacguugcaccggugccugagguggg

SEQ ID NO: 516036 - RNA, 32 nt, Human
ugcagaaaggagagagagggaucugauggcaa

SEQ ID NO: 516037 - RNA, 32 nt, Human
ugcagaaauacaauuuccuacacuucauaccu

SEQ ID NO: 516038 - RNA, 20 nt, Human
ugcagaaaugcagacauggu

SEQ ID NO: 516039 - RNA, 32 nt, Human
ugcagaaauuuccucagccacuggagggauuu

SEQ ID NO: 516040 - RNA, 32 nt, Human
ugcagaacccccagugugggccuggggguggg

SEQ ID NO: 516041 - RNA, 32 nt, Human
ugcagaaccucaccucuaguugagaccaagaa

SEQ ID NO: 516042 - RNA, 32 nt, Human
ugcagaacuaucauagucacauacauauaaga

SEQ ID NO: 516043 - RNA, 23 nt, Human
ugcagaacuguagaagacccuga

SEQ ID NO: 516044 - RNA, 32 nt, Human
ugcagaacuguucagugguauuacaugaaaug

SEQ ID NO: 516045 - RNA, 32 nt, Human
ugcagaacuugcagaaugcgugguguuaaucu

SEQ ID NO: 516046 - RNA, 32 nt, Human
ugcagaagaaaauuuugcucuuauaaaaccuc

SEQ ID NO: 516047 - RNA, 32 nt, Human
ugcagaagacaguguuaauguguuugguuugg

SEQ ID NO: 516048 - RNA, 32 nt, Human
ugcagaagaggaagagaugagggaaggccugg

SEQ ID NO: 516049 - RNA, 32 nt, Human
ugcagaagaggaagaggaggaguauggugucu

SEQ ID NO: 516050 - RNA, 32 nt, Human
ugcagaagaguccuggugguggcagccucacc

SEQ ID NO: 516051 - RNA, 32 nt, Human
ugcagaagcagcaggaggcacuugaggagcag

SEQ ID NO: 516052 - RNA, 18 nt, Human
ugcagaagcagcccugug

SEQ ID NO: 516053 - RNA, 24 nt, Human
ugcagaagcuaaaaagcuaaagua

SEQ ID NO: 516054 - RNA, 32 nt, Human
ugcagaagcucccuuagugauuucacguuuaa

SEQ ID NO: 516055 - RNA, 32 nt, Human
ugcagaagcugaagcacaagaauugcuugaac

SEQ ID NO: 516056 - RNA, 32 nt, Human
ugcagaagcugcauuucagcugaaucuguguu

SEQ ID NO: 516057 - RNA, 32 nt, Human
ugcagaaggagagaauguguggaggauuaugu

SEQ ID NO: 516058 - RNA, 18 nt, Human
ugcagaaggccccgugca

SEQ ID NO: 516059 - RNA, 16 nt, Human
ugcagaagggccucuu

SEQ ID NO: 516060 - RNA, 32 nt, Human
ugcagaagucaauccuuuguucuuuuguuuug

SEQ ID NO: 516061 - RNA, 32 nt, Human
ugcagaaguccuucuuguccuggucguuguuc

SEQ ID NO: 516062 - RNA, 32 nt, Human
ugcagaagucugucuuccuccugcugcuauca

SEQ ID NO: 516063 - RNA, 32 nt, Human
ugcagaagugaguuuuuauugaagaagcucca

SEQ ID NO: 516064 - RNA, 32 nt, Human
ugcagaagugcacuaccaugcccagcuaauuu

SEQ ID NO: 516065 - RNA, 32 nt, Human
ugcagaauaaagauugcucaggccugccuggc

SEQ ID NO: 516066 - RNA, 32 nt, Human
ugcagaaugaaaccucuuuuccauccagaagc

SEQ ID NO: 516067 - RNA, 23 nt, Human
ugcagaaugaaauagaagcaaag

SEQ ID NO: 516068 - RNA, 32 nt, Human
ugcagaaugagaggagagagggaaggcagguc

SEQ ID NO: 516069 - RNA, 32 nt, Human
ugcagaaugccacaucugaaccacccuucccu

SEQ ID NO: 516070 - RNA, 33 nt, Human
ugcagaauguguguugaauauucuuuacauuua

SEQ ID NO: 516071 - RNA, 32 nt, Human
ugcagaauuaugcacugacaugacccugggug

SEQ ID NO: 516072 - RNA, 22 nt, Human
ugcagacaaagcaccccugcac

SEQ ID NO: 516073 - RNA, 32 nt, Human
ugcagacaagaaugcagguggggaaggaagag

SEQ ID NO: 516074 - RNA, 32 nt, Human
ugcagacaagcuaagcucaucaucugguuccc

SEQ ID NO: 516075 - RNA, 19 nt, Human
ugcagacaagggucuccac

SEQ ID NO: 516076 - RNA, 32 nt, Human
ugcagacacagcaucuacucagcgugggucac

SEQ ID NO: 516077 - RNA, 32 nt, Human
ugcagacacaggcuggugcugcaagggcuccu

SEQ ID NO: 516078 - RNA, 32 nt, Human
ugcagacacgcccgcauuucuccagggcgggg

SEQ ID NO: 516079 - RNA, 32 nt, Human
ugcagacagggugaccaggagcugcuaagccc

SEQ ID NO: 516080 - RNA, 32 nt, Human
ugcagacaguucuaaagcaaggagcugcagca

SEQ ID NO: 516081 - RNA, 32 nt, Human
ugcagacaucacaaaguaguuuuucagaaugc

SEQ ID NO: 516082 - RNA, 32 nt, Human
ugcagacaucucuggagccagagagaacaaca

SEQ ID NO: 516083 - RNA, 32 nt, Human
ugcagacauggaccaucaugcccagcugcaac

SEQ ID NO: 516084 - RNA, 32 nt, Human
ugcagaccaauuaaauccaggucucuaggggu

SEQ ID NO: 516085 - RNA, 32 nt, Human
ugcagaccagccuggccaacauggcaaaaccc

SEQ ID NO: 516086 - RNA, 32 nt, Human
ugcagaccagccuggguaacauagugagaccu

SEQ ID NO: 516087 - RNA, 32 nt, Human
ugcagaccaucucacaaucaucauguuccaca

SEQ ID NO: 516088 - RNA, 32 nt, Human
ugcagacccagagguaaggcugccuggcugcc

SEQ ID NO: 516089 - RNA, 21 nt, Human
ugcagacccaucucccuccac

SEQ ID NO: 516090 - RNA, 32 nt, Human
ugcagaccccagggugggcagaugucuccagu

SEQ ID NO: 516091 - RNA, 21 nt, Human
ugcagacccccacccccggcc

SEQ ID NO: 516092 - RNA, 18 nt, Human
ugcagaccccgccuccca

SEQ ID NO: 516093 - RNA, 32 nt, Human
ugcagacccggcccagagacugugcgugccac

SEQ ID NO: 516094 - RNA, 32 nt, Human
ugcagacccuacucucuauuuugcagugggug

SEQ ID NO: 516095 - RNA, 32 nt, Human
ugcagacccugaacccacaccugggcaucagg

SEQ ID NO: 516096 - RNA, 32 nt, Human
ugcagacccuggggucccuguuguacgcugca

SEQ ID NO: 516097 - RNA, 32 nt, Human
ugcagacccuucugccccaugacaggccuggg

SEQ ID NO: 516098 - RNA, 32 nt, Human
ugcagaccucaaggaggcucccuagcaacagc

SEQ ID NO: 516099 - RNA, 32 nt, Human
ugcagaccugaagaccuccucggauucccugu

SEQ ID NO: 516100 - RNA, 32 nt, Human
ugcagaccugcaagaucauauucuuccuccug

SEQ ID NO: 516101 - RNA, 32 nt, Human
ugcagaccugcaggacaucgagucucugcuau

SEQ ID NO: 516102 - RNA, 20 nt, Human
ugcagacggcccgggagcug

SEQ ID NO: 516103 - RNA, 29 nt, Human
ugcagacggcugcuaugacaucccuguuc

SEQ ID NO: 516104 - RNA, 32 nt, Human
ugcagacggggaguagcuuuguggaaacugau

SEQ ID NO: 516105 - RNA, 32 nt, Human
ugcagacggugacuggcccuggcuuccugggu

SEQ ID NO: 516106 - RNA, 32 nt, Human
ugcagacgucccugagagguucuugaagaugu

SEQ ID NO: 516107 - RNA, 32 nt, Human
ugcagacgugagccaccacagcuggcugaaga

SEQ ID NO: 516108 - RNA, 32 nt, Human
ugcagacgugagccaccaugcccagccaaguu

SEQ ID NO: 516109 - RNA, 32 nt, Human
ugcagacucacagauaauaaagcucagagcag

SEQ ID NO: 516110 - RNA, 32 nt, Human
ugcagacucacugcccaccggcucccuccccc

SEQ ID NO: 516111 - RNA, 23 nt, Human
ugcagacucaugaaagacccuga

SEQ ID NO: 516112 - RNA, 32 nt, Human
ugcagacucgagggucuccgcagccacuuccu

SEQ ID NO: 516113 - RNA, 32 nt, Human
ugcagacucugccucucaggcucaggugaucc

SEQ ID NO: 516114 - RNA, 20 nt, Human
ugcagacucuuguccagcgg

SEQ ID NO: 516115 - RNA, 32 nt, Human
ugcagacuggacuggauucuucuagcuccuuc

SEQ ID NO: 516116 - RNA, 32 nt, Human
ugcagacuggugaaacugaacaagcaccauuu

SEQ ID NO: 516117 - RNA, 32 nt, Human
ugcagacuuaccccacccuccaccccuagcuc

SEQ ID NO: 516118 - RNA, 24 nt, Human
ugcagacuucaccuccugaguuca

SEQ ID NO: 516119 - RNA, 32 nt, Human
ugcagacuuccgggggaauuguugccuccugc

SEQ ID NO: 516120 - RNA, 32 nt, Human
ugcagacuucugggggaauugucgccuccugc

SEQ ID NO: 516121 - RNA, 32 nt, Human
ugcagacuugagccacagugcccagccucacu

SEQ ID NO: 516122 - RNA, 32 nt, Human
ugcagacuugcgcuucucugcaccuuaucccu

SEQ ID NO: 516123 - RNA, 32 nt, Human
ugcagagaaacuuaagcaaaggggacagcugu

SEQ ID NO: 516124 - RNA, 32 nt, Human
ugcagagaaagagcaaagcccaaaagggagaa

SEQ ID NO: 516125 - RNA, 32 nt, Human
ugcagagaaggagccggggaccagcuugaaga

SEQ ID NO: 516126 - RNA, 32 nt, Human
ugcagagaaggcaccugcagagagcagggcag

SEQ ID NO: 516127 - RNA, 21 nt, Human
ugcagagaagguccugggaaa

SEQ ID NO: 516128 - RNA, 32 nt, Human
ugcagagaaggugggaccagggccaggguucc

SEQ ID NO: 516129 - RNA, 32 nt, Human
ugcagagaaguuuucucagugccguaauauag

SEQ ID NO: 516130 - RNA, 32 nt, Human
ugcagagaccacugcacuccagccugggcaac

SEQ ID NO: 516131 - RNA, 18 nt, Human
ugcagagaccccggcaag

SEQ ID NO: 516132 - RNA, 22 nt, Human
ugcagagaccugugcccagaga

SEQ ID NO: 516133 - RNA, 32 nt, Human
ugcagagacgcgagcaaccucuucucaucggc

SEQ ID NO: 516134 - RNA, 15 nt, Human
ugcagagagaagucu

SEQ ID NO: 516135 - RNA, 32 nt, Human
ugcagagagacaccuggucagccagcguugca

SEQ ID NO: 516136 - RNA, 32 nt, Human
ugcagagagagcaugggcuuucuggugucaga

SEQ ID NO: 516137 - RNA, 32 nt, Human
ugcagagagccuuuggaagaggucuucggaga

SEQ ID NO: 516138 - RNA, 32 nt, Human
ugcagagaggaagagggcagcaguugaggaug

SEQ ID NO: 516139 - RNA, 32 nt, Human
ugcagagaggagaaaguucuguagguaauaag

SEQ ID NO: 516140 - RNA, 32 nt, Human
ugcagagaggagcuacccucucugcuuagagc

SEQ ID NO: 516141 - RNA, 20 nt, Human
ugcagagaggauccuggcaa

SEQ ID NO: 516142 - RNA, 32 nt, Human
ugcagagaggccugccuuccggauuccaggcg

SEQ ID NO: 516143 - RNA, 16 nt, Human
ugcagagaggcugcug

SEQ ID NO: 516144 - RNA, 32 nt, Human
ugcagagaugccucuggagucccuguggccac

SEQ ID NO: 516145 - RNA, 32 nt, Human
ugcagagauggacaugggcagcuggaggguag

SEQ ID NO: 516146 - RNA, 21 nt, Human
ugcagagauuugcugccagga

SEQ ID NO: 516147 - RNA, 32 nt, Human
ugcagagcaacagggcuucaguauauucacau

SEQ ID NO: 516148 - RNA, 32 nt, Human
ugcagagcaagggagagugaaggaagccaaag

SEQ ID NO: 516149 - RNA, 32 nt, Human
ugcagagcacuuccauacucagccacacauuc

SEQ ID NO: 516150 - RNA, 25 nt, Human
ugcagagcacuuccuuuugguuuuu

SEQ ID NO: 516151 - RNA, 32 nt, Human
ugcagagcagcaagaggcucucuccagaaaac

SEQ ID NO: 516152 - RNA, 21 nt, Human
ugcagagcagcacuaacagug

SEQ ID NO: 516153 - RNA, 18 nt, Human
ugcagagcagcccuguga

SEQ ID NO: 516154 - RNA, 32 nt, Human
ugcagagcagccugggcaacauggugaaaccc

SEQ ID NO: 516155 - RNA, 32 nt, Human
ugcagagccagaagagcacggagcagcaacuc

SEQ ID NO: 516156 - RNA, 32 nt, Human
ugcagagccagccugacccaccagaaccuccc

SEQ ID NO: 516157 - RNA, 32 nt, Human
ugcagagccagccugugcugcccacuuucaga

SEQ ID NO: 516158 - RNA, 20 nt, Human
ugcagagcccaccagaugug

SEQ ID NO: 516159 - RNA, 22 nt, Human
ugcagagcccacugggcacggu

SEQ ID NO: 516160 - RNA, 32 nt, Human
ugcagagcccaggaggcaaauguuuguacacu

SEQ ID NO: 516161 - RNA, 20 nt, Human
ugcagagcccagggcacugg

SEQ ID NO: 516162 - RNA, 22 nt, Human
ugcagagcccccagguggaaga

SEQ ID NO: 516163 - RNA, 19 nt, Human
ugcagagccggacccagug

SEQ ID NO: 516164 - RNA, 24 nt, Human
ugcagagccguccaaccccagucc

SEQ ID NO: 516165 - RNA, 32 nt, Human
ugcagagccgugggcuguagaaggucagaugg

SEQ ID NO: 516166 - RNA, 27 nt, Human
ugcagagccucgcacuggggccagggc

SEQ ID NO: 516167 - RNA, 30 nt, Human
ugcagagccuguccacagcuccuguggggg

SEQ ID NO: 516168 - RNA, 32 nt, Human
ugcagagccuuccuuagcaccauuaggccuuc

SEQ ID NO: 516169 - RNA, 32 nt, Human
ugcagagccuuucuccccuucccggaucauua

SEQ ID NO: 516170 - RNA, 22 nt, Human
ugcagagcgccgugaguucuca

SEQ ID NO: 516171 - RNA, 32 nt, Human
ugcagagcggcggcuggagacuggagccaccg

SEQ ID NO: 516172 - RNA, 19 nt, Human
ugcagagcucacagccagg

SEQ ID NO: 516173 - RNA, 22 nt, Human
ugcagagcucacagggcccagg

SEQ ID NO: 516174 - RNA, 32 nt, Human
ugcagagcucaggagccaguccuggcccccug

SEQ ID NO: 516175 - RNA, 19 nt, Human
ugcagagcuccgggacgug

SEQ ID NO: 516176 - RNA, 32 nt, Human
ugcagagcucggagcggcggaggcagagaccg

SEQ ID NO: 516177 - RNA, 32 nt, Human
ugcagagcucugcuuccugcagccucuccccg

SEQ ID NO: 516178 - RNA, 20 nt, Human
ugcagagcugacccagagug

SEQ ID NO: 516179 - RNA, 21 nt, Human
ugcagagcugauuaaacagug

SEQ ID NO: 516180 - RNA, 32 nt, Human
ugcagagcugggcaguugaggaaaggacagcc

SEQ ID NO: 516181 - RNA, 32 nt, Human
ugcagagcugggcucuaccccaaaaggcuuca

SEQ ID NO: 516182 - RNA, 32 nt, Human
ugcagagcuguggcuuaccagagacucugcuc

SEQ ID NO: 516183 - RNA, 32 nt, Human
ugcagagcuugcugcccuugaauuuccuccaa

SEQ ID NO: 516184 - RNA, 32 nt, Human
ugcagaggaagaucgaugaguucuggugucgg

SEQ ID NO: 516185 - RNA, 32 nt, Human
ugcagaggaaggcugaggcgggaggauugcuu

SEQ ID NO: 516186 - RNA, 32 nt, Human
ugcagaggacagaggccugggucuccaggaga

SEQ ID NO: 516187 - RNA, 32 nt, Human
ugcagaggacaggccaagaaacuccacaucau

SEQ ID NO: 516188 - RNA, 32 nt, Human
ugcagaggacaguggacguggagcugcggggu

SEQ ID NO: 516189 - RNA, 32 nt, Human
ugcagaggagagagacagcgagaagaagccgc

SEQ ID NO: 516190 - RNA, 32 nt, Human
ugcagaggagcauaaaguucaaaaagaucaaa

SEQ ID NO: 516191 - RNA, 32 nt, Human
ugcagaggaggcaccugaggcccagagacgag

SEQ ID NO: 516192 - RNA, 32 nt, Human
ugcagaggagggcagagggaagauugauuugc

SEQ ID NO: 516193 - RNA, 32 nt, Human
ugcagaggaggugagagugggagggagguaac

SEQ ID NO: 516194 - RNA, 32 nt, Human
ugcagaggaguuuucaagaggcuaucuggugu

SEQ ID NO: 516195 - RNA, 32 nt, Human
ugcagaggauggaggucaaaaaccacucccag

SEQ ID NO: 516196 - RNA, 32 nt, Human
ugcagaggcacuccacccugggcacggagauu

SEQ ID NO: 516197 - RNA, 32 nt, Human
ugcagaggccuggguuacacagccugagucac

SEQ ID NO: 516198 - RNA, 32 nt, Human
ugcagaggcucauuccuguaaucccagcucuu

SEQ ID NO: 516199 - RNA, 32 nt, Human
ugcagagggagaggacaacagcuccaguaaac

SEQ ID NO: 516200 - RNA, 32 nt, Human
ugcagagggagggagagccagguccguagcgu

SEQ ID NO: 516201 - RNA, 32 nt, Human
ugcagagggcccaggagggucuugcagucauc

SEQ ID NO: 516202 - RNA, 21 nt, Human
ugcagagggcugggcacggug

SEQ ID NO: 516203 - RNA, 32 nt, Human
ugcagaggggucagcagcaggagaagcguguu

SEQ ID NO: 516204 - RNA, 31 nt, Human
ugcagagggguggaaaauggcagagcugcag

SEQ ID NO: 516205 - RNA, 32 nt, Human
ugcagagguauucaguuccuggcacaggggac

SEQ ID NO: 516206 - RNA, 32 nt, Human
ugcagaggucacuucccuagccucagaugggu

SEQ ID NO: 516207 - RNA, 32 nt, Human
ugcagaggugcagaaccagggacuccugggcc

SEQ ID NO: 516208 - RNA, 32 nt, Human
ugcagaggugcagagucaggugggacccgucg

SEQ ID NO: 516209 - RNA, 32 nt, Human
ugcagaggugccugugucucagccugaccccu

SEQ ID NO: 516210 - RNA, 25 nt, Human
ugcagaguagacugagagcuggggc

SEQ ID NO: 516211 - RNA, 32 nt, Human
ugcagagucaauuuuacaugcccauaaagaca

SEQ ID NO: 516212 - RNA, 23 nt, Human
ugcagagucagcagaacuggggu

SEQ ID NO: 516213 - RNA, 32 nt, Human
ugcagaguccugcaccaggccugggugagugg

SEQ ID NO: 516214 - RNA, 32 nt, Human
ugcagaguccuuccagccuaggccugcagcgc

SEQ ID NO: 516215 - RNA, 32 nt, Human
ugcagagugauggacagcagguggcaucuuac

SEQ ID NO: 516216 - RNA, 32 nt, Human
ugcagagugcaagagaugccucagucaaguca

SEQ ID NO: 516217 - RNA, 32 nt, Human
ugcagagugccuucccugaugcugcagccgga

SEQ ID NO: 516218 - RNA, 18 nt, Human
ugcagagugcugggccaa

SEQ ID NO: 516219 - RNA, 32 nt, Human
ugcagagugggcucccugccccucucugccug

SEQ ID NO: 516220 - RNA, 18 nt, Human
ugcagaguguagaauggu

SEQ ID NO: 516221 - RNA, 32 nt, Human
ugcagaguuauguaacgaacccaacaaugaag

SEQ ID NO: 516222 - RNA, 32 nt, Human
ugcagaguuccuggagcucacagcugagcccg

SEQ ID NO: 516223 - RNA, 32 nt, Human
ugcagauaacacuuaguuaagacaaggucaca

SEQ ID NO: 516224 - RNA, 19 nt, Human
ugcagauacaaccugcucu

SEQ ID NO: 516225 - RNA, 32 nt, Human
ugcagauaccuuacucccagccacuuugccuu

SEQ ID NO: 516226 - RNA, 32 nt, Human
ugcagauaggugaagaaaagcaaaaugaucaa

SEQ ID NO: 516227 - RNA, 32 nt, Human
ugcagauaguaauauauaaacacacacaauga

SEQ ID NO: 516228 - RNA, 32 nt, Human
ugcagauaguacaagccauuucuucaggguuc

SEQ ID NO: 516229 - RNA, 32 nt, Human
ugcagauaucccccagcauugagacccucccc

SEQ ID NO: 516230 - RNA, 32 nt, Human
ugcagauaucucuacaagauccugauuuuaau

SEQ ID NO: 516231 - RNA, 32 nt, Human
ugcagauauuggaauguauggaaguaucucag

SEQ ID NO: 516232 - RNA, 28 nt, Human
ugcagaucaugaggaaggaaaguugaug

SEQ ID NO: 516233 - RNA, 23 nt, Human
ugcagaucccacacucacccuga

SEQ ID NO: 516234 - RNA, 21 nt, Human
ugcagaucccucaggccccga

SEQ ID NO: 516235 - RNA, 32 nt, Human
ugcagaucuacaacaccugccagugccccugc

SEQ ID NO: 516236 - RNA, 32 nt, Human
ugcagaugaagccacagagcaggcgcucgacc

SEQ ID NO: 516237 - RNA, 30 nt, Human
ugcagaugaagccaguuccucccaccacga

SEQ ID NO: 516238 - RNA, 32 nt, Human
ugcagaugccgcccacucccaccccacuccua

SEQ ID NO: 516239 - RNA, 19 nt, Human
ugcagaugcgcagacaugg

SEQ ID NO: 516240 - RNA, 32 nt, Human
ugcagaugcucauguaagcagcuuuucgagag

SEQ ID NO: 516241 - RNA, 32 nt, Human
ugcagauggaaagaggugaaaaugaagaagga

SEQ ID NO: 516242 - RNA, 32 nt, Human
ugcagauggaauaaaaggcagggaccuguucc

SEQ ID NO: 516243 - RNA, 32 nt, Human
ugcagauggaauagggcccugccuugccuugc

SEQ ID NO: 516244 - RNA, 32 nt, Human
ugcagauggagacugaaucugagggcagcaga

SEQ ID NO: 516245 - RNA, 32 nt, Human
ugcagauggaggcaguggcuggagugaaugaa

SEQ ID NO: 516246 - RNA, 32 nt, Human
ugcagaugggcagagggaugcauggggaugca

SEQ ID NO: 516247 - RNA, 32 nt, Human
ugcagauggggcuaggacugugggcuuuuagc

SEQ ID NO: 516248 - RNA, 32 nt, Human
ugcagaugggggaaacugaggaagcaccaggu

SEQ ID NO: 516249 - RNA, 32 nt, Human
ugcagauggggucuuuggaaauguuagucacc

SEQ ID NO: 516250 - RNA, 32 nt, Human
ugcagauguacgugacaaugagacugaccuuu

SEQ ID NO: 516251 - RNA, 32 nt, Human
ugcagauguccucagacgggaagguuugagaa

SEQ ID NO: 516252 - RNA, 32 nt, Human
ugcagaugugagccaccgugccuggccagauu

SEQ ID NO: 516253 - RNA, 32 nt, Human
ugcagaugugagccacugugccaggcuccuuc

SEQ ID NO: 516254 - RNA, 32 nt, Human
ugcagaugugcgccaccaugcccggcuaauuu

SEQ ID NO: 516255 - RNA, 25 nt, Human
ugcagauguuguuuucagguuaaug

SEQ ID NO: 516256 - RNA, 21 nt, Human
ugcagauuaaaguaacuguga

SEQ ID NO: 516257 - RNA, 32 nt, Human
ugcagauucauuuuucuuucugaugucaaaaa

SEQ ID NO: 516258 - RNA, 23 nt, Human
ugcagauucccaggaaugugcua

SEQ ID NO: 516259 - RNA, 32 nt, Human
ugcagauucccaggcugggugcaguggcucac

SEQ ID NO: 516260 - RNA, 21 nt, Human
ugcagauuccuccccuggcca

SEQ ID NO: 516261 - RNA, 32 nt, Human
ugcagauucucauuagcuucagcugggucaug

SEQ ID NO: 516262 - RNA, 32 nt, Human
ugcagauuggggcucccugaggauggggcugu

SEQ ID NO: 516263 - RNA, 32 nt, Human
ugcagauugggugacugaccagacuuguuggg

SEQ ID NO: 516264 - RNA, 29 nt, Human
ugcagauuuggcuggagcuccagaccucc

SEQ ID NO: 516265 - RNA, 32 nt, Human
ugcagauuuuugcaaccuccuccugagccggg

SEQ ID NO: 516266 - RNA, 32 nt, Human
ugcagcaaaaccaacuccaccaaaaagccagg

SEQ ID NO: 516267 - RNA, 32 nt, Human
ugcagcaaaccaccauggcacauguauaccua

SEQ ID NO: 516268 - RNA, 32 nt, Human
ugcagcaaaccaccauggcacguguauaccua

SEQ ID NO: 516269 - RNA, 32 nt, Human
ugcagcaaaguaccauggcacauguauaccug

SEQ ID NO: 516270 - RNA, 32 nt, Human
ugcagcaacagcuucuacuaccagcccuuggg

SEQ ID NO: 516271 - RNA, 32 nt, Human
ugcagcaacaucacuaaccacaucccagacau

SEQ ID NO: 516272 - RNA, 32 nt, Human
ugcagcaacccuauuucuccauccccagugaa

SEQ ID NO: 516273 - RNA, 32 nt, Human
ugcagcaagauggauuugggaaaggaccaauc

SEQ ID NO: 516274 - RNA, 32 nt, Human
ugcagcaagcagauugggaagaccucucacag

SEQ ID NO: 516275 - RNA, 32 nt, Human
ugcagcaagccuugaggcccucaagaaugcag

SEQ ID NO: 516276 - RNA, 23 nt, Human
ugcagcaagcucacagugccccu

SEQ ID NO: 516277 - RNA, 32 nt, Human
ugcagcaauccaaaaggcaguuuguuuggggu

SEQ ID NO: 516278 - RNA, 22 nt, Human
ugcagcaaugaacaguacaucu

SEQ ID NO: 516279 - RNA, 32 nt, Human
ugcagcaauggccuggugauucccacacaucc

SEQ ID NO: 516280 - RNA, 32 nt, Human
ugcagcacaccaacauggcacauguauacaua

SEQ ID NO: 516281 - RNA, 32 nt, Human
ugcagcacaccaacauggcauauguauacaua

SEQ ID NO: 516282 - RNA, 32 nt, Human
ugcagcacaccagcauggcacagguauacaua

SEQ ID NO: 516283 - RNA, 32 nt, Human
ugcagcacaccagcauggcacaugaauacaca

SEQ ID NO: 516284 - RNA, 32 nt, Human
ugcagcacaccagcauggcacauguauacaua

SEQ ID NO: 516285 - RNA, 32 nt, Human
ugcagcacaccaucauggcaccuguauacaua

SEQ ID NO: 516286 - RNA, 32 nt, Human
ugcagcacagagcgggcaaagccaggcaggcc

SEQ ID NO: 516287 - RNA, 22 nt, Human
ugcagcacagcccgcauucaca

SEQ ID NO: 516288 - RNA, 32 nt, Human
ugcagcacaggaguucaaggcuucagugagcu

SEQ ID NO: 516289 - RNA, 32 nt, Human
ugcagcacagggcuucugugaggaccacaaaa

SEQ ID NO: 516290 - RNA, 32 nt, Human
ugcagcacccacccuaaagcccccuccaaaua

SEQ ID NO: 516291 - RNA, 32 nt, Human
ugcagcacccaggacacagccagcaugaacug

SEQ ID NO: 516292 - RNA, 32 nt, Human
ugcagcacccaugacagaaaucaaagaguuga

SEQ ID NO: 516293 - RNA, 20 nt, Human
ugcagcaccuuccucacaca

SEQ ID NO: 516294 - RNA, 32 nt, Human
ugcagcacuaggggagggggcagauggugguu

SEQ ID NO: 516295 - RNA, 32 nt, Human
ugcagcacucuuaucuacauaaggaugaaggu

SEQ ID NO: 516296 - RNA, 32 nt, Human
ugcagcacugcaccacccugcaacaccucagg

SEQ ID NO: 516297 - RNA, 32 nt, Human
ugcagcacuggggaagugacagaaugugaaaa

SEQ ID NO: 516298 - RNA, 23 nt, Human
ugcagcacuucugggucguugca

SEQ ID NO: 516299 - RNA, 32 nt, Human
ugcagcacuuguaaaccacacacacagccucu

SEQ ID NO: 516300 - RNA, 24 nt, Human
ugcagcacuuucugaggcuuucac

SEQ ID NO: 516301 - RNA, 32 nt, Human
ugcagcagaagcugcccacauucugaccaaug

SEQ ID NO: 516302 - RNA, 24 nt, Human
ugcagcagacuacacaguacuucu

SEQ ID NO: 516303 - RNA, 27 nt, Human
ugcagcagagccuugaaggagugugua

SEQ ID NO: 516304 - RNA, 32 nt, Human
ugcagcagaggaacuccuauaaccaccaccag

SEQ ID NO: 516305 - RNA, 32 nt, Human
ugcagcagagggcagaaggcuugcacuugggc

SEQ ID NO: 516306 - RNA, 32 nt, Human
ugcagcagagugacagcaguggagauugagag

SEQ ID NO: 516307 - RNA, 32 nt, Human
ugcagcagagugaggagugagggcagcugaca

SEQ ID NO: 516308 - RNA, 22 nt, Human
ugcagcagagugaggcuggggc

SEQ ID NO: 516309 - RNA, 32 nt, Human
ugcagcagaguuuggcaggcacugcugugcac

SEQ ID NO: 516310 - RNA, 22 nt, Human
ugcagcagaucauugagcuggg

SEQ ID NO: 516311 - RNA, 32 nt, Human
ugcagcagauccagagacagaggcagccuguc

SEQ ID NO: 516312 - RNA, 32 nt, Human
ugcagcagauuccacagacaaagagcccauuc

SEQ ID NO: 516313 - RNA, 32 nt, Human
ugcagcagcaaccggauuucagccugggccuc

SEQ ID NO: 516314 - RNA, 32 nt, Human
ugcagcagcaggcagaugaugcagaggagcga

SEQ ID NO: 516315 - RNA, 32 nt, Human
ugcagcagcaggggcaagacccuggguccagu

SEQ ID NO: 516316 - RNA, 32 nt, Human
ugcagcagcauggugacugccucuguguggcc

SEQ ID NO: 516317 - RNA, 25 nt, Human
ugcagcagcauuggaaggcuggggc

SEQ ID NO: 516318 - RNA, 32 nt, Human
ugcagcagccacauccauacacacacgcucgc

SEQ ID NO: 516319 - RNA, 32 nt, Human
ugcagcagcccguuccccuccucggugccgcc

SEQ ID NO: 516320 - RNA, 32 nt, Human
ugcagcagccugaaacuugagagcgaaaguga

SEQ ID NO: 516321 - RNA, 32 nt, Human
ugcagcagcggagacagucgccagcagcuggg

SEQ ID NO: 516322 - RNA, 32 nt, Human
ugcagcagcucacaccucucugcgguucccuc

SEQ ID NO: 516323 - RNA, 32 nt, Human
ugcagcagcuccuccagcugcaccaccuucag

SEQ ID NO: 516324 - RNA, 32 nt, Human
ugcagcagcugcaguaagccaagaucaugcug

SEQ ID NO: 516325 - RNA, 32 nt, Human
ugcagcaggaaggaggacucuuuugccgcgga

SEQ ID NO: 516326 - RNA, 32 nt, Human
ugcagcaggacuagcugucaccucccgcccgc

SEQ ID NO: 516327 - RNA, 32 nt, Human
ugcagcaggaggcagagcugugggaugaauga

SEQ ID NO: 516328 - RNA, 32 nt, Human
ugcagcaggaggccagaggacagagcagagga

SEQ ID NO: 516329 - RNA, 32 nt, Human
ugcagcaggaggggcaggcucagaguuaagca

SEQ ID NO: 516330 - RNA, 32 nt, Human
ugcagcaggccugcugggagcucggagauggu

SEQ ID NO: 516331 - RNA, 32 nt, Human
ugcagcagggccuggggcugagccugggcugc

SEQ ID NO: 516332 - RNA, 32 nt, Human
ugcagcagggugucugggcauugguggcucca

SEQ ID NO: 516333 - RNA, 32 nt, Human
ugcagcaggugccaccaccaccacaaaagaca

SEQ ID NO: 516334 - RNA, 32 nt, Human
ugcagcaguccaggugcacacuaagaacagcc

SEQ ID NO: 516335 - RNA, 32 nt, Human
ugcagcaguccaggugcacacuagaacagccu

SEQ ID NO: 516336 - RNA, 32 nt, Human
ugcagcagucccaugccccacacucugagucu

SEQ ID NO: 516337 - RNA, 32 nt, Human
ugcagcagucccgugccccacacucugagucu

SEQ ID NO: 516338 - RNA, 32 nt, Human
ugcagcagugccuucuucauccuuccuuacga

SEQ ID NO: 516339 - RNA, 32 nt, Human
ugcagcaguggcgccuccuagcucaggacagu

SEQ ID NO: 516340 - RNA, 32 nt, Human
ugcagcauacgcaggagccuauccugaauuuu

SEQ ID NO: 516341 - RNA, 32 nt, Human
ugcagcaucagcccuguuggaaaaggacaagg

SEQ ID NO: 516342 - RNA, 19 nt, Human
ugcagcaucuaccugcucc

SEQ ID NO: 516343 - RNA, 32 nt, Human
ugcagcaugaacacaauuucucuccaccuggc

SEQ ID NO: 516344 - RNA, 22 nt, Human
ugcagcaugaaggcccuugcca

SEQ ID NO: 516345 - RNA, 32 nt, Human
ugcagcaugccaauauggcacauguauacaua

SEQ ID NO: 516346 - RNA, 32 nt, Human
ugcagcaugccauuuggcuuucccaccuaaac

SEQ ID NO: 516347 - RNA, 32 nt, Human
ugcagcauggcagaggcggcauggcagaggcg

SEQ ID NO: 516348 - RNA, 32 nt, Human
ugcagcauuaugcuuugggcaguauuacaaaa

SEQ ID NO: 516349 - RNA, 32 nt, Human
ugcagcauugcacuccagccugggugacagaa

SEQ ID NO: 516350 - RNA, 32 nt, Human
ugcagcauuuaaaucacuguguuuuccuuguu

SEQ ID NO: 516351 - RNA, 32 nt, Human
ugcagcauuuggagucucucucuugcugagga

SEQ ID NO: 516352 - RNA, 32 nt, Human
ugcagccaaacuuggccucugaagggggaagg

SEQ ID NO: 516353 - RNA, 32 nt, Human
ugcagccaaccaaccuggcacauguauucaua

SEQ ID NO: 516354 - RNA, 32 nt, Human
ugcagccaaccacacgagcaauacugugcugg

SEQ ID NO: 516355 - RNA, 32 nt, Human
ugcagccaagcccagccccguggggaagggga

SEQ ID NO: 516356 - RNA, 23 nt, Human
ugcagccaagcucggcacuuugu

SEQ ID NO: 516357 - RNA, 21 nt, Human
ugcagccaaggcuguccccgc

SEQ ID NO: 516358 - RNA, 32 nt, Human
ugcagccaaguucacugucacgggggaaggag

SEQ ID NO: 516359 - RNA, 20 nt, Human
ugcagccaaugaccagaagc

SEQ ID NO: 516360 - RNA, 32 nt, Human
ugcagccaauugccuguugcagcuguggccac

SEQ ID NO: 516361 - RNA, 32 nt, Human
ugcagccacagaacaccuggugucaucagggc

SEQ ID NO: 516362 - RNA, 19 nt, Human
ugcagccacagcuccucca

SEQ ID NO: 516363 - RNA, 32 nt, Human
ugcagccacagcugcagccgcaggcccugcac

SEQ ID NO: 516364 - RNA, 32 nt, Human
ugcagccaccauguucagcuggcugaagcggg

SEQ ID NO: 516365 - RNA, 32 nt, Human
ugcagccaccguccugacguucaucggagcag

SEQ ID NO: 516366 - RNA, 23 nt, Human
ugcagccacgcaccucccgaucc

SEQ ID NO: 516367 - RNA, 24 nt, Human
ugcagccacugccucccagguuca

SEQ ID NO: 516368 - RNA, 24 nt, Human
ugcagccacugccuccuggguuca

SEQ ID NO: 516369 - RNA, 21 nt, Human
ugcagccagaacagguggcug

SEQ ID NO: 516370 - RNA, 32 nt, Human
ugcagccagaagccagaggauacccagggaca

SEQ ID NO: 516371 - RNA, 18 nt, Human
ugcagccagaauugugcu

SEQ ID NO: 516372 - RNA, 32 nt, Human
ugcagccagaccuauuccuccugggccccuca

SEQ ID NO: 516373 - RNA, 19 nt, Human
ugcagccagacuggaugcu

SEQ ID NO: 516374 - RNA, 32 nt, Human
ugcagccagagaaugcccacugccuguaacag

SEQ ID NO: 516375 - RNA, 21 nt, Human
ugcagccagcacccugggcuc

SEQ ID NO: 516376 - RNA, 21 nt, Human
ugcagccagccaccaacggcc

SEQ ID NO: 516377 - RNA, 32 nt, Human
ugcagccagccaucaaauagugaauggucucu

SEQ ID NO: 516378 - RNA, 23 nt, Human
ugcagccagcucuccugggauca

SEQ ID NO: 516379 - RNA, 32 nt, Human
ugcagccagcuggccugcacuggguguggaga

SEQ ID NO: 516380 - RNA, 20 nt, Human
ugcagccaggagaccgaugc

SEQ ID NO: 516381 - RNA, 18 nt, Human
ugcagccaggagacuugc

SEQ ID NO: 516382 - RNA, 32 nt, Human
ugcagccaggagacuugcaagggauuggugau

SEQ ID NO: 516383 - RNA, 32 nt, Human
ugcagccaggagagcagcaguuugcagcugac

SEQ ID NO: 516384 - RNA, 32 nt, Human
ugcagccaggcagaggcgaggaaggcuucucc

SEQ ID NO: 516385 - RNA, 32 nt, Human
ugcagccaggguagcugaaguuugggucuggg

SEQ ID NO: 516386 - RNA, 32 nt, Human
ugcagccagguaucucagguugcaauggucag

SEQ ID NO: 516387 - RNA, 32 nt, Human
ugcagccaguccagagagaauagagccugccc

SEQ ID NO: 516388 - RNA, 20 nt, Human
ugcagccaguuccaaugcug

SEQ ID NO: 516389 - RNA, 21 nt, Human
ugcagccaugaagggaugcua

SEQ ID NO: 516390 - RNA, 32 nt, Human
ugcagccaugucacuccucuugcugguggucu

SEQ ID NO: 516391 - RNA, 32 nt, Human
ugcagccauuuugccaccaugggaaaccuggg

SEQ ID NO: 516392 - RNA, 32 nt, Human
ugcagcccaacaaacaagggaacuaggaccga

SEQ ID NO: 516393 - RNA, 32 nt, Human
ugcagcccaaggcauccucugugucuccuacu

SEQ ID NO: 516394 - RNA, 32 nt, Human
ugcagcccacaggaguccagggaaggcgggga

SEQ ID NO: 516395 - RNA, 32 nt, Human
ugcagcccaccuggcuggaggugugcuggcuc

SEQ ID NO: 516396 - RNA, 32 nt, Human
ugcagcccagagcugcugggcccacuggccgu

SEQ ID NO: 516397 - RNA, 32 nt, Human
ugcagcccaggcccagugggggccagaggauc

SEQ ID NO: 516398 - RNA, 24 nt, Human
ugcagcccaggcuggagugcagug

SEQ ID NO: 516399 - RNA, 32 nt, Human
ugcagcccaguguggaggggcgagacuugggg

SEQ ID NO: 516400 - RNA, 32 nt, Human
ugcagcccauccgcgaccucaccaagaacugg

SEQ ID NO: 516401 - RNA, 32 nt, Human
ugcagcccauggagagcaacuacacggugcug

SEQ ID NO: 516402 - RNA, 32 nt, Human
ugcagccccagccugagcagcagccguucuca

SEQ ID NO: 516403 - RNA, 32 nt, Human
ugcagccccagcuggacuccagccugucccuc

SEQ ID NO: 516404 - RNA, 32 nt, Human
ugcagccccaggaagucccagaccuaaaacaa

SEQ ID NO: 516405 - RNA, 32 nt, Human
ugcagccccaggacuggacgaccugagacugc

SEQ ID NO: 516406 - RNA, 20 nt, Human
ugcagccccaggccccggcc

SEQ ID NO: 516407 - RNA, 32 nt, Human
ugcagccccauacccauacccaacccauugac

SEQ ID NO: 516408 - RNA, 18 nt, Human
ugcagccccaucuccuca

SEQ ID NO: 516409 - RNA, 22 nt, Human
ugcagccccauuucccaagcuc

SEQ ID NO: 516410 - RNA, 32 nt, Human
ugcagcccccgaccucccgggcucaggugauu

SEQ ID NO: 516411 - RNA, 32 nt, Human
ugcagcccccgccacccuuccuucccuucccu

SEQ ID NO: 516412 - RNA, 32 nt, Human
ugcagcccccggcauugaccuccugggugucc

SEQ ID NO: 516413 - RNA, 32 nt, Human
ugcagccccucccagccucucccgcuaggaga

SEQ ID NO: 516414 - RNA, 32 nt, Human
ugcagccccugccuucccugggugggcugaug

SEQ ID NO: 516415 - RNA, 32 nt, Human
ugcagccccuguccgggccucuugccugccgc

SEQ ID NO: 516416 - RNA, 32 nt, Human
ugcagcccgaaaccuccagucacugcgcccgg

SEQ ID NO: 516417 - RNA, 32 nt, Human
ugcagcccgccuggcccagcggccaggccugc

SEQ ID NO: 516418 - RNA, 32 nt, Human
ugcagcccggcuucccgcugcagcacgacggu

SEQ ID NO: 516419 - RNA, 32 nt, Human
ugcagcccgugaauucaagaccagccuggcca

SEQ ID NO: 516420 - RNA, 32 nt, Human
ugcagcccuagugccuuagcuccaugcccggc

SEQ ID NO: 516421 - RNA, 32 nt, Human
ugcagcccuccagcucuggcccucagcugcuu

SEQ ID NO: 516422 - RNA, 25 nt, Human
ugcagcccucgaccuccugggcuca

SEQ ID NO: 516423 - RNA, 32 nt, Human
ugcagcccucgaccuccugggcucaagugauc

SEQ ID NO: 516424 - RNA, 32 nt, Human
ugcagcccucuuggggcuccaggauuugcuga

SEQ ID NO: 516425 - RNA, 32 nt, Human
ugcagcccugcaggugccugggcacugaugga

SEQ ID NO: 516426 - RNA, 32 nt, Human
ugcagcccugcuccagccuuggccucuccuga

SEQ ID NO: 516427 - RNA, 32 nt, Human
ugcagcccuugccucuuucccacagguuccac

SEQ ID NO: 516428 - RNA, 21 nt, Human
ugcagccgcugccuccugggc

SEQ ID NO: 516429 - RNA, 32 nt, Human
ugcagccggacccugcucgaugggcacgacug

SEQ ID NO: 516430 - RNA, 32 nt, Human
ugcagccggcggaucccucuucccaggcuccg

SEQ ID NO: 516431 - RNA, 19 nt, Human
ugcagccgugaagaaugcu

SEQ ID NO: 516432 - RNA, 32 nt, Human
ugcagccguggucccguccacgcccaccucag

SEQ ID NO: 516433 - RNA, 32 nt, Human
ugcagccguucugaacaccacccuccauuuca

SEQ ID NO: 516434 - RNA, 24 nt, Human
ugcagccuagaccugcugggcuca

SEQ ID NO: 516435 - RNA, 32 nt, Human
ugcagccuaggugacagagcgagacccugucu

SEQ ID NO: 516436 - RNA, 32 nt, Human
ugcagccuaguggaaggugcugagggggcccu

SEQ ID NO: 516437 - RNA, 32 nt, Human
ugcagccuauggaucaaggagugauuucaacu

SEQ ID NO: 516438 - RNA, 24 nt, Human
ugcagccucaaacuacugggcuca

SEQ ID NO: 516439 - RNA, 24 nt, Human
ugcagccucaaacuccuaggcuca

SEQ ID NO: 516440 - RNA, 24 nt, Human
ugcagccucaaacuccugagccca

SEQ ID NO: 516441 - RNA, 23 nt, Human
ugcagccucaaacuccugggcuc

SEQ ID NO: 516442 - RNA, 24 nt, Human
ugcagccucaaacuccugggcuca

SEQ ID NO: 516443 - RNA, 24 nt, Human
ugcagccucaaauuccugggcuca

SEQ ID NO: 516444 - RNA, 24 nt, Human
ugcagccucaaccucccaggcuca

SEQ ID NO: 516445 - RNA, 24 nt, Human
ugcagccucaaccuccugagcuca

SEQ ID NO: 516446 - RNA, 24 nt, Human
ugcagccucaaccuccuggacuca

SEQ ID NO: 516447 - RNA, 22 nt, Human
ugcagccucaaccuccugggcu

SEQ ID NO: 516448 - RNA, 24 nt, Human
ugcagccucaaccuccugggcuca

SEQ ID NO: 516449 - RNA, 24 nt, Human
ugcagccucaaccugcugggcuca

SEQ ID NO: 516450 - RNA, 21 nt, Human
ugcagccucaaccuggguuca

SEQ ID NO: 516451 - RNA, 24 nt, Human
ugcagccucaacuucccaggcuca

SEQ ID NO: 516452 - RNA, 24 nt, Human
ugcagccucaacuuccuggacuca

SEQ ID NO: 516453 - RNA, 24 nt, Human
ugcagccucaaucuccuggucuca

SEQ ID NO: 516454 - RNA, 24 nt, Human
ugcagccucaaucuuccaggcuca

SEQ ID NO: 516455 - RNA, 24 nt, Human
ugcagccucagacuccuggguuca

SEQ ID NO: 516456 - RNA, 24 nt, Human
ugcagccucagcguccugggcuca

SEQ ID NO: 516457 - RNA, 24 nt, Human
ugcagccucauacuccugggcuca

SEQ ID NO: 516458 - RNA, 24 nt, Human
ugcagccuccaacuccuagccuca

SEQ ID NO: 516459 - RNA, 24 nt, Human
ugcagccuccaacuccugggcuca

SEQ ID NO: 516460 - RNA, 32 nt, Human
ugcagccuccaccccuacagugcugccaucug

SEQ ID NO: 516461 - RNA, 19 nt, Human
ugcagccuccacccggcuc

SEQ ID NO: 516462 - RNA, 24 nt, Human
ugcagccuccaccuccagaguuca

SEQ ID NO: 516463 - RNA, 24 nt, Human
ugcagccuccaccuccaggguuca

SEQ ID NO: 516464 - RNA, 24 nt, Human
ugcagccuccaccucccaggcuca

SEQ ID NO: 516465 - RNA, 24 nt, Human
ugcagccuccaccucccagguuca

SEQ ID NO: 516466 - RNA, 23 nt, Human
ugcagccuccaccuccccgguuc

SEQ ID NO: 516467 - RNA, 24 nt, Human
ugcagccuccaccuccccgguuca

SEQ ID NO: 516468 - RNA, 23 nt, Human
ugcagccuccaccucccgggcuc

SEQ ID NO: 516469 - RNA, 24 nt, Human
ugcagccuccaccucccggguuca

SEQ ID NO: 516470 - RNA, 24 nt, Human
ugcagccuccaccuccuaggcuca

SEQ ID NO: 516471 - RNA, 23 nt, Human
ugcagccuccaccuccugggcuc

SEQ ID NO: 516472 - RNA, 24 nt, Human
ugcagccuccaccuccugggcuca

SEQ ID NO: 516473 - RNA, 24 nt, Human
ugcagccuccaccuccuggguuca

SEQ ID NO: 516474 - RNA, 23 nt, Human
ugcagccuccaccuccuugacuc

SEQ ID NO: 516475 - RNA, 24 nt, Human
ugcagccuccaccugccaggcuca

SEQ ID NO: 516476 - RNA, 24 nt, Human
ugcagccuccacuuccuggguuca

SEQ ID NO: 516477 - RNA, 32 nt, Human
ugcagccuccauccucuggguucaagcaauuc

SEQ ID NO: 516478 - RNA, 32 nt, Human
ugcagccuccaucucccggggcucaggugauu

SEQ ID NO: 516479 - RNA, 24 nt, Human
ugcagccuccaucucccggguuca

SEQ ID NO: 516480 - RNA, 24 nt, Human
ugcagccuccaucuccuaggcuca

SEQ ID NO: 516481 - RNA, 24 nt, Human
ugcagccuccaucuccugggcuca

SEQ ID NO: 516482 - RNA, 24 nt, Human
ugcagccuccccaaucccagccca

SEQ ID NO: 516483 - RNA, 32 nt, Human
ugcagccucccugccucacauugcuaagacuc

SEQ ID NO: 516484 - RNA, 32 nt, Human
ugcagccuccgacuccugcuggcuccaggaac

SEQ ID NO: 516485 - RNA, 24 nt, Human
ugcagccuccgccaccuggguuca

SEQ ID NO: 516486 - RNA, 24 nt, Human
ugcagccuccgccucccgaguuca

SEQ ID NO: 516487 - RNA, 24 nt, Human
ugcagccuccgccucccggguuca

SEQ ID NO: 516488 - RNA, 24 nt, Human
ugcagccuccgcuuccuggguuca

SEQ ID NO: 516489 - RNA, 22 nt, Human
ugcagccuccguccuggccuca

SEQ ID NO: 516490 - RNA, 32 nt, Human
ugcagccuccucccccugagcauucauucucu

SEQ ID NO: 516491 - RNA, 23 nt, Human
ugcagccuccucccuaaagcuca

SEQ ID NO: 516492 - RNA, 32 nt, Human
ugcagccuccucucccccagcuccuggaagca

SEQ ID NO: 516493 - RNA, 24 nt, Human
ugcagccuccuucuccugggucca

SEQ ID NO: 516494 - RNA, 22 nt, Human
ugcagccucgaacaccugggcu

SEQ ID NO: 516495 - RNA, 24 nt, Human
ugcagccucgaacuccugggcuca

SEQ ID NO: 516496 - RNA, 24 nt, Human
ugcagccucgaacuccugggcuua

SEQ ID NO: 516497 - RNA, 24 nt, Human
ugcagccucgaaucccugggcuca

SEQ ID NO: 516498 - RNA, 23 nt, Human
ugcagccucgacaccuggguuca

SEQ ID NO: 516499 - RNA, 23 nt, Human
ugcagccucgaccucccaggcuc

SEQ ID NO: 516500 - RNA, 24 nt, Human
ugcagccucgaccucccaggcuca

SEQ ID NO: 516501 - RNA, 24 nt, Human
ugcagccucgaccuccccagcuca

SEQ ID NO: 516502 - RNA, 24 nt, Human
ugcagccucgaccucccgggcuca

SEQ ID NO: 516503 - RNA, 25 nt, Human
ugcagccucgaccucccugggcuca

SEQ ID NO: 516504 - RNA, 24 nt, Human
ugcagccucgaccuccugggcuca

SEQ ID NO: 516505 - RNA, 24 nt, Human
ugcagccucgacuuccugggcuca

SEQ ID NO: 516506 - RNA, 32 nt, Human
ugcagccucggcagggcagguacaggggccac

SEQ ID NO: 516507 - RNA, 24 nt, Human
ugcagccucuaacuccugggcuca

SEQ ID NO: 516508 - RNA, 24 nt, Human
ugcagccucuaccuccccaggcuc

SEQ ID NO: 516509 - RNA, 24 nt, Human
ugcagccucuauuucccaggcuca

SEQ ID NO: 516510 - RNA, 32 nt, Human
ugcagccucucaucucacacugugaguccagc

SEQ ID NO: 516511 - RNA, 21 nt, Human
ugcagccucuccccgaccuca

SEQ ID NO: 516512 - RNA, 32 nt, Human
ugcagccucugccuccagcccggcagcucugg

SEQ ID NO: 516513 - RNA, 24 nt, Human
ugcagccucugccucccagguuca

SEQ ID NO: 516514 - RNA, 24 nt, Human
ugcagccucugccuccuggguuca

SEQ ID NO: 516515 - RNA, 32 nt, Human
ugcagccucugccucucucagccgcaucaccc

SEQ ID NO: 516516 - RNA, 32 nt, Human
ugcagccucugccuucugggcucacgugaucc

SEQ ID NO: 516517 - RNA, 32 nt, Human
ugcagccucugcucagaacgcccuuccuccag

SEQ ID NO: 516518 - RNA, 23 nt, Human
ugcagccucugucccuggguuca

SEQ ID NO: 516519 - RNA, 24 nt, Human
ugcagccucugucucccgggcuca

SEQ ID NO: 516520 - RNA, 32 nt, Human
ugcagccugcaaucccagcuacuugagaggcu

SEQ ID NO: 516521 - RNA, 21 nt, Human
ugcagccugcagaacuggggc

SEQ ID NO: 516522 - RNA, 32 nt, Human
ugcagccugcagccuccggccggccggcgagc

SEQ ID NO: 516523 - RNA, 32 nt, Human
ugcagccugccuggcuccgccccuagugcccc

SEQ ID NO: 516524 - RNA, 19 nt, Human
ugcagccugcggggccaag

SEQ ID NO: 516525 - RNA, 32 nt, Human
ugcagccugcucccuccuacccuggccucaag

SEQ ID NO: 516526 - RNA, 32 nt, Human
ugcagccuggaaccuccagucacugugccagc

SEQ ID NO: 516527 - RNA, 24 nt, Human
ugcagccuggaacuccugggauca

SEQ ID NO: 516528 - RNA, 24 nt, Human
ugcagccuggaacuccugggcuca

SEQ ID NO: 516529 - RNA, 24 nt, Human
ugcagccuggaacuccuuggcuca

SEQ ID NO: 516530 - RNA, 24 nt, Human
ugcagccuggaauuccugggcuca

SEQ ID NO: 516531 - RNA, 32 nt, Human
ugcagccuggacaacaugaugagauccccauc

SEQ ID NO: 516532 - RNA, 32 nt, Human
ugcagccuggacaguagagcgagaccccaucu

SEQ ID NO: 516533 - RNA, 24 nt, Human
ugcagccuggaccuccuagccuca

SEQ ID NO: 516534 - RNA, 21 nt, Human
ugcagccuggagcuccugggc

SEQ ID NO: 516535 - RNA, 32 nt, Human
ugcagccuggaugacagagcgagacucuaucu

SEQ ID NO: 516536 - RNA, 22 nt, Human
ugcagccuggcugggcuggagc

SEQ ID NO: 516537 - RNA, 32 nt, Human
ugcagccugggaggagcuuuugcugcggaugc

SEQ ID NO: 516538 - RNA, 31 nt, Human
ugcagccugggcaacacagugagacccuguc

SEQ ID NO: 516539 - RNA, 32 nt, Human
ugcagccugggcaacagaaugagacugugucu

SEQ ID NO: 516540 - RNA, 32 nt, Human
ugcagccugggcaacauagcaagacucugucu

SEQ ID NO: 516541 - RNA, 32 nt, Human
ugcagccugggcgacagagcgagauucugccu

SEQ ID NO: 516542 - RNA, 32 nt, Human
ugcagccugggugacaaagcaagacccugugu

SEQ ID NO: 516543 - RNA, 32 nt, Human
ugcagccugggugacacuccagccugggugac

SEQ ID NO: 516544 - RNA, 32 nt, Human
ugcagccugggugacagaaugagacugcaucu

SEQ ID NO: 516545 - RNA, 32 nt, Human
ugcagccugggugacagaaugugacucugucu

SEQ ID NO: 516546 - RNA, 32 nt, Human
ugcagccugggugacagagcaagacccugucu

SEQ ID NO: 516547 - RNA, 32 nt, Human
ugcagccugggugacagagugagacucugucu

SEQ ID NO: 516548 - RNA, 32 nt, Human
ugcagccuggguggcagagugagacccagucu

SEQ ID NO: 516549 - RNA, 32 nt, Human
ugcagccugguguuuuaccuccuucacucucu

SEQ ID NO: 516550 - RNA, 32 nt, Human
ugcagccugguuggcagcaucugcuccaucgg

SEQ ID NO: 516551 - RNA, 32 nt, Human
ugcagccugucaucccugucugugaccauugg

SEQ ID NO: 516552 - RNA, 24 nt, Human
ugcagccugugucuccuggguuca

SEQ ID NO: 516553 - RNA, 24 nt, Human
ugcagccuucaauuccugggcuca

SEQ ID NO: 516554 - RNA, 24 nt, Human
ugcagccuucaccucccggguuca

SEQ ID NO: 516555 - RNA, 32 nt, Human
ugcagccuuccagauuuagaggcacugggagg

SEQ ID NO: 516556 - RNA, 32 nt, Human
ugcagccuucgagggccagcccucuccgaguc

SEQ ID NO: 516557 - RNA, 24 nt, Human
ugcagccuucgccucccggguuca

SEQ ID NO: 516558 - RNA, 24 nt, Human
ugcagccuugaacaccugagcuca

SEQ ID NO: 516559 - RNA, 24 nt, Human
ugcagccuugaacaccuggacuca

SEQ ID NO: 516560 - RNA, 24 nt, Human
ugcagccuugaacuccuaggcuca

SEQ ID NO: 516561 - RNA, 24 nt, Human
ugcagccuugaacuccugagcuca

SEQ ID NO: 516562 - RNA, 24 nt, Human
ugcagccuugaacuccuggccuca

SEQ ID NO: 516563 - RNA, 24 nt, Human
ugcagccuugaacuccugggauca

SEQ ID NO: 516564 - RNA, 22 nt, Human
ugcagccuugaacuccugggcu

SEQ ID NO: 516565 - RNA, 24 nt, Human
ugcagccuugaacuccugggcuca

SEQ ID NO: 516566 - RNA, 24 nt, Human
ugcagccuugaacuccugggcuua

SEQ ID NO: 516567 - RNA, 23 nt, Human
ugcagccuugaacucugggcuca

SEQ ID NO: 516568 - RNA, 23 nt, Human
ugcagccuugaauuccugggcuc

SEQ ID NO: 516569 - RNA, 24 nt, Human
ugcagccuugaccucaugggcuca

SEQ ID NO: 516570 - RNA, 24 nt, Human
ugcagccuugaccuccagggcuca

SEQ ID NO: 516571 - RNA, 24 nt, Human
ugcagccuugaccucccaggcuca

SEQ ID NO: 516572 - RNA, 24 nt, Human
ugcagccuugaccucccgggcuca

SEQ ID NO: 516573 - RNA, 24 nt, Human
ugcagccuugaccuccuaggauca

SEQ ID NO: 516574 - RNA, 24 nt, Human
ugcagccuugaccuccugagcuca

SEQ ID NO: 516575 - RNA, 22 nt, Human
ugcagccuugaccuccugggcu

SEQ ID NO: 516576 - RNA, 24 nt, Human
ugcagccuugaccuccugggcuca

SEQ ID NO: 516577 - RNA, 24 nt, Human
ugcagccuugacuuccugggcuca

SEQ ID NO: 516578 - RNA, 24 nt, Human
ugcagccuugaucucccaggcuca

SEQ ID NO: 516579 - RNA, 24 nt, Human
ugcagccuugauuucccgggcuca

SEQ ID NO: 516580 - RNA, 25 nt, Human
ugcagccuuggcuucccugggcuca

SEQ ID NO: 516581 - RNA, 24 nt, Human
ugcagccuuguccucccaggcuca

SEQ ID NO: 516582 - RNA, 32 nt, Human
ugcagccuugugacuuuuauaaaacaagugau

SEQ ID NO: 516583 - RNA, 32 nt, Human
ugcagccuuguggauuuuccacacagcagcuu

SEQ ID NO: 516584 - RNA, 23 nt, Human
ugcagccuuguguccaccaccaa

SEQ ID NO: 516585 - RNA, 24 nt, Human
ugcagccuuuaacuacugggcuca

SEQ ID NO: 516586 - RNA, 32 nt, Human
ugcagccuuugcagaccacacagcucgguccc

SEQ ID NO: 516587 - RNA, 22 nt, Human
ugcagccuuuggcucaagcuca

SEQ ID NO: 516588 - RNA, 32 nt, Human
ugcagcgacauggagggagcugcuuugcugag

SEQ ID NO: 516589 - RNA, 21 nt, Human
ugcagcgagcagccggcgcgg

SEQ ID NO: 516590 - RNA, 32 nt, Human
ugcagcgaggucugggaacacccugggugagg

SEQ ID NO: 516591 - RNA, 32 nt, Human
ugcagcgagguugaugcccagguccagcacug

SEQ ID NO: 516592 - RNA, 32 nt, Human
ugcagcgaucauggcucagugcagccucaaac

SEQ ID NO: 516593 - RNA, 32 nt, Human
ugcagcgcaccagcacggcacauguauacaua

SEQ ID NO: 516594 - RNA, 32 nt, Human
ugcagcgcaccagcauggcacauguauacaua

SEQ ID NO: 516595 - RNA, 32 nt, Human
ugcagcgcaccagcauggcacauguauacgua

SEQ ID NO: 516596 - RNA, 32 nt, Human
ugcagcgcaccagcguggcacauguauacaua

SEQ ID NO: 516597 - RNA, 22 nt, Human
ugcagcgccacaguccccggcc

SEQ ID NO: 516598 - RNA, 32 nt, Human
ugcagcgccagccucacuaucaguguggacac

SEQ ID NO: 516599 - RNA, 32 nt, Human
ugcagcgccucgggggaucccuggccgcgcau

SEQ ID NO: 516600 - RNA, 22 nt, Human
ugcagcgccuucaaauguuuau

SEQ ID NO: 516601 - RNA, 32 nt, Human
ugcagcgccuugcugggcuccuggguuggacu

SEQ ID NO: 516602 - RNA, 32 nt, Human
ugcagcgcgaacacaaacaggcccagcagagc

SEQ ID NO: 516603 - RNA, 32 nt, Human
ugcagcgcgcuccugaccccucccugcagggg

SEQ ID NO: 516604 - RNA, 32 nt, Human
ugcagcgcgggugggagccccgggcggaaccg

SEQ ID NO: 516605 - RNA, 23 nt, Human
ugcagcgcugagauuccuuuaca

SEQ ID NO: 516606 - RNA, 32 nt, Human
ugcagcggacuugcuccagccugggugaggag

SEQ ID NO: 516607 - RNA, 32 nt, Human
ugcagcggagagucugcccaccccggagacac

SEQ ID NO: 516608 - RNA, 32 nt, Human
ugcagcggaggcacuuuggaagaaugacucug

SEQ ID NO: 516609 - RNA, 22 nt, Human
ugcagcggcacaaaugcaccuc

SEQ ID NO: 516610 - RNA, 22 nt, Human
ugcagcggccacacuguacucu

SEQ ID NO: 516611 - RNA, 23 nt, Human
ugcagcggccggcucucaccucu

SEQ ID NO: 516612 - RNA, 32 nt, Human
ugcagcgggggagcucuggggagcagcuugug

SEQ ID NO: 516613 - RNA, 32 nt, Human
ugcagcggguggaucacuugagguaaggaguu

SEQ ID NO: 516614 - RNA, 32 nt, Human
ugcagcguccgagggccaccgggcuggcauuu

SEQ ID NO: 516615 - RNA, 32 nt, Human
ugcagcguugggaggagcagagccagggagcc

SEQ ID NO: 516616 - RNA, 32 nt, Human
ugcagcuaaaggccaccaaggcagaacaggca

SEQ ID NO: 516617 - RNA, 21 nt, Human
ugcagcuaacccacccaccaa

SEQ ID NO: 516618 - RNA, 32 nt, Human
ugcagcuaagcaugauugacccugccagagga

SEQ ID NO: 516619 - RNA, 32 nt, Human
ugcagcuaagugguccuggggcauggagucuu

SEQ ID NO: 516620 - RNA, 32 nt, Human
ugcagcuacagaaauccaaggccuggcauggc

SEQ ID NO: 516621 - RNA, 20 nt, Human
ugcagcuaccagacauggug

SEQ ID NO: 516622 - RNA, 32 nt, Human
ugcagcuaccucagugcgcagggcccgucugu

SEQ ID NO: 516623 - RNA, 32 nt, Human
ugcagcuaccugcacuucuagaugcuccccag

SEQ ID NO: 516624 - RNA, 32 nt, Human
ugcagcuagaggcaucuucuacgggauggcca

SEQ ID NO: 516625 - RNA, 32 nt, Human
ugcagcuauacgcaagauuaaggcugggacuu

SEQ ID NO: 516626 - RNA, 16 nt, Human
ugcagcuaucucucca

SEQ ID NO: 516627 - RNA, 32 nt, Human
ugcagcuauggugggagccacauaggaacuuc

SEQ ID NO: 516628 - RNA, 32 nt, Human
ugcagcucaagaaacugaaggaugaguacguc

SEQ ID NO: 516629 - RNA, 32 nt, Human
ugcagcucacaccacuccagaaccugacaagg

SEQ ID NO: 516630 - RNA, 26 nt, Human
ugcagcucaccucccuccuguucaca

SEQ ID NO: 516631 - RNA, 32 nt, Human
ugcagcucacggggcagaaccagcacaucugg

SEQ ID NO: 516632 - RNA, 32 nt, Human
ugcagcucacuccaugccacacgggugggcca

SEQ ID NO: 516633 - RNA, 32 nt, Human
ugcagcucagccaccuccuccucucaggucug

SEQ ID NO: 516634 - RNA, 32 nt, Human
ugcagcucagcccagagccacuuguaauugau

SEQ ID NO: 516635 - RNA, 32 nt, Human
ugcagcucagggacuggcacacuggccuccag

SEQ ID NO: 516636 - RNA, 19 nt, Human
ugcagcucagucccugcca

SEQ ID NO: 516637 - RNA, 32 nt, Human
ugcagcuccagugcccugagcucccagccaca

SEQ ID NO: 516638 - RNA, 32 nt, Human
ugcagcucccuccgugccucagaucugcugua

SEQ ID NO: 516639 - RNA, 31 nt, Human
ugcagcucccucucugguccugggucccaca

SEQ ID NO: 516640 - RNA, 32 nt, Human
ugcagcuccguuuggcagugcaaugguauaaa

SEQ ID NO: 516641 - RNA, 32 nt, Human
ugcagcuccuggaggcagacgcuggagggcug

SEQ ID NO: 516642 - RNA, 32 nt, Human
ugcagcucgcguaucccaaccccagguaccaa

SEQ ID NO: 516643 - RNA, 32 nt, Human
ugcagcucgggugucuguggcuucuaaccuug

SEQ ID NO: 516644 - RNA, 22 nt, Human
ugcagcucugucccagccuuca

SEQ ID NO: 516645 - RNA, 32 nt, Human
ugcagcucuucuuccugcucccugcacauuga

SEQ ID NO: 516646 - RNA, 32 nt, Human
ugcagcucuuguugaagacacaaucagacuua

SEQ ID NO: 516647 - RNA, 32 nt, Human
ugcagcugaccaggguuugugcagugaucuuc

SEQ ID NO: 516648 - RNA, 32 nt, Human
ugcagcugagagcaggagcaggaaaaggaggc

SEQ ID NO: 516649 - RNA, 32 nt, Human
ugcagcugagagccggagcuuccuucagcucg

SEQ ID NO: 516650 - RNA, 32 nt, Human
ugcagcugagccacuagcacauggagucaccu

SEQ ID NO: 516651 - RNA, 32 nt, Human
ugcagcugaugccaaaguugugguguccagug

SEQ ID NO: 516652 - RNA, 32 nt, Human
ugcagcugcaaaaugacuacagccugaagggc

SEQ ID NO: 516653 - RNA, 32 nt, Human
ugcagcugcacuccagucuuuaagcccagcug

SEQ ID NO: 516654 - RNA, 21 nt, Human
ugcagcugcagcccgaccgcg

SEQ ID NO: 516655 - RNA, 19 nt, Human
ugcagcugcagccggggcg

SEQ ID NO: 516656 - RNA, 18 nt, Human
ugcagcugcagccugcca

SEQ ID NO: 516657 - RNA, 32 nt, Human
ugcagcugcagcuggagaaugaagaagacaua

SEQ ID NO: 516658 - RNA, 19 nt, Human
ugcagcugcaggacugagc

SEQ ID NO: 516659 - RNA, 32 nt, Human
ugcagcugcccaggcgcuauggcgagugcggu

SEQ ID NO: 516660 - RNA, 18 nt, Human
ugcagcugccccacccca

SEQ ID NO: 516661 - RNA, 21 nt, Human
ugcagcugccgccgccgccac

SEQ ID NO: 516662 - RNA, 32 nt, Human
ugcagcugcuccauccuccccugaauuuguac

SEQ ID NO: 516663 - RNA, 32 nt, Human
ugcagcugcugcaggggauggggaagggaugg

SEQ ID NO: 516664 - RNA, 32 nt, Human
ugcagcuggaauucuccucuuggucccagggc

SEQ ID NO: 516665 - RNA, 32 nt, Human
ugcagcuggacgacauccagcaugccaucgcc

SEQ ID NO: 516666 - RNA, 32 nt, Human
ugcagcuggagcagaggagcucacgccugcgg

SEQ ID NO: 516667 - RNA, 32 nt, Human
ugcagcugggauuugaaccaggccuucugauu

SEQ ID NO: 516668 - RNA, 32 nt, Human
ugcagcugggcugagcggggagucagcucaga

SEQ ID NO: 516669 - RNA, 32 nt, Human
ugcagcuggggcuugagcuggagcucgguuag

SEQ ID NO: 516670 - RNA, 32 nt, Human
ugcagcugggguccccggugcagccucgucag

SEQ ID NO: 516671 - RNA, 32 nt, Human
ugcagcuggugaacuuugccuaucgggacuug

SEQ ID NO: 516672 - RNA, 32 nt, Human
ugcagcuguacaacaagguggacccuggagag

SEQ ID NO: 516673 - RNA, 32 nt, Human
ugcagcugucgcuuugcagugccuguaggacu

SEQ ID NO: 516674 - RNA, 32 nt, Human
ugcagcugucuucuccucagugcuggcgcucu

SEQ ID NO: 516675 - RNA, 32 nt, Human
ugcagcugugcucaccccaggucaucagacuc

SEQ ID NO: 516676 - RNA, 32 nt, Human
ugcagcuguggacccaggaaucucuguacucu

SEQ ID NO: 516677 - RNA, 32 nt, Human
ugcagcuguggcuguggcugaagcuggcggau

SEQ ID NO: 516678 - RNA, 32 nt, Human
ugcagcuguggucccagcuacucaggaggcug

SEQ ID NO: 516679 - RNA, 32 nt, Human
ugcagcuguguagugcuggacagugacaaccc

SEQ ID NO: 516680 - RNA, 32 nt, Human
ugcagcuguguuuguugcugggagcggcggca

SEQ ID NO: 516681 - RNA, 32 nt, Human
ugcagcuguuuaacuugaaagacacugucgga

SEQ ID NO: 516682 - RNA, 32 nt, Human
ugcagcuuacgguccguucccuggaggggugg

SEQ ID NO: 516683 - RNA, 24 nt, Human
ugcagcuucaacuuccugggcuca

SEQ ID NO: 516684 - RNA, 22 nt, Human
ugcagcuucacuccugaagcca

SEQ ID NO: 516685 - RNA, 21 nt, Human
ugcagcuucacuccugagcca

SEQ ID NO: 516686 - RNA, 32 nt, Human
ugcagcuucacuugcuggagugccaaguagau

SEQ ID NO: 516687 - RNA, 32 nt, Human
ugcagcuucauuuugggcugccuuagccauga

SEQ ID NO: 516688 - RNA, 21 nt, Human
ugcagcuuccaaaucucauac

SEQ ID NO: 516689 - RNA, 21 nt, Human
ugcagcuuccacauuauacug

SEQ ID NO: 516690 - RNA, 24 nt, Human
ugcagcuuccacuuccugggcuca

SEQ ID NO: 516691 - RNA, 31 nt, Human
ugcagcuucuaguuuaagaccaaagcccuuc

SEQ ID NO: 516692 - RNA, 32 nt, Human
ugcagcuucuguggccaagccccagccugcac

SEQ ID NO: 516693 - RNA, 31 nt, Human
ugcagcuucuucuguaaccuaccucagaggg

SEQ ID NO: 516694 - RNA, 21 nt, Human
ugcagcuugacucugggccca

SEQ ID NO: 516695 - RNA, 32 nt, Human
ugcagcuugcccauggcccuaggcagcgaggg

SEQ ID NO: 516696 - RNA, 32 nt, Human
ugcagcuugcuacugugguggagguuccauug

SEQ ID NO: 516697 - RNA, 21 nt, Human
ugcagcuuucaagcucaucug

SEQ ID NO: 516698 - RNA, 24 nt, Human
ugcagcuuugaccuccugggcuua

SEQ ID NO: 516699 - RNA, 32 nt, Human
ugcagcuuugaccuugccgggcucaggugacc

SEQ ID NO: 516700 - RNA, 24 nt, Human
ugcagcuuugacuuccugggcuca

SEQ ID NO: 516701 - RNA, 32 nt, Human
ugcagcuuugggacagaugaguggcucugucc

SEQ ID NO: 516702 - RNA, 32 nt, Human
ugcagcuuuguuguccuuugagcuuucuguua

SEQ ID NO: 516703 - RNA, 32 nt, Human
ugcagcuuuugccuugguucuuccuagugccu

SEQ ID NO: 516704 - RNA, 24 nt, Human
ugcagcuuuuugugcccucuacug

SEQ ID NO: 516705 - RNA, 32 nt, Human
ugcaggaaacaccuagagcagccccagaguca

SEQ ID NO: 516706 - RNA, 23 nt, Human
ugcaggaacagcacuuccugcca

SEQ ID NO: 516707 - RNA, 32 nt, Human
ugcaggaacagcucuagucuacuaagcugaac

SEQ ID NO: 516708 - RNA, 23 nt, Human
ugcaggaacccuggccaugggag

SEQ ID NO: 516709 - RNA, 22 nt, Human
ugcaggaacguggagacccuga

SEQ ID NO: 516710 - RNA, 32 nt, Human
ugcaggaacuauucaacuuaguucccaacaug

SEQ ID NO: 516711 - RNA, 32 nt, Human
ugcaggaagaaaggaagagaauggaaauugcu

SEQ ID NO: 516712 - RNA, 32 nt, Human
ugcaggaaggagagaggaagaggagcagaagg

SEQ ID NO: 516713 - RNA, 32 nt, Human
ugcaggaagggaggguggcgagggggaagcga

SEQ ID NO: 516714 - RNA, 32 nt, Human
ugcaggaagucaaacacgaacucaaagaggac

SEQ ID NO: 516715 - RNA, 23 nt, Human
ugcaggaaugucccuucccacca

SEQ ID NO: 516716 - RNA, 32 nt, Human
ugcaggacaaacgccccugcccugccagaauc

SEQ ID NO: 516717 - RNA, 32 nt, Human
ugcaggacacauuuugccauguaaacuaacau

SEQ ID NO: 516718 - RNA, 32 nt, Human
ugcaggacagaucaggucagagcccaggaauu

SEQ ID NO: 516719 - RNA, 20 nt, Human
ugcaggacaguaagcccuca

SEQ ID NO: 516720 - RNA, 32 nt, Human
ugcaggaccagaaccccugccuccaucuuucc

SEQ ID NO: 516721 - RNA, 32 nt, Human
ugcaggaccaugguggcuuuaguuucuacccc

SEQ ID NO: 516722 - RNA, 32 nt, Human
ugcaggaccccuggccagucugaauagcagga

SEQ ID NO: 516723 - RNA, 19 nt, Human
ugcaggaccccuuccccca

SEQ ID NO: 516724 - RNA, 32 nt, Human
ugcaggacccuccccugcuccaugugacccuc

SEQ ID NO: 516725 - RNA, 32 nt, Human
ugcaggaccugcccuccacugcccagcugcug

SEQ ID NO: 516726 - RNA, 32 nt, Human
ugcaggaccuucugccccagcugggccuggug

SEQ ID NO: 516727 - RNA, 32 nt, Human
ugcaggacgagaaacgcccgcggcaccaaagc

SEQ ID NO: 516728 - RNA, 32 nt, Human
ugcaggacucaccucugugccuugcugcuccu

SEQ ID NO: 516729 - RNA, 32 nt, Human
ugcaggacuccaguggaagugaaagaacuggg

SEQ ID NO: 516730 - RNA, 32 nt, Human
ugcaggacuccuuuccucaucccaggcucgga

SEQ ID NO: 516731 - RNA, 32 nt, Human
ugcaggacuggaaguugcucugggugagucaa

SEQ ID NO: 516732 - RNA, 32 nt, Human
ugcaggagaaaagauaauuggcucaggucucg

SEQ ID NO: 516733 - RNA, 32 nt, Human
ugcaggagaacgccaguggccgggggaacaug

SEQ ID NO: 516734 - RNA, 32 nt, Human
ugcaggagaaggacuugcccgcauggagcuau

SEQ ID NO: 516735 - RNA, 32 nt, Human
ugcaggagacaaggucucgccauguugccuag

SEQ ID NO: 516736 - RNA, 32 nt, Human
ugcaggagacgagagaauaugagucuccaucu

SEQ ID NO: 516737 - RNA, 32 nt, Human
ugcaggagagugaccaggagcccggggcagcu

SEQ ID NO: 516738 - RNA, 32 nt, Human
ugcaggagcacuuggcccugccuuaccugcca

SEQ ID NO: 516739 - RNA, 32 nt, Human
ugcaggagcagucugcaauuuaugccuacagg

SEQ ID NO: 516740 - RNA, 32 nt, Human
ugcaggagcauccugaagaccaggagaagguu

SEQ ID NO: 516741 - RNA, 32 nt, Human
ugcaggagccagaaagagauccuggccugaga

SEQ ID NO: 516742 - RNA, 19 nt, Human
ugcaggagccuagcaggaa

SEQ ID NO: 516743 - RNA, 32 nt, Human
ugcaggagccugggcugacugguugggacuca

SEQ ID NO: 516744 - RNA, 32 nt, Human
ugcaggagcucaaggaccugggcgucaccgug

SEQ ID NO: 516745 - RNA, 32 nt, Human
ugcaggagcuucugugggaguacggucaugag

SEQ ID NO: 516746 - RNA, 23 nt, Human
ugcaggaggaaaagaacaggcag

SEQ ID NO: 516747 - RNA, 32 nt, Human
ugcaggaggagaaggaggaggagcaggaggug

SEQ ID NO: 516748 - RNA, 32 nt, Human
ugcaggaggauguagcgccucaguuuauuuua

SEQ ID NO: 516749 - RNA, 32 nt, Human
ugcaggaggccaaacugucccucccuugcuga

SEQ ID NO: 516750 - RNA, 23 nt, Human
ugcaggaggcccgcagccgggaa

SEQ ID NO: 516751 - RNA, 23 nt, Human
ugcaggagggcacuggagcuggg

SEQ ID NO: 516752 - RNA, 32 nt, Human
ugcaggaggucgggaaaggcaguccugguaga

SEQ ID NO: 516753 - RNA, 24 nt, Human
ugcaggagguggagcggcagagaa

SEQ ID NO: 516754 - RNA, 32 nt, Human
ugcaggagucugcaggucacccggagcaggau

SEQ ID NO: 516755 - RNA, 22 nt, Human
ugcaggagugaccaggacacua

SEQ ID NO: 516756 - RNA, 32 nt, Human
ugcaggaguuugugguaacuugagauucaaga

SEQ ID NO: 516757 - RNA, 32 nt, Human
ugcaggaucaggaggggagaagaaggagccuc

SEQ ID NO: 516758 - RNA, 32 nt, Human
ugcaggaucucucuucauagcccaguacgacu

SEQ ID NO: 516759 - RNA, 32 nt, Human
ugcaggaucugcuucccuucucuccaggaccu

SEQ ID NO: 516760 - RNA, 32 nt, Human
ugcaggaugcccagggcucggaagcaguaagg

SEQ ID NO: 516761 - RNA, 32 nt, Human
ugcaggaugguuuugaaacagaaacaauacuu

SEQ ID NO: 516762 - RNA, 31 nt, Human
ugcaggaugucagaagagugagaugucuugc

SEQ ID NO: 516763 - RNA, 32 nt, Human
ugcaggaugugugagaggaagcaguuaauugu

SEQ ID NO: 516764 - RNA, 32 nt, Human
ugcaggcaacacagggccucucccaaaagaga

SEQ ID NO: 516765 - RNA, 32 nt, Human
ugcaggcaagcggucggguggggagggagggc

SEQ ID NO: 516766 - RNA, 23 nt, Human
ugcaggcaaggaggagauggggu

SEQ ID NO: 516767 - RNA, 32 nt, Human
ugcaggcacacugcagugguuuuccugcagcu

SEQ ID NO: 516768 - RNA, 32 nt, Human
ugcaggcacugaaauugguucaucccagugac

SEQ ID NO: 516769 - RNA, 32 nt, Human
ugcaggcacugaggcuggagggacauggagcc

SEQ ID NO: 516770 - RNA, 21 nt, Human
ugcaggcagaaggcaguaggg

SEQ ID NO: 516771 - RNA, 23 nt, Human
ugcaggcagacgcaccauugagg

SEQ ID NO: 516772 - RNA, 17 nt, Human
ugcaggcagccugcucc

SEQ ID NO: 516773 - RNA, 23 nt, Human
ugcaggcaggacagccaugaggu

SEQ ID NO: 516774 - RNA, 19 nt, Human
ugcaggcaggcuugauggg

SEQ ID NO: 516775 - RNA, 20 nt, Human
ugcaggcagggcgcugcggg

SEQ ID NO: 516776 - RNA, 19 nt, Human
ugcaggcagggcguguggg

SEQ ID NO: 516777 - RNA, 23 nt, Human
ugcaggcagggcugacucuaggu

SEQ ID NO: 516778 - RNA, 21 nt, Human
ugcaggcagggcuggguuggg

SEQ ID NO: 516779 - RNA, 32 nt, Human
ugcaggcagggcuguggcccagcugggucuga

SEQ ID NO: 516780 - RNA, 23 nt, Human
ugcaggcagguccugauugaagg

SEQ ID NO: 516781 - RNA, 32 nt, Human
ugcaggcaugagccaccacucccggccugcuu

SEQ ID NO: 516782 - RNA, 32 nt, Human
ugcaggcaugagccaccaugccuggccccaca

SEQ ID NO: 516783 - RNA, 32 nt, Human
ugcaggcaugagccaccgcgcccagccagaaa

SEQ ID NO: 516784 - RNA, 32 nt, Human
ugcaggcaugagccaccgugcccagccucaaa

SEQ ID NO: 516785 - RNA, 32 nt, Human
ugcaggcaugagccacugcacccaaccccugg

SEQ ID NO: 516786 - RNA, 32 nt, Human
ugcaggcaugagccacugcacccagcccugua

SEQ ID NO: 516787 - RNA, 32 nt, Human
ugcaggcaugagccacugcgccuggccuaauc

SEQ ID NO: 516788 - RNA, 32 nt, Human
ugcaggcaugagccacugcgccuggccucaaa

SEQ ID NO: 516789 - RNA, 32 nt, Human
ugcaggcaugagccacugcucccggcccuauu

SEQ ID NO: 516790 - RNA, 32 nt, Human
ugcaggcaugagccacugugccuguccaagaa

SEQ ID NO: 516791 - RNA, 32 nt, Human
ugcaggcaugagccacuucgccuagccaagcc

SEQ ID NO: 516792 - RNA, 32 nt, Human
ugcaggcaugagccaucacacccggcugguuu

SEQ ID NO: 516793 - RNA, 32 nt, Human
ugcaggcaugcgccaccaugccaggcugauuu

SEQ ID NO: 516794 - RNA, 32 nt, Human
ugcaggcauggacuggaagucguaguacuuuu

SEQ ID NO: 516795 - RNA, 24 nt, Human
ugcaggccacagaaagauuugaug

SEQ ID NO: 516796 - RNA, 32 nt, Human
ugcaggccacaggcagcgacucaccaguugcc

SEQ ID NO: 516797 - RNA, 32 nt, Human
ugcaggccacauggccaccugggaaggcccgg

SEQ ID NO: 516798 - RNA, 26 nt, Human
ugcaggccaccuggcugggguuggug

SEQ ID NO: 516799 - RNA, 32 nt, Human
ugcaggccagaagauagugucugaguagggcu

SEQ ID NO: 516800 - RNA, 32 nt, Human
ugcaggccagcccuucaaguucaguaucgcgg

SEQ ID NO: 516801 - RNA, 32 nt, Human
ugcaggccagccuggaccucugacacacucgu

SEQ ID NO: 516802 - RNA, 32 nt, Human
ugcaggccaggucauuggccccuuccccaauc

SEQ ID NO: 516803 - RNA, 32 nt, Human
ugcaggccaguaacaggaagggccuggggaga

SEQ ID NO: 516804 - RNA, 32 nt, Human
ugcaggccauguccugaaggguuccucaggag

SEQ ID NO: 516805 - RNA, 19 nt, Human
ugcaggcccagcuccugcc

SEQ ID NO: 516806 - RNA, 32 nt, Human
ugcaggccccagcacccgcagagcagacacug

SEQ ID NO: 516807 - RNA, 32 nt, Human
ugcaggccccaugccucuccucccucucuggc

SEQ ID NO: 516808 - RNA, 32 nt, Human
ugcaggcccccuggguccccuuguucagagac

SEQ ID NO: 516809 - RNA, 32 nt, Human
ugcaggcccuaaaacagaaaggacggacggag

SEQ ID NO: 516810 - RNA, 32 nt, Human
ugcaggccucaucccugacugcagcuugacuc

SEQ ID NO: 516811 - RNA, 32 nt, Human
ugcaggccuccaggugaccucacucggacgga

SEQ ID NO: 516812 - RNA, 32 nt, Human
ugcaggccuccccuccauccuggaccagcugu

SEQ ID NO: 516813 - RNA, 32 nt, Human
ugcaggccucgcggaucccccacuugucucga

SEQ ID NO: 516814 - RNA, 32 nt, Human
ugcaggccucugguguuugcaaaggaugcgug

SEQ ID NO: 516815 - RNA, 32 nt, Human
ugcaggccugagccaccgcgcccggccccuua

SEQ ID NO: 516816 - RNA, 32 nt, Human
ugcaggccuguaaucccagcuacucgggaggc

SEQ ID NO: 516817 - RNA, 32 nt, Human
ugcaggccuucugcaaaucagugcuggccugg

SEQ ID NO: 516818 - RNA, 21 nt, Human
ugcaggcgaagagauuggagg

SEQ ID NO: 516819 - RNA, 32 nt, Human
ugcaggcgaaggacaggacagcagagugagcu

SEQ ID NO: 516820 - RNA, 24 nt, Human
ugcaggcgaaugagaaaggacaga

SEQ ID NO: 516821 - RNA, 32 nt, Human
ugcaggcgccggcagcccuggagggcagccgc

SEQ ID NO: 516822 - RNA, 32 nt, Human
ugcaggcgccuauaaucccagcuacucaggag

SEQ ID NO: 516823 - RNA, 32 nt, Human
ugcaggcgcucaggggcgcuaggguuugaggc

SEQ ID NO: 516824 - RNA, 21 nt, Human
ugcaggcggcgugugcugcug

SEQ ID NO: 516825 - RNA, 32 nt, Human
ugcaggcgugagccaccacacccggcccaccu

SEQ ID NO: 516826 - RNA, 32 nt, Human
ugcaggcgugagccaccacgcccggccuccag

SEQ ID NO: 516827 - RNA, 32 nt, Human
ugcaggcgugagccaccaggcccugccugguu

SEQ ID NO: 516828 - RNA, 32 nt, Human
ugcaggcgugagccaccaugcccggcucucac

SEQ ID NO: 516829 - RNA, 32 nt, Human
ugcaggcgugagccaccaugccuggccagaag

SEQ ID NO: 516830 - RNA, 32 nt, Human
ugcaggcgugagccaccgcgcccggccaacgu

SEQ ID NO: 516831 - RNA, 32 nt, Human
ugcaggcgugagccaccgcgcccggccugccc

SEQ ID NO: 516832 - RNA, 32 nt, Human
ugcaggcgugagccacugcacccagccucuuu

SEQ ID NO: 516833 - RNA, 32 nt, Human
ugcaggcgugagccacugcauccgaccucauu

SEQ ID NO: 516834 - RNA, 32 nt, Human
ugcaggcgugagccacugcuccuggcuugaau

SEQ ID NO: 516835 - RNA, 32 nt, Human
ugcaggcgugagccacuuucccagccucucuu

SEQ ID NO: 516836 - RNA, 32 nt, Human
ugcaggcguggucaugagggcagauggacacu

SEQ ID NO: 516837 - RNA, 23 nt, Human
ugcaggcuagcggccucccgcca

SEQ ID NO: 516838 - RNA, 32 nt, Human
ugcaggcucagcgaugaacaucuggcuggggc

SEQ ID NO: 516839 - RNA, 32 nt, Human
ugcaggcucauagggaagaccugcugagggac

SEQ ID NO: 516840 - RNA, 17 nt, Human
ugcaggcucauucccca

SEQ ID NO: 516841 - RNA, 32 nt, Human
ugcaggcuccaugcaccucccuucccucccug

SEQ ID NO: 516842 - RNA, 32 nt, Human
ugcaggcucccuacacaguccugcugcugccg

SEQ ID NO: 516843 - RNA, 18 nt, Human
ugcaggcuccgcgagcgg

SEQ ID NO: 516844 - RNA, 32 nt, Human
ugcaggcucgaggagcuuuccggagcuuccca

SEQ ID NO: 516845 - RNA, 31 nt, Human
ugcaggcucgccucugggcuuugucuccuug

SEQ ID NO: 516846 - RNA, 32 nt, Human
ugcaggcucucaucugguccaugcccagaugc

SEQ ID NO: 516847 - RNA, 17 nt, Human
ugcaggcugagagcugg

SEQ ID NO: 516848 - RNA, 32 nt, Human
ugcaggcugauccuucuuuucacuuucuguca

SEQ ID NO: 516849 - RNA, 32 nt, Human
ugcaggcugaugacacacagggagaguggccc

SEQ ID NO: 516850 - RNA, 15 nt, Human
ugcaggcugcagggg

SEQ ID NO: 516851 - RNA, 19 nt, Human
ugcaggcugccacuggagg

SEQ ID NO: 516852 - RNA, 23 nt, Human
ugcaggcugcccccugccggcca

SEQ ID NO: 516853 - RNA, 29 nt, Human
ugcaggcugcugcuauucccugucugcug

SEQ ID NO: 516854 - RNA, 22 nt, Human
ugcaggcuggaagcaccaggga

SEQ ID NO: 516855 - RNA, 17 nt, Human
ugcaggcuggagugcgg

SEQ ID NO: 516856 - RNA, 23 nt, Human
ugcaggcuggcuggcccuugcca

SEQ ID NO: 516857 - RNA, 32 nt, Human
ugcaggcugggagggggcagccaagaagccgg

SEQ ID NO: 516858 - RNA, 32 nt, Human
ugcaggcuggguagcugguagaaauguugugg

SEQ ID NO: 516859 - RNA, 32 nt, Human
ugcaggcugggugacagagugagacuccaucu

SEQ ID NO: 516860 - RNA, 32 nt, Human
ugcaggcugguucaugccacuuuuucagagua

SEQ ID NO: 516861 - RNA, 20 nt, Human
ugcaggcuguccuccccgcc

SEQ ID NO: 516862 - RNA, 19 nt, Human
ugcaggcuguguccuggca

SEQ ID NO: 516863 - RNA, 16 nt, Human
ugcaggcuucaggagg

SEQ ID NO: 516864 - RNA, 32 nt, Human
ugcaggcuugcagugagccaugaucaugccac

SEQ ID NO: 516865 - RNA, 32 nt, Human
ugcaggcuuguugggagccuuuaggacgucuc

SEQ ID NO: 516866 - RNA, 32 nt, Human
ugcaggcuuuguaugugaauaauucuagcggg

SEQ ID NO: 516867 - RNA, 32 nt, Human
ugcagggaaggaugaugccagccccggauccg

SEQ ID NO: 516868 - RNA, 18 nt, Human
ugcagggacacgucggau

SEQ ID NO: 516869 - RNA, 32 nt, Human
ugcagggacaguuggcuuccagagguuucagc

SEQ ID NO: 516870 - RNA, 32 nt, Human
ugcagggacaucuuauugacugccuccuucuc

SEQ ID NO: 516871 - RNA, 32 nt, Human
ugcagggaccgagggccuacacugccuccucc

SEQ ID NO: 516872 - RNA, 32 nt, Human
ugcagggaccugccuuugccuccugcucgaag

SEQ ID NO: 516873 - RNA, 32 nt, Human
ugcagggacucaugacuguaauccuaguacuu

SEQ ID NO: 516874 - RNA, 32 nt, Human
ugcagggagagggcaggcggcugcugcuguug

SEQ ID NO: 516875 - RNA, 32 nt, Human
ugcagggagagggcugugaggaagagcacagg

SEQ ID NO: 516876 - RNA, 32 nt, Human
ugcagggagaggggaggcggggacggugugcc

SEQ ID NO: 516877 - RNA, 32 nt, Human
ugcagggagcacuguucacaucauagauaaag

SEQ ID NO: 516878 - RNA, 18 nt, Human
ugcagggagcaggcgcug

SEQ ID NO: 516879 - RNA, 19 nt, Human
ugcagggagccuucugcca

SEQ ID NO: 516880 - RNA, 32 nt, Human
ugcagggagcuggggagcaggaacgccucgga

SEQ ID NO: 516881 - RNA, 32 nt, Human
ugcagggaggagaggggaagggccagucuggg

SEQ ID NO: 516882 - RNA, 22 nt, Human
ugcagggaggaggaaauggggg

SEQ ID NO: 516883 - RNA, 32 nt, Human
ugcagggaggcggagguugcagugagccgaga

SEQ ID NO: 516884 - RNA, 32 nt, Human
ugcagggagggcagaggcauugcugagacugc

SEQ ID NO: 516885 - RNA, 23 nt, Human
ugcagggagggcccaggagccgg

SEQ ID NO: 516886 - RNA, 32 nt, Human
ugcagggaguggcuccccagacccccucgcca

SEQ ID NO: 516887 - RNA, 22 nt, Human
ugcagggauauuugaggacagg

SEQ ID NO: 516888 - RNA, 18 nt, Human
ugcagggaucccaggccc

SEQ ID NO: 516889 - RNA, 32 nt, Human
ugcagggaugaguugagggugcgugggcacag

SEQ ID NO: 516890 - RNA, 32 nt, Human
ugcagggauuacaggcaugagccaccaugccu

SEQ ID NO: 516891 - RNA, 32 nt, Human
ugcagggauucuagagcagagagcagaccaua

SEQ ID NO: 516892 - RNA, 32 nt, Human
ugcagggauuucaccaccucaggguggagaga

SEQ ID NO: 516893 - RNA, 32 nt, Human
ugcagggcagacagugccuggcacugaggggu

SEQ ID NO: 516894 - RNA, 32 nt, Human
ugcagggcagagaccuaggaauuuggauaaug

SEQ ID NO: 516895 - RNA, 32 nt, Human
ugcagggcaggaaagcuccacacacacagccc

SEQ ID NO: 516896 - RNA, 32 nt, Human
ugcagggcaguguggcagguggagagguccua

SEQ ID NO: 516897 - RNA, 32 nt, Human
ugcagggcaucuugugaauauguauguaaaua

SEQ ID NO: 516898 - RNA, 32 nt, Human
ugcagggccagaggugacccugccuggccucc

SEQ ID NO: 516899 - RNA, 32 nt, Human
ugcagggccagccugccaugaucuuucucacu

SEQ ID NO: 516900 - RNA, 21 nt, Human
ugcagggcccacaaacacggu

SEQ ID NO: 516901 - RNA, 32 nt, Human
ugcagggcccuguguggucuccggacagcugc

SEQ ID NO: 516902 - RNA, 22 nt, Human
ugcagggccgggcacccaccca

SEQ ID NO: 516903 - RNA, 32 nt, Human
ugcagggccguugcccccagacuuccuccuuu

SEQ ID NO: 516904 - RNA, 32 nt, Human
ugcagggccuggagguggggaggccagaggca

SEQ ID NO: 516905 - RNA, 32 nt, Human
ugcagggccuggugaugcuguccucuguaccg

SEQ ID NO: 516906 - RNA, 32 nt, Human
ugcagggccuguaaucccagcauuuugggagg

SEQ ID NO: 516907 - RNA, 32 nt, Human
ugcagggcgcagccccgaggaggcagguggag

SEQ ID NO: 516908 - RNA, 32 nt, Human
ugcagggcgggccugggacaauggggcgguug

SEQ ID NO: 516909 - RNA, 32 nt, Human
ugcagggcuggcccuggcucgggcaggguggg

SEQ ID NO: 516910 - RNA, 32 nt, Human
ugcagggcugguggcccugcuucugcccaggc

SEQ ID NO: 516911 - RNA, 32 nt, Human
ugcagggcugguuuguucugacuuuuuguuuc

SEQ ID NO: 516912 - RNA, 32 nt, Human
ugcagggcugugacacaauagggacucuaugg

SEQ ID NO: 516913 - RNA, 31 nt, Human
ugcagggcugugaucacagccaacaccaccu

SEQ ID NO: 516914 - RNA, 32 nt, Human
ugcagggcuguuguguagacugcagacaucca

SEQ ID NO: 516915 - RNA, 22 nt, Human
ugcagggcuucucuuguuuaca

SEQ ID NO: 516916 - RNA, 32 nt, Human
ugcagggcuuuccccucuccuuccuuuacgua

SEQ ID NO: 516917 - RNA, 32 nt, Human
ugcaggggaaggcagcggcggcggcggcggga

SEQ ID NO: 516918 - RNA, 19 nt, Human
ugcaggggacacucuggau

SEQ ID NO: 516919 - RNA, 32 nt, Human
ugcaggggacaggagugggagcagggagauag

SEQ ID NO: 516920 - RNA, 32 nt, Human
ugcaggggacauccugaaguucuugaaaaaga

SEQ ID NO: 516921 - RNA, 32 nt, Human
ugcaggggacucuggccagcuugagugacgcg

SEQ ID NO: 516922 - RNA, 17 nt, Human
ugcaggggacugggcca

SEQ ID NO: 516923 - RNA, 32 nt, Human
ugcaggggaggggcccaggcagcugugcuggu

SEQ ID NO: 516924 - RNA, 32 nt, Human
ugcaggggagguggaggccagaggacagggag

SEQ ID NO: 516925 - RNA, 31 nt, Human
ugcaggggcacaaucucagcucacugcaacc

SEQ ID NO: 516926 - RNA, 32 nt, Human
ugcaggggcagagagagcagcaggugaaggcu

SEQ ID NO: 516927 - RNA, 32 nt, Human
ugcaggggcagaggaggagaccagccugacaa

SEQ ID NO: 516928 - RNA, 32 nt, Human
ugcaggggcaggagaggaagggaccggcaaag

SEQ ID NO: 516929 - RNA, 32 nt, Human
ugcaggggcauuagcucacugcagucuccacc

SEQ ID NO: 516930 - RNA, 22 nt, Human
ugcaggggccgcgccuggcuca

SEQ ID NO: 516931 - RNA, 32 nt, Human
ugcaggggccugggcuaguaggguuugggaaa

SEQ ID NO: 516932 - RNA, 32 nt, Human
ugcaggggcugcaggccguuaaguggacagga

SEQ ID NO: 516933 - RNA, 32 nt, Human
ugcagggggaggaggacuuggagggucugggg

SEQ ID NO: 516934 - RNA, 21 nt, Human
ugcagggggagggagagggga

SEQ ID NO: 516935 - RNA, 32 nt, Human
ugcagggggcacuuguuccugagguccucgcc

SEQ ID NO: 516936 - RNA, 32 nt, Human
ugcagggggccagcaccccuggguuaucuggg

SEQ ID NO: 516937 - RNA, 32 nt, Human
ugcagggggcgcggggcggaggcugcgagggc

SEQ ID NO: 516938 - RNA, 32 nt, Human
ugcagggggugagggggaacagcgagagcuug

SEQ ID NO: 516939 - RNA, 32 nt, Human
ugcagggggugugucugcucaguaauuugagg

SEQ ID NO: 516940 - RNA, 32 nt, Human
ugcagggucacugcaccucggcccagggccuc

SEQ ID NO: 516941 - RNA, 18 nt, Human
ugcagggucauuucccca

SEQ ID NO: 516942 - RNA, 32 nt, Human
ugcaggguccccaaggauggaaagggaauguu

SEQ ID NO: 516943 - RNA, 21 nt, Human
ugcaggguccuggagcuaggc

SEQ ID NO: 516944 - RNA, 32 nt, Human
ugcagggucuaugucuuugucuugacuuccag

SEQ ID NO: 516945 - RNA, 32 nt, Human
ugcagggucugaugucaucguugacagccuuu

SEQ ID NO: 516946 - RNA, 32 nt, Human
ugcagggugaugagaaguuuggucugaguaac

SEQ ID NO: 516947 - RNA, 32 nt, Human
ugcagggugcccagugcacacacuagagagaa

SEQ ID NO: 516948 - RNA, 32 nt, Human
ugcagggugggaggagaagaccaaacgaagua

SEQ ID NO: 516949 - RNA, 32 nt, Human
ugcaggguguggaauugcccuuugggguccuu

SEQ ID NO: 516950 - RNA, 32 nt, Human
ugcaggguuggcagggacagagcccagaccau

SEQ ID NO: 516951 - RNA, 32 nt, Human
ugcagguacaggaauuguuccaccagcauuag

SEQ ID NO: 516952 - RNA, 32 nt, Human
ugcagguacccaccucuuucucuugggugagg

SEQ ID NO: 516953 - RNA, 32 nt, Human
ugcagguacgagcccgcccaggaacaggaggg

SEQ ID NO: 516954 - RNA, 32 nt, Human
ugcagguagagaagagauggugccaugauaua

SEQ ID NO: 516955 - RNA, 32 nt, Human
ugcagguagagcagccucauuccuucacaaga

SEQ ID NO: 516956 - RNA, 21 nt, Human
ugcagguagccggccggccgg

SEQ ID NO: 516957 - RNA, 32 nt, Human
ugcagguagggaaaaaguuggucuaauugaag

SEQ ID NO: 516958 - RNA, 32 nt, Human
ugcagguauuaaaaauaauuaaaaauaguccu

SEQ ID NO: 516959 - RNA, 32 nt, Human
ugcaggucagcaacugugucgugagcagcugc

SEQ ID NO: 516960 - RNA, 32 nt, Human
ugcaggucagcccaggaauuggcagaggaagu

SEQ ID NO: 516961 - RNA, 32 nt, Human
ugcaggucaggcguucaacaccagccuggcca

SEQ ID NO: 516962 - RNA, 32 nt, Human
ugcaggucaguauccugggacuuggaagcugg

SEQ ID NO: 516963 - RNA, 32 nt, Human
ugcagguccagcccuggcgagggcaggucaga

SEQ ID NO: 516964 - RNA, 32 nt, Human
ugcagguccauucugcaccucuuggcucgggu

SEQ ID NO: 516965 - RNA, 32 nt, Human
ugcaggucucccaugaaggccaccccaugguc

SEQ ID NO: 516966 - RNA, 32 nt, Human
ugcaggucucggggcuccuggguugcuucugg

SEQ ID NO: 516967 - RNA, 32 nt, Human
ugcaggucucugagcaaggcggagguguggag

SEQ ID NO: 516968 - RNA, 32 nt, Human
ugcaggucucugcugguuucucuuagucgcca

SEQ ID NO: 516969 - RNA, 32 nt, Human
ugcaggucuuggcacaugcacagcaggcuccc

SEQ ID NO: 516970 - RNA, 32 nt, Human
ugcaggugaacgccuccaaccuggugagcuuu

SEQ ID NO: 516971 - RNA, 32 nt, Human
ugcaggugaaggacaggaaggggcaugugagc

SEQ ID NO: 516972 - RNA, 32 nt, Human
ugcaggugaauuuauuacugagccaaaugagg

SEQ ID NO: 516973 - RNA, 32 nt, Human
ugcaggugacaagggcccugccuccaccccuc

SEQ ID NO: 516974 - RNA, 32 nt, Human
ugcaggugagcagaagggagagagggagggcg

SEQ ID NO: 516975 - RNA, 32 nt, Human
ugcaggugagcucugggccauguugccuugac

SEQ ID NO: 516976 - RNA, 32 nt, Human
ugcaggugaggugggcugaggcuuccuuguga

SEQ ID NO: 516977 - RNA, 32 nt, Human
ugcaggugaugccauguuauauccaauaacua

SEQ ID NO: 516978 - RNA, 32 nt, Human
ugcaggugcaugccaccaugccuggcuaauuu

SEQ ID NO: 516979 - RNA, 32 nt, Human
ugcaggugccaaggcacaucaugcugcuggac

SEQ ID NO: 516980 - RNA, 32 nt, Human
ugcaggugccauccggggucucagagcccauc

SEQ ID NO: 516981 - RNA, 32 nt, Human
ugcaggugcccaccaucaugcccagcuaauuu

SEQ ID NO: 516982 - RNA, 32 nt, Human
ugcaggugccugccaccaugccuggcuaauuu

SEQ ID NO: 516983 - RNA, 32 nt, Human
ugcaggugcgagccaccggguccagccucuca

SEQ ID NO: 516984 - RNA, 32 nt, Human
ugcagguggagagaaaacaggagaguagcaau

SEQ ID NO: 516985 - RNA, 32 nt, Human
ugcagguggaggacgcgcaggagcgcgcggcc

SEQ ID NO: 516986 - RNA, 32 nt, Human
ugcagguggcagguggccccaggccuguuugg

SEQ ID NO: 516987 - RNA, 32 nt, Human
ugcagguggcccuuccccuuggaggcgagaag

SEQ ID NO: 516988 - RNA, 32 nt, Human
ugcaggugggcauaggugcagugagugcaggu

SEQ ID NO: 516989 - RNA, 32 nt, Human
ugcagguggggagacugggcugagggagccug

SEQ ID NO: 516990 - RNA, 32 nt, Human
ugcagguggguaaacugaggcucaggaaguuu

SEQ ID NO: 516991 - RNA, 32 nt, Human
ugcagguguccugagcaccacacccaguggga

SEQ ID NO: 516992 - RNA, 20 nt, Human
ugcagguguccugggccaag

SEQ ID NO: 516993 - RNA, 32 nt, Human
ugcaggugucugcagugucagaggagccgcug

SEQ ID NO: 516994 - RNA, 32 nt, Human
ugcaggugugagccaccacacccagccaugaa

SEQ ID NO: 516995 - RNA, 32 nt, Human
ugcaggugugagccaccacgcccagccuagaa

SEQ ID NO: 516996 - RNA, 32 nt, Human
ugcaggugugagccaccgcacccagccucaau

SEQ ID NO: 516997 - RNA, 32 nt, Human
ugcaggugugagccacugcacccggcccuugc

SEQ ID NO: 516998 - RNA, 32 nt, Human
ugcaggugugagccacugcgccuggccuaaac

SEQ ID NO: 516999 - RNA, 32 nt, Human
ugcaggugugagccacugugccuggcuggcag

SEQ ID NO: 517000 - RNA, 32 nt, Human
ugcaggugugagccagugcacccggccguaug

SEQ ID NO: 517001 - RNA, 32 nt, Human
ugcaggugugcaccaccaugcccagcuaauuu

SEQ ID NO: 517002 - RNA, 32 nt, Human
ugcagguguggaccccaggaaccuacaggggu

SEQ ID NO: 517003 - RNA, 22 nt, Human
ugcagguguggcagagaugggg

SEQ ID NO: 517004 - RNA, 32 nt, Human
ugcaggugugggcucuccacauugggccgggg

SEQ ID NO: 517005 - RNA, 32 nt, Human
ugcagguguuaacauguaucaccacuucugug

SEQ ID NO: 517006 - RNA, 26 nt, Human
ugcagguuaagaauccacacaaccaa

SEQ ID NO: 517007 - RNA, 32 nt, Human
ugcagguuagaagacgacuguggugugcagug

SEQ ID NO: 517008 - RNA, 16 nt, Human
ugcagguuccaggugg

SEQ ID NO: 517009 - RNA, 32 nt, Human
ugcagguugcccaggaggagcugcagcgccag

SEQ ID NO: 517010 - RNA, 32 nt, Human
ugcagguugggcuauagggaggcuccaguuug

SEQ ID NO: 517011 - RNA, 24 nt, Human
ugcagguuugcagccagcggagga

SEQ ID NO: 517012 - RNA, 32 nt, Human
ugcagguuugcagccagcggaggagugaaagu

SEQ ID NO: 517013 - RNA, 32 nt, Human
ugcagguuuuauaauaguaaaaagcuagaaaa

SEQ ID NO: 517014 - RNA, 32 nt, Human
ugcagguuuuucaaggaucaacuaaugugcaa

SEQ ID NO: 517015 - RNA, 31 nt, Human
ugcaguaaaaguuucagacaugcaagagaga

SEQ ID NO: 517016 - RNA, 32 nt, Human
ugcaguaaaauguccacuaggaccccauugcc

SEQ ID NO: 517017 - RNA, 20 nt, Human
ugcaguaaagcccaggacug

SEQ ID NO: 517018 - RNA, 25 nt, Human
ugcaguaaauggauuacacuggggc

SEQ ID NO: 517019 - RNA, 21 nt, Human
ugcaguaauuugccugugauc

SEQ ID NO: 517020 - RNA, 32 nt, Human
ugcaguaccagcuccucugucucccucugccu

SEQ ID NO: 517021 - RNA, 32 nt, Human
ugcaguaccccagcucaugggggacucagcaa

SEQ ID NO: 517022 - RNA, 32 nt, Human
ugcaguacgauuggaacacuugagauuucugc

SEQ ID NO: 517023 - RNA, 32 nt, Human
ugcaguacucaguaagacagugcagugcucag

SEQ ID NO: 517024 - RNA, 32 nt, Human
ugcaguacuugcucuaacuuugccgcagcugc

SEQ ID NO: 517025 - RNA, 32 nt, Human
ugcaguacuuugcccaaagucacacacauauu

SEQ ID NO: 517026 - RNA, 23 nt, Human
ugcaguagaacggaacuuggggc

SEQ ID NO: 517027 - RNA, 22 nt, Human
ugcaguagcaacuggugcuggg

SEQ ID NO: 517028 - RNA, 32 nt, Human
ugcaguagccaauauaggcuucaugcccuccu

SEQ ID NO: 517029 - RNA, 21 nt, Human
ugcaguagcuaaagcuggggu

SEQ ID NO: 517030 - RNA, 22 nt, Human
ugcaguagcucacacuguaauc

SEQ ID NO: 517031 - RNA, 32 nt, Human
ugcaguagcucacgccuguaaucccagcacuu

SEQ ID NO: 517032 - RNA, 32 nt, Human
ugcaguagcucaugccuguaaucccagcacuu

SEQ ID NO: 517033 - RNA, 31 nt, Human
ugcaguaggaaacuguccuagcaaggcucca

SEQ ID NO: 517034 - RNA, 32 nt, Human
ugcaguaggagagauuacuagaggagagaguu

SEQ ID NO: 517035 - RNA, 32 nt, Human
ugcaguaggagggagaggaaggggugccaccg

SEQ ID NO: 517036 - RNA, 22 nt, Human
ugcaguaggcaccagagguggg

SEQ ID NO: 517037 - RNA, 32 nt, Human
ugcaguaggggagagagcagagaaguacaggu

SEQ ID NO: 517038 - RNA, 32 nt, Human
ugcaguaguuuacgccuguaaucccagcacug

SEQ ID NO: 517039 - RNA, 32 nt, Human
ugcaguaucugacagagaacucacaggaaguu

SEQ ID NO: 517040 - RNA, 20 nt, Human
ugcaguaugcuuauccuuga

SEQ ID NO: 517041 - RNA, 22 nt, Human
ugcaguauuuggauuugcuuga

SEQ ID NO: 517042 - RNA, 25 nt, Human
ugcaguauuugguuuucuguuccca

SEQ ID NO: 517043 - RNA, 25 nt, Human
ugcaguauuuuuacuccauuuuuga

SEQ ID NO: 517044 - RNA, 31 nt, Human
ugcagucaagugucugucauguguugauauc

SEQ ID NO: 517045 - RNA, 32 nt, Human
ugcagucacaccccugcacuccagccugggug

SEQ ID NO: 517046 - RNA, 32 nt, Human
ugcagucacccaggaggguuuuccuggggccc

SEQ ID NO: 517047 - RNA, 18 nt, Human
ugcagucacugggccagg

SEQ ID NO: 517048 - RNA, 32 nt, Human
ugcagucagcacucuccagugauuagaauggg

SEQ ID NO: 517049 - RNA, 32 nt, Human
ugcagucagcagcguggaggugucugggccac

SEQ ID NO: 517050 - RNA, 31 nt, Human
ugcagucaggaaccccaacucacuuggaaug

SEQ ID NO: 517051 - RNA, 32 nt, Human
ugcagucaggacaagagagcagguuugaacgu

SEQ ID NO: 517052 - RNA, 32 nt, Human
ugcagucagggugguggccugcagggaccuga

SEQ ID NO: 517053 - RNA, 32 nt, Human
ugcagucauuggagagagagcuccucauuucu

SEQ ID NO: 517054 - RNA, 32 nt, Human
ugcaguccaaggugccuggagccagaggucgg

SEQ ID NO: 517055 - RNA, 32 nt, Human
ugcaguccacguaacuggcugcagagaaaucu

SEQ ID NO: 517056 - RNA, 32 nt, Human
ugcaguccagccuggaugacagagugagacuc

SEQ ID NO: 517057 - RNA, 32 nt, Human
ugcaguccagccugggcagcaagagugaaacu

SEQ ID NO: 517058 - RNA, 32 nt, Human
ugcaguccagccugggcgacagagugagaccc

SEQ ID NO: 517059 - RNA, 32 nt, Human
ugcaguccagccugggcgacagagugagacuc

SEQ ID NO: 517060 - RNA, 32 nt, Human
ugcaguccagccugggcuacagagugagacug

SEQ ID NO: 517061 - RNA, 32 nt, Human
ugcaguccccuccauguuccccagcgccacua

SEQ ID NO: 517062 - RNA, 32 nt, Human
ugcaguccccuccauguuccccggcgccacua

SEQ ID NO: 517063 - RNA, 23 nt, Human
ugcagucccuggauucugugcca

SEQ ID NO: 517064 - RNA, 32 nt, Human
ugcagucccuguccucagacagugccaccaug

SEQ ID NO: 517065 - RNA, 32 nt, Human
ugcaguccgcaguccagccugggcgacagagc

SEQ ID NO: 517066 - RNA, 32 nt, Human
ugcaguccgcugacccuacuguccucacugaa

SEQ ID NO: 517067 - RNA, 32 nt, Human
ugcaguccuccaccaugccggaauccacuugc

SEQ ID NO: 517068 - RNA, 32 nt, Human
ugcaguccuccccuacccacucccugcccuuc

SEQ ID NO: 517069 - RNA, 32 nt, Human
ugcaguccucggccagccuggcugucaguugg

SEQ ID NO: 517070 - RNA, 32 nt, Human
ugcaguccugugagggugugcauaaccguucc

SEQ ID NO: 517071 - RNA, 21 nt, Human
ugcagucgccgccgccgccgc

SEQ ID NO: 517072 - RNA, 32 nt, Human
ugcagucgcguuccugcuguccggacacuuuu

SEQ ID NO: 517073 - RNA, 32 nt, Human
ugcagucgcugcaaccuacccucucucugccu

SEQ ID NO: 517074 - RNA, 32 nt, Human
ugcagucgcuguguguuuuagggucucauacc

SEQ ID NO: 517075 - RNA, 19 nt, Human
ugcagucggcccaggacgg

SEQ ID NO: 517076 - RNA, 32 nt, Human
ugcagucgggagguggaggcaccggcugcauu

SEQ ID NO: 517077 - RNA, 22 nt, Human
ugcagucguucccucuacccua

SEQ ID NO: 517078 - RNA, 24 nt, Human
ugcagucuccaccuccuggguuca

SEQ ID NO: 517079 - RNA, 32 nt, Human
ugcagucuccucucagucauucaucaaugugg

SEQ ID NO: 517080 - RNA, 24 nt, Human
ugcagucucgaccucccaggcuca

SEQ ID NO: 517081 - RNA, 32 nt, Human
ugcagucucugccucccaggcucaagugaucc

SEQ ID NO: 517082 - RNA, 32 nt, Human
ugcagucugcgucagccucugggaaaccacag

SEQ ID NO: 517083 - RNA, 32 nt, Human
ugcagucuggaagggcaggugggagcugugac

SEQ ID NO: 517084 - RNA, 32 nt, Human
ugcagucugggugggaugccugaaagagccca

SEQ ID NO: 517085 - RNA, 32 nt, Human
ugcagucugugcugugugucugggccugucuc

SEQ ID NO: 517086 - RNA, 32 nt, Human
ugcagucuguuuggugcauguaugaaugugau

SEQ ID NO: 517087 - RNA, 24 nt, Human
ugcagucuucaccucccagauuca

SEQ ID NO: 517088 - RNA, 32 nt, Human
ugcagucuuccaucugcuuucucuucauacug

SEQ ID NO: 517089 - RNA, 32 nt, Human
ugcagucuucccucagccuccugaguagcuag

SEQ ID NO: 517090 - RNA, 32 nt, Human
ugcagucuucucuucgcucuucagccugaagg

SEQ ID NO: 517091 - RNA, 32 nt, Human
ugcagugaacagcccuggcugggggugcagcc

SEQ ID NO: 517092 - RNA, 21 nt, Human
ugcagugaagaaaaaccuuua

SEQ ID NO: 517093 - RNA, 32 nt, Human
ugcagugacugugguuucuucccauuuuacuc

SEQ ID NO: 517094 - RNA, 32 nt, Human
ugcagugagacaccuuccuguauccagcuuuc

SEQ ID NO: 517095 - RNA, 32 nt, Human
ugcagugagccaagaucacaccacuccacucc

SEQ ID NO: 517096 - RNA, 32 nt, Human
ugcagugagccaagaucaugccacuuuacucc

SEQ ID NO: 517097 - RNA, 32 nt, Human
ugcagugagccaagaucgcaccgcugcacucc

SEQ ID NO: 517098 - RNA, 32 nt, Human
ugcagugagccaagauugcgccgcuacauucc

SEQ ID NO: 517099 - RNA, 32 nt, Human
ugcagugagccaagcgcgugccauuucacucc

SEQ ID NO: 517100 - RNA, 32 nt, Human
ugcagugagccaagcucacuucacugcacucc

SEQ ID NO: 517101 - RNA, 32 nt, Human
ugcagugagccacggcacuccacccugggcaa

SEQ ID NO: 517102 - RNA, 32 nt, Human
ugcagugagccacugcacuccagccugaugac

SEQ ID NO: 517103 - RNA, 32 nt, Human
ugcagugagccgagauugcgccacugcacucc

SEQ ID NO: 517104 - RNA, 32 nt, Human
ugcagugagccgggauugcagugagccacggc

SEQ ID NO: 517105 - RNA, 21 nt, Human
ugcagugagcuacugugauca

SEQ ID NO: 517106 - RNA, 32 nt, Human
ugcagugagcugucuggccuuuuguccuugau

SEQ ID NO: 517107 - RNA, 32 nt, Human
ugcagugaggcgccguccgccuucccuguguc

SEQ ID NO: 517108 - RNA, 32 nt, Human
ugcagugaguggagagccuacauaaaagagag

SEQ ID NO: 517109 - RNA, 32 nt, Human
ugcagugagugugaguuccuuccaggugugug

SEQ ID NO: 517110 - RNA, 32 nt, Human
ugcagugauggaaacacuuuucuuauguacca

SEQ ID NO: 517111 - RNA, 24 nt, Human
ugcagugcaauccugcaauucuca

SEQ ID NO: 517112 - RNA, 31 nt, Human
ugcagugcacuuuggggagcagauauuaacu

SEQ ID NO: 517113 - RNA, 18 nt, Human
ugcagugcagccugcucc

SEQ ID NO: 517114 - RNA, 32 nt, Human
ugcagugcagcucuaauaaaggccuuauuuuu

SEQ ID NO: 517115 - RNA, 32 nt, Human
ugcagugcagugacacgaucuugucucacugc

SEQ ID NO: 517116 - RNA, 32 nt, Human
ugcagugcagugagccaagaucgugccagugc

SEQ ID NO: 517117 - RNA, 32 nt, Human
ugcagugcaguggcaugaucauggcucgcugc

SEQ ID NO: 517118 - RNA, 32 nt, Human
ugcagugcaguggcaugaucuuggcuuacugc

SEQ ID NO: 517119 - RNA, 32 nt, Human
ugcagugcaguggugugaucuuggcucacuac

SEQ ID NO: 517120 - RNA, 32 nt, Human
ugcagugcaguugcugaggaacugagcagacu

SEQ ID NO: 517121 - RNA, 17 nt, Human
ugcagugcauccauuca

SEQ ID NO: 517122 - RNA, 32 nt, Human
ugcagugccaggacucagcccacugugcggcu

SEQ ID NO: 517123 - RNA, 32 nt, Human
ugcagugccccgagguggccaaggcugaccgg

SEQ ID NO: 517124 - RNA, 32 nt, Human
ugcagugccggcccagcuaacccuccagcccu

SEQ ID NO: 517125 - RNA, 32 nt, Human
ugcagugcggcagccucggccugggcaggccc

SEQ ID NO: 517126 - RNA, 32 nt, Human
ugcagugcuagacucaagcccugaccuuugca

SEQ ID NO: 517127 - RNA, 32 nt, Human
ugcagugcuaugagccuuauaucuguuaauau

SEQ ID NO: 517128 - RNA, 32 nt, Human
ugcagugcucaaaaucucagauuuuggagcau

SEQ ID NO: 517129 - RNA, 32 nt, Human
ugcagugcucaaggaauccucucccaucagcc

SEQ ID NO: 517130 - RNA, 32 nt, Human
ugcagugcucaauaaggcagugcagugcucag

SEQ ID NO: 517131 - RNA, 32 nt, Human
ugcagugcucaguaaggcagugcaauacucag

SEQ ID NO: 517132 - RNA, 32 nt, Human
ugcagugcugcccucauccuccagcagugcaa

SEQ ID NO: 517133 - RNA, 32 nt, Human
ugcagugcuuuugacuaucuuaugcaugguuu

SEQ ID NO: 517134 - RNA, 32 nt, Human
ugcaguggaacaaccuuggcucacggcaacuu

SEQ ID NO: 517135 - RNA, 32 nt, Human
ugcaguggaagucaugagguugcuugauaccc

SEQ ID NO: 517136 - RNA, 32 nt, Human
ugcaguggacccugcugcugccaagcugugga

SEQ ID NO: 517137 - RNA, 32 nt, Human
ugcaguggaucacgccuguaaucccagcacau

SEQ ID NO: 517138 - RNA, 32 nt, Human
ugcaguggaucaugucuguaauccuagcacug

SEQ ID NO: 517139 - RNA, 31 nt, Human
ugcaguggcacaaucucaacucacuacagcc

SEQ ID NO: 517140 - RNA, 31 nt, Human
ugcaguggcacaaucucagcucacugcaacc

SEQ ID NO: 517141 - RNA, 31 nt, Human
ugcaguggcacaaucucagcucacugcaagc

SEQ ID NO: 517142 - RNA, 31 nt, Human
ugcaguggcacaaucucaguucacugcaacc

SEQ ID NO: 517143 - RNA, 31 nt, Human
ugcaguggcacaaucucggcccgcugcagcc

SEQ ID NO: 517144 - RNA, 31 nt, Human
ugcaguggcacaaucucggcucacugcaacc

SEQ ID NO: 517145 - RNA, 31 nt, Human
ugcaguggcacaaucucggcucacugcaagc

SEQ ID NO: 517146 - RNA, 31 nt, Human
ugcaguggcacaaucucggcucacugcaauu

SEQ ID NO: 517147 - RNA, 31 nt, Human
ugcaguggcacaaucucggcucacugcagcc

SEQ ID NO: 517148 - RNA, 31 nt, Human
ugcaguggcacaaucucggcucacuguaacc

SEQ ID NO: 517149 - RNA, 31 nt, Human
ugcaguggcacaaucucugcucacugcaagc

SEQ ID NO: 517150 - RNA, 32 nt, Human
ugcaguggcacacaccuguagucccagcuaca

SEQ ID NO: 517151 - RNA, 32 nt, Human
ugcaguggcacacggcuguaaucccagcacuu

SEQ ID NO: 517152 - RNA, 31 nt, Human
ugcaguggcaccaucucagcucacugcaacc

SEQ ID NO: 517153 - RNA, 31 nt, Human
ugcaguggcacgaucucagcucacugcaacc

SEQ ID NO: 517154 - RNA, 31 nt, Human
ugcaguggcacgaucucagcucacugcaagc

SEQ ID NO: 517155 - RNA, 31 nt, Human
ugcaguggcacgaucucagcucauugcaacc

SEQ ID NO: 517156 - RNA, 31 nt, Human
ugcaguggcacgaucucagcucauugcagcc

SEQ ID NO: 517157 - RNA, 31 nt, Human
ugcaguggcauaaucucagcucacugcaguc

SEQ ID NO: 517158 - RNA, 31 nt, Human
ugcaguggcaugaucucagcucacugaagcc

SEQ ID NO: 517159 - RNA, 31 nt, Human
ugcaguggcaugaucucagcucacuguaacc

SEQ ID NO: 517160 - RNA, 31 nt, Human
ugcaguggcaugaucucagcucacuguaggc

SEQ ID NO: 517161 - RNA, 32 nt, Human
ugcaguggcaugugcuuguaaucccagcuacu

SEQ ID NO: 517162 - RNA, 19 nt, Human
ugcaguggccaggcauggu

SEQ ID NO: 517163 - RNA, 32 nt, Human
ugcaguggccaggugacauuccuguggagaaa

SEQ ID NO: 517164 - RNA, 32 nt, Human
ugcaguggcccaugccuguaaucccagcacuu

SEQ ID NO: 517165 - RNA, 32 nt, Human
ugcaguggcccuucuacccugcaccugaccuc

SEQ ID NO: 517166 - RNA, 31 nt, Human
ugcaguggcgcaaucucagcucaccgcaacc

SEQ ID NO: 517167 - RNA, 31 nt, Human
ugcaguggcgcaaucucagcucacugcaacc

SEQ ID NO: 517168 - RNA, 31 nt, Human
ugcaguggcgcaaucucagcucacugcaacg

SEQ ID NO: 517169 - RNA, 31 nt, Human
ugcaguggcgcaaucucagcucacugcaagc

SEQ ID NO: 517170 - RNA, 31 nt, Human
ugcaguggcgcaaucucagcucacugccacc

SEQ ID NO: 517171 - RNA, 31 nt, Human
ugcaguggcgcgaucucagcucacuacaacc

SEQ ID NO: 517172 - RNA, 31 nt, Human
ugcaguggcgcgaucucagcucacugcaacc

SEQ ID NO: 517173 - RNA, 31 nt, Human
ugcaguggcgcgaucucagcucacugcaagc

SEQ ID NO: 517174 - RNA, 31 nt, Human
ugcaguggcgcgaucucagcucacugcagcc

SEQ ID NO: 517175 - RNA, 31 nt, Human
ugcaguggcgcgaucucagcucacugccacc

SEQ ID NO: 517176 - RNA, 31 nt, Human
ugcaguggcgcgaucucagcuuacugcaagc

SEQ ID NO: 517177 - RNA, 32 nt, Human
ugcaguggcuaaagccuguaaucccagcacuu

SEQ ID NO: 517178 - RNA, 32 nt, Human
ugcaguggcucaagccuguaaugucagcacuu

SEQ ID NO: 517179 - RNA, 32 nt, Human
ugcaguggcucacacauguaaucccaccuacu

SEQ ID NO: 517180 - RNA, 32 nt, Human
ugcaguggcucacaccgguaaucccagcacuu

SEQ ID NO: 517181 - RNA, 32 nt, Human
ugcaguggcucacaccuauaaucccaacacuu

SEQ ID NO: 517182 - RNA, 32 nt, Human
ugcaguggcucacaccuauaaucccagcacuu

SEQ ID NO: 517183 - RNA, 32 nt, Human
ugcaguggcucacaccuguaauaccagcacuu

SEQ ID NO: 517184 - RNA, 32 nt, Human
ugcaguggcucacaccuguaauaccagcaguu

SEQ ID NO: 517185 - RNA, 23 nt, Human
ugcaguggcucacaccuguaauc

SEQ ID NO: 517186 - RNA, 32 nt, Human
ugcaguggcucacaccuguaaucccaacauuu

SEQ ID NO: 517187 - RNA, 32 nt, Human
ugcaguggcucacaccuguaaucccagcacuu

SEQ ID NO: 517188 - RNA, 32 nt, Human
ugcaguggcucacaccuguaaucccagugcuu

SEQ ID NO: 517189 - RNA, 32 nt, Human
ugcaguggcucacaccuguaauccuagcacuu

SEQ ID NO: 517190 - RNA, 32 nt, Human
ugcaguggcucacaccuguaauccuagcaucu

SEQ ID NO: 517191 - RNA, 32 nt, Human
ugcaguggcucacaccuguaaucucaacacuu

SEQ ID NO: 517192 - RNA, 32 nt, Human
ugcaguggcucacaccuguaaucucagcacuu

SEQ ID NO: 517193 - RNA, 32 nt, Human
ugcaguggcucacaccuguaauuccagcacuu

SEQ ID NO: 517194 - RNA, 32 nt, Human
ugcaguggcucacaccuguauucccaacacuu

SEQ ID NO: 517195 - RNA, 32 nt, Human
ugcaguggcucacaccuguauucccagcacuu

SEQ ID NO: 517196 - RNA, 32 nt, Human
ugcaguggcucacaccugucauuccagcacuu

SEQ ID NO: 517197 - RNA, 32 nt, Human
ugcaguggcucacaccugugaucccagcacuu

SEQ ID NO: 517198 - RNA, 32 nt, Human
ugcaguggcucacaccuguggaaucccagcac

SEQ ID NO: 517199 - RNA, 32 nt, Human
ugcaguggcucacaccuuuaaucccagcacuu

SEQ ID NO: 517200 - RNA, 32 nt, Human
ugcaguggcucacacuuguaaucccagcacuu

SEQ ID NO: 517201 - RNA, 32 nt, Human
ugcaguggcucacaucuguaaucucaacacuu

SEQ ID NO: 517202 - RNA, 32 nt, Human
ugcaguggcucacgccuauaaucccaacacuu

SEQ ID NO: 517203 - RNA, 32 nt, Human
ugcaguggcucacgccuauaaucccagcacuu

SEQ ID NO: 517204 - RNA, 32 nt, Human
ugcaguggcucacgccuguaaucccaacacuu

SEQ ID NO: 517205 - RNA, 32 nt, Human
ugcaguggcucacgccuguaaucccagcaauu

SEQ ID NO: 517206 - RNA, 32 nt, Human
ugcaguggcucacgccuguaaucccagcacug

SEQ ID NO: 517207 - RNA, 32 nt, Human
ugcaguggcucacgccuguaaucccagcacuu

SEQ ID NO: 517208 - RNA, 32 nt, Human
ugcaguggcucacgcuuauaaucccagcacuu

SEQ ID NO: 517209 - RNA, 32 nt, Human
ugcaguggcucacgcuuguaaucccagcacuu

SEQ ID NO: 517210 - RNA, 32 nt, Human
ugcaguggcucacguauguaaucccagcacuu

SEQ ID NO: 517211 - RNA, 32 nt, Human
ugcaguggcucacgucuguaaucccagcacuu

SEQ ID NO: 517212 - RNA, 32 nt, Human
ugcaguggcucacuccuguaauccgagcaauu

SEQ ID NO: 517213 - RNA, 32 nt, Human
ugcaguggcucacuccuguaauccuagcaguu

SEQ ID NO: 517214 - RNA, 32 nt, Human
ugcaguggcucacugcaaccugggugacagaa

SEQ ID NO: 517215 - RNA, 23 nt, Human
ugcaguggcucaggccuguaauc

SEQ ID NO: 517216 - RNA, 32 nt, Human
ugcaguggcucaggccuguaaucccaacccuu

SEQ ID NO: 517217 - RNA, 32 nt, Human
ugcaguggcucaggccuguaaucccagcacuu

SEQ ID NO: 517218 - RNA, 32 nt, Human
ugcaguggcucaggccuguaaucccagcauuu

SEQ ID NO: 517219 - RNA, 32 nt, Human
ugcaguggcucauaccuguaaucccagcacuu

SEQ ID NO: 517220 - RNA, 32 nt, Human
ugcaguggcucaugccuauaaucccagcacuu

SEQ ID NO: 517221 - RNA, 32 nt, Human
ugcaguggcucaugccuauaaucccagcucuu

SEQ ID NO: 517222 - RNA, 23 nt, Human
ugcaguggcucaugccuguaauc

SEQ ID NO: 517223 - RNA, 32 nt, Human
ugcaguggcucaugccuguaaucccaacacuu

SEQ ID NO: 517224 - RNA, 32 nt, Human
ugcaguggcucaugccuguaaucccagcaccu

SEQ ID NO: 517225 - RNA, 32 nt, Human
ugcaguggcucaugccuguaaucccagcacua

SEQ ID NO: 517226 - RNA, 32 nt, Human
ugcaguggcucaugccuguaaucccagcacuu

SEQ ID NO: 517227 - RNA, 32 nt, Human
ugcaguggcucaugccuguaaucccagcauuu

SEQ ID NO: 517228 - RNA, 32 nt, Human
ugcaguggcucaugccuguaaucucagcaauu

SEQ ID NO: 517229 - RNA, 32 nt, Human
ugcaguggcucaugccuguaauuccaauguga

SEQ ID NO: 517230 - RNA, 23 nt, Human
ugcaguggcucaugcuuguaauc

SEQ ID NO: 517231 - RNA, 32 nt, Human
ugcaguggcucaugcuuguaaucccagcacuu

SEQ ID NO: 517232 - RNA, 32 nt, Human
ugcaguggcucgcaccuguaaucccagcacuu

SEQ ID NO: 517233 - RNA, 32 nt, Human
ugcaguggcucgcgccuguaaucccagcacuu

SEQ ID NO: 517234 - RNA, 32 nt, Human
ugcaguggcucgugccuguaaucccagcacuu

SEQ ID NO: 517235 - RNA, 32 nt, Human
ugcaguggcucuugccuguaaucccagcacuu

SEQ ID NO: 517236 - RNA, 32 nt, Human
ugcaguggcugcaggcgcagaacagagcguua

SEQ ID NO: 517237 - RNA, 32 nt, Human
ugcaguggcuuacaccaguaaucccagcacuu

SEQ ID NO: 517238 - RNA, 32 nt, Human
ugcaguggcuuacaccuguaaucccagcacuu

SEQ ID NO: 517239 - RNA, 21 nt, Human
ugcaguggcuuacaucuguaa

SEQ ID NO: 517240 - RNA, 32 nt, Human
ugcaguggcuuaugcuuguaaucccagcacuu

SEQ ID NO: 517241 - RNA, 32 nt, Human
ugcaguggcuuuggggacucagcaguggcaag

SEQ ID NO: 517242 - RNA, 32 nt, Human
ugcagugggagaggggacacgcagggccuggc

SEQ ID NO: 517243 - RNA, 32 nt, Human
ugcagugggcucaggagucugcauuugugggu

SEQ ID NO: 517244 - RNA, 21 nt, Human
ugcaguggggauuccaguaag

SEQ ID NO: 517245 - RNA, 32 nt, Human
ugcaguggggcaucgucugucuugccuuguca

SEQ ID NO: 517246 - RNA, 32 nt, Human
ugcaguggggccaccaggaagugccggccaag

SEQ ID NO: 517247 - RNA, 31 nt, Human
ugcagugguacaaucucggcucacugcaacc

SEQ ID NO: 517248 - RNA, 31 nt, Human
ugcagugguacgaucucagcucaccaaaucu

SEQ ID NO: 517249 - RNA, 31 nt, Human
ugcagugguauaaucucagcucacugcaacc

SEQ ID NO: 517250 - RNA, 32 nt, Human
ugcaguggucucagcugcuucccuggggguaa

SEQ ID NO: 517251 - RNA, 31 nt, Human
ugcaguggugcaaucucagcucacuacaacc

SEQ ID NO: 517252 - RNA, 31 nt, Human
ugcaguggugcaaucucagcucacugcaaac

SEQ ID NO: 517253 - RNA, 31 nt, Human
ugcaguggugcaaucucagcucacugcaacc

SEQ ID NO: 517254 - RNA, 31 nt, Human
ugcaguggugcaaucucagcucacugcagcc

SEQ ID NO: 517255 - RNA, 31 nt, Human
ugcaguggugcaaucucagcuugcugcaaac

SEQ ID NO: 517256 - RNA, 31 nt, Human
ugcaguggugcaaucucaguucacugcaacc

SEQ ID NO: 517257 - RNA, 31 nt, Human
ugcaguggugcgaucucagcucacugcaacc

SEQ ID NO: 517258 - RNA, 31 nt, Human
ugcaguggugcgaucucagcucacugcaagc

SEQ ID NO: 517259 - RNA, 31 nt, Human
ugcaguggugcgaucucagcucacugcagcc

SEQ ID NO: 517260 - RNA, 31 nt, Human
ugcaguggugcgaucucagcucacugcaucc

SEQ ID NO: 517261 - RNA, 31 nt, Human
ugcaguggugcgaucucagcucacuguacuc

SEQ ID NO: 517262 - RNA, 31 nt, Human
ugcaguggugcgaucucagcuuacugcagcc

SEQ ID NO: 517263 - RNA, 31 nt, Human
ugcaguggugcgaucucagcuuauuacaacc

SEQ ID NO: 517264 - RNA, 32 nt, Human
ugcaguggugggcaccuguaaucccagcuacu

SEQ ID NO: 517265 - RNA, 32 nt, Human
ugcagugguucacaccuguaauugcagcacuu

SEQ ID NO: 517266 - RNA, 32 nt, Human
ugcagugguucacgccuguauucccagcauuu

SEQ ID NO: 517267 - RNA, 32 nt, Human
ugcagugguucaucugaaggcuggauuccauu

SEQ ID NO: 517268 - RNA, 32 nt, Human
ugcagugguucaugccuguaauccagcacuuu

SEQ ID NO: 517269 - RNA, 32 nt, Human
ugcagugguucaugccuguaaucccagcacuu

SEQ ID NO: 517270 - RNA, 32 nt, Human
ugcagugucaugccuauaagcauuucuccuau

SEQ ID NO: 517271 - RNA, 19 nt, Human
ugcaguguccuucguucac

SEQ ID NO: 517272 - RNA, 32 nt, Human
ugcagugucucaagccuauaaucccagcacuu

SEQ ID NO: 517273 - RNA, 32 nt, Human
ugcagugucuuucaccuguaaucccagcacuu

SEQ ID NO: 517274 - RNA, 32 nt, Human
ugcagugugauuuggacuuagguguguguauc

SEQ ID NO: 517275 - RNA, 32 nt, Human
ugcagugugcugccuacaccuccaccuccuuc

SEQ ID NO: 517276 - RNA, 32 nt, Human
ugcaguguggaggauaaccagugccuuacaaa

SEQ ID NO: 517277 - RNA, 25 nt, Human
ugcaguguggcucaugccuauaauc

SEQ ID NO: 517278 - RNA, 32 nt, Human
ugcaguguggugagaucaugccacuacacucc

SEQ ID NO: 517279 - RNA, 32 nt, Human
ugcaguguucaguuuccuugggggccugcucc

SEQ ID NO: 517280 - RNA, 32 nt, Human
ugcaguguucaucaaagagagagacagugaac

SEQ ID NO: 517281 - RNA, 32 nt, Human
ugcaguguugguccacacuaccauccuaagug

SEQ ID NO: 517282 - RNA, 32 nt, Human
ugcaguuaagaggcagcucauuuguccaaauu

SEQ ID NO: 517283 - RNA, 32 nt, Human
ugcaguuaagccuguugucuguuguagucugu

SEQ ID NO: 517284 - RNA, 32 nt, Human
ugcaguuaauaucaguguuggaagaugucuuu

SEQ ID NO: 517285 - RNA, 32 nt, Human
ugcaguuacauggccacaucuuuggucauugu

SEQ ID NO: 517286 - RNA, 32 nt, Human
ugcaguuagauaccagaugcaccagaacaggc

SEQ ID NO: 517287 - RNA, 32 nt, Human
ugcaguucagaauggcaguccuggaggcaggg

SEQ ID NO: 517288 - RNA, 32 nt, Human
ugcaguucagcccggcugaagcugaccgaaug

SEQ ID NO: 517289 - RNA, 32 nt, Human
ugcaguucaggagauagcuguucuccagccuu

SEQ ID NO: 517290 - RNA, 32 nt, Human
ugcaguuccagaggauccuggacgaccccucc

SEQ ID NO: 517291 - RNA, 32 nt, Human
ugcaguucccguuuccgccauggaugccucau

SEQ ID NO: 517292 - RNA, 32 nt, Human
ugcaguuccugcccccauucucuuggggucag

SEQ ID NO: 517293 - RNA, 32 nt, Human
ugcaguucucaugacuccuacuuuucauccua

SEQ ID NO: 517294 - RNA, 32 nt, Human
ugcaguucugagaagguggaggcaccaggcuc

SEQ ID NO: 517295 - RNA, 32 nt, Human
ugcaguugagauagaggaaggccgcugucuca

SEQ ID NO: 517296 - RNA, 32 nt, Human
ugcaguugcaagcacagaugcugccaccagug

SEQ ID NO: 517297 - RNA, 32 nt, Human
ugcaguugcccagccccaauucuuuauuugga

SEQ ID NO: 517298 - RNA, 32 nt, Human
ugcaguugucuggaagccuggguggcgucaug

SEQ ID NO: 517299 - RNA, 32 nt, Human
ugcaguuguguccaggggcagccguagaccac

SEQ ID NO: 517300 - RNA, 32 nt, Human
ugcaguuguuuauuuguuuacaguuauuuccc

SEQ ID NO: 517301 - RNA, 32 nt, Human
ugcaguuuaucccacacacugcacuuagggag

SEQ ID NO: 517302 - RNA, 32 nt, Human
ugcaguuucccagcugcagccuaggcagggga

SEQ ID NO: 517303 - RNA, 32 nt, Human
ugcaguuucuaaaaucacacaggugagugggc

SEQ ID NO: 517304 - RNA, 32 nt, Human
ugcaguuucucauuugcuguggacaugaccau

SEQ ID NO: 517305 - RNA, 32 nt, Human
ugcaguuucuuucucuuuccauaaguacuuuc

SEQ ID NO: 517306 - RNA, 32 nt, Human
ugcaguuuggcaaccuguguccuggcugagga

SEQ ID NO: 517307 - RNA, 32 nt, Human
ugcaguuugggcuccguagcugcucagcaaau

SEQ ID NO: 517308 - RNA, 32 nt, Human
ugcaguuuuauuauugcuugugccucaacugu

SEQ ID NO: 517309 - RNA, 24 nt, Human
ugcaguuuugaccucccaggcuca

SEQ ID NO: 517310 - RNA, 32 nt, Human
ugcauaaaaguuaaagagaggggaaagauuac

SEQ ID NO: 517311 - RNA, 32 nt, Human
ugcauaaaauccuaaaacagacuucuguauag

SEQ ID NO: 517312 - RNA, 32 nt, Human
ugcauaaagcucuccccuccugugaccagcug

SEQ ID NO: 517313 - RNA, 32 nt, Human
ugcauaacaauaacaggaaugacuuugccugc

SEQ ID NO: 517314 - RNA, 32 nt, Human
ugcauaaccagcugccacccucaggccugggc

SEQ ID NO: 517315 - RNA, 32 nt, Human
ugcauaagcacagcucaagaacugagcuuugu

SEQ ID NO: 517316 - RNA, 32 nt, Human
ugcauaagcccugggcugcuguggacccaacc

SEQ ID NO: 517317 - RNA, 32 nt, Human
ugcauaaggaagaacucuacagcagcccaauc

SEQ ID NO: 517318 - RNA, 23 nt, Human
ugcauaaguccuagugggucaag

SEQ ID NO: 517319 - RNA, 32 nt, Human
ugcauaagugugaccuggaugugagacacgga

SEQ ID NO: 517320 - RNA, 32 nt, Human
ugcauaaucauuucucagauucagaugcaaaa

SEQ ID NO: 517321 - RNA, 32 nt, Human
ugcauaaucucagccacucuuucacaacuaua

SEQ ID NO: 517322 - RNA, 32 nt, Human
ugcauaauucugaaguuauauuuccuauacca

SEQ ID NO: 517323 - RNA, 32 nt, Human
ugcauacaaaggacacacagggauuuugaaaa

SEQ ID NO: 517324 - RNA, 32 nt, Human
ugcauacaagcagauucagcacugccuaccag

SEQ ID NO: 517325 - RNA, 32 nt, Human
ugcauacaagucugaguggcagaagcuucaag

SEQ ID NO: 517326 - RNA, 32 nt, Human
ugcauacacacagacauacacaugcacucaca

SEQ ID NO: 517327 - RNA, 32 nt, Human
ugcauacacaccaacacacauaugcacacuca

SEQ ID NO: 517328 - RNA, 32 nt, Human
ugcauacacagugcuaaugaggugccuucggg

SEQ ID NO: 517329 - RNA, 32 nt, Human
ugcauacacaugcacacucagacacaugguca

SEQ ID NO: 517330 - RNA, 32 nt, Human
ugcauacacaugccuccaugcauauaugugug

SEQ ID NO: 517331 - RNA, 32 nt, Human
ugcauacacaugccugcauacaggcauacaca

SEQ ID NO: 517332 - RNA, 32 nt, Human
ugcauacaggggaggggcgcaccccacagcug

SEQ ID NO: 517333 - RNA, 32 nt, Human
ugcauacauacacauauauacacacacaaaga

SEQ ID NO: 517334 - RNA, 32 nt, Human
ugcauacauauauacacacauauguauauaaa

SEQ ID NO: 517335 - RNA, 32 nt, Human
ugcauacaugugggccagccugccucacuuua

SEQ ID NO: 517336 - RNA, 32 nt, Human
ugcauaccaauaagaaaacuuaccuuauuuug

SEQ ID NO: 517337 - RNA, 32 nt, Human
ugcauaccacacugcccggcacgccacaucca

SEQ ID NO: 517338 - RNA, 32 nt, Human
ugcauaccauagggcagggcaccccacuaugg

SEQ ID NO: 517339 - RNA, 21 nt, Human
ugccgggauuacaggcaugag

SEQ ID NO: 517340 - RNA, 32 nt, Human
ugccgggauuacaggcaugagccaccgcuccc

SEQ ID NO: 517341 - RNA, 32 nt, Human
ugccgggauuacaggcaugagccacugcaccc

SEQ ID NO: 517342 - RNA, 32 nt, Human
ugccgggauuacaggcaugagccacugugucu

SEQ ID NO: 517343 - RNA, 32 nt, Human
ugccgggauuacaggcaugagccuccacaccu

SEQ ID NO: 517344 - RNA, 32 nt, Human
ugccgggauuacaggcgugagccaccuugccu

SEQ ID NO: 517345 - RNA, 32 nt, Human
ugccgggauugcaggcaugagccuccacaccu

SEQ ID NO: 517346 - RNA, 23 nt, Human
ugccgggcccacucaccugcaca

SEQ ID NO: 517347 - RNA, 22 nt, Human
ugccgggccuugauucugcgga

SEQ ID NO: 517348 - RNA, 32 nt, Human
ugccgggcucuuggggcugagcuacgggcugc

SEQ ID NO: 517349 - RNA, 32 nt, Human
ugccggggacugccucgacucugguuuuggca

SEQ ID NO: 517350 - RNA, 32 nt, Human
ugccggggaggaggaggaggaggaagaggagg

SEQ ID NO: 517351 - RNA, 22 nt, Human
ugccggggccccgaccccggcc

SEQ ID NO: 517352 - RNA, 32 nt, Human
ugccgggggacgcugggcugagcggccggcgg

SEQ ID NO: 517353 - RNA, 32 nt, Human
ugccgggggccgcuggacccaccagcugcacg

SEQ ID NO: 517354 - RNA, 32 nt, Human
ugccgggguaggcagggggaggagaacgcuca

SEQ ID NO: 517355 - RNA, 22 nt, Human
ugccggguaaagcuguaugcca

SEQ ID NO: 517356 - RNA, 15 nt, Human
ugccgggugcagugg

SEQ ID NO: 517357 - RNA, 32 nt, Human
ugccggguguugcuucagcccagagccagagg

SEQ ID NO: 517358 - RNA, 32 nt, Human
ugccggguucacgccauucuccugccucagcc

SEQ ID NO: 517359 - RNA, 32 nt, Human
ugccggguugacuuggcugggguggugggaau

SEQ ID NO: 517360 - RNA, 32 nt, Human
ugccgguagcccaggagauggagcagcccagc

SEQ ID NO: 517361 - RNA, 32 nt, Human
ugccggucaccaggccacugugcagugggcgc

SEQ ID NO: 517362 - RNA, 32 nt, Human
ugccggucuccuacucuucauggccuuuguac

SEQ ID NO: 517363 - RNA, 32 nt, Human
ugccggucugcaggauguaguuuaacaauuug

SEQ ID NO: 517364 - RNA, 32 nt, Human
ugccggugaaaacagucuaguacacaggugcu

SEQ ID NO: 517365 - RNA, 32 nt, Human
ugccgguggaucaggcagguccacacuugcua

SEQ ID NO: 517366 - RNA, 32 nt, Human
ugccgguggcuccugcucacaugucuucgggu

SEQ ID NO: 517367 - RNA, 22 nt, Human
ugccggugggccuguguugcug

SEQ ID NO: 517368 - RNA, 32 nt, Human
ugccgguguccccagagcagggacucugucac

SEQ ID NO: 517369 - RNA, 32 nt, Human
ugccgguuauucacuaggaauauuuccccaag

SEQ ID NO: 517370 - RNA, 32 nt, Human
ugccgguuauuuuucuguccugggaacagccu

SEQ ID NO: 517371 - RNA, 32 nt, Human
ugccgguugacaugaagaagcagcagcggcua

SEQ ID NO: 517372 - RNA, 22 nt, Human
ugccgguuucaacaaaugucca

SEQ ID NO: 517373 - RNA, 32 nt, Human
ugccguaacucacgccuguaaucccagcacuu

SEQ ID NO: 517374 - RNA, 32 nt, Human
ugccguacucgcacuccagagcccugggaugu

SEQ ID NO: 517375 - RNA, 23 nt, Human
ugccguagucccagcuacuugga

SEQ ID NO: 517376 - RNA, 32 nt, Human
ugccguaucugugcguuccuucauccuggucc

SEQ ID NO: 517377 - RNA, 32 nt, Human
ugccguauuuauuguuuuaaaaaugaaaggaa

SEQ ID NO: 517378 - RNA, 32 nt, Human
ugccgucaauaugcacuguacauuccacaagc

SEQ ID NO: 517379 - RNA, 32 nt, Human
ugccgucacaccacuguguauuuaacugccau

SEQ ID NO: 517380 - RNA, 31 nt, Human
ugccgucacagcugggccaguaaaguaccuu

SEQ ID NO: 517381 - RNA, 32 nt, Human
ugccgucagacucuggcagggcucccagagga

SEQ ID NO: 517382 - RNA, 32 nt, Human
ugccgucagacucuggcagggcucccagaggu

SEQ ID NO: 517383 - RNA, 32 nt, Human
ugccgucagggcagugccaugcugaccugcug

SEQ ID NO: 517384 - RNA, 32 nt, Human
ugccgucaguucuuccuuucuccguggcuggc

SEQ ID NO: 517385 - RNA, 32 nt, Human
ugccgucaucacaaugaugauauagggauauu

SEQ ID NO: 517386 - RNA, 32 nt, Human
ugccgucauccaggcuggacaguucagugauu

SEQ ID NO: 517387 - RNA, 32 nt, Human
ugccgucaugcugcuggccugagacaguaucc

SEQ ID NO: 517388 - RNA, 32 nt, Human
ugccguccccagccugccacgggugcgaggac

SEQ ID NO: 517389 - RNA, 28 nt, Human
ugccgucccccgacugccucauucuuug

SEQ ID NO: 517390 - RNA, 32 nt, Human
ugccgucccugggccacuggccuggcgccugu

SEQ ID NO: 517391 - RNA, 32 nt, Human
ugccgucgccgcugcaaccuccacuacugcuu

SEQ ID NO: 517392 - RNA, 23 nt, Human
ugccgucuccaucucagugccaa

SEQ ID NO: 517393 - RNA, 32 nt, Human
ugccgucucggaaggguuagcacacagccagg

SEQ ID NO: 517394 - RNA, 21 nt, Human
ugccgucugccaccccgccac

SEQ ID NO: 517395 - RNA, 32 nt, Human
ugccgucugcgcuccagccuucgccuggcaga

SEQ ID NO: 517396 - RNA, 32 nt, Human
ugccgugaagauccaggcaucuugccgggcuc

SEQ ID NO: 517397 - RNA, 32 nt, Human
ugccgugacuccagaggccugaggcuccaggg

SEQ ID NO: 517398 - RNA, 32 nt, Human
ugccgugcagccaggcagaggcgaggaaggcu

SEQ ID NO: 517399 - RNA, 32 nt, Human
ugccgugcauuugcugagagauaaaaacauuc

SEQ ID NO: 517400 - RNA, 24 nt, Human
ugccgugcccggccggugcugcug

SEQ ID NO: 517401 - RNA, 32 nt, Human
ugccgugcuuuuaguguucccugaagaauacu

SEQ ID NO: 517402 - RNA, 32 nt, Human
ugccguggcaaagagcucagaaauccaauuug

SEQ ID NO: 517403 - RNA, 31 nt, Human
ugccguggcacaaucuccgcucacugcaacc

SEQ ID NO: 517404 - RNA, 31 nt, Human
ugccguggcacgaucucagcucacugcaacc

SEQ ID NO: 517405 - RNA, 31 nt, Human
ugccguggcgcaaucucagcucacugcaacc

SEQ ID NO: 517406 - RNA, 32 nt, Human
ugccguggcucacaccuguaaucccagcauuu

SEQ ID NO: 517407 - RNA, 32 nt, Human
ugccguggcucacaccuguaaucccaguaccu

SEQ ID NO: 517408 - RNA, 32 nt, Human
ugccguggcucacaccuguaaucugagcacau

SEQ ID NO: 517409 - RNA, 32 nt, Human
ugccguggcucacgccuguaaucccagcacuu

SEQ ID NO: 517410 - RNA, 32 nt, Human
ugccguggcucacgccuguaaucccagcauuu

SEQ ID NO: 517411 - RNA, 32 nt, Human
ugccguggcucaugccuguaaucccagcacuu

SEQ ID NO: 517412 - RNA, 32 nt, Human
ugccgugggucacgccuguaaucccagcacuu

SEQ ID NO: 517413 - RNA, 32 nt, Human
ugccguggguggacacagcaagaaggcccuca

SEQ ID NO: 517414 - RNA, 32 nt, Human
ugccguggguggggacacaggagaagcacgga

SEQ ID NO: 517415 - RNA, 32 nt, Human
ugccgugugcugcuucucaucacugcacacaa

SEQ ID NO: 517416 - RNA, 32 nt, Human
ugccguguuacccaggcuagucacgaacuccu

SEQ ID NO: 517417 - RNA, 32 nt, Human
ugccguuacucuaccccgagacugccuucugc

SEQ ID NO: 517418 - RNA, 32 nt, Human
ugccguuccauccugguucagagaaggccgag

SEQ ID NO: 517419 - RNA, 32 nt, Human
ugccguucguuucucguugccuaagauguuuu

SEQ ID NO: 517420 - RNA, 32 nt, Human
ugccguugagccagaagaugucucgugugaag

SEQ ID NO: 517421 - RNA, 32 nt, Human
ugccguugcacuccagccgggcaacaagggcu

SEQ ID NO: 517422 - RNA, 32 nt, Human
ugccguugcacuccagccugggcaacaagagu

SEQ ID NO: 517423 - RNA, 32 nt, Human
ugccguugcacuccagccugggcgacaagagc

SEQ ID NO: 517424 - RNA, 24 nt, Human
ugccguuggugccgccgccgccgc

SEQ ID NO: 517425 - RNA, 32 nt, Human
ugccguuguacuccagcuugggcaacagagug

SEQ ID NO: 517426 - RNA, 32 nt, Human
ugccguuucuccaagcacugcagguuccaccg

SEQ ID NO: 517427 - RNA, 32 nt, Human
ugccuaaaaaggauuuugugcuucguggcuug

SEQ ID NO: 517428 - RNA, 32 nt, Human
ugccuaaaaguggagagccaggggaguguggg

SEQ ID NO: 517429 - RNA, 32 nt, Human
ugccuaaaugaccacgggccagugacuuuacc

SEQ ID NO: 517430 - RNA, 32 nt, Human
ugccuaacauggugaaaccccgucuccacuaa

SEQ ID NO: 517431 - RNA, 32 nt, Human
ugccuaacuucagagcagggcuucugaucccu

SEQ ID NO: 517432 - RNA, 32 nt, Human
ugccuaagagccuuuugaggagaccguccugg

SEQ ID NO: 517433 - RNA, 32 nt, Human
ugccuaagccuccugaguagcuaggacuacag

SEQ ID NO: 517434 - RNA, 32 nt, Human
ugccuaaggcugucugguauuucuuuucaagg

SEQ ID NO: 517435 - RNA, 32 nt, Human
ugccuaagggcuaggccacccagagacugugc

SEQ ID NO: 517436 - RNA, 32 nt, Human
ugccuaaggggauaaggaaaaauaaugugaaa

SEQ ID NO: 517437 - RNA, 23 nt, Human
ugccuaauacccgacguagcucu

SEQ ID NO: 517438 - RNA, 32 nt, Human
ugccuaaucugaaaucugaauccuaaugagaa

SEQ ID NO: 517439 - RNA, 32 nt, Human
ugccuaauuuuugccauucucauaauguggca

SEQ ID NO: 517440 - RNA, 32 nt, Human
ugccuacaaagcucugaauucaggucccaguu

SEQ ID NO: 517441 - RNA, 32 nt, Human
ugccuacaaauggagcuccacccuucagucug

SEQ ID NO: 517442 - RNA, 32 nt, Human
ugccuacacuucaaagcacgucuagcacuaau

SEQ ID NO: 517443 - RNA, 32 nt, Human
ugccuacagcagccagagcagcagggaguccg

SEQ ID NO: 517444 - RNA, 18 nt, Human
ugccuacagccccagccc

SEQ ID NO: 517445 - RNA, 32 nt, Human
ugccuacagcuuugccuguaacaugggcacag

SEQ ID NO: 517446 - RNA, 32 nt, Human
ugccuacagugcuacaggaggcugaggcaaga

SEQ ID NO: 517447 - RNA, 32 nt, Human
ugccuacauauuuuaucuucugaucucacuga

SEQ ID NO: 517448 - RNA, 32 nt, Human
ugccuacaucuucucucuuccccaucuugcau

SEQ ID NO: 517449 - RNA, 32 nt, Human
ugccuacccuccuucuugcccgccgggcugug

SEQ ID NO: 517450 - RNA, 32 nt, Human
ugccuaccuggccgcaaguccccagccccuca

SEQ ID NO: 517451 - RNA, 32 nt, Human
ugccuacgaggaaggccagcgcaugcaggacu

SEQ ID NO: 517452 - RNA, 32 nt, Human
ugccuacgauagagucuuccuuugggugaggu

SEQ ID NO: 517453 - RNA, 32 nt, Human
ugccuacgauaugcaggcugcacagaacacaa

SEQ ID NO: 517454 - RNA, 32 nt, Human
ugccuacuccaaaaggucuguccuuuuuaaug

SEQ ID NO: 517455 - RNA, 32 nt, Human
ugccuacucccagcucccaaggagacugagau

SEQ ID NO: 517456 - RNA, 21 nt, Human
ugccuacuccccgccaggggg

SEQ ID NO: 517457 - RNA, 32 nt, Human
ugccuacugcacuccagccugggcaacaaagu

SEQ ID NO: 517458 - RNA, 32 nt, Human
ugccuacuggaagccuguucuucagcuuuggg

SEQ ID NO: 517459 - RNA, 32 nt, Human
ugccuacugugugccacacaccauaucaggug

SEQ ID NO: 517460 - RNA, 32 nt, Human
ugccuacuucgccugcacugccauccuggaca

SEQ ID NO: 517461 - RNA, 32 nt, Human
ugccuagaaaccaggugguacauggcuccagc

SEQ ID NO: 517462 - RNA, 32 nt, Human
ugccuagaaccagcugcaccugcuguucucuu

SEQ ID NO: 517463 - RNA, 32 nt, Human
ugccuagaacucccguggugguccugagcaga

SEQ ID NO: 517464 - RNA, 32 nt, Human
ugccuagaagugaaauugcugggucaaagacu

SEQ ID NO: 517465 - RNA, 27 nt, Human
ugccuagaggcacggagccaccaggga

SEQ ID NO: 517466 - RNA, 32 nt, Human
ugccuagaguuugccuauccagaaguucuuuc

SEQ ID NO: 517467 - RNA, 32 nt, Human
ugccuagcaagaaucacauucguuucccagug

SEQ ID NO: 517468 - RNA, 32 nt, Human
ugccuagcaggccuuccuuuucaccaccucgg

SEQ ID NO: 517469 - RNA, 32 nt, Human
ugccuagccacacugucauagacacagacaug

SEQ ID NO: 517470 - RNA, 28 nt, Human
ugccuagccaugucugccucauccucag

SEQ ID NO: 517471 - RNA, 19 nt, Human
ugccuagccuacagagauc

SEQ ID NO: 517472 - RNA, 22 nt, Human
ugccuagcgacucuucuggcac

SEQ ID NO: 517473 - RNA, 32 nt, Human
ugccuagcucacugcuguuccucugcuugcac

SEQ ID NO: 517474 - RNA, 22 nt, Human
ugccuagcuggacacagcuccc

SEQ ID NO: 517475 - RNA, 32 nt, Human
ugccuagcuguuguaaguuuucaucaguagcu

SEQ ID NO: 517476 - RNA, 32 nt, Human
ugccuaggagaaaggccacgaauggcagcgga

SEQ ID NO: 517477 - RNA, 32 nt, Human
ugccuaggaggaagggacccagcugggucugg

SEQ ID NO: 517478 - RNA, 32 nt, Human
ugccuaggagguugaggcugcagugagcugug

SEQ ID NO: 517479 - RNA, 21 nt, Human
ugccuaggccagagugcagug

SEQ ID NO: 517480 - RNA, 32 nt, Human
ugccuaggcccagggucagucucagauggaag

SEQ ID NO: 517481 - RNA, 32 nt, Human
ugccuaggccuggaaauggaguaaaucuuuca

SEQ ID NO: 517482 - RNA, 19 nt, Human
ugccuaggcugagugcagu

SEQ ID NO: 517483 - RNA, 20 nt, Human
ugccuaggcugagugcagug

SEQ ID NO: 517484 - RNA, 21 nt, Human
ugccuaggcugagugcagugg

SEQ ID NO: 517485 - RNA, 21 nt, Human
ugccuaggcuggaaugcagug

SEQ ID NO: 517486 - RNA, 21 nt, Human
ugccuaggcuggaguacagug

SEQ ID NO: 517487 - RNA, 21 nt, Human
ugccuaggcuggagugaagug

SEQ ID NO: 517488 - RNA, 21 nt, Human
ugccuaggcuggagugcaaug

SEQ ID NO: 517489 - RNA, 21 nt, Human
ugccuaggcuggagugcagug

SEQ ID NO: 517490 - RNA, 32 nt, Human
ugccuaggcuggucucuaaccccugagcuccg

SEQ ID NO: 517491 - RNA, 32 nt, Human
ugccuagggggcagagggugcaguggcagugu

SEQ ID NO: 517492 - RNA, 32 nt, Human
ugccuaggguuuguaacccagggccugugcug

SEQ ID NO: 517493 - RNA, 32 nt, Human
ugccuagguugcugaaaacagggaggcaccug

SEQ ID NO: 517494 - RNA, 19 nt, Human
ugccuagguuggaguacag

SEQ ID NO: 517495 - RNA, 32 nt, Human
ugccuagugcauccuggcugugggcagccccu

SEQ ID NO: 517496 - RNA, 32 nt, Human
ugccuagugcuacaaaccuuccugugggacuc

SEQ ID NO: 517497 - RNA, 32 nt, Human
ugccuaguuuccucccccuccucuucucccuc

SEQ ID NO: 517498 - RNA, 23 nt, Human
ugccuaguuuccuuuuguuccuu

SEQ ID NO: 517499 - RNA, 20 nt, Human
ugccuauaagguugggauua

SEQ ID NO: 517500 - RNA, 24 nt, Human
ugccuauaaucccagcuacucaga

SEQ ID NO: 517501 - RNA, 24 nt, Human
ugccuauaaucccagcuacucagg

SEQ ID NO: 517502 - RNA, 24 nt, Human
ugccuauaaucccagcuacucggg

SEQ ID NO: 517503 - RNA, 22 nt, Human
ugccuauaaucccagcuacuug

SEQ ID NO: 517504 - RNA, 24 nt, Human
ugccuauaaucccagcuacuuggg

SEQ ID NO: 517505 - RNA, 24 nt, Human
ugccuauaaucccagcuauuuggg

SEQ ID NO: 517506 - RNA, 32 nt, Human
ugccuauaaucccagcucuuagggaggcagag

SEQ ID NO: 517507 - RNA, 24 nt, Human
ugccuauaaucccagcuucuuggg

SEQ ID NO: 517508 - RNA, 24 nt, Human
ugccuauaaucccagguacuuggg

SEQ ID NO: 517509 - RNA, 32 nt, Human
ugccuauaaucccagugcuuuacaaggcugag

SEQ ID NO: 517510 - RNA, 32 nt, Human
ugccuauaaucccagugcuuugggaagccgaa

SEQ ID NO: 517511 - RNA, 24 nt, Human
ugccuauaaucccggcuacucggg

SEQ ID NO: 517512 - RNA, 32 nt, Human
ugccuauaaucccggcuacucgggaggcugag

SEQ ID NO: 517513 - RNA, 24 nt, Human
ugccuauagccccagcuacuuggg

SEQ ID NO: 517514 - RNA, 32 nt, Human
ugccuauaggggacucacagacugcagaugca

SEQ ID NO: 517515 - RNA, 24 nt, Human
ugccuauagucccaacuacuaggg

SEQ ID NO: 517516 - RNA, 24 nt, Human
ugccuauagucccaacuacuuaga

SEQ ID NO: 517517 - RNA, 24 nt, Human
ugccuauagucccagcaacuuggg

SEQ ID NO: 517518 - RNA, 24 nt, Human
ugccuauagucccagcacuuuggg

SEQ ID NO: 517519 - RNA, 24 nt, Human
ugccuauagucccagccacuagga

SEQ ID NO: 517520 - RNA, 20 nt, Human
ugccuauagucccagcuacu

SEQ ID NO: 517521 - RNA, 24 nt, Human
ugccuauagucccagcuacucggg

SEQ ID NO: 517522 - RNA, 24 nt, Human
ugccuauagucccagcuacuuggg

SEQ ID NO: 517523 - RNA, 24 nt, Human
ugccuauagucccagcuccuuggg

SEQ ID NO: 517524 - RNA, 23 nt, Human
ugccuauagucccagcugcuggg

SEQ ID NO: 517525 - RNA, 23 nt, Human
ugccuauaguccuggcacuuuga

SEQ ID NO: 517526 - RNA, 24 nt, Human
ugccuauaguuuuagcuacuuggg

SEQ ID NO: 517527 - RNA, 32 nt, Human
ugccuauccugggaccuccacacuccugguuc

SEQ ID NO: 517528 - RNA, 32 nt, Human
ugccuaucugcacuuccaggugccccaccuau

SEQ ID NO: 517529 - RNA, 32 nt, Human
ugccuaucuggaccccugccuagguggauggc

SEQ ID NO: 517530 - RNA, 32 nt, Human
ugccuaucugugcucuuuccucccucugcggg

SEQ ID NO: 517531 - RNA, 32 nt, Human
ugccuaucuuuguccucucucuuccggcuucg

SEQ ID NO: 517532 - RNA, 32 nt, Human
ugccuaugagcuacugcacauaccucaaggcc

SEQ ID NO: 517533 - RNA, 32 nt, Human
ugccuaugcauucaugucugucuccaugcaug

SEQ ID NO: 517534 - RNA, 32 nt, Human
ugccuaugcccagggaauaagauguauucuuu

SEQ ID NO: 517535 - RNA, 32 nt, Human
ugccuaugcuggaaaggaccagaggaauuaau

SEQ ID NO: 517536 - RNA, 32 nt, Human
ugccuaugcuguguguuugcuauauucaaucu

SEQ ID NO: 517537 - RNA, 32 nt, Human
ugccuaugcuguugcccuccccagggccugag

SEQ ID NO: 517538 - RNA, 32 nt, Human
ugccuauggcccgugaguguucuugaagcuau

SEQ ID NO: 517539 - RNA, 32 nt, Human
ugccuaugggaaccaaaagaaucaagcugaac

SEQ ID NO: 517540 - RNA, 32 nt, Human
ugccuauguacauguguaaacaugccauagca

SEQ ID NO: 517541 - RNA, 32 nt, Human
ugccuaugugcaccacacauuccagugugcug

SEQ ID NO: 517542 - RNA, 32 nt, Human
ugccuauguggguggcaagccacccaggugcc

SEQ ID NO: 517543 - RNA, 32 nt, Human
ugccuauucgcucuuccuccagccucuggcaa

SEQ ID NO: 517544 - RNA, 32 nt, Human
ugccuauucuauuuucugcaguuuacaauaca

SEQ ID NO: 517545 - RNA, 20 nt, Human
ugccuauuuaaagucuccua

SEQ ID NO: 517546 - RNA, 22 nt, Human
ugccuauuucauucugauucua

SEQ ID NO: 517547 - RNA, 32 nt, Human
ugccucaaaaacugggaccaaccaaagugugu

SEQ ID NO: 517548 - RNA, 19 nt, Human
ugccucaaagagcugugau

SEQ ID NO: 517549 - RNA, 32 nt, Human
ugccucaaauggaacaccagcacuggaaccau

SEQ ID NO: 517550 - RNA, 32 nt, Human
ugccucaacugcugccccaggcaccagcccca

SEQ ID NO: 517551 - RNA, 18 nt, Human
ugccucaacuucuuccag

SEQ ID NO: 517552 - RNA, 19 nt, Human
ugccucaacuuuccuagga

SEQ ID NO: 517553 - RNA, 32 nt, Human
ugccucaagggagcgaggcgggagggugugug

SEQ ID NO: 517554 - RNA, 32 nt, Human
ugccucaaguuccucaucuaaguggcccuggc

SEQ ID NO: 517555 - RNA, 32 nt, Human
ugccucacaagugccuuucagagagccccaau

SEQ ID NO: 517556 - RNA, 32 nt, Human
ugccucacaccaugccuggcccuuagaagugc

SEQ ID NO: 517557 - RNA, 21 nt, Human
ugccucacaccuguaauccca

SEQ ID NO: 517558 - RNA, 32 nt, Human
ugccucacaccuguaaucccagcacuuugggg

SEQ ID NO: 517559 - RNA, 32 nt, Human
ugccucacaccuguaauuccagcacuuuggga

SEQ ID NO: 517560 - RNA, 32 nt, Human
ugccucacacuggccucuauaggcccaggugc

SEQ ID NO: 517561 - RNA, 32 nt, Human
ugccucacacuggccucucuacauccagcuca

SEQ ID NO: 517562 - RNA, 32 nt, Human
ugccucacacuggccucucuacauccagcuua

SEQ ID NO: 517563 - RNA, 32 nt, Human
ugccucacacuggccucucuaggcccagcucc

SEQ ID NO: 517564 - RNA, 32 nt, Human
ugccucacacuggccucucuaggccgaggucc

SEQ ID NO: 517565 - RNA, 32 nt, Human
ugccucacacuggccucuugaggcucagcuca

SEQ ID NO: 517566 - RNA, 32 nt, Human
ugccucacacuggccuguugaggcccagcuca

SEQ ID NO: 517567 - RNA, 32 nt, Human
ugccucacacuggccuguugaggcccagcuua

SEQ ID NO: 517568 - RNA, 32 nt, Human
ugccucacagaagagguggggaccgcagucag

SEQ ID NO: 517569 - RNA, 32 nt, Human
ugccucacagcauccuccgaaaacugagcauu

SEQ ID NO: 517570 - RNA, 32 nt, Human
ugccucacaggguuccugcugccuggugucuu

SEQ ID NO: 517571 - RNA, 32 nt, Human
ugccucaccagcucucugcucacuuuucucuc

SEQ ID NO: 517572 - RNA, 32 nt, Human
ugccucaccauggccuccucugaccagguucc

SEQ ID NO: 517573 - RNA, 32 nt, Human
ugccucacccugagcugggcaccaagguuaga

SEQ ID NO: 517574 - RNA, 32 nt, Human
ugccucaccuguaauccaaguacuuugggagg

SEQ ID NO: 517575 - RNA, 21 nt, Human
ugccucacgccuguaauccca

SEQ ID NO: 517576 - RNA, 32 nt, Human
ugccucacgccuguaaucccagcacuuuggga

SEQ ID NO: 517577 - RNA, 32 nt, Human
ugccucacgccugucaucccagcacuuuggga

SEQ ID NO: 517578 - RNA, 32 nt, Human
ugccucacuacaaccccugccuccuggguuuu

SEQ ID NO: 517579 - RNA, 32 nt, Human
ugccucacucagcuccugcugcucuuagggaa

SEQ ID NO: 517580 - RNA, 32 nt, Human
ugccucacucucucagcuuucuucccacaguu

SEQ ID NO: 517581 - RNA, 32 nt, Human
ugccucacugcaacgccugccucucaggcuca

SEQ ID NO: 517582 - RNA, 32 nt, Human
ugccucacugcuguucugggccauccccauag

SEQ ID NO: 517583 - RNA, 32 nt, Human
ugccucacuuccuuggaacuccugccuccaca

SEQ ID NO: 517584 - RNA, 31 nt, Human
ugccucagaagcuagaaucgaaggcuuaccc

SEQ ID NO: 517585 - RNA, 32 nt, Human
ugccucagaaggcagaggaagccuugaggugg

SEQ ID NO: 517586 - RNA, 32 nt, Human
ugccucagacaagaacucugggaauccuaaca

SEQ ID NO: 517587 - RNA, 32 nt, Human
ugccucagaccacagcagagcucacagaaccu

SEQ ID NO: 517588 - RNA, 32 nt, Human
ugccucagacuacuuugccaacccacuuccac

SEQ ID NO: 517589 - RNA, 32 nt, Human
ugccucagacuccugaguaucugggaccacag

SEQ ID NO: 517590 - RNA, 32 nt, Human
ugccucagagccgguccucagagaccacgaag

SEQ ID NO: 517591 - RNA, 32 nt, Human
ugccucagaugcaaaaggaaaccaucgccauc

SEQ ID NO: 517592 - RNA, 32 nt, Human
ugccucagccagaugggaauacugucuugugu

SEQ ID NO: 517593 - RNA, 32 nt, Human
ugccucagcccagccaggcugugccuuugacu

SEQ ID NO: 517594 - RNA, 32 nt, Human
ugccucagccccacuagcuggcaccaacuuaa

SEQ ID NO: 517595 - RNA, 32 nt, Human
ugccucagcccccagagguugggguggggugg

SEQ ID NO: 517596 - RNA, 18 nt, Human
ugccucagccccgugccc

SEQ ID NO: 517597 - RNA, 32 nt, Human
ugccucagccccucaaguagcugggacuacaa

SEQ ID NO: 517598 - RNA, 32 nt, Human
ugccucagccuccagaguagcuggaacuacag

SEQ ID NO: 517599 - RNA, 32 nt, Human
ugccucagccuccagaguaucugggacuacag

SEQ ID NO: 517600 - RNA, 32 nt, Human
ugccucagccuccagaguaucugggauuacau

SEQ ID NO: 517601 - RNA, 22 nt, Human
ugccucagccucccaaaaugcu

SEQ ID NO: 517602 - RNA, 32 nt, Human
ugccucagccucccaaagugcuuggauuacag

SEQ ID NO: 517603 - RNA, 32 nt, Human
ugccucagccucccaaaguucugggauuacag

SEQ ID NO: 517604 - RNA, 32 nt, Human
ugccucagccucccaaguagcuuggacuacag

SEQ ID NO: 517605 - RNA, 32 nt, Human
ugccucagccucccaaguagcuuggauuacag

SEQ ID NO: 517606 - RNA, 32 nt, Human
ugccucagccucccaaguaggugggacuacag

SEQ ID NO: 517607 - RNA, 32 nt, Human
ugccucagccucccaaguaggugggauuacag

SEQ ID NO: 517608 - RNA, 32 nt, Human
ugccucagccucccgaguagcugagaccacag

SEQ ID NO: 517609 - RNA, 32 nt, Human
ugccucagccucccgaguagcugagacuacag

SEQ ID NO: 517610 - RNA, 32 nt, Human
ugccucagccucccgaguagcugagacuucag

SEQ ID NO: 517611 - RNA, 32 nt, Human
ugccucagccucccgaguagcugagauuacag

SEQ ID NO: 517612 - RNA, 32 nt, Human
ugccucagccucccgaguagcugagauuauag

SEQ ID NO: 517613 - RNA, 32 nt, Human
ugccucagccucccgaguagcuggaacuacag

SEQ ID NO: 517614 - RNA, 32 nt, Human
ugccucagccucccgaguagcuggaauuacag

SEQ ID NO: 517615 - RNA, 32 nt, Human
ugccucagccucccgaguagcuggaauuauag

SEQ ID NO: 517616 - RNA, 32 nt, Human
ugccucagccucccgaguagcuuggacuacag

SEQ ID NO: 517617 - RNA, 32 nt, Human
ugccucagccucccgaguaggugggaccacag

SEQ ID NO: 517618 - RNA, 32 nt, Human
ugccucagccucccgaguaggugggacuacag

SEQ ID NO: 517619 - RNA, 32 nt, Human
ugccucagccucccgaguaggugggauuauag

SEQ ID NO: 517620 - RNA, 32 nt, Human
ugccucagccucccgaguggcugggauuagcg

SEQ ID NO: 517621 - RNA, 19 nt, Human
ugccucagccucccuagca

SEQ ID NO: 517622 - RNA, 19 nt, Human
ugccucagccucccuagua

SEQ ID NO: 517623 - RNA, 32 nt, Human
ugccucagccuccgagguagcugggaccauag

SEQ ID NO: 517624 - RNA, 32 nt, Human
ugccucagccuccuaaguaucugggauuacag

SEQ ID NO: 517625 - RNA, 32 nt, Human
ugccucagccuccucuuccugaguagcugcaa

SEQ ID NO: 517626 - RNA, 32 nt, Human
ugccucagccuccugaauagccgggauuacag

SEQ ID NO: 517627 - RNA, 32 nt, Human
ugccucagccuccugagaagcuaggacuacag

SEQ ID NO: 517628 - RNA, 32 nt, Human
ugccucagccuccugagaagcugagauuacag

SEQ ID NO: 517629 - RNA, 32 nt, Human
ugccucagccuccugagcagcugggauuacag

SEQ ID NO: 517630 - RNA, 32 nt, Human
ugccucagccuccugaguaacuggaauugcag

SEQ ID NO: 517631 - RNA, 32 nt, Human
ugccucagccuccugaguagcuaggacuacag

SEQ ID NO: 517632 - RNA, 32 nt, Human
ugccucagccuccugaguagcuaggacuauag

SEQ ID NO: 517633 - RNA, 32 nt, Human
ugccucagccuccugaguagcuaggauuacag

SEQ ID NO: 517634 - RNA, 32 nt, Human
ugccucagccuccugaguagcugagauuacag

SEQ ID NO: 517635 - RNA, 32 nt, Human
ugccucagccuccugaguagcugagauuauag

SEQ ID NO: 517636 - RNA, 32 nt, Human
ugccucagccuccugaguagcuggaauuacag

SEQ ID NO: 517637 - RNA, 32 nt, Human
ugccucagccuccugaguagcugggaauacag

SEQ ID NO: 517638 - RNA, 32 nt, Human
ugccucagccuccugaguagcugggacuagag

SEQ ID NO: 517639 - RNA, 32 nt, Human
ugccucagccuccugaguagcugggaguacag

SEQ ID NO: 517640 - RNA, 32 nt, Human
ugccucagccuccugaguagcugggauaacag

SEQ ID NO: 517641 - RNA, 32 nt, Human
ugccucagccuccugaguagcugggaugacag

SEQ ID NO: 517642 - RNA, 32 nt, Human
ugccucagccuccugaguagcugggauuacaa

SEQ ID NO: 517643 - RNA, 32 nt, Human
ugccucagccuccugaguagcugggauuacag

SEQ ID NO: 517644 - RNA, 32 nt, Human
ugccucagccuccugaguagcugggauuacgg

SEQ ID NO: 517645 - RNA, 32 nt, Human
ugccucagccuccugaguagcugggauuauag

SEQ ID NO: 517646 - RNA, 32 nt, Human
ugccucagccuccugaguagcugggauuaugg

SEQ ID NO: 517647 - RNA, 32 nt, Human
ugccucagccuccugaguagcugggauugcag

SEQ ID NO: 517648 - RNA, 32 nt, Human
ugccucagccuccugaguaucuaggaucacag

SEQ ID NO: 517649 - RNA, 32 nt, Human
ugccucagccuccugaguaucugggauuacag

SEQ ID NO: 517650 - RNA, 32 nt, Human
ugccucagccuccugagucgcugggauuacug

SEQ ID NO: 517651 - RNA, 32 nt, Human
ugccucagccuccuggguagcugggauuacaa

SEQ ID NO: 517652 - RNA, 32 nt, Human
ugccucagccuccuggguagcugggauuacag

SEQ ID NO: 517653 - RNA, 32 nt, Human
ugccucagccucucaaguaacugggauuacag

SEQ ID NO: 517654 - RNA, 32 nt, Human
ugccucagccucucaaguagcugggacuacag

SEQ ID NO: 517655 - RNA, 32 nt, Human
ugccucagccucucaaguagcugggauuacag

SEQ ID NO: 517656 - RNA, 32 nt, Human
ugccucagccucugccucccagccucuuucug

SEQ ID NO: 517657 - RNA, 19 nt, Human
ugccucagccugccuagua

SEQ ID NO: 517658 - RNA, 32 nt, Human
ugccucagccugucaaguagcugggauuacag

SEQ ID NO: 517659 - RNA, 32 nt, Human
ugccucagcuacucaagaggcugaggcaggag

SEQ ID NO: 517660 - RNA, 32 nt, Human
ugccucagcuacucaggagaauugcuugaacc

SEQ ID NO: 517661 - RNA, 32 nt, Human
ugccucagcuacucaggaggcugagguaguag

SEQ ID NO: 517662 - RNA, 32 nt, Human
ugccucagcuacucgggaggcugaggcaagag

SEQ ID NO: 517663 - RNA, 32 nt, Human
ugccucagcugguuccugcucccaggccuagc

SEQ ID NO: 517664 - RNA, 32 nt, Human
ugccucagcuuccugaguaggugggauuacaa

SEQ ID NO: 517665 - RNA, 32 nt, Human
ugccucaggaggagaacccuccccaguguacu

SEQ ID NO: 517666 - RNA, 32 nt, Human
ugccucagggcagacuuuccaggccuagcguu

SEQ ID NO: 517667 - RNA, 32 nt, Human
ugccucaggucaggccagggcagugcugcugc

SEQ ID NO: 517668 - RNA, 32 nt, Human
ugccucaguccuguccccuugggcacugagga

SEQ ID NO: 517669 - RNA, 32 nt, Human
ugccucagucuccugagcagcugggauuacag

SEQ ID NO: 517670 - RNA, 32 nt, Human
ugccucagucuccugaguagcugagacuacag

SEQ ID NO: 517671 - RNA, 32 nt, Human
ugccucagucuccugaguagcuggaacuacaa

SEQ ID NO: 517672 - RNA, 32 nt, Human
ugccucagucuccugaguagcuggaacuacag

SEQ ID NO: 517673 - RNA, 32 nt, Human
ugccucagucuccugaguagcugggauuacag

SEQ ID NO: 517674 - RNA, 32 nt, Human
ugccucagucuccugaguagcugggauuacgg

SEQ ID NO: 517675 - RNA, 32 nt, Human
ugccucagucuccugaguaucuaggacuacag

SEQ ID NO: 517676 - RNA, 32 nt, Human
ugccucagugccaggcuggcuccuggggaugg

SEQ ID NO: 517677 - RNA, 32 nt, Human
ugccucaguuuagucaucuggaaaggaagggg

SEQ ID NO: 517678 - RNA, 32 nt, Human
ugccucauaggacucauguucucuccaaccag

SEQ ID NO: 517679 - RNA, 32 nt, Human
ugccucauccuccuccucauucagaccaaucu

SEQ ID NO: 517680 - RNA, 21 nt, Human
ugccucaugccuauaauccca

SEQ ID NO: 517681 - RNA, 32 nt, Human
ugccucaugccuauaaucccagcacuuuggga

SEQ ID NO: 517682 - RNA, 32 nt, Human
ugccucaugccugcaauccuagcacuuuggga

SEQ ID NO: 517683 - RNA, 21 nt, Human
ugccucaugccuguaauccca

SEQ ID NO: 517684 - RNA, 32 nt, Human
ugccucaugccuguaaucccagcacuuucgga

SEQ ID NO: 517685 - RNA, 32 nt, Human
ugccucaugccuguaaucccagcacuuuggga

SEQ ID NO: 517686 - RNA, 32 nt, Human
ugccucaugccuguaauccuagcaccuuggga

SEQ ID NO: 517687 - RNA, 32 nt, Human
ugccucaugccuguaauuccagcacuuuggga

SEQ ID NO: 517688 - RNA, 32 nt, Human
ugccucaugccuguagucccagcacuuugggg

SEQ ID NO: 517689 - RNA, 32 nt, Human
ugccucauguaggauccggcaggcuggugggu

SEQ ID NO: 517690 - RNA, 32 nt, Human
ugccucauugccaccuccaccugcaggaaggc

SEQ ID NO: 517691 - RNA, 32 nt, Human
ugccuccaaagaaagaaaaaguaaaacugaaa

SEQ ID NO: 517692 - RNA, 23 nt, Human
ugccuccaaagugcugggauuac

SEQ ID NO: 517693 - RNA, 32 nt, Human
ugccuccaacagcaucuaucaauccuguuagc

SEQ ID NO: 517694 - RNA, 17 nt, Human
ugccuccaaccugcuuc

SEQ ID NO: 517695 - RNA, 32 nt, Human
ugccuccaacgucaccaccauccacaccccgg

SEQ ID NO: 517696 - RNA, 32 nt, Human
ugccuccaagaccuggugucucccacugugag

SEQ ID NO: 517697 - RNA, 32 nt, Human
ugccuccacaaacugccacugcuuaacgguca

SEQ ID NO: 517698 - RNA, 32 nt, Human
ugccuccacacuggccuucccugcugcgugga

SEQ ID NO: 517699 - RNA, 32 nt, Human
ugccuccacccugcucuccaucucccgcucua

SEQ ID NO: 517700 - RNA, 32 nt, Human
ugccuccaccucacuguccccagccugccugc

SEQ ID NO: 517701 - RNA, 32 nt, Human
ugccuccacuccaaggcugccugccugcugua

SEQ ID NO: 517702 - RNA, 32 nt, Human
ugccuccacuccugccuccaccauguccauca

SEQ ID NO: 517703 - RNA, 20 nt, Human
ugccuccacucucauucaga

SEQ ID NO: 517704 - RNA, 32 nt, Human
ugccuccagaccacaggacugcagccuggggc

SEQ ID NO: 517705 - RNA, 32 nt, Human
ugccuccagauuucaagaggagaaauuuaguu

SEQ ID NO: 517706 - RNA, 32 nt, Human
ugccuccagcacugcccauccuugccccuuuc

SEQ ID NO: 517707 - RNA, 32 nt, Human
ugccuccagcaucaccuggccgagacgggccu

SEQ ID NO: 517708 - RNA, 32 nt, Human
ugccuccagccaaaugccuagcacagagcuca

SEQ ID NO: 517709 - RNA, 32 nt, Human
ugccuccagccacacccccugccuuccccagc

SEQ ID NO: 517710 - RNA, 32 nt, Human
ugccuccagccaccaucaccacugaccaaggc

SEQ ID NO: 517711 - RNA, 20 nt, Human
ugccuccagccuuugcugcu

SEQ ID NO: 517712 - RNA, 32 nt, Human
ugccuccagcucugccccaggcuccuccuaga

SEQ ID NO: 517713 - RNA, 32 nt, Human
ugccuccaggagauggaggcacgugauaagac

SEQ ID NO: 517714 - RNA, 32 nt, Human
ugccuccagggaggggaggggaugggaagcac

SEQ ID NO: 517715 - RNA, 19 nt, Human
ugccuccaggguccagaug

SEQ ID NO: 517716 - RNA, 32 nt, Human
ugccuccagucugggaaagucaccaacccgca

SEQ ID NO: 517717 - RNA, 32 nt, Human
ugccuccaguucagguacuuggcauugcuaag

SEQ ID NO: 517718 - RNA, 32 nt, Human
ugccuccauaaccugaacugugccgacuccac

SEQ ID NO: 517719 - RNA, 32 nt, Human
ugccuccauaccaauccucuuucucacagaga

SEQ ID NO: 517720 - RNA, 32 nt, Human
ugccuccaugccacuccagacugcaccggcau

SEQ ID NO: 517721 - RNA, 32 nt, Human
ugccuccauuuugccuuguuuguuaguuugcc

SEQ ID NO: 517722 - RNA, 32 nt, Human
ugccucccaaaacacugcucucaccagaacug

SEQ ID NO: 517723 - RNA, 32 nt, Human
ugccucccaaaaugcugggauuacaggcguga

SEQ ID NO: 517724 - RNA, 32 nt, Human
ugccucccaaagugcuaggauuacaggcguga

SEQ ID NO: 517725 - RNA, 32 nt, Human
ugccucccaaagugcugccauuacaggcguga

SEQ ID NO: 517726 - RNA, 32 nt, Human
ugccucccaaagugcugggaucacaggcauga

SEQ ID NO: 517727 - RNA, 24 nt, Human
ugccucccaaagugcugggauuac

SEQ ID NO: 517728 - RNA, 32 nt, Human
ugccucccaaagugcugggauuacaagcauga

SEQ ID NO: 517729 - RNA, 32 nt, Human
ugccucccaaagugcugggauuacaggcauga

SEQ ID NO: 517730 - RNA, 32 nt, Human
ugccucccaaagugcugggauuacaggcguaa

SEQ ID NO: 517731 - RNA, 32 nt, Human
ugccucccaaagugcugggauuacaggcguga

SEQ ID NO: 517732 - RNA, 32 nt, Human
ugccucccaaagugcugggauuacagguguga

SEQ ID NO: 517733 - RNA, 32 nt, Human
ugccucccaaagugcugggauugcaggcaugg

SEQ ID NO: 517734 - RNA, 32 nt, Human
ugccucccaaagugcugugauuacaggccuca

SEQ ID NO: 517735 - RNA, 24 nt, Human
ugccucccaaaguguugggauuac

SEQ ID NO: 517736 - RNA, 32 nt, Human
ugccucccaagcaauccucccaccucagccuc

SEQ ID NO: 517737 - RNA, 32 nt, Human
ugccucccaaguagcugggaccacaggugggc

SEQ ID NO: 517738 - RNA, 32 nt, Human
ugccucccaaguagcugggacuacagaacaga

SEQ ID NO: 517739 - RNA, 32 nt, Human
ugccucccaaguagcugggacuacaggcaugc

SEQ ID NO: 517740 - RNA, 32 nt, Human
ugccucccaaguagcugggauuaaggcgccug

SEQ ID NO: 517741 - RNA, 32 nt, Human
ugccucccaaguagcugggauuacaggcaccc

SEQ ID NO: 517742 - RNA, 32 nt, Human
ugccucccacaggauuccagcugcagggagcc

SEQ ID NO: 517743 - RNA, 32 nt, Human
ugccucccacugcagccucugccugcucugcc

SEQ ID NO: 517744 - RNA, 32 nt, Human
ugccucccacuuggcugucccugcugcugggc

SEQ ID NO: 517745 - RNA, 32 nt, Human
ugccucccagaacaaagugggaaagggaagcu

SEQ ID NO: 517746 - RNA, 32 nt, Human
ugccucccagaaccccagcccagaacucuuca

SEQ ID NO: 517747 - RNA, 32 nt, Human
ugccucccagagugcugggauuacaggcguga

SEQ ID NO: 517748 - RNA, 32 nt, Human
ugccucccaggaacccccuccgucucagacac

SEQ ID NO: 517749 - RNA, 32 nt, Human
ugccucccaggcucaagcacuuuuccugucuc

SEQ ID NO: 517750 - RNA, 32 nt, Human
ugccucccauccuggcagcccagccugagacc

SEQ ID NO: 517751 - RNA, 32 nt, Human
ugccucccauucugaccacccuucucauucca

SEQ ID NO: 517752 - RNA, 32 nt, Human
ugccucccauuuccuuccccuuucucugucau

SEQ ID NO: 517753 - RNA, 32 nt, Human
ugccuccccacugccccuaaagccacagcaga

SEQ ID NO: 517754 - RNA, 32 nt, Human
ugccuccccaggcuggccccagaggagcgagc

SEQ ID NO: 517755 - RNA, 32 nt, Human
ugccucccccaccuccacaugccugcagucga

SEQ ID NO: 517756 - RNA, 32 nt, Human
ugccucccccuccagccuucuccacugaugcc

SEQ ID NO: 517757 - RNA, 32 nt, Human
ugccucccccucccccauucucuccauuuucu

SEQ ID NO: 517758 - RNA, 32 nt, Human
ugccucccccuguauucccccucccagggcag

SEQ ID NO: 517759 - RNA, 32 nt, Human
ugccuccccuccaccccugccucuccuccacc

SEQ ID NO: 517760 - RNA, 32 nt, Human
ugccuccccuccuacccucuggccucaagagc

SEQ ID NO: 517761 - RNA, 32 nt, Human
ugccuccccugcccuuucucagcugccucccc

SEQ ID NO: 517762 - RNA, 32 nt, Human
ugccuccccugccucaccagcccuggcaacug

SEQ ID NO: 517763 - RNA, 32 nt, Human
ugccuccccugccuccccugccugccuccugc

SEQ ID NO: 517764 - RNA, 32 nt, Human
ugccuccccugccugccuccugccuccccugc

SEQ ID NO: 517765 - RNA, 32 nt, Human
ugccucccgaagugcuuggauuacagguguga

SEQ ID NO: 517766 - RNA, 32 nt, Human
ugccucccgaguagcugggauuacaggcacac

SEQ ID NO: 517767 - RNA, 32 nt, Human
ugccucccgaguagcugggauuacaggcaucu

SEQ ID NO: 517768 - RNA, 20 nt, Human
ugccucccgcaguccaggug

SEQ ID NO: 517769 - RNA, 32 nt, Human
ugccucccgcuggcccaggucuccucuccagu

SEQ ID NO: 517770 - RNA, 32 nt, Human
ugccucccgggagacugggauuucuggccucc

SEQ ID NO: 517771 - RNA, 32 nt, Human
ugccucccguugcucugugaccugaggguauu

SEQ ID NO: 517772 - RNA, 32 nt, Human
ugccucccuaaccuuuucuagggcucaguuug

SEQ ID NO: 517773 - RNA, 32 nt, Human
ugccucccuaaguguugggauuacaggcauga

SEQ ID NO: 517774 - RNA, 32 nt, Human
ugccucccucagauagaaaacagcccccacuc

SEQ ID NO: 517775 - RNA, 32 nt, Human
ugccucccuccagacucgggagggucgagggg

SEQ ID NO: 517776 - RNA, 32 nt, Human
ugccucccucccucccccuggcaccggcucca

SEQ ID NO: 517777 - RNA, 32 nt, Human
ugccucccuccugucuggcuccuggggcccau

SEQ ID NO: 517778 - RNA, 32 nt, Human
ugccucccucucacaggccugccuguguuacu

SEQ ID NO: 517779 - RNA, 32 nt, Human
ugccucccugcagggcccucggugcagccugg

SEQ ID NO: 517780 - RNA, 32 nt, Human
ugccucccuggggcugaggggcugcaaggaga

SEQ ID NO: 517781 - RNA, 32 nt, Human
ugccucccuuucucccuucuccacuucacugg

SEQ ID NO: 517782 - RNA, 32 nt, Human
ugccuccgagauguggcaccauagugcggugc

SEQ ID NO: 517783 - RNA, 32 nt, Human
ugccuccgagcucuggcuucaaggggagcucu

SEQ ID NO: 517784 - RNA, 21 nt, Human
ugccuccgccgccgccgccgc

SEQ ID NO: 517785 - RNA, 32 nt, Human
ugccuccggccuugaaaucuccaccucugcuc

SEQ ID NO: 517786 - RNA, 32 nt, Human
ugccuccgggaggguuaagaucaaagaugaag

SEQ ID NO: 517787 - RNA, 32 nt, Human
ugccuccguccagaaaugccucucacaccagg

SEQ ID NO: 517788 - RNA, 32 nt, Human
ugccuccuaaagugcugggauucugggccuua

SEQ ID NO: 517789 - RNA, 32 nt, Human
ugccuccuaagccaggagcuggguuaugcacc

SEQ ID NO: 517790 - RNA, 32 nt, Human
ugccuccuagagugcagggauuacaggcguga

SEQ ID NO: 517791 - RNA, 32 nt, Human
ugccuccuagcccaggauuugucuccuuuaga

SEQ ID NO: 517792 - RNA, 31 nt, Human
ugccuccucacuuagaauaccaacagucaaa

SEQ ID NO: 517793 - RNA, 32 nt, Human
ugccuccucagcacucccuccugggaggccuu

SEQ ID NO: 517794 - RNA, 32 nt, Human
ugccuccuccagucucuccaucccugagcucu

SEQ ID NO: 517795 - RNA, 19 nt, Human
ugccuccuccauucuuccu

SEQ ID NO: 517796 - RNA, 17 nt, Human
ugccuccucccauccag

SEQ ID NO: 517797 - RNA, 32 nt, Human
ugccuccuccccagguggaggugccaggaagc

SEQ ID NO: 517798 - RNA, 23 nt, Human
ugccuccucccuggcugcagccu

SEQ ID NO: 517799 - RNA, 18 nt, Human
ugccuccuccuguccaga

SEQ ID NO: 517800 - RNA, 32 nt, Human
ugccuccucuagcccaggaaugcagcuggggg

SEQ ID NO: 517801 - RNA, 17 nt, Human
ugccuccucuccacgga

SEQ ID NO: 517802 - RNA, 18 nt, Human
ugccuccucuccauucag

SEQ ID NO: 517803 - RNA, 32 nt, Human
ugccuccucugccaguuccuuuauugaaagag

SEQ ID NO: 517804 - RNA, 32 nt, Human
ugccuccucugcccauggguccugggcaccca

SEQ ID NO: 517805 - RNA, 32 nt, Human
ugccuccucuggcugcugccuccgcagcuccc

SEQ ID NO: 517806 - RNA, 32 nt, Human
ugccuccucuugcugcuaugucuccuugugau

SEQ ID NO: 517807 - RNA, 32 nt, Human
ugccuccugaagcccaacgauggaccauucuc

SEQ ID NO: 517808 - RNA, 32 nt, Human
ugccuccugacccucagacgccuccgccccac

SEQ ID NO: 517809 - RNA, 32 nt, Human
ugccuccugagagccuccugggugucaaguac

SEQ ID NO: 517810 - RNA, 32 nt, Human
ugccuccugaguagcuggaauuacaggcaugu

SEQ ID NO: 517811 - RNA, 32 nt, Human
ugccuccugaguagcugggacuacaggcgcac

SEQ ID NO: 517812 - RNA, 32 nt, Human
ugccuccugaguagcugggauuacaggcgugu

SEQ ID NO: 517813 - RNA, 32 nt, Human
ugccuccugaguagcugggauuacaggugcau

SEQ ID NO: 517814 - RNA, 32 nt, Human
ugccuccugaguagcugggauuacuggcacac

SEQ ID NO: 517815 - RNA, 32 nt, Human
ugccuccugccaccccuuccuccccauacucc

SEQ ID NO: 517816 - RNA, 32 nt, Human
ugccuccugccugccccucucccgccagacug

SEQ ID NO: 517817 - RNA, 32 nt, Human
ugccuccugcuuccuuucucucuccugccucu

SEQ ID NO: 517818 - RNA, 32 nt, Human
ugccuccugcuuugggaagacugaggcauccg

SEQ ID NO: 517819 - RNA, 32 nt, Human
ugccuccugggugagaagggucagauuuuccu

SEQ ID NO: 517820 - RNA, 19 nt, Human
ugccuccuggguucagaug

SEQ ID NO: 517821 - RNA, 32 nt, Human
ugccuccuggguuuuaucccagauagcucugg

SEQ ID NO: 517822 - RNA, 20 nt, Human
ugccuccuguguuccaggug

SEQ ID NO: 517823 - RNA, 32 nt, Human
ugccuccuucacauuuccuccccagcuuuugc

SEQ ID NO: 517824 - RNA, 22 nt, Human
ugccuccuuccuccgcgcaccc

SEQ ID NO: 517825 - RNA, 21 nt, Human
ugccuccuuccuccuccuucc

SEQ ID NO: 517826 - RNA, 32 nt, Human
ugccuccuuccucuccccuggggcugggaggc

SEQ ID NO: 517827 - RNA, 32 nt, Human
ugccuccuuccucuucccagcuuugcagcagg

SEQ ID NO: 517828 - RNA, 23 nt, Human
ugccuccuuccucuuuuccuucc

SEQ ID NO: 517829 - RNA, 32 nt, Human
ugccuccuuccucuuuuccuucccaaagcaag

SEQ ID NO: 517830 - RNA, 26 nt, Human
ugccuccuuccugcugauugcuucca

SEQ ID NO: 517831 - RNA, 32 nt, Human
ugccuccuugccucccugccucccucccuccc

SEQ ID NO: 517832 - RNA, 32 nt, Human
ugccuccuuuccagcaaguaguuuacucucag

SEQ ID NO: 517833 - RNA, 32 nt, Human
ugccuccuuucucacuuuagaacauauauugg

SEQ ID NO: 517834 - RNA, 19 nt, Human
ugccuccuuuuauccagau

SEQ ID NO: 517835 - RNA, 32 nt, Human
ugccucgaccucucaaguagcugggauuacaa

SEQ ID NO: 517836 - RNA, 32 nt, Human
ugccucgauucccugcccuugugaccucccag

SEQ ID NO: 517837 - RNA, 32 nt, Human
ugccucgcaagaaccugccugagcggcugcuc

SEQ ID NO: 517838 - RNA, 32 nt, Human
ugccucgcagaggcagcccgcucacuucccgc

SEQ ID NO: 517839 - RNA, 32 nt, Human
ugccucggagcugagguggggugagacagagu

SEQ ID NO: 517840 - RNA, 22 nt, Human
ugccucggccucccaaaaugcu

SEQ ID NO: 517841 - RNA, 23 nt, Human
ugccucggccucccaaagugcuu

SEQ ID NO: 517842 - RNA, 32 nt, Human
ugccucggccuccugaguagcugggauuacag

SEQ ID NO: 517843 - RNA, 32 nt, Human
ugccucggccuccugaguagcugggauuucag

SEQ ID NO: 517844 - RNA, 32 nt, Human
ugccucggcugcaggcgcagcgcgcagaccug

SEQ ID NO: 517845 - RNA, 32 nt, Human
ugccucgggacagauggauguccaguuuacug

SEQ ID NO: 517846 - RNA, 32 nt, Human
ugccucgggacggcucugccccagggagcgug

SEQ ID NO: 517847 - RNA, 32 nt, Human
ugccucguacccuuuccuuguuuuucuccaga

SEQ ID NO: 517848 - RNA, 23 nt, Human
ugccucgucgagccccucuaggg

SEQ ID NO: 517849 - RNA, 32 nt, Human
ugccucgugaacacaucugcuggugggaaggc

SEQ ID NO: 517850 - RNA, 32 nt, Human
ugccucgugagccucccagagcccaggccucc

SEQ ID NO: 517851 - RNA, 32 nt, Human
ugccucgugccugugaucccagcacuuuggga

SEQ ID NO: 517852 - RNA, 32 nt, Human
ugccucguugggggacagagagagggacucca

SEQ ID NO: 517853 - RNA, 32 nt, Human
ugccucuaacacagcuuugccuucuaaagcgg

SEQ ID NO: 517854 - RNA, 25 nt, Human
ugccucuaauagcccugccugguac

SEQ ID NO: 517855 - RNA, 32 nt, Human
ugccucuacaaaacaugcaaaaauuagcuggg

SEQ ID NO: 517856 - RNA, 32 nt, Human
ugccucuaccaccaccucucacuucucaaggc

SEQ ID NO: 517857 - RNA, 21 nt, Human
ugccucuaccagcuucccaug

SEQ ID NO: 517858 - RNA, 32 nt, Human
ugccucuaccugccugguccagcugggacccu

SEQ ID NO: 517859 - RNA, 22 nt, Human
ugccucuacuaaaaauacaaaa

SEQ ID NO: 517860 - RNA, 32 nt, Human
ugccucuaggccccacucucaggcuaggaugg

SEQ ID NO: 517861 - RNA, 32 nt, Human
ugccucuagugcacucccuccagccuacccac

SEQ ID NO: 517862 - RNA, 32 nt, Human
ugccucuaucagggcuggaguggugcagcccc

SEQ ID NO: 517863 - RNA, 23 nt, Human
ugccucuaugugcuguuuuuccu

SEQ ID NO: 517864 - RNA, 32 nt, Human
ugccucucacucauccuccaccacuuugccga

SEQ ID NO: 517865 - RNA, 32 nt, Human
ugccucucagucuuaggggacauggcagagau

SEQ ID NO: 517866 - RNA, 32 nt, Human
ugccucucauaucaccaguggccaucugaggu

SEQ ID NO: 517867 - RNA, 32 nt, Human
ugccucucccacccuuaccuccaucucacaca

SEQ ID NO: 517868 - RNA, 32 nt, Human
ugccucucccauaggaauggaauacauuuauu

SEQ ID NO: 517869 - RNA, 32 nt, Human
ugccucuccccuuccuccucugcucuugaucu

SEQ ID NO: 517870 - RNA, 24 nt, Human
ugccucuccgccggaggucuagcu

SEQ ID NO: 517871 - RNA, 32 nt, Human
ugccucuccuacagcauggagaggcugacccc

SEQ ID NO: 517872 - RNA, 19 nt, Human
ugccucuccucuccccaga

SEQ ID NO: 517873 - RNA, 32 nt, Human
ugccucuccugccucucgccgcugcuccuccc

SEQ ID NO: 517874 - RNA, 32 nt, Human
ugccucuccuucugaaccuugggagagggcug

SEQ ID NO: 517875 - RNA, 32 nt, Human
ugccucuccuuuuccuccuuuuuaccuucugg

SEQ ID NO: 517876 - RNA, 32 nt, Human
ugccucucgcaggccccagcuggcugucacug

SEQ ID NO: 517877 - RNA, 32 nt, Human
ugccucucgggcagcuggaauuacaggcaugc

SEQ ID NO: 517878 - RNA, 32 nt, Human
ugccucucuacggcucugcuucccagcgggca

SEQ ID NO: 517879 - RNA, 32 nt, Human
ugccucucuacuccagccugggcaauagggua

SEQ ID NO: 517880 - RNA, 32 nt, Human
ugccucucucacucuucauacuccuccauauu

SEQ ID NO: 517881 - RNA, 22 nt, Human
ugccucucugcguuuccaggug

SEQ ID NO: 517882 - RNA, 32 nt, Human
ugccucucuuccucuuggauccaggagcaauu

SEQ ID NO: 517883 - RNA, 32 nt, Human
ugccucucuugaggagaggaagugguucuauu

SEQ ID NO: 517884 - RNA, 32 nt, Human
ugccucucuuugucucugcauuuccuuuccug

SEQ ID NO: 517885 - RNA, 21 nt, Human
ugccucugaagcaccugcuca

SEQ ID NO: 517886 - RNA, 32 nt, Human
ugccucugaagcaccugcucacagaaggguga

SEQ ID NO: 517887 - RNA, 32 nt, Human
ugccucugaccagcaucgucuguaaagguuaa

SEQ ID NO: 517888 - RNA, 32 nt, Human
ugccucugaccccuccugugguggugacccau

SEQ ID NO: 517889 - RNA, 32 nt, Human
ugccucugaccugccguguccuuugcaggaag

SEQ ID NO: 517890 - RNA, 32 nt, Human
ugccucugagagcaucaggccuagaggccuga

SEQ ID NO: 517891 - RNA, 32 nt, Human
ugccucugagcagagagcagcagcagcaggua

SEQ ID NO: 517892 - RNA, 32 nt, Human
ugccucugaggcccuucugcaggcuggaugaa

SEQ ID NO: 517893 - RNA, 32 nt, Human
ugccucugagucugaaucucccaaagagagaa

SEQ ID NO: 517894 - RNA, 19 nt, Human
ugccucugaguuucagaug

SEQ ID NO: 517895 - RNA, 32 nt, Human
ugccucugcacuccaaccugggugauggagca

SEQ ID NO: 517896 - RNA, 32 nt, Human
ugccucugcacuccagccugcgugacaaagug

SEQ ID NO: 517897 - RNA, 32 nt, Human
ugccucugcaguuggacaagacuuggcccccg

SEQ ID NO: 517898 - RNA, 32 nt, Human
ugccucugcauuccagccuuggugacagagca

SEQ ID NO: 517899 - RNA, 32 nt, Human
ugccucugcccaccucuucucuucugcuucca

SEQ ID NO: 517900 - RNA, 31 nt, Human
ugccucugccucagugggccugugggagccu

SEQ ID NO: 517901 - RNA, 22 nt, Human
ugccucugcgaagaaccuugug

SEQ ID NO: 517902 - RNA, 32 nt, Human
ugccucugcucccaucucucucuuugccucau

SEQ ID NO: 517903 - RNA, 32 nt, Human
ugccucuggaaagaacaacuggcaggacuguu

SEQ ID NO: 517904 - RNA, 32 nt, Human
ugccucuggagaccccagccccagagggcuuu

SEQ ID NO: 517905 - RNA, 29 nt, Human
ugccucuggcugccugcguccucucggug

SEQ ID NO: 517906 - RNA, 32 nt, Human
ugccucuggcugucugcacuuuuguucaugcu

SEQ ID NO: 517907 - RNA, 32 nt, Human
ugccucugggagagaggaagaagaaaggggcc

SEQ ID NO: 517908 - RNA, 32 nt, Human
ugccucugggaggggugcugccuuguagaugg

SEQ ID NO: 517909 - RNA, 32 nt, Human
ugccucugggcaaugaaguaauguuucucuac

SEQ ID NO: 517910 - RNA, 32 nt, Human
ugccucugguauccuuccuuuugaaacgaagc

SEQ ID NO: 517911 - RNA, 32 nt, Human
ugccucuguaccauuuuuccuugagugugcuu

SEQ ID NO: 517912 - RNA, 32 nt, Human
ugccucuguagcuggccuucuuccugccacag

SEQ ID NO: 517913 - RNA, 22 nt, Human
ugccucuguaggcaaucuucug

SEQ ID NO: 517914 - RNA, 32 nt, Human
ugccucuguaguguggccuggugcugggguga

SEQ ID NO: 517915 - RNA, 32 nt, Human
ugccucuguccacacccaccucccugguguac

SEQ ID NO: 517916 - RNA, 20 nt, Human
ugccucugugccucucccca

SEQ ID NO: 517917 - RNA, 32 nt, Human
ugccucugugcgagugcaccgacagaaaacug

SEQ ID NO: 517918 - RNA, 32 nt, Human
ugccucuguggaagacgccugcugcuaagaga

SEQ ID NO: 517919 - RNA, 32 nt, Human
ugccucuguggggagucugccucccagacugg

SEQ ID NO: 517920 - RNA, 32 nt, Human
ugccucuguuggcugagcucuccugggcuacu

SEQ ID NO: 517921 - RNA, 17 nt, Human
ugccucuuacucuccag

SEQ ID NO: 517922 - RNA, 20 nt, Human
ugccucuucagcacaucuca

SEQ ID NO: 517923 - RNA, 32 nt, Human
ugccucuucauacccaugcaugcugcucaccc

SEQ ID NO: 517924 - RNA, 22 nt, Human
ugccucuuccaaaacagugcaa

SEQ ID NO: 517925 - RNA, 17 nt, Human
ugccucuucccagaaga

SEQ ID NO: 517926 - RNA, 18 nt, Human
ugccucuuccccacccag

SEQ ID NO: 517927 - RNA, 19 nt, Human
ugccucuucccuaacuaga

SEQ ID NO: 517928 - RNA, 26 nt, Human
ugccucuuccuccccaccccacugcc

SEQ ID NO: 517929 - RNA, 18 nt, Human
ugccucuuccugcaguug

SEQ ID NO: 517930 - RNA, 18 nt, Human
ugccucuuccugcuccag

SEQ ID NO: 517931 - RNA, 32 nt, Human
ugccucuuccuguuucuccugaggaugcuccu

SEQ ID NO: 517932 - RNA, 19 nt, Human
ugccucuucuaggcaguug

SEQ ID NO: 517933 - RNA, 19 nt, Human
ugccucuucuccaaucaga

SEQ ID NO: 517934 - RNA, 32 nt, Human
ugccucuucuccaaucagagcguggaggcgag

SEQ ID NO: 517935 - RNA, 19 nt, Human
ugccucuucucccgcgggu

SEQ ID NO: 517936 - RNA, 32 nt, Human
ugccucuucugcauuuggcuuuauuuugauuc

SEQ ID NO: 517937 - RNA, 20 nt, Human
ugccucuucuguggccagau

SEQ ID NO: 517938 - RNA, 19 nt, Human
ugccucuucuugcaaggug

SEQ ID NO: 517939 - RNA, 32 nt, Human
ugccucuugaagcuuuuucugccuccugauuc

SEQ ID NO: 517940 - RNA, 32 nt, Human
ugccucuugaaugcagggacaaaugccacacg

SEQ ID NO: 517941 - RNA, 32 nt, Human
ugccucuugcaagcugugugaccccgggcaca

SEQ ID NO: 517942 - RNA, 32 nt, Human
ugccucuugcaagcugugugacccugggcaca

SEQ ID NO: 517943 - RNA, 32 nt, Human
ugccucuugcguuccugaccucaugggaccag

SEQ ID NO: 517944 - RNA, 19 nt, Human
ugccucuuuaggccaguug

SEQ ID NO: 517945 - RNA, 25 nt, Human
ugccucuuucccccagccaccgccu

SEQ ID NO: 517946 - RNA, 32 nt, Human
ugccucuuucugcucuaucuccaccuccuuuu

SEQ ID NO: 517947 - RNA, 19 nt, Human
ugccucuuucuuccccaga

SEQ ID NO: 517948 - RNA, 32 nt, Human
ugccucuuugaaaaauacaaaaauuagcugga

SEQ ID NO: 517949 - RNA, 20 nt, Human
ugccucuuuguccccaggug

SEQ ID NO: 517950 - RNA, 32 nt, Human
ugccugaaaaauuggccauggaggcacaccaa

SEQ ID NO: 517951 - RNA, 32 nt, Human
ugccugaaaccucagauaguacugaacccuuu

SEQ ID NO: 517952 - RNA, 32 nt, Human
ugccugaaacuuccuccaccugcuugaggagc

SEQ ID NO: 517953 - RNA, 32 nt, Human
ugccugaaacuuccuccaccuucuugaggagc

SEQ ID NO: 517954 - RNA, 32 nt, Human
ugccugaacagccccuucucucccuccacccc

SEQ ID NO: 517955 - RNA, 32 nt, Human
ugccugaacagcccucucucucacuccccucu

SEQ ID NO: 517956 - RNA, 32 nt, Human
ugccugaacauacacacgcacacccaugcgca

SEQ ID NO: 517957 - RNA, 32 nt, Human
ugccugaacccccagccugggcuuagcccugu

SEQ ID NO: 517958 - RNA, 32 nt, Human
ugccugaacgcuaagaacaugacuucugucug

SEQ ID NO: 517959 - RNA, 32 nt, Human
ugccugaagcuccccucuuccucucuuccucc

SEQ ID NO: 517960 - RNA, 32 nt, Human
ugccugaagcuuggugcacccuccagugagac

SEQ ID NO: 517961 - RNA, 32 nt, Human
ugccugaaggauccugaacauauuuaguuacc

SEQ ID NO: 517962 - RNA, 32 nt, Human
ugccugaaguuuuaguauuuguuuucuaggug

SEQ ID NO: 517963 - RNA, 32 nt, Human
ugccugaauaguacaccccacccuccaucugu

SEQ ID NO: 517964 - RNA, 32 nt, Human
ugccugaaugaacaugcccacugugaaagauu

SEQ ID NO: 517965 - RNA, 27 nt, Human
ugccugaauguaaccugcuagcucucc

SEQ ID NO: 517966 - RNA, 32 nt, Human
ugccugacaagugccugacacgcagccuaguu

SEQ ID NO: 517967 - RNA, 32 nt, Human
ugccugacacccagggaugagcaguguccagu

SEQ ID NO: 517968 - RNA, 32 nt, Human
ugccugacagaauugcuuagaaaggagcagag

SEQ ID NO: 517969 - RNA, 32 nt, Human
ugccugacccaggucaggauuuucaagaaaga

SEQ ID NO: 517970 - RNA, 31 nt, Human
ugccugacccuacuggagcaauuugugaucu

SEQ ID NO: 517971 - RNA, 32 nt, Human
ugccugaccugacagguggcuucaggccucgg

SEQ ID NO: 517972 - RNA, 32 nt, Human
ugccugacggacccuguugccugcuccugggc

SEQ ID NO: 517973 - RNA, 32 nt, Human
ugccugacucauuccugaccucuugucauuuu

SEQ ID NO: 517974 - RNA, 32 nt, Human
ugccugacuccaccuagcuauuuggaauaacc

SEQ ID NO: 517975 - RNA, 32 nt, Human
ugccugacuccccuccccagacuggcuuggga

SEQ ID NO: 517976 - RNA, 32 nt, Human
ugccugacucuugguccuucuggcagggaccu

SEQ ID NO: 517977 - RNA, 32 nt, Human
ugccugacuuaucuugcaucccuuugaaugag

SEQ ID NO: 517978 - RNA, 32 nt, Human
ugccugacuucaucacgcucccugcacuuagg

SEQ ID NO: 517979 - RNA, 19 nt, Human
ugccugacuucucugaaua

SEQ ID NO: 517980 - RNA, 20 nt, Human
ugccugagaaacugagccua

SEQ ID NO: 517981 - RNA, 32 nt, Human
ugccugagaagaacccacagaguggaugcugu

SEQ ID NO: 517982 - RNA, 32 nt, Human
ugccugagaccaggagguugaggcugcaguga

SEQ ID NO: 517983 - RNA, 32 nt, Human
ugccugagagaaccuguuucuucaccuaaaaa

SEQ ID NO: 517984 - RNA, 32 nt, Human
ugccugagagcagaaugaauaauugagguuag

SEQ ID NO: 517985 - RNA, 32 nt, Human
ugccugagagccccauaacggaaagggcuaag

SEQ ID NO: 517986 - RNA, 32 nt, Human
ugccugagaggaaacaguggaggcagcggggc

SEQ ID NO: 517987 - RNA, 32 nt, Human
ugccugagagugaagacacagaggacagcgca

SEQ ID NO: 517988 - RNA, 32 nt, Human
ugccugagcccaggacccacuggagccagccc

SEQ ID NO: 517989 - RNA, 23 nt, Human
ugccugagcccaggaguucaaga

SEQ ID NO: 517990 - RNA, 32 nt, Human
ugccugagcgccgccucugugcccagguccca

SEQ ID NO: 517991 - RNA, 23 nt, Human
ugccugagcucaggaguucaaga

SEQ ID NO: 517992 - RNA, 23 nt, Human
ugccugagcucaggaguucgaga

SEQ ID NO: 517993 - RNA, 23 nt, Human
ugccugagcucaggaguuugaga

SEQ ID NO: 517994 - RNA, 32 nt, Human
ugccugagcuccaagacagggccuccugagga

SEQ ID NO: 517995 - RNA, 32 nt, Human
ugccugagcuggugcugaccucuuagccaugg

SEQ ID NO: 517996 - RNA, 32 nt, Human
ugccugaggacagcagugcaguugacauggau

SEQ ID NO: 517997 - RNA, 32 nt, Human
ugccugaggccccacagcagaguucaacugga

SEQ ID NO: 517998 - RNA, 32 nt, Human
ugccugagggcugugcugagagggagaggagc

SEQ ID NO: 517999 - RNA, 32 nt, Human
ugccugagguaggccuuagaaggggaugaguc

SEQ ID NO: 518000 - RNA, 23 nt, Human
ugccugaggucaggaguucaaga

SEQ ID NO: 518001 - RNA, 32 nt, Human
ugccugaguaccauugggguccuugcccaguc

SEQ ID NO: 518002 - RNA, 32 nt, Human
ugccugaguagcugggacuacaggcaugcacc

SEQ ID NO: 518003 - RNA, 24 nt, Human
ugccugagucaccgccgccgccgc

SEQ ID NO: 518004 - RNA, 32 nt, Human
ugccugaguccaguccugccuuacccguuccu

SEQ ID NO: 518005 - RNA, 23 nt, Human
ugccugaguucaggaguucgaga

SEQ ID NO: 518006 - RNA, 32 nt, Human
ugccugaguucucuccuaggcaaguggccagu

SEQ ID NO: 518007 - RNA, 32 nt, Human
ugccugauggccagggccagaugcuguucuuc

SEQ ID NO: 518008 - RNA, 32 nt, Human
ugccugaugugggaacagcucuucucccagau

SEQ ID NO: 518009 - RNA, 23 nt, Human
ugccugauucaacuguagccugu

SEQ ID NO: 518010 - RNA, 22 nt, Human
ugccugauuccugauucccaug

SEQ ID NO: 518011 - RNA, 32 nt, Human
ugccugcaaaccuaggagagaggucuacaaca

SEQ ID NO: 518012 - RNA, 31 nt, Human
ugccugcaacaacugcucaugccaagcuggg

SEQ ID NO: 518013 - RNA, 32 nt, Human
ugccugcaacccaaguggccuuauccgugcag

SEQ ID NO: 518014 - RNA, 24 nt, Human
ugccugcaaucccagcuacucagg

SEQ ID NO: 518015 - RNA, 24 nt, Human
ugccugcaaucccagcuacucggg

SEQ ID NO: 518016 - RNA, 22 nt, Human
ugccugcaaucccagcuacuug

SEQ ID NO: 518017 - RNA, 24 nt, Human
ugccugcaaucccagcuacuugga

SEQ ID NO: 518018 - RNA, 32 nt, Human
ugccugcaccccgguccucagccugggcuccc

SEQ ID NO: 518019 - RNA, 32 nt, Human
ugccugcaccuugucuuggacuugccagccuu

SEQ ID NO: 518020 - RNA, 21 nt, Human
ugccugcagacccuccagggg

SEQ ID NO: 518021 - RNA, 32 nt, Human
ugccugcagagcagagagaaauuuguagcaau

SEQ ID NO: 518022 - RNA, 32 nt, Human
ugccugcagccugcccugccucucucacaggc

SEQ ID NO: 518023 - RNA, 32 nt, Human
ugccugcagccugccuggcuccgccccuagug

SEQ ID NO: 518024 - RNA, 32 nt, Human
ugccugcagcuuccagcuccuucgucccugau

SEQ ID NO: 518025 - RNA, 24 nt, Human
ugccugcagggccgccgccaccac

SEQ ID NO: 518026 - RNA, 31 nt, Human
ugccugcagguguccaucaccuucaaggacu

SEQ ID NO: 518027 - RNA, 24 nt, Human
ugccugcagucccagcuauucagg

SEQ ID NO: 518028 - RNA, 24 nt, Human
ugccugcagucccaguuacuuggg

SEQ ID NO: 518029 - RNA, 24 nt, Human
ugccugcaguccuagcuacuuggg

SEQ ID NO: 518030 - RNA, 27 nt, Human
ugccugcagugaccagugcucuguggg

SEQ ID NO: 518031 - RNA, 32 nt, Human
ugccugcauacaggcauacacaugcacgcuua

SEQ ID NO: 518032 - RNA, 32 nt, Human
ugccugcauagcacaccuuagaugugguauuu

SEQ ID NO: 518033 - RNA, 32 nt, Human
ugccugcaucucgugugccuguugugcauucu

SEQ ID NO: 518034 - RNA, 32 nt, Human
ugccugcauucaggccaggggccguguuugcu

SEQ ID NO: 518035 - RNA, 32 nt, Human
ugccugccacagagcaaaaggagugguggaac

SEQ ID NO: 518036 - RNA, 32 nt, Human
ugccugccaccaccauccaacagaccuggugc

SEQ ID NO: 518037 - RNA, 32 nt, Human
ugccugccaccugggcccucacagcccagacc

SEQ ID NO: 518038 - RNA, 22 nt, Human
ugccugccacuucuuccagggg

SEQ ID NO: 518039 - RNA, 32 nt, Human
ugccugccagcccuuucuggauuacugauaga

SEQ ID NO: 518040 - RNA, 32 nt, Human
ugccugccauuuucuuuuugcuuagguuuuuc

SEQ ID NO: 518041 - RNA, 32 nt, Human
ugccugcccacaucccugccuccuggaauccu

SEQ ID NO: 518042 - RNA, 32 nt, Human
ugccugcccacccuccacccacugccuucccg

SEQ ID NO: 518043 - RNA, 32 nt, Human
ugccugcccagaacgccugcacccucaccucu

SEQ ID NO: 518044 - RNA, 32 nt, Human
ugccugcccagccugggcccugcaguguggag

SEQ ID NO: 518045 - RNA, 32 nt, Human
ugccugccccacugcacccucucccccuuauc

SEQ ID NO: 518046 - RNA, 20 nt, Human
ugccugccccccaccccagg

SEQ ID NO: 518047 - RNA, 32 nt, Human
ugccugcccccgcugacucaggagcuccggug

SEQ ID NO: 518048 - RNA, 22 nt, Human
ugccugccccgagucccccggg

SEQ ID NO: 518049 - RNA, 19 nt, Human
ugccugccccgccuugggg

SEQ ID NO: 518050 - RNA, 16 nt, Human
ugccugccccucccca

SEQ ID NO: 518051 - RNA, 20 nt, Human
ugccugccccucucccgcca

SEQ ID NO: 518052 - RNA, 31 nt, Human
ugccugccccucucuggcccacugggcgucg

SEQ ID NO: 518053 - RNA, 32 nt, Human
ugccugccccugggcgagugcgggcagggauc

SEQ ID NO: 518054 - RNA, 19 nt, Human
ugccugccccuuccagcug

SEQ ID NO: 518055 - RNA, 17 nt, Human
ugccugcccgccugcuu

SEQ ID NO: 518056 - RNA, 19 nt, Human
ugccugcccgggcccgggg

SEQ ID NO: 518057 - RNA, 32 nt, Human
ugccugcccuauuccuccucccaagucuguuc

SEQ ID NO: 518058 - RNA, 32 nt, Human
ugccugcccucagcucucacacaugacuggag

SEQ ID NO: 518059 - RNA, 19 nt, Human
ugccugcccuccagugcug

SEQ ID NO: 518060 - RNA, 32 nt, Human
ugccugcccucugucugucuucuccuaauucu

SEQ ID NO: 518061 - RNA, 32 nt, Human
ugccugcccugagcugugucucugucuaggua

SEQ ID NO: 518062 - RNA, 32 nt, Human
ugccugcccugccaaggaucuugcuguggacg

SEQ ID NO: 518063 - RNA, 22 nt, Human
ugccugcccugccagagggagg

SEQ ID NO: 518064 - RNA, 24 nt, Human
ugccugcccugccccuccaggggg

SEQ ID NO: 518065 - RNA, 20 nt, Human
ugccugcccugcccuugggg

SEQ ID NO: 518066 - RNA, 32 nt, Human
ugccugcccugccuccgucccaaccaugggcu

SEQ ID NO: 518067 - RNA, 32 nt, Human
ugccugcccugccucuccacgcacaguguuaa

SEQ ID NO: 518068 - RNA, 32 nt, Human
ugccugcccugccucugccugaggcagccgcu

SEQ ID NO: 518069 - RNA, 21 nt, Human
ugccugcccugccuuucaugg

SEQ ID NO: 518070 - RNA, 23 nt, Human
ugccugcccugcuucccccaggg

SEQ ID NO: 518071 - RNA, 19 nt, Human
ugccugcccugggccaggg

SEQ ID NO: 518072 - RNA, 32 nt, Human
ugccugcccugucaggaggcagaaggaagcag

SEQ ID NO: 518073 - RNA, 32 nt, Human
ugccugcccuguucacacaaccccuguggacu

SEQ ID NO: 518074 - RNA, 32 nt, Human
ugccugccgccuucauugauccuguauuaagc

SEQ ID NO: 518075 - RNA, 32 nt, Human
ugccugccggcuuagggaggguugauggggga

SEQ ID NO: 518076 - RNA, 32 nt, Human
ugccugccuacuggccugucucucacaaucca

SEQ ID NO: 518077 - RNA, 24 nt, Human
ugccugccucagccucccaagggg

SEQ ID NO: 518078 - RNA, 32 nt, Human
ugccugccuccaccucuuuaacgagccucuuu

SEQ ID NO: 518079 - RNA, 32 nt, Human
ugccugccuccaggagcaggacgguggcuggg

SEQ ID NO: 518080 - RNA, 32 nt, Human
ugccugccucccucccugucugccuccugccc

SEQ ID NO: 518081 - RNA, 32 nt, Human
ugccugccuccuuccuggugugaauggucagc

SEQ ID NO: 518082 - RNA, 32 nt, Human
ugccugccucucuccuuuccuuccucaucccc

SEQ ID NO: 518083 - RNA, 32 nt, Human
ugccugccugauuccauggcuguugugcugau

SEQ ID NO: 518084 - RNA, 32 nt, Human
ugccugccugcacuauugccccagaggagggc

SEQ ID NO: 518085 - RNA, 32 nt, Human
ugccugccugcagggaguuaccccaguuucca

SEQ ID NO: 518086 - RNA, 32 nt, Human
ugccugccugccugccugccucaguuuauuuc

SEQ ID NO: 518087 - RNA, 32 nt, Human
ugccugccugcucgcucccugcagaggggcug

SEQ ID NO: 518088 - RNA, 32 nt, Human
ugccugccugcucuugagaaaccuggaccagg

SEQ ID NO: 518089 - RNA, 23 nt, Human
ugccugccuggcccacgcugcug

SEQ ID NO: 518090 - RNA, 32 nt, Human
ugccugccuggcuggggagccccagggauagc

SEQ ID NO: 518091 - RNA, 32 nt, Human
ugccugccuguaauccagcuacucaggaggcu

SEQ ID NO: 518092 - RNA, 32 nt, Human
ugccugccuguaaucccagcacugugggaggc

SEQ ID NO: 518093 - RNA, 32 nt, Human
ugccugccugucucuaguuucucucacauccc

SEQ ID NO: 518094 - RNA, 32 nt, Human
ugccugccuguuacagaucacuucuccgucgg

SEQ ID NO: 518095 - RNA, 32 nt, Human
ugccugccuucccauauuggucccuugacauu

SEQ ID NO: 518096 - RNA, 32 nt, Human
ugccugccuuccucccagaggguguuuccuag

SEQ ID NO: 518097 - RNA, 32 nt, Human
ugccugccuucucuagcggcacagaagcagcc

SEQ ID NO: 518098 - RNA, 32 nt, Human
ugccugcggccugucuguguuugucuuacuca

SEQ ID NO: 518099 - RNA, 32 nt, Human
ugccugcuaagguacugaguugacaauuuuau

SEQ ID NO: 518100 - RNA, 32 nt, Human
ugccugcuaguaagcagucacauaagugggua

SEQ ID NO: 518101 - RNA, 32 nt, Human
ugccugcucacugaccaacugccccucgccca

SEQ ID NO: 518102 - RNA, 32 nt, Human
ugccugcucagcugccucgggcccucaccuga

SEQ ID NO: 518103 - RNA, 32 nt, Human
ugccugcuccagacauuuuguucuugaaucug

SEQ ID NO: 518104 - RNA, 32 nt, Human
ugccugcucccagagaagcuugucuaaccuag

SEQ ID NO: 518105 - RNA, 19 nt, Human
ugccugcuccuccaugcug

SEQ ID NO: 518106 - RNA, 32 nt, Human
ugccugcuccugggcagugguuuuguugccug

SEQ ID NO: 518107 - RNA, 24 nt, Human
ugccugcucgcucccugcagaggg

SEQ ID NO: 518108 - RNA, 32 nt, Human
ugccugcugaagggaagccaggcagcucucua

SEQ ID NO: 518109 - RNA, 32 nt, Human
ugccugcugagccaguccuggagcccauaccu

SEQ ID NO: 518110 - RNA, 22 nt, Human
ugccugcugaugcccacagggg

SEQ ID NO: 518111 - RNA, 32 nt, Human
ugccugcugccaccagcauccucuggaguccu

SEQ ID NO: 518112 - RNA, 32 nt, Human
ugccugcugcccucucuggugccuguggagau

SEQ ID NO: 518113 - RNA, 32 nt, Human
ugccugcugcucccuuuuucugucucugucca

SEQ ID NO: 518114 - RNA, 32 nt, Human
ugccugcugcucggcuuugcuuuugcuuuucc

SEQ ID NO: 518115 - RNA, 32 nt, Human
ugccugcugcuuccuuccccuguuuacagcaa

SEQ ID NO: 518116 - RNA, 22 nt, Human
ugccugcuggaagcucuguggg

SEQ ID NO: 518117 - RNA, 21 nt, Human
ugccugcuggaguuuucugcc

SEQ ID NO: 518118 - RNA, 32 nt, Human
ugccugcuggcugcacggcagcuguucuugga

SEQ ID NO: 518119 - RNA, 21 nt, Human
ugccugcugggacccuggcca

SEQ ID NO: 518120 - RNA, 32 nt, Human
ugccugcuguagguaucugugugugcaccuug

SEQ ID NO: 518121 - RNA, 32 nt, Human
ugccugcugugcugggagguauagggguccug

SEQ ID NO: 518122 - RNA, 32 nt, Human
ugccugcuuccccagcccugccaguuuccaga

SEQ ID NO: 518123 - RNA, 32 nt, Human
ugccugcuugccaaaagcuaggaugcuucagg

SEQ ID NO: 518124 - RNA, 32 nt, Human
ugccugcuugcucuccuuugcugauggauugc

SEQ ID NO: 518125 - RNA, 32 nt, Human
ugccugcuuucuggucacauguggaccuugau

SEQ ID NO: 518126 - RNA, 32 nt, Human
ugccuggaaaggagggacuggagcagccagga

SEQ ID NO: 518127 - RNA, 31 nt, Human
ugccuggaaaugucucccgaaaaggaugaaa

SEQ ID NO: 518128 - RNA, 32 nt, Human
ugccuggaacaccgcugccacuguggcuccag

SEQ ID NO: 518129 - RNA, 32 nt, Human
ugccuggaacauucuucccauagugucugcau

SEQ ID NO: 518130 - RNA, 20 nt, Human
ugccuggaaccauccagaug

SEQ ID NO: 518131 - RNA, 32 nt, Human
ugccuggaagcugaaugcccaucucuguggac

SEQ ID NO: 518132 - RNA, 22 nt, Human
ugccuggaaggggccuccuagg

SEQ ID NO: 518133 - RNA, 32 nt, Human
ugccuggaccuagccaggcucacuguugaagu

SEQ ID NO: 518134 - RNA, 21 nt, Human
ugccuggacgccccccuggug

SEQ ID NO: 518135 - RNA, 24 nt, Human
ugccuggacuucccuucccaggga

SEQ ID NO: 518136 - RNA, 32 nt, Human
ugccuggagaggauucaagaugaccaacgaag

SEQ ID NO: 518137 - RNA, 32 nt, Human
ugccuggagaugggaauguggccucagugccu

SEQ ID NO: 518138 - RNA, 32 nt, Human
ugccuggagcaucuggcagccccacaccugcc

SEQ ID NO: 518139 - RNA, 32 nt, Human
ugccuggagccugggccaggcccagcccaucu

SEQ ID NO: 518140 - RNA, 32 nt, Human
ugccuggagcgccaugguauggggaaggacag

SEQ ID NO: 518141 - RNA, 32 nt, Human
ugccuggaggaugggugcgcagcucugcccuc

SEQ ID NO: 518142 - RNA, 32 nt, Human
ugccuggaggggacaucagggaagaggcuucc

SEQ ID NO: 518143 - RNA, 32 nt, Human
ugccuggaggggcggaguuuccaagauaacag

SEQ ID NO: 518144 - RNA, 32 nt, Human
ugccuggaggugugggagggaagaugaguuau

SEQ ID NO: 518145 - RNA, 32 nt, Human
ugccuggagucccgccccugcccagaacccuu

SEQ ID NO: 518146 - RNA, 23 nt, Human
ugccuggagucgucuguccaagg

SEQ ID NO: 518147 - RNA, 32 nt, Human
ugccuggaguggagcugagagcucaggucugg

SEQ ID NO: 518148 - RNA, 32 nt, Human
ugccuggaguuacauaacccauugugcuucca

SEQ ID NO: 518149 - RNA, 25 nt, Human
ugccuggauacaggagcucuguggg

SEQ ID NO: 518150 - RNA, 32 nt, Human
ugccuggaucccggcagaagcuaugaaaggga

SEQ ID NO: 518151 - RNA, 32 nt, Human
ugccuggaugucugcggccaccccagacaugc

SEQ ID NO: 518152 - RNA, 32 nt, Human
ugccuggauuacaggcaugagccacugcaccc

SEQ ID NO: 518153 - RNA, 22 nt, Human
ugccuggcaaccuaggcccucc

SEQ ID NO: 518154 - RNA, 23 nt, Human
ugccuggcacagggaacagcaug

SEQ ID NO: 518155 - RNA, 22 nt, Human
ugccuggcacagugucugguac

SEQ ID NO: 518156 - RNA, 32 nt, Human
ugccuggcacagugucugguacauuuguguuu

SEQ ID NO: 518157 - RNA, 32 nt, Human
ugccuggcagaagguguuaugcuuuucuggcu

SEQ ID NO: 518158 - RNA, 32 nt, Human
ugccuggcagaauccacagagcagcccaggug

SEQ ID NO: 518159 - RNA, 32 nt, Human
ugccuggcagaaugcccugccugccugccugc

SEQ ID NO: 518160 - RNA, 32 nt, Human
ugccuggcagccaaggguguuggucgcgaagc

SEQ ID NO: 518161 - RNA, 32 nt, Human
ugccuggcagcccucagaugugauuuggccuu

SEQ ID NO: 518162 - RNA, 32 nt, Human
ugccuggcaucgagaagaacuggagcaccgac

SEQ ID NO: 518163 - RNA, 21 nt, Human
ugccuggcaugacaucucucc

SEQ ID NO: 518164 - RNA, 32 nt, Human
ugccuggccacugcucccuaagccagccuggu

SEQ ID NO: 518165 - RNA, 32 nt, Human
ugccuggccagccugcuguaagcuagaaccca

SEQ ID NO: 518166 - RNA, 24 nt, Human
ugccuggccaggggcucugcuggg

SEQ ID NO: 518167 - RNA, 32 nt, Human
ugccuggccagucagcagcacagccaucaucu

SEQ ID NO: 518168 - RNA, 32 nt, Human
ugccuggccaugucaccuugaagcugugaccu

SEQ ID NO: 518169 - RNA, 19 nt, Human
ugccuggcccaggcucacc

SEQ ID NO: 518170 - RNA, 20 nt, Human
ugccuggcccauagacaucc

SEQ ID NO: 518171 - RNA, 21 nt, Human
ugccuggcccccaggcccucc

SEQ ID NO: 518172 - RNA, 20 nt, Human
ugccuggccccccagcuucc

SEQ ID NO: 518173 - RNA, 21 nt, Human
ugccuggccccccuggcuccc

SEQ ID NO: 518174 - RNA, 22 nt, Human
ugccuggcccccuguccucucu

SEQ ID NO: 518175 - RNA, 32 nt, Human
ugccuggcccccuguccucucuggcuggggag

SEQ ID NO: 518176 - RNA, 32 nt, Human
ugccuggccccucgccuguggagcucagcccc

SEQ ID NO: 518177 - RNA, 19 nt, Human
ugccuggccccugcugcug

SEQ ID NO: 518178 - RNA, 22 nt, Human
ugccuggccccugcugcugucc

SEQ ID NO: 518179 - RNA, 20 nt, Human
ugccuggccccuggccaucc

SEQ ID NO: 518180 - RNA, 20 nt, Human
ugccuggcccggcggccucc

SEQ ID NO: 518181 - RNA, 17 nt, Human
ugccuggcccugagcca

SEQ ID NO: 518182 - RNA, 32 nt, Human
ugccuggcccugcuugaaugucaugaacaggu

SEQ ID NO: 518183 - RNA, 19 nt, Human
ugccuggccuccccucuca

SEQ ID NO: 518184 - RNA, 21 nt, Human
ugccuggccuccccugccccc

SEQ ID NO: 518185 - RNA, 18 nt, Human
ugccuggccugguagcuc

SEQ ID NO: 518186 - RNA, 20 nt, Human
ugccuggccugucagcuccc

SEQ ID NO: 518187 - RNA, 22 nt, Human
ugccuggccuguggguucugcc

SEQ ID NO: 518188 - RNA, 18 nt, Human
ugccuggccuuccagaug

SEQ ID NO: 518189 - RNA, 23 nt, Human
ugccuggcgcuauuuuugcaggg

SEQ ID NO: 518190 - RNA, 20 nt, Human
ugccuggcggccaggccucc

SEQ ID NO: 518191 - RNA, 32 nt, Human
ugccuggcgucucugugccccugugagaaucu

SEQ ID NO: 518192 - RNA, 20 nt, Human
ugccuggcuaccugcucaug

SEQ ID NO: 518193 - RNA, 24 nt, Human
ugccuggcuacuuggcaccaggga

SEQ ID NO: 518194 - RNA, 23 nt, Human
ugccuggcuauuccaugcucaug

SEQ ID NO: 518195 - RNA, 21 nt, Human
ugccuggcucauuaccugcca

SEQ ID NO: 518196 - RNA, 21 nt, Human
ugccuggcuccacgugccucc

SEQ ID NO: 518197 - RNA, 18 nt, Human
ugccuggcuccauucucc

SEQ ID NO: 518198 - RNA, 32 nt, Human
ugccuggcucccgguugcuuguguaaacucaa

SEQ ID NO: 518199 - RNA, 32 nt, Human
ugccuggcucccugucuucauucuccacgcag

SEQ ID NO: 518200 - RNA, 32 nt, Human
ugccuggcuccggcauccggaaacccacgugg

SEQ ID NO: 518201 - RNA, 22 nt, Human
ugccuggcuccuagauggcucu

SEQ ID NO: 518202 - RNA, 32 nt, Human
ugccuggcuccucugggcuaggcucuucucua

SEQ ID NO: 518203 - RNA, 32 nt, Human
ugccuggcucuucuccacuggaccagggagcu

SEQ ID NO: 518204 - RNA, 23 nt, Human
ugccuggcugucucccagcuccc

SEQ ID NO: 518205 - RNA, 19 nt, Human
ugccuggcuuccuucuggu

SEQ ID NO: 518206 - RNA, 32 nt, Human
ugccuggcuucucugccuccagccuuuggggu

SEQ ID NO: 518207 - RNA, 32 nt, Human
ugccuggcuuggcugcagugcacuuugaaaug

SEQ ID NO: 518208 - RNA, 32 nt, Human
ugccuggcuuggugccuggcaccuagaaagca

SEQ ID NO: 518209 - RNA, 32 nt, Human
ugccuggcuuuauuuaaaggaacugcaguagg

SEQ ID NO: 518210 - RNA, 22 nt, Human
ugccuggcuuugccccacugac

SEQ ID NO: 518211 - RNA, 32 nt, Human
ugccugggaaaaugguuugucuuccaggacaa

SEQ ID NO: 518212 - RNA, 32 nt, Human
ugccugggaaacaggcuucauucagcacagcu

SEQ ID NO: 518213 - RNA, 32 nt, Human
ugccugggaccuggaaaguguuuagauucuug

SEQ ID NO: 518214 - RNA, 21 nt, Human
ugccugggacgcugcuugcca

SEQ ID NO: 518215 - RNA, 32 nt, Human
ugccugggagaacagagcaggagcgucgugcg

SEQ ID NO: 518216 - RNA, 32 nt, Human
ugccugggaggcacguagaggcccagagaguc

SEQ ID NO: 518217 - RNA, 32 nt, Human
ugccugggaggcugaggcaggagaauugcuug

SEQ ID NO: 518218 - RNA, 32 nt, Human
ugccugggaggcugccaggggguggggcuucu

SEQ ID NO: 518219 - RNA, 32 nt, Human
ugccugggagugugugguguuagggugcagcc

SEQ ID NO: 518220 - RNA, 32 nt, Human
ugccugggauggagugggcgggcagguguagc

SEQ ID NO: 518221 - RNA, 32 nt, Human
ugccugggccauggccagcucuagguggauuc

SEQ ID NO: 518222 - RNA, 32 nt, Human
ugccugggcccaggcuggggguuuucaguauu

SEQ ID NO: 518223 - RNA, 20 nt, Human
ugccugggccccccuccagg

SEQ ID NO: 518224 - RNA, 32 nt, Human
ugccugggccucggucccuccugcaccugcug

SEQ ID NO: 518225 - RNA, 21 nt, Human
ugccugggcuggagugcagug

SEQ ID NO: 518226 - RNA, 32 nt, Human
ugccugggcuggcugugaggccaccuuugucc

SEQ ID NO: 518227 - RNA, 32 nt, Human
ugccugggcuguuggcacucacagaccuggag

SEQ ID NO: 518228 - RNA, 26 nt, Human
ugccugggcuucaggccuucuggcac

SEQ ID NO: 518229 - RNA, 32 nt, Human
ugccugggcuuuggugagaggggcagacucug

SEQ ID NO: 518230 - RNA, 32 nt, Human
ugccuggggaaguuuuuccuccccaaggcggc

SEQ ID NO: 518231 - RNA, 32 nt, Human
ugccuggggaauggggaucaugggugcuggca

SEQ ID NO: 518232 - RNA, 31 nt, Human
ugccuggggcacuggaacacauuccuggggg

SEQ ID NO: 518233 - RNA, 32 nt, Human
ugccuggggcccuggcuccuucucggcugccc

SEQ ID NO: 518234 - RNA, 32 nt, Human
ugccuggggccugcucucucccaggaauucuc

SEQ ID NO: 518235 - RNA, 32 nt, Human
ugccuggggccugggucaagggccagucagca

SEQ ID NO: 518236 - RNA, 32 nt, Human
ugccuggggcguccucccuggagcugggggag

SEQ ID NO: 518237 - RNA, 32 nt, Human
ugccugggggagagaggcagcaagucuuaaca

SEQ ID NO: 518238 - RNA, 32 nt, Human
ugccugggggcucccccgacccucucucuauu

SEQ ID NO: 518239 - RNA, 24 nt, Human
ugccuggggucgaaggagcugcuu

SEQ ID NO: 518240 - RNA, 32 nt, Human
ugccuggggucuacuccauaaggguuuacaaa

SEQ ID NO: 518241 - RNA, 32 nt, Human
ugccugggguggaggcuaagccuggacacagu

SEQ ID NO: 518242 - RNA, 32 nt, Human
ugccuggguaacagccacugagauccuccagc

SEQ ID NO: 518243 - RNA, 32 nt, Human
ugccuggguccuggcccuccucccccaucugc

SEQ ID NO: 518244 - RNA, 32 nt, Human
ugccugggucucccugucucuccagccaguau

SEQ ID NO: 518245 - RNA, 32 nt, Human
ugccugggugcagcuucucuagcuggccuugc

SEQ ID NO: 518246 - RNA, 32 nt, Human
ugccugguaggugacuggaggcauugagcagu

SEQ ID NO: 518247 - RNA, 32 nt, Human
ugccugguaggugacuggaggccuugaucggu

SEQ ID NO: 518248 - RNA, 26 nt, Human
ugccuggucccaagccucuuuugcca

SEQ ID NO: 518249 - RNA, 32 nt, Human
ugccuggucccaagccucuuuugccaugguca

SEQ ID NO: 518250 - RNA, 20 nt, Human
ugccuggucccggcuccacc

SEQ ID NO: 518251 - RNA, 21 nt, Human
ugccuggucugcuuucuucca

SEQ ID NO: 518252 - RNA, 21 nt, Human
ugccuggucuuugucuccgcc

SEQ ID NO: 518253 - RNA, 32 nt, Human
ugccuggugcauuuccugucuccugagcaucu

SEQ ID NO: 518254 - RNA, 24 nt, Human
ugccuggugccaacaggggcaucc

SEQ ID NO: 518255 - RNA, 24 nt, Human
ugccuggugcccagugaccugggg

SEQ ID NO: 518256 - RNA, 18 nt, Human
ugccuggugcccuccugg

SEQ ID NO: 518257 - RNA, 20 nt, Human
ugccugguggauguuucugg

SEQ ID NO: 518258 - RNA, 23 nt, Human
ugccugguggugcuagcuccucc

SEQ ID NO: 518259 - RNA, 32 nt, Human
ugccuggugucggccaccuccguguggacggc

SEQ ID NO: 518260 - RNA, 32 nt, Human
ugccuggugucucccugacugcagaggagccc

SEQ ID NO: 518261 - RNA, 32 nt, Human
ugccugguucucuugcuccaccaggaacaagc

SEQ ID NO: 518262 - RNA, 32 nt, Human
ugccugguuuucgagcagguccuggcugagcg

SEQ ID NO: 518263 - RNA, 32 nt, Human
ugccuguaaaacaccugggaaguuccacuggu

SEQ ID NO: 518264 - RNA, 21 nt, Human
ugccuguaacagccaccugga

SEQ ID NO: 518265 - RNA, 24 nt, Human
ugccuguaaccccagcacuuuggg

SEQ ID NO: 518266 - RNA, 24 nt, Human
ugccuguaaccccagcuacucagg

SEQ ID NO: 518267 - RNA, 24 nt, Human
ugccuguaaccccagcuacucggg

SEQ ID NO: 518268 - RNA, 21 nt, Human
ugccuguaagaacuacucucc

SEQ ID NO: 518269 - RNA, 26 nt, Human
ugccuguaauaccaugucuucccaug

SEQ ID NO: 518270 - RNA, 24 nt, Human
ugccuguaauagcagcuacucggg

SEQ ID NO: 518271 - RNA, 32 nt, Human
ugccuguaaucaaucccagcacuuugggaggc

SEQ ID NO: 518272 - RNA, 24 nt, Human
ugccuguaaucacagcuacucggg

SEQ ID NO: 518273 - RNA, 22 nt, Human
ugccuguaaucagcuacucggg

SEQ ID NO: 518274 - RNA, 32 nt, Human
ugccuguaaucagcuacucgggaggcugaggc

SEQ ID NO: 518275 - RNA, 24 nt, Human
ugccuguaauccaacuacccagga

SEQ ID NO: 518276 - RNA, 24 nt, Human
ugccuguaauccaagcuacucgga

SEQ ID NO: 518277 - RNA, 24 nt, Human
ugccuguaauccagcuacucagga

SEQ ID NO: 518278 - RNA, 32 nt, Human
ugccuguaauccagcuacucaggaggcugagg

SEQ ID NO: 518279 - RNA, 24 nt, Human
ugccuguaaucccaaaacuuuggg

SEQ ID NO: 518280 - RNA, 24 nt, Human
ugccuguaaucccaacacucuggg

SEQ ID NO: 518281 - RNA, 24 nt, Human
ugccuguaaucccaacacuuaggg

SEQ ID NO: 518282 - RNA, 24 nt, Human
ugccuguaaucccaacacuucagg

SEQ ID NO: 518283 - RNA, 21 nt, Human
ugccuguaaucccaacacuuu

SEQ ID NO: 518284 - RNA, 23 nt, Human
ugccuguaaucccaacacuuuga

SEQ ID NO: 518285 - RNA, 24 nt, Human
ugccuguaaucccaacacuuuggg

SEQ ID NO: 518286 - RNA, 24 nt, Human
ugccuguaaucccaacacuuuugg

SEQ ID NO: 518287 - RNA, 24 nt, Human
ugccuguaaucccaacauucuggg

SEQ ID NO: 518288 - RNA, 24 nt, Human
ugccuguaaucccaacauuuuggg

SEQ ID NO: 518289 - RNA, 24 nt, Human
ugccuguaaucccaacuaccugga

SEQ ID NO: 518290 - RNA, 24 nt, Human
ugccuguaaucccaacuacucagg

SEQ ID NO: 518291 - RNA, 24 nt, Human
ugccuguaaucccaacuacucggg

SEQ ID NO: 518292 - RNA, 24 nt, Human
ugccuguaaucccaacuacuuggg

SEQ ID NO: 518293 - RNA, 23 nt, Human
ugccuguaaucccaacucuuggg

SEQ ID NO: 518294 - RNA, 24 nt, Human
ugccuguaaucccaauacuuuggg

SEQ ID NO: 518295 - RNA, 24 nt, Human
ugccuguaaucccaccacuuuggg

SEQ ID NO: 518296 - RNA, 24 nt, Human
ugccuguaaucccagaacuuugga

SEQ ID NO: 518297 - RNA, 24 nt, Human
ugccuguaaucccagaacuuuggg

SEQ ID NO: 518298 - RNA, 24 nt, Human
ugccuguaaucccagaauuuuggg

SEQ ID NO: 518299 - RNA, 24 nt, Human
ugccuguaaucccagauacucagg

SEQ ID NO: 518300 - RNA, 24 nt, Human
ugccuguaaucccagauacuuggg

SEQ ID NO: 518301 - RNA, 24 nt, Human
ugccuguaaucccagcaauuuagg

SEQ ID NO: 518302 - RNA, 24 nt, Human
ugccuguaaucccagcaauuuggg

SEQ ID NO: 518303 - RNA, 24 nt, Human
ugccuguaaucccagcacauuggg

SEQ ID NO: 518304 - RNA, 24 nt, Human
ugccuguaaucccagcacccuggg

SEQ ID NO: 518305 - RNA, 22 nt, Human
ugccuguaaucccagcaccuug

SEQ ID NO: 518306 - RNA, 24 nt, Human
ugccuguaaucccagcacucugga

SEQ ID NO: 518307 - RNA, 24 nt, Human
ugccuguaaucccagcacucuggg

SEQ ID NO: 518308 - RNA, 20 nt, Human
ugccuguaaucccagcacuu

SEQ ID NO: 518309 - RNA, 23 nt, Human
ugccuguaaucccagcacuuagg

SEQ ID NO: 518310 - RNA, 24 nt, Human
ugccuguaaucccagcacuucagg

SEQ ID NO: 518311 - RNA, 24 nt, Human
ugccuguaaucccagcacuucggg

SEQ ID NO: 518312 - RNA, 23 nt, Human
ugccuguaaucccagcacuugga

SEQ ID NO: 518313 - RNA, 23 nt, Human
ugccuguaaucccagcacuuggg

SEQ ID NO: 518314 - RNA, 21 nt, Human
ugccuguaaucccagcacuuu

SEQ ID NO: 518315 - RNA, 24 nt, Human
ugccuguaaucccagcacuuuagg

SEQ ID NO: 518316 - RNA, 23 nt, Human
ugccuguaaucccagcacuuuga

SEQ ID NO: 518317 - RNA, 23 nt, Human
ugccuguaaucccagcacuuugg

SEQ ID NO: 518318 - RNA, 24 nt, Human
ugccuguaaucccagcacuuugga

SEQ ID NO: 518319 - RNA, 24 nt, Human
ugccuguaaucccagcacuuuggg

SEQ ID NO: 518320 - RNA, 32 nt, Human
ugccuguaaucccagcacuuuugaggcugagg

SEQ ID NO: 518321 - RNA, 32 nt, Human
ugccuguaaucccagcaugcugggaggccaag

SEQ ID NO: 518322 - RNA, 24 nt, Human
ugccuguaaucccagcauguuggg

SEQ ID NO: 518323 - RNA, 24 nt, Human
ugccuguaaucccagcauucuggg

SEQ ID NO: 518324 - RNA, 23 nt, Human
ugccuguaaucccagcauuuugg

SEQ ID NO: 518325 - RNA, 24 nt, Human
ugccuguaaucccagcauuuuggg

SEQ ID NO: 518326 - RNA, 24 nt, Human
ugccuguaaucccagccacucagg

SEQ ID NO: 518327 - RNA, 24 nt, Human
ugccuguaaucccagccacuuggg

SEQ ID NO: 518328 - RNA, 24 nt, Human
ugccuguaaucccagcgcuuuggg

SEQ ID NO: 518329 - RNA, 24 nt, Human
ugccuguaaucccagcuaaucagg

SEQ ID NO: 518330 - RNA, 24 nt, Human
ugccuguaaucccagcuacacugg

SEQ ID NO: 518331 - RNA, 24 nt, Human
ugccuguaaucccagcuacccagg

SEQ ID NO: 518332 - RNA, 24 nt, Human
ugccuguaaucccagcuacccggg

SEQ ID NO: 518333 - RNA, 20 nt, Human
ugccuguaaucccagcuacu

SEQ ID NO: 518334 - RNA, 23 nt, Human
ugccuguaaucccagcuacuagg

SEQ ID NO: 518335 - RNA, 24 nt, Human
ugccuguaaucccagcuacucagg

SEQ ID NO: 518336 - RNA, 24 nt, Human
ugccuguaaucccagcuacuccgg

SEQ ID NO: 518337 - RNA, 24 nt, Human
ugccuguaaucccagcuacucgga

SEQ ID NO: 518338 - RNA, 24 nt, Human
ugccuguaaucccagcuacucggg

SEQ ID NO: 518339 - RNA, 24 nt, Human
ugccuguaaucccagcuacucugg

SEQ ID NO: 518340 - RNA, 23 nt, Human
ugccuguaaucccagcuacuggg

SEQ ID NO: 518341 - RNA, 24 nt, Human
ugccuguaaucccagcuacuggga

SEQ ID NO: 518342 - RNA, 24 nt, Human
ugccuguaaucccagcuacuuagg

SEQ ID NO: 518343 - RNA, 22 nt, Human
ugccuguaaucccagcuacuug

SEQ ID NO: 518344 - RNA, 24 nt, Human
ugccuguaaucccagcuacuuggg

SEQ ID NO: 518345 - RNA, 24 nt, Human
ugccuguaaucccagcuacuuugg

SEQ ID NO: 518346 - RNA, 24 nt, Human
ugccuguaaucccagcuauucagg

SEQ ID NO: 518347 - RNA, 24 nt, Human
ugccuguaaucccagcuauucgga

SEQ ID NO: 518348 - RNA, 24 nt, Human
ugccuguaaucccagcuauucggg

SEQ ID NO: 518349 - RNA, 24 nt, Human
ugccuguaaucccagcuauuuggg

SEQ ID NO: 518350 - RNA, 24 nt, Human
ugccuguaaucccagcuccuuggg

SEQ ID NO: 518351 - RNA, 24 nt, Human
ugccuguaaucccagcucuuuggg

SEQ ID NO: 518352 - RNA, 24 nt, Human
ugccuguaaucccagcugcucagg

SEQ ID NO: 518353 - RNA, 24 nt, Human
ugccuguaaucccagcugcuuggg

SEQ ID NO: 518354 - RNA, 24 nt, Human
ugccuguaaucccagcuguuuggg

SEQ ID NO: 518355 - RNA, 23 nt, Human
ugccuguaaucccagcuucugga

SEQ ID NO: 518356 - RNA, 24 nt, Human
ugccuguaaucccagcuucuuggg

SEQ ID NO: 518357 - RNA, 23 nt, Human
ugccuguaaucccaggacuuugg

SEQ ID NO: 518358 - RNA, 24 nt, Human
ugccuguaaucccaggacuuuggg

SEQ ID NO: 518359 - RNA, 22 nt, Human
ugccuguaaucccagguacuug

SEQ ID NO: 518360 - RNA, 24 nt, Human
ugccuguaaucccagguacuugga

SEQ ID NO: 518361 - RNA, 24 nt, Human
ugccuguaaucccaguacucuggg

SEQ ID NO: 518362 - RNA, 24 nt, Human
ugccuguaaucccaguacuuuggg

SEQ ID NO: 518363 - RNA, 24 nt, Human
ugccuguaaucccagugcuuugga

SEQ ID NO: 518364 - RNA, 24 nt, Human
ugccuguaaucccagugcuuuggg

SEQ ID NO: 518365 - RNA, 32 nt, Human
ugccuguaaucccagugcuuugggaggcugag

SEQ ID NO: 518366 - RNA, 24 nt, Human
ugccuguaaucccaguuacucagg

SEQ ID NO: 518367 - RNA, 23 nt, Human
ugccuguaaucccaguuacuggg

SEQ ID NO: 518368 - RNA, 24 nt, Human
ugccuguaaucccaguuacuuggg

SEQ ID NO: 518369 - RNA, 24 nt, Human
ugccuguaaucccaucuacucagg

SEQ ID NO: 518370 - RNA, 24 nt, Human
ugccuguaaucccggcuacucagg

SEQ ID NO: 518371 - RNA, 32 nt, Human
ugccuguaaucccggcuacuugggaggcugag

SEQ ID NO: 518372 - RNA, 24 nt, Human
ugccuguaaucccggcuauucaga

SEQ ID NO: 518373 - RNA, 24 nt, Human
ugccuguaaucccgguacuuuggg

SEQ ID NO: 518374 - RNA, 23 nt, Human
ugccuguaaucccugcacuuagg

SEQ ID NO: 518375 - RNA, 24 nt, Human
ugccuguaaucccugcuacucagg

SEQ ID NO: 518376 - RNA, 24 nt, Human
ugccuguaaucccugcuacuuggg

SEQ ID NO: 518377 - RNA, 24 nt, Human
ugccuguaauccuagcacuuugga

SEQ ID NO: 518378 - RNA, 24 nt, Human
ugccuguaauccuagcuacucagg

SEQ ID NO: 518379 - RNA, 23 nt, Human
ugccuguaauccuagcuacuugg

SEQ ID NO: 518380 - RNA, 24 nt, Human
ugccuguaauccuagcuacuuggg

SEQ ID NO: 518381 - RNA, 24 nt, Human
ugccuguaauccuggcuacuuggg

SEQ ID NO: 518382 - RNA, 21 nt, Human
ugccuguaaucgcagcacuuu

SEQ ID NO: 518383 - RNA, 24 nt, Human
ugccuguaaucgcagcuacucagg

SEQ ID NO: 518384 - RNA, 23 nt, Human
ugccuguaaucguagcacuuuga

SEQ ID NO: 518385 - RNA, 24 nt, Human
ugccuguaaucuaagcuacuuggg

SEQ ID NO: 518386 - RNA, 24 nt, Human
ugccuguaaucucaacuacuuggg

SEQ ID NO: 518387 - RNA, 24 nt, Human
ugccuguaaucucaccuacuuggg

SEQ ID NO: 518388 - RNA, 23 nt, Human
ugccuguaaucucagcacuuuga

SEQ ID NO: 518389 - RNA, 20 nt, Human
ugccuguaaucucagcuacu

SEQ ID NO: 518390 - RNA, 24 nt, Human
ugccuguaaucucagcuacucagg

SEQ ID NO: 518391 - RNA, 24 nt, Human
ugccuguaaucucagcuacucggg

SEQ ID NO: 518392 - RNA, 23 nt, Human
ugccuguaaucucagcuacuugg

SEQ ID NO: 518393 - RNA, 24 nt, Human
ugccuguaaucucagcuacuuggg

SEQ ID NO: 518394 - RNA, 24 nt, Human
ugccuguaaucuccgcuacuuagg

SEQ ID NO: 518395 - RNA, 24 nt, Human
ugccuguaauuucagcuacuuggg

SEQ ID NO: 518396 - RNA, 32 nt, Human
ugccuguacauacacaugcacacccucucuga

SEQ ID NO: 518397 - RNA, 32 nt, Human
ugccuguacuguacuccagccugggaaacaau

SEQ ID NO: 518398 - RNA, 24 nt, Human
ugccuguagcccaagcuacucaga

SEQ ID NO: 518399 - RNA, 24 nt, Human
ugccuguagccccagcuacucagg

SEQ ID NO: 518400 - RNA, 24 nt, Human
ugccuguagccccagcuacuuggg

SEQ ID NO: 518401 - RNA, 32 nt, Human
ugccuguaggggugaaaggagcagggaccggc

SEQ ID NO: 518402 - RNA, 32 nt, Human
ugccuguaguaaucccagcacuuuuggaggcc

SEQ ID NO: 518403 - RNA, 20 nt, Human
ugccuguaguccaagcuacu

SEQ ID NO: 518404 - RNA, 22 nt, Human
ugccuguaguccaagcuacuug

SEQ ID NO: 518405 - RNA, 24 nt, Human
ugccuguagucccaacuacuaggg

SEQ ID NO: 518406 - RNA, 24 nt, Human
ugccuguagucccaccuacuuggg

SEQ ID NO: 518407 - RNA, 24 nt, Human
ugccuguagucccacuuacuuggg

SEQ ID NO: 518408 - RNA, 24 nt, Human
ugccuguagucccagauacuuggg

SEQ ID NO: 518409 - RNA, 24 nt, Human
ugccuguagucccagcaacucagg

SEQ ID NO: 518410 - RNA, 23 nt, Human
ugccuguagucccagcacucggg

SEQ ID NO: 518411 - RNA, 26 nt, Human
ugccuguagucccagcacucuguggg

SEQ ID NO: 518412 - RNA, 24 nt, Human
ugccuguagucccagcacuuuggg

SEQ ID NO: 518413 - RNA, 20 nt, Human
ugccuguagucccagccacu

SEQ ID NO: 518414 - RNA, 23 nt, Human
ugccuguagucccagccacuagg

SEQ ID NO: 518415 - RNA, 24 nt, Human
ugccuguagucccagccacucaga

SEQ ID NO: 518416 - RNA, 24 nt, Human
ugccuguagucccagccacuuggg

SEQ ID NO: 518417 - RNA, 24 nt, Human
ugccuguagucccagcuaacuggg

SEQ ID NO: 518418 - RNA, 24 nt, Human
ugccuguagucccagcuaaucagg

SEQ ID NO: 518419 - RNA, 24 nt, Human
ugccuguagucccagcuaccuggg

SEQ ID NO: 518420 - RNA, 20 nt, Human
ugccuguagucccagcuacu

SEQ ID NO: 518421 - RNA, 24 nt, Human
ugccuguagucccagcuacucaga

SEQ ID NO: 518422 - RNA, 24 nt, Human
ugccuguagucccagcuacucagg

SEQ ID NO: 518423 - RNA, 24 nt, Human
ugccuguagucccagcuacuccgg

SEQ ID NO: 518424 - RNA, 23 nt, Human
ugccuguagucccagcuacucgg

SEQ ID NO: 518425 - RNA, 24 nt, Human
ugccuguagucccagcuacucggg

SEQ ID NO: 518426 - RNA, 24 nt, Human
ugccuguagucccagcuacucugg

SEQ ID NO: 518427 - RNA, 22 nt, Human
ugccuguagucccagcuacugg

SEQ ID NO: 518428 - RNA, 23 nt, Human
ugccuguagucccagcuacuggg

SEQ ID NO: 518429 - RNA, 24 nt, Human
ugccuguagucccagcuacuuagg

SEQ ID NO: 518430 - RNA, 24 nt, Human
ugccuguagucccagcuacuucgg

SEQ ID NO: 518431 - RNA, 22 nt, Human
ugccuguagucccagcuacuug

SEQ ID NO: 518432 - RNA, 32 nt, Human
ugccuguagucccagcuacuugaguggccgag

SEQ ID NO: 518433 - RNA, 23 nt, Human
ugccuguagucccagcuacuugg

SEQ ID NO: 518434 - RNA, 24 nt, Human
ugccuguagucccagcuacuuggg

SEQ ID NO: 518435 - RNA, 24 nt, Human
ugccuguagucccagcuagucugg

SEQ ID NO: 518436 - RNA, 24 nt, Human
ugccuguagucccagcuaucuggg

SEQ ID NO: 518437 - RNA, 24 nt, Human
ugccuguagucccagcuauucagg

SEQ ID NO: 518438 - RNA, 24 nt, Human
ugccuguagucccagcuauucggg

SEQ ID NO: 518439 - RNA, 24 nt, Human
ugccuguagucccagcuauucugg

SEQ ID NO: 518440 - RNA, 24 nt, Human
ugccuguagucccagcuccucagg

SEQ ID NO: 518441 - RNA, 24 nt, Human
ugccuguagucccagcuccuuggg

SEQ ID NO: 518442 - RNA, 24 nt, Human
ugccuguagucccagcugcuuggg

SEQ ID NO: 518443 - RNA, 24 nt, Human
ugccuguagucccagguacucagg

SEQ ID NO: 518444 - RNA, 24 nt, Human
ugccuguagucccaguacucagga

SEQ ID NO: 518445 - RNA, 24 nt, Human
ugccuguagucccaguuacucagg

SEQ ID NO: 518446 - RNA, 24 nt, Human
ugccuguagucccaguuacuuggg

SEQ ID NO: 518447 - RNA, 24 nt, Human
ugccuguagucccauguacuuggg

SEQ ID NO: 518448 - RNA, 24 nt, Human
ugccuguagucccgguuacucggg

SEQ ID NO: 518449 - RNA, 24 nt, Human
ugccuguagucccugcuacuuggg

SEQ ID NO: 518450 - RNA, 20 nt, Human
ugccuguaguccuagcuacu

SEQ ID NO: 518451 - RNA, 24 nt, Human
ugccuguaguccuagcuacuuggg

SEQ ID NO: 518452 - RNA, 24 nt, Human
ugccuguaguccuaguuacuuggg

SEQ ID NO: 518453 - RNA, 24 nt, Human
ugccuguagucgcagcuacucaga

SEQ ID NO: 518454 - RNA, 24 nt, Human
ugccuguagucucagcuacucagg

SEQ ID NO: 518455 - RNA, 24 nt, Human
ugccuguagucucagcuacucggg

SEQ ID NO: 518456 - RNA, 24 nt, Human
ugccuguagucucagcuacuuagg

SEQ ID NO: 518457 - RNA, 24 nt, Human
ugccuguagucucagcuacuuggg

SEQ ID NO: 518458 - RNA, 24 nt, Human
ugccuguagugcuagcuacucaga

SEQ ID NO: 518459 - RNA, 23 nt, Human
ugccuguaguucagcuacucagg

SEQ ID NO: 518460 - RNA, 24 nt, Human
ugccuguaguugcagcuacucagg

SEQ ID NO: 518461 - RNA, 24 nt, Human
ugccuguauugccagcuacucgga

SEQ ID NO: 518462 - RNA, 32 nt, Human
ugccugucacaacacaaauaccccucuugaaa

SEQ ID NO: 518463 - RNA, 32 nt, Human
ugccugucacaguccuucagccagggcuggac

SEQ ID NO: 518464 - RNA, 23 nt, Human
ugccugucacccaguucugugga

SEQ ID NO: 518465 - RNA, 32 nt, Human
ugccugucacccaguucuguggaugugcuggu

SEQ ID NO: 518466 - RNA, 32 nt, Human
ugccugucacccuucaucugggacuugcuguc

SEQ ID NO: 518467 - RNA, 32 nt, Human
ugccugucacguggcccugccuauccgccccu

SEQ ID NO: 518468 - RNA, 24 nt, Human
ugccugucacucagcauucccaug

SEQ ID NO: 518469 - RNA, 32 nt, Human
ugccugucacucgagcaagccuggguguuccu

SEQ ID NO: 518470 - RNA, 32 nt, Human
ugccugucagcuccagauucaucaggaccugc

SEQ ID NO: 518471 - RNA, 32 nt, Human
ugccugucagguggucugcaaagaugauaacc

SEQ ID NO: 518472 - RNA, 18 nt, Human
ugccugucauggugcugg

SEQ ID NO: 518473 - RNA, 32 nt, Human
ugccugucauuugaauaaacaguguuucuauu

SEQ ID NO: 518474 - RNA, 32 nt, Human
ugccuguccagccugggcagccaggcugccaa

SEQ ID NO: 518475 - RNA, 32 nt, Human
ugccugucccuccugcugaaguugccuuuccu

SEQ ID NO: 518476 - RNA, 32 nt, Human
ugccugucccugagcuuggccugcuggagcau

SEQ ID NO: 518477 - RNA, 24 nt, Human
ugccuguccugcagaguccccaug

SEQ ID NO: 518478 - RNA, 31 nt, Human
ugccuguccugccucuggccuguguccuggg

SEQ ID NO: 518479 - RNA, 32 nt, Human
ugccuguccugggaaaguaucuuugccccacu

SEQ ID NO: 518480 - RNA, 32 nt, Human
ugccugucucacaggccugcugugaaggcuga

SEQ ID NO: 518481 - RNA, 21 nt, Human
ugccugucucagacucuuggg

SEQ ID NO: 518482 - RNA, 32 nt, Human
ugccugucucaucuaacgccccaaaccuucau

SEQ ID NO: 518483 - RNA, 32 nt, Human
ugccugucucccuccagcacugccgagguucu

SEQ ID NO: 518484 - RNA, 32 nt, Human
ugccugucuccucccuccuacacauuuccagc

SEQ ID NO: 518485 - RNA, 19 nt, Human
ugccugucucggccuccca

SEQ ID NO: 518486 - RNA, 32 nt, Human
ugccugucucugcuuccgacuuugucuucuuu

SEQ ID NO: 518487 - RNA, 32 nt, Human
ugccugucugcgccucucacacacagauaagu

SEQ ID NO: 518488 - RNA, 32 nt, Human
ugccugucugggaaaaggucacuggaccugga

SEQ ID NO: 518489 - RNA, 20 nt, Human
ugccugucugugccugggag

SEQ ID NO: 518490 - RNA, 32 nt, Human
ugccugucuuugggugcugcaguucaguagga

SEQ ID NO: 518491 - RNA, 32 nt, Human
ugccugucuuugggugcuguaguucgguagga

SEQ ID NO: 518492 - RNA, 20 nt, Human
ugccugugaacugaacucug

SEQ ID NO: 518493 - RNA, 32 nt, Human
ugccugugaagugccugcagcccacgccucug

SEQ ID NO: 518494 - RNA, 32 nt, Human
ugccugugacaugcagguucugggcccacucu

SEQ ID NO: 518495 - RNA, 32 nt, Human
ugccugugagaauuggagguuagugccugaag

SEQ ID NO: 518496 - RNA, 32 nt, Human
ugccugugagucgucuucacacaugcuguuuu

SEQ ID NO: 518497 - RNA, 32 nt, Human
ugccugugcagaagguggagguggcaggcgga

SEQ ID NO: 518498 - RNA, 32 nt, Human
ugccugugcagcgggugcugcugguaacagug

SEQ ID NO: 518499 - RNA, 32 nt, Human
ugccugugcagcuguauuuagggcugcguucc

SEQ ID NO: 518500 - RNA, 32 nt, Human
ugccugugccauucuuccucugggccuucaug

SEQ ID NO: 518501 - RNA, 22 nt, Human
ugccugugcccacucugugccu

SEQ ID NO: 518502 - RNA, 32 nt, Human
ugccugugcccacucugugccugcugggagga

SEQ ID NO: 518503 - RNA, 32 nt, Human
ugccugugcccucuggaaaaauuuccuccuag

SEQ ID NO: 518504 - RNA, 32 nt, Human
ugccugugcuugcugugagucuuuguggacag

SEQ ID NO: 518505 - RNA, 32 nt, Human
ugccuguggagacagcccugccuauccucugu

SEQ ID NO: 518506 - RNA, 32 nt, Human
ugccuguggagaugcacaguucuaccauucaa

SEQ ID NO: 518507 - RNA, 32 nt, Human
ugccuguggaggucgccucuccccaggggagc

SEQ ID NO: 518508 - RNA, 32 nt, Human
ugccuguggccagacacacgguggagggaagu

SEQ ID NO: 518509 - RNA, 32 nt, Human
ugccuguggccugucuguccuccucccuaauu

SEQ ID NO: 518510 - RNA, 22 nt, Human
ugccugugggaagcagcucucc

SEQ ID NO: 518511 - RNA, 24 nt, Human
ugccuguggucccagcuacucaga

SEQ ID NO: 518512 - RNA, 24 nt, Human
ugccuguggucccagcuacuugga

SEQ ID NO: 518513 - RNA, 32 nt, Human
ugccuguggucccggcugcucgggaggcugag

SEQ ID NO: 518514 - RNA, 32 nt, Human
ugccugugucagacauggauugcagugcuccc

SEQ ID NO: 518515 - RNA, 32 nt, Human
ugccuguguccucaggguggggcagguuggca

SEQ ID NO: 518516 - RNA, 18 nt, Human
ugccugugucucucccca

SEQ ID NO: 518517 - RNA, 32 nt, Human
ugccugugugcagccuccugugccucacccag

SEQ ID NO: 518518 - RNA, 32 nt, Human
ugccugugugccuccauuggcaucucugccug

SEQ ID NO: 518519 - RNA, 32 nt, Human
ugccuguguggaauauguguguguggguuugc

SEQ ID NO: 518520 - RNA, 32 nt, Human
ugccugugugggaacagcucuucucccagaug

SEQ ID NO: 518521 - RNA, 22 nt, Human
ugccuguguguaaacuugggga

SEQ ID NO: 518522 - RNA, 32 nt, Human
ugccuguguguccagcccuggagccagccagu

SEQ ID NO: 518523 - RNA, 32 nt, Human
ugccugugugugugcaagugugcagguuccuu

SEQ ID NO: 518524 - RNA, 32 nt, Human
ugccugugugugugcacucgugucgcgccuuc

SEQ ID NO: 518525 - RNA, 32 nt, Human
ugccugugugugugggugcacauuugugugug

SEQ ID NO: 518526 - RNA, 32 nt, Human
ugccuguguugcccaccuguucacaaaaagua

SEQ ID NO: 518527 - RNA, 32 nt, Human
ugccuguuaauuuauaauguauuugaaaauua

SEQ ID NO: 518528 - RNA, 32 nt, Human
ugccuguuaccaggugcugcuucuucagauga

SEQ ID NO: 518529 - RNA, 32 nt, Human
ugccuguucaucugcugacuucugucuaggcu

SEQ ID NO: 518530 - RNA, 32 nt, Human
ugccuguuccagcccaggcagagaucaggugg

SEQ ID NO: 518531 - RNA, 32 nt, Human
ugccuguucuggacuguguucugggccugcug

SEQ ID NO: 518532 - RNA, 32 nt, Human
ugccuguugacagaugugugucuguccucagg

SEQ ID NO: 518533 - RNA, 32 nt, Human
ugccuguugcagcuguggccacugccucccgg

SEQ ID NO: 518534 - RNA, 32 nt, Human
ugccuguugccagacuggagugcaguggcacg

SEQ ID NO: 518535 - RNA, 32 nt, Human
ugccuguuggcagcccacuccccagccccagc

SEQ ID NO: 518536 - RNA, 32 nt, Human
ugccuguuggguggccuggccuggaggcgggg

SEQ ID NO: 518537 - RNA, 32 nt, Human
ugccuguuguagccccagcuacucaagaggcu

SEQ ID NO: 518538 - RNA, 22 nt, Human
ugccuguuuaaaacugauccua

SEQ ID NO: 518539 - RNA, 20 nt, Human
ugccuguuuaaaucucccug

SEQ ID NO: 518540 - RNA, 19 nt, Human
ugccuguuuaacauuucua

SEQ ID NO: 518541 - RNA, 18 nt, Human
ugccuguuuauggauccu

SEQ ID NO: 518542 - RNA, 21 nt, Human
ugccuguuuauuuaugaccua

SEQ ID NO: 518543 - RNA, 23 nt, Human
ugccuguuuccuggcuuccaaug

SEQ ID NO: 518544 - RNA, 32 nt, Human
ugccuguuucuuuccagugccugcuucugggg

SEQ ID NO: 518545 - RNA, 32 nt, Human
ugccuguuuuaccuuaaaugacaggaaaggaa

SEQ ID NO: 518546 - RNA, 19 nt, Human
ugccuguuuucuuauccua

SEQ ID NO: 518547 - RNA, 32 nt, Human
ugccuguuuuggccauuagcugccuuaaacgu

SEQ ID NO: 518548 - RNA, 32 nt, Human
ugccuuaaaaaugucacuucaagucuacuuuu

SEQ ID NO: 518549 - RNA, 32 nt, Human
ugccuuaaauagccucucuccccauuuaggag

SEQ ID NO: 518550 - RNA, 32 nt, Human
ugccuuaacaguacuauuuucucgccaccaaa

SEQ ID NO: 518551 - RNA, 32 nt, Human
ugccuuaacucauagacaucaaucagagagug

SEQ ID NO: 518552 - RNA, 32 nt, Human
ugccuuaacugacguagcuccuaagugauguu

SEQ ID NO: 518553 - RNA, 32 nt, Human
ugccuuaacuuagcagugaaugacaacuguca

SEQ ID NO: 518554 - RNA, 19 nt, Human
ugccuuaaggaaaagguua

SEQ ID NO: 518555 - RNA, 32 nt, Human
ugccuuaaguaggaagagagggaaggacacca

SEQ ID NO: 518556 - RNA, 32 nt, Human
ugccuuaauuguuuaaaaucucuggcuucaaa

SEQ ID NO: 518557 - RNA, 32 nt, Human
ugccuuacagaccuaccucaaacacacuguuu

SEQ ID NO: 518558 - RNA, 32 nt, Human
ugccuuacagggaaauagccuggggugucugg

SEQ ID NO: 518559 - RNA, 32 nt, Human
ugccuuacccaccaucaugguauuccacacag

SEQ ID NO: 518560 - RNA, 32 nt, Human
ugccuuaccugacugggggcucugaguccagu

SEQ ID NO: 518561 - RNA, 32 nt, Human
ugccuuaccuuucuuugguuucccaagagcua

SEQ ID NO: 518562 - RNA, 32 nt, Human
ugccuuacgcuacaucuuguuuucuaggaaga

SEQ ID NO: 518563 - RNA, 32 nt, Human
ugccuuagaaaugcacauucuguauuuugugg

SEQ ID NO: 518564 - RNA, 31 nt, Human
ugccuuagacuucucccgacccccagagcgc

SEQ ID NO: 518565 - RNA, 32 nt, Human
ugccuuagagagagcgcgcucugcucccugcc

SEQ ID NO: 518566 - RNA, 32 nt, Human
ugccuuagagccaccagcccugucccaggcca

SEQ ID NO: 518567 - RNA, 19 nt, Human
ugccuuagauuccucaaua

SEQ ID NO: 518568 - RNA, 32 nt, Human
ugccuuagccuccugaguagcuggaauuauag

SEQ ID NO: 518569 - RNA, 32 nt, Human
ugccuuagccuccugaguagcugggauuacag

SEQ ID NO: 518570 - RNA, 32 nt, Human
ugccuuaggaacagccuucccccaccagcagc

SEQ ID NO: 518571 - RNA, 32 nt, Human
ugccuuaggauggggccaggaggccaggcacu

SEQ ID NO: 518572 - RNA, 31 nt, Human
ugccuuaggcacuauuccuuauauaacaaaa

SEQ ID NO: 518573 - RNA, 32 nt, Human
ugccuuaggugccuucugcucucuggaaccag

SEQ ID NO: 518574 - RNA, 32 nt, Human
ugccuuauacugggaaugccucaggcuugcuc

SEQ ID NO: 518575 - RNA, 32 nt, Human
ugccuuauccuucuguuuguucauacacuuag

SEQ ID NO: 518576 - RNA, 32 nt, Human
ugccuuaucgccaagcuccuucaggagaacaa

SEQ ID NO: 518577 - RNA, 32 nt, Human
ugccuuaucugugucacugucacuuuagcaaa

SEQ ID NO: 518578 - RNA, 32 nt, Human
ugccuuauggccagcauauucucuuacaaggg

SEQ ID NO: 518579 - RNA, 32 nt, Human
ugccuucaaaguguaaguucucaugucauuau

SEQ ID NO: 518580 - RNA, 32 nt, Human
ugccuucaacacagcuugucucuugccugcca

SEQ ID NO: 518581 - RNA, 32 nt, Human
ugccuucaauaugaguuucauuuccucugugu

SEQ ID NO: 518582 - RNA, 32 nt, Human
ugccuucacagcaacaccuagauuagcauuca

SEQ ID NO: 518583 - RNA, 32 nt, Human
ugccuucaccguguccaugccugcuccggcag

SEQ ID NO: 518584 - RNA, 32 nt, Human
ugccuucacugaaauauaccucaggcugaaau

SEQ ID NO: 518585 - RNA, 32 nt, Human
ugccuucacugaaauauaccucaggcugagau

SEQ ID NO: 518586 - RNA, 32 nt, Human
ugccuucacugaaggcugcagugcuguucuga

SEQ ID NO: 518587 - RNA, 32 nt, Human
ugccuucacugccuggugauccuccaucaacc

SEQ ID NO: 518588 - RNA, 32 nt, Human
ugccuucacugugcuccaaccugaaggucccc

SEQ ID NO: 518589 - RNA, 32 nt, Human
ugccuucagaaaccugagcuucagcggccaac

SEQ ID NO: 518590 - RNA, 32 nt, Human
ugccuucagagcagguccugccagccucgcug

SEQ ID NO: 518591 - RNA, 22 nt, Human
ugccuucaggaccuucugguac

SEQ ID NO: 518592 - RNA, 32 nt, Human
ugccuucaggccacagucgugcugcuagaaca

SEQ ID NO: 518593 - RNA, 32 nt, Human
ugccuucaucccucauuuccucccucucauuc

SEQ ID NO: 518594 - RNA, 29 nt, Human
ugccuucaucugugugugcuugggccagc

SEQ ID NO: 518595 - RNA, 32 nt, Human
ugccuucaugaagaaaagacagaggcagaaag

SEQ ID NO: 518596 - RNA, 32 nt, Human
ugccuuccaccaugcuugugagaucuucccag

SEQ ID NO: 518597 - RNA, 32 nt, Human
ugccuucccacacaccccuuuccuccuguucc

SEQ ID NO: 518598 - RNA, 32 nt, Human
ugccuucccacacacucacuauccagaaaaga

SEQ ID NO: 518599 - RNA, 32 nt, Human
ugccuucccagccccuccuucucccucccucc

SEQ ID NO: 518600 - RNA, 23 nt, Human
ugccuucccaggccagcugcuca

SEQ ID NO: 518601 - RNA, 23 nt, Human
ugccuuccccacuccuguguccu

SEQ ID NO: 518602 - RNA, 18 nt, Human
ugccuuccccacuucuca

SEQ ID NO: 518603 - RNA, 32 nt, Human
ugccuuccccaugucucuccucuccuuggccg

SEQ ID NO: 518604 - RNA, 32 nt, Human
ugccuucccccggaugcugggcccugcugcuc

SEQ ID NO: 518605 - RNA, 32 nt, Human
ugccuucccccuucucccuugaagacccucau

SEQ ID NO: 518606 - RNA, 32 nt, Human
ugccuuccccuauguguauacacacauacaug

SEQ ID NO: 518607 - RNA, 32 nt, Human
ugccuuccccucagccucuccccacaccaccc

SEQ ID NO: 518608 - RNA, 32 nt, Human
ugccuucccgcugccauuucuacucgucagga

SEQ ID NO: 518609 - RNA, 32 nt, Human
ugccuucccuaccucuuccucccagaguccuc

SEQ ID NO: 518610 - RNA, 32 nt, Human
ugccuucccucccagggaggccccuucagaga

SEQ ID NO: 518611 - RNA, 32 nt, Human
ugccuucccugagacugucucuucuccuguga

SEQ ID NO: 518612 - RNA, 23 nt, Human
ugccuuccgaguagcugugauca

SEQ ID NO: 518613 - RNA, 32 nt, Human
ugccuuccgggaacuguggugcugcuuucugu

SEQ ID NO: 518614 - RNA, 32 nt, Human
ugccuuccuaagauugcugguauucuagcucu

SEQ ID NO: 518615 - RNA, 32 nt, Human
ugccuuccuagaguuggguugucacuguccug

SEQ ID NO: 518616 - RNA, 32 nt, Human
ugccuuccucaccaccuagccauagucucaaa

SEQ ID NO: 518617 - RNA, 32 nt, Human
ugccuuccucccuucuuccucuuggagucccc

SEQ ID NO: 518618 - RNA, 32 nt, Human
ugccuuccuuucucaucccauggggcccugug

SEQ ID NO: 518619 - RNA, 32 nt, Human
ugccuuccuuucucccaaucuccauucccaaa

SEQ ID NO: 518620 - RNA, 32 nt, Human
ugccuuccuuucucuacccccucgcuguugug

SEQ ID NO: 518621 - RNA, 32 nt, Human
ugccuuccuuuuccucuucucucuuugccugg

SEQ ID NO: 518622 - RNA, 32 nt, Human
ugccuucgaaacugagccgugaggaacuauac

SEQ ID NO: 518623 - RNA, 32 nt, Human
ugccuucggcgcgcuucucagcagggccgccg

SEQ ID NO: 518624 - RNA, 32 nt, Human
ugccuucguccgggccccuccugggccucccc

SEQ ID NO: 518625 - RNA, 32 nt, Human
ugccuucuaagccgggcugggaauggggacac

SEQ ID NO: 518626 - RNA, 32 nt, Human
ugccuucuagccguccuccaccuugcagaaag

SEQ ID NO: 518627 - RNA, 32 nt, Human
ugccuucucaaggaguccacagucuggaggac

SEQ ID NO: 518628 - RNA, 32 nt, Human
ugccuucucauguugccccuccaucuucaagc

SEQ ID NO: 518629 - RNA, 32 nt, Human
ugccuucuccaccagggucgcuccaucaccca

SEQ ID NO: 518630 - RNA, 32 nt, Human
ugccuucuccaccugcccucccacucuuccag

SEQ ID NO: 518631 - RNA, 32 nt, Human
ugccuucuccaccuuccccuccuuuggcucug

SEQ ID NO: 518632 - RNA, 31 nt, Human
ugccuucuccucucugggccuuuguuuccuu

SEQ ID NO: 518633 - RNA, 32 nt, Human
ugccuucucuccacuuuucacagucuucucau

SEQ ID NO: 518634 - RNA, 32 nt, Human
ugccuucucuccccugucauuuccagauuuca

SEQ ID NO: 518635 - RNA, 32 nt, Human
ugccuucucugcugggagcucuuuggagagga

SEQ ID NO: 518636 - RNA, 32 nt, Human
ugccuucucuggggccucccacaugcccucuu

SEQ ID NO: 518637 - RNA, 32 nt, Human
ugccuucugaccaaccucuccccaucguugcc

SEQ ID NO: 518638 - RNA, 32 nt, Human
ugccuucugagcggagucuccuuagcuuuggg

SEQ ID NO: 518639 - RNA, 32 nt, Human
ugccuucugccaccucugccucaggagcagau

SEQ ID NO: 518640 - RNA, 31 nt, Human
ugccuucugggcuggggaugggugagcaaag

SEQ ID NO: 518641 - RNA, 21 nt, Human
ugccuucuguccuccauggug

SEQ ID NO: 518642 - RNA, 32 nt, Human
ugccuucugucugccucgccuguucucuccag

SEQ ID NO: 518643 - RNA, 32 nt, Human
ugccuucuguucgggcccuccuuuggugggaa

SEQ ID NO: 518644 - RNA, 32 nt, Human
ugccuucuucucuggcuuccucuccuucuggu

SEQ ID NO: 518645 - RNA, 32 nt, Human
ugccuucuucuucauuuaucccaguacgagca

SEQ ID NO: 518646 - RNA, 32 nt, Human
ugccuucuuuucucccuuuuaauccuggcugu

SEQ ID NO: 518647 - RNA, 32 nt, Human
ugccuucuuuucuuccagaggauuucucucuc

SEQ ID NO: 518648 - RNA, 32 nt, Human
ugccuugaacaucaugguuccuuuggugaucu

SEQ ID NO: 518649 - RNA, 32 nt, Human
ugccuugacuguggcgaugauuacaugaaaac

SEQ ID NO: 518650 - RNA, 32 nt, Human
ugccuugagaucugugguggucuucaaaaugg

SEQ ID NO: 518651 - RNA, 32 nt, Human
ugccuugagcuugagagguugaagcugcagug

SEQ ID NO: 518652 - RNA, 32 nt, Human
ugccuugaggggcagcuguggccuaggcuacc

SEQ ID NO: 518653 - RNA, 32 nt, Human
ugccuugaguagcugggacuucaggugcacgc

SEQ ID NO: 518654 - RNA, 32 nt, Human
ugccuugagucugaggcauccucugccugcuu

SEQ ID NO: 518655 - RNA, 32 nt, Human
ugccuugauucugacauuuggcccagccugua

SEQ ID NO: 518656 - RNA, 32 nt, Human
ugccuugcaaauugcugccugggugaaugcug

SEQ ID NO: 518657 - RNA, 32 nt, Human
ugccuugcacuccaugcauucugauaacggca

SEQ ID NO: 518658 - RNA, 32 nt, Human
ugccuugcagagccugaagccuggggagaagg

SEQ ID NO: 518659 - RNA, 32 nt, Human
ugccuugcagagccuggagccggaaagagcac

SEQ ID NO: 518660 - RNA, 32 nt, Human
ugccuugccagccugcucuccauugccuuggc

SEQ ID NO: 518661 - RNA, 32 nt, Human
ugccuugccuggugcuuccucccucauugugu

SEQ ID NO: 518662 - RNA, 32 nt, Human
ugccuugccuuggugugaaaccucggggcucc

SEQ ID NO: 518663 - RNA, 18 nt, Human
ugccuugcuuccuccagg

SEQ ID NO: 518664 - RNA, 32 nt, Human
ugccuugcuuucucuucuuacugucccacagc

SEQ ID NO: 518665 - RNA, 32 nt, Human
ugccuuggaagggaagucaggcucacuuggac

SEQ ID NO: 518666 - RNA, 32 nt, Human
ugccuuggacucucccccaccgggcuccuuuu

SEQ ID NO: 518667 - RNA, 32 nt, Human
ugccuuggagagagcagacacugugggggcca

SEQ ID NO: 518668 - RNA, 32 nt, Human
ugccuuggagcagaaagccaggguccugagug

SEQ ID NO: 518669 - RNA, 32 nt, Human
ugccuuggagcagagcaccaaaugucugcccu

SEQ ID NO: 518670 - RNA, 32 nt, Human
ugccuuggagcccugcauccacgucuuguaac

SEQ ID NO: 518671 - RNA, 32 nt, Human
ugccuuggaggucaaaacugcagugagccaug

SEQ ID NO: 518672 - RNA, 22 nt, Human
ugccuuggccucccaaaaugcu

SEQ ID NO: 518673 - RNA, 32 nt, Human
ugccuuggcuguuuaucccacugccuuggaag

SEQ ID NO: 518674 - RNA, 20 nt, Human
ugccuugggaaaugauccua

SEQ ID NO: 518675 - RNA, 32 nt, Human
ugccuugggaauguuauagugugaacuaccuu

SEQ ID NO: 518676 - RNA, 32 nt, Human
ugccuugggacccguccucucacccccagcag

SEQ ID NO: 518677 - RNA, 32 nt, Human
ugccuugggcagucccagcuccacacugcccu

SEQ ID NO: 518678 - RNA, 32 nt, Human
ugccuugggccuuucaugccccggcugcacac

SEQ ID NO: 518679 - RNA, 32 nt, Human
ugccuugguaacuuucagauuccuguggaauu

SEQ ID NO: 518680 - RNA, 32 nt, Human
ugccuugguaaucccuuagauaauguggaaac

SEQ ID NO: 518681 - RNA, 32 nt, Human
ugccuuggugcugugccucaggcuccuuccug

SEQ ID NO: 518682 - RNA, 32 nt, Human
ugccuugguuaggaaauguuuugggggauauc

SEQ ID NO: 518683 - RNA, 32 nt, Human
ugccuuguaacugcucagacccuggccagaag

SEQ ID NO: 518684 - RNA, 32 nt, Human
ugccuuguaagugucaggccuccugggcgcuc

SEQ ID NO: 518685 - RNA, 32 nt, Human
ugccuuguccccagcaggcugaggaauuacca

SEQ ID NO: 518686 - RNA, 32 nt, Human
ugccuugugagagauugagacacucuaaauaa

SEQ ID NO: 518687 - RNA, 32 nt, Human
ugccuugugccuggcacucugccggugccuug

SEQ ID NO: 518688 - RNA, 32 nt, Human
ugccuuguggaaacaggaaguccaagugauuc

SEQ ID NO: 518689 - RNA, 32 nt, Human
ugccuuguggagccacggccucccgggacgga

SEQ ID NO: 518690 - RNA, 32 nt, Human
ugccuuguggugagauauaaauuauggccaug

SEQ ID NO: 518691 - RNA, 32 nt, Human
ugccuugugguuuuggccagccuugugcuaug

SEQ ID NO: 518692 - RNA, 32 nt, Human
ugccuuguuucaaaucaugugcuggcuguuuu

SEQ ID NO: 518693 - RNA, 32 nt, Human
ugccuuuacaauaccuuuaauuuauuaggauc

SEQ ID NO: 518694 - RNA, 23 nt, Human
ugccuuuacugauccguuugcug

SEQ ID NO: 518695 - RNA, 32 nt, Human
ugccuuuaguuacagguccugccuuauuuuca

SEQ ID NO: 518696 - RNA, 16 nt, Human
ugccuuuaucucccca

SEQ ID NO: 518697 - RNA, 19 nt, Human
ugccuuuaugaaaccuuug

SEQ ID NO: 518698 - RNA, 32 nt, Human
ugccuuucaccauuuucuccccacuuccagug

SEQ ID NO: 518699 - RNA, 32 nt, Human
ugccuuucaccuucugccaugacugugaggcc

SEQ ID NO: 518700 - RNA, 32 nt, Human
ugccuuucaguaggaggaggcugugaaauagu

SEQ ID NO: 518701 - RNA, 32 nt, Human
ugccuuuccaccauaggcuuguucacaugcac

SEQ ID NO: 518702 - RNA, 32 nt, Human
ugccuuuccaccugcuuucuccugggcccgcu

SEQ ID NO: 518703 - RNA, 32 nt, Human
ugccuuuccagacucuuaccacugccuguuga

SEQ ID NO: 518704 - RNA, 28 nt, Human
ugccuuuccagugcugcucccuuuauca

SEQ ID NO: 518705 - RNA, 32 nt, Human
ugccuuucccacuccaccuucuacaguugcuu

SEQ ID NO: 518706 - RNA, 32 nt, Human
ugccuuuccuccuucuggaaucguguccaucc

SEQ ID NO: 518707 - RNA, 32 nt, Human
ugccuuuccucuggcccugcugcccccacacc

SEQ ID NO: 518708 - RNA, 32 nt, Human
ugccuuuccucuuccuccuccuccuccuuggc

SEQ ID NO: 518709 - RNA, 32 nt, Human
ugccuuuccuugucugccuccugcugcuucug

SEQ ID NO: 518710 - RNA, 32 nt, Human
ugccuuucgcaauaauguauccauuccccuga

SEQ ID NO: 518711 - RNA, 32 nt, Human
ugccuuucuacguucucuuucuuccaagccua

SEQ ID NO: 518712 - RNA, 32 nt, Human
ugccuuucuccccucagcaccuucaucucugc

SEQ ID NO: 518713 - RNA, 32 nt, Human
ugccuuucugucuugcuuccagggggcugguu

SEQ ID NO: 518714 - RNA, 32 nt, Human
ugccuuugacaccucugcauauguuuuaauga

SEQ ID NO: 518715 - RNA, 32 nt, Human
ugccuuugcacuccagcguggaagacagugag

SEQ ID NO: 518716 - RNA, 32 nt, Human
ugccuuugcagugcuuucggcccaguucuggc

SEQ ID NO: 518717 - RNA, 32 nt, Human
ugccuuugccguggcccuguccuguuuaguuc

SEQ ID NO: 518718 - RNA, 29 nt, Human
ugccuuugccuguguguguucugggggag

SEQ ID NO: 518719 - RNA, 32 nt, Human
ugccuuugcuccaugccuuuuccaugagcaug

SEQ ID NO: 518720 - RNA, 32 nt, Human
ugccuuugcuucugcauuuccuccuugagugc

SEQ ID NO: 518721 - RNA, 32 nt, Human
ugccuuuggaagggucucucuccaggucagcc

SEQ ID NO: 518722 - RNA, 32 nt, Human
ugccuuuggacugcucugacuuuagcaucagc

SEQ ID NO: 518723 - RNA, 32 nt, Human
ugccuuuggcuuccuguugacuucuucccgac

SEQ ID NO: 518724 - RNA, 23 nt, Human
ugccuuuggggcuccugggcuca

SEQ ID NO: 518725 - RNA, 32 nt, Human
ugccuuuguagugcuuucggcccaguucuggc

SEQ ID NO: 518726 - RNA, 32 nt, Human
ugccuuuguccucauccaaagcauuuugugcc

SEQ ID NO: 518727 - RNA, 32 nt, Human
ugccuuugucggcagaauugguacuuaaccuu

SEQ ID NO: 518728 - RNA, 32 nt, Human
ugccuuuguugaguaaaaauguuaauauagcu

SEQ ID NO: 518729 - RNA, 20 nt, Human
ugccuuuguuggaguccgca

SEQ ID NO: 518730 - RNA, 32 nt, Human
ugccuuuuaagccauaaagauaccucaagccu

SEQ ID NO: 518731 - RNA, 32 nt, Human
ugccuuuuccaucaauuuuagcauggaaaaau

SEQ ID NO: 518732 - RNA, 32 nt, Human
ugccuuuuccuccuccucacagaggagaugug

SEQ ID NO: 518733 - RNA, 32 nt, Human
ugccuuuucugccauuuuaauuuuccauuuaa

SEQ ID NO: 518734 - RNA, 32 nt, Human
ugccuuuucuuucuguggauccaguaucuucc

SEQ ID NO: 518735 - RNA, 32 nt, Human
ugccuuuugcugcaauagaagaugagcaaagg

SEQ ID NO: 518736 - RNA, 32 nt, Human
ugccuuuugcugguguuucuggaauuugcuuu

SEQ ID NO: 518737 - RNA, 32 nt, Human
ugccuuuuucugugcuuugaaaacuugauaug

SEQ ID NO: 518738 - RNA, 32 nt, Human
ugccuuuuugggacucagauggcaggaggucc

SEQ ID NO: 518739 - RNA, 32 nt, Human
ugccuuuuugggaggcagcccugcagacaugg

SEQ ID NO: 518740 - RNA, 32 nt, Human
ugcgaacagcagagcaggcaagggaaacuggg

SEQ ID NO: 518741 - RNA, 32 nt, Human
ugcgaacagccauugcacuccagccugggcaa

SEQ ID NO: 518742 - RNA, 32 nt, Human
ugcgaacccgggaggcggagcuugcagugagc

SEQ ID NO: 518743 - RNA, 32 nt, Human
ugcgaaccggcuggaaagaaacaccgagucac

SEQ ID NO: 518744 - RNA, 32 nt, Human
ugcgaaccucauucugacugugaacuaagcaa

SEQ ID NO: 518745 - RNA, 24 nt, Human
ugcgaacggaggaggaacugugau

SEQ ID NO: 518746 - RNA, 32 nt, Human
ugcgaagaugggcgaggacagagcagggcccg

SEQ ID NO: 518747 - RNA, 32 nt, Human
ugcgaaggagaagccgccgcagaggaaaagca

SEQ ID NO: 518748 - RNA, 32 nt, Human
ugcgaauagccacugcacuccagccugggcaa

SEQ ID NO: 518749 - RNA, 32 nt, Human
ugcgaaucccuccugagggagaugcuugaagg

SEQ ID NO: 518750 - RNA, 32 nt, Human
ugcgaaucuguguuaagaaucuagucuuugua

SEQ ID NO: 518751 - RNA, 32 nt, Human
ugcgaauuucgaagaggagguggcaaaguggg

SEQ ID NO: 518752 - RNA, 32 nt, Human
ugcgacagagucucaaucugucacccaggcug

SEQ ID NO: 518753 - RNA, 32 nt, Human
ugcgacagagucuugcucugucgccaagccag

SEQ ID NO: 518754 - RNA, 32 nt, Human
ugcgacagccuggguaagagguguaggucggc

SEQ ID NO: 518755 - RNA, 32 nt, Human
ugcgacagugugacccugggcucuggcgggca

SEQ ID NO: 518756 - RNA, 32 nt, Human
ugcgaccaccuugccgcuuuucaucacaagcu

SEQ ID NO: 518757 - RNA, 32 nt, Human
ugcgaccagagcaugaugccuccaucaagugg

SEQ ID NO: 518758 - RNA, 32 nt, Human
ugcgaccccugccccgacccgggcugccaucu

SEQ ID NO: 518759 - RNA, 32 nt, Human
ugcgacccuccagggaugcaggggauccagga

SEQ ID NO: 518760 - RNA, 32 nt, Human
ugcgacccuccccgcuugugucccuucuccug

SEQ ID NO: 518761 - RNA, 32 nt, Human
ugcgacccugggggcacaggaggcaggcaugg

SEQ ID NO: 518762 - RNA, 24 nt, Human
ugcgaccuccaccuccuggguuca

SEQ ID NO: 518763 - RNA, 32 nt, Human
ugcgaccuggcugagcuccugccuccugucgg

SEQ ID NO: 518764 - RNA, 32 nt, Human
ugcgaccuugcaaccucaccuuccugugggug

SEQ ID NO: 518765 - RNA, 32 nt, Human
ugcgacgcacuccuggccaucuugccguguca

SEQ ID NO: 518766 - RNA, 32 nt, Human
ugcgacgccccuccuucucuuaagccuuucca

SEQ ID NO: 518767 - RNA, 18 nt, Human
ugcgacggugucuggugu

SEQ ID NO: 518768 - RNA, 32 nt, Human
ugcgacgugagucugagucugaucccuccgaa

SEQ ID NO: 518769 - RNA, 32 nt, Human
ugcgacugcacuccagccugggugacugagca

SEQ ID NO: 518770 - RNA, 32 nt, Human
ugcgacuucucccaaggcccugcucagcauag

SEQ ID NO: 518771 - RNA, 32 nt, Human
ugcgacuucuucccucgcuccuccuggucaug

SEQ ID NO: 518772 - RNA, 32 nt, Human
ugcgagaaauggaugguggaaggguggcgaau

SEQ ID NO: 518773 - RNA, 32 nt, Human
ugcgagaaggcagaggaggagggagggaggga

SEQ ID NO: 518774 - RNA, 32 nt, Human
ugcgagaaggugagacacacucagagucagag

SEQ ID NO: 518775 - RNA, 32 nt, Human
ugcgagaaucgagcgcagccugugcugguugu

SEQ ID NO: 518776 - RNA, 32 nt, Human
ugcgagacagagagcuacuuauucucugcuuu

SEQ ID NO: 518777 - RNA, 32 nt, Human
ugcgagacucacugcagugucaagaucaccuu

SEQ ID NO: 518778 - RNA, 32 nt, Human
ugcgagcaccagcucccuucuccucgccacuc

SEQ ID NO: 518779 - RNA, 32 nt, Human
ugcgagcagagcuggguuuaaugagcauuuaa

SEQ ID NO: 518780 - RNA, 32 nt, Human
ugcgagcaugccacuguacuccagccugagcu

SEQ ID NO: 518781 - RNA, 32 nt, Human
ugcgagccagcagaggccuccacccagugcug

SEQ ID NO: 518782 - RNA, 32 nt, Human
ugcgagcccagcccuggugccucaugggaugg

SEQ ID NO: 518783 - RNA, 20 nt, Human
ugcgagcccagcuccuacca

SEQ ID NO: 518784 - RNA, 32 nt, Human
ugcgagcccuccugggcucuggggacuggccg

SEQ ID NO: 518785 - RNA, 32 nt, Human
ugcgagccugcacucacuucauccucagcaga

SEQ ID NO: 518786 - RNA, 32 nt, Human
ugcgagcgcacacacaugcacaagugcgaagg

SEQ ID NO: 518787 - RNA, 22 nt, Human
ugcgagcgcccccgccccggcc

SEQ ID NO: 518788 - RNA, 32 nt, Human
ugcgagcgggcucucugugcuuccugccuucu

SEQ ID NO: 518789 - RNA, 32 nt, Human
ugcgagcucagccuuccucccauccucaaccc

SEQ ID NO: 518790 - RNA, 23 nt, Human
ugcgagcuggcggggcgcgcgga

SEQ ID NO: 518791 - RNA, 21 nt, Human
ugcgagcugggccagggaaga

SEQ ID NO: 518792 - RNA, 32 nt, Human
ugcgagcugggccguguguaugugagugccga

SEQ ID NO: 518793 - RNA, 32 nt, Human
ugcgaggaaagccguuuccuggaacaucggaa

SEQ ID NO: 518794 - RNA, 32 nt, Human
ugcgaggaauagguggggcaucaggaagaagc

SEQ ID NO: 518795 - RNA, 32 nt, Human
ugcgaggagaagaagagagagcccagggcuca

SEQ ID NO: 518796 - RNA, 23 nt, Human
ugcgaggagccuuucauccgaag

SEQ ID NO: 518797 - RNA, 32 nt, Human
ugcgaggcacccaccagcaucauuccccgugc

SEQ ID NO: 518798 - RNA, 32 nt, Human
ugcgaggccacagcccugggaggggguccuga

SEQ ID NO: 518799 - RNA, 32 nt, Human
ugcgaggccuacccuuucucccgucucagggc

SEQ ID NO: 518800 - RNA, 32 nt, Human
ugcgaggccucuggacaguucauccaucaggc

SEQ ID NO: 518801 - RNA, 32 nt, Human
ugcgaggccugggagcaccguggccccuccug

SEQ ID NO: 518802 - RNA, 32 nt, Human
ugcgaggcgcgcccuggagcugcuagagaucc

SEQ ID NO: 518803 - RNA, 32 nt, Human
ugcgaggcggcggucagcaggugccgaaccca

SEQ ID NO: 518804 - RNA, 32 nt, Human
ugcgaggcuagaugguaacacacagaaagcuc

SEQ ID NO: 518805 - RNA, 32 nt, Human
ugcgaggcucaagcgauccucccgccuuagcc

SEQ ID NO: 518806 - RNA, 21 nt, Human
ugcgagggaaaggccaguggc

SEQ ID NO: 518807 - RNA, 32 nt, Human
ugcgagggagagagaggacaccgaagccggga

SEQ ID NO: 518808 - RNA, 32 nt, Human
ugcgagggaggaacgggccgcuccccgccagc

SEQ ID NO: 518809 - RNA, 32 nt, Human
ugcgagggugcacggccggcccugggcaggcg

SEQ ID NO: 518810 - RNA, 32 nt, Human
ugcgagguaggaggggagcacuggcagggaga

SEQ ID NO: 518811 - RNA, 32 nt, Human
ugcgaggucagggcauuucucuacaaaguggc

SEQ ID NO: 518812 - RNA, 32 nt, Human
ugcgaggucccccaggccucagccuggagcuc

SEQ ID NO: 518813 - RNA, 32 nt, Human
ugcgaggucugucgccuggugcagccuggccu

SEQ ID NO: 518814 - RNA, 32 nt, Human
ugcgaguagggagggcaggagggugaugggag

SEQ ID NO: 518815 - RNA, 32 nt, Human
ugcgaguccggaaagccugaucuuuaagucca

SEQ ID NO: 518816 - RNA, 32 nt, Human
ugcgagucuccuuggaaaaguguaagguucua

SEQ ID NO: 518817 - RNA, 32 nt, Human
ugcgagucugggaacagaucuguuuuucacuu

SEQ ID NO: 518818 - RNA, 31 nt, Human
ugcgagugggugguggaguaggggugggagu

SEQ ID NO: 518819 - RNA, 20 nt, Human
ugcgagugugucugauuuca

SEQ ID NO: 518820 - RNA, 32 nt, Human
ugcgagugugugugcacauguuacaaaggcaa

SEQ ID NO: 518821 - RNA, 32 nt, Human
ugcgauccuugucuuccuccagugcugguccc

SEQ ID NO: 518822 - RNA, 32 nt, Human
ugcgaucucacugcaaccucugccucccgggc

SEQ ID NO: 518823 - RNA, 32 nt, Human
ugcgaucucagcucacugcauccucugccucc

SEQ ID NO: 518824 - RNA, 32 nt, Human
ugcgaugaagaaaagcgggccagugugggaau

SEQ ID NO: 518825 - RNA, 29 nt, Human
ugcgaugcuguacuucucuuuguuuuggg

SEQ ID NO: 518826 - RNA, 29 nt, Human
ugcgauggagucuugcucucuugcccagg

SEQ ID NO: 518827 - RNA, 32 nt, Human
ugcgauggcucacgccuguaaucccagcacua

SEQ ID NO: 518828 - RNA, 32 nt, Human
ugcgauggcucacgccuguaaucccggcacuu

SEQ ID NO: 518829 - RNA, 32 nt, Human
ugcgauggggcgagaaaggucccacugcagcc

SEQ ID NO: 518830 - RNA, 29 nt, Human
ugcgaugggggaagcagagaaguuucacu

SEQ ID NO: 518831 - RNA, 32 nt, Human
ugcgaugguaacaugcucaucagccaucuacu

SEQ ID NO: 518832 - RNA, 32 nt, Human
ugcgauggugggugccuguaaucccagauacu

SEQ ID NO: 518833 - RNA, 32 nt, Human
ugcgaugugaucuguaccaggucacccagcua

SEQ ID NO: 518834 - RNA, 32 nt, Human
ugcgauguugcccaggcuggucucaaacuccu

SEQ ID NO: 518835 - RNA, 32 nt, Human
ugcgauguugucauucuuacuaaucuagucca

SEQ ID NO: 518836 - RNA, 32 nt, Human
ugcgauuuguuuugugccugaacggucuguuu

SEQ ID NO: 518837 - RNA, 32 nt, Human
ugcgcaaaccccuagccagccuucccacacug

SEQ ID NO: 518838 - RNA, 32 nt, Human
ugcgcaaacuccuucaggguugggggacucug

SEQ ID NO: 518839 - RNA, 32 nt, Human
ugcgcaaagaugguggaggaggagaacauccg

SEQ ID NO: 518840 - RNA, 32 nt, Human
ugcgcaacauggcgaaaccccgucucuacaau

SEQ ID NO: 518841 - RNA, 32 nt, Human
ugcgcaaccauccugaccacagauccagaaag

SEQ ID NO: 518842 - RNA, 32 nt, Human
ugcgcaacccuuucuacaccaggaugacacug

SEQ ID NO: 518843 - RNA, 32 nt, Human
ugcgcaaguuuccguccccaucggccggacag

SEQ ID NO: 518844 - RNA, 32 nt, Human
ugcgcaaugccgcggcgguggagcuguggcag

SEQ ID NO: 518845 - RNA, 32 nt, Human
ugcgcacacacagcagucugucacgaggcugg

SEQ ID NO: 518846 - RNA, 32 nt, Human
ugcgcacagccacgggggacugacgccagguu

SEQ ID NO: 518847 - RNA, 32 nt, Human
ugcgcacagggagcugucaccaugccucacuc

SEQ ID NO: 518848 - RNA, 32 nt, Human
ugcgcacauauguguauguguggaguaugugu

SEQ ID NO: 518849 - RNA, 32 nt, Human
ugcgcaccagcugccugcuguuuacacccagg

SEQ ID NO: 518850 - RNA, 32 nt, Human
ugcgcacccaggaggagcagaucaagacccuc

SEQ ID NO: 518851 - RNA, 32 nt, Human
ugcgcacccauaauccagcuacuugggaggcu

SEQ ID NO: 518852 - RNA, 32 nt, Human
ugcgcaccccuggaugucucggggaggggaug

SEQ ID NO: 518853 - RNA, 32 nt, Human
ugcgcacccgcacuggggccugggcggugcag

SEQ ID NO: 518854 - RNA, 32 nt, Human
ugcgcaccugggagggagcugccauccgggcu

SEQ ID NO: 518855 - RNA, 32 nt, Human
ugcgcaccuguaaucccagcuacuuggaaggc

SEQ ID NO: 518856 - RNA, 32 nt, Human
ugcgcaccuguaaucccagcuacuugggaggc

SEQ ID NO: 518857 - RNA, 32 nt, Human
ugcgcacggcggccuaccuccacaccacaacc

SEQ ID NO: 518858 - RNA, 32 nt, Human
ugcgcacuccaucucccucccuuuucuucucu

SEQ ID NO: 518859 - RNA, 32 nt, Human
ugcgcacugcagcuccccaggccacccaccac

SEQ ID NO: 518860 - RNA, 32 nt, Human
ugcgcagaccacccauagcccugcugcugcca

SEQ ID NO: 518861 - RNA, 32 nt, Human
ugcgcagagccaagccucucaaccucuucugg

SEQ ID NO: 518862 - RNA, 32 nt, Human
ugcgcagcaggcaccuccagaaagguaauggu

SEQ ID NO: 518863 - RNA, 32 nt, Human
ugcgcagccaggacugggguaugggcgcuguc

SEQ ID NO: 518864 - RNA, 32 nt, Human
ugcgcagccauuuucucccgggagagguugga

SEQ ID NO: 518865 - RNA, 32 nt, Human
ugcgcagccugaagggacaggacggacaagcg

SEQ ID NO: 518866 - RNA, 32 nt, Human
ugcgcaggacagccccucacaaaaagaaaccc

SEQ ID NO: 518867 - RNA, 32 nt, Human
ugcgcaggccagagugagugagcccagcacgg

SEQ ID NO: 518868 - RNA, 32 nt, Human
ugcgcaggcugcaacccuggugugcugggcga

SEQ ID NO: 518869 - RNA, 32 nt, Human
ugcgcagugaacaggcuggcugaggugcacgg

SEQ ID NO: 518870 - RNA, 32 nt, Human
ugcgcaguggagcggccagugggcaggaugac

SEQ ID NO: 518871 - RNA, 32 nt, Human
ugcgcaucagcaccuggggaucuggacccugc

SEQ ID NO: 518872 - RNA, 32 nt, Human
ugcgcaugccuguagucccagcuacuugggag

SEQ ID NO: 518873 - RNA, 22 nt, Human
ugcgcaugggcaaggccagcgc

SEQ ID NO: 518874 - RNA, 32 nt, Human
ugcgcauggugcagugccgcucuguggagggc

SEQ ID NO: 518875 - RNA, 32 nt, Human
ugcgcaugugugugcgugcaugcacauaugug

SEQ ID NO: 518876 - RNA, 32 nt, Human
ugcgcauuccuucucccuggacuuuaccuuac

SEQ ID NO: 518877 - RNA, 32 nt, Human
ugcgccaagccuugccugaacggaggcgucug

SEQ ID NO: 518878 - RNA, 32 nt, Human
ugcgccacagcauuccagccugggcgauggag

SEQ ID NO: 518879 - RNA, 32 nt, Human
ugcgccaccacacuccagccugggcaacagag

SEQ ID NO: 518880 - RNA, 32 nt, Human
ugcgccaccacugcacuccagccugggcaaca

SEQ ID NO: 518881 - RNA, 32 nt, Human
ugcgccacccaccuacucccuacacgcccacu

SEQ ID NO: 518882 - RNA, 32 nt, Human
ugcgccaccgcacuccagccugggcaacagag

SEQ ID NO: 518883 - RNA, 32 nt, Human
ugcgccaccgcacuccagccugggcgacagag

SEQ ID NO: 518884 - RNA, 32 nt, Human
ugcgccaccgcgcuccagccugggugacagag

SEQ ID NO: 518885 - RNA, 32 nt, Human
ugcgccacgccguggcucccaccagcagugcc

SEQ ID NO: 518886 - RNA, 32 nt, Human
ugcgccacggcacuccagccugggcgacagag

SEQ ID NO: 518887 - RNA, 21 nt, Human
ugcgccacgucugcugaagcc

SEQ ID NO: 518888 - RNA, 32 nt, Human
ugcgccacuacacuccagccugggugacagag

SEQ ID NO: 518889 - RNA, 32 nt, Human
ugcgccacuacacucuagccugggcaacgaga

SEQ ID NO: 518890 - RNA, 32 nt, Human
ugcgccacugcaaaccagccugggcaauagag

SEQ ID NO: 518891 - RNA, 32 nt, Human
ugcgccacugcacaccagucuggagacagagu

SEQ ID NO: 518892 - RNA, 32 nt, Human
ugcgccacugcacacuagcuugggugacagag

SEQ ID NO: 518893 - RNA, 32 nt, Human
ugcgccacugcaccccagcaugagcgacagaa

SEQ ID NO: 518894 - RNA, 32 nt, Human
ugcgccacugcaccccagcccagugacagggc

SEQ ID NO: 518895 - RNA, 32 nt, Human
ugcgccacugcaccccagcccgggugacagag

SEQ ID NO: 518896 - RNA, 32 nt, Human
ugcgccacugcaccccagccuggacaacagag

SEQ ID NO: 518897 - RNA, 32 nt, Human
ugcgccacugcaccccagccugggcgacagag

SEQ ID NO: 518898 - RNA, 32 nt, Human
ugcgccacugcaccccagccugggugacagag

SEQ ID NO: 518899 - RNA, 32 nt, Human
ugcgccacugcacccggcccgugaaggucuuu

SEQ ID NO: 518900 - RNA, 32 nt, Human
ugcgccacugcacucaagucugggcgacaggg

SEQ ID NO: 518901 - RNA, 32 nt, Human
ugcgccacugcacuccaaccugggcaauagag

SEQ ID NO: 518902 - RNA, 32 nt, Human
ugcgccacugcacuccacccugggugacagag

SEQ ID NO: 518903 - RNA, 32 nt, Human
ugcgccacugcacuccagccagggcgaaggag

SEQ ID NO: 518904 - RNA, 32 nt, Human
ugcgccacugcacuccagcccuggcgacagag

SEQ ID NO: 518905 - RNA, 32 nt, Human
ugcgccacugcacuccagccuaggugauagag

SEQ ID NO: 518906 - RNA, 32 nt, Human
ugcgccacugcacuccagccugacgacaaagc

SEQ ID NO: 518907 - RNA, 32 nt, Human
ugcgccacugcacuccagccugagcgacagag

SEQ ID NO: 518908 - RNA, 32 nt, Human
ugcgccacugcacuccagccuggcgacagagc

SEQ ID NO: 518909 - RNA, 32 nt, Human
ugcgccacugcacuccagccugggagacagag

SEQ ID NO: 518910 - RNA, 32 nt, Human
ugcgccacugcacuccagccugggcaacaaga

SEQ ID NO: 518911 - RNA, 32 nt, Human
ugcgccacugcacuccagccugggcaacagag

SEQ ID NO: 518912 - RNA, 32 nt, Human
ugcgccacugcacuccagccugggcaauagag

SEQ ID NO: 518913 - RNA, 32 nt, Human
ugcgccacugcacuccagccugggcagcagag

SEQ ID NO: 518914 - RNA, 32 nt, Human
ugcgccacugcacuccagccugggcgacagag

SEQ ID NO: 518915 - RNA, 32 nt, Human
ugcgccacugcacuccagccugggcgacggag

SEQ ID NO: 518916 - RNA, 32 nt, Human
ugcgccacugcacuccagccugggcuacagag

SEQ ID NO: 518917 - RNA, 32 nt, Human
ugcgccacugcacuccagccugggggacagag

SEQ ID NO: 518918 - RNA, 32 nt, Human
ugcgccacugcacuccagccuggguaacagag

SEQ ID NO: 518919 - RNA, 32 nt, Human
ugcgccacugcacuccagccugggugacagaa

SEQ ID NO: 518920 - RNA, 32 nt, Human
ugcgccacugcacuccagccugggugacagag

SEQ ID NO: 518921 - RNA, 32 nt, Human
ugcgccacugcacuccagccugggugacugag

SEQ ID NO: 518922 - RNA, 32 nt, Human
ugcgccacugcacuccagccugguugacagag

SEQ ID NO: 518923 - RNA, 32 nt, Human
ugcgccacugcacuccagcgcggaagacagag

SEQ ID NO: 518924 - RNA, 32 nt, Human
ugcgccacugcacuccagcgugggcuacagag

SEQ ID NO: 518925 - RNA, 32 nt, Human
ugcgccacugcacuccagucugggacaacaga

SEQ ID NO: 518926 - RNA, 32 nt, Human
ugcgccacugcacuccagucugggcgacagag

SEQ ID NO: 518927 - RNA, 32 nt, Human
ugcgccacugcacuccagucuggucggcaaga

SEQ ID NO: 518928 - RNA, 32 nt, Human
ugcgccacugcacucuagccuaagcaauggag

SEQ ID NO: 518929 - RNA, 32 nt, Human
ugcgccacugcacucuagccugggcuacagag

SEQ ID NO: 518930 - RNA, 32 nt, Human
ugcgccacugcacuucagccuggaugacagag

SEQ ID NO: 518931 - RNA, 32 nt, Human
ugcgccacugcacuucagccugggcaacagag

SEQ ID NO: 518932 - RNA, 32 nt, Human
ugcgccacugcauuccagccugggugacugag

SEQ ID NO: 518933 - RNA, 32 nt, Human
ugcgccacugcauucuagccugagugacagag

SEQ ID NO: 518934 - RNA, 32 nt, Human
ugcgccacugcgcuccagccugggcaacagag

SEQ ID NO: 518935 - RNA, 32 nt, Human
ugcgccacuggacuccagccugcgugacagag

SEQ ID NO: 518936 - RNA, 32 nt, Human
ugcgccacuguacuccagccuggcaacagagu

SEQ ID NO: 518937 - RNA, 32 nt, Human
ugcgccacuguacuccagccugggugacgagc

SEQ ID NO: 518938 - RNA, 32 nt, Human
ugcgccacuguacuccagccugggugaggaga

SEQ ID NO: 518939 - RNA, 32 nt, Human
ugcgccacuguacuccagcuugggcaacagag

SEQ ID NO: 518940 - RNA, 32 nt, Human
ugcgccacuucacuccagccugggcaacagag

SEQ ID NO: 518941 - RNA, 32 nt, Human
ugcgccacuucacuccagccugggugacagag

SEQ ID NO: 518942 - RNA, 32 nt, Human
ugcgccagagugaggggugcaggaagacaaag

SEQ ID NO: 518943 - RNA, 32 nt, Human
ugcgccagccuccccgcccgcucucuuuucuc

SEQ ID NO: 518944 - RNA, 32 nt, Human
ugcgccaggcaggaagaaggcaggcuucuggc

SEQ ID NO: 518945 - RNA, 32 nt, Human
ugcgccagugcacuccagcugggcgacagagc

SEQ ID NO: 518946 - RNA, 32 nt, Human
ugcgccauaggcagaggcuuauaaagaaaugg

SEQ ID NO: 518947 - RNA, 32 nt, Human
ugcgccauugcacuccagcccgggcaacaaga

SEQ ID NO: 518948 - RNA, 32 nt, Human
ugcgccauugcacuccagccuagguaacaaga

SEQ ID NO: 518949 - RNA, 32 nt, Human
ugcgccauugcacuccagccugggcaaaaaga

SEQ ID NO: 518950 - RNA, 32 nt, Human
ugcgccauugcacuccagccugggcaacaaga

SEQ ID NO: 518951 - RNA, 32 nt, Human
ugcgccauugcacuccagccugggcaacacag

SEQ ID NO: 518952 - RNA, 32 nt, Human
ugcgccauugcacuccagccugggcaacagag

SEQ ID NO: 518953 - RNA, 32 nt, Human
ugcgccauugcacuccagccugggcaacgagu

SEQ ID NO: 518954 - RNA, 32 nt, Human
ugcgccauugcacuccagccuggggacaaagc

SEQ ID NO: 518955 - RNA, 32 nt, Human
ugcgccauugcacucuagccugugugacagag

SEQ ID NO: 518956 - RNA, 32 nt, Human
ugcgccauugcauuccagccugggcaacaaga

SEQ ID NO: 518957 - RNA, 32 nt, Human
ugcgccauugcauuccagccugggugacagag

SEQ ID NO: 518958 - RNA, 32 nt, Human
ugcgccauuguacuccagccugggcaacaaga

SEQ ID NO: 518959 - RNA, 32 nt, Human
ugcgccauuguacuccagccugggggacagga

SEQ ID NO: 518960 - RNA, 32 nt, Human
ugcgccauugugcuccagccugggugacaaag

SEQ ID NO: 518961 - RNA, 32 nt, Human
ugcgcccagagacccacuggucuuccaccuuc

SEQ ID NO: 518962 - RNA, 32 nt, Human
ugcgcccagccucuccccagcauguaaagucu

SEQ ID NO: 518963 - RNA, 32 nt, Human
ugcgccccaaaccucuucauauugaagaugga

SEQ ID NO: 518964 - RNA, 21 nt, Human
ugcgccccaccgcggcccgca

SEQ ID NO: 518965 - RNA, 32 nt, Human
ugcgcccccagccugccccagcccagucccuc

SEQ ID NO: 518966 - RNA, 32 nt, Human
ugcgcccccagcuucucucucccugucacaca

SEQ ID NO: 518967 - RNA, 32 nt, Human
ugcgcccccaggcugcucacagccggcuugcu

SEQ ID NO: 518968 - RNA, 32 nt, Human
ugcgcccccgagugcccauggcuacaagggug

SEQ ID NO: 518969 - RNA, 32 nt, Human
ugcgcccccggcuggggagggaagcacuguca

SEQ ID NO: 518970 - RNA, 32 nt, Human
ugcgcccccugcacuccagccugggcuucaga

SEQ ID NO: 518971 - RNA, 26 nt, Human
ugcgcccccuucuuugcagcugccca

SEQ ID NO: 518972 - RNA, 32 nt, Human
ugcgccccuccaccaacagcccaucuccuguc

SEQ ID NO: 518973 - RNA, 32 nt, Human
ugcgccccugcacuccaaccuggacaacacag

SEQ ID NO: 518974 - RNA, 32 nt, Human
ugcgcccgaggcagacggugcaggggccuccg

SEQ ID NO: 518975 - RNA, 32 nt, Human
ugcgcccgcagcccugccuccacagcucgcca

SEQ ID NO: 518976 - RNA, 32 nt, Human
ugcgcccgcuugguucggaccucggcaacugg

SEQ ID NO: 518977 - RNA, 32 nt, Human
ugcgcccggcaggagucaggagccagggacug

SEQ ID NO: 518978 - RNA, 32 nt, Human
ugcgcccggcagucuggcgaccaccuugcggg

SEQ ID NO: 518979 - RNA, 32 nt, Human
ugcgcccggcgcccggggugggcgaccugggc

SEQ ID NO: 518980 - RNA, 32 nt, Human
ugcgcccuaaacacuccugggccaugagcuaa

SEQ ID NO: 518981 - RNA, 32 nt, Human
ugcgcccuccacccucacucugccauuguucc

SEQ ID NO: 518982 - RNA, 32 nt, Human
ugcgcccucccucugcuccugagaugcugacc

SEQ ID NO: 518983 - RNA, 23 nt, Human
ugcgcccuccgugagcugcggca

SEQ ID NO: 518984 - RNA, 32 nt, Human
ugcgcccucggcuugccucucucccuccuccc

SEQ ID NO: 518985 - RNA, 32 nt, Human
ugcgcccugccuggaacucuaugaggaaauac

SEQ ID NO: 518986 - RNA, 22 nt, Human
ugcgcccugcggcccgcucccc

SEQ ID NO: 518987 - RNA, 32 nt, Human
ugcgcccuggagggagguguagaaagagguac

SEQ ID NO: 518988 - RNA, 32 nt, Human
ugcgcccugggggccugggcucugcugcccug

SEQ ID NO: 518989 - RNA, 32 nt, Human
ugcgcccugguggcggggguggugcuggcuca

SEQ ID NO: 518990 - RNA, 32 nt, Human
ugcgcccugugggcaccgacaccacagaagcc

SEQ ID NO: 518991 - RNA, 32 nt, Human
ugcgcccuuaacugcauccagccuggggcuga

SEQ ID NO: 518992 - RNA, 32 nt, Human
ugcgccgacggcagcgacgagcgcggcugcgg

SEQ ID NO: 518993 - RNA, 32 nt, Human
ugcgccgacuccgucucccagaaaucaacgug

SEQ ID NO: 518994 - RNA, 32 nt, Human
ugcgccgauugccucucggccugggcaauggu

SEQ ID NO: 518995 - RNA, 32 nt, Human
ugcgccgcuacauuccagccugggcaacacga

SEQ ID NO: 518996 - RNA, 32 nt, Human
ugcgccgcugcacuccagccugggcaacagag

SEQ ID NO: 518997 - RNA, 32 nt, Human
ugcgccgcugcacuccagccugggcgacagag

SEQ ID NO: 518998 - RNA, 32 nt, Human
ugcgccgguagaaaggaugacgccucaacccu

SEQ ID NO: 518999 - RNA, 32 nt, Human
ugcgccggugccuuugccccagcggagccugc

SEQ ID NO: 519000 - RNA, 32 nt, Human
ugcgccguaccucaccuggccugcaggaugaa

SEQ ID NO: 519001 - RNA, 32 nt, Human
ugcgccguggcguuccgcuccaugacugucgc

SEQ ID NO: 519002 - RNA, 32 nt, Human
ugcgccguuguacuccagccugggcaacagag

SEQ ID NO: 519003 - RNA, 32 nt, Human
ugcgccuagaaucccagcuacucggaaggcca

SEQ ID NO: 519004 - RNA, 32 nt, Human
ugcgccucaguugaugcugcuaaauucccugg

SEQ ID NO: 519005 - RNA, 32 nt, Human
ugcgccuccacugcagugccugggcuccccuu

SEQ ID NO: 519006 - RNA, 32 nt, Human
ugcgccuccucuauuggcccaggaagcccacc

SEQ ID NO: 519007 - RNA, 32 nt, Human
ugcgccuccugggccacuggcccagccccagc

SEQ ID NO: 519008 - RNA, 32 nt, Human
ugcgccucgguaucuggcuucccuggaagcuc

SEQ ID NO: 519009 - RNA, 32 nt, Human
ugcgccucucuggaguucacgugcugcacccc

SEQ ID NO: 519010 - RNA, 24 nt, Human
ugcgccucugccccucuccugcca

SEQ ID NO: 519011 - RNA, 32 nt, Human
ugcgccucugcggucgucgcuccugggccucg

SEQ ID NO: 519012 - RNA, 32 nt, Human
ugcgccugcagucccagcuacuugggaggccg

SEQ ID NO: 519013 - RNA, 32 nt, Human
ugcgccugcuccugaaaagcucucugggaagg

SEQ ID NO: 519014 - RNA, 32 nt, Human
ugcgccugggcaacauagaaaccugugucuac

SEQ ID NO: 519015 - RNA, 32 nt, Human
ugcgccuguaaccccagcuauucgggaggcug

SEQ ID NO: 519016 - RNA, 32 nt, Human
ugcgccuguaaucccagcuaccggagaggcug

SEQ ID NO: 519017 - RNA, 32 nt, Human
ugcgccuguaaucccagcuacucgggaggcug

SEQ ID NO: 519018 - RNA, 32 nt, Human
ugcgccuguaaucccagcuacucgggagguug

SEQ ID NO: 519019 - RNA, 32 nt, Human
ugcgccuguaaucccagcuacucgggagucuc

SEQ ID NO: 519020 - RNA, 32 nt, Human
ugcgccuguaaucccagcuacucuggaggcug

SEQ ID NO: 519021 - RNA, 32 nt, Human
ugcgccuguaaucccagcuacuucggagguug

SEQ ID NO: 519022 - RNA, 32 nt, Human
ugcgccuguaaucccagcuacuugggaggcug

SEQ ID NO: 519023 - RNA, 32 nt, Human
ugcgccuguaaucccagcuauauaggaggcug

SEQ ID NO: 519024 - RNA, 32 nt, Human
ugcgccuguagucccagcuacccaggaggcug

SEQ ID NO: 519025 - RNA, 32 nt, Human
ugcgccuguagucccagcuacucaggaggcug

SEQ ID NO: 519026 - RNA, 32 nt, Human
ugcgccuguagucccagcuacucgggagacug

SEQ ID NO: 519027 - RNA, 32 nt, Human
ugcgccuguagucccagcuacucgggaggcug

SEQ ID NO: 519028 - RNA, 32 nt, Human
ugcgccuguagucccagcuacuuggaagcuga

SEQ ID NO: 519029 - RNA, 32 nt, Human
ugcgccuguagucccagcuacuugggagacug

SEQ ID NO: 519030 - RNA, 32 nt, Human
ugcgccuguagucccagcuacuugggaggcug

SEQ ID NO: 519031 - RNA, 32 nt, Human
ugcgccuguagucccagcuacuugugaggcug

SEQ ID NO: 519032 - RNA, 32 nt, Human
ugcgccuguagucccagcugcucaggaggcug

SEQ ID NO: 519033 - RNA, 32 nt, Human
ugcgccuguagucccagcugcucggggaggcu

SEQ ID NO: 519034 - RNA, 32 nt, Human
ugcgccuguagucccaucuacuugggaggcug

SEQ ID NO: 519035 - RNA, 32 nt, Human
ugcgccuguauacccagcuacucgggaggcug

SEQ ID NO: 519036 - RNA, 32 nt, Human
ugcgccugucaucccagcuacuugagaggcug

SEQ ID NO: 519037 - RNA, 32 nt, Human
ugcgccugucuucucccucugaccccagagaa

SEQ ID NO: 519038 - RNA, 32 nt, Human
ugcgccugugaucccagcuacuuggaaggcug

SEQ ID NO: 519039 - RNA, 32 nt, Human
ugcgccugugggggaagagcaaacaggaagga

SEQ ID NO: 519040 - RNA, 32 nt, Human
ugcgccuucaucuugaagcacucugaaauugc

SEQ ID NO: 519041 - RNA, 32 nt, Human
ugcgccuucucauggcugacucaggccugggg

SEQ ID NO: 519042 - RNA, 32 nt, Human
ugcgcgaacagcccuccuccuccucucgccgc

SEQ ID NO: 519043 - RNA, 17 nt, Human
ugcgcgagcggcugcug

SEQ ID NO: 519044 - RNA, 32 nt, Human
ugcgcgcacccucuccccucguccaccgcugc

SEQ ID NO: 519045 - RNA, 32 nt, Human
ugcgcgcacccucuccccuuguccacugcugc

SEQ ID NO: 519046 - RNA, 32 nt, Human
ugcgcgcccagccugccaagcagcgugccccg

SEQ ID NO: 519047 - RNA, 22 nt, Human
ugcgcgcccgccucggcccgca

SEQ ID NO: 519048 - RNA, 32 nt, Human
ugcgcgccugcacuuccccucggugcagaagg

SEQ ID NO: 519049 - RNA, 32 nt, Human
ugcgcgccugcagccagaguugcagggaaagc

SEQ ID NO: 519050 - RNA, 32 nt, Human
ugcgcgcucccagguucuuggagacgccgagu

SEQ ID NO: 519051 - RNA, 32 nt, Human
ugcgcgcucugcucuucgcagcuccccggacc

SEQ ID NO: 519052 - RNA, 32 nt, Human
ugcgcgcuuugucagcagugcugugagaaguu

SEQ ID NO: 519053 - RNA, 32 nt, Human
ugcgcggacauggccucaaacgauuauaccca

SEQ ID NO: 519054 - RNA, 32 nt, Human
ugcgcggccccugauuucugcaugguguagaa

SEQ ID NO: 519055 - RNA, 32 nt, Human
ugcgcggccgccaaguuucagugaugaacgcc

SEQ ID NO: 519056 - RNA, 32 nt, Human
ugcgcggccuaccucaagcugagacacuggca

SEQ ID NO: 519057 - RNA, 32 nt, Human
ugcgcggcuuccugccuccaugccacuccaga

SEQ ID NO: 519058 - RNA, 32 nt, Human
ugcgcgggaggccaaagccauggccauugcca

SEQ ID NO: 519059 - RNA, 32 nt, Human
ugcgcggggugggcgggggaaagacccugagg

SEQ ID NO: 519060 - RNA, 32 nt, Human
ugcgcguccccagcuuccuagccuggguggga

SEQ ID NO: 519061 - RNA, 32 nt, Human
ugcgcgugugugugcgugugcgcacgcucugg

SEQ ID NO: 519062 - RNA, 32 nt, Human
ugcgcuaagagccccgggugaggaccuccaag

SEQ ID NO: 519063 - RNA, 32 nt, Human
ugcgcuacagccugggcgacacaguaagaccc

SEQ ID NO: 519064 - RNA, 32 nt, Human
ugcgcuacuacgcuacagccugggugacagcc

SEQ ID NO: 519065 - RNA, 32 nt, Human
ugcgcuacugaacuccagccuggguuacagag

SEQ ID NO: 519066 - RNA, 32 nt, Human
ugcgcuacugcaaucccaccugggcaacaaga

SEQ ID NO: 519067 - RNA, 32 nt, Human
ugcgcuacugcacuccagccuaggcaacagag

SEQ ID NO: 519068 - RNA, 32 nt, Human
ugcgcuacugcacuccagccuggacaacagag

SEQ ID NO: 519069 - RNA, 32 nt, Human
ugcgcuacugcacuccagccugggcgacagua

SEQ ID NO: 519070 - RNA, 32 nt, Human
ugcgcuacugcacuccagccugggugacagag

SEQ ID NO: 519071 - RNA, 32 nt, Human
ugcgcuacuggcagagcugcugcgaggacccu

SEQ ID NO: 519072 - RNA, 32 nt, Human
ugcgcucaggaggcagagguuacagguuacag

SEQ ID NO: 519073 - RNA, 32 nt, Human
ugcgcucaugcuggcaucaguggugagacagu

SEQ ID NO: 519074 - RNA, 32 nt, Human
ugcgcuccagccuggacaacacagugagacuc

SEQ ID NO: 519075 - RNA, 32 nt, Human
ugcgcuccagccugggcaacagagugagacuc

SEQ ID NO: 519076 - RNA, 32 nt, Human
ugcgcuccagccugggcgaaagagugagacuc

SEQ ID NO: 519077 - RNA, 32 nt, Human
ugcgcuccagccugggcgacagagugguauuc

SEQ ID NO: 519078 - RNA, 32 nt, Human
ugcgcuccagccugggugacagagugagacuc

SEQ ID NO: 519079 - RNA, 32 nt, Human
ugcgcuccccacucugaugcucaggcccgugg

SEQ ID NO: 519080 - RNA, 32 nt, Human
ugcgcuccuggcucccuguaaaaucacagccc

SEQ ID NO: 519081 - RNA, 32 nt, Human
ugcgcucgucccugggaggggagggaggcgcg

SEQ ID NO: 519082 - RNA, 32 nt, Human
ugcgcucugggaaagguggcagagggcaggac

SEQ ID NO: 519083 - RNA, 32 nt, Human
ugcgcucuguugcccaggcuggagugcagugg

SEQ ID NO: 519084 - RNA, 32 nt, Human
ugcgcucuugcagccaagaaggcgggaggcug

SEQ ID NO: 519085 - RNA, 32 nt, Human
ugcgcugacucugcggcccuccaggacggaca

SEQ ID NO: 519086 - RNA, 32 nt, Human
ugcgcugcagaggcacuccacccugggcacgg

SEQ ID NO: 519087 - RNA, 32 nt, Human
ugcgcugcagccugggcaacacagugagaccc

SEQ ID NO: 519088 - RNA, 32 nt, Human
ugcgcugcagcucuguggccugcgccuggaag

SEQ ID NO: 519089 - RNA, 32 nt, Human
ugcgcugcucaaccucucuccuucuggcgcaa

SEQ ID NO: 519090 - RNA, 32 nt, Human
ugcgcugcugcacuccaaccugggcgacagag

SEQ ID NO: 519091 - RNA, 32 nt, Human
ugcgcugcugugagccucacccugggccccug

SEQ ID NO: 519092 - RNA, 32 nt, Human
ugcgcugcuuucccucuccugccucauuccuu

SEQ ID NO: 519093 - RNA, 32 nt, Human
ugcgcuggaaucgcagcaggagaggggagugg

SEQ ID NO: 519094 - RNA, 32 nt, Human
ugcgcuggcugcugcuuuucugcuccuggaag

SEQ ID NO: 519095 - RNA, 32 nt, Human
ugcgcugggaaucccucucggaguuuuuccag

SEQ ID NO: 519096 - RNA, 32 nt, Human
ugcgcuguaauucccugcucccuggagacugg

SEQ ID NO: 519097 - RNA, 32 nt, Human
ugcgcugucacccaggcuggagugcagugcug

SEQ ID NO: 519098 - RNA, 32 nt, Human
ugcgcuguugcccaggcucuagugcaauggca

SEQ ID NO: 519099 - RNA, 32 nt, Human
ugcgcuuagauuuuaccggucuguaaaaugga

SEQ ID NO: 519100 - RNA, 32 nt, Human
ugcgcuucacagaaccuccucuucauuggaaa

SEQ ID NO: 519101 - RNA, 32 nt, Human
ugcgcuucagccugggcaacaagagugaaacu

SEQ ID NO: 519102 - RNA, 31 nt, Human
ugcgcuucauccaaggaggauuugaagagga

SEQ ID NO: 519103 - RNA, 32 nt, Human
ugcgcuucuuggauuuuccaaaggaggugacc

SEQ ID NO: 519104 - RNA, 32 nt, Human
ugcgcuuuugucccguaaauguuaacacucau

SEQ ID NO: 519105 - RNA, 32 nt, Human
ugcggaaacagaaaggaaagaguccucccaga

SEQ ID NO: 519106 - RNA, 32 nt, Human
ugcggaaagggucagagcagggcucggcguca

SEQ ID NO: 519107 - RNA, 32 nt, Human
ugcggaacucuuccuggaaugcauucacucag

SEQ ID NO: 519108 - RNA, 32 nt, Human
ugcggaaggaggggcaggcagugaagagggaa

SEQ ID NO: 519109 - RNA, 32 nt, Human
ugcggaagggagcugcugggaaggcggacgag

SEQ ID NO: 519110 - RNA, 32 nt, Human
ugcggacagugcgggccagggaggaaaaccag

SEQ ID NO: 519111 - RNA, 32 nt, Human
ugcggacagugugggccagggaggaaaaccag

SEQ ID NO: 519112 - RNA, 32 nt, Human
ugcggaccauggggacucagcucugcauggca

SEQ ID NO: 519113 - RNA, 32 nt, Human
ugcggacccacggacacggaggcugcaccuuc

SEQ ID NO: 519114 - RNA, 32 nt, Human
ugcggacgagcgggcggcaggagccggcgcga

SEQ ID NO: 519115 - RNA, 32 nt, Human
ugcggacggggccugguggcgagcccaagugg

SEQ ID NO: 519116 - RNA, 32 nt, Human
ugcggacucaggcuggcgaauagcccuggcga

SEQ ID NO: 519117 - RNA, 32 nt, Human
ugcggagagagugggagugcucagggaaagaa

SEQ ID NO: 519118 - RNA, 32 nt, Human
ugcggagagggggagagcaggcagcgggcggc

SEQ ID NO: 519119 - RNA, 32 nt, Human
ugcggagccauccugaggcuuugacaucuaug

SEQ ID NO: 519120 - RNA, 25 nt, Human
ugcggagcccgcucacccgcucccu

SEQ ID NO: 519121 - RNA, 32 nt, Human
ugcggagcuugcugaggcaaggccgaggauaa

SEQ ID NO: 519122 - RNA, 32 nt, Human
ugcggaggaaggcacgggggcacuggggcgca

SEQ ID NO: 519123 - RNA, 32 nt, Human
ugcggagggaaguguggggagagcagaggcgc

SEQ ID NO: 519124 - RNA, 24 nt, Human
ugcggaggucacccccgccuggcc

SEQ ID NO: 519125 - RNA, 32 nt, Human
ugcggagguggggcagggggagacugaggugg

SEQ ID NO: 519126 - RNA, 32 nt, Human
ugcggagguuccugggggaaucaaagagaaau

SEQ ID NO: 519127 - RNA, 32 nt, Human
ugcggagucugugguucuggaagggcucacug

SEQ ID NO: 519128 - RNA, 32 nt, Human
ugcggagugcggggcuccgggggacugagcag

SEQ ID NO: 519129 - RNA, 32 nt, Human
ugcggaguugugccgagugccugcugcagacc

SEQ ID NO: 519130 - RNA, 32 nt, Human
ugcggaguugugccgagugccugcugcagucu

SEQ ID NO: 519131 - RNA, 32 nt, Human
ugcggaucuucauggccucaggagacuuguuu

SEQ ID NO: 519132 - RNA, 32 nt, Human
ugcggaugagccugcggcaguccuggggaaac

SEQ ID NO: 519133 - RNA, 32 nt, Human
ugcggauggccucagcccuggguggccaggcu

SEQ ID NO: 519134 - RNA, 32 nt, Human
ugcggauggucucagcaguucuccaguuuggc

SEQ ID NO: 519135 - RNA, 32 nt, Human
ugcggcaaacagcacuugcaagaaauauaacc

SEQ ID NO: 519136 - RNA, 20 nt, Human
ugcggcaaccuuuaaccaca

SEQ ID NO: 519137 - RNA, 22 nt, Human
ugcggcaacuccaugcaagcug

SEQ ID NO: 519138 - RNA, 32 nt, Human
ugcggcacaggacugugcccugugcugucccc

SEQ ID NO: 519139 - RNA, 32 nt, Human
ugcggcagagagaggaaggcagggaggugcug

SEQ ID NO: 519140 - RNA, 32 nt, Human
ugcggcagccugggcgggugcaggagaucgug

SEQ ID NO: 519141 - RNA, 32 nt, Human
ugcggcaggagaaggaccaagagaggagagga

SEQ ID NO: 519142 - RNA, 32 nt, Human
ugcggcaggcggaucacuugaggucaggaguc

SEQ ID NO: 519143 - RNA, 32 nt, Human
ugcggcaguagggacagcaggagcaguggugc

SEQ ID NO: 519144 - RNA, 32 nt, Human
ugcggcagucucucccugccaggcucuucauc

SEQ ID NO: 519145 - RNA, 32 nt, Human
ugcggcaucacccucagaccuuggagcccaag

SEQ ID NO: 519146 - RNA, 32 nt, Human
ugcggcauccuucugccuguuucuguaagcaa

SEQ ID NO: 519147 - RNA, 32 nt, Human
ugcggcaucuuuccuccccaccgcugggccug

SEQ ID NO: 519148 - RNA, 20 nt, Human
ugcggccagaacccccugcc

SEQ ID NO: 519149 - RNA, 22 nt, Human
ugcggccagcagagcccaggcc

SEQ ID NO: 519150 - RNA, 32 nt, Human
ugcggccaggcagaggaagagaggucgacugu

SEQ ID NO: 519151 - RNA, 24 nt, Human
ugcggccauuaggggccggugcgg

SEQ ID NO: 519152 - RNA, 32 nt, Human
ugcggcccaaagagucacaugggguuuucugg

SEQ ID NO: 519153 - RNA, 28 nt, Human
ugcggcccaagugauacuuucuuuaccg

SEQ ID NO: 519154 - RNA, 22 nt, Human
ugcggcccaggguucgcgcggg

SEQ ID NO: 519155 - RNA, 32 nt, Human
ugcggccccaggaggggaacugagucacgcug

SEQ ID NO: 519156 - RNA, 32 nt, Human
ugcggcccccuccugagugggacaucaggggu

SEQ ID NO: 519157 - RNA, 21 nt, Human
ugcggccccgggccgcgcggg

SEQ ID NO: 519158 - RNA, 32 nt, Human
ugcggccccuggcaauggcgccaccaucgguc

SEQ ID NO: 519159 - RNA, 19 nt, Human
ugcggcccgcagccggcgc

SEQ ID NO: 519160 - RNA, 25 nt, Human
ugcggcccguggcggcgugcgcggg

SEQ ID NO: 519161 - RNA, 32 nt, Human
ugcggcccugcuccaaacuccuggaccccauc

SEQ ID NO: 519162 - RNA, 24 nt, Human
ugcggccgcaguagccggagccgg

SEQ ID NO: 519163 - RNA, 21 nt, Human
ugcggccgccaccgcggugga

SEQ ID NO: 519164 - RNA, 21 nt, Human
ugcggccgcccugcgcacgga

SEQ ID NO: 519165 - RNA, 23 nt, Human
ugcggccgccugcgcgcggcggg

SEQ ID NO: 519166 - RNA, 22 nt, Human
ugcggccgcgccgggcgccggg

SEQ ID NO: 519167 - RNA, 21 nt, Human
ugcggccgcgggggcggcgga

SEQ ID NO: 519168 - RNA, 21 nt, Human
ugcggccgcugcagcgcaggg

SEQ ID NO: 519169 - RNA, 32 nt, Human
ugcggccgcugcugcugacacucgcucccagg

SEQ ID NO: 519170 - RNA, 21 nt, Human
ugcggccgcuuucggcaugga

SEQ ID NO: 519171 - RNA, 32 nt, Human
ugcggccggcggucucgggaaaagugagggga

SEQ ID NO: 519172 - RNA, 22 nt, Human
ugcggccggggaggcgcgcgga

SEQ ID NO: 519173 - RNA, 21 nt, Human
ugcggccggguccggcgcggg

SEQ ID NO: 519174 - RNA, 22 nt, Human
ugcggccguagccuguggcggg

SEQ ID NO: 519175 - RNA, 32 nt, Human
ugcggccgugccccaucuccccgcagcugcgg

SEQ ID NO: 519176 - RNA, 32 nt, Human
ugcggccguggcugucucaggcuccaggacag

SEQ ID NO: 519177 - RNA, 32 nt, Human
ugcggccuccagggcgccuccugccggccccg

SEQ ID NO: 519178 - RNA, 32 nt, Human
ugcggccuccccugccuuuucuccggugggga

SEQ ID NO: 519179 - RNA, 32 nt, Human
ugcggccugccuauuccaucugaaugucgcau

SEQ ID NO: 519180 - RNA, 32 nt, Human
ugcggccugcuccuggucaucgcccugggcug

SEQ ID NO: 519181 - RNA, 19 nt, Human
ugcggccugugccagagag

SEQ ID NO: 519182 - RNA, 32 nt, Human
ugcggcgacgagaugcgagcagaggagcccug

SEQ ID NO: 519183 - RNA, 32 nt, Human
ugcggcgaggagaaaggaaggagaggagaaaa

SEQ ID NO: 519184 - RNA, 32 nt, Human
ugcggcgcagccucggugucucugggccggcg

SEQ ID NO: 519185 - RNA, 32 nt, Human
ugcggcgccaugcaggucuccagccucaauga

SEQ ID NO: 519186 - RNA, 32 nt, Human
ugcggcgcgcacaggcaggagguugcaguugg

SEQ ID NO: 519187 - RNA, 23 nt, Human
ugcggcgcugcggccgacgccgg

SEQ ID NO: 519188 - RNA, 32 nt, Human
ugcggcggcagaagugaagugccugaggaccg

SEQ ID NO: 519189 - RNA, 24 nt, Human
ugcggcggcggcugcgcgcguggg

SEQ ID NO: 519190 - RNA, 32 nt, Human
ugcggcggcucacgcauguaaucccagcacuu

SEQ ID NO: 519191 - RNA, 32 nt, Human
ugcggcggcuguaugggcucucuuccuccuuc

SEQ ID NO: 519192 - RNA, 32 nt, Human
ugcggcgggaggcccugaagaugcaguccccc

SEQ ID NO: 519193 - RNA, 21 nt, Human
ugcggcgggucucuguucaca

SEQ ID NO: 519194 - RNA, 32 nt, Human
ugcggcgguucaugccuguaaucccaguacuu

SEQ ID NO: 519195 - RNA, 32 nt, Human
ugcggcuccauggucugaguugucagccguug

SEQ ID NO: 519196 - RNA, 28 nt, Human
ugcggcugacagcagccgcgcgcgcggg

SEQ ID NO: 519197 - RNA, 22 nt, Human
ugcggcugcaauggaggcaagg

SEQ ID NO: 519198 - RNA, 25 nt, Human
ugcggcugcacugagagcgcgcggg

SEQ ID NO: 519199 - RNA, 22 nt, Human
ugcggcugcaggcaccggcgcg

SEQ ID NO: 519200 - RNA, 22 nt, Human
ugcggcugcaguagcagcugga

SEQ ID NO: 519201 - RNA, 24 nt, Human
ugcggcugcaguggugguggcggg

SEQ ID NO: 519202 - RNA, 32 nt, Human
ugcggcugccccuucccugccucccagcuguu

SEQ ID NO: 519203 - RNA, 22 nt, Human
ugcggcugccgcugccgggcgg

SEQ ID NO: 519204 - RNA, 20 nt, Human
ugcggcugcggcaggacggg

SEQ ID NO: 519205 - RNA, 22 nt, Human
ugcggcugcggcggccgcgcgg

SEQ ID NO: 519206 - RNA, 26 nt, Human
ugcggcugcggcggccgcgcggcggg

SEQ ID NO: 519207 - RNA, 21 nt, Human
ugcggcugcugcggccggagc

SEQ ID NO: 519208 - RNA, 21 nt, Human
ugcggcugcugcggcugcgga

SEQ ID NO: 519209 - RNA, 20 nt, Human
ugcggcugcuggaugcggag

SEQ ID NO: 519210 - RNA, 32 nt, Human
ugcggcuggaggcggaggcaacggcggcugga

SEQ ID NO: 519211 - RNA, 32 nt, Human
ugcggcugggcccggggagcagugaguggaaa

SEQ ID NO: 519212 - RNA, 32 nt, Human
ugcggcugggcuggaggucaaggaugcauucc

SEQ ID NO: 519213 - RNA, 32 nt, Human
ugcggcugggggcagagagggagagccggucc

SEQ ID NO: 519214 - RNA, 23 nt, Human
ugcggcuguccggggccgcgcgg

SEQ ID NO: 519215 - RNA, 21 nt, Human
ugcggcugucgucaagcgcgg

SEQ ID NO: 519216 - RNA, 32 nt, Human
ugcggcugugugugcacgcgugugcaggagcg

SEQ ID NO: 519217 - RNA, 32 nt, Human
ugcggcuugcccagucccgccccucugacccc

SEQ ID NO: 519218 - RNA, 21 nt, Human
ugcgggaaagagggaggggga

SEQ ID NO: 519219 - RNA, 32 nt, Human
ugcgggaaaggcugcugguaacauucuguuga

SEQ ID NO: 519220 - RNA, 32 nt, Human
ugcgggaaccccacagcagcccagcggauuga

SEQ ID NO: 519221 - RNA, 32 nt, Human
ugcgggaaccuggucccagcuugaguuccugc

SEQ ID NO: 519222 - RNA, 32 nt, Human
ugcgggaaggagagaaggagaagaguugcgac

SEQ ID NO: 519223 - RNA, 32 nt, Human
ugcgggaccugccacugcacaccagcccagcu

SEQ ID NO: 519224 - RNA, 24 nt, Human
ugcgggacugcgcaggcgcgcggg

SEQ ID NO: 519225 - RNA, 32 nt, Human
ugcgggagcaucugaagagagaagggaugauu

SEQ ID NO: 519226 - RNA, 32 nt, Human
ugcgggagcucuguauggucaggauguagggg

SEQ ID NO: 519227 - RNA, 32 nt, Human
ugcgggaggaaggggacagggaagaagaggcu

SEQ ID NO: 519228 - RNA, 18 nt, Human
ugcgggaggaagugggga

SEQ ID NO: 519229 - RNA, 31 nt, Human
ugcgggaggagaccugguccaggaucaagga

SEQ ID NO: 519230 - RNA, 21 nt, Human
ugcgggaggaggcuuagcaga

SEQ ID NO: 519231 - RNA, 32 nt, Human
ugcgggcaagggagccgggcaagcccagggca

SEQ ID NO: 519232 - RNA, 19 nt, Human
ugcgggcaccagaaugcua

SEQ ID NO: 519233 - RNA, 32 nt, Human
ugcgggcaccuguaaucccagcuacuugggug

SEQ ID NO: 519234 - RNA, 32 nt, Human
ugcgggcagacucuuccuccacacagcagaca

SEQ ID NO: 519235 - RNA, 32 nt, Human
ugcgggcaggaggcggcggcagcagcgggacc

SEQ ID NO: 519236 - RNA, 32 nt, Human
ugcgggcaggggcugcagggaggaggagagga

SEQ ID NO: 519237 - RNA, 32 nt, Human
ugcgggccaagaagguccgggagcccacggcg

SEQ ID NO: 519238 - RNA, 32 nt, Human
ugcgggccacacagguagccacccugagcuca

SEQ ID NO: 519239 - RNA, 32 nt, Human
ugcgggccaccuccucuuccuuggcuccugcu

SEQ ID NO: 519240 - RNA, 32 nt, Human
ugcgggccaggcggaggcucaagcggggaucc

SEQ ID NO: 519241 - RNA, 32 nt, Human
ugcgggcccccuucaccccuuuucugucugca

SEQ ID NO: 519242 - RNA, 32 nt, Human
ugcgggccccggcugugaacccugcaccaagc

SEQ ID NO: 519243 - RNA, 27 nt, Human
ugcgggccccuauguuugaguuugaug

SEQ ID NO: 519244 - RNA, 32 nt, Human
ugcgggccggcagaggcuggcggggagcagcc

SEQ ID NO: 519245 - RNA, 32 nt, Human
ugcgggccucugcugucacacgcccggggugg

SEQ ID NO: 519246 - RNA, 32 nt, Human
ugcgggccuggcgggaggugggggagguccau

SEQ ID NO: 519247 - RNA, 32 nt, Human
ugcgggcggguggucuuagcuccaguccccca

SEQ ID NO: 519248 - RNA, 32 nt, Human
ugcgggcgugggcucccgggucgcaagccggg

SEQ ID NO: 519249 - RNA, 32 nt, Human
ugcgggcucaccaggcugcuggcuccgguacc

SEQ ID NO: 519250 - RNA, 32 nt, Human
ugcgggcucacugcaagcuccggcucccgggu

SEQ ID NO: 519251 - RNA, 32 nt, Human
ugcgggcucccuggcaggaugcugagcuuguc

SEQ ID NO: 519252 - RNA, 32 nt, Human
ugcgggcuccggggucaccacccugggcgacc

SEQ ID NO: 519253 - RNA, 32 nt, Human
ugcgggcucugccccacgaaagcccuguccug

SEQ ID NO: 519254 - RNA, 32 nt, Human
ugcgggcucugggggcagagguggcaggaaug

SEQ ID NO: 519255 - RNA, 32 nt, Human
ugcgggcugagggcaucucugagugucucugc

SEQ ID NO: 519256 - RNA, 32 nt, Human
ugcgggcuggcgccagcucaggaggacgcccc

SEQ ID NO: 519257 - RNA, 32 nt, Human
ugcgggcugucaggaaaccuaccugaacggga

SEQ ID NO: 519258 - RNA, 32 nt, Human
ugcggggaaccccuaccgccagccuccccgcc

SEQ ID NO: 519259 - RNA, 32 nt, Human
ugcggggacugaggcauggcagggaaacugcc

SEQ ID NO: 519260 - RNA, 20 nt, Human
ugcggggagaagacggagga

SEQ ID NO: 519261 - RNA, 32 nt, Human
ugcggggagagggagcgagcagaagaggaaga

SEQ ID NO: 519262 - RNA, 32 nt, Human
ugcggggagagggggaggaggggacggagagg

SEQ ID NO: 519263 - RNA, 22 nt, Human
ugcggggagauuugagagggga

SEQ ID NO: 519264 - RNA, 32 nt, Human
ugcggggaggggaaggacgccuccaagcccgc

SEQ ID NO: 519265 - RNA, 32 nt, Human
ugcggggagguguggaggugagggguuagagg

SEQ ID NO: 519266 - RNA, 25 nt, Human
ugcggggauuggagagggaugggga

SEQ ID NO: 519267 - RNA, 32 nt, Human
ugcggggcagaggcccuucucuccgccaaaug

SEQ ID NO: 519268 - RNA, 32 nt, Human
ugcggggcagaggcggcggccgcagcggcgca

SEQ ID NO: 519269 - RNA, 32 nt, Human
ugcggggcagggccuaacaaggaaaccugggc

SEQ ID NO: 519270 - RNA, 32 nt, Human
ugcggggcagugccccacuccuuugugcacaa

SEQ ID NO: 519271 - RNA, 32 nt, Human
ugcggggcaugcugggggcaggaggggcaggg

SEQ ID NO: 519272 - RNA, 32 nt, Human
ugcggggccagucccugcccucccaggagggg

SEQ ID NO: 519273 - RNA, 22 nt, Human
ugcggggccucccgccucgacc

SEQ ID NO: 519274 - RNA, 24 nt, Human
ugcggggcgcgcacccacgucccc

SEQ ID NO: 519275 - RNA, 32 nt, Human
ugcggggcgggcuccgcaggcccagccgccuc

SEQ ID NO: 519276 - RNA, 32 nt, Human
ugcggggcuggcagaggcgagggagguugcgg

SEQ ID NO: 519277 - RNA, 32 nt, Human
ugcgggggcucacgccuguaaucccagcacuu

SEQ ID NO: 519278 - RNA, 32 nt, Human
ugcgggggcuuuccccugggagccgcagcugu

SEQ ID NO: 519279 - RNA, 32 nt, Human
ugcgggggugccuugaaaacuucauuuuaaau

SEQ ID NO: 519280 - RNA, 32 nt, Human
ugcgggggugcuguuguccugccugugucuca

SEQ ID NO: 519281 - RNA, 32 nt, Human
ugcggggucccagcucugaauggaugcccaug

SEQ ID NO: 519282 - RNA, 32 nt, Human
ugcgggguccgcggggaagucuuggcggugga

SEQ ID NO: 519283 - RNA, 32 nt, Human
ugcgggguccgggagagcgggaugcuggccgg

SEQ ID NO: 519284 - RNA, 32 nt, Human
ugcggggugugaggacugagccggcuuccccu

SEQ ID NO: 519285 - RNA, 32 nt, Human
ugcgggucgguguuuggggagcuggaguccca

SEQ ID NO: 519286 - RNA, 32 nt, Human
ugcgggucucagaaccgagugagguguacauu

SEQ ID NO: 519287 - RNA, 32 nt, Human
ugcgggucuccucugagcugucuuaucucuca

SEQ ID NO: 519288 - RNA, 32 nt, Human
ugcgggucuccucugagcugucuuaucucucg

SEQ ID NO: 519289 - RNA, 32 nt, Human
ugcgggucuccucugaucuguuguaaugcuga

SEQ ID NO: 519290 - RNA, 32 nt, Human
ugcgggugaacaaagcagccacgaggugcaac

SEQ ID NO: 519291 - RNA, 20 nt, Human
ugcgggugaagggaugggga

SEQ ID NO: 519292 - RNA, 32 nt, Human
ugcgggugacugcuucagggcuucuccgcgac

SEQ ID NO: 519293 - RNA, 32 nt, Human
ugcgggugaggaacuuguugcgcccgcggcug

SEQ ID NO: 519294 - RNA, 18 nt, Human
ugcgggugcacugccuca

SEQ ID NO: 519295 - RNA, 32 nt, Human
ugcgggugcacugccucagggaagaaguugag

SEQ ID NO: 519296 - RNA, 32 nt, Human
ugcgggugcucucacccucccuucucucccuc

SEQ ID NO: 519297 - RNA, 32 nt, Human
ugcggguggggaaggauggaaggccuuggauu

SEQ ID NO: 519298 - RNA, 23 nt, Human
ugcgggugguaaccaguggaaga

SEQ ID NO: 519299 - RNA, 32 nt, Human
ugcggguggucugccuguguauuuuggucaug

SEQ ID NO: 519300 - RNA, 32 nt, Human
ugcggguguucgccaccaugcccagcuaauuu

SEQ ID NO: 519301 - RNA, 32 nt, Human
ugcggguguugggaaccaugccugccagccag

SEQ ID NO: 519302 - RNA, 32 nt, Human
ugcggguguuugcaggagguugcaguacucgc

SEQ ID NO: 519303 - RNA, 32 nt, Human
ugcggguugcaggaguucaggaaaggaggugg

SEQ ID NO: 519304 - RNA, 32 nt, Human
ugcgguagaagaggaagggaaacacgaacaaa

SEQ ID NO: 519305 - RNA, 24 nt, Human
ugcgguagccgccgccgccgccgc

SEQ ID NO: 519306 - RNA, 32 nt, Human
ugcgguagcucauaccuguaaucccaggacuu

SEQ ID NO: 519307 - RNA, 32 nt, Human
ugcgguaguagccuggcuuugcucugacggcg

SEQ ID NO: 519308 - RNA, 32 nt, Human
ugcgguaugaaggaugugaagauggagggcuu

SEQ ID NO: 519309 - RNA, 32 nt, Human
ugcggucacagcucacugccuccugggcucag

SEQ ID NO: 519310 - RNA, 32 nt, Human
ugcggucacgagacgcccccaagggaguaucc

SEQ ID NO: 519311 - RNA, 32 nt, Human
ugcggucacucgcacaccacagccugaagcuc

SEQ ID NO: 519312 - RNA, 32 nt, Human
ugcggucaugccacugcacuccagccugggug

SEQ ID NO: 519313 - RNA, 22 nt, Human
ugcggucccggagccgcgcggg

SEQ ID NO: 519314 - RNA, 32 nt, Human
ugcgguccgaaugcaugcauucaugaguccau

SEQ ID NO: 519315 - RNA, 22 nt, Human
ugcggucgcagaggccgacgga

SEQ ID NO: 519316 - RNA, 32 nt, Human
ugcggucgcucuguggcaagugugugagaagu

SEQ ID NO: 519317 - RNA, 32 nt, Human
ugcggucucaggcugcagccuagcucgguaac

SEQ ID NO: 519318 - RNA, 32 nt, Human
ugcggucugcaucagccucugggaaaccacag

SEQ ID NO: 519319 - RNA, 32 nt, Human
ugcggugaagaagaugguagaaaacagucugg

SEQ ID NO: 519320 - RNA, 18 nt, Human
ugcggugacaccugcucc

SEQ ID NO: 519321 - RNA, 32 nt, Human
ugcggugacaugcaccuguaaucccaccuacu

SEQ ID NO: 519322 - RNA, 32 nt, Human
ugcggugaccacccugguccugaaaaguccag

SEQ ID NO: 519323 - RNA, 32 nt, Human
ugcggugaccagcagcacacagcaaccagucu

SEQ ID NO: 519324 - RNA, 32 nt, Human
ugcggugaccugccagcaccugccgcagccuu

SEQ ID NO: 519325 - RNA, 32 nt, Human
ugcggugacucacgccuauaaucccagcacuu

SEQ ID NO: 519326 - RNA, 32 nt, Human
ugcggugacucaugccuguaaucccaguacuc

SEQ ID NO: 519327 - RNA, 32 nt, Human
ugcggugacucaugccuguaaucccugcacuu

SEQ ID NO: 519328 - RNA, 32 nt, Human
ugcggugacucgcaccuguaaucccagcauuu

SEQ ID NO: 519329 - RNA, 32 nt, Human
ugcggugacugcacuuucccuggaguggaagc

SEQ ID NO: 519330 - RNA, 32 nt, Human
ugcggugcagagcagagcaggcaggggugggg

SEQ ID NO: 519331 - RNA, 32 nt, Human
ugcggugccucacaucuguaaucccaacacuu

SEQ ID NO: 519332 - RNA, 32 nt, Human
ugcggugccucaugccuguaaucccagcacuu

SEQ ID NO: 519333 - RNA, 32 nt, Human
ugcggugccuggguggggcugcuccuccaggg

SEQ ID NO: 519334 - RNA, 32 nt, Human
ugcggugcuaucucccccagccccauccucug

SEQ ID NO: 519335 - RNA, 32 nt, Human
ugcgguggaaggaucaccugagcccaggaggu

SEQ ID NO: 519336 - RNA, 31 nt, Human
ugcgguggcacaaucucggcucacugcaacc

SEQ ID NO: 519337 - RNA, 32 nt, Human
ugcgguggcacacaccuguaaucccagcuacc

SEQ ID NO: 519338 - RNA, 32 nt, Human
ugcgguggcacaugccuguaaucccagcacuu

SEQ ID NO: 519339 - RNA, 32 nt, Human
ugcgguggcacccgccuguaaucccagcuacu

SEQ ID NO: 519340 - RNA, 32 nt, Human
ugcgguggcaggcgccuguaaucccaguuacu

SEQ ID NO: 519341 - RNA, 32 nt, Human
ugcgguggccaugucggcagggccagggccuc

SEQ ID NO: 519342 - RNA, 32 nt, Human
ugcgguggcccacaucuguaaucccagcacuu

SEQ ID NO: 519343 - RNA, 32 nt, Human
ugcgguggcgggcaccuguagucccagcuacu

SEQ ID NO: 519344 - RNA, 32 nt, Human
ugcgguggcuaacaccuguaaucccagcacuu

SEQ ID NO: 519345 - RNA, 32 nt, Human
ugcgguggcuauaauccuagcacuuugggagg

SEQ ID NO: 519346 - RNA, 32 nt, Human
ugcgguggcucaagccuguaaucccagcacuu

SEQ ID NO: 519347 - RNA, 23 nt, Human
ugcgguggcucacaccuauaauc

SEQ ID NO: 519348 - RNA, 32 nt, Human
ugcgguggcucacaccuauaaucccagcacuu

SEQ ID NO: 519349 - RNA, 32 nt, Human
ugcgguggcucacaccugcaaucccagcacuu

SEQ ID NO: 519350 - RNA, 23 nt, Human
ugcgguggcucacaccuguaauc

SEQ ID NO: 519351 - RNA, 32 nt, Human
ugcgguggcucacaccuguaaucccagcacuc

SEQ ID NO: 519352 - RNA, 32 nt, Human
ugcgguggcucacaccuguaaucccagcacuu

SEQ ID NO: 519353 - RNA, 32 nt, Human
ugcgguggcucacaccuguaaucccagcaguu

SEQ ID NO: 519354 - RNA, 32 nt, Human
ugcgguggcucacaccuguaaucccagcauuu

SEQ ID NO: 519355 - RNA, 32 nt, Human
ugcgguggcucacaccuguaaucccagcgcuu

SEQ ID NO: 519356 - RNA, 32 nt, Human
ugcgguggcucacaccuguaauccuagcacuu

SEQ ID NO: 519357 - RNA, 32 nt, Human
ugcgguggcucacaccuguaaucucagcacuu

SEQ ID NO: 519358 - RNA, 32 nt, Human
ugcgguggcucacaccuguaauuccagcacuu

SEQ ID NO: 519359 - RNA, 32 nt, Human
ugcgguggcucacaccugucaucccagcacuu

SEQ ID NO: 519360 - RNA, 32 nt, Human
ugcgguggcucaccccuuuaaucccagcacuu

SEQ ID NO: 519361 - RNA, 32 nt, Human
ugcgguggcucacgccuauaaucccagcacuu

SEQ ID NO: 519362 - RNA, 23 nt, Human
ugcgguggcucacgccuguaauc

SEQ ID NO: 519363 - RNA, 32 nt, Human
ugcgguggcucacgccuguaaucacacuuucg

SEQ ID NO: 519364 - RNA, 32 nt, Human
ugcgguggcucacgccuguaaucccaacacuu

SEQ ID NO: 519365 - RNA, 32 nt, Human
ugcgguggcucacgccuguaaucccagcaccu

SEQ ID NO: 519366 - RNA, 32 nt, Human
ugcgguggcucacgccuguaaucccagcacug

SEQ ID NO: 519367 - RNA, 32 nt, Human
ugcgguggcucacgccuguaaucccagcacuu

SEQ ID NO: 519368 - RNA, 32 nt, Human
ugcgguggcucacgccuguaaucccagcccuu

SEQ ID NO: 519369 - RNA, 32 nt, Human
ugcgguggcucacgccuguaaucccagcucuu

SEQ ID NO: 519370 - RNA, 32 nt, Human
ugcgguggcucacgccuguaauccuagcacuu

SEQ ID NO: 519371 - RNA, 32 nt, Human
ugcgguggcucacgcuugcaaucccagugcuu

SEQ ID NO: 519372 - RNA, 32 nt, Human
ugcgguggcucacgcuuguaaucccagcacuu

SEQ ID NO: 519373 - RNA, 32 nt, Human
ugcgguggcucacgucuguaaucccagcaccu

SEQ ID NO: 519374 - RNA, 32 nt, Human
ugcgguggcucacgucuguaaucccagcacuu

SEQ ID NO: 519375 - RNA, 32 nt, Human
ugcgguggcucacgucuguaaucucagcacuu

SEQ ID NO: 519376 - RNA, 32 nt, Human
ugcgguggcucacuccuguaauccuagcaguu

SEQ ID NO: 519377 - RNA, 32 nt, Human
ugcgguggcucaggccuguaaucccagcacuu

SEQ ID NO: 519378 - RNA, 32 nt, Human
ugcgguggcucauaccuguaaucccagcauuu

SEQ ID NO: 519379 - RNA, 32 nt, Human
ugcgguggcucaugccuauaaucccagcaccu

SEQ ID NO: 519380 - RNA, 32 nt, Human
ugcgguggcucaugccuauaaucccagcacuu

SEQ ID NO: 519381 - RNA, 32 nt, Human
ugcgguggcucaugccuggaaucccagcacuu

SEQ ID NO: 519382 - RNA, 20 nt, Human
ugcgguggcucaugccugua

SEQ ID NO: 519383 - RNA, 23 nt, Human
ugcgguggcucaugccuguaauc

SEQ ID NO: 519384 - RNA, 32 nt, Human
ugcgguggcucaugccuguaaucccaccacuu

SEQ ID NO: 519385 - RNA, 32 nt, Human
ugcgguggcucaugccuguaaucccagcacua

SEQ ID NO: 519386 - RNA, 32 nt, Human
ugcgguggcucaugccuguaaucccagcacug

SEQ ID NO: 519387 - RNA, 32 nt, Human
ugcgguggcucaugccuguaaucccagcacuu

SEQ ID NO: 519388 - RNA, 32 nt, Human
ugcgguggcucaugccuguaaucccagcauuu

SEQ ID NO: 519389 - RNA, 32 nt, Human
ugcgguggcucaugccuguaaucccagcgcuu

SEQ ID NO: 519390 - RNA, 32 nt, Human
ugcgguggcucaugccuguaaucccagugcuu

SEQ ID NO: 519391 - RNA, 32 nt, Human
ugcgguggcucaugccuguaaucccggcacuu

SEQ ID NO: 519392 - RNA, 32 nt, Human
ugcgguggcucaugccuguaauccuagcacuu

SEQ ID NO: 519393 - RNA, 32 nt, Human
ugcgguggcucaugccuguaauccuagcauuu

SEQ ID NO: 519394 - RNA, 32 nt, Human
ugcgguggcucaugucuguaaucccagcacuc

SEQ ID NO: 519395 - RNA, 32 nt, Human
ugcgguggcucaugucuguaaucccagcacuu

SEQ ID NO: 519396 - RNA, 32 nt, Human
ugcgguggcucccgccuguaauccuagcacuu

SEQ ID NO: 519397 - RNA, 32 nt, Human
ugcgguggcuccugccuauaaucccagcacuu

SEQ ID NO: 519398 - RNA, 32 nt, Human
ugcgguggcuuacaccuguaaucccaacacuu

SEQ ID NO: 519399 - RNA, 32 nt, Human
ugcgguggcuuacaccuguaaucccagcacuu

SEQ ID NO: 519400 - RNA, 32 nt, Human
ugcggugggcugggguggugccacugcgcucc

SEQ ID NO: 519401 - RNA, 32 nt, Human
ugcggugggucugaggcuaggugcucuggguu

SEQ ID NO: 519402 - RNA, 31 nt, Human
ugcggugguacaaucucggcucacugcaacc

SEQ ID NO: 519403 - RNA, 31 nt, Human
ugcgguggugcaaucucagcucacugcaacc

SEQ ID NO: 519404 - RNA, 32 nt, Human
ugcgguggugcuuucugggcagccagggguuc

SEQ ID NO: 519405 - RNA, 32 nt, Human
ugcggugguucacaccuguaauccaagcacuu

SEQ ID NO: 519406 - RNA, 32 nt, Human
ugcggugguucacgcuuguaaucccaucacuu

SEQ ID NO: 519407 - RNA, 32 nt, Human
ugcggugguucaugccuauaaucccagugcuu

SEQ ID NO: 519408 - RNA, 32 nt, Human
ugcggugguucgugccuguaaucccagcucuu

SEQ ID NO: 519409 - RNA, 32 nt, Human
ugcggugucucacaccuguaaucccagcacuu

SEQ ID NO: 519410 - RNA, 32 nt, Human
ugcggugucucaugccuguaaucccagcacuu

SEQ ID NO: 519411 - RNA, 32 nt, Human
ugcgguguuggggguggguuggggaggguggu

SEQ ID NO: 519412 - RNA, 32 nt, Human
ugcgguucauuucugauuuccucaucuuuugc

SEQ ID NO: 519413 - RNA, 32 nt, Human
ugcgguugagcucucugccacuuucuucaaug

SEQ ID NO: 519414 - RNA, 32 nt, Human
ugcgguuucccaagccuuuguccaucucagcc

SEQ ID NO: 519415 - RNA, 32 nt, Human
ugcgguuuugcaagagccgggaagaaacuuaa

SEQ ID NO: 519416 - RNA, 32 nt, Human
ugcguaacaggcccgaugagggugccaggcug

SEQ ID NO: 519417 - RNA, 32 nt, Human
ugcguaaugugcgugugaagagacugggggag

SEQ ID NO: 519418 - RNA, 32 nt, Human
ugcguacaaaccugccuagcuguuguaaguuu

SEQ ID NO: 519419 - RNA, 32 nt, Human
ugcguaccccucuccagugucaaccuggggcu

SEQ ID NO: 519420 - RNA, 32 nt, Human
ugcguacuuacuccuccauauucuuucaaccc

SEQ ID NO: 519421 - RNA, 32 nt, Human
ugcguaggaaucuuauuaaaaugcagauucug

SEQ ID NO: 519422 - RNA, 29 nt, Human
ugcguauaacaucagugaggaagacugca

SEQ ID NO: 519423 - RNA, 32 nt, Human
ugcguauaugguaaagagaucuuuucagcugc

SEQ ID NO: 519424 - RNA, 32 nt, Human
ugcguaucccccagccuugagggaagaugaag

SEQ ID NO: 519425 - RNA, 32 nt, Human
ugcguaugcuccaccacgccugggcgacucgg

SEQ ID NO: 519426 - RNA, 32 nt, Human
ugcguauggucuguguggggccccuuucacag

SEQ ID NO: 519427 - RNA, 22 nt, Human
ugcguauguggcuccuccaggu

SEQ ID NO: 519428 - RNA, 32 nt, Human
ugcguauguguaugacuauggguggguggugg

SEQ ID NO: 519429 - RNA, 29 nt, Human
ugcguauguguguguaugccuggagauug

SEQ ID NO: 519430 - RNA, 32 nt, Human
ugcguauuugccaaagacgacagggugggcug

SEQ ID NO: 519431 - RNA, 32 nt, Human
ugcgucacagcccaggucaaggagaacuggcu

SEQ ID NO: 519432 - RNA, 32 nt, Human
ugcgucacugaacuccggccugggugacagaa

SEQ ID NO: 519433 - RNA, 32 nt, Human
ugcgucacugcacuccaaccugggugacagag

SEQ ID NO: 519434 - RNA, 32 nt, Human
ugcgucacugcacuccagccugagcaacagag

SEQ ID NO: 519435 - RNA, 32 nt, Human
ugcgucacugcacuccagccugggcgacagag

SEQ ID NO: 519436 - RNA, 32 nt, Human
ugcgucacugcacugcagccugggugacagaa

SEQ ID NO: 519437 - RNA, 32 nt, Human
ugcgucacugcagccuccaccucccgggcucc

SEQ ID NO: 519438 - RNA, 32 nt, Human
ugcgucagagcgagacucagaggcuccgaacu

SEQ ID NO: 519439 - RNA, 21 nt, Human
ugcgucagcaauuuccugcuc

SEQ ID NO: 519440 - RNA, 32 nt, Human
ugcgucagccaaggaaagggaagugcugcuua

SEQ ID NO: 519441 - RNA, 32 nt, Human
ugcgucagccucccccaccccucugcagacug

SEQ ID NO: 519442 - RNA, 31 nt, Human
ugcgucaucagcuagagccccgccgcgcugg

SEQ ID NO: 519443 - RNA, 32 nt, Human
ugcgucauuuuuccuuugcuuucucuuuacuu

SEQ ID NO: 519444 - RNA, 32 nt, Human
ugcguccagcucccugaaucucugcugcugcu

SEQ ID NO: 519445 - RNA, 32 nt, Human
ugcgucccauaucuggacccagaagggacuuc

SEQ ID NO: 519446 - RNA, 32 nt, Human
ugcguccccugccccggccucagccagcccug

SEQ ID NO: 519447 - RNA, 32 nt, Human
ugcgucccucugggcgccucaggccccaggau

SEQ ID NO: 519448 - RNA, 32 nt, Human
ugcguccggcugggauuccacucacugggacu

SEQ ID NO: 519449 - RNA, 32 nt, Human
ugcguccgggggaggggaaggaagggccgcug

SEQ ID NO: 519450 - RNA, 32 nt, Human
ugcguccuccccaggcugaaguguccucaggu

SEQ ID NO: 519451 - RNA, 32 nt, Human
ugcguccucuuaucuucugccaggaucaccuc

SEQ ID NO: 519452 - RNA, 32 nt, Human
ugcguccugcccauguggaaagugaccacuuu

SEQ ID NO: 519453 - RNA, 32 nt, Human
ugcguccugguuccuguuuagcuguucugaaa

SEQ ID NO: 519454 - RNA, 32 nt, Human
ugcguccuuucaggccccgcguuguuacagga

SEQ ID NO: 519455 - RNA, 18 nt, Human
ugcgucgccuccaggcgg

SEQ ID NO: 519456 - RNA, 31 nt, Human
ugcgucuaucaugauuccuguugagagggcu

SEQ ID NO: 519457 - RNA, 32 nt, Human
ugcgucucauuggcucagguccugcagccgcu

SEQ ID NO: 519458 - RNA, 18 nt, Human
ugcgucucccucucugca

SEQ ID NO: 519459 - RNA, 31 nt, Human
ugcgucucccucucugcagccuguguaagcu

SEQ ID NO: 519460 - RNA, 18 nt, Human
ugcgucucucugucugca

SEQ ID NO: 519461 - RNA, 32 nt, Human
ugcgucugagucugggcugagaccaguccugg

SEQ ID NO: 519462 - RNA, 32 nt, Human
ugcgucugcucuucugugcccaggguggcugc

SEQ ID NO: 519463 - RNA, 32 nt, Human
ugcgucugggccugagacgugcauggagggcu

SEQ ID NO: 519464 - RNA, 23 nt, Human
ugcgucugucguugugcuuuuuu

SEQ ID NO: 519465 - RNA, 32 nt, Human
ugcgucuuaaagccagcuccucugccagaccc

SEQ ID NO: 519466 - RNA, 32 nt, Human
ugcgucuuaguuccgcccuccuguccaucagg

SEQ ID NO: 519467 - RNA, 32 nt, Human
ugcgucuucuaguuuauuccuccuggggacau

SEQ ID NO: 519468 - RNA, 32 nt, Human
ugcgucuuucccucuuccgcugccucauuccu

SEQ ID NO: 519469 - RNA, 32 nt, Human
ugcgugaaaaggcccugagaucaaugaggaag

SEQ ID NO: 519470 - RNA, 32 nt, Human
ugcgugaacuuggccucuccagcccuugcagg

SEQ ID NO: 519471 - RNA, 32 nt, Human
ugcgugacagcggagggcuaggaaaaggcgca

SEQ ID NO: 519472 - RNA, 32 nt, Human
ugcgugagagugaaaccaagaagcggaugggg

SEQ ID NO: 519473 - RNA, 32 nt, Human
ugcgugaggaagagagcuagagacuggacagg

SEQ ID NO: 519474 - RNA, 32 nt, Human
ugcgugcagcaugggcggcgucggggagccgg

SEQ ID NO: 519475 - RNA, 32 nt, Human
ugcgugcauccagcagccccuucaagacauaa

SEQ ID NO: 519476 - RNA, 32 nt, Human
ugcgugccauccagagucaucucagcccugcc

SEQ ID NO: 519477 - RNA, 32 nt, Human
ugcgugcccaccaggauuuccugugagggccc

SEQ ID NO: 519478 - RNA, 32 nt, Human
ugcgugccuauaauccuagcuacucagguggc

SEQ ID NO: 519479 - RNA, 32 nt, Human
ugcgugccugugugcugggaucuagcguggcc

SEQ ID NO: 519480 - RNA, 32 nt, Human
ugcgugcgcgagugggagguggcaggccugcg

SEQ ID NO: 519481 - RNA, 32 nt, Human
ugcgugcggugaggaggccccgccaagagacu

SEQ ID NO: 519482 - RNA, 32 nt, Human
ugcgugcugcgaggugggggacccugggcagg

SEQ ID NO: 519483 - RNA, 32 nt, Human
ugcgugcuuguuuucuccuuugcccaaguucc

SEQ ID NO: 519484 - RNA, 32 nt, Human
ugcguggaagcccugucugcagccucugcuca

SEQ ID NO: 519485 - RNA, 32 nt, Human
ugcguggacccgugagcucaggagccucagac

SEQ ID NO: 519486 - RNA, 32 nt, Human
ugcguggacuccugggagcuccugcucccuac

SEQ ID NO: 519487 - RNA, 32 nt, Human
ugcguggagagggaguggugucagagggucag

SEQ ID NO: 519488 - RNA, 32 nt, Human
ugcguggagagggugggugcaggaggcagacc

SEQ ID NO: 519489 - RNA, 32 nt, Human
ugcguggagcugcaggcuucagcugccuucaa

SEQ ID NO: 519490 - RNA, 32 nt, Human
ugcguggagguccugcaucaguuugaccaggu

SEQ ID NO: 519491 - RNA, 32 nt, Human
ugcguggagguggagccugcggcuggaguaag

SEQ ID NO: 519492 - RNA, 32 nt, Human
ugcguggauauugcccagcucugccucccuug

SEQ ID NO: 519493 - RNA, 32 nt, Human
ugcguggccaccugaaugcugccuuaucacaa

SEQ ID NO: 519494 - RNA, 32 nt, Human
ugcguggccugcagaguccauuccaucaugau

SEQ ID NO: 519495 - RNA, 32 nt, Human
ugcguggccuggaugguuggaggcagagcuug

SEQ ID NO: 519496 - RNA, 32 nt, Human
ugcguggcgguggaccagccagcugcugucca

SEQ ID NO: 519497 - RNA, 32 nt, Human
ugcgugggcaaguggcacuggccacucugccu

SEQ ID NO: 519498 - RNA, 21 nt, Human
ugcgugggcggggcaggggcg

SEQ ID NO: 519499 - RNA, 32 nt, Human
ugcgugggcugugccaucugaugucuauuccc

SEQ ID NO: 519500 - RNA, 32 nt, Human
ugcguggggacauccugggucaucucagucau

SEQ ID NO: 519501 - RNA, 32 nt, Human
ugcguggggcuccaccucacacccaccccugg

SEQ ID NO: 519502 - RNA, 32 nt, Human
ugcgugguggcugcaggcugagcucuaaccag

SEQ ID NO: 519503 - RNA, 32 nt, Human
ugcguguaaaccacagccucagaccagcuaug

SEQ ID NO: 519504 - RNA, 32 nt, Human
ugcguguaucuccuccaccucucccauuccau

SEQ ID NO: 519505 - RNA, 32 nt, Human
ugcgugucagcccuuggugguggccagggaga

SEQ ID NO: 519506 - RNA, 32 nt, Human
ugcguguccagaaggcaagagagggcggcucc

SEQ ID NO: 519507 - RNA, 32 nt, Human
ugcguguccuccccuccacugccugcaugggg

SEQ ID NO: 519508 - RNA, 32 nt, Human
ugcguguccuucaguucuuuggcucugauucc

SEQ ID NO: 519509 - RNA, 32 nt, Human
ugcgugucgaaacagauccagcagugcaaaga

SEQ ID NO: 519510 - RNA, 32 nt, Human
ugcgugucuuuuccuuugucugucuuuuucuu

SEQ ID NO: 519511 - RNA, 29 nt, Human
ugcgugugccugugugugaaccugggggc

SEQ ID NO: 519512 - RNA, 29 nt, Human
ugcgugugccugugugugccugggaguga

SEQ ID NO: 519513 - RNA, 32 nt, Human
ugcguguggccucagcuugcagaggagugcac

SEQ ID NO: 519514 - RNA, 32 nt, Human
ugcguguggugggcaagcuccucaaaugguau

SEQ ID NO: 519515 - RNA, 32 nt, Human
ugcgugugugagagcgcgcgagggagugugag

SEQ ID NO: 519516 - RNA, 32 nt, Human
ugcguguguguagacacacacgcauacacaca

SEQ ID NO: 519517 - RNA, 20 nt, Human
ugcguguguguccuaccggg

SEQ ID NO: 519518 - RNA, 20 nt, Human
ugcguguguuugccccaagg

SEQ ID NO: 519519 - RNA, 32 nt, Human
ugcguguuaugcugguuuccugggugacaaaa

SEQ ID NO: 519520 - RNA, 32 nt, Human
ugcguguuccacuugaggcccuuuggugucuu

SEQ ID NO: 519521 - RNA, 32 nt, Human
ugcguuacacccgagucugccucucggagcag

SEQ ID NO: 519522 - RNA, 32 nt, Human
ugcguuagcccccugcacuguccuucccauag

SEQ ID NO: 519523 - RNA, 32 nt, Human
ugcguucacaugcacauuugcuagcccagagc

SEQ ID NO: 519524 - RNA, 32 nt, Human
ugcguucacccucacaccacacgccuuaaauc

SEQ ID NO: 519525 - RNA, 32 nt, Human
ugcguucacggcaggauucgguuaggaggaac

SEQ ID NO: 519526 - RNA, 32 nt, Human
ugcguucagacccugcaggcugggcuggccug

SEQ ID NO: 519527 - RNA, 32 nt, Human
ugcguucagcagacugguuugcagugaauuuu

SEQ ID NO: 519528 - RNA, 32 nt, Human
ugcguuccugcaggcuucaucuggcccuaugg

SEQ ID NO: 519529 - RNA, 32 nt, Human
ugcguucggucaccucguaggccagccuaguu

SEQ ID NO: 519530 - RNA, 32 nt, Human
ugcguucucuccaccagcucccggcucaccca

SEQ ID NO: 519531 - RNA, 32 nt, Human
ugcguugaucauucucagaucauugauuggcc

SEQ ID NO: 519532 - RNA, 32 nt, Human
ugcguugccaccagauccugcccagcaauggc

SEQ ID NO: 519533 - RNA, 32 nt, Human
ugcguugccacuugucuuaacucugaauauuu

SEQ ID NO: 519534 - RNA, 32 nt, Human
ugcguuggaggcugugacagagcugagagccu

SEQ ID NO: 519535 - RNA, 32 nt, Human
ugcguuggcugcggccuggcaccaaaggggcg

SEQ ID NO: 519536 - RNA, 32 nt, Human
ugcguugguuucucucauagaggcauuaacua

SEQ ID NO: 519537 - RNA, 32 nt, Human
ugcguugucugacaucgucgcucucuucauaa

SEQ ID NO: 519538 - RNA, 32 nt, Human
ugcguuguggucuccgguggggccagaucccc

SEQ ID NO: 519539 - RNA, 32 nt, Human
ugcguuuccaaccucggagaauuccaggcacu

SEQ ID NO: 519540 - RNA, 32 nt, Human
ugcguuugcaauggcugcuacugugaacuugg

SEQ ID NO: 519541 - RNA, 32 nt, Human
ugcguuugucccaggcucgggggcucaguggg

SEQ ID NO: 519542 - RNA, 32 nt, Human
ugcguuuguccucugcugccaucugccccggc

SEQ ID NO: 519543 - RNA, 32 nt, Human
ugcguuugucucuucacuaagaguaaacuggg

SEQ ID NO: 519544 - RNA, 32 nt, Human
ugcguuugugugugugcguguauguaugugua

SEQ ID NO: 519545 - RNA, 32 nt, Human
ugcuaaaaauaagaaaaauuagccaggagugg

SEQ ID NO: 519546 - RNA, 32 nt, Human
ugcuaaaacacaugcuaugagcacucgaggaa

SEQ ID NO: 519547 - RNA, 32 nt, Human
ugcuaaaagagcuccagguguugucuguuuug

SEQ ID NO: 519548 - RNA, 32 nt, Human
ugcuaaaagggugggaguagcaggagggucuu

SEQ ID NO: 519549 - RNA, 32 nt, Human
ugcuaaaauaaaagucucugaaguauuccaug

SEQ ID NO: 519550 - RNA, 32 nt, Human
ugcuaaagaaagggagaucaauggaguugccu

SEQ ID NO: 519551 - RNA, 32 nt, Human
ugcuaaaucacaaagacaacucuccuugcaaa

SEQ ID NO: 519552 - RNA, 32 nt, Human
ugcuaaaucacaucugccucauagagaaagga

SEQ ID NO: 519553 - RNA, 32 nt, Human
ugcuaaaugaauaucccugcucugcuggucaa

SEQ ID NO: 519554 - RNA, 32 nt, Human
ugcuaaauguggcaagguuucucagucuuugc

SEQ ID NO: 519555 - RNA, 32 nt, Human
ugcuaaauuucauuuuggcuuugcaagucaug

SEQ ID NO: 519556 - RNA, 32 nt, Human
ugcuaacaaaagaagauauggaaguaacagag

SEQ ID NO: 519557 - RNA, 32 nt, Human
ugcuaacacaguggcaguguuagaugaagaug

SEQ ID NO: 519558 - RNA, 32 nt, Human
ugcuaacaccucagagcuguccucuucucuag

SEQ ID NO: 519559 - RNA, 32 nt, Human
ugcuaacacgaggaugggggacuuggaugcug

SEQ ID NO: 519560 - RNA, 32 nt, Human
ugcuaacacuuggcauugucagucucuuaaaa

SEQ ID NO: 519561 - RNA, 32 nt, Human
ugcuaacagcauaaacaugcagggggugggag

SEQ ID NO: 519562 - RNA, 32 nt, Human
ugcuaacaggagacuugcaggagaccguguga

SEQ ID NO: 519563 - RNA, 32 nt, Human
ugcuaacauggugaaaccccgucucuacuaaa

SEQ ID NO: 519564 - RNA, 32 nt, Human
ugcuaacauugaaacuguugguggugauggau

SEQ ID NO: 519565 - RNA, 32 nt, Human
ugcuaaccaaaacccaaaggcucuuuucagag

SEQ ID NO: 519566 - RNA, 32 nt, Human
ugcuaaccaagcucuugacucuguuucccuua

SEQ ID NO: 519567 - RNA, 32 nt, Human
ugcuaaccuguaaucccagcuacuugggaggc

SEQ ID NO: 519568 - RNA, 32 nt, Human
ugcuaaccuuucaggauucagagaaagaugaa

SEQ ID NO: 519569 - RNA, 32 nt, Human
ugcuaacuagcuguuuaaccucgcuuagggca

SEQ ID NO: 519570 - RNA, 32 nt, Human
ugcuaacuauuuaugcauuagcuccccaaggg

SEQ ID NO: 519571 - RNA, 32 nt, Human
ugcuaacuccuaaacugggacccccuacccug

SEQ ID NO: 519572 - RNA, 32 nt, Human
ugcuaacugcccuucucuccucccucucaucc

SEQ ID NO: 519573 - RNA, 32 nt, Human
ugcuaagaagcagcaguggggcuuuugaauuu

SEQ ID NO: 519574 - RNA, 32 nt, Human
ugcuaagaagggaaggagauucccuggaggcc

SEQ ID NO: 519575 - RNA, 23 nt, Human
ugcuaagauggaaagggcugcuu

SEQ ID NO: 519576 - RNA, 32 nt, Human
ugcuaagcacuauuuuuagcauguuauuuaua

SEQ ID NO: 519577 - RNA, 32 nt, Human
ugcuaagcacuggccccacagagccauggucc

SEQ ID NO: 519578 - RNA, 22 nt, Human
ugcuaagcccuuggcaggggug

SEQ ID NO: 519579 - RNA, 32 nt, Human
ugcuaagcucaugcagggaagggaggcuggaa

SEQ ID NO: 519580 - RNA, 32 nt, Human
ugcuaagcuuuccugguaugcgcccuauuuuu

SEQ ID NO: 519581 - RNA, 20 nt, Human
ugcuaaggaagcuguggcca

SEQ ID NO: 519582 - RNA, 32 nt, Human
ugcuaaggaguucucaucccucugucaggguc

SEQ ID NO: 519583 - RNA, 32 nt, Human
ugcuaaggccaucaaaccuauugaucggaagu

SEQ ID NO: 519584 - RNA, 32 nt, Human
ugcuaagggaaaggggaaagaaagggaaaagg

SEQ ID NO: 519585 - RNA, 32 nt, Human
ugcuaagggcuuccaaacauugccugcacccc

SEQ ID NO: 519586 - RNA, 32 nt, Human
ugcuaaggguaagggagagggagggagccggg

SEQ ID NO: 519587 - RNA, 32 nt, Human
ugcuaaguacuaccccuucaucuuccauggau

SEQ ID NO: 519588 - RNA, 32 nt, Human
ugcuaagugagcuuggaguguaccagucaagg

SEQ ID NO: 519589 - RNA, 32 nt, Human
ugcuaagugcaauagggguauguagaaaagag

SEQ ID NO: 519590 - RNA, 32 nt, Human
ugcuaauaccaguccccucccuucccuuuggc

SEQ ID NO: 519591 - RNA, 32 nt, Human
ugcuaauagaaaagccuagucuucucaagcaa

SEQ ID NO: 519592 - RNA, 32 nt, Human
ugcuaaucagugucagugaauccacagucuuu

SEQ ID NO: 519593 - RNA, 32 nt, Human
ugcuaaucccccagugcucuggaguuuggacc

SEQ ID NO: 519594 - RNA, 32 nt, Human
ugcuaaucucaaggagcuuccagugcagaggg

SEQ ID NO: 519595 - RNA, 32 nt, Human
ugcuaaucuucugcuuauuuuucagccuuuaa

SEQ ID NO: 519596 - RNA, 32 nt, Human
ugcuaaugaguauaggauuuccuuuugaguga

SEQ ID NO: 519597 - RNA, 32 nt, Human
ugcuaauggaagcaccacggcagcuuuguuug

SEQ ID NO: 519598 - RNA, 32 nt, Human
ugcuaauguguuaauagcuuuuaaaagaaaag

SEQ ID NO: 519599 - RNA, 32 nt, Human
ugcuaauucuggggagguaccugcucuaguaa

SEQ ID NO: 519600 - RNA, 32 nt, Human
ugcuaauugagucugauaaaagucuucuuuga

SEQ ID NO: 519601 - RNA, 32 nt, Human
ugcuacaacaucacuaauuuggcuuucacauu

SEQ ID NO: 519602 - RNA, 32 nt, Human
ugcuacaauuuccauuacagagacaucuguug

SEQ ID NO: 519603 - RNA, 32 nt, Human
ugcuacacaaaauacaaaaacagaugaaggag

SEQ ID NO: 519604 - RNA, 32 nt, Human
ugcuacacaggcaggaaugcgguugggaggca

SEQ ID NO: 519605 - RNA, 32 nt, Human
ugcuacacucgucccccuccugccucaucuuc

SEQ ID NO: 519606 - RNA, 32 nt, Human
ugcuacacucuguuuugugugccuuccuuggu

SEQ ID NO: 519607 - RNA, 32 nt, Human
ugcuacacuuggaauucugugcucugacucug

SEQ ID NO: 519608 - RNA, 22 nt, Human
ugcuacagaaagcugcuugcca

SEQ ID NO: 519609 - RNA, 32 nt, Human
ugcuacagacaggauggggcccagagcugugc

SEQ ID NO: 519610 - RNA, 32 nt, Human
ugcuacagagcagacaguuaagagaaaugagc

SEQ ID NO: 519611 - RNA, 32 nt, Human
ugcuacagaggagugcuuuucuucucaauugu

SEQ ID NO: 519612 - RNA, 32 nt, Human
ugcuacagccacuccuggaagugcugccugac

SEQ ID NO: 519613 - RNA, 21 nt, Human
ugcuacagccgccgccgccgc

SEQ ID NO: 519614 - RNA, 32 nt, Human
ugcuacagccugggcgacacagugagacuccg

SEQ ID NO: 519615 - RNA, 32 nt, Human
ugcuacagcuccaagggcccuucaccuucaug

SEQ ID NO: 519616 - RNA, 32 nt, Human
ugcuacagcuccagccccuccugggccuccca

SEQ ID NO: 519617 - RNA, 32 nt, Human
ugcuacaggauccaggccaggcugugguuucc

SEQ ID NO: 519618 - RNA, 32 nt, Human
ugcuacauaccccuguuccagcauuaacuacc

SEQ ID NO: 519619 - RNA, 32 nt, Human
ugcuacaugcagcagacagcugugagcuugca

SEQ ID NO: 519620 - RNA, 25 nt, Human
ugcuacauucaggcuuacccauuga

SEQ ID NO: 519621 - RNA, 32 nt, Human
ugcuacauugcccaggcuggucucaaacuccu

SEQ ID NO: 519622 - RNA, 32 nt, Human
ugcuaccaaggaagagagcacacagauaagac

SEQ ID NO: 519623 - RNA, 32 nt, Human
ugcuaccacaggaagacacagcagggagaagc

SEQ ID NO: 519624 - RNA, 27 nt, Human
ugcuaccaccgcugccgucgccgccgc

SEQ ID NO: 519625 - RNA, 32 nt, Human
ugcuaccaggagacaccuggacccuguaaggc

SEQ ID NO: 519626 - RNA, 32 nt, Human
ugcuaccaugaaggaaaggccaagacaaucau

SEQ ID NO: 519627 - RNA, 32 nt, Human
ugcuacccaucggcccuuaauaaauggccuca

SEQ ID NO: 519628 - RNA, 32 nt, Human
ugcuacccauuuucagcuucucugccucucuu

SEQ ID NO: 519629 - RNA, 32 nt, Human
ugcuaccccuugcccaggcaaggaaagacagc

SEQ ID NO: 519630 - RNA, 32 nt, Human
ugcuacccucauuucucaucuuuuuacuaaac

SEQ ID NO: 519631 - RNA, 32 nt, Human
ugcuacccuccaggggccaacagcccagcucc

SEQ ID NO: 519632 - RNA, 32 nt, Human
ugcuacccuccccgccucccuccacagugauc

SEQ ID NO: 519633 - RNA, 32 nt, Human
ugcuaccgugaccguuuagaacagaaacuguu

SEQ ID NO: 519634 - RNA, 18 nt, Human
ugcuaccuaguuccagcu

SEQ ID NO: 519635 - RNA, 32 nt, Human
ugcuaccucagacauccucuuuucuccagagu

SEQ ID NO: 519636 - RNA, 32 nt, Human
ugcuaccucgauuccuccuguguuggacagag

SEQ ID NO: 519637 - RNA, 32 nt, Human
ugcuaccugcagcugcagccacucucccaccc

SEQ ID NO: 519638 - RNA, 32 nt, Human
ugcuaccugccugcugaccgcugcaacuacca

SEQ ID NO: 519639 - RNA, 32 nt, Human
ugcuaccuggucuguguuuugagaagugcccc

SEQ ID NO: 519640 - RNA, 22 nt, Human
ugcuacgacccccacgaugugc

SEQ ID NO: 519641 - RNA, 32 nt, Human
ugcuacgagcgguggcucaugccugaaucuca

SEQ ID NO: 519642 - RNA, 32 nt, Human
ugcuacggagacacuggcugcuguggggagga

SEQ ID NO: 519643 - RNA, 32 nt, Human
ugcuacggcugcugcccuuguacuacuaccuc

SEQ ID NO: 519644 - RNA, 32 nt, Human
ugcuacgggaaaccaucaggaaccuagacugu

SEQ ID NO: 519645 - RNA, 32 nt, Human
ugcuacggggccagagccaaggaagcuuccac

SEQ ID NO: 519646 - RNA, 32 nt, Human
ugcuacgugacccaggcuggaguguaguagcu

SEQ ID NO: 519647 - RNA, 32 nt, Human
ugcuacguggaagugaauggagacugaucuca

SEQ ID NO: 519648 - RNA, 32 nt, Human
ugcuacuaaaaauacaaaaauuacccgggcuu

SEQ ID NO: 519649 - RNA, 32 nt, Human
ugcuacuaaaaauacaaaaauuggcugggugu

SEQ ID NO: 519650 - RNA, 32 nt, Human
ugcuacuaagugguaacuuuuguauuuuaaua

SEQ ID NO: 519651 - RNA, 32 nt, Human
ugcuacuaccaccaccaccaccaccccuucug

SEQ ID NO: 519652 - RNA, 32 nt, Human
ugcuacucacaguguaguccauggacaaucgg

SEQ ID NO: 519653 - RNA, 32 nt, Human
ugcuacuccugugcucuggaggcugcagagcu

SEQ ID NO: 519654 - RNA, 32 nt, Human
ugcuacucuacuccagccugggcaacacagca

SEQ ID NO: 519655 - RNA, 32 nt, Human
ugcuacucucucccucuccaucccaucuuugc

SEQ ID NO: 519656 - RNA, 32 nt, Human
ugcuacugaggugucaggagugcagcugggcc

SEQ ID NO: 519657 - RNA, 32 nt, Human
ugcuacugcacuccaaucuggcaacagagcga

SEQ ID NO: 519658 - RNA, 32 nt, Human
ugcuacugcacuccagccccagcugggugaca

SEQ ID NO: 519659 - RNA, 32 nt, Human
ugcuacugcacuccagccuaggugacagagug

SEQ ID NO: 519660 - RNA, 32 nt, Human
ugcuacugcacuccagccugggagacagagcg

SEQ ID NO: 519661 - RNA, 32 nt, Human
ugcuacugcacuccagccugggcaacacagag

SEQ ID NO: 519662 - RNA, 32 nt, Human
ugcuacugcacuccagccugggcgacagagcg

SEQ ID NO: 519663 - RNA, 32 nt, Human
ugcuacugcacuccagccugggggacagaaag

SEQ ID NO: 519664 - RNA, 32 nt, Human
ugcuacugcacuccagccugggugacagagcg

SEQ ID NO: 519665 - RNA, 32 nt, Human
ugcuacugcacuccagcuuagguggcaaagug

SEQ ID NO: 519666 - RNA, 32 nt, Human
ugcuacugcacuccagucugggugacagagug

SEQ ID NO: 519667 - RNA, 32 nt, Human
ugcuacugcacucccgccugggugacagagug

SEQ ID NO: 519668 - RNA, 32 nt, Human
ugcuacugcacucuagauugggugacagagcc

SEQ ID NO: 519669 - RNA, 32 nt, Human
ugcuacugcaugccagccugggugacaaagcg

SEQ ID NO: 519670 - RNA, 32 nt, Human
ugcuacugccgcagcggaguucagagggcccg

SEQ ID NO: 519671 - RNA, 32 nt, Human
ugcuacugguguccuuucuccucagucacaag

SEQ ID NO: 519672 - RNA, 32 nt, Human
ugcuacugucccuucucacaggcauucacaga

SEQ ID NO: 519673 - RNA, 23 nt, Human
ugcuacugugcaggccaagggua

SEQ ID NO: 519674 - RNA, 32 nt, Human
ugcuacuuacaucucccucccuuggcugaggu

SEQ ID NO: 519675 - RNA, 32 nt, Human
ugcuacuucacagcuucauuuuuguuucauuc

SEQ ID NO: 519676 - RNA, 32 nt, Human
ugcuacuucccuuaucccucuuccaccaucuc

SEQ ID NO: 519677 - RNA, 32 nt, Human
ugcuacuucugaaucuguuuugucuuccuaau

SEQ ID NO: 519678 - RNA, 32 nt, Human
ugcuacuucuuaauagccaaagccuggaaaug

SEQ ID NO: 519679 - RNA, 32 nt, Human
ugcuacuugccaggaacagguugggaagaaaa

SEQ ID NO: 519680 - RNA, 32 nt, Human
ugcuacuugcccagguagugaucagugagagu

SEQ ID NO: 519681 - RNA, 32 nt, Human
ugcuacuuuuauuuuggacaggccaguucucc

SEQ ID NO: 519682 - RNA, 32 nt, Human
ugcuacuuuucugcagggauaaaacuuuugag

SEQ ID NO: 519683 - RNA, 32 nt, Human
ugcuacuuuugaaaauaaaucuuucuuuauau

SEQ ID NO: 519684 - RNA, 20 nt, Human
ugcuagaaaaucauguuccu

SEQ ID NO: 519685 - RNA, 32 nt, Human
ugcuagaaagcguacaucacacauucgcaaug

SEQ ID NO: 519686 - RNA, 32 nt, Human
ugcuagaacccccacccaccagccuccggaac

SEQ ID NO: 519687 - RNA, 32 nt, Human
ugcuagaacccuaaaagaaccaaaaaucugcc

SEQ ID NO: 519688 - RNA, 32 nt, Human
ugcuagaacucagcauucaugacaggggcuaa

SEQ ID NO: 519689 - RNA, 23 nt, Human
ugcuagaagacugaaugcuuucc

SEQ ID NO: 519690 - RNA, 32 nt, Human
ugcuagaagaggaggaaaaggaauauguggug

SEQ ID NO: 519691 - RNA, 24 nt, Human
ugcuagaagcacuuuauguuuccu

SEQ ID NO: 519692 - RNA, 32 nt, Human
ugcuagaaguuggguuguucuggauuuucccc

SEQ ID NO: 519693 - RNA, 32 nt, Human
ugcuagaauggguggagaagaagcagagauac

SEQ ID NO: 519694 - RNA, 32 nt, Human
ugcuagaauuacaggcauuagccaccaugccu

SEQ ID NO: 519695 - RNA, 32 nt, Human
ugcuagacagggauugguguguuugcaccugu

SEQ ID NO: 519696 - RNA, 20 nt, Human
ugcuagaccaagaccuguug

SEQ ID NO: 519697 - RNA, 32 nt, Human
ugcuagacucccuccuccuccaaaucugggcu

SEQ ID NO: 519698 - RNA, 32 nt, Human
ugcuagagaaaagaauguggacaaguguaugg

SEQ ID NO: 519699 - RNA, 32 nt, Human
ugcuagagacagggauucgccauguuggccag

SEQ ID NO: 519700 - RNA, 32 nt, Human
ugcuagagccuuucccuuuaccgcacccaaga

SEQ ID NO: 519701 - RNA, 32 nt, Human
ugcuagagcugcggcauucuccugggucucgg

SEQ ID NO: 519702 - RNA, 32 nt, Human
ugcuagaggguaggagagagccuggaucucug

SEQ ID NO: 519703 - RNA, 32 nt, Human
ugcuagaggguguggaaaagaccaagaugcca

SEQ ID NO: 519704 - RNA, 32 nt, Human
ugcuagagucaggccugcauccaaaucagggg

SEQ ID NO: 519705 - RNA, 32 nt, Human
ugcuagaguccucagggagggagugaccucga

SEQ ID NO: 519706 - RNA, 32 nt, Human
ugcuagagucuuccuuugucagccaggcugga

SEQ ID NO: 519707 - RNA, 32 nt, Human
ugcuagauaucuuaucagagcucagauuccag

SEQ ID NO: 519708 - RNA, 32 nt, Human
ugcuagauggguucuuugcauguggguuccau

SEQ ID NO: 519709 - RNA, 32 nt, Human
ugcuagcaagccugcaaaacagcaaccuaaac

SEQ ID NO: 519710 - RNA, 32 nt, Human
ugcuagcaagggcaguagcuuaaauacuuuug

SEQ ID NO: 519711 - RNA, 32 nt, Human
ugcuagcaagugaaguccagggccaggugggg

SEQ ID NO: 519712 - RNA, 32 nt, Human
ugcuagcacagcuguccacgucugugugagcu

SEQ ID NO: 519713 - RNA, 32 nt, Human
ugcuagcagacuaauacagaggaugauugaaa

SEQ ID NO: 519714 - RNA, 32 nt, Human
ugcuagcaggaagccuucaucuucuugaguac

SEQ ID NO: 519715 - RNA, 32 nt, Human
ugcuagcaguuuccguucacauuggccuagac

SEQ ID NO: 519716 - RNA, 23 nt, Human
ugcuagccaagugaacccgugga

SEQ ID NO: 519717 - RNA, 32 nt, Human
ugcuagccacaugaggaacaaguuuccguguc

SEQ ID NO: 519718 - RNA, 20 nt, Human
ugcuagccccagagaugcca

SEQ ID NO: 519719 - RNA, 32 nt, Human
ugcuagcccuggcaggcacagcccuccccuca

SEQ ID NO: 519720 - RNA, 32 nt, Human
ugcuagccuagauuuuguaauaacacugauuu

SEQ ID NO: 519721 - RNA, 32 nt, Human
ugcuagccuagccagggcuuacuccaggaauc

SEQ ID NO: 519722 - RNA, 32 nt, Human
ugcuagccucaaccuccuggggcaggggacgc

SEQ ID NO: 519723 - RNA, 32 nt, Human
ugcuagccugaguuggcacacugugagaaccc

SEQ ID NO: 519724 - RNA, 32 nt, Human
ugcuagccuguacaaccuacaugucuuuucuu

SEQ ID NO: 519725 - RNA, 20 nt, Human
ugcuagcgccuagcagcccc

SEQ ID NO: 519726 - RNA, 32 nt, Human
ugcuagcgcugcacuccauuuugcaauggccu

SEQ ID NO: 519727 - RNA, 32 nt, Human
ugcuagcucagguaagucagcacacagcaccu

SEQ ID NO: 519728 - RNA, 32 nt, Human
ugcuagcucauagcacucuucguccacuacau

SEQ ID NO: 519729 - RNA, 32 nt, Human
ugcuagcucuucuaacaggggaagucuguaug

SEQ ID NO: 519730 - RNA, 32 nt, Human
ugcuaggaaaccuuaaguauggggaagguaga

SEQ ID NO: 519731 - RNA, 18 nt, Human
ugcuaggaagggccccuu

SEQ ID NO: 519732 - RNA, 32 nt, Human
ugcuaggagaggauggucuccacccaucuuuc

SEQ ID NO: 519733 - RNA, 32 nt, Human
ugcuaggagagggcgggcagcgccgcggcgcg

SEQ ID NO: 519734 - RNA, 32 nt, Human
ugcuaggagcagcagaggauguggugaaugca

SEQ ID NO: 519735 - RNA, 32 nt, Human
ugcuaggaggcagaaggggcagagaguaaaaa

SEQ ID NO: 519736 - RNA, 32 nt, Human
ugcuaggaggcgacagaagaaaaagacacaag

SEQ ID NO: 519737 - RNA, 32 nt, Human
ugcuaggauaacaggugugagccaccgcaccc

SEQ ID NO: 519738 - RNA, 32 nt, Human
ugcuaggaucauuggauucaguucccaaaaua

SEQ ID NO: 519739 - RNA, 32 nt, Human
ugcuaggauuacaggcaucagccaccacgccu

SEQ ID NO: 519740 - RNA, 32 nt, Human
ugcuaggauuacaggcaugaaccaccgugccc

SEQ ID NO: 519741 - RNA, 32 nt, Human
ugcuaggauuacaggcaugagccaccacaucc

SEQ ID NO: 519742 - RNA, 32 nt, Human
ugcuaggauuacaggcaugagccaccacgccc

SEQ ID NO: 519743 - RNA, 32 nt, Human
ugcuaggauuacaggcaugagccaccaugccc

SEQ ID NO: 519744 - RNA, 32 nt, Human
ugcuaggauuacaggcaugagccaccgcaccg

SEQ ID NO: 519745 - RNA, 32 nt, Human
ugcuaggauuacaggcaugagccacugcaccc

SEQ ID NO: 519746 - RNA, 32 nt, Human
ugcuaggauuacaggcaugggccacugcacuc

SEQ ID NO: 519747 - RNA, 20 nt, Human
ugcuaggcaagcccagggca

SEQ ID NO: 519748 - RNA, 32 nt, Human
ugcuaggcaccacugggcucuguuucuguccc

SEQ ID NO: 519749 - RNA, 32 nt, Human
ugcuaggcgggggaggggcguugcuauggcga

SEQ ID NO: 519750 - RNA, 26 nt, Human
ugcuaggcucuagggcuuuccugcuc

SEQ ID NO: 519751 - RNA, 32 nt, Human
ugcuaggcugcagacugccuuguacucccugg

SEQ ID NO: 519752 - RNA, 20 nt, Human
ugcuaggcuggagugcagug

SEQ ID NO: 519753 - RNA, 32 nt, Human
ugcuagggagagaacgccagagggaggcggcu

SEQ ID NO: 519754 - RNA, 32 nt, Human
ugcuagggagagggaagagggagaccaaaugu

SEQ ID NO: 519755 - RNA, 32 nt, Human
ugcuagggccuccagccagggcaugucuagug

SEQ ID NO: 519756 - RNA, 32 nt, Human
ugcuagggcuucaucagaccacugacuugacu

SEQ ID NO: 519757 - RNA, 32 nt, Human
ugcuaggggaagagacugggccuuagcagguc

SEQ ID NO: 519758 - RNA, 32 nt, Human
ugcuaggggacuagcaggaagcggcacgccug

SEQ ID NO: 519759 - RNA, 32 nt, Human
ugcuaggggagcugagcaagaggcucaccaug

SEQ ID NO: 519760 - RNA, 32 nt, Human
ugcuaggggagggagagugaggagggaguguu

SEQ ID NO: 519761 - RNA, 32 nt, Human
ugcuaggggcuggaaugggggaaaguguugac

SEQ ID NO: 519762 - RNA, 32 nt, Human
ugcuagggguuaggcuuuugagcuugaacgcc

SEQ ID NO: 519763 - RNA, 32 nt, Human
ugcuagggguuugggacugaggcguggagagc

SEQ ID NO: 519764 - RNA, 32 nt, Human
ugcuagguaguacgacccucuggauuuggaag

SEQ ID NO: 519765 - RNA, 32 nt, Human
ugcuagguucacacccuccucgccccgaucuu

SEQ ID NO: 519766 - RNA, 32 nt, Human
ugcuaguacagugucaguuauuuaaaguggua

SEQ ID NO: 519767 - RNA, 32 nt, Human
ugcuagucaugaccuggucaucagcuugcuuu

SEQ ID NO: 519768 - RNA, 32 nt, Human
ugcuagugaaguuucgggcacgcauugucauu

SEQ ID NO: 519769 - RNA, 32 nt, Human
ugcuagugagccuucccauuuagauuaaagau

SEQ ID NO: 519770 - RNA, 32 nt, Human
ugcuagugaggccaagagagccugugacaauu

SEQ ID NO: 519771 - RNA, 23 nt, Human
ugcuagugcccaagugguggagg

SEQ ID NO: 519772 - RNA, 32 nt, Human
ugcuaguggccagggcugcaccugccaucccc

SEQ ID NO: 519773 - RNA, 32 nt, Human
ugcuaguguuuagaauaacagauuuguuuaua

SEQ ID NO: 519774 - RNA, 18 nt, Human
ugcuaguuaaccgcgggg

SEQ ID NO: 519775 - RNA, 32 nt, Human
ugcuaguucuuauucgagaacuauggucagag

SEQ ID NO: 519776 - RNA, 32 nt, Human
ugcuaguugcaggagacggguguuacacgcag

SEQ ID NO: 519777 - RNA, 32 nt, Human
ugcuaguuuugcaaaucguuucucugaugacc

SEQ ID NO: 519778 - RNA, 32 nt, Human
ugcuauaaaucagcuauguguauugucaaauu

SEQ ID NO: 519779 - RNA, 20 nt, Human
ugcuauaauccuagcacuuu

SEQ ID NO: 519780 - RNA, 32 nt, Human
ugcuauaauuccaugaaucagaaauaauaaaa

SEQ ID NO: 519781 - RNA, 32 nt, Human
ugcuauagaugucuucuggaaguugaguugug

SEQ ID NO: 519782 - RNA, 32 nt, Human
ugcuauagcaacguccuggacgcccagaccuu

SEQ ID NO: 519783 - RNA, 32 nt, Human
ugcuauagccugggcaagagcgugagacccug

SEQ ID NO: 519784 - RNA, 32 nt, Human
ugcuauaguguuuggcuuauuuuccaucccag

SEQ ID NO: 519785 - RNA, 32 nt, Human
ugcuauauacagucuagguuuucuguuuggaa

SEQ ID NO: 519786 - RNA, 32 nt, Human
ugcuauaucaucuuuauuuauucaggguauuu

SEQ ID NO: 519787 - RNA, 32 nt, Human
ugcuauaugaacacaucgggacugugucugca

SEQ ID NO: 519788 - RNA, 32 nt, Human
ugcuauauggaaggcacauuuuugcacuauau

SEQ ID NO: 519789 - RNA, 31 nt, Human
ugcuauauguagucucguugccaaagucugc

SEQ ID NO: 519790 - RNA, 32 nt, Human
ugcuaucacagaacuccaccagcaacuccacc

SEQ ID NO: 519791 - RNA, 32 nt, Human
ugcuaucagaauaucaggugaagagagaauca

SEQ ID NO: 519792 - RNA, 32 nt, Human
ugcuaucaguguacuccagugcccuugaauaa

SEQ ID NO: 519793 - RNA, 32 nt, Human
ugcuaucccaggaguaucaggaccagacacau

SEQ ID NO: 519794 - RNA, 32 nt, Human
ugcuaucccuccaguauuuagauuuauccugc

SEQ ID NO: 519795 - RNA, 32 nt, Human
ugcuaucccuccccucuccacccaccccacag

SEQ ID NO: 519796 - RNA, 32 nt, Human
ugcuaucccugcacucaaaaguuuugaaagaa

SEQ ID NO: 519797 - RNA, 32 nt, Human
ugcuaucucccaggggccuggaugucgaugga

SEQ ID NO: 519798 - RNA, 32 nt, Human
ugcuaucugcagcuccuaggugcuuuccucag

SEQ ID NO: 519799 - RNA, 32 nt, Human
ugcuaucuuagcgucagcgagggaagguugag

SEQ ID NO: 519800 - RNA, 32 nt, Human
ugcuaucuuagucuguucaggcugucacaaca

SEQ ID NO: 519801 - RNA, 32 nt, Human
ugcuaucuugcagcccaaccaggaggcccugc

SEQ ID NO: 519802 - RNA, 32 nt, Human
ugcuaugaacacagcagucggucccugucauu

SEQ ID NO: 519803 - RNA, 32 nt, Human
ugcuaugaaccagccccacagccccaggcucc

SEQ ID NO: 519804 - RNA, 32 nt, Human
ugcuaugaaggcagagcuucuauucuuuaugg

SEQ ID NO: 519805 - RNA, 19 nt, Human
ugcuaugacaaaaccuuua

SEQ ID NO: 519806 - RNA, 32 nt, Human
ugcuaugagagcagaggaguaaccuggucuga

SEQ ID NO: 519807 - RNA, 32 nt, Human
ugcuaugcaacaaugcauugaguauuaggaag

SEQ ID NO: 519808 - RNA, 32 nt, Human
ugcuaugcaggaaucccucccaugacguguau

SEQ ID NO: 519809 - RNA, 32 nt, Human
ugcuaugccugggaaaaugguuugucuuccag

SEQ ID NO: 519810 - RNA, 32 nt, Human
ugcuaugccuguguguaaacuuggggauggcu

SEQ ID NO: 519811 - RNA, 32 nt, Human
ugcuaugcuaaaccuccugccucccaauacca

SEQ ID NO: 519812 - RNA, 32 nt, Human
ugcuaugcuuaugauucaggcuggacagccug

SEQ ID NO: 519813 - RNA, 29 nt, Human
ugcuauggaagggagagaggaggagauug

SEQ ID NO: 519814 - RNA, 29 nt, Human
ugcuauggaagugaguccuuggaguuguc

SEQ ID NO: 519815 - RNA, 29 nt, Human
ugcuauggaauaugaugagaagcuggccc

SEQ ID NO: 519816 - RNA, 32 nt, Human
ugcuauggagagaaagcuaacauggucccaug

SEQ ID NO: 519817 - RNA, 32 nt, Human
ugcuauggagccacaguugaggacaguaguuu

SEQ ID NO: 519818 - RNA, 29 nt, Human
ugcuauggaggcggcggcggcgguggugg

SEQ ID NO: 519819 - RNA, 32 nt, Human
ugcuaugggcucccuggccucccaggccacca

SEQ ID NO: 519820 - RNA, 32 nt, Human
ugcuauggggagaaaagacaugaauaugauua

SEQ ID NO: 519821 - RNA, 32 nt, Human
ugcuauggucuccccuaggaaugugauagaua

SEQ ID NO: 519822 - RNA, 32 nt, Human
ugcuauggugugaaagacuaccuuugacuugg

SEQ ID NO: 519823 - RNA, 32 nt, Human
ugcuaugucacucaggcuggagugcaguggca

SEQ ID NO: 519824 - RNA, 32 nt, Human
ugcuaugucagcuccccucugccccaccucac

SEQ ID NO: 519825 - RNA, 31 nt, Human
ugcuaugucauuucauguccugugucaguuu

SEQ ID NO: 519826 - RNA, 32 nt, Human
ugcuaugucucaggccuguaaucccagcuuug

SEQ ID NO: 519827 - RNA, 32 nt, Human
ugcuaugucucccaggcuggagugcaguggca

SEQ ID NO: 519828 - RNA, 32 nt, Human
ugcuauguugcccaggcuagagugcaguggcu

SEQ ID NO: 519829 - RNA, 32 nt, Human
ugcuauguugcccaggcuggucccaaacuccu

SEQ ID NO: 519830 - RNA, 32 nt, Human
ugcuauguugcccaggcuggucucaaacuccu

SEQ ID NO: 519831 - RNA, 32 nt, Human
ugcuauguugcccaggcuggucucaaacuucu

SEQ ID NO: 519832 - RNA, 32 nt, Human
ugcuauguugcccaggcuggucuccaacucaa

SEQ ID NO: 519833 - RNA, 32 nt, Human
ugcuauguugcccaggcuggucucgaacuccu

SEQ ID NO: 519834 - RNA, 32 nt, Human
ugcuauguugcccaggcugguugcaaacuucu

SEQ ID NO: 519835 - RNA, 32 nt, Human
ugcuauguuggccaggcuggucucaaacuucu

SEQ ID NO: 519836 - RNA, 32 nt, Human
ugcuauguuuuagcuggucagggaaggcuccu

SEQ ID NO: 519837 - RNA, 32 nt, Human
ugcuauguuuuuacaaaauuguuccuacaccu

SEQ ID NO: 519838 - RNA, 32 nt, Human
ugcuauuauaaauaaugauucauuuuauaacc

SEQ ID NO: 519839 - RNA, 32 nt, Human
ugcuauuaucuauuacucuugagagcuggcug

SEQ ID NO: 519840 - RNA, 32 nt, Human
ugcuauuccaaccuucuuugguauuuguaauu

SEQ ID NO: 519841 - RNA, 32 nt, Human
ugcuauucccccauccuaguucuaucauauua

SEQ ID NO: 519842 - RNA, 32 nt, Human
ugcuauucuggcccaaauguuccauuauucag

SEQ ID NO: 519843 - RNA, 32 nt, Human
ugcuauugaaaugaaguauagaggaggaaaaa

SEQ ID NO: 519844 - RNA, 32 nt, Human
ugcuauugcacuccagccugggcgacagagca

SEQ ID NO: 519845 - RNA, 32 nt, Human
ugcuauugcacuccagccugggugacagacua

SEQ ID NO: 519846 - RNA, 32 nt, Human
ugcuauugugauauuuuagcacuuugguagcu

SEQ ID NO: 519847 - RNA, 32 nt, Human
ugcuauuguucugcacgaggcugggccugccu

SEQ ID NO: 519848 - RNA, 32 nt, Human
ugcuauuucacuuuuugacuugacuuuuauau

SEQ ID NO: 519849 - RNA, 32 nt, Human
ugcuauuucccaagcuggagugcaguggugcg

SEQ ID NO: 519850 - RNA, 32 nt, Human
ugcuauuuccuagaaguuucugguuuuuaaga

SEQ ID NO: 519851 - RNA, 32 nt, Human
ugcuauuuguguaacugaaagguugcacucua

SEQ ID NO: 519852 - RNA, 32 nt, Human
ugcuauuuuccuccucuuguuacaagcuucag

SEQ ID NO: 519853 - RNA, 32 nt, Human
ugcuauuuucucacuuuuccuuuugauggugc

SEQ ID NO: 519854 - RNA, 32 nt, Human
ugcuauuuuugagagugaugcuccugagcccc

SEQ ID NO: 519855 - RNA, 32 nt, Human
ugcucaaaaguucugaauucauacagaaaaca

SEQ ID NO: 519856 - RNA, 32 nt, Human
ugcucaaaauggaauuccucuaagaaucaagg

SEQ ID NO: 519857 - RNA, 25 nt, Human
ugcucaaaccacaaacaacagcaug

SEQ ID NO: 519858 - RNA, 32 nt, Human
ugcucaacaaggccucuaacagucuucugucc

SEQ ID NO: 519859 - RNA, 32 nt, Human
ugcucaacuauacgaggacacugcaggcacag

SEQ ID NO: 519860 - RNA, 32 nt, Human
ugcucaagaaaauuagugcucagccccaacaa

SEQ ID NO: 519861 - RNA, 32 nt, Human
ugcucaagaacagauuugaggccaggugcggu

SEQ ID NO: 519862 - RNA, 32 nt, Human
ugcucaagaccaugggaacccaucucuugugg

SEQ ID NO: 519863 - RNA, 32 nt, Human
ugcucaagagggagguuuccuccugagugaag

SEQ ID NO: 519864 - RNA, 23 nt, Human
ugcucaagcccaggaguuugaga

SEQ ID NO: 519865 - RNA, 32 nt, Human
ugcucaagcuguuccguccccuuaccaccccu

SEQ ID NO: 519866 - RNA, 32 nt, Human
ugcucaaggacagagaaaaggauagaaguuug

SEQ ID NO: 519867 - RNA, 25 nt, Human
ugcucaagguguccaggcuuuuggg

SEQ ID NO: 519868 - RNA, 32 nt, Human
ugcucaagucuacacaccuguacagcacguua

SEQ ID NO: 519869 - RNA, 32 nt, Human
ugcucaaguucugcuaagggacagacugccuc

SEQ ID NO: 519870 - RNA, 31 nt, Human
ugcucaauaaauaguugcugacuuuaauuuu

SEQ ID NO: 519871 - RNA, 28 nt, Human
ugcucaauaaauguugguuccugcugau

SEQ ID NO: 519872 - RNA, 31 nt, Human
ugcucaauacugugagagaaagacuguacuc

SEQ ID NO: 519873 - RNA, 32 nt, Human
ugcuuugggcugggacauaaguuuuucugcuu

SEQ ID NO: 519874 - RNA, 32 nt, Human
ugcuuugggcugggauggugacuccugaaacc

SEQ ID NO: 519875 - RNA, 32 nt, Human
ugcuuugggguuuuauuucuguuguucaaaug

SEQ ID NO: 519876 - RNA, 18 nt, Human
ugcuuuggguacugugau

SEQ ID NO: 519877 - RNA, 32 nt, Human
ugcuuuggugaugcuuugcucaucucagugaa

SEQ ID NO: 519878 - RNA, 32 nt, Human
ugcuuuggugcaagguacagcccacaccucuc

SEQ ID NO: 519879 - RNA, 32 nt, Human
ugcuuuguaaagcauugagauguuuaugugua

SEQ ID NO: 519880 - RNA, 32 nt, Human
ugcuuuguaauauuucacuuuguuuuacuaca

SEQ ID NO: 519881 - RNA, 32 nt, Human
ugcuuugucacccaggcuggaguacaguggcg

SEQ ID NO: 519882 - RNA, 32 nt, Human
ugcuuugucacccaggcuggagugcaguggug

SEQ ID NO: 519883 - RNA, 32 nt, Human
ugcuuugucacccaggcuggagugcagugucg

SEQ ID NO: 519884 - RNA, 32 nt, Human
ugcuuugucacccaggcuggagugcuguggug

SEQ ID NO: 519885 - RNA, 32 nt, Human
ugcuuugucacccaugcuggaguacaauggca

SEQ ID NO: 519886 - RNA, 32 nt, Human
ugcuuugucgcccaggcuggagcgcagucccg

SEQ ID NO: 519887 - RNA, 32 nt, Human
ugcuuugucgcccaggcuggagugcaguggca

SEQ ID NO: 519888 - RNA, 32 nt, Human
ugcuuugucgcccaggcuggagugcaguggcg

SEQ ID NO: 519889 - RNA, 22 nt, Human
ugcuuuguggcugggugcagug

SEQ ID NO: 519890 - RNA, 32 nt, Human
ugcuuuguggcugggugcagugguucacaccu

SEQ ID NO: 519891 - RNA, 32 nt, Human
ugcuuuguguguggaguuuuccaugaagugca

SEQ ID NO: 519892 - RNA, 32 nt, Human
ugcuuuguguguggggaugcuuaccaacacca

SEQ ID NO: 519893 - RNA, 32 nt, Human
ugcuuuguuccaaguuaaguguuuucagaaaa

SEQ ID NO: 519894 - RNA, 22 nt, Human
ugcuuuguugcaaguugauaua

SEQ ID NO: 519895 - RNA, 22 nt, Human
ugcuuuguugcacgccugggca

SEQ ID NO: 519896 - RNA, 32 nt, Human
ugcuuuguugccaggcuggagugcaguggcgc

SEQ ID NO: 519897 - RNA, 32 nt, Human
ugcuuuguugcccagacuggagugcaguggca

SEQ ID NO: 519898 - RNA, 32 nt, Human
ugcuuuguugcccaggcuggagugcaguagca

SEQ ID NO: 519899 - RNA, 32 nt, Human
ugcuuuguugcccaggcuggaguguggugggg

SEQ ID NO: 519900 - RNA, 22 nt, Human
ugcuuuguugggggccuggcca

SEQ ID NO: 519901 - RNA, 32 nt, Human
ugcuuuguuuacuaaggacuuguggggaggaa

SEQ ID NO: 519902 - RNA, 24 nt, Human
ugcuuuguuuuaguuccuuacaua

SEQ ID NO: 519903 - RNA, 31 nt, Human
ugcuuuuaaaugucucaugccaaggcacuga

SEQ ID NO: 519904 - RNA, 32 nt, Human
ugcuuuuaacagagucugaaccuauuucuuaa

SEQ ID NO: 519905 - RNA, 32 nt, Human
ugcuuuuaagagguggauugaagaauauuuga

SEQ ID NO: 519906 - RNA, 32 nt, Human
ugcuuuuaccauugaagaaacugagguccugu

SEQ ID NO: 519907 - RNA, 32 nt, Human
ugcuuuuauaaauaugugaugucacauauuuc

SEQ ID NO: 519908 - RNA, 23 nt, Human
ugcuuuuauuccagcacuguggu

SEQ ID NO: 519909 - RNA, 24 nt, Human
ugcuuuuauucuaugcucucugua

SEQ ID NO: 519910 - RNA, 31 nt, Human
ugcuuuucaggcaaggagggagaaauccugc

SEQ ID NO: 519911 - RNA, 32 nt, Human
ugcuuuucccaagggucugggcucugaguugg

SEQ ID NO: 519912 - RNA, 32 nt, Human
ugcuuuuccucacucacguggaaaugugaacu

SEQ ID NO: 519913 - RNA, 32 nt, Human
ugcuuuucuaacugcuuugaacuuuucggauu

SEQ ID NO: 519914 - RNA, 32 nt, Human
ugcuuuucucacccaugcuuccuugaagcccc

SEQ ID NO: 519915 - RNA, 32 nt, Human
ugcuuuucuccuccuccccuucccaguuacca

SEQ ID NO: 519916 - RNA, 32 nt, Human
ugcuuuucuccucugagucuuagcaauggaca

SEQ ID NO: 519917 - RNA, 32 nt, Human
ugcuuuucucuucucuucuccugcuccguucc

SEQ ID NO: 519918 - RNA, 32 nt, Human
ugcuuuucuucccacccugccaccccaccccu

SEQ ID NO: 519919 - RNA, 32 nt, Human
ugcuuuucuuguaggaacugugucuuugaguu

SEQ ID NO: 519920 - RNA, 32 nt, Human
ugcuuuucuuuccauuugacuugcuguaagcc

SEQ ID NO: 519921 - RNA, 32 nt, Human
ugcuuuucuuucugaaaaaucucccucucucc

SEQ ID NO: 519922 - RNA, 32 nt, Human
ugcuuuucuuuguauuuuuccugcuuuagucc

SEQ ID NO: 519923 - RNA, 32 nt, Human
ugcuuuugaaggagguagggaaugacaucuuc

SEQ ID NO: 519924 - RNA, 32 nt, Human
ugcuuuugacccuuuacaugcgggugagcaag

SEQ ID NO: 519925 - RNA, 32 nt, Human
ugcuuuugcauuaggaugacagaggugaauag

SEQ ID NO: 519926 - RNA, 19 nt, Human
ugcuuuugccaacuuucca

SEQ ID NO: 519927 - RNA, 32 nt, Human
ugcuuuugccuucuguuguuuaucuuaccugc

SEQ ID NO: 519928 - RNA, 32 nt, Human
ugcuuuugcugcagauaaucagccagagccug

SEQ ID NO: 519929 - RNA, 32 nt, Human
ugcuuuuggaagucaccuaccuuuuuaacaca

SEQ ID NO: 519930 - RNA, 32 nt, Human
ugcuuuuggacagugacccaugauaucugccu

SEQ ID NO: 519931 - RNA, 32 nt, Human
ugcuuuugggaaaugugcucagaggaagaacu

SEQ ID NO: 519932 - RNA, 32 nt, Human
ugcuuuugggagacuggaaaagggaaggugac

SEQ ID NO: 519933 - RNA, 32 nt, Human
ugcuuuugggcaacaugagaggaaccuuuuca

SEQ ID NO: 519934 - RNA, 32 nt, Human
ugcuuuugggcaggaaaauggaagaaagagug

SEQ ID NO: 519935 - RNA, 31 nt, Human
ugcuuuuggguggaaguuaggagaauguuug

SEQ ID NO: 519936 - RNA, 32 nt, Human
ugcuuuuguacggguucccaugaaucuucugc

SEQ ID NO: 519937 - RNA, 32 nt, Human
ugcuuuugucuuucuuaccugauugauauuac

SEQ ID NO: 519938 - RNA, 23 nt, Human
ugcuuuuguuccguggagaugca

SEQ ID NO: 519939 - RNA, 32 nt, Human
ugcuuuuguucguuuugccuucuguccuugga

SEQ ID NO: 519940 - RNA, 32 nt, Human
ugcuuuuguuuaccuggguaccacacaaccaa

SEQ ID NO: 519941 - RNA, 32 nt, Human
ugcuuuuuccaccucggaaaugcagcuuuccc

SEQ ID NO: 519942 - RNA, 32 nt, Human
ugcuuuuuccuuucacuuggauuugcauuuua

SEQ ID NO: 519943 - RNA, 32 nt, Human
ugcuuuuucuaggauucauuguuuucuauuug

SEQ ID NO: 519944 - RNA, 32 nt, Human
ugcuuuuucuucagugcuaagaaaguucccuc

SEQ ID NO: 519945 - RNA, 32 nt, Human
ugcuuuuucuuucuuaguugaguaaacaagua

SEQ ID NO: 519946 - RNA, 32 nt, Human
ugcuuuuuguguugguauuauuccucagaauu

SEQ ID NO: 519947 - RNA, 24 nt, Human
ugcuuuuuuccuaugguuacagca

SEQ ID NO: 519948 - RNA, 32 nt, Human
uggaaaaacaaaaucugcaagcuuugaaugau

SEQ ID NO: 519949 - RNA, 32 nt, Human
uggaaaaacaagccaaggaggauuucuuuugu

SEQ ID NO: 519950 - RNA, 26 nt, Human
uggaaaaacauuucucuuuaguuuca

SEQ ID NO: 519951 - RNA, 22 nt, Human
uggaaaaacugccauugcugug

SEQ ID NO: 519952 - RNA, 32 nt, Human
uggaaaaaggaaagagauucgagaagugagag

SEQ ID NO: 519953 - RNA, 32 nt, Human
uggaaaaaggagacggugguguggaaauggcu

SEQ ID NO: 519954 - RNA, 32 nt, Human
uggaaaaaggcagagaacgugggagugaucau

SEQ ID NO: 519955 - RNA, 32 nt, Human
uggaaaaauacugccuagaaaaugcaaaauga

SEQ ID NO: 519956 - RNA, 32 nt, Human
uggaaaaauagaagaaggucggccgggcuugg

SEQ ID NO: 519957 - RNA, 32 nt, Human
uggaaaaaucgagccucucccacccucagucg

SEQ ID NO: 519958 - RNA, 21 nt, Human
uggaaaaaugaacacuucccu

SEQ ID NO: 519959 - RNA, 32 nt, Human
uggaaaacaaagugacugaccuguggcucugg

SEQ ID NO: 519960 - RNA, 21 nt, Human
uggaaaacaauuuuuccacca

SEQ ID NO: 519961 - RNA, 32 nt, Human
uggaaaacacuccccucucccucuuucuucuu

SEQ ID NO: 519962 - RNA, 32 nt, Human
uggaaaacagcaggaacaccucuccuccauuc

SEQ ID NO: 519963 - RNA, 32 nt, Human
uggaaaacaggccuccccucccucucucggca

SEQ ID NO: 519964 - RNA, 21 nt, Human
uggaaaacaguuaauaugcca

SEQ ID NO: 519965 - RNA, 24 nt, Human
uggaaaacaguuaaugaccagcca

SEQ ID NO: 519966 - RNA, 32 nt, Human
uggaaaaccaacaacuugaaaucucagguauu

SEQ ID NO: 519967 - RNA, 32 nt, Human
uggaaaaccaguaucugccaggugcucaguga

SEQ ID NO: 519968 - RNA, 23 nt, Human
uggaaaacccaccccacacgcca

SEQ ID NO: 519969 - RNA, 19 nt, Human
uggaaaaccugcucugcug

SEQ ID NO: 519970 - RNA, 32 nt, Human
uggaaaacuacacacauauacauaaggaagag

SEQ ID NO: 519971 - RNA, 32 nt, Human
uggaaaacucacugagccugacaucugccugu

SEQ ID NO: 519972 - RNA, 32 nt, Human
uggaaaacuguggcuucucaauaaauauucag

SEQ ID NO: 519973 - RNA, 32 nt, Human
uggaaaagaacuggugugggagagggauaccu

SEQ ID NO: 519974 - RNA, 32 nt, Human
uggaaaagacucccuuuagucccuuuuucaau

SEQ ID NO: 519975 - RNA, 32 nt, Human
uggaaaagccaucucagguuggcggcagacac

SEQ ID NO: 519976 - RNA, 23 nt, Human
uggaaaagcggggacccagcgag

SEQ ID NO: 519977 - RNA, 32 nt, Human
uggaaaagcugcagacacucaaugccaacgug

SEQ ID NO: 519978 - RNA, 32 nt, Human
uggaaaagcugcagacacucaaugccagccca

SEQ ID NO: 519979 - RNA, 32 nt, Human
uggaaaaggagaaaauguccuuuuggaagaau

SEQ ID NO: 519980 - RNA, 22 nt, Human
uggaaaaggagauaauacaauu

SEQ ID NO: 519981 - RNA, 32 nt, Human
uggaaaaggagcuucaguauuguggggcucau

SEQ ID NO: 519982 - RNA, 32 nt, Human
uggaaaaggagucaggagccacugugagguga

SEQ ID NO: 519983 - RNA, 32 nt, Human
uggaaaaggccguuugccucacacauuguaac

SEQ ID NO: 519984 - RNA, 32 nt, Human
uggaaaaggugauggugcuggggugugaguug

SEQ ID NO: 519985 - RNA, 32 nt, Human
uggaaaagucggcuuguaaucaagagcaugcu

SEQ ID NO: 519986 - RNA, 32 nt, Human
uggaaaagucucccaaaccuucagagagugga

SEQ ID NO: 519987 - RNA, 32 nt, Human
uggaaaagucuucgguccaguguuacaccuua

SEQ ID NO: 519988 - RNA, 32 nt, Human
uggaaaagugagacuggaucucugauucugug

SEQ ID NO: 519989 - RNA, 32 nt, Human
uggaaaauaagaaauugagaucuagucaggaa

SEQ ID NO: 519990 - RNA, 32 nt, Human
uggaaaauauggucaguguacuacaaaaugag

SEQ ID NO: 519991 - RNA, 32 nt, Human
uggaaaaucaaccugaauucagagaagccuuc

SEQ ID NO: 519992 - RNA, 32 nt, Human
uggaaaaucauaauugccgucuggaccauuga

SEQ ID NO: 519993 - RNA, 32 nt, Human
uggaaaauccagacauuuggaauugcauauua

SEQ ID NO: 519994 - RNA, 32 nt, Human
uggaaaauccuccaaauuuggccacagaaacu

SEQ ID NO: 519995 - RNA, 32 nt, Human
uggaaaaucucccaugcgacccucggggccca

SEQ ID NO: 519996 - RNA, 22 nt, Human
uggaaaaugaucccggggccag

SEQ ID NO: 519997 - RNA, 31 nt, Human
uggaaaaugcuccuggcgccucagggaaggu

SEQ ID NO: 519998 - RNA, 24 nt, Human
uggaaaauggcuacaccacuccca

SEQ ID NO: 519999 - RNA, 32 nt, Human
uggaaaaugucacugugacaaaagccagcaua

SEQ ID NO: 520000 - RNA, 32 nt, Human
uggaaaaugucucucagcauugcuuuauuaca

SEQ ID NO: 520001 - RNA, 32 nt, Human
uggaaaauucacuauguuuccacacaccaaca

SEQ ID NO: 520002 - RNA, 32 nt, Human
uggaaaauuucaggacuuuucuuuugcaagug

SEQ ID NO: 520003 - RNA, 32 nt, Human
uggaaaauuuucuccucgguuugcuaguaucu

SEQ ID NO: 520004 - RNA, 32 nt, Human
uggaaacaaucugagagacaggaaaagugcaa

SEQ ID NO: 520005 - RNA, 32 nt, Human
uggaaacagagccacugucaagaaggaaucug

SEQ ID NO: 520006 - RNA, 32 nt, Human
uggaaacagaguggaaacacauggagcaucag

SEQ ID NO: 520007 - RNA, 32 nt, Human
uggaaacagcacacagcaagcaaccacaaaac

SEQ ID NO: 520008 - RNA, 32 nt, Human
uggaaacagcucugugugugaaggugaggacu

SEQ ID NO: 520009 - RNA, 32 nt, Human
uggaaacaucugaggcaccacuuugauucugu

SEQ ID NO: 520010 - RNA, 32 nt, Human
uggaaacaucuucuuccugagaccucguugaa

SEQ ID NO: 520011 - RNA, 32 nt, Human
uggaaaccaagagaauggcugaugucucuuuc

SEQ ID NO: 520012 - RNA, 32 nt, Human
uggaaaccacaucugcuucucucccaggacug

SEQ ID NO: 520013 - RNA, 21 nt, Human
uggaaaccaccuuaccugguu

SEQ ID NO: 520014 - RNA, 21 nt, Human
uggaaaccacguguucugguu

SEQ ID NO: 520015 - RNA, 32 nt, Human
uggaaaccagcccaggccucccagggaagggc

SEQ ID NO: 520016 - RNA, 32 nt, Human
uggaaaccagugcugccgugcaacgcuguguc

SEQ ID NO: 520017 - RNA, 20 nt, Human
uggaaacccaagccaggcgg

SEQ ID NO: 520018 - RNA, 23 nt, Human
uggaaaccccuucuuuacuuccc

SEQ ID NO: 520019 - RNA, 32 nt, Human
uggaaacccugcacucuccccugagcacccac

SEQ ID NO: 520020 - RNA, 32 nt, Human
uggaaaccgaauucccccuccaugguuucccc

SEQ ID NO: 520021 - RNA, 23 nt, Human
uggaaaccgccaaaugcccaggg

SEQ ID NO: 520022 - RNA, 32 nt, Human
uggaaaccgugaccaccauggacugcccuucc

SEQ ID NO: 520023 - RNA, 32 nt, Human
uggaaaccuguauuuauacauuaguuugucuu

SEQ ID NO: 520024 - RNA, 28 nt, Human
uggaaacgauugccaacacauacuucua

SEQ ID NO: 520025 - RNA, 32 nt, Human
uggaaacuacauuuuaaacuuuggaaucaaau

SEQ ID NO: 520026 - RNA, 32 nt, Human
uggaaacuaccaggugugccuggaagaguugg

SEQ ID NO: 520027 - RNA, 32 nt, Human
uggaaacucaaaagcuugcacucucauuuugg

SEQ ID NO: 520028 - RNA, 22 nt, Human
uggaaacucaauugucagagga

SEQ ID NO: 520029 - RNA, 32 nt, Human
uggaaacucaguaauucucccaccuucacauu

SEQ ID NO: 520030 - RNA, 32 nt, Human
uggaaacuccacucugaagcugccgcuuugga

SEQ ID NO: 520031 - RNA, 32 nt, Human
uggaaacugcagcucuguaaaugccucucuag

SEQ ID NO: 520032 - RNA, 23 nt, Human
uggaaacugcucuucuaacucca

SEQ ID NO: 520033 - RNA, 32 nt, Human
uggaaacugcuucuagaaacucuggcucagcc

SEQ ID NO: 520034 - RNA, 24 nt, Human
uggaaacuggacaggccauugcca

SEQ ID NO: 520035 - RNA, 32 nt, Human
uggaaacugggugagagacuguggcagcugcu

SEQ ID NO: 520036 - RNA, 22 nt, Human
uggaaacuggucaauauugcca

SEQ ID NO: 520037 - RNA, 32 nt, Human
uggaaacugguuuuccucuguuuuggucucuu

SEQ ID NO: 520038 - RNA, 32 nt, Human
uggaaacuguccuuuuuggauuccugcugcuu

SEQ ID NO: 520039 - RNA, 32 nt, Human
uggaaacuucaagggcugaugguucuguguuc

SEQ ID NO: 520040 - RNA, 20 nt, Human
uggaaacuucucccacggga

SEQ ID NO: 520041 - RNA, 32 nt, Human
uggaaacuuguggaugcugugaccucaagaag

SEQ ID NO: 520042 - RNA, 20 nt, Human
uggaaagaaaaucccagcag

SEQ ID NO: 520043 - RNA, 32 nt, Human
uggaaagaaaugcagaacuaucauagucacau

SEQ ID NO: 520044 - RNA, 32 nt, Human
uggaaagaacauaguguggcagaagggacagg

SEQ ID NO: 520045 - RNA, 32 nt, Human
uggaaagaagacagggaugaaauauaaucaag

SEQ ID NO: 520046 - RNA, 32 nt, Human
uggaaagaauacugcaacaacuucucgcaauu

SEQ ID NO: 520047 - RNA, 32 nt, Human
uggaaagagaaaaagauggaauaucuuaaaga

SEQ ID NO: 520048 - RNA, 32 nt, Human
uggaaagagauccaggucuggagcuggagaga

SEQ ID NO: 520049 - RNA, 22 nt, Human
uggaaagagcuagcaaacagca

SEQ ID NO: 520050 - RNA, 32 nt, Human
uggaaagagcuuuuuccuucucuacaaggagg

SEQ ID NO: 520051 - RNA, 32 nt, Human
uggaaagaggagcugggaccgcggcgagcagc

SEQ ID NO: 520052 - RNA, 32 nt, Human
uggaaagauacagcuccaggguuaaaaagaga

SEQ ID NO: 520053 - RNA, 32 nt, Human
uggaaagauggaggagaaaaagaaaaggaaga

SEQ ID NO: 520054 - RNA, 32 nt, Human
uggaaagauguggccucaggaaaagggaugag

SEQ ID NO: 520055 - RNA, 32 nt, Human
uggaaagauguggucugagaugggugcugcaa

SEQ ID NO: 520056 - RNA, 32 nt, Human
uggaaagauuugcacacccuccagaaaggaga

SEQ ID NO: 520057 - RNA, 32 nt, Human
uggaaagcaaaggagagcaggaaguuguaaau

SEQ ID NO: 520058 - RNA, 32 nt, Human
uggaaagcaacucuugccccuaccucuucugg

SEQ ID NO: 520059 - RNA, 32 nt, Human
uggaaagcaaggggguggugcguccccaggcc

SEQ ID NO: 520060 - RNA, 32 nt, Human
uggaaagcagccuggccaacauagugggaccc

SEQ ID NO: 520061 - RNA, 32 nt, Human
uggaaagcaguuuggcaguuucuuaaaacguu

SEQ ID NO: 520062 - RNA, 32 nt, Human
uggaaagcauccucaaaacugugggucaguga

SEQ ID NO: 520063 - RNA, 32 nt, Human
uggaaagccagguuguuuuauagagguucuug

SEQ ID NO: 520064 - RNA, 32 nt, Human
uggaaagcccuagaaacuaggguuccucugcc

SEQ ID NO: 520065 - RNA, 32 nt, Human
uggaaagccgauguauaugcucagccaguuua

SEQ ID NO: 520066 - RNA, 32 nt, Human
uggaaagcgucccagaauauuagccaguuuuc

SEQ ID NO: 520067 - RNA, 32 nt, Human
uggaaagcucagggguaggcccaggugggaug

SEQ ID NO: 520068 - RNA, 18 nt, Human
uggaaagcuccuagcaga

SEQ ID NO: 520069 - RNA, 32 nt, Human
uggaaagcugggacuggagccuggggaaaacu

SEQ ID NO: 520070 - RNA, 32 nt, Human
uggaaagcugggaggacagagggcaaggcaga

SEQ ID NO: 520071 - RNA, 22 nt, Human
uggaaaggaaagaugaugcuca

SEQ ID NO: 520072 - RNA, 32 nt, Human
uggaaaggaauuucauccugcccacacacugc

SEQ ID NO: 520073 - RNA, 21 nt, Human
uggaaaggacagcccuugacc

SEQ ID NO: 520074 - RNA, 32 nt, Human
uggaaaggacgguacaccggagcggcggagga

SEQ ID NO: 520075 - RNA, 26 nt, Human
uggaaaggaucuuggguccuaucccu

SEQ ID NO: 520076 - RNA, 32 nt, Human
uggaaaggcacugacaugaccuaaucaugaau

SEQ ID NO: 520077 - RNA, 32 nt, Human
uggaaaggcaggcagagggagaggcacucuga

SEQ ID NO: 520078 - RNA, 32 nt, Human
uggaaaggccacuggggagaaaccuuauuccu

SEQ ID NO: 520079 - RNA, 32 nt, Human
uggaaaggccaggccuggagcuugccucuuca

SEQ ID NO: 520080 - RNA, 32 nt, Human
uggaaagggaaaggggaggagaugggacuuug

SEQ ID NO: 520081 - RNA, 32 nt, Human
uggaaagggaaaggguggggguuaggggaagg

SEQ ID NO: 520082 - RNA, 32 nt, Human
uggaaagggacacacccagcugucugcucgca

SEQ ID NO: 520083 - RNA, 32 nt, Human
uggaaagggagacagccagguggcaccugcag

SEQ ID NO: 520084 - RNA, 21 nt, Human
uggaaagggagauuccacgga

SEQ ID NO: 520085 - RNA, 32 nt, Human
uggaaagggaugacauuuaccuaugugugcug

SEQ ID NO: 520086 - RNA, 32 nt, Human
uggaaaggggcuuccugagcugcuagggggug

SEQ ID NO: 520087 - RNA, 22 nt, Human
uggaaaggucagcuggggccag

SEQ ID NO: 520088 - RNA, 32 nt, Human
uggaaagguucagaaauguggugaggaaguga

SEQ ID NO: 520089 - RNA, 32 nt, Human
uggaaaguaagaaaguuucauggauuagagug

SEQ ID NO: 520090 - RNA, 21 nt, Human
uggaaagucacaaaccgcugg

SEQ ID NO: 520091 - RNA, 24 nt, Human
uggaaaguccuccuccagcuccac

SEQ ID NO: 520092 - RNA, 32 nt, Human
uggaaaguccuccuccagcuccaccucccucc

SEQ ID NO: 520093 - RNA, 32 nt, Human
uggaaaguccugaacuccuggcuuuccaggag

SEQ ID NO: 520094 - RNA, 32 nt, Human
uggaaagucucuuccaguucaucaggguagua

SEQ ID NO: 520095 - RNA, 32 nt, Human
uggaaagucuucgagaagcuucagaggaggga

SEQ ID NO: 520096 - RNA, 32 nt, Human
uggaaagugagugccuacagaaauuucuugga

SEQ ID NO: 520097 - RNA, 32 nt, Human
uggaaaguggaccugugucugugucuguccug

SEQ ID NO: 520098 - RNA, 32 nt, Human
uggaaagugggacugagagggagucagcaggc

SEQ ID NO: 520099 - RNA, 32 nt, Human
uggaaaguguccaaucagauccccaaaacggu

SEQ ID NO: 520100 - RNA, 22 nt, Human
uggaaaguugaugcccaguaag

SEQ ID NO: 520101 - RNA, 32 nt, Human
uggaaaguuuugaaggaggaggcauggcccgg

SEQ ID NO: 520102 - RNA, 32 nt, Human
uggaaauaaaguuuuaaaaaugagagagcagu

SEQ ID NO: 520103 - RNA, 32 nt, Human
uggaaauaaucauaacuugucuuuccaaaaua

SEQ ID NO: 520104 - RNA, 21 nt, Human
uggaaauacaggcaugagcca

SEQ ID NO: 520105 - RNA, 32 nt, Human
uggaaauacagguucuuguccccaaauuaggu

SEQ ID NO: 520106 - RNA, 32 nt, Human
uggaaauagcuuugugaaaagaggguggagag

SEQ ID NO: 520107 - RNA, 28 nt, Human
uggaaauauaccugauaauuaccaccug

SEQ ID NO: 520108 - RNA, 22 nt, Human
uggaaaucaaccgcccgcgggg

SEQ ID NO: 520109 - RNA, 32 nt, Human
uggaaaucaaguauaauagccaccucaaagaa

SEQ ID NO: 520110 - RNA, 22 nt, Human
uggaaaucagaggcacaggaag

SEQ ID NO: 520111 - RNA, 32 nt, Human
uggaaaucauucuccaacgauauacaaauugg

SEQ ID NO: 520112 - RNA, 32 nt, Human
uggaaaucccauuccuccuugugucucaucug

SEQ ID NO: 520113 - RNA, 24 nt, Human
uggaaauccgaccacuaauugcca

SEQ ID NO: 520114 - RNA, 32 nt, Human
uggaaaugaaaccaugugaaccuggccagggc

SEQ ID NO: 520115 - RNA, 20 nt, Human
uggaaaugaacagggcccuc

SEQ ID NO: 520116 - RNA, 32 nt, Human
uggaaaugagccucuccugguaucaggccuag

SEQ ID NO: 520117 - RNA, 32 nt, Human
uggaaaugaucuguauugacuaauacaccagu

SEQ ID NO: 520118 - RNA, 32 nt, Human
uggaaaugaugccaaauuuuuguauuucuuua

SEQ ID NO: 520119 - RNA, 32 nt, Human
uggaaaugcaaauaagugagccucccaaggga

SEQ ID NO: 520120 - RNA, 32 nt, Human
uggaaaugcucuguacaaagauauaagucaug

SEQ ID NO: 520121 - RNA, 32 nt, Human
uggaaaugcugagcuuccauaagucagcugag

SEQ ID NO: 520122 - RNA, 20 nt, Human
uggaaauggauuauugaaga

SEQ ID NO: 520123 - RNA, 29 nt, Human
uggaaauggcuacaauauuuaaccucaga

SEQ ID NO: 520124 - RNA, 23 nt, Human
uggaaaugguccaacacuucccu

SEQ ID NO: 520125 - RNA, 32 nt, Human
uggaaauggucuccugucuccagccugcuuga

SEQ ID NO: 520126 - RNA, 32 nt, Human
uggaaauggugcagccacuggggacaguucug

SEQ ID NO: 520127 - RNA, 22 nt, Human
uggaaauguggagagaauugaa

SEQ ID NO: 520128 - RNA, 32 nt, Human
uggaaauuaguccucaaaguaaccucagcugu

SEQ ID NO: 520129 - RNA, 32 nt, Human
uggaaauucaacuaauuuuuggugcuauuauu

SEQ ID NO: 520130 - RNA, 32 nt, Human
uggaaauucacugagucagcagccuucacacc

SEQ ID NO: 520131 - RNA, 20 nt, Human
uggaaauugaagcccaggga

SEQ ID NO: 520132 - RNA, 32 nt, Human
uggaaauugagucugaagcacucucgcacaca

SEQ ID NO: 520133 - RNA, 32 nt, Human
uggaaauugcuagcagguuccacgauguuuau

SEQ ID NO: 520134 - RNA, 17 nt, Human
uggaaauuggaauggag

SEQ ID NO: 520135 - RNA, 32 nt, Human
uggaaauuguauuugccuucuccacuuuggga

SEQ ID NO: 520136 - RNA, 32 nt, Human
uggaaauugucggucauauuucuagaacuuua

SEQ ID NO: 520137 - RNA, 32 nt, Human
uggaaauuucugagagauguguaguuaauuag

SEQ ID NO: 520138 - RNA, 32 nt, Human
uggaaauuuucaagaagggaaguauggucuug

SEQ ID NO: 520139 - RNA, 32 nt, Human
uggaacaaaagaaucugaacagcagcccuuga

SEQ ID NO: 520140 - RNA, 32 nt, Human
uggaacaaacccucaggcaccagcacagggcu

SEQ ID NO: 520141 - RNA, 32 nt, Human
uggaacaacaaacuguccugguugcuggucag

SEQ ID NO: 520142 - RNA, 32 nt, Human
uggaacaacuguucucccuugugacuaauucc

SEQ ID NO: 520143 - RNA, 21 nt, Human
uggaacaagccuguaguccca

SEQ ID NO: 520144 - RNA, 32 nt, Human
uggaacaagcugggaauggcuuugaguagcua

SEQ ID NO: 520145 - RNA, 32 nt, Human
uggaacaaggaggugggggcaguguggccccu

SEQ ID NO: 520146 - RNA, 32 nt, Human
uggaacaauacaaugcauagaguaaacaugca

SEQ ID NO: 520147 - RNA, 32 nt, Human
uggaacaaugucccuccucuuagaauguccca

SEQ ID NO: 520148 - RNA, 32 nt, Human
uggaacaauugaugccgagugucuaaaaucau

SEQ ID NO: 520149 - RNA, 18 nt, Human
uggaacacaauaccucua

SEQ ID NO: 520150 - RNA, 32 nt, Human
uggaacacagucagugguagguaaucuguagg

SEQ ID NO: 520151 - RNA, 32 nt, Human
uggaacacccgcuguccucuggccucccacac

SEQ ID NO: 520152 - RNA, 32 nt, Human
uggaacaccuuucuguuuaauucccaaaguga

SEQ ID NO: 520153 - RNA, 32 nt, Human
uggaacacugccucauugucuuguuagaucuc

SEQ ID NO: 520154 - RNA, 21 nt, Human
uggaacacuuccugugccagg

SEQ ID NO: 520155 - RNA, 32 nt, Human
uggaacagaaaguaacaaagaggaaugagcca

SEQ ID NO: 520156 - RNA, 32 nt, Human
uggaacagaccagccacugcagcagacagacc

SEQ ID NO: 520157 - RNA, 32 nt, Human
uggaacagagcugcaagaagucucugggcauc

SEQ ID NO: 520158 - RNA, 21 nt, Human
uggaacagcagagccugcucc

SEQ ID NO: 520159 - RNA, 32 nt, Human
uggaacagcaggaggcggaggugcaggggccg

SEQ ID NO: 520160 - RNA, 32 nt, Human
uggaacagcaucuccccugggcuugcuccugg

SEQ ID NO: 520161 - RNA, 32 nt, Human
uggaacagcccugcacgcccaggaugaagggg

SEQ ID NO: 520162 - RNA, 24 nt, Human
uggaacagcugggcaugggucaug

SEQ ID NO: 520163 - RNA, 32 nt, Human
uggaacaggagaggcuucaggagcaggaugag

SEQ ID NO: 520164 - RNA, 32 nt, Human
uggaacaggagggagagccaagggggcggccc

SEQ ID NO: 520165 - RNA, 32 nt, Human
uggaacagggaaacccagagagccagugcugu

SEQ ID NO: 520166 - RNA, 32 nt, Human
uggaacaggggcccugggcauuucugcugaga

SEQ ID NO: 520167 - RNA, 32 nt, Human
uggaacagugccuggcaccuaggaagccuuca

SEQ ID NO: 520168 - RNA, 32 nt, Human
uggaacaguuuggagggcucagaaggagacag

SEQ ID NO: 520169 - RNA, 32 nt, Human
uggaacauagccaagaccaggagaagagagag

SEQ ID NO: 520170 - RNA, 32 nt, Human
uggaacauccuguaacuuuucacugcacuugg

SEQ ID NO: 520171 - RNA, 32 nt, Human
uggaacaugagacucgaggcugagcguggauc

SEQ ID NO: 520172 - RNA, 32 nt, Human
uggaacaugccuguggucccagcuucuuggga

SEQ ID NO: 520173 - RNA, 32 nt, Human
uggaacauggaaauuuuugaaagugauauaug

SEQ ID NO: 520174 - RNA, 32 nt, Human
uggaacauggaaugccuuuccaggaaaacguu

SEQ ID NO: 520175 - RNA, 21 nt, Human
uggaacaugugauuucagggu

SEQ ID NO: 520176 - RNA, 32 nt, Human
uggaacauguugaauuuuaucaggugguuaca

SEQ ID NO: 520177 - RNA, 21 nt, Human
uggaaccaaaaaucacuguca

SEQ ID NO: 520178 - RNA, 32 nt, Human
uggaaccaaaccugcgcgcguggccgggccgu

SEQ ID NO: 520179 - RNA, 32 nt, Human
uggaaccacaauauuauuguuaccuucaaaga

SEQ ID NO: 520180 - RNA, 21 nt, Human
uggaaccacaugagccugcuc

SEQ ID NO: 520181 - RNA, 32 nt, Human
uggaaccagagagcugggagggaccaagguug

SEQ ID NO: 520182 - RNA, 32 nt, Human
uggaaccagccaggccaggcaaccaguggccc

SEQ ID NO: 520183 - RNA, 22 nt, Human
uggaaccaggaauucauucuca

SEQ ID NO: 520184 - RNA, 32 nt, Human
uggaaccaggacuucguuguuccuucauugug

SEQ ID NO: 520185 - RNA, 32 nt, Human
uggaaccaggagacacguguggcgggcagugg

SEQ ID NO: 520186 - RNA, 32 nt, Human
uggaaccagggcugccuuccagcacuucaugg

SEQ ID NO: 520187 - RNA, 32 nt, Human
uggaaccaguagcaaggagcccgagaucagcc

SEQ ID NO: 520188 - RNA, 32 nt, Human
uggaaccagucaggaaccaggcucuggaaggc

SEQ ID NO: 520189 - RNA, 32 nt, Human
uggaaccauaaggguaaccagauuuucaucua

SEQ ID NO: 520190 - RNA, 22 nt, Human
uggaaccaugccccucccaguc

SEQ ID NO: 520191 - RNA, 32 nt, Human
uggaaccauggaguguguagaagagaagaagg

SEQ ID NO: 520192 - RNA, 32 nt, Human
uggaacccacacagauaggggagggauuaagc

SEQ ID NO: 520193 - RNA, 32 nt, Human
uggaacccacagaauguucaacagggcagcac

SEQ ID NO: 520194 - RNA, 32 nt, Human
uggaacccagaaggucaaggcugcaaugagcc

SEQ ID NO: 520195 - RNA, 32 nt, Human
uggaacccagaagguggagguugcagugagcc

SEQ ID NO: 520196 - RNA, 32 nt, Human
uggaacccaggaggcaaagguugcagugagcc

SEQ ID NO: 520197 - RNA, 32 nt, Human
uggaacccaggaggcagaggucgcagugaguc

SEQ ID NO: 520198 - RNA, 32 nt, Human
uggaacccaggagguggagguugcagugagcu

SEQ ID NO: 520199 - RNA, 32 nt, Human
uggaaccccagcuucccuccagccucuccucc

SEQ ID NO: 520200 - RNA, 32 nt, Human
uggaaccccaggagccugacuuaaggucgcug

SEQ ID NO: 520201 - RNA, 32 nt, Human
uggaacccgggagguagaggcugcagugagcc

SEQ ID NO: 520202 - RNA, 24 nt, Human
uggaacccggugcucccucuguca

SEQ ID NO: 520203 - RNA, 32 nt, Human
uggaacccucccuacccugccugucuucuguu

SEQ ID NO: 520204 - RNA, 32 nt, Human
uggaacccugcucucagccuggaggcuggcag

SEQ ID NO: 520205 - RNA, 32 nt, Human
uggaacccugggaacugcccucccccuuagcu

SEQ ID NO: 520206 - RNA, 32 nt, Human
uggaaccgacucuaaagccauuguagacccuc

SEQ ID NO: 520207 - RNA, 20 nt, Human
uggaaccgggccgcagcccc

SEQ ID NO: 520208 - RNA, 32 nt, Human
uggaaccguuuaugaggaaaacugagcagggu

SEQ ID NO: 520209 - RNA, 32 nt, Human
uggaaccuagagcuggagugaggaguagaggu

SEQ ID NO: 520210 - RNA, 32 nt, Human
uggaaccucaggccuagacuagguugccuuug

SEQ ID NO: 520211 - RNA, 32 nt, Human
uggaaccugccugcucccucucccagaccagc

SEQ ID NO: 520212 - RNA, 32 nt, Human
uggaaccuggcaggcccugcccagccagccau

SEQ ID NO: 520213 - RNA, 32 nt, Human
uggaaccugggagccggaggcugcagugagcc

SEQ ID NO: 520214 - RNA, 32 nt, Human
uggaaccugggagguggaggcugcagugaacc

SEQ ID NO: 520215 - RNA, 32 nt, Human
uggaaccuuaccucuccuccuuagcccaauau

SEQ ID NO: 520216 - RNA, 32 nt, Human
uggaaccuuauccaaccucuuggugcuucagu

SEQ ID NO: 520217 - RNA, 32 nt, Human
uggaaccuuuggaaccugcugucaacaggucu

SEQ ID NO: 520218 - RNA, 23 nt, Human
uggaacgaucuuggcucacugca

SEQ ID NO: 520219 - RNA, 21 nt, Human
uggaacgcagugguguuuuca

SEQ ID NO: 520220 - RNA, 32 nt, Human
uggaacgccguugccaccgaggaggcggcggc

SEQ ID NO: 520221 - RNA, 32 nt, Human
uggaacgcgggcgcuccuccagcuuccgaguc

SEQ ID NO: 520222 - RNA, 32 nt, Human
uggaacgcgguugccaccgaggaggcggcggc

SEQ ID NO: 520223 - RNA, 32 nt, Human
uggaacguggaggcagagguugcagugagccg

SEQ ID NO: 520224 - RNA, 32 nt, Human
uggaacguuccaguuggaagguuccuaugccu

SEQ ID NO: 520225 - RNA, 32 nt, Human
uggaacuaagggcagggacucaugcauaaggg

SEQ ID NO: 520226 - RNA, 32 nt, Human
uggaacuaauccccuguggauaccaagggaug

SEQ ID NO: 520227 - RNA, 32 nt, Human
uggaacuacaccauuggcucuccugggucucc

SEQ ID NO: 520228 - RNA, 32 nt, Human
uggaacucacagccaccacuaccaccacuuua

SEQ ID NO: 520229 - RNA, 32 nt, Human
uggaacucagcugucuguggcuucccaugucu

SEQ ID NO: 520230 - RNA, 32 nt, Human
uggaacucaggaggcggaggcugcagucaacc

SEQ ID NO: 520231 - RNA, 22 nt, Human
uggaacucccauagucaucugc

SEQ ID NO: 520232 - RNA, 32 nt, Human
uggaacucccgagggccucuaggaccaggguu

SEQ ID NO: 520233 - RNA, 32 nt, Human
uggaacucccgauuucaggugggcuaaaagag

SEQ ID NO: 520234 - RNA, 32 nt, Human
uggaacuccugccuccacagccccuccagugg

SEQ ID NO: 520235 - RNA, 32 nt, Human
uggaacuccuugugggaagaaguuugcaccuc

SEQ ID NO: 520236 - RNA, 32 nt, Human
uggaacucucucucgcagugcucgaggcugug

SEQ ID NO: 520237 - RNA, 32 nt, Human
uggaacucugaguccuccuaugaaccucugua

SEQ ID NO: 520238 - RNA, 32 nt, Human
uggaacucuguggaauucugcccaggcagugg

SEQ ID NO: 520239 - RNA, 32 nt, Human
uggaacugaccacccuccagccugccuuagua

SEQ ID NO: 520240 - RNA, 31 nt, Human
uggaacugacuucuucugucaggaggacugg

SEQ ID NO: 520241 - RNA, 22 nt, Human
uggaacugagaagaacuucaca

SEQ ID NO: 520242 - RNA, 23 nt, Human
uggaacugagauuuagcugcaca

SEQ ID NO: 520243 - RNA, 21 nt, Human
uggaacugagccggggcccuc

SEQ ID NO: 520244 - RNA, 32 nt, Human
uggaacugagccugaaguuauggggcguguau

SEQ ID NO: 520245 - RNA, 32 nt, Human
uggaacugcaacuccagcguccucagcacccc

SEQ ID NO: 520246 - RNA, 32 nt, Human
uggaacugcagccucagcccaucuggcagagu

SEQ ID NO: 520247 - RNA, 32 nt, Human
uggaacugcccauuuucuggaucuucccucuc

SEQ ID NO: 520248 - RNA, 31 nt, Human
uggaacugccucugcugcccugggaucauua

SEQ ID NO: 520249 - RNA, 31 nt, Human
uggaacugccucugggagcuuuggcgucugu

SEQ ID NO: 520250 - RNA, 32 nt, Human
uggaacugcugaggauacaguaaugaauuggc

SEQ ID NO: 520251 - RNA, 32 nt, Human
uggaacugggaggaagcuggagaaaagaugcc

SEQ ID NO: 520252 - RNA, 21 nt, Human
uggaacugggggugcucggca

SEQ ID NO: 520253 - RNA, 32 nt, Human
uggaacugggguaagggcaggagccaguuauu

SEQ ID NO: 520254 - RNA, 32 nt, Human
uggaacuguaggagcaggugaauaaaggaucu

SEQ ID NO: 520255 - RNA, 31 nt, Human
uggaacuuaaaacuacuuuguugaaacauca

SEQ ID NO: 520256 - RNA, 32 nt, Human
uggaacuucauacuucauccuguguaagagua

SEQ ID NO: 520257 - RNA, 32 nt, Human
uggaacuucauauggaccaaguggccacacac

SEQ ID NO: 520258 - RNA, 32 nt, Human
uggaacuuccaccugggcucugcgcuaggucu

SEQ ID NO: 520259 - RNA, 32 nt, Human
uggaacuucccccucaccgccagacuuaagcu

SEQ ID NO: 520260 - RNA, 32 nt, Human
uggaacuucucccucccuauucccacaaaaac

SEQ ID NO: 520261 - RNA, 32 nt, Human
uggaacuucugccuccaccucgcuggggagcc

SEQ ID NO: 520262 - RNA, 24 nt, Human
uggaacuucuggaagauuucaggg

SEQ ID NO: 520263 - RNA, 32 nt, Human
uggaacuucuuccuuccuccugccucugcaca

SEQ ID NO: 520264 - RNA, 32 nt, Human
uggaacuugaacucuuugccuaugggccuggu

SEQ ID NO: 520265 - RNA, 32 nt, Human
uggaacuuuaccagcagccucagcuuuacaaa

SEQ ID NO: 520266 - RNA, 32 nt, Human
uggaacuuucugggauguucucugugccuugg

SEQ ID NO: 520267 - RNA, 23 nt, Human
uggaacuuuuuuccuggguagua

SEQ ID NO: 520268 - RNA, 32 nt, Human
uggaagaaaaacaugugccuucugcuaacugu

SEQ ID NO: 520269 - RNA, 32 nt, Human
uggaagaaaagccucuucuuaaagcuauugua

SEQ ID NO: 520270 - RNA, 32 nt, Human
uggaagaaaaggauuuuggaaacucaaggaaa

SEQ ID NO: 520271 - RNA, 32 nt, Human
uggaagaaaaguagaaaagaguaguacuauug

SEQ ID NO: 520272 - RNA, 32 nt, Human
uggaagaaacacccuuucaucucagaguccac

SEQ ID NO: 520273 - RNA, 32 nt, Human
uggaagaaacuggacacagucaccagcauccc

SEQ ID NO: 520274 - RNA, 32 nt, Human
uggaagaaagcggagagcagcaaagggaagca

SEQ ID NO: 520275 - RNA, 32 nt, Human
uggaagaacaggagaaaaagaaaagcaaaaac

SEQ ID NO: 520276 - RNA, 32 nt, Human
uggaagaaccaguucuggagcucaggccuucc

SEQ ID NO: 520277 - RNA, 32 nt, Human
uggaagaacucacuagaacuucuuugagcauc

SEQ ID NO: 520278 - RNA, 32 nt, Human
uggaagaagaaacaccaguuagaaguuuguuu

SEQ ID NO: 520279 - RNA, 32 nt, Human
uggaagaagauacuccaggcagaggaaauagu

SEQ ID NO: 520280 - RNA, 32 nt, Human
uggaagaagaugaagaaggaaaccaggugaac

SEQ ID NO: 520281 - RNA, 32 nt, Human
uggaagaagcacaggcuccuguccucagaucc

SEQ ID NO: 520282 - RNA, 32 nt, Human
uggaagaagcacaucaagacuguucuccugcg

SEQ ID NO: 520283 - RNA, 32 nt, Human
uggaagaagcagccgccgcagccccgguggaa

SEQ ID NO: 520284 - RNA, 21 nt, Human
uggaagaaggggucucacaaa

SEQ ID NO: 520285 - RNA, 21 nt, Human
uggaagaaguguccuagcaag

SEQ ID NO: 520286 - RNA, 32 nt, Human
uggaagaaucuauccaugugucugccuccaua

SEQ ID NO: 520287 - RNA, 32 nt, Human
uggaagaaugggggugggaggguggaggggcu

SEQ ID NO: 520288 - RNA, 32 nt, Human
uggaagaauucauauaugaaucagaugagaau

SEQ ID NO: 520289 - RNA, 32 nt, Human
uggaagaauugucuugggucacacauaaaaua

SEQ ID NO: 520290 - RNA, 32 nt, Human
uggaagacaagagguuugagcauggcagaagg

SEQ ID NO: 520291 - RNA, 32 nt, Human
uggaagacacagauuccuaauuaguccaaauu

SEQ ID NO: 520292 - RNA, 32 nt, Human
uggaagacacagauuuuucuggaagacaugga

SEQ ID NO: 520293 - RNA, 32 nt, Human
uggaagacagcaucugcuacgagcggaggcac

SEQ ID NO: 520294 - RNA, 32 nt, Human
uggaagacaggaagaaaagaagagaaggaagu

SEQ ID NO: 520295 - RNA, 32 nt, Human
uggaagaccuggaggaagaggaggaggaggag

SEQ ID NO: 520296 - RNA, 32 nt, Human
uggaagacgaggaggacgaggaugaggaggag

SEQ ID NO: 520297 - RNA, 32 nt, Human
uggaagacggggccaagggaaaggccagagcc

SEQ ID NO: 520298 - RNA, 22 nt, Human
uggaagacguuuccuuucuucu

SEQ ID NO: 520299 - RNA, 32 nt, Human
uggaagacuaaagaggugcaaugugaucugag

SEQ ID NO: 520300 - RNA, 32 nt, Human
uggaagacuggauuugcuggaagacuugauuu

SEQ ID NO: 520301 - RNA, 32 nt, Human
uggaagagaagcugggguagggagacaggaag

SEQ ID NO: 520302 - RNA, 21 nt, Human
uggaagagaauggaccaguaa

SEQ ID NO: 520303 - RNA, 32 nt, Human
uggaagagcagccuuuuucaucaggcccacaa

SEQ ID NO: 520304 - RNA, 32 nt, Human
uggaagagccagagggcucuggagugagcaga

SEQ ID NO: 520305 - RNA, 32 nt, Human
uggaagagccuccauuucaucucauguccauu

SEQ ID NO: 520306 - RNA, 32 nt, Human
uggaagagcucggggaucuggcucaggcccac

SEQ ID NO: 520307 - RNA, 32 nt, Human
uggaagagcuggggugggggaggagggagcgu

SEQ ID NO: 520308 - RNA, 32 nt, Human
uggaagaggaagaagagaggaaugagaaagaa

SEQ ID NO: 520309 - RNA, 32 nt, Human
uggaagaggaagaugccuagcacagaccuucu

SEQ ID NO: 520310 - RNA, 20 nt, Human
uggaagaggaauccagugaa

SEQ ID NO: 520311 - RNA, 32 nt, Human
uggaagaggaccccaaacuccaaauaagaagc

SEQ ID NO: 520312 - RNA, 32 nt, Human
uggaagaggacuggugaugguggagggugaga

SEQ ID NO: 520313 - RNA, 32 nt, Human
uggaagaggagaaaggagaaccacugauuuua

SEQ ID NO: 520314 - RNA, 32 nt, Human
uggaagaggaggaggaggagaggcggcgggga

SEQ ID NO: 520315 - RNA, 32 nt, Human
uggaagaggaggaggaggaggagaaggaggag

SEQ ID NO: 520316 - RNA, 32 nt, Human
uggaagaggaggcagaagaggagcagcgcauc

SEQ ID NO: 520317 - RNA, 32 nt, Human
uggaagaggcagcaguggcucaaguuugcgug

SEQ ID NO: 520318 - RNA, 20 nt, Human
uggaagaggcucuuggcaaa

SEQ ID NO: 520319 - RNA, 32 nt, Human
uggaagagggugagacagguauuccucacaga

SEQ ID NO: 520320 - RNA, 32 nt, Human
uggaagaggguuuugcccucucuccucaaaaa

SEQ ID NO: 520321 - RNA, 32 nt, Human
uggaagagguggcggggaccagcugggcagau

SEQ ID NO: 520322 - RNA, 20 nt, Human
uggaagagguucucagcaag

SEQ ID NO: 520323 - RNA, 32 nt, Human
uggaagagugggaggaagcagagggagggacu

SEQ ID NO: 520324 - RNA, 20 nt, Human
uggaagagugggcaggggga

SEQ ID NO: 520325 - RNA, 32 nt, Human
uggaagaguguuagauuuuucuuaauuccacu

SEQ ID NO: 520326 - RNA, 32 nt, Human
uggaagauacacuuuugucuuugcuauuauag

SEQ ID NO: 520327 - RNA, 32 nt, Human
uggaagauaucaugagaaugcacacaaaacug

SEQ ID NO: 520328 - RNA, 32 nt, Human
uggaagauauuaagcaaaauguuuaaagacac

SEQ ID NO: 520329 - RNA, 32 nt, Human
uggaagauauuccuuuuuaacuuugugguaac

SEQ ID NO: 520330 - RNA, 32 nt, Human
uggaagauccugcugugaaaggagcaguacaa

SEQ ID NO: 520331 - RNA, 32 nt, Human
uggaagaucugcugcaaccauuaucuuuguuc

SEQ ID NO: 520332 - RNA, 32 nt, Human
uggaagaugaaggcaggaggcagcagcucaga

SEQ ID NO: 520333 - RNA, 32 nt, Human
uggaagaugaaggcgcaccagaagggaaggac

SEQ ID NO: 520334 - RNA, 32 nt, Human
uggaagaugacaacauccuuuuucauuacugu

SEQ ID NO: 520335 - RNA, 32 nt, Human
uggaagaugauugcaugcauccucauaaucau

SEQ ID NO: 520336 - RNA, 32 nt, Human
uggaagaugcagcuguuugagcagcccugucc

SEQ ID NO: 520337 - RNA, 32 nt, Human
uggaagaugcuauauaguccagaguuguaagc

SEQ ID NO: 520338 - RNA, 32 nt, Human
uggaagauggcucacccaggaggucccaggag

SEQ ID NO: 520339 - RNA, 32 nt, Human
uggaagauguggaagaugucaaguuugugauc

SEQ ID NO: 520340 - RNA, 32 nt, Human
uggaagauguuacauuugaucugaaucuugaa

SEQ ID NO: 520341 - RNA, 32 nt, Human
uggaagauuaggcaugaauacacagagauuua

SEQ ID NO: 520342 - RNA, 28 nt, Human
uggaagcaagcccacccuccccagggga

SEQ ID NO: 520343 - RNA, 32 nt, Human
uggaagcacagucgggacagaauucgauggau

SEQ ID NO: 520344 - RNA, 22 nt, Human
uggaagcagcacccccagagga

SEQ ID NO: 520345 - RNA, 18 nt, Human
uggaagcaggaccaguaa

SEQ ID NO: 520346 - RNA, 32 nt, Human
uggaagcaggcagaggaagacaagggcauccc

SEQ ID NO: 520347 - RNA, 32 nt, Human
uggaagcagggacugguugagggaguggggag

SEQ ID NO: 520348 - RNA, 22 nt, Human
uggaagcagucgaaggacuuca

SEQ ID NO: 520349 - RNA, 32 nt, Human
uggaagcaucaccccaauuggcuccaaauacu

SEQ ID NO: 520350 - RNA, 32 nt, Human
uggaagcaucucccuacacuggcagccaguca

SEQ ID NO: 520351 - RNA, 32 nt, Human
uggaagccaaaccaguucuuaaaugcuacaug

SEQ ID NO: 520352 - RNA, 32 nt, Human
uggaagccaagcgcaacaggugcuuggagguc

SEQ ID NO: 520353 - RNA, 32 nt, Human
uggaagccaccaggaacagaaggucuggccac

SEQ ID NO: 520354 - RNA, 23 nt, Human
uggaagccaccaucaucucuggc

SEQ ID NO: 520355 - RNA, 32 nt, Human
uggaagccacccacaaacacacaccugcuggu

SEQ ID NO: 520356 - RNA, 20 nt, Human
uggaagccacccggaccugg

SEQ ID NO: 520357 - RNA, 32 nt, Human
uggaagccagaacaugguggguggagagaugu

SEQ ID NO: 520358 - RNA, 32 nt, Human
uggaagccagggcuugucacagucucuacugu

SEQ ID NO: 520359 - RNA, 18 nt, Human
uggaagccaucugcugcu

SEQ ID NO: 520360 - RNA, 32 nt, Human
uggaagccaugugauuccaucuugcccgcuca

SEQ ID NO: 520361 - RNA, 32 nt, Human
uggaagccauuuggggaggcaggcugggccaa

SEQ ID NO: 520362 - RNA, 32 nt, Human
uggaagcccagagggacuaugaucugauggcc

SEQ ID NO: 520363 - RNA, 23 nt, Human
uggaagcccaguuccuuaggugg

SEQ ID NO: 520364 - RNA, 21 nt, Human
uggaagccccccaccuuucuc

SEQ ID NO: 520365 - RNA, 21 nt, Human
uggaagcccccucugccuccc

SEQ ID NO: 520366 - RNA, 32 nt, Human
uggaagcccucuuguaaagacacaccuaaacc

SEQ ID NO: 520367 - RNA, 22 nt, Human
uggaagccgucugguacugcuu

SEQ ID NO: 520368 - RNA, 32 nt, Human
uggaagccguggggucccucaggccugggcgg

SEQ ID NO: 520369 - RNA, 24 nt, Human
uggaagccuaugguauucuuggcu

SEQ ID NO: 520370 - RNA, 32 nt, Human
uggaagccucagggagcuacaacaucaaguua

SEQ ID NO: 520371 - RNA, 32 nt, Human
uggaagccuccaccugcagccccaggccuccc

SEQ ID NO: 520372 - RNA, 32 nt, Human
uggaagccucuccuguccuuggcucuucccuc

SEQ ID NO: 520373 - RNA, 32 nt, Human
uggaagccugcacuccagcuucgaguggaacg

SEQ ID NO: 520374 - RNA, 18 nt, Human
uggaagccuguaguccca

SEQ ID NO: 520375 - RNA, 21 nt, Human
uggaagccuguagucccagcu

SEQ ID NO: 520376 - RNA, 32 nt, Human
uggaagccuucagguugcugugcaauggaaua

SEQ ID NO: 520377 - RNA, 23 nt, Human
uggaagccuucccacagcuuccc

SEQ ID NO: 520378 - RNA, 32 nt, Human
uggaagccuuucuuuccaaggccguguuucuc

SEQ ID NO: 520379 - RNA, 32 nt, Human
uggaagcuaaaggaacuugggcauucagggag

SEQ ID NO: 520380 - RNA, 32 nt, Human
uggaagcuccuuuucuccaccucucucaacac

SEQ ID NO: 520381 - RNA, 32 nt, Human
uggaagcucuccacuugaaccucuucauguca

SEQ ID NO: 520382 - RNA, 32 nt, Human
uggaagcucugcaucccuucucccauaccuug

SEQ ID NO: 520383 - RNA, 32 nt, Human
uggaagcucuucauuuauaaagcuauuugaag

SEQ ID NO: 520384 - RNA, 20 nt, Human
uggaagcugagccugaccca

SEQ ID NO: 520385 - RNA, 23 nt, Human
uggaagcugcccuuuguucugua

SEQ ID NO: 520386 - RNA, 32 nt, Human
uggaagcugcuugugaugcgccugguccaggg

SEQ ID NO: 520387 - RNA, 32 nt, Human
uggaagcuggagugugacuggaaaaauacuca

SEQ ID NO: 520388 - RNA, 24 nt, Human
uggaagcuguggcucacaccugua

SEQ ID NO: 520389 - RNA, 21 nt, Human
uggaagcuguucaagauacau

SEQ ID NO: 520390 - RNA, 21 nt, Human
uggaagcuuacacaucucccu

SEQ ID NO: 520391 - RNA, 32 nt, Human
uggaagcuuccccuccugccuuaugcucaccu

SEQ ID NO: 520392 - RNA, 32 nt, Human
uggaagcuucccugagcaacagaccagaagag

SEQ ID NO: 520393 - RNA, 32 nt, Human
uggaaggaaaggugacugugugaucugauucu

SEQ ID NO: 520394 - RNA, 32 nt, Human
uggaaggaagggaggaaggaaaggaggagaaa

SEQ ID NO: 520395 - RNA, 32 nt, Human
uggaaggaaucagcuauguucugccuuuugcu

SEQ ID NO: 520396 - RNA, 32 nt, Human
uggaaggacacauacuacugaacuaggaaggu

SEQ ID NO: 520397 - RNA, 26 nt, Human
uggaaggacagauucgagggggccag

SEQ ID NO: 520398 - RNA, 32 nt, Human
uggaaggacagauucgagggggccaguauugu

SEQ ID NO: 520399 - RNA, 32 nt, Human
uggaaggacaggcagcacgggagccaggcgcu

SEQ ID NO: 520400 - RNA, 32 nt, Human
uggaaggagacaugugacauggggagggagag

SEQ ID NO: 520401 - RNA, 32 nt, Human
uggaaggagagggcacagaagcagcuguuuac

SEQ ID NO: 520402 - RNA, 32 nt, Human
uggaaggagagggugagugggggauggcuuuc

SEQ ID NO: 520403 - RNA, 32 nt, Human
uggaaggagcaucuccccucuugucuguggaa

SEQ ID NO: 520404 - RNA, 24 nt, Human
uggaaggagccucagcccaugcca

SEQ ID NO: 520405 - RNA, 32 nt, Human
uggaaggauaguuuccuggugcgcuggauuag

SEQ ID NO: 520406 - RNA, 32 nt, Human
uggaaggauauggagaaggccacugaacccac

SEQ ID NO: 520407 - RNA, 32 nt, Human
uggaaggauuuagcuuaacaacugucacuccu

SEQ ID NO: 520408 - RNA, 32 nt, Human
uggaaggcaaagucuuggcuuuugagacugaa

SEQ ID NO: 520409 - RNA, 32 nt, Human
uggaaggcacuucuccugccuccugggagccu

SEQ ID NO: 520410 - RNA, 32 nt, Human
uggaaggcagaagggaaaagaaucaaucagaa

SEQ ID NO: 520411 - RNA, 18 nt, Human
uggaaggcaggaccucuc

SEQ ID NO: 520412 - RNA, 32 nt, Human
uggaaggccaaaggaauaaaauucuuuuauau

SEQ ID NO: 520413 - RNA, 21 nt, Human
uggaaggcugaggcaggggga

SEQ ID NO: 520414 - RNA, 32 nt, Human
uggaagggaaacacuggaaauugugagacuuc

SEQ ID NO: 520415 - RNA, 32 nt, Human
uggaagggaagugaggaggagggacaaggaag

SEQ ID NO: 520416 - RNA, 32 nt, Human
uggaagggacugcagaggugugcgagaugagu

SEQ ID NO: 520417 - RNA, 32 nt, Human
uggaagggacugucuguccgucccgcuuguuc

SEQ ID NO: 520418 - RNA, 32 nt, Human
uggaagggagagaaagagaaagaagguauccu

SEQ ID NO: 520419 - RNA, 32 nt, Human
uggaagggagagaggugggugggaggguggga

SEQ ID NO: 520420 - RNA, 32 nt, Human
uggaagggaggaaggccuuucuucuguguuaa

SEQ ID NO: 520421 - RNA, 32 nt, Human
uggaagggaggcauuugcugacagaggacggg

SEQ ID NO: 520422 - RNA, 32 nt, Human
uggaagggcgcagcuccucucccagagcucau

SEQ ID NO: 520423 - RNA, 32 nt, Human
uggaaggggcagcaggaggaguggaaggaaac

SEQ ID NO: 520424 - RNA, 32 nt, Human
uggaaggguccagagcaggagcuucuaucucc

SEQ ID NO: 520425 - RNA, 32 nt, Human
uggaagguagucugagccacugccuuucccaa

SEQ ID NO: 520426 - RNA, 22 nt, Human
uggaaggucacuauuucugacu

SEQ ID NO: 520427 - RNA, 32 nt, Human
uggaagguccaguaccaccaagagcugcccau

SEQ ID NO: 520428 - RNA, 21 nt, Human
uggaaggucgcugcccaggga

SEQ ID NO: 520429 - RNA, 32 nt, Human
uggaaggucucugcuggaagagacugggagag

SEQ ID NO: 520430 - RNA, 32 nt, Human
uggaaggucuuacaauacacugccugccucac

SEQ ID NO: 520431 - RNA, 32 nt, Human
uggaaggugaaagcugagcaggcuccaguccc

SEQ ID NO: 520432 - RNA, 32 nt, Human
uggaaggugaaggugaaggugagacccuguag

SEQ ID NO: 520433 - RNA, 24 nt, Human
uggaaggugccacauauacuuuua

SEQ ID NO: 520434 - RNA, 20 nt, Human
uggaagguggcgguggugaa

SEQ ID NO: 520435 - RNA, 32 nt, Human
uggaagguuuacugcugccucaaguccucuuc

SEQ ID NO: 520436 - RNA, 32 nt, Human
uggaagguuugauguccuguuucucauugaag

SEQ ID NO: 520437 - RNA, 24 nt, Human
uggaaguagaaugauuucaguaga

SEQ ID NO: 520438 - RNA, 32 nt, Human
uggaaguagggagggggaagcaggagaaugag

SEQ ID NO: 520439 - RNA, 32 nt, Human
uggaagucaaaacagcuggagucuaguuuaau

SEQ ID NO: 520440 - RNA, 32 nt, Human
uggaagucacaggacaggaaugacagaucagg

SEQ ID NO: 520441 - RNA, 22 nt, Human
uggaagucaggagccuuugaug

SEQ ID NO: 520442 - RNA, 32 nt, Human
uggaagucaguguggcgauuccucagagaugu

SEQ ID NO: 520443 - RNA, 32 nt, Human
uggaagucauagggagacaggaguuguacuua

SEQ ID NO: 520444 - RNA, 32 nt, Human
uggaagucauugccaacucugccagucacacu

SEQ ID NO: 520445 - RNA, 24 nt, Human
uggaaguccagugaugggaaaaug

SEQ ID NO: 520446 - RNA, 24 nt, Human
uggaagucgcccuggcccacagcu

SEQ ID NO: 520447 - RNA, 19 nt, Human
uggaagucugggaaugagg

SEQ ID NO: 520448 - RNA, 32 nt, Human
uggaagugaaggagggaaagugcagaggcuuu

SEQ ID NO: 520449 - RNA, 32 nt, Human
uggaagugaccacuuugcuauauacagauauu

SEQ ID NO: 520450 - RNA, 32 nt, Human
uggaagugaccagcucggcaccugaggagaca

SEQ ID NO: 520451 - RNA, 32 nt, Human
uggaagugagaggugaagccagcuggucuucu

SEQ ID NO: 520452 - RNA, 32 nt, Human
uggaagugagguuuuggagcagccuccagagg

SEQ ID NO: 520453 - RNA, 22 nt, Human
uggaagugcagcaggcagguga

SEQ ID NO: 520454 - RNA, 32 nt, Human
uggaagugccuguagucccagcuacucuggag

SEQ ID NO: 520455 - RNA, 32 nt, Human
uggaagugcuucuguuaagacagacauguagc

SEQ ID NO: 520456 - RNA, 32 nt, Human
uggaaguggacugacaugcucuucugacauca

SEQ ID NO: 520457 - RNA, 32 nt, Human
uggaagugucugcacuggggucaugcacugag

SEQ ID NO: 520458 - RNA, 32 nt, Human
uggaaguuaagaggggugagaaaacaaagaag

SEQ ID NO: 520459 - RNA, 32 nt, Human
uggaaguucauugaagagucugaaauuaggga

SEQ ID NO: 520460 - RNA, 32 nt, Human
uggaaguuccuucacaccaauucuccuccuga

SEQ ID NO: 520461 - RNA, 23 nt, Human
uggaaguugccacuccagugccc

SEQ ID NO: 520462 - RNA, 32 nt, Human
uggaaguugcucugggugagucaaugagugag

SEQ ID NO: 520463 - RNA, 32 nt, Human
uggaauaaaagauaaccguucaucuuaccuaa

SEQ ID NO: 520464 - RNA, 32 nt, Human
uggaauaaaaggagguuuuccugauguggugu

SEQ ID NO: 520465 - RNA, 32 nt, Human
uggaauaaauuaucuuuuucagucuccucuaa

SEQ ID NO: 520466 - RNA, 32 nt, Human
uggaauaagggcccgaugcagcauuuucuugc

SEQ ID NO: 520467 - RNA, 32 nt, Human
uggaauacaagcuugaaucugggaaacaagcu

SEQ ID NO: 520468 - RNA, 32 nt, Human
uggaauacacagagagaggcagcagcuugcuc

SEQ ID NO: 520469 - RNA, 32 nt, Human
uggaauacaguggugugaucauagcucacugc

SEQ ID NO: 520470 - RNA, 20 nt, Human
uggaauacccaugggcccuc

SEQ ID NO: 520471 - RNA, 32 nt, Human
uggaauacucauuuguggaugauucaacacag

SEQ ID NO: 520472 - RNA, 32 nt, Human
uggaauacugaaaagaaaucacuuccuugaaa

SEQ ID NO: 520473 - RNA, 32 nt, Human
uggaauacuugaauucuggcugugguguaaac

SEQ ID NO: 520474 - RNA, 32 nt, Human
uggaauagacagaguccagcugcccaaaccgu

SEQ ID NO: 520475 - RNA, 32 nt, Human
uggaauagcacaagggcaucacguacuucacg

SEQ ID NO: 520476 - RNA, 32 nt, Human
uggaauagcagagcaaaauauggauaaugaaa

SEQ ID NO: 520477 - RNA, 32 nt, Human
uggaauaggagcuugcucuguccacucuacac

SEQ ID NO: 520478 - RNA, 32 nt, Human
uggaauagggcugaagccagggagccaagugg

SEQ ID NO: 520479 - RNA, 20 nt, Human
uggaauaguaaacuaaagua

SEQ ID NO: 520480 - RNA, 22 nt, Human
uggaauauaaacuguacacaua

SEQ ID NO: 520481 - RNA, 32 nt, Human
uggaauauacaaacaauuucaaaaagaaaggu

SEQ ID NO: 520482 - RNA, 32 nt, Human
uggaauauacagguaauaaauaguuugaugua

SEQ ID NO: 520483 - RNA, 21 nt, Human
uggaauaucucuaaaaacaua

SEQ ID NO: 520484 - RNA, 31 nt, Human
uggaauaugaaaugccuacuuaaguacaguu

SEQ ID NO: 520485 - RNA, 32 nt, Human
uggaauaugagaggaugggaggcccuuuagag

SEQ ID NO: 520486 - RNA, 32 nt, Human
uggaauauuuccaauaaacacaaggugccgua

SEQ ID NO: 520487 - RNA, 32 nt, Human
uggaauauuucuggcuuuagaaguacaggagg

SEQ ID NO: 520488 - RNA, 32 nt, Human
uggaaucaaaggcuccuucgggugauuaccuc

SEQ ID NO: 520489 - RNA, 32 nt, Human
uggaaucaacacagacuugcucuccaaagaga

SEQ ID NO: 520490 - RNA, 32 nt, Human
uggaaucacagucaagacggaucaauaauaug

SEQ ID NO: 520491 - RNA, 32 nt, Human
uggaaucacauucuuagcacaccuacaccucu

SEQ ID NO: 520492 - RNA, 32 nt, Human
uggaaucacccagaggggugccuugcccuggc

SEQ ID NO: 520493 - RNA, 32 nt, Human
uggaaucaccuuucccccucccaugugcuuuc

SEQ ID NO: 520494 - RNA, 32 nt, Human
uggaaucacugcaaaucuaucugcucuucaga

SEQ ID NO: 520495 - RNA, 32 nt, Human
uggaaucagaagaccuaccuuugauuccuggc

SEQ ID NO: 520496 - RNA, 32 nt, Human
uggaaucagagagaagagguuugcauuguuaa

SEQ ID NO: 520497 - RNA, 32 nt, Human
uggaaucauccaguguuagagcauugggaccc

SEQ ID NO: 520498 - RNA, 32 nt, Human
uggaaucaucccugucauguaaauaggaaauc

SEQ ID NO: 520499 - RNA, 32 nt, Human
uggaaucaugacucccacaaugccuugggcac

SEQ ID NO: 520500 - RNA, 32 nt, Human
uggaauccagaacuuuccauuugcagugugca

SEQ ID NO: 520501 - RNA, 32 nt, Human
uggaauccccuaggagccuucagucugggaga

SEQ ID NO: 520502 - RNA, 32 nt, Human
uggaauccuaccaucccaggaggcaggcacag

SEQ ID NO: 520503 - RNA, 32 nt, Human
uggaauccuaguuugcuaaccugcauuugugu

SEQ ID NO: 520504 - RNA, 32 nt, Human
uggaauccuccucugcgaguugcugaaugcua

SEQ ID NO: 520505 - RNA, 32 nt, Human
uggaauccucuuugaaguucccccucucuuug

SEQ ID NO: 520506 - RNA, 24 nt, Human
uggaauccugugcucccucugugc

SEQ ID NO: 520507 - RNA, 32 nt, Human
uggaaucgauuuccucccaccuccgugugacg

SEQ ID NO: 520508 - RNA, 32 nt, Human
uggaaucgcuugaacccaggaggcggagguug

SEQ ID NO: 520509 - RNA, 32 nt, Human
uggaaucuaagcuguauauguguacauuugua

SEQ ID NO: 520510 - RNA, 32 nt, Human
uggaaucucacuggugccccaggagagcgaga

SEQ ID NO: 520511 - RNA, 32 nt, Human
uggaaucugaggcauccucugacuccacucaa

SEQ ID NO: 520512 - RNA, 32 nt, Human
uggaaucugcugcaguggcuaccucuaugccu

SEQ ID NO: 520513 - RNA, 32 nt, Human
uggaaucuuguucucuugcccaggcuggagug

SEQ ID NO: 520514 - RNA, 32 nt, Human
uggaaugaaccuaaauggugcauuaaaggaau

SEQ ID NO: 520515 - RNA, 32 nt, Human
uggaaugaaggcugcaggcacugguugcagac

SEQ ID NO: 520516 - RNA, 32 nt, Human
uggaaugaccagugauuucagcucucacuccc

SEQ ID NO: 520517 - RNA, 32 nt, Human
uggaaugacuacaggcaugggccaccacaccc

SEQ ID NO: 520518 - RNA, 32 nt, Human
uggaaugagcagucuuccauuccaacuuuagu

SEQ ID NO: 520519 - RNA, 32 nt, Human
uggaaugaggaaccucggucuuugaguuaugg

SEQ ID NO: 520520 - RNA, 32 nt, Human
uggaaugaggugaagggcaagugcuuucccag

SEQ ID NO: 520521 - RNA, 22 nt, Human
uggaaugaguugaucauuccag

SEQ ID NO: 520522 - RNA, 32 nt, Human
uggaaugauaaauacagccauacuuaaauaga

SEQ ID NO: 520523 - RNA, 32 nt, Human
uggaaugauggaccuuuuccccacuggauuag

SEQ ID NO: 520524 - RNA, 32 nt, Human
uggaaugauucacauccucucaaguuaggagg

SEQ ID NO: 520525 - RNA, 32 nt, Human
uggaaugcacugaauaaagcacgugcaaggac

SEQ ID NO: 520526 - RNA, 32 nt, Human
uggaaugcagagccuggccugccaagcuacaa

SEQ ID NO: 520527 - RNA, 32 nt, Human
uggaaugcaggcaagaggguuccaacucagag

SEQ ID NO: 520528 - RNA, 32 nt, Human
uggaaugcaguggcacaaucauagcucacucc

SEQ ID NO: 520529 - RNA, 32 nt, Human
uggaaugcaguggcacaaucuuagcucacuac

SEQ ID NO: 520530 - RNA, 32 nt, Human
uggaaugcaguggcacgaucuuggcucacugc

SEQ ID NO: 520531 - RNA, 32 nt, Human
uggaaugcaguggcaugaucucagcucacugc

SEQ ID NO: 520532 - RNA, 32 nt, Human
uggaaugcaguggcaugaucuuggcucacuga

SEQ ID NO: 520533 - RNA, 32 nt, Human
uggaaugcaguggcaugaucuuggcucacugc

SEQ ID NO: 520534 - RNA, 32 nt, Human
uggaaugcaguggcgagaucauagcucacugc

SEQ ID NO: 520535 - RNA, 32 nt, Human
uggaaugcaguggcgugaucucggcucacugc

SEQ ID NO: 520536 - RNA, 32 nt, Human
uggaaugcaguggcgugaucucggcuuuacug

SEQ ID NO: 520537 - RNA, 32 nt, Human
uggaaugcaguggcgugaucuuggcuuacugc

SEQ ID NO: 520538 - RNA, 32 nt, Human
uggaaugcaguggugcaaucauagcucacugc

SEQ ID NO: 520539 - RNA, 32 nt, Human
uggaaugcaguggugugaucuuggcucacugc

SEQ ID NO: 520540 - RNA, 32 nt, Human
uggaaugcccagcuuggguuucugagcuuuuc

SEQ ID NO: 520541 - RNA, 22 nt, Human
uggaaugccccauggggcucuc

SEQ ID NO: 520542 - RNA, 32 nt, Human
uggaaugccugaggguggagagagcuguggcu

SEQ ID NO: 520543 - RNA, 29 nt, Human
uggaaugcgaaacuuauuugcaaacuuuu

SEQ ID NO: 520544 - RNA, 32 nt, Human
uggaaugcguggucaacugucagcucucaggg

SEQ ID NO: 520545 - RNA, 32 nt, Human
uggaaugcguuuacagucauuguaauggaagc

SEQ ID NO: 520546 - RNA, 32 nt, Human
uggaaugcuguguccucucuucugucuccugc

SEQ ID NO: 520547 - RNA, 32 nt, Human
uggaauggacauccuguauaagcacugaaaaa

SEQ ID NO: 520548 - RNA, 32 nt, Human
uggaauggauugggccucaggccagguggucu

SEQ ID NO: 520549 - RNA, 32 nt, Human
uggaauggcugagccugguucugcaggggagg

SEQ ID NO: 520550 - RNA, 32 nt, Human
uggaaugggauuacuuuggcccagggaagccc

SEQ ID NO: 520551 - RNA, 32 nt, Human
uggaauggggagcaaugagaggagggagugag

SEQ ID NO: 520552 - RNA, 32 nt, Human
uggaauggggucugggcugcuggaaccuauuc

SEQ ID NO: 520553 - RNA, 32 nt, Human
uggaaugggugucccagcaagagaugcuggag

SEQ ID NO: 520554 - RNA, 32 nt, Human
uggaaugguaaagaauuuacuuaaacacaaag

SEQ ID NO: 520555 - RNA, 32 nt, Human
uggaaugguuacuguuuauacugugguauguu

SEQ ID NO: 520556 - RNA, 20 nt, Human
uggaauguaauuguggugaa

SEQ ID NO: 520557 - RNA, 32 nt, Human
uggaauguaguggagagaucauagcucacugu

SEQ ID NO: 520558 - RNA, 32 nt, Human
uggaaugugcgacaagcccaaauguuccaggg

SEQ ID NO: 520559 - RNA, 32 nt, Human
uggaaugugggaugguaacuuaucaacauauu

SEQ ID NO: 520560 - RNA, 32 nt, Human
uggaaugugguggcaugaacauagcucacugu

SEQ ID NO: 520561 - RNA, 32 nt, Human
uggaauguucagcagaacaccaccacugugac

SEQ ID NO: 520562 - RNA, 32 nt, Human
uggaauguugcuggauggauuacauagaugag

SEQ ID NO: 520563 - RNA, 32 nt, Human
uggaauuaaaagccacugacuguuauaaagua

SEQ ID NO: 520564 - RNA, 32 nt, Human
uggaauuacaauuuucaacugggaaacagaaa

SEQ ID NO: 520565 - RNA, 21 nt, Human
uggaauuacaggcaugcgcca

SEQ ID NO: 520566 - RNA, 32 nt, Human
uggaauuacuuaaauuuuaaagccugaaaauu

SEQ ID NO: 520567 - RNA, 32 nt, Human
uggaauuaugugccugaaguuuggaggcacau

SEQ ID NO: 520568 - RNA, 32 nt, Human
uggaauucagaagaaauuugaagaccagauca

SEQ ID NO: 520569 - RNA, 32 nt, Human
uggaauucagcaguuuuauccuggccuuguac

SEQ ID NO: 520570 - RNA, 32 nt, Human
uggaauucagcuauuuaucauaacucuugcua

SEQ ID NO: 520571 - RNA, 32 nt, Human
uggaauucauucucuucauuggcaguucuagu

SEQ ID NO: 520572 - RNA, 32 nt, Human
uggaauucauuuucuuuucguuucauguuuaa

SEQ ID NO: 520573 - RNA, 32 nt, Human
uggaauuccaggccccuccuguccuccugcuc

SEQ ID NO: 520574 - RNA, 32 nt, Human
uggaauucucacugugggcccauuccauggcu

SEQ ID NO: 520575 - RNA, 32 nt, Human
uggaauucuccucuuggucccagggcggggca

SEQ ID NO: 520576 - RNA, 23 nt, Human
uggaauugagaaucuggaccuua

SEQ ID NO: 520577 - RNA, 32 nt, Human
uggaauugaugucggucauaguuuccugaagc

SEQ ID NO: 520578 - RNA, 32 nt, Human
uggaauugcccagccagucacagcaguagcuc

SEQ ID NO: 520579 - RNA, 32 nt, Human
uggaauugcugcucucugagggagaggcugug

SEQ ID NO: 520580 - RNA, 32 nt, Human
uggaauuggaacuuauuuuaaauuguuggagu

SEQ ID NO: 520581 - RNA, 32 nt, Human
uggaauuggaagccugauaauuucgggaggcu

SEQ ID NO: 520582 - RNA, 32 nt, Human
uggaauuggaauuuccuaggaauaucuucuac

SEQ ID NO: 520583 - RNA, 32 nt, Human
uggaauuggauaaauauugcaaguggaugagu

SEQ ID NO: 520584 - RNA, 32 nt, Human
uggaauugggcaccgagaagaccugagaaaaa

SEQ ID NO: 520585 - RNA, 23 nt, Human
uggaauugucuuccccacccuca

SEQ ID NO: 520586 - RNA, 32 nt, Human
uggaauuuaaggcuugauguaaagaagaaccc

SEQ ID NO: 520587 - RNA, 21 nt, Human
uggaauuuaugaucuggguua

SEQ ID NO: 520588 - RNA, 32 nt, Human
uggaauuucacugcaaucccccguaucaucca

SEQ ID NO: 520589 - RNA, 32 nt, Human
uggaauuuccagauuuccugagagcuugguac

SEQ ID NO: 520590 - RNA, 32 nt, Human
uggaauuucucaucuucugccucccuuccuac

SEQ ID NO: 520591 - RNA, 32 nt, Human
uggaauuuguaaccucagcucugggagaggau

SEQ ID NO: 520592 - RNA, 32 nt, Human
uggaauuuuccacuucuggcaucacgucagug

SEQ ID NO: 520593 - RNA, 32 nt, Human
uggacaaaaagcuuuuucugaaaccaacuuuu

SEQ ID NO: 520594 - RNA, 32 nt, Human
uggacaaaauggcuggcuucaaaauauaguca

SEQ ID NO: 520595 - RNA, 32 nt, Human
uggacaaacaccaaauucagacuugccucugg

SEQ ID NO: 520596 - RNA, 32 nt, Human
uggacaaacccuucccccucucugggcacccu

SEQ ID NO: 520597 - RNA, 32 nt, Human
uggacaaagagagagaaagaaagaaggaagga

SEQ ID NO: 520598 - RNA, 32 nt, Human
uggacaaagcaggcuggggcaccaggugugca

SEQ ID NO: 520599 - RNA, 32 nt, Human
uggacaaaggcugggugcaguggcucaugccu

SEQ ID NO: 520600 - RNA, 18 nt, Human
uggacaaaguuaacagca

SEQ ID NO: 520601 - RNA, 32 nt, Human
uggacaaauccugggaaaaccugagacuagaa

SEQ ID NO: 520602 - RNA, 32 nt, Human
uggacaacaaagcaagaccccaucucuauuaa

SEQ ID NO: 520603 - RNA, 32 nt, Human
uggacaacacagugagaccucaucucuaucaa

SEQ ID NO: 520604 - RNA, 32 nt, Human
uggacaacagcugggagcucaacauggacuug

SEQ ID NO: 520605 - RNA, 32 nt, Human
uggacaacaguaacuucucagagcuguucucc

SEQ ID NO: 520606 - RNA, 32 nt, Human
uggacaacaguuacauagugucuugguagcac

SEQ ID NO: 520607 - RNA, 22 nt, Human
uggacaacauaaugagacccca

SEQ ID NO: 520608 - RNA, 32 nt, Human
uggacaacauagcaagaccccaucucuuaaaa

SEQ ID NO: 520609 - RNA, 32 nt, Human
uggacaacauagcaagauuccaucucuaaaaa

SEQ ID NO: 520610 - RNA, 32 nt, Human
uggacaacauagugagaccccgucucuacaaa

SEQ ID NO: 520611 - RNA, 32 nt, Human
uggacaacauggcaaaacccugucucuacaaa

SEQ ID NO: 520612 - RNA, 32 nt, Human
uggacaacauggcaaaacccugucucucccaa

SEQ ID NO: 520613 - RNA, 32 nt, Human
uggacaacauggcaagacccauuucuacaaaa

SEQ ID NO: 520614 - RNA, 32 nt, Human
uggacaacauggcgaaaaaccgccucuacaaa

SEQ ID NO: 520615 - RNA, 32 nt, Human
uggacaacauggcgagaccccaccucuacgaa

SEQ ID NO: 520616 - RNA, 32 nt, Human
uggacaacauggggagaccccaucucuaccgg

SEQ ID NO: 520617 - RNA, 32 nt, Human
uggacaacauggugaaaccccaucucuacgaa

SEQ ID NO: 520618 - RNA, 32 nt, Human
uggacaacauggugaaaccccaucucuuuaaa

SEQ ID NO: 520619 - RNA, 32 nt, Human
uggacaacauggugaaaccccgucucuacaaa

SEQ ID NO: 520620 - RNA, 32 nt, Human
uggacaacuaagugagacuccaucucuacaaa

SEQ ID NO: 520621 - RNA, 32 nt, Human
uggacaagaccccaagauucuucaaggauagg

SEQ ID NO: 520622 - RNA, 32 nt, Human
uggacaagaggugguugguggguggugaaggc

SEQ ID NO: 520623 - RNA, 32 nt, Human
uggacaaggaggugggggcagcugaguuagag

SEQ ID NO: 520624 - RNA, 32 nt, Human
uggacaaguacaacaguggcaaguacauggaa

SEQ ID NO: 520625 - RNA, 32 nt, Human
uggacaauagcugcuuucuucucuauccaaga

SEQ ID NO: 520626 - RNA, 32 nt, Human
uggacaauauagugaaaccccgucucuacuaa

SEQ ID NO: 520627 - RNA, 32 nt, Human
uggacaaucauaaacccuuuugcucagcgauu

SEQ ID NO: 520628 - RNA, 32 nt, Human
uggacaaucugcaaaauggagagaauacaaua

SEQ ID NO: 520629 - RNA, 32 nt, Human
uggacaaugaacacaugggccgccgcucaucc

SEQ ID NO: 520630 - RNA, 31 nt, Human
uggacaaugccacuccuccuguacaccuguc

SEQ ID NO: 520631 - RNA, 32 nt, Human
uggacaaugcuagugacugcacaauauuguga

SEQ ID NO: 520632 - RNA, 24 nt, Human
uggacacaacuacaaagaacagca

SEQ ID NO: 520633 - RNA, 32 nt, Human
uggacacaagagccacugcacaacagccaagg

SEQ ID NO: 520634 - RNA, 32 nt, Human
uggacacaaugacauaaguacucuccacagua

SEQ ID NO: 520635 - RNA, 32 nt, Human
uggacacaauuucacgaaguauacaaagcaac

SEQ ID NO: 520636 - RNA, 21 nt, Human
uggacacacacagcccuggag

SEQ ID NO: 520637 - RNA, 32 nt, Human
uggacacacagaugcacugcugugcugcuuuc

SEQ ID NO: 520638 - RNA, 24 nt, Human
uggacacacaugcagccccuggag

SEQ ID NO: 520639 - RNA, 32 nt, Human
uggacacacucgguuccucagaaagccaagcc

SEQ ID NO: 520640 - RNA, 32 nt, Human
uggacacacuugguuccucagaaagccaagcc

SEQ ID NO: 520641 - RNA, 19 nt, Human
uggacacagagaaacagca

SEQ ID NO: 520642 - RNA, 32 nt, Human
uggacacagagcugcagaguccugaacauccc

SEQ ID NO: 520643 - RNA, 32 nt, Human
uggacacagccauccuggaagacgccggugcc

SEQ ID NO: 520644 - RNA, 19 nt, Human
uggacacagcccacugcag

SEQ ID NO: 520645 - RNA, 32 nt, Human
uggacacaggaccaguuuggaaaagggucagg

SEQ ID NO: 520646 - RNA, 32 nt, Human
uggacacaguagggcuuggugaaugcugcuga

SEQ ID NO: 520647 - RNA, 32 nt, Human
uggacacauacuccugggccagaggcuaaaac

SEQ ID NO: 520648 - RNA, 32 nt, Human
uggacacauacuccugggccagaggcuauaaa

SEQ ID NO: 520649 - RNA, 32 nt, Human
uggacacauauggacacacauauggacacgug

SEQ ID NO: 520650 - RNA, 32 nt, Human
uggacacaugaggaagaggcugcucugggagc

SEQ ID NO: 520651 - RNA, 24 nt, Human
uggacaccagcugggucggucuca

SEQ ID NO: 520652 - RNA, 20 nt, Human
uggacacccaaauagcccca

SEQ ID NO: 520653 - RNA, 32 nt, Human
uggacacccacugugugccaggccccagcggg

SEQ ID NO: 520654 - RNA, 32 nt, Human
uggacacccagaauccacgaaaagcaacucgc

SEQ ID NO: 520655 - RNA, 22 nt, Human
uggacacccggccccagcucca

SEQ ID NO: 520656 - RNA, 32 nt, Human
uggacacccugacccccgaagcggggagggcc

SEQ ID NO: 520657 - RNA, 32 nt, Human
uggacaccucuccucugcugccauacucuccc

SEQ ID NO: 520658 - RNA, 18 nt, Human
uggacaccuguaauccca

SEQ ID NO: 520659 - RNA, 21 nt, Human
uggacaccuguaaucccagcu

SEQ ID NO: 520660 - RNA, 18 nt, Human
uggacaccuguaguccca

SEQ ID NO: 520661 - RNA, 21 nt, Human
uggacaccuguagucccagcu

SEQ ID NO: 520662 - RNA, 32 nt, Human
uggacaccuucacuccagcuggacaaagacuc

SEQ ID NO: 520663 - RNA, 32 nt, Human
uggacaccuucgucuccaucuggugguccagc

SEQ ID NO: 520664 - RNA, 32 nt, Human
uggacacgcauauggacacauauggacacaca

SEQ ID NO: 520665 - RNA, 32 nt, Human
uggacacggaggaggggguagagguggugugg

SEQ ID NO: 520666 - RNA, 32 nt, Human
uggacacggaucugcugggcucugccuuaaac

SEQ ID NO: 520667 - RNA, 32 nt, Human
uggacacguggacaaggcccaggcgcccucug

SEQ ID NO: 520668 - RNA, 18 nt, Human
uggacacuacaaaugcca

SEQ ID NO: 520669 - RNA, 31 nt, Human
uggacacucaauaaauguucauuggugaaaa

SEQ ID NO: 520670 - RNA, 22 nt, Human
uggacacuccccgguucuggcu

SEQ ID NO: 520671 - RNA, 32 nt, Human
uggacacucuguaucuagcuacucuggugggg

SEQ ID NO: 520672 - RNA, 32 nt, Human
uggacacugccucuggagccagccugacacca

SEQ ID NO: 520673 - RNA, 32 nt, Human
uggacacuggaagugccaggaggaaggaaggc

SEQ ID NO: 520674 - RNA, 32 nt, Human
uggacacuggcagccaauggggaggcggccuc

SEQ ID NO: 520675 - RNA, 32 nt, Human
uggacacuggccauucuggucaucucagucug

SEQ ID NO: 520676 - RNA, 32 nt, Human
uggacacuugcucccaucuacuuucuucucua

SEQ ID NO: 520677 - RNA, 21 nt, Human
uggacacuuuauaaucauuaa

SEQ ID NO: 520678 - RNA, 32 nt, Human
uggacacuuuucagaagucacugcaguauucc

SEQ ID NO: 520679 - RNA, 18 nt, Human
uggacacuuuucccaaua

SEQ ID NO: 520680 - RNA, 32 nt, Human
uggacagaaagcuucagaagacaagcugggcc

SEQ ID NO: 520681 - RNA, 18 nt, Human
uggacagaacagaauaau

SEQ ID NO: 520682 - RNA, 32 nt, Human
uggacagaagaaugcucuggugaggcaggugu

SEQ ID NO: 520683 - RNA, 32 nt, Human
uggacagaagccaugaggcagagccagaacca

SEQ ID NO: 520684 - RNA, 32 nt, Human
uggacagaagcccacuuaguuucuugggagca

SEQ ID NO: 520685 - RNA, 19 nt, Human
uggacagaauauugcugug

SEQ ID NO: 520686 - RNA, 32 nt, Human
uggacagacagcagugccugaugggugucccc

SEQ ID NO: 520687 - RNA, 32 nt, Human
uggacagaccugggcuaggaggcacauucaca

SEQ ID NO: 520688 - RNA, 32 nt, Human
uggacagagacaccugcacuuggaacuggacu

SEQ ID NO: 520689 - RNA, 32 nt, Human
uggacagagagccacagaaucaugagugcaga

SEQ ID NO: 520690 - RNA, 32 nt, Human
uggacagagauaugcccagagaugcauaugug

SEQ ID NO: 520691 - RNA, 20 nt, Human
uggacagagcaagaacagua

SEQ ID NO: 520692 - RNA, 32 nt, Human
uggacagagcacuggcugggcaucaggacuag

SEQ ID NO: 520693 - RNA, 32 nt, Human
uggacagagccccagucacugagcugcccacc

SEQ ID NO: 520694 - RNA, 32 nt, Human
uggacagagcccugggcaggcaguaggggagg

SEQ ID NO: 520695 - RNA, 32 nt, Human
uggacagagcuacagaccuauggggccuggaa

SEQ ID NO: 520696 - RNA, 20 nt, Human
uggacagaggcugcccucca

SEQ ID NO: 520697 - RNA, 32 nt, Human
uggacagaggggauugcuaaagugcugaaucg

SEQ ID NO: 520698 - RNA, 32 nt, Human
uggacagaggggcaggggagugccaagguugu

SEQ ID NO: 520699 - RNA, 18 nt, Human
uggacagagggggcgugg

SEQ ID NO: 520700 - RNA, 20 nt, Human
uggacagagggucucacgga

SEQ ID NO: 520701 - RNA, 32 nt, Human
uggacagaguacugcauugcaccaugagcaag

SEQ ID NO: 520702 - RNA, 32 nt, Human
uggacagaguccgaauccuacuccauccuuca

SEQ ID NO: 520703 - RNA, 19 nt, Human
uggacagagucuugcugug

SEQ ID NO: 520704 - RNA, 32 nt, Human
uggacagaguuccugggcagaggggaaagcag

SEQ ID NO: 520705 - RNA, 32 nt, Human
uggacagaugugagccaucuggagcagagggg

SEQ ID NO: 520706 - RNA, 32 nt, Human
uggacagauugauuuccagcugaauaaauugg

SEQ ID NO: 520707 - RNA, 32 nt, Human
uggacagcaucguccuggaauggccacggagu

SEQ ID NO: 520708 - RNA, 32 nt, Human
uggacagcauggcaaaacccuaucucuacaaa

SEQ ID NO: 520709 - RNA, 32 nt, Human
uggacagcaugguccucacacccagcucccug

SEQ ID NO: 520710 - RNA, 32 nt, Human
uggacagccagcccgcccgcccgucccuggcc

SEQ ID NO: 520711 - RNA, 22 nt, Human
uggacagcccagacacuucccu

SEQ ID NO: 520712 - RNA, 32 nt, Human
uggacagcgaaaggagagaaaccaccacaggc

SEQ ID NO: 520713 - RNA, 19 nt, Human
uggacagcgaagucugcgg

SEQ ID NO: 520714 - RNA, 32 nt, Human
uggacagcgcccgcuccugccugggugcacac

SEQ ID NO: 520715 - RNA, 22 nt, Human
uggacagcuccaccagcuccac

SEQ ID NO: 520716 - RNA, 18 nt, Human
uggacagcuccuagcaaa

SEQ ID NO: 520717 - RNA, 32 nt, Human
uggacagcucuggaaggugcucacaggugcac

SEQ ID NO: 520718 - RNA, 32 nt, Human
uggacagcuuuuccuucuucuccagugucuac

SEQ ID NO: 520719 - RNA, 32 nt, Human
uggacaggagguucugguccugccuuuggggc

SEQ ID NO: 520720 - RNA, 20 nt, Human
uggacaggauccaaauagca

SEQ ID NO: 520721 - RNA, 32 nt, Human
uggacaggcaucagccuacuaacaucauaugg

SEQ ID NO: 520722 - RNA, 32 nt, Human
uggacaggccagcauccccagcagguucuggg

SEQ ID NO: 520723 - RNA, 32 nt, Human
uggacaggcugcagagggcuccagguucuggg

SEQ ID NO: 520724 - RNA, 32 nt, Human
uggacaggcuggcauuccccagccucucugcc

SEQ ID NO: 520725 - RNA, 32 nt, Human
uggacagggacagcuggcuacagggaaucaaa

SEQ ID NO: 520726 - RNA, 22 nt, Human
uggacagggaggugacaagucu

SEQ ID NO: 520727 - RNA, 19 nt, Human
uggacagggcugggccagc

SEQ ID NO: 520728 - RNA, 32 nt, Human
uggacaggggagaaacgaaaaccacaaaaaga

SEQ ID NO: 520729 - RNA, 32 nt, Human
uggacagggguggucagagagaggaaggggca

SEQ ID NO: 520730 - RNA, 32 nt, Human
uggacagggugugggcccggggagacaguugu

SEQ ID NO: 520731 - RNA, 22 nt, Human
uggacagguacacccaagcaca

SEQ ID NO: 520732 - RNA, 32 nt, Human
uggacaggugugccgacagaaggaaccagcgu

SEQ ID NO: 520733 - RNA, 32 nt, Human
uggacaguacaaaaacaaagcugcucuuguua

SEQ ID NO: 520734 - RNA, 18 nt, Human
uggacaguacccagcaag

SEQ ID NO: 520735 - RNA, 21 nt, Human
uggacaguaggauucagcaga

SEQ ID NO: 520736 - RNA, 32 nt, Human
uggacaguaucagucuugaucuaaauuguagg

SEQ ID NO: 520737 - RNA, 32 nt, Human
uggacagucagaagcauuggaagaggaaaaug

SEQ ID NO: 520738 - RNA, 32 nt, Human
uggacagucagcaaggaauugucucccagugc

SEQ ID NO: 520739 - RNA, 32 nt, Human
uggacagucugagccaagucccuccugcugga

SEQ ID NO: 520740 - RNA, 32 nt, Human
uggacagugagauaucgggaaaccccaugaaa

SEQ ID NO: 520741 - RNA, 32 nt, Human
uggacagugaggucacaguccacccacccucu

SEQ ID NO: 520742 - RNA, 19 nt, Human
uggacagugcuguugaaga

SEQ ID NO: 520743 - RNA, 32 nt, Human
uggacagugggaugugguguuccacaugugcc

SEQ ID NO: 520744 - RNA, 32 nt, Human
uggacagugggcuuuucaugccucucuuacug

SEQ ID NO: 520745 - RNA, 32 nt, Human
uggacaguguauccuaacaagucccaugucug

SEQ ID NO: 520746 - RNA, 32 nt, Human
uggacagugugggcgcucucccuaccuugccu

SEQ ID NO: 520747 - RNA, 21 nt, Human
uggacaguuagguugauucca

SEQ ID NO: 520748 - RNA, 32 nt, Human
uggacaguugcagagaaacacaggcuugucgu

SEQ ID NO: 520749 - RNA, 32 nt, Human
uggacauaaaacacagaugaggaaagggcuuc

SEQ ID NO: 520750 - RNA, 21 nt, Human
uggacauaaaggcucuuuuca

SEQ ID NO: 520751 - RNA, 22 nt, Human
uggacauaagcucuuucuuucc

SEQ ID NO: 520752 - RNA, 32 nt, Human
uggacauaagugcuggaaaagacuuaaugaug

SEQ ID NO: 520753 - RNA, 32 nt, Human
uggacauacuucuaguuguauucuccauacua

SEQ ID NO: 520754 - RNA, 32 nt, Human
uggacauagcacagaugaaccaaaaauguauu

SEQ ID NO: 520755 - RNA, 21 nt, Human
uggacauaggaaggucccaag

SEQ ID NO: 520756 - RNA, 32 nt, Human
uggacauaguaaaauuuuucuccauaaauaau

SEQ ID NO: 520757 - RNA, 32 nt, Human
uggacauauaucaggaagcuacauacaucaaa

SEQ ID NO: 520758 - RNA, 32 nt, Human
uggacauaugcuggcugugugggguagaggga

SEQ ID NO: 520759 - RNA, 32 nt, Human
uggacaucaagugccuugcauagagcccccuc

SEQ ID NO: 520760 - RNA, 20 nt, Human
uggacaucaccgccccugga

SEQ ID NO: 520761 - RNA, 32 nt, Human
uggacaucagcucuucauuaugcagcuucccu

SEQ ID NO: 520762 - RNA, 32 nt, Human
uggacauccagacgacacagauuuuauccaaa

SEQ ID NO: 520763 - RNA, 32 nt, Human
uggacaucccggcaggagaguccuccaagggg

SEQ ID NO: 520764 - RNA, 32 nt, Human
uggacauccuggagcagaaacagucccauuuu

SEQ ID NO: 520765 - RNA, 19 nt, Human
uggacaucuaccagcccac

SEQ ID NO: 520766 - RNA, 32 nt, Human
uggacaucuccaggaaaccaggccaucugggc

SEQ ID NO: 520767 - RNA, 32 nt, Human
uggacaucucuaguguagcugccacauugauu

SEQ ID NO: 520768 - RNA, 32 nt, Human
uggacaucucuuccucucccaggaagcuuaca

SEQ ID NO: 520769 - RNA, 32 nt, Human
uggacaugagcugagggcacggucgcgggcgg

SEQ ID NO: 520770 - RNA, 21 nt, Human
uggacaugcgacuggggagug

SEQ ID NO: 520771 - RNA, 22 nt, Human
uggacaugcgcaaagggcccuc

SEQ ID NO: 520772 - RNA, 32 nt, Human
uggacaugcuagaggugugaggcugcagaaca

SEQ ID NO: 520773 - RNA, 32 nt, Human
uggacaugcugcagagggcugaaggaggcggg

SEQ ID NO: 520774 - RNA, 32 nt, Human
uggacauggacucugugguacuaaauggugau

SEQ ID NO: 520775 - RNA, 32 nt, Human
uggacaugggagaaagggaugggagccacagu

SEQ ID NO: 520776 - RNA, 20 nt, Human
uggacaugggugcccuccac

SEQ ID NO: 520777 - RNA, 24 nt, Human
uggacaugguggcacgugccugua

SEQ ID NO: 520778 - RNA, 24 nt, Human
uggacaugguggcucaugccugua

SEQ ID NO: 520779 - RNA, 24 nt, Human
uggacauggugguggguaccugua

SEQ ID NO: 520780 - RNA, 32 nt, Human
uggacauguaaugucacaucuuuguggagugu

SEQ ID NO: 520781 - RNA, 32 nt, Human
uggacaugugccuucaggguuccuccggggcc

SEQ ID NO: 520782 - RNA, 32 nt, Human
uggacauguggguggagaagggaggguggcca

SEQ ID NO: 520783 - RNA, 32 nt, Human
uggacauuauugaguuuguggaacccugccuc

SEQ ID NO: 520784 - RNA, 20 nt, Human
uggacauuggaaccuuggag

SEQ ID NO: 520785 - RNA, 21 nt, Human
uggacauuuaaggucuuucca

SEQ ID NO: 520786 - RNA, 32 nt, Human
uggacauuuaaugccaaaaccaggaauauccg

SEQ ID NO: 520787 - RNA, 32 nt, Human
uggacauuugggggccacugcagccccaccgc

SEQ ID NO: 520788 - RNA, 22 nt, Human
uggaccaaaccuucugcacacu

SEQ ID NO: 520789 - RNA, 23 nt, Human
uggaccaaaggacugcccuccac

SEQ ID NO: 520790 - RNA, 32 nt, Human
uggaccaagauguccagaauuauucuugagca

SEQ ID NO: 520791 - RNA, 32 nt, Human
uggaccaagggagccagucuugggcgcuggag

SEQ ID NO: 520792 - RNA, 32 nt, Human
uggaccacagaguggaccugccacacgcagac

SEQ ID NO: 520793 - RNA, 32 nt, Human
uggaccaccagccugggcgcaguggugcuggg

SEQ ID NO: 520794 - RNA, 32 nt, Human
uggaccacccaucuugagccccuuggaguucu

SEQ ID NO: 520795 - RNA, 32 nt, Human
uggaccaccccacuugcugccagccugucagu

SEQ ID NO: 520796 - RNA, 32 nt, Human
uggaccaccuggggcucccugaggauucacgg

SEQ ID NO: 520797 - RNA, 22 nt, Human
uggaccacggggcaccaaucca

SEQ ID NO: 520798 - RNA, 32 nt, Human
uggaccacuaccugcagcuaagcagugagcag

SEQ ID NO: 520799 - RNA, 32 nt, Human
uggaccacuauacuccagccuggcaacagagc

SEQ ID NO: 520800 - RNA, 32 nt, Human
uggaccacugcucuccagccugggcaacagag

SEQ ID NO: 520801 - RNA, 32 nt, Human
uggaccagaagcagggaggguguggagaaggc

SEQ ID NO: 520802 - RNA, 32 nt, Human
uggaccagagaauuccugcaugugcaaguuug

SEQ ID NO: 520803 - RNA, 32 nt, Human
uggaccagaucugucccaguccuggaugccuc

SEQ ID NO: 520804 - RNA, 32 nt, Human
uggaccagcagcucugacucacacacgcacag

SEQ ID NO: 520805 - RNA, 32 nt, Human
uggaccagcaugccgguggggugcaggcgcca

SEQ ID NO: 520806 - RNA, 30 nt, Human
uggaccagccucuccacucaugugacucuu

SEQ ID NO: 520807 - RNA, 32 nt, Human
uggaccagccugaaaugaucuugaaggaagcc

SEQ ID NO: 520808 - RNA, 32 nt, Human
uggaccagccugcugcggguccuggccagggg

SEQ ID NO: 520809 - RNA, 20 nt, Human
uggaccaggagcagcaccaa

SEQ ID NO: 520810 - RNA, 32 nt, Human
uggaccaggaugaagagggaucaaagagauaa

SEQ ID NO: 520811 - RNA, 32 nt, Human
uggaccagggucagcaaagugcagccuacaag

SEQ ID NO: 520812 - RNA, 32 nt, Human
uggaccaggugggacagauuagcugugcccuu

SEQ ID NO: 520813 - RNA, 32 nt, Human
uggaccaguagucacuguuaaauguaaaagua

SEQ ID NO: 520814 - RNA, 31 nt, Human
uggaccagugagaggagagggcuggggcgcu

SEQ ID NO: 520815 - RNA, 32 nt, Human
uggaccaguucuuguugcuauuguacaaguua

SEQ ID NO: 520816 - RNA, 22 nt, Human
uggaccauagaaaauauccaga

SEQ ID NO: 520817 - RNA, 20 nt, Human
uggaccaucuguacagacca

SEQ ID NO: 520818 - RNA, 32 nt, Human
uggaccauggcaagauuuccucauucaucaaa

SEQ ID NO: 520819 - RNA, 31 nt, Human
uggaccauggugcugcucugggagccugcag

SEQ ID NO: 520820 - RNA, 32 nt, Human
uggaccauuucugaaaccugucccacaaaaag

SEQ ID NO: 520821 - RNA, 32 nt, Human
uggacccaaggcagauguccaggcuuuauccu

SEQ ID NO: 520822 - RNA, 20 nt, Human
uggacccaccucccuugcca

SEQ ID NO: 520823 - RNA, 32 nt, Human
uggacccacuacccuucuccuuuccuucccag

SEQ ID NO: 520824 - RNA, 32 nt, Human
uggacccagaacucaaagucagccccaaggaa

SEQ ID NO: 520825 - RNA, 32 nt, Human
uggacccagccccuggagacaccauucacuuu

SEQ ID NO: 520826 - RNA, 32 nt, Human
uggacccaggaggaguggcaggugguggcggg

SEQ ID NO: 520827 - RNA, 32 nt, Human
uggacccaggaggcagagcuugcagugagccg

SEQ ID NO: 520828 - RNA, 23 nt, Human
uggacccaggaggucucugcaga

SEQ ID NO: 520829 - RNA, 32 nt, Human
uggacccaggcagcagccacagaggggcccau

SEQ ID NO: 520830 - RNA, 32 nt, Human
uggacccagggugggguggggcagggcgggcg

SEQ ID NO: 520831 - RNA, 32 nt, Human
uggacccagugacgaguggcccuuguaagggu

SEQ ID NO: 520832 - RNA, 32 nt, Human
uggacccaguggucaauccugcagagaauucg

SEQ ID NO: 520833 - RNA, 32 nt, Human
uggacccaguucagugagguucuuggguuuug

SEQ ID NO: 520834 - RNA, 32 nt, Human
uggacccauccagcugagugaacccagggugg

SEQ ID NO: 520835 - RNA, 21 nt, Human
uggacccauccucccugcuca

SEQ ID NO: 520836 - RNA, 32 nt, Human
uggaccccagaaccccagacaagggggcaggc

SEQ ID NO: 520837 - RNA, 32 nt, Human
uggaccccagaagcgugcugugguguggacug

SEQ ID NO: 520838 - RNA, 32 nt, Human
uggaccccagccccuugcaccuccaugccagg

SEQ ID NO: 520839 - RNA, 32 nt, Human
uggacccccaggaggcuggugccagggagaca

SEQ ID NO: 520840 - RNA, 24 nt, Human
uggacccccuacuacuauuuguca

SEQ ID NO: 520841 - RNA, 32 nt, Human
uggacccccugccucucagugccccugcccua

SEQ ID NO: 520842 - RNA, 23 nt, Human
uggaccccgagauggugcugucu

SEQ ID NO: 520843 - RNA, 32 nt, Human
uggaccccgcagcugcgugggcagccgacaca

SEQ ID NO: 520844 - RNA, 19 nt, Human
uggaccccgccucccagga

SEQ ID NO: 520845 - RNA, 32 nt, Human
uggaccccgcguuccuccucccugccgguccc

SEQ ID NO: 520846 - RNA, 32 nt, Human
uggaccccgguggaugaccugccccucucccc

SEQ ID NO: 520847 - RNA, 32 nt, Human
uggaccccgugccucgaaacaggcaguguugu

SEQ ID NO: 520848 - RNA, 32 nt, Human
uggaccccucuccucugcugccauacuccccc

SEQ ID NO: 520849 - RNA, 32 nt, Human
uggaccccuucaaguugagaacuggucagggc

SEQ ID NO: 520850 - RNA, 32 nt, Human
uggacccgcggggcccggcgccccagacucug

SEQ ID NO: 520851 - RNA, 32 nt, Human
uggacccgcugcugccccagggggcgggccug

SEQ ID NO: 520852 - RNA, 32 nt, Human
uggacccggcucagggcagguggaggagcugg

SEQ ID NO: 520853 - RNA, 32 nt, Human
uggacccgggaggcagagguugcagugagccg

SEQ ID NO: 520854 - RNA, 32 nt, Human
uggacccgggaggcggagguugcagugagccg

SEQ ID NO: 520855 - RNA, 32 nt, Human
uggacccggggaggggaggcugaggcguuugg

SEQ ID NO: 520856 - RNA, 32 nt, Human
uggacccgugagcucaggagccucagacgccu

SEQ ID NO: 520857 - RNA, 32 nt, Human
uggacccucacugcugucucugccuccuuucu

SEQ ID NO: 520858 - RNA, 32 nt, Human
uggacccucagugcccuggcaacagcucugug

SEQ ID NO: 520859 - RNA, 22 nt, Human
uggacccuccaguucugccaca

SEQ ID NO: 520860 - RNA, 32 nt, Human
uggacccuccauuccuccuuucugagcccaac

SEQ ID NO: 520861 - RNA, 32 nt, Human
uggacccucccugagcaacuuccugagcagga

SEQ ID NO: 520862 - RNA, 32 nt, Human
uggacccucuaggucuugggggaagagcuggg

SEQ ID NO: 520863 - RNA, 22 nt, Human
uggacccucugccaggcuccac

SEQ ID NO: 520864 - RNA, 32 nt, Human
uggacccugcuuccuguguaccacugaggggc

SEQ ID NO: 520865 - RNA, 32 nt, Human
uggacccugcuucugugcaccugcugcaggcu

SEQ ID NO: 520866 - RNA, 32 nt, Human
uggacccuggagaaggaggccaggagccagcc

SEQ ID NO: 520867 - RNA, 32 nt, Human
uggacccuggcuuaggggugacucauuucuac

SEQ ID NO: 520868 - RNA, 32 nt, Human
uggacccuggggaccccgucaggagcagguga

SEQ ID NO: 520869 - RNA, 19 nt, Human
uggacccuucccacuacau

SEQ ID NO: 520870 - RNA, 23 nt, Human
uggacccuucccagggaucauug

SEQ ID NO: 520871 - RNA, 32 nt, Human
uggaccgagcccuuugaagaauacucagaagu

SEQ ID NO: 520872 - RNA, 32 nt, Human
uggaccgggugggugaggcugccccucccucc

SEQ ID NO: 520873 - RNA, 32 nt, Human
uggaccuacucucccuccuccccaccauuccu

SEQ ID NO: 520874 - RNA, 32 nt, Human
uggaccuagaagcacacgggaccaggcugggc

SEQ ID NO: 520875 - RNA, 32 nt, Human
uggaccuaggagguggagguugcagugagcug

SEQ ID NO: 520876 - RNA, 32 nt, Human
uggaccuaugaacaaaagaaggcucccuggag

SEQ ID NO: 520877 - RNA, 32 nt, Human
uggaccucagcccugggugcugggccuugaag

SEQ ID NO: 520878 - RNA, 23 nt, Human
uggaccucagguuuccaucugua

SEQ ID NO: 520879 - RNA, 32 nt, Human
uggaccucauacucuucuguuuuccauuccac

SEQ ID NO: 520880 - RNA, 32 nt, Human
uggaccucaucacucugacucugccuucuugg

SEQ ID NO: 520881 - RNA, 32 nt, Human
uggaccucccaaagcgcugggauuacaggcuc

SEQ ID NO: 520882 - RNA, 32 nt, Human
uggaccucccaaagugcuggaauuacaggcgu

SEQ ID NO: 520883 - RNA, 32 nt, Human
uggaccucugaacaaaaagauuaucuuccgcu

SEQ ID NO: 520884 - RNA, 32 nt, Human
uggaccugaaggagcggguagagaaacuagag

SEQ ID NO: 520885 - RNA, 32 nt, Human
uggaccugagggcugaagccugccccaccucc

SEQ ID NO: 520886 - RNA, 32 nt, Human
uggaccugaugaagaaugacacgaggauacac

SEQ ID NO: 520887 - RNA, 32 nt, Human
uggaccugcaggacgagggucagggcucagcc

SEQ ID NO: 520888 - RNA, 32 nt, Human
uggaccugcuucugucagggggacagccagug

SEQ ID NO: 520889 - RNA, 32 nt, Human
uggaccugcuuuggcggaaguugguugacaag

SEQ ID NO: 520890 - RNA, 21 nt, Human
uggaccuggaaucccagcaga

SEQ ID NO: 520891 - RNA, 32 nt, Human
uggaccuggagagaggaugaaagggaauagga

SEQ ID NO: 520892 - RNA, 22 nt, Human
uggaccuggccagcagccgccu

SEQ ID NO: 520893 - RNA, 32 nt, Human
uggaccugggaggaagcuggagaaaagaugcc

SEQ ID NO: 520894 - RNA, 32 nt, Human
uggaccugggaggaaggaaggaccugggagca

SEQ ID NO: 520895 - RNA, 32 nt, Human
uggaccugggaggcagagguuucagugagccc

SEQ ID NO: 520896 - RNA, 32 nt, Human
uggaccugggaggcggagcuugcagugagcug

SEQ ID NO: 520897 - RNA, 32 nt, Human
uggaccugggagguggagguugcagugagcug

SEQ ID NO: 520898 - RNA, 32 nt, Human
uggaccugggagguggagguugcggugagcug

SEQ ID NO: 520899 - RNA, 32 nt, Human
uggaccugggccuauuaguccaugaagaagcu

SEQ ID NO: 520900 - RNA, 32 nt, Human
uggaccugguacugaggagcaagacuguccag

SEQ ID NO: 520901 - RNA, 32 nt, Human
uggaccuggucccaggcucagugaggagaugg

SEQ ID NO: 520902 - RNA, 32 nt, Human
uggaccuggugcagcugggaagcuugggacuc

SEQ ID NO: 520903 - RNA, 32 nt, Human
uggaccuguggcuucucugaggcccuugagua

SEQ ID NO: 520904 - RNA, 32 nt, Human
uggaccuguguacccacccaaggcuaaaggca

SEQ ID NO: 520905 - RNA, 18 nt, Human
uggaccuuaggccuuccu

SEQ ID NO: 520906 - RNA, 32 nt, Human
uggaccuuuaccucgcugccuagauuccgagg

SEQ ID NO: 520907 - RNA, 32 nt, Human
uggaccuuucccccucucccugcggccuuugu

SEQ ID NO: 520908 - RNA, 32 nt, Human
uggaccuuucuuucucugcuuucuugacuuaa

SEQ ID NO: 520909 - RNA, 32 nt, Human
uggaccuuuucgagaggcuccucuguguucau

SEQ ID NO: 520910 - RNA, 32 nt, Human
uggacgacaugaucaaugguggcaggaagcag

SEQ ID NO: 520911 - RNA, 32 nt, Human
uggacgacccuccgcugccacugaugagccag

SEQ ID NO: 520912 - RNA, 19 nt, Human
uggacgaccugcucucuac

SEQ ID NO: 520913 - RNA, 32 nt, Human
uggacgacgcuggcggcccagccugggcaggu

SEQ ID NO: 520914 - RNA, 32 nt, Human
uggacgacgcuugcggcccagccugggcaggu

SEQ ID NO: 520915 - RNA, 32 nt, Human
uggacgagcucaucaucaccgacuggcuggag

SEQ ID NO: 520916 - RNA, 32 nt, Human
uggacgagcuccuggcgcgccugcugcagggg

SEQ ID NO: 520917 - RNA, 32 nt, Human
uggacgauaauggagaaaaagcagggaugcua

SEQ ID NO: 520918 - RNA, 22 nt, Human
uggacgaucucagcucacugca

SEQ ID NO: 520919 - RNA, 32 nt, Human
uggacgaugggccuguuaccagcugggacuua

SEQ ID NO: 520920 - RNA, 32 nt, Human
uggacgcauuuuuauacauaggguaagcgcag

SEQ ID NO: 520921 - RNA, 20 nt, Human
uggacgccucucccccggag

SEQ ID NO: 520922 - RNA, 18 nt, Human
uggacgccuguaauccca

SEQ ID NO: 520923 - RNA, 21 nt, Human
uggacgccuguaaucccagcu

SEQ ID NO: 520924 - RNA, 32 nt, Human
uggacgccuguaaucccagcuacuugggaggc

SEQ ID NO: 520925 - RNA, 24 nt, Human
uggacgcgguggcucacgccugua

SEQ ID NO: 520926 - RNA, 32 nt, Human
uggacgcucgcgaggagcaggcugcagguuuc

SEQ ID NO: 520927 - RNA, 32 nt, Human
uggacgcugcagcuggaacuagcgugccaagu

SEQ ID NO: 520928 - RNA, 32 nt, Human
uggacgcuuugucccaaggcguuucuugcugc

SEQ ID NO: 520929 - RNA, 32 nt, Human
uggacgggagacagagugaagcaucaaccuac

SEQ ID NO: 520930 - RNA, 32 nt, Human
uggacgggagugucuggggcagguguggcaau

SEQ ID NO: 520931 - RNA, 32 nt, Human
uggacgggaugaccuccagaagucccuucaau

SEQ ID NO: 520932 - RNA, 32 nt, Human
uggacgggccaaggagacuccgggcuugagcc

SEQ ID NO: 520933 - RNA, 32 nt, Human
uggacggggcugggaaaaugaauaagaauuau

SEQ ID NO: 520934 - RNA, 32 nt, Human
uggacggggcuggggccaaggcccuggagauc

SEQ ID NO: 520935 - RNA, 32 nt, Human
uggacgguccgcagaagcagaccucauugauu

SEQ ID NO: 520936 - RNA, 21 nt, Human
uggacggugagaucucacaga

SEQ ID NO: 520937 - RNA, 32 nt, Human
uggacguagcacugucauguggcauuuggaaa

SEQ ID NO: 520938 - RNA, 32 nt, Human
uggacguaguuuagcuuaaacuuuauguuaga

SEQ ID NO: 520939 - RNA, 32 nt, Human
uggacgucagguccagccugccccggcagccc

SEQ ID NO: 520940 - RNA, 21 nt, Human
uggacgugcaaagcccuugga

SEQ ID NO: 520941 - RNA, 32 nt, Human
uggacgugcagagacugucugcgcagccccca

SEQ ID NO: 520942 - RNA, 32 nt, Human
uggacgugcguucugccuuccuuguuaauuuu

SEQ ID NO: 520943 - RNA, 24 nt, Human
uggacguggcggcucuugccugua

SEQ ID NO: 520944 - RNA, 32 nt, Human
uggacgugggagaguggagcacuaccuccuca

SEQ ID NO: 520945 - RNA, 32 nt, Human
uggacgugggcccagaggcccacagggacgcc

SEQ ID NO: 520946 - RNA, 24 nt, Human
uggacgugguggcaugugcuugua

SEQ ID NO: 520947 - RNA, 24 nt, Human
uggacgugguggcucagccuugua

SEQ ID NO: 520948 - RNA, 24 nt, Human
uggacgugguggcuuacgccugua

SEQ ID NO: 520949 - RNA, 21 nt, Human
uggacguggugguucaugccu

SEQ ID NO: 520950 - RNA, 32 nt, Human
uggacguguagucccagcuacuuaggaggcug

SEQ ID NO: 520951 - RNA, 32 nt, Human
uggacguuauuugaugaacagaaauaaauuga

SEQ ID NO: 520952 - RNA, 32 nt, Human
uggacguugauuuggagccagcacuuuauuuc

SEQ ID NO: 520953 - RNA, 32 nt, Human
uggacguugccuggcccugccucgaugccucu

SEQ ID NO: 520954 - RNA, 32 nt, Human
uggacguuuccagauugugaauaacucuguga

SEQ ID NO: 520955 - RNA, 21 nt, Human
uggacuaacccgccgccacca

SEQ ID NO: 520956 - RNA, 22 nt, Human
uggacuaagauuuagaauauag

SEQ ID NO: 520957 - RNA, 32 nt, Human
uggacuaauacaucuggcaauacuugaagugg

SEQ ID NO: 520958 - RNA, 32 nt, Human
uggacuaaugacacaaauacuuuaggucgccg

SEQ ID NO: 520959 - RNA, 31 nt, Human
uggacuaauguugaaagaugggauggauugg

SEQ ID NO: 520960 - RNA, 32 nt, Human
uggacuacagcuuauucagccugggaaaaaua

SEQ ID NO: 520961 - RNA, 32 nt, Human
uggacuacaggcaauccuggccuuggcaggga

SEQ ID NO: 520962 - RNA, 32 nt, Human
uggacuacaguuaucggcaggcugugcggcgc

SEQ ID NO: 520963 - RNA, 32 nt, Human
uggacuacauggugaaacuccaucucuacuaa

SEQ ID NO: 520964 - RNA, 32 nt, Human
uggacuaccuuuccucaccucuaucucucuca

SEQ ID NO: 520965 - RNA, 32 nt, Human
uggacuacuucuacgaccugcucuagugggca

SEQ ID NO: 520966 - RNA, 32 nt, Human
uggacuagauuuaacaaaucagcuaugugguu

SEQ ID NO: 520967 - RNA, 32 nt, Human
uggacuagcuuggguuggugaucaugucuccu

SEQ ID NO: 520968 - RNA, 32 nt, Human
uggacuaggagugggaagggccuggacacuca

SEQ ID NO: 520969 - RNA, 32 nt, Human
uggacuaggcugguauauacauauuugaaaag

SEQ ID NO: 520970 - RNA, 32 nt, Human
uggacuagugagcagaggaugagaggacuacc

SEQ ID NO: 520971 - RNA, 21 nt, Human
uggacuagugcaguccuugcc

SEQ ID NO: 520972 - RNA, 32 nt, Human
uggacuauauaauaauauagcaggugcucaau

SEQ ID NO: 520973 - RNA, 24 nt, Human
uggacuauaucaguuuuuggaaag

SEQ ID NO: 520974 - RNA, 32 nt, Human
uggacuauauuuuaaaggggaaucugggguca

SEQ ID NO: 520975 - RNA, 31 nt, Human
uggacuaucaauaaauacaaauugaauauuc

SEQ ID NO: 520976 - RNA, 21 nt, Human
uggacuauccucuuuggaaag

SEQ ID NO: 520977 - RNA, 32 nt, Human
uggacuauggacauccagcagaaaagaggaug

SEQ ID NO: 520978 - RNA, 32 nt, Human
uggacuauuucagacaaccagguuccgacagu

SEQ ID NO: 520979 - RNA, 32 nt, Human
uggacucaagcaguccucccaccucagccucc

SEQ ID NO: 520980 - RNA, 32 nt, Human
uggacucaagugaccaaaaccuugcuuggauu

SEQ ID NO: 520981 - RNA, 32 nt, Human
uggacucaagugauccucccaccucagccucc

SEQ ID NO: 520982 - RNA, 32 nt, Human
uggacucaauggccugggagguuugucccagc

SEQ ID NO: 520983 - RNA, 32 nt, Human
uggacucacuuccugcccaccuggugagggga

SEQ ID NO: 520984 - RNA, 32 nt, Human
uggacucagaaaaacacacaccaccuuuuggc

SEQ ID NO: 520985 - RNA, 21 nt, Human
uggacucagcagcaacaccaa

SEQ ID NO: 520986 - RNA, 21 nt, Human
uggacucagcaggaacaccaa

SEQ ID NO: 520987 - RNA, 32 nt, Human
uggacucaggaggcggaguuugcagugagcug

SEQ ID NO: 520988 - RNA, 32 nt, Human
uggacuccaaagguggagguugcaguaagcug

SEQ ID NO: 520989 - RNA, 23 nt, Human
uggacuccaagcuguaacuuccu

SEQ ID NO: 520990 - RNA, 32 nt, Human
uggacuccagagguggagguugcaguaagcug

SEQ ID NO: 520991 - RNA, 32 nt, Human
uggacuccagccugggcgacagagugagacuc

SEQ ID NO: 520992 - RNA, 32 nt, Human
uggacuccagccugucccucuuagcacucuag

SEQ ID NO: 520993 - RNA, 26 nt, Human
uggacuccagggugccuccaccugac

SEQ ID NO: 520994 - RNA, 21 nt, Human
uggacuccagguuccuugccu

SEQ ID NO: 520995 - RNA, 23 nt, Human
uggacuccagugugacuuugcuu

SEQ ID NO: 520996 - RNA, 32 nt, Human
uggacuccaguuuuggccccucucacacagag

SEQ ID NO: 520997 - RNA, 32 nt, Human
uggacucccagccugggugacagagcgagacu

SEQ ID NO: 520998 - RNA, 24 nt, Human
uggacucccgugucccuccgcgca

SEQ ID NO: 520999 - RNA, 21 nt, Human
uggacucccuccuugaccaaa

SEQ ID NO: 521000 - RNA, 32 nt, Human
uggacucccucuuccucccauuccaccuccac

SEQ ID NO: 521001 - RNA, 32 nt, Human
uggacuccuaccuaucugugcauuuuaccggc

SEQ ID NO: 521002 - RNA, 32 nt, Human
uggacuccuugaagagugggcuucuggagaga

SEQ ID NO: 521003 - RNA, 32 nt, Human
uggacuccuuucuccuuuucuuuccucucuag

SEQ ID NO: 521004 - RNA, 32 nt, Human
uggacucgaagcacagcacccccaucagaaug

SEQ ID NO: 521005 - RNA, 20 nt, Human
uggacucgccuguaaucuca

SEQ ID NO: 521006 - RNA, 32 nt, Human
uggacucgggcugugcaggggcgaggggagca

SEQ ID NO: 521007 - RNA, 32 nt, Human
uggacucgugguacuaaggcuuggccuggaca

SEQ ID NO: 521008 - RNA, 32 nt, Human
uggacucuacgcuuaggcugggcagaggccuc

SEQ ID NO: 521009 - RNA, 24 nt, Human
uggacucuagaggugaugcugcuu

SEQ ID NO: 521010 - RNA, 32 nt, Human
uggacucucagccuugcuguucugccuggaga

SEQ ID NO: 521011 - RNA, 32 nt, Human
uggacucuccaaugcagcugccucuguuaccu

SEQ ID NO: 521012 - RNA, 32 nt, Human
uggacucuccauuccucugccuguacuacccc

SEQ ID NO: 521013 - RNA, 32 nt, Human
uggacucugagcugccccuggcuuccuuuaag

SEQ ID NO: 521014 - RNA, 23 nt, Human
uggacucugaguggcgacugccu

SEQ ID NO: 521015 - RNA, 32 nt, Human
uggacucugcuccugaucccccuucuccuugc

SEQ ID NO: 521016 - RNA, 22 nt, Human
uggacucugggauguguagccu

SEQ ID NO: 521017 - RNA, 32 nt, Human
uggacucuguaacucauaggugcauucuuuuu

SEQ ID NO: 521018 - RNA, 32 nt, Human
uggacucuuaacaggugcuaugugaccaggaa

SEQ ID NO: 521019 - RNA, 32 nt, Human
uggacugaaaagaggaagaggcugcaauggag

SEQ ID NO: 521020 - RNA, 32 nt, Human
uggacugaacggaaucaagcucugagcagagg

SEQ ID NO: 521021 - RNA, 32 nt, Human
uggacugaaggcaugagaugcccuuugagugu

SEQ ID NO: 521022 - RNA, 32 nt, Human
uggacugaaugaccucccaccuccagcauuag

SEQ ID NO: 521023 - RNA, 32 nt, Human
uggacugaccagcuggcacuuccccuggccua

SEQ ID NO: 521024 - RNA, 32 nt, Human
uggacugagacaugaggcugagcugguuccgg

SEQ ID NO: 521025 - RNA, 32 nt, Human
uggacugaggcaaaggcugggccaggcucagc

SEQ ID NO: 521026 - RNA, 32 nt, Human
uggacugaggcaaagggcuggccacaccaccu

SEQ ID NO: 521027 - RNA, 32 nt, Human
uggacugaguagaacuggaggacaagagucga

SEQ ID NO: 521028 - RNA, 32 nt, Human
uggacugagugucccccaggcccagccaggac

SEQ ID NO: 521029 - RNA, 31 nt, Human
uggacugauuggccacccugccaaagcugca

SEQ ID NO: 521030 - RNA, 32 nt, Human
uggacugcacagucuaagcuaauuccgauugg

SEQ ID NO: 521031 - RNA, 32 nt, Human
uggacugcaguggcacaaucauagcucacugc

SEQ ID NO: 521032 - RNA, 32 nt, Human
uggacugcaguggcaugaucucggcucacugc

SEQ ID NO: 521033 - RNA, 32 nt, Human
uggacugcaguggcgugaucucugcucacugc

SEQ ID NO: 521034 - RNA, 32 nt, Human
uggacugccagauuccuugagugugggggauu

SEQ ID NO: 521035 - RNA, 32 nt, Human
uggacugccaugaguuucacaaccucaggccc

SEQ ID NO: 521036 - RNA, 22 nt, Human
uggacugccccccugcacccag

SEQ ID NO: 521037 - RNA, 32 nt, Human
uggacugcccucuccuucuuggugauucaaag

SEQ ID NO: 521038 - RNA, 32 nt, Human
uggacugcgaccuccuucccuccugggagagc

SEQ ID NO: 521039 - RNA, 21 nt, Human
uggacugcgcggcgccgugag

SEQ ID NO: 521040 - RNA, 32 nt, Human
uggacugcgguguggagggaaagcuugggauu

SEQ ID NO: 521041 - RNA, 32 nt, Human
uggacugcguggacccgugagcucaggagccu

SEQ ID NO: 521042 - RNA, 32 nt, Human
uggacugcucagaaaaaugagggagagagaaa

SEQ ID NO: 521043 - RNA, 32 nt, Human
uggacugcugggagggagggggcagcaggccc

SEQ ID NO: 521044 - RNA, 32 nt, Human
uggacugcuuugugcuauaugaaaaucucuga

SEQ ID NO: 521045 - RNA, 22 nt, Human
uggacuggaaaguaaguaggug

SEQ ID NO: 521046 - RNA, 32 nt, Human
uggacuggaaggcagaaagugggauccuggcc

SEQ ID NO: 521047 - RNA, 20 nt, Human
uggacuggaaucuuagcaaa

SEQ ID NO: 521048 - RNA, 21 nt, Human
uggacuggagauccgagcaga

SEQ ID NO: 521049 - RNA, 20 nt, Human
uggacuggaggccccuggag

SEQ ID NO: 521050 - RNA, 32 nt, Human
uggacuggagugaaugggcacagggguggagc

SEQ ID NO: 521051 - RNA, 32 nt, Human
uggacuggauauuaccaucauccaccauccug

SEQ ID NO: 521052 - RNA, 32 nt, Human
uggacuggcaccugggcugcuggagaagucuc

SEQ ID NO: 521053 - RNA, 32 nt, Human
uggacuggcauggauccagugugcagaagagc

SEQ ID NO: 521054 - RNA, 32 nt, Human
uggacuggccaauccaggucccugcacgccuc

SEQ ID NO: 521055 - RNA, 32 nt, Human
uggacuggccaggagucugggaggcagguuuc

SEQ ID NO: 521056 - RNA, 32 nt, Human
uggacuggccaguucauagcagcacugugagg

SEQ ID NO: 521057 - RNA, 32 nt, Human
uggacuggcccaggaggacgugcaucaucacu

SEQ ID NO: 521058 - RNA, 32 nt, Human
uggacuggccgggaggugaugggcggggaagg

SEQ ID NO: 521059 - RNA, 32 nt, Human
uggacugggaggagggggagggugaugcauua

SEQ ID NO: 521060 - RNA, 32 nt, Human
uggacugggucugaucacagcccuuggcccug

SEQ ID NO: 521061 - RNA, 32 nt, Human
uggacugguccagucacagucacccccacuuu

SEQ ID NO: 521062 - RNA, 32 nt, Human
uggacuggucucucagaccccugggccaccau

SEQ ID NO: 521063 - RNA, 32 nt, Human
uggacuguacccuuuucccauucauucacaaa

SEQ ID NO: 521064 - RNA, 32 nt, Human
uggacuguacugcugccaucucuggcucacug

SEQ ID NO: 521065 - RNA, 32 nt, Human
uggacuguaugauuuccaaggacucuaccagu

SEQ ID NO: 521066 - RNA, 32 nt, Human
uggacuguccugcggagagaaaccccagccca

SEQ ID NO: 521067 - RNA, 32 nt, Human
uggacugucucauacugcucuggacuaugugg

SEQ ID NO: 521068 - RNA, 18 nt, Human
uggacuguguacaucuga

SEQ ID NO: 521069 - RNA, 32 nt, Human
uggacugugucacacugccaggcuuccagggc

SEQ ID NO: 521070 - RNA, 32 nt, Human
uggacuguucuguaaaguggcugguaacaaca

SEQ ID NO: 521071 - RNA, 32 nt, Human
uggacuuaaauggugugaccaggaucuaguuu

SEQ ID NO: 521072 - RNA, 32 nt, Human
uggacuuacauaagcagcuguauuccauuaga

SEQ ID NO: 521073 - RNA, 32 nt, Human
uggacuuacccucaucaccuugcucaccaacu

SEQ ID NO: 521074 - RNA, 32 nt, Human
uggacuuagaccagugugugagguuggacuua

SEQ ID NO: 521075 - RNA, 32 nt, Human
uggacuuaggaaggagaaagaaacaagauuaa

SEQ ID NO: 521076 - RNA, 32 nt, Human
uggacuucacauaggacgcccaaagcuacaag

SEQ ID NO: 521077 - RNA, 32 nt, Human
uggacuucacauggucaugcaggaagugagga

SEQ ID NO: 521078 - RNA, 32 nt, Human
uggacuucacccaggaggaguggggucaacua

SEQ ID NO: 521079 - RNA, 32 nt, Human
uggacuucacuggggcugcuggauuggauggg

SEQ ID NO: 521080 - RNA, 32 nt, Human
uggacuucagagcaccugcuucucccuggccu

SEQ ID NO: 521081 - RNA, 32 nt, Human
uggacuucagagggucuaugaaaccccuaaaa

SEQ ID NO: 521082 - RNA, 32 nt, Human
uggacuucagccccucugcucuguacccuuuu

SEQ ID NO: 521083 - RNA, 32 nt, Human
uggacuucagccccugccaguguggcaggauc

SEQ ID NO: 521084 - RNA, 32 nt, Human
uggacuucagccuccagaacugugagaaauac

SEQ ID NO: 521085 - RNA, 32 nt, Human
uggacuuccauuccucuuucuuuugauucccc

SEQ ID NO: 521086 - RNA, 32 nt, Human
uggacuucccugcuguugccaucagggugcac

SEQ ID NO: 521087 - RNA, 32 nt, Human
uggacuuccugggucuaguggggacuuggaga

SEQ ID NO: 521088 - RNA, 32 nt, Human
uggacuucgcaguccacuucugacagccucag

SEQ ID NO: 521089 - RNA, 32 nt, Human
uggacuucucugagucugugcaaucauuuucu

SEQ ID NO: 521090 - RNA, 19 nt, Human
uggacuucuggcuuccaca

SEQ ID NO: 521091 - RNA, 32 nt, Human
uggacuucugguaguguccacauugcucuucc

SEQ ID NO: 521092 - RNA, 32 nt, Human
uggacuugacaacuauucacccuaccucagau

SEQ ID NO: 521093 - RNA, 32 nt, Human
uggacuugccccugccaccuccugccucaggu

SEQ ID NO: 521094 - RNA, 32 nt, Human
uggacuuggaccugggccugcaguuccuacag

SEQ ID NO: 521095 - RNA, 32 nt, Human
uggacuuggauccgaggcagacgaggaagcug

SEQ ID NO: 521096 - RNA, 32 nt, Human
uggacuugggaggcgguuguugcagugagcug

SEQ ID NO: 521097 - RNA, 32 nt, Human
uggacuuggggguaggggaggggugugugugc

SEQ ID NO: 521098 - RNA, 32 nt, Human
uggacuugucuuuuuaaaugcuuuaucuuuuu

SEQ ID NO: 521099 - RNA, 23 nt, Human
uggacuuguuaaacuuuuggaaa

SEQ ID NO: 521100 - RNA, 32 nt, Human
uggacuuguugacggaagaaaaguaggaaugc

SEQ ID NO: 521101 - RNA, 32 nt, Human
uggacuuucacaaucggagauggcagugguga

SEQ ID NO: 521102 - RNA, 32 nt, Human
uggacuuuccuuucuguuccuugggucuauuu

SEQ ID NO: 521103 - RNA, 32 nt, Human
uggacuuugaguggaagaugugauuuggacca

SEQ ID NO: 521104 - RNA, 18 nt, Human
uggacuuuggaggggaag

SEQ ID NO: 521105 - RNA, 32 nt, Human
uggacuuuuccucuggacaaaaugacagcauc

SEQ ID NO: 521106 - RNA, 32 nt, Human
uggacuuuugaguuaagacuuugggggacagu

SEQ ID NO: 521107 - RNA, 32 nt, Human
uggacuuuugcagcuuccuuccaagucuuccu

SEQ ID NO: 521108 - RNA, 32 nt, Human
uggagaaaacauugccugguagcugcagauuc

SEQ ID NO: 521109 - RNA, 32 nt, Human
uggagaaaaccucaaguaaaguuuuauucugc

SEQ ID NO: 521110 - RNA, 21 nt, Human
uggagaaaauacuccagcaaa

SEQ ID NO: 521111 - RNA, 32 nt, Human
uggagaaaaugagaggcccugccuggacccag

SEQ ID NO: 521112 - RNA, 32 nt, Human
uggagaaaaugcuaauacagacaucuuacuuc

SEQ ID NO: 521113 - RNA, 32 nt, Human
uggagaaaaugggcggggguggugugggugau

SEQ ID NO: 521114 - RNA, 32 nt, Human
uggagaaacccagccgccccaaaacuuccuuc

SEQ ID NO: 521115 - RNA, 32 nt, Human
uggagaaaccccaucucuaccaaaaauacaaa

SEQ ID NO: 521116 - RNA, 32 nt, Human
uggagaaaccccaucuuuaccaaaaauacaaa

SEQ ID NO: 521117 - RNA, 32 nt, Human
uggagaaacucaaaccuucaagcccuaggugu

SEQ ID NO: 521118 - RNA, 18 nt, Human
uggagaaacuccagcaag

SEQ ID NO: 521119 - RNA, 32 nt, Human
uggagaaacuccuaauuuaaaugucacagaca

SEQ ID NO: 521120 - RNA, 32 nt, Human
uggagaaacugaaguuacccugggcggcugua

SEQ ID NO: 521121 - RNA, 32 nt, Human
uggagaaacugaggcacagauaaauuaacuug

SEQ ID NO: 521122 - RNA, 32 nt, Human
uggagaaagaauugugccaugaaaaauggaaa

SEQ ID NO: 521123 - RNA, 32 nt, Human
uggagaaagggcccugggccugccucaccacg

SEQ ID NO: 521124 - RNA, 20 nt, Human
uggagaaaggguuuugcaaa

SEQ ID NO: 521125 - RNA, 32 nt, Human
uggagaaauaagagguaagcaugcacuguaag

SEQ ID NO: 521126 - RNA, 32 nt, Human
uggagaaaugccaucucuacuaaaaauacaaa

SEQ ID NO: 521127 - RNA, 32 nt, Human
uggagaaauguauuauuuccaugaucaaaugu

SEQ ID NO: 521128 - RNA, 32 nt, Human
uggagaaauuaacuuucacauauggcuuuggg

SEQ ID NO: 521129 - RNA, 32 nt, Human
uggagaaauucaggcugggugcaguggcucac

SEQ ID NO: 521130 - RNA, 32 nt, Human
uggagaacaacaaauauguucucugaaugagc

SEQ ID NO: 521131 - RNA, 32 nt, Human
uggagaacacagcaacaaggugccaucuugga

SEQ ID NO: 521132 - RNA, 32 nt, Human
uggagaacagacuguagggggagccagagggc

SEQ ID NO: 521133 - RNA, 32 nt, Human
uggagaacaguaagggagcagagugguuaagg

SEQ ID NO: 521134 - RNA, 32 nt, Human
uggagaacaguggugggcauggagaggauaug

SEQ ID NO: 521135 - RNA, 32 nt, Human
uggagaaccaguacuccuucuacuacccgcgg

SEQ ID NO: 521136 - RNA, 25 nt, Human
uggagaacccugggaaggaccuggu

SEQ ID NO: 521137 - RNA, 32 nt, Human
uggagaaccugaagagagaggcugcagagguc

SEQ ID NO: 521138 - RNA, 32 nt, Human
uggagaacggagaagaaguuguagcagaggga

SEQ ID NO: 521139 - RNA, 32 nt, Human
uggagaacuagguuuaaaacagccuggguagg

SEQ ID NO: 521140 - RNA, 32 nt, Human
uggagaacucgcagagguuuaaauaagaucgu

SEQ ID NO: 521141 - RNA, 32 nt, Human
uggagaacugagccuugcaucucuccaggguc

SEQ ID NO: 521142 - RNA, 32 nt, Human
uggagaacugcaacgccuacgcccccagucgu

SEQ ID NO: 521143 - RNA, 32 nt, Human
uggagaagaaggcuugcaggaggcaggagaug

SEQ ID NO: 521144 - RNA, 32 nt, Human
uggagaagagcaaucugggcacuguuaccacu

SEQ ID NO: 521145 - RNA, 32 nt, Human
uggagaagagguacaaaggaaaacgagagggu

SEQ ID NO: 521146 - RNA, 32 nt, Human
uggagaagaguccucaaugagccuggccgagg

SEQ ID NO: 521147 - RNA, 32 nt, Human
uggagaagcaaggcuguccucccagggcugcc

SEQ ID NO: 521148 - RNA, 24 nt, Human
uggagaagcaggccuuauucaacu

SEQ ID NO: 521149 - RNA, 32 nt, Human
uggagaagccaaugcagaacugaugggaaagg

SEQ ID NO: 521150 - RNA, 32 nt, Human
uggagaagccugggugggaagcugcuggccca

SEQ ID NO: 521151 - RNA, 22 nt, Human
uggagaagcgaggccagcaggc

SEQ ID NO: 521152 - RNA, 32 nt, Human
uggagaagcggaggcccaggaggagggggaau

SEQ ID NO: 521153 - RNA, 32 nt, Human
uggagaagcucugcaagagaccugugcaaggg

SEQ ID NO: 521154 - RNA, 32 nt, Human
uggagaagcuguagaaguuacacagaagaucu

SEQ ID NO: 521155 - RNA, 32 nt, Human
uggagaaggaagcacugacucagacucgggua

SEQ ID NO: 521156 - RNA, 32 nt, Human
uggagaaggaccugggcugugggcuucugggu

SEQ ID NO: 521157 - RNA, 32 nt, Human
uggagaagggagaccuggcaguggagggaggc

SEQ ID NO: 521158 - RNA, 32 nt, Human
uggagaagggcccacgugucuccacacgccag

SEQ ID NO: 521159 - RNA, 32 nt, Human
uggagaagguucugagaugcagugagggaaga

SEQ ID NO: 521160 - RNA, 32 nt, Human
uggagaagugagugcuccuugaugguggaaug

SEQ ID NO: 521161 - RNA, 21 nt, Human
uggagaagugcugauggucuu

SEQ ID NO: 521162 - RNA, 32 nt, Human
uggagaaguggaaucacuggccugaggucaca

SEQ ID NO: 521163 - RNA, 32 nt, Human
uggagaagugguuccugcaguguagagauaug

SEQ ID NO: 521164 - RNA, 32 nt, Human
uggagaaguuaaauaaccaagacuucacaggc

SEQ ID NO: 521165 - RNA, 32 nt, Human
uggagaaguuugcgcugcgguucgugagcgca

SEQ ID NO: 521166 - RNA, 32 nt, Human
uggagaauacucacccuucagaaacagaccaa

SEQ ID NO: 521167 - RNA, 32 nt, Human
uggagaauagcgaagacucauucuuccugcac

SEQ ID NO: 521168 - RNA, 23 nt, Human
uggagaaucacaaaagaagugaa

SEQ ID NO: 521169 - RNA, 32 nt, Human
uggagaaucagaaaaucuuucucuaacaaccu

SEQ ID NO: 521170 - RNA, 32 nt, Human
uggagaauccacacccucacgccucaguccaa

SEQ ID NO: 521171 - RNA, 32 nt, Human
uggagaaucugagggcacucucugccagcucc

SEQ ID NO: 521172 - RNA, 18 nt, Human
uggagaaucuucagcaga

SEQ ID NO: 521173 - RNA, 21 nt, Human
uggagaaugaaaccugcucca

SEQ ID NO: 521174 - RNA, 32 nt, Human
uggagaauggcugucucucagcuggggaggag

SEQ ID NO: 521175 - RNA, 32 nt, Human
uggagaaugggaugugaagcaguagaccgcag

SEQ ID NO: 521176 - RNA, 32 nt, Human
uggagaauggggcagcuuccacacugcccagg

SEQ ID NO: 521177 - RNA, 21 nt, Human
uggagaauuguucuuuccucu

SEQ ID NO: 521178 - RNA, 20 nt, Human
uggagaauuuuccuuucccu

SEQ ID NO: 521179 - RNA, 26 nt, Human
uggagacaaaagccuugcuuuccucu

SEQ ID NO: 521180 - RNA, 32 nt, Human
uggagacaagccugggcaacauggugaaacug

SEQ ID NO: 521181 - RNA, 32 nt, Human
uggagacaaggcaugaacaguuccuagagcag

SEQ ID NO: 521182 - RNA, 21 nt, Human
uggagacaauugccugguucc

SEQ ID NO: 521183 - RNA, 32 nt, Human
uggagacaauugggucagauaaucuugguggu

SEQ ID NO: 521184 - RNA, 32 nt, Human
uggagacacagccuucuggcugggacugacuu

SEQ ID NO: 521185 - RNA, 32 nt, Human
uggagacacccaggaggaaggccgugcuccug

SEQ ID NO: 521186 - RNA, 21 nt, Human
uggagacacccucuuuggccc

SEQ ID NO: 521187 - RNA, 32 nt, Human
uggagacagaaaacucuaguucaagagcugua

SEQ ID NO: 521188 - RNA, 23 nt, Human
uggagacagaagggaucccggca

SEQ ID NO: 521189 - RNA, 21 nt, Human
uggagacagaaucucacucca

SEQ ID NO: 521190 - RNA, 32 nt, Human
uggagacagcacagcagcacucacaucccggc

SEQ ID NO: 521191 - RNA, 22 nt, Human
uggagacagccccagacccuuu

SEQ ID NO: 521192 - RNA, 23 nt, Human
uggagacagcccucuuucucacc

SEQ ID NO: 521193 - RNA, 25 nt, Human
uggagacagcuccgagacggcuuca

SEQ ID NO: 521194 - RNA, 32 nt, Human
uggagacaggcaggaggugggggaagagcuga

SEQ ID NO: 521195 - RNA, 32 nt, Human
uggagacaggcaggcuucucugcccugggaag

SEQ ID NO: 521196 - RNA, 22 nt, Human
uggagacaggcuagccuggcca

SEQ ID NO: 521197 - RNA, 32 nt, Human
uggagacaggguggggaggauaaagggagcgu

SEQ ID NO: 521198 - RNA, 22 nt, Human
uggagacaggugcugggcuggu

SEQ ID NO: 521199 - RNA, 32 nt, Human
uggagacauaugugugcguguggaugucuaca

SEQ ID NO: 521200 - RNA, 32 nt, Human
uggagaccaaaccaaaggucucacuaggaaau

SEQ ID NO: 521201 - RNA, 32 nt, Human
uggagaccaaccagccuggccaauucaaaggc

SEQ ID NO: 521202 - RNA, 20 nt, Human
uggagaccagaaaccuucca

SEQ ID NO: 521203 - RNA, 32 nt, Human
uggagaccagcaccagaggaaucuacaaggca

SEQ ID NO: 521204 - RNA, 32 nt, Human
uggagaccagcaccucauacucagugaaggcc

SEQ ID NO: 521205 - RNA, 32 nt, Human
uggagaccagccuaggcaacauggcgaaaccc

SEQ ID NO: 521206 - RNA, 32 nt, Human
uggagaccagccugaccaacauggacaaaccc

SEQ ID NO: 521207 - RNA, 32 nt, Human
uggagaccagccugaccaacauggagaaaccc

SEQ ID NO: 521208 - RNA, 32 nt, Human
uggagaccagccugagcaacauagugagaccc

SEQ ID NO: 521209 - RNA, 32 nt, Human
uggagaccagccugcccaacaugaugaaaccc

SEQ ID NO: 521210 - RNA, 32 nt, Human
uggagaccagccuggccaacauagugaaaccc

SEQ ID NO: 521211 - RNA, 32 nt, Human
uggagaccagccuggccaacauggcgaaaccc

SEQ ID NO: 521212 - RNA, 32 nt, Human
uggagaccagccuggccaacauggugaaaccc

SEQ ID NO: 521213 - RNA, 32 nt, Human
uggagaccagccuggccaacguggcaaaaccc

SEQ ID NO: 521214 - RNA, 32 nt, Human
uggagaccagccuggccaagauggugaaaccc

SEQ ID NO: 521215 - RNA, 32 nt, Human
uggagaccagccugggcaacacagugagaacc

SEQ ID NO: 521216 - RNA, 32 nt, Human
uggagaccagccugggcaacauagugagaccc

SEQ ID NO: 521217 - RNA, 32 nt, Human
uggagaccagccugggcaacauggcaaaacuc

SEQ ID NO: 521218 - RNA, 32 nt, Human
uggagaccagccugggcaacauggugagacca

SEQ ID NO: 521219 - RNA, 32 nt, Human
uggagaccagccugguggccgaugucauagag

SEQ ID NO: 521220 - RNA, 32 nt, Human
uggagaccaggcuggccaacacggugaaaccc

SEQ ID NO: 521221 - RNA, 32 nt, Human
uggagaccagucuggccaauauggugaaaccc

SEQ ID NO: 521222 - RNA, 32 nt, Human
uggagaccagucugggcaacauggugaaaccc

SEQ ID NO: 521223 - RNA, 22 nt, Human
uggagaccagugggcccagggg

SEQ ID NO: 521224 - RNA, 32 nt, Human
uggagaccauccuggccaacacagugaggccc

SEQ ID NO: 521225 - RNA, 32 nt, Human
uggagaccauccuggccaacauggugaaaccc

SEQ ID NO: 521226 - RNA, 32 nt, Human
uggagaccauccuggccaacauggugaaaccu

SEQ ID NO: 521227 - RNA, 32 nt, Human
uggagaccauccuggcuaacaaggugaaaccc

SEQ ID NO: 521228 - RNA, 32 nt, Human
uggagaccauccuggcuaacacggugaaaccc

SEQ ID NO: 521229 - RNA, 32 nt, Human
uggagaccauccuggcuaacacggugagaccc

SEQ ID NO: 521230 - RNA, 32 nt, Human
uggagaccauccuggcuaacauggugaaaccc

SEQ ID NO: 521231 - RNA, 20 nt, Human
uggagaccaucuuguuccag

SEQ ID NO: 521232 - RNA, 23 nt, Human
uggagacccaggagccucggggg

SEQ ID NO: 521233 - RNA, 22 nt, Human
uggagacccaggcgugccuaga

SEQ ID NO: 521234 - RNA, 22 nt, Human
uggagacccgcagccucaagga

SEQ ID NO: 521235 - RNA, 32 nt, Human
uggagacccgccuggcuaacaaggcgaaaucc

SEQ ID NO: 521236 - RNA, 22 nt, Human
uggagacccgcggacgccggga

SEQ ID NO: 521237 - RNA, 20 nt, Human
uggagacccugcaggccaga

SEQ ID NO: 521238 - RNA, 19 nt, Human
uggagacccuucccaggga

SEQ ID NO: 521239 - RNA, 32 nt, Human
uggagaccgaggcccaucuccgcaucccgggc

SEQ ID NO: 521240 - RNA, 18 nt, Human
uggagaccgucagccaga

SEQ ID NO: 521241 - RNA, 32 nt, Human
uggagaccuacaggaggccagagugagggguc

SEQ ID NO: 521242 - RNA, 32 nt, Human
uggagaccuaguguccagucuggacagaaugc

SEQ ID NO: 521243 - RNA, 32 nt, Human
uggagaccucccaucacugagacagaucacag

SEQ ID NO: 521244 - RNA, 32 nt, Human
uggagaccugggagcuugaggcucauuggaag

SEQ ID NO: 521245 - RNA, 32 nt, Human
uggagaccugggaggagcggcugcuucgguuc

SEQ ID NO: 521246 - RNA, 20 nt, Human
uggagaccuggucccagcag

SEQ ID NO: 521247 - RNA, 21 nt, Human
uggagaccugguuccaguaaa

SEQ ID NO: 521248 - RNA, 32 nt, Human
uggagaccugugguugcgaggcucccuggggc

SEQ ID NO: 521249 - RNA, 24 nt, Human
uggagaccuugggagcuccaggga

SEQ ID NO: 521250 - RNA, 24 nt, Human
uggagacgaggccgcagaccccuu

SEQ ID NO: 521251 - RNA, 18 nt, Human
uggagacgcacagauccc

SEQ ID NO: 521252 - RNA, 32 nt, Human
uggagacgcaguucacguccaggcucuuccac

SEQ ID NO: 521253 - RNA, 21 nt, Human
uggagacgccccccgaccccu

SEQ ID NO: 521254 - RNA, 32 nt, Human
uggagacggcuuucauauguuugggaaacauu

SEQ ID NO: 521255 - RNA, 32 nt, Human
uggagacuagaggcaggagcugagggacugau

SEQ ID NO: 521256 - RNA, 32 nt, Human
uggagacuaucugagaacaaaaggacauuauu

SEQ ID NO: 521257 - RNA, 23 nt, Human
uggagacucaaagagacaagaga

SEQ ID NO: 521258 - RNA, 32 nt, Human
uggagacucccaggugccccaggugugcccag

SEQ ID NO: 521259 - RNA, 32 nt, Human
uggagacugauccccucugaguccucugcccc

SEQ ID NO: 521260 - RNA, 24 nt, Human
uggagacugauuuuagcaggaacu

SEQ ID NO: 521261 - RNA, 32 nt, Human
uggagacugccuggcuguguccucucagccag

SEQ ID NO: 521262 - RNA, 32 nt, Human
uggagacugcgcugcccugcccugcaccuacc

SEQ ID NO: 521263 - RNA, 22 nt, Human
uggagacugggaaagcaaagcu

SEQ ID NO: 521264 - RNA, 32 nt, Human
uggagacugggacaucccugauagguucacau

SEQ ID NO: 521265 - RNA, 23 nt, Human
uggagacugggagagcccagcag

SEQ ID NO: 521266 - RNA, 22 nt, Human
uggagacugggggcccagcaga

SEQ ID NO: 521267 - RNA, 32 nt, Human
uggagacuuaguuucacagacucugucauuuu

SEQ ID NO: 521268 - RNA, 32 nt, Human
uggagacuuauccaaucuguguuguaguacag

SEQ ID NO: 521269 - RNA, 32 nt, Human
uggagacuuauucgaggguauaggaagggccc

SEQ ID NO: 521270 - RNA, 32 nt, Human
uggagacuugagccaccaccagucagaggugc

SEQ ID NO: 521271 - RNA, 32 nt, Human
uggagacuugcuggaugccccauggcaauugu

SEQ ID NO: 521272 - RNA, 21 nt, Human
uggagacuuugcgcccggggg

SEQ ID NO: 521273 - RNA, 17 nt, Human
uggagagaaaaagcaaa

SEQ ID NO: 521274 - RNA, 21 nt, Human
uggagagaaaaccucugcgag

SEQ ID NO: 521275 - RNA, 21 nt, Human
uggagagaaacaucagucaaa

SEQ ID NO: 521276 - RNA, 18 nt, Human
uggagagaaaccaacaag

SEQ ID NO: 521277 - RNA, 19 nt, Human
uggagagaaaccauacaaa

SEQ ID NO: 521278 - RNA, 19 nt, Human
uggagagaaaccccacaaa

SEQ ID NO: 521279 - RNA, 19 nt, Human
uggagagaaacccuacaaa

SEQ ID NO: 521280 - RNA, 19 nt, Human
uggagagaaacccuauaaa

SEQ ID NO: 521281 - RNA, 19 nt, Human
uggagagaaaccgugcaag

SEQ ID NO: 521282 - RNA, 19 nt, Human
uggagagaaaccuuacaaa

SEQ ID NO: 521283 - RNA, 18 nt, Human
uggagagaaacuagugaa

SEQ ID NO: 521284 - RNA, 19 nt, Human
uggagagaaacucuacaaa

SEQ ID NO: 521285 - RNA, 32 nt, Human
uggagagaaagaaugaaguagauggaaagauc

SEQ ID NO: 521286 - RNA, 19 nt, Human
uggagagaaagcuuacaaa

SEQ ID NO: 521287 - RNA, 20 nt, Human
uggagagaaaggguggcaag

SEQ ID NO: 521288 - RNA, 19 nt, Human
uggagagaaauccugugaa

SEQ ID NO: 521289 - RNA, 18 nt, Human
uggagagaaaucgguaag

SEQ ID NO: 521290 - RNA, 19 nt, Human
uggagagaaauguuacaag

SEQ ID NO: 521291 - RNA, 20 nt, Human
uggagagaacaccuagggaa

SEQ ID NO: 521292 - RNA, 20 nt, Human
uggagagaacccccggcagg

SEQ ID NO: 521293 - RNA, 19 nt, Human
uggagagaaccuugguaaa

SEQ ID NO: 521294 - RNA, 21 nt, Human
uggagagaacgccauagugaa

SEQ ID NO: 521295 - RNA, 19 nt, Human
uggagagaacgcuugcaag

SEQ ID NO: 521296 - RNA, 18 nt, Human
uggagagaagaagcugca

SEQ ID NO: 521297 - RNA, 22 nt, Human
uggagagaagacgaucugcacu

SEQ ID NO: 521298 - RNA, 21 nt, Human
uggagagaagacugcagugag

SEQ ID NO: 521299 - RNA, 22 nt, Human
uggagagaagagaaggcagcag

SEQ ID NO: 521300 - RNA, 19 nt, Human
uggagagaagagagguaga

SEQ ID NO: 521301 - RNA, 19 nt, Human
uggagagaagcccugugaa

SEQ ID NO: 521302 - RNA, 23 nt, Human
uggagagaaggaaaacuaguaga

SEQ ID NO: 521303 - RNA, 22 nt, Human
uggagagaaggaaucccagcaa

SEQ ID NO: 521304 - RNA, 18 nt, Human
uggagagaaggccgcagc

SEQ ID NO: 521305 - RNA, 21 nt, Human
uggagagaaggcuaagacaaa

SEQ ID NO: 521306 - RNA, 21 nt, Human
uggagagaaggucuccuuggc

SEQ ID NO: 521307 - RNA, 17 nt, Human
uggagagaaguaaguaa

SEQ ID NO: 521308 - RNA, 32 nt, Human
uggagagaaguuaggcagguccuagggagggc

SEQ ID NO: 521309 - RNA, 18 nt, Human
uggagagaaucaugcaaa

SEQ ID NO: 521310 - RNA, 20 nt, Human
uggagagaauccccuccaga

SEQ ID NO: 521311 - RNA, 17 nt, Human
uggagagaaucuggcaa

SEQ ID NO: 521312 - RNA, 32 nt, Human
uggagagaaugcugguaaugaagaacccaagc

SEQ ID NO: 521313 - RNA, 20 nt, Human
uggagagacaaagggaggug

SEQ ID NO: 521314 - RNA, 21 nt, Human
uggagagacaacuccuguaaa

SEQ ID NO: 521315 - RNA, 21 nt, Human
uggagagacacaccugcucca

SEQ ID NO: 521316 - RNA, 32 nt, Human
uggagagacacagccugacauacacauaucau

SEQ ID NO: 521317 - RNA, 23 nt, Human
uggagagacacugcgcucaggga

SEQ ID NO: 521318 - RNA, 21 nt, Human
uggagagacaggacccacaga

SEQ ID NO: 521319 - RNA, 18 nt, Human
uggagagacaggugcaag

SEQ ID NO: 521320 - RNA, 18 nt, Human
uggagagaccccaggaaa

SEQ ID NO: 521321 - RNA, 32 nt, Human
uggagagacccccagccccaccauucagcgcg

SEQ ID NO: 521322 - RNA, 32 nt, Human
uggagagaccccuucagagcagggauugugcc

SEQ ID NO: 521323 - RNA, 32 nt, Human
uggagagacggaggagaagggcaggguucaga

SEQ ID NO: 521324 - RNA, 19 nt, Human
uggagagacuccaugcaga

SEQ ID NO: 521325 - RNA, 32 nt, Human
uggagagacugaaugcuugugagggaauuagg

SEQ ID NO: 521326 - RNA, 32 nt, Human
uggagagagaaaaggugguaacuggagugcug

SEQ ID NO: 521327 - RNA, 21 nt, Human
uggagagagaaauucagcaaa

SEQ ID NO: 521328 - RNA, 18 nt, Human
uggagagagaagagcaga

SEQ ID NO: 521329 - RNA, 32 nt, Human
uggagagagaagguauugaaacaucuccuuua

SEQ ID NO: 521330 - RNA, 19 nt, Human
uggagagagacccuauaaa

SEQ ID NO: 521331 - RNA, 19 nt, Human
uggagagagacccuguaaa

SEQ ID NO: 521332 - RNA, 32 nt, Human
uggagagagagccauuggcuggaguugagacu

SEQ ID NO: 521333 - RNA, 32 nt, Human
uggagagagcacugaaauggggcuuggcaggu

SEQ ID NO: 521334 - RNA, 32 nt, Human
uggagagagcaggaacagggagagaguaggga

SEQ ID NO: 521335 - RNA, 19 nt, Human
uggagagagcaucaggaaa

SEQ ID NO: 521336 - RNA, 20 nt, Human
uggagagagcugacggcaga

SEQ ID NO: 521337 - RNA, 32 nt, Human
uggagagagcuggaaggaaggagccagcgugc

SEQ ID NO: 521338 - RNA, 19 nt, Human
uggagagaggacccaguga

SEQ ID NO: 521339 - RNA, 18 nt, Human
uggagagaggagacagca

SEQ ID NO: 521340 - RNA, 18 nt, Human
uggagagaggagaggcaa

SEQ ID NO: 521341 - RNA, 21 nt, Human
uggagagaggagcgcugcgga

SEQ ID NO: 521342 - RNA, 21 nt, Human
uggagagaggaugaaagggaa

SEQ ID NO: 521343 - RNA, 18 nt, Human
uggagagaggauuuuagc

SEQ ID NO: 521344 - RNA, 19 nt, Human
uggagagaggcccuacaaa

SEQ ID NO: 521345 - RNA, 32 nt, Human
uggagagaggccggggaggcgagcccaggcga

SEQ ID NO: 521346 - RNA, 32 nt, Human
uggagagaggcugccuuucugguuccaucucc

SEQ ID NO: 521347 - RNA, 23 nt, Human
uggagagagggaagcucaauaaa

SEQ ID NO: 521348 - RNA, 20 nt, Human
uggagagaggggaccucaag

SEQ ID NO: 521349 - RNA, 20 nt, Human
uggagagaggucugggcagg

SEQ ID NO: 521350 - RNA, 17 nt, Human
uggagagaggugagcaa

SEQ ID NO: 521351 - RNA, 21 nt, Human
uggagagaggugggaagcaga

SEQ ID NO: 521352 - RNA, 19 nt, Human
uggagagagugcuaggaaa

SEQ ID NO: 521353 - RNA, 21 nt, Human
uggagagaguugauugaccca

SEQ ID NO: 521354 - RNA, 19 nt, Human
uggagagauagcccacaag

SEQ ID NO: 521355 - RNA, 20 nt, Human
uggagagauccaucagcaga

SEQ ID NO: 521356 - RNA, 32 nt, Human
uggagagauccggagagcuggagcagcagcgg

SEQ ID NO: 521357 - RNA, 32 nt, Human
uggagagauccucuacccuuuugaggauauuu

SEQ ID NO: 521358 - RNA, 32 nt, Human
uggagagaucuggccucagcuugggcuagaga

SEQ ID NO: 521359 - RNA, 32 nt, Human
uggagagaugacaccaggcgggugggacucaa

SEQ ID NO: 521360 - RNA, 22 nt, Human
uggagagaugagaacccagugg

SEQ ID NO: 521361 - RNA, 32 nt, Human
uggagagauggaaaaucagcucucauacuaau

SEQ ID NO: 521362 - RNA, 17 nt, Human
uggagagauucuggcaa

SEQ ID NO: 521363 - RNA, 20 nt, Human
uggagagauuuuccauuaag

SEQ ID NO: 521364 - RNA, 22 nt, Human
uggagagcacuguuuuagcaga

SEQ ID NO: 521365 - RNA, 32 nt, Human
uggagagcagagccaggagcucuggcagcugu

SEQ ID NO: 521366 - RNA, 32 nt, Human
uggagagcagaggaccugaucccccacuagag

SEQ ID NO: 521367 - RNA, 18 nt, Human
uggagagcagccagcagg

SEQ ID NO: 521368 - RNA, 32 nt, Human
uggagagcagcugaaagccaucuggguggaga

SEQ ID NO: 521369 - RNA, 32 nt, Human
uggagagcaggaggccaggacaaggacaaagg

SEQ ID NO: 521370 - RNA, 32 nt, Human
uggagagcagugaggaauuaaucuugcuuuug

SEQ ID NO: 521371 - RNA, 32 nt, Human
uggagagcaguggccaaucauagcuuacugcc

SEQ ID NO: 521372 - RNA, 32 nt, Human
uggagagcaguggugcaaucuuggcucacugc

SEQ ID NO: 521373 - RNA, 32 nt, Human
uggagagccacaggaagagaaggaagaccagc

SEQ ID NO: 521374 - RNA, 32 nt, Human
uggagagccaugccuguucuccuuccuugcua

SEQ ID NO: 521375 - RNA, 24 nt, Human
uggagagcccgggcagccacugcc

SEQ ID NO: 521376 - RNA, 32 nt, Human
uggagagccucaagauaaaacucugucauuca

SEQ ID NO: 521377 - RNA, 32 nt, Human
uggagagccucaugccgucucuaccuucgcac

SEQ ID NO: 521378 - RNA, 32 nt, Human
uggagagccugaggaaucaggagcuccaggaa

SEQ ID NO: 521379 - RNA, 32 nt, Human
uggagagccugcagagggucaaguccaagcua

SEQ ID NO: 521380 - RNA, 18 nt, Human
uggagagccuucagcaag

SEQ ID NO: 521381 - RNA, 32 nt, Human
uggagagcuacaccauuuucuucuccaaccau

SEQ ID NO: 521382 - RNA, 21 nt, Human
uggagagcuagaacccggcag

SEQ ID NO: 521383 - RNA, 19 nt, Human
uggagagcuagguuccagc

SEQ ID NO: 521384 - RNA, 16 nt, Human
uggagagcucccagca

SEQ ID NO: 521385 - RNA, 32 nt, Human
uggagagcuggcugccccuggugcacuggccc

SEQ ID NO: 521386 - RNA, 22 nt, Human
uggagagcugguacuuagcaaa

SEQ ID NO: 521387 - RNA, 22 nt, Human
uggagagcuuucaggggaggug

SEQ ID NO: 521388 - RNA, 32 nt, Human
uggagaggaaacaggcuauuguuggccagccc

SEQ ID NO: 521389 - RNA, 19 nt, Human
uggagaggaaaugggcaaa

SEQ ID NO: 521390 - RNA, 20 nt, Human
uggagaggaagacaugugaa

SEQ ID NO: 521391 - RNA, 32 nt, Human
uggagaggaagagacgcccccucugcccgaga

SEQ ID NO: 521392 - RNA, 18 nt, Human
uggagaggaagaggcaag

SEQ ID NO: 521393 - RNA, 32 nt, Human
uggagaggaaggacuuagggaggcagagugga

SEQ ID NO: 521394 - RNA, 20 nt, Human
uggagaggaauuucagggag

SEQ ID NO: 521395 - RNA, 20 nt, Human
uggagaggaccccccgcgaa

SEQ ID NO: 521396 - RNA, 32 nt, Human
uggagaggagacaaaaccaggagcagcacagu

SEQ ID NO: 521397 - RNA, 32 nt, Human
uggagaggagagaaugagagaguguggaaaaa

SEQ ID NO: 521398 - RNA, 20 nt, Human
uggagaggagagacagcaag

SEQ ID NO: 521399 - RNA, 18 nt, Human
uggagaggagauggggga

SEQ ID NO: 521400 - RNA, 21 nt, Human
uggagaggagaugggggacag

SEQ ID NO: 521401 - RNA, 18 nt, Human
uggagaggagauuaagca

SEQ ID NO: 521402 - RNA, 32 nt, Human
uggagaggagcaggccauggaggcaggugcca

SEQ ID NO: 521403 - RNA, 19 nt, Human
uggagaggagcccggggag

SEQ ID NO: 521404 - RNA, 18 nt, Human
uggagaggagcgugcaga

SEQ ID NO: 521405 - RNA, 18 nt, Human
uggagaggaggaagcgga

SEQ ID NO: 521406 - RNA, 32 nt, Human
uggagaggaggcaggggcugggcugggggcgc

SEQ ID NO: 521407 - RNA, 20 nt, Human
uggagaggagggagccggca

SEQ ID NO: 521408 - RNA, 32 nt, Human
uggagaggaguaagucuaaaagaagggugaaa

SEQ ID NO: 521409 - RNA, 20 nt, Human
uggagaggauaccucacaag

SEQ ID NO: 521410 - RNA, 32 nt, Human
uggagaggaugagguuugaggagcagagggaa

SEQ ID NO: 521411 - RNA, 20 nt, Human
uggagaggcagaucugggcc

SEQ ID NO: 521412 - RNA, 32 nt, Human
uggagaggcagauguguccugaggaacaguug

SEQ ID NO: 521413 - RNA, 32 nt, Human
uggagaggcaggcagagggcagugguucuccc

SEQ ID NO: 521414 - RNA, 32 nt, Human
uggagaggcaggcauaggcagggaaccgagca

SEQ ID NO: 521415 - RNA, 20 nt, Human
uggagaggcagggcagggug

SEQ ID NO: 521416 - RNA, 32 nt, Human
uggagaggccagaagagacucagaggagcggg

SEQ ID NO: 521417 - RNA, 18 nt, Human
uggagaggccccaccaag

SEQ ID NO: 521418 - RNA, 18 nt, Human
uggagaggccccaggaag

SEQ ID NO: 521419 - RNA, 18 nt, Human
uggagaggccccagggag

SEQ ID NO: 521420 - RNA, 21 nt, Human
uggagaggccuccuuuucccu

SEQ ID NO: 521421 - RNA, 32 nt, Human
uggagaggccugacagaagaaggagcggcccu

SEQ ID NO: 521422 - RNA, 20 nt, Human
uggagaggcgggccugcaag

SEQ ID NO: 521423 - RNA, 32 nt, Human
uggagaggcugaggcaggagaauagcuugaac

SEQ ID NO: 521424 - RNA, 32 nt, Human
uggagaggcugaggcaggagaaucacuuagac

SEQ ID NO: 521425 - RNA, 32 nt, Human
uggagaggcugaggcaggagaaucgcuugaac

SEQ ID NO: 521426 - RNA, 19 nt, Human
uggagaggcuucccagcaa

SEQ ID NO: 521427 - RNA, 18 nt, Human
uggagagggaaaagcaga

SEQ ID NO: 521428 - RNA, 32 nt, Human
uggagagggaacaacuguguacaaacauguga

SEQ ID NO: 521429 - RNA, 32 nt, Human
uggagagggacaggaggaaacgcagcgccagc

SEQ ID NO: 521430 - RNA, 19 nt, Human
uggagagggacgcggcgga

SEQ ID NO: 521431 - RNA, 18 nt, Human
uggagagggacuggcaga

SEQ ID NO: 521432 - RNA, 21 nt, Human
uggagagggagacgcaggaag

SEQ ID NO: 521433 - RNA, 32 nt, Human
uggagagggcccuguccaguugggugaucagg

SEQ ID NO: 521434 - RNA, 32 nt, Human
uggagagggcuggguuaccugggcccuguggc

SEQ ID NO: 521435 - RNA, 32 nt, Human
uggagaggggagugcagggcaccaccugggcg

SEQ ID NO: 521436 - RNA, 20 nt, Human
uggagaggggcuacagcaga

SEQ ID NO: 521437 - RNA, 32 nt, Human
uggagagggguuggcucucugagccaucagug

SEQ ID NO: 521438 - RNA, 21 nt, Human
uggagaggguauuaccgcgag

SEQ ID NO: 521439 - RNA, 32 nt, Human
uggagagggucuguggcagcuuucuggacuga

SEQ ID NO: 521440 - RNA, 19 nt, Human
uggagaggucuucagggaa

SEQ ID NO: 521441 - RNA, 32 nt, Human
uggagaggugaggaccccaugguggcucuagu

SEQ ID NO: 521442 - RNA, 32 nt, Human
uggagaggugggcuugguccagcucuugcugg

SEQ ID NO: 521443 - RNA, 32 nt, Human
uggagaggugugaggcugaggcaggguuuuac

SEQ ID NO: 521444 - RNA, 19 nt, Human
uggagaguagacuagcaaa

SEQ ID NO: 521445 - RNA, 18 nt, Human
uggagaguagccugcucc

SEQ ID NO: 521446 - RNA, 32 nt, Human
uggagagucagccuguggacccugugcacagc

SEQ ID NO: 521447 - RNA, 32 nt, Human
uggagagucaggcagugacccauuggccaugu

SEQ ID NO: 521448 - RNA, 18 nt, Human
uggagagucccuagcaga

SEQ ID NO: 521449 - RNA, 17 nt, Human
uggagaguccucagcag

SEQ ID NO: 521450 - RNA, 21 nt, Human
uggagaguuacagccagcaag

SEQ ID NO: 521451 - RNA, 32 nt, Human
uggagaguucucuccugaagcuccauccccuc

SEQ ID NO: 521452 - RNA, 21 nt, Human
uggagaguuggugcuggcaaa

SEQ ID NO: 521453 - RNA, 32 nt, Human
uggagauaaggaaagagagggacuucagagag

SEQ ID NO: 521454 - RNA, 21 nt, Human
uggagauaaggucucugcaga

SEQ ID NO: 521455 - RNA, 32 nt, Human
uggagauaauuuaaauagcacagggaccccug

SEQ ID NO: 521456 - RNA, 32 nt, Human
uggagauacuugagcugagaacucagccaucu

SEQ ID NO: 521457 - RNA, 32 nt, Human
uggagauagcaguagcaccaacuccacugcuu

SEQ ID NO: 521458 - RNA, 32 nt, Human
uggagauagcgcuccuggagagggcagaguag

SEQ ID NO: 521459 - RNA, 22 nt, Human
uggagauaggaggaucucagua

SEQ ID NO: 521460 - RNA, 32 nt, Human
uggagauaggagggggacuggguguguccagc

SEQ ID NO: 521461 - RNA, 32 nt, Human
uggagauaucaaguccccagcccagggccaga

SEQ ID NO: 521462 - RNA, 32 nt, Human
uggagaucacccuguucuaguguguggaggcu

SEQ ID NO: 521463 - RNA, 32 nt, Human
uggagaucagcaccugugagaccgaggccucc

SEQ ID NO: 521464 - RNA, 21 nt, Human
uggagaucagccugggcaaca

SEQ ID NO: 521465 - RNA, 32 nt, Human
uggagaucaggaaacugcaaagacugggaagu

SEQ ID NO: 521466 - RNA, 32 nt, Human
uggagaucauugggcucccuguggacugcagc

SEQ ID NO: 521467 - RNA, 32 nt, Human
uggagauccacaaccuuuaacagggauccaag

SEQ ID NO: 521468 - RNA, 32 nt, Human
uggagauccaggaagcccagguaucggauaaa

SEQ ID NO: 521469 - RNA, 32 nt, Human
uggagauccaucuguccuguguggaauccagu

SEQ ID NO: 521470 - RNA, 32 nt, Human
uggagaucccagaggaaggggcgccucacacc

SEQ ID NO: 521471 - RNA, 32 nt, Human
uggagaucccccagaggaguggagggugucuc

SEQ ID NO: 521472 - RNA, 23 nt, Human
uggagaucccuggacccaguaag

SEQ ID NO: 521473 - RNA, 32 nt, Human
uggagaucccuuaaagagaaccagauucauac

SEQ ID NO: 521474 - RNA, 32 nt, Human
uggagauccugguggagaccuggcaggagccc

SEQ ID NO: 521475 - RNA, 26 nt, Human
uggagaucuacggcauacgcccaggg

SEQ ID NO: 521476 - RNA, 32 nt, Human
uggagaucucaaacuuucuguacucagaaggg

SEQ ID NO: 521477 - RNA, 32 nt, Human
uggagaucuccagguagacuucagagagaugc

SEQ ID NO: 521478 - RNA, 32 nt, Human
uggagaucugcagcaagcucaacuacauucca

SEQ ID NO: 521479 - RNA, 23 nt, Human
uggagaucuggcacgggggccag

SEQ ID NO: 521480 - RNA, 32 nt, Human
uggagaugaacacaucgcguuugcaucccaga

SEQ ID NO: 521481 - RNA, 32 nt, Human
uggagaugacagugaugcugccaccuuuaagc

SEQ ID NO: 521482 - RNA, 32 nt, Human
uggagaugaccaguccacacugauaaggaguu

SEQ ID NO: 521483 - RNA, 32 nt, Human
uggagaugcacuaacccagcuggauguguuga

SEQ ID NO: 521484 - RNA, 32 nt, Human
uggagaugcgccacugcacuccagccugggcg

SEQ ID NO: 521485 - RNA, 26 nt, Human
uggagaugcugggccaccagaccccu

SEQ ID NO: 521486 - RNA, 32 nt, Human
uggagaugcuguccccaguggaaaugaaguuu

SEQ ID NO: 521487 - RNA, 30 nt, Human
uggagaugcuuucagugguggagaauggac

SEQ ID NO: 521488 - RNA, 32 nt, Human
uggagauggagccccuacagaggucagcaggu

SEQ ID NO: 521489 - RNA, 32 nt, Human
uggagauggccaguucuuucuaccucagagug

SEQ ID NO: 521490 - RNA, 18 nt, Human
uggagauggcccggcgga

SEQ ID NO: 521491 - RNA, 29 nt, Human
uggagauggcugcugcucacccuccuagc

SEQ ID NO: 521492 - RNA, 30 nt, Human
uggagauggggaccgcccuggacaucaaga

SEQ ID NO: 521493 - RNA, 32 nt, Human
uggagaugucucuguguguuuguguguaucug

SEQ ID NO: 521494 - RNA, 24 nt, Human
uggagauguuccgccagcgcuuca

SEQ ID NO: 521495 - RNA, 32 nt, Human
uggagauucagcaauucugucuucauugcucc

SEQ ID NO: 521496 - RNA, 32 nt, Human
uggagauucaggcccuggaauggggcugaaug

SEQ ID NO: 521497 - RNA, 32 nt, Human
uggagauuccucagccucucguggacacccac

SEQ ID NO: 521498 - RNA, 19 nt, Human
uggagauugauccugcgag

SEQ ID NO: 521499 - RNA, 32 nt, Human
uggagauugcugucugcuuuauguuccagugg

SEQ ID NO: 521500 - RNA, 32 nt, Human
uggagauuuccagauggaagcuguacuugggu

SEQ ID NO: 521501 - RNA, 32 nt, Human
uggagauuucuagcuuuccugagagcugcugc

SEQ ID NO: 521502 - RNA, 20 nt, Human
uggagcaacuuccugcucca

SEQ ID NO: 521503 - RNA, 32 nt, Human
uggagcaaguggagcccagcaguccuguauga

SEQ ID NO: 521504 - RNA, 32 nt, Human
uggagcaauucuuguaauucaccagagguauc

SEQ ID NO: 521505 - RNA, 19 nt, Human
uggagcaauuuccagcaga

SEQ ID NO: 521506 - RNA, 32 nt, Human
uggagcaauuuccagcagaaguuguggcuugc

SEQ ID NO: 521507 - RNA, 32 nt, Human
uggagcacaagggggagagagacuggcccucc

SEQ ID NO: 521508 - RNA, 18 nt, Human
uggagcacagaggccgca

SEQ ID NO: 521509 - RNA, 32 nt, Human
uggagcacauuuccucugcuucuuuuaucaua

SEQ ID NO: 521510 - RNA, 32 nt, Human
uggagcaccaaacuccgccccaaaaaggagag

SEQ ID NO: 521511 - RNA, 32 nt, Human
uggagcacccgagcgccugccugguggcggcg

SEQ ID NO: 521512 - RNA, 32 nt, Human
uggagcaccugggaaggagcaaccagaguggg

SEQ ID NO: 521513 - RNA, 32 nt, Human
uggagcaccuuagacaaacuacccagcacagg

SEQ ID NO: 521514 - RNA, 32 nt, Human
uggagcaccuugcacacagucacugcagccuc

SEQ ID NO: 521515 - RNA, 25 nt, Human
uggagcacgguggcucacaccugua

SEQ ID NO: 521516 - RNA, 32 nt, Human
uggagcacguccgggcaguggagggagggaca

SEQ ID NO: 521517 - RNA, 32 nt, Human
uggagcacugguuuuacauucugccucugcug

SEQ ID NO: 521518 - RNA, 32 nt, Human
uggagcacugucugaagaugaggaaucaucug

SEQ ID NO: 521519 - RNA, 32 nt, Human
uggagcacuuaaaguccagccuccaggaccgg

SEQ ID NO: 521520 - RNA, 32 nt, Human
uggagcagaaauucaccucucucacugacuau

SEQ ID NO: 521521 - RNA, 32 nt, Human
uggagcagaacuuaagagagugugugggguga

SEQ ID NO: 521522 - RNA, 32 nt, Human
uggagcagaccaccccgccugcccucauggcc

SEQ ID NO: 521523 - RNA, 22 nt, Human
uggagcagagcugcgcccaggu

SEQ ID NO: 521524 - RNA, 32 nt, Human
uggagcagcaccugucccgcugggcagaggau

SEQ ID NO: 521525 - RNA, 32 nt, Human
uggagcagcagugccucgcaccccagcacgcc

SEQ ID NO: 521526 - RNA, 20 nt, Human
uggagcagcaguuuagcaaa

SEQ ID NO: 521527 - RNA, 22 nt, Human
uggagcagcaugaggcccagca

SEQ ID NO: 521528 - RNA, 24 nt, Human
uggagcagcaugaggcccagcaag

SEQ ID NO: 521529 - RNA, 32 nt, Human
uggagcagccaaggccgccacuguggagacag

SEQ ID NO: 521530 - RNA, 23 nt, Human
uggagcagcccaggcccggcgga

SEQ ID NO: 521531 - RNA, 32 nt, Human
uggagcagccccugccgccagcgucaggucca

SEQ ID NO: 521532 - RNA, 32 nt, Human
uggagcagccucguggaguagggacggacuag

SEQ ID NO: 521533 - RNA, 32 nt, Human
uggagcagccugggggcugacccaggcuggag

SEQ ID NO: 521534 - RNA, 19 nt, Human
uggagcagcugaaugcaga

SEQ ID NO: 521535 - RNA, 32 nt, Human
uggagcagcugaggaggaggcaggagagaggg

SEQ ID NO: 521536 - RNA, 32 nt, Human
uggagcagcugcaggagcugcagaccaggguu

SEQ ID NO: 521537 - RNA, 32 nt, Human
uggagcagcugcaggccuggcugcaggccuga

SEQ ID NO: 521538 - RNA, 32 nt, Human
uggagcagcuuuuccuggaggcccaggauauu

SEQ ID NO: 521539 - RNA, 32 nt, Human
uggagcaggagaccauuauccuaagugaccua

SEQ ID NO: 521540 - RNA, 21 nt, Human
uggagcaggagaggugggagg

SEQ ID NO: 521541 - RNA, 32 nt, Human
uggagcaggagccauauaccuggagggaaugu

SEQ ID NO: 521542 - RNA, 32 nt, Human
uggagcaggcuucuugcuuuguucccuccuaa

SEQ ID NO: 521543 - RNA, 32 nt, Human
uggagcagggccuuugaucacuguggucacag

SEQ ID NO: 521544 - RNA, 32 nt, Human
uggagcaggguggggagucagagcagguccca

SEQ ID NO: 521545 - RNA, 31 nt, Human
uggagcagguggcuagaaaaagaggcugugg

SEQ ID NO: 521546 - RNA, 32 nt, Human
uggagcaguacggaaagucacagggaagauca

SEQ ID NO: 521547 - RNA, 21 nt, Human
uggagcagucagagggcccuc

SEQ ID NO: 521548 - RNA, 18 nt, Human
uggagcagucguggugaa

SEQ ID NO: 521549 - RNA, 32 nt, Human
uggagcagugccugucagagcccugggggugu

SEQ ID NO: 521550 - RNA, 23 nt, Human
uggagcauaagguuuccaguaag

SEQ ID NO: 521551 - RNA, 18 nt, Human
uggagcauaggaauugcc

SEQ ID NO: 521552 - RNA, 32 nt, Human
uggagcauauuuguuucucucuaccugauuuc

SEQ ID NO: 521553 - RNA, 24 nt, Human
uggagcaucccaagucuguccuua

SEQ ID NO: 521554 - RNA, 32 nt, Human
uggagcaucgucagauccucuaccuuuuacag

SEQ ID NO: 521555 - RNA, 32 nt, Human
uggagcaugaggcuggaugcagugguggugag

SEQ ID NO: 521556 - RNA, 32 nt, Human
uggagcaugccaagccuacugcagccauggau

SEQ ID NO: 521557 - RNA, 32 nt, Human
uggagcaugccauuggaaaacccacccccacc

SEQ ID NO: 521558 - RNA, 32 nt, Human
uggagcaugccuguagucucagcuacucagga

SEQ ID NO: 521559 - RNA, 32 nt, Human
uggagcaugccugucaucccagcuacuuggga

SEQ ID NO: 521560 - RNA, 32 nt, Human
uggagcaugccugugaucccagcuacucagga

SEQ ID NO: 521561 - RNA, 32 nt, Human
uggagcauugaugggggagaucagagggucug

SEQ ID NO: 521562 - RNA, 32 nt, Human
uggagccacagcugccucagcccacuccucac

SEQ ID NO: 521563 - RNA, 32 nt, Human
uggagccacagucuggcgucugacccuucagu

SEQ ID NO: 521564 - RNA, 32 nt, Human
uggagccacaguugaggacaguaguuuccugc

SEQ ID NO: 521565 - RNA, 32 nt, Human
uggagccaccucugcuucucagccccacccag

SEQ ID NO: 521566 - RNA, 18 nt, Human
uggagccacugcacucca

SEQ ID NO: 521567 - RNA, 32 nt, Human
uggagccacugcacuccagcccaggugacaga

SEQ ID NO: 521568 - RNA, 32 nt, Human
uggagccacugcacuccagccugggcgacaga

SEQ ID NO: 521569 - RNA, 32 nt, Human
uggagccacugcacuccagccugggggaaaga

SEQ ID NO: 521570 - RNA, 32 nt, Human
uggagccacuugaggucagguguucgagauua

SEQ ID NO: 521571 - RNA, 32 nt, Human
uggagccagagagguagaggcugcagugagcu

SEQ ID NO: 521572 - RNA, 32 nt, Human
uggagccagagggagcccagugagugccggga

SEQ ID NO: 521573 - RNA, 32 nt, Human
uggagccagaguggcugggaugugggagcagc

SEQ ID NO: 521574 - RNA, 22 nt, Human
uggagccagauggcaagagggu

SEQ ID NO: 521575 - RNA, 32 nt, Human
uggagccagcccugagccagaggcagaaugga

SEQ ID NO: 521576 - RNA, 32 nt, Human
uggagccagccuucagacucagugguuguuuc

SEQ ID NO: 521577 - RNA, 32 nt, Human
uggagccagcuguccccucucucucaggcucc

SEQ ID NO: 521578 - RNA, 32 nt, Human
uggagccaggaacaggcaggagcccagcccuu

SEQ ID NO: 521579 - RNA, 32 nt, Human
uggagccaggcaggggccacaggcccgugaag

SEQ ID NO: 521580 - RNA, 32 nt, Human
uggagccagguagaggaaaaggguuugggcgu

SEQ ID NO: 521581 - RNA, 32 nt, Human
uggagccagguccuccuccuccuccuucuccu

SEQ ID NO: 521582 - RNA, 32 nt, Human
uggagccaguacgcuccuccagaguggagcca

SEQ ID NO: 521583 - RNA, 32 nt, Human
uggagccaucuucuccauagcauuacggacuu

SEQ ID NO: 521584 - RNA, 32 nt, Human
uggagcccaaucugcuggacagccugggaccg

SEQ ID NO: 521585 - RNA, 32 nt, Human
uggagcccaccaggcuggugucgacggagugu

SEQ ID NO: 521586 - RNA, 24 nt, Human
uggagcccagcaugcuggggagug

SEQ ID NO: 521587 - RNA, 24 nt, Human
uggagcccagccaggcagccuccu

SEQ ID NO: 521588 - RNA, 32 nt, Human
uggagcccaggaaauugaggcugcagugagcc

SEQ ID NO: 521589 - RNA, 32 nt, Human
uggagcccaggaauucaagaccagucugagca

SEQ ID NO: 521590 - RNA, 32 nt, Human
uggagcccaggaggcacaggcugcagugagca

SEQ ID NO: 521591 - RNA, 32 nt, Human
uggagcccaggaggucaaggcugcagugagcu

SEQ ID NO: 521592 - RNA, 32 nt, Human
uggagcccaggaguucgagaccugccuuggca

SEQ ID NO: 521593 - RNA, 32 nt, Human
uggagcccaggaguucgaggcugcaaugagcu

SEQ ID NO: 521594 - RNA, 32 nt, Human
uggagcccaggaguuugagaccagcuugggca

SEQ ID NO: 521595 - RNA, 32 nt, Human
uggagcccaggaguuugaggcugcagcgagcu

SEQ ID NO: 521596 - RNA, 32 nt, Human
uggagcccaggaguuugagguuacaguaaacc

SEQ ID NO: 521597 - RNA, 32 nt, Human
uggagcccaggccacauggaugaugaugauuc

SEQ ID NO: 521598 - RNA, 32 nt, Human
uggagcccaggccagcuggggagggguggggu

SEQ ID NO: 521599 - RNA, 32 nt, Human
uggagcccaguaggucaagaccagccagggca

SEQ ID NO: 521600 - RNA, 32 nt, Human
uggagccccacacagacccuggcuccaggcug

SEQ ID NO: 521601 - RNA, 32 nt, Human
uggagccccagagcggugaccucugccucgac

SEQ ID NO: 521602 - RNA, 32 nt, Human
uggagccccaggacccaggccgcuuguaugug

SEQ ID NO: 521603 - RNA, 32 nt, Human
uggagcccccaucacaaaacagugcccaggag

SEQ ID NO: 521604 - RNA, 32 nt, Human
uggagccccuccgcuccuaucuccagcagaca

SEQ ID NO: 521605 - RNA, 32 nt, Human
uggagcccgaagguauuucuccagauccacag

SEQ ID NO: 521606 - RNA, 32 nt, Human
uggagcccgaguagcugccuggaucgcucgac

SEQ ID NO: 521607 - RNA, 19 nt, Human
uggagcccgggucgagagg

SEQ ID NO: 521608 - RNA, 32 nt, Human
uggagcccuaucuuuacaaaaguuuccuacug

SEQ ID NO: 521609 - RNA, 32 nt, Human
uggagcccuccaggaaaugacccccugggcug

SEQ ID NO: 521610 - RNA, 32 nt, Human
uggagcccugaugaaugggauuagugcuuuau

SEQ ID NO: 521611 - RNA, 32 nt, Human
uggagcccugggaggcuggagccccaggugca

SEQ ID NO: 521612 - RNA, 32 nt, Human
uggagcccugggcucuugccuccuguugaauu

SEQ ID NO: 521613 - RNA, 32 nt, Human
uggagcccuugccuccgagcucuggcuucaag

SEQ ID NO: 521614 - RNA, 32 nt, Human
uggagccgaggccaggauuucucugaagaccc

SEQ ID NO: 521615 - RNA, 32 nt, Human
uggagccgauucugcaacccucacuuccuaag

SEQ ID NO: 521616 - RNA, 32 nt, Human
uggagccgcaaggagccacacagcaggaggug

SEQ ID NO: 521617 - RNA, 32 nt, Human
uggagccgccgcaccccgacuccuggggccgc

SEQ ID NO: 521618 - RNA, 32 nt, Human
uggagccgcggugggagcccgccgggucgagc

SEQ ID NO: 521619 - RNA, 32 nt, Human
uggagccggcgccgggcacggcaucgggggcc

SEQ ID NO: 521620 - RNA, 21 nt, Human
uggagccgguggccaggaagg

SEQ ID NO: 521621 - RNA, 32 nt, Human
uggagccucacugucugauuuucccagacguu

SEQ ID NO: 521622 - RNA, 32 nt, Human
uggagccucacuuccagcccagccugggcccg

SEQ ID NO: 521623 - RNA, 32 nt, Human
uggagccucagcaaccugugcuauccaauagc

SEQ ID NO: 521624 - RNA, 32 nt, Human
uggagccucagcccuguccuggccacgggccg

SEQ ID NO: 521625 - RNA, 32 nt, Human
uggagccucagcucuguuucuuucucugggua

SEQ ID NO: 521626 - RNA, 32 nt, Human
uggagccucagcugccccuccaacacagcccu

SEQ ID NO: 521627 - RNA, 31 nt, Human
uggagccucccugaauaccuguccauggaug

SEQ ID NO: 521628 - RNA, 32 nt, Human
uggagccuccugggagaucuucagacccaggg

SEQ ID NO: 521629 - RNA, 32 nt, Human
uggagccuccugggcauguuugucugugugcu

SEQ ID NO: 521630 - RNA, 32 nt, Human
uggagccucggcaauuauuucugugauucugu

SEQ ID NO: 521631 - RNA, 32 nt, Human
uggagccucugcccuccuccagcccggauggc

SEQ ID NO: 521632 - RNA, 32 nt, Human
uggagccucuucugggacccagccaugagugu

SEQ ID NO: 521633 - RNA, 32 nt, Human
uggagccucuuuuuccuucuucagcaggaagg

SEQ ID NO: 521634 - RNA, 32 nt, Human
uggagccugaacugaaagaccaucacagcuug

SEQ ID NO: 521635 - RNA, 32 nt, Human
uggagccugcagccccugccuucccugggugg

SEQ ID NO: 521636 - RNA, 32 nt, Human
uggagccugcagcugagucugugcccgagaca

SEQ ID NO: 521637 - RNA, 32 nt, Human
uggagccugcaggaggagaggcuggggagggu

SEQ ID NO: 521638 - RNA, 32 nt, Human
uggagccugcagggcaggucaggcugguucag

SEQ ID NO: 521639 - RNA, 32 nt, Human
uggagccugcaguuggucacagaugauacugc

SEQ ID NO: 521640 - RNA, 17 nt, Human
uggagccugcccugcag

SEQ ID NO: 521641 - RNA, 32 nt, Human
uggagccugccugcagcccgaggucccacucu

SEQ ID NO: 521642 - RNA, 32 nt, Human
uggagccugccuggucucuggggguguugagu

SEQ ID NO: 521643 - RNA, 18 nt, Human
uggagccuggaaggggga

SEQ ID NO: 521644 - RNA, 32 nt, Human
uggagccugggaaguugaggcugcagugagcc

SEQ ID NO: 521645 - RNA, 32 nt, Human
uggagccugggacauucuggaagcauggaagg

SEQ ID NO: 521646 - RNA, 32 nt, Human
uggagccugucaggaacuccucacuguuuaaa

SEQ ID NO: 521647 - RNA, 32 nt, Human
uggagccuguccugccaaguggcaagagugug

SEQ ID NO: 521648 - RNA, 32 nt, Human
uggagccuuaaagauggagaugacagaaauga

SEQ ID NO: 521649 - RNA, 17 nt, Human
uggagccuuccagcaga

SEQ ID NO: 521650 - RNA, 32 nt, Human
uggagccuuccagcagacuucaguagcucauu

SEQ ID NO: 521651 - RNA, 32 nt, Human
uggagccuuccuccucuacuuucuaggcaccu

SEQ ID NO: 521652 - RNA, 32 nt, Human
uggagcgacacccaggcaggagagggggaaga

SEQ ID NO: 521653 - RNA, 32 nt, Human
uggagcgacagaaccaggaguaccaggugcuc

SEQ ID NO: 521654 - RNA, 32 nt, Human
uggagcgacgucacugacccugucuuuguccc

SEQ ID NO: 521655 - RNA, 32 nt, Human
uggagcgagagggaggcagguggacgcugcag

SEQ ID NO: 521656 - RNA, 32 nt, Human
uggagcgaggguggcuuuggggugggggcuug

SEQ ID NO: 521657 - RNA, 21 nt, Human
uggagcgaucucggcucacug

SEQ ID NO: 521658 - RNA, 32 nt, Human
uggagcgcagcgguaaagagcaagggguuggu

SEQ ID NO: 521659 - RNA, 32 nt, Human
uggagcgcaguggcaggaucucagcucaacac

SEQ ID NO: 521660 - RNA, 21 nt, Human
uggagcgcaugguggugguga

SEQ ID NO: 521661 - RNA, 18 nt, Human
uggagcggacccagcgag

SEQ ID NO: 521662 - RNA, 23 nt, Human
uggagcggagacgggaggccugg

SEQ ID NO: 521663 - RNA, 32 nt, Human
uggagcggagcuugccugccugccuguggaga

SEQ ID NO: 521664 - RNA, 32 nt, Human
uggagcggaggacccgagcggcugaggagaga

SEQ ID NO: 521665 - RNA, 19 nt, Human
uggagcggccagugggcag

SEQ ID NO: 521666 - RNA, 32 nt, Human
uggagcggcuguuccgcagcaccaugcuguag

SEQ ID NO: 521667 - RNA, 32 nt, Human
uggagcgggaggcguugccguggggccucgag

SEQ ID NO: 521668 - RNA, 32 nt, Human
uggagcgggcagagcgggggcaguugauagaa

SEQ ID NO: 521669 - RNA, 32 nt, Human
uggagcggggaggcgaggagggggcugugagu

SEQ ID NO: 521670 - RNA, 18 nt, Human
uggagcggggaggcgggc

SEQ ID NO: 521671 - RNA, 32 nt, Human
uggagcgguacaggggucucucuucauccacc

SEQ ID NO: 521672 - RNA, 31 nt, Human
uggagcgucggacauggaugggugaacugac

SEQ ID NO: 521673 - RNA, 32 nt, Human
uggagcgugaugcccagaagugugugaacugg

SEQ ID NO: 521674 - RNA, 32 nt, Human
uggagcuacagggagagaaacaggaggagacu

SEQ ID NO: 521675 - RNA, 32 nt, Human
uggagcuacauccugcuuccuuugggccuggg

SEQ ID NO: 521676 - RNA, 32 nt, Human
uggagcuaccuuccuguguaugcugagguaca

SEQ ID NO: 521677 - RNA, 32 nt, Human
uggagcuacugccuugcccuuccuucccuccc

SEQ ID NO: 521678 - RNA, 32 nt, Human
uggagcuacugggaggguaaagccauuugaag

SEQ ID NO: 521679 - RNA, 32 nt, Human
uggagcuagagaggcaggcaagcaguuggguu

SEQ ID NO: 521680 - RNA, 32 nt, Human
uggagcuauccaggguuuucauccaaagguug

SEQ ID NO: 521681 - RNA, 32 nt, Human
uggagcuaucucaucuaaguguuccugaugcc

SEQ ID NO: 521682 - RNA, 32 nt, Human
uggagcuaucuguggucuuagggaaggaucca

SEQ ID NO: 521683 - RNA, 32 nt, Human
uggagcucaagucaccagccacacaaccagau

SEQ ID NO: 521684 - RNA, 32 nt, Human
uggagcucacagugaucagugaccacaucauu

SEQ ID NO: 521685 - RNA, 32 nt, Human
uggagcucacucucuucagcuuccggcccuca

SEQ ID NO: 521686 - RNA, 32 nt, Human
uggagcucacugcacuccagcagucaugggac

SEQ ID NO: 521687 - RNA, 32 nt, Human
uggagcucagaggcagcuuacguugugauuag

SEQ ID NO: 521688 - RNA, 32 nt, Human
uggagcucagcagcagcagcugguuuggaaga

SEQ ID NO: 521689 - RNA, 19 nt, Human
uggagcucagccgagcccc

SEQ ID NO: 521690 - RNA, 32 nt, Human
uggagcucauggagaaauggauagaaagcaau

SEQ ID NO: 521691 - RNA, 32 nt, Human
uggagcucauuuccaggcgcccuucccucuuc

SEQ ID NO: 521692 - RNA, 22 nt, Human
uggagcucccccauuucuggcu

SEQ ID NO: 521693 - RNA, 32 nt, Human
uggagcuccgaaugugcuuaaguggaaagaua

SEQ ID NO: 521694 - RNA, 32 nt, Human
uggagcuccugcugggcuauggggaagggagg

SEQ ID NO: 521695 - RNA, 25 nt, Human
uggagcuccuuccucucugguucca

SEQ ID NO: 521696 - RNA, 32 nt, Human
uggagcucgggaguucaagaccagccugggca

SEQ ID NO: 521697 - RNA, 32 nt, Human
uggagcucuccaggaaagccaagcuggcggcc

SEQ ID NO: 521698 - RNA, 32 nt, Human
uggagcucuccuggcccaggccuggcgggcac

SEQ ID NO: 521699 - RNA, 32 nt, Human
uggagcucugugggucucuggaagaggaacca

SEQ ID NO: 521700 - RNA, 32 nt, Human
uggagcucuucccagccucccaucugacuaca

SEQ ID NO: 521701 - RNA, 32 nt, Human
uggagcugaaggaggaauggcaggaugaagaa

SEQ ID NO: 521702 - RNA, 32 nt, Human
uggagcugaaggaggugguuguggggaaccac

SEQ ID NO: 521703 - RNA, 32 nt, Human
uggagcugaauuugaaugcaagccuuggcacc

SEQ ID NO: 521704 - RNA, 32 nt, Human
uggagcugacgauuuugagggcugaggcuggu

SEQ ID NO: 521705 - RNA, 32 nt, Human
uggagcugagaagaggaggaggugggggcugg

SEQ ID NO: 521706 - RNA, 32 nt, Human
uggagcugagggaaggcagagcugggucucac

SEQ ID NO: 521707 - RNA, 32 nt, Human
uggagcugauuaggcugggauuugaggugaua

SEQ ID NO: 521708 - RNA, 32 nt, Human
uggagcugcagcugggacugugaggaccgaga

SEQ ID NO: 521709 - RNA, 23 nt, Human
uggagcugcaggaucccagggga

SEQ ID NO: 521710 - RNA, 32 nt, Human
uggagcugccaagugagggguuaaagaagagg

SEQ ID NO: 521711 - RNA, 21 nt, Human
uggagcugccagcagcacccc

SEQ ID NO: 521712 - RNA, 32 nt, Human
uggagcugcccacugucuccccagccaacgcu

SEQ ID NO: 521713 - RNA, 32 nt, Human
uggagcugcccugccuuucucaaguauuuauu

SEQ ID NO: 521714 - RNA, 31 nt, Human
uggagcugccucugugggcgguucgggagau

SEQ ID NO: 521715 - RNA, 32 nt, Human
uggagcugcugcguucugugaaugacuuucug

SEQ ID NO: 521716 - RNA, 32 nt, Human
uggagcugcuucaguccaucucccagaggcau

SEQ ID NO: 521717 - RNA, 32 nt, Human
uggagcuggagaagcugggacacauggcacca

SEQ ID NO: 521718 - RNA, 32 nt, Human
uggagcuggaggaggaaaaggcaggcagugga

SEQ ID NO: 521719 - RNA, 32 nt, Human
uggagcuggagugagguggaggggccgcaagc

SEQ ID NO: 521720 - RNA, 17 nt, Human
uggagcuggaugccugg

SEQ ID NO: 521721 - RNA, 24 nt, Human
uggagcuggccuagggaggccugg

SEQ ID NO: 521722 - RNA, 18 nt, Human
uggagcuggcggcagcug

SEQ ID NO: 521723 - RNA, 22 nt, Human
uggagcuggcuuccuuuucccu

SEQ ID NO: 521724 - RNA, 21 nt, Human
uggagcugggaacccagcgag

SEQ ID NO: 521725 - RNA, 32 nt, Human
uggagcugggaaggcaggaaaccggcuagaug

SEQ ID NO: 521726 - RNA, 32 nt, Human
uggagcugggcaagggcaggcagcaaaugggg

SEQ ID NO: 521727 - RNA, 32 nt, Human
uggagcugggcacugcccugccucaacagggu

SEQ ID NO: 521728 - RNA, 32 nt, Human
uggagcugggccuacauuggaaacaagccccu

SEQ ID NO: 521729 - RNA, 32 nt, Human
uggagcugggcuggggcaggggagaaagacag

SEQ ID NO: 521730 - RNA, 32 nt, Human
uggagcugggcuguggucuggggcaggccagc

SEQ ID NO: 521731 - RNA, 32 nt, Human
uggagcuggugcagacaccaaggcugcccagu

SEQ ID NO: 521732 - RNA, 32 nt, Human
uggagcuguacuuggccagggugucaaaggga

SEQ ID NO: 521733 - RNA, 18 nt, Human
uggagcugucccagcgaa

SEQ ID NO: 521734 - RNA, 32 nt, Human
uggagcugucuuugcuggaggccgaggcggcg

SEQ ID NO: 521735 - RNA, 32 nt, Human
uggagcugugugccuccacuccaaggcugccu

SEQ ID NO: 521736 - RNA, 32 nt, Human
uggagcuguucuguagccgggaugacagcucu

SEQ ID NO: 521737 - RNA, 19 nt, Human
uggagcuguuuccccaagu

SEQ ID NO: 521738 - RNA, 32 nt, Human
uggagcuucauaacuuuagcuuuuuccuaaaa

SEQ ID NO: 521739 - RNA, 21 nt, Human
uggagcuuccugcagccuccu

SEQ ID NO: 521740 - RNA, 32 nt, Human
uggagcuucuccucagcuccucugagcagcca

SEQ ID NO: 521741 - RNA, 32 nt, Human
uggagcuugccaaggagcacuggcugcggggc

SEQ ID NO: 521742 - RNA, 21 nt, Human
uggagcuuggaagccugcucc

SEQ ID NO: 521743 - RNA, 32 nt, Human
uggagcuuggugggggaggugggcgcagcagg

SEQ ID NO: 521744 - RNA, 32 nt, Human
uggagcuugucccagaucuggagcuucccagg

SEQ ID NO: 521745 - RNA, 32 nt, Human
uggagcuuuaagaacauacuuaguuucucaug

SEQ ID NO: 521746 - RNA, 32 nt, Human
uggagcuuuauuaguuucuuuuguagguguca

SEQ ID NO: 521747 - RNA, 32 nt, Human
uggagcuuugagagaaaaacagaagggugaug

SEQ ID NO: 521748 - RNA, 32 nt, Human
uggagcuuugggaacagucuguccuuacagag

SEQ ID NO: 521749 - RNA, 23 nt, Human
uggagcuuuuaggggaaaaugaa

SEQ ID NO: 521750 - RNA, 23 nt, Human
uggagcuuuuucuuugggccaua

SEQ ID NO: 521751 - RNA, 32 nt, Human
uggaggaaaagaacaaagaagcacgugucuua

SEQ ID NO: 521752 - RNA, 21 nt, Human
uggaggaaaagcuggggccag

SEQ ID NO: 521753 - RNA, 32 nt, Human
uggaggaaaugagggagauacggagugggagg

SEQ ID NO: 521754 - RNA, 32 nt, Human
uggaggaaccaccacagcagugccuucucguc

SEQ ID NO: 521755 - RNA, 22 nt, Human
uggaggaaccgauuucagggaa

SEQ ID NO: 521756 - RNA, 20 nt, Human
uggaggaaccgcccagugaa

SEQ ID NO: 521757 - RNA, 32 nt, Human
uggaggaacggagacaaaggaggauucauguc

SEQ ID NO: 521758 - RNA, 32 nt, Human
uggaggaacuaccuggccaaaacacuggccag

SEQ ID NO: 521759 - RNA, 32 nt, Human
uggaggaacugcuuccuguagggcaagaacug

SEQ ID NO: 521760 - RNA, 32 nt, Human
uggaggaagaggaggaggaggaggaggaagcu

SEQ ID NO: 521761 - RNA, 32 nt, Human
uggaggaagaggagggacaaaugaggucaagu

SEQ ID NO: 521762 - RNA, 32 nt, Human
uggaggaagaggccucgcgcagaggagggagc

SEQ ID NO: 521763 - RNA, 22 nt, Human
uggaggaagcccacccagcaag

SEQ ID NO: 521764 - RNA, 32 nt, Human
uggaggaagccuccaaguagaggggagaccug

SEQ ID NO: 521765 - RNA, 32 nt, Human
uggaggaaggacggggcugagguggugggcag

SEQ ID NO: 521766 - RNA, 22 nt, Human
uggaggaaguagcuucggcaag

SEQ ID NO: 521767 - RNA, 32 nt, Human
uggaggaauacauuuuauucuguccaugaagc

SEQ ID NO: 521768 - RNA, 32 nt, Human
uggaggaauagucucuucucuucaccucaaua

SEQ ID NO: 521769 - RNA, 32 nt, Human
uggaggacaagccugaagacacugccacauuc

SEQ ID NO: 521770 - RNA, 32 nt, Human
uggaggacacaccgaccccaccccaugcugcc

SEQ ID NO: 521771 - RNA, 20 nt, Human
uggaggacacucccaucaga

SEQ ID NO: 521772 - RNA, 32 nt, Human
uggaggacagacagcaauucuaugagugcuca

SEQ ID NO: 521773 - RNA, 32 nt, Human
uggaggacaguggcacaaucauggcugauugc

SEQ ID NO: 521774 - RNA, 21 nt, Human
uggaggaccaguggagacacu

SEQ ID NO: 521775 - RNA, 32 nt, Human
uggaggacccgccucuuggcagccagcugaga

SEQ ID NO: 521776 - RNA, 32 nt, Human
uggaggaccuggagguggacggucagaaaguu

SEQ ID NO: 521777 - RNA, 32 nt, Human
uggaggaccugggaggagggaguguguccuuu

SEQ ID NO: 521778 - RNA, 32 nt, Human
uggaggaccuguacacccaaagacugaauugg

SEQ ID NO: 521779 - RNA, 32 nt, Human
uggaggacgaaucacuuuacagacaagauuaa

SEQ ID NO: 521780 - RNA, 32 nt, Human
uggaggacucugccacccacucuugggaaaca

SEQ ID NO: 521781 - RNA, 32 nt, Human
uggaggacuggcugaggggagacuacuucccu

SEQ ID NO: 521782 - RNA, 32 nt, Human
uggaggacuggguagagacauuggagggaagg

SEQ ID NO: 521783 - RNA, 32 nt, Human
uggaggacuuccagaaaauuaccacuguugga

SEQ ID NO: 521784 - RNA, 32 nt, Human
uggaggagaacagaugugcggcuccguccugg

SEQ ID NO: 521785 - RNA, 21 nt, Human
uggaggagaagaggagugagg

SEQ ID NO: 521786 - RNA, 25 nt, Human
uggaggagaccccgccaguggggug

SEQ ID NO: 521787 - RNA, 22 nt, Human
uggaggagacugcagcaaauua

SEQ ID NO: 521788 - RNA, 32 nt, Human
uggaggagagagagcucaccaugcucagguaa

SEQ ID NO: 521789 - RNA, 32 nt, Human
uggaggagagaguggcacccucugauugucug

SEQ ID NO: 521790 - RNA, 32 nt, Human
uggaggagaggauaauuuccacuguguggaau

SEQ ID NO: 521791 - RNA, 32 nt, Human
uggaggagaggccggcuugggguggggccucg

SEQ ID NO: 521792 - RNA, 18 nt, Human
uggaggagaggcuaggug

SEQ ID NO: 521793 - RNA, 20 nt, Human
uggaggagauggaggaagug

SEQ ID NO: 521794 - RNA, 22 nt, Human
uggaggagcacaggugauagug

SEQ ID NO: 521795 - RNA, 18 nt, Human
uggaggagcaggaaggug

SEQ ID NO: 521796 - RNA, 21 nt, Human
uggaggagcagucugcgggug

SEQ ID NO: 521797 - RNA, 19 nt, Human
uggaggagccauugcuuug

SEQ ID NO: 521798 - RNA, 32 nt, Human
uggaggagcccugagcugggaggcagcaaagg

SEQ ID NO: 521799 - RNA, 32 nt, Human
uggaggagccggagguggaggguggggucugg

SEQ ID NO: 521800 - RNA, 32 nt, Human
uggaggagcgucgccaacaucaugcccuaaac

SEQ ID NO: 521801 - RNA, 25 nt, Human
uggaggagcgugaguucucagcgga

SEQ ID NO: 521802 - RNA, 32 nt, Human
uggaggagcugcagagauguccggccagagcc

SEQ ID NO: 521803 - RNA, 32 nt, Human
uggaggagcuugggugacagccaggugagcac

SEQ ID NO: 521804 - RNA, 32 nt, Human
uggaggaggaaauaaagggaaagggaagucgu

SEQ ID NO: 521805 - RNA, 32 nt, Human
uggaggaggaagaaggggcacagcacagucca

SEQ ID NO: 521806 - RNA, 32 nt, Human
uggaggaggaagagaagcaggagagagaaagc

SEQ ID NO: 521807 - RNA, 32 nt, Human
uggaggaggaagagggcauggcggccucacug

SEQ ID NO: 521808 - RNA, 32 nt, Human
uggaggaggagagacgggaggggaccauuugg

SEQ ID NO: 521809 - RNA, 32 nt, Human
uggaggaggaggagcauuuccugcaggaggcu

SEQ ID NO: 521810 - RNA, 32 nt, Human
uggaggaggaggaggaagagguggaggaggag

SEQ ID NO: 521811 - RNA, 32 nt, Human
uggaggaggaggaggaagaucaggaggaggag

SEQ ID NO: 521812 - RNA, 32 nt, Human
uggaggaggaggaggagaaggaggagggcagc

SEQ ID NO: 521813 - RNA, 32 nt, Human
uggaggaggaggaggaggaggagaggggccuc

SEQ ID NO: 521814 - RNA, 32 nt, Human
uggaggaggaggaggaggaggaggagguggcg

SEQ ID NO: 521815 - RNA, 32 nt, Human
uggaggaggaggaggaggaggugguggaggag

SEQ ID NO: 521816 - RNA, 32 nt, Human
uggaggaggaggaggaggauacgccagucagc

SEQ ID NO: 521817 - RNA, 32 nt, Human
uggaggaggaggcagagaggaguggagggcgg

SEQ ID NO: 521818 - RNA, 32 nt, Human
uggaggaggaggcggcggcugcgggacggucc

SEQ ID NO: 521819 - RNA, 32 nt, Human
uggaggaggagguggggcuggcgcugaagccg

SEQ ID NO: 521820 - RNA, 19 nt, Human
uggaggaggcagugggggc

SEQ ID NO: 521821 - RNA, 32 nt, Human
uggaggagggcagaggcagugugggcugauga

SEQ ID NO: 521822 - RNA, 20 nt, Human
uggaggagggccccagcgag

SEQ ID NO: 521823 - RNA, 32 nt, Human
uggaggagggcgaugugcugugcccuggcugc

SEQ ID NO: 521824 - RNA, 21 nt, Human
uggaggaggggacaugaggug

SEQ ID NO: 521825 - RNA, 18 nt, Human
uggaggaggggcgagcug

SEQ ID NO: 521826 - RNA, 32 nt, Human
uggaggaggggcgagcuguggagcagccaccc

SEQ ID NO: 521827 - RNA, 18 nt, Human
uggaggaggggguaaggu

SEQ ID NO: 521828 - RNA, 17 nt, Human
uggaggaggggguacag

SEQ ID NO: 521829 - RNA, 32 nt, Human
uggaggagguacaugggcuggggaaggagagg

SEQ ID NO: 521830 - RNA, 32 nt, Human
uggaggaggugugggcugacuaccucccagaa

SEQ ID NO: 521831 - RNA, 18 nt, Human
uggaggagucagagugag

SEQ ID NO: 521832 - RNA, 32 nt, Human
uggaggaguccaggccauggaggcagaauccu

SEQ ID NO: 521833 - RNA, 31 nt, Human
uggaggagugagaggagccaaggaggguggg

SEQ ID NO: 521834 - RNA, 32 nt, Human
uggaggaguggguggagacaaggagggaguaa

SEQ ID NO: 521835 - RNA, 32 nt, Human
uggaggaguugaguuugguugacuugaggacu

SEQ ID NO: 521836 - RNA, 19 nt, Human
uggaggaguuuccuuccca

SEQ ID NO: 521837 - RNA, 32 nt, Human
uggaggaucacuugaguccaggaguccgagac

SEQ ID NO: 521838 - RNA, 22 nt, Human
uggaggauccaccccaucacca

SEQ ID NO: 521839 - RNA, 32 nt, Human
uggaggaucccacccuucugcucugaugucuu

SEQ ID NO: 521840 - RNA, 20 nt, Human
uggaggaucuacuuagcaaa

SEQ ID NO: 521841 - RNA, 32 nt, Human
uggaggaucuuaaagagaccaguuacagaugc

SEQ ID NO: 521842 - RNA, 32 nt, Human
uggaggaugagcuguagggggcuggaguggaa

SEQ ID NO: 521843 - RNA, 20 nt, Human
uggaggauggagagagggga

SEQ ID NO: 521844 - RNA, 32 nt, Human
uggaggauggcuucugcugcuaaaaauacaaa

SEQ ID NO: 521845 - RNA, 32 nt, Human
uggaggauggggaaguggaggcugacauuaag

SEQ ID NO: 521846 - RNA, 32 nt, Human
uggaggaugucaucaggcuggcccagaaggag

SEQ ID NO: 521847 - RNA, 18 nt, Human
uggaggauguccacauca

SEQ ID NO: 521848 - RNA, 20 nt, Human
uggaggauugauucgguaga

SEQ ID NO: 521849 - RNA, 21 nt, Human
uggaggcaaacaccuuccccu

SEQ ID NO: 521850 - RNA, 32 nt, Human
uggaggcaaagcauucuuucugugacuauuuu

SEQ ID NO: 521851 - RNA, 32 nt, Human
uggaggcaacagauguucauauuucuaguauu

SEQ ID NO: 521852 - RNA, 32 nt, Human
uggaggcacaacgcaccagacacucacagcaa

SEQ ID NO: 521853 - RNA, 32 nt, Human
uggaggcacccaaacuggaacuucauuugucu

SEQ ID NO: 521854 - RNA, 32 nt, Human
uggaggcacccagggaccuggccagccgugca

SEQ ID NO: 521855 - RNA, 21 nt, Human
uggaggcagacaagaugcuca

SEQ ID NO: 521856 - RNA, 32 nt, Human
uggaggcagagcaguccucucuggggagccug

SEQ ID NO: 521857 - RNA, 32 nt, Human
uggaggcagagcccaggguaggggacagagcu

SEQ ID NO: 521858 - RNA, 32 nt, Human
uggaggcagagggagcgggcacggggccggca

SEQ ID NO: 521859 - RNA, 32 nt, Human
uggaggcagagguaaacuuggagaggacagga

SEQ ID NO: 521860 - RNA, 32 nt, Human
uggaggcaggcgcgaucagccgaacucuaggg

SEQ ID NO: 521861 - RNA, 32 nt, Human
uggaggcagggagaaugcgacucuccaaaacc

SEQ ID NO: 521862 - RNA, 32 nt, Human
uggaggcaggggcagaggugacgacagugccc

SEQ ID NO: 521863 - RNA, 32 nt, Human
uggaggcagggugagaucagaggaccggggca

SEQ ID NO: 521864 - RNA, 32 nt, Human
uggaggcaguaggacaaggugcaggcaggcug

SEQ ID NO: 521865 - RNA, 32 nt, Human
uggaggcaguugcuuugcaagauggcugagga

SEQ ID NO: 521866 - RNA, 32 nt, Human
uggaggcaucuugacuuaguugcugggagccu

SEQ ID NO: 521867 - RNA, 22 nt, Human
uggaggcauuauccucagcaaa

SEQ ID NO: 521868 - RNA, 32 nt, Human
uggaggcauucuaagucacaggaugagacagg

SEQ ID NO: 521869 - RNA, 32 nt, Human
uggaggccaacgaaaucugccuccuucaauca

SEQ ID NO: 521870 - RNA, 32 nt, Human
uggaggccaagagucugagaccagccuggcua

SEQ ID NO: 521871 - RNA, 32 nt, Human
uggaggccaauggagaagacagggagauggug

SEQ ID NO: 521872 - RNA, 32 nt, Human
uggaggccaccaggagcauccaugagcgggga

SEQ ID NO: 521873 - RNA, 32 nt, Human
uggaggccacguggucacugaccucauuuccu

SEQ ID NO: 521874 - RNA, 22 nt, Human
uggaggccacucagcccaggga

SEQ ID NO: 521875 - RNA, 22 nt, Human
uggaggccagagacacugcuca

SEQ ID NO: 521876 - RNA, 21 nt, Human
uggaggccagagcucggcaga

SEQ ID NO: 521877 - RNA, 19 nt, Human
uggaggccagcagaccccu

SEQ ID NO: 521878 - RNA, 32 nt, Human
uggaggccaggaguucaauaccagccugggca

SEQ ID NO: 521879 - RNA, 32 nt, Human
uggaggccaggccguggccagagcagauacgu

SEQ ID NO: 521880 - RNA, 32 nt, Human
uggaggccagugccagcaccugcccagugggc

SEQ ID NO: 521881 - RNA, 20 nt, Human
uggaggcccaaggucgggga

SEQ ID NO: 521882 - RNA, 32 nt, Human
uggaggcccaggaaugggcgggcaggacaccc

SEQ ID NO: 521883 - RNA, 32 nt, Human
uggaggcccagguggagguagccagugccaag

SEQ ID NO: 521884 - RNA, 21 nt, Human
uggaggccccaccccagaggg

SEQ ID NO: 521885 - RNA, 22 nt, Human
uggaggcccccacugacccuca

SEQ ID NO: 521886 - RNA, 32 nt, Human
uggaggcccccugguguguguggugcacucca

SEQ ID NO: 521887 - RNA, 24 nt, Human
uggaggccccgggggguucaggga

SEQ ID NO: 521888 - RNA, 32 nt, Human
uggaggccccucucucaccucaaggcugccug

SEQ ID NO: 521889 - RNA, 32 nt, Human
uggaggcccgggcuggaggggcaguguugcug

SEQ ID NO: 521890 - RNA, 24 nt, Human
uggaggcccugcagacacugcuca

SEQ ID NO: 521891 - RNA, 32 nt, Human
uggaggcccuggagaaggauauggcccugaag

SEQ ID NO: 521892 - RNA, 32 nt, Human
uggaggccgacagcaggacuccgucagugauu

SEQ ID NO: 521893 - RNA, 32 nt, Human
uggaggccgaugaagacaagaaggaggagggg

SEQ ID NO: 521894 - RNA, 17 nt, Human
uggaggccgcccugcag

SEQ ID NO: 521895 - RNA, 32 nt, Human
uggaggccguggucagaaacagguugaauugg

SEQ ID NO: 521896 - RNA, 32 nt, Human
uggaggccgugguggaaggcuugguggccacu

SEQ ID NO: 521897 - RNA, 32 nt, Human
uggaggccuaggcuggcccuaggaccuucuug

SEQ ID NO: 521898 - RNA, 32 nt, Human
uggaggccuaucucccucagaacggcgcgaga

SEQ ID NO: 521899 - RNA, 24 nt, Human
uggaggccuccaagcugcugcuca

SEQ ID NO: 521900 - RNA, 23 nt, Human
uggaggccuccuguccucgggga

SEQ ID NO: 521901 - RNA, 32 nt, Human
uggaggccucggggaguggcuuuuccagcucu

SEQ ID NO: 521902 - RNA, 32 nt, Human
uggaggccucugagccuccccugugccuuggg

SEQ ID NO: 521903 - RNA, 32 nt, Human
uggaggccugacaucgaagaccuguguguuuu

SEQ ID NO: 521904 - RNA, 22 nt, Human
uggaggccugcuuccagcccca

SEQ ID NO: 521905 - RNA, 22 nt, Human
uggaggccuggagcccaggaga

SEQ ID NO: 521906 - RNA, 21 nt, Human
uggaggccuggcuggugcuca

SEQ ID NO: 521907 - RNA, 32 nt, Human
uggaggccuggcuggugcucacauacaauaau

SEQ ID NO: 521908 - RNA, 32 nt, Human
uggaggccugggaacaggguuuauacuaagua

SEQ ID NO: 521909 - RNA, 26 nt, Human
uggaggccuguguccuuguccagggg

SEQ ID NO: 521910 - RNA, 20 nt, Human
uggaggccuuacagagugcu

SEQ ID NO: 521911 - RNA, 32 nt, Human
uggaggccuuccugccugccuuccagcguggc

SEQ ID NO: 521912 - RNA, 21 nt, Human
uggaggccuugaugaggccca

SEQ ID NO: 521913 - RNA, 32 nt, Human
uggaggccuuucuuucccgcuaggcucccagc

SEQ ID NO: 521914 - RNA, 24 nt, Human
uggaggcgcuucagcaccgcggcc

SEQ ID NO: 521915 - RNA, 32 nt, Human
uggaggcggaagcgugaaauaaggacugagug

SEQ ID NO: 521916 - RNA, 32 nt, Human
uggaggcggaggaggaggcggaggaggguggc

SEQ ID NO: 521917 - RNA, 32 nt, Human
uggaggcgggaaaaucauuugaggucagaagu

SEQ ID NO: 521918 - RNA, 32 nt, Human
uggaggcggggcugcaucuggcuuggugguag

SEQ ID NO: 521919 - RNA, 32 nt, Human
uggaggcgugugccaccaugcccagcuaauuc

SEQ ID NO: 521920 - RNA, 32 nt, Human
uggaggcuauucuuguuucuccaucucaaguc

SEQ ID NO: 521921 - RNA, 32 nt, Human
uggaggcucacaccuauaaucccaacacuuug

SEQ ID NO: 521922 - RNA, 32 nt, Human
uggaggcucaggggaccccauggggacaggca

SEQ ID NO: 521923 - RNA, 32 nt, Human
uggaggcucauugucucagagcccagacaguu

SEQ ID NO: 521924 - RNA, 32 nt, Human
uggaggcuccacccugugggacgucaccaguu

SEQ ID NO: 521925 - RNA, 32 nt, Human
uggaggcuccagggcaggaaggggaggaucca

SEQ ID NO: 521926 - RNA, 22 nt, Human
uggaggcuccauccuuucuccu

SEQ ID NO: 521927 - RNA, 32 nt, Human
uggaggcuccccucgcgguccggggcugcgcg

SEQ ID NO: 521928 - RNA, 32 nt, Human
uggaggcuccggaccaagccccuucagcuucu

SEQ ID NO: 521929 - RNA, 32 nt, Human
uggaggcucgccucucuggccgggugcaguga

SEQ ID NO: 521930 - RNA, 32 nt, Human
uggaggcucugugagcccugcagcccucagaa

SEQ ID NO: 521931 - RNA, 32 nt, Human
uggaggcugaaagucuuugaauccagagauuu

SEQ ID NO: 521932 - RNA, 32 nt, Human
uggaggcugagcaggaagcccuggagaaggac

SEQ ID NO: 521933 - RNA, 32 nt, Human
uggaggcugaugugcuuuuggucagugaacca

SEQ ID NO: 521934 - RNA, 32 nt, Human
uggaggcugcuggccguuuccuacugccuggg

SEQ ID NO: 521935 - RNA, 32 nt, Human
uggaggcugggaaguccaagaugaggguguca

SEQ ID NO: 521936 - RNA, 32 nt, Human
uggaggcugggaaguucaagaucaaggcacua

SEQ ID NO: 521937 - RNA, 32 nt, Human
uggaggcugggacaggggucccugccagggau

SEQ ID NO: 521938 - RNA, 18 nt, Human
uggaggcugggagccugg

SEQ ID NO: 521939 - RNA, 32 nt, Human
uggaggcuggggcagagaugggcgugacccag

SEQ ID NO: 521940 - RNA, 20 nt, Human
uggaggcugggucagagggg

SEQ ID NO: 521941 - RNA, 32 nt, Human
uggaggcugguccaccucccucagcuuccagg

SEQ ID NO: 521942 - RNA, 32 nt, Human
uggaggcuguggacagaaacaggucagugaug

SEQ ID NO: 521943 - RNA, 32 nt, Human
uggaggcuucaaggcccugccugcugcacgcc

SEQ ID NO: 521944 - RNA, 32 nt, Human
uggaggcuuccagacagccacaguuagugccc

SEQ ID NO: 521945 - RNA, 27 nt, Human
uggaggcuuuuccaacgucuucaggga

SEQ ID NO: 521946 - RNA, 18 nt, Human
uggagggaaacgagcaaa

SEQ ID NO: 521947 - RNA, 18 nt, Human
uggagggaaagccacaaa

SEQ ID NO: 521948 - RNA, 32 nt, Human
uggagggaaagccacaaaagggggcuauagua

SEQ ID NO: 521949 - RNA, 19 nt, Human
uggagggaaccccagggag

SEQ ID NO: 521950 - RNA, 21 nt, Human
uggagggaagaaagaaguaaa

SEQ ID NO: 521951 - RNA, 19 nt, Human
uggagggaagagaauagca

SEQ ID NO: 521952 - RNA, 20 nt, Human
uggagggaagaggcaggaaa

SEQ ID NO: 521953 - RNA, 18 nt, Human
uggagggaagaguccagc

SEQ ID NO: 521954 - RNA, 19 nt, Human
uggagggaagaugcagggg

SEQ ID NO: 521955 - RNA, 17 nt, Human
uggagggaagccgugaa

SEQ ID NO: 521956 - RNA, 17 nt, Human
uggagggaagcgggaag

SEQ ID NO: 521957 - RNA, 32 nt, Human
uggagggaagcugggggagaagacugaacuca

SEQ ID NO: 521958 - RNA, 20 nt, Human
uggagggaaggagcuacgag

SEQ ID NO: 521959 - RNA, 19 nt, Human
uggagggaagucccaggga

SEQ ID NO: 521960 - RNA, 21 nt, Human
uggagggaaguccuaaguaaa

SEQ ID NO: 521961 - RNA, 18 nt, Human
uggagggaaucuagggaa

SEQ ID NO: 521962 - RNA, 25 nt, Human
uggagggacagagcagaggggccag

SEQ ID NO: 521963 - RNA, 32 nt, Human
uggagggacuccugggacaguccuccacccug

SEQ ID NO: 521964 - RNA, 32 nt, Human
uggagggacucgugagccggagcccagaaauc

SEQ ID NO: 521965 - RNA, 32 nt, Human
uggagggacuggacuccucuccagcuccccac

SEQ ID NO: 521966 - RNA, 20 nt, Human
uggagggagacaccagcagg

SEQ ID NO: 521967 - RNA, 22 nt, Human
uggagggagaggcuuaggcaga

SEQ ID NO: 521968 - RNA, 20 nt, Human
uggagggagagggaagcaag

SEQ ID NO: 521969 - RNA, 32 nt, Human
uggagggagagggagcgucagaagcccggagg

SEQ ID NO: 521970 - RNA, 20 nt, Human
uggagggagcaugcggcaga

SEQ ID NO: 521971 - RNA, 32 nt, Human
uggagggagccacagagagggguccaggcuuu

SEQ ID NO: 521972 - RNA, 32 nt, Human
uggagggagccacugagcacagcaaggcacca

SEQ ID NO: 521973 - RNA, 18 nt, Human
uggagggagccugucaaa

SEQ ID NO: 521974 - RNA, 32 nt, Human
uggagggagcuuccuuccuuccuuccuggaca

SEQ ID NO: 521975 - RNA, 23 nt, Human
uggagggaggaacaacgagcaga

SEQ ID NO: 521976 - RNA, 22 nt, Human
uggagggaggagagaagacaga

SEQ ID NO: 521977 - RNA, 21 nt, Human
uggagggaggagcccaacaga

SEQ ID NO: 521978 - RNA, 32 nt, Human
uggagggagggagggaggggagcauggugucu

SEQ ID NO: 521979 - RNA, 32 nt, Human
uggagggaggggcagagcgguguggacuuccc

SEQ ID NO: 521980 - RNA, 32 nt, Human
uggagggaggggcagggccuugcaggggauug

SEQ ID NO: 521981 - RNA, 32 nt, Human
uggagggaggggcuuuaauuggaggccccgua

SEQ ID NO: 521982 - RNA, 32 nt, Human
uggagggaggugguguguucacgugagccuac

SEQ ID NO: 521983 - RNA, 19 nt, Human
uggagggaguacaagcaaa

SEQ ID NO: 521984 - RNA, 32 nt, Human
uggagggaguuucauuaaaugcuaacuacuuu

SEQ ID NO: 521985 - RNA, 25 nt, Human
uggagggaucgcagagcccggcaag

SEQ ID NO: 521986 - RNA, 22 nt, Human
uggagggaucugggugccggca

SEQ ID NO: 521987 - RNA, 22 nt, Human
uggagggaugacuuuuaguaaa

SEQ ID NO: 521988 - RNA, 21 nt, Human
uggagggaugccacccagcaa

SEQ ID NO: 521989 - RNA, 32 nt, Human
uggagggauggaaaacuccucugcagcaucag

SEQ ID NO: 521990 - RNA, 19 nt, Human
uggagggauggccagggaa

SEQ ID NO: 521991 - RNA, 19 nt, Human
uggagggauuuccuacaag

SEQ ID NO: 521992 - RNA, 32 nt, Human
uggagggcaaauucugguggaacuuuugggcc

SEQ ID NO: 521993 - RNA, 32 nt, Human
uggagggcaagggguuuccacaguugcugcuc

SEQ ID NO: 521994 - RNA, 20 nt, Human
uggagggcagaucucgcgag

SEQ ID NO: 521995 - RNA, 32 nt, Human
uggagggcaggggcucucccuaggggcauagc

SEQ ID NO: 521996 - RNA, 32 nt, Human
uggagggcagugacauaaucauagcucacugu

SEQ ID NO: 521997 - RNA, 32 nt, Human
uggagggcaguggcacgaucucagcucacugc

SEQ ID NO: 521998 - RNA, 32 nt, Human
uggagggcaguggcacgaucuuggcuuucugc

SEQ ID NO: 521999 - RNA, 32 nt, Human
uggagggcaguggcgugaucucggcucacugc

SEQ ID NO: 522000 - RNA, 32 nt, Human
uggagggcauuugugcuaaauugcccagugcu

SEQ ID NO: 522001 - RNA, 32 nt, Human
uggagggcauuuuccagggcacugcuuucccc

SEQ ID NO: 522002 - RNA, 32 nt, Human
uggagggccaggcagaggcuguucuggaaggc

SEQ ID NO: 522003 - RNA, 21 nt, Human
uggagggcgccuguaauccca

SEQ ID NO: 522004 - RNA, 21 nt, Human
uggagggcgccuguaguccca

SEQ ID NO: 522005 - RNA, 32 nt, Human
uggagggcguagggugggggcagugaggaaug

SEQ ID NO: 522006 - RNA, 32 nt, Human
uggagggcucagaaggagacaggaaaaugugg

SEQ ID NO: 522007 - RNA, 20 nt, Human
uggagggcucccuuucccuc

SEQ ID NO: 522008 - RNA, 27 nt, Human
uggagggcucggggcuuccucuccucu

SEQ ID NO: 522009 - RNA, 32 nt, Human
uggagggcucuggggaugaugacuccuuuccc

SEQ ID NO: 522010 - RNA, 32 nt, Human
uggagggcugccaggaaacauggugcaagugc

SEQ ID NO: 522011 - RNA, 32 nt, Human
uggagggcugcuucugccccgaggggacucug

SEQ ID NO: 522012 - RNA, 32 nt, Human
uggagggcuguggacagcccagcaaccugucg

SEQ ID NO: 522013 - RNA, 32 nt, Human
uggagggcuucguggaggaagggagaauugag

SEQ ID NO: 522014 - RNA, 32 nt, Human
uggaggggaaaaagauccauucuacguauccu

SEQ ID NO: 522015 - RNA, 18 nt, Human
uggaggggaaacagcgga

SEQ ID NO: 522016 - RNA, 21 nt, Human
uggaggggaagaaacaggaaa

SEQ ID NO: 522017 - RNA, 18 nt, Human
uggaggggaagcggcaga

SEQ ID NO: 522018 - RNA, 24 nt, Human
uggaggggacugguggggacucag

SEQ ID NO: 522019 - RNA, 23 nt, Human
uggaggggagaauuucuagggga

SEQ ID NO: 522020 - RNA, 32 nt, Human
uggaggggagagaaggauucuaggggugugga

SEQ ID NO: 522021 - RNA, 18 nt, Human
uggaggggagaucccugc

SEQ ID NO: 522022 - RNA, 32 nt, Human
uggaggggagccaaggccagggagagccguca

SEQ ID NO: 522023 - RNA, 32 nt, Human
uggaggggagccaccaccccugaccauguaga

SEQ ID NO: 522024 - RNA, 20 nt, Human
uggaggggagcccaagugag

SEQ ID NO: 522025 - RNA, 21 nt, Human
uggaggggcacggaggagccg

SEQ ID NO: 522026 - RNA, 21 nt, Human
uggaggggcagagccaggaag

SEQ ID NO: 522027 - RNA, 32 nt, Human
uggaggggcagccugugccugccuuuguguca

SEQ ID NO: 522028 - RNA, 32 nt, Human
uggaggggcaggcacaggagacagcaguggcc

SEQ ID NO: 522029 - RNA, 21 nt, Human
uggaggggcaguggagaucag

SEQ ID NO: 522030 - RNA, 19 nt, Human
uggaggggcaguguacagg

SEQ ID NO: 522031 - RNA, 32 nt, Human
uggaggggcauagcuagugagacagagcucgc

SEQ ID NO: 522032 - RNA, 21 nt, Human
uggaggggcccagcagggcca

SEQ ID NO: 522033 - RNA, 32 nt, Human
uggaggggcccaggcucugagcuccacagguc

SEQ ID NO: 522034 - RNA, 32 nt, Human
uggaggggccccaggauuuguugggggcaaag

SEQ ID NO: 522035 - RNA, 32 nt, Human
uggaggggccccugcuucuccagccuggaccc

SEQ ID NO: 522036 - RNA, 21 nt, Human
uggaggggcccgaggagccag

SEQ ID NO: 522037 - RNA, 32 nt, Human
uggaggggcuggcugaucacacaugcccccuc

SEQ ID NO: 522038 - RNA, 32 nt, Human
uggaggggcuugcaacaaggaggcaggcccug

SEQ ID NO: 522039 - RNA, 32 nt, Human
uggagggggaaaugaggucaagagagauuucc

SEQ ID NO: 522040 - RNA, 32 nt, Human
uggagggggaauggcagcagggguuggggaaa

SEQ ID NO: 522041 - RNA, 32 nt, Human
uggagggggaaugugugcuggccaggguggag

SEQ ID NO: 522042 - RNA, 24 nt, Human
uggagggggagcacccggggccag

SEQ ID NO: 522043 - RNA, 32 nt, Human
uggagggggaggcaggaggauugcugucagcc

SEQ ID NO: 522044 - RNA, 21 nt, Human
uggagggggcagaugcaggug

SEQ ID NO: 522045 - RNA, 32 nt, Human
uggagggggcagugcuggaggagaagaaagca

SEQ ID NO: 522046 - RNA, 23 nt, Human
uggagggggccaaugggggucag

SEQ ID NO: 522047 - RNA, 32 nt, Human
uggagggggccagcaggucacggggcagaauc

SEQ ID NO: 522048 - RNA, 21 nt, Human
uggagggggccggggacccag

SEQ ID NO: 522049 - RNA, 32 nt, Human
uggagggggcggcuccuggagaucaggccaaa

SEQ ID NO: 522050 - RNA, 22 nt, Human
uggagggggcuggggucacaga

SEQ ID NO: 522051 - RNA, 19 nt, Human
uggaggggggaacagcgag

SEQ ID NO: 522052 - RNA, 20 nt, Human
uggaggggggacccacuaaa

SEQ ID NO: 522053 - RNA, 21 nt, Human
uggaggggggccuggggcaga

SEQ ID NO: 522054 - RNA, 22 nt, Human
uggaggggguggguccggggga

SEQ ID NO: 522055 - RNA, 32 nt, Human
uggaggggguugaaggauccugacagaccaug

SEQ ID NO: 522056 - RNA, 21 nt, Human
uggaggggguuugguuuguga

SEQ ID NO: 522057 - RNA, 21 nt, Human
uggagggguauuuucagcaga

SEQ ID NO: 522058 - RNA, 32 nt, Human
uggaggggucaccaagccagagcugggcucca

SEQ ID NO: 522059 - RNA, 20 nt, Human
uggaggggucagggccgcuc

SEQ ID NO: 522060 - RNA, 22 nt, Human
uggagggguccuuuagggccag

SEQ ID NO: 522061 - RNA, 32 nt, Human
uggagggguggaggaaggagguguugggcagc

SEQ ID NO: 522062 - RNA, 18 nt, Human
uggagggguggcagcgga

SEQ ID NO: 522063 - RNA, 32 nt, Human
uggaggguaaaugauguggugccugaggucug

SEQ ID NO: 522064 - RNA, 32 nt, Human
uggaggguagggcugaaaguccuaaccuucua

SEQ ID NO: 522065 - RNA, 21 nt, Human
uggaggguaguccucaguaaa

SEQ ID NO: 522066 - RNA, 32 nt, Human
uggagggucaaguggcuucuucugagcgcuga

SEQ ID NO: 522067 - RNA, 32 nt, Human
uggagggucauugccagaucuaaccaaccucc

SEQ ID NO: 522068 - RNA, 32 nt, Human
uggaggguccagagucucacucuguugcccag

SEQ ID NO: 522069 - RNA, 22 nt, Human
uggaggguccgcacacccgccc

SEQ ID NO: 522070 - RNA, 32 nt, Human
uggagggucgccuggcuuauucccauguguga

SEQ ID NO: 522071 - RNA, 32 nt, Human
uggagggucugcaggcuuaggcugcagcaggc

SEQ ID NO: 522072 - RNA, 32 nt, Human
uggagggucugcuucuagcucagcuguuucuc

SEQ ID NO: 522073 - RNA, 32 nt, Human
uggagggucuucaugaaacacagcugccagga

SEQ ID NO: 522074 - RNA, 32 nt, Human
uggagggugaaaggagggagaggaucagcaaa

SEQ ID NO: 522075 - RNA, 32 nt, Human
uggagggugacuggcccuggcuccugcuauga

SEQ ID NO: 522076 - RNA, 32 nt, Human
uggagggugagguuugagcuguggcugaaagc

SEQ ID NO: 522077 - RNA, 32 nt, Human
uggagggugccagguguguggugaccuucugg

SEQ ID NO: 522078 - RNA, 21 nt, Human
uggagggugccuguaauccca

SEQ ID NO: 522079 - RNA, 24 nt, Human
uggagggugccuguaaucccagcu

SEQ ID NO: 522080 - RNA, 32 nt, Human
uggagggugccuuuagucccagcucuuuggga

SEQ ID NO: 522081 - RNA, 32 nt, Human
uggagggugggcacugcugggccaugccacuu

SEQ ID NO: 522082 - RNA, 32 nt, Human
uggagggugggcauuuaguggugacccuugca

SEQ ID NO: 522083 - RNA, 32 nt, Human
uggaggguggggcuuggccaggagugaccaga

SEQ ID NO: 522084 - RNA, 32 nt, Human
uggagggugugccugcucugugccccaugcug

SEQ ID NO: 522085 - RNA, 32 nt, Human
uggaggguguggcggaaacuugaggcuuggag

SEQ ID NO: 522086 - RNA, 32 nt, Human
uggagguacugagacagggugcugaugggaag

SEQ ID NO: 522087 - RNA, 32 nt, Human
uggagguauguucuucaugcaagggcaguucc

SEQ ID NO: 522088 - RNA, 32 nt, Human
uggaggucaggaguucgaaaccagccuggcca

SEQ ID NO: 522089 - RNA, 32 nt, Human
uggaggucaggaguuugagaccagccuggcca

SEQ ID NO: 522090 - RNA, 32 nt, Human
uggaggucagggaggugggaaggugggugggc

SEQ ID NO: 522091 - RNA, 32 nt, Human
uggaggucaguggaggaugcagccaguggcca

SEQ ID NO: 522092 - RNA, 21 nt, Human
uggaggucccagccacaggga

SEQ ID NO: 522093 - RNA, 21 nt, Human
uggaggucccccugugccaga

SEQ ID NO: 522094 - RNA, 32 nt, Human
uggaggucggggacaaaaugaagaauguguuu

SEQ ID NO: 522095 - RNA, 32 nt, Human
uggaggucucacagcagcaccagaagaacaaa

SEQ ID NO: 522096 - RNA, 32 nt, Human
uggaggucucacuauguugcccaggcugaucu

SEQ ID NO: 522097 - RNA, 32 nt, Human
uggaggugaacaagcaaacccagagggcucca

SEQ ID NO: 522098 - RNA, 32 nt, Human
uggaggugaaugucucugccuccuguaggccu

SEQ ID NO: 522099 - RNA, 32 nt, Human
uggaggugacaaggccuuagggccaaaagucu

SEQ ID NO: 522100 - RNA, 31 nt, Human
uggaggugacagagagaagaggccauugguc

SEQ ID NO: 522101 - RNA, 19 nt, Human
uggaggugaucccaggaaa

SEQ ID NO: 522102 - RNA, 32 nt, Human
uggaggugaugcacagaugucacugggaaacc

SEQ ID NO: 522103 - RNA, 20 nt, Human
uggaggugaugugggcccuc

SEQ ID NO: 522104 - RNA, 19 nt, Human
uggaggugauuccagugaa

SEQ ID NO: 522105 - RNA, 23 nt, Human
uggaggugcagguggcauguaga

SEQ ID NO: 522106 - RNA, 20 nt, Human
uggaggugccaggggcccuc

SEQ ID NO: 522107 - RNA, 32 nt, Human
uggaggugcucaauacugcugaacuguacacu

SEQ ID NO: 522108 - RNA, 32 nt, Human
uggagguggaacuucccaggaggggaagggac

SEQ ID NO: 522109 - RNA, 32 nt, Human
uggagguggacugcauagcccagagcccuuca

SEQ ID NO: 522110 - RNA, 32 nt, Human
uggagguggagcugcaccccuuguagagaaug

SEQ ID NO: 522111 - RNA, 32 nt, Human
uggagguggaggcagagauuacugugggccaa

SEQ ID NO: 522112 - RNA, 32 nt, Human
uggagguggagguggagguugcagugagccga

SEQ ID NO: 522113 - RNA, 32 nt, Human
uggagguggauggggaggaugguugcacaaca

SEQ ID NO: 522114 - RNA, 32 nt, Human
uggaggugggagcuuagggaaugcagagccua

SEQ ID NO: 522115 - RNA, 21 nt, Human
uggaggugggcagggcugcuc

SEQ ID NO: 522116 - RNA, 32 nt, Human
uggaggugggcggaucacgugaggucaggagu

SEQ ID NO: 522117 - RNA, 20 nt, Human
uggaggugggcugggcccuc

SEQ ID NO: 522118 - RNA, 32 nt, Human
uggagguggggugggagaaagagcuaaaauca

SEQ ID NO: 522119 - RNA, 32 nt, Human
uggaggugugcagacuggucucugccugggcu

SEQ ID NO: 522120 - RNA, 32 nt, Human
uggagguguguauguuuauauguauauaacaa

SEQ ID NO: 522121 - RNA, 32 nt, Human
uggagguguuagacaccagcccccugcauccu

SEQ ID NO: 522122 - RNA, 32 nt, Human
uggagguguucuggacaguggggagggcucca

SEQ ID NO: 522123 - RNA, 32 nt, Human
uggagguuacacaggguaaagugcaguaugau

SEQ ID NO: 522124 - RNA, 32 nt, Human
uggagguucacaguggauuucuuucugccgaa

SEQ ID NO: 522125 - RNA, 32 nt, Human
uggagguuccuggaagguggugaaccuggaga

SEQ ID NO: 522126 - RNA, 32 nt, Human
uggagguucuguccucccugcugcucucagga

SEQ ID NO: 522127 - RNA, 32 nt, Human
uggagguugaaaagauuucacuacaguguucu

SEQ ID NO: 522128 - RNA, 32 nt, Human
uggagguugaguucgagaccagccuggccaca

SEQ ID NO: 522129 - RNA, 32 nt, Human
uggagguuguagugagacaagauugcgcuacu

SEQ ID NO: 522130 - RNA, 32 nt, Human
uggagguuguggcggagguuguggugagcuga

SEQ ID NO: 522131 - RNA, 24 nt, Human
uggagguuuaccccaugaugcuca

SEQ ID NO: 522132 - RNA, 32 nt, Human
uggagguuuagcaggaggaucacuugagccca

SEQ ID NO: 522133 - RNA, 31 nt, Human
uggagguuucucaaggagcuggagacuucag

SEQ ID NO: 522134 - RNA, 20 nt, Human
uggagguuugcagugaggug

SEQ ID NO: 522135 - RNA, 32 nt, Human
uggagguuuuuagguagauucauagaauauaa

SEQ ID NO: 522136 - RNA, 24 nt, Human
uggaguaaacuagcuuggaccuug

SEQ ID NO: 522137 - RNA, 32 nt, Human
uggaguaaagcacaauuuuggcaauuuuaaag

SEQ ID NO: 522138 - RNA, 18 nt, Human
uggaguaacugagccugu

SEQ ID NO: 522139 - RNA, 32 nt, Human
uggaguacaauggcacaaacacugcucacugc

SEQ ID NO: 522140 - RNA, 32 nt, Human
uggaguacacagaaggaaagcaaagaagagca

SEQ ID NO: 522141 - RNA, 32 nt, Human
uggaguacaggaguuuggggcuguagugugua

SEQ ID NO: 522142 - RNA, 32 nt, Human
uggaguacaguggcaugaucauagcucacugc

SEQ ID NO: 522143 - RNA, 32 nt, Human
uggaguacaguggcaugaucauggcucacugc

SEQ ID NO: 522144 - RNA, 32 nt, Human
uggaguaccaugggcauuaucccaggcccaca

SEQ ID NO: 522145 - RNA, 32 nt, Human
uggaguacccuggcuguucuccacacucacaa

SEQ ID NO: 522146 - RNA, 32 nt, Human
uggaguaccggcagcugcucauccccugugca

SEQ ID NO: 522147 - RNA, 32 nt, Human
uggaguacgagaugcaacccagcccccaaacc

SEQ ID NO: 522148 - RNA, 32 nt, Human
uggaguagagccagagguauaacugaauaaga

SEQ ID NO: 522149 - RNA, 32 nt, Human
uggaguagcggggagagcgggaagccugaggg

SEQ ID NO: 522150 - RNA, 21 nt, Human
uggaguagcuggaacuacagg

SEQ ID NO: 522151 - RNA, 32 nt, Human
uggaguagcugggaccacaaucacacaccacc

SEQ ID NO: 522152 - RNA, 23 nt, Human
uggaguagcugggacuacaggug

SEQ ID NO: 522153 - RNA, 23 nt, Human
uggaguagcugggauuacaggug

SEQ ID NO: 522154 - RNA, 32 nt, Human
uggaguaggaauagaagugcaagcuggaaagg

SEQ ID NO: 522155 - RNA, 32 nt, Human
uggaguaggagaaaagagagauuagaucuuaa

SEQ ID NO: 522156 - RNA, 23 nt, Human
uggaguagggcgggaaggggcag

SEQ ID NO: 522157 - RNA, 20 nt, Human
uggaguaugagcucagcaga

SEQ ID NO: 522158 - RNA, 32 nt, Human
uggaguaugagcugcccccgcccgcuccugag

SEQ ID NO: 522159 - RNA, 32 nt, Human
uggaguauucuugaggagccuuuugcucauag

SEQ ID NO: 522160 - RNA, 22 nt, Human
uggagucaaccccagccccuca

SEQ ID NO: 522161 - RNA, 32 nt, Human
uggagucaagcagucauggcucagggacacuc

SEQ ID NO: 522162 - RNA, 32 nt, Human
uggagucaauaugcuagucuuggauugccugc

SEQ ID NO: 522163 - RNA, 32 nt, Human
uggagucagaugagcaaggacauugccccaag

SEQ ID NO: 522164 - RNA, 23 nt, Human
uggagucagcccugcuuccccuc

SEQ ID NO: 522165 - RNA, 22 nt, Human
uggagucagccucgcaggccuc

SEQ ID NO: 522166 - RNA, 32 nt, Human
uggagucaggcagagccgguauugaaaguggg

SEQ ID NO: 522167 - RNA, 21 nt, Human
uggagucagggcccccugugc

SEQ ID NO: 522168 - RNA, 32 nt, Human
uggagucaguaucgagccugaccaccgcaagc

SEQ ID NO: 522169 - RNA, 20 nt, Human
uggagucaguccccucugug

SEQ ID NO: 522170 - RNA, 32 nt, Human
uggagucauaaaggaauucaauuccuaggguu

SEQ ID NO: 522171 - RNA, 32 nt, Human
uggagucaucaucucuacccccagucuggcuu

SEQ ID NO: 522172 - RNA, 32 nt, Human
uggagucauccaggugcugccacaugacaggc

SEQ ID NO: 522173 - RNA, 32 nt, Human
uggagucaucuuccugcccuugccccaugccc

SEQ ID NO: 522174 - RNA, 32 nt, Human
uggagucauggagccucccaaacauagggaaa

SEQ ID NO: 522175 - RNA, 32 nt, Human
uggagucaugguccgguguccuuuucacuaca

SEQ ID NO: 522176 - RNA, 32 nt, Human
uggaguccagaacaaaguuagggagcaaacca

SEQ ID NO: 522177 - RNA, 32 nt, Human
uggaguccagaccugggcccugguucccccag

SEQ ID NO: 522178 - RNA, 32 nt, Human
uggaguccagagccuucauucaaucucagauu

SEQ ID NO: 522179 - RNA, 32 nt, Human
uggaguccagauggcaggcuacaguugggaag

SEQ ID NO: 522180 - RNA, 22 nt, Human
uggaguccagcaaggugacuca

SEQ ID NO: 522181 - RNA, 32 nt, Human
uggaguccagcaauccucccaccucaaccucu

SEQ ID NO: 522182 - RNA, 32 nt, Human
uggaguccagccugggugacagagugagaccc

SEQ ID NO: 522183 - RNA, 32 nt, Human
uggaguccaggaguucaagguggcagugagcu

SEQ ID NO: 522184 - RNA, 32 nt, Human
uggaguccagucucuucugcuggcagaaagca

SEQ ID NO: 522185 - RNA, 32 nt, Human
uggaguccaguggugugaucauagcucacugc

SEQ ID NO: 522186 - RNA, 22 nt, Human
uggagucccaucucucugagca

SEQ ID NO: 522187 - RNA, 32 nt, Human
uggaguccgaggaggaggagaaggaggccugc

SEQ ID NO: 522188 - RNA, 32 nt, Human
uggaguccguguccaagguccucugugagguc

SEQ ID NO: 522189 - RNA, 32 nt, Human
uggaguccuagagaggcagacaauguugauga

SEQ ID NO: 522190 - RNA, 32 nt, Human
uggaguccuccguuccccucagccucugagcu

SEQ ID NO: 522191 - RNA, 18 nt, Human
uggaguccuccuagcaga

SEQ ID NO: 522192 - RNA, 32 nt, Human
uggaguccugcucugugugguccagguccuuu

SEQ ID NO: 522193 - RNA, 32 nt, Human
uggagucuaaacuuuuucauugccagugcccc

SEQ ID NO: 522194 - RNA, 32 nt, Human
uggagucuccaccuucuugacacuuggggccc

SEQ ID NO: 522195 - RNA, 32 nt, Human
uggagucuccaccuuuuccuaccaagucccca

SEQ ID NO: 522196 - RNA, 32 nt, Human
uggagucuccaggaaccccagccuguuagggu

SEQ ID NO: 522197 - RNA, 32 nt, Human
uggagucucgcucucuggagugcaauggcgca

SEQ ID NO: 522198 - RNA, 32 nt, Human
uggagucucgcucucuugcccaggcuggagug

SEQ ID NO: 522199 - RNA, 32 nt, Human
uggagucucguucugucacccaggcuggcgug

SEQ ID NO: 522200 - RNA, 32 nt, Human
uggagucucucugcacuccagccugggugaca

SEQ ID NO: 522201 - RNA, 32 nt, Human
uggagucucugucacccaggcuggagugcaau

SEQ ID NO: 522202 - RNA, 32 nt, Human
uggagucucuuuuaugagggcacuaauuccaa

SEQ ID NO: 522203 - RNA, 32 nt, Human
uggagucugaagauggagaccaacgagucuac

SEQ ID NO: 522204 - RNA, 32 nt, Human
uggagucugaagccugcagguccggggaggag

SEQ ID NO: 522205 - RNA, 32 nt, Human
uggagucugagccggugguugcagcggaggcg

SEQ ID NO: 522206 - RNA, 32 nt, Human
uggagucugauggggagaagaaguacccaugc

SEQ ID NO: 522207 - RNA, 32 nt, Human
uggagucugccacccaggcuggaguccagugg

SEQ ID NO: 522208 - RNA, 23 nt, Human
uggagucuggaagcagcagaacu

SEQ ID NO: 522209 - RNA, 30 nt, Human
uggagucuggcucucuggcuccugugcauu

SEQ ID NO: 522210 - RNA, 32 nt, Human
uggagucuggggguacugaucuuuggaaaugu

SEQ ID NO: 522211 - RNA, 32 nt, Human
uggagucuguucuguguugauuugacugccau

SEQ ID NO: 522212 - RNA, 32 nt, Human
uggagucuuaccacucugcugcagggguggaa

SEQ ID NO: 522213 - RNA, 32 nt, Human
uggagucuuaggcaucucugguacaguggggu

SEQ ID NO: 522214 - RNA, 32 nt, Human
uggagucuuccucccuucucccaagucuuucu

SEQ ID NO: 522215 - RNA, 32 nt, Human
uggagucuuguucugucacccaggcuggagug

SEQ ID NO: 522216 - RNA, 32 nt, Human
uggagucuuguucugucacccaggcuggggug

SEQ ID NO: 522217 - RNA, 32 nt, Human
uggagucuuuaaaaauguugaagaauaaaaua

SEQ ID NO: 522218 - RNA, 20 nt, Human
uggagugaaaauccccucca

SEQ ID NO: 522219 - RNA, 32 nt, Human
uggagugaaaggaagggagaaagggaaaaagc

SEQ ID NO: 522220 - RNA, 31 nt, Human
uggagugaaauaaauucagccaacaugugac

SEQ ID NO: 522221 - RNA, 32 nt, Human
uggagugaaauuccacgccaggcacagaauuu

SEQ ID NO: 522222 - RNA, 32 nt, Human
uggagugacagccuuguucucugugauaggaa

SEQ ID NO: 522223 - RNA, 21 nt, Human
uggagugacaguuuccgccca

SEQ ID NO: 522224 - RNA, 18 nt, Human
uggagugaccuggcccca

SEQ ID NO: 522225 - RNA, 32 nt, Human
uggagugacuagaucacaggagcacuggagga

SEQ ID NO: 522226 - RNA, 21 nt, Human
uggagugacugaauuucuaca

SEQ ID NO: 522227 - RNA, 32 nt, Human
uggagugagaaacugggaucccagggggaggg

SEQ ID NO: 522228 - RNA, 32 nt, Human
uggagugagaugggauuuggcgucucguuuuu

SEQ ID NO: 522229 - RNA, 32 nt, Human
uggagugagucaaaccucagcccaggguaauu

SEQ ID NO: 522230 - RNA, 21 nt, Human
uggagugagucaccugcucca

SEQ ID NO: 522231 - RNA, 32 nt, Human
uggagugagucaccugcuccagaagaugccag

SEQ ID NO: 522232 - RNA, 20 nt, Human
uggagugaguuucugcacca

SEQ ID NO: 522233 - RNA, 32 nt, Human
uggagugaucacugccccuuugaacuucuggg

SEQ ID NO: 522234 - RNA, 32 nt, Human
uggagugaugcggccacaagcccagggacacc

SEQ ID NO: 522235 - RNA, 32 nt, Human
uggagugauuuguuggaaaaaguucugaagaa

SEQ ID NO: 522236 - RNA, 32 nt, Human
uggagugcaauggcacguucucagcucacugc

SEQ ID NO: 522237 - RNA, 32 nt, Human
uggagugcaauggcauaauuucugcucaccgc

SEQ ID NO: 522238 - RNA, 32 nt, Human
uggagugcaauggcaugaucucaccgauggcu

SEQ ID NO: 522239 - RNA, 32 nt, Human
uggagugcaauggcgcguucucugcucacuac

SEQ ID NO: 522240 - RNA, 32 nt, Human
uggagugcaauggcgugaucgcugcucaccgc

SEQ ID NO: 522241 - RNA, 32 nt, Human
uggagugcagaggcacagucagaacucacugc

SEQ ID NO: 522242 - RNA, 32 nt, Human
uggagugcagaggcacgaucuccguucacugc

SEQ ID NO: 522243 - RNA, 32 nt, Human
uggagugcagagggcccugaugacaugugugu

SEQ ID NO: 522244 - RNA, 32 nt, Human
uggagugcaggaguucaagaccagccugggca

SEQ ID NO: 522245 - RNA, 32 nt, Human
uggagugcagugacacgaucuuggcucacugc

SEQ ID NO: 522246 - RNA, 32 nt, Human
uggagugcagugacaugaucuuagcucacugc

SEQ ID NO: 522247 - RNA, 32 nt, Human
uggagugcagugacaugaucuuggcugacugc

SEQ ID NO: 522248 - RNA, 32 nt, Human
uggagugcagugacgcgauccugacugacugu

SEQ ID NO: 522249 - RNA, 32 nt, Human
uggagugcagugacucaugucucggcucacug

SEQ ID NO: 522250 - RNA, 32 nt, Human
uggagugcagugagccgagaucacgccacugc

SEQ ID NO: 522251 - RNA, 32 nt, Human
uggagugcagugagcuauuacagugccacugc

SEQ ID NO: 522252 - RNA, 32 nt, Human
uggagugcagugagcugagaucgcaccacugc

SEQ ID NO: 522253 - RNA, 32 nt, Human
uggagugcagugagcugagauugcgccacugc

SEQ ID NO: 522254 - RNA, 32 nt, Human
uggagugcagugaugcgauugaucauggcuca

SEQ ID NO: 522255 - RNA, 32 nt, Human
uggagugcagugaugugaucucggcuuacugu

SEQ ID NO: 522256 - RNA, 32 nt, Human
uggagugcagugaugugaucucgguucacugc

SEQ ID NO: 522257 - RNA, 32 nt, Human
uggagugcagugaugugaucuuggcucacugc

SEQ ID NO: 522258 - RNA, 32 nt, Human
uggagugcagugccaugaucacagcucacugc

SEQ ID NO: 522259 - RNA, 32 nt, Human
uggagugcaguggcaaaaucauggcucacugc

SEQ ID NO: 522260 - RNA, 32 nt, Human
uggagugcaguggcaagaucuuggcucacugc

SEQ ID NO: 522261 - RNA, 32 nt, Human
uggagugcaguggcacaaucaaagcucacugc

SEQ ID NO: 522262 - RNA, 32 nt, Human
uggagugcaguggcacaaucacagcucacugc

SEQ ID NO: 522263 - RNA, 32 nt, Human
uggagugcaguggcacaaucauaccucacugc

SEQ ID NO: 522264 - RNA, 32 nt, Human
uggagugcaguggcacaaucauggcucacugc

SEQ ID NO: 522265 - RNA, 32 nt, Human
uggagugcaguggcacaaucuuagcucacugc

SEQ ID NO: 522266 - RNA, 32 nt, Human
uggagugcaguggcaccaucuuagcucaccgc

SEQ ID NO: 522267 - RNA, 32 nt, Human
uggagugcaguggcacgaucacagcucacugc

SEQ ID NO: 522268 - RNA, 32 nt, Human
uggagugcaguggcacgaucauagcucacuga

SEQ ID NO: 522269 - RNA, 32 nt, Human
uggagugcaguggcacgaucauagcucacugc

SEQ ID NO: 522270 - RNA, 32 nt, Human
uggagugcaguggcacgaucauggcucacugc

SEQ ID NO: 522271 - RNA, 32 nt, Human
uggagugcaguggcacgaucucagcucacugc

SEQ ID NO: 522272 - RNA, 32 nt, Human
uggagugcaguggcacgaucucagcucauugc

SEQ ID NO: 522273 - RNA, 32 nt, Human
uggagugcaguggcacgaucucagcucccugc

SEQ ID NO: 522274 - RNA, 32 nt, Human
uggagugcaguggcacgaucucggcugacugc

SEQ ID NO: 522275 - RNA, 32 nt, Human
uggagugcaguggcacgaucuuagcucacuac

SEQ ID NO: 522276 - RNA, 32 nt, Human
uggagugcaguggcacgaucuuggcucacucc

SEQ ID NO: 522277 - RNA, 32 nt, Human
uggagugcaguggcacgaucuuggcucacugc

SEQ ID NO: 522278 - RNA, 32 nt, Human
uggagugcaguggcacgaucuuggcucgcugc

SEQ ID NO: 522279 - RNA, 32 nt, Human
uggagugcaguggcacgaucuuggcuuacuac

SEQ ID NO: 522280 - RNA, 32 nt, Human
uggagugcaguggcacgauuauggcucauugc

SEQ ID NO: 522281 - RNA, 32 nt, Human
uggagugcaguggcacugaucucggcucacug

SEQ ID NO: 522282 - RNA, 32 nt, Human
uggagugcaguggcagaguugcagcuggcugc

SEQ ID NO: 522283 - RNA, 32 nt, Human
uggagugcaguggcaggaucacagcuuacugc

SEQ ID NO: 522284 - RNA, 32 nt, Human
uggagugcaguggcagugucauggcucacugc

SEQ ID NO: 522285 - RNA, 32 nt, Human
uggagugcaguggcauaaucauaccucauugc

SEQ ID NO: 522286 - RNA, 32 nt, Human
uggagugcaguggcauaaucauagcucaccgc

SEQ ID NO: 522287 - RNA, 32 nt, Human
uggagugcaguggcaucaucucagcucacugc

SEQ ID NO: 522288 - RNA, 32 nt, Human
uggagugcaguggcaugaucacagcucacugc

SEQ ID NO: 522289 - RNA, 32 nt, Human
uggagugcaguggcaugaucauaacucacugc

SEQ ID NO: 522290 - RNA, 32 nt, Human
uggagugcaguggcaugaucauagcucacugc

SEQ ID NO: 522291 - RNA, 32 nt, Human
uggagugcaguggcaugaucauagcucauugc

SEQ ID NO: 522292 - RNA, 32 nt, Human
uggagugcaguggcaugaucaucagugagcgu

SEQ ID NO: 522293 - RNA, 32 nt, Human
uggagugcaguggcaugaucauggcucacugc

SEQ ID NO: 522294 - RNA, 32 nt, Human
uggagugcaguggcaugaucauggcuuacugc

SEQ ID NO: 522295 - RNA, 32 nt, Human
uggagugcaguggcaugaucauugcucacuac

SEQ ID NO: 522296 - RNA, 32 nt, Human
uggagugcaguggcaugaucucagcucacugc

SEQ ID NO: 522297 - RNA, 32 nt, Human
uggagugcaguggcaugaucucagcucacugu

SEQ ID NO: 522298 - RNA, 32 nt, Human
uggagugcaguggcaugaucucagcucgcugc

SEQ ID NO: 522299 - RNA, 32 nt, Human
uggagugcaguggcaugaucucaguuuaugca

SEQ ID NO: 522300 - RNA, 32 nt, Human
uggagugcaguggcaugaucucggcucacuac

SEQ ID NO: 522301 - RNA, 32 nt, Human
uggagugcaguggcaugaucucggcucacugc

SEQ ID NO: 522302 - RNA, 32 nt, Human
uggagugcaguggcaugaucucggcucauugc

SEQ ID NO: 522303 - RNA, 32 nt, Human
uggagugcaguggcaugaucucggcucgcugc

SEQ ID NO: 522304 - RNA, 32 nt, Human
uggagugcaguggcaugaucuggucucacugc

SEQ ID NO: 522305 - RNA, 32 nt, Human
uggagugcaguggcaugaucuuagcucacugc

SEQ ID NO: 522306 - RNA, 32 nt, Human
uggagugcaguggcaugaucuuagcucucugc

SEQ ID NO: 522307 - RNA, 32 nt, Human
uggagugcaguggcaugaucuuggcucacucc

SEQ ID NO: 522308 - RNA, 32 nt, Human
uggagugcaguggcaugaucuuggcucacugc

SEQ ID NO: 522309 - RNA, 32 nt, Human
uggagugcaguggcaugaucuuggcuuacugc

SEQ ID NO: 522310 - RNA, 32 nt, Human
uggagugcaguggcaugaugucggcucacugc

SEQ ID NO: 522311 - RNA, 32 nt, Human
uggagugcaguggcaugauuucggcucacugc

SEQ ID NO: 522312 - RNA, 32 nt, Human
uggagugcaguggcauuaucuagacucacugc

SEQ ID NO: 522313 - RNA, 32 nt, Human
uggagugcaguggccugaucuuggcucacugc

SEQ ID NO: 522314 - RNA, 32 nt, Human
uggagugcaguggccuggucauggcaucaagg

SEQ ID NO: 522315 - RNA, 32 nt, Human
uggagugcaguggcgcaaucauggcucacugc

SEQ ID NO: 522316 - RNA, 32 nt, Human
uggagugcaguggcgccaucucccaggcucaa

SEQ ID NO: 522317 - RNA, 32 nt, Human
uggagugcaguggcgcgaucauggcucacuga

SEQ ID NO: 522318 - RNA, 32 nt, Human
uggagugcaguggcgcgaucaugguucccugc

SEQ ID NO: 522319 - RNA, 32 nt, Human
uggagugcaguggcgcgaucuuagcucacugc

SEQ ID NO: 522320 - RNA, 32 nt, Human
uggagugcaguggcgcgaucuuagcucucugc

SEQ ID NO: 522321 - RNA, 32 nt, Human
uggagugcaguggcgugagcucggcugacugc

SEQ ID NO: 522322 - RNA, 32 nt, Human
uggagugcaguggcgugaucauagcucacugc

SEQ ID NO: 522323 - RNA, 32 nt, Human
uggagugcaguggcgugaucccagcuauauug

SEQ ID NO: 522324 - RNA, 32 nt, Human
uggagugcaguggcgugaucucagcucacugc

SEQ ID NO: 522325 - RNA, 32 nt, Human
uggagugcaguggcgugaucucagcucgcuac

SEQ ID NO: 522326 - RNA, 32 nt, Human
uggagugcaguggcgugaucucagcucgcugc

SEQ ID NO: 522327 - RNA, 32 nt, Human
uggagugcaguggcgugaucucaguucacugc

SEQ ID NO: 522328 - RNA, 32 nt, Human
uggagugcaguggcgugaucuccgcucgcuac

SEQ ID NO: 522329 - RNA, 32 nt, Human
uggagugcaguggcgugaucucggcucaccgc

SEQ ID NO: 522330 - RNA, 32 nt, Human
uggagugcaguggcgugaucucggcucacuac

SEQ ID NO: 522331 - RNA, 32 nt, Human
uggagugcaguggcgugaucucggcucacugc

SEQ ID NO: 522332 - RNA, 32 nt, Human
uggagugcaguggcgugaucucggcucauggc

SEQ ID NO: 522333 - RNA, 32 nt, Human
uggagugcaguggcgugaucucggcucauugc

SEQ ID NO: 522334 - RNA, 32 nt, Human
uggagugcaguggcgugaucucggcucgcuac

SEQ ID NO: 522335 - RNA, 32 nt, Human
uggagugcaguggcgugaucucggcucgcugc

SEQ ID NO: 522336 - RNA, 32 nt, Human
uggagugcaguggcgugaucucggcuuacugc

SEQ ID NO: 522337 - RNA, 32 nt, Human
uggagugcaguggcgugaucucugcucacugc

SEQ ID NO: 522338 - RNA, 32 nt, Human
uggagugcaguggcgugaucugggcucaccuc

SEQ ID NO: 522339 - RNA, 32 nt, Human
uggagugcaguggcgugaucuuggcucacuac

SEQ ID NO: 522340 - RNA, 32 nt, Human
uggagugcaguggcgugaucuuggcucacugc

SEQ ID NO: 522341 - RNA, 32 nt, Human
uggagugcaguggcgugaucuuggcucgcugc

SEQ ID NO: 522342 - RNA, 32 nt, Human
uggagugcaguggcgugaucuuggcugacugc

SEQ ID NO: 522343 - RNA, 32 nt, Human
uggagugcaguggcgugaucuugguucacugc

SEQ ID NO: 522344 - RNA, 32 nt, Human
uggagugcaguggcgugauuucagcucacggc

SEQ ID NO: 522345 - RNA, 32 nt, Human
uggagugcaguggcgugauuuuggcucacugc

SEQ ID NO: 522346 - RNA, 32 nt, Human
uggagugcaguggcgugauuuuggcucacugu

SEQ ID NO: 522347 - RNA, 32 nt, Human
uggagugcaguggcgugucuuggguuacugca

SEQ ID NO: 522348 - RNA, 32 nt, Human
uggagugcaguggcuugaucuuggcucacugc

SEQ ID NO: 522349 - RNA, 32 nt, Human
uggagugcagugggaugaucuuggcucacugc

SEQ ID NO: 522350 - RNA, 32 nt, Human
uggagugcagugguacaaucauggcucacugc

SEQ ID NO: 522351 - RNA, 32 nt, Human
uggagugcagugguaugaccauagcucacugc

SEQ ID NO: 522352 - RNA, 32 nt, Human
uggagugcagugguaugaucauagcugacugc

SEQ ID NO: 522353 - RNA, 32 nt, Human
uggagugcagugguaugaucauggcuugcugc

SEQ ID NO: 522354 - RNA, 32 nt, Human
uggagugcagugguaugaucucaccuuacugc

SEQ ID NO: 522355 - RNA, 32 nt, Human
uggagugcagugguaugaucucagcucacugc

SEQ ID NO: 522356 - RNA, 32 nt, Human
uggagugcagugguaugaucuuggcucacugu

SEQ ID NO: 522357 - RNA, 32 nt, Human
uggagugcaguggugcaaucauagcucacuau

SEQ ID NO: 522358 - RNA, 32 nt, Human
uggagugcaguggugcaaucauagcucacugc

SEQ ID NO: 522359 - RNA, 32 nt, Human
uggagugcaguggugcaaucauagcucauuga

SEQ ID NO: 522360 - RNA, 32 nt, Human
uggagugcaguggugccaucauagcucacugu

SEQ ID NO: 522361 - RNA, 32 nt, Human
uggagugcaguggugcgaucauagcucacugc

SEQ ID NO: 522362 - RNA, 32 nt, Human
uggagugcaguggugcgaucauggcucacugc

SEQ ID NO: 522363 - RNA, 32 nt, Human
uggagugcaguggugcgaucguggcucacuga

SEQ ID NO: 522364 - RNA, 32 nt, Human
uggagugcaguggugcgaucucggcuggcugc

SEQ ID NO: 522365 - RNA, 32 nt, Human
uggagugcaguggugucaucauagcucauugc

SEQ ID NO: 522366 - RNA, 32 nt, Human
uggagugcaguggugugaacagggcuaacugc

SEQ ID NO: 522367 - RNA, 32 nt, Human
uggagugcaguggugugaucacagcucacugc

SEQ ID NO: 522368 - RNA, 32 nt, Human
uggagugcaguggugugaucacggcucacugc

SEQ ID NO: 522369 - RNA, 32 nt, Human
uggagugcaguggugugaucacugcucagugc

SEQ ID NO: 522370 - RNA, 32 nt, Human
uggagugcaguggugugaucauaacucaguau

SEQ ID NO: 522371 - RNA, 32 nt, Human
uggagugcaguggugugaucauagccaauaga

SEQ ID NO: 522372 - RNA, 32 nt, Human
uggagugcaguggugugaucauagcucacuac

SEQ ID NO: 522373 - RNA, 32 nt, Human
uggagugcaguggugugaucauagcucacugc

SEQ ID NO: 522374 - RNA, 32 nt, Human
uggagugcaguggugugaucauagcucacugg

SEQ ID NO: 522375 - RNA, 32 nt, Human
uggagugcaguggugugaucauggcucacugc

SEQ ID NO: 522376 - RNA, 32 nt, Human
uggagugcaguggugugaucaugguucacugc

SEQ ID NO: 522377 - RNA, 32 nt, Human
uggagugcaguggugugauccuggcucacugu

SEQ ID NO: 522378 - RNA, 32 nt, Human
uggagugcaguggugugaucucagcucaccga

SEQ ID NO: 522379 - RNA, 32 nt, Human
uggagugcaguggugugaucucagcucacugc

SEQ ID NO: 522380 - RNA, 32 nt, Human
uggagugcaguggugugaucucagcucagugc

SEQ ID NO: 522381 - RNA, 32 nt, Human
uggagugcaguggugugaucucagcucaucaa

SEQ ID NO: 522382 - RNA, 32 nt, Human
uggagugcaguggugugaucucagcucgcugc

SEQ ID NO: 522383 - RNA, 32 nt, Human
uggagugcaguggugugaucucagcuuacugc

SEQ ID NO: 522384 - RNA, 32 nt, Human
uggagugcaguggugugaucucagcuuauugc

SEQ ID NO: 522385 - RNA, 32 nt, Human
uggagugcaguggugugaucuuggcucaccgu

SEQ ID NO: 522386 - RNA, 32 nt, Human
uggagugcaguggugugaucuuggcucacugc

SEQ ID NO: 522387 - RNA, 32 nt, Human
uggagugcaguggugugaucuuggcucacuug

SEQ ID NO: 522388 - RNA, 32 nt, Human
uggagugcaguggugugaucuuggcucaucgu

SEQ ID NO: 522389 - RNA, 32 nt, Human
uggagugcaguggugugaucuuggcuuucugc

SEQ ID NO: 522390 - RNA, 32 nt, Human
uggagugcagugguugaucauagcucccgggc

SEQ ID NO: 522391 - RNA, 32 nt, Human
uggagugcaguugcaggaucauaguuugcugc

SEQ ID NO: 522392 - RNA, 32 nt, Human
uggagugcauguugacaccagcacuuuuucug

SEQ ID NO: 522393 - RNA, 32 nt, Human
uggagugccacaccccucucucugccaguuca

SEQ ID NO: 522394 - RNA, 32 nt, Human
uggagugcgguggcaugaucucaguucacugc

SEQ ID NO: 522395 - RNA, 32 nt, Human
uggagugcgguggugcgaucauagcucacugc

SEQ ID NO: 522396 - RNA, 32 nt, Human
uggagugcggugguggaaucauagcucacuau

SEQ ID NO: 522397 - RNA, 32 nt, Human
uggagugcucacuaacaagggugagugcucuc

SEQ ID NO: 522398 - RNA, 32 nt, Human
uggagugcugggacuggcagaggaaauuaauu

SEQ ID NO: 522399 - RNA, 32 nt, Human
uggagugcuucacaggggaaacccauccgcau

SEQ ID NO: 522400 - RNA, 32 nt, Human
uggaguggaauuuucuguuacagugaaugcag

SEQ ID NO: 522401 - RNA, 32 nt, Human
uggaguggagaaggggccagggguucugggca

SEQ ID NO: 522402 - RNA, 21 nt, Human
uggaguggagaccuaccucca

SEQ ID NO: 522403 - RNA, 32 nt, Human
uggaguggagagagcacugaaauggggcuugg

SEQ ID NO: 522404 - RNA, 32 nt, Human
uggaguggagagugggcucggguacaugggag

SEQ ID NO: 522405 - RNA, 32 nt, Human
uggaguggagccaaaggaaaagaucguuagag

SEQ ID NO: 522406 - RNA, 32 nt, Human
uggaguggagguggagggaccgaggaaccaug

SEQ ID NO: 522407 - RNA, 32 nt, Human
uggaguggaguggcacgaucauagcucacuaa

SEQ ID NO: 522408 - RNA, 32 nt, Human
uggaguggaguggcaugaucucggcugacugc

SEQ ID NO: 522409 - RNA, 32 nt, Human
uggaguggcagcuggggugauggccagggcag

SEQ ID NO: 522410 - RNA, 32 nt, Human
uggaguggccaugucccuugugcauugagugc

SEQ ID NO: 522411 - RNA, 32 nt, Human
uggaguggccugaaagagagcaagaacaugug

SEQ ID NO: 522412 - RNA, 32 nt, Human
uggaguggcguagaguucaguguucgcagucg

SEQ ID NO: 522413 - RNA, 32 nt, Human
uggaguggcucauaccuguaaucccagcacuu

SEQ ID NO: 522414 - RNA, 32 nt, Human
uggaguggcugcagccaucuggauggaggcag

SEQ ID NO: 522415 - RNA, 32 nt, Human
uggagugggaaaaugcugggaccaaagauugg

SEQ ID NO: 522416 - RNA, 21 nt, Human
uggagugggaagaccuaucca

SEQ ID NO: 522417 - RNA, 24 nt, Human
uggagugggaagaguugagacuga

SEQ ID NO: 522418 - RNA, 20 nt, Human
uggagugggagggaggcgca

SEQ ID NO: 522419 - RNA, 32 nt, Human
uggagugggcacaggcaugguaccaccagccu

SEQ ID NO: 522420 - RNA, 32 nt, Human
uggagugggcaggcaggccagggcugcgcauc

SEQ ID NO: 522421 - RNA, 32 nt, Human
uggagugggccccagaccagagaaaaguggua

SEQ ID NO: 522422 - RNA, 32 nt, Human
uggagugggcccugugcaccucaccuggcgga

SEQ ID NO: 522423 - RNA, 23 nt, Human
uggaguggggccucaaagggcag

SEQ ID NO: 522424 - RNA, 32 nt, Human
uggagugggggaacaaaucaauguggcuguuu

SEQ ID NO: 522425 - RNA, 32 nt, Human
uggagugggggucaaccccuccccagucucug

SEQ ID NO: 522426 - RNA, 32 nt, Human
uggagugggugcuugugucugcugucucagag

SEQ ID NO: 522427 - RNA, 32 nt, Human
uggagugguuuaaaacugaucaagcagcucau

SEQ ID NO: 522428 - RNA, 32 nt, Human
uggccuaccuccugaggaccucagccacagau

SEQ ID NO: 522429 - RNA, 32 nt, Human
uggccuaccugagcccaugcagccuggggcca

SEQ ID NO: 522430 - RNA, 32 nt, Human
uggccuacggagcccacccaggcacagccacc

SEQ ID NO: 522431 - RNA, 32 nt, Human
uggccuagacuccaaaggguuggguagaugag

SEQ ID NO: 522432 - RNA, 32 nt, Human
uggccuagauccagccaccacucugaaacuca

SEQ ID NO: 522433 - RNA, 30 nt, Human
uggccuagccucucuguccuucccugaguc

SEQ ID NO: 522434 - RNA, 32 nt, Human
uggccuaggaguucaagaccagccugggcuac

SEQ ID NO: 522435 - RNA, 21 nt, Human
uggccuaggcuggagugcagu

SEQ ID NO: 522436 - RNA, 22 nt, Human
uggccuaggcuggagugcagug

SEQ ID NO: 522437 - RNA, 32 nt, Human
uggccuaggggaggggaagggaggcccacuuc

SEQ ID NO: 522438 - RNA, 32 nt, Human
uggccuaggggcccugaucgcccaccugccug

SEQ ID NO: 522439 - RNA, 32 nt, Human
uggccuagggucuugcuauguugcccaggcug

SEQ ID NO: 522440 - RNA, 24 nt, Human
uggccuaggugauccacccgccuc

SEQ ID NO: 522441 - RNA, 32 nt, Human
uggccuagguuggagugcaauggcgcaaucuc

SEQ ID NO: 522442 - RNA, 19 nt, Human
uggccuagucccuuccaca

SEQ ID NO: 522443 - RNA, 32 nt, Human
uggccuaugauggaugggggcucuguggcaaa

SEQ ID NO: 522444 - RNA, 32 nt, Human
uggccuaugauggaugggggcucuguggugaa

SEQ ID NO: 522445 - RNA, 32 nt, Human
uggccuaugcugcagaaucucacugcagcugg

SEQ ID NO: 522446 - RNA, 32 nt, Human
uggccuauuggcccucaguuuuccuacagagu

SEQ ID NO: 522447 - RNA, 23 nt, Human
uggccucaaacgaccuuccugcc

SEQ ID NO: 522448 - RNA, 32 nt, Human
uggccucaaacuugaacaaagcugcaggcucc

SEQ ID NO: 522449 - RNA, 25 nt, Human
uggccucaaaugauccacccaccuu

SEQ ID NO: 522450 - RNA, 26 nt, Human
uggccucaaaugaucuucccacuuca

SEQ ID NO: 522451 - RNA, 32 nt, Human
uggccucaaauggaugccagaugccaacccca

SEQ ID NO: 522452 - RNA, 26 nt, Human
uggccucaagcaauccgccuaccuca

SEQ ID NO: 522453 - RNA, 26 nt, Human
uggccucaagcaauccucccaccuca

SEQ ID NO: 522454 - RNA, 32 nt, Human
uggccucaagcaauccucccaccucagcaucc

SEQ ID NO: 522455 - RNA, 32 nt, Human
uggccucaagcaauccucccaccucagccucc

SEQ ID NO: 522456 - RNA, 32 nt, Human
uggccucaagcaauccucccaccucggccucc

SEQ ID NO: 522457 - RNA, 26 nt, Human
uggccucaagcaauccucccaccuua

SEQ ID NO: 522458 - RNA, 26 nt, Human
uggccucaagcaauccuuccaccuca

SEQ ID NO: 522459 - RNA, 20 nt, Human
uggccucaagcaguccuccc

SEQ ID NO: 522460 - RNA, 26 nt, Human
uggccucaagcaguccucccaccuca

SEQ ID NO: 522461 - RNA, 26 nt, Human
uggccucaagcaguccucccaccuua

SEQ ID NO: 522462 - RNA, 32 nt, Human
uggccucaagccuaaggaccccaauggcagua

SEQ ID NO: 522463 - RNA, 25 nt, Human
uggccucaagcgauccacccaucuu

SEQ ID NO: 522464 - RNA, 25 nt, Human
uggccucaagcgauccucccaccuc

SEQ ID NO: 522465 - RNA, 26 nt, Human
uggccucaagcgauccucccaccuca

SEQ ID NO: 522466 - RNA, 32 nt, Human
uggccucaagcgauccucccaccucagccucc

SEQ ID NO: 522467 - RNA, 32 nt, Human
uggccucaagcgauccucccaccucgaccucc

SEQ ID NO: 522468 - RNA, 26 nt, Human
uggccucaagcgauccucucaucuca

SEQ ID NO: 522469 - RNA, 26 nt, Human
uggccucaagcuguccucccaucuca

SEQ ID NO: 522470 - RNA, 25 nt, Human
uggccucaagucauuccccaccuua

SEQ ID NO: 522471 - RNA, 26 nt, Human
uggccucaagugauccacccaccuca

SEQ ID NO: 522472 - RNA, 25 nt, Human
uggccucaagugauccaccggccuc

SEQ ID NO: 522473 - RNA, 24 nt, Human
uggccucaagugauccaccuaccu

SEQ ID NO: 522474 - RNA, 26 nt, Human
uggccucaagugauccuccugccuca

SEQ ID NO: 522475 - RNA, 26 nt, Human
uggccucaagugauccuccugccuua

SEQ ID NO: 522476 - RNA, 26 nt, Human
uggccucaagugauccucuugccuca

SEQ ID NO: 522477 - RNA, 25 nt, Human
uggccucaagugauccuuccaccuu

SEQ ID NO: 522478 - RNA, 25 nt, Human
uggccucaagugaucugccgccuca

SEQ ID NO: 522479 - RNA, 26 nt, Human
uggccucaagugaucugccugccuca

SEQ ID NO: 522480 - RNA, 25 nt, Human
uggccucaagugauucacccgccuc

SEQ ID NO: 522481 - RNA, 26 nt, Human
uggccucaagugauucuccugccuca

SEQ ID NO: 522482 - RNA, 32 nt, Human
uggccucaaguuggggcuuggcugggagaagu

SEQ ID NO: 522483 - RNA, 24 nt, Human
uggccucaaucgaucuuccugcca

SEQ ID NO: 522484 - RNA, 31 nt, Human
uggccucacagcuuccuugcaaggcugucac

SEQ ID NO: 522485 - RNA, 32 nt, Human
uggccucaccagaaacugacccugccagaccu

SEQ ID NO: 522486 - RNA, 32 nt, Human
uggccucacccaagccucuucuaaaaaccaug

SEQ ID NO: 522487 - RNA, 32 nt, Human
uggccucacccaggacuuugaugugagaauga

SEQ ID NO: 522488 - RNA, 22 nt, Human
uggccucacgccuguaauccca

SEQ ID NO: 522489 - RNA, 24 nt, Human
uggccucacgccuguaaucccagc

SEQ ID NO: 522490 - RNA, 26 nt, Human
uggccucacgugaucuguccacuuca

SEQ ID NO: 522491 - RNA, 31 nt, Human
uggccucagaccucugggccugugugagcuc

SEQ ID NO: 522492 - RNA, 32 nt, Human
uggccucagagcuuccuggggaccaagauuua

SEQ ID NO: 522493 - RNA, 32 nt, Human
uggccucagauggauggauguguuuggacgag

SEQ ID NO: 522494 - RNA, 32 nt, Human
uggccucagcccccagcaucuccuggggcccc

SEQ ID NO: 522495 - RNA, 32 nt, Human
uggccucaggagcugggggugcagugggggac

SEQ ID NO: 522496 - RNA, 18 nt, Human
uggccucaggcaauuuca

SEQ ID NO: 522497 - RNA, 32 nt, Human
uggccucaggggaccugccuguccucagcucc

SEQ ID NO: 522498 - RNA, 25 nt, Human
uggccucaggugacccgcccgccuu

SEQ ID NO: 522499 - RNA, 26 nt, Human
uggccucaggugauccacccaccuca

SEQ ID NO: 522500 - RNA, 26 nt, Human
uggccucaggugauccacccgccuca

SEQ ID NO: 522501 - RNA, 25 nt, Human
uggccucaggugaucugcccaccuc

SEQ ID NO: 522502 - RNA, 26 nt, Human
uggccucaggugaucugcccaccuca

SEQ ID NO: 522503 - RNA, 25 nt, Human
uggccucaggugaucugcccaccuu

SEQ ID NO: 522504 - RNA, 32 nt, Human
uggccucagguuuauuggcgauaaucacagaa

SEQ ID NO: 522505 - RNA, 32 nt, Human
uggccucagucccuaaaaaugauguggaaagg

SEQ ID NO: 522506 - RNA, 32 nt, Human
uggccucagugcacaguggcccccagccucgg

SEQ ID NO: 522507 - RNA, 20 nt, Human
uggccucauaagcucacaga

SEQ ID NO: 522508 - RNA, 32 nt, Human
uggccucauacagaaagugacaagggcacaag

SEQ ID NO: 522509 - RNA, 32 nt, Human
uggccucauagcuccuccucgccaagcauguc

SEQ ID NO: 522510 - RNA, 32 nt, Human
uggccucaucuccuccugccuuuccucccuua

SEQ ID NO: 522511 - RNA, 22 nt, Human
uggccucaugccuauaauccca

SEQ ID NO: 522512 - RNA, 24 nt, Human
uggccucaugccuauaaucccagc

SEQ ID NO: 522513 - RNA, 32 nt, Human
uggccucauggaggugcugguggagaagauuu

SEQ ID NO: 522514 - RNA, 26 nt, Human
uggccucaugugaucugcccaccuca

SEQ ID NO: 522515 - RNA, 32 nt, Human
uggccucauucucuuucuaaucuugcugguuu

SEQ ID NO: 522516 - RNA, 32 nt, Human
uggccuccaaagugcugggauuacagguguga

SEQ ID NO: 522517 - RNA, 32 nt, Human
uggccuccaagcucugccuccagugcucacuc

SEQ ID NO: 522518 - RNA, 32 nt, Human
uggccuccaagcucugcguccagugcucacuc

SEQ ID NO: 522519 - RNA, 32 nt, Human
uggccuccaccccaccaccaggcccaaugacc

SEQ ID NO: 522520 - RNA, 18 nt, Human
uggccuccagauuccagu

SEQ ID NO: 522521 - RNA, 32 nt, Human
uggccuccagccugggugaccgagugagacug

SEQ ID NO: 522522 - RNA, 32 nt, Human
uggccuccagcuguucuuagugacacacacug

SEQ ID NO: 522523 - RNA, 32 nt, Human
uggccuccagcuugucccucucucacuuucua

SEQ ID NO: 522524 - RNA, 21 nt, Human
uggccuccaggccucuacaca

SEQ ID NO: 522525 - RNA, 26 nt, Human
uggccuccagggugccuccaccugac

SEQ ID NO: 522526 - RNA, 32 nt, Human
uggccuccagucccaucucccccaacacaugu

SEQ ID NO: 522527 - RNA, 32 nt, Human
uggccuccauccucaucucucuugggccaagc

SEQ ID NO: 522528 - RNA, 32 nt, Human
uggccucccaaagugcuagauuacaggcgugg

SEQ ID NO: 522529 - RNA, 32 nt, Human
uggccucccaaagugcuggauuacaggcauag

SEQ ID NO: 522530 - RNA, 32 nt, Human
uggccucccaaaguguuggauuacagguguga

SEQ ID NO: 522531 - RNA, 32 nt, Human
uggccucccaagugcugggauuacaggcgcga

SEQ ID NO: 522532 - RNA, 18 nt, Human
uggccucccacucccaca

SEQ ID NO: 522533 - RNA, 32 nt, Human
uggccucccacuguuuucagcuguguccccca

SEQ ID NO: 522534 - RNA, 26 nt, Human
uggccucccaguuuccccuccugcca

SEQ ID NO: 522535 - RNA, 32 nt, Human
uggccucccaguuuccccuccugccaguccuu

SEQ ID NO: 522536 - RNA, 18 nt, Human
uggccucccauucacaca

SEQ ID NO: 522537 - RNA, 32 nt, Human
uggccuccccaaagugcugggauuacaggcau

SEQ ID NO: 522538 - RNA, 24 nt, Human
uggccuccccuuccccucccugcc

SEQ ID NO: 522539 - RNA, 32 nt, Human
uggccucccgaaagugcugggauuacagucau

SEQ ID NO: 522540 - RNA, 32 nt, Human
uggccucccgggcuguguccgcacucagcagc

SEQ ID NO: 522541 - RNA, 22 nt, Human
uggccucccucccccuaccuca

SEQ ID NO: 522542 - RNA, 19 nt, Human
uggccucccugccuccagu

SEQ ID NO: 522543 - RNA, 32 nt, Human
uggccucccugccuccaguccuucccuagccc

SEQ ID NO: 522544 - RNA, 26 nt, Human
uggccucccuggccugucuccccacu

SEQ ID NO: 522545 - RNA, 19 nt, Human
uggccucccugguucugca

SEQ ID NO: 522546 - RNA, 32 nt, Human
uggccucccuugccuggugccugagugaagga

SEQ ID NO: 522547 - RNA, 32 nt, Human
uggccuccgccagcuccugccuggcugccaga

SEQ ID NO: 522548 - RNA, 22 nt, Human
uggccuccggagccuuccugcu

SEQ ID NO: 522549 - RNA, 32 nt, Human
uggccuccgggaccagggagggaggacgcugg

SEQ ID NO: 522550 - RNA, 32 nt, Human
uggccuccuaagugcugggauuacaggcguga

SEQ ID NO: 522551 - RNA, 32 nt, Human
uggccuccuagagugcugggauuacaggugug

SEQ ID NO: 522552 - RNA, 32 nt, Human
uggccuccuaguuucuaccuaaucaugucccu

SEQ ID NO: 522553 - RNA, 32 nt, Human
uggccuccucauucucuuuugccauuggaaug

SEQ ID NO: 522554 - RNA, 32 nt, Human
uggccuccuccaccaccugccuugugaccaca

SEQ ID NO: 522555 - RNA, 32 nt, Human
uggccuccuccaggagggcuggcuucucugca

SEQ ID NO: 522556 - RNA, 32 nt, Human
uggccuccuccugugugagucccaccaggagc

SEQ ID NO: 522557 - RNA, 32 nt, Human
uggccuccugaguagcugggguugcaggugug

SEQ ID NO: 522558 - RNA, 32 nt, Human
uggccuccugccucccugucuucccauguucu

SEQ ID NO: 522559 - RNA, 32 nt, Human
uggccuccugggugcugggauuacagacguga

SEQ ID NO: 522560 - RNA, 32 nt, Human
uggccuccuugaacuccuccugccuuggccuc

SEQ ID NO: 522561 - RNA, 32 nt, Human
uggccuccuugccugugagauggcacugugac

SEQ ID NO: 522562 - RNA, 32 nt, Human
uggccuccuuggggcuccuguuggcuccuaau

SEQ ID NO: 522563 - RNA, 32 nt, Human
uggccuccuuuuccuuugacuggaccacugcc

SEQ ID NO: 522564 - RNA, 32 nt, Human
uggccucgcacacuggagacccuggugccaga

SEQ ID NO: 522565 - RNA, 22 nt, Human
uggccucgcguccgcccauuca

SEQ ID NO: 522566 - RNA, 21 nt, Human
uggccucuaacccucugcaca

SEQ ID NO: 522567 - RNA, 32 nt, Human
uggccucuacccacuaggugccaggaaugcgc

SEQ ID NO: 522568 - RNA, 18 nt, Human
uggccucuacuccccaca

SEQ ID NO: 522569 - RNA, 18 nt, Human
uggccucuacucugaaca

SEQ ID NO: 522570 - RNA, 20 nt, Human
uggccucuagauuaaugcca

SEQ ID NO: 522571 - RNA, 32 nt, Human
uggccucucaaccucagacuucucagccugcc

SEQ ID NO: 522572 - RNA, 20 nt, Human
uggccucucacuccuucaca

SEQ ID NO: 522573 - RNA, 19 nt, Human
uggccucucagccugcaua

SEQ ID NO: 522574 - RNA, 32 nt, Human
uggccucucagccugcauaacagacugaaaug

SEQ ID NO: 522575 - RNA, 19 nt, Human
uggccucucagcucugcca

SEQ ID NO: 522576 - RNA, 20 nt, Human
uggccucucaggauuccaca

SEQ ID NO: 522577 - RNA, 32 nt, Human
uggccucucaucccccuucuucccacaacccu

SEQ ID NO: 522578 - RNA, 21 nt, Human
uggccucuccagggcugcuca

SEQ ID NO: 522579 - RNA, 32 nt, Human
uggccucuccauccgccccgacuuccagaagg

SEQ ID NO: 522580 - RNA, 19 nt, Human
uggccucucccccaugcug

SEQ ID NO: 522581 - RNA, 21 nt, Human
uggccucucccugcccugaca

SEQ ID NO: 522582 - RNA, 32 nt, Human
uggccucuccuccccuccccucccucaguccu

SEQ ID NO: 522583 - RNA, 32 nt, Human
uggccucuccugaugucccucucccucccucc

SEQ ID NO: 522584 - RNA, 32 nt, Human
uggccucucuccccucucucuuuuccuccuuc

SEQ ID NO: 522585 - RNA, 20 nt, Human
uggccucucugauccuucca

SEQ ID NO: 522586 - RNA, 32 nt, Human
uggccucucugccuucucuguucuguucuccc

SEQ ID NO: 522587 - RNA, 18 nt, Human
uggccucucuggcugcca

SEQ ID NO: 522588 - RNA, 19 nt, Human
uggccucucuguccccaca

SEQ ID NO: 522589 - RNA, 18 nt, Human
uggccucugacccccaca

SEQ ID NO: 522590 - RNA, 32 nt, Human
uggccucugagaugcacuggcuuggggcgccc

SEQ ID NO: 522591 - RNA, 18 nt, Human
uggccucugagcuccaca

SEQ ID NO: 522592 - RNA, 19 nt, Human
uggccucugcaacugcuca

SEQ ID NO: 522593 - RNA, 24 nt, Human
uggccucugcacccccuucugcca

SEQ ID NO: 522594 - RNA, 32 nt, Human
uggccucugcacccuggagaugcggcugccuc

SEQ ID NO: 522595 - RNA, 20 nt, Human
uggccucugcaccuccacac

SEQ ID NO: 522596 - RNA, 32 nt, Human
uggccucugcacuccagccugggugacagagu

SEQ ID NO: 522597 - RNA, 32 nt, Human
uggccucugcagaggggaccucagccugucac

SEQ ID NO: 522598 - RNA, 20 nt, Human
uggccucugcagccaacaca

SEQ ID NO: 522599 - RNA, 32 nt, Human
uggccucugcagggagcuucguagaggugagg

SEQ ID NO: 522600 - RNA, 18 nt, Human
uggccucugccaucugca

SEQ ID NO: 522601 - RNA, 32 nt, Human
uggccucugcccacccuuugagcuguaccugc

SEQ ID NO: 522602 - RNA, 32 nt, Human
uggccucugccuccuuggccccacauuucugc

SEQ ID NO: 522603 - RNA, 21 nt, Human
uggccucugcgccuccugcca

SEQ ID NO: 522604 - RNA, 32 nt, Human
uggccucugcuccaccucaacagcucccacug

SEQ ID NO: 522605 - RNA, 32 nt, Human
uggccucuggaaccagccugugugccagcgcu

SEQ ID NO: 522606 - RNA, 22 nt, Human
uggccucuggaaccuuauccaa

SEQ ID NO: 522607 - RNA, 32 nt, Human
uggccucugggagggggucaggaagaggcgaa

SEQ ID NO: 522608 - RNA, 32 nt, Human
uggccucuggggaucugcugggcagauguccc

SEQ ID NO: 522609 - RNA, 32 nt, Human
uggccucuuaacccucuccuuagcccuagggc

SEQ ID NO: 522610 - RNA, 32 nt, Human
uggccucuuagcaccacauuccuguuuuucag

SEQ ID NO: 522611 - RNA, 32 nt, Human
uggccucuuccuccuccccugccaggccucug

SEQ ID NO: 522612 - RNA, 32 nt, Human
uggccucuucugggugccugaauucaugcgug

SEQ ID NO: 522613 - RNA, 32 nt, Human
uggccucuucuuucccagcuccugccuccugg

SEQ ID NO: 522614 - RNA, 22 nt, Human
uggccucuugaguuccucugca

SEQ ID NO: 522615 - RNA, 32 nt, Human
uggccucuuuaagaguuaguuucuuugggauu

SEQ ID NO: 522616 - RNA, 21 nt, Human
uggccucuuucacucagcaca

SEQ ID NO: 522617 - RNA, 32 nt, Human
uggccucuuugaagaaauggccagaagugagc

SEQ ID NO: 522618 - RNA, 32 nt, Human
uggccucuuuugauuauaacuggggucaccaa

SEQ ID NO: 522619 - RNA, 19 nt, Human
uggccugaacagauguaaa

SEQ ID NO: 522620 - RNA, 26 nt, Human
uggccugaagcaauccgcccaccuca

SEQ ID NO: 522621 - RNA, 32 nt, Human
uggccugaagccugggcuggaggguucagucc

SEQ ID NO: 522622 - RNA, 25 nt, Human
uggccugaagugauuugcccaucuc

SEQ ID NO: 522623 - RNA, 32 nt, Human
uggccugaauugcaggaugacauuccaaacau

SEQ ID NO: 522624 - RNA, 32 nt, Human
uggccugacccagccagguggccuuauuucuu

SEQ ID NO: 522625 - RNA, 32 nt, Human
uggccugacccuguccugucagcuggguuuac

SEQ ID NO: 522626 - RNA, 32 nt, Human
uggccugagcccagggguucuagaccagcuua

SEQ ID NO: 522627 - RNA, 32 nt, Human
uggccugagccccaggccuuggccuccugugc

SEQ ID NO: 522628 - RNA, 19 nt, Human
uggccugagcgcaggggga

SEQ ID NO: 522629 - RNA, 32 nt, Human
uggccugaggauggcccugccuggcagaggag

SEQ ID NO: 522630 - RNA, 32 nt, Human
uggccugagggcaggccagagcugaggggcug

SEQ ID NO: 522631 - RNA, 32 nt, Human
uggccugaucaauaugaugaaaccccugucuc

SEQ ID NO: 522632 - RNA, 32 nt, Human
uggccugaucauggaaaguaaggaguuaggca

SEQ ID NO: 522633 - RNA, 23 nt, Human
uggccugaucucggcucacugca

SEQ ID NO: 522634 - RNA, 23 nt, Human
uggccugaucuuggcucacugca

SEQ ID NO: 522635 - RNA, 20 nt, Human
uggccugcaauggacccgag

SEQ ID NO: 522636 - RNA, 32 nt, Human
uggccugcacacagcugcucagcaccauuuca

SEQ ID NO: 522637 - RNA, 21 nt, Human
uggccugcaccuguaguccca

SEQ ID NO: 522638 - RNA, 24 nt, Human
uggccugcaccuguagucccagcu

SEQ ID NO: 522639 - RNA, 32 nt, Human
uggccugcagaacugugagacaauaaacucuc

SEQ ID NO: 522640 - RNA, 16 nt, Human
uggccugcaugggguc

SEQ ID NO: 522641 - RNA, 32 nt, Human
uggccugccccuccuccagcccuaagugccug

SEQ ID NO: 522642 - RNA, 32 nt, Human
uggccugccugaggccuuccagccagaacauc

SEQ ID NO: 522643 - RNA, 32 nt, Human
uggccugcgggaggcuguguacacuuggcccc

SEQ ID NO: 522644 - RNA, 22 nt, Human
uggccugcgugcccucccagca

SEQ ID NO: 522645 - RNA, 32 nt, Human
uggccugcuccaggauggugcugcagguaccu

SEQ ID NO: 522646 - RNA, 32 nt, Human
uggccugcugcauuugacuugcucugaaucaa

SEQ ID NO: 522647 - RNA, 32 nt, Human
uggccugcugcucucugcaauggugggacccu

SEQ ID NO: 522648 - RNA, 19 nt, Human
uggccugcugcucugcaca

SEQ ID NO: 522649 - RNA, 32 nt, Human
uggccugcugcuggugaagacgccccuuacua

SEQ ID NO: 522650 - RNA, 32 nt, Human
uggccuggaaaccaagccccacugccucuuug

SEQ ID NO: 522651 - RNA, 32 nt, Human
uggccuggaaccuggaugccuccagccuuugc

SEQ ID NO: 522652 - RNA, 32 nt, Human
uggccuggacaacauggcgagaccccaccucu

SEQ ID NO: 522653 - RNA, 32 nt, Human
uggccuggacaccgccaugagcacagggcagg

SEQ ID NO: 522654 - RNA, 32 nt, Human
uggccuggacagugaagggagagaaguggauu

SEQ ID NO: 522655 - RNA, 18 nt, Human
uggccuggaccagggagg

SEQ ID NO: 522656 - RNA, 20 nt, Human
uggccuggaccucagaagga

SEQ ID NO: 522657 - RNA, 20 nt, Human
uggccuggacugacugcagc

SEQ ID NO: 522658 - RNA, 20 nt, Human
uggccuggacugagggagga

SEQ ID NO: 522659 - RNA, 32 nt, Human
uggccuggagcagcagcccaugcuacucucug

SEQ ID NO: 522660 - RNA, 32 nt, Human
uggccuggagccuggaagggggagacggcccg

SEQ ID NO: 522661 - RNA, 21 nt, Human
uggccuggaggcaccagaggg

SEQ ID NO: 522662 - RNA, 32 nt, Human
uggccuggaggcaccagaggggcaagagaaug

SEQ ID NO: 522663 - RNA, 32 nt, Human
uggccuggauucugcugccacgugccauagug

SEQ ID NO: 522664 - RNA, 32 nt, Human
uggccuggauugcaacauccucccagagaagg

SEQ ID NO: 522665 - RNA, 20 nt, Human
uggccuggcaccgggugggg

SEQ ID NO: 522666 - RNA, 21 nt, Human
uggccuggcagccagggguga

SEQ ID NO: 522667 - RNA, 17 nt, Human
uggccuggcaggcaggg

SEQ ID NO: 522668 - RNA, 32 nt, Human
uggccuggccaucucccuccccagaaacagug

SEQ ID NO: 522669 - RNA, 32 nt, Human
uggccuggccaucuuguugcugcuuggagaga

SEQ ID NO: 522670 - RNA, 32 nt, Human
uggccuggcccaccuuccccagaaccagggga

SEQ ID NO: 522671 - RNA, 32 nt, Human
uggccuggcccuggcccuccugcugcugcugg

SEQ ID NO: 522672 - RNA, 32 nt, Human
uggccuggccgacgugguaaaaccccaucuau

SEQ ID NO: 522673 - RNA, 32 nt, Human
uggccuggccuccagcucccacucccuuucca

SEQ ID NO: 522674 - RNA, 32 nt, Human
uggccuggccugggacaccuccucucugccag

SEQ ID NO: 522675 - RNA, 19 nt, Human
uggccuggcggggagcggg

SEQ ID NO: 522676 - RNA, 18 nt, Human
uggccuggcgggucuggg

SEQ ID NO: 522677 - RNA, 32 nt, Human
uggccuggcuaggaggaaaaagagcaguuuuc

SEQ ID NO: 522678 - RNA, 19 nt, Human
uggccuggcucaaccgagu

SEQ ID NO: 522679 - RNA, 32 nt, Human
uggccuggcucugugccugccugccuccagga

SEQ ID NO: 522680 - RNA, 16 nt, Human
uggccuggcugagggg

SEQ ID NO: 522681 - RNA, 18 nt, Human
uggccuggcuguggaggg

SEQ ID NO: 522682 - RNA, 17 nt, Human
uggccuggcuucagggg

SEQ ID NO: 522683 - RNA, 32 nt, Human
uggccuggcuuccuggcguagccagcaaguuc

SEQ ID NO: 522684 - RNA, 32 nt, Human
uggccugggaaagaaggggaagaaacaauugc

SEQ ID NO: 522685 - RNA, 21 nt, Human
uggccugggaacucaggggga

SEQ ID NO: 522686 - RNA, 32 nt, Human
uggccugggacugcuguggcagaggaagcaug

SEQ ID NO: 522687 - RNA, 32 nt, Human
uggccugggagcugcuuucuccccacuggcug

SEQ ID NO: 522688 - RNA, 32 nt, Human
uggccugggaggcagggccugggcagggcuuc

SEQ ID NO: 522689 - RNA, 32 nt, Human
uggccugggaggccagaaugaaguggguauua

SEQ ID NO: 522690 - RNA, 32 nt, Human
uggccugggaggcgggggccggcgggagccaa

SEQ ID NO: 522691 - RNA, 32 nt, Human
uggccugggagggagaaggggcuggagagggc

SEQ ID NO: 522692 - RNA, 32 nt, Human
uggccugggagguccaggcugcaaugagccaa

SEQ ID NO: 522693 - RNA, 21 nt, Human
uggccugggaucucagaggga

SEQ ID NO: 522694 - RNA, 32 nt, Human
uggccugggauuggcugugaggucccuccgca

SEQ ID NO: 522695 - RNA, 21 nt, Human
uggccugggcaacagagcaag

SEQ ID NO: 522696 - RNA, 22 nt, Human
uggccugggcgacagagcgaga

SEQ ID NO: 522697 - RNA, 32 nt, Human
uggccugggcgagccaggucugaggccccgcu

SEQ ID NO: 522698 - RNA, 32 nt, Human
uggccugggcucccgcagcccacccugaccgg

SEQ ID NO: 522699 - RNA, 32 nt, Human
uggccugggcucucccagccucccagcccucu

SEQ ID NO: 522700 - RNA, 17 nt, Human
uggccuggggaaggagg

SEQ ID NO: 522701 - RNA, 18 nt, Human
uggccuggggaaguggga

SEQ ID NO: 522702 - RNA, 32 nt, Human
uggccuggggagcccugagauugccuggccag

SEQ ID NO: 522703 - RNA, 19 nt, Human
uggccuggggcccaggagg

SEQ ID NO: 522704 - RNA, 32 nt, Human
uggccuggggcuggaggcccugguagagcugc

SEQ ID NO: 522705 - RNA, 19 nt, Human
uggccugggggaaggagga

SEQ ID NO: 522706 - RNA, 19 nt, Human
uggccugggggaaggcaga

SEQ ID NO: 522707 - RNA, 32 nt, Human
uggccugggggagaaugcuggagggagcacgc

SEQ ID NO: 522708 - RNA, 32 nt, Human
uggccugggggcggggacagagacggagaccu

SEQ ID NO: 522709 - RNA, 23 nt, Human
uggccuggggucgggcaggggga

SEQ ID NO: 522710 - RNA, 32 nt, Human
uggccuggggucucuucuuugcuggacacagc

SEQ ID NO: 522711 - RNA, 19 nt, Human
uggccuggguccagggaga

SEQ ID NO: 522712 - RNA, 20 nt, Human
uggccugggugccaggagga

SEQ ID NO: 522713 - RNA, 32 nt, Human
uggccuggguggagcagucauccucccccuuc

SEQ ID NO: 522714 - RNA, 21 nt, Human
uggccugggugugcagggagg

SEQ ID NO: 522715 - RNA, 17 nt, Human
uggccuggucccagggg

SEQ ID NO: 522716 - RNA, 32 nt, Human
uggccuggucccccggccccugccccaucucc

SEQ ID NO: 522717 - RNA, 19 nt, Human
uggccugguccucuggaca

SEQ ID NO: 522718 - RNA, 20 nt, Human
uggccuggugacucucaggg

SEQ ID NO: 522719 - RNA, 32 nt, Human
uggccuggugagccccuccaccuuccaggcuu

SEQ ID NO: 522720 - RNA, 32 nt, Human
uggccuggugaguggagguagaaaaaugauga

SEQ ID NO: 522721 - RNA, 17 nt, Human
uggccuggugcacaggg

SEQ ID NO: 522722 - RNA, 20 nt, Human
uggccuggugccagcuggga

SEQ ID NO: 522723 - RNA, 32 nt, Human
uggccuggugcucugggcucugccuucugguu

SEQ ID NO: 522724 - RNA, 19 nt, Human
uggccuggugcugggguga

SEQ ID NO: 522725 - RNA, 19 nt, Human
uggccuggugggaccaggg

SEQ ID NO: 522726 - RNA, 18 nt, Human
uggccuggugggcggagg

SEQ ID NO: 522727 - RNA, 18 nt, Human
uggccuggugggggugga

SEQ ID NO: 522728 - RNA, 21 nt, Human
uggccugguguuuagguggga

SEQ ID NO: 522729 - RNA, 18 nt, Human
uggccugguuuuggggga

SEQ ID NO: 522730 - RNA, 32 nt, Human
uggccuguacuuccucuggcccuggcugaaga

SEQ ID NO: 522731 - RNA, 32 nt, Human
uggccuguagcagacacugaaccaccagccag

SEQ ID NO: 522732 - RNA, 20 nt, Human
uggccuguaugaccuccaca

SEQ ID NO: 522733 - RNA, 32 nt, Human
uggccuguccccaucuuucugugacaucacaa

SEQ ID NO: 522734 - RNA, 32 nt, Human
uggccugucgcucucacuugucuuccagcggg

SEQ ID NO: 522735 - RNA, 22 nt, Human
uggccugucucggcucacugca

SEQ ID NO: 522736 - RNA, 32 nt, Human
uggccugucugccuguucugggagggcuguga

SEQ ID NO: 522737 - RNA, 32 nt, Human
uggccugucuuuccuucaagcagaccagagag

SEQ ID NO: 522738 - RNA, 32 nt, Human
uggccugugagucuccccuugcagccugguca

SEQ ID NO: 522739 - RNA, 32 nt, Human
uggccugugauggauggauguucuguggugaa

SEQ ID NO: 522740 - RNA, 32 nt, Human
uggccugugcauuuccuuccucuccucuuccc

SEQ ID NO: 522741 - RNA, 21 nt, Human
uggccugugccuauaguccca

SEQ ID NO: 522742 - RNA, 21 nt, Human
uggccugugccuguaaaccca

SEQ ID NO: 522743 - RNA, 24 nt, Human
uggccugugccuguaaacccagcu

SEQ ID NO: 522744 - RNA, 32 nt, Human
uggccugugcugcugucacggugcuaaggggc

SEQ ID NO: 522745 - RNA, 32 nt, Human
uggccuguggcacagcccugagugucccaagc

SEQ ID NO: 522746 - RNA, 17 nt, Human
uggccuguggcccgagg

SEQ ID NO: 522747 - RNA, 19 nt, Human
uggccuguggccuggggga

SEQ ID NO: 522748 - RNA, 32 nt, Human
uggccuguuaggaaccaggcuacagagcagga

SEQ ID NO: 522749 - RNA, 32 nt, Human
uggccuguuccgggacacucugggcagggccc

SEQ ID NO: 522750 - RNA, 32 nt, Human
uggccuguuggaggcaaauagaucagauuuuu

SEQ ID NO: 522751 - RNA, 32 nt, Human
uggccuguuuaucacuggcucugugauacaug

SEQ ID NO: 522752 - RNA, 32 nt, Human
uggccuguuugcagccucuccuagccacagac

SEQ ID NO: 522753 - RNA, 21 nt, Human
uggccuuaagugauccuccca

SEQ ID NO: 522754 - RNA, 26 nt, Human
uggccuuaagugauccucccaccuca

SEQ ID NO: 522755 - RNA, 24 nt, Human
uggccuuaauaauccauccuuuca

SEQ ID NO: 522756 - RNA, 19 nt, Human
uggccuuacagaaagggaa

SEQ ID NO: 522757 - RNA, 32 nt, Human
uggccuuacccccagcccuggcucagcaucua

SEQ ID NO: 522758 - RNA, 32 nt, Human
uggccuuacgauggcaauuggcaucauucucc

SEQ ID NO: 522759 - RNA, 21 nt, Human
uggccuuacucuccucugaca

SEQ ID NO: 522760 - RNA, 32 nt, Human
uggccuuagaaaauaaauugccucuaacuuac

SEQ ID NO: 522761 - RNA, 32 nt, Human
uggccuuagaaccacccgcucucucuuccuuu

SEQ ID NO: 522762 - RNA, 17 nt, Human
uggccuuaucuguucca

SEQ ID NO: 522763 - RNA, 32 nt, Human
uggccuuaugguagaaaauuuuauaccagauu

SEQ ID NO: 522764 - RNA, 32 nt, Human
uggccuuaugucaguugucuacucuggagcuu

SEQ ID NO: 522765 - RNA, 25 nt, Human
uggccuuaugugauccgcccaccuu

SEQ ID NO: 522766 - RNA, 19 nt, Human
uggccuuauuuccauucca

SEQ ID NO: 522767 - RNA, 32 nt, Human
uggccuuauuugggagauucuauacugaccuu

SEQ ID NO: 522768 - RNA, 25 nt, Human
uggccuucaagauccaucgaccuua

SEQ ID NO: 522769 - RNA, 32 nt, Human
uggccuucaccauggcgggagggagaccgcau

SEQ ID NO: 522770 - RNA, 32 nt, Human
uggccuucaccccgggccucuuaacuucaggu

SEQ ID NO: 522771 - RNA, 32 nt, Human
uggccuucagcaauccucccaccucaaccucc

SEQ ID NO: 522772 - RNA, 32 nt, Human
uggccuucagcccucacagaugcccagccuca

SEQ ID NO: 522773 - RNA, 22 nt, Human
uggccuucauggcgcgcuccag

SEQ ID NO: 522774 - RNA, 32 nt, Human
uggccuuccaagugcuaggauuacaggcguga

SEQ ID NO: 522775 - RNA, 23 nt, Human
uggccuuccacgucuuccuccaa

SEQ ID NO: 522776 - RNA, 21 nt, Human
uggccuuccccuccucugcca

SEQ ID NO: 522777 - RNA, 21 nt, Human
uggccuuccgugcccgcucca

SEQ ID NO: 522778 - RNA, 24 nt, Human
uggccuuccuccccauuccugcca

SEQ ID NO: 522779 - RNA, 32 nt, Human
uggccuuccucuucuuucucuuucccucugcc

SEQ ID NO: 522780 - RNA, 32 nt, Human
uggccuuccuguucuucacucccuucagccac

SEQ ID NO: 522781 - RNA, 32 nt, Human
uggccuuccuuucaauaaagcugccucagcuu

SEQ ID NO: 522782 - RNA, 32 nt, Human
uggccuuccuuuccucuuuccuccucacucuc

SEQ ID NO: 522783 - RNA, 19 nt, Human
uggccuucgggguccccac

SEQ ID NO: 522784 - RNA, 24 nt, Human
uggccuucgugaacuuugcuccaa

SEQ ID NO: 522785 - RNA, 24 nt, Human
uggccuucguggucacuugcuuca

SEQ ID NO: 522786 - RNA, 22 nt, Human
uggccuucuaggaucuguccaa

SEQ ID NO: 522787 - RNA, 32 nt, Human
uggccuucucaggacuccuggguggcacagca

SEQ ID NO: 522788 - RNA, 32 nt, Human
uggccuucucuccuggucccuggugcuguuug

SEQ ID NO: 522789 - RNA, 32 nt, Human
uggccuucuggacccuggcuucuccccacugu

SEQ ID NO: 522790 - RNA, 32 nt, Human
uggccuucuuuguguacaugacaugcauucuc

SEQ ID NO: 522791 - RNA, 32 nt, Human
uggccuugaacaaaaccaaguccacuggggac

SEQ ID NO: 522792 - RNA, 32 nt, Human
uggccuugaaccccuugccucaagugagcuuc

SEQ ID NO: 522793 - RNA, 20 nt, Human
uggccuugaauccaccucuu

SEQ ID NO: 522794 - RNA, 19 nt, Human
uggccuugaggccuuugca

SEQ ID NO: 522795 - RNA, 21 nt, Human
uggccuugaggccuuugcaca

SEQ ID NO: 522796 - RNA, 32 nt, Human
uggccuugagggaggggugcagguguggcucc

SEQ ID NO: 522797 - RNA, 22 nt, Human
uggccuugauccuccugccuua

SEQ ID NO: 522798 - RNA, 18 nt, Human
uggccuugaucucuccau

SEQ ID NO: 522799 - RNA, 32 nt, Human
uggccuugcaaugcuuuguggcauuuucaaug

SEQ ID NO: 522800 - RNA, 24 nt, Human
uggccuugcacacacacccaccca

SEQ ID NO: 522801 - RNA, 32 nt, Human
uggccuugcacugugaggugggggagguggga

SEQ ID NO: 522802 - RNA, 21 nt, Human
uggccuugccccaggcccugc

SEQ ID NO: 522803 - RNA, 21 nt, Human
uggccuugcccccgugagcua

SEQ ID NO: 522804 - RNA, 20 nt, Human
uggccuugccccugcccgcc

SEQ ID NO: 522805 - RNA, 24 nt, Human
uggccuugccccugcccgccuaca

SEQ ID NO: 522806 - RNA, 21 nt, Human
uggccuugcccgccagccuca

SEQ ID NO: 522807 - RNA, 24 nt, Human
uggccuugccuccccuuccugcca

SEQ ID NO: 522808 - RNA, 32 nt, Human
uggccuugccuccccuuccugccacgugcccc

SEQ ID NO: 522809 - RNA, 23 nt, Human
uggccuugcugaaacgcaucuca

SEQ ID NO: 522810 - RNA, 32 nt, Human
uggccuugcuggcagguucugccuccucucug

SEQ ID NO: 522811 - RNA, 32 nt, Human
uggccuugcuggggccccuccugccuccacgc

SEQ ID NO: 522812 - RNA, 32 nt, Human
uggccuuggaagggaugagcaaacggaagaga

SEQ ID NO: 522813 - RNA, 20 nt, Human
uggccuuggccacccacuuc

SEQ ID NO: 522814 - RNA, 32 nt, Human
uggccuuggcccugcuacucacccaacauucc

SEQ ID NO: 522815 - RNA, 32 nt, Human
uggccuugggcaacuuccuuaaccucacucaa

SEQ ID NO: 522816 - RNA, 23 nt, Human
uggccuugggcugcucgaucuca

SEQ ID NO: 522817 - RNA, 23 nt, Human
uggccuuggugaucacuuuuuca

SEQ ID NO: 522818 - RNA, 17 nt, Human
uggccuugguuugcaca

SEQ ID NO: 522819 - RNA, 21 nt, Human
uggccuuguaucuugcauuca

SEQ ID NO: 522820 - RNA, 32 nt, Human
uggccuuguccacuccuugaggcagauccugg

SEQ ID NO: 522821 - RNA, 32 nt, Human
uggccuugugccagggcugucugugauccgcc

SEQ ID NO: 522822 - RNA, 24 nt, Human
uggccuuguggagacaacgccuua

SEQ ID NO: 522823 - RNA, 24 nt, Human
uggccuuguggcagcacauccuca

SEQ ID NO: 522824 - RNA, 32 nt, Human
uggccuuguggcuucaugaauggagcugcugu

SEQ ID NO: 522825 - RNA, 32 nt, Human
uggccuuguuugcuuaguuuaucuggaauucu

SEQ ID NO: 522826 - RNA, 32 nt, Human
uggccuuuaaccugcagcguccugggucucuu

SEQ ID NO: 522827 - RNA, 32 nt, Human
uggccuuuagacuuugccauccuuaaggagug

SEQ ID NO: 522828 - RNA, 32 nt, Human
uggccuuuauugccuugugggccuggagauuc

SEQ ID NO: 522829 - RNA, 32 nt, Human
uggccuuucacuccaguucugggugaggcagg

SEQ ID NO: 522830 - RNA, 32 nt, Human
uggccuuuccucaguguuguaaggccuaugcc

SEQ ID NO: 522831 - RNA, 32 nt, Human
uggccuuucuguuccuuggacaugccuggaga

SEQ ID NO: 522832 - RNA, 32 nt, Human
uggccuuucuuccucugggcaaagaagggcuu

SEQ ID NO: 522833 - RNA, 32 nt, Human
uggccuuucuuucugcugagugguucacugug

SEQ ID NO: 522834 - RNA, 32 nt, Human
uggccuuugacucaugaggccuggagaaaagu

SEQ ID NO: 522835 - RNA, 32 nt, Human
uggccuuugagagagucucacucuccagcuag

SEQ ID NO: 522836 - RNA, 32 nt, Human
uggccuuugcacuugcggcagcaacguguacu

SEQ ID NO: 522837 - RNA, 32 nt, Human
uggccuuugcagaagcugaugguuacagagcu

SEQ ID NO: 522838 - RNA, 32 nt, Human
uggccuuuggagauugcgugugguguucagga

SEQ ID NO: 522839 - RNA, 24 nt, Human
uggccuuugggaacuuugcuccaa

SEQ ID NO: 522840 - RNA, 32 nt, Human
uggccuuuggucagcguuuccacauccugcuc

SEQ ID NO: 522841 - RNA, 32 nt, Human
uggccuuuggugaccucaccacucccucccac

SEQ ID NO: 522842 - RNA, 32 nt, Human
uggccuuuguaggcaguggaaaacuugcaagg

SEQ ID NO: 522843 - RNA, 25 nt, Human
uggccuuuuaauuccuccucugcca

SEQ ID NO: 522844 - RNA, 32 nt, Human
uggccuuuuaauuccuccucugccaggguggg

SEQ ID NO: 522845 - RNA, 32 nt, Human
uggccuuuugagacagggccucacucuguucc

SEQ ID NO: 522846 - RNA, 32 nt, Human
uggccuuuugcgaggugcugcagccauagcua

SEQ ID NO: 522847 - RNA, 32 nt, Human
uggccuuuuggaaauccaaauugccugaacau

SEQ ID NO: 522848 - RNA, 19 nt, Human
uggccuuuuuccucacaca

SEQ ID NO: 522849 - RNA, 23 nt, Human
uggcgaaaucucagcucacugca

SEQ ID NO: 522850 - RNA, 17 nt, Human
uggcgaacaaauguaaa

SEQ ID NO: 522851 - RNA, 32 nt, Human
uggcgaacauggugaaaccccaucucuacuaa

SEQ ID NO: 522852 - RNA, 32 nt, Human
uggcgaacauggugagacccaucucuacuaaa

SEQ ID NO: 522853 - RNA, 32 nt, Human
uggcgaagcaccuguccauguguuuggccaaa

SEQ ID NO: 522854 - RNA, 32 nt, Human
uggcgaaggagaggacaccgccagugguccaa

SEQ ID NO: 522855 - RNA, 32 nt, Human
uggcgaagggguggccucggaggcaggcucug

SEQ ID NO: 522856 - RNA, 24 nt, Human
uggcgaaugccuguaaucucagcu

SEQ ID NO: 522857 - RNA, 32 nt, Human
uggcgacacaggcacccagcuuugggguggug

SEQ ID NO: 522858 - RNA, 32 nt, Human
uggcgacacugcacugcaggcugggcuacaaa

SEQ ID NO: 522859 - RNA, 32 nt, Human
uggcgaccucaccuucauucuuaggucaauac

SEQ ID NO: 522860 - RNA, 32 nt, Human
uggcgacugcagcugcaccaucacacaugcau

SEQ ID NO: 522861 - RNA, 32 nt, Human
uggcgagaucacagcucacugcagccuugaac

SEQ ID NO: 522862 - RNA, 23 nt, Human
uggcgagaucacggcucacugca

SEQ ID NO: 522863 - RNA, 24 nt, Human
uggcgagaucauagcucacugcag

SEQ ID NO: 522864 - RNA, 32 nt, Human
uggcgagaucauagcucacugcagccucaaac

SEQ ID NO: 522865 - RNA, 23 nt, Human
uggcgagaucucagcucacugca

SEQ ID NO: 522866 - RNA, 32 nt, Human
uggcgagcauccuggccaacauggugaaaccc

SEQ ID NO: 522867 - RNA, 32 nt, Human
uggcgagccacuguuugccguuugaucgggca

SEQ ID NO: 522868 - RNA, 32 nt, Human
uggcgagccaguacccgugaaugcuacuuccu

SEQ ID NO: 522869 - RNA, 21 nt, Human
uggcgagcgccuguaguccca

SEQ ID NO: 522870 - RNA, 24 nt, Human
uggcgagcgccuguagucccagcu

SEQ ID NO: 522871 - RNA, 32 nt, Human
uggcgagcuguggcucggggucugccacgaau

SEQ ID NO: 522872 - RNA, 32 nt, Human
uggcgagcuguggcucggggucugccaugaau

SEQ ID NO: 522873 - RNA, 32 nt, Human
uggcgaggacaucgggacggaggcagacgugg

SEQ ID NO: 522874 - RNA, 32 nt, Human
uggcgaggagcugcugcgcuuccuucacaugc

SEQ ID NO: 522875 - RNA, 22 nt, Human
uggcgaggccccuuggggccac

SEQ ID NO: 522876 - RNA, 32 nt, Human
uggcgaggccggcccagcacagcaagcagcag

SEQ ID NO: 522877 - RNA, 32 nt, Human
uggcgaggcugcugggguugcagcgggacagu

SEQ ID NO: 522878 - RNA, 32 nt, Human
uggcgagggcugcccuggaggcuccggcucgg

SEQ ID NO: 522879 - RNA, 32 nt, Human
uggcgaggguuaugaacccaguguagagacca

SEQ ID NO: 522880 - RNA, 32 nt, Human
uggcgaguccccgcuaccacacggugggccgc

SEQ ID NO: 522881 - RNA, 32 nt, Human
uggcgagucggaggcaggguggggcccaggua

SEQ ID NO: 522882 - RNA, 32 nt, Human
uggcgagugaguggagagccagcucugcggag

SEQ ID NO: 522883 - RNA, 32 nt, Human
uggcgagugaguugagagccagcucugcgggg

SEQ ID NO: 522884 - RNA, 32 nt, Human
uggcgaguggugcugaagggacagcuccagca

SEQ ID NO: 522885 - RNA, 21 nt, Human
uggcgagugucuguaauccca

SEQ ID NO: 522886 - RNA, 32 nt, Human
uggcgaucauuucccaagauugguuucccuug

SEQ ID NO: 522887 - RNA, 32 nt, Human
uggcgaugacaucagagauuccgaccuuccug

SEQ ID NO: 522888 - RNA, 32 nt, Human
uggcgcaaacauggcucacugcagccucaacc

SEQ ID NO: 522889 - RNA, 22 nt, Human
uggcgcaaccagcucacugcag

SEQ ID NO: 522890 - RNA, 23 nt, Human
uggcgcaaccucggcucacugca

SEQ ID NO: 522891 - RNA, 23 nt, Human
uggcgcaaccuuggcucacugca

SEQ ID NO: 522892 - RNA, 21 nt, Human
uggcgcaagccuguaauccca

SEQ ID NO: 522893 - RNA, 32 nt, Human
uggcgcaagccuguaaucccagcuauuuggga

SEQ ID NO: 522894 - RNA, 21 nt, Human
uggcgcaagccuguaguccca

SEQ ID NO: 522895 - RNA, 23 nt, Human
uggcgcaaucucagcucacugca

SEQ ID NO: 522896 - RNA, 32 nt, Human
uggcgcaaucuccacucacugcagccuccgcc

SEQ ID NO: 522897 - RNA, 23 nt, Human
uggcgcaaucucggcucacugca

SEQ ID NO: 522898 - RNA, 23 nt, Human
uggcgcaaucucggcucacugua

SEQ ID NO: 522899 - RNA, 23 nt, Human
uggcgcaaucugggcucacugca

SEQ ID NO: 522900 - RNA, 23 nt, Human
uggcgcaaucuuggcucacuaca

SEQ ID NO: 522901 - RNA, 23 nt, Human
uggcgcaaucuuggcucacugca

SEQ ID NO: 522902 - RNA, 23 nt, Human
uggcgcaauuucagcucacugca

SEQ ID NO: 522903 - RNA, 23 nt, Human
uggcgcaauuucggcucacugca

SEQ ID NO: 522904 - RNA, 23 nt, Human
uggcgcaauuuuggcucacugca

SEQ ID NO: 522905 - RNA, 21 nt, Human
uggcgcacaccuauaaucuca

SEQ ID NO: 522906 - RNA, 21 nt, Human
uggcgcacaccuguaauccca

SEQ ID NO: 522907 - RNA, 24 nt, Human
uggcgcacaccuguaaucccagcu

SEQ ID NO: 522908 - RNA, 21 nt, Human
uggcgcacaccuguaauccua

SEQ ID NO: 522909 - RNA, 24 nt, Human
uggcgcacaccuguaauccuagcu

SEQ ID NO: 522910 - RNA, 21 nt, Human
uggcgcacaccuguaaucuca

SEQ ID NO: 522911 - RNA, 24 nt, Human
uggcgcacaccuguaaucucagcu

SEQ ID NO: 522912 - RNA, 21 nt, Human
uggcgcacaccuguaguccca

SEQ ID NO: 522913 - RNA, 24 nt, Human
uggcgcacaccuguagucccagcu

SEQ ID NO: 522914 - RNA, 32 nt, Human
uggcgcaccagccucugcaacuagugaggucu

SEQ ID NO: 522915 - RNA, 21 nt, Human
uggcgcaccccuguaaucuca

SEQ ID NO: 522916 - RNA, 24 nt, Human
uggcgcaccccuguaaucucagcu

SEQ ID NO: 522917 - RNA, 21 nt, Human
uggcgcacgccucuaauccca

SEQ ID NO: 522918 - RNA, 21 nt, Human
uggcgcacgccuguaauccca

SEQ ID NO: 522919 - RNA, 24 nt, Human
uggcgcacgccuguaaucccagcu

SEQ ID NO: 522920 - RNA, 21 nt, Human
uggcgcacgccuguaaucuca

SEQ ID NO: 522921 - RNA, 24 nt, Human
uggcgcacgccuguaaucucagcu

SEQ ID NO: 522922 - RNA, 32 nt, Human
uggcgcacgccuguaaugccagcuacuuggga

SEQ ID NO: 522923 - RNA, 21 nt, Human
uggcgcacgccuguaguccca

SEQ ID NO: 522924 - RNA, 24 nt, Human
uggcgcacgccuguagucccagcu

SEQ ID NO: 522925 - RNA, 24 nt, Human
uggcgcacgccuguaguuccagcu

SEQ ID NO: 522926 - RNA, 21 nt, Human
uggcgcacuacuauaauccca

SEQ ID NO: 522927 - RNA, 32 nt, Human
uggcgcaggagucccuggcuugcaguguuucu

SEQ ID NO: 522928 - RNA, 32 nt, Human
uggcgcagggccacuuggcugcagagaacgug

SEQ ID NO: 522929 - RNA, 23 nt, Human
uggcgcaguggcucacgccugua

SEQ ID NO: 522930 - RNA, 32 nt, Human
uggcgcaguguuucagcaucuaggggucaaaa

SEQ ID NO: 522931 - RNA, 21 nt, Human
uggcgcauaccuguaauccca

SEQ ID NO: 522932 - RNA, 24 nt, Human
uggcgcauaccuguaaucccagcu

SEQ ID NO: 522933 - RNA, 32 nt, Human
uggcgcauaccuguaaucccagcuacuuggga

SEQ ID NO: 522934 - RNA, 21 nt, Human
uggcgcauaccuguaauucca

SEQ ID NO: 522935 - RNA, 24 nt, Human
uggcgcauaccuguaauuccagcu

SEQ ID NO: 522936 - RNA, 21 nt, Human
uggcgcauaccuguaguccca

SEQ ID NO: 522937 - RNA, 24 nt, Human
uggcgcauaccuguagucccagcu

SEQ ID NO: 522938 - RNA, 32 nt, Human
uggcgcaucccuguaaucccagcuacuuuacu

SEQ ID NO: 522939 - RNA, 32 nt, Human
uggcgcaucucuagauccuuucccggaguuca

SEQ ID NO: 522940 - RNA, 21 nt, Human
uggcgcaugccuauaauccca

SEQ ID NO: 522941 - RNA, 21 nt, Human
uggcgcaugccuauaguccca

SEQ ID NO: 522942 - RNA, 21 nt, Human
uggcgcaugccuguaacccca

SEQ ID NO: 522943 - RNA, 24 nt, Human
uggcgcaugccuguaaccccagcu

SEQ ID NO: 522944 - RNA, 21 nt, Human
uggcgcaugccuguaauccca

SEQ ID NO: 522945 - RNA, 24 nt, Human
uggcgcaugccuguaaucccaacu

SEQ ID NO: 522946 - RNA, 32 nt, Human
uggcgcaugccuguaaucccagaacuuuggga

SEQ ID NO: 522947 - RNA, 23 nt, Human
uggcgcaugccuguaaucccagc

SEQ ID NO: 522948 - RNA, 32 nt, Human
uggcgcaugccuguaaucccagcacuuuggga

SEQ ID NO: 522949 - RNA, 24 nt, Human
uggcgcaugccuguaaucccagcu

SEQ ID NO: 522950 - RNA, 32 nt, Human
uggcgcaugccuguaaucccagcuacuagaga

SEQ ID NO: 522951 - RNA, 32 nt, Human
uggcgcaugccuguaaucccagcuacucagga

SEQ ID NO: 522952 - RNA, 32 nt, Human
uggcgcaugccuguaaucccagcuacucggga

SEQ ID NO: 522953 - RNA, 32 nt, Human
uggcgcaugccuguaaucccagcuacugggaa

SEQ ID NO: 522954 - RNA, 32 nt, Human
uggcgcaugccuguaaucccagcuacuuagga

SEQ ID NO: 522955 - RNA, 32 nt, Human
uggcgcaugccuguaaucccagcuacuuggga

SEQ ID NO: 522956 - RNA, 32 nt, Human
uggcgcaugccuguaaucccagcugcuuggga

SEQ ID NO: 522957 - RNA, 24 nt, Human
uggcgcaugccuguaaucccaguu

SEQ ID NO: 522958 - RNA, 32 nt, Human
uggcgcaugccuguaaucccaguuacucagga

SEQ ID NO: 522959 - RNA, 21 nt, Human
uggcgcaugccuguaauccua

SEQ ID NO: 522960 - RNA, 24 nt, Human
uggcgcaugccuguaauccuagcu

SEQ ID NO: 522961 - RNA, 32 nt, Human
uggcgcaugccuguaauccuagcuacucagga

SEQ ID NO: 522962 - RNA, 32 nt, Human
uggcgcaugccuguaauccuagcuacucggga

SEQ ID NO: 522963 - RNA, 21 nt, Human
uggcgcaugccuguaaucuca

SEQ ID NO: 522964 - RNA, 24 nt, Human
uggcgcaugccuguaaucucagcu

SEQ ID NO: 522965 - RNA, 32 nt, Human
uggcgcaugccuguaaucucagcuacucagga

SEQ ID NO: 522966 - RNA, 21 nt, Human
uggcgcaugccuguaauucca

SEQ ID NO: 522967 - RNA, 24 nt, Human
uggcgcaugccuguaauuccagcu

SEQ ID NO: 522968 - RNA, 21 nt, Human
uggcgcaugccuguaguccca

SEQ ID NO: 522969 - RNA, 24 nt, Human
uggcgcaugccuguagucccaacu

SEQ ID NO: 522970 - RNA, 24 nt, Human
uggcgcaugccuguagucccagcu

SEQ ID NO: 522971 - RNA, 32 nt, Human
uggcgcaugccuguagucccagcuaacuggga

SEQ ID NO: 522972 - RNA, 32 nt, Human
uggcgcaugccuguagucccagcuacuuggga

SEQ ID NO: 522973 - RNA, 32 nt, Human
uggcgcaugccuguagucccagguacucagga

SEQ ID NO: 522974 - RNA, 32 nt, Human
uggcgcaugccuguagucgcagcuacucgcga

SEQ ID NO: 522975 - RNA, 24 nt, Human
uggcgcaugccuguaguuccagcu

SEQ ID NO: 522976 - RNA, 32 nt, Human
uggcgcaugccuguaguuccagcuacucagga

SEQ ID NO: 522977 - RNA, 32 nt, Human
uggcgcaugccuguaguuccagcuacuuguga

SEQ ID NO: 522978 - RNA, 21 nt, Human
uggcgcaugccugugauccca

SEQ ID NO: 522979 - RNA, 24 nt, Human
uggcgcaugccugugaucccagcu

SEQ ID NO: 522980 - RNA, 32 nt, Human
uggcgcaugccugugaucccagcuacuugaga

SEQ ID NO: 522981 - RNA, 21 nt, Human
uggcgcaugcuuguaauccca

SEQ ID NO: 522982 - RNA, 24 nt, Human
uggcgcaugcuuguaaucccagcu

SEQ ID NO: 522983 - RNA, 32 nt, Human
uggcgcauguccugugcuuuguggacgcugcu

SEQ ID NO: 522984 - RNA, 21 nt, Human
uggcgcaugucuguaauccca

SEQ ID NO: 522985 - RNA, 24 nt, Human
uggcgcaugucuguaaucccagcu

SEQ ID NO: 522986 - RNA, 23 nt, Human
uggcgcauucuaggcucacugca

SEQ ID NO: 522987 - RNA, 22 nt, Human
uggcgcauugccuguaauccca

SEQ ID NO: 522988 - RNA, 32 nt, Human
uggcgccaacaacuucuccauccuuucugccu

SEQ ID NO: 522989 - RNA, 32 nt, Human
uggcgccacuacacuccagccugggcaacaga

SEQ ID NO: 522990 - RNA, 32 nt, Human
uggcgccacuacacuccagccugggcgacaga

SEQ ID NO: 522991 - RNA, 32 nt, Human
uggcgccacugcacuccagcccgggcgacaga

SEQ ID NO: 522992 - RNA, 32 nt, Human
uggcgccacugcacuccagccuaggcaacaga

SEQ ID NO: 522993 - RNA, 32 nt, Human
uggcgccacugcacuccagccugagugacaga

SEQ ID NO: 522994 - RNA, 32 nt, Human
uggcgccacugcacuccagccugggcgacaga

SEQ ID NO: 522995 - RNA, 32 nt, Human
uggcgccacugcacuccagccugggcgucaga

SEQ ID NO: 522996 - RNA, 32 nt, Human
uggcgccacugcacuccagccuggguaacaga

SEQ ID NO: 522997 - RNA, 32 nt, Human
uggcgccacugcacuccagccugggugacaga

SEQ ID NO: 522998 - RNA, 32 nt, Human
uggcgccacugcacuccagccugggugagaga

SEQ ID NO: 522999 - RNA, 32 nt, Human
uggcgccacugcacuccagucugggcaacaga

SEQ ID NO: 523000 - RNA, 32 nt, Human
uggcgccacugcacuccagucugggcgauaga

SEQ ID NO: 523001 - RNA, 32 nt, Human
uggcgccacugcacucccgucugggggagaga

SEQ ID NO: 523002 - RNA, 32 nt, Human
uggcgccacugcacuucagccuuggagacagg

SEQ ID NO: 523003 - RNA, 20 nt, Human
uggcgccacugcauuccagc

SEQ ID NO: 523004 - RNA, 32 nt, Human
uggcgccacugcauuccagccugggcaacaga

SEQ ID NO: 523005 - RNA, 32 nt, Human
uggcgccacugcgcuccagccugggcaacaga

SEQ ID NO: 523006 - RNA, 32 nt, Human
uggcgccacuucacugcagccuggguggcaga

SEQ ID NO: 523007 - RNA, 32 nt, Human
uggcgccagcagguggagcuugacgugacguc

SEQ ID NO: 523008 - RNA, 23 nt, Human
uggcgccaucucggcucacugca

SEQ ID NO: 523009 - RNA, 23 nt, Human
uggcgccaucuuggcucacugca

SEQ ID NO: 523010 - RNA, 23 nt, Human
uggcgccaucuuggcucacugua

SEQ ID NO: 523011 - RNA, 32 nt, Human
uggcgccauugcacuccagccugggcaaaaag

SEQ ID NO: 523012 - RNA, 32 nt, Human
uggcgccauugcacuccagccugggugacaag

SEQ ID NO: 523013 - RNA, 32 nt, Human
uggcgccauuucacuccagccugggcgacaga

SEQ ID NO: 523014 - RNA, 32 nt, Human
uggcgcccaaagccuccagccugagagucgcc

SEQ ID NO: 523015 - RNA, 21 nt, Human
uggcgcccaccuguaauccua

SEQ ID NO: 523016 - RNA, 24 nt, Human
uggcgcccaccuguaauccuagcu

SEQ ID NO: 523017 - RNA, 24 nt, Human
uggcgcccaggcuggaguacagug

SEQ ID NO: 523018 - RNA, 24 nt, Human
uggcgcccaggcuggagugcagug

SEQ ID NO: 523019 - RNA, 32 nt, Human
uggcgccccacccagucucauccgggggacuu

SEQ ID NO: 523020 - RNA, 32 nt, Human
uggcgcccccuggagggaggaaggggaacugc

SEQ ID NO: 523021 - RNA, 32 nt, Human
uggcgcccccuggagggaggaaggggaacugu

SEQ ID NO: 523022 - RNA, 32 nt, Human
uggcgccccgugccaugcgggagcgcuggggc

SEQ ID NO: 523023 - RNA, 32 nt, Human
uggcgccccucacucagauucuccccugggcu

SEQ ID NO: 523024 - RNA, 32 nt, Human
uggcgcccgaggagaacgcugggaccuaacuc

SEQ ID NO: 523025 - RNA, 32 nt, Human
uggcgcccguaaucccagcuacuaaggcugga

SEQ ID NO: 523026 - RNA, 32 nt, Human
uggcgccggcgcugccuuucgguugccaaaau

SEQ ID NO: 523027 - RNA, 29 nt, Human
uggcgccgggcagcuucauccccuccccc

SEQ ID NO: 523028 - RNA, 32 nt, Human
uggcgccgucgggggcaaggguggcucggggg

SEQ ID NO: 523029 - RNA, 24 nt, Human
uggcgccgucucggcucacuacag

SEQ ID NO: 523030 - RNA, 32 nt, Human
uggcgccuauagucccagcuacuugggaggcu

SEQ ID NO: 523031 - RNA, 32 nt, Human
uggcgccuccacccacccuccugccucacccc

SEQ ID NO: 523032 - RNA, 19 nt, Human
uggcgccugaggcaacaca

SEQ ID NO: 523033 - RNA, 32 nt, Human
uggcgccugccagaaaaauuuggggcuaggca

SEQ ID NO: 523034 - RNA, 32 nt, Human
uggcgccugccugcccaucucugcccucgguu

SEQ ID NO: 523035 - RNA, 21 nt, Human
uggcgccugccuguaauccca

SEQ ID NO: 523036 - RNA, 24 nt, Human
uggcgccugccuguaaucccagcu

SEQ ID NO: 523037 - RNA, 32 nt, Human
uggcgccugccuguaaucccagcuacuaagga

SEQ ID NO: 523038 - RNA, 32 nt, Human
uggcgccuguaaucccagcuacucaggagguu

SEQ ID NO: 523039 - RNA, 32 nt, Human
uggcgccuguaaucccagcuacucgggaggcu

SEQ ID NO: 523040 - RNA, 32 nt, Human
uggcgccuguagucccagcuacuccagaugcu

SEQ ID NO: 523041 - RNA, 32 nt, Human
uggcgccuguagucccagcuacucggaaggcu

SEQ ID NO: 523042 - RNA, 32 nt, Human
uggcgccuugaagaaagaggccuaggagagca

SEQ ID NO: 523043 - RNA, 23 nt, Human
uggcgcgacccugaccgauccca

SEQ ID NO: 523044 - RNA, 32 nt, Human
uggcgcgacugcacuccagccugggcgagaga

SEQ ID NO: 523045 - RNA, 32 nt, Human
uggcgcgaucauggcucccugcagccucaaac

SEQ ID NO: 523046 - RNA, 32 nt, Human
uggcgcgaucccagcucgcugcagccuccacc

SEQ ID NO: 523047 - RNA, 23 nt, Human
uggcgcgaucuaggcucacugca

SEQ ID NO: 523048 - RNA, 23 nt, Human
uggcgcgaucucaacucacugca

SEQ ID NO: 523049 - RNA, 23 nt, Human
uggcgcgaucucagcucaccgca

SEQ ID NO: 523050 - RNA, 23 nt, Human
uggcgcgaucucagcucacuaca

SEQ ID NO: 523051 - RNA, 23 nt, Human
uggcgcgaucucagcucacugca

SEQ ID NO: 523052 - RNA, 24 nt, Human
uggcgcgaucucagcucacugcag

SEQ ID NO: 523053 - RNA, 23 nt, Human
uggcgcgaucuccgcucacugca

SEQ ID NO: 523054 - RNA, 23 nt, Human
uggcgcgaucucgacucacugca

SEQ ID NO: 523055 - RNA, 23 nt, Human
uggcgcgaucucggcucaccgca

SEQ ID NO: 523056 - RNA, 23 nt, Human
uggcgcgaucucggcucacuaca

SEQ ID NO: 523057 - RNA, 24 nt, Human
uggcgcgaucucggcucacuacag

SEQ ID NO: 523058 - RNA, 23 nt, Human
uggcgcgaucucggcucacugca

SEQ ID NO: 523059 - RNA, 24 nt, Human
uggcgcgaucucggcucacugcag

SEQ ID NO: 523060 - RNA, 23 nt, Human
uggcgcgaucuuagcucacugca

SEQ ID NO: 523061 - RNA, 23 nt, Human
uggcgcgaucuugacucacugca

SEQ ID NO: 523062 - RNA, 23 nt, Human
uggcgcgaucuuggcucacugca

SEQ ID NO: 523063 - RNA, 23 nt, Human
uggcgcgaucuuugcucacugca

SEQ ID NO: 523064 - RNA, 22 nt, Human
uggcgcgauucagcucacugca

SEQ ID NO: 523065 - RNA, 23 nt, Human
uggcgcgauuucagcucacugca

SEQ ID NO: 523066 - RNA, 23 nt, Human
uggcgcgauuucggcucacugca

SEQ ID NO: 523067 - RNA, 32 nt, Human
uggcgcgcaccugcucaagaccaggguccugc

SEQ ID NO: 523068 - RNA, 21 nt, Human
uggcgcgcaccuguaauccca

SEQ ID NO: 523069 - RNA, 24 nt, Human
uggcgcgcaccuguaaucccagcu

SEQ ID NO: 523070 - RNA, 21 nt, Human
uggcgcgcaccuguaguccca

SEQ ID NO: 523071 - RNA, 24 nt, Human
uggcgcgcaccuguagucccagcu

SEQ ID NO: 523072 - RNA, 21 nt, Human
uggcgcgcgccuauaauccca

SEQ ID NO: 523073 - RNA, 21 nt, Human
uggcgcgcgccuguaauccca

SEQ ID NO: 523074 - RNA, 24 nt, Human
uggcgcgcgccuguaaucccagcu

SEQ ID NO: 523075 - RNA, 24 nt, Human
uggcgcgcgccuguaaucccaguu

SEQ ID NO: 523076 - RNA, 21 nt, Human
uggcgcgcgccuguaguccca

SEQ ID NO: 523077 - RNA, 24 nt, Human
uggcgcgcgccuguagucccagcu

SEQ ID NO: 523078 - RNA, 21 nt, Human
uggcgcgcgucuguaauccca

SEQ ID NO: 523079 - RNA, 24 nt, Human
uggcgcgcgucuguaaucccagcu

SEQ ID NO: 523080 - RNA, 32 nt, Human
uggcgcggcugucggcuggcaccagcucccug

SEQ ID NO: 523081 - RNA, 32 nt, Human
uggcgcgggcgguggaggaggagguggggcug

SEQ ID NO: 523082 - RNA, 32 nt, Human
uggcgcggggaagggguggaaggguggaggua

SEQ ID NO: 523083 - RNA, 32 nt, Human
uggcgcggggcggcgggggcgggcggugcuga

SEQ ID NO: 523084 - RNA, 32 nt, Human
uggcgcggugagggagcggggguggggaucgg

SEQ ID NO: 523085 - RNA, 21 nt, Human
uggcgcgugccuguaauccca

SEQ ID NO: 523086 - RNA, 24 nt, Human
uggcgcgugccuguaaucccagcu

SEQ ID NO: 523087 - RNA, 32 nt, Human
uggcgcgugccuguaaucccagcuacuagggg

SEQ ID NO: 523088 - RNA, 32 nt, Human
uggcgcgugccuguaaucccagcuacucggga

SEQ ID NO: 523089 - RNA, 32 nt, Human
uggcgcgugccuguaaucccagcuacuuggga

SEQ ID NO: 523090 - RNA, 21 nt, Human
uggcgcgugccuguaauccua

SEQ ID NO: 523091 - RNA, 24 nt, Human
uggcgcgugccuguaauccuagcu

SEQ ID NO: 523092 - RNA, 32 nt, Human
uggcgcgugccuguaauccuagcuacucagga

SEQ ID NO: 523093 - RNA, 21 nt, Human
uggcgcgugccuguaauucca

SEQ ID NO: 523094 - RNA, 24 nt, Human
uggcgcgugccuguaauuccagcu

SEQ ID NO: 523095 - RNA, 21 nt, Human
uggcgcgugccuguaguccca

SEQ ID NO: 523096 - RNA, 24 nt, Human
uggcgcgugccuguagucccagcu

SEQ ID NO: 523097 - RNA, 32 nt, Human
uggcgcgugccuguagucccagcuacucgaga

SEQ ID NO: 523098 - RNA, 21 nt, Human
uggcgcgugcuuguaauccca

SEQ ID NO: 523099 - RNA, 24 nt, Human
uggcgcgugcuuguaaucccagcu

SEQ ID NO: 523100 - RNA, 32 nt, Human
uggcgcuagaggccauggaggcaguaggacaa

SEQ ID NO: 523101 - RNA, 32 nt, Human
uggcgcuaguccagcacgcccaggguuaaaag

SEQ ID NO: 523102 - RNA, 23 nt, Human
uggcgcuaucucagcucgcugca

SEQ ID NO: 523103 - RNA, 23 nt, Human
uggcgcuaucucggcucacugca

SEQ ID NO: 523104 - RNA, 23 nt, Human
uggcgcuaucuuggcucacugca

SEQ ID NO: 523105 - RNA, 32 nt, Human
uggcgcuauugcacuccagucuggguaacagg

SEQ ID NO: 523106 - RNA, 21 nt, Human
uggcgcucaaggagcagcagg

SEQ ID NO: 523107 - RNA, 32 nt, Human
uggcgcucagcagcuaggugggcaggucggcc

SEQ ID NO: 523108 - RNA, 32 nt, Human
uggcgcucauauccuccagucaugcccuagag

SEQ ID NO: 523109 - RNA, 32 nt, Human
uggcgcuccaacagaaaggcuugggugaccag

SEQ ID NO: 523110 - RNA, 32 nt, Human
uggcgcuccccuccucucccgcucuggcuucu

SEQ ID NO: 523111 - RNA, 32 nt, Human
uggcgcuccggaguugcugggcucagcgcagc

SEQ ID NO: 523112 - RNA, 32 nt, Human
uggcgcucuuagcuccugauugguuguguguu

SEQ ID NO: 523113 - RNA, 32 nt, Human
uggcgcugcacugggggcugggugcuggggag

SEQ ID NO: 523114 - RNA, 32 nt, Human
uggcgcugcugcacucaagcuuggaugacaga

SEQ ID NO: 523115 - RNA, 32 nt, Human
uggcgcugcugccaucuuuccucccaggugga

SEQ ID NO: 523116 - RNA, 32 nt, Human
uggcgcuggacauuggcaguucugcucugaau

SEQ ID NO: 523117 - RNA, 32 nt, Human
uggcgcuggauguggauuccaccaacagccgg

SEQ ID NO: 523118 - RNA, 32 nt, Human
uggcgcuguagcagcggcaggcugcugggcag

SEQ ID NO: 523119 - RNA, 23 nt, Human
uggcgcugucucagcucacugca

SEQ ID NO: 523120 - RNA, 23 nt, Human
uggcgcugucucggcucacugca

SEQ ID NO: 523121 - RNA, 32 nt, Human
uggcgcugucucucccccucggcucggagagg

SEQ ID NO: 523122 - RNA, 32 nt, Human
uggcgcuuccccuucuccucuggcuccggggu

SEQ ID NO: 523123 - RNA, 32 nt, Human
uggcgcuugccuguagucuagcuacuuggggu

SEQ ID NO: 523124 - RNA, 32 nt, Human
uggcgcuuugugaagcucugcuagccacuguu

SEQ ID NO: 523125 - RNA, 32 nt, Human
uggcggaaccgcgcugccgcagccugggauuc

SEQ ID NO: 523126 - RNA, 32 nt, Human
uggcggaaccuguaaucccagcuacucaggag

SEQ ID NO: 523127 - RNA, 32 nt, Human
uggcggacaccuggcccccgaggucccccggc

SEQ ID NO: 523128 - RNA, 32 nt, Human
uggcggaccacgaccagcuggcaccucagcuc

SEQ ID NO: 523129 - RNA, 32 nt, Human
uggcggaccagaccugcccugcucugugacag

SEQ ID NO: 523130 - RNA, 32 nt, Human
uggcggaccaucagcaagaacggaggggcuga

SEQ ID NO: 523131 - RNA, 32 nt, Human
uggcggacgccuguaaucccagcuacuuggaa

SEQ ID NO: 523132 - RNA, 32 nt, Human
uggcggacggucccuggcuggguucuggaggc

SEQ ID NO: 523133 - RNA, 32 nt, Human
uggcggagaacagcgagagucugggcaccguc

SEQ ID NO: 523134 - RNA, 23 nt, Human
uggcggagacaagcacugagaca

SEQ ID NO: 523135 - RNA, 32 nt, Human
uggcggagacaggguuucaccauguuggccag

SEQ ID NO: 523136 - RNA, 32 nt, Human
uggcggagagugaaggagacggagaaacgcgc

SEQ ID NO: 523137 - RNA, 32 nt, Human
uggcggagcgcugagggcagcggcuggcucug

SEQ ID NO: 523138 - RNA, 32 nt, Human
uggcggaggaagaggaguggcggcagcggcgg

SEQ ID NO: 523139 - RNA, 32 nt, Human
uggcggaggggagggggcgcccaggaggggug

SEQ ID NO: 523140 - RNA, 31 nt, Human
uggcggcaacaugcaagaaggagggacuguc

SEQ ID NO: 523141 - RNA, 32 nt, Human
uggcggcaagagcccuuaaauuacauuaaauc

SEQ ID NO: 523142 - RNA, 21 nt, Human
uggcggcagacgagaagagag

SEQ ID NO: 523143 - RNA, 32 nt, Human
uggcggcagaggcagagaugggagugaugcgg

SEQ ID NO: 523144 - RNA, 32 nt, Human
uggcggcagccgcggcggcgggcggcgguugc

SEQ ID NO: 523145 - RNA, 32 nt, Human
uggcggcagcugucuguguuucuccuguucuc

SEQ ID NO: 523146 - RNA, 32 nt, Human
uggcggcaggacggcgaacuugcaguaucucc

SEQ ID NO: 523147 - RNA, 25 nt, Human
uggcggcagucacggccaagagagu

SEQ ID NO: 523148 - RNA, 32 nt, Human
uggcggcaucugcacacacaaaaacuuguaca

SEQ ID NO: 523149 - RNA, 32 nt, Human
uggcggccaagguggcgaagcagcagccgcgg

SEQ ID NO: 523150 - RNA, 32 nt, Human
uggcggcccugccugggccuucggagccuccu

SEQ ID NO: 523151 - RNA, 32 nt, Human
uggcggccuccagggggcugggaauagccgcu

SEQ ID NO: 523152 - RNA, 32 nt, Human
uggcggccugcagcgugagcugugggagaggg

SEQ ID NO: 523153 - RNA, 20 nt, Human
uggcggccuuggucggccca

SEQ ID NO: 523154 - RNA, 32 nt, Human
uggcggccuuucugcuccucgcggcccaggug

SEQ ID NO: 523155 - RNA, 32 nt, Human
uggcggcgccuggcaggcuccgccagcccccu

SEQ ID NO: 523156 - RNA, 30 nt, Human
uggcggcgccuguaaucccagcuacuuggg

SEQ ID NO: 523157 - RNA, 19 nt, Human
uggcggcgcgguugguccu

SEQ ID NO: 523158 - RNA, 32 nt, Human
uggcggcggcggaggagagggagcagcgucac

SEQ ID NO: 523159 - RNA, 32 nt, Human
uggcggcggcggcagaggcggcgggaggauga

SEQ ID NO: 523160 - RNA, 32 nt, Human
uggcggcggcggcaggcggcagaggggagucc

SEQ ID NO: 523161 - RNA, 32 nt, Human
uggcggcggcggcggaggcgucgguggaggag

SEQ ID NO: 523162 - RNA, 32 nt, Human
uggcggcggcuccucuucugccuguguaugga

SEQ ID NO: 523163 - RNA, 32 nt, Human
uggcggcgguagcggaggugugaguggacgcg

SEQ ID NO: 523164 - RNA, 32 nt, Human
uggcggcguccaagggagguugagggcucuga

SEQ ID NO: 523165 - RNA, 32 nt, Human
uggcggcuagcugcaccucccauuucuuggac

SEQ ID NO: 523166 - RNA, 32 nt, Human
uggcggcuccuggaggaggggcagagggaguu

SEQ ID NO: 523167 - RNA, 32 nt, Human
uggcggcucuggcggccuaaagaaggcggccg

SEQ ID NO: 523168 - RNA, 32 nt, Human
uggcggcuucagcaggaagcccagggacagca

SEQ ID NO: 523169 - RNA, 32 nt, Human
uggcgggaacccaggaggcagagguugcagug

SEQ ID NO: 523170 - RNA, 22 nt, Human
uggcgggaagagcccggaaaga

SEQ ID NO: 523171 - RNA, 32 nt, Human
uggcgggagauggcuguggagcuggggguuua

SEQ ID NO: 523172 - RNA, 32 nt, Human
uggcgggaggcagcgccgcggagccagcgccg

SEQ ID NO: 523173 - RNA, 32 nt, Human
uggcgggagggacagccccagagcagacccuu

SEQ ID NO: 523174 - RNA, 32 nt, Human
uggcgggagggaggaauggaaaguggcugcua

SEQ ID NO: 523175 - RNA, 32 nt, Human
uggcgggaggugcagagcagggggcuuuaggg

SEQ ID NO: 523176 - RNA, 21 nt, Human
uggcgggcaccuauaauccca

SEQ ID NO: 523177 - RNA, 21 nt, Human
uggcgggcaccuauaguccca

SEQ ID NO: 523178 - RNA, 21 nt, Human
uggcgggcaccuguaauacca

SEQ ID NO: 523179 - RNA, 21 nt, Human
uggcgggcaccuguaauccca

SEQ ID NO: 523180 - RNA, 24 nt, Human
uggcgggcaccuguaaucccagcu

SEQ ID NO: 523181 - RNA, 21 nt, Human
uggcgggcaccuguaaucgca

SEQ ID NO: 523182 - RNA, 21 nt, Human
uggcgggcaccuguaguccca

SEQ ID NO: 523183 - RNA, 24 nt, Human
uggcgggcaccuguagucccagcu

SEQ ID NO: 523184 - RNA, 24 nt, Human
uggcgggcaccuguaguuccagcu

SEQ ID NO: 523185 - RNA, 32 nt, Human
uggcgggcaccuguaguuccagcugcuuggga

SEQ ID NO: 523186 - RNA, 21 nt, Human
uggcgggcacuuguaauccca

SEQ ID NO: 523187 - RNA, 24 nt, Human
uggcgggcacuuguaaucccagcu

SEQ ID NO: 523188 - RNA, 32 nt, Human
uggcgggcaggcggguggggcaggcugggggc

SEQ ID NO: 523189 - RNA, 21 nt, Human
uggcgggcccccguaguccca

SEQ ID NO: 523190 - RNA, 21 nt, Human
uggcgggccccuguaauccca

SEQ ID NO: 523191 - RNA, 24 nt, Human
uggcgggccccuguaaucccagcu

SEQ ID NO: 523192 - RNA, 21 nt, Human
uggcgggccccuguaguccca

SEQ ID NO: 523193 - RNA, 24 nt, Human
uggcgggccccuguagucccagcu

SEQ ID NO: 523194 - RNA, 21 nt, Human
uggcgggcgcccguaauccca

SEQ ID NO: 523195 - RNA, 21 nt, Human
uggcgggcgccuauaauccca

SEQ ID NO: 523196 - RNA, 21 nt, Human
uggcgggcgccuauaauccua

SEQ ID NO: 523197 - RNA, 32 nt, Human
uggcgggcgccuguaauaucagcuacuuggga

SEQ ID NO: 523198 - RNA, 24 nt, Human
uggcgggcgccuguaaucacagcu

SEQ ID NO: 523199 - RNA, 32 nt, Human
uggcgggcgccuguaaucacagcuacuuggga

SEQ ID NO: 523200 - RNA, 21 nt, Human
uggcgggcgccuguaauccca

SEQ ID NO: 523201 - RNA, 24 nt, Human
uggcgggcgccuguaaucccagcu

SEQ ID NO: 523202 - RNA, 32 nt, Human
uggcgggcgccuguaaucccagcuacuuggga

SEQ ID NO: 523203 - RNA, 32 nt, Human
uggcgggcgccuguaaucccagcuacuugggu

SEQ ID NO: 523204 - RNA, 21 nt, Human
uggcgggcgccuguaauccua

SEQ ID NO: 523205 - RNA, 24 nt, Human
uggcgggcgccuguaauccuagcu

SEQ ID NO: 523206 - RNA, 32 nt, Human
uggcgggcgccuguaauccuagcugcuuggga

SEQ ID NO: 523207 - RNA, 21 nt, Human
uggcgggcgccuguagcccca

SEQ ID NO: 523208 - RNA, 24 nt, Human
uggcgggcgccuguagccccagcu

SEQ ID NO: 523209 - RNA, 21 nt, Human
uggcgggcgccuguaguccca

SEQ ID NO: 523210 - RNA, 24 nt, Human
uggcgggcgccuguagucccagcu

SEQ ID NO: 523211 - RNA, 24 nt, Human
uggcgggcgccuguaguuccagcu

SEQ ID NO: 523212 - RNA, 32 nt, Human
uggcgggcgccuguaucccagcuacucgggag

SEQ ID NO: 523213 - RNA, 21 nt, Human
uggcgggcgccuguauuccca

SEQ ID NO: 523214 - RNA, 21 nt, Human
uggcgggcgccugugguccca

SEQ ID NO: 523215 - RNA, 21 nt, Human
uggcgggcuccuguaguccca

SEQ ID NO: 523216 - RNA, 24 nt, Human
uggcgggcuccuguagucccagcu

SEQ ID NO: 523217 - RNA, 32 nt, Human
uggcgggcugacccucgaccucccagacacca

SEQ ID NO: 523218 - RNA, 32 nt, Human
uggcgggcuggcaaggggauauucagcucugc

SEQ ID NO: 523219 - RNA, 32 nt, Human
uggcgggcuucuguaauuccagcuacuuggga

SEQ ID NO: 523220 - RNA, 32 nt, Human
uggcggggagcacagcugcccugacacauugg

SEQ ID NO: 523221 - RNA, 32 nt, Human
uggcggggcugcuccuucccaccccucagaac

SEQ ID NO: 523222 - RNA, 32 nt, Human
uggcgggggaggcaggggugagaggauggaau

SEQ ID NO: 523223 - RNA, 32 nt, Human
uggcgggggcagcagaggggcugggugaacuc

SEQ ID NO: 523224 - RNA, 32 nt, Human
uggcgggggccuguaauccuagcuacuugggg

SEQ ID NO: 523225 - RNA, 32 nt, Human
uggcgggggcugggaggacaggcguggggucc

SEQ ID NO: 523226 - RNA, 32 nt, Human
uggcgggggugaguggggccagcggggcugga

SEQ ID NO: 523227 - RNA, 32 nt, Human
uggcgggucaugaaaacaguuacuggaauugu

SEQ ID NO: 523228 - RNA, 32 nt, Human
uggcgggucugcagaagaucagcagcuucuua

SEQ ID NO: 523229 - RNA, 32 nt, Human
uggcgggugcacagagacggucuggaaggaaa

SEQ ID NO: 523230 - RNA, 21 nt, Human
uggcgggugccuguaauccca

SEQ ID NO: 523231 - RNA, 32 nt, Human
uggcgggugccuguaaucccagcuacucagga

SEQ ID NO: 523232 - RNA, 32 nt, Human
uggcgggugccuguaaucccagcuacucggga

SEQ ID NO: 523233 - RNA, 32 nt, Human
uggcgggugccuguaaucccagcuacugggga

SEQ ID NO: 523234 - RNA, 32 nt, Human
uggcgggugccuguaaucccagcuacuuggga

SEQ ID NO: 523235 - RNA, 32 nt, Human
uggcgggugccuguaaucccggcuacucagga

SEQ ID NO: 523236 - RNA, 32 nt, Human
uggcgggugccuguaaucucagcuacucagga

SEQ ID NO: 523237 - RNA, 32 nt, Human
uggcgggugccuguaaucucagcuacuugaga

SEQ ID NO: 523238 - RNA, 32 nt, Human
uggcgggugccuguagucccagccacuuggga

SEQ ID NO: 523239 - RNA, 32 nt, Human
uggcgggugccuguagucccagcuacucagga

SEQ ID NO: 523240 - RNA, 32 nt, Human
uggcgggugccuguagucccagcuacucggga

SEQ ID NO: 523241 - RNA, 32 nt, Human
uggcgggugccuguagucccagcuacugguag

SEQ ID NO: 523242 - RNA, 32 nt, Human
uggcgggugccuguagucccagcuauuuggga

SEQ ID NO: 523243 - RNA, 32 nt, Human
uggcgggugccuguagucccagcugcucggga

SEQ ID NO: 523244 - RNA, 32 nt, Human
uggcgggugccuguagucccaguacucaggag

SEQ ID NO: 523245 - RNA, 32 nt, Human
uggcgggugccuguauugccagcuacucggaa

SEQ ID NO: 523246 - RNA, 32 nt, Human
uggcggguggcugcucugggcccacugcucuu

SEQ ID NO: 523247 - RNA, 22 nt, Human
uggcgguacccacccagcccaa

SEQ ID NO: 523248 - RNA, 21 nt, Human
uggcggucaccuguaguccca

SEQ ID NO: 523249 - RNA, 24 nt, Human
uggcggucaccuguagucccagcu

SEQ ID NO: 523250 - RNA, 32 nt, Human
uggcggucaugaaggcugugugcagugcaagg

SEQ ID NO: 523251 - RNA, 20 nt, Human
uggcggucucuguaauccca

SEQ ID NO: 523252 - RNA, 23 nt, Human
uggcggucucuguaaucccagcu

SEQ ID NO: 523253 - RNA, 32 nt, Human
uggcggucugcacuucucucccggguuccauc

SEQ ID NO: 523254 - RNA, 20 nt, Human
uggcggugacagccggccca

SEQ ID NO: 523255 - RNA, 32 nt, Human
uggcggugacucugcuuccugcacugacccag

SEQ ID NO: 523256 - RNA, 21 nt, Human
uggcggugacugcgugguccu

SEQ ID NO: 523257 - RNA, 24 nt, Human
uggcggugcacgccugugguccca

SEQ ID NO: 523258 - RNA, 17 nt, Human
uggcggugccggcgccc

SEQ ID NO: 523259 - RNA, 32 nt, Human
uggcggugcugccuccacccuccugagccugg

SEQ ID NO: 523260 - RNA, 32 nt, Human
uggcgguggaguccugagcuagucgugucccg

SEQ ID NO: 523261 - RNA, 32 nt, Human
uggcgguggcccuucccggcugcggagagccc

SEQ ID NO: 523262 - RNA, 32 nt, Human
uggcgguggcugggcagggcugggcagggccg

SEQ ID NO: 523263 - RNA, 32 nt, Human
uggcggugggcccugaaccugcggugucgggg

SEQ ID NO: 523264 - RNA, 32 nt, Human
uggcgguggggaucgaaagaaaggagggcaug

SEQ ID NO: 523265 - RNA, 29 nt, Human
uggcggugucugugaugguccggagcgag

SEQ ID NO: 523266 - RNA, 20 nt, Human
uggcggugugggccguccca

SEQ ID NO: 523267 - RNA, 22 nt, Human
uggcgguuccguagcgguccca

SEQ ID NO: 523268 - RNA, 32 nt, Human
uggcgguuccugugcugaguccugaacacgua

SEQ ID NO: 523269 - RNA, 23 nt, Human
uggcguaaucucggcucacugca

SEQ ID NO: 523270 - RNA, 23 nt, Human
uggcguaaucuuggcucacugca

SEQ ID NO: 523271 - RNA, 21 nt, Human
uggcguacgccuauaguccca

SEQ ID NO: 523272 - RNA, 21 nt, Human
uggcguacgccuguaguccca

SEQ ID NO: 523273 - RNA, 24 nt, Human
uggcguacgccuguagucccagcu

SEQ ID NO: 523274 - RNA, 32 nt, Human
uggcguagagccuagcaacagcgcaggcuccc

SEQ ID NO: 523275 - RNA, 21 nt, Human
uggcguaugccuguaauccca

SEQ ID NO: 523276 - RNA, 24 nt, Human
uggcguaugccuguaaucccagcu

SEQ ID NO: 523277 - RNA, 32 nt, Human
uggcguaugccuguaaucccagcuacuuagga

SEQ ID NO: 523278 - RNA, 32 nt, Human
uggcgucaagagcaguugacucacugaugaag

SEQ ID NO: 523279 - RNA, 31 nt, Human
uggcgucacagcugagcaccgugccgggagg

SEQ ID NO: 523280 - RNA, 32 nt, Human
uggcgucacuaccuucuuguaagccaguauac

SEQ ID NO: 523281 - RNA, 32 nt, Human
uggcgucaguguucuccagccugggcaacaga

SEQ ID NO: 523282 - RNA, 23 nt, Human
uggcgucaucucagcucacugca

SEQ ID NO: 523283 - RNA, 23 nt, Human
uggcgucaucucggcucacugca

SEQ ID NO: 523284 - RNA, 32 nt, Human
uggcguccgggguggggucaaugaagugcagc

SEQ ID NO: 523285 - RNA, 32 nt, Human
uggcguccuccaccaccacaccuucaccugcg

SEQ ID NO: 523286 - RNA, 32 nt, Human
uggcgucgaggcuuccauggggugggggaggc

SEQ ID NO: 523287 - RNA, 32 nt, Human
uggcgucggagccggcccuggcccccugcagc

SEQ ID NO: 523288 - RNA, 32 nt, Human
uggcgucugagcaacuuucguccacaagcaug

SEQ ID NO: 523289 - RNA, 32 nt, Human
uggcgucuguccucaccaugccuagccuuugg

SEQ ID NO: 523290 - RNA, 32 nt, Human
uggcgugaacccaggagacggagcuugcagug

SEQ ID NO: 523291 - RNA, 32 nt, Human
uggcgugaacccaggaggaggagcuugcagug

SEQ ID NO: 523292 - RNA, 32 nt, Human
uggcgugaacccaggaggcagagcuugcagug

SEQ ID NO: 523293 - RNA, 32 nt, Human
uggcgugaacccaggaggcagagguugcagug

SEQ ID NO: 523294 - RNA, 32 nt, Human
uggcgugaacccaggaggcggaccuuguagug

SEQ ID NO: 523295 - RNA, 32 nt, Human
uggcgugaacccaggaggcggagcuggcagug

SEQ ID NO: 523296 - RNA, 32 nt, Human
uggcgugaacccaggaggcggagcuugcagug

SEQ ID NO: 523297 - RNA, 32 nt, Human
uggcgugaacccaggaggcggagguugcagug

SEQ ID NO: 523298 - RNA, 32 nt, Human
uggcgugaacccaggaggcguagcuagcagug

SEQ ID NO: 523299 - RNA, 32 nt, Human
uggcgugaacccaggagguggagcuugcagug

SEQ ID NO: 523300 - RNA, 32 nt, Human
uggcgugaauccaggagguggagccugcagug

SEQ ID NO: 523301 - RNA, 32 nt, Human
uggcgugaccagggcucacugcagccuugacc

SEQ ID NO: 523302 - RNA, 23 nt, Human
uggcgugaccuuggcucacugca

SEQ ID NO: 523303 - RNA, 32 nt, Human
uggcgugagcccaggaggcggagcuugcagug

SEQ ID NO: 523304 - RNA, 32 nt, Human
uggcgugauaacccugucaucuucccaaagcu

SEQ ID NO: 523305 - RNA, 24 nt, Human
uggcgugaucacagcucacugcag

SEQ ID NO: 523306 - RNA, 32 nt, Human
uggcgugaucacagcucacugcagccuugacc

SEQ ID NO: 523307 - RNA, 32 nt, Human
uggcgugaucauaccucacugcagcuucaacu

SEQ ID NO: 523308 - RNA, 32 nt, Human
uggcgugaucauagcucacugcagccuugaau

SEQ ID NO: 523309 - RNA, 32 nt, Human
uggcgugaucaugccucacugcagccucgacc

SEQ ID NO: 523310 - RNA, 32 nt, Human
uggcgugaucauggcucauugcagccucgacc

SEQ ID NO: 523311 - RNA, 23 nt, Human
uggcgugaucucagaucacugca

SEQ ID NO: 523312 - RNA, 23 nt, Human
uggcgugaucucagcucacugca

SEQ ID NO: 523313 - RNA, 23 nt, Human
uggcgugaucuccacucacugca

SEQ ID NO: 523314 - RNA, 24 nt, Human
uggcgugaucucgagucacugcag

SEQ ID NO: 523315 - RNA, 32 nt, Human
uggcgugaucucgagucacugcagccuguguc

SEQ ID NO: 523316 - RNA, 23 nt, Human
uggcgugaucucggcucaaugca

SEQ ID NO: 523317 - RNA, 23 nt, Human
uggcgugaucucggcucaccgca

SEQ ID NO: 523318 - RNA, 23 nt, Human
uggcgugaucucggcucacuaca

SEQ ID NO: 523319 - RNA, 22 nt, Human
uggcgugaucucggcucacugc

SEQ ID NO: 523320 - RNA, 23 nt, Human
uggcgugaucucggcucacugca

SEQ ID NO: 523321 - RNA, 32 nt, Human
uggcgugaucucggcucacugcagccuccgcc

SEQ ID NO: 523322 - RNA, 23 nt, Human
uggcgugaucucggcucacugcg

SEQ ID NO: 523323 - RNA, 23 nt, Human
uggcgugaucucggcucauugca

SEQ ID NO: 523324 - RNA, 32 nt, Human
uggcgugaucucggcucgcugcagccucugcc

SEQ ID NO: 523325 - RNA, 23 nt, Human
uggcgugaucucggcuuacugca

SEQ ID NO: 523326 - RNA, 23 nt, Human
uggcgugaucucgguucacugca

SEQ ID NO: 523327 - RNA, 23 nt, Human
uggcgugaucucugcucacugca

SEQ ID NO: 523328 - RNA, 23 nt, Human
uggcgugaucuuggcucacugca

SEQ ID NO: 523329 - RNA, 24 nt, Human
uggcgugaucuuggcucacugcag

SEQ ID NO: 523330 - RNA, 32 nt, Human
uggcgugaucuuggcucacugcagacuucacc

SEQ ID NO: 523331 - RNA, 32 nt, Human
uggcgugaucuuggcucacugcagccuccacc

SEQ ID NO: 523332 - RNA, 32 nt, Human
uggcgugaucuuggcucacugcagccuucgcc

SEQ ID NO: 523333 - RNA, 23 nt, Human
uggcgugaucuuggcuuacugca

SEQ ID NO: 523334 - RNA, 24 nt, Human
uggcgugaucuuggcuuacugcag

SEQ ID NO: 523335 - RNA, 32 nt, Human
uggcgugaucuuggcuuacugcagccuuugcc

SEQ ID NO: 523336 - RNA, 23 nt, Human
uggcgugaucuugguucacugca

SEQ ID NO: 523337 - RNA, 21 nt, Human
uggcgugcaccuguaauccca

SEQ ID NO: 523338 - RNA, 24 nt, Human
uggcgugcaccuguaaucccagcu

SEQ ID NO: 523339 - RNA, 32 nt, Human
uggcgugcaccuguaaucccagcuacuaggga

SEQ ID NO: 523340 - RNA, 32 nt, Human
uggcgugcaccuguaaucccagcuacucagga

SEQ ID NO: 523341 - RNA, 32 nt, Human
uggcgugcaccuguaaucccagcuacuuggga

SEQ ID NO: 523342 - RNA, 21 nt, Human
uggcgugcaccuguaguccca

SEQ ID NO: 523343 - RNA, 22 nt, Human
uggcgugcaguggugugaucuc

SEQ ID NO: 523344 - RNA, 32 nt, Human
uggcgugcaugugccaagaaauguguuuuuau

SEQ ID NO: 523345 - RNA, 18 nt, Human
uggcgugcccucugccca

SEQ ID NO: 523346 - RNA, 32 nt, Human
uggcgugccugccugcacggcccuugccucuc

SEQ ID NO: 523347 - RNA, 21 nt, Human
uggcgugcgccuguaauccca

SEQ ID NO: 523348 - RNA, 24 nt, Human
uggcgugcgccuguaaucccagcu

SEQ ID NO: 523349 - RNA, 32 nt, Human
uggcgugcgccuguaaucccagcuacuuggga

SEQ ID NO: 523350 - RNA, 21 nt, Human
uggcgugcgccuguaaucuca

SEQ ID NO: 523351 - RNA, 24 nt, Human
uggcgugcgccuguaaucucagcu

SEQ ID NO: 523352 - RNA, 32 nt, Human
uggcgugcgccuguaaucucagcuacuuggga

SEQ ID NO: 523353 - RNA, 21 nt, Human
uggcgugcgccuguaguccca

SEQ ID NO: 523354 - RNA, 24 nt, Human
uggcgugcgccuguagucccagcu

SEQ ID NO: 523355 - RNA, 32 nt, Human
uggcguggaaccgccucaucaugcggcccagc

SEQ ID NO: 523356 - RNA, 32 nt, Human
uggcguggaagagauauagagaacucgacugg

SEQ ID NO: 523357 - RNA, 32 nt, Human
uggcguggcucagcugucuguugaaguuguug

SEQ ID NO: 523358 - RNA, 32 nt, Human
uggcgugggaugggggaaagaaaagaaagaga

SEQ ID NO: 523359 - RNA, 19 nt, Human
uggcguggggacgggccau

SEQ ID NO: 523360 - RNA, 21 nt, Human
uggcgugugccuguaauccca

SEQ ID NO: 523361 - RNA, 24 nt, Human
uggcgugugccuguaaucccagcu

SEQ ID NO: 523362 - RNA, 32 nt, Human
uggcgugugccuguaaucccagcuacuuggga

SEQ ID NO: 523363 - RNA, 32 nt, Human
uggcgugugccuguaaucccagcuauuuggga

SEQ ID NO: 523364 - RNA, 21 nt, Human
uggcgugugccuguaaucuca

SEQ ID NO: 523365 - RNA, 24 nt, Human
uggcgugugccuguaaucucagcu

SEQ ID NO: 523366 - RNA, 21 nt, Human
uggcgugugccuguaaugcca

SEQ ID NO: 523367 - RNA, 24 nt, Human
uggcgugugccuguaaugccagcu

SEQ ID NO: 523368 - RNA, 21 nt, Human
uggcgugugccuguaguccca

SEQ ID NO: 523369 - RNA, 24 nt, Human
uggcgugugccuguagucccagcu

SEQ ID NO: 523370 - RNA, 32 nt, Human
uggcgugugccuguagucccagcuacuuggga

SEQ ID NO: 523371 - RNA, 32 nt, Human
uggcgugugccuguagucccagcugcuuggga

SEQ ID NO: 523372 - RNA, 21 nt, Human
uggcgugugccugugauccca

SEQ ID NO: 523373 - RNA, 24 nt, Human
uggcgugugccugugaucccagcu

SEQ ID NO: 523374 - RNA, 32 nt, Human
uggcgugugguggcucaugccuguaaucccag

SEQ ID NO: 523375 - RNA, 32 nt, Human
uggcguguuccuucucccuggguccgacaugu

SEQ ID NO: 523376 - RNA, 32 nt, Human
uggcguucccagugcccggggaaagggguccc

SEQ ID NO: 523377 - RNA, 32 nt, Human
uggcguuugccuccuucgcuuaguucuccaga

SEQ ID NO: 523378 - RNA, 32 nt, Human
uggcuaaaaauacaaaaaguuagccgggcgug

SEQ ID NO: 523379 - RNA, 21 nt, Human
uggcuaaagccuguaauccca

SEQ ID NO: 523380 - RNA, 32 nt, Human
uggcuaaagccuguaaucccagcacuuuggga

SEQ ID NO: 523381 - RNA, 32 nt, Human
uggcuaaauugagcuaaugacaagcuguucga

SEQ ID NO: 523382 - RNA, 32 nt, Human
uggcuaacaaggugaaaccccgucucuacuaa

SEQ ID NO: 523383 - RNA, 32 nt, Human
uggcuaacacagugaaaccccaucucuaauaa

SEQ ID NO: 523384 - RNA, 32 nt, Human
uggcuaacacagugaaaccccaucucuacuaa

SEQ ID NO: 523385 - RNA, 32 nt, Human
uggcuaacacagugaaaccccgucucuaccaa

SEQ ID NO: 523386 - RNA, 30 nt, Human
uggcuaacacagugaaaccccgucucuacu

SEQ ID NO: 523387 - RNA, 32 nt, Human
uggcuaacacagugaaaccccgucucuacuaa

SEQ ID NO: 523388 - RNA, 32 nt, Human
uggcuaacacagugaaaccccgucucuucuaa

SEQ ID NO: 523389 - RNA, 32 nt, Human
uggcuaacaccgugaaaccccaucucuacuaa

SEQ ID NO: 523390 - RNA, 32 nt, Human
uggcuaacaccuguaaucccagcacuuuggga

SEQ ID NO: 523391 - RNA, 32 nt, Human
uggcuaacacggcgaaaccccgucucuacuaa

SEQ ID NO: 523392 - RNA, 32 nt, Human
uggcuaacacggcgaaacgccaucucuacuga

SEQ ID NO: 523393 - RNA, 32 nt, Human
uggcuaacacgggugaaaccccgucucuauua

SEQ ID NO: 523394 - RNA, 32 nt, Human
uggcuaacacgguaaaaccccaucucuacuaa

SEQ ID NO: 523395 - RNA, 32 nt, Human
uggcuaacacggugaaaacccaugucuacuaa

SEQ ID NO: 523396 - RNA, 32 nt, Human
uggcuaacacggugaaaccccaucuccacuaa

SEQ ID NO: 523397 - RNA, 32 nt, Human
uggcuaacacggugaaaccccaucucuacaaa

SEQ ID NO: 523398 - RNA, 32 nt, Human
uggcuaacacggugaaaccccaucucuacuaa

SEQ ID NO: 523399 - RNA, 32 nt, Human
uggcuaacacggugaaaccccaucucuacuga

SEQ ID NO: 523400 - RNA, 32 nt, Human
uggcuaacacggugaaaccccgucucuaauaa

SEQ ID NO: 523401 - RNA, 32 nt, Human
uggcuaacacggugaaaccccgucucuacaua

SEQ ID NO: 523402 - RNA, 32 nt, Human
uggcuaacacggugaaaccccgucucuacuaa

SEQ ID NO: 523403 - RNA, 32 nt, Human
uggcuaacacggugaaaccccgucucuacuac

SEQ ID NO: 523404 - RNA, 32 nt, Human
uggcuaacacggugaaaccccgucucuacuga

SEQ ID NO: 523405 - RNA, 32 nt, Human
uggcuaacacggugaaaccccgucucuaguaa

SEQ ID NO: 523406 - RNA, 32 nt, Human
uggcuaacacggugaaaccccgucuuuacuaa

SEQ ID NO: 523407 - RNA, 32 nt, Human
uggcuaacacggugaaacuccaucucuacuaa

SEQ ID NO: 523408 - RNA, 32 nt, Human
uggcuaacacggugaaacuccgucucuacuaa

SEQ ID NO: 523409 - RNA, 32 nt, Human
uggcuaacacggugagaccccaucucuacuaa

SEQ ID NO: 523410 - RNA, 32 nt, Human
uggcuaacacggugauaccccgucucuacuaa

SEQ ID NO: 523411 - RNA, 32 nt, Human
uggcuaacagggugaaaccccgucucuacuaa

SEQ ID NO: 523412 - RNA, 32 nt, Human
uggcuaacauggcaaaaccccaucucuacuaa

SEQ ID NO: 523413 - RNA, 32 nt, Human
uggcuaacauggcaaaaccucaucucuacuaa

SEQ ID NO: 523414 - RNA, 32 nt, Human
uggcuaacauggcaauacccuaucucuacuaa

SEQ ID NO: 523415 - RNA, 32 nt, Human
uggcuaacauggcgaaaccccgucucuacuaa

SEQ ID NO: 523416 - RNA, 32 nt, Human
uggcuaacaugguaaaaccccgucucuacuaa

SEQ ID NO: 523417 - RNA, 32 nt, Human
uggcuaacauggugaaaccccaucuccacuaa

SEQ ID NO: 523418 - RNA, 30 nt, Human
uggcuaacauggugaaaccccaucucuacu

SEQ ID NO: 523419 - RNA, 32 nt, Human
uggcuaacauggugaaaccccaucucuacuaa

SEQ ID NO: 523420 - RNA, 32 nt, Human
uggcuaacauggugaaaccccaucucuacuga

SEQ ID NO: 523421 - RNA, 32 nt, Human
uggcuaacauggugaaaccccaucucuaguaa

SEQ ID NO: 523422 - RNA, 32 nt, Human
uggcuaacauggugaaaccccgucucuaccaa

SEQ ID NO: 523423 - RNA, 32 nt, Human
uggcuaacauggugaaaccccgucucuacuaa

SEQ ID NO: 523424 - RNA, 32 nt, Human
uggcuaacauggugaaaccccgucucuacuga

SEQ ID NO: 523425 - RNA, 32 nt, Human
uggcuaacauggugaaaccccgucucuacuua

SEQ ID NO: 523426 - RNA, 32 nt, Human
uggcuaacauggugaaaccccgucucugcuaa

SEQ ID NO: 523427 - RNA, 32 nt, Human
uggcuaacauggugaaaucccgucucuacuga

SEQ ID NO: 523428 - RNA, 32 nt, Human
uggcuaacauggugguaccccgucucuacuga

SEQ ID NO: 523429 - RNA, 32 nt, Human
uggcuaacgccuguaaucccagaacuuuggga

SEQ ID NO: 523430 - RNA, 32 nt, Human
uggcuaacgccuguaaucccagcacuugggag

SEQ ID NO: 523431 - RNA, 32 nt, Human
uggcuaacgccuguaaucccagcacuuugaga

SEQ ID NO: 523432 - RNA, 32 nt, Human
uggcuaacguggugaaaccccaucucuacuaa

SEQ ID NO: 523433 - RNA, 32 nt, Human
uggcuaacugcaaccuccagcuccuggguuca

SEQ ID NO: 523434 - RNA, 32 nt, Human
uggcuaacugcaaccuccgccucccagguuca

SEQ ID NO: 523435 - RNA, 32 nt, Human
uggcuaacugcaacuuccaccuccuggguuca

SEQ ID NO: 523436 - RNA, 32 nt, Human
uggcuaacugggacuaaaacagcuccaucacc

SEQ ID NO: 523437 - RNA, 32 nt, Human
uggcuaacuuggugaaaccccgucucuaauaa

SEQ ID NO: 523438 - RNA, 32 nt, Human
uggcuaagaacucauggccacuguggaaaucu

SEQ ID NO: 523439 - RNA, 32 nt, Human
uggcuaaggagagucacguagcugugggcggg

SEQ ID NO: 523440 - RNA, 20 nt, Human
uggcuaaggccccucugcac

SEQ ID NO: 523441 - RNA, 32 nt, Human
uggcuaauacagugaaaccccaucucuacuaa

SEQ ID NO: 523442 - RNA, 32 nt, Human
uggcuaauacggugaaaccccgucucuacuaa

SEQ ID NO: 523443 - RNA, 32 nt, Human
uggcuaauauggugaaaccccaucucuacuaa

SEQ ID NO: 523444 - RNA, 32 nt, Human
uggcuaauauggugaaaccccgucucuacuaa

SEQ ID NO: 523445 - RNA, 32 nt, Human
uggcuaaucauucauucauucauuccacacac

SEQ ID NO: 523446 - RNA, 32 nt, Human
uggcuaauguggugaaaccccgucucuacuaa

SEQ ID NO: 523447 - RNA, 32 nt, Human
uggcuaauuagcucugugccacauuccuaagc

SEQ ID NO: 523448 - RNA, 32 nt, Human
uggcuaauuaugcaauuaauucucaacguauc

SEQ ID NO: 523449 - RNA, 32 nt, Human
uggcuacacagaaccccacuacuuaccaggca

SEQ ID NO: 523450 - RNA, 32 nt, Human
uggcuacacagcaacagcacccgaugggccca

SEQ ID NO: 523451 - RNA, 32 nt, Human
uggcuacaccacucucccagccugugaccacc

SEQ ID NO: 523452 - RNA, 21 nt, Human
uggcuacagcuuaugcaucau

SEQ ID NO: 523453 - RNA, 32 nt, Human
uggcuacauggugaaaccccgucucuauaaaa

SEQ ID NO: 523454 - RNA, 32 nt, Human
uggcuaccaaaugauaagaacaacagcaacaa

SEQ ID NO: 523455 - RNA, 32 nt, Human
uggcuaccagcaacacaccugcuccaccgcca

SEQ ID NO: 523456 - RNA, 32 nt, Human
uggcuacccagcugugugugaggaggaccuga

SEQ ID NO: 523457 - RNA, 32 nt, Human
uggcuacccuggggcgaguccuguuuacagug

SEQ ID NO: 523458 - RNA, 32 nt, Human
uggcuaccuaggcuugccagguacggcagaaa

SEQ ID NO: 523459 - RNA, 26 nt, Human
uggcuaccucccuuacuuucuucagg

SEQ ID NO: 523460 - RNA, 32 nt, Human
uggcuaccugacuuggugggagcuccaggcag

SEQ ID NO: 523461 - RNA, 32 nt, Human
uggcuacgacuugggacggaaguggccugaga

SEQ ID NO: 523462 - RNA, 32 nt, Human
uggcuacgccuguaaucccagcacuuugggag

SEQ ID NO: 523463 - RNA, 32 nt, Human
uggcuacugcuggcuuucuucauggccucucu

SEQ ID NO: 523464 - RNA, 32 nt, Human
uggcuagaauggcuuguuccugcuggggcuga

SEQ ID NO: 523465 - RNA, 32 nt, Human
uggcuagacccaaacauaugcacauucacuua

SEQ ID NO: 523466 - RNA, 32 nt, Human
uggcuagagaugggggugagaccggggaagga

SEQ ID NO: 523467 - RNA, 32 nt, Human
uggcuagcagaggccuggccagcuggccacug

SEQ ID NO: 523468 - RNA, 32 nt, Human
uggcuagcauaguaaaaccccaucucuacuga

SEQ ID NO: 523469 - RNA, 32 nt, Human
uggcuagcaugcugcugggccacaccccaaga

SEQ ID NO: 523470 - RNA, 32 nt, Human
uggcuagcauggugaaaccccgucucuacuaa

SEQ ID NO: 523471 - RNA, 32 nt, Human
uggcuagccacuguccaagccugggucugugu

SEQ ID NO: 523472 - RNA, 32 nt, Human
uggcuagccacugugcuccagccugggcaaca

SEQ ID NO: 523473 - RNA, 32 nt, Human
uggcuagccaucccaguacuuccacguuuuuc

SEQ ID NO: 523474 - RNA, 32 nt, Human
uggcuagccugcagauaacaucaaguaguuuc

SEQ ID NO: 523475 - RNA, 32 nt, Human
uggcuagcuacacagaguccaucuaauuuuug

SEQ ID NO: 523476 - RNA, 32 nt, Human
uggcuagcucagggguccagcucugcagggug

SEQ ID NO: 523477 - RNA, 19 nt, Human
uggcuagcucuugcccuua

SEQ ID NO: 523478 - RNA, 32 nt, Human
uggcuaggacccagagccacacugcagccucc

SEQ ID NO: 523479 - RNA, 32 nt, Human
uggcuaggaccccuccaugugggcuaguuggg

SEQ ID NO: 523480 - RNA, 32 nt, Human
uggcuaggagggucucaaacuccugaccucag

SEQ ID NO: 523481 - RNA, 32 nt, Human
uggcuaggcagacaguggggacugugcauauu

SEQ ID NO: 523482 - RNA, 32 nt, Human
uggcuaggcccugggaaucggguuuagucauc

SEQ ID NO: 523483 - RNA, 32 nt, Human
uggcuagggaaguuuccagaaacccgcuggac

SEQ ID NO: 523484 - RNA, 32 nt, Human
uggcuagggcaagucuccaaaguaauucagau

SEQ ID NO: 523485 - RNA, 32 nt, Human
uggcuagggcugggaggguuuugcucuccuau

SEQ ID NO: 523486 - RNA, 32 nt, Human
uggcuaggggcagagggcacugccaggcugug

SEQ ID NO: 523487 - RNA, 32 nt, Human
uggcuaguaaguacuggcaaagugaauauuua

SEQ ID NO: 523488 - RNA, 32 nt, Human
uggcuagugaacacuugaaauguggcuagugu

SEQ ID NO: 523489 - RNA, 32 nt, Human
uggcuauacaucuucaucccuccccaccaucc

SEQ ID NO: 523490 - RNA, 32 nt, Human
uggcuauaucccccguccccagccccucuucu

SEQ ID NO: 523491 - RNA, 32 nt, Human
uggcuauauguuguugagauauuugaaacuua

SEQ ID NO: 523492 - RNA, 19 nt, Human
uggcuaucccccucugcca

SEQ ID NO: 523493 - RNA, 32 nt, Human
uggcuaucccuucuccccuccguggaauuccu

SEQ ID NO: 523494 - RNA, 32 nt, Human
uggcuauccugauccaguggccacaucucagg

SEQ ID NO: 523495 - RNA, 32 nt, Human
uggcuaucucaguucuguagcagaucccuggu

SEQ ID NO: 523496 - RNA, 32 nt, Human
uggcuaucuccaagacagcaaaggcaggggaa

SEQ ID NO: 523497 - RNA, 17 nt, Human
uggcuaugaacagacca

SEQ ID NO: 523498 - RNA, 32 nt, Human
uggcuaugcucaccccaucucccuugagaggc

SEQ ID NO: 523499 - RNA, 32 nt, Human
uggcuauggggugagagaaguagcuugaggau

SEQ ID NO: 523500 - RNA, 31 nt, Human
uggcuauggguggagggugaguuugaagagg

SEQ ID NO: 523501 - RNA, 32 nt, Human
uggcuauggguggagggugaguuugaagaggu

SEQ ID NO: 523502 - RNA, 19 nt, Human
uggcuauguagacauaaag

SEQ ID NO: 523503 - RNA, 32 nt, Human
uggcuaugugaagccuaauuuaccugcaggaa

SEQ ID NO: 523504 - RNA, 32 nt, Human
uggcuauuaaaguguuuuauuucccaauucau

SEQ ID NO: 523505 - RNA, 32 nt, Human
uggcuauuacaaaggggcagcccauucacuac

SEQ ID NO: 523506 - RNA, 32 nt, Human
uggcuauugcaauauuuacuaguagaggaacu

SEQ ID NO: 523507 - RNA, 32 nt, Human
uggcuauuggcagccuccgcauggaagccugu

SEQ ID NO: 523508 - RNA, 32 nt, Human
uggcuauugggggagcccagagacaggggaag

SEQ ID NO: 523509 - RNA, 32 nt, Human
uggcuauuuaaggaggacuggguuuguuguga

SEQ ID NO: 523510 - RNA, 32 nt, Human
uggcuauuuguauuuaacaagacuuaaucauc

SEQ ID NO: 523511 - RNA, 21 nt, Human
uggcucaaaccuguaauccca

SEQ ID NO: 523512 - RNA, 23 nt, Human
uggcucaaaccuguaaucccagc

SEQ ID NO: 523513 - RNA, 32 nt, Human
uggcucaaaccuguaaucccagcacuuuggga

SEQ ID NO: 523514 - RNA, 23 nt, Human
uggcucaaaugccuguaauccca

SEQ ID NO: 523515 - RNA, 25 nt, Human
uggcucaaaugccuguaaucccagu

SEQ ID NO: 523516 - RNA, 32 nt, Human
uggcucaacacaugagaagaagcacgaagcag

SEQ ID NO: 523517 - RNA, 20 nt, Human
uggcucaagcaguccucccc

SEQ ID NO: 523518 - RNA, 32 nt, Human
uggcucaagcagucuucaucucagccuccaga

SEQ ID NO: 523519 - RNA, 21 nt, Human
uggcucaagcccauaauccca

SEQ ID NO: 523520 - RNA, 21 nt, Human
uggcucaagccuauaauccca

SEQ ID NO: 523521 - RNA, 21 nt, Human
uggcucaagccuguaauccca

SEQ ID NO: 523522 - RNA, 23 nt, Human
uggcucaagccuguaaucccagc

SEQ ID NO: 523523 - RNA, 32 nt, Human
uggcucaagccuguaaucccagcacuuuaggu

SEQ ID NO: 523524 - RNA, 32 nt, Human
uggcucaagccuguaaucccagcacuuuggga

SEQ ID NO: 523525 - RNA, 32 nt, Human
uggcucaagccuguaaucccagcauuuuggga

SEQ ID NO: 523526 - RNA, 23 nt, Human
uggcucaagccuguaaucccagu

SEQ ID NO: 523527 - RNA, 21 nt, Human
uggcucaagccuguaauguca

SEQ ID NO: 523528 - RNA, 32 nt, Human
uggcucaagccuguaaugucagcacuuuaaaa

SEQ ID NO: 523529 - RNA, 32 nt, Human
uggcucaagccuguacucccagcacuuuugga

SEQ ID NO: 523530 - RNA, 21 nt, Human
uggcucaagccuguaguucca

SEQ ID NO: 523531 - RNA, 24 nt, Human
uggcucaagccuguaguuccagcu

SEQ ID NO: 523532 - RNA, 32 nt, Human
uggcucaagccugucaucccagcacuguggga

SEQ ID NO: 523533 - RNA, 25 nt, Human
uggcucaaggcauccucccaccuca

SEQ ID NO: 523534 - RNA, 24 nt, Human
uggcucaagugaucucccacuuca

SEQ ID NO: 523535 - RNA, 32 nt, Human
uggcucaauccuccuccaccaccaggggccuc

SEQ ID NO: 523536 - RNA, 32 nt, Human
uggcucaaucuauccugugcuugaugcuagaa

SEQ ID NO: 523537 - RNA, 23 nt, Human
uggcucaaucucggcucacugca

SEQ ID NO: 523538 - RNA, 32 nt, Human
uggcucaaugcaaccuccaccucccagguuca

SEQ ID NO: 523539 - RNA, 32 nt, Human
uggcucacaacugcaaccuccgucucccgggu

SEQ ID NO: 523540 - RNA, 20 nt, Human
uggcucacaacuguaauccc

SEQ ID NO: 523541 - RNA, 21 nt, Human
uggcucacaacuguaauccua

SEQ ID NO: 523542 - RNA, 32 nt, Human
uggcucacacauccccagccagggagcuugcc

SEQ ID NO: 523543 - RNA, 21 nt, Human
uggcucacacauguaauccca

SEQ ID NO: 523544 - RNA, 21 nt, Human
uggcucacacccauaauccca

SEQ ID NO: 523545 - RNA, 21 nt, Human
uggcucacacccguaauccca

SEQ ID NO: 523546 - RNA, 21 nt, Human
uggcucacaccgguaauccca

SEQ ID NO: 523547 - RNA, 19 nt, Human
uggcucacaccuaauccca

SEQ ID NO: 523548 - RNA, 32 nt, Human
uggcucacaccuaaucccagcacuuugggagg

SEQ ID NO: 523549 - RNA, 21 nt, Human
uggcucacaccuauaauccca

SEQ ID NO: 523550 - RNA, 21 nt, Human
uggcucacaccuauaauccua

SEQ ID NO: 523551 - RNA, 21 nt, Human
uggcucacaccuauaauucca

SEQ ID NO: 523552 - RNA, 23 nt, Human
uggcucacaccuauaauuccagc

SEQ ID NO: 523553 - RNA, 21 nt, Human
uggcucacaccuauaguccca

SEQ ID NO: 523554 - RNA, 21 nt, Human
uggcucacaccucuaauccca

SEQ ID NO: 523555 - RNA, 21 nt, Human
uggcucacaccuguaauacca

SEQ ID NO: 523556 - RNA, 23 nt, Human
uggcucacaccuguaauaccagc

SEQ ID NO: 523557 - RNA, 32 nt, Human
uggcucacaccuguaauaccagcacuuuggga

SEQ ID NO: 523558 - RNA, 18 nt, Human
uggcucacaccuguaauc

SEQ ID NO: 523559 - RNA, 32 nt, Human
uggcucacaccuguaauccaagcacuuuggga

SEQ ID NO: 523560 - RNA, 20 nt, Human
uggcucacaccuguaauccc

SEQ ID NO: 523561 - RNA, 21 nt, Human
uggcucacaccuguaauccca

SEQ ID NO: 523562 - RNA, 22 nt, Human
uggcucacaccuguaaucccag

SEQ ID NO: 523563 - RNA, 32 nt, Human
uggcucacaccuguaaucccagaacuuuggga

SEQ ID NO: 523564 - RNA, 23 nt, Human
uggcucacaccuguaaucccagc

SEQ ID NO: 523565 - RNA, 27 nt, Human
uggcucacaccuguaaucccagcacuu

SEQ ID NO: 523566 - RNA, 32 nt, Human
uggcucacaccuguaaucccagcacuuagaga

SEQ ID NO: 523567 - RNA, 32 nt, Human
uggcucacaccuguaaucccagcacuuaggga

SEQ ID NO: 523568 - RNA, 32 nt, Human
uggcucacaccuguaaucccagcacuucggga

SEQ ID NO: 523569 - RNA, 32 nt, Human
uggcucacaccuguaaucccagcacuugggaa

SEQ ID NO: 523570 - RNA, 32 nt, Human
uggcucacaccuguaaucccagcacuugggga

SEQ ID NO: 523571 - RNA, 32 nt, Human
uggcucacaccuguaaucccagcacuuugaga

SEQ ID NO: 523572 - RNA, 32 nt, Human
uggcucacaccuguaaucccagcacuuugcgg

SEQ ID NO: 523573 - RNA, 32 nt, Human
uggcucacaccuguaaucccagcacuuuggca

SEQ ID NO: 523574 - RNA, 32 nt, Human
uggcucacaccuguaaucccagcacuuuggga

SEQ ID NO: 523575 - RNA, 32 nt, Human
uggcucacaccuguaaucccagcacuuugggg

SEQ ID NO: 523576 - RNA, 32 nt, Human
uggcucacaccuguaaucccagcacuuuggua

SEQ ID NO: 523577 - RNA, 32 nt, Human
uggcucacaccuguaaucccagcacuuuugga

SEQ ID NO: 523578 - RNA, 32 nt, Human
uggcucacaccuguaaucccagcgcuuuggga

SEQ ID NO: 523579 - RNA, 24 nt, Human
uggcucacaccuguaaucccagcu

SEQ ID NO: 523580 - RNA, 23 nt, Human
uggcucacaccuguaaucccagu

SEQ ID NO: 523581 - RNA, 24 nt, Human
uggcucacaccuguaauccccagc

SEQ ID NO: 523582 - RNA, 32 nt, Human
uggcucacaccuguaauccccagcacuuuggg

SEQ ID NO: 523583 - RNA, 22 nt, Human
uggcucacaccuguaaucccgc

SEQ ID NO: 523584 - RNA, 23 nt, Human
uggcucacaccuguaaucccggc

SEQ ID NO: 523585 - RNA, 23 nt, Human
uggcucacaccuguaaucccugc

SEQ ID NO: 523586 - RNA, 21 nt, Human
uggcucacaccuguaauccua

SEQ ID NO: 523587 - RNA, 23 nt, Human
uggcucacaccuguaauccuagc

SEQ ID NO: 523588 - RNA, 21 nt, Human
uggcucacaccuguaaucuca

SEQ ID NO: 523589 - RNA, 23 nt, Human
uggcucacaccuguaaucucagc

SEQ ID NO: 523590 - RNA, 23 nt, Human
uggcucacaccuguaaucugagc

SEQ ID NO: 523591 - RNA, 21 nt, Human
uggcucacaccuguaaucuua

SEQ ID NO: 523592 - RNA, 21 nt, Human
uggcucacaccuguaaugcca

SEQ ID NO: 523593 - RNA, 23 nt, Human
uggcucacaccuguaaugccagc

SEQ ID NO: 523594 - RNA, 32 nt, Human
uggcucacaccuguaaugccagcacuuugggc

SEQ ID NO: 523595 - RNA, 18 nt, Human
uggcucacaccuguaauu

SEQ ID NO: 523596 - RNA, 21 nt, Human
uggcucacaccuguaauucca

SEQ ID NO: 523597 - RNA, 32 nt, Human
uggcucacaccuguaauuccaacacuuuggga

SEQ ID NO: 523598 - RNA, 23 nt, Human
uggcucacaccuguaauuccagc

SEQ ID NO: 523599 - RNA, 32 nt, Human
uggcucacaccuguaauuccagcacuugggga

SEQ ID NO: 523600 - RNA, 32 nt, Human
uggcucacaccuguaauuccagcacuuuggga

SEQ ID NO: 523601 - RNA, 32 nt, Human
uggcucacaccuguaauuccagcacuuuguga

SEQ ID NO: 523602 - RNA, 32 nt, Human
uggcucacaccuguaauucuagcacuuuggga

SEQ ID NO: 523603 - RNA, 23 nt, Human
uggcucacaccuguaauugcagc

SEQ ID NO: 523604 - RNA, 23 nt, Human
uggcucacaccuguaauuucagc

SEQ ID NO: 523605 - RNA, 21 nt, Human
uggcucacaccuguaguccca

SEQ ID NO: 523606 - RNA, 23 nt, Human
uggcucacaccuguagucccagc

SEQ ID NO: 523607 - RNA, 32 nt, Human
uggcucacaccuguagucccagcacuuuagga

SEQ ID NO: 523608 - RNA, 24 nt, Human
uggcucacaccuguagucccagcu

SEQ ID NO: 523609 - RNA, 32 nt, Human
uggcucacaccuguaucccagcacuuugggag

SEQ ID NO: 523610 - RNA, 32 nt, Human
uggcucacaccugucauuccagcacuuugaga

SEQ ID NO: 523611 - RNA, 23 nt, Human
uggcucacaccugucauuccggc

SEQ ID NO: 523612 - RNA, 21 nt, Human
uggcucacaccugugauccca

SEQ ID NO: 523613 - RNA, 23 nt, Human
uggcucacaccugugaucccagc

SEQ ID NO: 523614 - RNA, 32 nt, Human
uggcucacaccugugaucccagcacuugggaa

SEQ ID NO: 523615 - RNA, 32 nt, Human
uggcucacaccugugaucccagcacuugggga

SEQ ID NO: 523616 - RNA, 32 nt, Human
uggcucacaccugugaucccagcacuuuggga

SEQ ID NO: 523617 - RNA, 32 nt, Human
uggcucacaccuguggucccagcucuuuggaa

SEQ ID NO: 523618 - RNA, 22 nt, Human
uggcucacaccuguuaauccca

SEQ ID NO: 523619 - RNA, 21 nt, Human
uggcucacaccuguuauccca

SEQ ID NO: 523620 - RNA, 20 nt, Human
uggcucacaccuuaauccca

SEQ ID NO: 523621 - RNA, 32 nt, Human
uggcucacaccuuaaucccagcacuuugggag

SEQ ID NO: 523622 - RNA, 22 nt, Human
uggcucacaccuuguaauccca

SEQ ID NO: 523623 - RNA, 24 nt, Human
uggcucacaccuuguaaucccagc

SEQ ID NO: 523624 - RNA, 21 nt, Human
uggcucacaccuuuaauccca

SEQ ID NO: 523625 - RNA, 21 nt, Human
uggcucacacguauaauccua

SEQ ID NO: 523626 - RNA, 21 nt, Human
uggcucacacguguaauccca

SEQ ID NO: 523627 - RNA, 32 nt, Human
uggcucacacuguaaucccagcacuuugggag

SEQ ID NO: 523628 - RNA, 32 nt, Human
uggcucacacuguaaugccagcacuuugggag

SEQ ID NO: 523629 - RNA, 21 nt, Human
uggcucacacuuauaauccca

SEQ ID NO: 523630 - RNA, 21 nt, Human
uggcucacacuuauaauccua

SEQ ID NO: 523631 - RNA, 21 nt, Human
uggcucacacuuguaauccca

SEQ ID NO: 523632 - RNA, 23 nt, Human
uggcucacacuuguaaucccagc

SEQ ID NO: 523633 - RNA, 32 nt, Human
uggcucacagaaaccuccgccucccagguuca

SEQ ID NO: 523634 - RNA, 32 nt, Human
uggcucacagcaaccucuaccuccuggguuca

SEQ ID NO: 523635 - RNA, 32 nt, Human
uggcucacagcagccucugccucccggguuca

SEQ ID NO: 523636 - RNA, 21 nt, Human
uggcucacagcuauaaucuca

SEQ ID NO: 523637 - RNA, 32 nt, Human
uggcucacaggaaccuccgccucccagguuca

SEQ ID NO: 523638 - RNA, 32 nt, Human
uggcucacaguguaaucccaacacuuugagaa

SEQ ID NO: 523639 - RNA, 21 nt, Human
uggcucacaucuguaauacca

SEQ ID NO: 523640 - RNA, 24 nt, Human
uggcucacaucuguaauaccagcu

SEQ ID NO: 523641 - RNA, 21 nt, Human
uggcucacaucuguaauccca

SEQ ID NO: 523642 - RNA, 23 nt, Human
uggcucacaucuguaaucccagc

SEQ ID NO: 523643 - RNA, 21 nt, Human
uggcucacaucuguaaucuca

SEQ ID NO: 523644 - RNA, 21 nt, Human
uggcucacaucuguaaugcca

SEQ ID NO: 523645 - RNA, 21 nt, Human
uggcucacauguguaauccca

SEQ ID NO: 523646 - RNA, 21 nt, Human
uggcucacauucguaauccca

SEQ ID NO: 523647 - RNA, 32 nt, Human
uggcucaccacaaccuccaccucccagguuca

SEQ ID NO: 523648 - RNA, 32 nt, Human
uggcucaccacaaccuccgccucccggauuca

SEQ ID NO: 523649 - RNA, 32 nt, Human
uggcucaccacaaccucuaccuccaggguuca

SEQ ID NO: 523650 - RNA, 32 nt, Human
uggcucaccacaaccucugccucccggguuca

SEQ ID NO: 523651 - RNA, 32 nt, Human
uggcucaccacaaccucugccuccuggguuca

SEQ ID NO: 523652 - RNA, 32 nt, Human
uggcucaccaccaauucguucucucugcccca

SEQ ID NO: 523653 - RNA, 32 nt, Human
uggcucaccagcuguucagaugcuuccaguau

SEQ ID NO: 523654 - RNA, 32 nt, Human
uggcucaccauaaccuccgccucccagguuca

SEQ ID NO: 523655 - RNA, 22 nt, Human
uggcucacccccuguaauccca

SEQ ID NO: 523656 - RNA, 24 nt, Human
uggcucacccccuguaaucccagc

SEQ ID NO: 523657 - RNA, 21 nt, Human
uggcucaccccuguaauccca

SEQ ID NO: 523658 - RNA, 23 nt, Human
uggcucaccccuguaaucccagc

SEQ ID NO: 523659 - RNA, 23 nt, Human
uggcucaccccuguaaucccagu

SEQ ID NO: 523660 - RNA, 21 nt, Human
uggcucaccccuguaauccua

SEQ ID NO: 523661 - RNA, 21 nt, Human
uggcucaccccuguaaucuca

SEQ ID NO: 523662 - RNA, 21 nt, Human
uggcucaccccuguaauucca

SEQ ID NO: 523663 - RNA, 23 nt, Human
uggcucaccccuguaauuccagc

SEQ ID NO: 523664 - RNA, 22 nt, Human
uggcucaccgaaagcucacaga

SEQ ID NO: 523665 - RNA, 32 nt, Human
uggcucaccgcaaccuccgccucccagguuca

SEQ ID NO: 523666 - RNA, 32 nt, Human
uggcucaccgcaaccuccgccucccggguuca

SEQ ID NO: 523667 - RNA, 32 nt, Human
uggcucaccgcaaccuccgccuccuaggucca

SEQ ID NO: 523668 - RNA, 32 nt, Human
uggcucaccgcaaccucugccuaccggguuca

SEQ ID NO: 523669 - RNA, 32 nt, Human
uggcucaccgcaaccucugccucccugguuca

SEQ ID NO: 523670 - RNA, 32 nt, Human
uggcucaccgcaaccucugccuccuggguuca

SEQ ID NO: 523671 - RNA, 32 nt, Human
uggcucaccgcagccuccaccuccaggguuca

SEQ ID NO: 523672 - RNA, 32 nt, Human
uggcucaccguaaucuccgccucccaggcuca

SEQ ID NO: 523673 - RNA, 32 nt, Human
uggcucaccucaaccucugccucccagguuca

SEQ ID NO: 523674 - RNA, 21 nt, Human
uggcucaccucuguaauccca

SEQ ID NO: 523675 - RNA, 23 nt, Human
uggcucaccucuguaaucccagc

SEQ ID NO: 523676 - RNA, 32 nt, Human
uggcucaccuguaaucccaacacuuugggagg

SEQ ID NO: 523677 - RNA, 32 nt, Human
uggcucaccuguaaucccagcacuuugggagg

SEQ ID NO: 523678 - RNA, 32 nt, Human
uggcucacgacaaccucugccucucggauuca

SEQ ID NO: 523679 - RNA, 21 nt, Human
uggcucacgacuguaauucca

SEQ ID NO: 523680 - RNA, 23 nt, Human
uggcucacgacuguaauuccagc

SEQ ID NO: 523681 - RNA, 21 nt, Human
uggcucacgcauguaauccca

SEQ ID NO: 523682 - RNA, 32 nt, Human
uggcucacgcauguaaucccagcacuuuggga

SEQ ID NO: 523683 - RNA, 21 nt, Human
uggcucacgcauguaauccua

SEQ ID NO: 523684 - RNA, 21 nt, Human
uggcucacgccacuaauccca

SEQ ID NO: 523685 - RNA, 21 nt, Human
uggcucacgccaguaauccca

SEQ ID NO: 523686 - RNA, 32 nt, Human
uggcucacgccaguaaucccagcacuuuggag

SEQ ID NO: 523687 - RNA, 32 nt, Human
uggcucacgccaguaaucccagcacuuuggga

SEQ ID NO: 523688 - RNA, 32 nt, Human
uggcucacgcccauaauccagcacuuugggaa

SEQ ID NO: 523689 - RNA, 21 nt, Human
uggcucacgcccguaauccca

SEQ ID NO: 523690 - RNA, 21 nt, Human
uggcucacgccgguaauccca

SEQ ID NO: 523691 - RNA, 32 nt, Human
uggcucacgccgguaaucccagcacuuuggga

SEQ ID NO: 523692 - RNA, 21 nt, Human
uggcucacgccuauaauccca

SEQ ID NO: 523693 - RNA, 32 nt, Human
uggcucacgccuauaaucccagcacuuaggga

SEQ ID NO: 523694 - RNA, 32 nt, Human
uggcucacgccuauaaucccagcacuuccaga

SEQ ID NO: 523695 - RNA, 32 nt, Human
uggcucacgccuauaaucccagcacuuuagga

SEQ ID NO: 523696 - RNA, 32 nt, Human
uggcucacgccuauaaucccagcacuuugcga

SEQ ID NO: 523697 - RNA, 32 nt, Human
uggcucacgccuauaaucccagcacuuuggga

SEQ ID NO: 523698 - RNA, 21 nt, Human
uggcucacgccuauaauccua

SEQ ID NO: 523699 - RNA, 21 nt, Human
uggcucacgccuauaaucuca

SEQ ID NO: 523700 - RNA, 21 nt, Human
uggcucacgccuauaauucca

SEQ ID NO: 523701 - RNA, 23 nt, Human
uggcucacgccuauaauuccagc

SEQ ID NO: 523702 - RNA, 32 nt, Human
uggcucacgccuauaucccagcacuuugggag

SEQ ID NO: 523703 - RNA, 21 nt, Human
uggcucacgccuaugauccca

SEQ ID NO: 523704 - RNA, 21 nt, Human
uggcucacgccucuaauccca

SEQ ID NO: 523705 - RNA, 32 nt, Human
uggcucacgccucuaaucccagcacuuuggga

SEQ ID NO: 523706 - RNA, 32 nt, Human
uggcucacgccugaaaucccagcacuuuggga

SEQ ID NO: 523707 - RNA, 32 nt, Human
uggcucacgccugcaaucccagcacuuuggga

SEQ ID NO: 523708 - RNA, 32 nt, Human
uggcucacgccugcaaugccagcacuuugaga

SEQ ID NO: 523709 - RNA, 32 nt, Human
uggcucacgccugcagucccagcacuuuggga

SEQ ID NO: 523710 - RNA, 32 nt, Human
uggcucacgccuggaaucccagcacuugaggc

SEQ ID NO: 523711 - RNA, 32 nt, Human
uggcucacgccuggaaucccagcacuuuggga

SEQ ID NO: 523712 - RNA, 21 nt, Human
uggcucacgccuguaaaccca

SEQ ID NO: 523713 - RNA, 23 nt, Human
uggcucacgccuguaaacccagc

SEQ ID NO: 523714 - RNA, 32 nt, Human
uggcucacgccuguaaacccagcacuuuagga

SEQ ID NO: 523715 - RNA, 21 nt, Human
uggcucacgccuguaacccca

SEQ ID NO: 523716 - RNA, 23 nt, Human
uggcucacgccuguaaccccagc

SEQ ID NO: 523717 - RNA, 32 nt, Human
uggcucacgccuguaaccccagcacuuuggga

SEQ ID NO: 523718 - RNA, 32 nt, Human
uggcucacgccuguaacccuagcacuuuggga

SEQ ID NO: 523719 - RNA, 21 nt, Human
uggcucacgccuguaaccuca

SEQ ID NO: 523720 - RNA, 23 nt, Human
uggcucacgccuguaaccucagc

SEQ ID NO: 523721 - RNA, 32 nt, Human
uggcucacgccuguaaccucagcacuuuggga

SEQ ID NO: 523722 - RNA, 21 nt, Human
uggcucacgccuguaauacca

SEQ ID NO: 523723 - RNA, 18 nt, Human
uggcucacgccuguaauc

SEQ ID NO: 523724 - RNA, 32 nt, Human
uggcucacgccuguaaucacacuuucggaggc

SEQ ID NO: 523725 - RNA, 23 nt, Human
uggcucacgccuguaaucacagc

SEQ ID NO: 523726 - RNA, 32 nt, Human
uggcucacgccuguaaucacagcacuuuggga

SEQ ID NO: 523727 - RNA, 19 nt, Human
uggcucacgccuguaaucc

SEQ ID NO: 523728 - RNA, 20 nt, Human
uggcucacgccuguaaucca

SEQ ID NO: 523729 - RNA, 32 nt, Human
uggcucacgccuguaauccaacacuuugagag

SEQ ID NO: 523730 - RNA, 23 nt, Human
uggcucacgccuguaauccaagc

SEQ ID NO: 523731 - RNA, 32 nt, Human
uggcucacgccuguaauccaagcacuugggga

SEQ ID NO: 523732 - RNA, 22 nt, Human
uggcucacgccuguaauccagc

SEQ ID NO: 523733 - RNA, 32 nt, Human
uggcucacgccuguaauccagcacuuugggag

SEQ ID NO: 523734 - RNA, 20 nt, Human
uggcucacgccuguaauccc

SEQ ID NO: 523735 - RNA, 21 nt, Human
uggcucacgccuguaauccca

SEQ ID NO: 523736 - RNA, 32 nt, Human
uggcucacgccuguaaucccaacacuuuagga

SEQ ID NO: 523737 - RNA, 32 nt, Human
uggcucacgccuguaaucccaacacuuuggga

SEQ ID NO: 523738 - RNA, 32 nt, Human
uggcucacgccuguaaucccaacacuuuucga

SEQ ID NO: 523739 - RNA, 32 nt, Human
uggcucacgccuguaaucccaccacuuuggaa

SEQ ID NO: 523740 - RNA, 32 nt, Human
uggcucacgccuguaaucccaccacuuuggga

SEQ ID NO: 523741 - RNA, 22 nt, Human
uggcucacgccuguaaucccag

SEQ ID NO: 523742 - RNA, 32 nt, Human
uggcucacgccuguaaucccagaacuuugaga

SEQ ID NO: 523743 - RNA, 32 nt, Human
uggcucacgccuguaaucccagaacuuuggga

SEQ ID NO: 523744 - RNA, 32 nt, Human
uggcucacgccuguaaucccagacuuugggag

SEQ ID NO: 523745 - RNA, 23 nt, Human
uggcucacgccuguaaucccagc

SEQ ID NO: 523746 - RNA, 32 nt, Human
uggcucacgccuguaaucccagcacuuagggu

SEQ ID NO: 523747 - RNA, 32 nt, Human
uggcucacgccuguaaucccagcacuucggga

SEQ ID NO: 523748 - RNA, 32 nt, Human
uggcucacgccuguaaucccagcacuucgggg

SEQ ID NO: 523749 - RNA, 32 nt, Human
uggcucacgccuguaaucccagcacuugggag

SEQ ID NO: 523750 - RNA, 32 nt, Human
uggcucacgccuguaaucccagcacuugggga

SEQ ID NO: 523751 - RNA, 32 nt, Human
uggcucacgccuguaaucccagcacuuuaaga

SEQ ID NO: 523752 - RNA, 32 nt, Human
uggcucacgccuguaaucccagcacuuuagga

SEQ ID NO: 523753 - RNA, 32 nt, Human
uggcucacgccuguaaucccagcacuuugaga

SEQ ID NO: 523754 - RNA, 32 nt, Human
uggcucacgccuguaaucccagcacuuugcga

SEQ ID NO: 523755 - RNA, 32 nt, Human
uggcucacgccuguaaucccagcacuuugcgg

SEQ ID NO: 523756 - RNA, 32 nt, Human
uggcucacgccuguaaucccagcacuuuggaa

SEQ ID NO: 523757 - RNA, 32 nt, Human
uggcucacgccuguaaucccagcacuuuggag

SEQ ID NO: 523758 - RNA, 32 nt, Human
uggcucacgccuguaaucccagcacuuuggca

SEQ ID NO: 523759 - RNA, 32 nt, Human
uggcucacgccuguaaucccagcacuuuggga

SEQ ID NO: 523760 - RNA, 32 nt, Human
uggcucacgccuguaaucccagcacuuugggg

SEQ ID NO: 523761 - RNA, 32 nt, Human
uggcucacgccuguaaucccagcacuuuggua

SEQ ID NO: 523762 - RNA, 32 nt, Human
uggcucacgccuguaaucccagcacuuugguu

SEQ ID NO: 523763 - RNA, 32 nt, Human
uggcucacgccuguaaucccagcacuuugugg

SEQ ID NO: 523764 - RNA, 32 nt, Human
uggcucacgccuguaaucccagcacuuuugga

SEQ ID NO: 523765 - RNA, 32 nt, Human
uggcucacgccuguaaucccagcacuuuuggg

SEQ ID NO: 523766 - RNA, 32 nt, Human
uggcucacgccuguaaucccagcaguuuggga

SEQ ID NO: 523767 - RNA, 32 nt, Human
uggcucacgccuguaaucccagcauuugggag

SEQ ID NO: 523768 - RNA, 32 nt, Human
uggcucacgccuguaaucccagcauuuuggga

SEQ ID NO: 523769 - RNA, 32 nt, Human
uggcucacgccuguaaucccagcgcuuuggga

SEQ ID NO: 523770 - RNA, 24 nt, Human
uggcucacgccuguaaucccagcu

SEQ ID NO: 523771 - RNA, 32 nt, Human
uggcucacgccuguaaucccagcucuuuggga

SEQ ID NO: 523772 - RNA, 32 nt, Human
uggcucacgccuguaaucccagcucuuugugg

SEQ ID NO: 523773 - RNA, 32 nt, Human
uggcucacgccuguaaucccaggacuuuagga

SEQ ID NO: 523774 - RNA, 32 nt, Human
uggcucacgccuguaaucccaggacuuuggga

SEQ ID NO: 523775 - RNA, 23 nt, Human
uggcucacgccuguaaucccagu

SEQ ID NO: 523776 - RNA, 32 nt, Human
uggcucacgccuguaaucccaguacuugggag

SEQ ID NO: 523777 - RNA, 32 nt, Human
uggcucacgccuguaaucccaguacuuuggga

SEQ ID NO: 523778 - RNA, 32 nt, Human
uggcucacgccuguaaucccaguauuuuggga

SEQ ID NO: 523779 - RNA, 32 nt, Human
uggcucacgccuguaauccccgcacuuuggga

SEQ ID NO: 523780 - RNA, 23 nt, Human
uggcucacgccuguaaucccggc

SEQ ID NO: 523781 - RNA, 32 nt, Human
uggcucacgccuguaaucccggcacuuuggga

SEQ ID NO: 523782 - RNA, 32 nt, Human
uggcucacgccuguaaucccgguauuuuggga

SEQ ID NO: 523783 - RNA, 23 nt, Human
uggcucacgccuguaaucccugc

SEQ ID NO: 523784 - RNA, 23 nt, Human
uggcucacgccuguaauccgagc

SEQ ID NO: 523785 - RNA, 21 nt, Human
uggcucacgccuguaauccua

SEQ ID NO: 523786 - RNA, 23 nt, Human
uggcucacgccuguaauccuagc

SEQ ID NO: 523787 - RNA, 32 nt, Human
uggcucacgccuguaauccuagcacuugggag

SEQ ID NO: 523788 - RNA, 32 nt, Human
uggcucacgccuguaauccuagcacuuuggaa

SEQ ID NO: 523789 - RNA, 32 nt, Human
uggcucacgccuguaauccuagcacuuuggga

SEQ ID NO: 523790 - RNA, 32 nt, Human
uggcucacgccuguaauccuagcacuuuguaa

SEQ ID NO: 523791 - RNA, 32 nt, Human
uggcucacgccuguaauccuagcauuuuggga

SEQ ID NO: 523792 - RNA, 32 nt, Human
uggcucacgccuguaauccuagcauuuugggu

SEQ ID NO: 523793 - RNA, 32 nt, Human
uggcucacgccuguaauccuagcauuuuugga

SEQ ID NO: 523794 - RNA, 23 nt, Human
uggcucacgccuguaauccuggc

SEQ ID NO: 523795 - RNA, 21 nt, Human
uggcucacgccuguaaucgca

SEQ ID NO: 523796 - RNA, 23 nt, Human
uggcucacgccuguaaucgcagc

SEQ ID NO: 523797 - RNA, 32 nt, Human
uggcucacgccuguaaucgcagcacuuuggga

SEQ ID NO: 523798 - RNA, 23 nt, Human
uggcucacgccuguaaucgcggc

SEQ ID NO: 523799 - RNA, 32 nt, Human
uggcucacgccuguaaucgcggcacuuuggga

SEQ ID NO: 523800 - RNA, 21 nt, Human
uggcucacgccuguaaucuca

SEQ ID NO: 523801 - RNA, 23 nt, Human
uggcucacgccuguaaucucagc

SEQ ID NO: 523802 - RNA, 32 nt, Human
uggcucacgccuguaaucucagcacuuuaaga

SEQ ID NO: 523803 - RNA, 32 nt, Human
uggcucacgccuguaaucucagcacuuuggga

SEQ ID NO: 523804 - RNA, 32 nt, Human
uggcucacgccuguaaucucagcacuuugggu

SEQ ID NO: 523805 - RNA, 32 nt, Human
uggcucacgccuguaaucucagcauuuuggga

SEQ ID NO: 523806 - RNA, 32 nt, Human
uggcucacgccuguaaucucggcacuuuggga

SEQ ID NO: 523807 - RNA, 32 nt, Human
uggcucacgccuguaaugccagcacuuuggga

SEQ ID NO: 523808 - RNA, 21 nt, Human
uggcucacgccuguaauucca

SEQ ID NO: 523809 - RNA, 23 nt, Human
uggcucacgccuguaauuccagc

SEQ ID NO: 523810 - RNA, 32 nt, Human
uggcucacgccuguaauuccagcacuucgaga

SEQ ID NO: 523811 - RNA, 32 nt, Human
uggcucacgccuguaauuccagcacuuuggga

SEQ ID NO: 523812 - RNA, 32 nt, Human
uggcucacgccuguaauuccagugcuuuggga

SEQ ID NO: 523813 - RNA, 32 nt, Human
uggcucacgccuguaauuccaucauuuuggga

SEQ ID NO: 523814 - RNA, 23 nt, Human
uggcucacgccuguaauucuagc

SEQ ID NO: 523815 - RNA, 32 nt, Human
uggcucacgccuguaauucuagcacuuuggga

SEQ ID NO: 523816 - RNA, 21 nt, Human
uggcucacgccuguaguccca

SEQ ID NO: 523817 - RNA, 22 nt, Human
uggcucacgccuguagucccag

SEQ ID NO: 523818 - RNA, 23 nt, Human
uggcucacgccuguagucccagc

SEQ ID NO: 523819 - RNA, 32 nt, Human
uggcucacgccuguagucccagcacuuugaga

SEQ ID NO: 523820 - RNA, 32 nt, Human
uggcucacgccuguagucccagcacuuuggga

SEQ ID NO: 523821 - RNA, 24 nt, Human
uggcucacgccuguagucccagcu

SEQ ID NO: 523822 - RNA, 32 nt, Human
uggcucacgccuguaucccagcacuuugggag

SEQ ID NO: 523823 - RNA, 32 nt, Human
uggcucacgccuguaucccagcuugugcuuug

SEQ ID NO: 523824 - RNA, 32 nt, Human
uggcucacgccuguaugccagcauuuugggag

SEQ ID NO: 523825 - RNA, 32 nt, Human
uggcucacgccuguauuccagcacuuugggag

SEQ ID NO: 523826 - RNA, 32 nt, Human
uggcucacgccugucaucccagcacuuuggga

SEQ ID NO: 523827 - RNA, 32 nt, Human
uggcucacgccugugauaccagcacuuuuggg

SEQ ID NO: 523828 - RNA, 21 nt, Human
uggcucacgccugugauccca

SEQ ID NO: 523829 - RNA, 23 nt, Human
uggcucacgccugugaucccagc

SEQ ID NO: 523830 - RNA, 32 nt, Human
uggcucacgccugugaucccagcacuuuggga

SEQ ID NO: 523831 - RNA, 32 nt, Human
uggcucacgccugugaucucagcacuuugagg

SEQ ID NO: 523832 - RNA, 23 nt, Human
uggcucacgccuguggucccagc

SEQ ID NO: 523833 - RNA, 32 nt, Human
uggcucacgccuguggucccagcacuuuggca

SEQ ID NO: 523834 - RNA, 32 nt, Human
uggcucacgccuguggucccagcacuuuggga

SEQ ID NO: 523835 - RNA, 32 nt, Human
uggcucacgccuguggucccagcacuuugggg

SEQ ID NO: 523836 - RNA, 32 nt, Human
uggcucacgccuguggucucagcacuuuggga

SEQ ID NO: 523837 - RNA, 32 nt, Human
uggcucacgccuguuaucccagcacuuuggga

SEQ ID NO: 523838 - RNA, 21 nt, Human
uggcucacgcuuauaauccca

SEQ ID NO: 523839 - RNA, 23 nt, Human
uggcucacgcuuauguaguccca

SEQ ID NO: 523840 - RNA, 21 nt, Human
uggcucacgcuuguaauccca

SEQ ID NO: 523841 - RNA, 23 nt, Human
uggcucacgcuuguaaucccagc

SEQ ID NO: 523842 - RNA, 32 nt, Human
uggcucacgcuuguaaucccagcacuuuggga

SEQ ID NO: 523843 - RNA, 24 nt, Human
uggcucacgcuuguaaucccagcu

SEQ ID NO: 523844 - RNA, 21 nt, Human
uggcucacgcuuguaaucgca

SEQ ID NO: 523845 - RNA, 32 nt, Human
uggcucacgcuuguaaucgcagcacuuuggga

SEQ ID NO: 523846 - RNA, 32 nt, Human
uggcucacgcuuguaaucucagcacuuuggga

SEQ ID NO: 523847 - RNA, 21 nt, Human
uggcucacgcuuguaauucca

SEQ ID NO: 523848 - RNA, 23 nt, Human
uggcucacgcuuguaauuccagc

SEQ ID NO: 523849 - RNA, 32 nt, Human
uggcucacgcuuguaauuccagcacuuuggga

SEQ ID NO: 523850 - RNA, 32 nt, Human
uggcucacggcaacuucagccuucccagguuc

SEQ ID NO: 523851 - RNA, 21 nt, Human
uggcucacguauguaauccca

SEQ ID NO: 523852 - RNA, 21 nt, Human
uggcucacgucuauaauccca

SEQ ID NO: 523853 - RNA, 21 nt, Human
uggcucacgucuguaauccca

SEQ ID NO: 523854 - RNA, 23 nt, Human
uggcucacgucuguaaucccagc

SEQ ID NO: 523855 - RNA, 32 nt, Human
uggcucacgucuguaaucccagcacuuuggaa

SEQ ID NO: 523856 - RNA, 32 nt, Human
uggcucacgucuguaaucccagcacuuuggga

SEQ ID NO: 523857 - RNA, 32 nt, Human
uggcucacgucuguaaucucagcacuuaggga

SEQ ID NO: 523858 - RNA, 32 nt, Human
uggcucacgucuguaaugccagcacuucggga

SEQ ID NO: 523859 - RNA, 21 nt, Human
uggcucacguuuguaauccca

SEQ ID NO: 523860 - RNA, 23 nt, Human
uggcucacguuuguaaucccagc

SEQ ID NO: 523861 - RNA, 32 nt, Human
uggcucacguuuguaaucccagcacuuuggga

SEQ ID NO: 523862 - RNA, 32 nt, Human
uggcucacuacaaccuccaccucccagguuca

SEQ ID NO: 523863 - RNA, 32 nt, Human
uggcucacuacaaccuccaccucccggguuca

SEQ ID NO: 523864 - RNA, 32 nt, Human
uggcucacuacaaccuccaccuuccaggcuua

SEQ ID NO: 523865 - RNA, 32 nt, Human
uggcucacuacaaccuccgccucccagguuca

SEQ ID NO: 523866 - RNA, 32 nt, Human
uggcucacuacaaccuccgccuccuggguuca

SEQ ID NO: 523867 - RNA, 32 nt, Human
uggcucacuacaaccucugccucccggguuca

SEQ ID NO: 523868 - RNA, 32 nt, Human
uggcucacuacaaccucugccucgcagguuca

SEQ ID NO: 523869 - RNA, 23 nt, Human
uggcucacuacucuaauuccagc

SEQ ID NO: 523870 - RNA, 32 nt, Human
uggcucacuacuguaauuccagcacuuuggga

SEQ ID NO: 523871 - RNA, 32 nt, Human
uggcucacuauaaccucuuccuccaggguuca

SEQ ID NO: 523872 - RNA, 32 nt, Human
uggcucacuccaaccuccaccuuccagguuca

SEQ ID NO: 523873 - RNA, 32 nt, Human
uggcucacuccaaccuccgccuccuggguuca

SEQ ID NO: 523874 - RNA, 32 nt, Human
uggcucacuccaaccuccuccuggguuccagc

SEQ ID NO: 523875 - RNA, 19 nt, Human
uggcucacuccuguaaucc

SEQ ID NO: 523876 - RNA, 20 nt, Human
uggcucacuccuguaauccc

SEQ ID NO: 523877 - RNA, 21 nt, Human
uggcucacuccuguaauccca

SEQ ID NO: 523878 - RNA, 23 nt, Human
uggcucacuccuguaaucccagc

SEQ ID NO: 523879 - RNA, 32 nt, Human
uggcucacuccuguaaucccagcacuuuggag

SEQ ID NO: 523880 - RNA, 32 nt, Human
uggcucacuccuguaaucccagcacuuuggga

SEQ ID NO: 523881 - RNA, 21 nt, Human
uggcucacuccuguaauccua

SEQ ID NO: 523882 - RNA, 21 nt, Human
uggcucacuccuguaaucuca

SEQ ID NO: 523883 - RNA, 32 nt, Human
uggcucacuccuguaauuccagcacuuuggga

SEQ ID NO: 523884 - RNA, 21 nt, Human
uggcucacuccuguaguccca

SEQ ID NO: 523885 - RNA, 21 nt, Human
uggcucacucuuguaauccca

SEQ ID NO: 523886 - RNA, 32 nt, Human
uggcucacugaaaccucugccucccgguucaa

SEQ ID NO: 523887 - RNA, 32 nt, Human
uggcucacugcaaacccgccucccagguuuaa

SEQ ID NO: 523888 - RNA, 32 nt, Human
uggcucacugcaaacuccgccuuccagguuca

SEQ ID NO: 523889 - RNA, 32 nt, Human
uggcucacugcaaacucugccuaccagguuca

SEQ ID NO: 523890 - RNA, 32 nt, Human
uggcucacugcaaacucugccucccagguuca

SEQ ID NO: 523891 - RNA, 32 nt, Human
uggcucacugcaaacucugccuuuuggguuca

SEQ ID NO: 523892 - RNA, 32 nt, Human
uggcucacugcaacauccgccucccggguuca

SEQ ID NO: 523893 - RNA, 32 nt, Human
uggcucacugcaacaucugacuccuggguuca

SEQ ID NO: 523894 - RNA, 32 nt, Human
uggcucacugcaaccacugcuuccuggguuca

SEQ ID NO: 523895 - RNA, 32 nt, Human
uggcucacugcaaccacugucucccggguuca

SEQ ID NO: 523896 - RNA, 32 nt, Human
uggcucacugcaacccccaccucccggguuca

SEQ ID NO: 523897 - RNA, 32 nt, Human
uggcucacugcaacccccgccaccuagguuca

SEQ ID NO: 523898 - RNA, 32 nt, Human
uggcucacugcaacccccgccuccaggguuca

SEQ ID NO: 523899 - RNA, 32 nt, Human
uggcucacugcaaccccgccucccagguucaa

SEQ ID NO: 523900 - RNA, 32 nt, Human
uggcucacugcaacccucccucccggguucca

SEQ ID NO: 523901 - RNA, 32 nt, Human
uggcucacugcaaccucaaccagcccagguuc

SEQ ID NO: 523902 - RNA, 32 nt, Human
uggcucacugcaaccucagccucccagguuca

SEQ ID NO: 523903 - RNA, 32 nt, Human
uggcucacugcaaccuccaacucccugguuca

SEQ ID NO: 523904 - RNA, 32 nt, Human
uggcucacugcaaccuccacccgccggguuca

SEQ ID NO: 523905 - RNA, 32 nt, Human
uggcucacugcaaccuccaccuccagguucaa

SEQ ID NO: 523906 - RNA, 32 nt, Human
uggcucacugcaaccuccaccucccaggucca

SEQ ID NO: 523907 - RNA, 32 nt, Human
uggcucacugcaaccuccaccucccagguuca

SEQ ID NO: 523908 - RNA, 32 nt, Human
uggcucacugcaaccuccaccucccaguucaa

SEQ ID NO: 523909 - RNA, 32 nt, Human
uggcucacugcaaccuccaccucccggguuca

SEQ ID NO: 523910 - RNA, 32 nt, Human
uggcucacugcaaccuccaccucccggguucc

SEQ ID NO: 523911 - RNA, 32 nt, Human
uggcucacugcaaccuccaccuccugggcuca

SEQ ID NO: 523912 - RNA, 32 nt, Human
uggcucacugcaaccuccaccuccugggucaa

SEQ ID NO: 523913 - RNA, 32 nt, Human
uggcucacugcaaccuccaccuccuggguuca

SEQ ID NO: 523914 - RNA, 32 nt, Human
uggcucacugcaaccuccaccucugggauuca

SEQ ID NO: 523915 - RNA, 32 nt, Human
uggcucacugcaaccuccaccuuccugguuca

SEQ ID NO: 523916 - RNA, 32 nt, Human
uggcucacugcaaccuccacuucccagguucu

SEQ ID NO: 523917 - RNA, 32 nt, Human
uggcucacugcaaccuccacuucccggguuca

SEQ ID NO: 523918 - RNA, 32 nt, Human
uggcucacugcaaccuccacuuccuggguuca

SEQ ID NO: 523919 - RNA, 32 nt, Human
uggcucacugcaaccuccacuucucagguuca

SEQ ID NO: 523920 - RNA, 32 nt, Human
uggcucacugcaaccuccaggccagccucagc

SEQ ID NO: 523921 - RNA, 32 nt, Human
uggcucacugcaaccuccaucuccggggcuca

SEQ ID NO: 523922 - RNA, 32 nt, Human
uggcucacugcaaccuccgacucccagguuca

SEQ ID NO: 523923 - RNA, 32 nt, Human
uggcucacugcaaccuccgacucccugguuca

SEQ ID NO: 523924 - RNA, 32 nt, Human
uggcucacugcaaccuccgccuccagggcgca

SEQ ID NO: 523925 - RNA, 32 nt, Human
uggcucacugcaaccuccgccuccaggguucg

SEQ ID NO: 523926 - RNA, 32 nt, Human
uggcucacugcaaccuccgccucccagguuca

SEQ ID NO: 523927 - RNA, 32 nt, Human
uggcucacugcaaccuccgccucccagguucc

SEQ ID NO: 523928 - RNA, 32 nt, Human
uggcucacugcaaccuccgccucccgaguuca

SEQ ID NO: 523929 - RNA, 32 nt, Human
uggcucacugcaaccuccgccucccggguuca

SEQ ID NO: 523930 - RNA, 32 nt, Human
uggcucacugcaaccuccgccucccggguucc

SEQ ID NO: 523931 - RNA, 32 nt, Human
uggcucacugcaaccuccgccucccugguuca

SEQ ID NO: 523932 - RNA, 32 nt, Human
uggcucacugcaaccuccgccuccgggguuca

SEQ ID NO: 523933 - RNA, 32 nt, Human
uggcucacugcaaccuccgccuccuggguuaa

SEQ ID NO: 523934 - RNA, 32 nt, Human
uggcucacugcaaccuccgccuccuggguuca

SEQ ID NO: 523935 - RNA, 32 nt, Human
uggcucacugcaaccuccgccuccuggguucc

SEQ ID NO: 523936 - RNA, 32 nt, Human
uggcucacugcaaccuccgccuccuggguucg

SEQ ID NO: 523937 - RNA, 32 nt, Human
uggcucacugcaaccuccgccucucagguuca

SEQ ID NO: 523938 - RNA, 32 nt, Human
uggcucacugcaaccuccgccucucggguuca

SEQ ID NO: 523939 - RNA, 32 nt, Human
uggcucacugcaaccuccgccucuuggguuca

SEQ ID NO: 523940 - RNA, 32 nt, Human
uggcucacugcaaccuccgccuuccugguuca

SEQ ID NO: 523941 - RNA, 32 nt, Human
uggcucacugcaaccuccgccuucuggguuca

SEQ ID NO: 523942 - RNA, 32 nt, Human
uggcucacugcaaccuccgucucccagguuca

SEQ ID NO: 523943 - RNA, 32 nt, Human
uggcucacugcaaccuccgucuccuggguuca

SEQ ID NO: 523944 - RNA, 32 nt, Human
uggcucacugcaaccuccgucuuccggguuca

SEQ ID NO: 523945 - RNA, 32 nt, Human
uggcucacugcaaccuccuccucccggguuca

SEQ ID NO: 523946 - RNA, 32 nt, Human
uggcucacugcaaccuccugcuuccuggguuc

SEQ ID NO: 523947 - RNA, 32 nt, Human
uggcucacugcaaccucuaccuccuggguuca

SEQ ID NO: 523948 - RNA, 32 nt, Human
uggcucacugcaaccucugccaccuggguuca

SEQ ID NO: 523949 - RNA, 32 nt, Human
uggcucacugcaaccucugccccaccaaaauu

SEQ ID NO: 523950 - RNA, 32 nt, Human
uggcucacugcaaccucugcccccuggguuca

SEQ ID NO: 523951 - RNA, 32 nt, Human
uggcucacugcaaccucugccuaccggauuca

SEQ ID NO: 523952 - RNA, 32 nt, Human
uggcucacugcaaccucugccucacaggcuca

SEQ ID NO: 523953 - RNA, 32 nt, Human
uggcucacugcaaccucugccucacagguuca

SEQ ID NO: 523954 - RNA, 32 nt, Human
uggcucacugcaaccucugccucccagguuca

SEQ ID NO: 523955 - RNA, 32 nt, Human
uggcucacugcaaccucugccucccgggcuca

SEQ ID NO: 523956 - RNA, 32 nt, Human
uggcucacugcaaccucugccucccggguuca

SEQ ID NO: 523957 - RNA, 32 nt, Human
uggcucacugcaaccucugccucccgguuuca

SEQ ID NO: 523958 - RNA, 32 nt, Human
uggcucacugcaaccucugccucccugguuca

SEQ ID NO: 523959 - RNA, 26 nt, Human
uggcucacugcaaccucugccuccug

SEQ ID NO: 523960 - RNA, 32 nt, Human
uggcucacugcaaccucugccuccugaauucc

SEQ ID NO: 523961 - RNA, 32 nt, Human
uggcucacugcaaccucugccuccugggcuca

SEQ ID NO: 523962 - RNA, 32 nt, Human
uggcucacugcaaccucugccuccuggguuca

SEQ ID NO: 523963 - RNA, 32 nt, Human
uggcucacugcaaccucugccuccuucguuca

SEQ ID NO: 523964 - RNA, 32 nt, Human
uggcucacugcaaccucugccuccuugguuca

SEQ ID NO: 523965 - RNA, 32 nt, Human
uggcucacugcaaccucugccugccggguuca

SEQ ID NO: 523966 - RNA, 32 nt, Human
uggcucacugcaaccucugccuucuggguuca

SEQ ID NO: 523967 - RNA, 32 nt, Human
uggcucacugcaaccucugcuucccagguuua

SEQ ID NO: 523968 - RNA, 32 nt, Human
uggcucacugcaaccucugcuucccgaguuca

SEQ ID NO: 523969 - RNA, 32 nt, Human
uggcucacugcaaccucugcuucccggguuca

SEQ ID NO: 523970 - RNA, 32 nt, Human
uggcucacugcaaccucugucucccagguuca

SEQ ID NO: 523971 - RNA, 32 nt, Human
uggcucacugcaaccucugucuccugggcuca

SEQ ID NO: 523972 - RNA, 32 nt, Human
uggcucacugcaaccucugucuuccagguuca

SEQ ID NO: 523973 - RNA, 32 nt, Human
uggcucacugcaaccucuguguccugggcuca

SEQ ID NO: 523974 - RNA, 32 nt, Human
uggcucacugcaaccucuuccuccugguucaa

SEQ ID NO: 523975 - RNA, 32 nt, Human
uggcucacugcaaccugcgccuccuggguuca

SEQ ID NO: 523976 - RNA, 32 nt, Human
uggcucacugcaaccugggugacagaacaaga

SEQ ID NO: 523977 - RNA, 32 nt, Human
uggcucacugcaaccuugaccucccaggcuca

SEQ ID NO: 523978 - RNA, 32 nt, Human
uggcucacugcaaccuugacgucccagguuca

SEQ ID NO: 523979 - RNA, 32 nt, Human
uggcucacugcaacguccgccucccagguuca

SEQ ID NO: 523980 - RNA, 32 nt, Human
uggcucacugcaacgucugccuccuggguuca

SEQ ID NO: 523981 - RNA, 32 nt, Human
uggcucacugcaacucugcuucccagguucaa

SEQ ID NO: 523982 - RNA, 32 nt, Human
uggcucacugcaacugcagccucccggguuca

SEQ ID NO: 523983 - RNA, 32 nt, Human
uggcucacugcaacuuccaccucugggaucaa

SEQ ID NO: 523984 - RNA, 32 nt, Human
uggcucacugcaacuuccacuucccggguuca

SEQ ID NO: 523985 - RNA, 32 nt, Human
uggcucacugcaacuuccgccuccuguguuca

SEQ ID NO: 523986 - RNA, 32 nt, Human
uggcucacugcaacuuccgucucccggguuca

SEQ ID NO: 523987 - RNA, 32 nt, Human
uggcucacugcaacuucuaccuccgagguuca

SEQ ID NO: 523988 - RNA, 32 nt, Human
uggcucacugcaacuucugccaccuggguuca

SEQ ID NO: 523989 - RNA, 32 nt, Human
uggcucacugcaacuucugccucuuggguuca

SEQ ID NO: 523990 - RNA, 32 nt, Human
uggcucacugcaacuucugccuuccagguuca

SEQ ID NO: 523991 - RNA, 32 nt, Human
uggcucacugcaacuugggccucccagguuca

SEQ ID NO: 523992 - RNA, 32 nt, Human
uggcucacugcaagcuccaccuccuggguuca

SEQ ID NO: 523993 - RNA, 32 nt, Human
uggcucacugcaagcuccgccucccagguuca

SEQ ID NO: 523994 - RNA, 32 nt, Human
uggcucacugcaagcuccgccucccagguucc

SEQ ID NO: 523995 - RNA, 32 nt, Human
uggcucacugcaagcuccgccucccgaguuca

SEQ ID NO: 523996 - RNA, 32 nt, Human
uggcucacugcaagcuccgccucccggcuuca

SEQ ID NO: 523997 - RNA, 32 nt, Human
uggcucacugcaagcuccgccucccggguuca

SEQ ID NO: 523998 - RNA, 32 nt, Human
uggcucacugcaagcuccgccuccuggguuca

SEQ ID NO: 523999 - RNA, 32 nt, Human
uggcucacugcaagcuccgccucucggguuug

SEQ ID NO: 524000 - RNA, 32 nt, Human
uggcucacugcaagcuccgucugccggguuca

SEQ ID NO: 524001 - RNA, 32 nt, Human
uggcucacugcaagcucugcccuccccggguu

SEQ ID NO: 524002 - RNA, 32 nt, Human
uggcucacugcaagcucugccucccggguuca

SEQ ID NO: 524003 - RNA, 32 nt, Human
uggcucacugcaagcuuccccuuccggguuca

SEQ ID NO: 524004 - RNA, 32 nt, Human
uggcucacugcaaucuccaucucccggguuca

SEQ ID NO: 524005 - RNA, 32 nt, Human
uggcucacugcaaucuccgccuccccaguuca

SEQ ID NO: 524006 - RNA, 32 nt, Human
uggcucacugcaaucucuauccccuggguuca

SEQ ID NO: 524007 - RNA, 32 nt, Human
uggcucacugcaaucucugccucucggguuca

SEQ ID NO: 524008 - RNA, 32 nt, Human
uggcucacugcaaucucugccuuccggguuca

SEQ ID NO: 524009 - RNA, 32 nt, Human
uggcucacugcaccuccaccuuccgggcucaa

SEQ ID NO: 524010 - RNA, 32 nt, Human
uggcucacugcagccuagaccucccagcugga

SEQ ID NO: 524011 - RNA, 32 nt, Human
uggcucacugcagccucaaccucccaggcuca

SEQ ID NO: 524012 - RNA, 32 nt, Human
uggcucacugcagccuccaccucccaggcuca

SEQ ID NO: 524013 - RNA, 32 nt, Human
uggcucacugcagccuccaccucccagguuca

SEQ ID NO: 524014 - RNA, 32 nt, Human
uggcucacugcagccuccaccuccccgguucc

SEQ ID NO: 524015 - RNA, 32 nt, Human
uggcucacugcagccuccaccucccggguuca

SEQ ID NO: 524016 - RNA, 32 nt, Human
uggcucacugcagccuccaccuccugggcuca

SEQ ID NO: 524017 - RNA, 32 nt, Human
uggcucacugcagccuccaccuccugggcucu

SEQ ID NO: 524018 - RNA, 32 nt, Human
uggcucacugcagccuccaccuccuugacucg

SEQ ID NO: 524019 - RNA, 32 nt, Human
uggcucacugcagccucgaccucccaggcuca

SEQ ID NO: 524020 - RNA, 32 nt, Human
uggcucacugcagccucugccucccaggcuca

SEQ ID NO: 524021 - RNA, 32 nt, Human
uggcucacugcagccucugccucccagguuca

SEQ ID NO: 524022 - RNA, 32 nt, Human
uggcucacugcagccucugccucccggguuca

SEQ ID NO: 524023 - RNA, 32 nt, Human
uggcucacugcagccucugccuccugaguagc

SEQ ID NO: 524024 - RNA, 32 nt, Human
uggcucacugcagccucugccuccuggguuca

SEQ ID NO: 524025 - RNA, 32 nt, Human
uggcucacugcagccucugccuccuggguucc

SEQ ID NO: 524026 - RNA, 32 nt, Human
uggcucacugcagcuuaagcucacugccuggg

SEQ ID NO: 524027 - RNA, 32 nt, Human
uggcucacugcaggcucugccucccgguuuca

SEQ ID NO: 524028 - RNA, 32 nt, Human
uggcucacugcagucucugccucccaggcuca

SEQ ID NO: 524029 - RNA, 32 nt, Human
uggcucacugcaguuucaaccucccagauucc

SEQ ID NO: 524030 - RNA, 32 nt, Human
uggcucacugcggccucugccucccggcuuca

SEQ ID NO: 524031 - RNA, 32 nt, Human
uggcucacugcuaccuccgccucccagguuca

SEQ ID NO: 524032 - RNA, 32 nt, Human
uggcucacugcugcaaccucccccuccugggu

SEQ ID NO: 524033 - RNA, 32 nt, Human
uggcucacuguaaccuccaccucccaggcuca

SEQ ID NO: 524034 - RNA, 32 nt, Human
uggcucacuguaaccuccgccucccagguuca

SEQ ID NO: 524035 - RNA, 32 nt, Human
uggcucacuguaaccucugccuccaggauuca

SEQ ID NO: 524036 - RNA, 32 nt, Human
uggcucacuguaaccucugccucccaggcucg

SEQ ID NO: 524037 - RNA, 32 nt, Human
uggcucacuguaaccucugccucccaguucaa

SEQ ID NO: 524038 - RNA, 32 nt, Human
uggcucacuguagccacaaccucucaggcuca

SEQ ID NO: 524039 - RNA, 32 nt, Human
uggcucacuguagccucgaccuccugggcuca

SEQ ID NO: 524040 - RNA, 32 nt, Human
uggcucacuguagccuugacauccugggcuca

SEQ ID NO: 524041 - RNA, 32 nt, Human
uggcucacuucaaccuccgcccccaagguuca

SEQ ID NO: 524042 - RNA, 32 nt, Human
uggcucacuuuaaccuccacuucccugguuca

SEQ ID NO: 524043 - RNA, 32 nt, Human
uggcucagaagcuuccccacugagcaccuugu

SEQ ID NO: 524044 - RNA, 32 nt, Human
uggcucagaagugggcacugaccagauggccu

SEQ ID NO: 524045 - RNA, 21 nt, Human
uggcucagaccuauaauccca

SEQ ID NO: 524046 - RNA, 32 nt, Human
uggcucagaccuauaaucccagcacuuuggga

SEQ ID NO: 524047 - RNA, 32 nt, Human
uggcucagaccuguaaucccagaacuuuggga

SEQ ID NO: 524048 - RNA, 32 nt, Human
uggcucagcaggcuugccccagagccauggca

SEQ ID NO: 524049 - RNA, 21 nt, Human
uggcucagcaguuaaauccca

SEQ ID NO: 524050 - RNA, 18 nt, Human
uggcucagccacauccca

SEQ ID NO: 524051 - RNA, 32 nt, Human
uggcucagccagcggaauuggccacauuucca

SEQ ID NO: 524052 - RNA, 20 nt, Human
uggcucagccuacaauccca

SEQ ID NO: 524053 - RNA, 21 nt, Human
uggcucagccuuguaauccca

SEQ ID NO: 524054 - RNA, 23 nt, Human
uggcucagccuuguaaucccagc

SEQ ID NO: 524055 - RNA, 20 nt, Human
uggcucagcuucuaauccca

SEQ ID NO: 524056 - RNA, 32 nt, Human
uggcucagcuucuaaucccagcacuuugguag

SEQ ID NO: 524057 - RNA, 18 nt, Human
uggcucaggaagaugcca

SEQ ID NO: 524058 - RNA, 18 nt, Human
uggcucaggagaauccua

SEQ ID NO: 524059 - RNA, 32 nt, Human
uggcucaggagguaguggcagccaugguucau

SEQ ID NO: 524060 - RNA, 23 nt, Human
uggcucaggaggugacagcuuug

SEQ ID NO: 524061 - RNA, 32 nt, Human
uggcucaggaggugacagcuuugggauucgca

SEQ ID NO: 524062 - RNA, 32 nt, Human
uggcucaggagguugaugccaugggaaccuga

SEQ ID NO: 524063 - RNA, 24 nt, Human
uggcucaggagucuuagagcuuua

SEQ ID NO: 524064 - RNA, 18 nt, Human
uggcucaggagugaagcu

SEQ ID NO: 524065 - RNA, 20 nt, Human
uggcucaggcaagggaccca

SEQ ID NO: 524066 - RNA, 21 nt, Human
uggcucaggccaagaucacca

SEQ ID NO: 524067 - RNA, 19 nt, Human
uggcucaggccaaugcaga

SEQ ID NO: 524068 - RNA, 19 nt, Human
uggcucaggcccagcccca

SEQ ID NO: 524069 - RNA, 21 nt, Human
uggcucaggccccugccuccc

SEQ ID NO: 524070 - RNA, 21 nt, Human
uggcucaggccuauaacccca

SEQ ID NO: 524071 - RNA, 32 nt, Human
uggcucaggccuguaaccccaguacuuuggga

SEQ ID NO: 524072 - RNA, 32 nt, Human
uggcucaggccuguaaccucagcacuuuggug

SEQ ID NO: 524073 - RNA, 21 nt, Human
uggcucaggccuguaauccca

SEQ ID NO: 524074 - RNA, 32 nt, Human
uggcucaggccuguaaucccaacacuuuggga

SEQ ID NO: 524075 - RNA, 23 nt, Human
uggcucaggccuguaaucccagc

SEQ ID NO: 524076 - RNA, 32 nt, Human
uggcucaggccuguaaucccagcacuguggga

SEQ ID NO: 524077 - RNA, 32 nt, Human
uggcucaggccuguaaucccagcacuucagga

SEQ ID NO: 524078 - RNA, 32 nt, Human
uggcucaggccuguaaucccagcacuuuccaa

SEQ ID NO: 524079 - RNA, 32 nt, Human
uggcucaggccuguaaucccagcacuuuggga

SEQ ID NO: 524080 - RNA, 32 nt, Human
uggcucaggccuguaaucccagcauuuucaga

SEQ ID NO: 524081 - RNA, 32 nt, Human
uggcucaggccuguaaucccagcauuuuggga

SEQ ID NO: 524082 - RNA, 24 nt, Human
uggcucaggccuguaaucccagcu

SEQ ID NO: 524083 - RNA, 20 nt, Human
uggcucaggccuguaauccu

SEQ ID NO: 524084 - RNA, 21 nt, Human
uggcucaggccuguaauccua

SEQ ID NO: 524085 - RNA, 21 nt, Human
uggcucaggccugucauccca

SEQ ID NO: 524086 - RNA, 32 nt, Human
uggcucaggccugugaucccagcacuuuggga

SEQ ID NO: 524087 - RNA, 20 nt, Human
uggcucaggccuuguuagcc

SEQ ID NO: 524088 - RNA, 19 nt, Human
uggcucaggccuuuuccca

SEQ ID NO: 524089 - RNA, 17 nt, Human
uggcucaggcggcccca

SEQ ID NO: 524090 - RNA, 18 nt, Human
uggcucaggcuaguucca

SEQ ID NO: 524091 - RNA, 22 nt, Human
uggcucaggcugagcugaaaga

SEQ ID NO: 524092 - RNA, 19 nt, Human
uggcucaggcugaucacca

SEQ ID NO: 524093 - RNA, 32 nt, Human
uggcucagggaguggcagaagggccauuuuuc

SEQ ID NO: 524094 - RNA, 32 nt, Human
uggcucagggccuggggcgggguccuggguag

SEQ ID NO: 524095 - RNA, 32 nt, Human
uggcucagggcuccugaggaccuuucccagca

SEQ ID NO: 524096 - RNA, 32 nt, Human
uggcucagggcugggguggcagagggaggccu

SEQ ID NO: 524097 - RNA, 32 nt, Human
uggcucaggguucaucguucugccuuguccac

SEQ ID NO: 524098 - RNA, 17 nt, Human
uggcucaggugaaaucc

SEQ ID NO: 524099 - RNA, 20 nt, Human
uggcucaguaaugcucaaga

SEQ ID NO: 524100 - RNA, 21 nt, Human
uggcucaguacggccacccca

SEQ ID NO: 524101 - RNA, 20 nt, Human
uggcucagucacauauccca

SEQ ID NO: 524102 - RNA, 32 nt, Human
uggcucaguccccagaccgcuguguggcuuug

SEQ ID NO: 524103 - RNA, 32 nt, Human
uggcucagugcaaccuccccaccccgggcucc

SEQ ID NO: 524104 - RNA, 32 nt, Human
uggcucagugcaaccuccgccuccuggguuca

SEQ ID NO: 524105 - RNA, 21 nt, Human
uggcucagugcaauacuccca

SEQ ID NO: 524106 - RNA, 20 nt, Human
uggcucagugcuucauccca

SEQ ID NO: 524107 - RNA, 32 nt, Human
uggcucaguggcuggugguggaccuggagagu

SEQ ID NO: 524108 - RNA, 32 nt, Human
uggcucauacaggagagagggaaggcugccag

SEQ ID NO: 524109 - RNA, 21 nt, Human
uggcucauaccuauaauccua

SEQ ID NO: 524110 - RNA, 24 nt, Human
uggcucauaccuguaaaucccagc

SEQ ID NO: 524111 - RNA, 21 nt, Human
uggcucauaccuguaauccca

SEQ ID NO: 524112 - RNA, 23 nt, Human
uggcucauaccuguaaucccagc

SEQ ID NO: 524113 - RNA, 32 nt, Human
uggcucauaccuguaaucccagcacuuuggga

SEQ ID NO: 524114 - RNA, 32 nt, Human
uggcucauaccuguaaucccagcaguuuggga

SEQ ID NO: 524115 - RNA, 32 nt, Human
uggcucauaccuguaaucccagcauuugggga

SEQ ID NO: 524116 - RNA, 21 nt, Human
uggcucauaccuguaauccua

SEQ ID NO: 524117 - RNA, 23 nt, Human
uggcucauaccuguaauccuagc

SEQ ID NO: 524118 - RNA, 32 nt, Human
uggcucauaccuguaaucucagcacuguggga

SEQ ID NO: 524119 - RNA, 21 nt, Human
uggcucauaccuguaaugcca

SEQ ID NO: 524120 - RNA, 23 nt, Human
uggcucauaccuguaaugccagc

SEQ ID NO: 524121 - RNA, 32 nt, Human
uggcucauaccuguaaugccagcacuuuggga

SEQ ID NO: 524122 - RNA, 24 nt, Human
uggcucauaccuguuaauuccagc

SEQ ID NO: 524123 - RNA, 23 nt, Human
uggcucauaccuguuauaccagc

SEQ ID NO: 524124 - RNA, 32 nt, Human
uggcucauaccuguuauaccagcacuuuggga

SEQ ID NO: 524125 - RNA, 21 nt, Human
uggcucauaccuuuaauccca

SEQ ID NO: 524126 - RNA, 23 nt, Human
uggcucauaccuuuaaucccagc

SEQ ID NO: 524127 - RNA, 21 nt, Human
uggcucauacguguaauccca

SEQ ID NO: 524128 - RNA, 23 nt, Human
uggcucauacguguaaucccagu

SEQ ID NO: 524129 - RNA, 20 nt, Human
uggcucauacuuguaauccc

SEQ ID NO: 524130 - RNA, 32 nt, Human
uggcucauagauggccuccugucugcauccuc

SEQ ID NO: 524131 - RNA, 32 nt, Human
uggcucauaucugugauuccagcacuuugaga

SEQ ID NO: 524132 - RNA, 32 nt, Human
uggcucaucacgaccuucgccucccagguuca

SEQ ID NO: 524133 - RNA, 32 nt, Human
uggcucaucagacugaaacuugcucacagacu

SEQ ID NO: 524134 - RNA, 32 nt, Human
uggcucauccccacugcauucucccccugaca

SEQ ID NO: 524135 - RNA, 21 nt, Human
uggcucaucccuguaauccca

SEQ ID NO: 524136 - RNA, 23 nt, Human
uggcucaucccuguaaucccagc

SEQ ID NO: 524137 - RNA, 32 nt, Human
uggcucaucccuguaaucccagcacuuaagga

SEQ ID NO: 524138 - RNA, 23 nt, Human
uggcucaucccuguaaucccagu

SEQ ID NO: 524139 - RNA, 32 nt, Human
uggcucaucccuguaaucccagugcuuuggga

SEQ ID NO: 524140 - RNA, 21 nt, Human
uggcucaucccuguaauucca

SEQ ID NO: 524141 - RNA, 23 nt, Human
uggcucaucccuguaauuccagc

SEQ ID NO: 524142 - RNA, 32 nt, Human
uggcucaucccuguaauuccagcacuuuggaa

SEQ ID NO: 524143 - RNA, 32 nt, Human
uggcucaucguaaccuccaccucccggguuca

SEQ ID NO: 524144 - RNA, 27 nt, Human
uggcucaugaaacagcagaauuccagc

SEQ ID NO: 524145 - RNA, 32 nt, Human
uggcucaugaacucaaucccugcccagguguu

SEQ ID NO: 524146 - RNA, 21 nt, Human
uggcucaugacuauaauccca

SEQ ID NO: 524147 - RNA, 24 nt, Human
uggcucaugacuauaaucccagcu

SEQ ID NO: 524148 - RNA, 32 nt, Human
uggcucaugacuguaaucccagcacuuuggga

SEQ ID NO: 524149 - RNA, 25 nt, Human
uggcucaugcacaccuguaauccca

SEQ ID NO: 524150 - RNA, 21 nt, Human
uggcucaugcacguaauccca

SEQ ID NO: 524151 - RNA, 32 nt, Human
uggcucaugcauguaaucccagcacuuuggga

SEQ ID NO: 524152 - RNA, 23 nt, Human
uggcucaugccaguuaucccagc

SEQ ID NO: 524153 - RNA, 32 nt, Human
uggcucaugccaguuaucccagcacuuuggga

SEQ ID NO: 524154 - RNA, 21 nt, Human
uggcucaugcccauaauccca

SEQ ID NO: 524155 - RNA, 23 nt, Human
uggcucaugcccauaaucccagc

SEQ ID NO: 524156 - RNA, 32 nt, Human
uggcucaugcccauaaucccagcacuuuggga

SEQ ID NO: 524157 - RNA, 21 nt, Human
uggcucaugcccguaauccca

SEQ ID NO: 524158 - RNA, 23 nt, Human
uggcucaugcccguaaucccagc

SEQ ID NO: 524159 - RNA, 32 nt, Human
uggcucaugcccguaaucccagcacuuuggga

SEQ ID NO: 524160 - RNA, 32 nt, Human
uggcucaugcccguaaucucagcacuuuggga

SEQ ID NO: 524161 - RNA, 20 nt, Human
uggcucaugcccguaauucu

SEQ ID NO: 524162 - RNA, 23 nt, Human
uggcucaugcccguaauuucugc

SEQ ID NO: 524163 - RNA, 21 nt, Human
uggcucaugccgauaauccca

SEQ ID NO: 524164 - RNA, 23 nt, Human
uggcucaugccgauaaucccagc

SEQ ID NO: 524165 - RNA, 32 nt, Human
uggcucaugccuaauccuagcacuuugggagg

SEQ ID NO: 524166 - RNA, 25 nt, Human
uggcucaugccuauaaaauuccagc

SEQ ID NO: 524167 - RNA, 21 nt, Human
uggcucaugccuauaagcacc

SEQ ID NO: 524168 - RNA, 21 nt, Human
uggcucaugccuauaaucagc

SEQ ID NO: 524169 - RNA, 19 nt, Human
uggcucaugccuauaaucc

SEQ ID NO: 524170 - RNA, 23 nt, Human
uggcucaugccuauaauccaagc

SEQ ID NO: 524171 - RNA, 20 nt, Human
uggcucaugccuauaauccc

SEQ ID NO: 524172 - RNA, 21 nt, Human
uggcucaugccuauaauccca

SEQ ID NO: 524173 - RNA, 23 nt, Human
uggcucaugccuauaaucccagc

SEQ ID NO: 524174 - RNA, 32 nt, Human
uggcucaugccuauaaucccagcacuuuagga

SEQ ID NO: 524175 - RNA, 32 nt, Human
uggcucaugccuauaaucccagcacuuugaga

SEQ ID NO: 524176 - RNA, 32 nt, Human
uggcucaugccuauaaucccagcacuuuggca

SEQ ID NO: 524177 - RNA, 32 nt, Human
uggcucaugccuauaaucccagcacuuuggga

SEQ ID NO: 524178 - RNA, 32 nt, Human
uggcucaugccuauaaucccagcacuuuugga

SEQ ID NO: 524179 - RNA, 23 nt, Human
uggcucaugccuauaaucccagu

SEQ ID NO: 524180 - RNA, 23 nt, Human
uggcucaugccuauaaucccggc

SEQ ID NO: 524181 - RNA, 21 nt, Human
uggcucaugccuauaauccua

SEQ ID NO: 524182 - RNA, 23 nt, Human
uggcucaugccuauaauccuagc

SEQ ID NO: 524183 - RNA, 21 nt, Human
uggcucaugccuauaaucuca

SEQ ID NO: 524184 - RNA, 23 nt, Human
uggcucaugccuauaaucucagc

SEQ ID NO: 524185 - RNA, 32 nt, Human
uggcucaugccuauaaucucagcacuuuuggg

SEQ ID NO: 524186 - RNA, 23 nt, Human
uggcucaugccuauaaucuuagc

SEQ ID NO: 524187 - RNA, 21 nt, Human
uggcucaugccuauaauucca

SEQ ID NO: 524188 - RNA, 23 nt, Human
uggcucaugccuauaauuccagc

SEQ ID NO: 524189 - RNA, 32 nt, Human
uggcucaugccuauaauuccagcacuuuggag

SEQ ID NO: 524190 - RNA, 32 nt, Human
uggcucaugccuauaauuccagcacuuuggga

SEQ ID NO: 524191 - RNA, 21 nt, Human
uggcucaugccuauaguccca

SEQ ID NO: 524192 - RNA, 23 nt, Human
uggcucaugccuauagucccagc

SEQ ID NO: 524193 - RNA, 32 nt, Human
uggcucaugccuauagucccagcacuuuggga

SEQ ID NO: 524194 - RNA, 32 nt, Human
uggcucaugccuauauuccagcacuuugggag

SEQ ID NO: 524195 - RNA, 23 nt, Human
uggcucaugccuauauucccagc

SEQ ID NO: 524196 - RNA, 32 nt, Human
uggcucaugccuauauucccagcacuuugaga

SEQ ID NO: 524197 - RNA, 21 nt, Human
uggcucaugccuauuauccca

SEQ ID NO: 524198 - RNA, 23 nt, Human
uggcucaugccuauuaucccagc

SEQ ID NO: 524199 - RNA, 32 nt, Human
uggcucaugccuauuaucccagcacuuuggga

SEQ ID NO: 524200 - RNA, 20 nt, Human
uggcucaugccucagcccgc

SEQ ID NO: 524201 - RNA, 21 nt, Human
uggcucaugccuccaauccca

SEQ ID NO: 524202 - RNA, 23 nt, Human
uggcucaugccuccaaucccagc

SEQ ID NO: 524203 - RNA, 21 nt, Human
uggcucaugccucuaauccca

SEQ ID NO: 524204 - RNA, 23 nt, Human
uggcucaugccucuaaucccagc

SEQ ID NO: 524205 - RNA, 32 nt, Human
uggcucaugccucuaaucccagcacuuuggga

SEQ ID NO: 524206 - RNA, 23 nt, Human
uggcucaugccucuugucccagc

SEQ ID NO: 524207 - RNA, 32 nt, Human
uggcucaugccugaaauccuagcacuuuggga

SEQ ID NO: 524208 - RNA, 32 nt, Human
uggcucaugccugaaauucuagcaguuugaga

SEQ ID NO: 524209 - RNA, 32 nt, Human
uggcucaugccugaaucucagcacuuugggag

SEQ ID NO: 524210 - RNA, 32 nt, Human
uggcucaugccugcaaucccagcacuguagaa

SEQ ID NO: 524211 - RNA, 32 nt, Human
uggcucaugccugcaaucccagcacuuuggga

SEQ ID NO: 524212 - RNA, 23 nt, Human
uggcucaugccugcaauuccagc

SEQ ID NO: 524213 - RNA, 32 nt, Human
uggcucaugccugcaauuccagcacuuuggga

SEQ ID NO: 524214 - RNA, 32 nt, Human
uggcucaugccugcggucccagcuacuuaggg

SEQ ID NO: 524215 - RNA, 23 nt, Human
uggcucaugccuggaaucccagc

SEQ ID NO: 524216 - RNA, 32 nt, Human
uggcucaugccuggaaucccagcacuuugaga

SEQ ID NO: 524217 - RNA, 32 nt, Human
uggcucaugccuggaaucccagcacuuuggga

SEQ ID NO: 524218 - RNA, 21 nt, Human
uggcucaugccuguaaaccca

SEQ ID NO: 524219 - RNA, 23 nt, Human
uggcucaugccuguaaacccagc

SEQ ID NO: 524220 - RNA, 32 nt, Human
uggcucaugccuguaaacccagcacuuuggga

SEQ ID NO: 524221 - RNA, 24 nt, Human
uggcucaugccuguaaaucccagc

SEQ ID NO: 524222 - RNA, 32 nt, Human
uggcucaugccuguaaaucccagcacuuuggu

SEQ ID NO: 524223 - RNA, 21 nt, Human
uggcucaugccuguaacccca

SEQ ID NO: 524224 - RNA, 23 nt, Human
uggcucaugccuguaaccccagc

SEQ ID NO: 524225 - RNA, 32 nt, Human
uggcucaugccuguaaccccagcacuuuggga

SEQ ID NO: 524226 - RNA, 21 nt, Human
uggcucaugccuguaagccca

SEQ ID NO: 524227 - RNA, 23 nt, Human
uggcucaugccuguaagcccagc

SEQ ID NO: 524228 - RNA, 32 nt, Human
uggcucaugccuguaagcccagcacuuuggga

SEQ ID NO: 524229 - RNA, 24 nt, Human
uggcucaugccuguaauagcagcu

SEQ ID NO: 524230 - RNA, 32 nt, Human
uggcucaugccuguaauagcagcuacucggga

SEQ ID NO: 524231 - RNA, 18 nt, Human
uggcucaugccuguaauc

SEQ ID NO: 524232 - RNA, 32 nt, Human
uggcucaugccuguaaucaaucccagcacuuu

SEQ ID NO: 524233 - RNA, 32 nt, Human
uggcucaugccuguaaucauagcauuauggga

SEQ ID NO: 524234 - RNA, 19 nt, Human
uggcucaugccuguaaucc

SEQ ID NO: 524235 - RNA, 20 nt, Human
uggcucaugccuguaaucca

SEQ ID NO: 524236 - RNA, 32 nt, Human
uggcucaugccuguaauccaacauugggaggc

SEQ ID NO: 524237 - RNA, 23 nt, Human
uggcucaugccuguaauccaagc

SEQ ID NO: 524238 - RNA, 32 nt, Human
uggcucaugccuguaauccaagcauuuugaga

SEQ ID NO: 524239 - RNA, 22 nt, Human
uggcucaugccuguaauccagc

SEQ ID NO: 524240 - RNA, 32 nt, Human
uggcucaugccuguaauccagcacuuugggag

SEQ ID NO: 524241 - RNA, 22 nt, Human
uggcucaugccuguaauccagu

SEQ ID NO: 524242 - RNA, 32 nt, Human
uggcucaugccuguaauccaguacuuuaggag

SEQ ID NO: 524243 - RNA, 20 nt, Human
uggcucaugccuguaauccc

SEQ ID NO: 524244 - RNA, 21 nt, Human
uggcucaugccuguaauccca

SEQ ID NO: 524245 - RNA, 32 nt, Human
uggcucaugccuguaaucccaaaacuuuggga

SEQ ID NO: 524246 - RNA, 32 nt, Human
uggcucaugccuguaaucccaacacucuggga

SEQ ID NO: 524247 - RNA, 32 nt, Human
uggcucaugccuguaaucccaacacuuaggga

SEQ ID NO: 524248 - RNA, 32 nt, Human
uggcucaugccuguaaucccaacacuuagggu

SEQ ID NO: 524249 - RNA, 32 nt, Human
uggcucaugccuguaaucccaacacuuugaga

SEQ ID NO: 524250 - RNA, 32 nt, Human
uggcucaugccuguaaucccaacacuuuggga

SEQ ID NO: 524251 - RNA, 32 nt, Human
uggcucaugccuguaaucccaacacuuuuggg

SEQ ID NO: 524252 - RNA, 24 nt, Human
uggcucaugccuguaaucccaacu

SEQ ID NO: 524253 - RNA, 32 nt, Human
uggcucaugccuguaaucccaccacugagguc

SEQ ID NO: 524254 - RNA, 32 nt, Human
uggcucaugccuguaaucccaccacuuuggga

SEQ ID NO: 524255 - RNA, 32 nt, Human
uggcucaugccuguaaucccaccacuuugggu

SEQ ID NO: 524256 - RNA, 22 nt, Human
uggcucaugccuguaaucccag

SEQ ID NO: 524257 - RNA, 32 nt, Human
uggcucaugccuguaaucccagaacuuuggga

SEQ ID NO: 524258 - RNA, 32 nt, Human
uggcucaugccuguaaucccagaauuuuggga

SEQ ID NO: 524259 - RNA, 23 nt, Human
uggcucaugccuguaaucccagc

SEQ ID NO: 524260 - RNA, 32 nt, Human
uggcucaugccuguaaucccagcaauuuagga

SEQ ID NO: 524261 - RNA, 32 nt, Human
uggcucaugccuguaaucccagcacauuggga

SEQ ID NO: 524262 - RNA, 32 nt, Human
uggcucaugccuguaaucccagcacccuggga

SEQ ID NO: 524263 - RNA, 32 nt, Human
uggcucaugccuguaaucccagcaccuugaag

SEQ ID NO: 524264 - RNA, 32 nt, Human
uggcucaugccuguaaucccagcaccuuggga

SEQ ID NO: 524265 - RNA, 32 nt, Human
uggcucaugccuguaaucccagcacuauggga

SEQ ID NO: 524266 - RNA, 32 nt, Human
uggcucaugccuguaaucccagcacucuggaa

SEQ ID NO: 524267 - RNA, 32 nt, Human
uggcucaugccuguaaucccagcacucuggga

SEQ ID NO: 524268 - RNA, 32 nt, Human
uggcucaugccuguaaucccagcacuguaggc

SEQ ID NO: 524269 - RNA, 32 nt, Human
uggcucaugccuguaaucccagcacuguggga

SEQ ID NO: 524270 - RNA, 32 nt, Human
uggcucaugccuguaaucccagcacuuauuuu

SEQ ID NO: 524271 - RNA, 32 nt, Human
uggcucaugccuguaaucccagcacuucagga

SEQ ID NO: 524272 - RNA, 32 nt, Human
uggcucaugccuguaaucccagcacuuggaga

SEQ ID NO: 524273 - RNA, 32 nt, Human
uggcucaugccuguaaucccagcacuugggag

SEQ ID NO: 524274 - RNA, 32 nt, Human
uggcucaugccuguaaucccagcacuugggga

SEQ ID NO: 524275 - RNA, 32 nt, Human
uggcucaugccuguaaucccagcacuuucaaa

SEQ ID NO: 524276 - RNA, 32 nt, Human
uggcucaugccuguaaucccagcacuuucaga

SEQ ID NO: 524277 - RNA, 32 nt, Human
uggcucaugccuguaaucccagcacuuucgga

SEQ ID NO: 524278 - RNA, 32 nt, Human
uggcucaugccuguaaucccagcacuuugaga

SEQ ID NO: 524279 - RNA, 32 nt, Human
uggcucaugccuguaaucccagcacuuugaua

SEQ ID NO: 524280 - RNA, 32 nt, Human
uggcucaugccuguaaucccagcacuuugcga

SEQ ID NO: 524281 - RNA, 32 nt, Human
uggcucaugccuguaaucccagcacuuuggaa

SEQ ID NO: 524282 - RNA, 32 nt, Human
uggcucaugccuguaaucccagcacuuuggga

SEQ ID NO: 524283 - RNA, 32 nt, Human
uggcucaugccuguaaucccagcacuuugggg

SEQ ID NO: 524284 - RNA, 32 nt, Human
uggcucaugccuguaaucccagcacuuuggua

SEQ ID NO: 524285 - RNA, 32 nt, Human
uggcucaugccuguaaucccagcacuuuucgg

SEQ ID NO: 524286 - RNA, 32 nt, Human
uggcucaugccuguaaucccagcacuuuugag

SEQ ID NO: 524287 - RNA, 32 nt, Human
uggcucaugccuguaaucccagcacuuuugga

SEQ ID NO: 524288 - RNA, 32 nt, Human
uggcucaugccuguaaucccagcauuuugaga

SEQ ID NO: 524289 - RNA, 32 nt, Human
uggcucaugccuguaaucccagcauuuuggaa

SEQ ID NO: 524290 - RNA, 32 nt, Human
uggcucaugccuguaaucccagcauuuuggga

SEQ ID NO: 524291 - RNA, 32 nt, Human
uggcucaugccuguaaucccagcauuuuggua

SEQ ID NO: 524292 - RNA, 32 nt, Human
uggcucaugccuguaaucccagcgcuuuggga

SEQ ID NO: 524293 - RNA, 24 nt, Human
uggcucaugccuguaaucccagcu

SEQ ID NO: 524294 - RNA, 32 nt, Human
uggcucaugccuguaaucccagcuacgcagga

SEQ ID NO: 524295 - RNA, 32 nt, Human
uggcucaugccuguaaucccagcuacucagga

SEQ ID NO: 524296 - RNA, 32 nt, Human
uggcucaugccuguaaucccaggacuuuggga

SEQ ID NO: 524297 - RNA, 23 nt, Human
uggcucaugccuguaaucccagu

SEQ ID NO: 524298 - RNA, 32 nt, Human
uggcucaugccuguaaucccaguacuuuggga

SEQ ID NO: 524299 - RNA, 32 nt, Human
uggcucaugccuguaaucccagugcuuuggga

SEQ ID NO: 524300 - RNA, 32 nt, Human
uggcucaugccuguaaucccgacacuuuggga

SEQ ID NO: 524301 - RNA, 32 nt, Human
uggcucaugccuguaaucccggcacuuuggga

SEQ ID NO: 524302 - RNA, 23 nt, Human
uggcucaugccuguaaucccugc

SEQ ID NO: 524303 - RNA, 32 nt, Human
uggcucaugccuguaaucccugcacuuuggga

SEQ ID NO: 524304 - RNA, 23 nt, Human
uggcucaugccuguaauccgagc

SEQ ID NO: 524305 - RNA, 32 nt, Human
uggcucaugccuguaauccgagcacuucggga

SEQ ID NO: 524306 - RNA, 32 nt, Human
uggcucaugccuguaauccgagcacuuuggga

SEQ ID NO: 524307 - RNA, 21 nt, Human
uggcucaugccuguaauccua

SEQ ID NO: 524308 - RNA, 32 nt, Human
uggcucaugccuguaauccuaacacuuuggga

SEQ ID NO: 524309 - RNA, 23 nt, Human
uggcucaugccuguaauccuagc

SEQ ID NO: 524310 - RNA, 32 nt, Human
uggcucaugccuguaauccuagcacuuugaga

SEQ ID NO: 524311 - RNA, 32 nt, Human
uggcucaugccuguaauccuagcacuuuggaa

SEQ ID NO: 524312 - RNA, 32 nt, Human
uggcucaugccuguaauccuagcacuuuggga

SEQ ID NO: 524313 - RNA, 32 nt, Human
uggcucaugccuguaauccuagcacuuugggg

SEQ ID NO: 524314 - RNA, 32 nt, Human
uggcucaugccuguaauccuagcacuuugggu

SEQ ID NO: 524315 - RNA, 32 nt, Human
uggcucaugccuguaauccuagcauuuuggga

SEQ ID NO: 524316 - RNA, 23 nt, Human
uggcucaugccuguaauccuggc

SEQ ID NO: 524317 - RNA, 32 nt, Human
uggcucaugccuguaauccuggcacuuuggga

SEQ ID NO: 524318 - RNA, 21 nt, Human
uggcucaugccuguaaucgca

SEQ ID NO: 524319 - RNA, 23 nt, Human
uggcucaugccuguaaucgcagc

SEQ ID NO: 524320 - RNA, 32 nt, Human
uggcucaugccuguaaucgcagcacuuuggga

SEQ ID NO: 524321 - RNA, 23 nt, Human
uggcucaugccuguaaucguagc

SEQ ID NO: 524322 - RNA, 32 nt, Human
uggcucaugccuguaaucguagcacuuugaga

SEQ ID NO: 524323 - RNA, 19 nt, Human
uggcucaugccuguaaucu

SEQ ID NO: 524324 - RNA, 21 nt, Human
uggcucaugccuguaaucuca

SEQ ID NO: 524325 - RNA, 32 nt, Human
uggcucaugccuguaaucucaacacuuuggga

SEQ ID NO: 524326 - RNA, 22 nt, Human
uggcucaugccuguaaucucag

SEQ ID NO: 524327 - RNA, 32 nt, Human
uggcucaugccuguaaucucagaacuuuggga

SEQ ID NO: 524328 - RNA, 23 nt, Human
uggcucaugccuguaaucucagc

SEQ ID NO: 524329 - RNA, 32 nt, Human
uggcucaugccuguaaucucagcacuguagga

SEQ ID NO: 524330 - RNA, 32 nt, Human
uggcucaugccuguaaucucagcacuuugaga

SEQ ID NO: 524331 - RNA, 32 nt, Human
uggcucaugccuguaaucucagcacuuuggga

SEQ ID NO: 524332 - RNA, 24 nt, Human
uggcucaugccuguaaucucagcu

SEQ ID NO: 524333 - RNA, 32 nt, Human
uggcucaugccuguaaucucagcuacuuggcu

SEQ ID NO: 524334 - RNA, 23 nt, Human
uggcucaugccuguaaucucagu

SEQ ID NO: 524335 - RNA, 32 nt, Human
uggcucaugccuguaaucucaguacauuggga

SEQ ID NO: 524336 - RNA, 32 nt, Human
uggcucaugccuguaaucucaguacuuuggga

SEQ ID NO: 524337 - RNA, 23 nt, Human
uggcucaugccuguaaucugagc

SEQ ID NO: 524338 - RNA, 32 nt, Human
uggcucaugccuguaaucugagcacuuuggga

SEQ ID NO: 524339 - RNA, 32 nt, Human
uggcucaugccuguaaucuuaucacuuuggga

SEQ ID NO: 524340 - RNA, 21 nt, Human
uggcucaugccuguaaugcca

SEQ ID NO: 524341 - RNA, 23 nt, Human
uggcucaugccuguaaugccagc

SEQ ID NO: 524342 - RNA, 32 nt, Human
uggcucaugccuguaaugccagcacuuugcca

SEQ ID NO: 524343 - RNA, 18 nt, Human
uggcucaugccuguaauu

SEQ ID NO: 524344 - RNA, 20 nt, Human
uggcucaugccuguaauucc

SEQ ID NO: 524345 - RNA, 21 nt, Human
uggcucaugccuguaauucca

SEQ ID NO: 524346 - RNA, 23 nt, Human
uggcucaugccuguaauuccagc

SEQ ID NO: 524347 - RNA, 32 nt, Human
uggcucaugccuguaauuccagcacuuuagga

SEQ ID NO: 524348 - RNA, 32 nt, Human
uggcucaugccuguaauuccagcacuuuggga

SEQ ID NO: 524349 - RNA, 32 nt, Human
uggcucaugccuguaauuccggcacuuuggga

SEQ ID NO: 524350 - RNA, 23 nt, Human
uggcucaugccuguaauucuagc

SEQ ID NO: 524351 - RNA, 32 nt, Human
uggcucaugccuguaauuucaguacuuuggga

SEQ ID NO: 524352 - RNA, 19 nt, Human
uggcucaugccuguagucc

SEQ ID NO: 524353 - RNA, 21 nt, Human
uggcucaugccuguaguccca

SEQ ID NO: 524354 - RNA, 23 nt, Human
uggcucaugccuguagucccagc

SEQ ID NO: 524355 - RNA, 32 nt, Human
uggcucaugccuguagucccagcacucgggaa

SEQ ID NO: 524356 - RNA, 32 nt, Human
uggcucaugccuguagucccagcacucugugg

SEQ ID NO: 524357 - RNA, 32 nt, Human
uggcucaugccuguagucccagcacuuuggga

SEQ ID NO: 524358 - RNA, 32 nt, Human
uggcucaugccuguagucccagcacuuugggg

SEQ ID NO: 524359 - RNA, 24 nt, Human
uggcucaugccuguagucccagcu

SEQ ID NO: 524360 - RNA, 32 nt, Human
uggcucaugccuguagucccagcuacucugga

SEQ ID NO: 524361 - RNA, 32 nt, Human
uggcucaugccuguagucccagcuacuuggga

SEQ ID NO: 524362 - RNA, 24 nt, Human
uggcucaugccuguagucccugcu

SEQ ID NO: 524363 - RNA, 32 nt, Human
uggcucaugccuguagucccugcuacuuggga

SEQ ID NO: 524364 - RNA, 32 nt, Human
uggcucaugccuguaguccuagcacuuuggga

SEQ ID NO: 524365 - RNA, 32 nt, Human
uggcucaugccuguaguuccagcgcuuuggga

SEQ ID NO: 524366 - RNA, 21 nt, Human
uggcucaugccuguauaaucc

SEQ ID NO: 524367 - RNA, 23 nt, Human
uggcucaugccuguauaauccca

SEQ ID NO: 524368 - RNA, 32 nt, Human
uggcucaugccuguauaaucccagcacuuugg

SEQ ID NO: 524369 - RNA, 32 nt, Human
uggcucaugccuguauccagcacuuugggagg

SEQ ID NO: 524370 - RNA, 32 nt, Human
uggcucaugccuguaucccagcacuuugggag

SEQ ID NO: 524371 - RNA, 32 nt, Human
uggcucaugccuguauucccaccacuuuggga

SEQ ID NO: 524372 - RNA, 32 nt, Human
uggcucaugccuguauucccaguacuuuggga

SEQ ID NO: 524373 - RNA, 23 nt, Human
uggcucaugccuguauucucagc

SEQ ID NO: 524374 - RNA, 21 nt, Human
uggcucaugccugucauccca

SEQ ID NO: 524375 - RNA, 23 nt, Human
uggcucaugccugucaucccagc

SEQ ID NO: 524376 - RNA, 32 nt, Human
uggcucaugccugucaucccagcacuuuggga

SEQ ID NO: 524377 - RNA, 32 nt, Human
uggcucaugccugucaucccagcauuugggag

SEQ ID NO: 524378 - RNA, 18 nt, Human
uggcucaugccugugauc

SEQ ID NO: 524379 - RNA, 21 nt, Human
uggcucaugccugugauccca

SEQ ID NO: 524380 - RNA, 32 nt, Human
uggcucaugccugugaucccaacacuuuggga

SEQ ID NO: 524381 - RNA, 23 nt, Human
uggcucaugccugugaucccagc

SEQ ID NO: 524382 - RNA, 32 nt, Human
uggcucaugccugugaucccagcacuuuggga

SEQ ID NO: 524383 - RNA, 32 nt, Human
uggcucaugccugugaucccagcacuuugggu

SEQ ID NO: 524384 - RNA, 24 nt, Human
uggcucaugccugugaucccagcu

SEQ ID NO: 524385 - RNA, 32 nt, Human
uggcucaugccugugaucccagcuacucggga

SEQ ID NO: 524386 - RNA, 32 nt, Human
uggcucaugccugugauccuagcacuuugcga

SEQ ID NO: 524387 - RNA, 32 nt, Human
uggcucaugccugugauccuagcacuuuggga

SEQ ID NO: 524388 - RNA, 32 nt, Human
uggcucaugccugugaucgcagcacuuuggga

SEQ ID NO: 524389 - RNA, 32 nt, Human
uggcucaugccuguggucccaacauuuuggga

SEQ ID NO: 524390 - RNA, 23 nt, Human
uggcucaugccuguggucccagc

SEQ ID NO: 524391 - RNA, 32 nt, Human
uggcucaugccuguggucccagcacuuuggga

SEQ ID NO: 524392 - RNA, 32 nt, Human
uggcucaugccuguggucccagcgcuuuggga

SEQ ID NO: 524393 - RNA, 24 nt, Human
uggcucaugccuguggucccagcu

SEQ ID NO: 524394 - RNA, 32 nt, Human
uggcucaugccuguggucccagcuacuugaga

SEQ ID NO: 524395 - RNA, 32 nt, Human
uggcucaugccuguuaucccaacacuuuggga

SEQ ID NO: 524396 - RNA, 32 nt, Human
uggcucaugccuuaaucccagcacuuugggag

SEQ ID NO: 524397 - RNA, 32 nt, Human
uggcucaugccuuaaucccagcacuuuuggag

SEQ ID NO: 524398 - RNA, 21 nt, Human
uggcucaugccuuuaauccca

SEQ ID NO: 524399 - RNA, 23 nt, Human
uggcucaugccuuuaaucccagc

SEQ ID NO: 524400 - RNA, 32 nt, Human
uggcucaugccuuuaaucccagcacuuuggga

SEQ ID NO: 524401 - RNA, 32 nt, Human
uggcucaugcguguaaucccagcacuuuggga

SEQ ID NO: 524402 - RNA, 23 nt, Human
uggcucaugcuacccaauuccag

SEQ ID NO: 524403 - RNA, 18 nt, Human
uggcucaugcuuguaauc

SEQ ID NO: 524404 - RNA, 20 nt, Human
uggcucaugcuuguaauccc

SEQ ID NO: 524405 - RNA, 21 nt, Human
uggcucaugcuuguaauccca

SEQ ID NO: 524406 - RNA, 23 nt, Human
uggcucaugcuuguaaucccagc

SEQ ID NO: 524407 - RNA, 32 nt, Human
uggcucaugcuuguaaucccagcacuugggga

SEQ ID NO: 524408 - RNA, 32 nt, Human
uggcucaugcuuguaaucccagcacuuuggga

SEQ ID NO: 524409 - RNA, 32 nt, Human
uggcucaugcuuguaaucccagcacuuuggua

SEQ ID NO: 524410 - RNA, 23 nt, Human
uggcucaugcuuguaaucccagu

SEQ ID NO: 524411 - RNA, 21 nt, Human
uggcucaugcuuguaauccua

SEQ ID NO: 524412 - RNA, 21 nt, Human
uggcucaugcuuguaaucuca

SEQ ID NO: 524413 - RNA, 32 nt, Human
uggcucaugcuuguaaucucagcacuuuggga

SEQ ID NO: 524414 - RNA, 21 nt, Human
uggcucaugcuuguaauucca

SEQ ID NO: 524415 - RNA, 23 nt, Human
uggcucaugcuuguaauuccagc

SEQ ID NO: 524416 - RNA, 32 nt, Human
uggcucaugcuuguaauuccagcacuguggaa

SEQ ID NO: 524417 - RNA, 32 nt, Human
uggcucauggcagagcauucagugccacgguu

SEQ ID NO: 524418 - RNA, 32 nt, Human
uggcucauggcuacgcuccagccccgggugug

SEQ ID NO: 524419 - RNA, 21 nt, Human
uggcucauguauguaauccua

SEQ ID NO: 524420 - RNA, 21 nt, Human
uggcucaugucuauaauccca

SEQ ID NO: 524421 - RNA, 23 nt, Human
uggcucaugucuauaaucccagc

SEQ ID NO: 524422 - RNA, 32 nt, Human
uggcucaugucuauaaucccagcacuuuggga

SEQ ID NO: 524423 - RNA, 21 nt, Human
uggcucaugucucuaauccca

SEQ ID NO: 524424 - RNA, 23 nt, Human
uggcucaugucucuaaucccagc

SEQ ID NO: 524425 - RNA, 32 nt, Human
uggcucaugucucuaaucccagcacuuuggga

SEQ ID NO: 524426 - RNA, 23 nt, Human
uggcucaugucugcaaucccagc

SEQ ID NO: 524427 - RNA, 21 nt, Human
uggcucaugucuguaauccca

SEQ ID NO: 524428 - RNA, 23 nt, Human
uggcucaugucuguaaucccagc

SEQ ID NO: 524429 - RNA, 32 nt, Human
uggcucaugucuguaaucccagcacucugggg

SEQ ID NO: 524430 - RNA, 32 nt, Human
uggcucaugucuguaaucccagcacuuuggga

SEQ ID NO: 524431 - RNA, 32 nt, Human
uggcucaugucuguaauucuagcauguuagaa

SEQ ID NO: 524432 - RNA, 20 nt, Human
uggcucaugugauccuccca

SEQ ID NO: 524433 - RNA, 25 nt, Human
uggcucaugugauccucccaucuca

SEQ ID NO: 524434 - RNA, 21 nt, Human
uggcucauguguguaauccca

SEQ ID NO: 524435 - RNA, 23 nt, Human
uggcucauguguguaaucccagc

SEQ ID NO: 524436 - RNA, 32 nt, Human
uggcucauguguguaaucccagcacucuggga

SEQ ID NO: 524437 - RNA, 24 nt, Human
uggcucauguuuguaaaucccagc

SEQ ID NO: 524438 - RNA, 32 nt, Human
uggcucauguuuguaaucccagcacuuugggg

SEQ ID NO: 524439 - RNA, 21 nt, Human
uggcucauguuuguaauccua

SEQ ID NO: 524440 - RNA, 32 nt, Human
uggcucauuccaggcuggaauguggauccagc

SEQ ID NO: 524441 - RNA, 21 nt, Human
uggcucauuccuguaauccca

SEQ ID NO: 524442 - RNA, 23 nt, Human
uggcucauuccuguaaucccagc

SEQ ID NO: 524443 - RNA, 32 nt, Human
uggcucauuccuguaaucccagcacuuuggga

SEQ ID NO: 524444 - RNA, 32 nt, Human
uggcucauugcaaccuccgccucccucccagg

SEQ ID NO: 524445 - RNA, 32 nt, Human
uggcucauugcaaccucugccucccaggucag

SEQ ID NO: 524446 - RNA, 32 nt, Human
uggcucauugcaaccuugaauuccugggcaca

SEQ ID NO: 524447 - RNA, 32 nt, Human
uggcucauugcaacuuccacuucccagguuca

SEQ ID NO: 524448 - RNA, 32 nt, Human
uggcucauuugaaaaugaggguccgugguagc

SEQ ID NO: 524449 - RNA, 32 nt, Human
uggcuccaaauacugucauguuuucuugcaca

SEQ ID NO: 524450 - RNA, 22 nt, Human
uggcuccaaggaacagggcugg

SEQ ID NO: 524451 - RNA, 32 nt, Human
uggcuccacaacucgggagccugcgccuuucc

SEQ ID NO: 524452 - RNA, 32 nt, Human
uggcuccaccucuguccucucucuagccugcc

SEQ ID NO: 524453 - RNA, 32 nt, Human
uggcuccagaaaacccgcgccccacauaccug

SEQ ID NO: 524454 - RNA, 32 nt, Human
uggcuccagaagcugccagagugcacuggggg

SEQ ID NO: 524455 - RNA, 32 nt, Human
uggcuccagaucuacucccuguaggaguucaa

SEQ ID NO: 524456 - RNA, 32 nt, Human
uggcuccagcagcugcuguugccaccaccacu

SEQ ID NO: 524457 - RNA, 32 nt, Human
uggcuccagcauggggccuggccaggcuauuc

SEQ ID NO: 524458 - RNA, 32 nt, Human
uggcuccagcuggucccuccauucaggguccc

SEQ ID NO: 524459 - RNA, 32 nt, Human
uggcuccagcuucccuccagccacuccccauu

SEQ ID NO: 524460 - RNA, 32 nt, Human
uggcuccaggaggacuuccugcguccauggaa

SEQ ID NO: 524461 - RNA, 32 nt, Human
uggcuccaggauguuaggaacugugaagaugg

SEQ ID NO: 524462 - RNA, 32 nt, Human
uggcuccagguggucagagaggccaccugggg

SEQ ID NO: 524463 - RNA, 32 nt, Human
uggcuccagguggucaggacaguggggguugg

SEQ ID NO: 524464 - RNA, 32 nt, Human
uggcuccaugacccaccccacucuggaugcca

SEQ ID NO: 524465 - RNA, 19 nt, Human
uggcuccauugguggugaa

SEQ ID NO: 524466 - RNA, 32 nt, Human
uggcucccaaagugcuggaauuacaggcauua

SEQ ID NO: 524467 - RNA, 19 nt, Human
uggcucccacaagcucucc

SEQ ID NO: 524468 - RNA, 21 nt, Human
uggcucccaccuauaauccca

SEQ ID NO: 524469 - RNA, 21 nt, Human
uggcucccaccuauaauccua

SEQ ID NO: 524470 - RNA, 21 nt, Human
uggcucccaccuguaaucuca

SEQ ID NO: 524471 - RNA, 23 nt, Human
uggcucccaccuguaaucucagc

SEQ ID NO: 524472 - RNA, 21 nt, Human
uggcucccaccuguaguccca

SEQ ID NO: 524473 - RNA, 32 nt, Human
uggcucccacuucagugcuguccuccugggcg

SEQ ID NO: 524474 - RNA, 21 nt, Human
uggcucccagcacuuugggag

SEQ ID NO: 524475 - RNA, 21 nt, Human
uggcucccagcauuuugggag

SEQ ID NO: 524476 - RNA, 32 nt, Human
uggcucccagggcagagccucuccuuguacuu

SEQ ID NO: 524477 - RNA, 32 nt, Human
uggcuccccuuuccuuggguccuuguguuccu

SEQ ID NO: 524478 - RNA, 21 nt, Human
uggcucccgccuguaauccca

SEQ ID NO: 524479 - RNA, 32 nt, Human
uggcucccgccuguaaucccagaacuuuggga

SEQ ID NO: 524480 - RNA, 23 nt, Human
uggcucccgccuguaaucccagc

SEQ ID NO: 524481 - RNA, 32 nt, Human
uggcucccgccuguaaucccagcacuuuggga

SEQ ID NO: 524482 - RNA, 23 nt, Human
uggcucccgccuguaaucccagu

SEQ ID NO: 524483 - RNA, 32 nt, Human
uggcucccgccuguaaucccaguacuuuggga

SEQ ID NO: 524484 - RNA, 21 nt, Human
uggcucccgccuguaauccua

SEQ ID NO: 524485 - RNA, 32 nt, Human
uggcucccgccuguaauccuagcacuuuggga

SEQ ID NO: 524486 - RNA, 32 nt, Human
uggcucccggcuuugccugggcugagguuuuu

SEQ ID NO: 524487 - RNA, 32 nt, Human
uggcucccuacaacuuccaccucccagguuca

SEQ ID NO: 524488 - RNA, 32 nt, Human
uggcucccuccagagcaaagggcagguuuguu

SEQ ID NO: 524489 - RNA, 32 nt, Human
uggcucccuccaggcagagccuaagaugcugg

SEQ ID NO: 524490 - RNA, 32 nt, Human
uggcucccucgaccugcuaucuccucugaaag

SEQ ID NO: 524491 - RNA, 32 nt, Human
uggcucccucuacccugccuugaggccuguuu

SEQ ID NO: 524492 - RNA, 32 nt, Human
uggcucccugcaaccuccgccuccuggauucc

SEQ ID NO: 524493 - RNA, 32 nt, Human
uggcucccugcaaccucugcuuccuggguuca

SEQ ID NO: 524494 - RNA, 32 nt, Human
uggcucccuggaggagcucccagucugauggg

SEQ ID NO: 524495 - RNA, 32 nt, Human
uggcucccugucuucagggcuggaagagccac

SEQ ID NO: 524496 - RNA, 32 nt, Human
uggcuccgaacuggcaaccucuuccauugccc

SEQ ID NO: 524497 - RNA, 21 nt, Human
uggcuccgaccuguaauccca

SEQ ID NO: 524498 - RNA, 32 nt, Human
uggcuccgaccuuuguguacacugcagacgcu

SEQ ID NO: 524499 - RNA, 32 nt, Human
uggcuccgagacuggucaggagcccaggccag

SEQ ID NO: 524500 - RNA, 32 nt, Human
uggcuccgcccuugggaacaggcacggaccac

SEQ ID NO: 524501 - RNA, 31 nt, Human
uggcuccgccucucugagccucugucucugc

SEQ ID NO: 524502 - RNA, 32 nt, Human
uggcuccgcgggcacaggccucaccagggagg

SEQ ID NO: 524503 - RNA, 32 nt, Human
uggcuccgcuggcucuggaggcuggaguuccc

SEQ ID NO: 524504 - RNA, 32 nt, Human
uggcuccggaagcagacacaggccaggccugg

SEQ ID NO: 524505 - RNA, 32 nt, Human
uggcuccggcuucaccaacaccauccugcucc

SEQ ID NO: 524506 - RNA, 32 nt, Human
uggcuccuacagccaggccuccuugcuggccg

SEQ ID NO: 524507 - RNA, 17 nt, Human
uggcuccuauaauccca

SEQ ID NO: 524508 - RNA, 32 nt, Human
uggcuccuaucaccugguggucugauucauac

SEQ ID NO: 524509 - RNA, 20 nt, Human
uggcuccucagcuccagcca

SEQ ID NO: 524510 - RNA, 32 nt, Human
uggcuccucaucucuccggucuccgcagacua

SEQ ID NO: 524511 - RNA, 32 nt, Human
uggcuccucccuugcugaccugccccuugcuu

SEQ ID NO: 524512 - RNA, 32 nt, Human
uggcuccuccucagcauggcuuugugucuuuc

SEQ ID NO: 524513 - RNA, 32 nt, Human
uggcuccucgaaguauggaaaaagccauggcg

SEQ ID NO: 524514 - RNA, 32 nt, Human
uggcuccucuacuguuuaacaacauggcuuuc

SEQ ID NO: 524515 - RNA, 21 nt, Human
uggcuccucucgccccuggag

SEQ ID NO: 524516 - RNA, 32 nt, Human
uggcuccucugccugcccccucaggcccccgc

SEQ ID NO: 524517 - RNA, 32 nt, Human
uggcuccucuuuccccagcuucugucugucuc

SEQ ID NO: 524518 - RNA, 20 nt, Human
uggcuccugaagggcuggcu

SEQ ID NO: 524519 - RNA, 32 nt, Human
uggcuccugcacagauccugcuccucuguggc

SEQ ID NO: 524520 - RNA, 32 nt, Human
uggcuccugccuauaaucccagcacuuuggga

SEQ ID NO: 524521 - RNA, 21 nt, Human
uggcuccugccuguaauccca

SEQ ID NO: 524522 - RNA, 23 nt, Human
uggcuccugccuguaaucccagc

SEQ ID NO: 524523 - RNA, 32 nt, Human
uggcuccugccuguaaucccagcacuuuggga

SEQ ID NO: 524524 - RNA, 21 nt, Human
uggcuccugccuguaaucgca

SEQ ID NO: 524525 - RNA, 32 nt, Human
uggcuccugccuguaaucgcagcacuuuggga

SEQ ID NO: 524526 - RNA, 32 nt, Human
uggcuccugcgcgcccuggccugggccuugcc

SEQ ID NO: 524527 - RNA, 32 nt, Human
uggcuccuggaagggaugaggguccagagaaa

SEQ ID NO: 524528 - RNA, 32 nt, Human
uggcuccuggcgcgcaccucugcucccuucuc

SEQ ID NO: 524529 - RNA, 32 nt, Human
uggcuccugggccugggcuuuagucugggcua

SEQ ID NO: 524530 - RNA, 32 nt, Human
uggcuccuguaggggacuggcucucuuggugc

SEQ ID NO: 524531 - RNA, 32 nt, Human
uggcuccuguggccucaccaggaagcgucaga

SEQ ID NO: 524532 - RNA, 24 nt, Human
uggcuccuguuuccacucagcuca

SEQ ID NO: 524533 - RNA, 32 nt, Human
uggcuccuuagacgacagacuaccucacggag

SEQ ID NO: 524534 - RNA, 32 nt, Human
uggcuccuuagaggaaucugggugccugcugu

SEQ ID NO: 524535 - RNA, 32 nt, Human
uggcuccuuagaggaaucugggugccuucugu

SEQ ID NO: 524536 - RNA, 32 nt, Human
uggcuccuugauacaucaguccucaauauuac

SEQ ID NO: 524537 - RNA, 32 nt, Human
uggcuccuuugccucugcuacugaggcagggg

SEQ ID NO: 524538 - RNA, 23 nt, Human
uggcucgaucucagcucacugca

SEQ ID NO: 524539 - RNA, 22 nt, Human
uggcucgaucucggcucacugc

SEQ ID NO: 524540 - RNA, 23 nt, Human
uggcucgaucucugcucacugca

SEQ ID NO: 524541 - RNA, 23 nt, Human
uggcucgaucuuggcucacugca

SEQ ID NO: 524542 - RNA, 21 nt, Human
uggcucgcaccuguaauccca

SEQ ID NO: 524543 - RNA, 23 nt, Human
uggcucgcaccuguaaucccagc

SEQ ID NO: 524544 - RNA, 32 nt, Human
uggcucgcaccuguaaucccagcacuuuggga

SEQ ID NO: 524545 - RNA, 32 nt, Human
uggcucgcaccuguaaucccagcacuuugggg

SEQ ID NO: 524546 - RNA, 32 nt, Human
uggcucgcaccugugggaccucagggcaccgg

SEQ ID NO: 524547 - RNA, 32 nt, Human
uggcucgccuguaaucccagcacuuugggagg

SEQ ID NO: 524548 - RNA, 21 nt, Human
uggcucgcgccuguaauccca

SEQ ID NO: 524549 - RNA, 23 nt, Human
uggcucgcgccuguaaucccagc

SEQ ID NO: 524550 - RNA, 32 nt, Human
uggcucgcgccuguaaucccagcacuuuggga

SEQ ID NO: 524551 - RNA, 21 nt, Human
uggcucgcgcuugugauccca

SEQ ID NO: 524552 - RNA, 32 nt, Human
uggcucgcgcuugugaucccagcacuuuggga

SEQ ID NO: 524553 - RNA, 32 nt, Human
uggcucgcugcaaccucagcuuccagaguuca

SEQ ID NO: 524554 - RNA, 32 nt, Human
uggcucgcugcaaccuccgccucccagguuca

SEQ ID NO: 524555 - RNA, 27 nt, Human
uggcucgcugcaaccucugccuccugg

SEQ ID NO: 524556 - RNA, 32 nt, Human
uggcucgcugcaaccuucacccuucaccuccc

SEQ ID NO: 524557 - RNA, 32 nt, Human
uggcucgcugcagccuccaccucccagguuca

SEQ ID NO: 524558 - RNA, 32 nt, Human
uggcucgcugcgccucugccucccagguucaa

SEQ ID NO: 524559 - RNA, 32 nt, Human
uggcucgcugucccgcagccugggcggggacc

SEQ ID NO: 524560 - RNA, 32 nt, Human
uggcucggccucugccuuugcaccacgggaca

SEQ ID NO: 524561 - RNA, 32 nt, Human
uggcucgggacuucaaaaucagugaugggagu

SEQ ID NO: 524562 - RNA, 21 nt, Human
uggcucgggccuguaauccca

SEQ ID NO: 524563 - RNA, 23 nt, Human
uggcucgggccuguaaucccagc

SEQ ID NO: 524564 - RNA, 32 nt, Human
uggcucgggccuguaaucccagcacuuucgga

SEQ ID NO: 524565 - RNA, 32 nt, Human
uggcucgggggauccagguugcagaugaaaua

SEQ ID NO: 524566 - RNA, 19 nt, Human
uggcucguaccuguaaucc

SEQ ID NO: 524567 - RNA, 32 nt, Human
uggcucguaccuguaauccagcacuuugggaa

SEQ ID NO: 524568 - RNA, 32 nt, Human
uggcucguaucuguaaucccagcacuuugaga

SEQ ID NO: 524569 - RNA, 18 nt, Human
uggcucgugccuguaauc

SEQ ID NO: 524570 - RNA, 21 nt, Human
uggcucgugccuguaauccca

SEQ ID NO: 524571 - RNA, 23 nt, Human
uggcucgugccuguaaucccagc

SEQ ID NO: 524572 - RNA, 32 nt, Human
uggcucgugccuguaaucccagcacuuuggga

SEQ ID NO: 524573 - RNA, 24 nt, Human
uggcucgugccuguaaucccagcu

SEQ ID NO: 524574 - RNA, 21 nt, Human
uggcucgugccuguaaucuca

SEQ ID NO: 524575 - RNA, 24 nt, Human
uggcucgugccuguaaucucagcu

SEQ ID NO: 524576 - RNA, 21 nt, Human
uggcucgugccuguacuccca

SEQ ID NO: 524577 - RNA, 32 nt, Human
uggcucgugccuguacucccagcacuuuggga

SEQ ID NO: 524578 - RNA, 21 nt, Human
uggcucgugccuguaguccca

SEQ ID NO: 524579 - RNA, 32 nt, Human
uggcucgugccuguagucccagcacuuuggga

SEQ ID NO: 524580 - RNA, 32 nt, Human
uggcucgugccugucaucccagcacuuuggga

SEQ ID NO: 524581 - RNA, 32 nt, Human
uggcucgugccugugaucucagcacuugggaa

SEQ ID NO: 524582 - RNA, 21 nt, Human
uggcucgugcuuguaauccca

SEQ ID NO: 524583 - RNA, 23 nt, Human
uggcucgugcuuguaaucccagc

SEQ ID NO: 524584 - RNA, 32 nt, Human
uggcucgugcuuguaaucccagcacuuuggga

SEQ ID NO: 524585 - RNA, 32 nt, Human
uggcucguggccccuuccuccaccuucaagcc

SEQ ID NO: 524586 - RNA, 32 nt, Human
uggcucgugggugagagcaagugaagaccgcc

SEQ ID NO: 524587 - RNA, 32 nt, Human
uggcucuaaggaugaugaguacacuuggaauu

SEQ ID NO: 524588 - RNA, 32 nt, Human
uggcucuaaguggcaggaggaggcggagcauc

SEQ ID NO: 524589 - RNA, 32 nt, Human
uggcucuaaucagcugagacagcaccagagga

SEQ ID NO: 524590 - RNA, 32 nt, Human
uggcucuaccugcagaaagcugcauuuuccaa

SEQ ID NO: 524591 - RNA, 32 nt, Human
uggcucuacuacaaauacaaaaauuagcugga

SEQ ID NO: 524592 - RNA, 32 nt, Human
uggcucuagaaugucuaggaaaaagaagggcu

SEQ ID NO: 524593 - RNA, 32 nt, Human
uggcucuaggcguuuggagaaugcagaaggaa

SEQ ID NO: 524594 - RNA, 31 nt, Human
uggcucuauaugugaccgaugccaagaugga

SEQ ID NO: 524595 - RNA, 32 nt, Human
uggcucucaagcucuguucuucaucgcauucu

SEQ ID NO: 524596 - RNA, 32 nt, Human
uggcucucacaggagcuagcugccugggagga

SEQ ID NO: 524597 - RNA, 32 nt, Human
uggcucucacuccugugcugcagccaccuugu

SEQ ID NO: 524598 - RNA, 23 nt, Human
uggcucucacuuuggagcacuua

SEQ ID NO: 524599 - RNA, 32 nt, Human
uggcucucagaaguccuggauuuuggaaacuc

SEQ ID NO: 524600 - RNA, 32 nt, Human
uggcucucagcccuuggggcauguuaucaugg

SEQ ID NO: 524601 - RNA, 32 nt, Human
uggcucucagcugcacucacagcaccagugag

SEQ ID NO: 524602 - RNA, 18 nt, Human
uggcucucaguaauccca

SEQ ID NO: 524603 - RNA, 32 nt, Human
uggcucucagucuagucaggugcaauguucuu

SEQ ID NO: 524604 - RNA, 32 nt, Human
uggcucucauuagccaggcauggugguacucg

SEQ ID NO: 524605 - RNA, 32 nt, Human
uggcucucauuucacaaauccagccuucccca

SEQ ID NO: 524606 - RNA, 32 nt, Human
uggcucucccagagaggugaaggagcaccugg

SEQ ID NO: 524607 - RNA, 32 nt, Human
uggcucuccgggcaguagagugugugagugca

SEQ ID NO: 524608 - RNA, 32 nt, Human
uggcucuccugaggaugcaccagcgucacccc

SEQ ID NO: 524609 - RNA, 32 nt, Human
uggcucuccuguagcucuccugggguucuggg

SEQ ID NO: 524610 - RNA, 21 nt, Human
uggcucucgccuauaauccca

SEQ ID NO: 524611 - RNA, 21 nt, Human
uggcucucgccuguaauccca

SEQ ID NO: 524612 - RNA, 23 nt, Human
uggcucucgccuguaaucccagc

SEQ ID NO: 524613 - RNA, 32 nt, Human
uggcucucgccuguaaucccagcacuuuggga

SEQ ID NO: 524614 - RNA, 21 nt, Human
uggcucucgccuguaaucuca

SEQ ID NO: 524615 - RNA, 32 nt, Human
uggcucucgccuguaaucucagcacuuuggga

SEQ ID NO: 524616 - RNA, 32 nt, Human
uggcucucucaaggagcuggagggugacagaa

SEQ ID NO: 524617 - RNA, 32 nt, Human
uggcucucucaggaagagggcaggucagggau

SEQ ID NO: 524618 - RNA, 32 nt, Human
uggcucucucaggguccaacaagagcaagcug

SEQ ID NO: 524619 - RNA, 32 nt, Human
uggcucucuccaggauccagaagggguuuggu

SEQ ID NO: 524620 - RNA, 32 nt, Human
uggcucucucucuguaugccucuuccuguucu

SEQ ID NO: 524621 - RNA, 32 nt, Human
uggcucucugcaaagacugccuauacagcuac

SEQ ID NO: 524622 - RNA, 32 nt, Human
uggcucucugcaaccucugccucccagguuca

SEQ ID NO: 524623 - RNA, 19 nt, Human
uggcucugaaacugcucca

SEQ ID NO: 524624 - RNA, 32 nt, Human
uggcucugaggugagagacugaagaagcagag

SEQ ID NO: 524625 - RNA, 32 nt, Human
uggcucugcacacucagguaugugccaaagug

SEQ ID NO: 524626 - RNA, 32 nt, Human
uggcucugcaccugguauaugggucauggacc

SEQ ID NO: 524627 - RNA, 32 nt, Human
uggcucugcaugacaaacacacauccagccca

SEQ ID NO: 524628 - RNA, 32 nt, Human
uggcucugcccagguggggugggguggcccag

SEQ ID NO: 524629 - RNA, 32 nt, Human
uggcucugcccuucuuacugcaaaccaugcug

SEQ ID NO: 524630 - RNA, 32 nt, Human
uggcucugcccuuugggcuggauuacccaugc

SEQ ID NO: 524631 - RNA, 23 nt, Human
uggcucugcggagucccagcaga

SEQ ID NO: 524632 - RNA, 32 nt, Human
uggcucuggaaccaggcugcuccaggaguaag

SEQ ID NO: 524633 - RNA, 32 nt, Human
uggcucuggaaccugggcugagauggauucgg

SEQ ID NO: 524634 - RNA, 32 nt, Human
uggcucuggagauagccccagagcaggguguu

SEQ ID NO: 524635 - RNA, 32 nt, Human
uggcucuggagguggccuguucagugggggca

SEQ ID NO: 524636 - RNA, 32 nt, Human
uggcucuggcagcaggcgggcgcgugggugca

SEQ ID NO: 524637 - RNA, 32 nt, Human
uggcucuggcccaggcuagagugcaguggugc

SEQ ID NO: 524638 - RNA, 32 nt, Human
uggcucuggccgagggcgagacaggaguauuc

SEQ ID NO: 524639 - RNA, 32 nt, Human
uggcucugggaccugggcugggccggaccugg

SEQ ID NO: 524640 - RNA, 32 nt, Human
uggcucugggacuucgcccccuccaguggcuc

SEQ ID NO: 524641 - RNA, 32 nt, Human
uggcucuggggccgagucaccuugcacaagga

SEQ ID NO: 524642 - RNA, 32 nt, Human
uggcucuggggcuggggugagggcuggugguu

SEQ ID NO: 524643 - RNA, 32 nt, Human
uggcucuggguuuggagaacacaguggcuggu

SEQ ID NO: 524644 - RNA, 32 nt, Human
uggcucuggugguucucuccaacauggguguc

SEQ ID NO: 524645 - RNA, 32 nt, Human
uggcucugucaauccaagagcaugccaguuau

SEQ ID NO: 524646 - RNA, 32 nt, Human
uggcucugucccuguguugccuuccacagagg

SEQ ID NO: 524647 - RNA, 32 nt, Human
uggcucugucuguauagcuuguaacaggagcc

SEQ ID NO: 524648 - RNA, 32 nt, Human
uggcucuguggccauucaaccugccaggacua

SEQ ID NO: 524649 - RNA, 32 nt, Human
uggcucugugucaguuuuccauucaguguuaa

SEQ ID NO: 524650 - RNA, 32 nt, Human
uggcucugugugaccauaggcagaugcugacu

SEQ ID NO: 524651 - RNA, 32 nt, Human
uggcucuguuccgagcugcacuuugggcaucc

SEQ ID NO: 524652 - RNA, 32 nt, Human
uggcucuguuggugguccugguguuuuaauga

SEQ ID NO: 524653 - RNA, 32 nt, Human
uggcucuuacuauuuuucacaaaugaguauuc

SEQ ID NO: 524654 - RNA, 32 nt, Human
uggcucuuacucugcaggguuuaauguaggac

SEQ ID NO: 524655 - RNA, 32 nt, Human
uggcucuuagaccucucccaucaugccuugac

SEQ ID NO: 524656 - RNA, 32 nt, Human
uggcucuucacacccaaauagcagacuaaucg

SEQ ID NO: 524657 - RNA, 32 nt, Human
uggcucuucuagcugacucuucugguugggcu

SEQ ID NO: 524658 - RNA, 32 nt, Human
uggcucuucugacauuuaucaggcaccuggua

SEQ ID NO: 524659 - RNA, 32 nt, Human
uggcucuucuuguccuuccucuucucagugca

SEQ ID NO: 524660 - RNA, 21 nt, Human
uggcucuugccuguaauccca

SEQ ID NO: 524661 - RNA, 23 nt, Human
uggcucuugccuguaaucccagc

SEQ ID NO: 524662 - RNA, 32 nt, Human
uggcucuugccuguaaucccagcacuuugaua

SEQ ID NO: 524663 - RNA, 32 nt, Human
uggcucuugccuguaaucccagcacuuuggga

SEQ ID NO: 524664 - RNA, 32 nt, Human
uggcucuugccuguaaucccagcacuuugggg

SEQ ID NO: 524665 - RNA, 32 nt, Human
uggcucuugccuguaauuccagcuacuuggga

SEQ ID NO: 524666 - RNA, 32 nt, Human
uggcucuugccuguagucccggcacuuuggga

SEQ ID NO: 524667 - RNA, 21 nt, Human
uggcucuugcuuccuuucaca

SEQ ID NO: 524668 - RNA, 32 nt, Human
uggcucuuggaaggccagguccccagcucccu

SEQ ID NO: 524669 - RNA, 32 nt, Human
uggcucuugucacccaggcuggagugcagugg

SEQ ID NO: 524670 - RNA, 21 nt, Human
uggcucuugucuguaauccca

SEQ ID NO: 524671 - RNA, 23 nt, Human
uggcucuugucuguaaucccagc

SEQ ID NO: 524672 - RNA, 32 nt, Human
uggcucuuguugcccaggcuggugugcaaugg

SEQ ID NO: 524673 - RNA, 32 nt, Human
uggcucuuuaauguaagccaacauggagagga

SEQ ID NO: 524674 - RNA, 32 nt, Human
uggcucuuucagaagacccaggaagggcagcu

SEQ ID NO: 524675 - RNA, 32 nt, Human
uggcucuuugcaaccucugccuccugggcuca

SEQ ID NO: 524676 - RNA, 32 nt, Human
uggcucuuuucaaccuccuguacagcacccug

SEQ ID NO: 524677 - RNA, 32 nt, Human
uggcucuuuucuccucuuuccuugccucaggg

SEQ ID NO: 524678 - RNA, 32 nt, Human
uggcugaaaaccugauuuucugcugcacgugg

SEQ ID NO: 524679 - RNA, 32 nt, Human
uggcugaaagaguccuuucaggaagguggagc

SEQ ID NO: 524680 - RNA, 32 nt, Human
uggcugaaauacaggggugcauaccaucuugc

SEQ ID NO: 524681 - RNA, 32 nt, Human
uggcugaaauuaggauccagauuucccaaacu

SEQ ID NO: 524682 - RNA, 32 nt, Human
uggcugaacggggagggcaggaagggagggcc

SEQ ID NO: 524683 - RNA, 32 nt, Human
uggcugaagacaguccaccacggaggguccag

SEQ ID NO: 524684 - RNA, 32 nt, Human
uggcugaagcuccuaauauggcaguugugaau

SEQ ID NO: 524685 - RNA, 21 nt, Human
uggcugaagucuguaauccua

SEQ ID NO: 524686 - RNA, 32 nt, Human
uggcugaaguugacaucugaugacaaagcagu

SEQ ID NO: 524687 - RNA, 32 nt, Human
uggcugaauaagaaggaugacagugccuuugu

SEQ ID NO: 524688 - RNA, 32 nt, Human
uggcugaauggggagggcaggaagggaggguc

SEQ ID NO: 524689 - RNA, 19 nt, Human
uggcugacacccuggagaa

SEQ ID NO: 524690 - RNA, 32 nt, Human
uggcugacaccuguaaucccagcacuuuggga

SEQ ID NO: 524691 - RNA, 32 nt, Human
uggcugacagccaggcucuuacuccagccggg

SEQ ID NO: 524692 - RNA, 32 nt, Human
uggcugacaucaaaacagcauucuucuucuag

SEQ ID NO: 524693 - RNA, 32 nt, Human
uggcugacauggugaaacuccaucucuacuaa

SEQ ID NO: 524694 - RNA, 21 nt, Human
uggcugacccccuuccuccca

SEQ ID NO: 524695 - RNA, 32 nt, Human
uggcugaccuuggugagaccuggagcugccug

SEQ ID NO: 524696 - RNA, 32 nt, Human
uggcugacgccuguaaucccagcacuuuggga

SEQ ID NO: 524697 - RNA, 28 nt, Human
uggcugacucaauaaacuuuucccucug

SEQ ID NO: 524698 - RNA, 32 nt, Human
uggcugacugcaacuucugccuccuggguuca

SEQ ID NO: 524699 - RNA, 32 nt, Human
uggcugacuucccuuggccuucccaagagaag

SEQ ID NO: 524700 - RNA, 32 nt, Human
uggcugacuuugccaaccugcccagcugcugc

SEQ ID NO: 524701 - RNA, 18 nt, Human
uggcugagaaaauguaag

SEQ ID NO: 524702 - RNA, 32 nt, Human
uggcugagaaacugggcuggagucaggaggcu

SEQ ID NO: 524703 - RNA, 32 nt, Human
uggcugagaacagugaucucucagcucuccag

SEQ ID NO: 524704 - RNA, 32 nt, Human
uggcugagaggcugcugcuuaucuguucccca

SEQ ID NO: 524705 - RNA, 32 nt, Human
uggcugagaucacaccacuacacuccagccug

SEQ ID NO: 524706 - RNA, 32 nt, Human
uggcugagcaccagcugcgcuucaccugccgc

SEQ ID NO: 524707 - RNA, 32 nt, Human
uggcugagcagagcuugaaggccauucugucu

SEQ ID NO: 524708 - RNA, 32 nt, Human
uggcugagcaggaagggcgaggagacaccuug

SEQ ID NO: 524709 - RNA, 32 nt, Human
uggcugagcccccagccccuggaauaugcagc

SEQ ID NO: 524710 - RNA, 32 nt, Human
uggcugaggaggaugaagaggaauguuugucc

SEQ ID NO: 524711 - RNA, 32 nt, Human
uggcugaggaguaccugcacuaccucagugag

SEQ ID NO: 524712 - RNA, 32 nt, Human
uggcugagggccugggccucaaacagcugcuu

SEQ ID NO: 524713 - RNA, 32 nt, Human
uggcugagguuagugugcuuggaggcugcagg

SEQ ID NO: 524714 - RNA, 32 nt, Human
uggcugagucuggaaugucugccugugccuca

SEQ ID NO: 524715 - RNA, 32 nt, Human
uggcugaucacaucaccucucugccucaguuu

SEQ ID NO: 524716 - RNA, 32 nt, Human
uggcugaucucgaacuccuagacuggggccuu

SEQ ID NO: 524717 - RNA, 23 nt, Human
uggcugaucugcaagacaaagaa

SEQ ID NO: 524718 - RNA, 32 nt, Human
uggcugaucuugaacuccugaccucgggaucc

SEQ ID NO: 524719 - RNA, 23 nt, Human
uggcugaugccuguaaucccagc

SEQ ID NO: 524720 - RNA, 32 nt, Human
uggcugaugccuguaaucccagcacuuuggga

SEQ ID NO: 524721 - RNA, 32 nt, Human
uggcugaugccugucaucccaacgcuuuggga

SEQ ID NO: 524722 - RNA, 32 nt, Human
uggcugcaaaagcagagguugcccguggcuuu

SEQ ID NO: 524723 - RNA, 32 nt, Human
uggcugcaaagggcuguguccugacucugcag

SEQ ID NO: 524724 - RNA, 32 nt, Human
uggcugcaacccacggugguauguuaguguuu

SEQ ID NO: 524725 - RNA, 32 nt, Human
uggcugcaauccagccagagacaggcgcaggu

SEQ ID NO: 524726 - RNA, 32 nt, Human
uggcugcacacagcagcuuccuugguagugua

SEQ ID NO: 524727 - RNA, 32 nt, Human
uggcugcacaggggugaagcucagggacaagu

SEQ ID NO: 524728 - RNA, 21 nt, Human
uggcugcaccccuuccuacca

SEQ ID NO: 524729 - RNA, 32 nt, Human
uggcugcaccucuuuaucaugccuguauuggc

SEQ ID NO: 524730 - RNA, 32 nt, Human
uggcugcaccuuggcggcuccccagagcgcgc

SEQ ID NO: 524731 - RNA, 32 nt, Human
uggcugcagagcagugggccuggccagcaggu

SEQ ID NO: 524732 - RNA, 32 nt, Human
uggcugcagaggccaucgcagcuuuugaaaag

SEQ ID NO: 524733 - RNA, 32 nt, Human
uggcugcagauccggagccaggagcucaacca

SEQ ID NO: 524734 - RNA, 32 nt, Human
uggcugcagaugccaagcagugcucggagauu

SEQ ID NO: 524735 - RNA, 32 nt, Human
uggcugcagcaacucccugacacucaggaagg

SEQ ID NO: 524736 - RNA, 32 nt, Human
uggcugcagccucagagcccucccagguugcu

SEQ ID NO: 524737 - RNA, 32 nt, Human
uggcugcagccugggagcucggccucccucgg

SEQ ID NO: 524738 - RNA, 32 nt, Human
uggcugcagcggggccagagcagcaauggcgg

SEQ ID NO: 524739 - RNA, 32 nt, Human
uggcugcagcucuucucucgggaccaggccua

SEQ ID NO: 524740 - RNA, 32 nt, Human
uggcugcaggcugagcucuaaccagauaacau

SEQ ID NO: 524741 - RNA, 32 nt, Human
uggcugcagggagguacaaaaggggcugggaa

SEQ ID NO: 524742 - RNA, 24 nt, Human
uggcugcaguggcucaugccugua

SEQ ID NO: 524743 - RNA, 32 nt, Human
uggcugcaucacagccacuggcugguccuauu

SEQ ID NO: 524744 - RNA, 22 nt, Human
uggcugcaucucccuuuccucu

SEQ ID NO: 524745 - RNA, 22 nt, Human
uggcugccaaggcacucacaga

SEQ ID NO: 524746 - RNA, 32 nt, Human
uggcugccaaucucccugcucuugguucuccu

SEQ ID NO: 524747 - RNA, 32 nt, Human
uggcugccacccucccuccugccuguguccca

SEQ ID NO: 524748 - RNA, 32 nt, Human
uggcugccaccucuccauccccuaggcuuuca

SEQ ID NO: 524749 - RNA, 25 nt, Human
uggcugccaccugcagauuccagcu

SEQ ID NO: 524750 - RNA, 32 nt, Human
uggcugccagccuacccugccugcacuccucc

SEQ ID NO: 524751 - RNA, 32 nt, Human
uggcugccaggcagcacacccaggaggccggc

SEQ ID NO: 524752 - RNA, 32 nt, Human
uggcugccaguggcugaugggucccggugaug

SEQ ID NO: 524753 - RNA, 32 nt, Human
uggcugccaguguggcacauucaugucaaaau

SEQ ID NO: 524754 - RNA, 18 nt, Human
uggcugccaguugugcug

SEQ ID NO: 524755 - RNA, 32 nt, Human
uggcugccauccagcgccagcacacaguaaug

SEQ ID NO: 524756 - RNA, 32 nt, Human
uggcugccaugucccaauccuuccagcucuug

SEQ ID NO: 524757 - RNA, 32 nt, Human
uggcugcccaggagaaaagaagacauucuaau

SEQ ID NO: 524758 - RNA, 32 nt, Human
uggcugcccaggagacagaccacuugccacgc

SEQ ID NO: 524759 - RNA, 32 nt, Human
uggcugcccaggcugaauggcagugccugggg

SEQ ID NO: 524760 - RNA, 20 nt, Human
uggcugcccccauuccugcu

SEQ ID NO: 524761 - RNA, 32 nt, Human
uggcugccccuccccuccggcccucuccacug

SEQ ID NO: 524762 - RNA, 32 nt, Human
uggcugcccuggaggagcacguggcugaugag

SEQ ID NO: 524763 - RNA, 32 nt, Human
uggcugccgccgcaccagccucaguggcagau

SEQ ID NO: 524764 - RNA, 32 nt, Human
uggcugccggcaccgcccuccugcugccagag

SEQ ID NO: 524765 - RNA, 32 nt, Human
uggcugccgucagcuucacagcuuaccucucc

SEQ ID NO: 524766 - RNA, 19 nt, Human
uggcugccuccuaauccca

SEQ ID NO: 524767 - RNA, 32 nt, Human
uggcugccugggacuggggccucucuccauca

SEQ ID NO: 524768 - RNA, 32 nt, Human
uggcugccugggcaccucucccaggaaguggu

SEQ ID NO: 524769 - RNA, 18 nt, Human
uggcugccuguaauccca

SEQ ID NO: 524770 - RNA, 32 nt, Human
uggcugccuguaaucccagcacuuugggaggc

SEQ ID NO: 524771 - RNA, 19 nt, Human
uggcugcgaccccccggga

SEQ ID NO: 524772 - RNA, 32 nt, Human
uggcugcggcagcaggggacuagcgugaaagu

SEQ ID NO: 524773 - RNA, 32 nt, Human
uggcugcuaccucccucacucuugucagaguc

SEQ ID NO: 524774 - RNA, 32 nt, Human
uggcugcuacugcccaccaggccagguacuga

SEQ ID NO: 524775 - RNA, 31 nt, Human
uggcugcucaauaaacacuuguugaaccauc

SEQ ID NO: 524776 - RNA, 32 nt, Human
uggcugcucagcugccuccuuuuaccuucuga

SEQ ID NO: 524777 - RNA, 32 nt, Human
uggcugcucccagggcugcaccugccaggacc

SEQ ID NO: 524778 - RNA, 32 nt, Human
uggcugcucgcaucugcaggaagcaugguggg

SEQ ID NO: 524779 - RNA, 32 nt, Human
uggcugcucuacugcuuccccuccugucucca

SEQ ID NO: 524780 - RNA, 22 nt, Human
uggcugcucugaucuggucuca

SEQ ID NO: 524781 - RNA, 32 nt, Human
uggcugcugagaugaaugugaaccagguugca

SEQ ID NO: 524782 - RNA, 32 nt, Human
uggcugcugccgcugccuccuccuggguaagg

SEQ ID NO: 524783 - RNA, 21 nt, Human
uggcugcugcggucagggaga

SEQ ID NO: 524784 - RNA, 32 nt, Human
uggcugcugcugcugcuuacuccugaggguga

SEQ ID NO: 524785 - RNA, 23 nt, Human
uggcugcuggaauuggagauagg

SEQ ID NO: 524786 - RNA, 24 nt, Human
uggcugcuggaguuuuccuucuga

SEQ ID NO: 524787 - RNA, 32 nt, Human
uggcugcuggcccauccugccugggcaucccu

SEQ ID NO: 524788 - RNA, 23 nt, Human
uggcugcuggcccuuugcccuug

SEQ ID NO: 524789 - RNA, 32 nt, Human
uggcugcugguguguggggucaguuccagcag

SEQ ID NO: 524790 - RNA, 32 nt, Human
uggcugcuguauccccaagaaucaugucugcg

SEQ ID NO: 524791 - RNA, 32 nt, Human
uggcugcugucaucuguccccaggguugaccu

SEQ ID NO: 524792 - RNA, 21 nt, Human
uggcugcugugagcccgcaga

SEQ ID NO: 524793 - RNA, 32 nt, Human
uggcugcuguugauggagucagacaguaaaca

SEQ ID NO: 524794 - RNA, 32 nt, Human
uggcugcuguugggagcuccacuggacuucug

SEQ ID NO: 524795 - RNA, 32 nt, Human
uggcugcuuaaaauaagcaaaaauuggaugca

SEQ ID NO: 524796 - RNA, 32 nt, Human
uggcugcuucgguaucacagacacucugacuc

SEQ ID NO: 524797 - RNA, 32 nt, Human
uggcugcuuucaucugaagcgccacuucucag

SEQ ID NO: 524798 - RNA, 32 nt, Human
uggcugcuuugugucaccucagugacuuacag

SEQ ID NO: 524799 - RNA, 32 nt, Human
uggcuggaaagccacgcguaugcugcccucua

SEQ ID NO: 524800 - RNA, 32 nt, Human
uggcuggaagaaaacggcggguggguggagga

SEQ ID NO: 524801 - RNA, 32 nt, Human
uggcuggacaggcgggugugaggaguugcaga

SEQ ID NO: 524802 - RNA, 16 nt, Human
uggcuggaccugcagc

SEQ ID NO: 524803 - RNA, 32 nt, Human
uggcuggacgcuggagcccuccuuuaaaggau

SEQ ID NO: 524804 - RNA, 32 nt, Human
uggcuggacuggaacccagauucugugguugc

SEQ ID NO: 524805 - RNA, 31 nt, Human
uggcuggacuuuaccaggcaugcagaagccu

SEQ ID NO: 524806 - RNA, 32 nt, Human
uggcuggagaagaaaggacaagaggcagcagg

SEQ ID NO: 524807 - RNA, 32 nt, Human
uggcuggagacccuccgcaugcaccuggccgg

SEQ ID NO: 524808 - RNA, 32 nt, Human
uggcuggagcagcaucgguccgggaggucucu

SEQ ID NO: 524809 - RNA, 32 nt, Human
uggcuggagcagcugggacacagggcaccaag

SEQ ID NO: 524810 - RNA, 32 nt, Human
uggcuggagcaguacuacgugggagagcuccg

SEQ ID NO: 524811 - RNA, 32 nt, Human
uggcuggagcccagaaaaagaagcaugugguu

SEQ ID NO: 524812 - RNA, 32 nt, Human
uggcuggagcuagagguggcagagagggggug

SEQ ID NO: 524813 - RNA, 32 nt, Human
uggcuggaggaggcaagggguaguguggcugg

SEQ ID NO: 524814 - RNA, 32 nt, Human
uggcuggagggccugggggcugugggaaagug

SEQ ID NO: 524815 - RNA, 32 nt, Human
uggcuggaggugcagggccaggaggaacauga

SEQ ID NO: 524816 - RNA, 32 nt, Human
uggcuggagucucaggccaaauugcagagggu

SEQ ID NO: 524817 - RNA, 31 nt, Human
uggcuggaguggccaaauaggagggagacug

SEQ ID NO: 524818 - RNA, 32 nt, Human
uggcuggaguucagugacaugaucucaggcuu

SEQ ID NO: 524819 - RNA, 23 nt, Human
uggcuggaucucagcucacugca

SEQ ID NO: 524820 - RNA, 32 nt, Human
uggcuggauggacagugaggaagccuguaccu

SEQ ID NO: 524821 - RNA, 32 nt, Human
uggcuggauuucuucugccauuguuuuaaaga

SEQ ID NO: 524822 - RNA, 32 nt, Human
uggcuggcacagugccuggcgccagaauaaga

SEQ ID NO: 524823 - RNA, 32 nt, Human
uggcuggcagaggcacaugcagacccuaccug

SEQ ID NO: 524824 - RNA, 32 nt, Human
uggcuggcaggcaccguggugugagcggaaga

SEQ ID NO: 524825 - RNA, 32 nt, Human
uggcuggcaggcaggacugggaucgaggccca

SEQ ID NO: 524826 - RNA, 32 nt, Human
uggcuggcaucugcuuuauucccauugcuguc

SEQ ID NO: 524827 - RNA, 32 nt, Human
uggcuggcccugugugggguggguacacugga

SEQ ID NO: 524828 - RNA, 32 nt, Human
uggcuggccgggaagguggauucgccuuggcu

SEQ ID NO: 524829 - RNA, 32 nt, Human
uggcuggccugauguuuuguugacagugaacc

SEQ ID NO: 524830 - RNA, 32 nt, Human
uggcuggccugccauuugccucuccccggaga

SEQ ID NO: 524831 - RNA, 32 nt, Human
uggcuggcgacacuggugauaauggucaccug

SEQ ID NO: 524832 - RNA, 24 nt, Human
uggcuggcgccuguaaucccagcu

SEQ ID NO: 524833 - RNA, 32 nt, Human
uggcuggcguggcaagggcaugcucuggggca

SEQ ID NO: 524834 - RNA, 32 nt, Human
uggcuggcuaacuucauggauaagcuacaaau

SEQ ID NO: 524835 - RNA, 32 nt, Human
uggcuggcuccucuggcugauggcauguugag

SEQ ID NO: 524836 - RNA, 32 nt, Human
uggcuggcuccuggcccuacuuggggugaugg

SEQ ID NO: 524837 - RNA, 32 nt, Human
uggcuggcucuuucuuuguucagaccucugca

SEQ ID NO: 524838 - RNA, 32 nt, Human
uggcuggcuggcucccuggcaucagugguuug

SEQ ID NO: 524839 - RNA, 32 nt, Human
uggcuggcuggcugcugggugcacuuacccuc

SEQ ID NO: 524840 - RNA, 32 nt, Human
uggcuggcuggcuggcugcuugacccagugug

SEQ ID NO: 524841 - RNA, 32 nt, Human
uggcuggcugggccccucucagcugcugggcc

SEQ ID NO: 524842 - RNA, 32 nt, Human
uggcuggcuggguccccuucgcaguguuuguc

SEQ ID NO: 524843 - RNA, 32 nt, Human
uggcuggcuguggucagggugcuacuagcacc

SEQ ID NO: 524844 - RNA, 32 nt, Human
uggcuggcuuuucuucuucuucuggugaaguc

SEQ ID NO: 524845 - RNA, 32 nt, Human
uggcugggaaagagggaugugcagugacgugg

SEQ ID NO: 524846 - RNA, 32 nt, Human
uggcugggaaccucaaagaggcuccacaaugu

SEQ ID NO: 524847 - RNA, 32 nt, Human
uggcugggaacugggagaagagcuggagcaac

SEQ ID NO: 524848 - RNA, 32 nt, Human
uggcugggaagagaggaggaguggcagaagaa

SEQ ID NO: 524849 - RNA, 32 nt, Human
uggcugggacacggagaggcagguguggcgua

SEQ ID NO: 524850 - RNA, 31 nt, Human
uggcugggacguggcucagccagcacuuguc

SEQ ID NO: 524851 - RNA, 32 nt, Human
uggcugggagagaagccagccaggcugcacuu

SEQ ID NO: 524852 - RNA, 32 nt, Human
uggcugggagagauggauggcgggaaaggggc

SEQ ID NO: 524853 - RNA, 32 nt, Human
uggcugggcagcacgucucuccccacagggcu

SEQ ID NO: 524854 - RNA, 24 nt, Human
uggcugggcagccccaggggccag

SEQ ID NO: 524855 - RNA, 32 nt, Human
uggcugggcaggcacaggcagugaggccgagg

SEQ ID NO: 524856 - RNA, 32 nt, Human
uggcugggccucuggauggaaggucuggucuu

SEQ ID NO: 524857 - RNA, 32 nt, Human
uggcugggccugggacaggcuccuccucuccc

SEQ ID NO: 524858 - RNA, 32 nt, Human
uggcugggcuaggcagggcagccccagcacgg

SEQ ID NO: 524859 - RNA, 32 nt, Human
uggcugggcuauuccauccaucuggaagcaca

SEQ ID NO: 524860 - RNA, 32 nt, Human
uggcugggcucuguguguggccuguguccccu

SEQ ID NO: 524861 - RNA, 32 nt, Human
uggcugggcugcagauaacuucguuaggcaga

SEQ ID NO: 524862 - RNA, 32 nt, Human
uggcugggcuggcggaggccuugcugaugaac

SEQ ID NO: 524863 - RNA, 32 nt, Human
uggcugggcuuccuguuuccagaugcauuccu

SEQ ID NO: 524864 - RNA, 32 nt, Human
uggcuggggaaagagauagaagcuguauaaac

SEQ ID NO: 524865 - RNA, 32 nt, Human
uggcuggggaggcggacgaugaggagugaugg

SEQ ID NO: 524866 - RNA, 32 nt, Human
uggcuggggagggagaggaugggaccagguug

SEQ ID NO: 524867 - RNA, 32 nt, Human
uggcuggggcacuuaugcucccagagccuuug

SEQ ID NO: 524868 - RNA, 32 nt, Human
uggcugggggaagcugggcgugguuagccugg

SEQ ID NO: 524869 - RNA, 32 nt, Human
uggcugggggugcagaagggcaggguaguucu

SEQ ID NO: 524870 - RNA, 32 nt, Human
uggcugggguagagagaagcagggguauuucu

SEQ ID NO: 524871 - RNA, 32 nt, Human
uggcugggguugacucucaggcucccggcugu

SEQ ID NO: 524872 - RNA, 17 nt, Human
uggcugggucccccagc

SEQ ID NO: 524873 - RNA, 32 nt, Human
uggcugggugcagugaauggccagcggguuuc

SEQ ID NO: 524874 - RNA, 32 nt, Human
uggcuggguggaagaaggguguggaagguaug

SEQ ID NO: 524875 - RNA, 32 nt, Human
uggcugggugucaaggagcaggcuccaggcca

SEQ ID NO: 524876 - RNA, 32 nt, Human
uggcuggguguuuucaaaugucagcuuaaaau

SEQ ID NO: 524877 - RNA, 32 nt, Human
uggcugguaaauucaccuuccugggccucagu

SEQ ID NO: 524878 - RNA, 32 nt, Human
uggcuggucaccugccuuaggcuccacagccc

SEQ ID NO: 524879 - RNA, 32 nt, Human
uggcugguccccaagcaaaacagaaugggcuu

SEQ ID NO: 524880 - RNA, 32 nt, Human
uggcuggucucaaacuccugaccucaaaugau

SEQ ID NO: 524881 - RNA, 32 nt, Human
uggcuggucucaaacuccugaccucaggcgau

SEQ ID NO: 524882 - RNA, 32 nt, Human
uggcuggucucaaacuccugaccuuauaaucc

SEQ ID NO: 524883 - RNA, 32 nt, Human
uggcuggucucaaacuccuggccucaggugau

SEQ ID NO: 524884 - RNA, 32 nt, Human
uggcuggucucaaacuccugggcucaagugau

SEQ ID NO: 524885 - RNA, 32 nt, Human
uggcuggucuccaacuccugaccucgggugau

SEQ ID NO: 524886 - RNA, 32 nt, Human
uggcuggucucgaacuccugaacgcaagugau

SEQ ID NO: 524887 - RNA, 32 nt, Human
uggcuggucucgaacuccugaccucaggugau

SEQ ID NO: 524888 - RNA, 32 nt, Human
uggcuggucucgacuccugaccucaggugauc

SEQ ID NO: 524889 - RNA, 32 nt, Human
uggcuggugagcuuggcgggucugugggcacg

SEQ ID NO: 524890 - RNA, 21 nt, Human
uggcuggugccuguaguccca

SEQ ID NO: 524891 - RNA, 24 nt, Human
uggcuggugccuguagucccagcu

SEQ ID NO: 524892 - RNA, 32 nt, Human
uggcuggugccuguagucccagcuacucagga

SEQ ID NO: 524893 - RNA, 32 nt, Human
uggcuggugucccuugucuuugccaaguucuc

SEQ ID NO: 524894 - RNA, 21 nt, Human
uggcuggugucuguaauccca

SEQ ID NO: 524895 - RNA, 24 nt, Human
uggcuggugucuguaaucccagcu

SEQ ID NO: 524896 - RNA, 32 nt, Human
uggcugguguugaacuccuaaccucaggugau

SEQ ID NO: 524897 - RNA, 32 nt, Human
uggcugguuccagaacgucucucaccuagacc

SEQ ID NO: 524898 - RNA, 32 nt, Human
uggcugguuccauuuccuuggcucucacugcu

SEQ ID NO: 524899 - RNA, 32 nt, Human
uggcugguucccaggcugcgcugguguucagc

SEQ ID NO: 524900 - RNA, 21 nt, Human
uggcuguaagguuugcccuug

SEQ ID NO: 524901 - RNA, 32 nt, Human
uggcuguaauggcauuuaaagcaaacaaacaa

SEQ ID NO: 524902 - RNA, 32 nt, Human
uggcuguaccugguguccugggugacacagga

SEQ ID NO: 524903 - RNA, 32 nt, Human
uggcuguagcugugcucuggguccccaggucc

SEQ ID NO: 524904 - RNA, 32 nt, Human
uggcuguaugaaacuugacggcgcuuuuguaa

SEQ ID NO: 524905 - RNA, 32 nt, Human
uggcuguaugugggugggcauguggccucccc

SEQ ID NO: 524906 - RNA, 32 nt, Human
uggcugucagccagccaagugaaggaccucuc

SEQ ID NO: 524907 - RNA, 32 nt, Human
uggcugucagcccauagguuugucaguuucac

SEQ ID NO: 524908 - RNA, 32 nt, Human
uggcugucagcucugggcugggcuuucugggg

SEQ ID NO: 524909 - RNA, 32 nt, Human
uggcugucaguggacauggggagcuggaugga

SEQ ID NO: 524910 - RNA, 32 nt, Human
uggcugucaguggcagaguuuggcugugaccu

SEQ ID NO: 524911 - RNA, 32 nt, Human
uggcuguccaugacugaagcauggacaacugu

SEQ ID NO: 524912 - RNA, 32 nt, Human
uggcuguccuuugaaagaaagaaguaauguuc

SEQ ID NO: 524913 - RNA, 21 nt, Human
uggcugucgccuguaaugcca

SEQ ID NO: 524914 - RNA, 32 nt, Human
uggcugucgccuguaaugccagcgcuuuggga

SEQ ID NO: 524915 - RNA, 32 nt, Human
uggcugucggcucuucagcucucccgcucggc

SEQ ID NO: 524916 - RNA, 32 nt, Human
uggcugucgggagcuguaucaccuggguucug

SEQ ID NO: 524917 - RNA, 19 nt, Human
uggcugucuagaaugugga

SEQ ID NO: 524918 - RNA, 32 nt, Human
uggcugucucacaggucacagagccauuacaa

SEQ ID NO: 524919 - RNA, 32 nt, Human
uggcugucuccucucuccgccauggcgugugc

SEQ ID NO: 524920 - RNA, 32 nt, Human
uggcugucucuagcgagggguggagaaucaga

SEQ ID NO: 524921 - RNA, 32 nt, Human
uggcugucucucccuuucucccccucucucuc

SEQ ID NO: 524922 - RNA, 32 nt, Human
uggcugucucucucacacagauacacgugcgc

SEQ ID NO: 524923 - RNA, 32 nt, Human
uggcugucuggccccagccucugcacuugggc

SEQ ID NO: 524924 - RNA, 32 nt, Human
uggcugucuggcuggcgaggagcugcugcgcu

SEQ ID NO: 524925 - RNA, 32 nt, Human
uggcugucuguccauucauccugcugcucuga

SEQ ID NO: 524926 - RNA, 32 nt, Human
uggcugucuguggagcuagcugagccaugcgu

SEQ ID NO: 524927 - RNA, 32 nt, Human
uggcugucuucuauaaagguaaaacucuaaac

SEQ ID NO: 524928 - RNA, 32 nt, Human
uggcugucuugcaggacuggagaagguggugg

SEQ ID NO: 524929 - RNA, 32 nt, Human
uggcugucuuuaucauccccacaaacauuuug

SEQ ID NO: 524930 - RNA, 32 nt, Human
uggcugugaaaggacugaggcagccaucuggg

SEQ ID NO: 524931 - RNA, 32 nt, Human
uggcugugaacaaauaacaaauaagugcuccc

SEQ ID NO: 524932 - RNA, 32 nt, Human
uggcugugacccuacuuccugcacugacccac

SEQ ID NO: 524933 - RNA, 32 nt, Human
uggcugugaggggcugucccacugugugggua

SEQ ID NO: 524934 - RNA, 32 nt, Human
uggcugugagguuucuggggaggcagagaggc

SEQ ID NO: 524935 - RNA, 32 nt, Human
uggcugugaugaagugccagaaugucucuuua

SEQ ID NO: 524936 - RNA, 32 nt, Human
uggcugugcagcucccuccgugccucagaucu

SEQ ID NO: 524937 - RNA, 32 nt, Human
uggcugugcaggaggcugugguuugaaaacug

SEQ ID NO: 524938 - RNA, 19 nt, Human
uggcugugcucucugcaca

SEQ ID NO: 524939 - RNA, 32 nt, Human
uggcugugcugugguuucucccgacgugcaca

SEQ ID NO: 524940 - RNA, 32 nt, Human
uggcuguggcaucuacccucccguccccugcu

SEQ ID NO: 524941 - RNA, 32 nt, Human
uggcuguggcaucuacccucccucccugcugc

SEQ ID NO: 524942 - RNA, 32 nt, Human
uggcuguggccccagcaccugaggcaggggua

SEQ ID NO: 524943 - RNA, 29 nt, Human
uggcuguggcugcucagguuccccuccuc

SEQ ID NO: 524944 - RNA, 32 nt, Human
uggcugugggacagagguuggaaggaaaggac

SEQ ID NO: 524945 - RNA, 32 nt, Human
uggcugugggcugaggccucccagggaagcug

SEQ ID NO: 524946 - RNA, 32 nt, Human
uggcuguggguacauggggagggaccuuucac

SEQ ID NO: 524947 - RNA, 24 nt, Human
uggcugugguggcucacaccugua

SEQ ID NO: 524948 - RNA, 20 nt, Human
uggcuguguaugacgggagg

SEQ ID NO: 524949 - RNA, 32 nt, Human
uggcuguguuagacucucuccuuuuguguuuu

SEQ ID NO: 524950 - RNA, 32 nt, Human
uggcuguguuuggaagcuucagcccugcacau

SEQ ID NO: 524951 - RNA, 32 nt, Human
uggcuguuaaugauaucccuguucuaauucca

SEQ ID NO: 524952 - RNA, 24 nt, Human
uggcuguucaacuugagcauguua

SEQ ID NO: 524953 - RNA, 32 nt, Human
uggcuguucacacccgccucgcugucuuggag

SEQ ID NO: 524954 - RNA, 32 nt, Human
uggcuguucaugggaagucuucaguggccuuc

SEQ ID NO: 524955 - RNA, 32 nt, Human
uggcuguucccuggaggcugucccuuuaaagg

SEQ ID NO: 524956 - RNA, 32 nt, Human
uggcuguucuggguuuuugucauucacaguua

SEQ ID NO: 524957 - RNA, 32 nt, Human
uggcuguugcccgguguuucagcacuuucagu

SEQ ID NO: 524958 - RNA, 32 nt, Human
uggcuguugucucccaggcuggagugcagugg

SEQ ID NO: 524959 - RNA, 32 nt, Human
uggcuguuucccaggcugaagugcaguggcau

SEQ ID NO: 524960 - RNA, 32 nt, Human
uggcuuaaaagcaggauugaagaaaagggacu

SEQ ID NO: 524961 - RNA, 32 nt, Human
uggcuuaaaauggacuaaagguccuguucuug

SEQ ID NO: 524962 - RNA, 26 nt, Human
uggcuuaaagugauucuccugccuca

SEQ ID NO: 524963 - RNA, 32 nt, Human
uggcuuaaaucuccucuuuggaauucugcuga

SEQ ID NO: 524964 - RNA, 24 nt, Human
uggcuuaacuggaugccauaagac

SEQ ID NO: 524965 - RNA, 31 nt, Human
uggcuuaacuucucugggccuuuguuccuau

SEQ ID NO: 524966 - RNA, 20 nt, Human
uggcuuaagugauccuccca

SEQ ID NO: 524967 - RNA, 25 nt, Human
uggcuuaagugauccucccaccuca

SEQ ID NO: 524968 - RNA, 32 nt, Human
uggcuuaauggaucagagcagccccaggaggu

SEQ ID NO: 524969 - RNA, 32 nt, Human
uggcuuacaaacaacagaaacguauugcucac

SEQ ID NO: 524970 - RNA, 21 nt, Human
uggcuuacaccuauaauccca

SEQ ID NO: 524971 - RNA, 21 nt, Human
uggcuuacaccuguaagccca

SEQ ID NO: 524972 - RNA, 21 nt, Human
uggcuuacaccuguaauccca

SEQ ID NO: 524973 - RNA, 22 nt, Human
uggcuuacaccuguaaucccag

SEQ ID NO: 524974 - RNA, 23 nt, Human
uggcuuacaccuguaaucccagc

SEQ ID NO: 524975 - RNA, 32 nt, Human
uggcuuacaccuguaaucccagcacuuuggga

SEQ ID NO: 524976 - RNA, 24 nt, Human
uggcuuacaccuguaaucccagcu

SEQ ID NO: 524977 - RNA, 23 nt, Human
uggcuuacaccuguaaucccagu

SEQ ID NO: 524978 - RNA, 21 nt, Human
uggcuuacaccuguaauccua

SEQ ID NO: 524979 - RNA, 32 nt, Human
uggcuuacaccuguaauuccagcacuuuggga

SEQ ID NO: 524980 - RNA, 32 nt, Human
uggcuuacaccugugaucccagcacuuuggga

SEQ ID NO: 524981 - RNA, 21 nt, Human
uggcuuacaucuguaauccca

SEQ ID NO: 524982 - RNA, 23 nt, Human
uggcuuacaucuguaaucccagc

SEQ ID NO: 524983 - RNA, 32 nt, Human
uggcuuacauggugaaaccccaucucuacuaa

SEQ ID NO: 524984 - RNA, 21 nt, Human
uggcuuaccccuguaauccca

SEQ ID NO: 524985 - RNA, 23 nt, Human
uggcuuaccccuguaaucccagc

SEQ ID NO: 524986 - RNA, 21 nt, Human
uggcuuacgccuauaauccca

SEQ ID NO: 524987 - RNA, 32 nt, Human
uggcuuacgccuauaaucccagcacuuuggga

SEQ ID NO: 524988 - RNA, 21 nt, Human
uggcuuacgccuguaauccca

SEQ ID NO: 524989 - RNA, 23 nt, Human
uggcuuacgccuguaaucccagc

SEQ ID NO: 524990 - RNA, 32 nt, Human
uggcuuacgccuguaaucccagcacuuuggga

SEQ ID NO: 524991 - RNA, 32 nt, Human
uggcuuacgccuguaaucccagcgcuuuggga

SEQ ID NO: 524992 - RNA, 32 nt, Human
uggcuuacgccuguaaucccaggacuuuggga

SEQ ID NO: 524993 - RNA, 21 nt, Human
uggcuuacgccuguaauccua

SEQ ID NO: 524994 - RNA, 32 nt, Human
uggcuuacgccuguaauccuagcacuuuggga

SEQ ID NO: 524995 - RNA, 32 nt, Human
uggcuuacgccuguaauuccagcacuuuggga

SEQ ID NO: 524996 - RNA, 32 nt, Human
uggcuuacgcuuguagucccagcacuuuggga

SEQ ID NO: 524997 - RNA, 32 nt, Human
uggcuuacuacaaccuccgccuccuggguuca

SEQ ID NO: 524998 - RNA, 32 nt, Human
uggcuuacuccugagauaugauuugcaaauga

SEQ ID NO: 524999 - RNA, 32 nt, Human
uggcuuacugcaaccuccaccucccagguuca

SEQ ID NO: 525000 - RNA, 32 nt, Human
uggcuuacugcaaccuccaccuccuggguuca

SEQ ID NO: 525001 - RNA, 32 nt, Human
uggcuuacugcaaccuccgccucccagguuca

SEQ ID NO: 525002 - RNA, 32 nt, Human
uggcuuacugcaaccuccgccuccuggguuca

SEQ ID NO: 525003 - RNA, 32 nt, Human
uggcuuacugcaaccucugccucccagguuua

SEQ ID NO: 525004 - RNA, 32 nt, Human
uggcuuacugcaacuuccgacucccagguuca

SEQ ID NO: 525005 - RNA, 32 nt, Human
uggcuuacugcaagcucugccuccuggguuca

SEQ ID NO: 525006 - RNA, 32 nt, Human
uggcuuacugcagccuuugccuccccggcucg

SEQ ID NO: 525007 - RNA, 32 nt, Human
uggcuuacuguguuacuugccuaggaggaaug

SEQ ID NO: 525008 - RNA, 32 nt, Human
uggcuuacuuugucugccacagacacagacag

SEQ ID NO: 525009 - RNA, 18 nt, Human
uggcuuagcagaacccca

SEQ ID NO: 525010 - RNA, 32 nt, Human
uggcuuaggaaagaccaucauggccaugaaga

SEQ ID NO: 525011 - RNA, 19 nt, Human
uggcuuaggacucuccaca

SEQ ID NO: 525012 - RNA, 31 nt, Human
uggcuuagguuucagcgcccuucucaacccc

SEQ ID NO: 525013 - RNA, 21 nt, Human
uggcuuagugccacccaccuu

SEQ ID NO: 525014 - RNA, 32 nt, Human
uggcuuaucauggggaaaaagaggaucuggag

SEQ ID NO: 525015 - RNA, 32 nt, Human
uggcuuaugcccauaaucacagcacuucggga

SEQ ID NO: 525016 - RNA, 21 nt, Human
uggcuuaugccuauaauccua

SEQ ID NO: 525017 - RNA, 32 nt, Human
uggcuuaugccuauaauuccagcacuugggga

SEQ ID NO: 525018 - RNA, 21 nt, Human
uggcuuaugccuguaacccca

SEQ ID NO: 525019 - RNA, 23 nt, Human
uggcuuaugccuguaaccccagc

SEQ ID NO: 525020 - RNA, 18 nt, Human
uggcuuaugccuguaauc

SEQ ID NO: 525021 - RNA, 19 nt, Human
uggcuuaugccuguaaucc

SEQ ID NO: 525022 - RNA, 20 nt, Human
uggcuuaugccuguaauccc

SEQ ID NO: 525023 - RNA, 21 nt, Human
uggcuuaugccuguaauccca

SEQ ID NO: 525024 - RNA, 32 nt, Human
uggcuuaugccuguaaucccacuuugggaggc

SEQ ID NO: 525025 - RNA, 23 nt, Human
uggcuuaugccuguaaucccagc

SEQ ID NO: 525026 - RNA, 32 nt, Human
uggcuuaugccuguaaucccagcacucuggga

SEQ ID NO: 525027 - RNA, 32 nt, Human
uggcuuaugccuguaaucccagcacuugggga

SEQ ID NO: 525028 - RNA, 32 nt, Human
uggcuuaugccuguaaucccagcacuuugcag

SEQ ID NO: 525029 - RNA, 32 nt, Human
uggcuuaugccuguaaucccagcacuuuggaa

SEQ ID NO: 525030 - RNA, 32 nt, Human
uggcuuaugccuguaaucccagcacuuuggga

SEQ ID NO: 525031 - RNA, 32 nt, Human
uggcuuaugccuguaaucccagcacuuugggu

SEQ ID NO: 525032 - RNA, 32 nt, Human
uggggcaggagaaucacuugaaccugggaggc

SEQ ID NO: 525033 - RNA, 32 nt, Human
uggggcaggagaaucacuugagcccaggaguu

SEQ ID NO: 525034 - RNA, 32 nt, Human
uggggcaggaggaucacuugaggccaggaguu

SEQ ID NO: 525035 - RNA, 32 nt, Human
uggggcaggaggaucgcuugugcccagaaguu

SEQ ID NO: 525036 - RNA, 32 nt, Human
uggggcaggaggcagaggcaggagaccaagau

SEQ ID NO: 525037 - RNA, 32 nt, Human
uggggcaggccacacccccauuccgugccuca

SEQ ID NO: 525038 - RNA, 32 nt, Human
uggggcaggcggagguugcaguaagccaagau

SEQ ID NO: 525039 - RNA, 32 nt, Human
uggggcagggccuggcccuggacuggguuggc

SEQ ID NO: 525040 - RNA, 32 nt, Human
uggggcagggccugggccucauggcuuuugcu

SEQ ID NO: 525041 - RNA, 32 nt, Human
uggggcagguagaucacuugaggucaggagac

SEQ ID NO: 525042 - RNA, 32 nt, Human
uggggcaguaaaugagguuggcagaguggcag

SEQ ID NO: 525043 - RNA, 32 nt, Human
uggggcaguaucugguccugugccccagcugc

SEQ ID NO: 525044 - RNA, 19 nt, Human
uggggcagucgggguccuc

SEQ ID NO: 525045 - RNA, 19 nt, Human
uggggcagucuggguccuc

SEQ ID NO: 525046 - RNA, 32 nt, Human
uggggcaguguugacaggagugaggcauuuug

SEQ ID NO: 525047 - RNA, 32 nt, Human
uggggcauaaggacaggaaaagggacacauac

SEQ ID NO: 525048 - RNA, 24 nt, Human
uggggcaucccaagugggguccuc

SEQ ID NO: 525049 - RNA, 32 nt, Human
uggggcaugagcuggggauuuggggauggggg

SEQ ID NO: 525050 - RNA, 32 nt, Human
  misc_feature (24)..(24): n is a, c, g, or u
  misc_feature (32)..(32): n is a, c, g, or u
uggggcaugccuguaaucccagcnacucgccn

SEQ ID NO: 525051 - RNA, 32 nt, Human
uggggcaugccuguagucccaccuacuuggga

SEQ ID NO: 525052 - RNA, 32 nt, Human
uggggcaugccuguagucccacuuacuuggga

SEQ ID NO: 525053 - RNA, 32 nt, Human
uggggcaugccuguagucccagcuacucagaa

SEQ ID NO: 525054 - RNA, 32 nt, Human
uggggcaugggcucuaggggaaccuggggucg

SEQ ID NO: 525055 - RNA, 32 nt, Human
uggggccaacacagccaccaacucugggucca

SEQ ID NO: 525056 - RNA, 32 nt, Human
uggggccaagccccgagggccccugcaagcac

SEQ ID NO: 525057 - RNA, 32 nt, Human
uggggccaagugauccucccaccucagccucu

SEQ ID NO: 525058 - RNA, 32 nt, Human
uggggccaauuugugguuaagagguggugaga

SEQ ID NO: 525059 - RNA, 32 nt, Human
uggggccacaugcugacccagccccacaucca

SEQ ID NO: 525060 - RNA, 32 nt, Human
uggggccaccucaguccugccuggguccuggu

SEQ ID NO: 525061 - RNA, 32 nt, Human
uggggccaccuuccugucagugcccgagggac

SEQ ID NO: 525062 - RNA, 32 nt, Human
uggggccacugcacaggccaccugcuuggguu

SEQ ID NO: 525063 - RNA, 32 nt, Human
uggggccacugcacugcagccugugugacaaa

SEQ ID NO: 525064 - RNA, 32 nt, Human
uggggccagaccucuuuacacacacauucccg

SEQ ID NO: 525065 - RNA, 32 nt, Human
uggggccagaggccgccuuacacacaccccag

SEQ ID NO: 525066 - RNA, 32 nt, Human
uggggccagcaauacuccagagcccaguuucu

SEQ ID NO: 525067 - RNA, 32 nt, Human
uggggccagcccgcacacaccaugccuccugu

SEQ ID NO: 525068 - RNA, 20 nt, Human
uggggccaggaaggccccuc

SEQ ID NO: 525069 - RNA, 32 nt, Human
uggggccaggacgccagcugaggagggcagga

SEQ ID NO: 525070 - RNA, 32 nt, Human
uggggccaggagaggugggugccuugugaucu

SEQ ID NO: 525071 - RNA, 32 nt, Human
uggggccaggaggcagcagccgugcagagccu

SEQ ID NO: 525072 - RNA, 32 nt, Human
uggggccaggggccuggagacacuccauggag

SEQ ID NO: 525073 - RNA, 32 nt, Human
uggggccagggugggagggagggacaaggggg

SEQ ID NO: 525074 - RNA, 32 nt, Human
uggggccaggucucuucuccagccuccaccug

SEQ ID NO: 525075 - RNA, 32 nt, Human
uggggccaguaccaaggagaagcuuuuaccac

SEQ ID NO: 525076 - RNA, 19 nt, Human
uggggccaguggugccuca

SEQ ID NO: 525077 - RNA, 32 nt, Human
uggggccaugaagaaggcuggaagggacaggg

SEQ ID NO: 525078 - RNA, 32 nt, Human
uggggccauggacucggacgccagccuggugu

SEQ ID NO: 525079 - RNA, 32 nt, Human
uggggcccaaucucaaugcacauaucagugcg

SEQ ID NO: 525080 - RNA, 32 nt, Human
uggggcccacaaagucaaggcugcagugagcu

SEQ ID NO: 525081 - RNA, 18 nt, Human
uggggcccaccagccccu

SEQ ID NO: 525082 - RNA, 32 nt, Human
uggggcccagaacuucauaucaguuguauuau

SEQ ID NO: 525083 - RNA, 21 nt, Human
uggggcccagauugcagaugg

SEQ ID NO: 525084 - RNA, 32 nt, Human
uggggcccagcacggccaggcucucaccuuuu

SEQ ID NO: 525085 - RNA, 32 nt, Human
uggggcccagccaggcagggugugggggcagc
